United States Patent Application Publication US 2007/0042381 A1 - sequence listing, part 2

SEQ ID NO: 39535 - RNA, 22 nt, Human
aggaugggucagcuagagucca

SEQ ID NO: 39536 - RNA, 23 nt, Human
aggauggguggcaauagaaagac

SEQ ID NO: 39537 - RNA, 23 nt, Human
aggaugugcauaugaccuaauca

SEQ ID NO: 39538 - RNA, 17 nt, Human
aggauguggagaaaauu

SEQ ID NO: 39539 - RNA, 22 nt, Human
aggauguguguaggcugguuaa

SEQ ID NO: 39540 - RNA, 22 nt, Human
aggauguugcuauuggcagucu

SEQ ID NO: 39541 - RNA, 22 nt, Human
aggauucauggugcagacaaag

SEQ ID NO: 39542 - RNA, 22 nt, Human
aggauuuacaaugauucuaggu

SEQ ID NO: 39543 - RNA, 22 nt, Human
aggauuuacuagcaaggauucu

SEQ ID NO: 39544 - RNA, 22 nt, Human
aggauuucugugccuggaaaau

SEQ ID NO: 39545 - RNA, 22 nt, Human
aggauuuuagauaagacagcaa

SEQ ID NO: 39546 - RNA, 21 nt, Human
aggauuuuguugaaguuucug

SEQ ID NO: 39547 - RNA, 22 nt, Human
aggcaaauagauaguccauaca

SEQ ID NO: 39548 - RNA, 22 nt, Human
aggcaacucaucaugaaagacu

SEQ ID NO: 39549 - RNA, 22 nt, Human
aggcaacugacagcauauccug

SEQ ID NO: 39550 - RNA, 22 nt, Human
aggcaagagugacuacgugaaa

SEQ ID NO: 39551 - RNA, 22 nt, Human
aggcaagcagucagucuaugag

SEQ ID NO: 39552 - RNA, 22 nt, Human
aggcaagcccccagugaggcuc

SEQ ID NO: 39553 - RNA, 22 nt, Human
aggcaagcugcagagaguccuu

SEQ ID NO: 39554 - RNA, 20 nt, Human
aggcaagguagaugucugcu

SEQ ID NO: 39555 - RNA, 22 nt, Human
aggcaaggugcuacagacagug

SEQ ID NO: 39556 - RNA, 22 nt, Human
aggcaaggugcucuugcucuau

SEQ ID NO: 39557 - RNA, 22 nt, Human
aggcaauacacagcauuucaca

SEQ ID NO: 39558 - RNA, 22 nt, Human
aggcaauauuccauguggaacu

SEQ ID NO: 39559 - RNA, 17 nt, Human
aggcaaugacugugguu

SEQ ID NO: 39560 - RNA, 22 nt, Human
aggcacagagaaguaaaguauc

SEQ ID NO: 39561 - RNA, 18 nt, Human
aggcacagagcauacaua

SEQ ID NO: 39562 - RNA, 22 nt, Human
aggcacagauuuggggaaagca

SEQ ID NO: 39563 - RNA, 22 nt, Human
aggcacagccucccccaacucc

SEQ ID NO: 39564 - RNA, 22 nt, Human
aggcacaggaggugguaagaag

SEQ ID NO: 39565 - RNA, 22 nt, Human
aggcacagguggacuucacagu

SEQ ID NO: 39566 - RNA, 22 nt, Human
aggcaccuugagagcaggagcu

SEQ ID NO: 39567 - RNA, 22 nt, Human
aggcacugaagugguaaaugua

SEQ ID NO: 39568 - RNA, 23 nt, Human
aggcacugaaugugucagugagu

SEQ ID NO: 39569 - RNA, 22 nt, Human
aggcacugacagauucuguguc

SEQ ID NO: 39570 - RNA, 22 nt, Human
aggcacugaccugcuuccuuga

SEQ ID NO: 39571 - RNA, 22 nt, Human
aggcacugagaggcuguguugc

SEQ ID NO: 39572 - RNA, 22 nt, Human
aggcacugcuucuaaguaggaa

SEQ ID NO: 39573 - RNA, 20 nt, Human
aggcacuggggauagguaag

SEQ ID NO: 39574 - RNA, 22 nt, Human
aggcacugggggaugagcaagg

SEQ ID NO: 39575 - RNA, 22 nt, Human
aggcacuggguaauuaguagcu

SEQ ID NO: 39576 - RNA, 22 nt, Human
aggcacugugcugaugucuuau

SEQ ID NO: 39577 - RNA, 22 nt, Human
aggcacugugcuucuuauaugu

SEQ ID NO: 39578 - RNA, 15 nt, Human
aggcacugugggacc

SEQ ID NO: 39579 - RNA, 22 nt, Human
aggcacuuaauaaggauucaau

SEQ ID NO: 39580 - RNA, 22 nt, Human
aggcacuucauggguucaagga

SEQ ID NO: 39581 - RNA, 22 nt, Human
aggcacuugcauugaugagguc

SEQ ID NO: 39582 - RNA, 22 nt, Human
aggcagaaccagcugggacuuu

SEQ ID NO: 39583 - RNA, 22 nt, Human
aggcagaauguuggaaaggaag

SEQ ID NO: 39584 - RNA, 22 nt, Human
aggcagacaaggucccuggucu

SEQ ID NO: 39585 - RNA, 18 nt, Human
aggcagacacuagagguc

SEQ ID NO: 39586 - RNA, 22 nt, Human
aggcagaccaugaaucaugacc

SEQ ID NO: 39587 - RNA, 16 nt, Human
aggcagagauuuaccc

SEQ ID NO: 39588 - RNA, 23 nt, Human
aggcagagccaaggucaaaaccc

SEQ ID NO: 39589 - RNA, 22 nt, Human
aggcagagcuaggaagaauugu

SEQ ID NO: 39590 - RNA, 22 nt, Human
aggcagaucacaggagggccug

SEQ ID NO: 39591 - RNA, 22 nt, Human
aggcagaucacuugaggccagg

SEQ ID NO: 39592 - RNA, 22 nt, Human
aggcagaugguaacugugauau

SEQ ID NO: 39593 - RNA, 17 nt, Human
aggcagauguuuuauuu

SEQ ID NO: 39594 - RNA, 22 nt, Human
aggcagauuuucuuuacucagu

SEQ ID NO: 39595 - RNA, 22 nt, Human
aggcagcaagauuauuuaaucc

SEQ ID NO: 39596 - RNA, 19 nt, Human
aggcagcacccaguccuug

SEQ ID NO: 39597 - RNA, 22 nt, Human
aggcagcagaaaacaaaugguu

SEQ ID NO: 39598 - RNA, 22 nt, Human
aggcagcagacuguuaaucaga

SEQ ID NO: 39599 - RNA, 22 nt, Human
aggcagcagcuugcugguugcc

SEQ ID NO: 39600 - RNA, 21 nt, Human
aggcagcaggauccagggaca

SEQ ID NO: 39601 - RNA, 22 nt, Human
aggcagcagugauaagauagga

SEQ ID NO: 39602 - RNA, 22 nt, Human
aggcagcauccagaggagaaug

SEQ ID NO: 39603 - RNA, 22 nt, Human
aggcagcauucaggggugauga

SEQ ID NO: 39604 - RNA, 22 nt, Human
aggcagccuauggggagcucag

SEQ ID NO: 39605 - RNA, 22 nt, Human
aggcagccuuuagacagucugc

SEQ ID NO: 39606 - RNA, 22 nt, Human
aggcagccuuuuuggaaacaua

SEQ ID NO: 39607 - RNA, 22 nt, Human
aggcagcugaccacaguaugau

SEQ ID NO: 39608 - RNA, 22 nt, Human
aggcagcuuaagcccuggccca

SEQ ID NO: 39609 - RNA, 22 nt, Human
aggcagcuucugauuagcagcg

SEQ ID NO: 39610 - RNA, 22 nt, Human
aggcagcuuuaacugguaguag

SEQ ID NO: 39611 - RNA, 22 nt, Human
aggcagcuuucuggugcaccau

SEQ ID NO: 39612 - RNA, 22 nt, Human
aggcagcuuuguaguaaagcua

SEQ ID NO: 39613 - RNA, 22 nt, Human
aggcaggagcaagcccuacaag

SEQ ID NO: 39614 - RNA, 22 nt, Human
aggcaggagugacccugacagg

SEQ ID NO: 39615 - RNA, 17 nt, Human
aggcaggcagagcggga

SEQ ID NO: 39616 - RNA, 22 nt, Human
aggcaggcagggcucacugucu

SEQ ID NO: 39617 - RNA, 23 nt, Human
aggcaggcaguucagcuguuguu

SEQ ID NO: 39618 - RNA, 22 nt, Human
aggcaggccuacacaaugggag

SEQ ID NO: 39619 - RNA, 22 nt, Human
aggcagguccccuggaaggcac

SEQ ID NO: 39620 - RNA, 19 nt, Human
aggcaggugcagagguccc

SEQ ID NO: 39621 - RNA, 22 nt, Human
aggcaggugcuuaugacuugcu

SEQ ID NO: 39622 - RNA, 22 nt, Human
aggcaggugggucacuugaguc

SEQ ID NO: 39623 - RNA, 22 nt, Human
aggcagguguugggagacacca

SEQ ID NO: 39624 - RNA, 22 nt, Human
aggcagguuggugagaagacug

SEQ ID NO: 39625 - RNA, 22 nt, Human
aggcagguuucccggcugucaa

SEQ ID NO: 39626 - RNA, 23 nt, Human
aggcagguuugggcucuucuugu

SEQ ID NO: 39627 - RNA, 22 nt, Human
aggcagucuaucucuggagccu

SEQ ID NO: 39628 - RNA, 22 nt, Human
aggcagugagaaauagcaagau

SEQ ID NO: 39629 - RNA, 22 nt, Human
aggcagugaugagucaugaaua

SEQ ID NO: 39630 - RNA, 22 nt, Human
aggcagugcagaguccucuucu

SEQ ID NO: 39631 - RNA, 22 nt, Human
auggcccagaaguuuggaaagg

SEQ ID NO: 39632 - RNA, 22 nt, Human
auggcccaggccaggauccagc

SEQ ID NO: 39633 - RNA, 22 nt, Human
auggcccugccaggaggaacaa

SEQ ID NO: 39634 - RNA, 22 nt, Human
auggcccuguuuaugguaaggc

SEQ ID NO: 39635 - RNA, 20 nt, Human
auggccugcuagaagucugu

SEQ ID NO: 39636 - RNA, 22 nt, Human
auggccugggcccgcuucagau

SEQ ID NO: 39637 - RNA, 22 nt, Human
auggcuaaaccugaacuggucu

SEQ ID NO: 39638 - RNA, 22 nt, Human
auggcuauuuuagagaucaagg

SEQ ID NO: 39639 - RNA, 22 nt, Human
auggcuccagcuuggcuucacc

SEQ ID NO: 39640 - RNA, 22 nt, Human
auggcuccauagcuucguuuag

SEQ ID NO: 39641 - RNA, 22 nt, Human
auggcucugagaaccugagcua

SEQ ID NO: 39642 - RNA, 22 nt, Human
auggcugaggcuggagguggca

SEQ ID NO: 39643 - RNA, 22 nt, Human
auggcugcuuacaaaaacugug

SEQ ID NO: 39644 - RNA, 22 nt, Human
auggcuggcaugugcauaacgg

SEQ ID NO: 39645 - RNA, 22 nt, Human
auggcugggaugggguagagaa

SEQ ID NO: 39646 - RNA, 22 nt, Human
auggcugggucaccaucagggu

SEQ ID NO: 39647 - RNA, 22 nt, Human
auggcugucacgccacugugag

SEQ ID NO: 39648 - RNA, 22 nt, Human
auggcuguccaguuucuagaga

SEQ ID NO: 39649 - RNA, 22 nt, Human
auggcugugaaaugguaggugg

SEQ ID NO: 39650 - RNA, 22 nt, Human
auggcuguuggcaggaggccuc

SEQ ID NO: 39651 - RNA, 22 nt, Human
auggcuucaucuuuuaguccuu

SEQ ID NO: 39652 - RNA, 17 nt, Human
auggcuuccauugacca

SEQ ID NO: 39653 - RNA, 22 nt, Human
auggcuuguucauugguaccug

SEQ ID NO: 39654 - RNA, 22 nt, Human
auggcuuucucuaaugugguau

SEQ ID NO: 39655 - RNA, 17 nt, Human
auggcuuugucacacag

SEQ ID NO: 39656 - RNA, 21 nt, Human
auggcuuuuuuaaagcuugug

SEQ ID NO: 39657 - RNA, 22 nt, Human
augggaagugaagucagggagg

SEQ ID NO: 39658 - RNA, 22 nt, Human
augggaaguguuagaagauuuu

SEQ ID NO: 39659 - RNA, 22 nt, Human
augggacaggcaugggacuuag

SEQ ID NO: 39660 - RNA, 22 nt, Human
augggaggaagagaagaugucu

SEQ ID NO: 39661 - RNA, 18 nt, Human
augggaggggccaagaga

SEQ ID NO: 39662 - RNA, 22 nt, Human
augggagugacagggccacugg

SEQ ID NO: 39663 - RNA, 22 nt, Human
augggagugugcuugaggaguu

SEQ ID NO: 39664 - RNA, 22 nt, Human
augggaugaacuugaucugcuu

SEQ ID NO: 39665 - RNA, 22 nt, Human
augggcaacagcagucacaaug

SEQ ID NO: 39666 - RNA, 22 nt, Human
augggcaggcaagguggcgagu

SEQ ID NO: 39667 - RNA, 22 nt, Human
augggcaguguauuggaaggaa

SEQ ID NO: 39668 - RNA, 23 nt, Human
augggccaagcaagacccaugac

SEQ ID NO: 39669 - RNA, 22 nt, Human
augggcuaaacuuagaggauau

SEQ ID NO: 39670 - RNA, 22 nt, Human
augggcuaucaaauggagguau

SEQ ID NO: 39671 - RNA, 19 nt, Human
augggcuauggugcuguuu

SEQ ID NO: 39672 - RNA, 22 nt, Human
augggcucuaugucuaggagau

SEQ ID NO: 39673 - RNA, 22 nt, Human
augggcugcuuggcuuccaccc

SEQ ID NO: 39674 - RNA, 22 nt, Human
augggcuggcagccugaacagc

SEQ ID NO: 39675 - RNA, 22 nt, Human
augggcuugacccuacagaaag

SEQ ID NO: 39676 - RNA, 22 nt, Human
aggucacuugguguuauucagc

SEQ ID NO: 39677 - RNA, 22 nt, Human
aggucagaaaaggagagcauug

SEQ ID NO: 39678 - RNA, 22 nt, Human
aggucagaagugccagggaauu

SEQ ID NO: 39679 - RNA, 22 nt, Human
aggucagcaugaguagaaggua

SEQ ID NO: 39680 - RNA, 22 nt, Human
aggucagcuagacagcucucug

SEQ ID NO: 39681 - RNA, 22 nt, Human
aggucagcugugugugcaugag

SEQ ID NO: 39682 - RNA, 22 nt, Human
aggucaggaggccucugccauu

SEQ ID NO: 39683 - RNA, 22 nt, Human
aggucagguaucagcagguauu

SEQ ID NO: 39684 - RNA, 22 nt, Human
aggucauuccagccauuccccu

SEQ ID NO: 39685 - RNA, 19 nt, Human
aggucauugauagugcagg

SEQ ID NO: 39686 - RNA, 22 nt, Human
agguccagaacgugccuacucu

SEQ ID NO: 39687 - RNA, 22 nt, Human
agguccagaggcuccuuauuac

SEQ ID NO: 39688 - RNA, 22 nt, Human
agguccagagguugaacggugg

SEQ ID NO: 39689 - RNA, 22 nt, Human
agguccaggagauuuggcaauu

SEQ ID NO: 39690 - RNA, 22 nt, Human
agguccaggauuuguggggucu

SEQ ID NO: 39691 - RNA, 22 nt, Human
agguccaggcauuuggguuggg

SEQ ID NO: 39692 - RNA, 22 nt, Human
agguccagguuccguuucugcg

SEQ ID NO: 39693 - RNA, 22 nt, Human
agguccagugcucuuggugguu

SEQ ID NO: 39694 - RNA, 21 nt, Human
agguccaguucugucuuggac

SEQ ID NO: 39695 - RNA, 22 nt, Human
agguccaguuuucugacaaggg

SEQ ID NO: 39696 - RNA, 22 nt, Human
aggucccaguguuagggugaca

SEQ ID NO: 39697 - RNA, 19 nt, Human
aggucccucccucgaggcu

SEQ ID NO: 39698 - RNA, 22 nt, Human
aggucccugcagcagacugcca

SEQ ID NO: 39699 - RNA, 22 nt, Human
agguccugaagauuuuacuaga

SEQ ID NO: 39700 - RNA, 22 nt, Human
agguccugacgcccuuugaaau

SEQ ID NO: 39701 - RNA, 22 nt, Human
agguccugacuccacguucuag

SEQ ID NO: 39702 - RNA, 23 nt, Human
agguccuggacauaugugcauca

SEQ ID NO: 39703 - RNA, 22 nt, Human
agguccuggugaccauggaguu

SEQ ID NO: 39704 - RNA, 20 nt, Human
agguccugguucucugggau

SEQ ID NO: 39705 - RNA, 22 nt, Human
agguccuguccuuggucucuga

SEQ ID NO: 39706 - RNA, 22 nt, Human
agguccuguguccaggggccug

SEQ ID NO: 39707 - RNA, 20 nt, Human
agguccuguuccuugucucc

SEQ ID NO: 39708 - RNA, 22 nt, Human
agguccuuaacauagugauauc

SEQ ID NO: 39709 - RNA, 22 nt, Human
aggucucaagagaaaaguggug

SEQ ID NO: 39710 - RNA, 22 nt, Human
aggucucaauuccugcuccugu

SEQ ID NO: 39711 - RNA, 22 nt, Human
aggucuccucauauucugccuc

SEQ ID NO: 39712 - RNA, 22 nt, Human
aggucucugaguacugcuggac

SEQ ID NO: 39713 - RNA, 22 nt, Human
aggucucugcccacacaggcuu

SEQ ID NO: 39714 - RNA, 22 nt, Human
aggucugagaacuaccuauagg

SEQ ID NO: 39715 - RNA, 22 nt, Human
aggucugagagccgcuuucccc

SEQ ID NO: 39716 - RNA, 17 nt, Human
aggucugagaguaucug

SEQ ID NO: 39717 - RNA, 22 nt, Human
aggucugaguagagaaaaggca

SEQ ID NO: 39718 - RNA, 19 nt, Human
aggucugcagcugcaguuu

SEQ ID NO: 39719 - RNA, 23 nt, Human
aggucuggacccuuggccccugc

SEQ ID NO: 39720 - RNA, 22 nt, Human
aggucuggcucuucuccacaga

SEQ ID NO: 39721 - RNA, 22 nt, Human
aggucugguauuuuucuauacu

SEQ ID NO: 39722 - RNA, 22 nt, Human
aggucugguguugggccugaaa

SEQ ID NO: 39723 - RNA, 20 nt, Human
aggucuuccaaucagcuccu

SEQ ID NO: 39724 - RNA, 19 nt, Human
aggucuugacucuguucuu

SEQ ID NO: 39725 - RNA, 22 nt, Human
aggucuugugaaggacugugcc

SEQ ID NO: 39726 - RNA, 22 nt, Human
aggugacuacuauuuuaaaaua

SEQ ID NO: 39727 - RNA, 22 nt, Human
aggugagggugccagugcaugg

SEQ ID NO: 39728 - RNA, 22 nt, Human
aggugaguccugggcacaggua

SEQ ID NO: 39729 - RNA, 19 nt, Human
aggugagugugggaaaggg

SEQ ID NO: 39730 - RNA, 21 nt, Human
aggugcagagccagggaccag

SEQ ID NO: 39731 - RNA, 19 nt, Human
aggugcaggucacagggga

SEQ ID NO: 39732 - RNA, 22 nt, Human
aggugcagugaaggaaaaggaa

SEQ ID NO: 39733 - RNA, 22 nt, Human
aggugcaguguuuaaaaguagc

SEQ ID NO: 39734 - RNA, 23 nt, Human
aggugccaacugagagcugagag

SEQ ID NO: 39735 - RNA, 22 nt, Human
aggugccugggagcucccugag

SEQ ID NO: 39736 - RNA, 22 nt, Human
aggugcuagguguguaguggag

SEQ ID NO: 39737 - RNA, 17 nt, Human
aggugcuggagcaucag

SEQ ID NO: 39738 - RNA, 21 nt, Human
aggugcuggcgccccaggaga

SEQ ID NO: 39739 - RNA, 22 nt, Human
agguggagugaaggaaaggcag

SEQ ID NO: 39740 - RNA, 21 nt, Human
agguggagugcuuagcaucca

SEQ ID NO: 39741 - RNA, 22 nt, Human
agggccagggaaacgaucagca

SEQ ID NO: 39742 - RNA, 22 nt, Human
agggccaguaccaggugggugg

SEQ ID NO: 39743 - RNA, 22 nt, Human
agggccaguucagaggacaugg

SEQ ID NO: 39744 - RNA, 22 nt, Human
agggccaguucuaccucugaau

SEQ ID NO: 39745 - RNA, 23 nt, Human
agggcccaagccuggacagcagg

SEQ ID NO: 39746 - RNA, 22 nt, Human
agggcccagcccuugcuggucu

SEQ ID NO: 39747 - RNA, 22 nt, Human
agggccccaguaagauuacaug

SEQ ID NO: 39748 - RNA, 22 nt, Human
agggccccauagucacugcccg

SEQ ID NO: 39749 - RNA, 22 nt, Human
agggcccucuggcaggccaggc

SEQ ID NO: 39750 - RNA, 22 nt, Human
agggcccuggggugcacugaca

SEQ ID NO: 39751 - RNA, 18 nt, Human
agggcccugguggccauu

SEQ ID NO: 39752 - RNA, 23 nt, Human
agggccucaggagggcugcaugg

SEQ ID NO: 39753 - RNA, 22 nt, Human
agggccucuaccauccaagguu

SEQ ID NO: 39754 - RNA, 22 nt, Human
agggccucucugggccuuuccu

SEQ ID NO: 39755 - RNA, 22 nt, Human
agggccucuggaacacugaggg

SEQ ID NO: 39756 - RNA, 21 nt, Human
agggccucuguguacuggggg

SEQ ID NO: 39757 - RNA, 22 nt, Human
agggccugagaccguggcuuga

SEQ ID NO: 39758 - RNA, 19 nt, Human
agggccugagcagauguug

SEQ ID NO: 39759 - RNA, 22 nt, Human
agggccugcucuaucacucuca

SEQ ID NO: 39760 - RNA, 20 nt, Human
agggccugcucugugguguc

SEQ ID NO: 39761 - RNA, 22 nt, Human
agggccuggaacugugggcagg

SEQ ID NO: 39762 - RNA, 22 nt, Human
agggccuggcuucacuuucuca

SEQ ID NO: 39763 - RNA, 22 nt, Human
agggccugucuguagaacugaa

SEQ ID NO: 39764 - RNA, 22 nt, Human
agggccugugaauucucccugc

SEQ ID NO: 39765 - RNA, 22 nt, Human
agggccugugcuuccugagaua

SEQ ID NO: 39766 - RNA, 20 nt, Human
agggccuguugcaagcguuu

SEQ ID NO: 39767 - RNA, 22 nt, Human
agggccuugcugucugaagcug

SEQ ID NO: 39768 - RNA, 22 nt, Human
agggcgaggagacggaggcaca

SEQ ID NO: 39769 - RNA, 22 nt, Human
agggcgccugcuguggccaccg

SEQ ID NO: 39770 - RNA, 22 nt, Human
agggcgcugaaauacuaacaug

SEQ ID NO: 39771 - RNA, 22 nt, Human
agggcgcugucuggccagcggu

SEQ ID NO: 39772 - RNA, 22 nt, Human
agggcuacugccugccuucagg

SEQ ID NO: 39773 - RNA, 22 nt, Human
agggcuagaguugagaugggga

SEQ ID NO: 39774 - RNA, 22 nt, Human
agggcuaggaauggaacuggag

SEQ ID NO: 39775 - RNA, 19 nt, Human
agggcuaggcacauagggc

SEQ ID NO: 39776 - RNA, 22 nt, Human
agggcucaagggcaugcuacgu

SEQ ID NO: 39777 - RNA, 22 nt, Human
agggcucaauggugggcaugua

SEQ ID NO: 39778 - RNA, 22 nt, Human
agggcucagaacaaugagugua

SEQ ID NO: 39779 - RNA, 22 nt, Human
agggcucagccuccuccucagc

SEQ ID NO: 39780 - RNA, 22 nt, Human
agggcucaggggccccaagcug

SEQ ID NO: 39781 - RNA, 22 nt, Human
agggcucaguaaacgguggauu

SEQ ID NO: 39782 - RNA, 22 nt, Human
agggcucauaauuccugacuuc

SEQ ID NO: 39783 - RNA, 22 nt, Human
agggcuccaggggcugggugac

SEQ ID NO: 39784 - RNA, 22 nt, Human
agggcuccgggcaggcgaugga

SEQ ID NO: 39785 - RNA, 22 nt, Human
agggcuccuccccggccuccac

SEQ ID NO: 39786 - RNA, 22 nt, Human
agggcucugagcuggaccaccu

SEQ ID NO: 39787 - RNA, 22 nt, Human
agggcucugggguggcagagau

SEQ ID NO: 39788 - RNA, 22 nt, Human
agggcucuguccccagaggccc

SEQ ID NO: 39789 - RNA, 22 nt, Human
agggcucuguuggggucagcac

SEQ ID NO: 39790 - RNA, 22 nt, Human
agggcugaaacauaauccuucu

SEQ ID NO: 39791 - RNA, 22 nt, Human
agggcugaaguuauggcugagc

SEQ ID NO: 39792 - RNA, 22 nt, Human
agggcugacagugaggagucaa

SEQ ID NO: 39793 - RNA, 22 nt, Human
agggcugacaguggcguggcgu

SEQ ID NO: 39794 - RNA, 22 nt, Human
agggcugagugggagagaguug

SEQ ID NO: 39795 - RNA, 22 nt, Human
agggcugaugcaccauguagcc

SEQ ID NO: 39796 - RNA, 19 nt, Human
agucacagggaagaggaac

SEQ ID NO: 39797 - RNA, 22 nt, Human
agucacauagcucugguuucuu

SEQ ID NO: 39798 - RNA, 22 nt, Human
agucacauaguguuuuggaauc

SEQ ID NO: 39799 - RNA, 22 nt, Human
agucacauggacucaggaugac

SEQ ID NO: 39800 - RNA, 22 nt, Human
agucacaugggauuagaaccca

SEQ ID NO: 39801 - RNA, 20 nt, Human
agucacauugagcuuuugga

SEQ ID NO: 39802 - RNA, 22 nt, Human
agucaccaggguuugcuggguu

SEQ ID NO: 39803 - RNA, 22 nt, Human
agucaccagguuuuagagaccu

SEQ ID NO: 39804 - RNA, 22 nt, Human
agucaccaucuguggcagccug

SEQ ID NO: 39805 - RNA, 22 nt, Human
agucaccuugaaaugucuugaa

SEQ ID NO: 39806 - RNA, 22 nt, Human
agucacuguuuaaucuagcuaa

SEQ ID NO: 39807 - RNA, 22 nt, Human
agucacuguuucagaacugagu

SEQ ID NO: 39808 - RNA, 22 nt, Human
agucacuuccagacaccugccu

SEQ ID NO: 39809 - RNA, 22 nt, Human
agucagaagggcccuuccuucc

SEQ ID NO: 39810 - RNA, 22 nt, Human
agucagagaauaaagaaugcau

SEQ ID NO: 39811 - RNA, 22 nt, Human
agucagagcuauguuguuauau

SEQ ID NO: 39812 - RNA, 22 nt, Human
agucagaggaaugggccaggcu

SEQ ID NO: 39813 - RNA, 22 nt, Human
agucagaguuuugaggugugac

SEQ ID NO: 39814 - RNA, 22 nt, Human
agucagcagugaaagcacagcc

SEQ ID NO: 39815 - RNA, 22 nt, Human
agucagcauauauggaguaagg

SEQ ID NO: 39816 - RNA, 22 nt, Human
agucagcauuuucacugagcua

SEQ ID NO: 39817 - RNA, 22 nt, Human
agucagcugcugcacacagcag

SEQ ID NO: 39818 - RNA, 22 nt, Human
agucagcuuggcuccucccaug

SEQ ID NO: 39819 - RNA, 22 nt, Human
agucaggagauauuuugauaug

SEQ ID NO: 39820 - RNA, 22 nt, Human
agucaggagcugcugcauugua

SEQ ID NO: 39821 - RNA, 22 nt, Human
agucagggguuggacggggcca

SEQ ID NO: 39822 - RNA, 22 nt, Human
agucaggguuguaggcucaccc

SEQ ID NO: 39823 - RNA, 22 nt, Human
agucagguacuccgagggcaug

SEQ ID NO: 39824 - RNA, 22 nt, Human
agucaggugguucugcuccacu

SEQ ID NO: 39825 - RNA, 22 nt, Human
agucaguagauccaaacuuuug

SEQ ID NO: 39826 - RNA, 22 nt, Human
agucaguauuuauuacuuagcu

SEQ ID NO: 39827 - RNA, 22 nt, Human
agucagugaaggcauugcucaa

SEQ ID NO: 39828 - RNA, 22 nt, Human
agucagugaaugguguaugcua

SEQ ID NO: 39829 - RNA, 23 nt, Human
agucagugcgggauggucagggg

SEQ ID NO: 39830 - RNA, 22 nt, Human
agucaguuaaccucacagcauc

SEQ ID NO: 39831 - RNA, 22 nt, Human
agucaguucauggcucuguccu

SEQ ID NO: 39832 - RNA, 19 nt, Human
agucaguucugaggaggaa

SEQ ID NO: 39833 - RNA, 22 nt, Human
agucaguugcaaacaucaggca

SEQ ID NO: 39834 - RNA, 22 nt, Human
agucaguuguggagauuuaacu

SEQ ID NO: 39835 - RNA, 22 nt, Human
agucauaaagccagugggaggc

SEQ ID NO: 39836 - RNA, 22 nt, Human
agucauauggcuauuuaguggg

SEQ ID NO: 39837 - RNA, 22 nt, Human
agucauauguggcauuuucuaa

SEQ ID NO: 39838 - RNA, 22 nt, Human
agucaucaucugcccucacugg

SEQ ID NO: 39839 - RNA, 22 nt, Human
agucauccaagagccugggcag

SEQ ID NO: 39840 - RNA, 19 nt, Human
agucaucucacugugccca

SEQ ID NO: 39841 - RNA, 22 nt, Human
agucaugacuccauuggucaag

SEQ ID NO: 39842 - RNA, 22 nt, Human
agucauguaaucacaaugaccu

SEQ ID NO: 39843 - RNA, 23 nt, Human
agucauuaagaaguucaggaacu

SEQ ID NO: 39844 - RNA, 22 nt, Human
agucauuuaucuuagccauuau

SEQ ID NO: 39845 - RNA, 22 nt, Human
agucauuucccauucuucauau

SEQ ID NO: 39846 - RNA, 22 nt, Human
aguccaagaucaaggugucaac

SEQ ID NO: 39847 - RNA, 22 nt, Human
aguccagaacuucagcuaguuu

SEQ ID NO: 39848 - RNA, 22 nt, Human
aguccagaucaugcagcaaacc

SEQ ID NO: 39849 - RNA, 22 nt, Human
aguccaggaagcaucauggucu

SEQ ID NO: 39850 - RNA, 22 nt, Human
agugggagggccauauggugaa

SEQ ID NO: 39851 - RNA, 19 nt, Human
agugggcaaggaagaugac

SEQ ID NO: 39852 - RNA, 22 nt, Human
agugggcaugaucuggugucug

SEQ ID NO: 39853 - RNA, 22 nt, Human
agugggcccuugucacacugau

SEQ ID NO: 39854 - RNA, 22 nt, Human
aguggggaagauuuugcaguca

SEQ ID NO: 39855 - RNA, 23 nt, Human
aguggggaaucaacagauucuuu

SEQ ID NO: 39856 - RNA, 22 nt, Human
aguggggacuuaugccagcauu

SEQ ID NO: 39857 - RNA, 22 nt, Human
aguggggccggugaggccgagg

SEQ ID NO: 39858 - RNA, 22 nt, Human
agugggguccaucccuucccuc

SEQ ID NO: 39859 - RNA, 22 nt, Human
aguggguguagucuuccuccug

SEQ ID NO: 39860 - RNA, 19 nt, Human
agugguagaugagcaggag

SEQ ID NO: 39861 - RNA, 22 nt, Human
aguggucaaagacuagauuuca

SEQ ID NO: 39862 - RNA, 22 nt, Human
agugguccugcaaacccgugug

SEQ ID NO: 39863 - RNA, 22 nt, Human
aguggucuagucugaggauuau

SEQ ID NO: 39864 - RNA, 22 nt, Human
aguggucugggcuaaaugaggu

SEQ ID NO: 39865 - RNA, 22 nt, Human
aguggugagaccuggugcuuuc

SEQ ID NO: 39866 - RNA, 22 nt, Human
aguggugcccaccugagccuga

SEQ ID NO: 39867 - RNA, 22 nt, Human
aguguacaaaaugauagauaaa

SEQ ID NO: 39868 - RNA, 22 nt, Human
aguguacauguuuacagcaucu

SEQ ID NO: 39869 - RNA, 22 nt, Human
aguguagaugaaauuaaaccca

SEQ ID NO: 39870 - RNA, 22 nt, Human
aguguaggguggucagagcaga

SEQ ID NO: 39871 - RNA, 22 nt, Human
aguguaucaugguuggcagaca

SEQ ID NO: 39872 - RNA, 22 nt, Human
aguguauguccugaggggagaa

SEQ ID NO: 39873 - RNA, 22 nt, Human
aguguauuaaaaugcuccuaag

SEQ ID NO: 39874 - RNA, 22 nt, Human
aguguauuaaguuaugaaguua

SEQ ID NO: 39875 - RNA, 22 nt, Human
aguguauuacagaacugacauu

SEQ ID NO: 39876 - RNA, 22 nt, Human
aguguauucagaauguagcaaa

SEQ ID NO: 39877 - RNA, 22 nt, Human
agugucaaaucagcaucugggu

SEQ ID NO: 39878 - RNA, 22 nt, Human
agugucaauaauuucuuuuugg

SEQ ID NO: 39879 - RNA, 22 nt, Human
agugucaauucucaaaucucgg

SEQ ID NO: 39880 - RNA, 17 nt, Human
agugucagaagacaguu

SEQ ID NO: 39881 - RNA, 22 nt, Human
agugucagcuaauuauucauga

SEQ ID NO: 39882 - RNA, 22 nt, Human
agugucauaaggagaaauuaca

SEQ ID NO: 39883 - RNA, 22 nt, Human
agugucauuccagggacccucg

SEQ ID NO: 39884 - RNA, 21 nt, Human
agugucauucccaagcuguga

SEQ ID NO: 39885 - RNA, 22 nt, Human
aguguccuacagcuccugccug

SEQ ID NO: 39886 - RNA, 19 nt, Human
aguguccuagucauuugcc

SEQ ID NO: 39887 - RNA, 22 nt, Human
aguguccugugucccagacugu

SEQ ID NO: 39888 - RNA, 22 nt, Human
aguguccuuucuguuccagcca

SEQ ID NO: 39889 - RNA, 22 nt, Human
agugucucagccccaacuagag

SEQ ID NO: 39890 - RNA, 22 nt, Human
agugucugagcuaucauuaggg

SEQ ID NO: 39891 - RNA, 22 nt, Human
agugucugaguaaauuucucau

SEQ ID NO: 39892 - RNA, 23 nt, Human
agugucugagugcaggcugugca

SEQ ID NO: 39893 - RNA, 22 nt, Human
agugucugcaaaaugaaagagc

SEQ ID NO: 39894 - RNA, 22 nt, Human
agugucugccugggaggagcau

SEQ ID NO: 39895 - RNA, 22 nt, Human
agugucugcgggcagaggagcg

SEQ ID NO: 39896 - RNA, 22 nt, Human
agugucugcuuaucaguucuug

SEQ ID NO: 39897 - RNA, 22 nt, Human
agugucugugcuuugcagcaaa

SEQ ID NO: 39898 - RNA, 22 nt, Human
agugucuuucauauccuccauc

SEQ ID NO: 39899 - RNA, 22 nt, Human
agugucuuugucucucaagcac

SEQ ID NO: 39900 - RNA, 22 nt, Human
agugugacauuuucaugaauuu

SEQ ID NO: 39901 - RNA, 22 nt, Human
agugugacuacauuacaagagu

SEQ ID NO: 39902 - RNA, 23 nt, Human
agugugacuuuuuugacugucac

SEQ ID NO: 39903 - RNA, 22 nt, Human
agugugagaugauugaggagca

SEQ ID NO: 39904 - RNA, 22 nt, Human
agugugaguaauucagggaggg

SEQ ID NO: 39905 - RNA, 19 nt, Human
agugugaguaauuggaguu

SEQ ID NO: 39906 - RNA, 22 nt, Human
agugugaguuacaaagugugaa

SEQ ID NO: 39907 - RNA, 22 nt, Human
agugugaguuugguugagacuu

SEQ ID NO: 39908 - RNA, 22 nt, Human
agugugcugcuuaaacaguugu

SEQ ID NO: 39909 - RNA, 22 nt, Human
agugugcuguuuccagaagggc

SEQ ID NO: 39910 - RNA, 22 nt, Human
agugugcuuaaguuuaucagga

SEQ ID NO: 39911 - RNA, 22 nt, Human
aguguggacuuuuccuaggagg

SEQ ID NO: 39912 - RNA, 22 nt, Human
aguguggauuggcuggagcuau

SEQ ID NO: 39913 - RNA, 22 nt, Human
aguguggcaggaaugacuagaa

SEQ ID NO: 39914 - RNA, 22 nt, Human
aguguguaagggaucaaagagu

SEQ ID NO: 39915 - RNA, 22 nt, Human
aguguguacauaauuguacgcc

SEQ ID NO: 39916 - RNA, 22 nt, Human
aguguguacauuuggugcaguu

SEQ ID NO: 39917 - RNA, 22 nt, Human
aguguguagcauuuggcaggca

SEQ ID NO: 39918 - RNA, 22 nt, Human
aguguguccagaaaucuguauu

SEQ ID NO: 39919 - RNA, 22 nt, Human
aguguguccaggaagcagaugg

SEQ ID NO: 39920 - RNA, 22 nt, Human
agugugucgagggaggguccag

SEQ ID NO: 39921 - RNA, 20 nt, Human
agugugucucggagguaagu

SEQ ID NO: 39922 - RNA, 22 nt, Human
agugugugccuuuggauaccug

SEQ ID NO: 39923 - RNA, 21 nt, Human
aguguguucuuggcauuaccu

SEQ ID NO: 39924 - RNA, 19 nt, Human
aguguuaacccaguguugg

SEQ ID NO: 39925 - RNA, 21 nt, Human
aguguuaauggaaauuauauu

SEQ ID NO: 39926 - RNA, 22 nt, Human
aguguuacugguucaugaaucu

SEQ ID NO: 39927 - RNA, 23 nt, Human
aguguucagcauguaguaaauac

SEQ ID NO: 39928 - RNA, 22 nt, Human
aguguucaggaucugaggccag

SEQ ID NO: 39929 - RNA, 23 nt, Human
aguguuccaguugguugagagug

SEQ ID NO: 39930 - RNA, 22 nt, Human
aguguuccugcucucaggaagc

SEQ ID NO: 39931 - RNA, 22 nt, Human
aguguucuaacaacugcuuuca

SEQ ID NO: 39932 - RNA, 19 nt, Human
aguguucugaguacuccuc

SEQ ID NO: 39933 - RNA, 22 nt, Human
aguguucuuguuucuaagcaaa

SEQ ID NO: 39934 - RNA, 22 nt, Human
aguguuguaauaaauaucaucu

SEQ ID NO: 39935 - RNA, 22 nt, Human
aguguuuaaguuacacacauau

SEQ ID NO: 39936 - RNA, 22 nt, Human
aguguuuacagaguaguggaaa

SEQ ID NO: 39937 - RNA, 22 nt, Human
aguguuuagaggaggaaagaug

SEQ ID NO: 39938 - RNA, 22 nt, Human
aguguuuaguuaagauuucaaa

SEQ ID NO: 39939 - RNA, 22 nt, Human
aguguuuauauuauggaaauau

SEQ ID NO: 39940 - RNA, 22 nt, Human
aguguuuauggaacccuggugg

SEQ ID NO: 39941 - RNA, 19 nt, Human
aguguuuauguagugccua

SEQ ID NO: 39942 - RNA, 23 nt, Human
aguguuuauguucagugacccuc

SEQ ID NO: 39943 - RNA, 18 nt, Human
aguguuuauuuaggugaa

SEQ ID NO: 39944 - RNA, 19 nt, Human
aguguuucaugugcuuuua

SEQ ID NO: 39945 - RNA, 22 nt, Human
aguguuuccugaguguuaucau

SEQ ID NO: 39946 - RNA, 17 nt, Human
aguguuuccuuaucauu

SEQ ID NO: 39947 - RNA, 22 nt, Human
aguguuucuaaguagaugugaa

SEQ ID NO: 39948 - RNA, 20 nt, Human
aguguuugcucacagucucc

SEQ ID NO: 39949 - RNA, 22 nt, Human
auuugcuugacuauggcuugca

SEQ ID NO: 39950 - RNA, 22 nt, Human
auuugcuuucagguauaaaagg

SEQ ID NO: 39951 - RNA, 22 nt, Human
auuugcuuuuacuauguuaaaa

SEQ ID NO: 39952 - RNA, 22 nt, Human
auuuggaaaaucugguuauaga

SEQ ID NO: 39953 - RNA, 22 nt, Human
auuuggaagcuugaagauuauu

SEQ ID NO: 39954 - RNA, 22 nt, Human
auuuggaaguuuggagugaagg

SEQ ID NO: 39955 - RNA, 22 nt, Human
auuuggacauuuacaauaguga

SEQ ID NO: 39956 - RNA, 21 nt, Human
auuuggauauugcuggcaaau

SEQ ID NO: 39957 - RNA, 22 nt, Human
auuuggaugcacuaaauaaaau

SEQ ID NO: 39958 - RNA, 22 nt, Human
auuuggcaacauuaauugaauc

SEQ ID NO: 39959 - RNA, 22 nt, Human
caaagguuguugagagugcagg

SEQ ID NO: 39960 - RNA, 22 nt, Human
caaaguaaacuaccacuguuuc

SEQ ID NO: 39961 - RNA, 22 nt, Human
caaaguaauauggucccaguga

SEQ ID NO: 39962 - RNA, 22 nt, Human
caaaguauauuucauagucuca

SEQ ID NO: 39963 - RNA, 22 nt, Human
caaaguaugaaccaguuucucu

SEQ ID NO: 39964 - RNA, 22 nt, Human
caaagucauggggaugcagguc

SEQ ID NO: 39965 - RNA, 22 nt, Human
caaagugccuguaccacuuugc

SEQ ID NO: 39966 - RNA, 22 nt, Human
caaagugcuaggauuacaggcc

SEQ ID NO: 39967 - RNA, 22 nt, Human
caaagugcuggaauuauagggg

SEQ ID NO: 39968 - RNA, 22 nt, Human
caaagugcugggauuagugcug

SEQ ID NO: 39969 - RNA, 22 nt, Human
caaaguggagagccugugguug

SEQ ID NO: 39970 - RNA, 22 nt, Human
caaaguuaugaaugauaagauu

SEQ ID NO: 39971 - RNA, 22 nt, Human
caaaguucucggcucaaguccu

SEQ ID NO: 39972 - RNA, 22 nt, Human
caaaguuuaaaguagauuucag

SEQ ID NO: 39973 - RNA, 22 nt, Human
caaaguuuuaguaaacauauau

SEQ ID NO: 39974 - RNA, 22 nt, Human
caaauaagcaauuccauucuuc

SEQ ID NO: 39975 - RNA, 22 nt, Human
caaauacucuggauguguuugu

SEQ ID NO: 39976 - RNA, 22 nt, Human
caaauacugaguuuauuuucaa

SEQ ID NO: 39977 - RNA, 22 nt, Human
caaauacuguacugaacacugu

SEQ ID NO: 39978 - RNA, 21 nt, Human
caaauacuuagaaacuuaaga

SEQ ID NO: 39979 - RNA, 22 nt, Human
caaauacuuuauauacuucaaa

SEQ ID NO: 39980 - RNA, 22 nt, Human
caaauagaacucacagacaaga

SEQ ID NO: 39981 - RNA, 22 nt, Human
caaauagaagguacucagagaa

SEQ ID NO: 39982 - RNA, 22 nt, Human
caaauagacaagauggcaggaa

SEQ ID NO: 39983 - RNA, 22 nt, Human
caaauagacuuaagcaucugua

SEQ ID NO: 39984 - RNA, 22 nt, Human
caaauagauuguucaauccuga

SEQ ID NO: 39985 - RNA, 22 nt, Human
caaaucaccacuuaauggguua

SEQ ID NO: 39986 - RNA, 22 nt, Human
caaaugaauagggagugugaug

SEQ ID NO: 39987 - RNA, 22 nt, Human
caaaugaauauuuccauggguu

SEQ ID NO: 39988 - RNA, 22 nt, Human
caaaugauaccuauuacuaggc

SEQ ID NO: 39989 - RNA, 22 nt, Human
caaaugauacuguuuuuagucu

SEQ ID NO: 39990 - RNA, 22 nt, Human
caaaugauagagccgauuauca

SEQ ID NO: 39991 - RNA, 22 nt, Human
caaaugauccuugcaagcugug

SEQ ID NO: 39992 - RNA, 22 nt, Human
caaaugcagauucaggaguucu

SEQ ID NO: 39993 - RNA, 22 nt, Human
caaaugcaggucagcagguguc

SEQ ID NO: 39994 - RNA, 22 nt, Human
caaaugccaggaaucucugaag

SEQ ID NO: 39995 - RNA, 22 nt, Human
caaaugcuggcccugcuacuua

SEQ ID NO: 39996 - RNA, 21 nt, Human
caaaugcuggcuggaugagga

SEQ ID NO: 39997 - RNA, 22 nt, Human
caaauggcaacaagaacacugg

SEQ ID NO: 39998 - RNA, 20 nt, Human
caaauggcuuuuauuuccuu

SEQ ID NO: 39999 - RNA, 22 nt, Human
caaauguaaauucuuuugaagc

SEQ ID NO: 40000 - RNA, 22 nt, Human
caaauguauguuuuccuaugua

SEQ ID NO: 40001 - RNA, 22 nt, Human
caaaugugguuucucagcauuc

SEQ ID NO: 40002 - RNA, 22 nt, Human
caaauguguaaggaaguguuag

SEQ ID NO: 40003 - RNA, 22 nt, Human
caaauguuaaauguguuaagac

SEQ ID NO: 40004 - RNA, 22 nt, Human
caaauguuucuugaacaccaac

SEQ ID NO: 40005 - RNA, 22 nt, Human
caaauguuugcaucacagggca

SEQ ID NO: 40006 - RNA, 22 nt, Human
caaauguuuuuauucuacaaca

SEQ ID NO: 40007 - RNA, 22 nt, Human
caaauguuuuuuaguauaagua

SEQ ID NO: 40008 - RNA, 22 nt, Human
caaauucagaaaauugguagag

SEQ ID NO: 40009 - RNA, 23 nt, Human
caaauucuaggcaggcucuuuug

SEQ ID NO: 40010 - RNA, 22 nt, Human
caaauucucaagguuuauccca

SEQ ID NO: 40011 - RNA, 20 nt, Human
caaauucuguugaauacacc

SEQ ID NO: 40012 - RNA, 22 nt, Human
caaauugcuaacugucagacua

SEQ ID NO: 40013 - RNA, 22 nt, Human
caaauuuuguguguucucuagu

SEQ ID NO: 40014 - RNA, 22 nt, Human
caacaagcgcucagagcaaagc

SEQ ID NO: 40015 - RNA, 22 nt, Human
caacaaguggguacuuuacagg

SEQ ID NO: 40016 - RNA, 22 nt, Human
caacaauaugccagacucaauu

SEQ ID NO: 40017 - RNA, 22 nt, Human
caacaccuugaucuuggacuuc

SEQ ID NO: 40018 - RNA, 20 nt, Human
caacacugcccauuguuugc

SEQ ID NO: 40019 - RNA, 23 nt, Human
caacacugccuucaggugaagaa

SEQ ID NO: 40020 - RNA, 22 nt, Human
caacagaaggaagcagggucag

SEQ ID NO: 40021 - RNA, 22 nt, Human
caacagcuggaggcuuggcccg

SEQ ID NO: 40022 - RNA, 23 nt, Human
caacagcuguuagauaugggcuu

SEQ ID NO: 40023 - RNA, 22 nt, Human
caacagcuuuagaaacacuuuc

SEQ ID NO: 40024 - RNA, 19 nt, Human
caacaguacugguuugucc

SEQ ID NO: 40025 - RNA, 22 nt, Human
caacagucagaaugaagcugag

SEQ ID NO: 40026 - RNA, 22 nt, Human
caacauaugauuuuguauauaa

SEQ ID NO: 40027 - RNA, 22 nt, Human
caacauggcgaaaccccaucuc

SEQ ID NO: 40028 - RNA, 22 nt, Human
caacauucuuaucacuauaagc

SEQ ID NO: 40029 - RNA, 22 nt, Human
caacauuuucauggccagggag

SEQ ID NO: 40030 - RNA, 22 nt, Human
caacccaaaagcguuuccauuu

SEQ ID NO: 40031 - RNA, 22 nt, Human
caacccucucgccucaauucug

SEQ ID NO: 40032 - RNA, 22 nt, Human
caaccucuguaauguucuagga

SEQ ID NO: 40033 - RNA, 22 nt, Human
caaccucuuugggccuugguuu

SEQ ID NO: 40034 - RNA, 22 nt, Human
caacuaauccuuugaaaagaag

SEQ ID NO: 40035 - RNA, 22 nt, Human
caacuacuggugcucaggaaau

SEQ ID NO: 40036 - RNA, 22 nt, Human
caacuauauagaaauugauugu

SEQ ID NO: 40037 - RNA, 22 nt, Human
caacucagacuggauuaaauaa

SEQ ID NO: 40038 - RNA, 22 nt, Human
caacucauguccaacuuucuuu

SEQ ID NO: 40039 - RNA, 22 nt, Human
caacuccuccccagcaugccaa

SEQ ID NO: 40040 - RNA, 22 nt, Human
caacugaacugauaucaacuau

SEQ ID NO: 40041 - RNA, 22 nt, Human
caacugagcaguagcgucugga

SEQ ID NO: 40042 - RNA, 22 nt, Human
caacugcugacaccaucacucc

SEQ ID NO: 40043 - RNA, 22 nt, Human
caacugcuuggaggaauacugc

SEQ ID NO: 40044 - RNA, 17 nt, Human
caacuucacaaacuguc

SEQ ID NO: 40045 - RNA, 22 nt, Human
caacuuuaauuugggugucaga

SEQ ID NO: 40046 - RNA, 22 nt, Human
caacuuuugacacgugugcuaa

SEQ ID NO: 40047 - RNA, 22 nt, Human
caagaaaugggauuugacugcc

SEQ ID NO: 40048 - RNA, 22 nt, Human
caagaaauuucuuaagaacuaa

SEQ ID NO: 40049 - RNA, 22 nt, Human
caagaagcccuuccugggugga

SEQ ID NO: 40050 - RNA, 22 nt, Human
caagaagccgagcuacaggcuc

SEQ ID NO: 40051 - RNA, 22 nt, Human
caagaaggcauccccagucccu

SEQ ID NO: 40052 - RNA, 22 nt, Human
caagaaggcuauaugggccagg

SEQ ID NO: 40053 - RNA, 22 nt, Human
caagaaguugacagccagguga

SEQ ID NO: 40054 - RNA, 22 nt, Human
caagaauagcuaccucccauau

SEQ ID NO: 40055 - RNA, 22 nt, Human
caagaaucaacauuauuuagug

SEQ ID NO: 40056 - RNA, 22 nt, Human
caagaauuguacaaacugggug

SEQ ID NO: 40057 - RNA, 22 nt, Human
caagacauugauuuuguacaga

SEQ ID NO: 40058 - RNA, 22 nt, Human
caagagcucuccacuagguugg

SEQ ID NO: 40059 - RNA, 22 nt, Human
caagaggcaaauugucuagaag

SEQ ID NO: 40060 - RNA, 22 nt, Human
caagaggcuaaacugggcuauu

SEQ ID NO: 40061 - RNA, 22 nt, Human
caagaucaaguguaguaucaaa

SEQ ID NO: 40062 - RNA, 22 nt, Human
caagaugccccugguagggauc

SEQ ID NO: 40063 - RNA, 22 nt, Human
caagauucagcccuccugaccu

SEQ ID NO: 40064 - RNA, 22 nt, Human
caagauucauuuuguccuuguc

SEQ ID NO: 40065 - RNA, 22 nt, Human
caagauuuaagagucagccuug

SEQ ID NO: 40066 - RNA, 22 nt, Human
auaaugguagauguccacgcag

SEQ ID NO: 40067 - RNA, 22 nt, Human
auaauguaaggcucccuacagu

SEQ ID NO: 40068 - RNA, 22 nt, Human
aucagagcuaguacuugcaggu

SEQ ID NO: 40069 - RNA, 22 nt, Human
aucagagcugcauuuuagagcc

SEQ ID NO: 40070 - RNA, 22 nt, Human
aucagagcugugauucccacuc

SEQ ID NO: 40071 - RNA, 22 nt, Human
aucagaggaccuaguugggcag

SEQ ID NO: 40072 - RNA, 22 nt, Human
aucagaguggguuuuaaaagug

SEQ ID NO: 40073 - RNA, 22 nt, Human
aucagaguguaaguucuuuccu

SEQ ID NO: 40074 - RNA, 22 nt, Human
aucagcaagauguaauuucuau

SEQ ID NO: 40075 - RNA, 22 nt, Human
aucagcaaucucguguauuagg

SEQ ID NO: 40076 - RNA, 22 nt, Human
aucagcaucuuuaacaauuacc

SEQ ID NO: 40077 - RNA, 22 nt, Human
aucaggaagaagaauguguugg

SEQ ID NO: 40078 - RNA, 20 nt, Human
aucaggaagagagacugacc

SEQ ID NO: 40079 - RNA, 22 nt, Human
aucaggaucaugcuggguggga

SEQ ID NO: 40080 - RNA, 22 nt, Human
aucaggccagcaaucccugggc

SEQ ID NO: 40081 - RNA, 19 nt, Human
aucaggcuucuauuuucuc

SEQ ID NO: 40082 - RNA, 22 nt, Human
aucaguauacaggggacauuca

SEQ ID NO: 40083 - RNA, 22 nt, Human
aucaguauauuccuuggucuuu

SEQ ID NO: 40084 - RNA, 22 nt, Human
aucagugcuaaagcaaaugccc

SEQ ID NO: 40085 - RNA, 22 nt, Human
aucaguggggacgagaaguuua

SEQ ID NO: 40086 - RNA, 22 nt, Human
aucaguguuucaaauguaaucu

SEQ ID NO: 40087 - RNA, 22 nt, Human
aucaguuugauaauaaggcuug

SEQ ID NO: 40088 - RNA, 22 nt, Human
aucaguuuguauaugaaacacu

SEQ ID NO: 40089 - RNA, 22 nt, Human
aucauaaagugcuaucugauug

SEQ ID NO: 40090 - RNA, 22 nt, Human
aucauaacuguaauucaucuac

SEQ ID NO: 40091 - RNA, 19 nt, Human
aucauacauguuacacucu

SEQ ID NO: 40092 - RNA, 22 nt, Human
aucauagaggaaaauccacguu

SEQ ID NO: 40093 - RNA, 23 nt, Human
aucauagucuuugugacuggccc

SEQ ID NO: 40094 - RNA, 22 nt, Human
aucaucaucuaaauugugucgc

SEQ ID NO: 40095 - RNA, 22 nt, Human
aucaucauucuuggauaaagca

SEQ ID NO: 40096 - RNA, 22 nt, Human
aucaucuuaucugacucauuuu

SEQ ID NO: 40097 - RNA, 22 nt, Human
aucaucuucgaaaaaagucaga

SEQ ID NO: 40098 - RNA, 22 nt, Human
aucaugaaucuuguguucuaug

SEQ ID NO: 40099 - RNA, 22 nt, Human
aucaugacagagucugccaucc

SEQ ID NO: 40100 - RNA, 22 nt, Human
aucaugacaucugaguuuaagu

SEQ ID NO: 40101 - RNA, 22 nt, Human
aucaugcagagucugggcuuca

SEQ ID NO: 40102 - RNA, 22 nt, Human
aucauguuguauguaaucuuuu

SEQ ID NO: 40103 - RNA, 22 nt, Human
aucauuagcaauuuucaauaag

SEQ ID NO: 40104 - RNA, 22 nt, Human
auauuuacugcuguggugaagg

SEQ ID NO: 40105 - RNA, 21 nt, Human
auauuucagauuuccguaauc

SEQ ID NO: 40106 - RNA, 22 nt, Human
auauuucucucagacauggaag

SEQ ID NO: 40107 - RNA, 22 nt, Human
auauuucuggggguguguuucu

SEQ ID NO: 40108 - RNA, 22 nt, Human
auauuugagggcaauagggugg

SEQ ID NO: 40109 - RNA, 22 nt, Human
auauuugcaggaaacuaguuuu

SEQ ID NO: 40110 - RNA, 22 nt, Human
auauuugucaauucacuguuca

SEQ ID NO: 40111 - RNA, 22 nt, Human
auauuugugguaaagguaagaa

SEQ ID NO: 40112 - RNA, 22 nt, Human
auauuuguuuggcagaguucag

SEQ ID NO: 40113 - RNA, 22 nt, Human
auauuuucacagaacuugcaaa

SEQ ID NO: 40114 - RNA, 22 nt, Human
auauuuugaaguuaauaaugug

SEQ ID NO: 40115 - RNA, 22 nt, Human
auauuuugguagcucucaauga

SEQ ID NO: 40116 - RNA, 22 nt, Human
auauuuuguaacuuggaauagg

SEQ ID NO: 40117 - RNA, 22 nt, Human
auauuuuuccaugugggacucu

SEQ ID NO: 40118 - RNA, 21 nt, Human
auauuuuuguuuggacuguca

SEQ ID NO: 40119 - RNA, 22 nt, Human
aucaaaauggaagaauuuggcu

SEQ ID NO: 40120 - RNA, 22 nt, Human
aucaaagaaugugacugaaaua

SEQ ID NO: 40121 - RNA, 22 nt, Human
aucaaagagugagauuuuuacu

SEQ ID NO: 40122 - RNA, 22 nt, Human
aucaaagguaucuaugcugucu

SEQ ID NO: 40123 - RNA, 22 nt, Human
aucaaaguaauuaacacugaga

SEQ ID NO: 40124 - RNA, 22 nt, Human
aucaaaguccaucagaagguag

SEQ ID NO: 40125 - RNA, 22 nt, Human
aucaaaguggaaguuuacuagg

SEQ ID NO: 40126 - RNA, 22 nt, Human
aucaaagugguuuucugugcuu

SEQ ID NO: 40127 - RNA, 22 nt, Human
aucaaauacaaagggcauaagg

SEQ ID NO: 40128 - RNA, 22 nt, Human
aucaaaucauugcauuaauguu

SEQ ID NO: 40129 - RNA, 22 nt, Human
aucaacauacugcucaggcauu

SEQ ID NO: 40130 - RNA, 22 nt, Human
aucaacauaugcaugggaaagu

SEQ ID NO: 40131 - RNA, 22 nt, Human
aucaacauggcaaugcccaucu

SEQ ID NO: 40132 - RNA, 21 nt, Human
aucaacauugaaagagcugga

SEQ ID NO: 40133 - RNA, 22 nt, Human
aucaagaaaagugcuuucggcu

SEQ ID NO: 40134 - RNA, 22 nt, Human
aucaagaguuauauuucauagu

SEQ ID NO: 40135 - RNA, 23 nt, Human
aucaagauaauccagaugaccua

SEQ ID NO: 40136 - RNA, 22 nt, Human
aucaagcuacuugucuucguuu

SEQ ID NO: 40137 - RNA, 18 nt, Human
aucaaggaggggaagguc

SEQ ID NO: 40138 - RNA, 22 nt, Human
aucaagugaagggcucuugaag

SEQ ID NO: 40139 - RNA, 22 nt, Human
aucaaugcucuguacccagaau

SEQ ID NO: 40140 - RNA, 22 nt, Human
aucacaaaggcugcuucaugau

SEQ ID NO: 40141 - RNA, 22 nt, Human
aucacaaucccucucucugaua

SEQ ID NO: 40142 - RNA, 22 nt, Human
aucacacuuuuguaaccaucag

SEQ ID NO: 40143 - RNA, 22 nt, Human
aucacagagcucccuuccacug

SEQ ID NO: 40144 - RNA, 22 nt, Human
aucacagauuugauacuuuugu

SEQ ID NO: 40145 - RNA, 22 nt, Human
aucacagggugaggauuagacc

SEQ ID NO: 40146 - RNA, 22 nt, Human
aucacaguggcagggauuuggg

SEQ ID NO: 40147 - RNA, 22 nt, Human
aucacaucgaggagcaaucaga

SEQ ID NO: 40148 - RNA, 19 nt, Human
aucacaugucaagagcagg

SEQ ID NO: 40149 - RNA, 22 nt, Human
aucacauuacaaaggacuccag

SEQ ID NO: 40150 - RNA, 22 nt, Human
aucacauuauguagugaaaagg

SEQ ID NO: 40151 - RNA, 22 nt, Human
aucacauuuauaguggcacgca

SEQ ID NO: 40152 - RNA, 22 nt, Human
aucaccacuacaaacaucauug

SEQ ID NO: 40153 - RNA, 21 nt, Human
aucaccagcagaagcugcaga

SEQ ID NO: 40154 - RNA, 23 nt, Human
aucaccagcggaagcugcagacc

SEQ ID NO: 40155 - RNA, 22 nt, Human
aucaccugcacaaauguguucc

SEQ ID NO: 40156 - RNA, 19 nt, Human
aucaccugguguuuccuug

SEQ ID NO: 40157 - RNA, 22 nt, Human
aucacuagaguuacauugccag

SEQ ID NO: 40158 - RNA, 22 nt, Human
aucacugaaugcaaagcuggga

SEQ ID NO: 40159 - RNA, 22 nt, Human
aucacuuugguaccaauucagc

SEQ ID NO: 40160 - RNA, 22 nt, Human
aucagaaaaacauaauguuauu

SEQ ID NO: 40161 - RNA, 22 nt, Human
aucagaaaguucaucauguuug

SEQ ID NO: 40162 - RNA, 22 nt, Human
aucagaaauugcuaccagugga

SEQ ID NO: 40163 - RNA, 20 nt, Human
aucagaagugauauuaacca

SEQ ID NO: 40164 - RNA, 22 nt, Human
aucagaaucauuucaucccuau

SEQ ID NO: 40165 - RNA, 22 nt, Human
aucagaaucuucugaacagugg

SEQ ID NO: 40166 - RNA, 22 nt, Human
aucagacagggaguucuguguc

SEQ ID NO: 40167 - RNA, 22 nt, Human
aucagacucugcauugcagucu

SEQ ID NO: 40168 - RNA, 20 nt, Human
aucagacuugcauuucagga

SEQ ID NO: 40169 - RNA, 20 nt, Human
aucagacuuuuaggaacaua

SEQ ID NO: 40170 - RNA, 22 nt, Human
aucagagcacugagcaggacac

SEQ ID NO: 40171 - RNA, 22 nt, Human
aucagagcccugaugacagacu

SEQ ID NO: 40172 - RNA, 22 nt, Human
aucagagggugagauggagaaa

SEQ ID NO: 40173 - RNA, 22 nt, Human
aucagagguuauguggagggga

SEQ ID NO: 40174 - RNA, 22 nt, Human
aucagagugggucuggcaugag

SEQ ID NO: 40175 - RNA, 22 nt, Human
aucagauauuuaaguuaucaac

SEQ ID NO: 40176 - RNA, 22 nt, Human
aucagcaaaaaugccuucagaa

SEQ ID NO: 40177 - RNA, 22 nt, Human
auccuugaacuuagacacuagg

SEQ ID NO: 40178 - RNA, 22 nt, Human
auccuugagccaaugacugauu

SEQ ID NO: 40179 - RNA, 22 nt, Human
auccuugggaagagaggaauau

SEQ ID NO: 40180 - RNA, 18 nt, Human
auccuuggggcugcugcu

SEQ ID NO: 40181 - RNA, 22 nt, Human
auccuugguaagagaguuggau

SEQ ID NO: 40182 - RNA, 22 nt, Human
auccuuuaaguuaauaaaauuc

SEQ ID NO: 40183 - RNA, 22 nt, Human
auccuuucaucugguaauauau

SEQ ID NO: 40184 - RNA, 22 nt, Human
aucgaggaaaggacaguuccuu

SEQ ID NO: 40185 - RNA, 22 nt, Human
aucgaggagaguugguuuguuu

SEQ ID NO: 40186 - RNA, 22 nt, Human
aucgaugcugacuucuuguuau

SEQ ID NO: 40187 - RNA, 22 nt, Human
aucgcauuugagcaaucuuuuc

SEQ ID NO: 40188 - RNA, 22 nt, Human
aucgccaauggggaggaaagaa

SEQ ID NO: 40189 - RNA, 22 nt, Human
aucguaaagcccuauggcuuca

SEQ ID NO: 40190 - RNA, 22 nt, Human
aucuaaacccuacuuucuuucu

SEQ ID NO: 40191 - RNA, 23 nt, Human
aucuaaaguguuaaauagcuggg

SEQ ID NO: 40192 - RNA, 22 nt, Human
aucuaaaguguuucaugaaaga

SEQ ID NO: 40193 - RNA, 22 nt, Human
aucuaacacuguaaacugucuu

SEQ ID NO: 40194 - RNA, 22 nt, Human
aucuaacugggcuauuuuauug

SEQ ID NO: 40195 - RNA, 16 nt, Human
aucuaagaugugcauu

SEQ ID NO: 40196 - RNA, 22 nt, Human
aucuacaaccccucaaacugug

SEQ ID NO: 40197 - RNA, 22 nt, Human
aucuacaagagguucuccucuc

SEQ ID NO: 40198 - RNA, 19 nt, Human
aucuacaauuauucucagu

SEQ ID NO: 40199 - RNA, 22 nt, Human
aucuacagcagugccagguagc

SEQ ID NO: 40200 - RNA, 22 nt, Human
aucuacucaguaacugcuuagg

SEQ ID NO: 40201 - RNA, 22 nt, Human
aucuagaaaaggugacuaaaau

SEQ ID NO: 40202 - RNA, 23 nt, Human
aucuagaaaccugaugacucugu

SEQ ID NO: 40203 - RNA, 22 nt, Human
aucuagaaaguguugaagauca

SEQ ID NO: 40204 - RNA, 22 nt, Human
aucuagaagccugagccaagau

SEQ ID NO: 40205 - RNA, 22 nt, Human
aucuagacaucugaaacauuua

SEQ ID NO: 40206 - RNA, 22 nt, Human
aucuagaggcaaugaaggaggu

SEQ ID NO: 40207 - RNA, 22 nt, Human
aucuagauuagguauaagagcu

SEQ ID NO: 40208 - RNA, 19 nt, Human
aucuagauuauugagaagg

SEQ ID NO: 40209 - RNA, 22 nt, Human
aucuagcaguguuauaauugga

SEQ ID NO: 40210 - RNA, 22 nt, Human
aucuagcaguucauugugcuau

SEQ ID NO: 40211 - RNA, 22 nt, Human
aucuauaucaugggguaaggua

SEQ ID NO: 40212 - RNA, 22 nt, Human
aucuaucccaguuuaacucauu

SEQ ID NO: 40213 - RNA, 22 nt, Human
aucuauuaugcugagaaacugu

SEQ ID NO: 40214 - RNA, 22 nt, Human
aucuauuucugcuaauaacaau

SEQ ID NO: 40215 - RNA, 22 nt, Human
aucucaaacaucuuugaccaua

SEQ ID NO: 40216 - RNA, 22 nt, Human
aucucaaagcauggagcagaau

SEQ ID NO: 40217 - RNA, 22 nt, Human
aucucaacaucccuauggagug

SEQ ID NO: 40218 - RNA, 19 nt, Human
aucucaacccuacucucug

SEQ ID NO: 40219 - RNA, 21 nt, Human
aucucacagcccagagaagcc

SEQ ID NO: 40220 - RNA, 22 nt, Human
aucucacauccucaguagugca

SEQ ID NO: 40221 - RNA, 22 nt, Human
cagacauccagguacgagcuuu

SEQ ID NO: 40222 - RNA, 22 nt, Human
cagacaucuguacccagccugu

SEQ ID NO: 40223 - RNA, 22 nt, Human
cagacaucuuuuaucuucagga

SEQ ID NO: 40224 - RNA, 22 nt, Human
cagacaugauguaagcagaggc

SEQ ID NO: 40225 - RNA, 22 nt, Human
cagacccaggauccaaauguug

SEQ ID NO: 40226 - RNA, 21 nt, Human
cagacccucuagaggccaccu

SEQ ID NO: 40227 - RNA, 20 nt, Human
cagaccugcacccacuucga

SEQ ID NO: 40228 - RNA, 22 nt, Human
cagaccugggucccuggccugu

SEQ ID NO: 40229 - RNA, 22 nt, Human
cagacucugaugcagccuugug

SEQ ID NO: 40230 - RNA, 22 nt, Human
cagacugagggcaucacauacg

SEQ ID NO: 40231 - RNA, 22 nt, Human
cagacuguagaguuugagaagu

SEQ ID NO: 40232 - RNA, 22 nt, Human
cagacugugucugaaccugguc

SEQ ID NO: 40233 - RNA, 22 nt, Human
cagacuuaccuaaggucacaca

SEQ ID NO: 40234 - RNA, 22 nt, Human
cagacuuuugacauuaauacag

SEQ ID NO: 40235 - RNA, 22 nt, Human
cagagaacauucagagcuguag

SEQ ID NO: 40236 - RNA, 22 nt, Human
cagagaacuuagcuaguuuucc

SEQ ID NO: 40237 - RNA, 22 nt, Human
cagagaagagucuggccucucu

SEQ ID NO: 40238 - RNA, 22 nt, Human
cagagacaacaaguuuaacuau

SEQ ID NO: 40239 - RNA, 22 nt, Human
cagagacaaugucucugcuugu

SEQ ID NO: 40240 - RNA, 22 nt, Human
cagagacagccugggagggaca

SEQ ID NO: 40241 - RNA, 22 nt, Human
cagagacauccauuuuauaugc

SEQ ID NO: 40242 - RNA, 22 nt, Human
cagagacauucuccccauugga

SEQ ID NO: 40243 - RNA, 20 nt, Human
cagagacccaggcuucagcu

SEQ ID NO: 40244 - RNA, 22 nt, Human
cagagaccccuggcaugguggu

SEQ ID NO: 40245 - RNA, 22 nt, Human
cagagacuggagugcaguggcg

SEQ ID NO: 40246 - RNA, 22 nt, Human
cagagagaggccacugcuauua

SEQ ID NO: 40247 - RNA, 22 nt, Human
cagagagagugggguguggauu

SEQ ID NO: 40248 - RNA, 22 nt, Human
cagagagcaugggaggcccgag

SEQ ID NO: 40249 - RNA, 21 nt, Human
cagagagcuagaacuucauga

SEQ ID NO: 40250 - RNA, 22 nt, Human
cagagagcuugcccuuguauau

SEQ ID NO: 40251 - RNA, 22 nt, Human
cagagaggauggauuccauagc

SEQ ID NO: 40252 - RNA, 22 nt, Human
cagagaugugauccagcugucu

SEQ ID NO: 40253 - RNA, 22 nt, Human
cagagauuauuauaacuaauua

SEQ ID NO: 40254 - RNA, 20 nt, Human
cagagauuuuacuuccucac

SEQ ID NO: 40255 - RNA, 22 nt, Human
cagagauuuuuaugcacaccaa

SEQ ID NO: 40256 - RNA, 22 nt, Human
cagagcaacacccuuuacaucg

SEQ ID NO: 40257 - RNA, 22 nt, Human
cagagcacacaugcauagagug

SEQ ID NO: 40258 - RNA, 22 nt, Human
cagagcacccaaggagcauuug

SEQ ID NO: 40259 - RNA, 22 nt, Human
cagagcagaaaccugggugauu

SEQ ID NO: 40260 - RNA, 22 nt, Human
cagagcagaagguccaagccug

SEQ ID NO: 40261 - RNA, 22 nt, Human
cagagcagccuccagggggagc

SEQ ID NO: 40262 - RNA, 21 nt, Human
cagagcagcguucugcugugg

SEQ ID NO: 40263 - RNA, 22 nt, Human
cagagcaggaauaggguguuga

SEQ ID NO: 40264 - RNA, 22 nt, Human
cagagcagguaucuuuggugaa

SEQ ID NO: 40265 - RNA, 22 nt, Human
cagagcaguaaaucuggggcac

SEQ ID NO: 40266 - RNA, 22 nt, Human
cagagcaguccuugucaaucag

SEQ ID NO: 40267 - RNA, 22 nt, Human
cagagcaucgcgcagagagccu

SEQ ID NO: 40268 - RNA, 22 nt, Human
cagagcauuaaaaccagcucug

SEQ ID NO: 40269 - RNA, 22 nt, Human
cagagccaaaccucagggcccg

SEQ ID NO: 40270 - RNA, 22 nt, Human
cagagccaaaugcugugguuau

SEQ ID NO: 40271 - RNA, 21 nt, Human
cagagccagacugcugaauuu

SEQ ID NO: 40272 - RNA, 22 nt, Human
cagagccagcaguggggacagg

SEQ ID NO: 40273 - RNA, 20 nt, Human
cagagccaggguuuuguuuu

SEQ ID NO: 40274 - RNA, 22 nt, Human
cagagccaucaugauauggagu

SEQ ID NO: 40275 - RNA, 22 nt, Human
cagagcccagggccuacguccc

SEQ ID NO: 40276 - RNA, 22 nt, Human
cagagcccauccuauacucucc

SEQ ID NO: 40277 - RNA, 22 nt, Human
cagagcccucaaggccgaugca

SEQ ID NO: 40278 - RNA, 22 nt, Human
cagagcccugugugccauguga

SEQ ID NO: 40279 - RNA, 22 nt, Human
cagagccuaaaacgacuccacu

SEQ ID NO: 40280 - RNA, 22 nt, Human
cagagccucuaaaauuucuauc

SEQ ID NO: 40281 - RNA, 22 nt, Human
cagagccucucagccccuuggg

SEQ ID NO: 40282 - RNA, 22 nt, Human
cagagccugccaccuuucuccc

SEQ ID NO: 40283 - RNA, 22 nt, Human
cagagccugccucuggcugugg

SEQ ID NO: 40284 - RNA, 22 nt, Human
cagagccuuaguucuccuagaa

SEQ ID NO: 40285 - RNA, 19 nt, Human
cagagccuucagugacucc

SEQ ID NO: 40286 - RNA, 22 nt, Human
aagcccauaaaaagaggucccu

SEQ ID NO: 40287 - RNA, 22 nt, Human
aagcccuggauagagagaacug

SEQ ID NO: 40288 - RNA, 22 nt, Human
aagcccugucacccugacuuca

SEQ ID NO: 40289 - RNA, 22 nt, Human
aagcccuuggcgcacaccgggc

SEQ ID NO: 40290 - RNA, 22 nt, Human
aagccgggccugagaaaugaca

SEQ ID NO: 40291 - RNA, 22 nt, Human
aagccuggacuaucgcgugugc

SEQ ID NO: 40292 - RNA, 22 nt, Human
aagccuuaaauguuucuaauau

SEQ ID NO: 40293 - RNA, 22 nt, Human
aagccuuauggggacaguuuug

SEQ ID NO: 40294 - RNA, 22 nt, Human
aagccuucagaguuggcugguc

SEQ ID NO: 40295 - RNA, 22 nt, Human
aagccuucccuuuuugagcuca

SEQ ID NO: 40296 - RNA, 22 nt, Human
aagccuuggggcuccucuguau

SEQ ID NO: 40297 - RNA, 22 nt, Human
aagccuuuuccaccuaauagag

SEQ ID NO: 40298 - RNA, 22 nt, Human
aagcaggagagccugggugagc

SEQ ID NO: 40299 - RNA, 22 nt, Human
aagcaggagaugggugcuuuuc

SEQ ID NO: 40300 - RNA, 22 nt, Human
aagcaggcaagguuguggggca

SEQ ID NO: 40301 - RNA, 22 nt, Human
aagcaggcccugggccagggga

SEQ ID NO: 40302 - RNA, 22 nt, Human
aagcaggcuagauugaagggcu

SEQ ID NO: 40303 - RNA, 23 nt, Human
aagcagggagauucuuagcugag

SEQ ID NO: 40304 - RNA, 22 nt, Human
aagcagggcucccuggggacuc

SEQ ID NO: 40305 - RNA, 22 nt, Human
aagcaguagaaugcauugcuuu

SEQ ID NO: 40306 - RNA, 20 nt, Human
aagcagugaggugaggagug

SEQ ID NO: 40307 - RNA, 22 nt, Human
aagcaguuacuauuuacuauua

SEQ ID NO: 40308 - RNA, 22 nt, Human
aagcauaaaacguuacaacaug

SEQ ID NO: 40309 - RNA, 22 nt, Human
aagcauagagacacaaauuugg

SEQ ID NO: 40310 - RNA, 22 nt, Human
aagcaucuaggugacugacaua

SEQ ID NO: 40311 - RNA, 22 nt, Human
aagcaucuauagguucuaggag

SEQ ID NO: 40312 - RNA, 22 nt, Human
aagcaucucauucuugccuguc

SEQ ID NO: 40313 - RNA, 22 nt, Human
aagcaucucuauguggagagug

SEQ ID NO: 40314 - RNA, 19 nt, Human
aagcauggugccucaccuc

SEQ ID NO: 40315 - RNA, 22 nt, Human
aagcaugguggaugauacagug

SEQ ID NO: 40316 - RNA, 22 nt, Human
aagcaugguuucugacgucaug

SEQ ID NO: 40317 - RNA, 22 nt, Human
aagcaugucccuugugauucaa

SEQ ID NO: 40318 - RNA, 22 nt, Human
aagcauucugcauuuucaaaga

SEQ ID NO: 40319 - RNA, 16 nt, Human
aagcauuggaauuagg

SEQ ID NO: 40320 - RNA, 22 nt, Human
aagcauuguaagcagaagaugc

SEQ ID NO: 40321 - RNA, 22 nt, Human
aagcauuuauagauaagaauuu

SEQ ID NO: 40322 - RNA, 22 nt, Human
aagcauuucaauauaauauuca

SEQ ID NO: 40323 - RNA, 22 nt, Human
aagcauuuuagauaaagcauca

SEQ ID NO: 40324 - RNA, 22 nt, Human
aagccaaggccugucuggggcu

SEQ ID NO: 40325 - RNA, 22 nt, Human
aagccaaucgugugaacuuagu

SEQ ID NO: 40326 - RNA, 22 nt, Human
aagccacuauuaaauaaugauu

SEQ ID NO: 40327 - RNA, 22 nt, Human
aagccacugagauuucacugca

SEQ ID NO: 40328 - RNA, 22 nt, Human
aagccagaucaaaguguccagg

SEQ ID NO: 40329 - RNA, 21 nt, Human
aagccagcccacagugguuug

SEQ ID NO: 40330 - RNA, 22 nt, Human
aagccaggaauggagucuucgc

SEQ ID NO: 40331 - RNA, 22 nt, Human
aagccaggaccaaacucauccu

SEQ ID NO: 40332 - RNA, 22 nt, Human
aagccaggauaaaguuguuuua

SEQ ID NO: 40333 - RNA, 22 nt, Human
aagccaggcugcacuugcuggg

SEQ ID NO: 40334 - RNA, 22 nt, Human
aagccagggauggaaugauagg

SEQ ID NO: 40335 - RNA, 22 nt, Human
aagccagggauuccugagggag

SEQ ID NO: 40336 - RNA, 22 nt, Human
aagccaggggcugcuuaggaga

SEQ ID NO: 40337 - RNA, 22 nt, Human
aagccaguaaguuuuugucauu

SEQ ID NO: 40338 - RNA, 22 nt, Human
aagccaguguccagaaugggca

SEQ ID NO: 40339 - RNA, 22 nt, Human
aagccagugugacaggaaacuu

SEQ ID NO: 40340 - RNA, 22 nt, Human
aagccaguguuuuugagaguug

SEQ ID NO: 40341 - RNA, 22 nt, Human
aagccauggcaugccaggauca

SEQ ID NO: 40342 - RNA, 22 nt, Human
aagccauucaucuaauguccug

SEQ ID NO: 40343 - RNA, 22 nt, Human
aagcccagaugagaucccugga

SEQ ID NO: 40344 - RNA, 22 nt, Human
aagcccagaugugagaacugag

SEQ ID NO: 40345 - RNA, 22 nt, Human
aagcccagcaucccugcaccag

SEQ ID NO: 40346 - RNA, 22 nt, Human
aagcccagcugaaagcauuuuu

SEQ ID NO: 40347 - RNA, 20 nt, Human
aagcccauuaccaugcuugg

SEQ ID NO: 40348 - RNA, 22 nt, Human
aagcccuccguacgugcuagcu

SEQ ID NO: 40349 - RNA, 23 nt, Human
aagcccugaagguuucaggcccu

SEQ ID NO: 40350 - RNA, 22 nt, Human
aagcccugagcacugcagagaa

SEQ ID NO: 40351 - RNA, 22 nt, Human
aagcccugcagucucugccaca

SEQ ID NO: 40352 - RNA, 22 nt, Human
aagcccuggcaaugucagauga

SEQ ID NO: 40353 - RNA, 22 nt, Human
aagcccugggauguucagcagu

SEQ ID NO: 40354 - RNA, 22 nt, Human
aagcccuguaaauugcccuuaa

SEQ ID NO: 40355 - RNA, 22 nt, Human
aagcccuguccggggggaagaa

SEQ ID NO: 40356 - RNA, 22 nt, Human
aagcccuguucuuucucucacc

SEQ ID NO: 40357 - RNA, 22 nt, Human
aagcccuuuucaagauacaaca

SEQ ID NO: 40358 - RNA, 21 nt, Human
aagccucaagcagaagacaga

SEQ ID NO: 40359 - RNA, 22 nt, Human
aagccuccuuauuaaaggauau

SEQ ID NO: 40360 - RNA, 22 nt, Human
aagccucuggggccucaucugu

SEQ ID NO: 40361 - RNA, 22 nt, Human
aagccuggcacauuggagucug

SEQ ID NO: 40362 - RNA, 22 nt, Human
aagccuugccuauuugaugaca

SEQ ID NO: 40363 - RNA, 22 nt, Human
aagccuugcucuugaaaaaguu

SEQ ID NO: 40364 - RNA, 22 nt, Human
aagcgacugcagguuaaaacaa

SEQ ID NO: 40365 - RNA, 22 nt, Human
aagcgccaugguuccugcgcag

SEQ ID NO: 40366 - RNA, 22 nt, Human
aagcggagcauuugaacuugaa

SEQ ID NO: 40367 - RNA, 22 nt, Human
aagcuaagauuacagauuuggg

SEQ ID NO: 40368 - RNA, 22 nt, Human
aagcuaaguauaggugaauccu

SEQ ID NO: 40369 - RNA, 22 nt, Human
aagcuaauagccaguuuucuuc

SEQ ID NO: 40370 - RNA, 22 nt, Human
aagcuacaauguguuuuugaaa

SEQ ID NO: 40371 - RNA, 19 nt, Human
aagcuacagcccaggucug

SEQ ID NO: 40372 - RNA, 22 nt, Human
aagcuagauuggcauucauuuc

SEQ ID NO: 40373 - RNA, 22 nt, Human
aagcuauacaaugcacaaauga

SEQ ID NO: 40374 - RNA, 22 nt, Human
aagcuauugaauuuauagcaua

SEQ ID NO: 40375 - RNA, 22 nt, Human
aagcuccuuuggcucgagaucu

SEQ ID NO: 40376 - RNA, 22 nt, Human
aagcucucuguccccuggacug

SEQ ID NO: 40377 - RNA, 22 nt, Human
aagcucugaggugagcaaucgg

SEQ ID NO: 40378 - RNA, 22 nt, Human
aagcucugguuaaaaggccugg

SEQ ID NO: 40379 - RNA, 22 nt, Human
aagcucuuguugaaucuuguca

SEQ ID NO: 40380 - RNA, 22 nt, Human
aagcugaaaaugagacucuaca

SEQ ID NO: 40381 - RNA, 22 nt, Human
aagcugaaauaauaucuauguu

SEQ ID NO: 40382 - RNA, 22 nt, Human
aagcugaagccggaucaaaaag

SEQ ID NO: 40383 - RNA, 22 nt, Human
aagcugagccaguggcaagugc

SEQ ID NO: 40384 - RNA, 22 nt, Human
aagcugcaaggaagugugccag

SEQ ID NO: 40385 - RNA, 22 nt, Human
aagcugcacuacuugagggacc

SEQ ID NO: 40386 - RNA, 22 nt, Human
aagcugcagaugugccugugga

SEQ ID NO: 40387 - RNA, 22 nt, Human
aagcugccaaugguaagcugcu

SEQ ID NO: 40388 - RNA, 22 nt, Human
aagcugccagauucagucugcu

SEQ ID NO: 40389 - RNA, 22 nt, Human
aagcugccauagaacgagaggu

SEQ ID NO: 40390 - RNA, 22 nt, Human
aagcugcccaagacugaagcau

SEQ ID NO: 40391 - RNA, 23 nt, Human
aagcugccuucgcaguuggucug

SEQ ID NO: 40392 - RNA, 22 nt, Human
aagcuggccuguaccugcugag

SEQ ID NO: 40393 - RNA, 18 nt, Human
aagcugggaaggagacag

SEQ ID NO: 40394 - RNA, 22 nt, Human
aagcugucaggagguuaccuuu

SEQ ID NO: 40395 - RNA, 22 nt, Human
aaggaguggggcauaucacaga

SEQ ID NO: 40396 - RNA, 22 nt, Human
aaggauacuuuuagagccugag

SEQ ID NO: 40397 - RNA, 17 nt, Human
aaggauauuauaguucu

SEQ ID NO: 40398 - RNA, 22 nt, Human
aaggauauuuggcuacagaagc

SEQ ID NO: 40399 - RNA, 22 nt, Human
aaggaugauugguaaugacacu

SEQ ID NO: 40400 - RNA, 22 nt, Human
aaggaugcagggacccaaggcu

SEQ ID NO: 40401 - RNA, 22 nt, Human
aaggaugucagucauuuuggau

SEQ ID NO: 40402 - RNA, 22 nt, Human
aaggauguggcauuuuucauau

SEQ ID NO: 40403 - RNA, 22 nt, Human
aaggauucaagaaaugguguag

SEQ ID NO: 40404 - RNA, 22 nt, Human
aaggauuuuuggaaugagaugg

SEQ ID NO: 40405 - RNA, 22 nt, Human
aaggcaagguucaccgugcuau

SEQ ID NO: 40406 - RNA, 22 nt, Human
aaggcaauaguauuaaacugga

SEQ ID NO: 40407 - RNA, 22 nt, Human
aaggcaauaucaagagaauucg

SEQ ID NO: 40408 - RNA, 22 nt, Human
aaggcaauggcaagagaaagca

SEQ ID NO: 40409 - RNA, 22 nt, Human
aaggcaaugguuucugugccuu

SEQ ID NO: 40410 - RNA, 22 nt, Human
aaggcaauguaaauuacagcuu

SEQ ID NO: 40411 - RNA, 22 nt, Human
aaggcaauugagaagaaacaga

SEQ ID NO: 40412 - RNA, 22 nt, Human
aaggcacaacacaagaggguga

SEQ ID NO: 40413 - RNA, 18 nt, Human
aaggcacaggagaacauu

SEQ ID NO: 40414 - RNA, 22 nt, Human
aaggcacauuccugaaaacaau

SEQ ID NO: 40415 - RNA, 22 nt, Human
aaggcugacguuuguguuuauu

SEQ ID NO: 40416 - RNA, 22 nt, Human
aaggcugaggagggccugcagg

SEQ ID NO: 40417 - RNA, 22 nt, Human
aaggcugagggcuguaccuggc

SEQ ID NO: 40418 - RNA, 16 nt, Human
aaggcugauuuucccu

SEQ ID NO: 40419 - RNA, 22 nt, Human
aaggcugccucugccagaggag

SEQ ID NO: 40420 - RNA, 22 nt, Human
aaggcuggaccuggaugaaucu

SEQ ID NO: 40421 - RNA, 22 nt, Human
aaggcuggcaauauauuuguua

SEQ ID NO: 40422 - RNA, 22 nt, Human
aaggcuggguaaccuguccacu

SEQ ID NO: 40423 - RNA, 22 nt, Human
aaggcugguggauuaugagguc

SEQ ID NO: 40424 - RNA, 22 nt, Human
aaggcuguuugagcacuggagc

SEQ ID NO: 40425 - RNA, 18 nt, Human
aaggcuucaaagaguaga

SEQ ID NO: 40426 - RNA, 22 nt, Human
aaggcuuccacuuuguuggguc

SEQ ID NO: 40427 - RNA, 19 nt, Human
aaggcuuggcugagcuggg

SEQ ID NO: 40428 - RNA, 22 nt, Human
aaggcuuguugucacgcucuug

SEQ ID NO: 40429 - RNA, 19 nt, Human
aaggcuuucugagugaaaa

SEQ ID NO: 40430 - RNA, 22 nt, Human
aaggcuuugauuccauugcccu

SEQ ID NO: 40431 - RNA, 22 nt, Human
aaggcuuugugcugaguugucg

SEQ ID NO: 40432 - RNA, 22 nt, Human
aaggcuuuuguuccuauuuagu

SEQ ID NO: 40433 - RNA, 22 nt, Human
aagggaaaauaguugaugacca

SEQ ID NO: 40434 - RNA, 22 nt, Human
aagggaaaucauauggugcagu

SEQ ID NO: 40435 - RNA, 22 nt, Human
aagggacuuugucagcuuucca

SEQ ID NO: 40436 - RNA, 22 nt, Human
aagggagaaagaaugaguuuag

SEQ ID NO: 40437 - RNA, 21 nt, Human
aagggagauaggaaucaggcc

SEQ ID NO: 40438 - RNA, 22 nt, Human
aagggagcaaauggacagacgg

SEQ ID NO: 40439 - RNA, 22 nt, Human
aagggauguaaacaugaauaag

SEQ ID NO: 40440 - RNA, 22 nt, Human
aagggcagaaagggacgcuuug

SEQ ID NO: 40441 - RNA, 22 nt, Human
aagggcagaauagagaagaugg

SEQ ID NO: 40442 - RNA, 22 nt, Human
aagggcagccugacucacgguc

SEQ ID NO: 40443 - RNA, 22 nt, Human
aagggcagcuuaaauugguagc

SEQ ID NO: 40444 - RNA, 22 nt, Human
aagggcagggaguuugugucua

SEQ ID NO: 40445 - RNA, 22 nt, Human
aagggcaggugggcauuucugg

SEQ ID NO: 40446 - RNA, 22 nt, Human
aagggccagggcucuagagaua

SEQ ID NO: 40447 - RNA, 22 nt, Human
aagggccauaacuugcaguguu

SEQ ID NO: 40448 - RNA, 22 nt, Human
aagggcuccacuugaaucacac

SEQ ID NO: 40449 - RNA, 22 nt, Human
aagggcuccauccuuauaaaug

SEQ ID NO: 40450 - RNA, 22 nt, Human
aagggcucucugcauugaaauu

SEQ ID NO: 40451 - RNA, 22 nt, Human
aagggcucugugcuugucccau

SEQ ID NO: 40452 - RNA, 22 nt, Human
aagggcucugugugccucccca

SEQ ID NO: 40453 - RNA, 18 nt, Human
aagggcuggccuuuggag

SEQ ID NO: 40454 - RNA, 19 nt, Human
aagggcugggcaccucacu

SEQ ID NO: 40455 - RNA, 22 nt, Human
aagggcuguaagccaaguaaag

SEQ ID NO: 40456 - RNA, 22 nt, Human
aagggcuguuauguuuuuauac

SEQ ID NO: 40457 - RNA, 22 nt, Human
aagggcuuuuaagauuuauccu

SEQ ID NO: 40458 - RNA, 22 nt, Human
aaggggaagagaccgcagaguc

SEQ ID NO: 40459 - RNA, 22 nt, Human
aaggggaauagaguggguugug

SEQ ID NO: 40460 - RNA, 22 nt, Human
aaggggagaugucaugggcccu

SEQ ID NO: 40461 - RNA, 23 nt, Human
aaggggauacuuccacuuucuuu

SEQ ID NO: 40462 - RNA, 22 nt, Human
aaggggauagagcagacacucc

SEQ ID NO: 40463 - RNA, 22 nt, Human
aaggggcacaauuguacccaag

SEQ ID NO: 40464 - RNA, 22 nt, Human
aaggggcucuugucaggcgcag

SEQ ID NO: 40465 - RNA, 22 nt, Human
aagggggaaauccuagcgccgc

SEQ ID NO: 40466 - RNA, 22 nt, Human
aagggggcacagucacuguaau

SEQ ID NO: 40467 - RNA, 22 nt, Human
aaggggggcaccugcaugcccg

SEQ ID NO: 40468 - RNA, 22 nt, Human
aaggggucaagcggcagcuaca

SEQ ID NO: 40469 - RNA, 22 nt, Human
aaggggugagcagaggcuucgc

SEQ ID NO: 40470 - RNA, 22 nt, Human
aaggggugcaaguuaaucagca

SEQ ID NO: 40471 - RNA, 22 nt, Human
aaggggugggcauuagagcagu

SEQ ID NO: 40472 - RNA, 22 nt, Human
aaggguccagcaccucggcucc

SEQ ID NO: 40473 - RNA, 22 nt, Human
aagggugguguaggagaucaaa

SEQ ID NO: 40474 - RNA, 22 nt, Human
aaggguuugucucccucaaggc

SEQ ID NO: 40475 - RNA, 22 nt, Human
aagguaauauuuuucucucuaa

SEQ ID NO: 40476 - RNA, 22 nt, Human
aagguaauccauaauaguuacu

SEQ ID NO: 40477 - RNA, 22 nt, Human
aagguacaccaaaguucaaguu

SEQ ID NO: 40478 - RNA, 22 nt, Human
aagguaggcucaggguuguucu

SEQ ID NO: 40479 - RNA, 22 nt, Human
aagguagguuaaccugcaggag

SEQ ID NO: 40480 - RNA, 22 nt, Human
aagguauuggcagggcugaguu

SEQ ID NO: 40481 - RNA, 22 nt, Human
aaggucacacucccagagcuga

SEQ ID NO: 40482 - RNA, 22 nt, Human
aaggucauuuuuuccucuguug

SEQ ID NO: 40483 - RNA, 22 nt, Human
aagguccacaacugguaaaugg

SEQ ID NO: 40484 - RNA, 22 nt, Human
aagguccuguagccacagagcc

SEQ ID NO: 40485 - RNA, 18 nt, Human
aaggucugucugguaggu

SEQ ID NO: 40486 - RNA, 22 nt, Human
aaggucuguggccaccucuggg

SEQ ID NO: 40487 - RNA, 22 nt, Human
aaggucuguucuaggugagggu

SEQ ID NO: 40488 - RNA, 22 nt, Human
aaggugaacugguaaugacaga

SEQ ID NO: 40489 - RNA, 22 nt, Human
aaggugcucguuauggccagug

SEQ ID NO: 40490 - RNA, 22 nt, Human
aagguggcccugagcaugacaa

SEQ ID NO: 40491 - RNA, 22 nt, Human
aagguggcgcuggagcuggucc

SEQ ID NO: 40492 - RNA, 22 nt, Human
aaggugggcagaucacaagguc

SEQ ID NO: 40493 - RNA, 22 nt, Human
aaggugguaauagugcaggauu

SEQ ID NO: 40494 - RNA, 22 nt, Human
aaggugguuugauuaucccacu

SEQ ID NO: 40495 - RNA, 22 nt, Human
aaggugguuugcagacagaaua

SEQ ID NO: 40496 - RNA, 22 nt, Human
aaggugguuugcuaaucccaac

SEQ ID NO: 40497 - RNA, 19 nt, Human
aaggugguuugucucugua

SEQ ID NO: 40498 - RNA, 22 nt, Human
aaggugucacugggacaggaaa

SEQ ID NO: 40499 - RNA, 22 nt, Human
aaggugucacuguuucuggccu

SEQ ID NO: 40500 - RNA, 19 nt, Human
aaggugucccaacugcguu

SEQ ID NO: 40501 - RNA, 22 nt, Human
aaggugugcugugagaccuggu

SEQ ID NO: 40502 - RNA, 23 nt, Human
aagguguuuguuuucagaaagca

SEQ ID NO: 40503 - RNA, 22 nt, Human
aagguuuauuaaauguugcaug

SEQ ID NO: 40504 - RNA, 22 nt, Human
aaugaguuuguucuauuauuug

SEQ ID NO: 40505 - RNA, 22 nt, Human
aaugauaccaaacauguagaua

SEQ ID NO: 40506 - RNA, 22 nt, Human
aaugauaugcaaauuaucauca

SEQ ID NO: 40507 - RNA, 20 nt, Human
aaugaucagcauagcaagga

SEQ ID NO: 40508 - RNA, 22 nt, Human
aaugaucauuauaaagugcucu

SEQ ID NO: 40509 - RNA, 21 nt, Human
aaugaugaaagaugacagagu

SEQ ID NO: 40510 - RNA, 22 nt, Human
aaugaugaacucagagggaacc

SEQ ID NO: 40511 - RNA, 22 nt, Human
aaugaugacaggauaaagaaca

SEQ ID NO: 40512 - RNA, 22 nt, Human
aaugaugggaaggagaaaagca

SEQ ID NO: 40513 - RNA, 22 nt, Human
aaugaugguuaaacacuggagg

SEQ ID NO: 40514 - RNA, 22 nt, Human
aaugaugguuucaucacuugaa

SEQ ID NO: 40515 - RNA, 22 nt, Human
aaugaugucgaaaaguaagcuc

SEQ ID NO: 40516 - RNA, 22 nt, Human
aaugauuggcacuagauacaca

SEQ ID NO: 40517 - RNA, 22 nt, Human
aaugauuuccccuacacagaag

SEQ ID NO: 40518 - RNA, 22 nt, Human
aaugcaaacuucuuguuacuug

SEQ ID NO: 40519 - RNA, 18 nt, Human
aaugcacacauuuacucc

SEQ ID NO: 40520 - RNA, 22 nt, Human
aaugcacauauauuuccuuauu

SEQ ID NO: 40521 - RNA, 22 nt, Human
aaugcacaugucuuggccucac

SEQ ID NO: 40522 - RNA, 22 nt, Human
aaugcacauguuguaauaaaua

SEQ ID NO: 40523 - RNA, 22 nt, Human
aaugcacuuaguaugaaugccu

SEQ ID NO: 40524 - RNA, 22 nt, Human
aaugcauaccaugucaucuuug

SEQ ID NO: 40525 - RNA, 22 nt, Human
aaugcauuccacugagauuugu

SEQ ID NO: 40526 - RNA, 18 nt, Human
aaugcauuuauggagaug

SEQ ID NO: 40527 - RNA, 22 nt, Human
aaugccaauauucauuuguguu

SEQ ID NO: 40528 - RNA, 22 nt, Human
aaugccguguuucuuacguuca

SEQ ID NO: 40529 - RNA, 22 nt, Human
aaugccuucaaguaucugagga

SEQ ID NO: 40530 - RNA, 22 nt, Human
aaugccuucccauuuauacuuu

SEQ ID NO: 40531 - RNA, 22 nt, Human
aaugcuaaaauggcacuaaagu

SEQ ID NO: 40532 - RNA, 22 nt, Human
aaugcuaucggcucuaagcaug

SEQ ID NO: 40533 - RNA, 22 nt, Human
aaugcucucugccauagcuaac

SEQ ID NO: 40534 - RNA, 21 nt, Human
aaugcugcccaguaagauggc

SEQ ID NO: 40535 - RNA, 22 nt, Human
aaugcuguucugagucugcagg

SEQ ID NO: 40536 - RNA, 22 nt, Human
aaugcuuaauucaauacugugu

SEQ ID NO: 40537 - RNA, 22 nt, Human
aaugcuuuaaauccuaguguaa

SEQ ID NO: 40538 - RNA, 22 nt, Human
aaugcuuuagaaaaccagcuuu

SEQ ID NO: 40539 - RNA, 22 nt, Human
aaugcuuucuuauaaccacugc

SEQ ID NO: 40540 - RNA, 22 nt, Human
aaugcuuugacuauaucuauaa

SEQ ID NO: 40541 - RNA, 22 nt, Human
aaugcuuuuacgacauguaccu

SEQ ID NO: 40542 - RNA, 22 nt, Human
aauggaacuuguaauuaugucc

SEQ ID NO: 40543 - RNA, 22 nt, Human
aauggaauaccuagguggccca

SEQ ID NO: 40544 - RNA, 22 nt, Human
aauggaaugccucacauguauu

SEQ ID NO: 40545 - RNA, 22 nt, Human
aauggaauucuccauuagaugu

SEQ ID NO: 40546 - RNA, 22 nt, Human
aauggagacuucaaaauggauu

SEQ ID NO: 40547 - RNA, 22 nt, Human
aauggagugguucuugcccucu

SEQ ID NO: 40548 - RNA, 22 nt, Human
aauggcagaggcaaagauggua

SEQ ID NO: 40549 - RNA, 22 nt, Human
aagucuuuugcuaagaguaaug

SEQ ID NO: 40550 - RNA, 22 nt, Human
aagugaauguagcaaacuugaa

SEQ ID NO: 40551 - RNA, 22 nt, Human
aagugacauaaaaucucccagg

SEQ ID NO: 40552 - RNA, 18 nt, Human
aagugacuggcaggccaa

SEQ ID NO: 40553 - RNA, 22 nt, Human
aagugaucuaaagaauauugaa

SEQ ID NO: 40554 - RNA, 22 nt, Human
aagugauuauuguuuucagguu

SEQ ID NO: 40555 - RNA, 22 nt, Human
aagugauucuagucaugauucu

SEQ ID NO: 40556 - RNA, 22 nt, Human
aagugauuguuccguugagugu

SEQ ID NO: 40557 - RNA, 22 nt, Human
aagugauuucugccugcauguu

SEQ ID NO: 40558 - RNA, 22 nt, Human
aagugcaaaucuguggcugaaa

SEQ ID NO: 40559 - RNA, 22 nt, Human
aagugcaagcaggacuuaguuu

SEQ ID NO: 40560 - RNA, 22 nt, Human
aagugcaaugaauagcugcaau

SEQ ID NO: 40561 - RNA, 22 nt, Human
aagugcaggaguggggaaagua

SEQ ID NO: 40562 - RNA, 22 nt, Human
aagugcaguggcgugaucuugg

SEQ ID NO: 40563 - RNA, 22 nt, Human
aagugcauaauaacucccaagu

SEQ ID NO: 40564 - RNA, 22 nt, Human
aagugcauauuuuuguuguaga

SEQ ID NO: 40565 - RNA, 21 nt, Human
aagugccacccacagaugcau

SEQ ID NO: 40566 - RNA, 22 nt, Human
aagugccccaggcuguuaacau

SEQ ID NO: 40567 - RNA, 22 nt, Human
aagugcuagaaccccagcaaca

SEQ ID NO: 40568 - RNA, 23 nt, Human
aagugcucaguggacagcauugc

SEQ ID NO: 40569 - RNA, 22 nt, Human
aagugcugggauuacaagcgug

SEQ ID NO: 40570 - RNA, 22 nt, Human
aagugcugggauuacagguguc

SEQ ID NO: 40571 - RNA, 22 nt, Human
aagugcuuggagcauaccuguu

SEQ ID NO: 40572 - RNA, 22 nt, Human
aagugcuuuacaaaugucuguu

SEQ ID NO: 40573 - RNA, 23 nt, Human
aagugcuuugggauggagucugg

SEQ ID NO: 40574 - RNA, 22 nt, Human
aagugcuuuuucuugagcugcu

SEQ ID NO: 40575 - RNA, 22 nt, Human
aaguggaagagaaguuaucuua

SEQ ID NO: 40576 - RNA, 22 nt, Human
aaguggcagaauaguggcagga

SEQ ID NO: 40577 - RNA, 22 nt, Human
aaguggcagccuuagaaggaga

SEQ ID NO: 40578 - RNA, 22 nt, Human
aagugguguguuggaagaaauc

SEQ ID NO: 40579 - RNA, 22 nt, Human
aagugguugcuugugagucccc

SEQ ID NO: 40580 - RNA, 22 nt, Human
aaguguagauuauggagugucu

SEQ ID NO: 40581 - RNA, 22 nt, Human
aaguguccucauucaacaugca

SEQ ID NO: 40582 - RNA, 22 nt, Human
aagugucuagcaccuggaugca

SEQ ID NO: 40583 - RNA, 22 nt, Human
aagugucuuuauauuugagaaa

SEQ ID NO: 40584 - RNA, 22 nt, Human
aagugucuuuuagccacuuuua

SEQ ID NO: 40585 - RNA, 22 nt, Human
aagugugagacacacaaaauua

SEQ ID NO: 40586 - RNA, 22 nt, Human
aaguguggggucucagagcuga

SEQ ID NO: 40587 - RNA, 22 nt, Human
aagugugguuuaggcaucuuuu

SEQ ID NO: 40588 - RNA, 22 nt, Human
aaguguguauuguuuaugcugc

SEQ ID NO: 40589 - RNA, 22 nt, Human
aagugugugagccugucaggcu

SEQ ID NO: 40590 - RNA, 22 nt, Human
aaguguguuuccgugauugagg

SEQ ID NO: 40591 - RNA, 22 nt, Human
aaguguuaaaagauuaaaugcu

SEQ ID NO: 40592 - RNA, 22 nt, Human
aaguguuaaagacuugaacacu

SEQ ID NO: 40593 - RNA, 22 nt, Human
aaguguuuaacggugauugagc

SEQ ID NO: 40594 - RNA, 22 nt, Human
aaguguuuaaugguuuugauga

SEQ ID NO: 40595 - RNA, 22 nt, Human
aaguguuucuuggaauguugcg

SEQ ID NO: 40596 - RNA, 22 nt, Human
aaguguuuggggaucauuuuaa

SEQ ID NO: 40597 - RNA, 22 nt, Human
aaguguuuuggcuucuguacac

SEQ ID NO: 40598 - RNA, 22 nt, Human
aaguuaagcauggccaugugac

SEQ ID NO: 40599 - RNA, 22 nt, Human
aaguuaaguaguacucucuuca

SEQ ID NO: 40600 - RNA, 22 nt, Human
aaguuacaagacuaaauggaag

SEQ ID NO: 40601 - RNA, 22 nt, Human
aaguuacaguuaugaaacucac

SEQ ID NO: 40602 - RNA, 20 nt, Human
aaguuacauuguauuguacc

SEQ ID NO: 40603 - RNA, 22 nt, Human
aaguuacuaugacucuucuuuu

SEQ ID NO: 40604 - RNA, 22 nt, Human
aaguuacuggcaagggcugcag

SEQ ID NO: 40605 - RNA, 22 nt, Human
aaguuagguugcauuggucauc

SEQ ID NO: 40606 - RNA, 22 nt, Human
aaguuaguggauaaacagcaaa

SEQ ID NO: 40607 - RNA, 22 nt, Human
aaguuauaucaucucauugacg

SEQ ID NO: 40608 - RNA, 22 nt, Human
aaguuaucuuugauuagaaaua

SEQ ID NO: 40609 - RNA, 22 nt, Human
aaguuauuuccucgugacugaa

SEQ ID NO: 40610 - RNA, 22 nt, Human
aaguucaaaaauguaaucagug

SEQ ID NO: 40611 - RNA, 22 nt, Human
aaguucaaggugauaguggcag

SEQ ID NO: 40612 - RNA, 22 nt, Human
aaguucaagucugcaucuuuuu

SEQ ID NO: 40613 - RNA, 22 nt, Human
aaugggaagucacuacuguuac

SEQ ID NO: 40614 - RNA, 22 nt, Human
aaugggaggauuuucucucuug

SEQ ID NO: 40615 - RNA, 22 nt, Human
aaugguaauggagagaacuacu

SEQ ID NO: 40616 - RNA, 19 nt, Human
aaugguaauuagagaaaug

SEQ ID NO: 40617 - RNA, 22 nt, Human
aaugguaucaccucacagaauu

SEQ ID NO: 40618 - RNA, 22 nt, Human
aaugguuuaacauaugcuugag

SEQ ID NO: 40619 - RNA, 22 nt, Human
aaugguuuauggggaccgcaaa

SEQ ID NO: 40620 - RNA, 19 nt, Human
aaugguuugaugaaguaua

SEQ ID NO: 40621 - RNA, 22 nt, Human
aaugguuuguaccuguccuugg

SEQ ID NO: 40622 - RNA, 22 nt, Human
aaugguuuugcuuuaguauucu

SEQ ID NO: 40623 - RNA, 22 nt, Human
aauguacaaaagucagccaacu

SEQ ID NO: 40624 - RNA, 22 nt, Human
aauguaccagccuaagaagugg

SEQ ID NO: 40625 - RNA, 21 nt, Human
aauguauaacagagcccauca

SEQ ID NO: 40626 - RNA, 22 nt, Human
aauguaugaagguuccaguuuc

SEQ ID NO: 40627 - RNA, 22 nt, Human
aauguaugacaguucuaguggu

SEQ ID NO: 40628 - RNA, 22 nt, Human
aauguaugcugugguaucuucu

SEQ ID NO: 40629 - RNA, 22 nt, Human
aauguauggauucaugucugug

SEQ ID NO: 40630 - RNA, 22 nt, Human
aauguaugugcaucauuuacau

SEQ ID NO: 40631 - RNA, 22 nt, Human
aauguauguguauaucaaauca

SEQ ID NO: 40632 - RNA, 22 nt, Human
aauguauuugauguauuagccu

SEQ ID NO: 40633 - RNA, 22 nt, Human
aauguauuuugggaguuucuuu

SEQ ID NO: 40634 - RNA, 22 nt, Human
aaugucaacacaagagaaaugc

SEQ ID NO: 40635 - RNA, 22 nt, Human
aaugucauugagcuccaauccu

SEQ ID NO: 40636 - RNA, 22 nt, Human
aaugucauugugaguuaggcuu

SEQ ID NO: 40637 - RNA, 22 nt, Human
aauguccuaggcaugauuuugu

SEQ ID NO: 40638 - RNA, 22 nt, Human
aaugucuagacauguuaaugca

SEQ ID NO: 40639 - RNA, 22 nt, Human
aaugucuaugauccuuuaaguu

SEQ ID NO: 40640 - RNA, 22 nt, Human
aaugucugcucuacucaggagg

SEQ ID NO: 40641 - RNA, 22 nt, Human
aaugucugucugcacguugcuu

SEQ ID NO: 40642 - RNA, 22 nt, Human
aaugucuuaaagucguguuaca

SEQ ID NO: 40643 - RNA, 22 nt, Human
aaugucuuuaaagugcaauaga

SEQ ID NO: 40644 - RNA, 22 nt, Human
aaugucuuuuaaccucuggacu

SEQ ID NO: 40645 - RNA, 22 nt, Human
aaugucuuuugauacaaguuac

SEQ ID NO: 40646 - RNA, 18 nt, Human
aaugugaauauuuacuuc

SEQ ID NO: 40647 - RNA, 22 nt, Human
aaugugaggccuugguaguuau

SEQ ID NO: 40648 - RNA, 22 nt, Human
aaugugauuagccucuacugga

SEQ ID NO: 40649 - RNA, 22 nt, Human
aaugugcaggcucaaaccuugu

SEQ ID NO: 40650 - RNA, 22 nt, Human
aauguggaugauacuaguacuu

SEQ ID NO: 40651 - RNA, 22 nt, Human
aaugugguuaaaauuugguugu

SEQ ID NO: 40652 - RNA, 22 nt, Human
aauguguagcagaaccaggauu

SEQ ID NO: 40653 - RNA, 22 nt, Human
aauguguauaagggagagcuaa

SEQ ID NO: 40654 - RNA, 22 nt, Human
aauguguaugaggaagagagaa

SEQ ID NO: 40655 - RNA, 22 nt, Human
aaugugucagcuugucgaucuu

SEQ ID NO: 40656 - RNA, 22 nt, Human
aaugugucccuuauuucacagg

SEQ ID NO: 40657 - RNA, 22 nt, Human
aauguguguucggggcccagag

SEQ ID NO: 40658 - RNA, 22 nt, Human
aauguguuacuguguaagagca

SEQ ID NO: 40659 - RNA, 22 nt, Human
aauguguucaguuaaaugaacu

SEQ ID NO: 40660 - RNA, 22 nt, Human
aauguuacacagguauaaucag

SEQ ID NO: 40661 - RNA, 22 nt, Human
aauguuauuucugcauaguagu

SEQ ID NO: 40662 - RNA, 22 nt, Human
aauguucagugccuuuaaacau

SEQ ID NO: 40663 - RNA, 22 nt, Human
aauguucauuguuuuccauaug

SEQ ID NO: 40664 - RNA, 22 nt, Human
aauguucugauguaggguuuag

SEQ ID NO: 40665 - RNA, 22 nt, Human
aauguucugcaacuguuuucau

SEQ ID NO: 40666 - RNA, 22 nt, Human
aauguugacaguggugaucuca

SEQ ID NO: 40667 - RNA, 22 nt, Human
aauguugaccuccugaauguuu

SEQ ID NO: 40668 - RNA, 22 nt, Human
aauguugauguuuucagugagc

SEQ ID NO: 40669 - RNA, 22 nt, Human
aauguuguuggcucuucaugau

SEQ ID NO: 40670 - RNA, 22 nt, Human
aauuaggaauaaaugaguacuu

SEQ ID NO: 40671 - RNA, 22 nt, Human
aauuaggagaaaacuguugucu

SEQ ID NO: 40672 - RNA, 22 nt, Human
aauuagggagagguagcuaggu

SEQ ID NO: 40673 - RNA, 22 nt, Human
aauuaguauugcgauucauuag

SEQ ID NO: 40674 - RNA, 22 nt, Human
aauuaguucaauggaugauaga

SEQ ID NO: 40675 - RNA, 22 nt, Human
aauuauacaauugucaaguucu

SEQ ID NO: 40676 - RNA, 22 nt, Human
aauuauauguuaaucuucaauu

SEQ ID NO: 40677 - RNA, 22 nt, Human
aauuauauuguggugugaaugu

SEQ ID NO: 40678 - RNA, 22 nt, Human
aauuauggugugugguuaaggg

SEQ ID NO: 40679 - RNA, 22 nt, Human
aauucaaauuacaauaguuguu

SEQ ID NO: 40680 - RNA, 22 nt, Human
aauucaacagucaguuaucuca

SEQ ID NO: 40681 - RNA, 22 nt, Human
aauucacaaaaguuagauccau

SEQ ID NO: 40682 - RNA, 22 nt, Human
aauucacaauuauguugggaga

SEQ ID NO: 40683 - RNA, 22 nt, Human
aauucacagcauuugcccaucu

SEQ ID NO: 40684 - RNA, 22 nt, Human
aauucacauauacauuauuccu

SEQ ID NO: 40685 - RNA, 22 nt, Human
aauucagaagcacaaaaccuag

SEQ ID NO: 40686 - RNA, 22 nt, Human
aauucagauggaagauucuggc

SEQ ID NO: 40687 - RNA, 22 nt, Human
aauucagugguuucugcaacaa

SEQ ID NO: 40688 - RNA, 22 nt, Human
aauucaguuggcaaacaugcug

SEQ ID NO: 40689 - RNA, 22 nt, Human
aauucauagcaacaaagaccca

SEQ ID NO: 40690 - RNA, 22 nt, Human
aauucaugaguagaaucuauau

SEQ ID NO: 40691 - RNA, 22 nt, Human
aauucauuaagaaagagcuaaa

SEQ ID NO: 40692 - RNA, 22 nt, Human
aauucauugccagaaucuauga

SEQ ID NO: 40693 - RNA, 22 nt, Human
aauuccaacagacaaaguuaga

SEQ ID NO: 40694 - RNA, 22 nt, Human
aauuccauccauuuguuucaac

SEQ ID NO: 40695 - RNA, 21 nt, Human
aauucccagaaacagcacaag

SEQ ID NO: 40696 - RNA, 22 nt, Human
aauuccucuaucuuucuucaag

SEQ ID NO: 40697 - RNA, 22 nt, Human
aauuccugucuuaacaguucug

SEQ ID NO: 40698 - RNA, 22 nt, Human
aauuccuuuggaucuucuggag

SEQ ID NO: 40699 - RNA, 22 nt, Human
aauucuaaauguaauuuagaau

SEQ ID NO: 40700 - RNA, 22 nt, Human
aauucugagaacaaaagguacu

SEQ ID NO: 40701 - RNA, 22 nt, Human
aauucugaugaauaaaucaucc

SEQ ID NO: 40702 - RNA, 22 nt, Human
aauucugauuagaugccuuugu

SEQ ID NO: 40703 - RNA, 22 nt, Human
aauucuguuacuaaugugaugu

SEQ ID NO: 40704 - RNA, 22 nt, Human
aauucuucaagugcuuuggaga

SEQ ID NO: 40705 - RNA, 22 nt, Human
aauucuuggaaacauuacugga

SEQ ID NO: 40706 - RNA, 22 nt, Human
aauucuugguccuaguguauaa

SEQ ID NO: 40707 - RNA, 22 nt, Human
aauugaaagaagugggauugcc

SEQ ID NO: 40708 - RNA, 22 nt, Human
aauugaacuugaucuuuagcua

SEQ ID NO: 40709 - RNA, 22 nt, Human
aauugacagaaaguuuacgagg

SEQ ID NO: 40710 - RNA, 22 nt, Human
aauugagaugacagaggaauag

SEQ ID NO: 40711 - RNA, 22 nt, Human
aauugcaauuuucuuaaggucu

SEQ ID NO: 40712 - RNA, 22 nt, Human
aauugcauauauaugaggccau

SEQ ID NO: 40713 - RNA, 22 nt, Human
aauugcauuacagaaacuuuca

SEQ ID NO: 40714 - RNA, 22 nt, Human
aauugcuaguuuguagcauuug

SEQ ID NO: 40715 - RNA, 22 nt, Human
aauugcuuacuguuuuucaccu

SEQ ID NO: 40716 - RNA, 17 nt, Human
aauugcuuguacuccca

SEQ ID NO: 40717 - RNA, 22 nt, Human
aauugcuuugaagaagggagcg

SEQ ID NO: 40718 - RNA, 22 nt, Human
aauuggcuauauuauuuagccu

SEQ ID NO: 40719 - RNA, 22 nt, Human
aauugguuugaguugucucuau

SEQ ID NO: 40720 - RNA, 22 nt, Human
aauuguaagugcugaguuaagg

SEQ ID NO: 40721 - RNA, 22 nt, Human
aauuguacaagccuugugccau

SEQ ID NO: 40722 - RNA, 22 nt, Human
aaugugugaacuucagagcauc

SEQ ID NO: 40723 - RNA, 22 nt, Human
aaugugugccuguuaaggggca

SEQ ID NO: 40724 - RNA, 22 nt, Human
aauguguuuaguuaaugaguug

SEQ ID NO: 40725 - RNA, 22 nt, Human
aauguguuuucacugaagauuc

SEQ ID NO: 40726 - RNA, 22 nt, Human
aauguuaaaaccuucagugcuu

SEQ ID NO: 40727 - RNA, 22 nt, Human
aauguuaaguuuagauuauaac

SEQ ID NO: 40728 - RNA, 22 nt, Human
aauguuaauguguuugcuuaug

SEQ ID NO: 40729 - RNA, 22 nt, Human
aauguuaauucacagccaaaua

SEQ ID NO: 40730 - RNA, 22 nt, Human
aauguuacaggaccuaagauga

SEQ ID NO: 40731 - RNA, 22 nt, Human
aauguuacgaucaacaacacau

SEQ ID NO: 40732 - RNA, 22 nt, Human
aauguuaugugguucaacuuaa

SEQ ID NO: 40733 - RNA, 22 nt, Human
aauguuauuguccuuuccaaaa

SEQ ID NO: 40734 - RNA, 20 nt, Human
aauguucaaaggugauggca

SEQ ID NO: 40735 - RNA, 22 nt, Human
aauguucaguagaauaggaaug

SEQ ID NO: 40736 - RNA, 22 nt, Human
aauguucauuagcauuguugac

SEQ ID NO: 40737 - RNA, 22 nt, Human
aauguuccuauuuacccccuaa

SEQ ID NO: 40738 - RNA, 22 nt, Human
aauguugagcuugaaaguaggu

SEQ ID NO: 40739 - RNA, 22 nt, Human
aauguuguaaauauucuuugag

SEQ ID NO: 40740 - RNA, 20 nt, Human
aauguuucugaacagguagu

SEQ ID NO: 40741 - RNA, 22 nt, Human
aauguuugaccaaaaaacugca

SEQ ID NO: 40742 - RNA, 22 nt, Human
aauguuugcaucuauucacaug

SEQ ID NO: 40743 - RNA, 22 nt, Human
aauguuugucaucacacagaua

SEQ ID NO: 40744 - RNA, 18 nt, Human
aauguuuguccucucuaa

SEQ ID NO: 40745 - RNA, 22 nt, Human
aauguuuuaaaagagauugaga

SEQ ID NO: 40746 - RNA, 22 nt, Human
aauguuuuacagaucccauuag

SEQ ID NO: 40747 - RNA, 22 nt, Human
aauguuuucauuauccuaacug

SEQ ID NO: 40748 - RNA, 22 nt, Human
aauuaaaaaaggagagcuugcu

SEQ ID NO: 40749 - RNA, 22 nt, Human
aauuaaauugguuuagagagga

SEQ ID NO: 40750 - RNA, 22 nt, Human
aauuaacuaaaauucacuuuau

SEQ ID NO: 40751 - RNA, 22 nt, Human
aauuaagucacacaccuaaacc

SEQ ID NO: 40752 - RNA, 22 nt, Human
aauuaauauuuguggaauuaau

SEQ ID NO: 40753 - RNA, 22 nt, Human
aauuaauucaguuuuuaaggga

SEQ ID NO: 40754 - RNA, 22 nt, Human
aauuaauuuuguucauucaguc

SEQ ID NO: 40755 - RNA, 23 nt, Human
aauuacaaccaagaacuggaagg

SEQ ID NO: 40756 - RNA, 22 nt, Human
aauuagaaccagaagccauauu

SEQ ID NO: 40757 - RNA, 22 nt, Human
aauuagaagcuguuagcaaaau

SEQ ID NO: 40758 - RNA, 22 nt, Human
aauuagagaagcuucuuccauu

SEQ ID NO: 40759 - RNA, 22 nt, Human
aauuagaguagagccuaagaau

SEQ ID NO: 40760 - RNA, 20 nt, Human
aauuagcuuaagucaaucag

SEQ ID NO: 40761 - RNA, 22 nt, Human
aauuagcuucagcuuguggggc

SEQ ID NO: 40762 - RNA, 22 nt, Human
aauuagcuuuaccuaggauugu

SEQ ID NO: 40763 - RNA, 22 nt, Human
aauuagggaaguauuuaguagu

SEQ ID NO: 40764 - RNA, 22 nt, Human
aauuaguucacguccugugcuu

SEQ ID NO: 40765 - RNA, 22 nt, Human
aauuauggucacuguuccuggg

SEQ ID NO: 40766 - RNA, 22 nt, Human
aauucaaucuguagauugugau

SEQ ID NO: 40767 - RNA, 22 nt, Human
aauucacaccuccgguuuuucu

SEQ ID NO: 40768 - RNA, 22 nt, Human
aauucacagaaccauggugcuc

SEQ ID NO: 40769 - RNA, 22 nt, Human
aauucacauccgaccaggucaa

SEQ ID NO: 40770 - RNA, 22 nt, Human
aauucacauguugaaguccuaa

SEQ ID NO: 40771 - RNA, 22 nt, Human
aauucagaaaaauucacuccua

SEQ ID NO: 40772 - RNA, 22 nt, Human
aauucagcaaaaagauacagga

SEQ ID NO: 40773 - RNA, 22 nt, Human
aauucagcacagaggaaccagu

SEQ ID NO: 40774 - RNA, 22 nt, Human
aauucagguuauauuugcaacu

SEQ ID NO: 40775 - RNA, 22 nt, Human
aauucauacucuauauugcuuu

SEQ ID NO: 40776 - RNA, 22 nt, Human
aauucaucauuuuauagcuagu

SEQ ID NO: 40777 - RNA, 22 nt, Human
aauuccaaguagcaucccauca

SEQ ID NO: 40778 - RNA, 22 nt, Human
aauuccacagaugucuaucugu

SEQ ID NO: 40779 - RNA, 22 nt, Human
aauuccagaggaggacaguccu

SEQ ID NO: 40780 - RNA, 22 nt, Human
aauuccuaguuguacuuaguga

SEQ ID NO: 40781 - RNA, 22 nt, Human
aauucucaggaauuucaucugu

SEQ ID NO: 40782 - RNA, 22 nt, Human
aauucucagguaaaaguuaagu

SEQ ID NO: 40783 - RNA, 22 nt, Human
aauucugaugauacugcauugu

SEQ ID NO: 40784 - RNA, 20 nt, Human
aauucugucuuuucugcugc

SEQ ID NO: 40785 - RNA, 22 nt, Human
aauucugugcaggcagagcuau

SEQ ID NO: 40786 - RNA, 19 nt, Human
aauucuguuucagcagauc

SEQ ID NO: 40787 - RNA, 22 nt, Human
acaaaugcagcauaaagugaac

SEQ ID NO: 40788 - RNA, 23 nt, Human
acaaaugcccauacaucuaguuc

SEQ ID NO: 40789 - RNA, 22 nt, Human
acaaaugcuuaguucaccaaaa

SEQ ID NO: 40790 - RNA, 22 nt, Human
acaaauggaacaaugaagacug

SEQ ID NO: 40791 - RNA, 22 nt, Human
acaaauggacucucaucuuuug

SEQ ID NO: 40792 - RNA, 22 nt, Human
acaaaugugauuguuucugaaa

SEQ ID NO: 40793 - RNA, 22 nt, Human
acaaauguuggauuugucuucc

SEQ ID NO: 40794 - RNA, 22 nt, Human
acaaauugccuagucuagcauc

SEQ ID NO: 40795 - RNA, 22 nt, Human
acaaauuguugggacucagccc

SEQ ID NO: 40796 - RNA, 21 nt, Human
acaaauuguuuauauaggaag

SEQ ID NO: 40797 - RNA, 22 nt, Human
acaaauuuauugaagggcauau

SEQ ID NO: 40798 - RNA, 22 nt, Human
acaaauuugaauccugacuucu

SEQ ID NO: 40799 - RNA, 22 nt, Human
acaaauuuggugagaguaaaua

SEQ ID NO: 40800 - RNA, 22 nt, Human
acaaauuuguguaguuauggca

SEQ ID NO: 40801 - RNA, 20 nt, Human
acaacaaacuugcuuaagga

SEQ ID NO: 40802 - RNA, 22 nt, Human
acaacacauguguauaugugug

SEQ ID NO: 40803 - RNA, 22 nt, Human
acaacaggguaaggcaggccau

SEQ ID NO: 40804 - RNA, 22 nt, Human
acaacaguagccuuuacaaggc

SEQ ID NO: 40805 - RNA, 22 nt, Human
acaacaguuuagguauuuguag

SEQ ID NO: 40806 - RNA, 22 nt, Human
acaaccaagaacagagggaaag

SEQ ID NO: 40807 - RNA, 22 nt, Human
acaacuguuggaggaacacagg

SEQ ID NO: 40808 - RNA, 22 nt, Human
acaacuucaauugggauucucc

SEQ ID NO: 40809 - RNA, 22 nt, Human
acaacuucucacagauaaauuu

SEQ ID NO: 40810 - RNA, 23 nt, Human
acaacuuuacagauacauuuugu

SEQ ID NO: 40811 - RNA, 22 nt, Human
acaacuuuagucuggagggaaa

SEQ ID NO: 40812 - RNA, 22 nt, Human
acaacuuucuggguuaucugau

SEQ ID NO: 40813 - RNA, 22 nt, Human
acaacuuugacccuuguucuua

SEQ ID NO: 40814 - RNA, 22 nt, Human
acaacuuuguagcaauuccacg

SEQ ID NO: 40815 - RNA, 22 nt, Human
acaagaagagcauuugcagggu

SEQ ID NO: 40816 - RNA, 22 nt, Human
acaagaagucacaucuaggagu

SEQ ID NO: 40817 - RNA, 22 nt, Human
acaagaauuauuucuaguuaac

SEQ ID NO: 40818 - RNA, 22 nt, Human
acaagagagacacuaggaaugu

SEQ ID NO: 40819 - RNA, 22 nt, Human
acaagagcauugcagguguguu

SEQ ID NO: 40820 - RNA, 22 nt, Human
acaagagcccuuucagauugac

SEQ ID NO: 40821 - RNA, 22 nt, Human
acaagaguaauuucaacagagu

SEQ ID NO: 40822 - RNA, 22 nt, Human
acaagagugagauuaucaugua

SEQ ID NO: 40823 - RNA, 22 nt, Human
acaagcacuucacuguccucug

SEQ ID NO: 40824 - RNA, 22 nt, Human
acaagcagagauuaaauguuuu

SEQ ID NO: 40825 - RNA, 22 nt, Human
acaagcauaagugagaugaaua

SEQ ID NO: 40826 - RNA, 22 nt, Human
acaagcaugugguaaaaagacc

SEQ ID NO: 40827 - RNA, 22 nt, Human
acaagcucagaucccugucucu

SEQ ID NO: 40828 - RNA, 20 nt, Human
acaaggaaccaggagguggc

SEQ ID NO: 40829 - RNA, 22 nt, Human
acaaggacaugcaauuuggauu

SEQ ID NO: 40830 - RNA, 22 nt, Human
acaaggcacuuuaugaagagga

SEQ ID NO: 40831 - RNA, 22 nt, Human
acaacaaucuacccuagcuucu

SEQ ID NO: 40832 - RNA, 22 nt, Human
acaacacagcuuuccucaaguu

SEQ ID NO: 40833 - RNA, 22 nt, Human
acaacaguccaguauagacugu

SEQ ID NO: 40834 - RNA, 22 nt, Human
acaacauucuuaaauacacuga

SEQ ID NO: 40835 - RNA, 22 nt, Human
acaacuagcagguauuaauuuu

SEQ ID NO: 40836 - RNA, 22 nt, Human
acaacugaugggucauguggga

SEQ ID NO: 40837 - RNA, 22 nt, Human
acaacuggcuuuuuagcuuguu

SEQ ID NO: 40838 - RNA, 22 nt, Human
acaacugggggcauuacuggca

SEQ ID NO: 40839 - RNA, 22 nt, Human
acaacuguuagacacuucuaag

SEQ ID NO: 40840 - RNA, 22 nt, Human
acaacuuuaauggguuucagcu

SEQ ID NO: 40841 - RNA, 22 nt, Human
acaacuuuucuaucauguggaa

SEQ ID NO: 40842 - RNA, 22 nt, Human
acaagaaagguaggauucaggu

SEQ ID NO: 40843 - RNA, 22 nt, Human
acaagauacucagcuacaagac

SEQ ID NO: 40844 - RNA, 22 nt, Human
acaagauucaaugaauugauug

SEQ ID NO: 40845 - RNA, 22 nt, Human
acaagauuuaaugcaacccaag

SEQ ID NO: 40846 - RNA, 22 nt, Human
acaagauuuuaugacucuuuuu

SEQ ID NO: 40847 - RNA, 22 nt, Human
acaagauuuugucugguagggu

SEQ ID NO: 40848 - RNA, 17 nt, Human
acaagcaguggccaugg

SEQ ID NO: 40849 - RNA, 22 nt, Human
acaagccaauuacugugccagg

SEQ ID NO: 40850 - RNA, 22 nt, Human
acaagcgagcggcuucuggccg

SEQ ID NO: 40851 - RNA, 22 nt, Human
acaagcgggccacagugcuggu

SEQ ID NO: 40852 - RNA, 22 nt, Human
acaagcuguggugggacaagag

SEQ ID NO: 40853 - RNA, 22 nt, Human
acaagcuuauuaaguuaucugu

SEQ ID NO: 40854 - RNA, 22 nt, Human
acaagcuuugugauaguagaga

SEQ ID NO: 40855 - RNA, 22 nt, Human
acaaggagaagaaauuggucau

SEQ ID NO: 40856 - RNA, 22 nt, Human
acaaggagagcacacaugggga

SEQ ID NO: 40857 - RNA, 22 nt, Human
acaaggaggauauguuuaaggg

SEQ ID NO: 40858 - RNA, 22 nt, Human
acaaggauuuguuccuaauguu

SEQ ID NO: 40859 - RNA, 23 nt, Human
acaaggcaacauagaucagggca

SEQ ID NO: 40860 - RNA, 22 nt, Human
acaaggcuaugaaguauuaguu

SEQ ID NO: 40861 - RNA, 23 nt, Human
acaaggcucuguucugcaguuuc

SEQ ID NO: 40862 - RNA, 22 nt, Human
acaaggcugaacagugaagccg

SEQ ID NO: 40863 - RNA, 19 nt, Human
acaagggcaggcaagguga

SEQ ID NO: 40864 - RNA, 22 nt, Human
acaagguacaaaacagagcaca

SEQ ID NO: 40865 - RNA, 18 nt, Human
acaaggucaauugguuac

SEQ ID NO: 40866 - RNA, 22 nt, Human
acaagguugauucuggcaucug

SEQ ID NO: 40867 - RNA, 22 nt, Human
acaagguuugguaccacaucca

SEQ ID NO: 40868 - RNA, 22 nt, Human
acaagguuugguccuauauuuu

SEQ ID NO: 40869 - RNA, 22 nt, Human
acaaguaauuuaugcaaacgga

SEQ ID NO: 40870 - RNA, 22 nt, Human
acaaguaccaaaugcucaagua

SEQ ID NO: 40871 - RNA, 22 nt, Human
acaaguaguaaauuauuaggug

SEQ ID NO: 40872 - RNA, 22 nt, Human
acaagucacucuaucauuuuca

SEQ ID NO: 40873 - RNA, 22 nt, Human
acaagucaguggaauuaauauu

SEQ ID NO: 40874 - RNA, 22 nt, Human
acaagucucaacagcagccagc

SEQ ID NO: 40875 - RNA, 22 nt, Human
acaagucuuuuucaugucuucu

SEQ ID NO: 40876 - RNA, 22 nt, Human
acaaguggguccuacauaaagc

SEQ ID NO: 40877 - RNA, 23 nt, Human
acaaguguuuccaauauggcugg

SEQ ID NO: 40878 - RNA, 22 nt, Human
acaaguucugggaauuaggaca

SEQ ID NO: 40879 - RNA, 22 nt, Human
acaaguuuauuugauuagaaca

SEQ ID NO: 40880 - RNA, 22 nt, Human
acaaguuuuggaagucuuaagg

SEQ ID NO: 40881 - RNA, 20 nt, Human
acaauacagguugugucuga

SEQ ID NO: 40882 - RNA, 22 nt, Human
acaauacuagccaagguuauua

SEQ ID NO: 40883 - RNA, 19 nt, Human
acaauagaaaagucuuuug

SEQ ID NO: 40884 - RNA, 22 nt, Human
acaauagauacugggcacauau

SEQ ID NO: 40885 - RNA, 22 nt, Human
acaauauacacauccuaauggg

SEQ ID NO: 40886 - RNA, 22 nt, Human
acaaucacacaugcaauuauac

SEQ ID NO: 40887 - RNA, 22 nt, Human
acaaucuuauuaguaguauaga

SEQ ID NO: 40888 - RNA, 22 nt, Human
acaaugaacgcuuuuuaacugu

SEQ ID NO: 40889 - RNA, 22 nt, Human
acaaugaagauaauguugcagu

SEQ ID NO: 40890 - RNA, 22 nt, Human
acaaugaagcuccacugagcuu

SEQ ID NO: 40891 - RNA, 22 nt, Human
acaaugaauacuaagcaccagg

SEQ ID NO: 40892 - RNA, 22 nt, Human
acaaugaauuuaauaccuuauu

SEQ ID NO: 40893 - RNA, 22 nt, Human
acaaugaccaaaauguuuccag

SEQ ID NO: 40894 - RNA, 22 nt, Human
acaaugcaauaggagcuagaaa

SEQ ID NO: 40895 - RNA, 22 nt, Human
acaaugcaccagcaucuucacc

SEQ ID NO: 40896 - RNA, 22 nt, Human
acaaugcaccuauuuuaaaacu

SEQ ID NO: 40897 - RNA, 22 nt, Human
acaaugcucauauuuaugccaa

SEQ ID NO: 40898 - RNA, 22 nt, Human
acaauguaggcugaaaaagcuu

SEQ ID NO: 40899 - RNA, 22 nt, Human
acaauguaguugucaugagaca

SEQ ID NO: 40900 - RNA, 22 nt, Human
acaaugugggcaugagaaacca

SEQ ID NO: 40901 - RNA, 22 nt, Human
acaauguucuacauauacauaa

SEQ ID NO: 40902 - RNA, 22 nt, Human
aauucuuguuguuaguauauuu

SEQ ID NO: 40903 - RNA, 22 nt, Human
aauugaaauucuuuguggucca

SEQ ID NO: 40904 - RNA, 21 nt, Human
aauugaagauguggagccauu

SEQ ID NO: 40905 - RNA, 22 nt, Human
aauugacaaaucauacuuguau

SEQ ID NO: 40906 - RNA, 22 nt, Human
aauugcaacagguagacuuuuc

SEQ ID NO: 40907 - RNA, 22 nt, Human
aauugcacauuucaguguucug

SEQ ID NO: 40908 - RNA, 22 nt, Human
aauugcauaaauuucauagcau

SEQ ID NO: 40909 - RNA, 22 nt, Human
aauugcauguuaaugacuaagu

SEQ ID NO: 40910 - RNA, 20 nt, Human
aauugcccauccuccuagcc

SEQ ID NO: 40911 - RNA, 22 nt, Human
aauugcuagacuauacuguaau

SEQ ID NO: 40912 - RNA, 22 nt, Human
aauugcuuaucuuguugaauag

SEQ ID NO: 40913 - RNA, 16 nt, Human
aauugcuucuugcugc

SEQ ID NO: 40914 - RNA, 22 nt, Human
aauugcuuuacaagccguuuaa

SEQ ID NO: 40915 - RNA, 22 nt, Human
aauuggacugugcugcucaaaa

SEQ ID NO: 40916 - RNA, 23 nt, Human
aauuggacuugcugucaaacuuc

SEQ ID NO: 40917 - RNA, 22 nt, Human
aauuggcagaacuuuauauauu

SEQ ID NO: 40918 - RNA, 22 nt, Human
aauugguuugaauaaauaaaga

SEQ ID NO: 40919 - RNA, 22 nt, Human
aauuguacaggaaguugcugga

SEQ ID NO: 40920 - RNA, 17 nt, Human
aauugucagcaguagcu

SEQ ID NO: 40921 - RNA, 22 nt, Human
aauugugcccgugacauuucau

SEQ ID NO: 40922 - RNA, 22 nt, Human
aauuuacaggugcacucgccau

SEQ ID NO: 40923 - RNA, 22 nt, Human
aauuuagauugauaaacaugga

SEQ ID NO: 40924 - RNA, 22 nt, Human
aauuuaguccuuacagugcaga

SEQ ID NO: 40925 - RNA, 22 nt, Human
aauuuauauguaauuaggcaca

SEQ ID NO: 40926 - RNA, 22 nt, Human
aauuuaucuuuaguaagcuucu

SEQ ID NO: 40927 - RNA, 22 nt, Human
aauuucacagugaacuuugagg

SEQ ID NO: 40928 - RNA, 22 nt, Human
aauuucaccugcacuacaucgc

SEQ ID NO: 40929 - RNA, 22 nt, Human
aauuucacuggaaaagauaauu

SEQ ID NO: 40930 - RNA, 22 nt, Human
aauuucagaacccaaauuagcg

SEQ ID NO: 40931 - RNA, 22 nt, Human
aauuucagaccauuugcaauua

SEQ ID NO: 40932 - RNA, 22 nt, Human
aauuucagagguagagauucua

SEQ ID NO: 40933 - RNA, 22 nt, Human
aauuucagcucaaacuuguguu

SEQ ID NO: 40934 - RNA, 22 nt, Human
aauuucagcuuaaguuguuugg

SEQ ID NO: 40935 - RNA, 22 nt, Human
aauuucaguaugaaguuucaca

SEQ ID NO: 40936 - RNA, 22 nt, Human
aauuuccagaucagaugacuca

SEQ ID NO: 40937 - RNA, 23 nt, Human
aauuuccccugucucugauuugg

SEQ ID NO: 40938 - RNA, 22 nt, Human
aauuucucaauuguuacaggug

SEQ ID NO: 40939 - RNA, 20 nt, Human
aauuucuccuggguaacaga

SEQ ID NO: 40940 - RNA, 22 nt, Human
acaacaaaaucacuagucuucc

SEQ ID NO: 40941 - RNA, 22 nt, Human
acaacaagagcuaaggguaagg

SEQ ID NO: 40942 - RNA, 22 nt, Human
acaacagagcuggacugagagg

SEQ ID NO: 40943 - RNA, 23 nt, Human
acaacaggaaaucagaccugaac

SEQ ID NO: 40944 - RNA, 22 nt, Human
acaacagugugguggaaggagc

SEQ ID NO: 40945 - RNA, 22 nt, Human
acaacauuuaaggaggcacuga

SEQ ID NO: 40946 - RNA, 23 nt, Human
acaaccagcacuggagggcacca

SEQ ID NO: 40947 - RNA, 22 nt, Human
acaaccuguucguuuccacaga

SEQ ID NO: 40948 - RNA, 22 nt, Human
acaacugucuucuucaugcucc

SEQ ID NO: 40949 - RNA, 22 nt, Human
acaagaaccaaagaaggauauu

SEQ ID NO: 40950 - RNA, 22 nt, Human
acaagaauguagauuaguuaag

SEQ ID NO: 40951 - RNA, 22 nt, Human
acaagagacaagagguucuucu

SEQ ID NO: 40952 - RNA, 22 nt, Human
acaagagucugcauuucuaaca

SEQ ID NO: 40953 - RNA, 22 nt, Human
acaagauguguuuauacaagcu

SEQ ID NO: 40954 - RNA, 22 nt, Human
acaagauugauaagucugcccu

SEQ ID NO: 40955 - RNA, 22 nt, Human
acaagauuuagcuuaaagggcu

SEQ ID NO: 40956 - RNA, 23 nt, Human
acaagcagcccagugcucugccu

SEQ ID NO: 40957 - RNA, 22 nt, Human
acaagcaucagguucagcaaua

SEQ ID NO: 40958 - RNA, 22 nt, Human
acaagcaugggcuuugacauca

SEQ ID NO: 40959 - RNA, 22 nt, Human
acaagcuccuuauucagcuggg

SEQ ID NO: 40960 - RNA, 22 nt, Human
acaaggacauaggaaacuacaa

SEQ ID NO: 40961 - RNA, 22 nt, Human
acaaggaccaugaggcagaccc

SEQ ID NO: 40962 - RNA, 22 nt, Human
acaaggacgucacuuccacggu

SEQ ID NO: 40963 - RNA, 22 nt, Human
acaaggaggucuggggggcccu

SEQ ID NO: 40964 - RNA, 22 nt, Human
acaaggaucuguguaggcaggc

SEQ ID NO: 40965 - RNA, 22 nt, Human
acaaggcaauggcaggauuuca

SEQ ID NO: 40966 - RNA, 22 nt, Human
acaaggcaauuccuggugaauu

SEQ ID NO: 40967 - RNA, 22 nt, Human
acaaggcaguacaaugaugaca

SEQ ID NO: 40968 - RNA, 22 nt, Human
acaaggcaguuaaaaugguuaa

SEQ ID NO: 40969 - RNA, 22 nt, Human
acaaggcauuccggaaguaacc

SEQ ID NO: 40970 - RNA, 22 nt, Human
acaaggcgugacggagagagga

SEQ ID NO: 40971 - RNA, 22 nt, Human
acaaggcuaauuuggaagauac

SEQ ID NO: 40972 - RNA, 22 nt, Human
acaaggcugcugugauugggaa

SEQ ID NO: 40973 - RNA, 22 nt, Human
acaaggcuggcugggaaaaacu

SEQ ID NO: 40974 - RNA, 22 nt, Human
acaaggcugugggagaaccucu

SEQ ID NO: 40975 - RNA, 22 nt, Human
acaagggauuguugaguagucu

SEQ ID NO: 40976 - RNA, 22 nt, Human
acaagguaagaaacauuggcuu

SEQ ID NO: 40977 - RNA, 22 nt, Human
acaagguuguucugaggauuua

SEQ ID NO: 40978 - RNA, 22 nt, Human
acaagguuuaaauagccaucag

SEQ ID NO: 40979 - RNA, 22 nt, Human
acaaguaggugcacuucaauag

SEQ ID NO: 40980 - RNA, 22 nt, Human
acaauaaggauuuuuaggggca

SEQ ID NO: 40981 - RNA, 22 nt, Human
acaauacuauuuucaguauccu

SEQ ID NO: 40982 - RNA, 22 nt, Human
acaauacuuaccaauguuuuug

SEQ ID NO: 40983 - RNA, 22 nt, Human
acaauagaaauaauuaagcaca

SEQ ID NO: 40984 - RNA, 22 nt, Human
acaauagaaggaaacugacaua

SEQ ID NO: 40985 - RNA, 21 nt, Human
acaauagaauagaguguggug

SEQ ID NO: 40986 - RNA, 22 nt, Human
acaauagacaaagugaauggcu

SEQ ID NO: 40987 - RNA, 22 nt, Human
acaauagucaaugcacgucauu

SEQ ID NO: 40988 - RNA, 22 nt, Human
acaauagugccuggcauagagu

SEQ ID NO: 40989 - RNA, 22 nt, Human
acaauauuugggggcaguuugu

SEQ ID NO: 40990 - RNA, 22 nt, Human
acaaucuggaaaaguuaacuau

SEQ ID NO: 40991 - RNA, 20 nt, Human
acaaucuguuuguugucugu

SEQ ID NO: 40992 - RNA, 22 nt, Human
acaaugaaaaaauuuacugugg

SEQ ID NO: 40993 - RNA, 22 nt, Human
acaaugaaagguauucugaacu

SEQ ID NO: 40994 - RNA, 22 nt, Human
acaaugaagggagacacuugcu

SEQ ID NO: 40995 - RNA, 19 nt, Human
acaaugaauguguucucuu

SEQ ID NO: 40996 - RNA, 22 nt, Human
acaaugaugcagaugaguaaga

SEQ ID NO: 40997 - RNA, 22 nt, Human
acaaugauuuuuuagaguaguu

SEQ ID NO: 40998 - RNA, 22 nt, Human
acaaugcaauuguaaggugugu

SEQ ID NO: 40999 - RNA, 23 nt, Human
acaaugcacuuuaaaugguuccc

SEQ ID NO: 41000 - RNA, 17 nt, Human
acaaugcagucucuagu

SEQ ID NO: 41001 - RNA, 22 nt, Human
acaaugcauaaguuucucccag

SEQ ID NO: 41002 - RNA, 22 nt, Human
acaaugcugcagggaaauuagg

SEQ ID NO: 41003 - RNA, 22 nt, Human
acaaugcuguugagacauucuu

SEQ ID NO: 41004 - RNA, 22 nt, Human
acaaugcuugguuuuucuagaa

SEQ ID NO: 41005 - RNA, 22 nt, Human
acaauguaggaguaugacagua

SEQ ID NO: 41006 - RNA, 22 nt, Human
acaauguaggauauguacuugu

SEQ ID NO: 41007 - RNA, 22 nt, Human
acaaugucaaaauaggaaacau

SEQ ID NO: 41008 - RNA, 22 nt, Human
acaaugucaccucucauguuuu

SEQ ID NO: 41009 - RNA, 22 nt, Human
acaaugugcuuaugaaggcagu

SEQ ID NO: 41010 - RNA, 22 nt, Human
acaauuacucaacuuugcugcu

SEQ ID NO: 41011 - RNA, 22 nt, Human
acaauucaagaagagagaugaa

SEQ ID NO: 41012 - RNA, 22 nt, Human
acaauucaagaugagauucagg

SEQ ID NO: 41013 - RNA, 22 nt, Human
acaauucugaugguuucccagu

SEQ ID NO: 41014 - RNA, 22 nt, Human
acaauucuggguauuuauauag

SEQ ID NO: 41015 - RNA, 22 nt, Human
acaauugacuguauuuuuagcu

SEQ ID NO: 41016 - RNA, 21 nt, Human
acaauugauggcuuaaguugc

SEQ ID NO: 41017 - RNA, 22 nt, Human
acaauugcuaaugcuucuguug

SEQ ID NO: 41018 - RNA, 22 nt, Human
acaauuuuaagccagagugggu

SEQ ID NO: 41019 - RNA, 22 nt, Human
acaauuuuccccauagguuauc

SEQ ID NO: 41020 - RNA, 22 nt, Human
acacaaaguuggaugacaaaau

SEQ ID NO: 41021 - RNA, 17 nt, Human
acacaagcaccuugagg

SEQ ID NO: 41022 - RNA, 22 nt, Human
acacaagcagcuuuugagcgga

SEQ ID NO: 41023 - RNA, 22 nt, Human
acacaagggccuauaguguauu

SEQ ID NO: 41024 - RNA, 22 nt, Human
acacaagucccuccauacucuc

SEQ ID NO: 41025 - RNA, 22 nt, Human
acacaaugauucacaagcagca

SEQ ID NO: 41026 - RNA, 22 nt, Human
acacaaugucaucauaauguca

SEQ ID NO: 41027 - RNA, 22 nt, Human
acacaauuucauaaacaccaug

SEQ ID NO: 41028 - RNA, 20 nt, Human
acacacagagacaugcgcau

SEQ ID NO: 41029 - RNA, 19 nt, Human
acacaccagugccugugac

SEQ ID NO: 41030 - RNA, 22 nt, Human
acacaccaugauuuauuuaccc

SEQ ID NO: 41031 - RNA, 21 nt, Human
acacacugaguuuuccacugu

SEQ ID NO: 41032 - RNA, 22 nt, Human
acacacugcucgcucagauuaa

SEQ ID NO: 41033 - RNA, 22 nt, Human
acacagaaccucauagccucuc

SEQ ID NO: 41034 - RNA, 22 nt, Human
acacagaagaucucuuaaugcu

SEQ ID NO: 41035 - RNA, 22 nt, Human
acacagaagcuuuuucuauucc

SEQ ID NO: 41036 - RNA, 22 nt, Human
acaggaggagcuguuucaggga

SEQ ID NO: 41037 - RNA, 22 nt, Human
acaggagggacaccuuccugcu

SEQ ID NO: 41038 - RNA, 22 nt, Human
acaggaguuaaccaugggaagu

SEQ ID NO: 41039 - RNA, 22 nt, Human
acaggaguuucugacagagaca

SEQ ID NO: 41040 - RNA, 22 nt, Human
acaggaugauaaaggauggcca

SEQ ID NO: 41041 - RNA, 21 nt, Human
acaggaugauuuuuccuuaug

SEQ ID NO: 41042 - RNA, 22 nt, Human
acaggauggccagcugauauug

SEQ ID NO: 41043 - RNA, 22 nt, Human
acaggaugggcgcacagagcua

SEQ ID NO: 41044 - RNA, 22 nt, Human
acaggauuaauaaaaaauugua

SEQ ID NO: 41045 - RNA, 22 nt, Human
acaggcaaggccagugagaaau

SEQ ID NO: 41046 - RNA, 22 nt, Human
acaggcaagucacacaacuugu

SEQ ID NO: 41047 - RNA, 21 nt, Human
acaggcaauuucauaugguuc

SEQ ID NO: 41048 - RNA, 22 nt, Human
acaggcacaggugugccccacc

SEQ ID NO: 41049 - RNA, 22 nt, Human
acaguguuuucuuaaggagaaa

SEQ ID NO: 41050 - RNA, 22 nt, Human
acaguuaaauauuucuacuggg

SEQ ID NO: 41051 - RNA, 22 nt, Human
acaguuaagcaguaugaucaca

SEQ ID NO: 41052 - RNA, 22 nt, Human
acaguuaauaaguaguaaguca

SEQ ID NO: 41053 - RNA, 22 nt, Human
acaguuacauuaaacaaaagga

SEQ ID NO: 41054 - RNA, 23 nt, Human
acaguuauagcugugaauaacau

SEQ ID NO: 41055 - RNA, 22 nt, Human
acaguucacuuuuuauaucaaa

SEQ ID NO: 41056 - RNA, 22 nt, Human
acaguucagacaaguguuccau

SEQ ID NO: 41057 - RNA, 19 nt, Human
acaguucuaauuucugugg

SEQ ID NO: 41058 - RNA, 22 nt, Human
acaguucugaagacuagagccu

SEQ ID NO: 41059 - RNA, 22 nt, Human
acaguucuuaaaacuugaauua

SEQ ID NO: 41060 - RNA, 22 nt, Human
acaguucuuuggauggaagaau

SEQ ID NO: 41061 - RNA, 22 nt, Human
acaguugacagggagaggguua

SEQ ID NO: 41062 - RNA, 22 nt, Human
acaguugagaugcaacuuuggg

SEQ ID NO: 41063 - RNA, 22 nt, Human
acaguugaggacuuaaacaaaa

SEQ ID NO: 41064 - RNA, 22 nt, Human
acaguuuaugguguuuuauaua

SEQ ID NO: 41065 - RNA, 22 nt, Human
acaguuuauguaaagcugccaa

SEQ ID NO: 41066 - RNA, 20 nt, Human
acaguuuauuuuacuugguu

SEQ ID NO: 41067 - RNA, 22 nt, Human
acaguuucuccauuuacaccuu

SEQ ID NO: 41068 - RNA, 22 nt, Human
acaguuugcacuguucaucaaa

SEQ ID NO: 41069 - RNA, 22 nt, Human
acaguuugcccugacauucucc

SEQ ID NO: 41070 - RNA, 19 nt, Human
acaguuugggaaaugagca

SEQ ID NO: 41071 - RNA, 22 nt, Human
acauaacauaguugacauuuuu

SEQ ID NO: 41072 - RNA, 22 nt, Human
acauaacaugucaaucacccga

SEQ ID NO: 41073 - RNA, 22 nt, Human
acauaauaccuaggacaguuug

SEQ ID NO: 41074 - RNA, 22 nt, Human
acauaauagguaccugaauaau

SEQ ID NO: 41075 - RNA, 22 nt, Human
acauaaugaaaugcagaaauca

SEQ ID NO: 41076 - RNA, 22 nt, Human
acauacacacauacuuucuccu

SEQ ID NO: 41077 - RNA, 21 nt, Human
acauacauaccuuaccaccuu

SEQ ID NO: 41078 - RNA, 22 nt, Human
acauacauguaaaggaaauuau

SEQ ID NO: 41079 - RNA, 21 nt, Human
acauacauuaucuuuuuaaaa

SEQ ID NO: 41080 - RNA, 22 nt, Human
acauacauugccucauugguaa

SEQ ID NO: 41081 - RNA, 22 nt, Human
acauacuugaagcaagugauca

SEQ ID NO: 41082 - RNA, 22 nt, Human
acauacuuuguccuuaacguac

SEQ ID NO: 41083 - RNA, 20 nt, Human
acauagaucagugauugaca

SEQ ID NO: 41084 - RNA, 22 nt, Human
acauagaucugugauucauucu

SEQ ID NO: 41085 - RNA, 22 nt, Human
acauagcauguuuggacacaug

SEQ ID NO: 41086 - RNA, 20 nt, Human
acauagcuauagaaagucga

SEQ ID NO: 41087 - RNA, 22 nt, Human
acauagcucagcauaaucgugg

SEQ ID NO: 41088 - RNA, 22 nt, Human
acauagcucaguaucacuuacu

SEQ ID NO: 41089 - RNA, 22 nt, Human
acauaggccaauauccagagcu

SEQ ID NO: 41090 - RNA, 22 nt, Human
acauaguaagugcucaguaaau

SEQ ID NO: 41091 - RNA, 22 nt, Human
acauauaugugcacaugugcag

SEQ ID NO: 41092 - RNA, 22 nt, Human
acauauauuacuaguaaagaca

SEQ ID NO: 41093 - RNA, 22 nt, Human
acauaucuuuacucaucaucuc

SEQ ID NO: 41094 - RNA, 20 nt, Human
acauaugaaugauagagcca

SEQ ID NO: 41095 - RNA, 22 nt, Human
acauaugagguguuauucuaug

SEQ ID NO: 41096 - RNA, 22 nt, Human
acauaugcgaucauaggaugca

SEQ ID NO: 41097 - RNA, 22 nt, Human
acauauguauauguacacaguc

SEQ ID NO: 41098 - RNA, 22 nt, Human
acauaugugcuuauauccauga

SEQ ID NO: 41099 - RNA, 22 nt, Human
acauaugugucugcacaugccc

SEQ ID NO: 41100 - RNA, 22 nt, Human
acauauuggcaaacuggaggca

SEQ ID NO: 41101 - RNA, 20 nt, Human
acaucaacuagucacagaca

SEQ ID NO: 41102 - RNA, 22 nt, Human
acaucagagggcucacaugauc

SEQ ID NO: 41103 - RNA, 22 nt, Human
acaucagauuaugcuuugcuua

SEQ ID NO: 41104 - RNA, 22 nt, Human
acaucaguaauuaagucucaag

SEQ ID NO: 41105 - RNA, 22 nt, Human
acaucagucuuuugcauacaua

SEQ ID NO: 41106 - RNA, 23 nt, Human
acaucaugauagccaacuuggga

SEQ ID NO: 41107 - RNA, 22 nt, Human
acaucauuucuaguuccuguca

SEQ ID NO: 41108 - RNA, 22 nt, Human
acauccaguaucagaagcauca

SEQ ID NO: 41109 - RNA, 23 nt, Human
acauccaugaaucaucugcuuuc

SEQ ID NO: 41110 - RNA, 22 nt, Human
acauccaugcaugucugugcac

SEQ ID NO: 41111 - RNA, 22 nt, Human
acaucccucagucagacuguaa

SEQ ID NO: 41112 - RNA, 22 nt, Human
acaucuauuuuuuucuguccau

SEQ ID NO: 41113 - RNA, 22 nt, Human
acaucucuucuuaaggcuccag

SEQ ID NO: 41114 - RNA, 22 nt, Human
acaucugacaugaucuucagua

SEQ ID NO: 41115 - RNA, 22 nt, Human
acaucugaccauuacaagacau

SEQ ID NO: 41116 - RNA, 22 nt, Human
acaucuguccucugcagagcuc

SEQ ID NO: 41117 - RNA, 22 nt, Human
acaucuguugauugauguuaca

SEQ ID NO: 41118 - RNA, 22 nt, Human
acaucuucaaagugcuuugcaa

SEQ ID NO: 41119 - RNA, 22 nt, Human
acaucuuugcucuuauagagcu

SEQ ID NO: 41120 - RNA, 22 nt, Human
acaucuuuuacucugguucggg

SEQ ID NO: 41121 - RNA, 22 nt, Human
acaugaaaaauguuugcaguuu

SEQ ID NO: 41122 - RNA, 22 nt, Human
acaugaaacccagccguggucc

SEQ ID NO: 41123 - RNA, 22 nt, Human
acaugaaauucuagcugaaccc

SEQ ID NO: 41124 - RNA, 22 nt, Human
acaugacagugcuuagcaaacu

SEQ ID NO: 41125 - RNA, 22 nt, Human
acaugagaucacaaagauaaau

SEQ ID NO: 41126 - RNA, 22 nt, Human
acaugagauuuggguggugaua

SEQ ID NO: 41127 - RNA, 22 nt, Human
acaugauauuaaugucuuauuu

SEQ ID NO: 41128 - RNA, 22 nt, Human
acaugaucccaccugccuauaa

SEQ ID NO: 41129 - RNA, 22 nt, Human
acaugaucugacuugcuuuuua

SEQ ID NO: 41130 - RNA, 22 nt, Human
acaugauuaaaagauuuuaaag

SEQ ID NO: 41131 - RNA, 22 nt, Human
acaugauucuugauaggcauug

SEQ ID NO: 41132 - RNA, 22 nt, Human
acaugauuucagggaauucuca

SEQ ID NO: 41133 - RNA, 22 nt, Human
acaugcaaaaauauauuuauga

SEQ ID NO: 41134 - RNA, 23 nt, Human
acaugcaaaaaucacagucuccu

SEQ ID NO: 41135 - RNA, 22 nt, Human
acaugcaacuaaagggugccac

SEQ ID NO: 41136 - RNA, 22 nt, Human
acaugcaagccccugaacacau

SEQ ID NO: 41137 - RNA, 22 nt, Human
acaugcacugguugagggguuu

SEQ ID NO: 41138 - RNA, 22 nt, Human
acaugcagacgggauccuggca

SEQ ID NO: 41139 - RNA, 22 nt, Human
acaugcauacguguguuuaaaa

SEQ ID NO: 41140 - RNA, 21 nt, Human
acaugcauagagagauuucug

SEQ ID NO: 41141 - RNA, 22 nt, Human
acaugccaucuuugucaggagu

SEQ ID NO: 41142 - RNA, 22 nt, Human
acaugcuaugagagauuacuuc

SEQ ID NO: 41143 - RNA, 22 nt, Human
acaugcugggcaauguuguuuu

SEQ ID NO: 41144 - RNA, 20 nt, Human
acaugcuugagaggaugcag

SEQ ID NO: 41145 - RNA, 22 nt, Human
acaugcuuuaacuuauuuugau

SEQ ID NO: 41146 - RNA, 22 nt, Human
acauggaagcaaaguucuauuu

SEQ ID NO: 41147 - RNA, 22 nt, Human
acauggauaaauuuuacuuucc

SEQ ID NO: 41148 - RNA, 20 nt, Human
acauggaucaaaugucaguu

SEQ ID NO: 41149 - RNA, 23 nt, Human
acaugggaaaugcaaagagaagu

SEQ ID NO: 41150 - RNA, 23 nt, Human
acaugggagggacauggaggcug

SEQ ID NO: 41151 - RNA, 17 nt, Human
acacagagauuaacaca

SEQ ID NO: 41152 - RNA, 22 nt, Human
acacagagcuggaacugcuuca

SEQ ID NO: 41153 - RNA, 22 nt, Human
acacagagcuucucaacuggga

SEQ ID NO: 41154 - RNA, 22 nt, Human
acacagaggcuccagagauaga

SEQ ID NO: 41155 - RNA, 22 nt, Human
acacagaguaucuuuugccuag

SEQ ID NO: 41156 - RNA, 22 nt, Human
acacagaguauuuagaaggggu

SEQ ID NO: 41157 - RNA, 22 nt, Human
acacagaguccuuacugaggua

SEQ ID NO: 41158 - RNA, 22 nt, Human
auguagaauuccuucuacuuug

SEQ ID NO: 41159 - RNA, 22 nt, Human
auguagaggaguuucuggucug

SEQ ID NO: 41160 - RNA, 22 nt, Human
auguagcaucuauccugauaaa

SEQ ID NO: 41161 - RNA, 22 nt, Human
auguagcugcagaugauaaugc

SEQ ID NO: 41162 - RNA, 22 nt, Human
auguagucucuuugggaaacuc

SEQ ID NO: 41163 - RNA, 22 nt, Human
auguaucagauaaagcaugugg

SEQ ID NO: 41164 - RNA, 22 nt, Human
auguaucaugcaggguccauga

SEQ ID NO: 41165 - RNA, 22 nt, Human
auguauccuuauacacauuuau

SEQ ID NO: 41166 - RNA, 23 nt, Human
auguaucucauccaaggaagcuc

SEQ ID NO: 41167 - RNA, 22 nt, Human
auguaugaagcuuuguuuggga

SEQ ID NO: 41168 - RNA, 22 nt, Human
auguaugauauuuccaguauca

SEQ ID NO: 41169 - RNA, 22 nt, Human
auguaugcauagugaguaaaug

SEQ ID NO: 41170 - RNA, 22 nt, Human
auguauguucaagcaaugauua

SEQ ID NO: 41171 - RNA, 22 nt, Human
auguauguuucauaucuucauu

SEQ ID NO: 41172 - RNA, 22 nt, Human
auguauguuucuauauaugaca

SEQ ID NO: 41173 - RNA, 22 nt, Human
auguauguuuucaguuguauua

SEQ ID NO: 41174 - RNA, 22 nt, Human
auguauucaagccacauacauu

SEQ ID NO: 41175 - RNA, 22 nt, Human
auguauuuacugagaaggaaac

SEQ ID NO: 41176 - RNA, 22 nt, Human
augucaaagcagacugagagcg

SEQ ID NO: 41177 - RNA, 21 nt, Human
augucaaaugcuuuauuuuau

SEQ ID NO: 41178 - RNA, 22 nt, Human
augucacaggcaacaagauugc

SEQ ID NO: 41179 - RNA, 22 nt, Human
augucacagucugacucaguga

SEQ ID NO: 41180 - RNA, 22 nt, Human
augucacaucugggauggcccu

SEQ ID NO: 41181 - RNA, 22 nt, Human
augucacauggucaccucuagc

SEQ ID NO: 41182 - RNA, 22 nt, Human
augucaccaguuuccaaauuug

SEQ ID NO: 41183 - RNA, 22 nt, Human
augucacugugaggcagcuguc

SEQ ID NO: 41184 - RNA, 22 nt, Human
augucacuguuuaccagcucca

SEQ ID NO: 41185 - RNA, 22 nt, Human
augucagaagaacaaugagaua

SEQ ID NO: 41186 - RNA, 22 nt, Human
augucagagcuuccacaauagu

SEQ ID NO: 41187 - RNA, 22 nt, Human
augucagauuccuaaauaucuu

SEQ ID NO: 41188 - RNA, 20 nt, Human
augucaggaagggagucagg

SEQ ID NO: 41189 - RNA, 22 nt, Human
auguccaauagaagggagaagc

SEQ ID NO: 41190 - RNA, 22 nt, Human
auguccagaguguccuggaaag

SEQ ID NO: 41191 - RNA, 22 nt, Human
auguccaggaucuauccccaga

SEQ ID NO: 41192 - RNA, 22 nt, Human
auguccagggcacacagcagug

SEQ ID NO: 41193 - RNA, 22 nt, Human
augucccagacacuuuaucuua

SEQ ID NO: 41194 - RNA, 22 nt, Human
augucccuucuuuggugcucag

SEQ ID NO: 41195 - RNA, 22 nt, Human
auguccucaaaacugauugcag

SEQ ID NO: 41196 - RNA, 20 nt, Human
auguccugcuucuccucacc

SEQ ID NO: 41197 - RNA, 22 nt, Human
auguccuucuccucuuaccugc

SEQ ID NO: 41198 - RNA, 22 nt, Human
auguccuuguuuuggugacacu

SEQ ID NO: 41199 - RNA, 22 nt, Human
auguccuuuuaaaaugugagaa

SEQ ID NO: 41200 - RNA, 22 nt, Human
augucucugcugugguuagcuu

SEQ ID NO: 41201 - RNA, 22 nt, Human
augucucuuuacucuuagaacc

SEQ ID NO: 41202 - RNA, 22 nt, Human
augucucuuuagagcaacagua

SEQ ID NO: 41203 - RNA, 22 nt, Human
augucugcaaauaucugccagu

SEQ ID NO: 41204 - RNA, 22 nt, Human
augucugcuuuccuuuuaauca

SEQ ID NO: 41205 - RNA, 22 nt, Human
augucuggaggucaucugguua

SEQ ID NO: 41206 - RNA, 22 nt, Human
augucuguauguggagaggggu

SEQ ID NO: 41207 - RNA, 22 nt, Human
augucugucaucuuccaggaag

SEQ ID NO: 41208 - RNA, 22 nt, Human
augucuguccaacccugcaggg

SEQ ID NO: 41209 - RNA, 22 nt, Human
augucuguucauuauuaacugc

SEQ ID NO: 41210 - RNA, 21 nt, Human
augucuguucuuucuggcagg

SEQ ID NO: 41211 - RNA, 19 nt, Human
augucuguugaauuucaua

SEQ ID NO: 41212 - RNA, 22 nt, Human
augucuuuuaugauuacgggau

SEQ ID NO: 41213 - RNA, 22 nt, Human
augugaaaaauuucuuauuaca

SEQ ID NO: 41214 - RNA, 22 nt, Human
augugaaaccugugaguagagu

SEQ ID NO: 41215 - RNA, 22 nt, Human
augugaaacgcaaugggaucau

SEQ ID NO: 41216 - RNA, 22 nt, Human
augugaaauauuaagccgagga

SEQ ID NO: 41217 - RNA, 22 nt, Human
augugaacucuguacucucuga

SEQ ID NO: 41218 - RNA, 22 nt, Human
augugacuagcccuucaugacc

SEQ ID NO: 41219 - RNA, 22 nt, Human
augugacuccacagcugugcug

SEQ ID NO: 41220 - RNA, 22 nt, Human
augugagaacucaggaaauacu

SEQ ID NO: 41221 - RNA, 22 nt, Human
augugagggaaaucagucagaa

SEQ ID NO: 41222 - RNA, 20 nt, Human
augugagggguugaaguggg

SEQ ID NO: 41223 - RNA, 22 nt, Human
augugcaaggaguggcuguugu

SEQ ID NO: 41224 - RNA, 22 nt, Human
augugcaauuauuaagaagaga

SEQ ID NO: 41225 - RNA, 22 nt, Human
augugcauuaaaugucaauguu

SEQ ID NO: 41226 - RNA, 22 nt, Human
augugcccuuucugcuuugcag

SEQ ID NO: 41227 - RNA, 22 nt, Human
augugcuaaacucaacaaaucu

SEQ ID NO: 41228 - RNA, 22 nt, Human
augugcucacccuauuuaugga

SEQ ID NO: 41229 - RNA, 22 nt, Human
augugcuuauggucucugguug

SEQ ID NO: 41230 - RNA, 22 nt, Human
augugcuucaggaugucagugu

SEQ ID NO: 41231 - RNA, 22 nt, Human
augugcuuguaauguuaaaugu

SEQ ID NO: 41232 - RNA, 22 nt, Human
augugcuuuaaagaagccagcu

SEQ ID NO: 41233 - RNA, 22 nt, Human
augugcuuucuuuguuucauaa

SEQ ID NO: 41234 - RNA, 22 nt, Human
auguggcaaugguuagcacugu

SEQ ID NO: 41235 - RNA, 22 nt, Human
auguggcuagggaauaaaauau

SEQ ID NO: 41236 - RNA, 22 nt, Human
auguggcucauuguuugcuuac

SEQ ID NO: 41237 - RNA, 21 nt, Human
auguggcucccuuccucagga

SEQ ID NO: 41238 - RNA, 22 nt, Human
auguggcuccuuacucaucagc

SEQ ID NO: 41239 - RNA, 22 nt, Human
auguggcuguggacaccuuuca

SEQ ID NO: 41240 - RNA, 22 nt, Human
auguggcuuucugcguuuucuc

SEQ ID NO: 41241 - RNA, 22 nt, Human
auguggcuuuucuaacccuucc

SEQ ID NO: 41242 - RNA, 22 nt, Human
auguguaaaaagugcuuaauau

SEQ ID NO: 41243 - RNA, 22 nt, Human
auguguaaaaggcauguuuuau

SEQ ID NO: 41244 - RNA, 22 nt, Human
auguguaaagcuuuucuuuguu

SEQ ID NO: 41245 - RNA, 22 nt, Human
auguagagcuccuugauccucc

SEQ ID NO: 41246 - RNA, 23 nt, Human
auguagaguacagcacaacagca

SEQ ID NO: 41247 - RNA, 22 nt, Human
auguagaguagaauaguacaac

SEQ ID NO: 41248 - RNA, 20 nt, Human
auguagcagugugcugggaa

SEQ ID NO: 41249 - RNA, 22 nt, Human
auguagcaugcauguuguuuug

SEQ ID NO: 41250 - RNA, 22 nt, Human
auguaggauugagugauagagg

SEQ ID NO: 41251 - RNA, 22 nt, Human
auguagggaacuaaauucacug

SEQ ID NO: 41252 - RNA, 22 nt, Human
auguaguacuggguauguuucu

SEQ ID NO: 41253 - RNA, 21 nt, Human
auguagugacuucauuccuuc

SEQ ID NO: 41254 - RNA, 22 nt, Human
auguaguguagagauuagucuc

SEQ ID NO: 41255 - RNA, 22 nt, Human
auguaguuagaagauucaaaca

SEQ ID NO: 41256 - RNA, 22 nt, Human
auguaguuuggggcuagauuua

SEQ ID NO: 41257 - RNA, 22 nt, Human
auguauacgugcaagucacagg

SEQ ID NO: 41258 - RNA, 22 nt, Human
auguauacuaacacaugcaguu

SEQ ID NO: 41259 - RNA, 22 nt, Human
auguauaguggugaugauuaca

SEQ ID NO: 41260 - RNA, 22 nt, Human
auguauaugaagcuaguauuuu

SEQ ID NO: 41261 - RNA, 22 nt, Human
auguaucaauuaucugucugca

SEQ ID NO: 41262 - RNA, 22 nt, Human
auguaucacagcaauguaguca

SEQ ID NO: 41263 - RNA, 22 nt, Human
auguaucagaaauagcauuggc

SEQ ID NO: 41264 - RNA, 20 nt, Human
auguaugcaaaugucuucca

SEQ ID NO: 41265 - RNA, 22 nt, Human
auguaugcaugcuacaguuuuc

SEQ ID NO: 41266 - RNA, 22 nt, Human
auguaugggguguaugggauca

SEQ ID NO: 41267 - RNA, 22 nt, Human
augugucuuggaguuuuaaugu

SEQ ID NO: 41268 - RNA, 22 nt, Human
augugucuuucaagguauagaa

SEQ ID NO: 41269 - RNA, 22 nt, Human
augugucuuugagacucugcua

SEQ ID NO: 41270 - RNA, 22 nt, Human
augugugcauauucugccaccu

SEQ ID NO: 41271 - RNA, 18 nt, Human
auguguggcuuggggucc

SEQ ID NO: 41272 - RNA, 22 nt, Human
augugugguuuaagaauugaau

SEQ ID NO: 41273 - RNA, 22 nt, Human
auguguguauauauagucauuu

SEQ ID NO: 41274 - RNA, 22 nt, Human
auguguguaugugccuauaucu

SEQ ID NO: 41275 - RNA, 22 nt, Human
augugugugaugggcgccgcca

SEQ ID NO: 41276 - RNA, 22 nt, Human
augugugugugcgcgcgcagga

SEQ ID NO: 41277 - RNA, 22 nt, Human
auguguucacgugcacaugugc

SEQ ID NO: 41278 - RNA, 22 nt, Human
auguguuuguaccuuuaaauau

SEQ ID NO: 41279 - RNA, 22 nt, Human
auguguuuugguggaucauuca

SEQ ID NO: 41280 - RNA, 22 nt, Human
auguuaaaaaccaguacaguug

SEQ ID NO: 41281 - RNA, 22 nt, Human
auguuaaaagugaggauggcca

SEQ ID NO: 41282 - RNA, 22 nt, Human
auguuaaauagccauuuguuug

SEQ ID NO: 41283 - RNA, 22 nt, Human
auguuaacagcugcuucuggug

SEQ ID NO: 41284 - RNA, 23 nt, Human
auguuaagugaaauaggccagga

SEQ ID NO: 41285 - RNA, 17 nt, Human
auguuaauuucacauuu

SEQ ID NO: 41286 - RNA, 22 nt, Human
auguuacagagaaaguggaagc

SEQ ID NO: 41287 - RNA, 22 nt, Human
auguuaccaucuuuuaucuaca

SEQ ID NO: 41288 - RNA, 22 nt, Human
auguuaccuuguucuccaaaaa

SEQ ID NO: 41289 - RNA, 22 nt, Human
auguuagugauaguaaauagug

SEQ ID NO: 41290 - RNA, 22 nt, Human
auguuauucaauuugaauccaa

SEQ ID NO: 41291 - RNA, 22 nt, Human
auguuauugaugccugaggcuu

SEQ ID NO: 41292 - RNA, 22 nt, Human
auguuauuuauugaaacacuuu

SEQ ID NO: 41293 - RNA, 22 nt, Human
auguuauuucaaaauucccuug

SEQ ID NO: 41294 - RNA, 22 nt, Human
auguuauuuuggaaaauacaaa

SEQ ID NO: 41295 - RNA, 22 nt, Human
auguucaaacaaguuaaugcca

SEQ ID NO: 41296 - RNA, 22 nt, Human
auguucaaagaucgugcuaucc

SEQ ID NO: 41297 - RNA, 22 nt, Human
auguucagcauucuauaaauau

SEQ ID NO: 41298 - RNA, 22 nt, Human
auguucaguuagcacugaaguc

SEQ ID NO: 41299 - RNA, 22 nt, Human
auguucauuagucaacauuucu

SEQ ID NO: 41300 - RNA, 22 nt, Human
auguucauuuuauggcgaugcc

SEQ ID NO: 41301 - RNA, 22 nt, Human
auguucauuuucuuaaugugcc

SEQ ID NO: 41302 - RNA, 22 nt, Human
auguucccaagggauagaaaga

SEQ ID NO: 41303 - RNA, 22 nt, Human
auguucccagcacugaguaaca

SEQ ID NO: 41304 - RNA, 22 nt, Human
auguuccucacuauuuuggccc

SEQ ID NO: 41305 - RNA, 22 nt, Human
auguuccugauccucguucuau

SEQ ID NO: 41306 - RNA, 22 nt, Human
auguuccuuccagagagcagaa

SEQ ID NO: 41307 - RNA, 22 nt, Human
auguucuaaucccugcuaugua

SEQ ID NO: 41308 - RNA, 22 nt, Human
auguucuguuuuguaauucaua

SEQ ID NO: 41309 - RNA, 22 nt, Human
auguuggagucguaaggcaugg

SEQ ID NO: 41310 - RNA, 22 nt, Human
auguugggaaggccgcaggcac

SEQ ID NO: 41311 - RNA, 22 nt, Human
auguuguugaacucuuugcaug

SEQ ID NO: 41312 - RNA, 22 nt, Human
auguuuaaaggagucagagacu

SEQ ID NO: 41313 - RNA, 22 nt, Human
auguuuaaucggcugccuuucc

SEQ ID NO: 41314 - RNA, 22 nt, Human
auguuuaauuaucuggguuuug

SEQ ID NO: 41315 - RNA, 22 nt, Human
auguuuagucauucagcuccuu

SEQ ID NO: 41316 - RNA, 22 nt, Human
auguuuaugcaaacaugugagu

SEQ ID NO: 41317 - RNA, 22 nt, Human
auguuuauggagcagguauuag

SEQ ID NO: 41318 - RNA, 22 nt, Human
auguuuauuguuuuaagcugcu

SEQ ID NO: 41319 - RNA, 22 nt, Human
auguuucaaugcacuuuagccu

SEQ ID NO: 41320 - RNA, 22 nt, Human
auguuucaucaguaagguuuug

SEQ ID NO: 41321 - RNA, 22 nt, Human
auguuuccagcucagcugcagg

SEQ ID NO: 41322 - RNA, 22 nt, Human
auguuuccaucaaauuugauga

SEQ ID NO: 41323 - RNA, 22 nt, Human
auguuucuaaaacuugcauggc

SEQ ID NO: 41324 - RNA, 22 nt, Human
auguuucugaguguauauacau

SEQ ID NO: 41325 - RNA, 22 nt, Human
auguuugcauucuuauuaucgu

SEQ ID NO: 41326 - RNA, 22 nt, Human
auguuuguagguaagugacacu

SEQ ID NO: 41327 - RNA, 22 nt, Human
auguuuguguuacacucugcag

SEQ ID NO: 41328 - RNA, 22 nt, Human
auguuuuauauuuugcagcagu

SEQ ID NO: 41329 - RNA, 22 nt, Human
auguuuuaugcuucagaugagg

SEQ ID NO: 41330 - RNA, 22 nt, Human
auguuuuauuaccaacuuguac

SEQ ID NO: 41331 - RNA, 22 nt, Human
auguuuuccauugccauggaaa

SEQ ID NO: 41332 - RNA, 22 nt, Human
auguuuucuuucagacuucccu

SEQ ID NO: 41333 - RNA, 22 nt, Human
auguuuugauugguuaggucug

SEQ ID NO: 41334 - RNA, 22 nt, Human
auguuuugcuggauguuggcua

SEQ ID NO: 41335 - RNA, 22 nt, Human
auguuuuugagauacaaacaga

SEQ ID NO: 41336 - RNA, 22 nt, Human
auguuuuuggcuucaaguuucu

SEQ ID NO: 41337 - RNA, 22 nt, Human
auuaaaacuaaaaugccugauu

SEQ ID NO: 41338 - RNA, 22 nt, Human
auuaaaauuccaagguaugcca

SEQ ID NO: 41339 - RNA, 22 nt, Human
auuaaacaauguaaaguucuug

SEQ ID NO: 41340 - RNA, 22 nt, Human
auuaaaccccaguucucuuacu

SEQ ID NO: 41341 - RNA, 22 nt, Human
auuaaagacagcagauggaugg

SEQ ID NO: 41342 - RNA, 22 nt, Human
auuaaaugguggucauucauuu

SEQ ID NO: 41343 - RNA, 22 nt, Human
auuaaauuggacgcugggggaa

SEQ ID NO: 41344 - RNA, 22 nt, Human
auuaaauuuucacuaggcuccc

SEQ ID NO: 41345 - RNA, 22 nt, Human
auuaacagaauuuuacaugcuu

SEQ ID NO: 41346 - RNA, 22 nt, Human
auuaacaugaguuggagauagg

SEQ ID NO: 41347 - RNA, 22 nt, Human
auuaagacuauugauauuuaca

SEQ ID NO: 41348 - RNA, 22 nt, Human
auuaagaguuacaaauagagua

SEQ ID NO: 41349 - RNA, 22 nt, Human
auuaagcucuccaggaaaugua

SEQ ID NO: 41350 - RNA, 22 nt, Human
auuaaggaacaaagccuuuuga

SEQ ID NO: 41351 - RNA, 22 nt, Human
auuaaggaauguaggcaagaag

SEQ ID NO: 41352 - RNA, 22 nt, Human
auuaaguguauugcugagggua

SEQ ID NO: 41353 - RNA, 22 nt, Human
auuaauacauuauagggauugu

SEQ ID NO: 41354 - RNA, 22 nt, Human
auuaauauacacuguuagcaug

SEQ ID NO: 41355 - RNA, 22 nt, Human
auuaauauuugcaccuucuguc

SEQ ID NO: 41356 - RNA, 22 nt, Human
auuaauuuuaccuuuguaaaca

SEQ ID NO: 41357 - RNA, 22 nt, Human
auuacaaaagaagggagaaggu

SEQ ID NO: 41358 - RNA, 22 nt, Human
auuacaacuguucccacugucu

SEQ ID NO: 41359 - RNA, 22 nt, Human
auuacaagggucugacuggagg

SEQ ID NO: 41360 - RNA, 22 nt, Human
auuacaaguuucaguguuuugc

SEQ ID NO: 41361 - RNA, 22 nt, Human
auuacaaucgagagaaacaaau

SEQ ID NO: 41362 - RNA, 22 nt, Human
auguggcuggugacugccguac

SEQ ID NO: 41363 - RNA, 22 nt, Human
auguggcuuaguuaggugcccc

SEQ ID NO: 41364 - RNA, 22 nt, Human
auguggcuuggcagggaauaug

SEQ ID NO: 41365 - RNA, 22 nt, Human
auguggcuuuuccuggguuccu

SEQ ID NO: 41366 - RNA, 22 nt, Human
augugggccgugcggguguccu

SEQ ID NO: 41367 - RNA, 22 nt, Human
augugguuuuggauuauucaug

SEQ ID NO: 41368 - RNA, 22 nt, Human
auguguaaaguuagaugucuga

SEQ ID NO: 41369 - RNA, 22 nt, Human
auguguaggugaaucgaggcug

SEQ ID NO: 41370 - RNA, 22 nt, Human
auguguauauuuauuguaguuu

SEQ ID NO: 41371 - RNA, 22 nt, Human
auguguaucuaagguguucuau

SEQ ID NO: 41372 - RNA, 22 nt, Human
auguguaugucuuauucaaaga

SEQ ID NO: 41373 - RNA, 22 nt, Human
auguguauuacccuuucauucc

SEQ ID NO: 41374 - RNA, 22 nt, Human
auguguauugagcaccuacugc

SEQ ID NO: 41375 - RNA, 22 nt, Human
auguguauuuauuuggggcuua

SEQ ID NO: 41376 - RNA, 17 nt, Human
cauucuguaaucuuucu

SEQ ID NO: 41377 - RNA, 22 nt, Human
cauucugugauucuaaaucccu

SEQ ID NO: 41378 - RNA, 22 nt, Human
cauucuuauauuuacucauuca

SEQ ID NO: 41379 - RNA, 22 nt, Human
cauucuugcaccgugauggcuu

SEQ ID NO: 41380 - RNA, 22 nt, Human
cauugaaacagauguacccaug

SEQ ID NO: 41381 - RNA, 22 nt, Human
cauugcacgggcgucugucugu

SEQ ID NO: 41382 - RNA, 22 nt, Human
cauugcacuucugcuuuuccuc

SEQ ID NO: 41383 - RNA, 22 nt, Human
cauugcugcuuccaggcacagg

SEQ ID NO: 41384 - RNA, 22 nt, Human
cauugcuuaucuaguucacaua

SEQ ID NO: 41385 - RNA, 22 nt, Human
cauugcuuccuaugucccuucu

SEQ ID NO: 41386 - RNA, 22 nt, Human
cauugcuugauagcugaaaauu

SEQ ID NO: 41387 - RNA, 22 nt, Human
cauugggcggggaccucggcug

SEQ ID NO: 41388 - RNA, 22 nt, Human
cauugguuugauauugccaugg

SEQ ID NO: 41389 - RNA, 22 nt, Human
cauuguaagcuguugaauccuc

SEQ ID NO: 41390 - RNA, 18 nt, Human
cauuguacaaugcuuuau

SEQ ID NO: 41391 - RNA, 22 nt, Human
cauuguacaguuauuuuaaaau

SEQ ID NO: 41392 - RNA, 21 nt, Human
cauugucgacauuuuccccuc

SEQ ID NO: 41393 - RNA, 22 nt, Human
cauugucucuugucauuuagua

SEQ ID NO: 41394 - RNA, 22 nt, Human
cauuguugaacaccugcuggau

SEQ ID NO: 41395 - RNA, 22 nt, Human
cauuguugcugcuucaagauau

SEQ ID NO: 41396 - RNA, 22 nt, Human
auuucaacacuuuuggaauuag

SEQ ID NO: 41397 - RNA, 22 nt, Human
auuucaacauucucaguuguag

SEQ ID NO: 41398 - RNA, 19 nt, Human
auuucaagagguuuauugg

SEQ ID NO: 41399 - RNA, 22 nt, Human
auuucaaggacuacuuuucaau

SEQ ID NO: 41400 - RNA, 22 nt, Human
auuucaaguguugagcucauaa

SEQ ID NO: 41401 - RNA, 22 nt, Human
auuucacagcgugguugacugc

SEQ ID NO: 41402 - RNA, 22 nt, Human
auuucacagcugcuguucaggu

SEQ ID NO: 41403 - RNA, 22 nt, Human
auuucacagcugucaguguuac

SEQ ID NO: 41404 - RNA, 22 nt, Human
auuucagaguagaucguuauuu

SEQ ID NO: 41405 - RNA, 20 nt, Human
auuucaguguuugcaauuuc

SEQ ID NO: 41406 - RNA, 22 nt, Human
auuucaguguuuuaagaguuca

SEQ ID NO: 41407 - RNA, 22 nt, Human
auuucaucccaggcucuggaag

SEQ ID NO: 41408 - RNA, 22 nt, Human
auuucaucucuggaacauaacu

SEQ ID NO: 41409 - RNA, 22 nt, Human
auuucauggcagacuuuaaccc

SEQ ID NO: 41410 - RNA, 22 nt, Human
auuucauguaaauggaaugaua

SEQ ID NO: 41411 - RNA, 22 nt, Human
auuucauguugaucuuucgagg

SEQ ID NO: 41412 - RNA, 22 nt, Human
auuuccaacuaccccuccauuu

SEQ ID NO: 41413 - RNA, 22 nt, Human
auuuccaagaaagcuuuaggau

SEQ ID NO: 41414 - RNA, 21 nt, Human
auuuccaaggguaccuaagau

SEQ ID NO: 41415 - RNA, 22 nt, Human
auuuccaagguaauuuugagua

SEQ ID NO: 41416 - RNA, 22 nt, Human
auuuccaccaucucucugggcc

SEQ ID NO: 41417 - RNA, 16 nt, Human
auuuccagauuaugca

SEQ ID NO: 41418 - RNA, 22 nt, Human
auuuccaggaguugaggucuga

SEQ ID NO: 41419 - RNA, 22 nt, Human
auuuccagugcacugaauagaa

SEQ ID NO: 41420 - RNA, 22 nt, Human
auuuccaugaaguuuaguuaua

SEQ ID NO: 41421 - RNA, 22 nt, Human
auuucccacucaggccgcggcg

SEQ ID NO: 41422 - RNA, 22 nt, Human
auuucccagggcccucauaguu

SEQ ID NO: 41423 - RNA, 22 nt, Human
auuuccucaugaucauaaugca

SEQ ID NO: 41424 - RNA, 17 nt, Human
auuuccugcaagccccu

SEQ ID NO: 41425 - RNA, 22 nt, Human
auuuccugcaggggcugguggg

SEQ ID NO: 41426 - RNA, 22 nt, Human
auuuccuguaccuaucaaggca

SEQ ID NO: 41427 - RNA, 16 nt, Human
auuuccuugugaguuu

SEQ ID NO: 41428 - RNA, 22 nt, Human
auuucuagaggcagcuucuagg

SEQ ID NO: 41429 - RNA, 22 nt, Human
auuucuagauauggagaguggu

SEQ ID NO: 41430 - RNA, 23 nt, Human
auuucuaggggauuuucuggugc

SEQ ID NO: 41431 - RNA, 22 nt, Human
auuucucaaccaggucaaaaag

SEQ ID NO: 41432 - RNA, 22 nt, Human
auuucucaaguaaaugagucau

SEQ ID NO: 41433 - RNA, 22 nt, Human
auuucucacccuaccucacucc

SEQ ID NO: 41434 - RNA, 22 nt, Human
auuucucacugagcagauaaaa

SEQ ID NO: 41435 - RNA, 22 nt, Human
auuucucaucaagugccaacuc

SEQ ID NO: 41436 - RNA, 22 nt, Human
auuucucauuaagaucuuccaa

SEQ ID NO: 41437 - RNA, 22 nt, Human
auuucuccuccagauggugguu

SEQ ID NO: 41438 - RNA, 22 nt, Human
auuucucugcaguguucggaau

SEQ ID NO: 41439 - RNA, 22 nt, Human
auuucucugccucagcuucugc

SEQ ID NO: 41440 - RNA, 22 nt, Human
auuucucuuagcaagacauuac

SEQ ID NO: 41441 - RNA, 22 nt, Human
auuucugauacccggucacccu

SEQ ID NO: 41442 - RNA, 22 nt, Human
auuucuggauuuuggaugcugc

SEQ ID NO: 41443 - RNA, 22 nt, Human
auuucuguaacuuaugaaaguu

SEQ ID NO: 41444 - RNA, 22 nt, Human
auuucuguaguccacauucuuu

SEQ ID NO: 41445 - RNA, 22 nt, Human
auuucuguggcuucauucuccu

SEQ ID NO: 41446 - RNA, 22 nt, Human
auuucuuaaaacuucagggaga

SEQ ID NO: 41447 - RNA, 22 nt, Human
auuucuuaugaauauugacugu

SEQ ID NO: 41448 - RNA, 22 nt, Human
auuucuucagguucuucuagga

SEQ ID NO: 41449 - RNA, 22 nt, Human
auuucuuccuucuccuagaaga

SEQ ID NO: 41450 - RNA, 22 nt, Human
auuucuugugggaaaugcagca

SEQ ID NO: 41451 - RNA, 22 nt, Human
auuucuuucuggccacgguuuu

SEQ ID NO: 41452 - RNA, 22 nt, Human
auuucuuuucaagagggugcuu

SEQ ID NO: 41453 - RNA, 22 nt, Human
auuugaaaucuggguuacucug

SEQ ID NO: 41454 - RNA, 22 nt, Human
auuugaauggcuuaacacaacg

SEQ ID NO: 41455 - RNA, 22 nt, Human
auuugcaaagguuaacagcagu

SEQ ID NO: 41456 - RNA, 22 nt, Human
auuugcaaagucguaucuguga

SEQ ID NO: 41457 - RNA, 22 nt, Human
auuugcaagcaugcacaaaagc

SEQ ID NO: 41458 - RNA, 22 nt, Human
auuugcaauuuuacuuugcagu

SEQ ID NO: 41459 - RNA, 22 nt, Human
auuugcagagcucugaauuuug

SEQ ID NO: 41460 - RNA, 22 nt, Human
auuugcaugcuucuauugugaa

SEQ ID NO: 41461 - RNA, 21 nt, Human
auuugcauuaaaauauuacgc

SEQ ID NO: 41462 - RNA, 22 nt, Human
auuugcauuuacauagcauaga

SEQ ID NO: 41463 - RNA, 22 nt, Human
auuugccaugaagaguguuuga

SEQ ID NO: 41464 - RNA, 22 nt, Human
auuugccuuggugauuuguaaa

SEQ ID NO: 41465 - RNA, 22 nt, Human
auuugcuaguggaauuuuccug

SEQ ID NO: 41466 - RNA, 22 nt, Human
auuugcucuagcugcagugaau

SEQ ID NO: 41467 - RNA, 22 nt, Human
auuugcuuaucuccacaguugu

SEQ ID NO: 41468 - RNA, 22 nt, Human
auuugcuuggucuucucuccgu

SEQ ID NO: 41469 - RNA, 19 nt, Human
auuugcuugucugcucugc

SEQ ID NO: 41470 - RNA, 22 nt, Human
auuugcuuuaagguauaaaagg

SEQ ID NO: 41471 - RNA, 22 nt, Human
auuuggaaaagcgguaacuugc

SEQ ID NO: 41472 - RNA, 22 nt, Human
auuuggaaaugcaucucuugag

SEQ ID NO: 41473 - RNA, 22 nt, Human
auuuggaagcauuuccaaagca

SEQ ID NO: 41474 - RNA, 22 nt, Human
auuuggaaggcguuucucugua

SEQ ID NO: 41475 - RNA, 22 nt, Human
auuuggauucuuauuuagcacu

SEQ ID NO: 41476 - RNA, 22 nt, Human
auuuggcacacuggguucucgu

SEQ ID NO: 41477 - RNA, 22 nt, Human
auuugggaauuauuugccuaau

SEQ ID NO: 41478 - RNA, 22 nt, Human
auuuggucacaccaguccacau

SEQ ID NO: 41479 - RNA, 22 nt, Human
auuuggucacuaggaaaaucaa

SEQ ID NO: 41480 - RNA, 22 nt, Human
auuuggugccugggaaaucucu

SEQ ID NO: 41481 - RNA, 22 nt, Human
auuuggugguuccuuuuccgaa

SEQ ID NO: 41482 - RNA, 22 nt, Human
auuugguguucaucuuuuagug

SEQ ID NO: 41483 - RNA, 22 nt, Human
auuuguaacacgugacagguug

SEQ ID NO: 41484 - RNA, 22 nt, Human
auuuguaagcuagagccaugau

SEQ ID NO: 41485 - RNA, 22 nt, Human
caaauagugucacauugugagg

SEQ ID NO: 41486 - RNA, 22 nt, Human
caaauaucuuuggcaaagagaa

SEQ ID NO: 41487 - RNA, 22 nt, Human
caaaucacaaugugagacugag

SEQ ID NO: 41488 - RNA, 22 nt, Human
caaaucauggaauaacuagaga

SEQ ID NO: 41489 - RNA, 17 nt, Human
caaauccuaggaugucu

SEQ ID NO: 41490 - RNA, 22 nt, Human
caaauccucaccucaucaugaa

SEQ ID NO: 41491 - RNA, 22 nt, Human
caaauccugcagggcuuagaug

SEQ ID NO: 41492 - RNA, 22 nt, Human
caaauccuggagccaugguaac

SEQ ID NO: 41493 - RNA, 22 nt, Human
caaaucuaggaugcauguagug

SEQ ID NO: 41494 - RNA, 22 nt, Human
caaaucugagucuacaauuuua

SEQ ID NO: 41495 - RNA, 22 nt, Human
caaaugaaaauggcgucuugga

SEQ ID NO: 41496 - RNA, 22 nt, Human
caaaugaagguggugggucauu

SEQ ID NO: 41497 - RNA, 22 nt, Human
caaaugaauuucccugcaaaug

SEQ ID NO: 41498 - RNA, 22 nt, Human
caaaugaugcauggcuagugag

SEQ ID NO: 41499 - RNA, 22 nt, Human
caaaugcauagaaagaugaaac

SEQ ID NO: 41500 - RNA, 22 nt, Human
caaaugcauaguuuauaagaag

SEQ ID NO: 41501 - RNA, 22 nt, Human
caaaugcuacuaauaggcaagu

SEQ ID NO: 41502 - RNA, 22 nt, Human
caaaugcuaugauuuugaguuu

SEQ ID NO: 41503 - RNA, 22 nt, Human
caaauggcuggcauccuucuac

SEQ ID NO: 41504 - RNA, 19 nt, Human
caaaugggacaggaaggca

SEQ ID NO: 41505 - RNA, 22 nt, Human
caaauguaauaaggaguuuccc

SEQ ID NO: 41506 - RNA, 23 nt, Human
caaauguaguguguccaccccug

SEQ ID NO: 41507 - RNA, 22 nt, Human
caaauguauaaauguacuuucu

SEQ ID NO: 41508 - RNA, 22 nt, Human
caaauguguagagcuuuugggg

SEQ ID NO: 41509 - RNA, 22 nt, Human
caaauguguuuuuucuucuaca

SEQ ID NO: 41510 - RNA, 22 nt, Human
caaauguuauucauucuuguuu

SEQ ID NO: 41511 - RNA, 22 nt, Human
caaauguugacuaagaggguuu

SEQ ID NO: 41512 - RNA, 22 nt, Human
caaauguugcuguaauguuugu

SEQ ID NO: 41513 - RNA, 22 nt, Human
caaauuaaugugucucaaaaua

SEQ ID NO: 41514 - RNA, 22 nt, Human
caaauucaaauuucaucagugu

SEQ ID NO: 41515 - RNA, 22 nt, Human
ccacaggaccagaggagaucac

SEQ ID NO: 41516 - RNA, 22 nt, Human
ccacaggaggaacaauuagaug

SEQ ID NO: 41517 - RNA, 20 nt, Human
ccacaggaguccagucgacc

SEQ ID NO: 41518 - RNA, 22 nt, Human
ccacagggacuguuaaaacccu

SEQ ID NO: 41519 - RNA, 22 nt, Human
ccacagggauaggaauggggcu

SEQ ID NO: 41520 - RNA, 22 nt, Human
ccacagggccuuuccugcuggc

SEQ ID NO: 41521 - RNA, 22 nt, Human
ccacagguacggauugaggacc

SEQ ID NO: 41522 - RNA, 22 nt, Human
ccacaguacaggaaaucuuguu

SEQ ID NO: 41523 - RNA, 22 nt, Human
ccacaguagaauucaucucccu

SEQ ID NO: 41524 - RNA, 22 nt, Human
ccacagugaucccugccugcga

SEQ ID NO: 41525 - RNA, 22 nt, Human
ccacagugguuguggcaugugg

SEQ ID NO: 41526 - RNA, 22 nt, Human
ccacaguguuuugucacauuag

SEQ ID NO: 41527 - RNA, 22 nt, Human
ccacaguuucuucaucuauaaa

SEQ ID NO: 41528 - RNA, 22 nt, Human
ccacaucuaucuuuaguaugaa

SEQ ID NO: 41529 - RNA, 22 nt, Human
ccacaucucuugauguaccuac

SEQ ID NO: 41530 - RNA, 22 nt, Human
ccacaugagcuggcaaugcccu

SEQ ID NO: 41531 - RNA, 22 nt, Human
ccacaugaugaggaagcugaac

SEQ ID NO: 41532 - RNA, 22 nt, Human
ccacaugcucaccaagucccug

SEQ ID NO: 41533 - RNA, 22 nt, Human
ccacaugcucucucuccagguu

SEQ ID NO: 41534 - RNA, 23 nt, Human
ccacauggcaagaugaugcauuc

SEQ ID NO: 41535 - RNA, 22 nt, Human
ccacaugguccucauuuacucu

SEQ ID NO: 41536 - RNA, 21 nt, Human
ccacauggugaaacccuaucu

SEQ ID NO: 41537 - RNA, 21 nt, Human
ccacauucucauucugacugc

SEQ ID NO: 41538 - RNA, 22 nt, Human
ccacauuuacugauguauguau

SEQ ID NO: 41539 - RNA, 20 nt, Human
ccacauuuuacuguuugcca

SEQ ID NO: 41540 - RNA, 22 nt, Human
ccacauuuuugauacucucacu

SEQ ID NO: 41541 - RNA, 22 nt, Human
ccaccacauuugccuagacuuu

SEQ ID NO: 41542 - RNA, 22 nt, Human
ccaccacugaggcacaggagcc

SEQ ID NO: 41543 - RNA, 22 nt, Human
ccaccaggcucuguccgagcgg

SEQ ID NO: 41544 - RNA, 21 nt, Human
ccaccaggucuucugcucggg

SEQ ID NO: 41545 - RNA, 22 nt, Human
ccaccaugggaagagagacuaa

SEQ ID NO: 41546 - RNA, 22 nt, Human
ccaccauuauaucucccaugcc

SEQ ID NO: 41547 - RNA, 22 nt, Human
ccacccacaaccagcuggcugu

SEQ ID NO: 41548 - RNA, 18 nt, Human
ccacccagggggagagga

SEQ ID NO: 41549 - RNA, 22 nt, Human
ccacccaugugacuaccucaug

SEQ ID NO: 41550 - RNA, 22 nt, Human
ccaccccugggugcagggagcg

SEQ ID NO: 41551 - RNA, 22 nt, Human
ccacccuaacaauccuuacugu

SEQ ID NO: 41552 - RNA, 22 nt, Human
ccacccugccuugggccaguga

SEQ ID NO: 41553 - RNA, 20 nt, Human
ccacccugcuaagaauacac

SEQ ID NO: 41554 - RNA, 22 nt, Human
ccacccuguguuuuugccauug

SEQ ID NO: 41555 - RNA, 22 nt, Human
ccaccgaaacgucugcggaucc

SEQ ID NO: 41556 - RNA, 22 nt, Human
ccaccgccauggcguuguacag

SEQ ID NO: 41557 - RNA, 22 nt, Human
ccaccuccuaggccuggagaag

SEQ ID NO: 41558 - RNA, 22 nt, Human
ccaccugugcuugguacuccau

SEQ ID NO: 41559 - RNA, 22 nt, Human
ccacgagggaaccagguggggu

SEQ ID NO: 41560 - RNA, 22 nt, Human
ccacgcucauccucucugagag

SEQ ID NO: 41561 - RNA, 22 nt, Human
ccacguguagguggacaggauc

SEQ ID NO: 41562 - RNA, 22 nt, Human
ccacuaguuuaauaccuuccuu

SEQ ID NO: 41563 - RNA, 21 nt, Human
ccacucaugacuccacucacc

SEQ ID NO: 41564 - RNA, 22 nt, Human
ccacucugauuucaagggagau

SEQ ID NO: 41565 - RNA, 23 nt, Human
ccacugaagaauccagggaguuu

SEQ ID NO: 41566 - RNA, 22 nt, Human
ccacugcccccugaagaccagg

SEQ ID NO: 41567 - RNA, 22 nt, Human
ccacugccuauuugcagggccc

SEQ ID NO: 41568 - RNA, 22 nt, Human
ccacugcuaacuugcugcagcu

SEQ ID NO: 41569 - RNA, 22 nt, Human
ccacugcuagagaugcaucccc

SEQ ID NO: 41570 - RNA, 22 nt, Human
ccacuggcuuuuccuaggucuc

SEQ ID NO: 41571 - RNA, 22 nt, Human
ccacuguaaccauuaucaccau

SEQ ID NO: 41572 - RNA, 22 nt, Human
ccacuguaaguuugaaaauaac

SEQ ID NO: 41573 - RNA, 22 nt, Human
ccacuguagagauuugaaugcc

SEQ ID NO: 41574 - RNA, 22 nt, Human
ccacugucugugacaucagaaa

SEQ ID NO: 41575 - RNA, 22 nt, Human
ccacugugagcaugaacaggac

SEQ ID NO: 41576 - RNA, 22 nt, Human
ccacugugcccagccucauggg

SEQ ID NO: 41577 - RNA, 22 nt, Human
ccacuguguccaccaggaaugc

SEQ ID NO: 41578 - RNA, 22 nt, Human
ccacuguuggcccgaagggguc

SEQ ID NO: 41579 - RNA, 22 nt, Human
ccacuguuuccuuucugcuggc

SEQ ID NO: 41580 - RNA, 22 nt, Human
ccacuguuuuucaguuaacuuu

SEQ ID NO: 41581 - RNA, 22 nt, Human
ccacuucaucccagcucagaua

SEQ ID NO: 41582 - RNA, 22 nt, Human
ccacuugaaucaaauucuuagg

SEQ ID NO: 41583 - RNA, 22 nt, Human
ccacuugaauuuuagugguuuu

SEQ ID NO: 41584 - RNA, 22 nt, Human
ccacuuugagaagcugaugaaa

SEQ ID NO: 41585 - RNA, 22 nt, Human
ccacuuugcaagauauucagag

SEQ ID NO: 41586 - RNA, 22 nt, Human
ccacuuuggcaccuucugccua

SEQ ID NO: 41587 - RNA, 22 nt, Human
ccacuuuucacuaagaugaauu

SEQ ID NO: 41588 - RNA, 22 nt, Human
ccagaaaaggagcugcaggaug

SEQ ID NO: 41589 - RNA, 22 nt, Human
ccagaaacaccuggauucuguu

SEQ ID NO: 41590 - RNA, 22 nt, Human
ccagaagaccccguccaccucc

SEQ ID NO: 41591 - RNA, 22 nt, Human
ccagaagagaucacaguucuug

SEQ ID NO: 41592 - RNA, 20 nt, Human
ccagaagcacucuucauguu

SEQ ID NO: 41593 - RNA, 22 nt, Human
ccagaagcagagccugaggcag

SEQ ID NO: 41594 - RNA, 22 nt, Human
cacuguccaauagauacauaau

SEQ ID NO: 41595 - RNA, 22 nt, Human
cacugucuugauuacuaugggu

SEQ ID NO: 41596 - RNA, 22 nt, Human
cacugucuuuugugaagacaau

SEQ ID NO: 41597 - RNA, 22 nt, Human
cacuguggaauuagaauaaccu

SEQ ID NO: 41598 - RNA, 22 nt, Human
cacuguggcuuaccaaagcuaa

SEQ ID NO: 41599 - RNA, 22 nt, Human
cacugugggccugucgugggug

SEQ ID NO: 41600 - RNA, 17 nt, Human
cacugugggggcauuua

SEQ ID NO: 41601 - RNA, 22 nt, Human
cacugugucagaguaugaugau

SEQ ID NO: 41602 - RNA, 22 nt, Human
cacugugucuggagugagcugg

SEQ ID NO: 41603 - RNA, 22 nt, Human
cacuguucaucaaaacugcucu

SEQ ID NO: 41604 - RNA, 22 nt, Human
cacuguugagcaauguacagug

SEQ ID NO: 41605 - RNA, 22 nt, Human
cacuguuuuauuccaacauagg

SEQ ID NO: 41606 - RNA, 22 nt, Human
cacuucaacaguuauuucuuag

SEQ ID NO: 41607 - RNA, 22 nt, Human
cacuucaagagcaagggugcca

SEQ ID NO: 41608 - RNA, 22 nt, Human
cacuucaaucucugccuccauc

SEQ ID NO: 41609 - RNA, 22 nt, Human
cacuucacuuggaugccuuuuc

SEQ ID NO: 41610 - RNA, 22 nt, Human
cacuucagguucuggcagggcg

SEQ ID NO: 41611 - RNA, 22 nt, Human
cacuucuguugccuugugcaau

SEQ ID NO: 41612 - RNA, 22 nt, Human
cacuugaaauauuaggggugau

SEQ ID NO: 41613 - RNA, 22 nt, Human
cacuugaacccgggaggcugag

SEQ ID NO: 41614 - RNA, 22 nt, Human
cacuugaaguuugggggacucu

SEQ ID NO: 41615 - RNA, 21 nt, Human
cacuugaaugguguuuuacaa

SEQ ID NO: 41616 - RNA, 21 nt, Human
cacuuuaaaaauaucuuuaua

SEQ ID NO: 41617 - RNA, 22 nt, Human
cacuuuauaaaauuggugugag

SEQ ID NO: 41618 - RNA, 19 nt, Human
cacuuuauuucuguuuugu

SEQ ID NO: 41619 - RNA, 22 nt, Human
cacuuucucaugaauuuggccc

SEQ ID NO: 41620 - RNA, 22 nt, Human
cacuuucuguguaucuuccauu

SEQ ID NO: 41621 - RNA, 22 nt, Human
cacuuugaagagcuuuuugaca

SEQ ID NO: 41622 - RNA, 22 nt, Human
cacuuugaugcagggcucagua

SEQ ID NO: 41623 - RNA, 22 nt, Human
cacuuugauuugugaugugaga

SEQ ID NO: 41624 - RNA, 22 nt, Human
cacuuugcaggguggugggagg

SEQ ID NO: 41625 - RNA, 22 nt, Human
cacuuugccucuuaccuguggu

SEQ ID NO: 41626 - RNA, 19 nt, Human
cacuuugcugaacucuucu

SEQ ID NO: 41627 - RNA, 22 nt, Human
cagaaaaccugacucuagaacu

SEQ ID NO: 41628 - RNA, 22 nt, Human
cagaaaaggguguuuguucagg

SEQ ID NO: 41629 - RNA, 22 nt, Human
cagaaaccucccugaauauuuu

SEQ ID NO: 41630 - RNA, 22 nt, Human
cagaaacugcuccccugguagg

SEQ ID NO: 41631 - RNA, 22 nt, Human
cagaaagcagagcugagccuuu

SEQ ID NO: 41632 - RNA, 22 nt, Human
cagaaagcccuauguacagugg

SEQ ID NO: 41633 - RNA, 22 nt, Human
cagaaagcgggaugcagcaugu

SEQ ID NO: 41634 - RNA, 22 nt, Human
cagaaagcucuuucaaucuugc

SEQ ID NO: 41635 - RNA, 22 nt, Human
cagaaagcuuaggcaaguugga

SEQ ID NO: 41636 - RNA, 22 nt, Human
cagaaaggacuuugguuggcuu

SEQ ID NO: 41637 - RNA, 18 nt, Human
cagaaaguuauuuacucu

SEQ ID NO: 41638 - RNA, 23 nt, Human
cagaaaguuugagaagauacauc

SEQ ID NO: 41639 - RNA, 23 nt, Human
cagaaauaaacugguuuguagau

SEQ ID NO: 41640 - RNA, 22 nt, Human
cagaaauaaaguggacagagua

SEQ ID NO: 41641 - RNA, 22 nt, Human
cagaaauagacaauggcagugg

SEQ ID NO: 41642 - RNA, 22 nt, Human
cagaaauaugugccaugccuua

SEQ ID NO: 41643 - RNA, 22 nt, Human
cagaaaucuccaugucagacau

SEQ ID NO: 41644 - RNA, 22 nt, Human
cagaaauggaaguucugguuua

SEQ ID NO: 41645 - RNA, 22 nt, Human
cagaaauggucuguucagcuua

SEQ ID NO: 41646 - RNA, 22 nt, Human
cagaaauguuuaugcuuuugaa

SEQ ID NO: 41647 - RNA, 22 nt, Human
cagaaauucccauuucagauuc

SEQ ID NO: 41648 - RNA, 22 nt, Human
cagaacagaaacguuguuccau

SEQ ID NO: 41649 - RNA, 19 nt, Human
cagaacagaggucauggcc

SEQ ID NO: 41650 - RNA, 22 nt, Human
cagaacaguaccuagcacauag

SEQ ID NO: 41651 - RNA, 22 nt, Human
cagaacauccccacugcuaccu

SEQ ID NO: 41652 - RNA, 20 nt, Human
cagaacaugagcaucgagcc

SEQ ID NO: 41653 - RNA, 22 nt, Human
cagaacaugauauaaacagaag

SEQ ID NO: 41654 - RNA, 22 nt, Human
cagaacauucuugccaguacau

SEQ ID NO: 41655 - RNA, 22 nt, Human
cagaacuguuauaacagcuguu

SEQ ID NO: 41656 - RNA, 22 nt, Human
cagaagaaaguggggagacaag

SEQ ID NO: 41657 - RNA, 22 nt, Human
cagaagaguagcugaacaaguu

SEQ ID NO: 41658 - RNA, 20 nt, Human
cagaagcaaggcagguaccu

SEQ ID NO: 41659 - RNA, 18 nt, Human
cagaagcaggcagugcag

SEQ ID NO: 41660 - RNA, 22 nt, Human
cagaagcauuccagcaaauagu

SEQ ID NO: 41661 - RNA, 22 nt, Human
cagaagccugccucagaugcac

SEQ ID NO: 41662 - RNA, 22 nt, Human
cagaaggcaaacaaaaggauuu

SEQ ID NO: 41663 - RNA, 22 nt, Human
cagaaggcaaggccugccacgc

SEQ ID NO: 41664 - RNA, 22 nt, Human
cagaaggcagcaaaugaaaacc

SEQ ID NO: 41665 - RNA, 22 nt, Human
cagaaggcuggcagauugagau

SEQ ID NO: 41666 - RNA, 22 nt, Human
cagaagggacaggguuuguaga

SEQ ID NO: 41667 - RNA, 22 nt, Human
cagaagggcagcacugggaagg

SEQ ID NO: 41668 - RNA, 22 nt, Human
cagaagguuuacacuggacugu

SEQ ID NO: 41669 - RNA, 22 nt, Human
cagaaguaagauuacugugagu

SEQ ID NO: 41670 - RNA, 20 nt, Human
cccagguaggugccaugagu

SEQ ID NO: 41671 - RNA, 22 nt, Human
cccagguaguuggaagagacaa

SEQ ID NO: 41672 - RNA, 22 nt, Human
cccagguccccaccugucugcu

SEQ ID NO: 41673 - RNA, 22 nt, Human
cccaggucccgccccagcucua

SEQ ID NO: 41674 - RNA, 22 nt, Human
cccaggucuaugccagcucuga

SEQ ID NO: 41675 - RNA, 22 nt, Human
cccaggucugugccagcucuga

SEQ ID NO: 41676 - RNA, 22 nt, Human
cccaguaagaagcuggcaccag

SEQ ID NO: 41677 - RNA, 22 nt, Human
cccaguaaucggagaguacuua

SEQ ID NO: 41678 - RNA, 22 nt, Human
cccaguaccucuguucccugcu

SEQ ID NO: 41679 - RNA, 22 nt, Human
cccaguauugagcuacaggccu

SEQ ID NO: 41680 - RNA, 22 nt, Human
cccaguccuaaagcagacgcca

SEQ ID NO: 41681 - RNA, 19 nt, Human
cccagucuagguccuagga

SEQ ID NO: 41682 - RNA, 18 nt, Human
cccagugcucacugccuc

SEQ ID NO: 41683 - RNA, 22 nt, Human
cccaguggcccagcauguggug

SEQ ID NO: 41684 - RNA, 22 nt, Human
cccaguggcuuuugcccagguu

SEQ ID NO: 41685 - RNA, 22 nt, Human
cccagugucuccaacaucagau

SEQ ID NO: 41686 - RNA, 22 nt, Human
cccagugugccccuccugcagc

SEQ ID NO: 41687 - RNA, 22 nt, Human
cccaguguuccuugaggggcug

SEQ ID NO: 41688 - RNA, 22 nt, Human
cccaucaggaacccaggagccc

SEQ ID NO: 41689 - RNA, 22 nt, Human
cccaugacucucauucacaguc

SEQ ID NO: 41690 - RNA, 22 nt, Human
cccaugccuucugacucacagg

SEQ ID NO: 41691 - RNA, 23 nt, Human
cccaugcugggcgcagugaaugg

SEQ ID NO: 41692 - RNA, 22 nt, Human
cccaugcugugccuagagagca

SEQ ID NO: 41693 - RNA, 22 nt, Human
cccauggcaauaaggucacagg

SEQ ID NO: 41694 - RNA, 22 nt, Human
cccauggcagucagagauaaga

SEQ ID NO: 41695 - RNA, 22 nt, Human
cccauggcuuaggagggagugu

SEQ ID NO: 41696 - RNA, 22 nt, Human
cccauucccuuuacuguugcau

SEQ ID NO: 41697 - RNA, 22 nt, Human
cccauuuagaccuauucugccc

SEQ ID NO: 41698 - RNA, 22 nt, Human
cccauuuguauagagccuuaua

SEQ ID NO: 41699 - RNA, 22 nt, Human
cccauuuguccaaaguauaaaa

SEQ ID NO: 41700 - RNA, 22 nt, Human
cccauuuuagcaagggguggcg

SEQ ID NO: 41701 - RNA, 22 nt, Human
ccccaaaauucuuaaguugaau

SEQ ID NO: 41702 - RNA, 22 nt, Human
ccccaaggugcucacugucugg

SEQ ID NO: 41703 - RNA, 22 nt, Human
cccuggauuuacaucauucuga

SEQ ID NO: 41704 - RNA, 22 nt, Human
cccuggcaaaacacucucuuga

SEQ ID NO: 41705 - RNA, 17 nt, Human
cccuggcaaagaauggc

SEQ ID NO: 41706 - RNA, 22 nt, Human
cccuggcagaagguguagaagc

SEQ ID NO: 41707 - RNA, 22 nt, Human
cccuggcagagggggcaggugc

SEQ ID NO: 41708 - RNA, 22 nt, Human
cccuggcagcaaucacuggugu

SEQ ID NO: 41709 - RNA, 22 nt, Human
cccuggcaugcaugucccuggc

SEQ ID NO: 41710 - RNA, 22 nt, Human
cccuggccagcucaugucugag

SEQ ID NO: 41711 - RNA, 22 nt, Human
cccuggccuccaggcaguccug

SEQ ID NO: 41712 - RNA, 22 nt, Human
cccuggcucuucaccaccugcc

SEQ ID NO: 41713 - RNA, 22 nt, Human
cccuggcugcuaccagguagcu

SEQ ID NO: 41714 - RNA, 22 nt, Human
cccuggcuuaaaaaccucauau

SEQ ID NO: 41715 - RNA, 22 nt, Human
cccuggcuuggcacucuccacu

SEQ ID NO: 41716 - RNA, 22 nt, Human
cccugggaaguauuccagcuau

SEQ ID NO: 41717 - RNA, 22 nt, Human
cccugggacccgcugcagaggc

SEQ ID NO: 41718 - RNA, 22 nt, Human
cccugggagcugccuggcugac

SEQ ID NO: 41719 - RNA, 22 nt, Human
cccugggauggauuggcaggaa

SEQ ID NO: 41720 - RNA, 22 nt, Human
cccugggcagucugcacuucag

SEQ ID NO: 41721 - RNA, 22 nt, Human
cccugggcucagagcagguagc

SEQ ID NO: 41722 - RNA, 22 nt, Human
cccuggggagcaggcgaaggag

SEQ ID NO: 41723 - RNA, 22 nt, Human
cccuggguucuggcugggcugc

SEQ ID NO: 41724 - RNA, 22 nt, Human
cccugguucagguuucucugaa

SEQ ID NO: 41725 - RNA, 21 nt, Human
cccugguuccacugucaccgc

SEQ ID NO: 41726 - RNA, 22 nt, Human
cccuguacagucucuguggcac

SEQ ID NO: 41727 - RNA, 22 nt, Human
cccuguauagauacaggucaua

SEQ ID NO: 41728 - RNA, 22 nt, Human
cccugucucauugaucacuugu

SEQ ID NO: 41729 - RNA, 20 nt, Human
cccugugauuggcaaguguc

SEQ ID NO: 41730 - RNA, 22 nt, Human
cccugugcacacacuucacucu

SEQ ID NO: 41731 - RNA, 22 nt, Human
cccugugcauuggaggguguuu

SEQ ID NO: 41732 - RNA, 22 nt, Human
cccugugccucaguuuccucau

SEQ ID NO: 41733 - RNA, 22 nt, Human
cccuguggaggcagcauccugc

SEQ ID NO: 41734 - RNA, 22 nt, Human
cccuguggcaggaggaggagca

SEQ ID NO: 41735 - RNA, 22 nt, Human
cccugugggaacuccugaguug

SEQ ID NO: 41736 - RNA, 22 nt, Human
cccuguuuaagaaaccuguaaa

SEQ ID NO: 41737 - RNA, 22 nt, Human
cccuguuuauuuuuggagagaa

SEQ ID NO: 41738 - RNA, 22 nt, Human
cccuguuuuaaguugauauuga

SEQ ID NO: 41739 - RNA, 22 nt, Human
cccuuagaacaacauuagcaua

SEQ ID NO: 41740 - RNA, 22 nt, Human
cccuuagagauucugucagagu

SEQ ID NO: 41741 - RNA, 22 nt, Human
cccuuagccaggaaaucgaccu

SEQ ID NO: 41742 - RNA, 22 nt, Human
cccuuagcuccaagggguuugg

SEQ ID NO: 41743 - RNA, 22 nt, Human
cccuuagcuggugagcccagcg

SEQ ID NO: 41744 - RNA, 22 nt, Human
cccuucaagcucucuggguuuu

SEQ ID NO: 41745 - RNA, 22 nt, Human
cccuucagugcgugagaaugag

SEQ ID NO: 41746 - RNA, 22 nt, Human
cccuuccucaaggagcuguguu

SEQ ID NO: 41747 - RNA, 22 nt, Human
cccuugagguagacugaacacc

SEQ ID NO: 41748 - RNA, 22 nt, Human
cccuugcacauuugucuuuaau

SEQ ID NO: 41749 - RNA, 21 nt, Human
cccuugccugcacuccucggc

SEQ ID NO: 41750 - RNA, 22 nt, Human
cccuuggaggaagcucuaggcu

SEQ ID NO: 41751 - RNA, 22 nt, Human
cccuugggccccagcucagggc

SEQ ID NO: 41752 - RNA, 22 nt, Human
cccuugggcuucagcccuaccg

SEQ ID NO: 41753 - RNA, 22 nt, Human
cccuuuaaaguuuuaccagcag

SEQ ID NO: 41754 - RNA, 22 nt, Human
cccuuuaacacacagaggcugc

SEQ ID NO: 41755 - RNA, 20 nt, Human
cccuuuaagcuuuaguaugc

SEQ ID NO: 41756 - RNA, 22 nt, Human
cccuuucuccagaacugucuga

SEQ ID NO: 41757 - RNA, 22 nt, Human
cccuuucuucuugacugaaaac

SEQ ID NO: 41758 - RNA, 20 nt, Human
cccuuuucacgaaaaggaga

SEQ ID NO: 41759 - RNA, 22 nt, Human
ccgagcuguggucucuuuuacg

SEQ ID NO: 41760 - RNA, 22 nt, Human
ccgaggaauuuuuauaagaucu

SEQ ID NO: 41761 - RNA, 22 nt, Human
ccgaggcuggccucagggcugu

SEQ ID NO: 41762 - RNA, 22 nt, Human
ccgcgagguggagguugcagug

SEQ ID NO: 41763 - RNA, 22 nt, Human
ccgcgcgcgugggcguccaggg

SEQ ID NO: 41764 - RNA, 22 nt, Human
ccgcguggcacccuccuggagg

SEQ ID NO: 41765 - RNA, 22 nt, Human
ccgcuguccuggagcugcugcu

SEQ ID NO: 41766 - RNA, 22 nt, Human
ccggcgggcagcggcagugagc

SEQ ID NO: 41767 - RNA, 22 nt, Human
ccggcgggcgcggugacgucag

SEQ ID NO: 41768 - RNA, 22 nt, Human
ccgggagaguggaaccaagagg

SEQ ID NO: 41769 - RNA, 18 nt, Human
ccgggcuuuggugacaca

SEQ ID NO: 41770 - RNA, 22 nt, Human
ccggggacuuaaagugaaggaa

SEQ ID NO: 41771 - RNA, 22 nt, Human
ccgggggaggcaagagacaugc

SEQ ID NO: 41772 - RNA, 22 nt, Human
ccgggggcgggacgagcuugac

SEQ ID NO: 41773 - RNA, 22 nt, Human
ccggggugcgaggagcgucuuu

SEQ ID NO: 41774 - RNA, 23 nt, Human
ccgugaagacagacagacagcag

SEQ ID NO: 41775 - RNA, 23 nt, Human
ccguguguauacucuguaauaga

SEQ ID NO: 41776 - RNA, 22 nt, Human
ccguuaaucccauaauauggau

SEQ ID NO: 41777 - RNA, 21 nt, Human
ccuaaacaagacugacacaca

SEQ ID NO: 41778 - RNA, 22 nt, Human
ccuaagaauuaaugaauacacc

SEQ ID NO: 41779 - RNA, 22 nt, Human
ccuaagagauuauugcuccugc

SEQ ID NO: 41780 - RNA, 22 nt, Human
ccuaaggaccagggcuuccagc

SEQ ID NO: 41781 - RNA, 22 nt, Human
ccuaaguugagaagccaguagc

SEQ ID NO: 41782 - RNA, 22 nt, Human
ccuaauuaucucccaaagaucc

SEQ ID NO: 41783 - RNA, 22 nt, Human
ccuaauuugauuuuaaauagcc

SEQ ID NO: 41784 - RNA, 22 nt, Human
ccuacagagcagcaggaccaga

SEQ ID NO: 41785 - RNA, 22 nt, Human
ccuaccaguaggaggccagaga

SEQ ID NO: 41786 - RNA, 22 nt, Human
ccuacucccuuucuagaguaug

SEQ ID NO: 41787 - RNA, 19 nt, Human
ccuagagcaguaccuggua

SEQ ID NO: 41788 - RNA, 22 nt, Human
ccuagaggcugcaaggagaggc

SEQ ID NO: 41789 - RNA, 22 nt, Human
cagaaguaaugaugucauuccu

SEQ ID NO: 41790 - RNA, 22 nt, Human
cagaaguggcaucauucaagag

SEQ ID NO: 41791 - RNA, 22 nt, Human
cagaaguuagugucugccagua

SEQ ID NO: 41792 - RNA, 22 nt, Human
cagaaguuaugucaauggucau

SEQ ID NO: 41793 - RNA, 22 nt, Human
cagaaguuccuauuuaccuccu

SEQ ID NO: 41794 - RNA, 22 nt, Human
cagaaguugauccugcguuucc

SEQ ID NO: 41795 - RNA, 22 nt, Human
cagaaguuugaaugagagccug

SEQ ID NO: 41796 - RNA, 22 nt, Human
cagaauaaaaacuccuaugucu

SEQ ID NO: 41797 - RNA, 22 nt, Human
cagaauaugacaagauuuuccu

SEQ ID NO: 41798 - RNA, 22 nt, Human
cagaaugaaauguaagaacacc

SEQ ID NO: 41799 - RNA, 22 nt, Human
cagaaugaguagcaucuucacc

SEQ ID NO: 41800 - RNA, 20 nt, Human
cagaaugcuguaaucaagaa

SEQ ID NO: 41801 - RNA, 22 nt, Human
cagaauguagaucaucaucaag

SEQ ID NO: 41802 - RNA, 22 nt, Human
cagaauuauaguugcuuuuuaa

SEQ ID NO: 41803 - RNA, 22 nt, Human
cagacacacacccuggccuagc

SEQ ID NO: 41804 - RNA, 22 nt, Human
cagacagaaggaaggccaacau

SEQ ID NO: 41805 - RNA, 22 nt, Human
cagacagggguaaccuuccuca

SEQ ID NO: 41806 - RNA, 22 nt, Human
cagacaggguccuguccgucac

SEQ ID NO: 41807 - RNA, 21 nt, Human
cagacaugagucucagcuuug

SEQ ID NO: 41808 - RNA, 22 nt, Human
cagacauggaaauuuaguguua

SEQ ID NO: 41809 - RNA, 22 nt, Human
cagaccagcucuaugaacccaa

SEQ ID NO: 41810 - RNA, 21 nt, Human
cagaccauugcaugagcaggu

SEQ ID NO: 41811 - RNA, 22 nt, Human
cagacccucgggugaguuggcc

SEQ ID NO: 41812 - RNA, 22 nt, Human
caggcucagaugcccugcgcug

SEQ ID NO: 41813 - RNA, 22 nt, Human
caggcuccagcuuccugcucag

SEQ ID NO: 41814 - RNA, 22 nt, Human
caggcucccgcuccacugggca

SEQ ID NO: 41815 - RNA, 22 nt, Human
caggcucuuccauccugcugag

SEQ ID NO: 41816 - RNA, 22 nt, Human
caggcucuuuugguggcaagga

SEQ ID NO: 41817 - RNA, 22 nt, Human
caggcugaggguuaggccuuag

SEQ ID NO: 41818 - RNA, 22 nt, Human
caggcugcagcagcaguggccc

SEQ ID NO: 41819 - RNA, 22 nt, Human
caggcugcccuagcuuggacau

SEQ ID NO: 41820 - RNA, 22 nt, Human
caggcugccgugaagcaggccu

SEQ ID NO: 41821 - RNA, 22 nt, Human
caggcugcggccgugugagcau

SEQ ID NO: 41822 - RNA, 22 nt, Human
caggcugcuccaggguaggaaa

SEQ ID NO: 41823 - RNA, 22 nt, Human
caggcuggaguacaauugugug

SEQ ID NO: 41824 - RNA, 22 nt, Human
caggcuggaguuaccuuuaggg

SEQ ID NO: 41825 - RNA, 22 nt, Human
caggcugggcugguguuagagu

SEQ ID NO: 41826 - RNA, 22 nt, Human
caggcugucugaauggaggccc

SEQ ID NO: 41827 - RNA, 23 nt, Human
cagcuucuuugggauucuuuaua

SEQ ID NO: 41828 - RNA, 22 nt, Human
cagcuugcuaacugguaggggu

SEQ ID NO: 41829 - RNA, 20 nt, Human
cagcuuggaugagaggcuga

SEQ ID NO: 41830 - RNA, 22 nt, Human
cagcuuggcgaauguagguaug

SEQ ID NO: 41831 - RNA, 22 nt, Human
cagcuugggucaggugccugcu

SEQ ID NO: 41832 - RNA, 22 nt, Human
cagcuugugaaaugucaccacu

SEQ ID NO: 41833 - RNA, 22 nt, Human
cagcuuuaccaauauuuggaaa

SEQ ID NO: 41834 - RNA, 22 nt, Human
cagcuuuaccuuuaggaguaac

SEQ ID NO: 41835 - RNA, 17 nt, Human
cagcuuuaugcuacugu

SEQ ID NO: 41836 - RNA, 22 nt, Human
cagcuuuauuaaugauugucuu

SEQ ID NO: 41837 - RNA, 22 nt, Human
cagcuuuauuucacguguuugu

SEQ ID NO: 41838 - RNA, 23 nt, Human
cagcuuucagggcuuuagggaag

SEQ ID NO: 41839 - RNA, 22 nt, Human
cagcuuuccagagaccugcccc

SEQ ID NO: 41840 - RNA, 22 nt, Human
cagcuuugaccuaaaguaggaa

SEQ ID NO: 41841 - RNA, 22 nt, Human
cagcuuugauucacugccuagu

SEQ ID NO: 41842 - RNA, 22 nt, Human
cagcuuugauucuuucugccau

SEQ ID NO: 41843 - RNA, 22 nt, Human
cagcuuugugcaaugcagucuc

SEQ ID NO: 41844 - RNA, 22 nt, Human
cagcuuuugcagacuucuugcc

SEQ ID NO: 41845 - RNA, 22 nt, Human
cagcuuuuuagaaucuagggca

SEQ ID NO: 41846 - RNA, 22 nt, Human
caggaaaaugucaauggaaagc

SEQ ID NO: 41847 - RNA, 19 nt, Human
caggaaacaccuacugcua

SEQ ID NO: 41848 - RNA, 22 nt, Human
caggaaacauucccauaacaca

SEQ ID NO: 41849 - RNA, 21 nt, Human
caggaaagaaaacguacauau

SEQ ID NO: 41850 - RNA, 22 nt, Human
caggaaagagagcuauucacuu

SEQ ID NO: 41851 - RNA, 22 nt, Human
caggaaagagcugccaggcagg

SEQ ID NO: 41852 - RNA, 22 nt, Human
caggaaauaaaaaguaucuucu

SEQ ID NO: 41853 - RNA, 22 nt, Human
caggaaauaggcguuuguccuc

SEQ ID NO: 41854 - RNA, 22 nt, Human
caggaaauaucucaacacuuua

SEQ ID NO: 41855 - RNA, 22 nt, Human
caggaaauguauaauuuuauaa

SEQ ID NO: 41856 - RNA, 22 nt, Human
caggaaauucccagaaggacug

SEQ ID NO: 41857 - RNA, 22 nt, Human
caggaaauuggcuauuugggau

SEQ ID NO: 41858 - RNA, 22 nt, Human
caggaacaacucccagcaucuc

SEQ ID NO: 41859 - RNA, 22 nt, Human
caggaacagcaccaggagcuag

SEQ ID NO: 41860 - RNA, 22 nt, Human
caggaacauguuggaaagaaau

SEQ ID NO: 41861 - RNA, 22 nt, Human
caggaaccaugaagacauauac

SEQ ID NO: 41862 - RNA, 22 nt, Human
caggaaccugcuccaagaggca

SEQ ID NO: 41863 - RNA, 22 nt, Human
caggaaccugugcguagggaug

SEQ ID NO: 41864 - RNA, 22 nt, Human
caggaagaaggguggugagucc

SEQ ID NO: 41865 - RNA, 22 nt, Human
caggaagagguaucaccgagca

SEQ ID NO: 41866 - RNA, 23 nt, Human
caggaagcagaugggguagaaga

SEQ ID NO: 41867 - RNA, 22 nt, Human
caggaagccacaggacagguag

SEQ ID NO: 41868 - RNA, 22 nt, Human
caggaagcucuuagcagucacc

SEQ ID NO: 41869 - RNA, 22 nt, Human
caggaaggcccaccuguccugu

SEQ ID NO: 41870 - RNA, 22 nt, Human
caggaaguagaguuggccagcc

SEQ ID NO: 41871 - RNA, 22 nt, Human
caggaaugaaaggucaggguug

SEQ ID NO: 41872 - RNA, 22 nt, Human
caggaaugaguucuggugcucu

SEQ ID NO: 41873 - RNA, 22 nt, Human
caggaaugaucugcugagugau

SEQ ID NO: 41874 - RNA, 22 nt, Human
caggaaugccaaccagugcaug

SEQ ID NO: 41875 - RNA, 22 nt, Human
caggaaugccuucuucagccau

SEQ ID NO: 41876 - RNA, 22 nt, Human
caggaaugguuaaucuaaagug

SEQ ID NO: 41877 - RNA, 22 nt, Human
caggaauguagcagcgauggaa

SEQ ID NO: 41878 - RNA, 22 nt, Human
caggaauguccuugucauuuca

SEQ ID NO: 41879 - RNA, 22 nt, Human
caggacaaccucagguugcugc

SEQ ID NO: 41880 - RNA, 22 nt, Human
caggacaagagggaaucgauaa

SEQ ID NO: 41881 - RNA, 22 nt, Human
caggacaauggucauacuggau

SEQ ID NO: 41882 - RNA, 22 nt, Human
caggacaauuuugagccaccug

SEQ ID NO: 41883 - RNA, 22 nt, Human
caggacacagaauaaggcaguu

SEQ ID NO: 41884 - RNA, 22 nt, Human
caggacacauuucuuguucagg

SEQ ID NO: 41885 - RNA, 22 nt, Human
caggacagagcccagacugugu

SEQ ID NO: 41886 - RNA, 22 nt, Human
caggacaggaguggggucaaag

SEQ ID NO: 41887 - RNA, 22 nt, Human
caggacaggcccuguggggucu

SEQ ID NO: 41888 - RNA, 22 nt, Human
caggacaguuggcaucugcugc

SEQ ID NO: 41889 - RNA, 22 nt, Human
caggacaucgucaucaugggga

SEQ ID NO: 41890 - RNA, 22 nt, Human
caggaccaagcaaaguuucuuu

SEQ ID NO: 41891 - RNA, 22 nt, Human
caggacccaaccucccugcucu

SEQ ID NO: 41892 - RNA, 22 nt, Human
caggaccugaagacaggcaggu

SEQ ID NO: 41893 - RNA, 22 nt, Human
caggacgggcaaacaggauggu

SEQ ID NO: 41894 - RNA, 22 nt, Human
caggacugaagggcacagggaa

SEQ ID NO: 41895 - RNA, 22 nt, Human
caggacuggcucgcagugggug

SEQ ID NO: 41896 - RNA, 22 nt, Human
caggagaaacauaauuuucugg

SEQ ID NO: 41897 - RNA, 22 nt, Human
caggagagauaugaguccccac

SEQ ID NO: 41898 - RNA, 22 nt, Human
caggagauguaccuguuuuuga

SEQ ID NO: 41899 - RNA, 22 nt, Human
caggagcccagaguccucagcu

SEQ ID NO: 41900 - RNA, 22 nt, Human
caggagcccugguggguggaca

SEQ ID NO: 41901 - RNA, 22 nt, Human
caggagcuucugcccauggcca

SEQ ID NO: 41902 - RNA, 22 nt, Human
caggagcuuucuucccaaacuu

SEQ ID NO: 41903 - RNA, 22 nt, Human
caggaggaagaacucugcaaca

SEQ ID NO: 41904 - RNA, 22 nt, Human
caggaggagcauuagcgucuca

SEQ ID NO: 41905 - RNA, 22 nt, Human
caggaggcagaggaugcccagu

SEQ ID NO: 41906 - RNA, 22 nt, Human
caggaggcaggugcauuuugag

SEQ ID NO: 41907 - RNA, 22 nt, Human
caggaggcccacaggccccugc

SEQ ID NO: 41908 - RNA, 23 nt, Human
caggagggaaugaaguuagacaa

SEQ ID NO: 41909 - RNA, 22 nt, Human
caggagggcccgagacucuucc

SEQ ID NO: 41910 - RNA, 22 nt, Human
caggaggguguggaaaacuggg

SEQ ID NO: 41911 - RNA, 22 nt, Human
caggagguacauagauucagau

SEQ ID NO: 41912 - RNA, 22 nt, Human
caggaggugaaggagaaccagu

SEQ ID NO: 41913 - RNA, 22 nt, Human
caggagguuguaagagcaggcc

SEQ ID NO: 41914 - RNA, 22 nt, Human
caggaguccagagugucauuuu

SEQ ID NO: 41915 - RNA, 22 nt, Human
caggaguccaucuggccuggug

SEQ ID NO: 41916 - RNA, 22 nt, Human
caggagugagaugcgaucacuu

SEQ ID NO: 41917 - RNA, 22 nt, Human
caggaguguuugcuacaguuuc

SEQ ID NO: 41918 - RNA, 22 nt, Human
caggauaaauaguaaauguaag

SEQ ID NO: 41919 - RNA, 22 nt, Human
caggauccccaggucgccgucc

SEQ ID NO: 41920 - RNA, 22 nt, Human
caggaucuuuuaaugucuccag

SEQ ID NO: 41921 - RNA, 22 nt, Human
cucaggccaauaagcuccagcc

SEQ ID NO: 41922 - RNA, 22 nt, Human
cucaggccauuccuaccaaggg

SEQ ID NO: 41923 - RNA, 22 nt, Human
cucaggccauucuuccagcugc

SEQ ID NO: 41924 - RNA, 22 nt, Human
cucaggcugguuuggguuguuu

SEQ ID NO: 41925 - RNA, 22 nt, Human
cucagggaauuauuucuguccu

SEQ ID NO: 41926 - RNA, 22 nt, Human
cucagggaauugaaucuccuug

SEQ ID NO: 41927 - RNA, 22 nt, Human
cucagggaugggcagauguuaa

SEQ ID NO: 41928 - RNA, 22 nt, Human
cucagggcuugaguguccagga

SEQ ID NO: 41929 - RNA, 21 nt, Human
cucaggggauuuugagauuag

SEQ ID NO: 41930 - RNA, 22 nt, Human
cucagggggaaucaggucacag

SEQ ID NO: 41931 - RNA, 22 nt, Human
cucagggucugguccuuagauu

SEQ ID NO: 41932 - RNA, 18 nt, Human
cucagggugaccaaugca

SEQ ID NO: 41933 - RNA, 22 nt, Human
cucaguggggcgacagggugcu

SEQ ID NO: 41934 - RNA, 22 nt, Human
cucagugguggucacuuggugg

SEQ ID NO: 41935 - RNA, 22 nt, Human
cucagugugagugagaagugca

SEQ ID NO: 41936 - RNA, 20 nt, Human
cucaguguggccugaguguu

SEQ ID NO: 41937 - RNA, 22 nt, Human
cucaguguuaaagacuuuccag

SEQ ID NO: 41938 - RNA, 22 nt, Human
cucaguguuggagaccuucagg

SEQ ID NO: 41939 - RNA, 22 nt, Human
cucaguuuccccggccugggcg

SEQ ID NO: 41940 - RNA, 22 nt, Human
cucaguuuccucaacugcaaaa

SEQ ID NO: 41941 - RNA, 22 nt, Human
cucaguuucugacauuaaaauc

SEQ ID NO: 41942 - RNA, 22 nt, Human
cucaguuugugugauauugucu

SEQ ID NO: 41943 - RNA, 22 nt, Human
cucaguuuuuuuaagagccaug

SEQ ID NO: 41944 - RNA, 22 nt, Human
caggcaccaacuuccuggggag

SEQ ID NO: 41945 - RNA, 22 nt, Human
caggcaccagugagaagggccu

SEQ ID NO: 41946 - RNA, 22 nt, Human
caggcacccagcccagucgcac

SEQ ID NO: 41947 - RNA, 22 nt, Human
caggcaccuuugugcaugggca

SEQ ID NO: 41948 - RNA, 22 nt, Human
caggcacgguggcucaugccug

SEQ ID NO: 41949 - RNA, 22 nt, Human
caggcacuagcagaaugaggcu

SEQ ID NO: 41950 - RNA, 22 nt, Human
caggcacugcacuaccacuuuu

SEQ ID NO: 41951 - RNA, 22 nt, Human
caggcacuucugcugcuugucu

SEQ ID NO: 41952 - RNA, 22 nt, Human
caggcagaaggaaguaccaggc

SEQ ID NO: 41953 - RNA, 17 nt, Human
caggcagacauguaagc

SEQ ID NO: 41954 - RNA, 22 nt, Human
caggcagagaacucauccguga

SEQ ID NO: 41955 - RNA, 22 nt, Human
caggcagagacgucaguguagg

SEQ ID NO: 41956 - RNA, 22 nt, Human
caggcagagaggagcauuuaau

SEQ ID NO: 41957 - RNA, 22 nt, Human
caggcagagccaaucguggggu

SEQ ID NO: 41958 - RNA, 22 nt, Human
caggcagagcugaagauagaug

SEQ ID NO: 41959 - RNA, 22 nt, Human
caggcagaggcuuuucauggcu

SEQ ID NO: 41960 - RNA, 22 nt, Human
caggcagagguaccaagauuga

SEQ ID NO: 41961 - RNA, 22 nt, Human
caggcagauuugcugcccucca

SEQ ID NO: 41962 - RNA, 22 nt, Human
caggcagcagccacucugguau

SEQ ID NO: 41963 - RNA, 22 nt, Human
caggcagcaucagucugcugua

SEQ ID NO: 41964 - RNA, 22 nt, Human
caggcagccaggggaccugucc

SEQ ID NO: 41965 - RNA, 22 nt, Human
caggcagcccugcaccaagugu

SEQ ID NO: 41966 - RNA, 22 nt, Human
caggcagcucuaauggaaagug

SEQ ID NO: 41967 - RNA, 22 nt, Human
caggcagcucugcuuuuccuaa

SEQ ID NO: 41968 - RNA, 22 nt, Human
caggcaguggccauguugggag

SEQ ID NO: 41969 - RNA, 22 nt, Human
caggcagugucccaggaagcca

SEQ ID NO: 41970 - RNA, 22 nt, Human
caggcauuucgcaaaggcugag

SEQ ID NO: 41971 - RNA, 22 nt, Human
caggccacagcuaaagaggauu

SEQ ID NO: 41972 - RNA, 22 nt, Human
caggccagggagaauaugaagc

SEQ ID NO: 41973 - RNA, 22 nt, Human
caggcccacugcuugucuaguc

SEQ ID NO: 41974 - RNA, 22 nt, Human
caggcccagggagggagaccaa

SEQ ID NO: 41975 - RNA, 22 nt, Human
caggcccaggguuauugggaaa

SEQ ID NO: 41976 - RNA, 22 nt, Human
caggcccugaggauucggcggg

SEQ ID NO: 41977 - RNA, 22 nt, Human
caggcccugcacagugguccug

SEQ ID NO: 41978 - RNA, 22 nt, Human
caggcccugggcaggaucagcc

SEQ ID NO: 41979 - RNA, 22 nt, Human
caggccggccggccccagcucu

SEQ ID NO: 41980 - RNA, 22 nt, Human
caggccgggcacugcgcuaggu

SEQ ID NO: 41981 - RNA, 22 nt, Human
caggccucaccagcggagcugc

SEQ ID NO: 41982 - RNA, 22 nt, Human
caggccucagggcuguccguag

SEQ ID NO: 41983 - RNA, 22 nt, Human
caggccuccacuccacgcagac

SEQ ID NO: 41984 - RNA, 22 nt, Human
caggccucuccuuagucuggca

SEQ ID NO: 41985 - RNA, 20 nt, Human
caggccucugggggcccugg

SEQ ID NO: 41986 - RNA, 22 nt, Human
caggccucuuccaugcagcagc

SEQ ID NO: 41987 - RNA, 22 nt, Human
caggccugcaggaaaggcuccc

SEQ ID NO: 41988 - RNA, 22 nt, Human
caggccugcuucuuacccuuca

SEQ ID NO: 41989 - RNA, 22 nt, Human
caggccuggggcuggcuuccag

SEQ ID NO: 41990 - RNA, 22 nt, Human
caggccuggguucaaaucccuu

SEQ ID NO: 41991 - RNA, 22 nt, Human
caggccugguugagcccugaga

SEQ ID NO: 41992 - RNA, 22 nt, Human
caggccugucugcacaugaggc

SEQ ID NO: 41993 - RNA, 20 nt, Human
caggccuucaggauggcugg

SEQ ID NO: 41994 - RNA, 22 nt, Human
caggccuugaguuuugggcuuu

SEQ ID NO: 41995 - RNA, 22 nt, Human
caggccuugcgucccauggccu

SEQ ID NO: 41996 - RNA, 22 nt, Human
caggccuugucaagaaaaugcc

SEQ ID NO: 41997 - RNA, 22 nt, Human
caggccuuucuuggggcuuaga

SEQ ID NO: 41998 - RNA, 22 nt, Human
caggccuuugcacgugcaguug

SEQ ID NO: 41999 - RNA, 22 nt, Human
caggccuuugcagggagagaga

SEQ ID NO: 42000 - RNA, 22 nt, Human
caggccuuuuuuccugcagugu

SEQ ID NO: 42001 - RNA, 22 nt, Human
caggcgagggcccugaggagcc

SEQ ID NO: 42002 - RNA, 22 nt, Human
caggcgagugaacagacucuca

SEQ ID NO: 42003 - RNA, 22 nt, Human
caggcgucacugccacggguau

SEQ ID NO: 42004 - RNA, 22 nt, Human
caggcuaaagcuuugagcaugu

SEQ ID NO: 42005 - RNA, 22 nt, Human
caggcuagauuggggccaguag

SEQ ID NO: 42006 - RNA, 22 nt, Human
caggcuagcagggcccagggca

SEQ ID NO: 42007 - RNA, 22 nt, Human
caggcuauauuuaaagaagaac

SEQ ID NO: 42008 - RNA, 22 nt, Human
caggcucagaagccaguggagc

SEQ ID NO: 42009 - RNA, 22 nt, Human
caggcucccacuuggcuuaaag

SEQ ID NO: 42010 - RNA, 22 nt, Human
caggcucccugcaggccaguga

SEQ ID NO: 42011 - RNA, 22 nt, Human
caggcucccugccagggccggc

SEQ ID NO: 42012 - RNA, 22 nt, Human
caggcucccuucucggaauucu

SEQ ID NO: 42013 - RNA, 22 nt, Human
caggcuccucacucaugcuccc

SEQ ID NO: 42014 - RNA, 22 nt, Human
caggcuccuuaucuuacaacuu

SEQ ID NO: 42015 - RNA, 21 nt, Human
caggcucugcuagaggagccu

SEQ ID NO: 42016 - RNA, 22 nt, Human
caggcugagcucuggccugggc

SEQ ID NO: 42017 - RNA, 22 nt, Human
caggcugaggcaguaggguuug

SEQ ID NO: 42018 - RNA, 22 nt, Human
caggcugcaagaaaggcauuca

SEQ ID NO: 42019 - RNA, 22 nt, Human
caggcugcagugcaguggcuau

SEQ ID NO: 42020 - RNA, 22 nt, Human
caggcugcuguccacaaagcau

SEQ ID NO: 42021 - RNA, 22 nt, Human
caggcuggacauuagauacaua

SEQ ID NO: 42022 - RNA, 22 nt, Human
caggcuggagugcagugucgcc

SEQ ID NO: 42023 - RNA, 22 nt, Human
caggcugggacugaccccugcu

SEQ ID NO: 42024 - RNA, 22 nt, Human
caggcugugaaacugagaugcg

SEQ ID NO: 42025 - RNA, 22 nt, Human
caggcugugggagucaggaccc

SEQ ID NO: 42026 - RNA, 22 nt, Human
caggcuuccgccagguuuccag

SEQ ID NO: 42027 - RNA, 22 nt, Human
caggcuugaagcuucagaguau

SEQ ID NO: 42028 - RNA, 21 nt, Human
caggcuugacccuagugggaa

SEQ ID NO: 42029 - RNA, 22 nt, Human
caggcuugagggcaggcccagu

SEQ ID NO: 42030 - RNA, 22 nt, Human
acauuuugaaagggaaauuguu

SEQ ID NO: 42031 - RNA, 22 nt, Human
acauuuuuggguugaugucuga

SEQ ID NO: 42032 - RNA, 21 nt, Human
accaaaaccuauacuuucugu

SEQ ID NO: 42033 - RNA, 22 nt, Human
accaaaaccugcuacuaaagga

SEQ ID NO: 42034 - RNA, 22 nt, Human
accaaacaaaauugugcacugu

SEQ ID NO: 42035 - RNA, 22 nt, Human
accagagauggggcuucucugu

SEQ ID NO: 42036 - RNA, 22 nt, Human
accagagcuggcucugagcacc

SEQ ID NO: 42037 - RNA, 22 nt, Human
accagagcuuacaugcuagaaa

SEQ ID NO: 42038 - RNA, 20 nt, Human
accagaggaaagagcaguga

SEQ ID NO: 42039 - RNA, 22 nt, Human
accagaguaauguguggaaauu

SEQ ID NO: 42040 - RNA, 22 nt, Human
accagcagccuagagcguucuu

SEQ ID NO: 42041 - RNA, 22 nt, Human
accagcaggccaggggcacugc

SEQ ID NO: 42042 - RNA, 22 nt, Human
accagcagguggcaguauguau

SEQ ID NO: 42043 - RNA, 22 nt, Human
accagcaucaccuggaggccug

SEQ ID NO: 42044 - RNA, 22 nt, Human
accagcucagagcaggcuccug

SEQ ID NO: 42045 - RNA, 22 nt, Human
accagcugaguucucggauggu

SEQ ID NO: 42046 - RNA, 22 nt, Human
accagcugcugauugcuaaaug

SEQ ID NO: 42047 - RNA, 22 nt, Human
accagcuguuaucuguaguauc

SEQ ID NO: 42048 - RNA, 22 nt, Human
accaggaacaagccauggagga

SEQ ID NO: 42049 - RNA, 18 nt, Human
accaggaagcuucuuguc

SEQ ID NO: 42050 - RNA, 22 nt, Human
accaggaagugugggccaacgu

SEQ ID NO: 42051 - RNA, 22 nt, Human
accaggaauauuuugcucauuu

SEQ ID NO: 42052 - RNA, 22 nt, Human
accaggacuucauuagguucuu

SEQ ID NO: 42053 - RNA, 19 nt, Human
accaggagacagugagcuu

SEQ ID NO: 42054 - RNA, 22 nt, Human
accaggagacaugaccaaugag

SEQ ID NO: 42055 - RNA, 22 nt, Human
accaggagagauuuuauugaga

SEQ ID NO: 42056 - RNA, 22 nt, Human
accaggaguaacagugaguggu

SEQ ID NO: 42057 - RNA, 22 nt, Human
accaggaguugggggugggacc

SEQ ID NO: 42058 - RNA, 22 nt, Human
accaggaguuuugaccaggggc

SEQ ID NO: 42059 - RNA, 22 nt, Human
accaggcaaaaccacaggagca

SEQ ID NO: 42060 - RNA, 22 nt, Human
accaggcacucuuguggcagug

SEQ ID NO: 42061 - RNA, 22 nt, Human
accaggcagcaccaaagccggu

SEQ ID NO: 42062 - RNA, 21 nt, Human
accaggccaggaggcuggcac

SEQ ID NO: 42063 - RNA, 22 nt, Human
accaggcugugaagugagacua

SEQ ID NO: 42064 - RNA, 22 nt, Human
accaggcuguugggcccagugu

SEQ ID NO: 42065 - RNA, 22 nt, Human
accaggcuuaauccuuugcuau

SEQ ID NO: 42066 - RNA, 22 nt, Human
accagggcugacaaucugaugg

SEQ ID NO: 42067 - RNA, 22 nt, Human
accagguggccccagcgugguu

SEQ ID NO: 42068 - RNA, 22 nt, Human
accaguaggaguuggagaggaa

SEQ ID NO: 42069 - RNA, 22 nt, Human
accaguaugugccuucaguguc

SEQ ID NO: 42070 - RNA, 21 nt, Human
accagucccuagucuuauccu

SEQ ID NO: 42071 - RNA, 22 nt, Human
accagucuuguugccaugucug

SEQ ID NO: 42072 - RNA, 22 nt, Human
accagugaguauuuguaacaga

SEQ ID NO: 42073 - RNA, 22 nt, Human
accaguuaaagaauaugaggcc

SEQ ID NO: 42074 - RNA, 21 nt, Human
accaguuuggggggcuuccug

SEQ ID NO: 42075 - RNA, 20 nt, Human
accauaauguuaauuacaaa

SEQ ID NO: 42076 - RNA, 22 nt, Human
accauauaacaaguuuaggaga

SEQ ID NO: 42077 - RNA, 22 nt, Human
accaucagagcacaguccgugc

SEQ ID NO: 42078 - RNA, 22 nt, Human
accaucagucacauguagagaa

SEQ ID NO: 42079 - RNA, 22 nt, Human
accauccugaaaccuucaugcu

SEQ ID NO: 42080 - RNA, 22 nt, Human
accauccuuuaguuugcguuuc

SEQ ID NO: 42081 - RNA, 22 nt, Human
accaucuuagcagacugcagug

SEQ ID NO: 42082 - RNA, 21 nt, Human
accaucuuccaugcauuauau

SEQ ID NO: 42083 - RNA, 22 nt, Human
accaucuuuuccucugccuccu

SEQ ID NO: 42084 - RNA, 22 nt, Human
accaugaguuauuugacaggcc

SEQ ID NO: 42085 - RNA, 22 nt, Human
accaugaucugcucugguguuu

SEQ ID NO: 42086 - RNA, 22 nt, Human
accaugcaucaguuaaaaggag

SEQ ID NO: 42087 - RNA, 22 nt, Human
accaugggucagccaccucagc

SEQ ID NO: 42088 - RNA, 22 nt, Human
accaugucauuuauuggccaaa

SEQ ID NO: 42089 - RNA, 22 nt, Human
accauguguuuuacacauggua

SEQ ID NO: 42090 - RNA, 21 nt, Human
accauuaacacccagguuucu

SEQ ID NO: 42091 - RNA, 22 nt, Human
accauucugucucuuuacaaau

SEQ ID NO: 42092 - RNA, 22 nt, Human
accauucuuuacaucagcacag

SEQ ID NO: 42093 - RNA, 22 nt, Human
accauugccuagaaaaauuccu

SEQ ID NO: 42094 - RNA, 22 nt, Human
accauuuacucccauuggaagu

SEQ ID NO: 42095 - RNA, 22 nt, Human
accauuugacucucuaaggaua

SEQ ID NO: 42096 - RNA, 22 nt, Human
accauuuuggguauuuucagag

SEQ ID NO: 42097 - RNA, 22 nt, Human
acccacaccuccguauaucacu

SEQ ID NO: 42098 - RNA, 22 nt, Human
acccacgaagaugagcggcaug

SEQ ID NO: 42099 - RNA, 22 nt, Human
acccacugucaucucugaccac

SEQ ID NO: 42100 - RNA, 22 nt, Human
acccagaggugucuagcaagcu

SEQ ID NO: 42101 - RNA, 22 nt, Human
acccagccacagcauugaggga

SEQ ID NO: 42102 - RNA, 22 nt, Human
acccagcuggaugcauggaggc

SEQ ID NO: 42103 - RNA, 22 nt, Human
acccaggacaaaauaaccaggu

SEQ ID NO: 42104 - RNA, 22 nt, Human
acccaggacucucuuccaguag

SEQ ID NO: 42105 - RNA, 22 nt, Human
acccaggagagagcuauaaaau

SEQ ID NO: 42106 - RNA, 22 nt, Human
acccaggaggcaagguugcagu

SEQ ID NO: 42107 - RNA, 22 nt, Human
acccaggccauuggcaagaguc

SEQ ID NO: 42108 - RNA, 22 nt, Human
acccaggccugagagacaggag

SEQ ID NO: 42109 - RNA, 22 nt, Human
acccaggcuagagugcaguggu

SEQ ID NO: 42110 - RNA, 18 nt, Human
acccaggcucaugguccu

SEQ ID NO: 42111 - RNA, 22 nt, Human
acccaggcuggagugcaguagc

SEQ ID NO: 42112 - RNA, 22 nt, Human
acccagggaccccgcugacgcc

SEQ ID NO: 42113 - RNA, 22 nt, Human
acccaggggcagccuugcugug

SEQ ID NO: 42114 - RNA, 22 nt, Human
acccaggucucucgacuucugg

SEQ ID NO: 42115 - RNA, 23 nt, Human
acccaguuagagcccuuuaggaa

SEQ ID NO: 42116 - RNA, 22 nt, Human
acccaguuccuaagcauccaug

SEQ ID NO: 42117 - RNA, 18 nt, Human
acccaguuugaaggaaag

SEQ ID NO: 42118 - RNA, 22 nt, Human
acccaugugcucuuuuguaccc

SEQ ID NO: 42119 - RNA, 22 nt, Human
acccauuccuuuacuucaucug

SEQ ID NO: 42120 - RNA, 19 nt, Human
acccauuuucaguauuggc

SEQ ID NO: 42121 - RNA, 22 nt, Human
acccauuuuuaaauauaacuug

SEQ ID NO: 42122 - RNA, 22 nt, Human
accccaaaagaguaauagaauu

SEQ ID NO: 42123 - RNA, 22 nt, Human
accccagcgcauauggucugcg

SEQ ID NO: 42124 - RNA, 23 nt, Human
accccaggcaucgcauuccucuu

SEQ ID NO: 42125 - RNA, 22 nt, Human
accccaggucuccaggcucugg

SEQ ID NO: 42126 - RNA, 22 nt, Human
acccccaaacaucaagggcuga

SEQ ID NO: 42127 - RNA, 22 nt, Human
acccccacggaaggccguacgc

SEQ ID NO: 42128 - RNA, 22 nt, Human
acccgcccucagccuuaccgug

SEQ ID NO: 42129 - RNA, 22 nt, Human
acccgugguuuuauacuacuuc

SEQ ID NO: 42130 - RNA, 16 nt, Human
acccucagaaacugcu

SEQ ID NO: 42131 - RNA, 22 nt, Human
acccucagaguaggcacugcug

SEQ ID NO: 42132 - RNA, 22 nt, Human
acccucagcuggagauugaauu

SEQ ID NO: 42133 - RNA, 22 nt, Human
acccucaugaagcuggccugga

SEQ ID NO: 42134 - RNA, 22 nt, Human
acccuccacuuuaucugucuuu

SEQ ID NO: 42135 - RNA, 22 nt, Human
acccuccaggcugcagcuccug

SEQ ID NO: 42136 - RNA, 19 nt, Human
acccucuccccacuggguc

SEQ ID NO: 42137 - RNA, 19 nt, Human
acccucucuguagaaagau

SEQ ID NO: 42138 - RNA, 22 nt, Human
acccucugcaucagcuucuuua

SEQ ID NO: 42139 - RNA, 22 nt, Human
acccagggccacagcccgcagu

SEQ ID NO: 42140 - RNA, 22 nt, Human
acccaggggcgaagcuggccac

SEQ ID NO: 42141 - RNA, 22 nt, Human
acccagggucaccccguagggu

SEQ ID NO: 42142 - RNA, 22 nt, Human
acccaggguuccugggucccag

SEQ ID NO: 42143 - RNA, 22 nt, Human
acccaggguuugagcucugcag

SEQ ID NO: 42144 - RNA, 22 nt, Human
acccagguggcucugacggggg

SEQ ID NO: 42145 - RNA, 22 nt, Human
acccagugacauccuuuaccug

SEQ ID NO: 42146 - RNA, 22 nt, Human
acccaugaguguaucuuuaaaa

SEQ ID NO: 42147 - RNA, 22 nt, Human
acccaugggccaguuggggugg

SEQ ID NO: 42148 - RNA, 22 nt, Human
accccagggcugccagccuccu

SEQ ID NO: 42149 - RNA, 22 nt, Human
accccaggucaucugagagucc

SEQ ID NO: 42150 - RNA, 22 nt, Human
acccccaaacaugaucauggug

SEQ ID NO: 42151 - RNA, 21 nt, Human
acccccacaccuccuuaguuc

SEQ ID NO: 42152 - RNA, 22 nt, Human
accccucagcucuucgugcccc

SEQ ID NO: 42153 - RNA, 22 nt, Human
accccuuuuauagaagaacaga

SEQ ID NO: 42154 - RNA, 22 nt, Human
acaggccugacacacagagggc

SEQ ID NO: 42155 - RNA, 22 nt, Human
acaggccugauguuauccuauu

SEQ ID NO: 42156 - RNA, 22 nt, Human
acaggccuuaggagagaugggg

SEQ ID NO: 42157 - RNA, 21 nt, Human
acaggccuuaggggccauuca

SEQ ID NO: 42158 - RNA, 20 nt, Human
acaggcgcuggggagauggc

SEQ ID NO: 42159 - RNA, 22 nt, Human
acaggcucucagccaguuggca

SEQ ID NO: 42160 - RNA, 21 nt, Human
acaggcucuggggaugcuggg

SEQ ID NO: 42161 - RNA, 22 nt, Human
acaggcugccacuugcauccaa

SEQ ID NO: 42162 - RNA, 22 nt, Human
acaggcugcccgcuccccaccu

SEQ ID NO: 42163 - RNA, 22 nt, Human
acaggcugcugagccauuugcu

SEQ ID NO: 42164 - RNA, 22 nt, Human
acaggcugcugggcuccgugcu

SEQ ID NO: 42165 - RNA, 22 nt, Human
acaggcuggaggaggaccaaga

SEQ ID NO: 42166 - RNA, 22 nt, Human
acaggcugguuuguaaaagaug

SEQ ID NO: 42167 - RNA, 18 nt, Human
acaggcugugggaauggu

SEQ ID NO: 42168 - RNA, 22 nt, Human
acaggcuucucacagaaaaggg

SEQ ID NO: 42169 - RNA, 22 nt, Human
acaggcuugcacuaggguggca

SEQ ID NO: 42170 - RNA, 21 nt, Human
acaggcuuuagaaaaugacuc

SEQ ID NO: 42171 - RNA, 20 nt, Human
acaggcuuuggagucugaau

SEQ ID NO: 42172 - RNA, 23 nt, Human
acagggaaaagucaucaguguga

SEQ ID NO: 42173 - RNA, 22 nt, Human
acagggaaggcauccgcgaaug

SEQ ID NO: 42174 - RNA, 22 nt, Human
acagggaauggagggaucagua

SEQ ID NO: 42175 - RNA, 22 nt, Human
acagggaccugugagcuccaua

SEQ ID NO: 42176 - RNA, 22 nt, Human
acagggaccuuggaagcuggaa

SEQ ID NO: 42177 - RNA, 22 nt, Human
acagggagccccagcauuucca

SEQ ID NO: 42178 - RNA, 18 nt, Human
acagggagggcgcugggg

SEQ ID NO: 42179 - RNA, 22 nt, Human
acagggagugcaauucauauug

SEQ ID NO: 42180 - RNA, 22 nt, Human
acagggcaaccucugggagacu

SEQ ID NO: 42181 - RNA, 22 nt, Human
acagggcaccugagguaggaag

SEQ ID NO: 42182 - RNA, 22 nt, Human
acagggcagaaauguugcaucu

SEQ ID NO: 42183 - RNA, 22 nt, Human
acagggcagcaacuuugugccu

SEQ ID NO: 42184 - RNA, 22 nt, Human
acagggcagugucuugaaaaau

SEQ ID NO: 42185 - RNA, 22 nt, Human
acagggcaugugcaagagacau

SEQ ID NO: 42186 - RNA, 22 nt, Human
acagggcauuuccucuaugugu

SEQ ID NO: 42187 - RNA, 22 nt, Human
acagggccaauguuagcauuga

SEQ ID NO: 42188 - RNA, 22 nt, Human
acagggcccuugccagcacaag

SEQ ID NO: 42189 - RNA, 22 nt, Human
acagggccuuugauggauuaua

SEQ ID NO: 42190 - RNA, 22 nt, Human
acagggcuuaguggaaauuuuu

SEQ ID NO: 42191 - RNA, 22 nt, Human
acagggcuugugacaacuuuaa

SEQ ID NO: 42192 - RNA, 22 nt, Human
acagggcuuuuaaucaguaguu

SEQ ID NO: 42193 - RNA, 22 nt, Human
acaggggaauuuacugucauua

SEQ ID NO: 42194 - RNA, 19 nt, Human
acaggggcuagcggaagca

SEQ ID NO: 42195 - RNA, 22 nt, Human
acaggggcuccgaaggugaggg

SEQ ID NO: 42196 - RNA, 22 nt, Human
acagggucaagggugcuacaag

SEQ ID NO: 42197 - RNA, 22 nt, Human
acagggucuuagagaucaccug

SEQ ID NO: 42198 - RNA, 22 nt, Human
acaggguggggauggugagcuu

SEQ ID NO: 42199 - RNA, 23 nt, Human
acagguacacuugauugcaaucc

SEQ ID NO: 42200 - RNA, 22 nt, Human
acagguacauacuugggaucca

SEQ ID NO: 42201 - RNA, 22 nt, Human
acagguagcauuuuuccucuuu

SEQ ID NO: 42202 - RNA, 22 nt, Human
acagguagguuaaaauguguca

SEQ ID NO: 42203 - RNA, 22 nt, Human
acagguagucugaacacugggu

SEQ ID NO: 42204 - RNA, 22 nt, Human
acagguagugggcuagaucugg

SEQ ID NO: 42205 - RNA, 22 nt, Human
acaggucuacuggcaagcagug

SEQ ID NO: 42206 - RNA, 22 nt, Human
acaggugacuugcauuuucaca

SEQ ID NO: 42207 - RNA, 22 nt, Human
acagguggaaacaugguguugg

SEQ ID NO: 42208 - RNA, 22 nt, Human
acagguggcagaagcauuuacu

SEQ ID NO: 42209 - RNA, 22 nt, Human
acagguggccccgagggagugg

SEQ ID NO: 42210 - RNA, 22 nt, Human
acagguguagcaggagcaucaa

SEQ ID NO: 42211 - RNA, 22 nt, Human
acagguguaugaauauguucca

SEQ ID NO: 42212 - RNA, 22 nt, Human
acagguguggggcugugguacu

SEQ ID NO: 42213 - RNA, 22 nt, Human
acagguuugucugauguaauga

SEQ ID NO: 42214 - RNA, 22 nt, Human
acagguuuuuggauaauccuuu

SEQ ID NO: 42215 - RNA, 22 nt, Human
acaguaaaauuaagggcaguua

SEQ ID NO: 42216 - RNA, 16 nt, Human
acaguaaagcuggaca

SEQ ID NO: 42217 - RNA, 22 nt, Human
acaguaaauaaugcauguugau

SEQ ID NO: 42218 - RNA, 22 nt, Human
acaguaaauauuaagccugagu

SEQ ID NO: 42219 - RNA, 22 nt, Human
acaguaacagucuauuucucag

SEQ ID NO: 42220 - RNA, 22 nt, Human
acaguaaggguaaauaagaaca

SEQ ID NO: 42221 - RNA, 22 nt, Human
acaguaaucauaugauuuucuc

SEQ ID NO: 42222 - RNA, 22 nt, Human
acaguaauuaaggucugaaacg

SEQ ID NO: 42223 - RNA, 22 nt, Human
acaguaauuguguacgaggaca

SEQ ID NO: 42224 - RNA, 22 nt, Human
acaguacaggacgaguuuuccu

SEQ ID NO: 42225 - RNA, 22 nt, Human
acaguacagugcagaggaagau

SEQ ID NO: 42226 - RNA, 22 nt, Human
acaguagcuaauauugcauuau

SEQ ID NO: 42227 - RNA, 22 nt, Human
acaguagugccaugaccuacag

SEQ ID NO: 42228 - RNA, 22 nt, Human
acaguauaaacuccuaaaagcc

SEQ ID NO: 42229 - RNA, 22 nt, Human
acaguauaccauugugacuuug

SEQ ID NO: 42230 - RNA, 22 nt, Human
acaguauauaugguuaucugau

SEQ ID NO: 42231 - RNA, 21 nt, Human
acaguauauuagauauuugaa

SEQ ID NO: 42232 - RNA, 22 nt, Human
acaguauuugcgauacugauga

SEQ ID NO: 42233 - RNA, 22 nt, Human
acagucaaaugucuaucuucuu

SEQ ID NO: 42234 - RNA, 22 nt, Human
acaguccuguacaggccauauc

SEQ ID NO: 42235 - RNA, 20 nt, Human
acagucgccuaucaaccagg

SEQ ID NO: 42236 - RNA, 22 nt, Human
acagucuaggugugugauuuaa

SEQ ID NO: 42237 - RNA, 22 nt, Human
acagucucuccacacugcaggg

SEQ ID NO: 42238 - RNA, 22 nt, Human
acagucucuguugcugcuguuu

SEQ ID NO: 42239 - RNA, 22 nt, Human
acagucugcagggugaacaugu

SEQ ID NO: 42240 - RNA, 22 nt, Human
acagucugcauaugaccuguag

SEQ ID NO: 42241 - RNA, 17 nt, Human
acagucugccugacagu

SEQ ID NO: 42242 - RNA, 22 nt, Human
acagucugcuugucuccauggu

SEQ ID NO: 42243 - RNA, 22 nt, Human
acagucuuaugcauacacuauu

SEQ ID NO: 42244 - RNA, 22 nt, Human
acagucuugcuguauggucagg

SEQ ID NO: 42245 - RNA, 22 nt, Human
acagucuuuagaguauuguccu

SEQ ID NO: 42246 - RNA, 22 nt, Human
acagucuuugcaggagaaagga

SEQ ID NO: 42247 - RNA, 22 nt, Human
acagugagcccacuccaggaga

SEQ ID NO: 42248 - RNA, 22 nt, Human
acauugauugagcacccauuau

SEQ ID NO: 42249 - RNA, 22 nt, Human
acauugcagauguguuuaaugu

SEQ ID NO: 42250 - RNA, 19 nt, Human
acauuggacauggaucuug

SEQ ID NO: 42251 - RNA, 22 nt, Human
acauuguuugagaauacagaug

SEQ ID NO: 42252 - RNA, 22 nt, Human
acauuguuuggaggagugagag

SEQ ID NO: 42253 - RNA, 22 nt, Human
acauuuaaauaugccuuauauu

SEQ ID NO: 42254 - RNA, 22 nt, Human
acauuuaaccaaacuguuuaau

SEQ ID NO: 42255 - RNA, 22 nt, Human
acauuuaaguuaaaaccucagu

SEQ ID NO: 42256 - RNA, 22 nt, Human
acauuuaaugauccuacuguga

SEQ ID NO: 42257 - RNA, 22 nt, Human
acauuuacuuaucaaaagucag

SEQ ID NO: 42258 - RNA, 19 nt, Human
acauuuagaauguacuugc

SEQ ID NO: 42259 - RNA, 22 nt, Human
acauuuagcuguacaaucuaug

SEQ ID NO: 42260 - RNA, 22 nt, Human
acauuuauauuuaguggggaau

SEQ ID NO: 42261 - RNA, 22 nt, Human
acauuucaguaaguguuaauuu

SEQ ID NO: 42262 - RNA, 22 nt, Human
acauuucuaauuuaauguaaca

SEQ ID NO: 42263 - RNA, 18 nt, Human
acauuucuaugcuucugg

SEQ ID NO: 42264 - RNA, 22 nt, Human
acauuucucauaggagagccac

SEQ ID NO: 42265 - RNA, 22 nt, Human
acauuucuccuugcaggaguca

SEQ ID NO: 42266 - RNA, 22 nt, Human
acauuucugcauguaggguaau

SEQ ID NO: 42267 - RNA, 22 nt, Human
acauuucuggaguuucucaaca

SEQ ID NO: 42268 - RNA, 22 nt, Human
acauuucuuagccuaguuccag

SEQ ID NO: 42269 - RNA, 22 nt, Human
acauuucuuuucaucucuauau

SEQ ID NO: 42270 - RNA, 22 nt, Human
acauuugacauuuaguaucagc

SEQ ID NO: 42271 - RNA, 22 nt, Human
acauuugauuccauccucuacu

SEQ ID NO: 42272 - RNA, 22 nt, Human
acauuuguaugcguuuuuacug

SEQ ID NO: 42273 - RNA, 22 nt, Human
acauuugugggggaacaggaua

SEQ ID NO: 42274 - RNA, 22 nt, Human
acauuuguugccauucauggag

SEQ ID NO: 42275 - RNA, 22 nt, Human
acauuuuacaccaagacuucuu

SEQ ID NO: 42276 - RNA, 22 nt, Human
acauuuuacaguugucuggcua

SEQ ID NO: 42277 - RNA, 20 nt, Human
acauuuuggcauacucucaa

SEQ ID NO: 42278 - RNA, 22 nt, Human
acauuuuuauccugagugccag

SEQ ID NO: 42279 - RNA, 22 nt, Human
acauuuuucuaggaggcaaggu

SEQ ID NO: 42280 - RNA, 22 nt, Human
accaaaaagauauguugaagcc

SEQ ID NO: 42281 - RNA, 22 nt, Human
accaagaguccaagugagguug

SEQ ID NO: 42282 - RNA, 22 nt, Human
accaagcacaaagaugaguaaa

SEQ ID NO: 42283 - RNA, 22 nt, Human
accaagcuucguggaggaaguu

SEQ ID NO: 42284 - RNA, 22 nt, Human
accaaggaagaaucuauuugag

SEQ ID NO: 42285 - RNA, 22 nt, Human
accaaggaguuugguauuuuag

SEQ ID NO: 42286 - RNA, 22 nt, Human
accaauauaaguauagguaagu

SEQ ID NO: 42287 - RNA, 22 nt, Human
acuguggauaagucagagaugu

SEQ ID NO: 42288 - RNA, 22 nt, Human
acuguggcacuaggcaccuuac

SEQ ID NO: 42289 - RNA, 22 nt, Human
acuguggccugcuguaugggcu

SEQ ID NO: 42290 - RNA, 22 nt, Human
acuguggcuaauucauuugguc

SEQ ID NO: 42291 - RNA, 18 nt, Human
acuguggcucagaguugc

SEQ ID NO: 42292 - RNA, 22 nt, Human
acuguggcucagggaaugcaug

SEQ ID NO: 42293 - RNA, 22 nt, Human
acugugggaaccacugaaucag

SEQ ID NO: 42294 - RNA, 22 nt, Human
acugugggacaucccucccuau

SEQ ID NO: 42295 - RNA, 22 nt, Human
acugugggagcgcaguggcagc

SEQ ID NO: 42296 - RNA, 23 nt, Human
acugugggcaccacagagagugu

SEQ ID NO: 42297 - RNA, 22 nt, Human
acugugggcagcuucugggaac

SEQ ID NO: 42298 - RNA, 22 nt, Human
acuguggggugaggcccaagaa

SEQ ID NO: 42299 - RNA, 22 nt, Human
acugugucuagcaccacguguc

SEQ ID NO: 42300 - RNA, 22 nt, Human
acugugugaaacaucaaugugu

SEQ ID NO: 42301 - RNA, 22 nt, Human
acugugugcccugacgccaggg

SEQ ID NO: 42302 - RNA, 22 nt, Human
acugugugcuggacaugauguu

SEQ ID NO: 42303 - RNA, 22 nt, Human
acuguguuaaauacagagaugg

SEQ ID NO: 42304 - RNA, 22 nt, Human
acuguuaaaguaauuaauuguc

SEQ ID NO: 42305 - RNA, 22 nt, Human
acuguuaagaaggaggauggaa

SEQ ID NO: 42306 - RNA, 22 nt, Human
acuguuaauucaaucaacaggu

SEQ ID NO: 42307 - RNA, 22 nt, Human
acuguuacagagcaggaaauug

SEQ ID NO: 42308 - RNA, 22 nt, Human
acuguuacagggcacugaacau

SEQ ID NO: 42309 - RNA, 22 nt, Human
acuguuauuuguaauccauuau

SEQ ID NO: 42310 - RNA, 20 nt, Human
acuguucaagggccuggugg

SEQ ID NO: 42311 - RNA, 22 nt, Human
acuguucaucucuuagaaagua

SEQ ID NO: 42312 - RNA, 19 nt, Human
acuguucuaacuugcagcu

SEQ ID NO: 42313 - RNA, 22 nt, Human
acuguucugccaacuuugguua

SEQ ID NO: 42314 - RNA, 22 nt, Human
acuguucugccaagaucaacgu

SEQ ID NO: 42315 - RNA, 22 nt, Human
acuguucuucauuuagcaaaga

SEQ ID NO: 42316 - RNA, 22 nt, Human
acuguucuucccauuuauauug

SEQ ID NO: 42317 - RNA, 22 nt, Human
acuguucuuguaacacuuaaau

SEQ ID NO: 42318 - RNA, 22 nt, Human
acuguuggcuucugguagugac

SEQ ID NO: 42319 - RNA, 22 nt, Human
acuguuugcugauagauauuua

SEQ ID NO: 42320 - RNA, 22 nt, Human
acuuaaagguuagcuauucuac

SEQ ID NO: 42321 - RNA, 22 nt, Human
acuuaaaguaguuuuacugugg

SEQ ID NO: 42322 - RNA, 23 nt, Human
acuuaaaugguucuuuaucucag

SEQ ID NO: 42323 - RNA, 22 nt, Human
acuuaacagacauuauuuaccu

SEQ ID NO: 42324 - RNA, 22 nt, Human
acuuaaugguuccuaaaaugug

SEQ ID NO: 42325 - RNA, 22 nt, Human
acuuagaaauucaguuuuguca

SEQ ID NO: 42326 - RNA, 22 nt, Human
acuuagaauuaguguagaauga

SEQ ID NO: 42327 - RNA, 22 nt, Human
acuuagauuuccuuacugggug

SEQ ID NO: 42328 - RNA, 22 nt, Human
acuuagcagagugaguugacua

SEQ ID NO: 42329 - RNA, 22 nt, Human
acuuagcaguuuagaauauguc

SEQ ID NO: 42330 - RNA, 22 nt, Human
acuuaguauuuuucagcuuuga

SEQ ID NO: 42331 - RNA, 22 nt, Human
acuuagugcccuggcccuuaca

SEQ ID NO: 42332 - RNA, 22 nt, Human
acuuauaggccaaguagacugu

SEQ ID NO: 42333 - RNA, 22 nt, Human
acuuaugaaugucauuauaaug

SEQ ID NO: 42334 - RNA, 22 nt, Human
acuuaugaggagaaaauauaua

SEQ ID NO: 42335 - RNA, 22 nt, Human
acuuauuagcugugugaccuug

SEQ ID NO: 42336 - RNA, 22 nt, Human
acuuauucugagauuaugauca

SEQ ID NO: 42337 - RNA, 22 nt, Human
acuuauuucauggaucauaaug

SEQ ID NO: 42338 - RNA, 22 nt, Human
acuucacaacuguacauggcag

SEQ ID NO: 42339 - RNA, 22 nt, Human
acuucacauuagcuaaaaggga

SEQ ID NO: 42340 - RNA, 22 nt, Human
acuucagagacuuuauggucca

SEQ ID NO: 42341 - RNA, 22 nt, Human
acuucaguaggugauaugugca

SEQ ID NO: 42342 - RNA, 22 nt, Human
acuucauauggacagcaaacua

SEQ ID NO: 42343 - RNA, 22 nt, Human
acuucauguacuguucaaggcc

SEQ ID NO: 42344 - RNA, 22 nt, Human
acuucauguaguccaucagguu

SEQ ID NO: 42345 - RNA, 22 nt, Human
acuucauucauuuucacgaaug

SEQ ID NO: 42346 - RNA, 22 nt, Human
acuuccaaaacacagcauggca

SEQ ID NO: 42347 - RNA, 22 nt, Human
acuuccagaggguguggaaaua

SEQ ID NO: 42348 - RNA, 22 nt, Human
acuuccaggguagaggggaaga

SEQ ID NO: 42349 - RNA, 22 nt, Human
acuucccaacacuuuugagaug

SEQ ID NO: 42350 - RNA, 22 nt, Human
acuuccugaauggggcuaauua

SEQ ID NO: 42351 - RNA, 22 nt, Human
acuuccuuuugggaaacuguuu

SEQ ID NO: 42352 - RNA, 22 nt, Human
acuucuaugcacagagcuugga

SEQ ID NO: 42353 - RNA, 18 nt, Human
acuucucauuucucugca

SEQ ID NO: 42354 - RNA, 22 nt, Human
acuucucugcuaccugcaaaga

SEQ ID NO: 42355 - RNA, 22 nt, Human
acuucucuuuaguacuaaaugu

SEQ ID NO: 42356 - RNA, 19 nt, Human
acuucugaggaacugcaca

SEQ ID NO: 42357 - RNA, 19 nt, Human
acugggaaaaaggcacugg

SEQ ID NO: 42358 - RNA, 22 nt, Human
acugggaaccugugcuaggagg

SEQ ID NO: 42359 - RNA, 22 nt, Human
acugggaagacuggaauugcuc

SEQ ID NO: 42360 - RNA, 22 nt, Human
acugggaagcuguuuugcuuuu

SEQ ID NO: 42361 - RNA, 22 nt, Human
acugggaaggaaaggaauguaa

SEQ ID NO: 42362 - RNA, 22 nt, Human
acugggaaggagcaggaucugu

SEQ ID NO: 42363 - RNA, 21 nt, Human
acugggagaacgagccuuucc

SEQ ID NO: 42364 - RNA, 22 nt, Human
acugggaggcaaagagcaagga

SEQ ID NO: 42365 - RNA, 22 nt, Human
acugggaguucuccaugucccu

SEQ ID NO: 42366 - RNA, 20 nt, Human
acugggcauaccuguccugu

SEQ ID NO: 42367 - RNA, 22 nt, Human
acugggcaugaugagucaccua

SEQ ID NO: 42368 - RNA, 22 nt, Human
acugggccagaucagagcaacu

SEQ ID NO: 42369 - RNA, 22 nt, Human
acugggccgcgcugcagagggc

SEQ ID NO: 42370 - RNA, 22 nt, Human
acugggccggugcagaguaguu

SEQ ID NO: 42371 - RNA, 22 nt, Human
acugggccuacccagauuggca

SEQ ID NO: 42372 - RNA, 22 nt, Human
acugggccugauugggucggag

SEQ ID NO: 42373 - RNA, 22 nt, Human
acugggccuggauuggcguguc

SEQ ID NO: 42374 - RNA, 22 nt, Human
acugggcuaccccaccauuacc

SEQ ID NO: 42375 - RNA, 22 nt, Human
acugggcuagaguggaagcugg

SEQ ID NO: 42376 - RNA, 21 nt, Human
acugggcuagccugacuucug

SEQ ID NO: 42377 - RNA, 22 nt, Human
acugggcucccaggcuugucau

SEQ ID NO: 42378 - RNA, 22 nt, Human
acugggcuggggcucauucucc

SEQ ID NO: 42379 - RNA, 22 nt, Human
acugggcuguggacacccagcg

SEQ ID NO: 42380 - RNA, 22 nt, Human
acugggcuguuccuuauuucua

SEQ ID NO: 42381 - RNA, 23 nt, Human
acugggcuuaugaggaggcuugu

SEQ ID NO: 42382 - RNA, 22 nt, Human
acuggggaguugaagcacuuuc

SEQ ID NO: 42383 - RNA, 22 nt, Human
acuggggccuccuccaugcucu

SEQ ID NO: 42384 - RNA, 22 nt, Human
acuggggugaaauuggaguguc

SEQ ID NO: 42385 - RNA, 22 nt, Human
acugggguuuaggccugggcaa

SEQ ID NO: 42386 - RNA, 23 nt, Human
acugguacagguuuacugguguc

SEQ ID NO: 42387 - RNA, 22 nt, Human
acuggugguuucuccccagaga

SEQ ID NO: 42388 - RNA, 22 nt, Human
acuguaaaacagguuucaucau

SEQ ID NO: 42389 - RNA, 22 nt, Human
acuguaaaagaaggucuuugca

SEQ ID NO: 42390 - RNA, 22 nt, Human
acuguaaaauacauaaguauug

SEQ ID NO: 42391 - RNA, 22 nt, Human
acuguaaauuacauaagaacag

SEQ ID NO: 42392 - RNA, 22 nt, Human
acuguaauaugguucuuuugau

SEQ ID NO: 42393 - RNA, 22 nt, Human
acuguaauauuuuaagaugucu

SEQ ID NO: 42394 - RNA, 22 nt, Human
acuguacaaccucugccccugu

SEQ ID NO: 42395 - RNA, 22 nt, Human
acuguacaacugcugagcagaa

SEQ ID NO: 42396 - RNA, 22 nt, Human
acuguacucuuauagccaucug

SEQ ID NO: 42397 - RNA, 22 nt, Human
acuguacugaaaaguaagcaag

SEQ ID NO: 42398 - RNA, 22 nt, Human
acuguacuuacgcauauacagg

SEQ ID NO: 42399 - RNA, 22 nt, Human
acuguagcugccacuggaugca

SEQ ID NO: 42400 - RNA, 22 nt, Human
acuguauacuucuguauacaau

SEQ ID NO: 42401 - RNA, 22 nt, Human
acuguauagauggaguugauuu

SEQ ID NO: 42402 - RNA, 22 nt, Human
acuuugaaacuaaaauucauua

SEQ ID NO: 42403 - RNA, 22 nt, Human
acuuugauaguuuaaucuagga

SEQ ID NO: 42404 - RNA, 22 nt, Human
acuuugaucuaaguuucuuuga

SEQ ID NO: 42405 - RNA, 22 nt, Human
acuuugcaaaaggaaaucaccu

SEQ ID NO: 42406 - RNA, 22 nt, Human
acuuugcaggccuuuucuugug

SEQ ID NO: 42407 - RNA, 22 nt, Human
acuuugcagggcuugauaucca

SEQ ID NO: 42408 - RNA, 22 nt, Human
acuuugcagguacaugagcauc

SEQ ID NO: 42409 - RNA, 23 nt, Human
acuuugcauacccaaauuguuuu

SEQ ID NO: 42410 - RNA, 19 nt, Human
acuuugcaugugugucuaa

SEQ ID NO: 42411 - RNA, 22 nt, Human
acuuuggacgccaugcuguuug

SEQ ID NO: 42412 - RNA, 22 nt, Human
acuuuggaucugauguaaucag

SEQ ID NO: 42413 - RNA, 21 nt, Human
acuuugggaggugugaggggc

SEQ ID NO: 42414 - RNA, 22 nt, Human
acuuuguaauaacuccugaguu

SEQ ID NO: 42415 - RNA, 22 nt, Human
acuuuguaauaguuuaagguca

SEQ ID NO: 42416 - RNA, 22 nt, Human
acuuuguauaagacaauaaaga

SEQ ID NO: 42417 - RNA, 22 nt, Human
acuuuguuccuuucacaaagaa

SEQ ID NO: 42418 - RNA, 22 nt, Human
acuuuguuuccauauuuguagc

SEQ ID NO: 42419 - RNA, 22 nt, Human
acuuuguuuggcuauuagaguc

SEQ ID NO: 42420 - RNA, 22 nt, Human
acuuuguuuuauagcacauaag

SEQ ID NO: 42421 - RNA, 22 nt, Human
acuuuucaaaugggaaacucag

SEQ ID NO: 42422 - RNA, 22 nt, Human
acuuuucccuugguagaguugc

SEQ ID NO: 42423 - RNA, 22 nt, Human
acuuuugaggacuuuauuguau

SEQ ID NO: 42424 - RNA, 22 nt, Human
acuuuugugcaggucucuccca

SEQ ID NO: 42425 - RNA, 22 nt, Human
acuuuuuuauaaggaagaagau

SEQ ID NO: 42426 - RNA, 21 nt, Human
agaaaaaccagcauguuuuca

SEQ ID NO: 42427 - RNA, 22 nt, Human
agaaaaacuaagaguggguggu

SEQ ID NO: 42428 - RNA, 22 nt, Human
agaaaacuugcucgagccuguu

SEQ ID NO: 42429 - RNA, 23 nt, Human
agaaaagcuuggacacauggccu

SEQ ID NO: 42430 - RNA, 22 nt, Human
agaaaaggauugauggaucaga

SEQ ID NO: 42431 - RNA, 22 nt, Human
agaaaagggcaggagggauaca

SEQ ID NO: 42432 - RNA, 22 nt, Human
agaaaagguugaaaguaggauu

SEQ ID NO: 42433 - RNA, 22 nt, Human
agaaaagugcucuagugagagc

SEQ ID NO: 42434 - RNA, 22 nt, Human
agaaaauaaauugaugguggaa

SEQ ID NO: 42435 - RNA, 22 nt, Human
agaaaauaauuucuuggcuggu

SEQ ID NO: 42436 - RNA, 22 nt, Human
agaaaaugugaacuugugaauu

SEQ ID NO: 42437 - RNA, 20 nt, Human
agaaaauguuuucagcugga

SEQ ID NO: 42438 - RNA, 22 nt, Human
agaaaauuuauucauguuaguu

SEQ ID NO: 42439 - RNA, 22 nt, Human
agaaacagaaccaggugucauu

SEQ ID NO: 42440 - RNA, 22 nt, Human
agaaacaucgcuuaguccucau

SEQ ID NO: 42441 - RNA, 22 nt, Human
agaaacauuuagauuauauguc

SEQ ID NO: 42442 - RNA, 23 nt, Human
agaaaccacugaagagauccagu

SEQ ID NO: 42443 - RNA, 22 nt, Human
agaaaccuccauuuauucacuc

SEQ ID NO: 42444 - RNA, 22 nt, Human
agaaacucauccuggagaugac

SEQ ID NO: 42445 - RNA, 22 nt, Human
agaaacucuaggucaauugagg

SEQ ID NO: 42446 - RNA, 22 nt, Human
agaaacugaauuauuucugagg

SEQ ID NO: 42447 - RNA, 22 nt, Human
agaaacuguguuacuagaaugu

SEQ ID NO: 42448 - RNA, 22 nt, Human
agaaagaacguugguuaucuua

SEQ ID NO: 42449 - RNA, 22 nt, Human
agaaagacaaaaugcaguggcu

SEQ ID NO: 42450 - RNA, 17 nt, Human
agaaagaggauccacag

SEQ ID NO: 42451 - RNA, 22 nt, Human
agaaagauccuucuggcugccu

SEQ ID NO: 42452 - RNA, 22 nt, Human
agaaagcagcauuuaugaucuc

SEQ ID NO: 42453 - RNA, 22 nt, Human
agaaagcccacccagaagaugu

SEQ ID NO: 42454 - RNA, 22 nt, Human
agaaagccucaaucuucaggcc

SEQ ID NO: 42455 - RNA, 22 nt, Human
agaaaggagaccagcucugccc

SEQ ID NO: 42456 - RNA, 22 nt, Human
agaaaggagcaccgugggggau

SEQ ID NO: 42457 - RNA, 22 nt, Human
agaaaggaggaagaaugaccuc

SEQ ID NO: 42458 - RNA, 22 nt, Human
agaaagggucacugaaagagga

SEQ ID NO: 42459 - RNA, 22 nt, Human
agaaaggucacuuagccucagc

SEQ ID NO: 42460 - RNA, 22 nt, Human
agaaagguggaugcucuggaau

SEQ ID NO: 42461 - RNA, 22 nt, Human
agaaagugugucauacuaagug

SEQ ID NO: 42462 - RNA, 22 nt, Human
agaaaguuaucacaaaauugag

SEQ ID NO: 42463 - RNA, 22 nt, Human
agaaaguucacugguauauuuu

SEQ ID NO: 42464 - RNA, 22 nt, Human
agaaaguuguuggaggaaauga

SEQ ID NO: 42465 - RNA, 22 nt, Human
agaaaguuguuuuagccaaacc

SEQ ID NO: 42466 - RNA, 22 nt, Human
acuguuuucuuagcucccugcu

SEQ ID NO: 42467 - RNA, 22 nt, Human
acuuaaaaacagauccagcagg

SEQ ID NO: 42468 - RNA, 22 nt, Human
acuuaaaaccagacagcgucau

SEQ ID NO: 42469 - RNA, 22 nt, Human
acuuaaagaggcuacuuuuggu

SEQ ID NO: 42470 - RNA, 22 nt, Human
acuuaaaguuauaauuugcuaa

SEQ ID NO: 42471 - RNA, 21 nt, Human
acuuaaauuccuugauauuua

SEQ ID NO: 42472 - RNA, 22 nt, Human
acuuacaagcuagggaagcuug

SEQ ID NO: 42473 - RNA, 22 nt, Human
acuuacaaucaaccaccuugga

SEQ ID NO: 42474 - RNA, 22 nt, Human
acuuaccagagaggauccgccc

SEQ ID NO: 42475 - RNA, 22 nt, Human
acuuagauaacaaaccuguggu

SEQ ID NO: 42476 - RNA, 22 nt, Human
acuuagauuccugguaccuccg

SEQ ID NO: 42477 - RNA, 22 nt, Human
acuuagcaaaucuuuuggauuc

SEQ ID NO: 42478 - RNA, 22 nt, Human
acuuagcaccuauggcauuuuu

SEQ ID NO: 42479 - RNA, 22 nt, Human
acuuagcagaguugaauguacu

SEQ ID NO: 42480 - RNA, 22 nt, Human
acuuagcagguggugacucgaa

SEQ ID NO: 42481 - RNA, 22 nt, Human
acuuauguaguaccucuuaugu

SEQ ID NO: 42482 - RNA, 19 nt, Human
acuucaaaucuuagagaaa

SEQ ID NO: 42483 - RNA, 22 nt, Human
acuucaaauuuucagaagaaau

SEQ ID NO: 42484 - RNA, 22 nt, Human
acuucacagaaauuuuaugagg

SEQ ID NO: 42485 - RNA, 22 nt, Human
acuucacuuguaaaugcagccu

SEQ ID NO: 42486 - RNA, 22 nt, Human
acuucauauuguuuccacuaga

SEQ ID NO: 42487 - RNA, 23 nt, Human
acuucauggcacugucuuagagg

SEQ ID NO: 42488 - RNA, 22 nt, Human
acuucauguuguuuacaacuua

SEQ ID NO: 42489 - RNA, 22 nt, Human
acuucauugcuaagaacaaggu

SEQ ID NO: 42490 - RNA, 22 nt, Human
acuucauuguaauauuauagca

SEQ ID NO: 42491 - RNA, 22 nt, Human
acuucauuucauuugcacagug

SEQ ID NO: 42492 - RNA, 22 nt, Human
acuuccaacuucaguccugagc

SEQ ID NO: 42493 - RNA, 22 nt, Human
acuuccagaaaugauuuaauuu

SEQ ID NO: 42494 - RNA, 22 nt, Human
acuuccagaacagguacauuuu

SEQ ID NO: 42495 - RNA, 22 nt, Human
acuuccagaauuagaauuuaag

SEQ ID NO: 42496 - RNA, 22 nt, Human
acuuccagauggccccaucuaa

SEQ ID NO: 42497 - RNA, 22 nt, Human
acuuccagcugcccugugugcu

SEQ ID NO: 42498 - RNA, 22 nt, Human
acuuccaggaggugucacugaa

SEQ ID NO: 42499 - RNA, 16 nt, Human
acuuccaggggagccc

SEQ ID NO: 42500 - RNA, 22 nt, Human
acuucccacugcagugacugag

SEQ ID NO: 42501 - RNA, 22 nt, Human
acuucccaggugguguggaguu

SEQ ID NO: 42502 - RNA, 22 nt, Human
acuuccccgaagcuggaaauag

SEQ ID NO: 42503 - RNA, 22 nt, Human
acuucccugugggcagguagug

SEQ ID NO: 42504 - RNA, 22 nt, Human
acuuccugcaaucguccacucc

SEQ ID NO: 42505 - RNA, 22 nt, Human
acuuccuguaaauagaauucca

SEQ ID NO: 42506 - RNA, 22 nt, Human
acuuccuguguuggucuugcug

SEQ ID NO: 42507 - RNA, 22 nt, Human
acuuccuuuucaaccauacagc

SEQ ID NO: 42508 - RNA, 22 nt, Human
acuucuaagcucaaauugguau

SEQ ID NO: 42509 - RNA, 22 nt, Human
acuucuaaucagaaggucuggu

SEQ ID NO: 42510 - RNA, 22 nt, Human
acuucucuucauagguggcaau

SEQ ID NO: 42511 - RNA, 22 nt, Human
acuucugaagcagagauuuggg

SEQ ID NO: 42512 - RNA, 22 nt, Human
acuucugauuaaggaugaaugc

SEQ ID NO: 42513 - RNA, 22 nt, Human
acuucuggauagagucagcuuu

SEQ ID NO: 42514 - RNA, 22 nt, Human
acuucuguaaagggaagacagu

SEQ ID NO: 42515 - RNA, 22 nt, Human
acuucuucuucagcugggggau

SEQ ID NO: 42516 - RNA, 22 nt, Human
acuucuuucacaauguuucuag

SEQ ID NO: 42517 - RNA, 22 nt, Human
acccagggcagccagcggggag

SEQ ID NO: 42518 - RNA, 22 nt, Human
acccagggcucaagcguaggca

SEQ ID NO: 42519 - RNA, 22 nt, Human
acccagggcuuaaggcggugca

SEQ ID NO: 42520 - RNA, 19 nt, Human
acccagggguuuaugugug

SEQ ID NO: 42521 - RNA, 22 nt, Human
acccaggguagaaccucagagc

SEQ ID NO: 42522 - RNA, 22 nt, Human
acccagucuggagugcagugac

SEQ ID NO: 42523 - RNA, 22 nt, Human
accccaagacaguagaagagaa

SEQ ID NO: 42524 - RNA, 22 nt, Human
accccacagcauacaaaggcac

SEQ ID NO: 42525 - RNA, 22 nt, Human
accccacuccucuguuuuaacu

SEQ ID NO: 42526 - RNA, 20 nt, Human
accccagccccucuaucuga

SEQ ID NO: 42527 - RNA, 22 nt, Human
accccagcucugagccacacca

SEQ ID NO: 42528 - RNA, 22 nt, Human
accccaggaaguggaggucaug

SEQ ID NO: 42529 - RNA, 22 nt, Human
accccaggagcugugccuaguc

SEQ ID NO: 42530 - RNA, 22 nt, Human
accccagguccagguuacagag

SEQ ID NO: 42531 - RNA, 22 nt, Human
acccccaagaggggccuucagc

SEQ ID NO: 42532 - RNA, 22 nt, Human
acccccuucgcacacucuuuca

SEQ ID NO: 42533 - RNA, 22 nt, Human
accccucaucaguugcuuccua

SEQ ID NO: 42534 - RNA, 22 nt, Human
accccuucuccuggcuguucca

SEQ ID NO: 42535 - RNA, 22 nt, Human
accccuuggaguccgcgcccag

SEQ ID NO: 42536 - RNA, 22 nt, Human
acccgggaggcaggagucauag

SEQ ID NO: 42537 - RNA, 22 nt, Human
acccucaagauggaagcaguuu

SEQ ID NO: 42538 - RNA, 17 nt, Human
acccucaaucuccugca

SEQ ID NO: 42539 - RNA, 22 nt, Human
acccucagacagcuguggccag

SEQ ID NO: 42540 - RNA, 22 nt, Human
acccucaguaaucgugcaguuu

SEQ ID NO: 42541 - RNA, 22 nt, Human
acccucgauaugaucugaugaa

SEQ ID NO: 42542 - RNA, 19 nt, Human
acccucucagugccugagg

SEQ ID NO: 42543 - RNA, 19 nt, Human
acccucugccacaagccuc

SEQ ID NO: 42544 - RNA, 22 nt, Human
acccugaagcaggcacucagcu

SEQ ID NO: 42545 - RNA, 22 nt, Human
acccugagaugccacagcauga

SEQ ID NO: 42546 - RNA, 22 nt, Human
acccugagccgccaggaaggcc

SEQ ID NO: 42547 - RNA, 22 nt, Human
acccugagggaugagaguugca

SEQ ID NO: 42548 - RNA, 22 nt, Human
acccugagucacugucugucug

SEQ ID NO: 42549 - RNA, 22 nt, Human
acccugauggccagauugugga

SEQ ID NO: 42550 - RNA, 22 nt, Human
acccugcccucuccagcucagg

SEQ ID NO: 42551 - RNA, 22 nt, Human
acccuggacaucuugucauagc

SEQ ID NO: 42552 - RNA, 22 nt, Human
acccuggacuggggcugaggcu

SEQ ID NO: 42553 - RNA, 22 nt, Human
acccuggaggucuacagugcag

SEQ ID NO: 42554 - RNA, 18 nt, Human
acccugggcaauucacuc

SEQ ID NO: 42555 - RNA, 22 nt, Human
acccuggggucacccuucucug

SEQ ID NO: 42556 - RNA, 16 nt, Human
acccuggguaguccug

SEQ ID NO: 42557 - RNA, 22 nt, Human
acccuggguauuucccaaacuu

SEQ ID NO: 42558 - RNA, 22 nt, Human
acccuguauacgcuacauuuuu

SEQ ID NO: 42559 - RNA, 22 nt, Human
acccuguugguggaucagauug

SEQ ID NO: 42560 - RNA, 22 nt, Human
acccuuuagaaggcaucucagu

SEQ ID NO: 42561 - RNA, 20 nt, Human
acccuuugccggaugccaag

SEQ ID NO: 42562 - RNA, 22 nt, Human
acccuuugccuagaggggcuuu

SEQ ID NO: 42563 - RNA, 22 nt, Human
accgaguuagccaggauggucu

SEQ ID NO: 42564 - RNA, 22 nt, Human
accgcagugacgugggacuucc

SEQ ID NO: 42565 - RNA, 22 nt, Human
accgggaaguccugcacugggc

SEQ ID NO: 42566 - RNA, 22 nt, Human
accgggcuaauuuuuguaucuu

SEQ ID NO: 42567 - RNA, 22 nt, Human
accguuuacaccacuaccgcuu

SEQ ID NO: 42568 - RNA, 22 nt, Human
accuaaauucuggcugauuagg

SEQ ID NO: 42569 - RNA, 22 nt, Human
accuacauaguuaaguaacaaa

SEQ ID NO: 42570 - RNA, 22 nt, Human
accuacaucaagggagugguag

SEQ ID NO: 42571 - RNA, 22 nt, Human
accuacauguuccacauaguug

SEQ ID NO: 42572 - RNA, 22 nt, Human
accuacccuuagaucacaaggg

SEQ ID NO: 42573 - RNA, 22 nt, Human
accuagaacugcaggcuauuuu

SEQ ID NO: 42574 - RNA, 22 nt, Human
accuagaguagucaaauucaua

SEQ ID NO: 42575 - RNA, 22 nt, Human
acguucaaugucagucaacuuu

SEQ ID NO: 42576 - RNA, 22 nt, Human
acguuuuauucccaugcagcau

SEQ ID NO: 42577 - RNA, 19 nt, Human
acuaaaaaugauguuugag

SEQ ID NO: 42578 - RNA, 22 nt, Human
acuaaacacaugagauuccugc

SEQ ID NO: 42579 - RNA, 22 nt, Human
acuaaagaugucuaaauauauu

SEQ ID NO: 42580 - RNA, 22 nt, Human
acuaaagcucacagaguugaac

SEQ ID NO: 42581 - RNA, 22 nt, Human
acuaaaguauggaagugaauaa

SEQ ID NO: 42582 - RNA, 22 nt, Human
acuaaagucagacugcauugau

SEQ ID NO: 42583 - RNA, 22 nt, Human
acuaaagucaucaaagaacuuu

SEQ ID NO: 42584 - RNA, 22 nt, Human
acuaaaguucacggucagcuuu

SEQ ID NO: 42585 - RNA, 22 nt, Human
acuaaauacacacauuuguuca

SEQ ID NO: 42586 - RNA, 22 nt, Human
acuaaauauuugagagguguag

SEQ ID NO: 42587 - RNA, 22 nt, Human
acuaaauuugucaaugacacuu

SEQ ID NO: 42588 - RNA, 22 nt, Human
acuaagugauucuaagcaucuu

SEQ ID NO: 42589 - RNA, 22 nt, Human
acuaagugggacauuuacuagg

SEQ ID NO: 42590 - RNA, 22 nt, Human
acuaauugagugcaugaucuuu

SEQ ID NO: 42591 - RNA, 22 nt, Human
acuaauuguauaguugauguaa

SEQ ID NO: 42592 - RNA, 22 nt, Human
acuacaaaagcacuggguauua

SEQ ID NO: 42593 - RNA, 22 nt, Human
acuacacagggaugugacuacc

SEQ ID NO: 42594 - RNA, 22 nt, Human
acuacaguaagggaggcagcau

SEQ ID NO: 42595 - RNA, 22 nt, Human
acuacaucuugcauaucuauaa

SEQ ID NO: 42596 - RNA, 22 nt, Human
acuacauuaugaggaaagagug

SEQ ID NO: 42597 - RNA, 22 nt, Human
acuacauucaugcucguguugg

SEQ ID NO: 42598 - RNA, 22 nt, Human
acuacauuuccugaccccugug

SEQ ID NO: 42599 - RNA, 22 nt, Human
acuacuaguggcuacaauaaug

SEQ ID NO: 42600 - RNA, 22 nt, Human
acuagaaaauuccuagaaacua

SEQ ID NO: 42601 - RNA, 22 nt, Human
acuagaacuucuaacuaagguc

SEQ ID NO: 42602 - RNA, 22 nt, Human
acuagaccaaggaauccuggaa

SEQ ID NO: 42603 - RNA, 23 nt, Human
acuagacuucaucgaagguuacc

SEQ ID NO: 42604 - RNA, 19 nt, Human
acuagcacccagguaaaug

SEQ ID NO: 42605 - RNA, 21 nt, Human
acuagcuuucuggagaagugu

SEQ ID NO: 42606 - RNA, 22 nt, Human
acuaggaacgggguuugcacuc

SEQ ID NO: 42607 - RNA, 22 nt, Human
acuagggagaagcacuuacaca

SEQ ID NO: 42608 - RNA, 22 nt, Human
acuagggauuacacuguauuca

SEQ ID NO: 42609 - RNA, 22 nt, Human
acuaguauucuuggucuuguau

SEQ ID NO: 42610 - RNA, 22 nt, Human
acuaguauugccuacuguacau

SEQ ID NO: 42611 - RNA, 20 nt, Human
acuagucuaaaagggcugac

SEQ ID NO: 42612 - RNA, 22 nt, Human
acuagucugcauuacaaaauag

SEQ ID NO: 42613 - RNA, 23 nt, Human
acuauaaaguuguucugauuuac

SEQ ID NO: 42614 - RNA, 22 nt, Human
acuauacaccaaaauauuaagg

SEQ ID NO: 42615 - RNA, 22 nt, Human
acuauacagaagaggauaggaa

SEQ ID NO: 42616 - RNA, 22 nt, Human
acuauauaagauuggcauuuuu

SEQ ID NO: 42617 - RNA, 22 nt, Human
acuauauacacauuaucuuguu

SEQ ID NO: 42618 - RNA, 22 nt, Human
acuaucaacaucauugcucuag

SEQ ID NO: 42619 - RNA, 22 nt, Human
acuaucuuccuuaugccuauca

SEQ ID NO: 42620 - RNA, 22 nt, Human
acuauguacccaaagaucugau

SEQ ID NO: 42621 - RNA, 22 nt, Human
acuauuagcauaucaugaaugg

SEQ ID NO: 42622 - RNA, 22 nt, Human
acuauucaagugcucauucaga

SEQ ID NO: 42623 - RNA, 22 nt, Human
acuauucacagauucaguguuc

SEQ ID NO: 42624 - RNA, 22 nt, Human
acucaaauagcugccccuagug

SEQ ID NO: 42625 - RNA, 22 nt, Human
acucaaauuugucaacugaagc

SEQ ID NO: 42626 - RNA, 22 nt, Human
acucaaguggccuugauggcuu

SEQ ID NO: 42627 - RNA, 23 nt, Human
acucacaaagcaggaucauguug

SEQ ID NO: 42628 - RNA, 22 nt, Human
acucacaagugaugugaauggc

SEQ ID NO: 42629 - RNA, 22 nt, Human
acucacauuucaucaggccaag

SEQ ID NO: 42630 - RNA, 22 nt, Human
acucacuucuuuuacuauaaaa

SEQ ID NO: 42631 - RNA, 22 nt, Human
acucagaaugucacugagggac

SEQ ID NO: 42632 - RNA, 22 nt, Human
acucagagaaacagcagggugu

SEQ ID NO: 42633 - RNA, 22 nt, Human
acucagagaauaucuagaagga

SEQ ID NO: 42634 - RNA, 22 nt, Human
acucagagcuuggcuccuugcu

SEQ ID NO: 42635 - RNA, 22 nt, Human
acccaggcuggagugcaguguc

SEQ ID NO: 42636 - RNA, 22 nt, Human
acccaggcuggcagaggcuccu

SEQ ID NO: 42637 - RNA, 22 nt, Human
acccagggagugcuccuguucu

SEQ ID NO: 42638 - RNA, 21 nt, Human
acccaggggaagcagaaacug

SEQ ID NO: 42639 - RNA, 22 nt, Human
acccaggguagagugcaguggc

SEQ ID NO: 42640 - RNA, 19 nt, Human
acccaggguugauguccag

SEQ ID NO: 42641 - RNA, 22 nt, Human
acccagucauccuggugugaga

SEQ ID NO: 42642 - RNA, 22 nt, Human
acccauacacacauauuuaugu

SEQ ID NO: 42643 - RNA, 23 nt, Human
acccaucucuccugucaugcaga

SEQ ID NO: 42644 - RNA, 18 nt, Human
acccauuauauuuguagc

SEQ ID NO: 42645 - RNA, 22 nt, Human
acccauuuguccagcaaagaua

SEQ ID NO: 42646 - RNA, 17 nt, Human
acccauuuugcacaggc

SEQ ID NO: 42647 - RNA, 20 nt, Human
accccacagaguccauugca

SEQ ID NO: 42648 - RNA, 22 nt, Human
accccagaaucuaugcuuuaca

SEQ ID NO: 42649 - RNA, 22 nt, Human
accccagaggcggaggcugcag

SEQ ID NO: 42650 - RNA, 22 nt, Human
accccagcccugcuucugggag

SEQ ID NO: 42651 - RNA, 22 nt, Human
accccaggcccagggaagaggc

SEQ ID NO: 42652 - RNA, 22 nt, Human
accccccagauaaucccuugag

SEQ ID NO: 42653 - RNA, 22 nt, Human
acccgcuuccggagcugcagug

SEQ ID NO: 42654 - RNA, 22 nt, Human
acccggaggcgggggaugcagu

SEQ ID NO: 42655 - RNA, 22 nt, Human
acccucagcuucuuggauuaau

SEQ ID NO: 42656 - RNA, 22 nt, Human
acccuccccaagaggucgugcc

SEQ ID NO: 42657 - RNA, 22 nt, Human
acccucugagaggcacacuuug

SEQ ID NO: 42658 - RNA, 22 nt, Human
acccugaagaaacuucuaagug

SEQ ID NO: 42659 - RNA, 22 nt, Human
acccugagaaagucacaugcau

SEQ ID NO: 42660 - RNA, 22 nt, Human
acccugauauagguccaagagc

SEQ ID NO: 42661 - RNA, 22 nt, Human
acccuggcccauugcugugccu

SEQ ID NO: 42662 - RNA, 22 nt, Human
acccuggcucucuggccaccgc

SEQ ID NO: 42663 - RNA, 22 nt, Human
acccugggagggagaaaucaga

SEQ ID NO: 42664 - RNA, 22 nt, Human
acccugggcacaccauuucccc

SEQ ID NO: 42665 - RNA, 22 nt, Human
acccuggggguggccagugcca

SEQ ID NO: 42666 - RNA, 22 nt, Human
acccugggucucaaucauccua

SEQ ID NO: 42667 - RNA, 22 nt, Human
acccugucuucccugggcauca

SEQ ID NO: 42668 - RNA, 22 nt, Human
acccuguuaugguguaacauuu

SEQ ID NO: 42669 - RNA, 22 nt, Human
acccuucauagaggagaagcug

SEQ ID NO: 42670 - RNA, 22 nt, Human
acccuugguuuugcagagcugu

SEQ ID NO: 42671 - RNA, 22 nt, Human
accgaaggaaacuggaaccguu

SEQ ID NO: 42672 - RNA, 22 nt, Human
accguauauguuugcugugccc

SEQ ID NO: 42673 - RNA, 22 nt, Human
accguggauuuguagucauuuc

SEQ ID NO: 42674 - RNA, 22 nt, Human
accuaaaucuaccucauguuuu

SEQ ID NO: 42675 - RNA, 22 nt, Human
accuacagagaucugcauuuuu

SEQ ID NO: 42676 - RNA, 22 nt, Human
accuacagaucuuugaaugugu

SEQ ID NO: 42677 - RNA, 20 nt, Human
accuacauguauagugaggg

SEQ ID NO: 42678 - RNA, 23 nt, Human
accuacauuauagggauaugggu

SEQ ID NO: 42679 - RNA, 22 nt, Human
accuacugcuccacagugacua

SEQ ID NO: 42680 - RNA, 22 nt, Human
accuagaaugaagcaaugcugu

SEQ ID NO: 42681 - RNA, 22 nt, Human
accuagcugaggagugugagug

SEQ ID NO: 42682 - RNA, 22 nt, Human
accucaagaauguauaacacag

SEQ ID NO: 42683 - RNA, 22 nt, Human
accucagcuauuucaaaacaga

SEQ ID NO: 42684 - RNA, 22 nt, Human
acucuucacuuccccugccagc

SEQ ID NO: 42685 - RNA, 22 nt, Human
acucuucauacagucaucuaau

SEQ ID NO: 42686 - RNA, 22 nt, Human
acucuugaagguggugggagug

SEQ ID NO: 42687 - RNA, 22 nt, Human
acugaaauacugcucuuggauu

SEQ ID NO: 42688 - RNA, 22 nt, Human
acugaaaugaaaucuaucaucu

SEQ ID NO: 42689 - RNA, 22 nt, Human
acugaacaccauuuauaacauu

SEQ ID NO: 42690 - RNA, 22 nt, Human
acugaacuuggugaaugccaca

SEQ ID NO: 42691 - RNA, 18 nt, Human
acugaagaugcaagaccu

SEQ ID NO: 42692 - RNA, 23 nt, Human
acugaagaugucuuaguggcccu

SEQ ID NO: 42693 - RNA, 22 nt, Human
acugaaggaaagccuuugcaug

SEQ ID NO: 42694 - RNA, 22 nt, Human
acugaaguccacacauguagga

SEQ ID NO: 42695 - RNA, 20 nt, Human
acugacagggaacuaaggcu

SEQ ID NO: 42696 - RNA, 22 nt, Human
acugacucuuguuaacuucagc

SEQ ID NO: 42697 - RNA, 22 nt, Human
acugagaaagaccacauggaga

SEQ ID NO: 42698 - RNA, 19 nt, Human
acugagaaccugacccagg

SEQ ID NO: 42699 - RNA, 22 nt, Human
acugagaacucaagagaaaagg

SEQ ID NO: 42700 - RNA, 20 nt, Human
acugagaccaauaaguagaa

SEQ ID NO: 42701 - RNA, 22 nt, Human
acugagacugccccuguaacaa

SEQ ID NO: 42702 - RNA, 22 nt, Human
acugagacuuuguugaguucuu

SEQ ID NO: 42703 - RNA, 21 nt, Human
acugagagauguuggaucaua

SEQ ID NO: 42704 - RNA, 22 nt, Human
acugagagcguguacaaacuua

SEQ ID NO: 42705 - RNA, 22 nt, Human
acugagaggugauagugacauu

SEQ ID NO: 42706 - RNA, 22 nt, Human
acugagagucaagauagcaugg

SEQ ID NO: 42707 - RNA, 22 nt, Human
acugagagucuuagaaacacau

SEQ ID NO: 42708 - RNA, 22 nt, Human
acugagaguugaaaagggagga

SEQ ID NO: 42709 - RNA, 23 nt, Human
acugagcaauguuuacauacuug

SEQ ID NO: 42710 - RNA, 22 nt, Human
acugagcauggcucacagagag

SEQ ID NO: 42711 - RNA, 23 nt, Human
acugagcauuaguauuuuuauaa

SEQ ID NO: 42712 - RNA, 22 nt, Human
acugagccuugaagcuagauag

SEQ ID NO: 42713 - RNA, 22 nt, Human
acugagcucuagguuuugaacc

SEQ ID NO: 42714 - RNA, 22 nt, Human
acugagcucuugacugggaguu

SEQ ID NO: 42715 - RNA, 22 nt, Human
acugagcugcuugaagugaacu

SEQ ID NO: 42716 - RNA, 22 nt, Human
acugaggaacauauauaagaug

SEQ ID NO: 42717 - RNA, 22 nt, Human
acugaggcuuaaagagauuagg

SEQ ID NO: 42718 - RNA, 22 nt, Human
acugagggagagucuuagguug

SEQ ID NO: 42719 - RNA, 22 nt, Human
acugagguuuacuugaaggaga

SEQ ID NO: 42720 - RNA, 22 nt, Human
acugagguuucauuuuaucgcu

SEQ ID NO: 42721 - RNA, 22 nt, Human
acugauacaucuguggaagugg

SEQ ID NO: 42722 - RNA, 22 nt, Human
acugauacgguuuuagagucca

SEQ ID NO: 42723 - RNA, 22 nt, Human
acugaucacagauauguauauu

SEQ ID NO: 42724 - RNA, 22 nt, Human
acugaucacauagauauauucc

SEQ ID NO: 42725 - RNA, 20 nt, Human
acugaucuuguucuuacucc

SEQ ID NO: 42726 - RNA, 22 nt, Human
acugaugaaaacuaauaaauua

SEQ ID NO: 42727 - RNA, 22 nt, Human
acugaugaaagguaagacucca

SEQ ID NO: 42728 - RNA, 22 nt, Human
acugaugaagaguaccacuguu

SEQ ID NO: 42729 - RNA, 22 nt, Human
acugauggcccaccuuggucuc

SEQ ID NO: 42730 - RNA, 22 nt, Human
acugauuaaaaacagacauuua

SEQ ID NO: 42731 - RNA, 22 nt, Human
acugauuacacgaguucugacu

SEQ ID NO: 42732 - RNA, 22 nt, Human
acugauucaaguuaugcaucuu

SEQ ID NO: 42733 - RNA, 22 nt, Human
acugauugcauucauaggguuu

SEQ ID NO: 42734 - RNA, 22 nt, Human
acugcaaaaaugggugcauuca

SEQ ID NO: 42735 - RNA, 21 nt, Human
acugcaaacagcagagacuga

SEQ ID NO: 42736 - RNA, 22 nt, Human
acugcaaagccagauauuauca

SEQ ID NO: 42737 - RNA, 22 nt, Human
acugcaaggaggugggguauca

SEQ ID NO: 42738 - RNA, 22 nt, Human
acugcacacauguuuaagugga

SEQ ID NO: 42739 - RNA, 22 nt, Human
acugcacacuuagcaucuggga

SEQ ID NO: 42740 - RNA, 22 nt, Human
acugcacagaaccuuagaauau

SEQ ID NO: 42741 - RNA, 22 nt, Human
acugcacagucccagaggaugc

SEQ ID NO: 42742 - RNA, 22 nt, Human
acugcacuccagcccgagcaac

SEQ ID NO: 42743 - RNA, 22 nt, Human
acugcacuucacccugggugac

SEQ ID NO: 42744 - RNA, 22 nt, Human
acugcagcccccuauuaggacu

SEQ ID NO: 42745 - RNA, 22 nt, Human
acugcagccuuugggcucauaa

SEQ ID NO: 42746 - RNA, 21 nt, Human
acugcaucugaagucccagga

SEQ ID NO: 42747 - RNA, 22 nt, Human
acugcaugauaauaauagcaga

SEQ ID NO: 42748 - RNA, 22 nt, Human
acugcauuaucaccaagaugua

SEQ ID NO: 42749 - RNA, 22 nt, Human
acugcauuggagagcaugaauu

SEQ ID NO: 42750 - RNA, 22 nt, Human
acugcauuugucugucucaauu

SEQ ID NO: 42751 - RNA, 22 nt, Human
acugccaaugguaguuugaugg

SEQ ID NO: 42752 - RNA, 22 nt, Human
acugccacguuccaggcuuagc

SEQ ID NO: 42753 - RNA, 20 nt, Human
acugccagccuugucuacug

SEQ ID NO: 42754 - RNA, 22 nt, Human
acugcccagaagagaugaaagu

SEQ ID NO: 42755 - RNA, 22 nt, Human
acugcccagugauuggugguua

SEQ ID NO: 42756 - RNA, 22 nt, Human
acugcccuggagacagcagagu

SEQ ID NO: 42757 - RNA, 22 nt, Human
acugcccuuguccuggcacacc

SEQ ID NO: 42758 - RNA, 22 nt, Human
acugccugccuuccagguacug

SEQ ID NO: 42759 - RNA, 22 nt, Human
acugccugcucauaacauugcu

SEQ ID NO: 42760 - RNA, 22 nt, Human
acugccugcuccuggcuccaca

SEQ ID NO: 42761 - RNA, 22 nt, Human
acugccuuauaugcugugugug

SEQ ID NO: 42762 - RNA, 22 nt, Human
acugccuucaugcagaccccug

SEQ ID NO: 42763 - RNA, 22 nt, Human
acugccuugauucaugcugaug

SEQ ID NO: 42764 - RNA, 22 nt, Human
acugccuugauugccaguuucc

SEQ ID NO: 42765 - RNA, 22 nt, Human
acugcuagugagaaaauaacca

SEQ ID NO: 42766 - RNA, 22 nt, Human
acugcucucugcaaguagaugg

SEQ ID NO: 42767 - RNA, 22 nt, Human
agaguuugaauuuugaaaagau

SEQ ID NO: 42768 - RNA, 22 nt, Human
agaguuuguguccuuuaucagg

SEQ ID NO: 42769 - RNA, 17 nt, Human
agaguuuuaagaaauuu

SEQ ID NO: 42770 - RNA, 22 nt, Human
agaguuuuauggcuuuaauucu

SEQ ID NO: 42771 - RNA, 22 nt, Human
agauaaaaugguucaaaggcua

SEQ ID NO: 42772 - RNA, 22 nt, Human
agauaacuaaagaaagggauua

SEQ ID NO: 42773 - RNA, 22 nt, Human
agauaacuuuuggguauucaug

SEQ ID NO: 42774 - RNA, 22 nt, Human
agauaaguacuguuauuauugc

SEQ ID NO: 42775 - RNA, 22 nt, Human
agauaauaaauguuuuagguuu

SEQ ID NO: 42776 - RNA, 22 nt, Human
agauaaucucuaggcuucaugu

SEQ ID NO: 42777 - RNA, 22 nt, Human
agauaauuugaguaaauuaauu

SEQ ID NO: 42778 - RNA, 22 nt, Human
agauacaaaaagggagaagauu

SEQ ID NO: 42779 - RNA, 22 nt, Human
agauacaaaggccuacagagca

SEQ ID NO: 42780 - RNA, 22 nt, Human
agauacaacucagaaguguggu

SEQ ID NO: 42781 - RNA, 22 nt, Human
agauacacagcccugccaucac

SEQ ID NO: 42782 - RNA, 22 nt, Human
agauacagaaguuuuucccuau

SEQ ID NO: 42783 - RNA, 22 nt, Human
agauacagaccucuuauuaagg

SEQ ID NO: 42784 - RNA, 22 nt, Human
agauacaguguuacauuuuuau

SEQ ID NO: 42785 - RNA, 20 nt, Human
agauacaguuuaauuacucu

SEQ ID NO: 42786 - RNA, 22 nt, Human
agauacauggaacgucaaaccu

SEQ ID NO: 42787 - RNA, 22 nt, Human
agauacauuaguaguuacuugu

SEQ ID NO: 42788 - RNA, 22 nt, Human
agauacauuguucuaagcauug

SEQ ID NO: 42789 - RNA, 22 nt, Human
agauacuaagcauuuccagcac

SEQ ID NO: 42790 - RNA, 22 nt, Human
agauacuauggaauuuuaugag

SEQ ID NO: 42791 - RNA, 21 nt, Human
agauaguugggcaugcagcug

SEQ ID NO: 42792 - RNA, 22 nt, Human
agauauacacccauaucacaua

SEQ ID NO: 42793 - RNA, 22 nt, Human
agcaaacagugugcuaagaaau

SEQ ID NO: 42794 - RNA, 20 nt, Human
agcaaacucuucccaucuuc

SEQ ID NO: 42795 - RNA, 22 nt, Human
agcaaagcaucacuccaaucug

SEQ ID NO: 42796 - RNA, 22 nt, Human
agcaaagcugauuaagagcaca

SEQ ID NO: 42797 - RNA, 22 nt, Human
agcaaaguaugugcugggagcu

SEQ ID NO: 42798 - RNA, 22 nt, Human
agcaaauauuuuguugaagugc

SEQ ID NO: 42799 - RNA, 22 nt, Human
agcaaaucagcugcucaggaaa

SEQ ID NO: 42800 - RNA, 19 nt, Human
agcaacaccguuuauuucc

SEQ ID NO: 42801 - RNA, 22 nt, Human
agcaacagcagguuugcacucc

SEQ ID NO: 42802 - RNA, 22 nt, Human
agcaacagcccugagguucaug

SEQ ID NO: 42803 - RNA, 22 nt, Human
agcaacaggaccauggagccca

SEQ ID NO: 42804 - RNA, 18 nt, Human
agcaacaggaucccaggg

SEQ ID NO: 42805 - RNA, 22 nt, Human
agcaacaggcauaauguguuga

SEQ ID NO: 42806 - RNA, 22 nt, Human
agcaacauugagacugcaguug

SEQ ID NO: 42807 - RNA, 22 nt, Human
agcaaccuggaucauggugaaa

SEQ ID NO: 42808 - RNA, 22 nt, Human
agcaacuauauugaaagccacc

SEQ ID NO: 42809 - RNA, 22 nt, Human
agcaacugggcucauuuuuuaa

SEQ ID NO: 42810 - RNA, 22 nt, Human
agcaacuuuucuagacaugguc

SEQ ID NO: 42811 - RNA, 22 nt, Human
agcaagaagcuuugcugugaua

SEQ ID NO: 42812 - RNA, 22 nt, Human
agcaagaagggcaaggaaguuu

SEQ ID NO: 42813 - RNA, 21 nt, Human
agcaagaaucaggaaggcucu

SEQ ID NO: 42814 - RNA, 22 nt, Human
agcaagacucagcaggauacca

SEQ ID NO: 42815 - RNA, 20 nt, Human
agcaagaguaaggacagcga

SEQ ID NO: 42816 - RNA, 22 nt, Human
agcaagaugaaggauucaagac

SEQ ID NO: 42817 - RNA, 22 nt, Human
agcaagauuuaaacccagguca

SEQ ID NO: 42818 - RNA, 21 nt, Human
agcaagcagaauccaucuaga

SEQ ID NO: 42819 - RNA, 22 nt, Human
agcaagcagugaaguugaaugu

SEQ ID NO: 42820 - RNA, 22 nt, Human
agcaagcuaacauaggagauug

SEQ ID NO: 42821 - RNA, 22 nt, Human
agcaagcuggaggggcucauga

SEQ ID NO: 42822 - RNA, 22 nt, Human
agcaagcugucaagagagcuga

SEQ ID NO: 42823 - RNA, 21 nt, Human
agcaaggcagccucucagccu

SEQ ID NO: 42824 - RNA, 22 nt, Human
agcaaggcagcuuucacugcuu

SEQ ID NO: 42825 - RNA, 22 nt, Human
agcaaggccgagaggaugcuau

SEQ ID NO: 42826 - RNA, 20 nt, Human
agcaaggcuaaaucaugauu

SEQ ID NO: 42827 - RNA, 22 nt, Human
agcaaggcuucagagcugucug

SEQ ID NO: 42828 - RNA, 22 nt, Human
agcaaguggaaucauggaaaag

SEQ ID NO: 42829 - RNA, 22 nt, Human
agcaaguguaagaaugcagaau

SEQ ID NO: 42830 - RNA, 22 nt, Human
agcaaguugaaugauaauacuc

SEQ ID NO: 42831 - RNA, 22 nt, Human
agcaauaauuuaggccuuuccu

SEQ ID NO: 42832 - RNA, 22 nt, Human
agcaauaugacauugcuacauc

SEQ ID NO: 42833 - RNA, 23 nt, Human
agcaaucuguguuucagcaagcc

SEQ ID NO: 42834 - RNA, 22 nt, Human
agcaaugaaaugaaaucagucu

SEQ ID NO: 42835 - RNA, 22 nt, Human
agcaaugaccagugaucuugua

SEQ ID NO: 42836 - RNA, 22 nt, Human
agcaaugacuuugaaaucauga

SEQ ID NO: 42837 - RNA, 22 nt, Human
agcaaugcaaucuuaaccuuga

SEQ ID NO: 42838 - RNA, 23 nt, Human
agcaaugcugggagacucuguaa

SEQ ID NO: 42839 - RNA, 22 nt, Human
agcaauguuggccuauauaccu

SEQ ID NO: 42840 - RNA, 22 nt, Human
agcaauuaugauaaggccgcug

SEQ ID NO: 42841 - RNA, 22 nt, Human
agcaauuauggaguuguugacg

SEQ ID NO: 42842 - RNA, 22 nt, Human
agcaauuucucgcaccagacgc

SEQ ID NO: 42843 - RNA, 21 nt, Human
agcaauuuuuccuccucugca

SEQ ID NO: 42844 - RNA, 22 nt, Human
agcacaauauaaagugaacgca

SEQ ID NO: 42845 - RNA, 23 nt, Human
agcacacuuguacaaugcccuag

SEQ ID NO: 42846 - RNA, 22 nt, Human
agcacagaaaguauugacugaa

SEQ ID NO: 42847 - RNA, 23 nt, Human
agcacagacuagaaaggucuuuc

SEQ ID NO: 42848 - RNA, 22 nt, Human
agcacagagagcucuagguaaa

SEQ ID NO: 42849 - RNA, 22 nt, Human
agcacagaguugcagagagcgu

SEQ ID NO: 42850 - RNA, 22 nt, Human
agcacagaguugcucacugccg

SEQ ID NO: 42851 - RNA, 22 nt, Human
agcacagaugugaguggaggcu

SEQ ID NO: 42852 - RNA, 22 nt, Human
agcacagauucugaagaguccu

SEQ ID NO: 42853 - RNA, 22 nt, Human
agcacagcagcgucuaaccgau

SEQ ID NO: 42854 - RNA, 22 nt, Human
agcacagcuuagcaccuggcac

SEQ ID NO: 42855 - RNA, 22 nt, Human
agcacaggacguagagcuugga

SEQ ID NO: 42856 - RNA, 22 nt, Human
agcacagugcugggcacacagu

SEQ ID NO: 42857 - RNA, 22 nt, Human
agcacauguauucuccuugaau

SEQ ID NO: 42858 - RNA, 20 nt, Human
agcacauuaaacauacuccu

SEQ ID NO: 42859 - RNA, 22 nt, Human
agcacauuuucucaaagcucau

SEQ ID NO: 42860 - RNA, 22 nt, Human
agcaccagcucaaggugcaccu

SEQ ID NO: 42861 - RNA, 22 nt, Human
agcaccaucggguucuugcuuu

SEQ ID NO: 42862 - RNA, 22 nt, Human
agcacccuccaacuucccugua

SEQ ID NO: 42863 - RNA, 22 nt, Human
agcacccuggggaagcacaaag

SEQ ID NO: 42864 - RNA, 22 nt, Human
agcacccuucagcccagccugg

SEQ ID NO: 42865 - RNA, 22 nt, Human
agcaccuggucuccuggcgcug

SEQ ID NO: 42866 - RNA, 22 nt, Human
agcaccuguguucaugccucau

SEQ ID NO: 42867 - RNA, 21 nt, Human
agcaccuuacagcuauaaugg

SEQ ID NO: 42868 - RNA, 22 nt, Human
agcaccuucacaggcucucagg

SEQ ID NO: 42869 - RNA, 22 nt, Human
agcaccuugagaucaagcagug

SEQ ID NO: 42870 - RNA, 22 nt, Human
agcaccuugcucuuggccuucc

SEQ ID NO: 42871 - RNA, 22 nt, Human
agcacguucuucauuacuucac

SEQ ID NO: 42872 - RNA, 17 nt, Human
agcacuaaaaugcuucc

SEQ ID NO: 42873 - RNA, 22 nt, Human
agcacuagagccaaaauuuggg

SEQ ID NO: 42874 - RNA, 22 nt, Human
agcacuauuccaaugauccaau

SEQ ID NO: 42875 - RNA, 23 nt, Human
agcacucaugcugcagaagucau

SEQ ID NO: 42876 - RNA, 22 nt, Human
agcacugauuuaaacuggauuu

SEQ ID NO: 42877 - RNA, 22 nt, Human
agcacugauuuuguugcacuua

SEQ ID NO: 42878 - RNA, 22 nt, Human
agcacugcuuuagagccucugc

SEQ ID NO: 42879 - RNA, 22 nt, Human
agcacuggaguuuagugggauu

SEQ ID NO: 42880 - RNA, 22 nt, Human
agcacugggaacgcauggggcc

SEQ ID NO: 42881 - RNA, 20 nt, Human
agcacugucugaccaguggc

SEQ ID NO: 42882 - RNA, 22 nt, Human
agcacuguggggaacucacaga

SEQ ID NO: 42883 - RNA, 22 nt, Human
agcacuuguagacuagaauuuu

SEQ ID NO: 42884 - RNA, 22 nt, Human
agaccaugggcucugaagagca

SEQ ID NO: 42885 - RNA, 22 nt, Human
agacccagaaagcagcugcauu

SEQ ID NO: 42886 - RNA, 22 nt, Human
agacccucuccaugcccacugc

SEQ ID NO: 42887 - RNA, 22 nt, Human
agacccucuccucauggacaug

SEQ ID NO: 42888 - RNA, 20 nt, Human
agacccucuggacugggccc

SEQ ID NO: 42889 - RNA, 21 nt, Human
agacccugcauauguucagua

SEQ ID NO: 42890 - RNA, 22 nt, Human
agacccugcauuuuccaggguu

SEQ ID NO: 42891 - RNA, 22 nt, Human
agacccuggagaaugaaagugc

SEQ ID NO: 42892 - RNA, 22 nt, Human
agacccuggggaaagucacuuc

SEQ ID NO: 42893 - RNA, 22 nt, Human
agacccugucaguguuaggaaa

SEQ ID NO: 42894 - RNA, 22 nt, Human
agacccuugcagucugguuguc

SEQ ID NO: 42895 - RNA, 22 nt, Human
agaccugcagggccaggccugc

SEQ ID NO: 42896 - RNA, 22 nt, Human
agaccugugaucacauggaaug

SEQ ID NO: 42897 - RNA, 22 nt, Human
agacgagggcccccaggacagc

SEQ ID NO: 42898 - RNA, 22 nt, Human
agacgcgcagaaggaagcggcc

SEQ ID NO: 42899 - RNA, 22 nt, Human
agacgcuauuuugaggggucua

SEQ ID NO: 42900 - RNA, 22 nt, Human
agacggauuaccugaggucagg

SEQ ID NO: 42901 - RNA, 22 nt, Human
agacuacaggagaaacucacuc

SEQ ID NO: 42902 - RNA, 22 nt, Human
cugagguggaacagaggugaag

SEQ ID NO: 42903 - RNA, 22 nt, Human
cugagguggggccugggcauca

SEQ ID NO: 42904 - RNA, 22 nt, Human
cugaguccuugggcuuagagug

SEQ ID NO: 42905 - RNA, 22 nt, Human
cugagucuccuggggaggugaa

SEQ ID NO: 42906 - RNA, 22 nt, Human
cugagugauagcgauggggaac

SEQ ID NO: 42907 - RNA, 22 nt, Human
cugagugaucagcuuggguccg

SEQ ID NO: 42908 - RNA, 22 nt, Human
cugaguggguuucugcuuguca

SEQ ID NO: 42909 - RNA, 22 nt, Human
cugaguucuaggcugccaccuu

SEQ ID NO: 42910 - RNA, 21 nt, Human
cugauaauuguuaaauuauuu

SEQ ID NO: 42911 - RNA, 22 nt, Human
cugauacacucccuaaaauaua

SEQ ID NO: 42912 - RNA, 22 nt, Human
cugauaggauuuaguuucuguu

SEQ ID NO: 42913 - RNA, 18 nt, Human
cugauagggguggcagcu

SEQ ID NO: 42914 - RNA, 22 nt, Human
cugauagguuauuuucagugag

SEQ ID NO: 42915 - RNA, 22 nt, Human
cugauauggaugccucauuguc

SEQ ID NO: 42916 - RNA, 22 nt, Human
cugauauucuuugagcugcuaa

SEQ ID NO: 42917 - RNA, 22 nt, Human
cugaugaggauauagauacaca

SEQ ID NO: 42918 - RNA, 22 nt, Human
cugaugccccuggaccugugac

SEQ ID NO: 42919 - RNA, 22 nt, Human
cugaugcuugcaacaaagaacc

SEQ ID NO: 42920 - RNA, 22 nt, Human
cugauggagacuccacugugau

SEQ ID NO: 42921 - RNA, 17 nt, Human
cugauggauuuuuucca

SEQ ID NO: 42922 - RNA, 22 nt, Human
cugauguguuuuaguuugguaa

SEQ ID NO: 42923 - RNA, 21 nt, Human
cugauugugaaagucaucauu

SEQ ID NO: 42924 - RNA, 22 nt, Human
cugauuuacauauacaaaagau

SEQ ID NO: 42925 - RNA, 22 nt, Human
cugauuuagauuucacacguga

SEQ ID NO: 42926 - RNA, 17 nt, Human
cugauuuauuagcagac

SEQ ID NO: 42927 - RNA, 22 nt, Human
cugauuuucaaaauguguuaaa

SEQ ID NO: 42928 - RNA, 22 nt, Human
cugcaaauaggggugugaauaa

SEQ ID NO: 42929 - RNA, 22 nt, Human
cugcaaaugccucggugugcgg

SEQ ID NO: 42930 - RNA, 22 nt, Human
cugcaaaugggcuuuagguggc

SEQ ID NO: 42931 - RNA, 22 nt, Human
cugcaaauugguggugaggcaa

SEQ ID NO: 42932 - RNA, 22 nt, Human
cugcaacucucuccagaggcug

SEQ ID NO: 42933 - RNA, 22 nt, Human
cugcaaggaguugacauugucu

SEQ ID NO: 42934 - RNA, 22 nt, Human
cugcaagguauauguuaucaua

SEQ ID NO: 42935 - RNA, 22 nt, Human
cugcaagguccaccugcuacau

SEQ ID NO: 42936 - RNA, 22 nt, Human
cugcaauaugaugucugagaaa

SEQ ID NO: 42937 - RNA, 22 nt, Human
cugcacagaggucggucugcca

SEQ ID NO: 42938 - RNA, 22 nt, Human
cugcacagggauauggggagcu

SEQ ID NO: 42939 - RNA, 22 nt, Human
cugcaccacagccugaggcagc

SEQ ID NO: 42940 - RNA, 22 nt, Human
cugcacccaggccuggucccag

SEQ ID NO: 42941 - RNA, 22 nt, Human
cugcacccaugagcucaaggga

SEQ ID NO: 42942 - RNA, 22 nt, Human
cugcacccugcagguaccccug

SEQ ID NO: 42943 - RNA, 22 nt, Human
cugcaccuacagccacauuuac

SEQ ID NO: 42944 - RNA, 20 nt, Human
cugcacugaacaugucugag

SEQ ID NO: 42945 - RNA, 22 nt, Human
cugcacugaagaaaggagcucu

SEQ ID NO: 42946 - RNA, 22 nt, Human
cugcacugagcucucccagccc

SEQ ID NO: 42947 - RNA, 22 nt, Human
cugcacuguguaacagauaacu

SEQ ID NO: 42948 - RNA, 22 nt, Human
cugcacuguguauuccuuggcu

SEQ ID NO: 42949 - RNA, 22 nt, Human
cugcacuugacaugcucucaga

SEQ ID NO: 42950 - RNA, 22 nt, Human
cugcagaaaccuuuccugauuu

SEQ ID NO: 42951 - RNA, 22 nt, Human
cugcagagaauuguggggcuuc

SEQ ID NO: 42952 - RNA, 22 nt, Human
cugcagagcaaguucucuguug

SEQ ID NO: 42953 - RNA, 22 nt, Human
cugcagagcagccaguccccca

SEQ ID NO: 42954 - RNA, 22 nt, Human
cugcagagcuuucugaaugaag

SEQ ID NO: 42955 - RNA, 22 nt, Human
cugcagaggccucgccuccucu

SEQ ID NO: 42956 - RNA, 22 nt, Human
cugcagagguugguucuaagau

SEQ ID NO: 42957 - RNA, 22 nt, Human
cugcagaugucucaauuuuauu

SEQ ID NO: 42958 - RNA, 22 nt, Human
cugcagauuuggugucugguga

SEQ ID NO: 42959 - RNA, 22 nt, Human
cugcagcagccuccagccuugg

SEQ ID NO: 42960 - RNA, 22 nt, Human
cugcagcaggaggcuccugcag

SEQ ID NO: 42961 - RNA, 22 nt, Human
cugcagcagugugucucauuuu

SEQ ID NO: 42962 - RNA, 22 nt, Human
cugcagccuccaccuuuugggu

SEQ ID NO: 42963 - RNA, 22 nt, Human
cugcagccuccuccagcuacgu

SEQ ID NO: 42964 - RNA, 22 nt, Human
caugccaugugugaggagagga

SEQ ID NO: 42965 - RNA, 22 nt, Human
caugccauuugguggauugaga

SEQ ID NO: 42966 - RNA, 22 nt, Human
caugccauuuuucuagauugag

SEQ ID NO: 42967 - RNA, 22 nt, Human
caugcuaaaauaucugaagauu

SEQ ID NO: 42968 - RNA, 22 nt, Human
caugcuaaaccagaacauagga

SEQ ID NO: 42969 - RNA, 22 nt, Human
caugcuccagcuccagacaggu

SEQ ID NO: 42970 - RNA, 22 nt, Human
caugcucugcagcagaccugug

SEQ ID NO: 42971 - RNA, 19 nt, Human
caugcugaccugcuguggu

SEQ ID NO: 42972 - RNA, 22 nt, Human
caugcugauucuuccugagcuu

SEQ ID NO: 42973 - RNA, 22 nt, Human
caugcugggccuugggugcacu

SEQ ID NO: 42974 - RNA, 22 nt, Human
caugcuggguaaagguggugaa

SEQ ID NO: 42975 - RNA, 22 nt, Human
caugcugugguaaaucacugaa

SEQ ID NO: 42976 - RNA, 22 nt, Human
caugcuguugaauaugacauug

SEQ ID NO: 42977 - RNA, 22 nt, Human
caugcuuaauuggagcauucau

SEQ ID NO: 42978 - RNA, 22 nt, Human
caugcuuauucauucugcuaac

SEQ ID NO: 42979 - RNA, 22 nt, Human
caugcuucacacacugaaugac

SEQ ID NO: 42980 - RNA, 22 nt, Human
caugcuucaugcaaaauucuga

SEQ ID NO: 42981 - RNA, 22 nt, Human
caugcuugcugccucauuguuc

SEQ ID NO: 42982 - RNA, 22 nt, Human
caugcuuuuugacaacaagcug

SEQ ID NO: 42983 - RNA, 22 nt, Human
caugcuuuuuucuaguauaaau

SEQ ID NO: 42984 - RNA, 22 nt, Human
cauggaggaguuaggugugagu

SEQ ID NO: 42985 - RNA, 22 nt, Human
cauggaggccaggaaacagccu

SEQ ID NO: 42986 - RNA, 22 nt, Human
cauggaucauaaaugugcuaaa

SEQ ID NO: 42987 - RNA, 22 nt, Human
cauggcagaaaccugagcugcu

SEQ ID NO: 42988 - RNA, 22 nt, Human
cauggcagagaaggggaacugg

SEQ ID NO: 42989 - RNA, 22 nt, Human
cauggcagccugcccugcuugc

SEQ ID NO: 42990 - RNA, 22 nt, Human
cauggcagcuuugggaggagga

SEQ ID NO: 42991 - RNA, 22 nt, Human
cauggcaggaaaaugaacaggc

SEQ ID NO: 42992 - RNA, 22 nt, Human
cauggcaggaucugggcccaca

SEQ ID NO: 42993 - RNA, 22 nt, Human
cauggccaaggaugcucaacca

SEQ ID NO: 42994 - RNA, 22 nt, Human
cauggccagcccccaguuccuc

SEQ ID NO: 42995 - RNA, 22 nt, Human
cauggccccaaaucccaugcau

SEQ ID NO: 42996 - RNA, 22 nt, Human
cauggccucaaaggacugcaga

SEQ ID NO: 42997 - RNA, 22 nt, Human
cauggccucucuccuggaaugg

SEQ ID NO: 42998 - RNA, 22 nt, Human
cauggccugccuccuccuggug

SEQ ID NO: 42999 - RNA, 22 nt, Human
cauggcugaaauucuucgcuug

SEQ ID NO: 43000 - RNA, 22 nt, Human
cauggcuuagaaguuccagccc

SEQ ID NO: 43001 - RNA, 22 nt, Human
cauggcuucaaagccuuuggca

SEQ ID NO: 43002 - RNA, 22 nt, Human
cauggcuucgcgcguccccgcu

SEQ ID NO: 43003 - RNA, 22 nt, Human
cauggcuucgucacagagggca

SEQ ID NO: 43004 - RNA, 22 nt, Human
cauggcuuuuuuauucugaaug

SEQ ID NO: 43005 - RNA, 22 nt, Human
caugggagguuggcuuggcaug

SEQ ID NO: 43006 - RNA, 23 nt, Human
caugggagugagaaugccagcuc

SEQ ID NO: 43007 - RNA, 22 nt, Human
caugggcccgugagaggcaggg

SEQ ID NO: 43008 - RNA, 22 nt, Human
caugggcugaaaaucugcaaac

SEQ ID NO: 43009 - RNA, 22 nt, Human
caugggcuugcucucugagcuc

SEQ ID NO: 43010 - RNA, 22 nt, Human
cauggggagacaccuagggaaa

SEQ ID NO: 43011 - RNA, 22 nt, Human
caucagaccugccagacuaggu

SEQ ID NO: 43012 - RNA, 19 nt, Human
caucagagggcauaggaug

SEQ ID NO: 43013 - RNA, 21 nt, Human
caucagauuuagaaguucuau

SEQ ID NO: 43014 - RNA, 22 nt, Human
caucagcaggcaacacucuugg

SEQ ID NO: 43015 - RNA, 23 nt, Human
caucagccucagucuguggaccc

SEQ ID NO: 43016 - RNA, 22 nt, Human
caucagcuuuucuaugugguga

SEQ ID NO: 43017 - RNA, 22 nt, Human
caucaggaaaaaacuggagcca

SEQ ID NO: 43018 - RNA, 22 nt, Human
caucaggaucucucuggaaugc

SEQ ID NO: 43019 - RNA, 22 nt, Human
caucagugcccuuggggaugcc

SEQ ID NO: 43020 - RNA, 20 nt, Human
caucagugccugacaggucc

SEQ ID NO: 43021 - RNA, 22 nt, Human
caucaguggauauagauuagcg

SEQ ID NO: 43022 - RNA, 22 nt, Human
caucaguguucacuauuccuuc

SEQ ID NO: 43023 - RNA, 22 nt, Human
caucaguucaugucuagcugcu

SEQ ID NO: 43024 - RNA, 22 nt, Human
caucaguucccaggcccagaca

SEQ ID NO: 43025 - RNA, 22 nt, Human
caucaguuccugccccugcccc

SEQ ID NO: 43026 - RNA, 22 nt, Human
caucaguuuggucaaugauggg

SEQ ID NO: 43027 - RNA, 22 nt, Human
caucauacuguuuacacucaaa

SEQ ID NO: 43028 - RNA, 20 nt, Human
caucaucacaugagccaauu

SEQ ID NO: 43029 - RNA, 22 nt, Human
caucauugccuguuucccuugg

SEQ ID NO: 43030 - RNA, 22 nt, Human
caucauuguuagggacucuaac

SEQ ID NO: 43031 - RNA, 22 nt, Human
caucauuuguucacuugauucc

SEQ ID NO: 43032 - RNA, 20 nt, Human
caucauuuuaaaaucucucc

SEQ ID NO: 43033 - RNA, 22 nt, Human
cauccaaagcaaauaucuuaaa

SEQ ID NO: 43034 - RNA, 22 nt, Human
cauccaauaccaguuugcaggc

SEQ ID NO: 43035 - RNA, 22 nt, Human
cauccagcuccugggggccacc

SEQ ID NO: 43036 - RNA, 22 nt, Human
cauccaggcaccacaaccagcu

SEQ ID NO: 43037 - RNA, 22 nt, Human
cauccaguggucagggaaguug

SEQ ID NO: 43038 - RNA, 22 nt, Human
cauccauuaacucauuuguuuc

SEQ ID NO: 43039 - RNA, 17 nt, Human
cauccgugagcucggca

SEQ ID NO: 43040 - RNA, 22 nt, Human
cauccugacuggguaaagcuua

SEQ ID NO: 43041 - RNA, 22 nt, Human
cauccugagaaaauaaaggaga

SEQ ID NO: 43042 - RNA, 22 nt, Human
cauccuucaaaggcuacaauua

SEQ ID NO: 43043 - RNA, 22 nt, Human
caucuacaggagaaugucacug

SEQ ID NO: 43044 - RNA, 22 nt, Human
caucuacaugcuugccacugcu

SEQ ID NO: 43045 - RNA, 22 nt, Human
caucuaccuccacccuauauau

SEQ ID NO: 43046 - RNA, 22 nt, Human
caucucaguguacagggagucu

SEQ ID NO: 43047 - RNA, 22 nt, Human
caucuccagguuuagggagcac

SEQ ID NO: 43048 - RNA, 22 nt, Human
caucuccuuuggucuacuucca

SEQ ID NO: 43049 - RNA, 22 nt, Human
caucugaauaucccaggcauau

SEQ ID NO: 43050 - RNA, 22 nt, Human
caucugaugggaauauaagagc

SEQ ID NO: 43051 - RNA, 22 nt, Human
caucugcuguuccuuggacuca

SEQ ID NO: 43052 - RNA, 19 nt, Human
caucuggaugauucuccug

SEQ ID NO: 43053 - RNA, 22 nt, Human
caucuggcuagcuaucauugug

SEQ ID NO: 43054 - RNA, 22 nt, Human
caucuguucuauccacguugcu

SEQ ID NO: 43055 - RNA, 22 nt, Human
caucuguuuuugucaauuacau

SEQ ID NO: 43056 - RNA, 21 nt, Human
caucuuaauugaaagcagaga

SEQ ID NO: 43057 - RNA, 22 nt, Human
caucuuauuuucuucuagugcu

SEQ ID NO: 43058 - RNA, 22 nt, Human
caucuucagugauuaccuaaaa

SEQ ID NO: 43059 - RNA, 22 nt, Human
caucuucugggacuucucaguu

SEQ ID NO: 43060 - RNA, 20 nt, Human
caucuugaaggucuuccaca

SEQ ID NO: 43061 - RNA, 22 nt, Human
caucuugaagguuucuuuagcu

SEQ ID NO: 43062 - RNA, 22 nt, Human
caucuugacugggauaagggau

SEQ ID NO: 43063 - RNA, 22 nt, Human
caucuugcugacuugcauuauu

SEQ ID NO: 43064 - RNA, 22 nt, Human
caucuugcuggguuuuaucaua

SEQ ID NO: 43065 - RNA, 22 nt, Human
caucuugcuguuauguuuaugu

SEQ ID NO: 43066 - RNA, 19 nt, Human
caucuuggaguacuccuuu

SEQ ID NO: 43067 - RNA, 22 nt, Human
caucuugucuuuuugggccuga

SEQ ID NO: 43068 - RNA, 22 nt, Human
caucuugugaggaccuucuugc

SEQ ID NO: 43069 - RNA, 22 nt, Human
caucuuuaacaauuuacaaugu

SEQ ID NO: 43070 - RNA, 22 nt, Human
caucuuuaauuugugacaacua

SEQ ID NO: 43071 - RNA, 22 nt, Human
caucuuuagggaccauuauucu

SEQ ID NO: 43072 - RNA, 22 nt, Human
caucuuuaguagguucuggaga

SEQ ID NO: 43073 - RNA, 22 nt, Human
caucuuuaguuauugaauauag

SEQ ID NO: 43074 - RNA, 22 nt, Human
caucuuuauuuauauagacagg

SEQ ID NO: 43075 - RNA, 22 nt, Human
caucuuugggcugcauggaagg

SEQ ID NO: 43076 - RNA, 19 nt, Human
caucuuuggucaccuaguc

SEQ ID NO: 43077 - RNA, 22 nt, Human
caucuuuugguaggagccgggc

SEQ ID NO: 43078 - RNA, 22 nt, Human
caugaaaauaacauuguuguga

SEQ ID NO: 43079 - RNA, 22 nt, Human
cugcagcuccucucugugcccc

SEQ ID NO: 43080 - RNA, 22 nt, Human
cugcagcuccugagcucagaga

SEQ ID NO: 43081 - RNA, 22 nt, Human
cugcagcuccuucuggcaugug

SEQ ID NO: 43082 - RNA, 17 nt, Human
cugcagcuggagggcca

SEQ ID NO: 43083 - RNA, 22 nt, Human
cugcagcuuaaaggaguucaau

SEQ ID NO: 43084 - RNA, 22 nt, Human
cugcagcuuauuugcuguguga

SEQ ID NO: 43085 - RNA, 22 nt, Human
cugcaggaaggggacggagugg

SEQ ID NO: 43086 - RNA, 22 nt, Human
cugcaggaaucugugcuaggug

SEQ ID NO: 43087 - RNA, 22 nt, Human
cugcaggagcaagccugggaga

SEQ ID NO: 43088 - RNA, 22 nt, Human
cugcaggcauuuauucaugcaa

SEQ ID NO: 43089 - RNA, 22 nt, Human
cugcagggagaggggacagccu

SEQ ID NO: 43090 - RNA, 22 nt, Human
cugcagggauugcuucuguaua

SEQ ID NO: 43091 - RNA, 22 nt, Human
cugcagggccauggguucuaua

SEQ ID NO: 43092 - RNA, 22 nt, Human
cugcagggcccaaggucaacgg

SEQ ID NO: 43093 - RNA, 22 nt, Human
cugcagggcccgccugagcccu

SEQ ID NO: 43094 - RNA, 22 nt, Human
cugcagggcuuaccuugcucug

SEQ ID NO: 43095 - RNA, 22 nt, Human
cugcaggggcaguccacuuccu

SEQ ID NO: 43096 - RNA, 22 nt, Human
cugcaggggccucgagcacagg

SEQ ID NO: 43097 - RNA, 22 nt, Human
cugcagggguguccuguauugg

SEQ ID NO: 43098 - RNA, 20 nt, Human
cugcagggugagugggcgau

SEQ ID NO: 43099 - RNA, 22 nt, Human
cugcaggguucggagaguuccc

SEQ ID NO: 43100 - RNA, 22 nt, Human
cugcaggguuuuucaaggacaa

SEQ ID NO: 43101 - RNA, 22 nt, Human
cugcaguagcaccuguggcuuu

SEQ ID NO: 43102 - RNA, 22 nt, Human
cugcagucagcuuuuaagaucu

SEQ ID NO: 43103 - RNA, 22 nt, Human
cugcagucugacauacgaggac

SEQ ID NO: 43104 - RNA, 22 nt, Human
cugcagugcaagcccagaugga

SEQ ID NO: 43105 - RNA, 22 nt, Human
cugcaguucucaauuucuauug

SEQ ID NO: 43106 - RNA, 22 nt, Human
cugcaguuggauaaagauacuu

SEQ ID NO: 43107 - RNA, 22 nt, Human
cugcaguuugaccuuguuuucu

SEQ ID NO: 43108 - RNA, 22 nt, Human
cugcaguuugcuaagagacaaa

SEQ ID NO: 43109 - RNA, 22 nt, Human
cugcaguuuguaaacauuuuaa

SEQ ID NO: 43110 - RNA, 22 nt, Human
cugcauaugagaauaggagaaa

SEQ ID NO: 43111 - RNA, 22 nt, Human
cugcauaugauagaugccuugc

SEQ ID NO: 43112 - RNA, 22 nt, Human
cugcaucauuuucagacaaugg

SEQ ID NO: 43113 - RNA, 22 nt, Human
cugcauccauguugcugcaaag

SEQ ID NO: 43114 - RNA, 22 nt, Human
cugcaucucaggagacgggucu

SEQ ID NO: 43115 - RNA, 22 nt, Human
cugcaucucugcuagucaguca

SEQ ID NO: 43116 - RNA, 22 nt, Human
cugcaugaagucuuuuuuauag

SEQ ID NO: 43117 - RNA, 22 nt, Human
cugcaugcugagccaacaguga

SEQ ID NO: 43118 - RNA, 23 nt, Human
cugcauguccacugguguaaaug

SEQ ID NO: 43119 - RNA, 22 nt, Human
cugcauguguuauauuugguuc

SEQ ID NO: 43120 - RNA, 22 nt, Human
ccaggacauguugcaaguuuau

SEQ ID NO: 43121 - RNA, 22 nt, Human
ccaggaccacacgacaggagag

SEQ ID NO: 43122 - RNA, 22 nt, Human
ccaggaccuggagcucuaugaa

SEQ ID NO: 43123 - RNA, 22 nt, Human
ccaggagaagcaucugagugua

SEQ ID NO: 43124 - RNA, 22 nt, Human
ccaggagagcagaagcccaggc

SEQ ID NO: 43125 - RNA, 22 nt, Human
ccaggagauaagcugaguuuau

SEQ ID NO: 43126 - RNA, 22 nt, Human
ccaggagaugauguuggggauu

SEQ ID NO: 43127 - RNA, 22 nt, Human
ccaggagcaaagaucacuggga

SEQ ID NO: 43128 - RNA, 22 nt, Human
ccaggagcagaguagguguuca

SEQ ID NO: 43129 - RNA, 22 nt, Human
ccaggagcagccggcccaccug

SEQ ID NO: 43130 - RNA, 22 nt, Human
ccaggagcagggcuggcugcac

SEQ ID NO: 43131 - RNA, 22 nt, Human
ccaggagcauuaagagaacaua

SEQ ID NO: 43132 - RNA, 17 nt, Human
ccaggagcgugggucuc

SEQ ID NO: 43133 - RNA, 22 nt, Human
ccaggagcuggagggugcagug

SEQ ID NO: 43134 - RNA, 22 nt, Human
ccaggagcuggcauguggagag

SEQ ID NO: 43135 - RNA, 22 nt, Human
ccaggaggaugaggggcauaga

SEQ ID NO: 43136 - RNA, 22 nt, Human
ccaggaggcucugcccauccca

SEQ ID NO: 43137 - RNA, 16 nt, Human
ccaggaggcugacacc

SEQ ID NO: 43138 - RNA, 22 nt, Human
ccaggagggaccgcggcauccc

SEQ ID NO: 43139 - RNA, 22 nt, Human
ccaggagggaggaguuccugag

SEQ ID NO: 43140 - RNA, 22 nt, Human
ccaggaggugcuggaagaaagc

SEQ ID NO: 43141 - RNA, 22 nt, Human
ccaggagguggagauugcagug

SEQ ID NO: 43142 - RNA, 22 nt, Human
ccaggagguggcaggacuugcc

SEQ ID NO: 43143 - RNA, 22 nt, Human
ccaggauaguaugaguagggau

SEQ ID NO: 43144 - RNA, 22 nt, Human
ccaggcaaaacagauuuguaug

SEQ ID NO: 43145 - RNA, 22 nt, Human
ccaggcaagagaggcucuggca

SEQ ID NO: 43146 - RNA, 22 nt, Human
ccaggcaauguucuaagugauu

SEQ ID NO: 43147 - RNA, 22 nt, Human
ccaggcacaggugggccucaga

SEQ ID NO: 43148 - RNA, 22 nt, Human
ccaggcaccaaaguaugcuuua

SEQ ID NO: 43149 - RNA, 22 nt, Human
ccaggcagaaugaaaccccugu

SEQ ID NO: 43150 - RNA, 21 nt, Human
ccaggcagagcugugaguucu

SEQ ID NO: 43151 - RNA, 22 nt, Human
ccaggcagaugggccggcuuca

SEQ ID NO: 43152 - RNA, 22 nt, Human
ccaggcaggcgauggugcagug

SEQ ID NO: 43153 - RNA, 22 nt, Human
ccaggcaguggaagcuaaaauu

SEQ ID NO: 43154 - RNA, 22 nt, Human
ccaggccaguguuugguccagg

SEQ ID NO: 43155 - RNA, 22 nt, Human
ccaggcccugcuccucacacca

SEQ ID NO: 43156 - RNA, 22 nt, Human
ccaggcccuugcaagucccacc

SEQ ID NO: 43157 - RNA, 22 nt, Human
ccaggccuuccaguacgcagaa

SEQ ID NO: 43158 - RNA, 22 nt, Human
ccaggccuucugaggacacucu

SEQ ID NO: 43159 - RNA, 22 nt, Human
ccaggcuagaaacugaggcaca

SEQ ID NO: 43160 - RNA, 22 nt, Human
ccaggcuagagagcaguggcac

SEQ ID NO: 43161 - RNA, 22 nt, Human
ccaggcuagagugcaauggcgc

SEQ ID NO: 43162 - RNA, 17 nt, Human
ccaggcuauaccaggcu

SEQ ID NO: 43163 - RNA, 22 nt, Human
ccaggcucacugacuaccacau

SEQ ID NO: 43164 - RNA, 22 nt, Human
ccaggcucagcuauuaagaaac

SEQ ID NO: 43165 - RNA, 22 nt, Human
ccaggcucaggccugcucguug

SEQ ID NO: 43166 - RNA, 22 nt, Human
ccaggcucagggcagacuuuca

SEQ ID NO: 43167 - RNA, 22 nt, Human
ccaggcucaggugcgagagaca

SEQ ID NO: 43168 - RNA, 22 nt, Human
ccaggcuccucaugaucuuguu

SEQ ID NO: 43169 - RNA, 22 nt, Human
ccaggcucugacauagauggga

SEQ ID NO: 43170 - RNA, 22 nt, Human
ccaggcucugucuggucagaag

SEQ ID NO: 43171 - RNA, 22 nt, Human
ccaggcugcucacaagcugccc

SEQ ID NO: 43172 - RNA, 22 nt, Human
ccaggcugcuuagccuuaucuu

SEQ ID NO: 43173 - RNA, 22 nt, Human
ccaggcugcuuuauuacucugu

SEQ ID NO: 43174 - RNA, 22 nt, Human
ccaggcuggaaucaauauucug

SEQ ID NO: 43175 - RNA, 22 nt, Human
ccaggcuggagugcaguagugu

SEQ ID NO: 43176 - RNA, 20 nt, Human
ccaggcuggcaaaugggggc

SEQ ID NO: 43177 - RNA, 21 nt, Human
ccaggcuggccaugguauuga

SEQ ID NO: 43178 - RNA, 22 nt, Human
ccaggcuguaaacaccuucaaa

SEQ ID NO: 43179 - RNA, 22 nt, Human
ccaggcugugcuuuucauaaau

SEQ ID NO: 43180 - RNA, 22 nt, Human
ccaggcuuauuaucuucuccau

SEQ ID NO: 43181 - RNA, 22 nt, Human
ccaggcuucugauuccaggcac

SEQ ID NO: 43182 - RNA, 22 nt, Human
ccaggcuugaagggaagaaugg

SEQ ID NO: 43183 - RNA, 19 nt, Human
ccaggcuuuaugcaaauac

SEQ ID NO: 43184 - RNA, 22 nt, Human
ccagggaagaauaggugugguu

SEQ ID NO: 43185 - RNA, 22 nt, Human
ccagggaagcuggucacgcagg

SEQ ID NO: 43186 - RNA, 22 nt, Human
ccagggaaugugggaugacucu

SEQ ID NO: 43187 - RNA, 22 nt, Human
ccagggagcccacaggacaaug

SEQ ID NO: 43188 - RNA, 18 nt, Human
ccagggagcuuauuagga

SEQ ID NO: 43189 - RNA, 23 nt, Human
ccagggagugcuacuaucaagcc

SEQ ID NO: 43190 - RNA, 21 nt, Human
ccagggauguugaacugaaag

SEQ ID NO: 43191 - RNA, 22 nt, Human
ccagggcaaaugagaucauagc

SEQ ID NO: 43192 - RNA, 22 nt, Human
ccagggcaauaggaacacuuuu

SEQ ID NO: 43193 - RNA, 22 nt, Human
ccagggcacguugggacaguac

SEQ ID NO: 43194 - RNA, 22 nt, Human
ccagggcacuuaggcccagccc

SEQ ID NO: 43195 - RNA, 22 nt, Human
ccagggcagcagaauuggggca

SEQ ID NO: 43196 - RNA, 22 nt, Human
ccagggcaggggcuggaguuca

SEQ ID NO: 43197 - RNA, 22 nt, Human
ccagggcauguaacuaauggug

SEQ ID NO: 43198 - RNA, 22 nt, Human
ccagggccaagagaccucgagg

SEQ ID NO: 43199 - RNA, 22 nt, Human
ccagggccaguaagauuggcau

SEQ ID NO: 43200 - RNA, 22 nt, Human
ccagggccuacagcuuaagucc

SEQ ID NO: 43201 - RNA, 22 nt, Human
ccagggccugagggcgacgccc

SEQ ID NO: 43202 - RNA, 19 nt, Human
ccagggcuccaagcugagu

SEQ ID NO: 43203 - RNA, 22 nt, Human
ccagggcuccauugcucauccu

SEQ ID NO: 43204 - RNA, 22 nt, Human
ccagggcucugcuucugccaug

SEQ ID NO: 43205 - RNA, 22 nt, Human
ccagggcugagacuguauuggg

SEQ ID NO: 43206 - RNA, 22 nt, Human
ccagggcugcugggggaguuga

SEQ ID NO: 43207 - RNA, 22 nt, Human
ccagggcuggaccagugcuugg

SEQ ID NO: 43208 - RNA, 22 nt, Human
ccagggcuggguuugucggugu

SEQ ID NO: 43209 - RNA, 22 nt, Human
ccagggcuggugggagaugcug

SEQ ID NO: 43210 - RNA, 22 nt, Human
ccagggcuuuaucugccuuuga

SEQ ID NO: 43211 - RNA, 21 nt, Human
ccaggggcaaauugucguuuc

SEQ ID NO: 43212 - RNA, 22 nt, Human
ccagggggcuuggugaggccau

SEQ ID NO: 43213 - RNA, 22 nt, Human
ccaggguaccccaagggcaggu

SEQ ID NO: 43214 - RNA, 22 nt, Human
ccagggugagaaaaggcuggau

SEQ ID NO: 43215 - RNA, 22 nt, Human
ccaggguggaggcuggauggag

SEQ ID NO: 43216 - RNA, 22 nt, Human
ccaggguggggcaggcccacug

SEQ ID NO: 43217 - RNA, 22 nt, Human
ccagggugugagaaggaaguag

SEQ ID NO: 43218 - RNA, 22 nt, Human
ccagggugugggcgucggcacg

SEQ ID NO: 43219 - RNA, 22 nt, Human
ccaggguugcuguauggcacuu

SEQ ID NO: 43220 - RNA, 22 nt, Human
ccaggguuggucucucugaggu

SEQ ID NO: 43221 - RNA, 22 nt, Human
ccagguaaauuaccuacugaau

SEQ ID NO: 43222 - RNA, 22 nt, Human
ccagguacauggagaagaacag

SEQ ID NO: 43223 - RNA, 22 nt, Human
ccaggucaagcuccccuguggu

SEQ ID NO: 43224 - RNA, 17 nt, Human
ccaggucuccuugcuuu

SEQ ID NO: 43225 - RNA, 22 nt, Human
ccaggucuggaaccaccagggc

SEQ ID NO: 43226 - RNA, 22 nt, Human
ccaggucuuugacuaauaugcu

SEQ ID NO: 43227 - RNA, 22 nt, Human
ccaggugccuccagucacagug

SEQ ID NO: 43228 - RNA, 22 nt, Human
cuguggaccugcucuuagagac

SEQ ID NO: 43229 - RNA, 18 nt, Human
ccaggccaugaaccucug

SEQ ID NO: 43230 - RNA, 22 nt, Human
ccaggccauucccagaguugcu

SEQ ID NO: 43231 - RNA, 22 nt, Human
ccaggccccagggcuggcuuuc

SEQ ID NO: 43232 - RNA, 22 nt, Human
ccaggcccccgagcagaagaca

SEQ ID NO: 43233 - RNA, 22 nt, Human
ccaggccucaccugcccaccua

SEQ ID NO: 43234 - RNA, 22 nt, Human
ccaggccuccugugaguggacc

SEQ ID NO: 43235 - RNA, 23 nt, Human
ccaggccucucagagggugugcc

SEQ ID NO: 43236 - RNA, 22 nt, Human
ccaggccucuggcugcuuaguc

SEQ ID NO: 43237 - RNA, 22 nt, Human
cccaggagaugcacuccauugg

SEQ ID NO: 43238 - RNA, 22 nt, Human
cccaggagauggagguugcagu

SEQ ID NO: 43239 - RNA, 22 nt, Human
cccaggagauggugcguggucu

SEQ ID NO: 43240 - RNA, 22 nt, Human
cccaggagcuucucucugccuc

SEQ ID NO: 43241 - RNA, 22 nt, Human
cccaggaggcagagcuugcagu

SEQ ID NO: 43242 - RNA, 22 nt, Human
cccaggaggcagagguugcagu

SEQ ID NO: 43243 - RNA, 22 nt, Human
cccaggaggguggccucugccc

SEQ ID NO: 43244 - RNA, 15 nt, Human
cccaggaguucgaga

SEQ ID NO: 43245 - RNA, 22 nt, Human
cccaggaguucgaggcuguagu

SEQ ID NO: 43246 - RNA, 20 nt, Human
cccaggaguuugcucuuacu

SEQ ID NO: 43247 - RNA, 22 nt, Human
cccaggaugucgaggcugcagu

SEQ ID NO: 43248 - RNA, 22 nt, Human
cccaggcacacugaagugacau

SEQ ID NO: 43249 - RNA, 22 nt, Human
cccaggcacagauuaucccaau

SEQ ID NO: 43250 - RNA, 22 nt, Human
cccaggcacauccacucuguga

SEQ ID NO: 43251 - RNA, 22 nt, Human
cccaggcagcccuucugacgca

SEQ ID NO: 43252 - RNA, 22 nt, Human
cccaggcaguagaaagaagagg

SEQ ID NO: 43253 - RNA, 17 nt, Human
cccaggccgccgggagc

SEQ ID NO: 43254 - RNA, 19 nt, Human
cccaggcuacauggagagg

SEQ ID NO: 43255 - RNA, 22 nt, Human
cccaggcuagaaaggccaacaa

SEQ ID NO: 43256 - RNA, 22 nt, Human
cccaggcuaguaugauaucagu

SEQ ID NO: 43257 - RNA, 22 nt, Human
cccaggcuccuacuguauucug

SEQ ID NO: 43258 - RNA, 22 nt, Human
cccaggcuccugacucauucua

SEQ ID NO: 43259 - RNA, 22 nt, Human
cccaggcugaguuagagguguc

SEQ ID NO: 43260 - RNA, 22 nt, Human
cccaggcugaugggaugggcca

SEQ ID NO: 43261 - RNA, 22 nt, Human
cccaggcugccacgauuacugc

SEQ ID NO: 43262 - RNA, 22 nt, Human
cccaggcuggagugcaauggug

SEQ ID NO: 43263 - RNA, 22 nt, Human
cccaggcugucuguccuuugcu

SEQ ID NO: 43264 - RNA, 22 nt, Human
cccaggcugugcaaacuucaaa

SEQ ID NO: 43265 - RNA, 22 nt, Human
cccaggcuuuuaaguuagacag

SEQ ID NO: 43266 - RNA, 22 nt, Human
cccagggaagggcuaccugagg

SEQ ID NO: 43267 - RNA, 23 nt, Human
cccagggacacgaugacaccucc

SEQ ID NO: 43268 - RNA, 22 nt, Human
cccagggacagaugggcagcua

SEQ ID NO: 43269 - RNA, 20 nt, Human
cccagggaccugagcuccau

SEQ ID NO: 43270 - RNA, 22 nt, Human
cccagggacucgggauucuagg

SEQ ID NO: 43271 - RNA, 22 nt, Human
cccagggagagcgcggaggcgg

SEQ ID NO: 43272 - RNA, 22 nt, Human
cccagggaggcccaggcucugc

SEQ ID NO: 43273 - RNA, 22 nt, Human
cccagggcuuuucucacuagac

SEQ ID NO: 43274 - RNA, 22 nt, Human
cccagggguaaggcgcagcgug

SEQ ID NO: 43275 - RNA, 22 nt, Human
cccagggguucuagaccagcuu

SEQ ID NO: 43276 - RNA, 22 nt, Human
cccagggucccugcucucugug

SEQ ID NO: 43277 - RNA, 22 nt, Human
cccaggguccggauaacccugg

SEQ ID NO: 43278 - RNA, 19 nt, Human
cccaggguuuccucucucc

SEQ ID NO: 43279 - RNA, 22 nt, Human
cccagguaaggaugcuccucau

SEQ ID NO: 43280 - RNA, 23 nt, Human
cccagguagcccucuagagccug

SEQ ID NO: 43281 - RNA, 22 nt, Human
cccaggucuccugcuucccagg

SEQ ID NO: 43282 - RNA, 22 nt, Human
cccaggugcugcgugaagccuc

SEQ ID NO: 43283 - RNA, 22 nt, Human
cccagguggcagaagcugcagu

SEQ ID NO: 43284 - RNA, 20 nt, Human
cccaggugucugaagcucug

SEQ ID NO: 43285 - RNA, 22 nt, Human
cccagguguuuguggcagaggu

SEQ ID NO: 43286 - RNA, 22 nt, Human
cccagucauccugcaggugaaa

SEQ ID NO: 43287 - RNA, 22 nt, Human
cccagugcuaugccuauuacau

SEQ ID NO: 43288 - RNA, 22 nt, Human
cccaguggaaggaguagaagac

SEQ ID NO: 43289 - RNA, 22 nt, Human
cccaguggcuguccccaugggc

SEQ ID NO: 43290 - RNA, 22 nt, Human
cccaguggggagcuucugccuu

SEQ ID NO: 43291 - RNA, 22 nt, Human
cccagugucucuugugccuuuc

SEQ ID NO: 43292 - RNA, 22 nt, Human
cccagugucugggccugcaggg

SEQ ID NO: 43293 - RNA, 22 nt, Human
cccagugugaugagguugcuaa

SEQ ID NO: 43294 - RNA, 22 nt, Human
cccagugugguugugaauucug

SEQ ID NO: 43295 - RNA, 22 nt, Human
cccaguguuacgugacagccug

SEQ ID NO: 43296 - RNA, 22 nt, Human
cccaguuuucugauugaagagc

SEQ ID NO: 43297 - RNA, 22 nt, Human
cccauauacuuuuucuggucca

SEQ ID NO: 43298 - RNA, 22 nt, Human
cccaucacagacacuggguuau

SEQ ID NO: 43299 - RNA, 22 nt, Human
cccaucucagucgugcuaaggg

SEQ ID NO: 43300 - RNA, 22 nt, Human
cccaugaacugucuugcuguag

SEQ ID NO: 43301 - RNA, 22 nt, Human
cccaugagguggagguugcagu

SEQ ID NO: 43302 - RNA, 22 nt, Human
cccaugagugcugcucagaggc

SEQ ID NO: 43303 - RNA, 22 nt, Human
cccaugcugaguggccugagau

SEQ ID NO: 43304 - RNA, 22 nt, Human
cccauggguuuuccucccugcc

SEQ ID NO: 43305 - RNA, 18 nt, Human
cccauguugccagucagc

SEQ ID NO: 43306 - RNA, 22 nt, Human
cccauuuaaacacaagcuuuca

SEQ ID NO: 43307 - RNA, 22 nt, Human
cccauuuaucccaagguuacuc

SEQ ID NO: 43308 - RNA, 23 nt, Human
cccauuuucauguuaacuccugg

SEQ ID NO: 43309 - RNA, 22 nt, Human
ccccaaagcugaguucccgccu

SEQ ID NO: 43310 - RNA, 19 nt, Human
ccccaaaguuuagauguug

SEQ ID NO: 43311 - RNA, 22 nt, Human
ccccaccagcacccucucuauc

SEQ ID NO: 43312 - RNA, 22 nt, Human
ccccacccaccuaagagaaacu

SEQ ID NO: 43313 - RNA, 23 nt, Human
ccccacuaccgugaugugcgagg

SEQ ID NO: 43314 - RNA, 22 nt, Human
ccccacucucggccagauaggc

SEQ ID NO: 43315 - RNA, 22 nt, Human
ccccacuuugaguagcacuuga

SEQ ID NO: 43316 - RNA, 22 nt, Human
ccccagaaguuugcacaagaga

SEQ ID NO: 43317 - RNA, 22 nt, Human
ccccagcacuuggaguggggag

SEQ ID NO: 43318 - RNA, 22 nt, Human
ccccagccagcuuguaguagaa

SEQ ID NO: 43319 - RNA, 22 nt, Human
ccccagcugagauuugaggaga

SEQ ID NO: 43320 - RNA, 22 nt, Human
ccccaggagaaaucuuaaacua

SEQ ID NO: 43321 - RNA, 22 nt, Human
ccccaggccuguuggauggcgc

SEQ ID NO: 43322 - RNA, 22 nt, Human
ccccagggucaguguguggagg

SEQ ID NO: 43323 - RNA, 22 nt, Human
ccccagugguugcaacagcaga

SEQ ID NO: 43324 - RNA, 22 nt, Human
ccccaugaaguagggucucuga

SEQ ID NO: 43325 - RNA, 22 nt, Human
cccccaaaguuugcacggauaa

SEQ ID NO: 43326 - RNA, 22 nt, Human
cccccaccguguuccugcucgg

SEQ ID NO: 43327 - RNA, 22 nt, Human
cccccagcucugcugggucccg

SEQ ID NO: 43328 - RNA, 22 nt, Human
cccccaggcucugacacaggag

SEQ ID NO: 43329 - RNA, 22 nt, Human
cccccaggggcuccgccucgug

SEQ ID NO: 43330 - RNA, 22 nt, Human
cccccuggcaggcuggccucuc

SEQ ID NO: 43331 - RNA, 22 nt, Human
ccccgcccugcgcggggauaac

SEQ ID NO: 43332 - RNA, 22 nt, Human
ccccucccugaccugguugggc

SEQ ID NO: 43333 - RNA, 22 nt, Human
ccccuccugcagcaccuuucuu

SEQ ID NO: 43334 - RNA, 22 nt, Human
ccccucugcaaauagccaggcu

SEQ ID NO: 43335 - RNA, 22 nt, Human
ccccucuugugggcucagguca

SEQ ID NO: 43336 - RNA, 22 nt, Human
ccccuuccacagugcuuccuaa

SEQ ID NO: 43337 - RNA, 22 nt, Human
ccccuuccgucucuugaguguc

SEQ ID NO: 43338 - RNA, 21 nt, Human
ccuccaggagcagagcccuga

SEQ ID NO: 43339 - RNA, 22 nt, Human
ccuccaggauaagucagggccu

SEQ ID NO: 43340 - RNA, 20 nt, Human
ccuccaggcacacccaugug

SEQ ID NO: 43341 - RNA, 22 nt, Human
ccuccaggcugaauaucuagaa

SEQ ID NO: 43342 - RNA, 22 nt, Human
ccuccaggcugguuaucagcug

SEQ ID NO: 43343 - RNA, 22 nt, Human
ccuccagguguuacauaugacu

SEQ ID NO: 43344 - RNA, 17 nt, Human
ccucccacaccgcccug

SEQ ID NO: 43345 - RNA, 22 nt, Human
ccucccacauccuagcucugcu

SEQ ID NO: 43346 - RNA, 22 nt, Human
ccucccacauugaggacaugcu

SEQ ID NO: 43347 - RNA, 19 nt, Human
ccucccacggauuccuucc

SEQ ID NO: 43348 - RNA, 22 nt, Human
ccucccagaugugcccaaugga

SEQ ID NO: 43349 - RNA, 22 nt, Human
ccucccagugccggggccggcu

SEQ ID NO: 43350 - RNA, 22 nt, Human
ccuccccaugacccggugcugg

SEQ ID NO: 43351 - RNA, 22 nt, Human
ccuccccucagacagagacugg

SEQ ID NO: 43352 - RNA, 23 nt, Human
ccuccccuucccacagcugggug

SEQ ID NO: 43353 - RNA, 18 nt, Human
ccucccucauuuucccag

SEQ ID NO: 43354 - RNA, 22 nt, Human
ccucccuccauugccaucgucu

SEQ ID NO: 43355 - RNA, 22 nt, Human
ccucccuucaguagagcccaau

SEQ ID NO: 43356 - RNA, 22 nt, Human
ccucccuuuuggugucugcaua

SEQ ID NO: 43357 - RNA, 22 nt, Human
ccuccuggccugugcagagccc

SEQ ID NO: 43358 - RNA, 22 nt, Human
ccuccugggacaggcuggcaca

SEQ ID NO: 43359 - RNA, 22 nt, Human
ccuccugggacucauuagcacc

SEQ ID NO: 43360 - RNA, 23 nt, Human
ccuccugggcacaggccugaugg

SEQ ID NO: 43361 - RNA, 22 nt, Human
ccuccugggccuugcucuguga

SEQ ID NO: 43362 - RNA, 22 nt, Human
ccuccuggugggcgcuucuggc

SEQ ID NO: 43363 - RNA, 19 nt, Human
ccuccuguggcgggugggg

SEQ ID NO: 43364 - RNA, 22 nt, Human
ccuccuguugucaccaggcgug

SEQ ID NO: 43365 - RNA, 22 nt, Human
ccucgaccuccccaggcucagg

SEQ ID NO: 43366 - RNA, 22 nt, Human
ccucgagcagcgaccccuccac

SEQ ID NO: 43367 - RNA, 22 nt, Human
ccucgcugugugaccuugggug

SEQ ID NO: 43368 - RNA, 22 nt, Human
ccucggagcgggucagagaggg

SEQ ID NO: 43369 - RNA, 22 nt, Human
ccucggaggcggaggcugcagu

SEQ ID NO: 43370 - RNA, 22 nt, Human
ccucuacagggcauagcccaaa

SEQ ID NO: 43371 - RNA, 22 nt, Human
ccucuaggauguggcuggagga

SEQ ID NO: 43372 - RNA, 22 nt, Human
ccucuauguacacauuuccagc

SEQ ID NO: 43373 - RNA, 22 nt, Human
ccucuccagcggccucagggcc

SEQ ID NO: 43374 - RNA, 21 nt, Human
ccucucucauuguaaugaagu

SEQ ID NO: 43375 - RNA, 22 nt, Human
ccucucuguagcagcccccagu

SEQ ID NO: 43376 - RNA, 22 nt, Human
ccucugacuccuggacuugggg

SEQ ID NO: 43377 - RNA, 22 nt, Human
ccucugagagaaggccuucagc

SEQ ID NO: 43378 - RNA, 22 nt, Human
ccucugagcuggccuguggggc

SEQ ID NO: 43379 - RNA, 22 nt, Human
ccucugaggucauggacuuggc

SEQ ID NO: 43380 - RNA, 22 nt, Human
ccucugagucaugcgcauagga

SEQ ID NO: 43381 - RNA, 22 nt, Human
ccucugaguccucccugguugc

SEQ ID NO: 43382 - RNA, 22 nt, Human
ccucugaguccuuugggcucuc

SEQ ID NO: 43383 - RNA, 22 nt, Human
ccucugagugacagccuccucu

SEQ ID NO: 43384 - RNA, 22 nt, Human
ccucugcagcagagagccagag

SEQ ID NO: 43385 - RNA, 22 nt, Human
ccucugccaccucccacgaggc

SEQ ID NO: 43386 - RNA, 22 nt, Human
ccucugccugcacaucauccug

SEQ ID NO: 43387 - RNA, 22 nt, Human
ccucugcgcccuugaucagcca

SEQ ID NO: 43388 - RNA, 22 nt, Human
ccucuggagucagaccagcuug

SEQ ID NO: 43389 - RNA, 22 nt, Human
ccucuggccacaugggacauag

SEQ ID NO: 43390 - RNA, 22 nt, Human
gacuggaaagccuguccucaga

SEQ ID NO: 43391 - RNA, 22 nt, Human
gacuggauauugaguacugcaa

SEQ ID NO: 43392 - RNA, 22 nt, Human
gacugggacaggacagacaucu

SEQ ID NO: 43393 - RNA, 22 nt, Human
gacuggggaaggacccgagacc

SEQ ID NO: 43394 - RNA, 22 nt, Human
gacugggggcagccgcaccagu

SEQ ID NO: 43395 - RNA, 22 nt, Human
gacuggguccucugcuuauggu

SEQ ID NO: 43396 - RNA, 22 nt, Human
gacugguaagguauuggaauuc

SEQ ID NO: 43397 - RNA, 22 nt, Human
gacuguacgucauugaaggcca

SEQ ID NO: 43398 - RNA, 22 nt, Human
gacuguacuugagagaggaacu

SEQ ID NO: 43399 - RNA, 22 nt, Human
gacugucauucuagugcccaug

SEQ ID NO: 43400 - RNA, 22 nt, Human
gacuguggauagaacacugcag

SEQ ID NO: 43401 - RNA, 22 nt, Human
gacuguggcaggcucagcacug

SEQ ID NO: 43402 - RNA, 22 nt, Human
gacuguggucuguucuccaggu

SEQ ID NO: 43403 - RNA, 22 nt, Human
gacuguuagaauguaaaauaua

SEQ ID NO: 43404 - RNA, 22 nt, Human
gacuuagacccugucuuuauuc

SEQ ID NO: 43405 - RNA, 22 nt, Human
gacuucaaagcgugauaaagau

SEQ ID NO: 43406 - RNA, 22 nt, Human
gacuucaaaggucaaacaucgc

SEQ ID NO: 43407 - RNA, 17 nt, Human
gacuucaacuucugcug

SEQ ID NO: 43408 - RNA, 21 nt, Human
gacuucaugggucaaccaauu

SEQ ID NO: 43409 - RNA, 22 nt, Human
gacuugccugcacugagccuau

SEQ ID NO: 43410 - RNA, 22 nt, Human
gacuugggagucuucugagaug

SEQ ID NO: 43411 - RNA, 22 nt, Human
gacuugggcugagggccagcag

SEQ ID NO: 43412 - RNA, 22 nt, Human
gacuugggugucggggcagucu

SEQ ID NO: 43413 - RNA, 22 nt, Human
gacuuuaaaaugcuagaacagg

SEQ ID NO: 43414 - RNA, 22 nt, Human
gacuuuaaguaagucaaggagc

SEQ ID NO: 43415 - RNA, 22 nt, Human
gacuuuauccugccugaccacg

SEQ ID NO: 43416 - RNA, 22 nt, Human
gacuuuaugaagagaugaccaa

SEQ ID NO: 43417 - RNA, 22 nt, Human
gacuuuauucguuaacuguuaa

SEQ ID NO: 43418 - RNA, 22 nt, Human
gacuuucuguccagugauuucu

SEQ ID NO: 43419 - RNA, 22 nt, Human
gacuuugauuaaaucaagcaaa

SEQ ID NO: 43420 - RNA, 22 nt, Human
gacuuugccacugaccuccaac

SEQ ID NO: 43421 - RNA, 22 nt, Human
gacuuuggcuuuuauucuaggu

SEQ ID NO: 43422 - RNA, 22 nt, Human
gacuuuuagaauggugaggaau

SEQ ID NO: 43423 - RNA, 22 nt, Human
gagaaaagcgaaggaccuggag

SEQ ID NO: 43424 - RNA, 22 nt, Human
gagaaaauagcauguguaguau

SEQ ID NO: 43425 - RNA, 22 nt, Human
gagaaacaacacuugaugccuu

SEQ ID NO: 43426 - RNA, 19 nt, Human
gagaaaccccgucuuuagg

SEQ ID NO: 43427 - RNA, 22 nt, Human
gagaaacuaacaucugaaggug

SEQ ID NO: 43428 - RNA, 22 nt, Human
gagaaagaugaagaguggcguu

SEQ ID NO: 43429 - RNA, 22 nt, Human
gagaaagauguaggcugggagg

SEQ ID NO: 43430 - RNA, 18 nt, Human
gagaaagcagggaauguu

SEQ ID NO: 43431 - RNA, 22 nt, Human
gagaaagcuaaauaaguugauu

SEQ ID NO: 43432 - RNA, 22 nt, Human
gagaaaggcauuccuaugcaaa

SEQ ID NO: 43433 - RNA, 18 nt, Human
gagaaaguuugggcagaa

SEQ ID NO: 43434 - RNA, 22 nt, Human
gagaaauagauucaugguagau

SEQ ID NO: 43435 - RNA, 22 nt, Human
gagaaaugagugauucacuuuu

SEQ ID NO: 43436 - RNA, 22 nt, Human
gagaaaugcuagcuuaggaauc

SEQ ID NO: 43437 - RNA, 22 nt, Human
gagaaauuuugaguggcuuucu

SEQ ID NO: 43438 - RNA, 22 nt, Human
gagaacacuaaugguuucuuaa

SEQ ID NO: 43439 - RNA, 22 nt, Human
gagaacaggcucuggagucaga

SEQ ID NO: 43440 - RNA, 22 nt, Human
gagaacagugucauccuauaau

SEQ ID NO: 43441 - RNA, 22 nt, Human
gagaaccucuccacaagucugg

SEQ ID NO: 43442 - RNA, 22 nt, Human
gagaacucagacgcaggucaug

SEQ ID NO: 43443 - RNA, 22 nt, Human
gagaacugauuagcauuugcca

SEQ ID NO: 43444 - RNA, 22 nt, Human
gagaagcagguuuagcagacaa

SEQ ID NO: 43445 - RNA, 22 nt, Human
gagaagccgagucagcugagcc

SEQ ID NO: 43446 - RNA, 18 nt, Human
gagaagcugauugaaugc

SEQ ID NO: 43447 - RNA, 21 nt, Human
ccugagaucuggaguggcuuu

SEQ ID NO: 43448 - RNA, 22 nt, Human
ccugagauguguaacagauggu

SEQ ID NO: 43449 - RNA, 19 nt, Human
ccugagauuccuccuuuuc

SEQ ID NO: 43450 - RNA, 22 nt, Human
ccugagauuuguaauuuuugua

SEQ ID NO: 43451 - RNA, 22 nt, Human
ccugagcaaaggaaggaugacu

SEQ ID NO: 43452 - RNA, 22 nt, Human
ccugagcaaaggcccagaggga

SEQ ID NO: 43453 - RNA, 22 nt, Human
ccugagcagcucugaggggcga

SEQ ID NO: 43454 - RNA, 22 nt, Human
ccugagcaucagcgccuccuua

SEQ ID NO: 43455 - RNA, 22 nt, Human
ccugagcauuagacauccauca

SEQ ID NO: 43456 - RNA, 22 nt, Human
ccugagccgagcgcucuuucuc

SEQ ID NO: 43457 - RNA, 22 nt, Human
ccugagccucuugcacgcucag

SEQ ID NO: 43458 - RNA, 22 nt, Human
ccugagccugcagccgagcaga

SEQ ID NO: 43459 - RNA, 22 nt, Human
ccugagccuggcucaugcacuc

SEQ ID NO: 43460 - RNA, 21 nt, Human
ccugagccuguuuauccagaa

SEQ ID NO: 43461 - RNA, 22 nt, Human
ccugagcuagggaaggaagacc

SEQ ID NO: 43462 - RNA, 22 nt, Human
ccugagcuggaagagcuugugc

SEQ ID NO: 43463 - RNA, 22 nt, Human
ccugagcuggagacauuacaua

SEQ ID NO: 43464 - RNA, 22 nt, Human
ccugagcuggcagugaccugga

SEQ ID NO: 43465 - RNA, 22 nt, Human
ccugagcuugauccuucugucu

SEQ ID NO: 43466 - RNA, 22 nt, Human
ccugaggacagugugaccaugg

SEQ ID NO: 43467 - RNA, 22 nt, Human
ccugaggacaucagcaucaccu

SEQ ID NO: 43468 - RNA, 22 nt, Human
ccugaggagauuguggcugggg

SEQ ID NO: 43469 - RNA, 22 nt, Human
ccugaggcuuaaucugucccaa

SEQ ID NO: 43470 - RNA, 22 nt, Human
ccugagggaucuguggaauagc

SEQ ID NO: 43471 - RNA, 22 nt, Human
ccugagggcucagcccccagcc

SEQ ID NO: 43472 - RNA, 22 nt, Human
ccugaggggcugcaggccagcu

SEQ ID NO: 43473 - RNA, 22 nt, Human
ccugagggucaaggagcccuag

SEQ ID NO: 43474 - RNA, 22 nt, Human
ccugaggucacaacuugcuuau

SEQ ID NO: 43475 - RNA, 22 nt, Human
ccugaggucaugcauuuccaac

SEQ ID NO: 43476 - RNA, 22 nt, Human
ccugaggucaugguccaguguu

SEQ ID NO: 43477 - RNA, 22 nt, Human
ccugaggucuagagucagggug

SEQ ID NO: 43478 - RNA, 21 nt, Human
ccugagguuucuggccucugu

SEQ ID NO: 43479 - RNA, 22 nt, Human
ccugagucuguguuuuccuaag

SEQ ID NO: 43480 - RNA, 22 nt, Human
ccugagucuuucccauugcgcu

SEQ ID NO: 43481 - RNA, 22 nt, Human
ccugagugccaugagagcaccc

SEQ ID NO: 43482 - RNA, 22 nt, Human
ccugaguggagggauucugcag

SEQ ID NO: 43483 - RNA, 22 nt, Human
ccugaguggugcuaagcagaua

SEQ ID NO: 43484 - RNA, 22 nt, Human
ccugaguguaauaaugaaggca

SEQ ID NO: 43485 - RNA, 22 nt, Human
ccugaguucuuauuuccaguca

SEQ ID NO: 43486 - RNA, 19 nt, Human
ccugaguugggugaagaga

SEQ ID NO: 43487 - RNA, 22 nt, Human
ccugaucaaguuuucuggcucc

SEQ ID NO: 43488 - RNA, 22 nt, Human
ccugauggcugucugggccuga

SEQ ID NO: 43489 - RNA, 22 nt, Human
ccugauucugccacuacuagcc

SEQ ID NO: 43490 - RNA, 22 nt, Human
ccugcaagacuauuuaguucca

SEQ ID NO: 43491 - RNA, 22 nt, Human
ccugcaccaggcccagcauggu

SEQ ID NO: 43492 - RNA, 22 nt, Human
ccugcaccucugugcuuggaac

SEQ ID NO: 43493 - RNA, 22 nt, Human
ccugcaccuucaagaaaauaau

SEQ ID NO: 43494 - RNA, 22 nt, Human
ccugcacuucucacagcugcug

SEQ ID NO: 43495 - RNA, 22 nt, Human
ccugcagaaaggguccccagga

SEQ ID NO: 43496 - RNA, 22 nt, Human
ccugcagaggucaggccagaaa

SEQ ID NO: 43497 - RNA, 23 nt, Human
ccugcagcugccacgcccugcuc

SEQ ID NO: 43498 - RNA, 22 nt, Human
ccugcagggaaucgaggcagaa

SEQ ID NO: 43499 - RNA, 22 nt, Human
ccugcaggggagagacuucuag

SEQ ID NO: 43500 - RNA, 22 nt, Human
ccugcagguugcagaggcggaa

SEQ ID NO: 43501 - RNA, 22 nt, Human
ccugcagguuucccccggacgg

SEQ ID NO: 43502 - RNA, 22 nt, Human
ccugcaguuuguugugaccccg

SEQ ID NO: 43503 - RNA, 22 nt, Human
ccugcauguggucagcacuccu

SEQ ID NO: 43504 - RNA, 22 nt, Human
ccugccagauccccugagcuga

SEQ ID NO: 43505 - RNA, 22 nt, Human
ccugccagccagaucacucgcc

SEQ ID NO: 43506 - RNA, 22 nt, Human
ccugccagcccgcguucaugcc

SEQ ID NO: 43507 - RNA, 21 nt, Human
ccugccaggaaacugaguguc

SEQ ID NO: 43508 - RNA, 22 nt, Human
ccugccaggagcuggugcugca

SEQ ID NO: 43509 - RNA, 22 nt, Human
ccugccagggccuuggaagaaa

SEQ ID NO: 43510 - RNA, 22 nt, Human
ccugccagucacuaugucaccu

SEQ ID NO: 43511 - RNA, 22 nt, Human
ccugguccuuacgucauugcuu

SEQ ID NO: 43512 - RNA, 22 nt, Human
ccuggugcaccaaguaagggug

SEQ ID NO: 43513 - RNA, 22 nt, Human
ccugguggaaggugagugaggc

SEQ ID NO: 43514 - RNA, 22 nt, Human
ccugguggagaggggcggagcg

SEQ ID NO: 43515 - RNA, 22 nt, Human
ccugguggcgaauggugguagg

SEQ ID NO: 43516 - RNA, 22 nt, Human
ccuggugucuguuuacagcagc

SEQ ID NO: 43517 - RNA, 22 nt, Human
ccugguucagucuuucuaugcu

SEQ ID NO: 43518 - RNA, 22 nt, Human
ccugguuuaaugcucacuguug

SEQ ID NO: 43519 - RNA, 22 nt, Human
ccugguuucaggaacauaaucu

SEQ ID NO: 43520 - RNA, 22 nt, Human
ccuguaaauaguuucuucugac

SEQ ID NO: 43521 - RNA, 22 nt, Human
ccuguacagugaaugaauguga

SEQ ID NO: 43522 - RNA, 22 nt, Human
ccuguacaucugcucucauugc

SEQ ID NO: 43523 - RNA, 19 nt, Human
ccuguacauuauucucccc

SEQ ID NO: 43524 - RNA, 23 nt, Human
ccugucaacaaggccccacugua

SEQ ID NO: 43525 - RNA, 22 nt, Human
ccugucaccuagguacugagca

SEQ ID NO: 43526 - RNA, 22 nt, Human
ccugucaguugcugucagggau

SEQ ID NO: 43527 - RNA, 22 nt, Human
ccugucauacuaacguaguggg

SEQ ID NO: 43528 - RNA, 20 nt, Human
ccugucaucccagcauuuug

SEQ ID NO: 43529 - RNA, 22 nt, Human
ccuguccuccaagagcacaucu

SEQ ID NO: 43530 - RNA, 22 nt, Human
ccugucugaaucaugauuuccu

SEQ ID NO: 43531 - RNA, 22 nt, Human
ccugucugaggaggugcucuuu

SEQ ID NO: 43532 - RNA, 22 nt, Human
ccugucugcagauaucucaggu

SEQ ID NO: 43533 - RNA, 22 nt, Human
ccugucugcaugagugagcaua

SEQ ID NO: 43534 - RNA, 22 nt, Human
ccugucugcggaggaguggaag

SEQ ID NO: 43535 - RNA, 20 nt, Human
ccugucuggagacaaagaga

SEQ ID NO: 43536 - RNA, 22 nt, Human
ccugucugggcuugaguauuua

SEQ ID NO: 43537 - RNA, 18 nt, Human
ccugucugggguccccac

SEQ ID NO: 43538 - RNA, 22 nt, Human
ccugucuggugaggggguugca

SEQ ID NO: 43539 - RNA, 22 nt, Human
ccugugacgugucuccuggcac

SEQ ID NO: 43540 - RNA, 22 nt, Human
ccugugaggucaucugugguaa

SEQ ID NO: 43541 - RNA, 22 nt, Human
ccugugaguuuacauucuggcc

SEQ ID NO: 43542 - RNA, 22 nt, Human
ccugugcaauguugagguuuca

SEQ ID NO: 43543 - RNA, 22 nt, Human
ccugugcacuaucugcauuuuu

SEQ ID NO: 43544 - RNA, 22 nt, Human
ccugugcauccgguggucauug

SEQ ID NO: 43545 - RNA, 22 nt, Human
ccugugcaugccaggguacacc

SEQ ID NO: 43546 - RNA, 22 nt, Human
ccugugcauugaccacacucuc

SEQ ID NO: 43547 - RNA, 21 nt, Human
ccugugccaaaguguguuagg

SEQ ID NO: 43548 - RNA, 22 nt, Human
ccugugccagcugggcccugcc

SEQ ID NO: 43549 - RNA, 22 nt, Human
ccugugcccucugcauagcagc

SEQ ID NO: 43550 - RNA, 21 nt, Human
ccugugcuaucagcuuggguu

SEQ ID NO: 43551 - RNA, 20 nt, Human
ccugugcugcccucggggcc

SEQ ID NO: 43552 - RNA, 22 nt, Human
ccugugcuggacagggcugggc

SEQ ID NO: 43553 - RNA, 22 nt, Human
ccugugcugggugugagggaca

SEQ ID NO: 43554 - RNA, 22 nt, Human
ccuguggaccaggaggcagccc

SEQ ID NO: 43555 - RNA, 22 nt, Human
ccuguggagcuuucagcagcuc

SEQ ID NO: 43556 - RNA, 22 nt, Human
cuaaaauuaccuaccaguuuag

SEQ ID NO: 43557 - RNA, 22 nt, Human
cuaaacaagggauuauaauuga

SEQ ID NO: 43558 - RNA, 22 nt, Human
cuaaacaugaacuacauuuagg

SEQ ID NO: 43559 - RNA, 22 nt, Human
cuaaacauguagcuuuuguggu

SEQ ID NO: 43560 - RNA, 20 nt, Human
cuaaacucugcagauuuagu

SEQ ID NO: 43561 - RNA, 19 nt, Human
cuaaacuuaugugaccaca

SEQ ID NO: 43562 - RNA, 22 nt, Human
cuaaacuucuuggcaauuuuau

SEQ ID NO: 43563 - RNA, 22 nt, Human
cuaaacuuuguuuauacucuga

SEQ ID NO: 43564 - RNA, 22 nt, Human
cuaaacuuuuauaacauugaga

SEQ ID NO: 43565 - RNA, 22 nt, Human
cuaaagaauuuugcuugaccag

SEQ ID NO: 43566 - RNA, 22 nt, Human
cuaaagaucuacagaggcuuuu

SEQ ID NO: 43567 - RNA, 22 nt, Human
cuaaagauguacauuuuucucc

SEQ ID NO: 43568 - RNA, 22 nt, Human
cuaaaggcucagcauucuuuuc

SEQ ID NO: 43569 - RNA, 22 nt, Human
cuaaauacuagccuucagauuu

SEQ ID NO: 43570 - RNA, 22 nt, Human
cuaaaucuagucuuuacugauu

SEQ ID NO: 43571 - RNA, 22 nt, Human
cuaaaugacagguaccauagug

SEQ ID NO: 43572 - RNA, 22 nt, Human
cuaaaugauauuuugguuuccu

SEQ ID NO: 43573 - RNA, 22 nt, Human
cuaaaugucauggaguuguaga

SEQ ID NO: 43574 - RNA, 22 nt, Human
cuaaauuaucaugagaauuaug

SEQ ID NO: 43575 - RNA, 22 nt, Human
cuaaauuauuugcacauuagag

SEQ ID NO: 43576 - RNA, 18 nt, Human
cuaacagggaaaauagaa

SEQ ID NO: 43577 - RNA, 22 nt, Human
cuaaccuaguucaacaacuguc

SEQ ID NO: 43578 - RNA, 22 nt, Human
cuaacuuuagcuuagauuauca

SEQ ID NO: 43579 - RNA, 18 nt, Human
cuaagaggucguuucuca

SEQ ID NO: 43580 - RNA, 22 nt, Human
cuaagauaaaugcuuugaugaa

SEQ ID NO: 43581 - RNA, 21 nt, Human
cuaagcaaggagcagggguag

SEQ ID NO: 43582 - RNA, 20 nt, Human
cuaagcacuuugauaaacug

SEQ ID NO: 43583 - RNA, 22 nt, Human
cuaaggaugcauauguuuuguu

SEQ ID NO: 43584 - RNA, 22 nt, Human
cuaaggcagguccauuccagga

SEQ ID NO: 43585 - RNA, 22 nt, Human
cuaagggcuugcuggagccagg

SEQ ID NO: 43586 - RNA, 22 nt, Human
cuaauaauagagguggcauuug

SEQ ID NO: 43587 - RNA, 22 nt, Human
cuaauacucauuucuguaacuc

SEQ ID NO: 43588 - RNA, 22 nt, Human
cuaauguaaagcauuuguucag

SEQ ID NO: 43589 - RNA, 22 nt, Human
cuaauuauguuguuauaaucaa

SEQ ID NO: 43590 - RNA, 22 nt, Human
cuaauucucagcaugaacuggu

SEQ ID NO: 43591 - RNA, 22 nt, Human
cuaauucugaaacagugucaau

SEQ ID NO: 43592 - RNA, 22 nt, Human
cuaauucuguauuuggucauug

SEQ ID NO: 43593 - RNA, 22 nt, Human
cuacaaagaaaguauacuggac

SEQ ID NO: 43594 - RNA, 22 nt, Human
cuacaaagaauuucucuagcuc

SEQ ID NO: 43595 - RNA, 22 nt, Human
cuacaaagcucuucuacaggca

SEQ ID NO: 43596 - RNA, 22 nt, Human
cuacaaaguaccacagacuggg

SEQ ID NO: 43597 - RNA, 22 nt, Human
cuacaaugacagaauugaguag

SEQ ID NO: 43598 - RNA, 21 nt, Human
cuacacagcuuucuauaggaa

SEQ ID NO: 43599 - RNA, 22 nt, Human
cuacacaguucugccuaauggc

SEQ ID NO: 43600 - RNA, 22 nt, Human
cuacacugagagcucuucaggg

SEQ ID NO: 43601 - RNA, 22 nt, Human
cuacagaagccguggucaggaa

SEQ ID NO: 43602 - RNA, 22 nt, Human
cuacagaaguuucccuugcuua

SEQ ID NO: 43603 - RNA, 22 nt, Human
cuacagaaucuaccucaagcca

SEQ ID NO: 43604 - RNA, 22 nt, Human
cuacagaguucacaggauuuua

SEQ ID NO: 43605 - RNA, 22 nt, Human
cuacagcuggccuuggaaaacu

SEQ ID NO: 43606 - RNA, 22 nt, Human
cuacagguaugugcaugacauc

SEQ ID NO: 43607 - RNA, 22 nt, Human
cuacaggucaagcaguagcucu

SEQ ID NO: 43608 - RNA, 23 nt, Human
cuacagguuaauuuucaguggaa

SEQ ID NO: 43609 - RNA, 22 nt, Human
cuacagucuggcaggaauguua

SEQ ID NO: 43610 - RNA, 22 nt, Human
cuacagugucgugugguuucug

SEQ ID NO: 43611 - RNA, 22 nt, Human
cuacauaaauuuaucacagacu

SEQ ID NO: 43612 - RNA, 22 nt, Human
cuacaugaacucuuaagucaca

SEQ ID NO: 43613 - RNA, 22 nt, Human
cuacauguagguuuccuuaauu

SEQ ID NO: 43614 - RNA, 18 nt, Human
cuacauucauaggaaagg

SEQ ID NO: 43615 - RNA, 22 nt, Human
cuacauuuuucaccgagccucu

SEQ ID NO: 43616 - RNA, 22 nt, Human
cuacccagauccaggauggcua

SEQ ID NO: 43617 - RNA, 21 nt, Human
cuacccucacucccauuccuc

SEQ ID NO: 43618 - RNA, 22 nt, Human
cuaccgguccacgguuuaaaug

SEQ ID NO: 43619 - RNA, 22 nt, Human
cuaccugaaaagguugugguga

SEQ ID NO: 43620 - RNA, 22 nt, Human
cuaccugguacauagaaauguu

SEQ ID NO: 43621 - RNA, 22 nt, Human
cuacucugaaaacccagaaacu

SEQ ID NO: 43622 - RNA, 22 nt, Human
cuacugaugcuauacuucucag

SEQ ID NO: 43623 - RNA, 22 nt, Human
cuacuguuauuauuaauaguaa

SEQ ID NO: 43624 - RNA, 17 nt, Human
cuacuucuucuauucuu

SEQ ID NO: 43625 - RNA, 22 nt, Human
cuacuuuaacaauucgcaagaa

SEQ ID NO: 43626 - RNA, 19 nt, Human
cuacuuuauaauaugccuc

SEQ ID NO: 43627 - RNA, 20 nt, Human
cuagaacugagaaauuuaaa

SEQ ID NO: 43628 - RNA, 22 nt, Human
cuagaaguuggggcuagggaua

SEQ ID NO: 43629 - RNA, 22 nt, Human
cuagaauaucauaugaagagac

SEQ ID NO: 43630 - RNA, 22 nt, Human
cuagaauugcauucuaugaaua

SEQ ID NO: 43631 - RNA, 22 nt, Human
cuagagaaaauguuaauacagu

SEQ ID NO: 43632 - RNA, 22 nt, Human
cuagagaagaggcucagccagc

SEQ ID NO: 43633 - RNA, 18 nt, Human
cuagagaagguuacuaug

SEQ ID NO: 43634 - RNA, 22 nt, Human
cuagagaaucuuuuaagaagug

SEQ ID NO: 43635 - RNA, 22 nt, Human
cuagagcuauucaagguuuuau

SEQ ID NO: 43636 - RNA, 22 nt, Human
cuagauaagguggcuuggaauu

SEQ ID NO: 43637 - RNA, 22 nt, Human
cuagauccauuuucugucucug

SEQ ID NO: 43638 - RNA, 22 nt, Human
cuagaucugcccacugaaguuc

SEQ ID NO: 43639 - RNA, 22 nt, Human
cuagcacaguaugguaucagau

SEQ ID NO: 43640 - RNA, 22 nt, Human
cuagcacugagaauagugcaua

SEQ ID NO: 43641 - RNA, 22 nt, Human
cuagcagggauugggcacuggg

SEQ ID NO: 43642 - RNA, 22 nt, Human
cuagcaggucaaaccagcugau

SEQ ID NO: 43643 - RNA, 22 nt, Human
cuagccagacucaagggccacc

SEQ ID NO: 43644 - RNA, 22 nt, Human
cuagccagauuuaaagagagac

SEQ ID NO: 43645 - RNA, 22 nt, Human
cuagccugggauuugaacuuau

SEQ ID NO: 43646 - RNA, 22 nt, Human
cuagcuguaagagggauguggc

SEQ ID NO: 43647 - RNA, 19 nt, Human
cuagcuugucauuugugug

SEQ ID NO: 43648 - RNA, 22 nt, Human
cuagcuuuuuaugacaaucuug

SEQ ID NO: 43649 - RNA, 22 nt, Human
cuaggaccacuguaacaaagua

SEQ ID NO: 43650 - RNA, 22 nt, Human
cuaggaggcgggggcugcagua

SEQ ID NO: 43651 - RNA, 22 nt, Human
cuaggcaaaguauuaaugagug

SEQ ID NO: 43652 - RNA, 22 nt, Human
cuaggcacucacguggcuuuag

SEQ ID NO: 43653 - RNA, 22 nt, Human
cuaggcccaugagguuugcugg

SEQ ID NO: 43654 - RNA, 22 nt, Human
cuaggcuggagugcaguggcau

SEQ ID NO: 43655 - RNA, 22 nt, Human
cuaggcuguaaagagcuaggag

SEQ ID NO: 43656 - RNA, 22 nt, Human
cuaggcuugcaggguggacaug

SEQ ID NO: 43657 - RNA, 17 nt, Human
cuaggcuuggcagcucg

SEQ ID NO: 43658 - RNA, 22 nt, Human
cuagggaaaguggacauggcuu

SEQ ID NO: 43659 - RNA, 22 nt, Human
cuagggaccucagcuccuggag

SEQ ID NO: 43660 - RNA, 22 nt, Human
cuagggagacucgcaggacuca

SEQ ID NO: 43661 - RNA, 22 nt, Human
cuagggaguggcagagcuggga

SEQ ID NO: 43662 - RNA, 22 nt, Human
cuagggcaaugacucaaagcgg

SEQ ID NO: 43663 - RNA, 23 nt, Human
cuagggcaguauuucacagacac

SEQ ID NO: 43664 - RNA, 22 nt, Human
cuagggcuccaaagcugagaag

SEQ ID NO: 43665 - RNA, 22 nt, Human
agcagagccugggcuaggggug

SEQ ID NO: 43666 - RNA, 22 nt, Human
agcagagcuauucuugugcaau

SEQ ID NO: 43667 - RNA, 16 nt, Human
agcagaggugagugaa

SEQ ID NO: 43668 - RNA, 22 nt, Human
agcagagucugugugcacuuua

SEQ ID NO: 43669 - RNA, 22 nt, Human
agcagagugccccaucacaagg

SEQ ID NO: 43670 - RNA, 22 nt, Human
agcagaguuucucaacaucagc

SEQ ID NO: 43671 - RNA, 22 nt, Human
agcagauaggacauuucauucu

SEQ ID NO: 43672 - RNA, 22 nt, Human
agcagauaguagaacauguaua

SEQ ID NO: 43673 - RNA, 22 nt, Human
agcagaugaaucccagauaaag

SEQ ID NO: 43674 - RNA, 22 nt, Human
agcagauggugucaugggaugg

SEQ ID NO: 43675 - RNA, 22 nt, Human
agcagaugugucucugcacugu

SEQ ID NO: 43676 - RNA, 22 nt, Human
agcagauguucccuggucccuu

SEQ ID NO: 43677 - RNA, 22 nt, Human
agcagcaacugcuagaguggca

SEQ ID NO: 43678 - RNA, 19 nt, Human
agcagcaacuguugauuca

SEQ ID NO: 43679 - RNA, 18 nt, Human
agcagcaauuugggauga

SEQ ID NO: 43680 - RNA, 22 nt, Human
agcagcacgaguccacaaaucc

SEQ ID NO: 43681 - RNA, 22 nt, Human
agcagcagaagguuugcaccca

SEQ ID NO: 43682 - RNA, 22 nt, Human
agcagcagagcucuggucugca

SEQ ID NO: 43683 - RNA, 22 nt, Human
agcagcagaggucagaaaggua

SEQ ID NO: 43684 - RNA, 19 nt, Human
agcagcagcaccagggauu

SEQ ID NO: 43685 - RNA, 22 nt, Human
agcagcaggaggccauugucuu

SEQ ID NO: 43686 - RNA, 23 nt, Human
agcagcaggagguauugauaagg

SEQ ID NO: 43687 - RNA, 22 nt, Human
agcagcagggacaaaggaacag

SEQ ID NO: 43688 - RNA, 22 nt, Human
agcagcaggguguaauugggca

SEQ ID NO: 43689 - RNA, 22 nt, Human
agcagcaggugaccucgaugcc

SEQ ID NO: 43690 - RNA, 22 nt, Human
agcagcaggugcuucuggaucu

SEQ ID NO: 43691 - RNA, 22 nt, Human
agcagcaguugcugacguucua

SEQ ID NO: 43692 - RNA, 22 nt, Human
agcagcauauugugucuucaua

SEQ ID NO: 43693 - RNA, 21 nt, Human
agcagcaucagccucaccuga

SEQ ID NO: 43694 - RNA, 22 nt, Human
agcagccaauuggaggaugaag

SEQ ID NO: 43695 - RNA, 22 nt, Human
agcagccacacgccuccuucuc

SEQ ID NO: 43696 - RNA, 22 nt, Human
agcagccacagucugggacagg

SEQ ID NO: 43697 - RNA, 16 nt, Human
agcagccagcacugga

SEQ ID NO: 43698 - RNA, 22 nt, Human
agcagccauagauagcaugcaa

SEQ ID NO: 43699 - RNA, 22 nt, Human
agcagccauccuuagagaaaga

SEQ ID NO: 43700 - RNA, 19 nt, Human
agcagccaucgaccaugga

SEQ ID NO: 43701 - RNA, 21 nt, Human
agcagccauuucacagagacu

SEQ ID NO: 43702 - RNA, 22 nt, Human
agcagcccagauaaagcucagg

SEQ ID NO: 43703 - RNA, 23 nt, Human
agcagcccagaugccuuccaucc

SEQ ID NO: 43704 - RNA, 22 nt, Human
agcagccccucggcgggugcgc

SEQ ID NO: 43705 - RNA, 22 nt, Human
agcagcccuagggauugcuguu

SEQ ID NO: 43706 - RNA, 22 nt, Human
agcagccguauuauggugguuu

SEQ ID NO: 43707 - RNA, 22 nt, Human
agcagcuaaguagcgcaguuaa

SEQ ID NO: 43708 - RNA, 22 nt, Human
agcagcuagaauagugccuggu

SEQ ID NO: 43709 - RNA, 22 nt, Human
agcagcucaaagccugcaagga

SEQ ID NO: 43710 - RNA, 22 nt, Human
agcagcucaacagugucucuau

SEQ ID NO: 43711 - RNA, 22 nt, Human
agcagcucaagacuuaaauuug

SEQ ID NO: 43712 - RNA, 19 nt, Human
agcagcucagggaggcacc

SEQ ID NO: 43713 - RNA, 22 nt, Human
agcagcuccugccaugagugcu

SEQ ID NO: 43714 - RNA, 22 nt, Human
agcagcugaaaggcaaacuucu

SEQ ID NO: 43715 - RNA, 22 nt, Human
agcagcugaccagugaguccug

SEQ ID NO: 43716 - RNA, 22 nt, Human
agcagcugagccccagcuguga

SEQ ID NO: 43717 - RNA, 21 nt, Human
agcagcugcaguuucuaucug

SEQ ID NO: 43718 - RNA, 23 nt, Human
agcagcuggggugcucuuuuguc

SEQ ID NO: 43719 - RNA, 22 nt, Human
agcagcuggguccggcggagca

SEQ ID NO: 43720 - RNA, 22 nt, Human
agcagcuggugagcaagcucag

SEQ ID NO: 43721 - RNA, 22 nt, Human
agcagcuguacuuucaucuguu

SEQ ID NO: 43722 - RNA, 18 nt, Human
agcagcugucagaaugcc

SEQ ID NO: 43723 - RNA, 19 nt, Human
agcagcuuaauuuuguagc

SEQ ID NO: 43724 - RNA, 22 nt, Human
agcagcuuccugcucuucgccu

SEQ ID NO: 43725 - RNA, 18 nt, Human
agcagcuuugugcuugau

SEQ ID NO: 43726 - RNA, 22 nt, Human
agcaggaccaagaaggggaaaa

SEQ ID NO: 43727 - RNA, 21 nt, Human
agcaggaggcagucacagcuc

SEQ ID NO: 43728 - RNA, 22 nt, Human
agcaggaggguuuuguagaguc

SEQ ID NO: 43729 - RNA, 22 nt, Human
agcaggaguguccccuggcugu

SEQ ID NO: 43730 - RNA, 22 nt, Human
agcaggcaagcgugaguucucu

SEQ ID NO: 43731 - RNA, 22 nt, Human
agcaggcaccagggcucguccu

SEQ ID NO: 43732 - RNA, 22 nt, Human
agcaggcacuaugccaggaucu

SEQ ID NO: 43733 - RNA, 22 nt, Human
agcaggcaggcugccagugaau

SEQ ID NO: 43734 - RNA, 22 nt, Human
agcaggcaguguagagccuuca

SEQ ID NO: 43735 - RNA, 22 nt, Human
agcaggccacugcagcuggagc

SEQ ID NO: 43736 - RNA, 22 nt, Human
agcaggcccaagcuggggggaa

SEQ ID NO: 43737 - RNA, 21 nt, Human
agcaggcccaauggagggggc

SEQ ID NO: 43738 - RNA, 22 nt, Human
agcaggccugccaccucggggu

SEQ ID NO: 43739 - RNA, 20 nt, Human
agcaggccuuggggagagga

SEQ ID NO: 43740 - RNA, 22 nt, Human
agcaggcuacuccuguguucgu

SEQ ID NO: 43741 - RNA, 22 nt, Human
agcaggcuccuuccuucucugg

SEQ ID NO: 43742 - RNA, 22 nt, Human
agcaggcugggcaauaugggca

SEQ ID NO: 43743 - RNA, 22 nt, Human
agcaggcuuguuaugucugaga

SEQ ID NO: 43744 - RNA, 21 nt, Human
agcaggcuuuggaguggggcu

SEQ ID NO: 43745 - RNA, 22 nt, Human
agcagggaagccuccagaaccu

SEQ ID NO: 43746 - RNA, 19 nt, Human
agcagggacauggaacuuu

SEQ ID NO: 43747 - RNA, 22 nt, Human
agcagggaggcccagggcacug

SEQ ID NO: 43748 - RNA, 17 nt, Human
agcagggagucaaggga

SEQ ID NO: 43749 - RNA, 19 nt, Human
agcagggagugguuguggg

SEQ ID NO: 43750 - RNA, 22 nt, Human
agcagggcagcugaugcgcacg

SEQ ID NO: 43751 - RNA, 22 nt, Human
agcagggcagugaucagaaagg

SEQ ID NO: 43752 - RNA, 18 nt, Human
agcagggcauuuugccau

SEQ ID NO: 43753 - RNA, 22 nt, Human
agcagggcuccauuucacugcc

SEQ ID NO: 43754 - RNA, 22 nt, Human
agcagggcuggauuuggcaaga

SEQ ID NO: 43755 - RNA, 22 nt, Human
agcagggcuggggcacgagcca

SEQ ID NO: 43756 - RNA, 22 nt, Human
agcagggcuguguagguaauga

SEQ ID NO: 43757 - RNA, 22 nt, Human
agcagggguaacagaaggaaag

SEQ ID NO: 43758 - RNA, 22 nt, Human
agcaggggucucugcuaaugaa

SEQ ID NO: 43759 - RNA, 22 nt, Human
agcaggguuccaggaguugcag

SEQ ID NO: 43760 - RNA, 23 nt, Human
agcagguagguugaaauuuuccu

SEQ ID NO: 43761 - RNA, 22 nt, Human
agcaggugaauuccuggaugug

SEQ ID NO: 43762 - RNA, 22 nt, Human
agcaggugacagggcuguggug

SEQ ID NO: 43763 - RNA, 22 nt, Human
agaaaucuauguuuugguuaga

SEQ ID NO: 43764 - RNA, 22 nt, Human
agaaaugcagucucgucaaaag

SEQ ID NO: 43765 - RNA, 22 nt, Human
agaaaugcauuagcacauauag

SEQ ID NO: 43766 - RNA, 22 nt, Human
agaaauguccagggcuaggauc

SEQ ID NO: 43767 - RNA, 20 nt, Human
agaaaugugaaaggcugagu

SEQ ID NO: 43768 - RNA, 22 nt, Human
agaaauguuacaguuguuauuu

SEQ ID NO: 43769 - RNA, 22 nt, Human
agaaauuccuaagguacacaag

SEQ ID NO: 43770 - RNA, 22 nt, Human
agaacaauguuaaauuauuaag

SEQ ID NO: 43771 - RNA, 22 nt, Human
agaacaauugccccaaagcuug

SEQ ID NO: 43772 - RNA, 22 nt, Human
agaacacucuccugaaaauuaa

SEQ ID NO: 43773 - RNA, 22 nt, Human
agaacagaugugggcagaccug

SEQ ID NO: 43774 - RNA, 22 nt, Human
agaacagcacaggaaguguauc

SEQ ID NO: 43775 - RNA, 22 nt, Human
agaauucuguucuucgggugug

SEQ ID NO: 43776 - RNA, 20 nt, Human
agaauucuuacccuuugaug

SEQ ID NO: 43777 - RNA, 22 nt, Human
agaauugguuggggaaugugga

SEQ ID NO: 43778 - RNA, 22 nt, Human
agaauuguaagcaauuugauua

SEQ ID NO: 43779 - RNA, 22 nt, Human
agaauuguaauaauaauagcau

SEQ ID NO: 43780 - RNA, 22 nt, Human
agaauuguucuguagcuuggcu

SEQ ID NO: 43781 - RNA, 19 nt, Human
agaauuguuuugagacccc

SEQ ID NO: 43782 - RNA, 22 nt, Human
agaauuuaggaugcaugugaau

SEQ ID NO: 43783 - RNA, 22 nt, Human
agacaaauaacuuuuuaugucc

SEQ ID NO: 43784 - RNA, 22 nt, Human
agacaaauaagugcugggauuu

SEQ ID NO: 43785 - RNA, 22 nt, Human
agacaaauggaguaugagcaac

SEQ ID NO: 43786 - RNA, 22 nt, Human
agacaaaugguaauuaugucua

SEQ ID NO: 43787 - RNA, 22 nt, Human
agacaaauugggacauuguguu

SEQ ID NO: 43788 - RNA, 22 nt, Human
agacaacaucuaguuuggugga

SEQ ID NO: 43789 - RNA, 22 nt, Human
agacaaggaauguagcuuacuc

SEQ ID NO: 43790 - RNA, 19 nt, Human
agacaaguuuccagaagcc

SEQ ID NO: 43791 - RNA, 22 nt, Human
agacaauauauaauuuuaguug

SEQ ID NO: 43792 - RNA, 22 nt, Human
agacaauauguauauuaagaau

SEQ ID NO: 43793 - RNA, 22 nt, Human
agacaaugcaagcagggagugg

SEQ ID NO: 43794 - RNA, 22 nt, Human
agacaauggagagcagaguacu

SEQ ID NO: 43795 - RNA, 22 nt, Human
agacaauggagggaaauacuuc

SEQ ID NO: 43796 - RNA, 22 nt, Human
agacaauggcuaaguaaccugu

SEQ ID NO: 43797 - RNA, 22 nt, Human
agacaaugucaaggugaucauc

SEQ ID NO: 43798 - RNA, 22 nt, Human
agacaauuagcacaucacgggg

SEQ ID NO: 43799 - RNA, 22 nt, Human
agacaauuguucuaaguaaaaa

SEQ ID NO: 43800 - RNA, 19 nt, Human
agacacacuugauaugugu

SEQ ID NO: 43801 - RNA, 22 nt, Human
agacacagcugcaggagguggg

SEQ ID NO: 43802 - RNA, 22 nt, Human
agacacagguguaauuucugcu

SEQ ID NO: 43803 - RNA, 22 nt, Human
agacacagugcugggugcugag

SEQ ID NO: 43804 - RNA, 23 nt, Human
agacacauaggagcagcuauugg

SEQ ID NO: 43805 - RNA, 19 nt, Human
agacacaucacauuucucc

SEQ ID NO: 43806 - RNA, 17 nt, Human
agacacugagccaagua

SEQ ID NO: 43807 - RNA, 22 nt, Human
agacacugccacuucuguuccc

SEQ ID NO: 43808 - RNA, 22 nt, Human
agacacuggcacuggggaagcc

SEQ ID NO: 43809 - RNA, 21 nt, Human
agacacugguuuagcauucau

SEQ ID NO: 43810 - RNA, 23 nt, Human
agacacuguaaagaauugcaguu

SEQ ID NO: 43811 - RNA, 22 nt, Human
agacacuuggcagagagcuguu

SEQ ID NO: 43812 - RNA, 22 nt, Human
agacagaacagaauaauuguug

SEQ ID NO: 43813 - RNA, 20 nt, Human
agacagaaucagagauaaag

SEQ ID NO: 43814 - RNA, 22 nt, Human
agacagaauuugucagauaaau

SEQ ID NO: 43815 - RNA, 22 nt, Human
agacagacaaaauuccugccug

SEQ ID NO: 43816 - RNA, 22 nt, Human
agacagaccauggcuauucaga

SEQ ID NO: 43817 - RNA, 22 nt, Human
agacagacugguuugaauuggu

SEQ ID NO: 43818 - RNA, 23 nt, Human
agacagaggcugaggcuggccgc

SEQ ID NO: 43819 - RNA, 21 nt, Human
agacagagugcagucuacaua

SEQ ID NO: 43820 - RNA, 22 nt, Human
agacagcuagggcugcagggac

SEQ ID NO: 43821 - RNA, 18 nt, Human
agacagcugaaaggaaaa

SEQ ID NO: 43822 - RNA, 22 nt, Human
agacagcugggaaauggagugu

SEQ ID NO: 43823 - RNA, 22 nt, Human
agacaggagagggaacugccgg

SEQ ID NO: 43824 - RNA, 22 nt, Human
agacaggaugcauacucuuggu

SEQ ID NO: 43825 - RNA, 22 nt, Human
agacagggccacucauccucac

SEQ ID NO: 43826 - RNA, 22 nt, Human
agacagguaaauagagaugcug

SEQ ID NO: 43827 - RNA, 17 nt, Human
agacagguuauaguuga

SEQ ID NO: 43828 - RNA, 22 nt, Human
agacaguaugauauaugaauac

SEQ ID NO: 43829 - RNA, 22 nt, Human
agacagugaggcagagcuuccg

SEQ ID NO: 43830 - RNA, 22 nt, Human
agacagugauggacaggcagac

SEQ ID NO: 43831 - RNA, 22 nt, Human
agacagugcuaucccaucugug

SEQ ID NO: 43832 - RNA, 22 nt, Human
agacaguggaucgggaugcacu

SEQ ID NO: 43833 - RNA, 23 nt, Human
agacaguggccgagagguacuag

SEQ ID NO: 43834 - RNA, 20 nt, Human
agacaguggggagcuccuag

SEQ ID NO: 43835 - RNA, 22 nt, Human
agacauaaacuuacugaaauac

SEQ ID NO: 43836 - RNA, 19 nt, Human
agacauaaagaguuugcaa

SEQ ID NO: 43837 - RNA, 22 nt, Human
agacauagauaggcacugauug

SEQ ID NO: 43838 - RNA, 22 nt, Human
agacauauuggcuugcuuuaau

SEQ ID NO: 43839 - RNA, 22 nt, Human
agacauccuucaagugauaugu

SEQ ID NO: 43840 - RNA, 22 nt, Human
agacaucuaccuuucauucaaa

SEQ ID NO: 43841 - RNA, 22 nt, Human
agacaugaaaauuccaaacauc

SEQ ID NO: 43842 - RNA, 19 nt, Human
agacaugagacacaggaug

SEQ ID NO: 43843 - RNA, 22 nt, Human
agacaugcaauaaugugcacuc

SEQ ID NO: 43844 - RNA, 22 nt, Human
agacaugcuuggaggagaagga

SEQ ID NO: 43845 - RNA, 22 nt, Human
agacaugguugagaauaaagug

SEQ ID NO: 43846 - RNA, 22 nt, Human
agacauguccacaaagcauuca

SEQ ID NO: 43847 - RNA, 22 nt, Human
agacauuaugcugagugaaaga

SEQ ID NO: 43848 - RNA, 22 nt, Human
agacauuauggcuuucacuggg

SEQ ID NO: 43849 - RNA, 22 nt, Human
agacauuguuggccuauccucu

SEQ ID NO: 43850 - RNA, 22 nt, Human
agacauuuccugugaaccuacu

SEQ ID NO: 43851 - RNA, 22 nt, Human
agacauuuggagccaacuuucc

SEQ ID NO: 43852 - RNA, 22 nt, Human
agacauuuugauaccccuaccg

SEQ ID NO: 43853 - RNA, 22 nt, Human
agacauuuugcaauggguagcu

SEQ ID NO: 43854 - RNA, 22 nt, Human
agaccacaggcaugcacagagc

SEQ ID NO: 43855 - RNA, 22 nt, Human
agaccacuggccuccugcagac

SEQ ID NO: 43856 - RNA, 22 nt, Human
agaccagugaguaggccuuaga

SEQ ID NO: 43857 - RNA, 22 nt, Human
agaccaugaccugccacuaagc

SEQ ID NO: 43858 - RNA, 22 nt, Human
agaccauggccauccuaggaaa

SEQ ID NO: 43859 - RNA, 22 nt, Human
agacccagagggcugcugggag

SEQ ID NO: 43860 - RNA, 22 nt, Human
agacccaggauuggggcugccg

SEQ ID NO: 43861 - RNA, 22 nt, Human
agacccccuuuaauggaagugc

SEQ ID NO: 43862 - RNA, 22 nt, Human
agacccuucauguaguucccca

SEQ ID NO: 43863 - RNA, 22 nt, Human
agacccuugcaugaauuaauuc

SEQ ID NO: 43864 - RNA, 22 nt, Human
agacccuuugggucugugcagg

SEQ ID NO: 43865 - RNA, 22 nt, Human
agaccucuggauagaugugagg

SEQ ID NO: 43866 - RNA, 22 nt, Human
agaccuggagaccugaguggua

SEQ ID NO: 43867 - RNA, 22 nt, Human
agaccuggaugugagggaagua

SEQ ID NO: 43868 - RNA, 22 nt, Human
agaccuggauuccaauccuacc

SEQ ID NO: 43869 - RNA, 22 nt, Human
agaccugggugcccugugcuuu

SEQ ID NO: 43870 - RNA, 22 nt, Human
agaccuuuauuucaugauagga

SEQ ID NO: 43871 - RNA, 22 nt, Human
agacgagggccuggcacacagu

SEQ ID NO: 43872 - RNA, 22 nt, Human
agacuaaauaguuacagguagg

SEQ ID NO: 43873 - RNA, 22 nt, Human
agacuacagaauggcauuguuu

SEQ ID NO: 43874 - RNA, 22 nt, Human
agacuagagagauauaauaugg

SEQ ID NO: 43875 - RNA, 22 nt, Human
agacucugauaagcaacucuug

SEQ ID NO: 43876 - RNA, 22 nt, Human
agacucugggauuuugaaagca

SEQ ID NO: 43877 - RNA, 22 nt, Human
agacucugugcuccuugcuuuc

SEQ ID NO: 43878 - RNA, 22 nt, Human
agacucuuggagaagagcuaua

SEQ ID NO: 43879 - RNA, 22 nt, Human
agacugaaacaaucugcaggca

SEQ ID NO: 43880 - RNA, 22 nt, Human
agacugaagcaauucaaccagu

SEQ ID NO: 43881 - RNA, 20 nt, Human
agacugaagccaugugacua

SEQ ID NO: 43882 - RNA, 22 nt, Human
agacugaagcuccuugaggaca

SEQ ID NO: 43883 - RNA, 22 nt, Human
agccaggccuuuucucaagguu

SEQ ID NO: 43884 - RNA, 22 nt, Human
agaugaaagauuuuuauagaga

SEQ ID NO: 43885 - RNA, 18 nt, Human
agaugaaagcaaaugaca

SEQ ID NO: 43886 - RNA, 23 nt, Human
agaugaaagcuucccaucacagu

SEQ ID NO: 43887 - RNA, 22 nt, Human
agaugaagacucaggagcaggu

SEQ ID NO: 43888 - RNA, 22 nt, Human
agaugacagcuacgggaugaaa

SEQ ID NO: 43889 - RNA, 22 nt, Human
agaugauggccauguccucucc

SEQ ID NO: 43890 - RNA, 22 nt, Human
agaugcagaaaaacuaagugau

SEQ ID NO: 43891 - RNA, 22 nt, Human
agaugcagaguuugcuguggac

SEQ ID NO: 43892 - RNA, 21 nt, Human
agaugcagugacccacugggg

SEQ ID NO: 43893 - RNA, 21 nt, Human
agaugcaguuaugagaugcag

SEQ ID NO: 43894 - RNA, 22 nt, Human
agaugcaugcuuaauuagcaca

SEQ ID NO: 43895 - RNA, 22 nt, Human
agaugcauggaaaucucauuac

SEQ ID NO: 43896 - RNA, 22 nt, Human
agaugcugaagcugaggcaaca

SEQ ID NO: 43897 - RNA, 22 nt, Human
agaugcugauugaauagauuuc

SEQ ID NO: 43898 - RNA, 22 nt, Human
agaugcuggauggaaaaugauc

SEQ ID NO: 43899 - RNA, 22 nt, Human
agaugcugggaggcugagugca

SEQ ID NO: 43900 - RNA, 22 nt, Human
agaugcuuacuaugguuguaug

SEQ ID NO: 43901 - RNA, 22 nt, Human
agaugcuuuccugauauuuaug

SEQ ID NO: 43902 - RNA, 22 nt, Human
agauggaggaaggcugaacuca

SEQ ID NO: 43903 - RNA, 17 nt, Human
agauggcaggaggcaga

SEQ ID NO: 43904 - RNA, 22 nt, Human
agauggccccaggugcccaggg

SEQ ID NO: 43905 - RNA, 22 nt, Human
agauggcuauagauagccuuuc

SEQ ID NO: 43906 - RNA, 22 nt, Human
agauggcuccaguguccagagg

SEQ ID NO: 43907 - RNA, 22 nt, Human
agauggcucuuugaaggggaau

SEQ ID NO: 43908 - RNA, 22 nt, Human
agauggcugauuaacuccaugg

SEQ ID NO: 43909 - RNA, 22 nt, Human
agaugggcgcgcugcucugaug

SEQ ID NO: 43910 - RNA, 22 nt, Human
agauggguugagaacacaugcu

SEQ ID NO: 43911 - RNA, 22 nt, Human
agagagcugacuuuggagucag

SEQ ID NO: 43912 - RNA, 22 nt, Human
agagaggcgaguuaccugugcu

SEQ ID NO: 43913 - RNA, 22 nt, Human
agagagggaauauuugggguau

SEQ ID NO: 43914 - RNA, 22 nt, Human
agagauaguguauuaguugggc

SEQ ID NO: 43915 - RNA, 22 nt, Human
agagauauuauuuaccaaguua

SEQ ID NO: 43916 - RNA, 22 nt, Human
agagaucaguuaaaaucuuuuu

SEQ ID NO: 43917 - RNA, 22 nt, Human
agagauccuucaaucuaguuuu

SEQ ID NO: 43918 - RNA, 22 nt, Human
agagaucucugaagcugcugcu

SEQ ID NO: 43919 - RNA, 22 nt, Human
agagaugaaaaguggagacugg

SEQ ID NO: 43920 - RNA, 22 nt, Human
agagaugaacauaaaacaagga

SEQ ID NO: 43921 - RNA, 22 nt, Human
agagaugccaccuuuuugcugu

SEQ ID NO: 43922 - RNA, 22 nt, Human
agagaugcccuugaaaggauua

SEQ ID NO: 43923 - RNA, 22 nt, Human
agagauggagagcacuggggcu

SEQ ID NO: 43924 - RNA, 22 nt, Human
agagaugggaaggcagacuuca

SEQ ID NO: 43925 - RNA, 22 nt, Human
agagauguagcaaagaaccaca

SEQ ID NO: 43926 - RNA, 22 nt, Human
agagauguaugcauuugucaca

SEQ ID NO: 43927 - RNA, 22 nt, Human
agagauguucauucagcauguu

SEQ ID NO: 43928 - RNA, 22 nt, Human
agagauugugcuacucacccaa

SEQ ID NO: 43929 - RNA, 20 nt, Human
agagauuuuaguagccacag

SEQ ID NO: 43930 - RNA, 22 nt, Human
agagcaaagggacauggaagag

SEQ ID NO: 43931 - RNA, 22 nt, Human
agagcaaauagagaagccagcu

SEQ ID NO: 43932 - RNA, 21 nt, Human
agagcaaguuaaggcauuaau

SEQ ID NO: 43933 - RNA, 22 nt, Human
agagcaauggcauccagcugau

SEQ ID NO: 43934 - RNA, 22 nt, Human
agagcacaaauuaguuggucuu

SEQ ID NO: 43935 - RNA, 22 nt, Human
agagcacaaauuuuaaggaggc

SEQ ID NO: 43936 - RNA, 22 nt, Human
agagcacagaagaauaggugcu

SEQ ID NO: 43937 - RNA, 22 nt, Human
agagcacaggugcuggagccca

SEQ ID NO: 43938 - RNA, 22 nt, Human
agagcacuuucgagagccggag

SEQ ID NO: 43939 - RNA, 22 nt, Human
agagcagacauccuugucuugu

SEQ ID NO: 43940 - RNA, 22 nt, Human
agagcagcguuuguggaacacu

SEQ ID NO: 43941 - RNA, 22 nt, Human
agagcauccaucggccaggacc

SEQ ID NO: 43942 - RNA, 22 nt, Human
agagcauccugguuuuaugaag

SEQ ID NO: 43943 - RNA, 22 nt, Human
agagcaucuaacacauaagccu

SEQ ID NO: 43944 - RNA, 17 nt, Human
agagcauguguaggagc

SEQ ID NO: 43945 - RNA, 22 nt, Human
agagccaaguugucaaggcacu

SEQ ID NO: 43946 - RNA, 22 nt, Human
agagccacggcaggccuaggaa

SEQ ID NO: 43947 - RNA, 19 nt, Human
agagccagacagcauagga

SEQ ID NO: 43948 - RNA, 22 nt, Human
agagccagcauuugacacuggc

SEQ ID NO: 43949 - RNA, 22 nt, Human
agagccagcauuugggcccugc

SEQ ID NO: 43950 - RNA, 22 nt, Human
agagccaggacugugucucacu

SEQ ID NO: 43951 - RNA, 22 nt, Human
agagccaggcggcugggcaccu

SEQ ID NO: 43952 - RNA, 22 nt, Human
agagccaguuaagcacuuacag

SEQ ID NO: 43953 - RNA, 22 nt, Human
agagcccagguccuggagaggg

SEQ ID NO: 43954 - RNA, 22 nt, Human
agagcccugagucaguucugga

SEQ ID NO: 43955 - RNA, 22 nt, Human
agagccugagaggauaaugggg

SEQ ID NO: 43956 - RNA, 22 nt, Human
agagccugagccugaucuugaa

SEQ ID NO: 43957 - RNA, 22 nt, Human
agagccugaggaugucccagcu

SEQ ID NO: 43958 - RNA, 22 nt, Human
agagccugaggcccugagaggg

SEQ ID NO: 43959 - RNA, 22 nt, Human
agagccugcuguguaagucaca

SEQ ID NO: 43960 - RNA, 22 nt, Human
agagccuggacuuuucugagcc

SEQ ID NO: 43961 - RNA, 22 nt, Human
agagccuggcaaaagguccugc

SEQ ID NO: 43962 - RNA, 22 nt, Human
agagccugggcagcuccucugg

SEQ ID NO: 43963 - RNA, 22 nt, Human
agagccugugggagaugcagcu

SEQ ID NO: 43964 - RNA, 22 nt, Human
agagccuguuuugugggagaug

SEQ ID NO: 43965 - RNA, 20 nt, Human
agagccuugaggaagaugau

SEQ ID NO: 43966 - RNA, 22 nt, Human
agagcuaggaaugaccacucuc

SEQ ID NO: 43967 - RNA, 22 nt, Human
agagcuccaggguuuuguagug

SEQ ID NO: 43968 - RNA, 22 nt, Human
agagcuccugcauucuucccug

SEQ ID NO: 43969 - RNA, 22 nt, Human
agagcucugcagcuggccucag

SEQ ID NO: 43970 - RNA, 22 nt, Human
agagcugagcaccaagcauggu

SEQ ID NO: 43971 - RNA, 22 nt, Human
agagcugcaauuucauguggug

SEQ ID NO: 43972 - RNA, 22 nt, Human
agagcugcaccuaugcagaccu

SEQ ID NO: 43973 - RNA, 22 nt, Human
agagcuggaagcugcucuuaga

SEQ ID NO: 43974 - RNA, 22 nt, Human
agagcuggagcagccccacugg

SEQ ID NO: 43975 - RNA, 22 nt, Human
agagcuggcacugacccucacc

SEQ ID NO: 43976 - RNA, 22 nt, Human
agagcugggugaagugccauca

SEQ ID NO: 43977 - RNA, 22 nt, Human
agagcuggugcauauucagaaa

SEQ ID NO: 43978 - RNA, 22 nt, Human
agagcugguuuacucaggaauu

SEQ ID NO: 43979 - RNA, 22 nt, Human
agagcugugaaaaugagguuug

SEQ ID NO: 43980 - RNA, 22 nt, Human
agagcuguggauaguccuggau

SEQ ID NO: 43981 - RNA, 22 nt, Human
agagcuguuaauuuugcacugg

SEQ ID NO: 43982 - RNA, 22 nt, Human
agagcuguuugucuagagagug

SEQ ID NO: 43983 - RNA, 22 nt, Human
agagcuuagaauuucagaugau

SEQ ID NO: 43984 - RNA, 23 nt, Human
agagcuuagggaauucacaugag

SEQ ID NO: 43985 - RNA, 22 nt, Human
agagcuuauaucuuggccaucc

SEQ ID NO: 43986 - RNA, 23 nt, Human
agagcuuucuaaaauguaaaucu

SEQ ID NO: 43987 - RNA, 22 nt, Human
agagcuuugggacauuugcuag

SEQ ID NO: 43988 - RNA, 22 nt, Human
agaggaagauuuuauuaaccag

SEQ ID NO: 43989 - RNA, 22 nt, Human
agaggaauaaauuucuguagug

SEQ ID NO: 43990 - RNA, 22 nt, Human
agaggaauaugggugcacuaga

SEQ ID NO: 43991 - RNA, 22 nt, Human
agaggaaucugucuagacacaa

SEQ ID NO: 43992 - RNA, 22 nt, Human
agaggacaaaaugagaagugcu

SEQ ID NO: 43993 - RNA, 22 nt, Human
agaguuaaaugaaaugguaugu

SEQ ID NO: 43994 - RNA, 22 nt, Human
agaguuacugcagagaugaaua

SEQ ID NO: 43995 - RNA, 22 nt, Human
agaguuaucacuccaugcagcu

SEQ ID NO: 43996 - RNA, 22 nt, Human
agaguucucucucauuugagcu

SEQ ID NO: 43997 - RNA, 22 nt, Human
agaguucugaaauuaucuuuac

SEQ ID NO: 43998 - RNA, 22 nt, Human
agaguucugcucuucucaguga

SEQ ID NO: 43999 - RNA, 22 nt, Human
agaguucugucugccacacgaa

SEQ ID NO: 44000 - RNA, 22 nt, Human
agaguugcuaccaagaugcuag

SEQ ID NO: 44001 - RNA, 22 nt, Human
agaguuuaacacaagaaaaguu

SEQ ID NO: 44002 - RNA, 22 nt, Human
agaguuuggagagggugaggca

SEQ ID NO: 44003 - RNA, 22 nt, Human
agaguuuggauuuuaggacauc

SEQ ID NO: 44004 - RNA, 22 nt, Human
agaguuuguauuuuucagugaa

SEQ ID NO: 44005 - RNA, 22 nt, Human
agauaaacccaacuuaaugaag

SEQ ID NO: 44006 - RNA, 22 nt, Human
agauaacauuuauugaauguaa

SEQ ID NO: 44007 - RNA, 22 nt, Human
agauaacucauuuuguauaucc

SEQ ID NO: 44008 - RNA, 19 nt, Human
agauaagaguugacugugg

SEQ ID NO: 44009 - RNA, 22 nt, Human
agauaagauaguccagcacaau

SEQ ID NO: 44010 - RNA, 22 nt, Human
agauaagcuguuuuucaagaau

SEQ ID NO: 44011 - RNA, 17 nt, Human
agauaagcuucagagcu

SEQ ID NO: 44012 - RNA, 22 nt, Human
agauaauuauuuacuucaaagu

SEQ ID NO: 44013 - RNA, 22 nt, Human
agauacaaguuaagagaaagga

SEQ ID NO: 44014 - RNA, 22 nt, Human
agauacacagagcaucuucaga

SEQ ID NO: 44015 - RNA, 22 nt, Human
agauacagaaugguuguuuguc

SEQ ID NO: 44016 - RNA, 22 nt, Human
agauacagccugccagguucuu

SEQ ID NO: 44017 - RNA, 22 nt, Human
agauacagcuuuuuugucaguc

SEQ ID NO: 44018 - RNA, 20 nt, Human
agauacagugguuucuuuag

SEQ ID NO: 44019 - RNA, 22 nt, Human
agauaggagccaggacuuaaca

SEQ ID NO: 44020 - RNA, 22 nt, Human
agauaggccauuaagaaggaua

SEQ ID NO: 44021 - RNA, 22 nt, Human
agauauaauaauuuacaagugu

SEQ ID NO: 44022 - RNA, 22 nt, Human
agauauauuuaagguaauaagu

SEQ ID NO: 44023 - RNA, 22 nt, Human
agauaucaccaguuuuacauac

SEQ ID NO: 44024 - RNA, 22 nt, Human
agauaucuuacacuuugaaguu

SEQ ID NO: 44025 - RNA, 22 nt, Human
agauaugucccugucuaauauu

SEQ ID NO: 44026 - RNA, 22 nt, Human
agauaugugccaauuguuauaa

SEQ ID NO: 44027 - RNA, 22 nt, Human
agauauuaaucguacauaaggu

SEQ ID NO: 44028 - RNA, 22 nt, Human
agcagcauggcugacuaaagac

SEQ ID NO: 44029 - RNA, 22 nt, Human
agcagcauguaugagggugaac

SEQ ID NO: 44030 - RNA, 22 nt, Human
agcagcauguucauuacauuau

SEQ ID NO: 44031 - RNA, 22 nt, Human
agcagcauguugggaugugaaa

SEQ ID NO: 44032 - RNA, 22 nt, Human
agcagcauuuaaguuucuucua

SEQ ID NO: 44033 - RNA, 22 nt, Human
agcagccacccagcugcucauu

SEQ ID NO: 44034 - RNA, 22 nt, Human
agcagccagaaagggcagucga

SEQ ID NO: 44035 - RNA, 23 nt, Human
agcagccagagauccucggcccu

SEQ ID NO: 44036 - RNA, 22 nt, Human
agcagccaguucucugugguag

SEQ ID NO: 44037 - RNA, 23 nt, Human
agcagcccaauggcaagcucugg

SEQ ID NO: 44038 - RNA, 22 nt, Human
agcagcccaguuguacugagug

SEQ ID NO: 44039 - RNA, 22 nt, Human
agcagccuggacuuggaugugg

SEQ ID NO: 44040 - RNA, 22 nt, Human
agcagcuauuucuuccagagag

SEQ ID NO: 44041 - RNA, 22 nt, Human
agcagcucacaggauuccugaa

SEQ ID NO: 44042 - RNA, 22 nt, Human
agcagcucuggcacuguagcau

SEQ ID NO: 44043 - RNA, 22 nt, Human
agcagcucuuaacaaagcaugg

SEQ ID NO: 44044 - RNA, 22 nt, Human
agcagcugcagggagggucugc

SEQ ID NO: 44045 - RNA, 22 nt, Human
agcagcugcuccacuugcuuaa

SEQ ID NO: 44046 - RNA, 22 nt, Human
agcagcuggaacauaugaagaa

SEQ ID NO: 44047 - RNA, 22 nt, Human
agcagcuggcagcuucuucucu

SEQ ID NO: 44048 - RNA, 21 nt, Human
agcagcugggcaacauggagg

SEQ ID NO: 44049 - RNA, 22 nt, Human
agcagcuggggccugugacgau

SEQ ID NO: 44050 - RNA, 19 nt, Human
agcagcuguagauagacac

SEQ ID NO: 44051 - RNA, 22 nt, Human
agcagcuguggaaaaguaacua

SEQ ID NO: 44052 - RNA, 22 nt, Human
agcagcuguggggacaagggua

SEQ ID NO: 44053 - RNA, 23 nt, Human
agcagcugugguuuaccuuagua

SEQ ID NO: 44054 - RNA, 22 nt, Human
agcagcuguuagaaacaggaag

SEQ ID NO: 44055 - RNA, 22 nt, Human
agcagcuucagaggcgggcgca

SEQ ID NO: 44056 - RNA, 22 nt, Human
agcagcuucuauuuucuugguu

SEQ ID NO: 44057 - RNA, 22 nt, Human
agcagcuugagcuggggcuggc

SEQ ID NO: 44058 - RNA, 22 nt, Human
agcagcuuguuaaaaaguucca

SEQ ID NO: 44059 - RNA, 20 nt, Human
agcaggaaaagugccagucu

SEQ ID NO: 44060 - RNA, 22 nt, Human
agcaggaacgaguucaugggga

SEQ ID NO: 44061 - RNA, 22 nt, Human
agcaggaacucagggaguucuc

SEQ ID NO: 44062 - RNA, 22 nt, Human
agcaggaaggcuuuggggguuc

SEQ ID NO: 44063 - RNA, 22 nt, Human
agcaggaaggggaugaugggca

SEQ ID NO: 44064 - RNA, 22 nt, Human
agcaggaaggggccuagccugg

SEQ ID NO: 44065 - RNA, 22 nt, Human
agcaggaaucuguucuguauaa

SEQ ID NO: 44066 - RNA, 22 nt, Human
agcaggacaauaugggaucagg

SEQ ID NO: 44067 - RNA, 22 nt, Human
agcaggacacgaugcggcagga

SEQ ID NO: 44068 - RNA, 18 nt, Human
agcaggacuguggggugg

SEQ ID NO: 44069 - RNA, 22 nt, Human
agcaggagauggggcgugaugu

SEQ ID NO: 44070 - RNA, 22 nt, Human
agcaggaguuugaugcuuuuau

SEQ ID NO: 44071 - RNA, 22 nt, Human
agcaggcaagguccgugccucg

SEQ ID NO: 44072 - RNA, 22 nt, Human
agcaggcagcaugggacccucc

SEQ ID NO: 44073 - RNA, 22 nt, Human
agcaggcagccauuuggaaggc

SEQ ID NO: 44074 - RNA, 23 nt, Human
agcaggcaucuguggcacaaggc

SEQ ID NO: 44075 - RNA, 22 nt, Human
agcaggcauuugauauauauuu

SEQ ID NO: 44076 - RNA, 19 nt, Human
agcaggccaggcagguggc

SEQ ID NO: 44077 - RNA, 22 nt, Human
agcaggccucaugcaccagcua

SEQ ID NO: 44078 - RNA, 18 nt, Human
agcaggcguugccuggga

SEQ ID NO: 44079 - RNA, 22 nt, Human
agcaggcuaaucuugcugaaca

SEQ ID NO: 44080 - RNA, 22 nt, Human
agcaggcugaugggcaugcuug

SEQ ID NO: 44081 - RNA, 22 nt, Human
agcaggcugccuuccaaagccu

SEQ ID NO: 44082 - RNA, 22 nt, Human
agcaggcugcuggcguugaagu

SEQ ID NO: 44083 - RNA, 22 nt, Human
agcaggcuuucaagagucuucu

SEQ ID NO: 44084 - RNA, 22 nt, Human
agcagggacauggcaucucucc

SEQ ID NO: 44085 - RNA, 22 nt, Human
agcagggaggcggugugcuggc

SEQ ID NO: 44086 - RNA, 22 nt, Human
agcagggaggucuagcacgugg

SEQ ID NO: 44087 - RNA, 22 nt, Human
agcagggcaaagucaggcuaac

SEQ ID NO: 44088 - RNA, 22 nt, Human
agcagggcacuggaaggcacug

SEQ ID NO: 44089 - RNA, 22 nt, Human
agcagggcagguaaggaucaga

SEQ ID NO: 44090 - RNA, 22 nt, Human
agcagggcaugaauaaggguuu

SEQ ID NO: 44091 - RNA, 22 nt, Human
agcagggccaacaguaaacacc

SEQ ID NO: 44092 - RNA, 22 nt, Human
agcagggccucuggcacugguc

SEQ ID NO: 44093 - RNA, 22 nt, Human
agcagggccugagugaccuaac

SEQ ID NO: 44094 - RNA, 22 nt, Human
agcagggccuggcacuccuggg

SEQ ID NO: 44095 - RNA, 16 nt, Human
agcagggcgggaagga

SEQ ID NO: 44096 - RNA, 22 nt, Human
agcagggcucacauuaguggau

SEQ ID NO: 44097 - RNA, 22 nt, Human
agcagggcucugccaugggccc

SEQ ID NO: 44098 - RNA, 22 nt, Human
agcagggcugugcuccuuccga

SEQ ID NO: 44099 - RNA, 22 nt, Human
agcagggcuucugugccugugc

SEQ ID NO: 44100 - RNA, 22 nt, Human
agcagggcuuuggcuggcuuuc

SEQ ID NO: 44101 - RNA, 22 nt, Human
agcaggguuuggggauuggcac

SEQ ID NO: 44102 - RNA, 22 nt, Human
agcagagucuucaagggcaggc

SEQ ID NO: 44103 - RNA, 22 nt, Human
agcagauaugauacuuaauuua

SEQ ID NO: 44104 - RNA, 22 nt, Human
agcagauauuuguugagcacuu

SEQ ID NO: 44105 - RNA, 22 nt, Human
agcagaugcgucugagugggag

SEQ ID NO: 44106 - RNA, 22 nt, Human
agcagauggagaauggagucag

SEQ ID NO: 44107 - RNA, 22 nt, Human
agcagcaaaagagaauaguuug

SEQ ID NO: 44108 - RNA, 22 nt, Human
agcagcaagcagugcacggguu

SEQ ID NO: 44109 - RNA, 22 nt, Human
agcagcaaggaacagaauggac

SEQ ID NO: 44110 - RNA, 22 nt, Human
agcagcaccuguccucgcugcu

SEQ ID NO: 44111 - RNA, 22 nt, Human
agcagcagaaaguugauggcag

SEQ ID NO: 44112 - RNA, 22 nt, Human
agcagcagaagggagacccagg

SEQ ID NO: 44113 - RNA, 22 nt, Human
agcagcagaucaaacaggcuug

SEQ ID NO: 44114 - RNA, 22 nt, Human
agcagcagauccaaaaaaugug

SEQ ID NO: 44115 - RNA, 22 nt, Human
agcagcagauucagcaggaaug

SEQ ID NO: 44116 - RNA, 21 nt, Human
agcagcagcaguggggcuucu

SEQ ID NO: 44117 - RNA, 22 nt, Human
agcagcagcauugagcgcuugu

SEQ ID NO: 44118 - RNA, 19 nt, Human
agcagcagcuaccacuugu

SEQ ID NO: 44119 - RNA, 22 nt, Human
agcagcagcucaguucucagcu

SEQ ID NO: 44120 - RNA, 22 nt, Human
agcagcaggaggcuguccacca

SEQ ID NO: 44121 - RNA, 22 nt, Human
agcagcaggcuuaaggaaaagu

SEQ ID NO: 44122 - RNA, 22 nt, Human
agcagcagggcucugcccgugc

SEQ ID NO: 44123 - RNA, 22 nt, Human
agcagcagggucauugcucuuu

SEQ ID NO: 44124 - RNA, 22 nt, Human
agcagcaguguucuggaauucu

SEQ ID NO: 44125 - RNA, 22 nt, Human
agcagcauccccggccuccacc

SEQ ID NO: 44126 - RNA, 22 nt, Human
agcagcaucugguucugaugug

SEQ ID NO: 44127 - RNA, 22 nt, Human
agcagcaucuucuaaguaaggc

SEQ ID NO: 44128 - RNA, 22 nt, Human
agcagcauggagaaaccguuca

SEQ ID NO: 44129 - RNA, 22 nt, Human
agcagcauuaagggaacugcag

SEQ ID NO: 44130 - RNA, 22 nt, Human
agcagcauuccuggcuucuauc

SEQ ID NO: 44131 - RNA, 22 nt, Human
agcagccaaccuuacauucauc

SEQ ID NO: 44132 - RNA, 22 nt, Human
agcagccagagaaugaugcagu

SEQ ID NO: 44133 - RNA, 22 nt, Human
agcagccagagucugaacauua

SEQ ID NO: 44134 - RNA, 22 nt, Human
agcagccaggaaucugcagagc

SEQ ID NO: 44135 - RNA, 19 nt, Human
agcagccauagacaauaug

SEQ ID NO: 44136 - RNA, 22 nt, Human
agcagcccaaacagacuaagac

SEQ ID NO: 44137 - RNA, 22 nt, Human
agcagcccgaggaucauguguc

SEQ ID NO: 44138 - RNA, 23 nt, Human
agcagcccugggaccuggccugc

SEQ ID NO: 44139 - RNA, 22 nt, Human
agcagccuauucuucucuugga

SEQ ID NO: 44140 - RNA, 22 nt, Human
agcagccucccagggagcagcc

SEQ ID NO: 44141 - RNA, 22 nt, Human
agcagccucuguagaggucucc

SEQ ID NO: 44142 - RNA, 22 nt, Human
agcagccuggucucucgccaau

SEQ ID NO: 44143 - RNA, 21 nt, Human
agcagccuugugugccaggca

SEQ ID NO: 44144 - RNA, 22 nt, Human
agcagccuuugaucaucuggga

SEQ ID NO: 44145 - RNA, 22 nt, Human
agcagcuagacuucagaaucug

SEQ ID NO: 44146 - RNA, 22 nt, Human
agcagcucagaggcaccagggc

SEQ ID NO: 44147 - RNA, 22 nt, Human
agcagcucauggaguaggcacu

SEQ ID NO: 44148 - RNA, 22 nt, Human
agcauauuguaugucuauaugu

SEQ ID NO: 44149 - RNA, 22 nt, Human
agcauauugucuuuggugucuc

SEQ ID NO: 44150 - RNA, 22 nt, Human
agcauccaacaggagggaaggg

SEQ ID NO: 44151 - RNA, 22 nt, Human
agcauccaacuuugauuagaga

SEQ ID NO: 44152 - RNA, 22 nt, Human
agcauccaggccagguugggca

SEQ ID NO: 44153 - RNA, 22 nt, Human
agcauccuccuucccagagaug

SEQ ID NO: 44154 - RNA, 22 nt, Human
agcauccugccucuccucccaa

SEQ ID NO: 44155 - RNA, 22 nt, Human
agcaucucuaaauccaguaagu

SEQ ID NO: 44156 - RNA, 22 nt, Human
agcaucugcauaaugccuuccc

SEQ ID NO: 44157 - RNA, 22 nt, Human
agcaucuggauggaaagcaagg

SEQ ID NO: 44158 - RNA, 20 nt, Human
agcaucuugcaucuucaagu

SEQ ID NO: 44159 - RNA, 18 nt, Human
agcaugagagaggcugug

SEQ ID NO: 44160 - RNA, 21 nt, Human
agcaugcacuacuucaucuua

SEQ ID NO: 44161 - RNA, 22 nt, Human
agcaugcgcuugaucagcucca

SEQ ID NO: 44162 - RNA, 22 nt, Human
agcauggggcuccgcaaugaac

SEQ ID NO: 44163 - RNA, 22 nt, Human
agcauguugggaugagaaggaa

SEQ ID NO: 44164 - RNA, 22 nt, Human
agcauuauguccaugcuaaauu

SEQ ID NO: 44165 - RNA, 22 nt, Human
agcauuccacacugaagucugc

SEQ ID NO: 44166 - RNA, 22 nt, Human
agcauugguggccagagugccu

SEQ ID NO: 44167 - RNA, 22 nt, Human
agcauuuaagcuucugcaaagc

SEQ ID NO: 44168 - RNA, 22 nt, Human
agcauuuagucuuuauugcagc

SEQ ID NO: 44169 - RNA, 22 nt, Human
agcauuuauugaccugcugcug

SEQ ID NO: 44170 - RNA, 22 nt, Human
agcauuucuuggcccauuguag

SEQ ID NO: 44171 - RNA, 22 nt, Human
agcauuuucugagaguauagau

SEQ ID NO: 44172 - RNA, 22 nt, Human
agccaaagaucagugugcaagu

SEQ ID NO: 44173 - RNA, 23 nt, Human
agccaaaucuuaacuucuguuac

SEQ ID NO: 44174 - RNA, 22 nt, Human
agccaacuaggagauuaaggua

SEQ ID NO: 44175 - RNA, 22 nt, Human
agccaacuuagaagaaauuuga

SEQ ID NO: 44176 - RNA, 22 nt, Human
agccaagaagugaguaauagua

SEQ ID NO: 44177 - RNA, 22 nt, Human
agccaagaaucaugagcuaaua

SEQ ID NO: 44178 - RNA, 22 nt, Human
agccaaggacacggagccuccu

SEQ ID NO: 44179 - RNA, 22 nt, Human
agccaaggagugcagguggcuu

SEQ ID NO: 44180 - RNA, 22 nt, Human
agccaaggucgccccagggcaa

SEQ ID NO: 44181 - RNA, 22 nt, Human
agccaauacacugaagaucuaa

SEQ ID NO: 44182 - RNA, 22 nt, Human
agccaaucuccuguugaugcca

SEQ ID NO: 44183 - RNA, 22 nt, Human
agccacacagcuuaaugacaga

SEQ ID NO: 44184 - RNA, 22 nt, Human
agccacaggaaacagagacagc

SEQ ID NO: 44185 - RNA, 22 nt, Human
agccacaggccaugagauacca

SEQ ID NO: 44186 - RNA, 22 nt, Human
agccacagucaaccuguccaua

SEQ ID NO: 44187 - RNA, 22 nt, Human
agccacagucugaugccugaga

SEQ ID NO: 44188 - RNA, 22 nt, Human
agccaccaccacugaaagguua

SEQ ID NO: 44189 - RNA, 22 nt, Human
agccacugugcaggagcagugu

SEQ ID NO: 44190 - RNA, 23 nt, Human
agccacuucuaucuugcuccugg

SEQ ID NO: 44191 - RNA, 22 nt, Human
agccacuuuacuuucauauuuu

SEQ ID NO: 44192 - RNA, 22 nt, Human
agccagaaccacuggaacggug

SEQ ID NO: 44193 - RNA, 22 nt, Human
agccagacuuuaaaauagauga

SEQ ID NO: 44194 - RNA, 22 nt, Human
agccagagaacagcaggaaaug

SEQ ID NO: 44195 - RNA, 22 nt, Human
agccagagggaucuuucuaaga

SEQ ID NO: 44196 - RNA, 19 nt, Human
agccagaguggcccagggg

SEQ ID NO: 44197 - RNA, 22 nt, Human
agccagaugugagaaagaacac

SEQ ID NO: 44198 - RNA, 21 nt, Human
agccagcaacacagcaucucc

SEQ ID NO: 44199 - RNA, 22 nt, Human
agccagcacuuuuucucugggc

SEQ ID NO: 44200 - RNA, 22 nt, Human
agccagcaggugagugcagccu

SEQ ID NO: 44201 - RNA, 22 nt, Human
agccagcaucccuucagucucc

SEQ ID NO: 44202 - RNA, 22 nt, Human
agccagcaugaagacagaggcc

SEQ ID NO: 44203 - RNA, 22 nt, Human
agccagccccugacuguguccu

SEQ ID NO: 44204 - RNA, 22 nt, Human
agccagcucccuccccugcagg

SEQ ID NO: 44205 - RNA, 22 nt, Human
agccagcuguacugccugcuca

SEQ ID NO: 44206 - RNA, 22 nt, Human
agccagcugugggcucaggcgg

SEQ ID NO: 44207 - RNA, 22 nt, Human
agccagcuguguggucaggcaa

SEQ ID NO: 44208 - RNA, 22 nt, Human
agccagcuucuuuacgguggca

SEQ ID NO: 44209 - RNA, 22 nt, Human
agccaggaaccagcuacagucu

SEQ ID NO: 44210 - RNA, 22 nt, Human
agccaggaagaaggucacacca

SEQ ID NO: 44211 - RNA, 22 nt, Human
agcagugaugcaugacagccua

SEQ ID NO: 44212 - RNA, 19 nt, Human
agcaguggagccaugccug

SEQ ID NO: 44213 - RNA, 22 nt, Human
agcaguggcugaagauguuccu

SEQ ID NO: 44214 - RNA, 22 nt, Human
agcaguguuuaggcauucagua

SEQ ID NO: 44215 - RNA, 22 nt, Human
agcaguguuuugauucugggag

SEQ ID NO: 44216 - RNA, 19 nt, Human
agcaguuauaugcauggga

SEQ ID NO: 44217 - RNA, 22 nt, Human
agcaguuauauuacucucaggu

SEQ ID NO: 44218 - RNA, 22 nt, Human
agcaguuauauugaaauaaaaa

SEQ ID NO: 44219 - RNA, 22 nt, Human
agcaguuaucgaagaaucaggu

SEQ ID NO: 44220 - RNA, 20 nt, Human
agcaguuuccuaacucagcu

SEQ ID NO: 44221 - RNA, 22 nt, Human
agcauacaguaggugcucaguu

SEQ ID NO: 44222 - RNA, 22 nt, Human
agcauacuugacacuucucuau

SEQ ID NO: 44223 - RNA, 22 nt, Human
agcauagaguccugagggcagg

SEQ ID NO: 44224 - RNA, 22 nt, Human
agcaucagcagacucucagcua

SEQ ID NO: 44225 - RNA, 22 nt, Human
agcaucagccucuguccuggag

SEQ ID NO: 44226 - RNA, 22 nt, Human
agcauccagaaaacucucagaa

SEQ ID NO: 44227 - RNA, 22 nt, Human
agcauccagaugccugauguca

SEQ ID NO: 44228 - RNA, 22 nt, Human
agcauccagcauccuauagaaa

SEQ ID NO: 44229 - RNA, 19 nt, Human
agcauccagucaugggauc

SEQ ID NO: 44230 - RNA, 22 nt, Human
agcaucccaugacucuggagga

SEQ ID NO: 44231 - RNA, 22 nt, Human
agcauccugcuugcugucugug

SEQ ID NO: 44232 - RNA, 22 nt, Human
agcaucuaaacuaucaguuuga

SEQ ID NO: 44233 - RNA, 21 nt, Human
agcaucugaggcaguuuccua

SEQ ID NO: 44234 - RNA, 22 nt, Human
agcaucugcauauugggagacc

SEQ ID NO: 44235 - RNA, 22 nt, Human
agcaucugcuuaauggcuuaac

SEQ ID NO: 44236 - RNA, 22 nt, Human
agcaucuggucaugagugagaa

SEQ ID NO: 44237 - RNA, 22 nt, Human
agcaucugugauauuuuguuau

SEQ ID NO: 44238 - RNA, 22 nt, Human
agcaucuugaaauauaaaguca

SEQ ID NO: 44239 - RNA, 22 nt, Human
agcaugaaagcauaggacaguc

SEQ ID NO: 44240 - RNA, 18 nt, Human
agcaugagucaggggugc

SEQ ID NO: 44241 - RNA, 22 nt, Human
agcaugcacaugacuggcuuaa

SEQ ID NO: 44242 - RNA, 22 nt, Human
agcaugcaggaaccacauggca

SEQ ID NO: 44243 - RNA, 22 nt, Human
agcaugcauuuuuggacugugc

SEQ ID NO: 44244 - RNA, 22 nt, Human
agcaugcugguuacguguagca

SEQ ID NO: 44245 - RNA, 22 nt, Human
agcauggacaguggcagcagug

SEQ ID NO: 44246 - RNA, 18 nt, Human
agcauggcacaggcuccc

SEQ ID NO: 44247 - RNA, 22 nt, Human
agcauggccucccgggccuggc

SEQ ID NO: 44248 - RNA, 22 nt, Human
agcauggggcaaugcaugugcu

SEQ ID NO: 44249 - RNA, 22 nt, Human
agcauguguggagaaauauuuu

SEQ ID NO: 44250 - RNA, 22 nt, Human
agcauuaagccuggcucagagg

SEQ ID NO: 44251 - RNA, 19 nt, Human
agcauuaggcaaauuuuga

SEQ ID NO: 44252 - RNA, 22 nt, Human
agcauucaugaugacaacagga

SEQ ID NO: 44253 - RNA, 22 nt, Human
agcauucucagaaugucauuuu

SEQ ID NO: 44254 - RNA, 21 nt, Human
agcauucugcuucuuuccugg

SEQ ID NO: 44255 - RNA, 22 nt, Human
agcauugaaccagauguuacau

SEQ ID NO: 44256 - RNA, 22 nt, Human
agcauugucuccaagcaggucu

SEQ ID NO: 44257 - RNA, 22 nt, Human
agcauuuaaggguggauacagg

SEQ ID NO: 44258 - RNA, 22 nt, Human
agcauuuaggagaauuugagaa

SEQ ID NO: 44259 - RNA, 22 nt, Human
agcauuuauagccccuaucauc

SEQ ID NO: 44260 - RNA, 22 nt, Human
agcauuuccgcccucuucugcc

SEQ ID NO: 44261 - RNA, 22 nt, Human
agcauuugaaaacuauuuaauu

SEQ ID NO: 44262 - RNA, 22 nt, Human
agcauuugauauguuuaaaaag

SEQ ID NO: 44263 - RNA, 22 nt, Human
agcagcucccuccucagccacc

SEQ ID NO: 44264 - RNA, 22 nt, Human
agcagcuccucuaggaacggau

SEQ ID NO: 44265 - RNA, 22 nt, Human
agcagcucggccagucaccagg

SEQ ID NO: 44266 - RNA, 22 nt, Human
agcagcucugagaggccagcac

SEQ ID NO: 44267 - RNA, 17 nt, Human
agcagcugaagcagcca

SEQ ID NO: 44268 - RNA, 22 nt, Human
agcagcugagaugguaagauuc

SEQ ID NO: 44269 - RNA, 22 nt, Human
agcagcugaucaaagcacuuau

SEQ ID NO: 44270 - RNA, 22 nt, Human
agcagcugcagagggcuccccc

SEQ ID NO: 44271 - RNA, 22 nt, Human
agcagcugccacuggaauagga

SEQ ID NO: 44272 - RNA, 22 nt, Human
agcagcuggaacuaauaguggu

SEQ ID NO: 44273 - RNA, 22 nt, Human
agcagcugucccuuaacaucag

SEQ ID NO: 44274 - RNA, 23 nt, Human
agcagcuguggaguuuugcauuu

SEQ ID NO: 44275 - RNA, 22 nt, Human
agcagcugugggcaauauguaa

SEQ ID NO: 44276 - RNA, 20 nt, Human
agcagcuguguuuucauccu

SEQ ID NO: 44277 - RNA, 22 nt, Human
agcagcuguuuguugaauuggu

SEQ ID NO: 44278 - RNA, 22 nt, Human
agcagcuuaucuuggagaggca

SEQ ID NO: 44279 - RNA, 22 nt, Human
agcagcuucuuucacuccugga

SEQ ID NO: 44280 - RNA, 22 nt, Human
agcagcuugaggcuggauucca

SEQ ID NO: 44281 - RNA, 22 nt, Human
agcagcuuggggccgagauaga

SEQ ID NO: 44282 - RNA, 22 nt, Human
agcagcuugggucucuccugcu

SEQ ID NO: 44283 - RNA, 22 nt, Human
agcagcuugguuuuaggcaugg

SEQ ID NO: 44284 - RNA, 22 nt, Human
agcagcuuuaagucacugguua

SEQ ID NO: 44285 - RNA, 22 nt, Human
agcagcuuuccucuggggucag

SEQ ID NO: 44286 - RNA, 22 nt, Human
agcaggaaggucugugugaguc

SEQ ID NO: 44287 - RNA, 22 nt, Human
agcaggaaguagucuguaagca

SEQ ID NO: 44288 - RNA, 22 nt, Human
agcaggaaguccucucaggaga

SEQ ID NO: 44289 - RNA, 20 nt, Human
agcaggaaugaugcuuucau

SEQ ID NO: 44290 - RNA, 22 nt, Human
agcaggagaacacuguggcucu

SEQ ID NO: 44291 - RNA, 22 nt, Human
agcaggagcauuuccaugauuc

SEQ ID NO: 44292 - RNA, 22 nt, Human
agcaggagcugugggaagaugg

SEQ ID NO: 44293 - RNA, 23 nt, Human
agcaggauaauuuuauuaugccc

SEQ ID NO: 44294 - RNA, 21 nt, Human
agcaggcaaaggugaagucuu

SEQ ID NO: 44295 - RNA, 22 nt, Human
agcaggcacaagaaagggaggu

SEQ ID NO: 44296 - RNA, 22 nt, Human
agcaggcagcugggggaguuga

SEQ ID NO: 44297 - RNA, 22 nt, Human
agcaggcaggaaggcagcacug

SEQ ID NO: 44298 - RNA, 22 nt, Human
agcaggcaggaaugguggaaca

SEQ ID NO: 44299 - RNA, 22 nt, Human
agcaggcaggaggcuacuaagg

SEQ ID NO: 44300 - RNA, 19 nt, Human
agcaggcagguggcccagg

SEQ ID NO: 44301 - RNA, 21 nt, Human
agcaggcagugggcuggauuu

SEQ ID NO: 44302 - RNA, 22 nt, Human
agcaggcuaagggaccuguuua

SEQ ID NO: 44303 - RNA, 22 nt, Human
agcaggcuaggaaccucacugc

SEQ ID NO: 44304 - RNA, 22 nt, Human
agcaggcuccaggcuggccauc

SEQ ID NO: 44305 - RNA, 17 nt, Human
agcaggcugcagaggcc

SEQ ID NO: 44306 - RNA, 20 nt, Human
agcaggcugcagggugaaau

SEQ ID NO: 44307 - RNA, 23 nt, Human
agcaggcugcuucuccacagcug

SEQ ID NO: 44308 - RNA, 22 nt, Human
agcaggcuuacuuucugauuag

SEQ ID NO: 44309 - RNA, 22 nt, Human
agcaggcuuaugguugaaggga

SEQ ID NO: 44310 - RNA, 22 nt, Human
agcaggcuugguccccagccuc

SEQ ID NO: 44311 - RNA, 22 nt, Human
agcagggaauagcggaaagaau

SEQ ID NO: 44312 - RNA, 22 nt, Human
agcagggagaccaucucuuccu

SEQ ID NO: 44313 - RNA, 22 nt, Human
agcagggcagcuuuuuucagaa

SEQ ID NO: 44314 - RNA, 22 nt, Human
agcagggcagugcuucagcucu

SEQ ID NO: 44315 - RNA, 22 nt, Human
agcagggcaguuaaaggguccu

SEQ ID NO: 44316 - RNA, 23 nt, Human
agcagggccagaauacuugcugu

SEQ ID NO: 44317 - RNA, 22 nt, Human
agcagggcuccugaaagccgcg

SEQ ID NO: 44318 - RNA, 22 nt, Human
agcagggcugcggccccaccac

SEQ ID NO: 44319 - RNA, 22 nt, Human
agcagggcuugccgcuuguccu

SEQ ID NO: 44320 - RNA, 22 nt, Human
agguccugggaguucuagugug

SEQ ID NO: 44321 - RNA, 22 nt, Human
agguccugucuaucacccucgc

SEQ ID NO: 44322 - RNA, 22 nt, Human
aggucuacaugcuuaauauauc

SEQ ID NO: 44323 - RNA, 22 nt, Human
aggucuagauuuauagacagca

SEQ ID NO: 44324 - RNA, 20 nt, Human
aggucucagagcaagagccc

SEQ ID NO: 44325 - RNA, 22 nt, Human
aggucuccuugugggucuugcc

SEQ ID NO: 44326 - RNA, 22 nt, Human
aggucugacucuuugccacaua

SEQ ID NO: 44327 - RNA, 22 nt, Human
aggucugagcaggggagaacag

SEQ ID NO: 44328 - RNA, 22 nt, Human
aggucugauuuuuuauucccag

SEQ ID NO: 44329 - RNA, 22 nt, Human
aggucugccucacucacuucug

SEQ ID NO: 44330 - RNA, 22 nt, Human
aggucuggaaacagcagggaga

SEQ ID NO: 44331 - RNA, 22 nt, Human
aggucuggaggcggagucagga

SEQ ID NO: 44332 - RNA, 22 nt, Human
aggucugggauugaagacauca

SEQ ID NO: 44333 - RNA, 22 nt, Human
aggucuggugagagcaggugcu

SEQ ID NO: 44334 - RNA, 22 nt, Human
aggucuggugggcuuuagauug

SEQ ID NO: 44335 - RNA, 22 nt, Human
aggucugucuggccccaugaau

SEQ ID NO: 44336 - RNA, 22 nt, Human
aggugaaguuaaaaaccagucu

SEQ ID NO: 44337 - RNA, 22 nt, Human
aggugacaggacaggagcuggu

SEQ ID NO: 44338 - RNA, 22 nt, Human
aggugacaucccggcagcagag

SEQ ID NO: 44339 - RNA, 19 nt, Human
aggugacaugugacagccu

SEQ ID NO: 44340 - RNA, 19 nt, Human
aggugaggggcaccauguc

SEQ ID NO: 44341 - RNA, 22 nt, Human
aggugagguuugggagguguca

SEQ ID NO: 44342 - RNA, 22 nt, Human
aggugauaaguguuaaauaaag

SEQ ID NO: 44343 - RNA, 22 nt, Human
aggugauguccacagcuugcag

SEQ ID NO: 44344 - RNA, 22 nt, Human
aggugcagaaaaaaguccuuua

SEQ ID NO: 44345 - RNA, 17 nt, Human
aggugcagaggcagagc

SEQ ID NO: 44346 - RNA, 22 nt, Human
aggugcagcugguggagucugg

SEQ ID NO: 44347 - RNA, 21 nt, Human
aggugcaggccucaagcccca

SEQ ID NO: 44348 - RNA, 22 nt, Human
aggugcaucucguagcucuucu

SEQ ID NO: 44349 - RNA, 22 nt, Human
aggugccaacaguauuucugcc

SEQ ID NO: 44350 - RNA, 22 nt, Human
aggugccaagaugucacagaca

SEQ ID NO: 44351 - RNA, 22 nt, Human
aggugccaauuuucagugaaca

SEQ ID NO: 44352 - RNA, 22 nt, Human
aggugccacucucaugggcuac

SEQ ID NO: 44353 - RNA, 22 nt, Human
aggugccaggagggaauuuagg

SEQ ID NO: 44354 - RNA, 22 nt, Human
aggugccagugcuguggucccc

SEQ ID NO: 44355 - RNA, 23 nt, Human
aggugcccagggcagguuuacug

SEQ ID NO: 44356 - RNA, 22 nt, Human
aggugcccaucaccucacaguc

SEQ ID NO: 44357 - RNA, 22 nt, Human
aggugccuuccgcggagcucgc

SEQ ID NO: 44358 - RNA, 18 nt, Human
aggugcucaaaugggaaa

SEQ ID NO: 44359 - RNA, 22 nt, Human
aggugcuggagucugggcagga

SEQ ID NO: 44360 - RNA, 22 nt, Human
aggugcuggcgccccaggagac

SEQ ID NO: 44361 - RNA, 19 nt, Human
aggugcuggugaggguguu

SEQ ID NO: 44362 - RNA, 22 nt, Human
aggugcugugcuaugcacuugu

SEQ ID NO: 44363 - RNA, 22 nt, Human
aggugcuguuugucagcaguuu

SEQ ID NO: 44364 - RNA, 22 nt, Human
agguggaaauggcuuuccuagg

SEQ ID NO: 44365 - RNA, 22 nt, Human
agguggaguuggcuguaguuca

SEQ ID NO: 44366 - RNA, 22 nt, Human
agguggcagagcuggcccagcg

SEQ ID NO: 44367 - RNA, 22 nt, Human
agguggcagcagaaucagggag

SEQ ID NO: 44368 - RNA, 22 nt, Human
agguggcagcagccuggugaaa

SEQ ID NO: 44369 - RNA, 22 nt, Human
agguggcagcaggagaugugga

SEQ ID NO: 44370 - RNA, 22 nt, Human
agguggcaugagacuguaccag

SEQ ID NO: 44371 - RNA, 22 nt, Human
agguggccaagacuguuugaca

SEQ ID NO: 44372 - RNA, 19 nt, Human
agguggccauguccagccu

SEQ ID NO: 44373 - RNA, 22 nt, Human
agguggccggugccagccgggc

SEQ ID NO: 44374 - RNA, 22 nt, Human
agguggcuguauucagcuguaa

SEQ ID NO: 44375 - RNA, 22 nt, Human
agguggcuguggcuucccuugu

SEQ ID NO: 44376 - RNA, 22 nt, Human
aggugggcaccaggcuuguggu

SEQ ID NO: 44377 - RNA, 22 nt, Human
aggugggcggauucaugagguc

SEQ ID NO: 44378 - RNA, 22 nt, Human
aggugggcuuggugccaacaug

SEQ ID NO: 44379 - RNA, 22 nt, Human
agguggggaaaccagcgauccc

SEQ ID NO: 44380 - RNA, 21 nt, Human
agguggggcugcaccucugcu

SEQ ID NO: 44381 - RNA, 19 nt, Human
agguggguaagcaguucuc

SEQ ID NO: 44382 - RNA, 22 nt, Human
aggugucugggcuuuggaguca

SEQ ID NO: 44383 - RNA, 22 nt, Human
aggugucugugaugggagcgau

SEQ ID NO: 44384 - RNA, 22 nt, Human
aggugucuucagggugagacag

SEQ ID NO: 44385 - RNA, 22 nt, Human
aggugucuuugcggcccgccgc

SEQ ID NO: 44386 - RNA, 22 nt, Human
agguguggcuggggcagaggcc

SEQ ID NO: 44387 - RNA, 18 nt, Human
agguguguuucuaggagc

SEQ ID NO: 44388 - RNA, 22 nt, Human
agguuaggaaauagggcuguaa

SEQ ID NO: 44389 - RNA, 22 nt, Human
agguuaggaagauacagaaugu

SEQ ID NO: 44390 - RNA, 22 nt, Human
agguuauaugacugucaugccu

SEQ ID NO: 44391 - RNA, 22 nt, Human
agguuauaugucauacugaagu

SEQ ID NO: 44392 - RNA, 22 nt, Human
agguuauucucuaucucauccc

SEQ ID NO: 44393 - RNA, 22 nt, Human
agguucagaguuguugauguuu

SEQ ID NO: 44394 - RNA, 22 nt, Human
agguucaggcacuugcccaaca

SEQ ID NO: 44395 - RNA, 22 nt, Human
agcuccaggauaagacaggugc

SEQ ID NO: 44396 - RNA, 22 nt, Human
agcuccaggcagcauuaauaaa

SEQ ID NO: 44397 - RNA, 22 nt, Human
agcuccaggccuugggccccgg

SEQ ID NO: 44398 - RNA, 22 nt, Human
agcuccagggaaagaguggauc

SEQ ID NO: 44399 - RNA, 22 nt, Human
agcuccaggucagugcaccccu

SEQ ID NO: 44400 - RNA, 20 nt, Human
agcuccaugaaguagucacu

SEQ ID NO: 44401 - RNA, 22 nt, Human
agcucccagaagccagagucgg

SEQ ID NO: 44402 - RNA, 22 nt, Human
agcucccagcagagcuggccac

SEQ ID NO: 44403 - RNA, 22 nt, Human
agcucccagggcugggcaaguu

SEQ ID NO: 44404 - RNA, 22 nt, Human
agcucccauuaucuucugaaac

SEQ ID NO: 44405 - RNA, 22 nt, Human
agcuccccucguuucucuccau

SEQ ID NO: 44406 - RNA, 22 nt, Human
agcuccugcagacuccugcuca

SEQ ID NO: 44407 - RNA, 22 nt, Human
agcuccugccaacacugauggg

SEQ ID NO: 44408 - RNA, 22 nt, Human
agcuccugcgcacggugcacac

SEQ ID NO: 44409 - RNA, 22 nt, Human
agcuccugggagcaggugguac

SEQ ID NO: 44410 - RNA, 22 nt, Human
agcuccuguggcagcucuucug

SEQ ID NO: 44411 - RNA, 22 nt, Human
agcuccuguggcugaaagagga

SEQ ID NO: 44412 - RNA, 22 nt, Human
agcucuagggaagaaaggcaca

SEQ ID NO: 44413 - RNA, 22 nt, Human
agcucucaagauaagaaagaac

SEQ ID NO: 44414 - RNA, 22 nt, Human
agcucugacauugauucucagc

SEQ ID NO: 44415 - RNA, 22 nt, Human
agcucugacugaagagaugcaa

SEQ ID NO: 44416 - RNA, 22 nt, Human
agcucugagaaaguuagaaagu

SEQ ID NO: 44417 - RNA, 22 nt, Human
agcucugcuacucuguggggug

SEQ ID NO: 44418 - RNA, 22 nt, Human
agcucuggaacucccggcugcu

SEQ ID NO: 44419 - RNA, 21 nt, Human
agcucuggagcagcaaucaag

SEQ ID NO: 44420 - RNA, 22 nt, Human
agcucuggcuaagcugauaaau

SEQ ID NO: 44421 - RNA, 22 nt, Human
agcucugggggaaagucugcuc

SEQ ID NO: 44422 - RNA, 22 nt, Human
agcucugggucacggcugccga

SEQ ID NO: 44423 - RNA, 22 nt, Human
agcucugugaagccagcaguuc

SEQ ID NO: 44424 - RNA, 22 nt, Human
agcucuuuagagucucccuucu

SEQ ID NO: 44425 - RNA, 22 nt, Human
agcucuuugacuaaucuugcuu

SEQ ID NO: 44426 - RNA, 22 nt, Human
agcucuuuggaaggugugcacu

SEQ ID NO: 44427 - RNA, 22 nt, Human
agcucuuuggcacugagcagca

SEQ ID NO: 44428 - RNA, 22 nt, Human
agcucuuuugcucuccaaguuu

SEQ ID NO: 44429 - RNA, 22 nt, Human
agcccuucaagagcucuguccu

SEQ ID NO: 44430 - RNA, 23 nt, Human
agcccuugauaauaaagcaccag

SEQ ID NO: 44431 - RNA, 22 nt, Human
agccgcaagaaguacagcagca

SEQ ID NO: 44432 - RNA, 17 nt, Human
agccgggcauggaccag

SEQ ID NO: 44433 - RNA, 22 nt, Human
agccuacagagggcagguggag

SEQ ID NO: 44434 - RNA, 22 nt, Human
agccuagcugugugaggccauc

SEQ ID NO: 44435 - RNA, 23 nt, Human
agccucagccgguggcagaagug

SEQ ID NO: 44436 - RNA, 22 nt, Human
agccuccacagaugcaaagggc

SEQ ID NO: 44437 - RNA, 22 nt, Human
agccuccaguagcugaagagac

SEQ ID NO: 44438 - RNA, 22 nt, Human
agccuccuguagcccucaccca

SEQ ID NO: 44439 - RNA, 22 nt, Human
agccucucuccagcuuggcaga

SEQ ID NO: 44440 - RNA, 22 nt, Human
agccucucuuuauucccagcua

SEQ ID NO: 44441 - RNA, 22 nt, Human
agccucucuuucugguggcuaa

SEQ ID NO: 44442 - RNA, 22 nt, Human
agccucugcacuucuuacaggu

SEQ ID NO: 44443 - RNA, 20 nt, Human
agccucugcccuucccacug

SEQ ID NO: 44444 - RNA, 22 nt, Human
agccucugcuggcccuggcacu

SEQ ID NO: 44445 - RNA, 22 nt, Human
agccucugcuuaugcaaaggua

SEQ ID NO: 44446 - RNA, 22 nt, Human
agccucuguagaaagcagugug

SEQ ID NO: 44447 - RNA, 22 nt, Human
agccucuuccagcuccuuucua

SEQ ID NO: 44448 - RNA, 23 nt, Human
agccucuuguggauggucagcga

SEQ ID NO: 44449 - RNA, 22 nt, Human
agccugagccccauccagcuga

SEQ ID NO: 44450 - RNA, 22 nt, Human
agccugagugcuuaggacuguu

SEQ ID NO: 44451 - RNA, 21 nt, Human
agccugcaauguagguaccgg

SEQ ID NO: 44452 - RNA, 20 nt, Human
agccugccagcuggcccaga

SEQ ID NO: 44453 - RNA, 22 nt, Human
agccugcuggaccaagcucaug

SEQ ID NO: 44454 - RNA, 22 nt, Human
agccugcuucccuuugugcccc

SEQ ID NO: 44455 - RNA, 22 nt, Human
agccugcuugagaguccuggcu

SEQ ID NO: 44456 - RNA, 22 nt, Human
agccuggaauuaaggaaaugca

SEQ ID NO: 44457 - RNA, 22 nt, Human
agccuggaccaggggccucaga

SEQ ID NO: 44458 - RNA, 22 nt, Human
agccuggauccauguggcuacc

SEQ ID NO: 44459 - RNA, 22 nt, Human
agccuggcacugaggcagggcg

SEQ ID NO: 44460 - RNA, 22 nt, Human
agccuggcuaaauucucccaug

SEQ ID NO: 44461 - RNA, 22 nt, Human
agccugggaauuuagaguucgg

SEQ ID NO: 44462 - RNA, 21 nt, Human
agccugggaggcggagguugc

SEQ ID NO: 44463 - RNA, 22 nt, Human
agccugggccuggcuucccgcc

SEQ ID NO: 44464 - RNA, 18 nt, Human
agccugggcucugccugg

SEQ ID NO: 44465 - RNA, 20 nt, Human
agccuggggaauuccacccc

SEQ ID NO: 44466 - RNA, 22 nt, Human
agccugggguuucaguuugcac

SEQ ID NO: 44467 - RNA, 21 nt, Human
agccuggguauccuuugagga

SEQ ID NO: 44468 - RNA, 22 nt, Human
agccuggguuaggguucuuccc

SEQ ID NO: 44469 - RNA, 22 nt, Human
agccugugagggaugcugcagu

SEQ ID NO: 44470 - RNA, 22 nt, Human
agccugugugaagcccucagag

SEQ ID NO: 44471 - RNA, 22 nt, Human
agccugugugcuuuggacaggg

SEQ ID NO: 44472 - RNA, 21 nt, Human
agccuguugguuuacugcuca

SEQ ID NO: 44473 - RNA, 22 nt, Human
agccuuaaaugcuagauucaua

SEQ ID NO: 44474 - RNA, 22 nt, Human
agccuuagaggaaaacauuagu

SEQ ID NO: 44475 - RNA, 22 nt, Human
agccuuagauuugggcaagaac

SEQ ID NO: 44476 - RNA, 16 nt, Human
agccuuaggaacagcc

SEQ ID NO: 44477 - RNA, 22 nt, Human
agccuucagcaguucaggugcc

SEQ ID NO: 44478 - RNA, 22 nt, Human
agccuucauaaucuugggcuuu

SEQ ID NO: 44479 - RNA, 22 nt, Human
agccuugaacacugacugaagg

SEQ ID NO: 44480 - RNA, 22 nt, Human
agccuugagcaguucacuuggu

SEQ ID NO: 44481 - RNA, 22 nt, Human
agccuuggccguaagguaugcu

SEQ ID NO: 44482 - RNA, 21 nt, Human
agcgccugcaacaaggcagau

SEQ ID NO: 44483 - RNA, 22 nt, Human
agcgcuggcuggcgcuccuucc

SEQ ID NO: 44484 - RNA, 22 nt, Human
agcggcgccgagcuuggccagg

SEQ ID NO: 44485 - RNA, 22 nt, Human
agcggcgccggagggaggugcg

SEQ ID NO: 44486 - RNA, 22 nt, Human
agcggcugcuccgcaggcuggc

SEQ ID NO: 44487 - RNA, 22 nt, Human
agcggcuggaccagcguucaag

SEQ ID NO: 44488 - RNA, 22 nt, Human
agcgggcucaaguggccagcag

SEQ ID NO: 44489 - RNA, 22 nt, Human
agcgggcucacccgguuguugu

SEQ ID NO: 44490 - RNA, 22 nt, Human
agcgugaaggcgggcagucggc

SEQ ID NO: 44491 - RNA, 22 nt, Human
agcguggacugcugggcaaggu

SEQ ID NO: 44492 - RNA, 22 nt, Human
agcgugugccucgggguacacg

SEQ ID NO: 44493 - RNA, 22 nt, Human
agcuaaacuagguaaacagcag

SEQ ID NO: 44494 - RNA, 22 nt, Human
agcuaaaugcauuucaagacug

SEQ ID NO: 44495 - RNA, 22 nt, Human
agcuaaaugugaaaugucaacc

SEQ ID NO: 44496 - RNA, 22 nt, Human
agcuaagcucucagauacuaag

SEQ ID NO: 44497 - RNA, 22 nt, Human
agcuaaggaaucagaagagguu

SEQ ID NO: 44498 - RNA, 22 nt, Human
agcuaaggagcaaguaggaguu

SEQ ID NO: 44499 - RNA, 22 nt, Human
agcuaaugauacaugcuccaca

SEQ ID NO: 44500 - RNA, 22 nt, Human
agcuaaugaugagauacagaua

SEQ ID NO: 44501 - RNA, 23 nt, Human
agcuaaugggacagauuccaugg

SEQ ID NO: 44502 - RNA, 22 nt, Human
agcuacaagucaucagcuauca

SEQ ID NO: 44503 - RNA, 19 nt, Human
agcuacagcauggcgaggu

SEQ ID NO: 44504 - RNA, 22 nt, Human
agcuacaguggacaagugaacu

SEQ ID NO: 44505 - RNA, 22 nt, Human
agcuacaguugcccucagcagg

SEQ ID NO: 44506 - RNA, 22 nt, Human
agcuacuggagaacacaaaacc

SEQ ID NO: 44507 - RNA, 22 nt, Human
agcuagacuuucccuuuccaug

SEQ ID NO: 44508 - RNA, 22 nt, Human
agcuagccauguggcuccugug

SEQ ID NO: 44509 - RNA, 22 nt, Human
agcuaggagauuuugugaggcu

SEQ ID NO: 44510 - RNA, 22 nt, Human
agcuaggauaagcagagacugg

SEQ ID NO: 44511 - RNA, 22 nt, Human
agcuaguauuucauugaggauu

SEQ ID NO: 44512 - RNA, 22 nt, Human
agucagaauucgaucccagguc

SEQ ID NO: 44513 - RNA, 22 nt, Human
agucagacauaauucuaacauu

SEQ ID NO: 44514 - RNA, 23 nt, Human
agucagagcagaagggcugcuug

SEQ ID NO: 44515 - RNA, 17 nt, Human
agucagaggaguaucug

SEQ ID NO: 44516 - RNA, 22 nt, Human
agucagaguucuuggggagaca

SEQ ID NO: 44517 - RNA, 22 nt, Human
agucagaugaugugaggagugg

SEQ ID NO: 44518 - RNA, 22 nt, Human
agucagcaucugcacugugcug

SEQ ID NO: 44519 - RNA, 22 nt, Human
agucagcuacaaguucauucac

SEQ ID NO: 44520 - RNA, 22 nt, Human
agucaggaagcuggagcugggg

SEQ ID NO: 44521 - RNA, 22 nt, Human
agucaggacacagcaugaacau

SEQ ID NO: 44522 - RNA, 22 nt, Human
agucaggacagauuuucugggg

SEQ ID NO: 44523 - RNA, 22 nt, Human
agucaggauuuaaacucagaca

SEQ ID NO: 44524 - RNA, 22 nt, Human
agucaggauuuuggauuauucg

SEQ ID NO: 44525 - RNA, 22 nt, Human
agucaggcagcugagcuuuaug

SEQ ID NO: 44526 - RNA, 22 nt, Human
agucagucaaaauauaaauugu

SEQ ID NO: 44527 - RNA, 23 nt, Human
agucaguguaaguuuggaaugca

SEQ ID NO: 44528 - RNA, 22 nt, Human
agucaguguagaaagcccaggc

SEQ ID NO: 44529 - RNA, 22 nt, Human
agucaguguucuccggagaggc

SEQ ID NO: 44530 - RNA, 18 nt, Human
agucaguugauggggacc

SEQ ID NO: 44531 - RNA, 22 nt, Human
agucaguuuuaccaaucucagu

SEQ ID NO: 44532 - RNA, 22 nt, Human
agucauauauuuuguuugugca

SEQ ID NO: 44533 - RNA, 22 nt, Human
agucaucaccaguacagugugc

SEQ ID NO: 44534 - RNA, 22 nt, Human
agucaucucagguagcauuuac

SEQ ID NO: 44535 - RNA, 22 nt, Human
agucaucugaccucuucucaga

SEQ ID NO: 44536 - RNA, 22 nt, Human
agucaucugguuuugcauggca

SEQ ID NO: 44537 - RNA, 22 nt, Human
agucauuaagacaacuggagua

SEQ ID NO: 44538 - RNA, 22 nt, Human
cugaaguuaguuaugccuaaaa

SEQ ID NO: 44539 - RNA, 22 nt, Human
cugaaguucgccagacucgggc

SEQ ID NO: 44540 - RNA, 22 nt, Human
cugaaguucuacaagccucagg

SEQ ID NO: 44541 - RNA, 22 nt, Human
cugaaguuuaugcuuuucgggu

SEQ ID NO: 44542 - RNA, 22 nt, Human
cugaauccacacaaggugaugg

SEQ ID NO: 44543 - RNA, 22 nt, Human
cugaaugaaaucaaggacugag

SEQ ID NO: 44544 - RNA, 22 nt, Human
cugaaugacugaagucacaauu

SEQ ID NO: 44545 - RNA, 22 nt, Human
cugaaugagggauucugagggc

SEQ ID NO: 44546 - RNA, 22 nt, Human
cugaaugauaaucuuuugcugg

SEQ ID NO: 44547 - RNA, 22 nt, Human
cugaaugauauaagaucuuucu

SEQ ID NO: 44548 - RNA, 22 nt, Human
cugacagauacuuaugacauaa

SEQ ID NO: 44549 - RNA, 22 nt, Human
cugacagaucuggaucugaacu

SEQ ID NO: 44550 - RNA, 22 nt, Human
cugacagcucuggcuaguagaa

SEQ ID NO: 44551 - RNA, 22 nt, Human
cugacaggguagacagagggca

SEQ ID NO: 44552 - RNA, 22 nt, Human
cugacagguugguagcuuugga

SEQ ID NO: 44553 - RNA, 22 nt, Human
cugaccagaccccaggaggcug

SEQ ID NO: 44554 - RNA, 22 nt, Human
cugaccaggguagaggugagag

SEQ ID NO: 44555 - RNA, 22 nt, Human
cugaccaguccuuagcaccugg

SEQ ID NO: 44556 - RNA, 22 nt, Human
cugaccaucauggugaaacccc

SEQ ID NO: 44557 - RNA, 22 nt, Human
cugacccagaggaacugcaaag

SEQ ID NO: 44558 - RNA, 19 nt, Human
cugacccaggacaccacgg

SEQ ID NO: 44559 - RNA, 18 nt, Human
cugacccuggcucugggu

SEQ ID NO: 44560 - RNA, 22 nt, Human
cugacccuuuaggguauguuua

SEQ ID NO: 44561 - RNA, 22 nt, Human
cugaccugcuaagccccugucc

SEQ ID NO: 44562 - RNA, 22 nt, Human
cugacucccaaagaggacgcgu

SEQ ID NO: 44563 - RNA, 22 nt, Human
cugacucccugauucuggguuu

SEQ ID NO: 44564 - RNA, 18 nt, Human
cugacuccuuugcugcca

SEQ ID NO: 44565 - RNA, 22 nt, Human
cugacucuccucaagcauaaau

SEQ ID NO: 44566 - RNA, 22 nt, Human
cugacuguaauucuguucuuaa

SEQ ID NO: 44567 - RNA, 22 nt, Human
cugacuucagggauaaaaagua

SEQ ID NO: 44568 - RNA, 22 nt, Human
cugacuuugcucauaggucaaa

SEQ ID NO: 44569 - RNA, 22 nt, Human
cugagaaaauuucaggaagugu

SEQ ID NO: 44570 - RNA, 22 nt, Human
cugagaaagugaggguuaaaca

SEQ ID NO: 44571 - RNA, 22 nt, Human
cugagaagaggguauguggcgc

SEQ ID NO: 44572 - RNA, 19 nt, Human
cugagaauccuacuuauuu

SEQ ID NO: 44573 - RNA, 22 nt, Human
cugagacacaguggcugaaaag

SEQ ID NO: 44574 - RNA, 22 nt, Human
cugagacuguaccacuuccucc

SEQ ID NO: 44575 - RNA, 22 nt, Human
cugagagaaacaugacucagga

SEQ ID NO: 44576 - RNA, 22 nt, Human
cugagagaaucaugcugcaggu

SEQ ID NO: 44577 - RNA, 22 nt, Human
cugagagcaucgcuggagauag

SEQ ID NO: 44578 - RNA, 22 nt, Human
cugagagccuccuguuggcuag

SEQ ID NO: 44579 - RNA, 22 nt, Human
cugagaggcacaaggcauuucg

SEQ ID NO: 44580 - RNA, 22 nt, Human
cugagaggcggagguugcagug

SEQ ID NO: 44581 - RNA, 22 nt, Human
cugagcuguggaauaaacacug

SEQ ID NO: 44582 - RNA, 22 nt, Human
cugagcugugugguccugggca

SEQ ID NO: 44583 - RNA, 22 nt, Human
cugagcuuaacccuguuagcaa

SEQ ID NO: 44584 - RNA, 22 nt, Human
cugagcuuccaguuccuccagg

SEQ ID NO: 44585 - RNA, 22 nt, Human
cugaggaaagcugcagcgguac

SEQ ID NO: 44586 - RNA, 22 nt, Human
cugaggaaaguauugccuggug

SEQ ID NO: 44587 - RNA, 22 nt, Human
cugaggagcguuggucacgugu

SEQ ID NO: 44588 - RNA, 22 nt, Human
cugaggagcugaaggcccucca

SEQ ID NO: 44589 - RNA, 22 nt, Human
cugaggagucaguuccacucag

SEQ ID NO: 44590 - RNA, 22 nt, Human
cugaggagugggugggcaguga

SEQ ID NO: 44591 - RNA, 22 nt, Human
cugaggaguuucuuauaugugu

SEQ ID NO: 44592 - RNA, 17 nt, Human
cugaggauuaugguugu

SEQ ID NO: 44593 - RNA, 22 nt, Human
cugaggcacagugaacuucucc

SEQ ID NO: 44594 - RNA, 22 nt, Human
cugaggcaccggcaauguucug

SEQ ID NO: 44595 - RNA, 22 nt, Human
cugaggcaggggcagcuggaga

SEQ ID NO: 44596 - RNA, 22 nt, Human
cugaggcaugaaugugggcuuu

SEQ ID NO: 44597 - RNA, 18 nt, Human
cugaggccaacuacacug

SEQ ID NO: 44598 - RNA, 22 nt, Human
cugaggccagagugggccucuu

SEQ ID NO: 44599 - RNA, 22 nt, Human
cugaggccucacuguagucccu

SEQ ID NO: 44600 - RNA, 22 nt, Human
cugaggccucuccuuggcuugu

SEQ ID NO: 44601 - RNA, 22 nt, Human
cugaggccucucuccuuggcuu

SEQ ID NO: 44602 - RNA, 23 nt, Human
cugaggccugcugcguucagguu

SEQ ID NO: 44603 - RNA, 22 nt, Human
cugaggccuguguuggggcagu

SEQ ID NO: 44604 - RNA, 18 nt, Human
cugaggcuggcaggagcc

SEQ ID NO: 44605 - RNA, 22 nt, Human
cugaggcugggcauggggucca

SEQ ID NO: 44606 - RNA, 22 nt, Human
cugaggcugggcugaggguaua

SEQ ID NO: 44607 - RNA, 22 nt, Human
cugaggcuuguccucucagcuu

SEQ ID NO: 44608 - RNA, 22 nt, Human
cugagggacccugugaguaccu

SEQ ID NO: 44609 - RNA, 22 nt, Human
cugagggagacagugcggacua

SEQ ID NO: 44610 - RNA, 22 nt, Human
cugagggagagaauggggcaaa

SEQ ID NO: 44611 - RNA, 22 nt, Human
cugagggauguggauuuugguc

SEQ ID NO: 44612 - RNA, 22 nt, Human
cugagggccgggacccaguuuc

SEQ ID NO: 44613 - RNA, 22 nt, Human
cugagggccugaggaccuagau

SEQ ID NO: 44614 - RNA, 22 nt, Human
cugagggccuuggcuccugccc

SEQ ID NO: 44615 - RNA, 22 nt, Human
cugagggcuuccuugucccggg

SEQ ID NO: 44616 - RNA, 22 nt, Human
cugagggucaacuugauuguau

SEQ ID NO: 44617 - RNA, 22 nt, Human
cugagguaauuuuccagauaau

SEQ ID NO: 44618 - RNA, 22 nt, Human
cugagguaccuggagcaggucc

SEQ ID NO: 44619 - RNA, 22 nt, Human
cugagguacgcuggcucccugg

SEQ ID NO: 44620 - RNA, 22 nt, Human
cugagguagccauggcccaagu

SEQ ID NO: 44621 - RNA, 22 nt, Human
cugagguagcugugaauguucu

SEQ ID NO: 44622 - RNA, 22 nt, Human
cugagguagucauuuucuacuc

SEQ ID NO: 44623 - RNA, 22 nt, Human
cugagguaugugggacuagccu

SEQ ID NO: 44624 - RNA, 22 nt, Human
cugagguauugaaguaucuucu

SEQ ID NO: 44625 - RNA, 22 nt, Human
cugagguccucagagggaaagg

SEQ ID NO: 44626 - RNA, 19 nt, Human
cugaggugaggggcaucau

SEQ ID NO: 44627 - RNA, 22 nt, Human
cugaggugaugucaaauggguu

SEQ ID NO: 44628 - RNA, 22 nt, Human
cugaggugcuauggaggauacg

SEQ ID NO: 44629 - RNA, 23 nt, Human
cugagguggagagugagguaagu

SEQ ID NO: 44630 - RNA, 22 nt, Human
cugagguggcgccucucuuuaa

SEQ ID NO: 44631 - RNA, 22 nt, Human
cugaggugggaguuuuucucau

SEQ ID NO: 44632 - RNA, 22 nt, Human
cugaggugugagccacuucccc

SEQ ID NO: 44633 - RNA, 22 nt, Human
cugagguguggucugggaguau

SEQ ID NO: 44634 - RNA, 22 nt, Human
cugaguaagauacagaagcucc

SEQ ID NO: 44635 - RNA, 22 nt, Human
cugaguccagggacagaggcgu

SEQ ID NO: 44636 - RNA, 22 nt, Human
cugagugaggggagcuugaugg

SEQ ID NO: 44637 - RNA, 18 nt, Human
cugagugaugauggggug

SEQ ID NO: 44638 - RNA, 22 nt, Human
cugaguguuuucagccacggcc

SEQ ID NO: 44639 - RNA, 22 nt, Human
cugauaauuugcugacuuucag

SEQ ID NO: 44640 - RNA, 22 nt, Human
cugauagacaaucaccauggga

SEQ ID NO: 44641 - RNA, 22 nt, Human
cugaucccauuggcaguccagu

SEQ ID NO: 44642 - RNA, 22 nt, Human
cugaugaccuuggcaagucaca

SEQ ID NO: 44643 - RNA, 22 nt, Human
cugaugagcccaggugaccaug

SEQ ID NO: 44644 - RNA, 22 nt, Human
cugaugcuauaagccacagugg

SEQ ID NO: 44645 - RNA, 22 nt, Human
cugauggagugauggagaaauu

SEQ ID NO: 44646 - RNA, 22 nt, Human
cugauguuucuagaugcuugcc

SEQ ID NO: 44647 - RNA, 22 nt, Human
cugccugggccggccacccucu

SEQ ID NO: 44648 - RNA, 22 nt, Human
cugccuguauugucugcuuggg

SEQ ID NO: 44649 - RNA, 22 nt, Human
cugccugugaacauacuggggg

SEQ ID NO: 44650 - RNA, 22 nt, Human
cugccugugccaaugcuccuuu

SEQ ID NO: 44651 - RNA, 22 nt, Human
cugccugugccaccgccucauu

SEQ ID NO: 44652 - RNA, 22 nt, Human
cugccuguggguacaaguggaa

SEQ ID NO: 44653 - RNA, 22 nt, Human
cugccugugucuauuccuuuuu

SEQ ID NO: 44654 - RNA, 22 nt, Human
cugccuuccaaccccagacucc

SEQ ID NO: 44655 - RNA, 21 nt, Human
cugccuugaaugguacuggga

SEQ ID NO: 44656 - RNA, 22 nt, Human
cugccuuggaaaaugugguaau

SEQ ID NO: 44657 - RNA, 22 nt, Human
cugccuugguucccagccagca

SEQ ID NO: 44658 - RNA, 22 nt, Human
cugccuuuucaucugagcugga

SEQ ID NO: 44659 - RNA, 22 nt, Human
cugcgggcugucaggcgugcca

SEQ ID NO: 44660 - RNA, 22 nt, Human
cugcgugcauuaauauuuccuu

SEQ ID NO: 44661 - RNA, 22 nt, Human
cugcgugucuccuuggggcaga

SEQ ID NO: 44662 - RNA, 22 nt, Human
cugcguguuugcacccugucug

SEQ ID NO: 44663 - RNA, 22 nt, Human
cugcuagaauuucuggaaaaga

SEQ ID NO: 44664 - RNA, 20 nt, Human
cugcucagaccaacucuucu

SEQ ID NO: 44665 - RNA, 22 nt, Human
cugcucagcggaaggaagagcg

SEQ ID NO: 44666 - RNA, 22 nt, Human
cugcucaguaauaguccuaucu

SEQ ID NO: 44667 - RNA, 20 nt, Human
cugcuccacccggcucucag

SEQ ID NO: 44668 - RNA, 23 nt, Human
cugcuccaggacagcauggaggu

SEQ ID NO: 44669 - RNA, 19 nt, Human
cugcuccaggagcugggga

SEQ ID NO: 44670 - RNA, 22 nt, Human
cugcucuaagcugguggagagu

SEQ ID NO: 44671 - RNA, 22 nt, Human
cugcucuaggggcagggcccuu

SEQ ID NO: 44672 - RNA, 22 nt, Human
cugcucuccccaggccagucug

SEQ ID NO: 44673 - RNA, 22 nt, Human
cugcucugcagcuuggacuccc

SEQ ID NO: 44674 - RNA, 22 nt, Human
cugcucuggcguacucggcauc

SEQ ID NO: 44675 - RNA, 22 nt, Human
cugcucuggggaagccagaugu

SEQ ID NO: 44676 - RNA, 21 nt, Human
cugcucuggggaccggcugug

SEQ ID NO: 44677 - RNA, 22 nt, Human
cugcucugugcacuuguucagg

SEQ ID NO: 44678 - RNA, 22 nt, Human
cugcucuugagggacugcgguc

SEQ ID NO: 44679 - RNA, 22 nt, Human
cugcugaaaacaauaaugauga

SEQ ID NO: 44680 - RNA, 22 nt, Human
cugcugaaccuuugcuagauaa

SEQ ID NO: 44681 - RNA, 22 nt, Human
cugcugaaugucucuuugguuu

SEQ ID NO: 44682 - RNA, 22 nt, Human
cugcugacucauuuucaacacu

SEQ ID NO: 44683 - RNA, 22 nt, Human
cugcugacucuuccuggaguga

SEQ ID NO: 44684 - RNA, 20 nt, Human
cugcugagagccuggcuugc

SEQ ID NO: 44685 - RNA, 22 nt, Human
cugcugagcauuugcagggaca

SEQ ID NO: 44686 - RNA, 22 nt, Human
cugcugagccgcacccaggagc

SEQ ID NO: 44687 - RNA, 22 nt, Human
cugcugagccuggugcgggaug

SEQ ID NO: 44688 - RNA, 22 nt, Human
cugcugaggcuccggaccaagu

SEQ ID NO: 44689 - RNA, 22 nt, Human
cugcugaucagggcaaagcaaa

SEQ ID NO: 44690 - RNA, 22 nt, Human
cugcugaugaccucaaacucuu

SEQ ID NO: 44691 - RNA, 22 nt, Human
cugcugauguaagccaugcucu

SEQ ID NO: 44692 - RNA, 22 nt, Human
cugcugcauuacucuucucaag

SEQ ID NO: 44693 - RNA, 22 nt, Human
cugcugcauuccucuuuaugag

SEQ ID NO: 44694 - RNA, 22 nt, Human
cugcugccaagggugccacagg

SEQ ID NO: 44695 - RNA, 22 nt, Human
cugcugccauuagggcacagac

SEQ ID NO: 44696 - RNA, 22 nt, Human
cugagaguagcuggagaacauu

SEQ ID NO: 44697 - RNA, 22 nt, Human
cugagagucagcuucuccuccu

SEQ ID NO: 44698 - RNA, 22 nt, Human
cugagaguuaagagauggggcu

SEQ ID NO: 44699 - RNA, 22 nt, Human
cugagauggaguuuugcucuug

SEQ ID NO: 44700 - RNA, 22 nt, Human
cugagauggccacugggucuca

SEQ ID NO: 44701 - RNA, 22 nt, Human
cugagcacagaaauaagauauu

SEQ ID NO: 44702 - RNA, 22 nt, Human
cugagcagaccauggcagaggu

SEQ ID NO: 44703 - RNA, 22 nt, Human
cugagcagcaccuucaagaaac

SEQ ID NO: 44704 - RNA, 22 nt, Human
cugagcagcagggagacuggug

SEQ ID NO: 44705 - RNA, 22 nt, Human
cugagcagcuguuacagagugu

SEQ ID NO: 44706 - RNA, 22 nt, Human
cugagcaggcgguggagcggcu

SEQ ID NO: 44707 - RNA, 22 nt, Human
cugagccaaaaagcagagcuug

SEQ ID NO: 44708 - RNA, 22 nt, Human
cugagccaaggggacagugaca

SEQ ID NO: 44709 - RNA, 22 nt, Human
cugagcccaggcgggagcugag

SEQ ID NO: 44710 - RNA, 20 nt, Human
cugagcccccagccugcagg

SEQ ID NO: 44711 - RNA, 17 nt, Human
cugagccccgggcagcu

SEQ ID NO: 44712 - RNA, 22 nt, Human
cugagcccgggugcucuacccc

SEQ ID NO: 44713 - RNA, 22 nt, Human
cugagcccuccugcuugcugag

SEQ ID NO: 44714 - RNA, 20 nt, Human
cugagcccuuccugugaacc

SEQ ID NO: 44715 - RNA, 22 nt, Human
cugagcccuugaacccaagucc

SEQ ID NO: 44716 - RNA, 22 nt, Human
cugagcccuugcuuaugcuucc

SEQ ID NO: 44717 - RNA, 22 nt, Human
cugagccuugaugucccuuguc

SEQ ID NO: 44718 - RNA, 22 nt, Human
cugagcgacaaguagcuuuuga

SEQ ID NO: 44719 - RNA, 22 nt, Human
cugagcgcgggaccugaggcug

SEQ ID NO: 44720 - RNA, 20 nt, Human
cugagcgucuaagaggugag

SEQ ID NO: 44721 - RNA, 22 nt, Human
cugagcuaggaguuaggaagcu

SEQ ID NO: 44722 - RNA, 22 nt, Human
cugagcugagccaaaucugucu

SEQ ID NO: 44723 - RNA, 22 nt, Human
cugagcugggaguagagacucu

SEQ ID NO: 44724 - RNA, 22 nt, Human
cugagcugggaguggauagugg

SEQ ID NO: 44725 - RNA, 22 nt, Human
cugagcuguggccaccaauuua

SEQ ID NO: 44726 - RNA, 22 nt, Human
cugagcuguuacucuguccucg

SEQ ID NO: 44727 - RNA, 22 nt, Human
cugagcuuggccaggaaugaau

SEQ ID NO: 44728 - RNA, 22 nt, Human
cugaggaaggaguuaggcaguu

SEQ ID NO: 44729 - RNA, 22 nt, Human
cugaggaccccacaggaggccc

SEQ ID NO: 44730 - RNA, 22 nt, Human
cugaggagaaagaugguccaag

SEQ ID NO: 44731 - RNA, 17 nt, Human
cugaggagaacagaaag

SEQ ID NO: 44732 - RNA, 22 nt, Human
cugaggagaccaucaacuaauu

SEQ ID NO: 44733 - RNA, 22 nt, Human
cugaggagaugauaaugucauu

SEQ ID NO: 44734 - RNA, 22 nt, Human
cugaggagcccccucucagcau

SEQ ID NO: 44735 - RNA, 22 nt, Human
cugaggaggggccugagugaga

SEQ ID NO: 44736 - RNA, 22 nt, Human
cugaggagucagcuuacucacu

SEQ ID NO: 44737 - RNA, 22 nt, Human
cugaggcagaaaaagcaagggu

SEQ ID NO: 44738 - RNA, 22 nt, Human
cugaggcaggauggccuggcug

SEQ ID NO: 44739 - RNA, 22 nt, Human
cugaggccccucucuugagcuu

SEQ ID NO: 44740 - RNA, 22 nt, Human
cugaggccccucuugugagcau

SEQ ID NO: 44741 - RNA, 22 nt, Human
cugaggccguuggugggccuua

SEQ ID NO: 44742 - RNA, 22 nt, Human
cugaggccuaagacaugaauga

SEQ ID NO: 44743 - RNA, 22 nt, Human
cugaggccucguuggcuggaac

SEQ ID NO: 44744 - RNA, 22 nt, Human
cugaggccucucuccugggcuu

SEQ ID NO: 44745 - RNA, 22 nt, Human
cugaggccucuguucaccagaa

SEQ ID NO: 44746 - RNA, 22 nt, Human
cugaggccuggccccaccacag

SEQ ID NO: 44747 - RNA, 22 nt, Human
cugaggccuggugaggugguga

SEQ ID NO: 44748 - RNA, 22 nt, Human
cugaggcucaagggcagguggg

SEQ ID NO: 44749 - RNA, 22 nt, Human
cugaggcugagacaggugaaau

SEQ ID NO: 44750 - RNA, 22 nt, Human
cugaggcuuggaggggucuggu

SEQ ID NO: 44751 - RNA, 22 nt, Human
cugaggcuuugugugcaugccu

SEQ ID NO: 44752 - RNA, 22 nt, Human
cugagggaacuugggcaagucu

SEQ ID NO: 44753 - RNA, 22 nt, Human
cugagggagcugcuggccuugg

SEQ ID NO: 44754 - RNA, 22 nt, Human
cugagggaguuccugagcccac

SEQ ID NO: 44755 - RNA, 18 nt, Human
cugagggcaacagaggcu

SEQ ID NO: 44756 - RNA, 22 nt, Human
cugccgagugggucaugaggca

SEQ ID NO: 44757 - RNA, 22 nt, Human
cugccgggcccuggauuuggca

SEQ ID NO: 44758 - RNA, 22 nt, Human
cugccuagggucugguaccaca

SEQ ID NO: 44759 - RNA, 22 nt, Human
cugccucaugcugccugcagcc

SEQ ID NO: 44760 - RNA, 22 nt, Human
cugccuccucacguccacagug

SEQ ID NO: 44761 - RNA, 22 nt, Human
cugccuccugccgugcagcuuc

SEQ ID NO: 44762 - RNA, 22 nt, Human
cugccucuauaggaguccacca

SEQ ID NO: 44763 - RNA, 22 nt, Human
cugccucuccccagaguggccc

SEQ ID NO: 44764 - RNA, 22 nt, Human
cugccugcaucccacagugggg

SEQ ID NO: 44765 - RNA, 22 nt, Human
cugccugcgccaccaccacguc

SEQ ID NO: 44766 - RNA, 22 nt, Human
cugccugcucuauccaggccug

SEQ ID NO: 44767 - RNA, 22 nt, Human
cugccugcugccuguggagggu

SEQ ID NO: 44768 - RNA, 23 nt, Human
cugccugcuggggagacagaucu

SEQ ID NO: 44769 - RNA, 22 nt, Human
cugccugcuuuucugggagccg

SEQ ID NO: 44770 - RNA, 22 nt, Human
cugccuggacagcucuuaccuu

SEQ ID NO: 44771 - RNA, 22 nt, Human
cugccuggcccagggaugggcc

SEQ ID NO: 44772 - RNA, 22 nt, Human
cugccuggggcaucagucaagg

SEQ ID NO: 44773 - RNA, 22 nt, Human
cugccugguacuuuaggcacuu

SEQ ID NO: 44774 - RNA, 22 nt, Human
cugccugugauuuuucucuagu

SEQ ID NO: 44775 - RNA, 22 nt, Human
cugccugugcaugcagucagaa

SEQ ID NO: 44776 - RNA, 22 nt, Human
cugccuguggucugugaucuaa

SEQ ID NO: 44777 - RNA, 22 nt, Human
cugccuguuagucuagcaguua

SEQ ID NO: 44778 - RNA, 22 nt, Human
cugccuguuccugaucauucua

SEQ ID NO: 44779 - RNA, 18 nt, Human
cugccuguugcugagagg

SEQ ID NO: 44780 - RNA, 22 nt, Human
cugccuucaucucugagcuggg

SEQ ID NO: 44781 - RNA, 22 nt, Human
cugccuuugaaaguucuguuga

SEQ ID NO: 44782 - RNA, 22 nt, Human
cugccuuuuaaagccaguguua

SEQ ID NO: 44783 - RNA, 22 nt, Human
cugcgugagcgugcccgucuug

SEQ ID NO: 44784 - RNA, 22 nt, Human
cugcgugucucugucucauggc

SEQ ID NO: 44785 - RNA, 22 nt, Human
cugcguucauuuugagugcugu

SEQ ID NO: 44786 - RNA, 22 nt, Human
cugcuaaaccucucugagagcu

SEQ ID NO: 44787 - RNA, 22 nt, Human
cugcuacaccggaauagugaca

SEQ ID NO: 44788 - RNA, 22 nt, Human
cugcucaauuccggcacgcugg

SEQ ID NO: 44789 - RNA, 22 nt, Human
cugcucacgccaccguucauca

SEQ ID NO: 44790 - RNA, 22 nt, Human
cugcucagaggaaggaaugucu

SEQ ID NO: 44791 - RNA, 22 nt, Human
cugcucagucauguuggauugu

SEQ ID NO: 44792 - RNA, 22 nt, Human
cugcuccacaccuccauuuccu

SEQ ID NO: 44793 - RNA, 22 nt, Human
cugcuccucugagguagccaca

SEQ ID NO: 44794 - RNA, 22 nt, Human
cugcuccuguccagcagggcca

SEQ ID NO: 44795 - RNA, 22 nt, Human
cugcucuagguuccugcauaug

SEQ ID NO: 44796 - RNA, 22 nt, Human
cugcucugaagccaggauucug

SEQ ID NO: 44797 - RNA, 22 nt, Human
cugcucugacccuuucaccuuc

SEQ ID NO: 44798 - RNA, 22 nt, Human
cugcucugaguauuaacggagg

SEQ ID NO: 44799 - RNA, 20 nt, Human
cugcucugcuuugcaggugg

SEQ ID NO: 44800 - RNA, 22 nt, Human
cugcucuggucucuucauguuu

SEQ ID NO: 44801 - RNA, 22 nt, Human
cugcucugugguccaugagaca

SEQ ID NO: 44802 - RNA, 22 nt, Human
cugcucuguucccccaucaucu

SEQ ID NO: 44803 - RNA, 19 nt, Human
cugcugaauuagcucugga

SEQ ID NO: 44804 - RNA, 22 nt, Human
cugcugagguccuugcucagac

SEQ ID NO: 44805 - RNA, 22 nt, Human
cugcugauucuuaaaugugguu

SEQ ID NO: 44806 - RNA, 22 nt, Human
cugcugcaaucuggcuuccaug

SEQ ID NO: 44807 - RNA, 20 nt, Human
cugcugcccugucagccucu

SEQ ID NO: 44808 - RNA, 22 nt, Human
cugcugccggcgagccucccuu

SEQ ID NO: 44809 - RNA, 22 nt, Human
cugcugccugacaauuuagguu

SEQ ID NO: 44810 - RNA, 22 nt, Human
cugcugccugauugcagaccuc

SEQ ID NO: 44811 - RNA, 22 nt, Human
cugcugcccagugugcauuggg

SEQ ID NO: 44812 - RNA, 22 nt, Human
cugcugcccuagacccaguccu

SEQ ID NO: 44813 - RNA, 22 nt, Human
cugcugccuaguccaagacgug

SEQ ID NO: 44814 - RNA, 22 nt, Human
cugcugccucgacauugggaca

SEQ ID NO: 44815 - RNA, 22 nt, Human
cugcugcucgaccagucccagg

SEQ ID NO: 44816 - RNA, 22 nt, Human
cugcugcugagaaugccucagg

SEQ ID NO: 44817 - RNA, 22 nt, Human
cugcugggaaggucugcucagu

SEQ ID NO: 44818 - RNA, 22 nt, Human
cugcugggcuccucaugugacu

SEQ ID NO: 44819 - RNA, 22 nt, Human
cugcugggucccccugcugauu

SEQ ID NO: 44820 - RNA, 19 nt, Human
cugcugggugcugagggag

SEQ ID NO: 44821 - RNA, 22 nt, Human
cugcuggguuugccuuucacca

SEQ ID NO: 44822 - RNA, 22 nt, Human
cugcuggugaugucugggcaug

SEQ ID NO: 44823 - RNA, 22 nt, Human
cugcuguaaugagucagcaucu

SEQ ID NO: 44824 - RNA, 22 nt, Human
cugcugucaaaaaucacuccau

SEQ ID NO: 44825 - RNA, 22 nt, Human
cugcugucaaaggaaauauuug

SEQ ID NO: 44826 - RNA, 22 nt, Human
cugcugugacagcugccguguu

SEQ ID NO: 44827 - RNA, 22 nt, Human
cugcugugagugguucuugccu

SEQ ID NO: 44828 - RNA, 22 nt, Human
cugcugugauugggagaaaccg

SEQ ID NO: 44829 - RNA, 22 nt, Human
cugcugugcaacauugcaccua

SEQ ID NO: 44830 - RNA, 22 nt, Human
cugcugugcacccaggaaggcu

SEQ ID NO: 44831 - RNA, 22 nt, Human
cugcugugcaggugccuaugau

SEQ ID NO: 44832 - RNA, 22 nt, Human
cugcuguggccagccaggucaa

SEQ ID NO: 44833 - RNA, 21 nt, Human
cugcuguggcccccgacaugc

SEQ ID NO: 44834 - RNA, 22 nt, Human
cugcuguggguuaagacacugu

SEQ ID NO: 44835 - RNA, 18 nt, Human
cugcugugucgucugggc

SEQ ID NO: 44836 - RNA, 20 nt, Human
cugcuguguuauuguagaac

SEQ ID NO: 44837 - RNA, 22 nt, Human
cugcuguguuucugcuagaaaa

SEQ ID NO: 44838 - RNA, 22 nt, Human
cugcuguucagaggaccucacu

SEQ ID NO: 44839 - RNA, 22 nt, Human
cugcuguuccaccucugaaugc

SEQ ID NO: 44840 - RNA, 20 nt, Human
cugcuuaaguaagugacaca

SEQ ID NO: 44841 - RNA, 22 nt, Human
cugcuucacccaacuuugggau

SEQ ID NO: 44842 - RNA, 22 nt, Human
cugcuucagcaaagcuauuugc

SEQ ID NO: 44843 - RNA, 22 nt, Human
cugcuuccacacaagcaaagcu

SEQ ID NO: 44844 - RNA, 19 nt, Human
cugcuuccuucccucacug

SEQ ID NO: 44845 - RNA, 23 nt, Human
cugcuuccuugcuucauugcugg

SEQ ID NO: 44846 - RNA, 22 nt, Human
cugcuugaccuguuguucucac

SEQ ID NO: 44847 - RNA, 22 nt, Human
cugcuuggcuuauaaccucagg

SEQ ID NO: 44848 - RNA, 18 nt, Human
cugcuugggagacgucag

SEQ ID NO: 44849 - RNA, 22 nt, Human
cugcuuuaaaacccucagcugg

SEQ ID NO: 44850 - RNA, 22 nt, Human
cugcuuuaacucugggaagcca

SEQ ID NO: 44851 - RNA, 22 nt, Human
cugcuuuaaucccugccuggaa

SEQ ID NO: 44852 - RNA, 22 nt, Human
cugcuuuaccaaacucuuggau

SEQ ID NO: 44853 - RNA, 22 nt, Human
cugcuuuaucugagacaaguca

SEQ ID NO: 44854 - RNA, 22 nt, Human
cugcuuucuuguugcaucuuaa

SEQ ID NO: 44855 - RNA, 22 nt, Human
cugcuuugaggggcucuguaua

SEQ ID NO: 44856 - RNA, 22 nt, Human
cugcuuuggacaacuauucuug

SEQ ID NO: 44857 - RNA, 22 nt, Human
cuggaaagaccugcuugcuuuu

SEQ ID NO: 44858 - RNA, 22 nt, Human
cuggaaagauuuacacggggaa

SEQ ID NO: 44859 - RNA, 22 nt, Human
cuggaaaggguccucauucugu

SEQ ID NO: 44860 - RNA, 22 nt, Human
cuggaaaguacagugugucaca

SEQ ID NO: 44861 - RNA, 22 nt, Human
cuggaacuccuggggagcuggu

SEQ ID NO: 44862 - RNA, 22 nt, Human
cuggaagagcauuugcauaggg

SEQ ID NO: 44863 - RNA, 22 nt, Human
cuggaagaggacacacgaauca

SEQ ID NO: 44864 - RNA, 22 nt, Human
cuggaagaggggaaaugccaug

SEQ ID NO: 44865 - RNA, 22 nt, Human
cuggccucuguguucaccauag

SEQ ID NO: 44866 - RNA, 22 nt, Human
cuggccugagcacagcggcugc

SEQ ID NO: 44867 - RNA, 22 nt, Human
cuggccugaggucggcuguagg

SEQ ID NO: 44868 - RNA, 22 nt, Human
cuggccugcugggugagguccu

SEQ ID NO: 44869 - RNA, 22 nt, Human
cuggccuggggccucagcugcu

SEQ ID NO: 44870 - RNA, 22 nt, Human
cuggccuggggggacacauccc

SEQ ID NO: 44871 - RNA, 22 nt, Human
cuggccuucagacucggacuga

SEQ ID NO: 44872 - RNA, 22 nt, Human
cuggccuuggaagggagcccgu

SEQ ID NO: 44873 - RNA, 22 nt, Human
cuggccuuuuguuucuggagaa

SEQ ID NO: 44874 - RNA, 22 nt, Human
cuggcgcaacagaaaaucugga

SEQ ID NO: 44875 - RNA, 22 nt, Human
cuggcucacaggugagaugcau

SEQ ID NO: 44876 - RNA, 22 nt, Human
cuggcucagugccuucagaagu

SEQ ID NO: 44877 - RNA, 22 nt, Human
cuggcucaguucuugguuuuca

SEQ ID NO: 44878 - RNA, 22 nt, Human
cuggcuccagugacaagucgau

SEQ ID NO: 44879 - RNA, 22 nt, Human
cuggcuccauccuaggcaaaug

SEQ ID NO: 44880 - RNA, 22 nt, Human
cuggcuccauccuugagcucug

SEQ ID NO: 44881 - RNA, 22 nt, Human
cuggcucccagcuuucagggag

SEQ ID NO: 44882 - RNA, 22 nt, Human
cuggcucucgcugggaguacuu

SEQ ID NO: 44883 - RNA, 22 nt, Human
cuggcucucugagauauugagu

SEQ ID NO: 44884 - RNA, 22 nt, Human
cuggcucugacuccgcauauuu

SEQ ID NO: 44885 - RNA, 22 nt, Human
cuggcucugagcccaccuccag

SEQ ID NO: 44886 - RNA, 22 nt, Human
cuggcucugucacccuuucucc

SEQ ID NO: 44887 - RNA, 22 nt, Human
cuggcucuuucagccgcuggag

SEQ ID NO: 44888 - RNA, 22 nt, Human
cuggcugaucuccugaaugucu

SEQ ID NO: 44889 - RNA, 22 nt, Human
cuggcugcagcuccgaggaaga

SEQ ID NO: 44890 - RNA, 22 nt, Human
cuggcugccacuucagggucuu

SEQ ID NO: 44891 - RNA, 22 nt, Human
cuggcugccagcauuuggggga

SEQ ID NO: 44892 - RNA, 22 nt, Human
cuggcugcuugggacagccaug

SEQ ID NO: 44893 - RNA, 20 nt, Human
cuggcuggaaacuuagccuu

SEQ ID NO: 44894 - RNA, 22 nt, Human
cuggcuggaggugagucacuga

SEQ ID NO: 44895 - RNA, 22 nt, Human
cuggcuggcagaugcucuugcu

SEQ ID NO: 44896 - RNA, 22 nt, Human
cuggcugggagcgagcugcuca

SEQ ID NO: 44897 - RNA, 22 nt, Human
cuggcuggggaagucauuugau

SEQ ID NO: 44898 - RNA, 22 nt, Human
cuggcugguuuuuaaagcuagg

SEQ ID NO: 44899 - RNA, 22 nt, Human
cuggcuguaacauuuugccaua

SEQ ID NO: 44900 - RNA, 22 nt, Human
cuggcugugcuggaguugagga

SEQ ID NO: 44901 - RNA, 22 nt, Human
cuggcugugugucuucauucag

SEQ ID NO: 44902 - RNA, 22 nt, Human
cuggcuuccaccauggccccug

SEQ ID NO: 44903 - RNA, 22 nt, Human
cuggcuuccucaggagcagugg

SEQ ID NO: 44904 - RNA, 22 nt, Human
cuggcuuuaaugucaucuuucu

SEQ ID NO: 44905 - RNA, 22 nt, Human
cuggcuuucccuggacaacagc

SEQ ID NO: 44906 - RNA, 22 nt, Human
cuggcuuucuauuuggugcuau

SEQ ID NO: 44907 - RNA, 22 nt, Human
cuggcuuugaaggucuuuccua

SEQ ID NO: 44908 - RNA, 22 nt, Human
cuggcuuugaucagagugaccu

SEQ ID NO: 44909 - RNA, 22 nt, Human
cuggcuuuggaaacaauuuauc

SEQ ID NO: 44910 - RNA, 22 nt, Human
cuggcuuugguccccugugccu

SEQ ID NO: 44911 - RNA, 22 nt, Human
cuggcuuuguauaguucccuga

SEQ ID NO: 44912 - RNA, 22 nt, Human
cuggcuuuuagugugaagacuu

SEQ ID NO: 44913 - RNA, 22 nt, Human
cuggcuuuuggaggagggucag

SEQ ID NO: 44914 - RNA, 22 nt, Human
cugggaaagugugcuccccucc

SEQ ID NO: 44915 - RNA, 22 nt, Human
cugggaacaggcacugcuguca

SEQ ID NO: 44916 - RNA, 22 nt, Human
cugggaagccacaggguguggg

SEQ ID NO: 44917 - RNA, 22 nt, Human
cugggaaguagaaucagaugag

SEQ ID NO: 44918 - RNA, 22 nt, Human
cugggacacguugugcuuuaac

SEQ ID NO: 44919 - RNA, 22 nt, Human
cugggacagagcagcagugggg

SEQ ID NO: 44920 - RNA, 22 nt, Human
cugggacaguucagguagggca

SEQ ID NO: 44921 - RNA, 22 nt, Human
cugggacauuauaagaaacauu

SEQ ID NO: 44922 - RNA, 22 nt, Human
cugggacccacaccuggaaucu

SEQ ID NO: 44923 - RNA, 22 nt, Human
cugggaccuccugagguggagc

SEQ ID NO: 44924 - RNA, 22 nt, Human
cugggacugccauucacagcca

SEQ ID NO: 44925 - RNA, 22 nt, Human
cugggacuggaccucugccugg

SEQ ID NO: 44926 - RNA, 22 nt, Human
cugggagagccuuuccugaguc

SEQ ID NO: 44927 - RNA, 22 nt, Human
cugggagaggaaccucgagggu

SEQ ID NO: 44928 - RNA, 22 nt, Human
cugggagaugacucagagcagg

SEQ ID NO: 44929 - RNA, 22 nt, Human
cugggagcaagaggcugcaaau

SEQ ID NO: 44930 - RNA, 22 nt, Human
cugggagcaccauacuuguuuc

SEQ ID NO: 44931 - RNA, 22 nt, Human
cugggagcucagcccuggggug

SEQ ID NO: 44932 - RNA, 22 nt, Human
cugggagcuggaugcccugccc

SEQ ID NO: 44933 - RNA, 22 nt, Human
cugggaggauacacaagaucag

SEQ ID NO: 44934 - RNA, 22 nt, Human
cugggaggcagucucucuagaa

SEQ ID NO: 44935 - RNA, 22 nt, Human
cugggaggcggagguuguagug

SEQ ID NO: 44936 - RNA, 22 nt, Human
cugggagguggagguugcauug

SEQ ID NO: 44937 - RNA, 22 nt, Human
cugggaguccaggauacagaug

SEQ ID NO: 44938 - RNA, 22 nt, Human
cugggagucuggaauuuuggua

SEQ ID NO: 44939 - RNA, 22 nt, Human
cugggagugucccucugguaau

SEQ ID NO: 44940 - RNA, 22 nt, Human
cugggauccacgggcucccaag

SEQ ID NO: 44941 - RNA, 22 nt, Human
cugggaugggaacugagaauca

SEQ ID NO: 44942 - RNA, 22 nt, Human
cugggaugugaggagcgccucu

SEQ ID NO: 44943 - RNA, 17 nt, Human
cugggauguggacucuu

SEQ ID NO: 44944 - RNA, 22 nt, Human
cugggcaaauugugccagcuau

SEQ ID NO: 44945 - RNA, 22 nt, Human
cugggcacaggggagcagaguc

SEQ ID NO: 44946 - RNA, 22 nt, Human
cugggcacaguggcucacgccu

SEQ ID NO: 44947 - RNA, 22 nt, Human
cugggcacauuuugacuagugu

SEQ ID NO: 44948 - RNA, 20 nt, Human
cugggcaccugucugcaguu

SEQ ID NO: 44949 - RNA, 22 nt, Human
cugggcacugcaggguguugag

SEQ ID NO: 44950 - RNA, 22 nt, Human
cugggcagaauuuuaggauggc

SEQ ID NO: 44951 - RNA, 22 nt, Human
cugggcagcugugcaaacaaua

SEQ ID NO: 44952 - RNA, 22 nt, Human
cugggcaggauacuucauggga

SEQ ID NO: 44953 - RNA, 22 nt, Human
cugggcaguucgcuuucguuuu

SEQ ID NO: 44954 - RNA, 22 nt, Human
cugggcaguuuauucaguucug

SEQ ID NO: 44955 - RNA, 22 nt, Human
cugggcaugaaaaggaugccag

SEQ ID NO: 44956 - RNA, 23 nt, Human
cugggcauggagcuucagaggcu

SEQ ID NO: 44957 - RNA, 22 nt, Human
cugggccaaaagaaguguucuu

SEQ ID NO: 44958 - RNA, 22 nt, Human
cugggccaagaaguuguguaug

SEQ ID NO: 44959 - RNA, 22 nt, Human
cugggccacaucagaugaagac

SEQ ID NO: 44960 - RNA, 22 nt, Human
cugggccacuccagaugcccac

SEQ ID NO: 44961 - RNA, 22 nt, Human
gcuggagcugcagccugggccu

SEQ ID NO: 44962 - RNA, 22 nt, Human
gcuggaggaggaagugugaggg

SEQ ID NO: 44963 - RNA, 22 nt, Human
gcuggaguccaguggcaugauc

SEQ ID NO: 44964 - RNA, 22 nt, Human
gcuggagugcuggagugcagug

SEQ ID NO: 44965 - RNA, 22 nt, Human
gcuggaucccugugggaguggu

SEQ ID NO: 44966 - RNA, 22 nt, Human
gcuggcacauggcucagggccu

SEQ ID NO: 44967 - RNA, 22 nt, Human
gcuggcaccuauuuggaccugg

SEQ ID NO: 44968 - RNA, 22 nt, Human
gcuggcacugggaaggacugag

SEQ ID NO: 44969 - RNA, 22 nt, Human
gcuggcagacugggggcagaac

SEQ ID NO: 44970 - RNA, 22 nt, Human
gcuggcaggagccuuucccuuu

SEQ ID NO: 44971 - RNA, 22 nt, Human
gcuggcaggguucucacugaaa

SEQ ID NO: 44972 - RNA, 22 nt, Human
gcuggccaaaguguaccuggag

SEQ ID NO: 44973 - RNA, 22 nt, Human
gcuggccacauugugccguccu

SEQ ID NO: 44974 - RNA, 22 nt, Human
cugugucccuugucccagagcc

SEQ ID NO: 44975 - RNA, 22 nt, Human
cuguguccuccccaucacuucu

SEQ ID NO: 44976 - RNA, 22 nt, Human
cuguguccucccgcugcaccca

SEQ ID NO: 44977 - RNA, 23 nt, Human
cugugucuaugcagccauaucca

SEQ ID NO: 44978 - RNA, 22 nt, Human
cugugucucuaccuccccaucc

SEQ ID NO: 44979 - RNA, 22 nt, Human
cugugucuucugcuuacagucu

SEQ ID NO: 44980 - RNA, 22 nt, Human
cugugugaauagugaggucuau

SEQ ID NO: 44981 - RNA, 22 nt, Human
cugugugagugacugcaucuca

SEQ ID NO: 44982 - RNA, 22 nt, Human
cugugugcaacuugcaguuuug

SEQ ID NO: 44983 - RNA, 22 nt, Human
cugugugcugaaaugcagugag

SEQ ID NO: 44984 - RNA, 22 nt, Human
cugugugcuguuagggagcugc

SEQ ID NO: 44985 - RNA, 22 nt, Human
cuguguggacugguugaggccc

SEQ ID NO: 44986 - RNA, 22 nt, Human
cugugugucauuugucaauccu

SEQ ID NO: 44987 - RNA, 22 nt, Human
cuguguguccucggacgaguuu

SEQ ID NO: 44988 - RNA, 22 nt, Human
cuguguuucugagaagugggga

SEQ ID NO: 44989 - RNA, 22 nt, Human
cuguguuugaugagaagccacc

SEQ ID NO: 44990 - RNA, 22 nt, Human
cuguguuuggacaacuuuucag

SEQ ID NO: 44991 - RNA, 22 nt, Human
cuguuaaaaagaccaauggauu

SEQ ID NO: 44992 - RNA, 22 nt, Human
cuguuacacggaccuucaaauc

SEQ ID NO: 44993 - RNA, 22 nt, Human
cuguuacccagcaaccccagca

SEQ ID NO: 44994 - RNA, 22 nt, Human
cuguuacuaaucuuuucugcua

SEQ ID NO: 44995 - RNA, 22 nt, Human
cuguuacugcuggagccauuga

SEQ ID NO: 44996 - RNA, 22 nt, Human
cuguuacuguauuuaaucaucu

SEQ ID NO: 44997 - RNA, 23 nt, Human
cuguuauauggguguuaugugcu

SEQ ID NO: 44998 - RNA, 22 nt, Human
cuguuauauugguauauuuaca

SEQ ID NO: 44999 - RNA, 22 nt, Human
cuguuaucaucaggaggggaua

SEQ ID NO: 45000 - RNA, 22 nt, Human
cuguuaucuguuauugccaguu

SEQ ID NO: 45001 - RNA, 22 nt, Human
cuguuauuaaaaagcucaggcu

SEQ ID NO: 45002 - RNA, 22 nt, Human
cuguuauuuaugcugcuccauu

SEQ ID NO: 45003 - RNA, 22 nt, Human
cuguuauuuuccucugaacucu

SEQ ID NO: 45004 - RNA, 22 nt, Human
cuguucaguaaccuauaaaaca

SEQ ID NO: 45005 - RNA, 22 nt, Human
cuguucauggaaaaauaguugg

SEQ ID NO: 45006 - RNA, 22 nt, Human
cuguucuaucauuaaaagcuau

SEQ ID NO: 45007 - RNA, 22 nt, Human
cuguucugaacugccugcaugc

SEQ ID NO: 45008 - RNA, 22 nt, Human
cuguucugaccagugcagggau

SEQ ID NO: 45009 - RNA, 22 nt, Human
cuguucuggagacacugaugaa

SEQ ID NO: 45010 - RNA, 22 nt, Human
cuguucuuaucgucuuaauauc

SEQ ID NO: 45011 - RNA, 18 nt, Human
cuguugagauguggcuga

SEQ ID NO: 45012 - RNA, 22 nt, Human
cuguugaucucaguuagcuaga

SEQ ID NO: 45013 - RNA, 22 nt, Human
cuguugcagaggggcggagagg

SEQ ID NO: 45014 - RNA, 22 nt, Human
cuguugcaugacugugcaugcu

SEQ ID NO: 45015 - RNA, 22 nt, Human
cuguugcuaaguagugcaggua

SEQ ID NO: 45016 - RNA, 22 nt, Human
cuguugcugagguucaaggguc

SEQ ID NO: 45017 - RNA, 22 nt, Human
cuguugcugggaacgcauguca

SEQ ID NO: 45018 - RNA, 22 nt, Human
cuguuggaugguuuccaaaaga

SEQ ID NO: 45019 - RNA, 22 nt, Human
cuguuggaugugacacuguuag

SEQ ID NO: 45020 - RNA, 22 nt, Human
cuguuguagcugcgcugcuuca

SEQ ID NO: 45021 - RNA, 22 nt, Human
cuguuuaucccuuuggucagca

SEQ ID NO: 45022 - RNA, 22 nt, Human
cuguuuauuacacuggauagca

SEQ ID NO: 45023 - RNA, 20 nt, Human
cuguuuauuagaaguggauu

SEQ ID NO: 45024 - RNA, 22 nt, Human
cuguuucauagaguugugaauu

SEQ ID NO: 45025 - RNA, 22 nt, Human
cuguuucucccaacgcccuagu

SEQ ID NO: 45026 - RNA, 19 nt, Human
cuguuucugagcuugcuuu

SEQ ID NO: 45027 - RNA, 22 nt, Human
cuguuucuuugcugucagagag

SEQ ID NO: 45028 - RNA, 21 nt, Human
cuguuugcaagccuauguguc

SEQ ID NO: 45029 - RNA, 20 nt, Human
cuguuugcuaucaugagcug

SEQ ID NO: 45030 - RNA, 22 nt, Human
cuguuugucucucuccugaccc

SEQ ID NO: 45031 - RNA, 22 nt, Human
cuguuuuaucucaagaguucaa

SEQ ID NO: 45032 - RNA, 22 nt, Human
cuguuuuaugaagggaaugaga

SEQ ID NO: 45033 - RNA, 22 nt, Human
cuguuuuccuggguuccaugag

SEQ ID NO: 45034 - RNA, 22 nt, Human
cuguuuucuacagucugggucu

SEQ ID NO: 45035 - RNA, 22 nt, Human
cuguuuucuagggcugagguga

SEQ ID NO: 45036 - RNA, 22 nt, Human
cuuaaaaguugcuucccuaacu

SEQ ID NO: 45037 - RNA, 22 nt, Human
cuuaaagaaauugaggagagga

SEQ ID NO: 45038 - RNA, 22 nt, Human
cuuaaagaugucaaggcuguuu

SEQ ID NO: 45039 - RNA, 22 nt, Human
cuuaaauuggaugaguuaaguu

SEQ ID NO: 45040 - RNA, 22 nt, Human
cuuaacagcaagaucuguguca

SEQ ID NO: 45041 - RNA, 22 nt, Human
cuuaacauccugcauuuuucuu

SEQ ID NO: 45042 - RNA, 22 nt, Human
cuuaacaugggggguaagucug

SEQ ID NO: 45043 - RNA, 21 nt, Human
cuuaacauuuuaaaugaaagg

SEQ ID NO: 45044 - RNA, 22 nt, Human
cuuaacuugaugucucucugcu

SEQ ID NO: 45045 - RNA, 22 nt, Human
cuuaagaagcaagucucagcaa

SEQ ID NO: 45046 - RNA, 22 nt, Human
cuuaagaugaggucaugcuaua

SEQ ID NO: 45047 - RNA, 21 nt, Human
cuuaagauggcauaguacgaa

SEQ ID NO: 45048 - RNA, 22 nt, Human
cuuaagauugucagcuucagcc

SEQ ID NO: 45049 - RNA, 22 nt, Human
cuuaagauuugagauaccuaau

SEQ ID NO: 45050 - RNA, 22 nt, Human
cuuaagcaaaauauucuuucac

SEQ ID NO: 45051 - RNA, 22 nt, Human
cuuaaucauggcuugugggagg

SEQ ID NO: 45052 - RNA, 22 nt, Human
cuuaauguggaccugguuucua

SEQ ID NO: 45053 - RNA, 22 nt, Human
cuuaauuggcuuauuuccucaa

SEQ ID NO: 45054 - RNA, 22 nt, Human
cuuaauuuaagccuagaaugca

SEQ ID NO: 45055 - RNA, 22 nt, Human
cuuacaaauacacuuaggagag

SEQ ID NO: 45056 - RNA, 22 nt, Human
cuuacaagaccaaagaaaggau

SEQ ID NO: 45057 - RNA, 22 nt, Human
cuuacacuuuccgaaagcuugu

SEQ ID NO: 45058 - RNA, 22 nt, Human
cuuacagagaagaaaauguagu

SEQ ID NO: 45059 - RNA, 22 nt, Human
cuuacaguguugagggaauuaa

SEQ ID NO: 45060 - RNA, 22 nt, Human
cuuacauacugagaaaauaucc

SEQ ID NO: 45061 - RNA, 22 nt, Human
cuuacccaaauuagaguuacca

SEQ ID NO: 45062 - RNA, 22 nt, Human
cuuacuugaaauuccaagcagg

SEQ ID NO: 45063 - RNA, 22 nt, Human
cuuagaaauuguuacucauuca

SEQ ID NO: 45064 - RNA, 20 nt, Human
cuuagaaauuuuuacccugg

SEQ ID NO: 45065 - RNA, 22 nt, Human
cuuagaaugggacccaaugggu

SEQ ID NO: 45066 - RNA, 22 nt, Human
cuuagagcuuaggcuagccauu

SEQ ID NO: 45067 - RNA, 22 nt, Human
cuuagcaugcaguguucugccc

SEQ ID NO: 45068 - RNA, 20 nt, Human
cuuagcuaguaagaagcugu

SEQ ID NO: 45069 - RNA, 22 nt, Human
cuuagcuuguuuucaccuaaga

SEQ ID NO: 45070 - RNA, 22 nt, Human
cuuaggaaaguuucugcuuaug

SEQ ID NO: 45071 - RNA, 22 nt, Human
cuuaggaacgcucugccuagug

SEQ ID NO: 45072 - RNA, 22 nt, Human
cuuaggaaugcguuuccugggu

SEQ ID NO: 45073 - RNA, 22 nt, Human
cuuaggaguucacuugaauagu

SEQ ID NO: 45074 - RNA, 22 nt, Human
cuuaggcaguuuaggaaagaga

SEQ ID NO: 45075 - RNA, 22 nt, Human
cuuagggaaucuuagagcugga

SEQ ID NO: 45076 - RNA, 22 nt, Human
cuuagggagaaugccucugcag

SEQ ID NO: 45077 - RNA, 22 nt, Human
cuuaguuucucuguauguuuac

SEQ ID NO: 45078 - RNA, 22 nt, Human
cuuaguuucuguugcguucugu

SEQ ID NO: 45079 - RNA, 22 nt, Human
gcugugucagaaacucugggga

SEQ ID NO: 45080 - RNA, 22 nt, Human
gcugugugcuaggauauguuuu

SEQ ID NO: 45081 - RNA, 22 nt, Human
gcuguuagagaauuagaguggg

SEQ ID NO: 45082 - RNA, 22 nt, Human
gcuguuaggugcccugaccuug

SEQ ID NO: 45083 - RNA, 22 nt, Human
ggcagaggugaaguucacaagg

SEQ ID NO: 45084 - RNA, 22 nt, Human
ggcagaguggagugcggccucc

SEQ ID NO: 45085 - RNA, 22 nt, Human
ggcagauauauucgugaaauag

SEQ ID NO: 45086 - RNA, 22 nt, Human
ggcagauggaagaggcuggguc

SEQ ID NO: 45087 - RNA, 22 nt, Human
ggcagauggggugacaagagag

SEQ ID NO: 45088 - RNA, 22 nt, Human
ggcagcaaagucacauggaaaa

SEQ ID NO: 45089 - RNA, 22 nt, Human
ggcagcaacacgagugagcuaa

SEQ ID NO: 45090 - RNA, 22 nt, Human
ggcagcaaccaaccaggcauuu

SEQ ID NO: 45091 - RNA, 22 nt, Human
ggcagcaacucauuauuccugu

SEQ ID NO: 45092 - RNA, 22 nt, Human
ggcagcaaguggugggagacuu

SEQ ID NO: 45093 - RNA, 20 nt, Human
ggcagcaauucacccuaucc

SEQ ID NO: 45094 - RNA, 21 nt, Human
ggcagcacuaccugaagcaua

SEQ ID NO: 45095 - RNA, 22 nt, Human
ggcagcacugcagcuuguuggg

SEQ ID NO: 45096 - RNA, 22 nt, Human
ggcagcaggguagccauuucuc

SEQ ID NO: 45097 - RNA, 22 nt, Human
ggcagcaguuacaaaugugcag

SEQ ID NO: 45098 - RNA, 22 nt, Human
ggcagcaucacuugucuccagc

SEQ ID NO: 45099 - RNA, 22 nt, Human
ggcagcaucucauaucuucagg

SEQ ID NO: 45100 - RNA, 22 nt, Human
ggcagcaucucuggcagcagcu

SEQ ID NO: 45101 - RNA, 22 nt, Human
ggcagcaugggugccuuuguga

SEQ ID NO: 45102 - RNA, 22 nt, Human
ggcagccacccugggaggcaga

SEQ ID NO: 45103 - RNA, 22 nt, Human
ggcagccagagggcagcuggau

SEQ ID NO: 45104 - RNA, 22 nt, Human
ggcagccauacucagaccuggg

SEQ ID NO: 45105 - RNA, 22 nt, Human
ggcagccaugcuccaggugcag

SEQ ID NO: 45106 - RNA, 22 nt, Human
ggcagcccaccagcccacgucu

SEQ ID NO: 45107 - RNA, 22 nt, Human
ggcagcccuuucuggccagcuc

SEQ ID NO: 45108 - RNA, 18 nt, Human
ggcagccuggacaugcuc

SEQ ID NO: 45109 - RNA, 21 nt, Human
ggcagcguguggacaggaagg

SEQ ID NO: 45110 - RNA, 22 nt, Human
ggcagcuagaauugugaugcug

SEQ ID NO: 45111 - RNA, 22 nt, Human
ggcagcuauuccaagcagcacu

SEQ ID NO: 45112 - RNA, 21 nt, Human
ggcagcucagcagauggggac

SEQ ID NO: 45113 - RNA, 22 nt, Human
ggcagcucgaugacuucugcau

SEQ ID NO: 45114 - RNA, 20 nt, Human
ggcagcucuagucgaggccc

SEQ ID NO: 45115 - RNA, 23 nt, Human
ggcagcucucaucugaugacuga

SEQ ID NO: 45116 - RNA, 22 nt, Human
ggcagcucugcuaauugagccu

SEQ ID NO: 45117 - RNA, 22 nt, Human
gaaauacaguugggaggaggua

SEQ ID NO: 45118 - RNA, 20 nt, Human
gaaauacuuacccaacuguu

SEQ ID NO: 45119 - RNA, 22 nt, Human
gaaauagaagcugccaauuucu

SEQ ID NO: 45120 - RNA, 22 nt, Human
gaaauagaucucugggaugcaa

SEQ ID NO: 45121 - RNA, 22 nt, Human
gaaauauacaugaagucggcug

SEQ ID NO: 45122 - RNA, 22 nt, Human
gaaauauuacaguggaggggau

SEQ ID NO: 45123 - RNA, 22 nt, Human
gaaauauuguacuggagauguu

SEQ ID NO: 45124 - RNA, 22 nt, Human
gaaauauuucucuugagccccu

SEQ ID NO: 45125 - RNA, 22 nt, Human
gaaaucaauuucuugguugaua

SEQ ID NO: 45126 - RNA, 22 nt, Human
gaaaucaugagaucucuuggac

SEQ ID NO: 45127 - RNA, 22 nt, Human
gaaaucuacuuuggguuagaca

SEQ ID NO: 45128 - RNA, 22 nt, Human
gaaaucugcggugaggccugag

SEQ ID NO: 45129 - RNA, 22 nt, Human
gaaaucuugcucauugugacaa

SEQ ID NO: 45130 - RNA, 22 nt, Human
gaaaugaaauagcaccaagguu

SEQ ID NO: 45131 - RNA, 22 nt, Human
gaaaugaugucugugcugccac

SEQ ID NO: 45132 - RNA, 22 nt, Human
gaaaugauuuuaguuuaucaug

SEQ ID NO: 45133 - RNA, 22 nt, Human
gaaaugcaaauucucucucgcu

SEQ ID NO: 45134 - RNA, 22 nt, Human
gaaaugcauggaucuuggcaga

SEQ ID NO: 45135 - RNA, 22 nt, Human
gaaauguacuuuaaagccaucc

SEQ ID NO: 45136 - RNA, 22 nt, Human
gaaauguauuugacaguccuug

SEQ ID NO: 45137 - RNA, 18 nt, Human
gaaaugugauucuagggc

SEQ ID NO: 45138 - RNA, 22 nt, Human
gaaauguuggacacuugaaauu

SEQ ID NO: 45139 - RNA, 22 nt, Human
gaaauguugucucugcagcaau

SEQ ID NO: 45140 - RNA, 22 nt, Human
gaaauguuugggaggagucaac

SEQ ID NO: 45141 - RNA, 22 nt, Human
gaaauuaagcaggggucugugg

SEQ ID NO: 45142 - RNA, 22 nt, Human
gaaauugaaagaccaacugcau

SEQ ID NO: 45143 - RNA, 22 nt, Human
gaaauuuacaacuuucucaugg

SEQ ID NO: 45144 - RNA, 22 nt, Human
gaaauuuauuaucuacaucauu

SEQ ID NO: 45145 - RNA, 22 nt, Human
gaacaaacacaucccagcagug

SEQ ID NO: 45146 - RNA, 22 nt, Human
gaacaaacagaagaggcggaac

SEQ ID NO: 45147 - RNA, 22 nt, Human
gaacaaagacauggaggaggau

SEQ ID NO: 45148 - RNA, 22 nt, Human
gaacaaaucccuuccugucucc

SEQ ID NO: 45149 - RNA, 22 nt, Human
gaacaacuccaagggacaucau

SEQ ID NO: 45150 - RNA, 22 nt, Human
gaacaauacaggcuuuauuccu

SEQ ID NO: 45151 - RNA, 22 nt, Human
gaacaauagugguaacaaagcc

SEQ ID NO: 45152 - RNA, 19 nt, Human
gaacaauuuguuagcucuc

SEQ ID NO: 45153 - RNA, 22 nt, Human
gaacacagaagaauuucuaaga

SEQ ID NO: 45154 - RNA, 22 nt, Human
gaacacaguacuuuuccugaug

SEQ ID NO: 45155 - RNA, 22 nt, Human
gaacacagugugaucguauguc

SEQ ID NO: 45156 - RNA, 22 nt, Human
gaacacauuucucugacuguag

SEQ ID NO: 45157 - RNA, 22 nt, Human
gaacacuguuucuucgugaaca

SEQ ID NO: 45158 - RNA, 22 nt, Human
gaacagaugccugauucauagg

SEQ ID NO: 45159 - RNA, 22 nt, Human
gaacagcuauaaucaucugucc

SEQ ID NO: 45160 - RNA, 22 nt, Human
gaacaggcauaagcauuugcau

SEQ ID NO: 45161 - RNA, 22 nt, Human
gaacaggguuugagaggcuuag

SEQ ID NO: 45162 - RNA, 17 nt, Human
gaacaguguaagacacu

SEQ ID NO: 45163 - RNA, 22 nt, Human
gaacaucugccuuguggcugcc

SEQ ID NO: 45164 - RNA, 22 nt, Human
gaacauucacagacucaccauu

SEQ ID NO: 45165 - RNA, 22 nt, Human
gaacauucuugggcaaguuacu

SEQ ID NO: 45166 - RNA, 22 nt, Human
gaacauuuaugaugcaauaccu

SEQ ID NO: 45167 - RNA, 22 nt, Human
gaaccaaguaggauacaaggag

SEQ ID NO: 45168 - RNA, 22 nt, Human
gaaccagcagacuuugacaggu

SEQ ID NO: 45169 - RNA, 22 nt, Human
gaaccauuguugaaaagaauag

SEQ ID NO: 45170 - RNA, 22 nt, Human
gaacccaggaggcagagguugc

SEQ ID NO: 45171 - RNA, 22 nt, Human
gaaccucuaguuuguucuuuga

SEQ ID NO: 45172 - RNA, 22 nt, Human
gaaccucuauauuugugacauc

SEQ ID NO: 45173 - RNA, 22 nt, Human
gaaccugagcccagguggcauu

SEQ ID NO: 45174 - RNA, 22 nt, Human
gaaccugagcgggcagcaagcg

SEQ ID NO: 45175 - RNA, 22 nt, Human
gaaccugcuuccuuuuauauua

SEQ ID NO: 45176 - RNA, 22 nt, Human
gaaccuggaauguggcgcccaa

SEQ ID NO: 45177 - RNA, 22 nt, Human
gaaccuuaugguaaaucuagag

SEQ ID NO: 45178 - RNA, 22 nt, Human
gaacuacagugcauuuucuuaa

SEQ ID NO: 45179 - RNA, 22 nt, Human
gaacuagaauguucugauggag

SEQ ID NO: 45180 - RNA, 22 nt, Human
gaacuauaucuucaagaaaaug

SEQ ID NO: 45181 - RNA, 22 nt, Human
gaacuauaugucuuaaagcuuu

SEQ ID NO: 45182 - RNA, 22 nt, Human
gaacucaacacaguauuuggua

SEQ ID NO: 45183 - RNA, 22 nt, Human
gaacugaaacuugguuuaaagc

SEQ ID NO: 45184 - RNA, 22 nt, Human
gaacuggucaguuuagcccacu

SEQ ID NO: 45185 - RNA, 22 nt, Human
gaacuggugaagugaagggcag

SEQ ID NO: 45186 - RNA, 22 nt, Human
gaacuguagagaauacauuucu

SEQ ID NO: 45187 - RNA, 22 nt, Human
gaacugucauuggggacaucag

SEQ ID NO: 45188 - RNA, 22 nt, Human
gaacuguguuuguuucuagguc

SEQ ID NO: 45189 - RNA, 22 nt, Human
gaacuguuucuggugaaagagu

SEQ ID NO: 45190 - RNA, 22 nt, Human
gaacuuaacggcaacuauuuaa

SEQ ID NO: 45191 - RNA, 22 nt, Human
gaacuucuucuuuaagagacuc

SEQ ID NO: 45192 - RNA, 22 nt, Human
gaaggcuugauugaggaaugcc

SEQ ID NO: 45193 - RNA, 22 nt, Human
gaaggcuugccgggaagcggca

SEQ ID NO: 45194 - RNA, 22 nt, Human
gaaggcuuuucuaccagaucuu

SEQ ID NO: 45195 - RNA, 22 nt, Human
gaagggaaggaaagaaccagca

SEQ ID NO: 45196 - RNA, 18 nt, Human
gaagggagcuggaaugca

SEQ ID NO: 45197 - RNA, 22 nt, Human
gaagggcugcaggucugggccc

SEQ ID NO: 45198 - RNA, 22 nt, Human
gaagggcuuggcugggaggcca

SEQ ID NO: 45199 - RNA, 22 nt, Human
gaaggggacuggcagcugcaga

SEQ ID NO: 45200 - RNA, 22 nt, Human
gaagggggaaaaugacaacaga

SEQ ID NO: 45201 - RNA, 22 nt, Human
gaaggucaccuccccucucugg

SEQ ID NO: 45202 - RNA, 22 nt, Human
gaagguuugauccuuauuuaua

SEQ ID NO: 45203 - RNA, 21 nt, Human
gaaguacaccaggaaggccac

SEQ ID NO: 45204 - RNA, 22 nt, Human
gaaguacagggguucuuaggua

SEQ ID NO: 45205 - RNA, 22 nt, Human
gaaguacaguuuuaucuagcca

SEQ ID NO: 45206 - RNA, 22 nt, Human
gaaguagcauguugcugccaga

SEQ ID NO: 45207 - RNA, 22 nt, Human
gaaguauuacucugaauguauu

SEQ ID NO: 45208 - RNA, 20 nt, Human
gaaguccuguuauauccuuu

SEQ ID NO: 45209 - RNA, 22 nt, Human
gaagucucauuuggugucaguu

SEQ ID NO: 45210 - RNA, 22 nt, Human
gaagucucucuggagaguagaa

SEQ ID NO: 45211 - RNA, 22 nt, Human
gaagucugccugccuucucugu

SEQ ID NO: 45212 - RNA, 22 nt, Human
gaagucuucauucucucugaga

SEQ ID NO: 45213 - RNA, 22 nt, Human
gaagucuugaaacacaaacuag

SEQ ID NO: 45214 - RNA, 22 nt, Human
gaagucuuggcugaaaacccuc

SEQ ID NO: 45215 - RNA, 22 nt, Human
gaagugaagagauuagaaauca

SEQ ID NO: 45216 - RNA, 22 nt, Human
gaagugaagguuacucuagauu

SEQ ID NO: 45217 - RNA, 22 nt, Human
gaagugacaagaugcuaggauc

SEQ ID NO: 45218 - RNA, 22 nt, Human
gaaguggaagccaucggcaguc

SEQ ID NO: 45219 - RNA, 22 nt, Human
gaagugugcacaucuuacaagu

SEQ ID NO: 45220 - RNA, 22 nt, Human
gaaguuaguaccugguauacuu

SEQ ID NO: 45221 - RNA, 22 nt, Human
gaaguuagucuugaaguuaguc

SEQ ID NO: 45222 - RNA, 18 nt, Human
gaaguuaguggugugcua

SEQ ID NO: 45223 - RNA, 22 nt, Human
gaaguuaguuggggcccaagaa

SEQ ID NO: 45224 - RNA, 22 nt, Human
gaaguuauugccugugaugaaa

SEQ ID NO: 45225 - RNA, 22 nt, Human
gaaguucaaugucagcaucuau

SEQ ID NO: 45226 - RNA, 22 nt, Human
gaaguucaggugggaauugagc

SEQ ID NO: 45227 - RNA, 22 nt, Human
gaaguuccucguaggagucucu

SEQ ID NO: 45228 - RNA, 22 nt, Human
gaaguucucagcuaggugaugu

SEQ ID NO: 45229 - RNA, 22 nt, Human
gaaguucuggcucagagaggaa

SEQ ID NO: 45230 - RNA, 22 nt, Human
gaaguucugggaguggcgcccu

SEQ ID NO: 45231 - RNA, 22 nt, Human
gaaguucuuugcuccccaguac

SEQ ID NO: 45232 - RNA, 22 nt, Human
gaaguuuagaguguuguaauuu

SEQ ID NO: 45233 - RNA, 22 nt, Human
gaaguuuucugaggcuguagcu

SEQ ID NO: 45234 - RNA, 22 nt, Human
gaauaacauuggaacccugaag

SEQ ID NO: 45235 - RNA, 22 nt, Human
gaauaacugcuaucuuucuggc

SEQ ID NO: 45236 - RNA, 22 nt, Human
gaauaauagcagaaauuagcag

SEQ ID NO: 45237 - RNA, 22 nt, Human
gaauaauuuugaucagaaggga

SEQ ID NO: 45238 - RNA, 22 nt, Human
gaauacaaauaauaccaaggug

SEQ ID NO: 45239 - RNA, 22 nt, Human
gaauacaagccaggcacaaggc

SEQ ID NO: 45240 - RNA, 19 nt, Human
gaauacagauaauaagcag

SEQ ID NO: 45241 - RNA, 22 nt, Human
gaauacauaucagauguguuuc

SEQ ID NO: 45242 - RNA, 22 nt, Human
gaauacaucugaaggcuaugaa

SEQ ID NO: 45243 - RNA, 22 nt, Human
gaauacaugaacccuccugugg

SEQ ID NO: 45244 - RNA, 22 nt, Human
gaauacaugcacgacacggggg

SEQ ID NO: 45245 - RNA, 22 nt, Human
gaauacauuggaaaucagaaua

SEQ ID NO: 45246 - RNA, 22 nt, Human
gaauagauaagugacuauuugg

SEQ ID NO: 45247 - RNA, 22 nt, Human
gaauagauccucauuuauugau

SEQ ID NO: 45248 - RNA, 22 nt, Human
gaauagauuauacuugaagcau

SEQ ID NO: 45249 - RNA, 22 nt, Human
gaauagcuguaggcuagugucu

SEQ ID NO: 45250 - RNA, 22 nt, Human
gaauagcuuccuuuuuuccaaa

SEQ ID NO: 45251 - RNA, 22 nt, Human
gaauauauuucucuuaccuuua

SEQ ID NO: 45252 - RNA, 22 nt, Human
gaauaucccgcuaugcaaagua

SEQ ID NO: 45253 - RNA, 22 nt, Human
gaauaucugggagugggaagcu

SEQ ID NO: 45254 - RNA, 22 nt, Human
gaauauguuugacauuuaguug

SEQ ID NO: 45255 - RNA, 22 nt, Human
gaauauuuguaauuacuguuga

SEQ ID NO: 45256 - RNA, 22 nt, Human
gaauauuuuuaaagggacuaau

SEQ ID NO: 45257 - RNA, 22 nt, Human
gaaucacacucguaagugaguu

SEQ ID NO: 45258 - RNA, 22 nt, Human
gaaucacgguauucugcacggg

SEQ ID NO: 45259 - RNA, 22 nt, Human
gaaucagaaucucuaagguggg

SEQ ID NO: 45260 - RNA, 22 nt, Human
gaaucagacuacaaaugacccc

SEQ ID NO: 45261 - RNA, 22 nt, Human
gaaucagauacugauuucaguc

SEQ ID NO: 45262 - RNA, 22 nt, Human
gaaucaggauucaagaucagcu

SEQ ID NO: 45263 - RNA, 22 nt, Human
gaaucauagaacauuaauagaa

SEQ ID NO: 45264 - RNA, 22 nt, Human
gaaucauucauugcucaauuaa

SEQ ID NO: 45265 - RNA, 22 nt, Human
gaaucauuuagcucugcaugga

SEQ ID NO: 45266 - RNA, 22 nt, Human
gaaucauuuauuuuugacagca

SEQ ID NO: 45267 - RNA, 22 nt, Human
gaauccaucaugcagaacaaug

SEQ ID NO: 45268 - RNA, 22 nt, Human
gaaucccaaucuguuauugaca

SEQ ID NO: 45269 - RNA, 22 nt, Human
gaaucucaggggaguuacugga

SEQ ID NO: 45270 - RNA, 20 nt, Human
gaaucuuacuacauucucuc

SEQ ID NO: 45271 - RNA, 22 nt, Human
gaaucuuagaaagguuaaggaa

SEQ ID NO: 45272 - RNA, 22 nt, Human
gaaugaacaaaugugguggaga

SEQ ID NO: 45273 - RNA, 22 nt, Human
gaaugacauugaaaagacauug

SEQ ID NO: 45274 - RNA, 22 nt, Human
gaaugacauugagccauaacau

SEQ ID NO: 45275 - RNA, 22 nt, Human
gaaugauauuauuucgugcugg

SEQ ID NO: 45276 - RNA, 22 nt, Human
gaaugauuaacuaguugauaca

SEQ ID NO: 45277 - RNA, 22 nt, Human
gaaugcacuuccaacaucuauu

SEQ ID NO: 45278 - RNA, 22 nt, Human
gaaugcaguggugagaucuugg

SEQ ID NO: 45279 - RNA, 22 nt, Human
gaaugcauuccacgguagugau

SEQ ID NO: 45280 - RNA, 22 nt, Human
gaaugcucuuugguccuagacu

SEQ ID NO: 45281 - RNA, 22 nt, Human
gaaugcugguguucagaauuuu

SEQ ID NO: 45282 - RNA, 21 nt, Human
gaauggcaccauuagcauaua

SEQ ID NO: 45283 - RNA, 22 nt, Human
gaauguaauagucaguagaaca

SEQ ID NO: 45284 - RNA, 22 nt, Human
gaaugucuaaacauagcuuuua

SEQ ID NO: 45285 - RNA, 22 nt, Human
gaauguuacuuugauuuugucc

SEQ ID NO: 45286 - RNA, 22 nt, Human
gaauguuauuggacagcagugg

SEQ ID NO: 45287 - RNA, 22 nt, Human
gaauguuccucagacuucccca

SEQ ID NO: 45288 - RNA, 22 nt, Human
gaauguuucauguguauguuag

SEQ ID NO: 45289 - RNA, 22 nt, Human
gaauguuugugcagagucaucu

SEQ ID NO: 45290 - RNA, 22 nt, Human
gaauuacauaguuucuagguuc

SEQ ID NO: 45291 - RNA, 22 nt, Human
gaauuacaugacccugaguaga

SEQ ID NO: 45292 - RNA, 22 nt, Human
gaauuagguaauagaacuagua

SEQ ID NO: 45293 - RNA, 22 nt, Human
gaauuauaaacuagugacuuca

SEQ ID NO: 45294 - RNA, 19 nt, Human
gaauuauuuuuaugggaug

SEQ ID NO: 45295 - RNA, 22 nt, Human
gaauucaucgucuuagcugcca

SEQ ID NO: 45296 - RNA, 22 nt, Human
gaauucuaaccauuaagccaag

SEQ ID NO: 45297 - RNA, 22 nt, Human
gaauucugguuuugaaaugaau

SEQ ID NO: 45298 - RNA, 23 nt, Human
gaauucuuaaggucacuaaaguc

SEQ ID NO: 45299 - RNA, 22 nt, Human
gaauugcuaauccaagugacug

SEQ ID NO: 45300 - RNA, 22 nt, Human
gaauugcucugccuggccagcc

SEQ ID NO: 45301 - RNA, 22 nt, Human
ggcuggaaacucagguaggguu

SEQ ID NO: 45302 - RNA, 18 nt, Human
ggcuggaagcuguugcug

SEQ ID NO: 45303 - RNA, 22 nt, Human
ggcuggaaggcccuuuguugau

SEQ ID NO: 45304 - RNA, 22 nt, Human
ggcuggaagguagaagaugagg

SEQ ID NO: 45305 - RNA, 22 nt, Human
ggcuggaaguccaagaucaaga

SEQ ID NO: 45306 - RNA, 22 nt, Human
ggcuggaauguguggaugugau

SEQ ID NO: 45307 - RNA, 21 nt, Human
ggcuggacaucccaggagacu

SEQ ID NO: 45308 - RNA, 22 nt, Human
ggcuggacuugguccuguuuug

SEQ ID NO: 45309 - RNA, 22 nt, Human
ggcuggagaagggugguugaca

SEQ ID NO: 45310 - RNA, 22 nt, Human
ggcuggagauaugucuggaaca

SEQ ID NO: 45311 - RNA, 22 nt, Human
ggcuggaggagaauggguguga

SEQ ID NO: 45312 - RNA, 17 nt, Human
ggcuggaggggacccgg

SEQ ID NO: 45313 - RNA, 22 nt, Human
ggcuggagguagaagaacacuu

SEQ ID NO: 45314 - RNA, 19 nt, Human
ggcuggaguggccaucugu

SEQ ID NO: 45315 - RNA, 22 nt, Human
ggcuggagugggcuccagaguu

SEQ ID NO: 45316 - RNA, 22 nt, Human
ggcuggauguacuuuggggcug

SEQ ID NO: 45317 - RNA, 22 nt, Human
ggcuggcaagugucugcucaug

SEQ ID NO: 45318 - RNA, 22 nt, Human
ggcuggcacccuuggggauagg

SEQ ID NO: 45319 - RNA, 22 nt, Human
ggcuggcaccugcccuccgcug

SEQ ID NO: 45320 - RNA, 22 nt, Human
ggcuggcaggcacaguaugcaa

SEQ ID NO: 45321 - RNA, 22 nt, Human
ggcuggcagugugagagaggga

SEQ ID NO: 45322 - RNA, 22 nt, Human
ggcuggccucuacagggaggca

SEQ ID NO: 45323 - RNA, 22 nt, Human
ggcuggcugcaugcccccuccu

SEQ ID NO: 45324 - RNA, 22 nt, Human
ggcugggaggccgugcugaccu

SEQ ID NO: 45325 - RNA, 22 nt, Human
ggcugggcaaacaagacucuuc

SEQ ID NO: 45326 - RNA, 22 nt, Human
ggcugggcagcagcuguuaagc

SEQ ID NO: 45327 - RNA, 21 nt, Human
ggcugggcaggacccaccccu

SEQ ID NO: 45328 - RNA, 22 nt, Human
ggcugggcugcggcuguaccug

SEQ ID NO: 45329 - RNA, 22 nt, Human
ggcuggguacagggcagugugc

SEQ ID NO: 45330 - RNA, 21 nt, Human
ggcugggucaugcagcuggcc

SEQ ID NO: 45331 - RNA, 19 nt, Human
ggcugggucuggcagguuc

SEQ ID NO: 45332 - RNA, 22 nt, Human
ggcuggguuauuuauggccaag

SEQ ID NO: 45333 - RNA, 22 nt, Human
ggcuggguucugagaaagagua

SEQ ID NO: 45334 - RNA, 22 nt, Human
ggcugguguuacagucggcagc

SEQ ID NO: 45335 - RNA, 22 nt, Human
ggcuguauauacuguauacagu

SEQ ID NO: 45336 - RNA, 22 nt, Human
ggcuguccuuggccaaggcacu

SEQ ID NO: 45337 - RNA, 19 nt, Human
ggcugucuggcguguggau

SEQ ID NO: 45338 - RNA, 22 nt, Human
ggcugucuugggagcucccccg

SEQ ID NO: 45339 - RNA, 22 nt, Human
ggcugugacaaggcugcgggaa

SEQ ID NO: 45340 - RNA, 23 nt, Human
ggcugugcagccugcggcaaaag

SEQ ID NO: 45341 - RNA, 22 nt, Human
ggcugugcagggcagagucuca

SEQ ID NO: 45342 - RNA, 22 nt, Human
ggcugugcuuugcccaaagggc

SEQ ID NO: 45343 - RNA, 22 nt, Human
ggcugugcuuuguuagguuguc

SEQ ID NO: 45344 - RNA, 18 nt, Human
ggcuguggacaagauuag

SEQ ID NO: 45345 - RNA, 22 nt, Human
ggcuguggccagcggggcugag

SEQ ID NO: 45346 - RNA, 22 nt, Human
ggcugugggccagcuagacccu

SEQ ID NO: 45347 - RNA, 22 nt, Human
ggcuguggggaccaacaggacu

SEQ ID NO: 45348 - RNA, 22 nt, Human
ggcuguggggccggguacagug

SEQ ID NO: 45349 - RNA, 22 nt, Human
ggcugugguggcaucccugagc

SEQ ID NO: 45350 - RNA, 22 nt, Human
ggcuguguccccaccugagcag

SEQ ID NO: 45351 - RNA, 22 nt, Human
ggcuuaagaaaugucuaguuuu

SEQ ID NO: 45352 - RNA, 22 nt, Human
ggcuuaaugguucuuuuucuca

SEQ ID NO: 45353 - RNA, 22 nt, Human
ggcuucacagccccauuagugc

SEQ ID NO: 45354 - RNA, 22 nt, Human
ggcuucacaguuguagcagcuc

SEQ ID NO: 45355 - RNA, 22 nt, Human
ggcuucagugagcugagcucac

SEQ ID NO: 45356 - RNA, 19 nt, Human
ggcuucaguuuagcaggcu

SEQ ID NO: 45357 - RNA, 22 nt, Human
ggcuucauggacaaaagccuca

SEQ ID NO: 45358 - RNA, 22 nt, Human
ggcuucauggaggaggugaguc

SEQ ID NO: 45359 - RNA, 22 nt, Human
ggcuucauggaguucuacacca

SEQ ID NO: 45360 - RNA, 22 nt, Human
ggcuucauuuuaucuuaucaug

SEQ ID NO: 45361 - RNA, 22 nt, Human
ggcuuccaagguccucuccacc

SEQ ID NO: 45362 - RNA, 18 nt, Human
ggcuucccuacucacuuc

SEQ ID NO: 45363 - RNA, 22 nt, Human
ggcuucccugccucacuuauuc

SEQ ID NO: 45364 - RNA, 22 nt, Human
ggcuucccuuuccgagaggaga

SEQ ID NO: 45365 - RNA, 22 nt, Human
ggcuuccuaauacucccuacac

SEQ ID NO: 45366 - RNA, 19 nt, Human
ggcuucgaggcuggggaag

SEQ ID NO: 45367 - RNA, 22 nt, Human
ggcuucgcagcucggcagccgc

SEQ ID NO: 45368 - RNA, 22 nt, Human
ggcuucugaaccaggcccugga

SEQ ID NO: 45369 - RNA, 22 nt, Human
ggcuucugcucagccugcacgc

SEQ ID NO: 45370 - RNA, 22 nt, Human
ggcuucuguccucuggaucugu

SEQ ID NO: 45371 - RNA, 22 nt, Human
ggcuucugucucaagcaccagc

SEQ ID NO: 45372 - RNA, 20 nt, Human
ggcuucuucaggugucuauu

SEQ ID NO: 45373 - RNA, 22 nt, Human
ggcuucuuccugugaacauguu

SEQ ID NO: 45374 - RNA, 22 nt, Human
ggcuugaucacauaggucuccc

SEQ ID NO: 45375 - RNA, 22 nt, Human
ggcuuggaauugguaggaugua

SEQ ID NO: 45376 - RNA, 22 nt, Human
ggcuuggcuacaagccaugggc

SEQ ID NO: 45377 - RNA, 22 nt, Human
ggcuuggcugucucccagccca

SEQ ID NO: 45378 - RNA, 22 nt, Human
ggcuuggcuugggcucagaggc

SEQ ID NO: 45379 - RNA, 22 nt, Human
ggcuuuaacaacagaaauuuau

SEQ ID NO: 45380 - RNA, 22 nt, Human
ggcuuuaacagcagcuuugcug

SEQ ID NO: 45381 - RNA, 22 nt, Human
ggcuuuaaggaguaaaaaugcc

SEQ ID NO: 45382 - RNA, 22 nt, Human
ggcuuuaagguuuaggaagcaa

SEQ ID NO: 45383 - RNA, 22 nt, Human
gagcuuaaaacauagccagacu

SEQ ID NO: 45384 - RNA, 22 nt, Human
gagcuuaaauggcuaaauauaa

SEQ ID NO: 45385 - RNA, 22 nt, Human
gagcuuaggccagggacaggga

SEQ ID NO: 45386 - RNA, 23 nt, Human
gagcuuagucuacucagacaucc

SEQ ID NO: 45387 - RNA, 22 nt, Human
gagcuucacgggggacagcauu

SEQ ID NO: 45388 - RNA, 22 nt, Human
gagcuucagagaccacuuaacu

SEQ ID NO: 45389 - RNA, 22 nt, Human
gagcuucagcugccaugacugu

SEQ ID NO: 45390 - RNA, 22 nt, Human
gagcuucauauguugcagagaa

SEQ ID NO: 45391 - RNA, 22 nt, Human
gagcuuccugcaggucacugug

SEQ ID NO: 45392 - RNA, 18 nt, Human
gagcuugaaauggcuuuu

SEQ ID NO: 45393 - RNA, 22 nt, Human
gagcuugggugccaugcugagc

SEQ ID NO: 45394 - RNA, 22 nt, Human
gagcuugguguuauuucugugg

SEQ ID NO: 45395 - RNA, 22 nt, Human
gagcuuuaagggauaaaaugau

SEQ ID NO: 45396 - RNA, 22 nt, Human
gagcuuuacuucugacuggugc

SEQ ID NO: 45397 - RNA, 22 nt, Human
gagcuuugaucgcuaagccuca

SEQ ID NO: 45398 - RNA, 22 nt, Human
gagcuuugcauuauucagaagc

SEQ ID NO: 45399 - RNA, 22 nt, Human
gagcuuugccuaaaacuagaau

SEQ ID NO: 45400 - RNA, 22 nt, Human
gagcuuuguagcaggaaggaag

SEQ ID NO: 45401 - RNA, 22 nt, Human
gagcuuugucuccuggagaccc

SEQ ID NO: 45402 - RNA, 22 nt, Human
gagcuuuuauaccuucucucag

SEQ ID NO: 45403 - RNA, 22 nt, Human
gagcuuuucccgucuuucucgu

SEQ ID NO: 45404 - RNA, 23 nt, Human
gagcuuuuguaguagucacugug

SEQ ID NO: 45405 - RNA, 22 nt, Human
gaggaaaauaacaacuaagggc

SEQ ID NO: 45406 - RNA, 23 nt, Human
gaggaaagaauauagaugcaauc

SEQ ID NO: 45407 - RNA, 22 nt, Human
gaggaaaugguuguucaggugg

SEQ ID NO: 45408 - RNA, 22 nt, Human
gaggaacagagggcaaggccag

SEQ ID NO: 45409 - RNA, 22 nt, Human
gaggaacaugaggugaccuggg

SEQ ID NO: 45410 - RNA, 22 nt, Human
gagaggccaagggauccgugag

SEQ ID NO: 45411 - RNA, 22 nt, Human
gagaggccauggggugggaugc

SEQ ID NO: 45412 - RNA, 22 nt, Human
gagaggcucagggacuugcuga

SEQ ID NO: 45413 - RNA, 22 nt, Human
gagaggcuggcagugccagguu

SEQ ID NO: 45414 - RNA, 22 nt, Human
gagaggcugguaaagucugaac

SEQ ID NO: 45415 - RNA, 22 nt, Human
gagaggcuuaagggcugugaag

SEQ ID NO: 45416 - RNA, 22 nt, Human
gagaggcuugugugaagaacaa

SEQ ID NO: 45417 - RNA, 22 nt, Human
gagagggcaaacuuguagcuaa

SEQ ID NO: 45418 - RNA, 21 nt, Human
gagagggcauuauaggaagug

SEQ ID NO: 45419 - RNA, 22 nt, Human
gagaggggaccugugugucuag

SEQ ID NO: 45420 - RNA, 22 nt, Human
gagagggugccuggaagccagg

SEQ ID NO: 45421 - RNA, 22 nt, Human
gagagguacacccuuuaaacuu

SEQ ID NO: 45422 - RNA, 22 nt, Human
gagagguagcaguaagaacagg

SEQ ID NO: 45423 - RNA, 22 nt, Human
gagaggugaaauaguuguccgg

SEQ ID NO: 45424 - RNA, 22 nt, Human
gagagguggugaggacuugucu

SEQ ID NO: 45425 - RNA, 22 nt, Human
gagagguuccucccugcuuuac

SEQ ID NO: 45426 - RNA, 22 nt, Human
gagaguccuuaguuugcaggua

SEQ ID NO: 45427 - RNA, 22 nt, Human
gagagugaaggcuucccagcaa

SEQ ID NO: 45428 - RNA, 22 nt, Human
gagagugagauccuccugggga

SEQ ID NO: 45429 - RNA, 22 nt, Human
gagagugaugaaugguuaaaca

SEQ ID NO: 45430 - RNA, 17 nt, Human
gagaguguauuggaugc

SEQ ID NO: 45431 - RNA, 22 nt, Human
gagaguuccaguaaguggauuc

SEQ ID NO: 45432 - RNA, 22 nt, Human
gagauaauaauaguaccuaucu

SEQ ID NO: 45433 - RNA, 22 nt, Human
gagauacaguuggcugcaggcu

SEQ ID NO: 45434 - RNA, 22 nt, Human
gagauauaagaucuagaaagga

SEQ ID NO: 45435 - RNA, 22 nt, Human
gagauccacuuaauuuuuuugc

SEQ ID NO: 45436 - RNA, 20 nt, Human
gagauccucaucuguaaagu

SEQ ID NO: 45437 - RNA, 22 nt, Human
gagaucgguaaagagcaugcac

SEQ ID NO: 45438 - RNA, 22 nt, Human
gagaucucuagcacuuccugua

SEQ ID NO: 45439 - RNA, 22 nt, Human
gagaugaagaggcccuuggagu

SEQ ID NO: 45440 - RNA, 22 nt, Human
gagaugacaugccuguuguagg

SEQ ID NO: 45441 - RNA, 22 nt, Human
gagauggaaucuguguggaggg

SEQ ID NO: 45442 - RNA, 20 nt, Human
gagauggcuaagugcugaac

SEQ ID NO: 45443 - RNA, 23 nt, Human
gagauggcugguuguccucugaa

SEQ ID NO: 45444 - RNA, 22 nt, Human
gagauggggaauaggagcaagc

SEQ ID NO: 45445 - RNA, 22 nt, Human
gagaugguugcaauaguuuaaa

SEQ ID NO: 45446 - RNA, 22 nt, Human
gagauguacaauguguauuaau

SEQ ID NO: 45447 - RNA, 22 nt, Human
gagaugugauccuuugcugugu

SEQ ID NO: 45448 - RNA, 22 nt, Human
gagauucuauguuguugauuau

SEQ ID NO: 45449 - RNA, 22 nt, Human
gagauucuuuccagaacuuuga

SEQ ID NO: 45450 - RNA, 22 nt, Human
gagauuggccuggcuugccaac

SEQ ID NO: 45451 - RNA, 22 nt, Human
gagauuguuuagcuaccauggc

SEQ ID NO: 45452 - RNA, 22 nt, Human
gagauuuagcugcuuaacuccu

SEQ ID NO: 45453 - RNA, 20 nt, Human
gagauuuccaaucaugccca

SEQ ID NO: 45454 - RNA, 22 nt, Human
gagauuucuuuugaugccuguc

SEQ ID NO: 45455 - RNA, 22 nt, Human
gagauuuucagcuugacuggga

SEQ ID NO: 45456 - RNA, 22 nt, Human
gagcaaaauaaauucugacaaa

SEQ ID NO: 45457 - RNA, 22 nt, Human
gagcaacacuccacauugcuag

SEQ ID NO: 45458 - RNA, 22 nt, Human
gagcaacagggcgaggagaacu

SEQ ID NO: 45459 - RNA, 22 nt, Human
gagcaacaguggcagugguggg

SEQ ID NO: 45460 - RNA, 22 nt, Human
gagcaacaguuuaugguuuuuc

SEQ ID NO: 45461 - RNA, 22 nt, Human
gagcaagacuacaggcagauga

SEQ ID NO: 45462 - RNA, 22 nt, Human
gagcaagaguguuggacuuuga

SEQ ID NO: 45463 - RNA, 22 nt, Human
gagcaaggaggguggggccuuu

SEQ ID NO: 45464 - RNA, 22 nt, Human
gagcaauacauggcaugaaauu

SEQ ID NO: 45465 - RNA, 22 nt, Human
gagcaauagaaagaauacugcu

SEQ ID NO: 45466 - RNA, 22 nt, Human
gagcaaugcccuucaccagccc

SEQ ID NO: 45467 - RNA, 22 nt, Human
gagcaauggaagauagauaaca

SEQ ID NO: 45468 - RNA, 22 nt, Human
gagcacacacuuugaaauuagg

SEQ ID NO: 45469 - RNA, 22 nt, Human
gagcacagaacuaaaugcuggu

SEQ ID NO: 45470 - RNA, 22 nt, Human
gagcacagaaggagaaauaugg

SEQ ID NO: 45471 - RNA, 22 nt, Human
gagcacagcgcaguuuguaauu

SEQ ID NO: 45472 - RNA, 22 nt, Human
gagcacaggcuuugguggacac

SEQ ID NO: 45473 - RNA, 22 nt, Human
gagcacaguaaagcagugucac

SEQ ID NO: 45474 - RNA, 20 nt, Human
gagcacaguaaugacugcua

SEQ ID NO: 45475 - RNA, 22 nt, Human
gagcacauucccaggagcugcu

SEQ ID NO: 45476 - RNA, 22 nt, Human
gagcacccgucggugguaggaa

SEQ ID NO: 45477 - RNA, 22 nt, Human
gagcacccuuugcacaucaguc

SEQ ID NO: 45478 - RNA, 22 nt, Human
gagcaccucaauuugcuauuug

SEQ ID NO: 45479 - RNA, 22 nt, Human
gagcagaacuacucacauaucg

SEQ ID NO: 45480 - RNA, 22 nt, Human
gagcagagaauccagcuaagug

SEQ ID NO: 45481 - RNA, 22 nt, Human
gagcagagacaguacaacuggc

SEQ ID NO: 45482 - RNA, 22 nt, Human
gagcagagucuauuuccacacu

SEQ ID NO: 45483 - RNA, 22 nt, Human
gagcagaucucaggccuucugu

SEQ ID NO: 45484 - RNA, 22 nt, Human
gagcagaugugugccaggaugc

SEQ ID NO: 45485 - RNA, 22 nt, Human
gagcagcaaagggaggguaaau

SEQ ID NO: 45486 - RNA, 22 nt, Human
gagcagcagcugggccagguuc

SEQ ID NO: 45487 - RNA, 18 nt, Human
gagcagcaggaucaagaa

SEQ ID NO: 45488 - RNA, 22 nt, Human
gagcagcagguggcugugaugg

SEQ ID NO: 45489 - RNA, 22 nt, Human
gagcagcaucuccggcuuaaag

SEQ ID NO: 45490 - RNA, 22 nt, Human
gagcagcucagaggacuagugu

SEQ ID NO: 45491 - RNA, 22 nt, Human
gagcagcucgagaaggaagcag

SEQ ID NO: 45492 - RNA, 22 nt, Human
gagcagcucugugccuggagac

SEQ ID NO: 45493 - RNA, 22 nt, Human
gagcagcugcagugcagacccu

SEQ ID NO: 45494 - RNA, 22 nt, Human
gagcagcuggcuguauugguuu

SEQ ID NO: 45495 - RNA, 22 nt, Human
gagcagcugguaggugaaccca

SEQ ID NO: 45496 - RNA, 22 nt, Human
gagcagcuguucugacuugucu

SEQ ID NO: 45497 - RNA, 22 nt, Human
gagcaggaacugaaaaugagac

SEQ ID NO: 45498 - RNA, 22 nt, Human
ggcuuuauaggguagaggauca

SEQ ID NO: 45499 - RNA, 22 nt, Human
ggcuuuaugcagggauagaaau

SEQ ID NO: 45500 - RNA, 21 nt, Human
ggcuuuaugcucacccagccu

SEQ ID NO: 45501 - RNA, 22 nt, Human
ggcuuuauuaacucauccguaa

SEQ ID NO: 45502 - RNA, 22 nt, Human
ggcuuuauuauguggccaugug

SEQ ID NO: 45503 - RNA, 22 nt, Human
ggcuuucagccaaaggacaacc

SEQ ID NO: 45504 - RNA, 22 nt, Human
ggcuuucuaugaacucaaaggc

SEQ ID NO: 45505 - RNA, 22 nt, Human
ggcuuucucacagcauggcagc

SEQ ID NO: 45506 - RNA, 22 nt, Human
ggcuuugccuggaauuuccuug

SEQ ID NO: 45507 - RNA, 22 nt, Human
ggcuuugcuuaacgugcuucua

SEQ ID NO: 45508 - RNA, 22 nt, Human
ggcuuuguggggugaaguaaag

SEQ ID NO: 45509 - RNA, 22 nt, Human
ggcuuuugcuguguuuuccaga

SEQ ID NO: 45510 - RNA, 22 nt, Human
ggcuuuuguuucagcucugcua

SEQ ID NO: 45511 - RNA, 22 nt, Human
gggaaacucaggcauuuccacu

SEQ ID NO: 45512 - RNA, 22 nt, Human
gggaaagacccugagucuuauu

SEQ ID NO: 45513 - RNA, 22 nt, Human
gggaaagacuuauuuugacuuc

SEQ ID NO: 45514 - RNA, 23 nt, Human
gggaaaggauaugauccuagggg

SEQ ID NO: 45515 - RNA, 22 nt, Human
gggaaaucucguccucuauuua

SEQ ID NO: 45516 - RNA, 22 nt, Human
gggaaccaccccucugcccuga

SEQ ID NO: 45517 - RNA, 22 nt, Human
gggaacuguuuaacagggguuu

SEQ ID NO: 45518 - RNA, 22 nt, Human
gggaacuucagaaagucgcugc

SEQ ID NO: 45519 - RNA, 22 nt, Human
aggagacucagagaccuggccg

SEQ ID NO: 45520 - RNA, 22 nt, Human
aggagagagguuuuaaaugggg

SEQ ID NO: 45521 - RNA, 22 nt, Human
aggagaggaaucauuauuacaa

SEQ ID NO: 45522 - RNA, 22 nt, Human
aggagaggcaucaagaaaaucg

SEQ ID NO: 45523 - RNA, 22 nt, Human
aggagagggguaggauuaauuu

SEQ ID NO: 45524 - RNA, 22 nt, Human
aggagaguaccauugggccgca

SEQ ID NO: 45525 - RNA, 22 nt, Human
aggagauaagaggcuggugugg

SEQ ID NO: 45526 - RNA, 22 nt, Human
aggagaucagcuuagggaaggu

SEQ ID NO: 45527 - RNA, 22 nt, Human
aggagcacugagccagcauggg

SEQ ID NO: 45528 - RNA, 23 nt, Human
aggagcacuuucaguuuguaaag

SEQ ID NO: 45529 - RNA, 22 nt, Human
aggagcagauugguaagaucau

SEQ ID NO: 45530 - RNA, 22 nt, Human
aggagccaagauggggcaagua

SEQ ID NO: 45531 - RNA, 23 nt, Human
aggagccagcccuguucucagua

SEQ ID NO: 45532 - RNA, 22 nt, Human
aggagccagggaagcugcuuuc

SEQ ID NO: 45533 - RNA, 23 nt, Human
aggagccaggugcagcccuugug

SEQ ID NO: 45534 - RNA, 22 nt, Human
aggagccaguggaguuccugcc

SEQ ID NO: 45535 - RNA, 22 nt, Human
aggagccauccccaugagaggu

SEQ ID NO: 45536 - RNA, 22 nt, Human
aggagccaugagcaggaggcaa

SEQ ID NO: 45537 - RNA, 22 nt, Human
aggagccaugagugacaucaca

SEQ ID NO: 45538 - RNA, 23 nt, Human
aggagccaugaguuggauauguu

SEQ ID NO: 45539 - RNA, 22 nt, Human
aggagccauggaggugaggcgg

SEQ ID NO: 45540 - RNA, 22 nt, Human
aggagcccagccugggcucgga

SEQ ID NO: 45541 - RNA, 22 nt, Human
aggagccugagucacagugccu

SEQ ID NO: 45542 - RNA, 18 nt, Human
aggagcggcugcggcugc

SEQ ID NO: 45543 - RNA, 22 nt, Human
aggagcuaauucauaagccacu

SEQ ID NO: 45544 - RNA, 22 nt, Human
aggagcucaaagaugccaggag

SEQ ID NO: 45545 - RNA, 22 nt, Human
aggagcucacaucuuuauuucu

SEQ ID NO: 45546 - RNA, 22 nt, Human
aggagcucagccauucauuuga

SEQ ID NO: 45547 - RNA, 22 nt, Human
aggagcucauugaaguggauga

SEQ ID NO: 45548 - RNA, 22 nt, Human
aggagcucccgugaggagacca

SEQ ID NO: 45549 - RNA, 20 nt, Human
aggagcucugugcugggaag

SEQ ID NO: 45550 - RNA, 22 nt, Human
aggagcugaaacuucucauaug

SEQ ID NO: 45551 - RNA, 20 nt, Human
aggagcugaauuagaggguu

SEQ ID NO: 45552 - RNA, 22 nt, Human
aggagcugacuuguaaagcauu

SEQ ID NO: 45553 - RNA, 22 nt, Human
aggagcugauagucuauggaga

SEQ ID NO: 45554 - RNA, 22 nt, Human
aggagcugcaaauauuaguaau

SEQ ID NO: 45555 - RNA, 22 nt, Human
aggagcuggaguccaggcaagu

SEQ ID NO: 45556 - RNA, 16 nt, Human
aggagcuggguaggag

SEQ ID NO: 45557 - RNA, 23 nt, Human
aggaggaaaaguuaucugcugag

SEQ ID NO: 45558 - RNA, 22 nt, Human
aggaggaaggcuucauuagguu

SEQ ID NO: 45559 - RNA, 22 nt, Human
aggaggaauacaauccagcagc

SEQ ID NO: 45560 - RNA, 22 nt, Human
aggaggagguaagaaaagcaua

SEQ ID NO: 45561 - RNA, 22 nt, Human
aggaggcaacugagauuuagaa

SEQ ID NO: 45562 - RNA, 22 nt, Human
aggaggccauucucucaguagc

SEQ ID NO: 45563 - RNA, 22 nt, Human
aggaggcucucagguccucccc

SEQ ID NO: 45564 - RNA, 22 nt, Human
aggaggcugcaacccugaggcc

SEQ ID NO: 45565 - RNA, 21 nt, Human
aggaggcugucucuuucagcu

SEQ ID NO: 45566 - RNA, 22 nt, Human
aggagggaauaagaaagaguca

SEQ ID NO: 45567 - RNA, 22 nt, Human
aggagggauagaaaaauacuug

SEQ ID NO: 45568 - RNA, 22 nt, Human
aggaggggcaaugauagucugg

SEQ ID NO: 45569 - RNA, 22 nt, Human
aggagggugauccgggcugguc

SEQ ID NO: 45570 - RNA, 22 nt, Human
aggagggugggaagcaguuuua

SEQ ID NO: 45571 - RNA, 22 nt, Human
aggaggguuucaaugggaugag

SEQ ID NO: 45572 - RNA, 22 nt, Human
aggaggugagcggucauguggu

SEQ ID NO: 45573 - RNA, 22 nt, Human
aggaggugcuagagaagauguu

SEQ ID NO: 45574 - RNA, 22 nt, Human
aggagucagauuguuugaaugu

SEQ ID NO: 45575 - RNA, 22 nt, Human
aggagucaggaccaaauggaaa

SEQ ID NO: 45576 - RNA, 22 nt, Human
aggagugagcuuuggggucaga

SEQ ID NO: 45577 - RNA, 22 nt, Human
aggagugggggcgagaaguuaa

SEQ ID NO: 45578 - RNA, 22 nt, Human
aggaguuauggcagaaucaaau

SEQ ID NO: 45579 - RNA, 21 nt, Human
aggaguugcuguggccugguu

SEQ ID NO: 45580 - RNA, 22 nt, Human
aggaguuuggggauuagucagg

SEQ ID NO: 45581 - RNA, 23 nt, Human
aggauaaacuaaacucauuuugg

SEQ ID NO: 45582 - RNA, 22 nt, Human
aggauaacuuugaaaguaaauu

SEQ ID NO: 45583 - RNA, 22 nt, Human
aggauaauuggcauuuguaggc

SEQ ID NO: 45584 - RNA, 22 nt, Human
aggauacauguuuuuuaucaau

SEQ ID NO: 45585 - RNA, 22 nt, Human
aggauaguugugaagauaggcu

SEQ ID NO: 45586 - RNA, 22 nt, Human
aggauauaaaaagacuauuugg

SEQ ID NO: 45587 - RNA, 22 nt, Human
aggaucagugaauacucagggu

SEQ ID NO: 45588 - RNA, 23 nt, Human
aggauccugguacaggagcagag

SEQ ID NO: 45589 - RNA, 22 nt, Human
aggaucugugccucaacccaga

SEQ ID NO: 45590 - RNA, 22 nt, Human
aggaugagaagauuggaaucuu

SEQ ID NO: 45591 - RNA, 22 nt, Human
aggaugagauugcuguguugua

SEQ ID NO: 45592 - RNA, 22 nt, Human
aggaugaggcuggcaggucuug

SEQ ID NO: 45593 - RNA, 20 nt, Human
aggaugcagggagucugcag

SEQ ID NO: 45594 - RNA, 21 nt, Human
aggaugccgcaggcggagaag

SEQ ID NO: 45595 - RNA, 21 nt, Human
aggauggaaaggacuaggggu

SEQ ID NO: 45596 - RNA, 22 nt, Human
aggaugggccugggauaugcuu

SEQ ID NO: 45597 - RNA, 22 nt, Human
aggaugugagccagccuggccu

SEQ ID NO: 45598 - RNA, 22 nt, Human
aggaugugccaccagcuuugca

SEQ ID NO: 45599 - RNA, 22 nt, Human
aggauguguuuugagcugacua

SEQ ID NO: 45600 - RNA, 22 nt, Human
aggauuaaaguauauuuuugag

SEQ ID NO: 45601 - RNA, 22 nt, Human
aggauucuguaaucugugaaau

SEQ ID NO: 45602 - RNA, 22 nt, Human
aggauugugccuccagucagaa

SEQ ID NO: 45603 - RNA, 22 nt, Human
aggauuuaaucaguuggcauuu

SEQ ID NO: 45604 - RNA, 22 nt, Human
aggauuuaucaggaacucucuu

SEQ ID NO: 45605 - RNA, 22 nt, Human
aggauuuauuauaugcccucau

SEQ ID NO: 45606 - RNA, 22 nt, Human
aggauuugaaccuaggcaauca

SEQ ID NO: 45607 - RNA, 22 nt, Human
aggauuugaaccugcauccagu

SEQ ID NO: 45608 - RNA, 23 nt, Human
agucuucauuguauuuccagacc

SEQ ID NO: 45609 - RNA, 22 nt, Human
agucuucugcucugucacuaac

SEQ ID NO: 45610 - RNA, 22 nt, Human
agucuucuugaucuuuucagug

SEQ ID NO: 45611 - RNA, 22 nt, Human
agucuucuuucauuuacucagu

SEQ ID NO: 45612 - RNA, 22 nt, Human
agucuugcauuuucugaagaug

SEQ ID NO: 45613 - RNA, 22 nt, Human
agucuuuaacauuuggagauug

SEQ ID NO: 45614 - RNA, 22 nt, Human
agucuuuauacagaaauauaug

SEQ ID NO: 45615 - RNA, 22 nt, Human
agucuuuauugucgucacuaga

SEQ ID NO: 45616 - RNA, 22 nt, Human
agucuuuauuuagaguuaggac

SEQ ID NO: 45617 - RNA, 18 nt, Human
agucuuuauuucuuucau

SEQ ID NO: 45618 - RNA, 22 nt, Human
agugaaaaccuaaucaugcagu

SEQ ID NO: 45619 - RNA, 22 nt, Human
agugaaauacugucguuuuuag

SEQ ID NO: 45620 - RNA, 22 nt, Human
agugaaauggaugcugcuacug

SEQ ID NO: 45621 - RNA, 22 nt, Human
agugaaauuccuggucuuuguu

SEQ ID NO: 45622 - RNA, 19 nt, Human
agugaacuccauaucaggu

SEQ ID NO: 45623 - RNA, 22 nt, Human
agugaaguaaaagaugugcauc

SEQ ID NO: 45624 - RNA, 22 nt, Human
agugaauguccccgcgggucag

SEQ ID NO: 45625 - RNA, 23 nt, Human
agugacaaugggccagagguggc

SEQ ID NO: 45626 - RNA, 22 nt, Human
agugacacggagagacagcaug

SEQ ID NO: 45627 - RNA, 22 nt, Human
agugacagccaaauccauccau

SEQ ID NO: 45628 - RNA, 22 nt, Human
aguuaacuaaacugugaguaaa

SEQ ID NO: 45629 - RNA, 22 nt, Human
aguuaagaaggucaacgaggga

SEQ ID NO: 45630 - RNA, 22 nt, Human
aguuaagaauacacaucauaau

SEQ ID NO: 45631 - RNA, 22 nt, Human
aguuaaggggguucaucuguaa

SEQ ID NO: 45632 - RNA, 22 nt, Human
aguuacaaccaugacacaagca

SEQ ID NO: 45633 - RNA, 22 nt, Human
aguuacacauaaacauuaaagg

SEQ ID NO: 45634 - RNA, 22 nt, Human
aguuacauauaagaagacagac

SEQ ID NO: 45635 - RNA, 22 nt, Human
aguuacaugacugccggcggug

SEQ ID NO: 45636 - RNA, 22 nt, Human
aguuacugcuuucaggaaguuu

SEQ ID NO: 45637 - RNA, 18 nt, Human
aguuagaaaugaaggcca

SEQ ID NO: 45638 - RNA, 22 nt, Human
aguuagaauggauguugagagc

SEQ ID NO: 45639 - RNA, 22 nt, Human
aguuagagacacaugcacaugc

SEQ ID NO: 45640 - RNA, 22 nt, Human
aguuagaguuaauuuccuaaca

SEQ ID NO: 45641 - RNA, 22 nt, Human
aguuagcaaauaccacaaucug

SEQ ID NO: 45642 - RNA, 22 nt, Human
aguuaggacacuugagggcuaa

SEQ ID NO: 45643 - RNA, 22 nt, Human
aguuaggaguauaggaaugccu

SEQ ID NO: 45644 - RNA, 23 nt, Human
aguuaggucaaguuaggucaauu

SEQ ID NO: 45645 - RNA, 22 nt, Human
aguuauaggugguuuugagaau

SEQ ID NO: 45646 - RNA, 22 nt, Human
aguuauucauuuauucuguaca

SEQ ID NO: 45647 - RNA, 22 nt, Human
aguuauugaguaucuauaaugu

SEQ ID NO: 45648 - RNA, 22 nt, Human
aguuauugagugcagagcaggg

SEQ ID NO: 45649 - RNA, 22 nt, Human
aguuauuuacuccuuugucucu

SEQ ID NO: 45650 - RNA, 22 nt, Human
aguuauuucaguaacauaauag

SEQ ID NO: 45651 - RNA, 19 nt, Human
aguuauuucuaaauuuacc

SEQ ID NO: 45652 - RNA, 22 nt, Human
aguuauuuuacauggaaguuug

SEQ ID NO: 45653 - RNA, 22 nt, Human
aguuauuuuggaaaaugaguca

SEQ ID NO: 45654 - RNA, 22 nt, Human
aguucaaaaagguaaaguuuau

SEQ ID NO: 45655 - RNA, 22 nt, Human
aguucaaagcugcaguaaugga

SEQ ID NO: 45656 - RNA, 22 nt, Human
aguucaaagucaaggaaacugu

SEQ ID NO: 45657 - RNA, 22 nt, Human
aguucacaccaaaguuagguag

SEQ ID NO: 45658 - RNA, 22 nt, Human
aguucacagcaaaguggggacc

SEQ ID NO: 45659 - RNA, 22 nt, Human
aguucacauaucuguuuuauuu

SEQ ID NO: 45660 - RNA, 22 nt, Human
aguucacucuuuaugagaaagu

SEQ ID NO: 45661 - RNA, 22 nt, Human
aguucacugcuuaagccuuuga

SEQ ID NO: 45662 - RNA, 22 nt, Human
aguucagagguuaauuuauuug

SEQ ID NO: 45663 - RNA, 22 nt, Human
aguucagaguaaauguugaagg

SEQ ID NO: 45664 - RNA, 23 nt, Human
aguucagcucaguucagugagca

SEQ ID NO: 45665 - RNA, 22 nt, Human
aguucagcuucccaggucacug

SEQ ID NO: 45666 - RNA, 22 nt, Human
aguucaggcauaaggcaugaac

SEQ ID NO: 45667 - RNA, 22 nt, Human
aguucaguaguccuucauugua

SEQ ID NO: 45668 - RNA, 22 nt, Human
aguucauggaagauucaaugga

SEQ ID NO: 45669 - RNA, 22 nt, Human
aguucaugugguuuaacuuaau

SEQ ID NO: 45670 - RNA, 22 nt, Human
aguuccaaagccuguauucuua

SEQ ID NO: 45671 - RNA, 22 nt, Human
aguuccaccauuuaggaucugu

SEQ ID NO: 45672 - RNA, 22 nt, Human
aguuccauccuuccacugcccu

SEQ ID NO: 45673 - RNA, 22 nt, Human
aguucccaggugaugcugaugu

SEQ ID NO: 45674 - RNA, 22 nt, Human
aguucccuggaugagcuaaaaa

SEQ ID NO: 45675 - RNA, 18 nt, Human
aguuccuuaaauuggugu

SEQ ID NO: 45676 - RNA, 22 nt, Human
aguucuauaauuaaaaugaagg

SEQ ID NO: 45677 - RNA, 22 nt, Human
aguucuauuggguagguucugu

SEQ ID NO: 45678 - RNA, 22 nt, Human
aguucucaagguuaggaaaagu

SEQ ID NO: 45679 - RNA, 22 nt, Human
aguucucagaauugcaccucaa

SEQ ID NO: 45680 - RNA, 22 nt, Human
aguucucauuucacaggcagug

SEQ ID NO: 45681 - RNA, 22 nt, Human
aguucucuaugaagucuauugu

SEQ ID NO: 45682 - RNA, 20 nt, Human
aguucucuuccuugggccug

SEQ ID NO: 45683 - RNA, 22 nt, Human
aguucucuucucaucacccagg

SEQ ID NO: 45684 - RNA, 22 nt, Human
aguucucuuuagcucauauggu

SEQ ID NO: 45685 - RNA, 22 nt, Human
aguucugcaugaaaaaggacua

SEQ ID NO: 45686 - RNA, 22 nt, Human
aguucuggcccaggguuucuug

SEQ ID NO: 45687 - RNA, 22 nt, Human
aguucugggaaaaacauggcca

SEQ ID NO: 45688 - RNA, 22 nt, Human
aguucuguugucuagggaagcc

SEQ ID NO: 45689 - RNA, 22 nt, Human
aguucuugcuauaaaaacaaau

SEQ ID NO: 45690 - RNA, 19 nt, Human
aguucuuguccugucuguu

SEQ ID NO: 45691 - RNA, 22 nt, Human
aguucuuugugauggaaauuua

SEQ ID NO: 45692 - RNA, 22 nt, Human
aguucuuuugugaacauaugcu

SEQ ID NO: 45693 - RNA, 22 nt, Human
aguugaaauuaagagagaguuu

SEQ ID NO: 45694 - RNA, 22 nt, Human
aguugaauuaugagugucuuug

SEQ ID NO: 45695 - RNA, 22 nt, Human
aguugacauccauaacaggaag

SEQ ID NO: 45696 - RNA, 22 nt, Human
aguugagggugggagagaaaug

SEQ ID NO: 45697 - RNA, 22 nt, Human
aguugcagccuucaggagaccc

SEQ ID NO: 45698 - RNA, 21 nt, Human
aguugcauaggccagccaucc

SEQ ID NO: 45699 - RNA, 18 nt, Human
aguugcuagaugcuguag

SEQ ID NO: 45700 - RNA, 22 nt, Human
aguugcuaucgugaagcacgug

SEQ ID NO: 45701 - RNA, 22 nt, Human
aguugcucaauguggcugugga

SEQ ID NO: 45702 - RNA, 21 nt, Human
aguugcugcugcugcagguga

SEQ ID NO: 45703 - RNA, 18 nt, Human
aguugcuuauucugugca

SEQ ID NO: 45704 - RNA, 22 nt, Human
aguuggagaagaggucgggaau

SEQ ID NO: 45705 - RNA, 22 nt, Human
aguuggauggauuggaaugaag

SEQ ID NO: 45706 - RNA, 22 nt, Human
aguuggcauuccugcauccuau

SEQ ID NO: 45707 - RNA, 22 nt, Human
aguuggugagcgugugguaauc

SEQ ID NO: 45708 - RNA, 22 nt, Human
aguuguaaauucauagcuuaua

SEQ ID NO: 45709 - RNA, 22 nt, Human
aguuguaagaggcacaaggaag

SEQ ID NO: 45710 - RNA, 22 nt, Human
aguuguauuagagaacacaaac

SEQ ID NO: 45711 - RNA, 22 nt, Human
aguugucaccucuauucaaauc

SEQ ID NO: 45712 - RNA, 22 nt, Human
aguugugcugugaugcaggaua

SEQ ID NO: 45713 - RNA, 22 nt, Human
aguuuaaaucauguuuuguaac

SEQ ID NO: 45714 - RNA, 22 nt, Human
aguuuaacuuuggaaaacuaua

SEQ ID NO: 45715 - RNA, 20 nt, Human
aguuuaagaaaaagcuccag

SEQ ID NO: 45716 - RNA, 22 nt, Human
aguuuaauauccuucaacuuuc

SEQ ID NO: 45717 - RNA, 22 nt, Human
aguuuaauuggaggcguggcuc

SEQ ID NO: 45718 - RNA, 22 nt, Human
aguuuacagaugcuacaggagc

SEQ ID NO: 45719 - RNA, 22 nt, Human
aguuuacaugacguguauuuca

SEQ ID NO: 45720 - RNA, 22 nt, Human
aguuuacccacuguugaaauua

SEQ ID NO: 45721 - RNA, 22 nt, Human
aguuuacucuggugacaauuua

SEQ ID NO: 45722 - RNA, 22 nt, Human
aguuuagaauucauuuugccca

SEQ ID NO: 45723 - RNA, 22 nt, Human
aguuuagacaaagucuugcauu

SEQ ID NO: 45724 - RNA, 22 nt, Human
aguuuauguuguuuauaagcca

SEQ ID NO: 45725 - RNA, 19 nt, Human
aguuuauuauaggugauuc

SEQ ID NO: 45726 - RNA, 22 nt, Human
aguuuauuguauaugguaguuu

SEQ ID NO: 45727 - RNA, 22 nt, Human
agcugccucccugugcuugucc

SEQ ID NO: 45728 - RNA, 22 nt, Human
agcugccugcauuuauauccug

SEQ ID NO: 45729 - RNA, 22 nt, Human
agcugccuggagccagaguuga

SEQ ID NO: 45730 - RNA, 22 nt, Human
agcugccuggagucauuuccug

SEQ ID NO: 45731 - RNA, 17 nt, Human
agcugccuugcuugagc

SEQ ID NO: 45732 - RNA, 21 nt, Human
agcugccuuuagagagaacca

SEQ ID NO: 45733 - RNA, 22 nt, Human
agcugcucauuacuuucuguug

SEQ ID NO: 45734 - RNA, 22 nt, Human
agcugcuccuuuccugcaggcg

SEQ ID NO: 45735 - RNA, 22 nt, Human
agcugcucucacuggacgccug

SEQ ID NO: 45736 - RNA, 20 nt, Human
agcugcucucauccagaccu

SEQ ID NO: 45737 - RNA, 22 nt, Human
aggcucagccugggccuagagc

SEQ ID NO: 45738 - RNA, 20 nt, Human
aggcucaggguguuuaggaa

SEQ ID NO: 45739 - RNA, 22 nt, Human
aggcucaguauagcuggcaagu

SEQ ID NO: 45740 - RNA, 22 nt, Human
aggcucagucuguucaugcacu

SEQ ID NO: 45741 - RNA, 22 nt, Human
aggcucaguucacgucaacuuu

SEQ ID NO: 45742 - RNA, 22 nt, Human
aggcucauucuugccucugagc

SEQ ID NO: 45743 - RNA, 22 nt, Human
aggcuccaagagguuaagucac

SEQ ID NO: 45744 - RNA, 22 nt, Human
aggcuccacggucacuggcucu

SEQ ID NO: 45745 - RNA, 23 nt, Human
aggcuccacucccugggaugugg

SEQ ID NO: 45746 - RNA, 22 nt, Human
aggcuccagccaaugggucugu

SEQ ID NO: 45747 - RNA, 22 nt, Human
aggcuccaggccucccugcaug

SEQ ID NO: 45748 - RNA, 22 nt, Human
aggcuccagucugaaccuuggg

SEQ ID NO: 45749 - RNA, 22 nt, Human
auauuaguguagguagcuaaua

SEQ ID NO: 45750 - RNA, 22 nt, Human
auauuauaaguuauuucaaguu

SEQ ID NO: 45751 - RNA, 22 nt, Human
auauucacacuguuuaguuaca

SEQ ID NO: 45752 - RNA, 22 nt, Human
auauucacugagcauaaagcca

SEQ ID NO: 45753 - RNA, 22 nt, Human
auauucacuggguacuaaaaag

SEQ ID NO: 45754 - RNA, 22 nt, Human
auauucaucguguagaaauacu

SEQ ID NO: 45755 - RNA, 22 nt, Human
auauuccaguuauaucaaauca

SEQ ID NO: 45756 - RNA, 22 nt, Human
auauuccauugguuucccuucu

SEQ ID NO: 45757 - RNA, 22 nt, Human
auauucugccucacuacaguug

SEQ ID NO: 45758 - RNA, 22 nt, Human
auauucuggguuagauauguuu

SEQ ID NO: 45759 - RNA, 22 nt, Human
auauucuuauccuuuucucugu

SEQ ID NO: 45760 - RNA, 22 nt, Human
auauucuugugauuauaaagua

SEQ ID NO: 45761 - RNA, 22 nt, Human
auauugaucuuggaacugauuu

SEQ ID NO: 45762 - RNA, 21 nt, Human
auauuguagguaaagugcagg

SEQ ID NO: 45763 - RNA, 22 nt, Human
auauuuauaagcaagcaggacu

SEQ ID NO: 45764 - RNA, 22 nt, Human
auauuucacguagguuguuuuc

SEQ ID NO: 45765 - RNA, 22 nt, Human
auauuucaugggguuccauacu

SEQ ID NO: 45766 - RNA, 22 nt, Human
auauuuguauuucgugugugua

SEQ ID NO: 45767 - RNA, 22 nt, Human
auauuugucaucugccuuaguu

SEQ ID NO: 45768 - RNA, 22 nt, Human
auauuuguugaguucuuaugau

SEQ ID NO: 45769 - RNA, 22 nt, Human
aucaaaaugcuccagugauggu

SEQ ID NO: 45770 - RNA, 23 nt, Human
aucaaacuggugagaaugucagu

SEQ ID NO: 45771 - RNA, 22 nt, Human
aucaaaguaguagguuuuggac

SEQ ID NO: 45772 - RNA, 22 nt, Human
aucaaagugauuuguaaacagg

SEQ ID NO: 45773 - RNA, 22 nt, Human
aucaaaguucguaacugauaac

SEQ ID NO: 45774 - RNA, 22 nt, Human
aucaaaguuucccagaaguugu

SEQ ID NO: 45775 - RNA, 22 nt, Human
aucaaauauaauaauuuucgcu

SEQ ID NO: 45776 - RNA, 22 nt, Human
aucaaauuaugugcuacaagaa

SEQ ID NO: 45777 - RNA, 22 nt, Human
aucaacagagcaaagccugaac

SEQ ID NO: 45778 - RNA, 22 nt, Human
aucaacagugaagagaucaaga

SEQ ID NO: 45779 - RNA, 22 nt, Human
aucaacauagccacuccuuaga

SEQ ID NO: 45780 - RNA, 22 nt, Human
aucaacauuccaaugugguaga

SEQ ID NO: 45781 - RNA, 22 nt, Human
aucaacauuugcauccuuccac

SEQ ID NO: 45782 - RNA, 22 nt, Human
aucaagaauguucauucuucua

SEQ ID NO: 45783 - RNA, 22 nt, Human
aucaagaauugggagcuauuga

SEQ ID NO: 45784 - RNA, 22 nt, Human
aucaagagaaggggaagaugaa

SEQ ID NO: 45785 - RNA, 22 nt, Human
aucaagaguauugacaagacca

SEQ ID NO: 45786 - RNA, 22 nt, Human
aucaagggcgcgugguucggcg

SEQ ID NO: 45787 - RNA, 22 nt, Human
aucaagucugccugucuggagg

SEQ ID NO: 45788 - RNA, 22 nt, Human
aucaaguuuucuuaguugacug

SEQ ID NO: 45789 - RNA, 22 nt, Human
aucaaugacaguugaauucuac

SEQ ID NO: 45790 - RNA, 22 nt, Human
aucaauucuuaggaaaauagcu

SEQ ID NO: 45791 - RNA, 22 nt, Human
aucaauuuugaggauacaagaa

SEQ ID NO: 45792 - RNA, 22 nt, Human
aucacaaaggucucagagcaca

SEQ ID NO: 45793 - RNA, 22 nt, Human
aucacaaucuucaaaucgauuc

SEQ ID NO: 45794 - RNA, 22 nt, Human
aucacacuggacauuggauacu

SEQ ID NO: 45795 - RNA, 22 nt, Human
aucacagauugugaauaacuau

SEQ ID NO: 45796 - RNA, 22 nt, Human
aucacaggugguaggaaaagaa

SEQ ID NO: 45797 - RNA, 22 nt, Human
aucacaucacagguugagcuag

SEQ ID NO: 45798 - RNA, 22 nt, Human
aucaccuggccauuggguuaac

SEQ ID NO: 45799 - RNA, 22 nt, Human
aucacgucaugguuugaucugg

SEQ ID NO: 45800 - RNA, 22 nt, Human
aucacgugguuugagaguacgc

SEQ ID NO: 45801 - RNA, 22 nt, Human
aucacugaaauacugaaauuac

SEQ ID NO: 45802 - RNA, 20 nt, Human
aucacuggagaaggaaaccu

SEQ ID NO: 45803 - RNA, 22 nt, Human
aucacuguggaaaacuguaugg

SEQ ID NO: 45804 - RNA, 21 nt, Human
aucagaaaauguaauggagca

SEQ ID NO: 45805 - RNA, 22 nt, Human
aucagaaauagucauguuacuu

SEQ ID NO: 45806 - RNA, 22 nt, Human
aucagaaauugcccagcuguuu

SEQ ID NO: 45807 - RNA, 22 nt, Human
aucagaagcaggaggaaugaag

SEQ ID NO: 45808 - RNA, 22 nt, Human
aucagaagugauguguguuauu

SEQ ID NO: 45809 - RNA, 22 nt, Human
aucagaauagugggggacaguc

SEQ ID NO: 45810 - RNA, 22 nt, Human
aucagaccugucuccucuugcc

SEQ ID NO: 45811 - RNA, 22 nt, Human
aucagagaaauggagggcgcuu

SEQ ID NO: 45812 - RNA, 22 nt, Human
aucagagaaguuucacuggcau

SEQ ID NO: 45813 - RNA, 22 nt, Human
aucagagcccggcaauuuauuu

SEQ ID NO: 45814 - RNA, 22 nt, Human
aucagaggaaauuaacucucuc

SEQ ID NO: 45815 - RNA, 20 nt, Human
aucagaggauagggaagugg

SEQ ID NO: 45816 - RNA, 22 nt, Human
aucagagucagaggcuagagcu

SEQ ID NO: 45817 - RNA, 20 nt, Human
aucagcaacugccacucagu

SEQ ID NO: 45818 - RNA, 22 nt, Human
aucagcaagacuaggggaauac

SEQ ID NO: 45819 - RNA, 22 nt, Human
aucagcaagcaugguuaggugu

SEQ ID NO: 45820 - RNA, 22 nt, Human
aucagcaagcauuuauugagug

SEQ ID NO: 45821 - RNA, 22 nt, Human
aucagcagaugcucaaugaaca

SEQ ID NO: 45822 - RNA, 22 nt, Human
aucagcaggaagggcaccuuua

SEQ ID NO: 45823 - RNA, 22 nt, Human
aucagcaggugcugguggagac

SEQ ID NO: 45824 - RNA, 22 nt, Human
aucagcagugaguggcuuucau

SEQ ID NO: 45825 - RNA, 22 nt, Human
aucagcaucggguggugguggg

SEQ ID NO: 45826 - RNA, 22 nt, Human
aucagcuagauaagucaagcaa

SEQ ID NO: 45827 - RNA, 22 nt, Human
aucagcuauuaugugaagaaag

SEQ ID NO: 45828 - RNA, 22 nt, Human
aucagcuggaacaagugucuga

SEQ ID NO: 45829 - RNA, 22 nt, Human
aucagcuuaauucucaacaggu

SEQ ID NO: 45830 - RNA, 22 nt, Human
aucagcuucauaaaguugguca

SEQ ID NO: 45831 - RNA, 22 nt, Human
aucagcuuggaccaauaagaug

SEQ ID NO: 45832 - RNA, 22 nt, Human
aucaggaaauacuuauuuauaa

SEQ ID NO: 45833 - RNA, 19 nt, Human
aucaggaacaaggcugauc

SEQ ID NO: 45834 - RNA, 22 nt, Human
aucaggaacguucauggacugu

SEQ ID NO: 45835 - RNA, 22 nt, Human
aucaggauagugguuaccuggg

SEQ ID NO: 45836 - RNA, 22 nt, Human
aucaggaucacagaaacuuuua

SEQ ID NO: 45837 - RNA, 22 nt, Human
aucaggauccaccuugagccug

SEQ ID NO: 45838 - RNA, 22 nt, Human
aucaggaucugcaucauaagaa

SEQ ID NO: 45839 - RNA, 22 nt, Human
aucaggaugacaacugcugggu

SEQ ID NO: 45840 - RNA, 22 nt, Human
aucaggaugacuauaaggcugc

SEQ ID NO: 45841 - RNA, 22 nt, Human
aucaggaugcugucaguuacca

SEQ ID NO: 45842 - RNA, 22 nt, Human
aucaggauggguuuggcuuagg

SEQ ID NO: 45843 - RNA, 22 nt, Human
aucaggauuauuaaaucuggau

SEQ ID NO: 45844 - RNA, 22 nt, Human
aucagguagauuuaauauucug

SEQ ID NO: 45845 - RNA, 22 nt, Human
aucaggugaugcucugguuccc

SEQ ID NO: 45846 - RNA, 22 nt, Human
aucuuagagagucguguuuugu

SEQ ID NO: 45847 - RNA, 22 nt, Human
aucuuaggguucuguuuuuaag

SEQ ID NO: 45848 - RNA, 22 nt, Human
aucuuauuuaacacagcaaaac

SEQ ID NO: 45849 - RNA, 22 nt, Human
aucuucaagggaagaaagagua

SEQ ID NO: 45850 - RNA, 22 nt, Human
aucuucagcgagguuuccuuuc

SEQ ID NO: 45851 - RNA, 22 nt, Human
aucuuccaggugccggggguca

SEQ ID NO: 45852 - RNA, 22 nt, Human
aucuucuacuuugccaaucagg

SEQ ID NO: 45853 - RNA, 22 nt, Human
aucuucucauguguaaugaggu

SEQ ID NO: 45854 - RNA, 22 nt, Human
aucuucugauuuauggagcaau

SEQ ID NO: 45855 - RNA, 22 nt, Human
aucuugaaauacuuucuagaau

SEQ ID NO: 45856 - RNA, 22 nt, Human
aucuugcugcuacaaagugccc

SEQ ID NO: 45857 - RNA, 22 nt, Human
aucuuggauugacuggcucugc

SEQ ID NO: 45858 - RNA, 22 nt, Human
aucuuggauuggagaaagaagu

SEQ ID NO: 45859 - RNA, 19 nt, Human
aucuugggaaaugguaacu

SEQ ID NO: 45860 - RNA, 20 nt, Human
aucuugggauugagauugcc

SEQ ID NO: 45861 - RNA, 22 nt, Human
aucuugugcugacaaaacacau

SEQ ID NO: 45862 - RNA, 22 nt, Human
aucuuguuaaaaugcagaaacu

SEQ ID NO: 45863 - RNA, 22 nt, Human
aucuuguuaaagugcagauuuu

SEQ ID NO: 45864 - RNA, 22 nt, Human
aucuuuaaagacaugugaacuu

SEQ ID NO: 45865 - RNA, 22 nt, Human
aucuuuacuuucagugcugagc

SEQ ID NO: 45866 - RNA, 22 nt, Human
aucuuuagacaggaagcaauca

SEQ ID NO: 45867 - RNA, 22 nt, Human
aggauaauaauaaucucguuua

SEQ ID NO: 45868 - RNA, 22 nt, Human
aggauagaagccccauguucuu

SEQ ID NO: 45869 - RNA, 20 nt, Human
aggauagcaugcaagugaga

SEQ ID NO: 45870 - RNA, 23 nt, Human
aggauaugacuugucugccaacc

SEQ ID NO: 45871 - RNA, 22 nt, Human
aggaucagggugguggaaguca

SEQ ID NO: 45872 - RNA, 22 nt, Human
aggauccuguauggagaagcug

SEQ ID NO: 45873 - RNA, 22 nt, Human
aggaucuuauguaauaauuaug

SEQ ID NO: 45874 - RNA, 22 nt, Human
aggaugacuggaacccaaguga

SEQ ID NO: 45875 - RNA, 22 nt, Human
aggaugaggcuggacacuucuu

SEQ ID NO: 45876 - RNA, 22 nt, Human
aggauggaauuagguagcaagu

SEQ ID NO: 45877 - RNA, 19 nt, Human
aggauggagcaggcgguga

SEQ ID NO: 45878 - RNA, 20 nt, Human
aggauggcaagcaagugcau

SEQ ID NO: 45879 - RNA, 22 nt, Human
aggauggcgauucgagcaccuc

SEQ ID NO: 45880 - RNA, 22 nt, Human
aggaugugaguggacacagucc

SEQ ID NO: 45881 - RNA, 22 nt, Human
aggauguggucuguuuucugag

SEQ ID NO: 45882 - RNA, 22 nt, Human
aggauguucgggucacauagcc

SEQ ID NO: 45883 - RNA, 22 nt, Human
aggauucagaauguaugcagug

SEQ ID NO: 45884 - RNA, 22 nt, Human
aggauucgggcauaaagccauu

SEQ ID NO: 45885 - RNA, 22 nt, Human
aggauuuaccgucauuuagucu

SEQ ID NO: 45886 - RNA, 22 nt, Human
aggauuuaccuccagcuaggcu

SEQ ID NO: 45887 - RNA, 20 nt, Human
aggauuuacuacuaccugcu

SEQ ID NO: 45888 - RNA, 21 nt, Human
aggauuuacuauuaacugugu

SEQ ID NO: 45889 - RNA, 22 nt, Human
aggauuuagcaugaaaugugaa

SEQ ID NO: 45890 - RNA, 22 nt, Human
aggauuuaggagcuggcuaacg

SEQ ID NO: 45891 - RNA, 22 nt, Human
aggauuuauuacaagccauggu

SEQ ID NO: 45892 - RNA, 22 nt, Human
aggauuuauuggugggaaguua

SEQ ID NO: 45893 - RNA, 22 nt, Human
aggauuucccauauagcuccau

SEQ ID NO: 45894 - RNA, 21 nt, Human
aggauuucugucauuucagau

SEQ ID NO: 45895 - RNA, 22 nt, Human
aggauuugaaauauuuaguaaa

SEQ ID NO: 45896 - RNA, 22 nt, Human
aggauuuguugaguuuuagugg

SEQ ID NO: 45897 - RNA, 22 nt, Human
aggauuuguuuauaggucuuaa

SEQ ID NO: 45898 - RNA, 22 nt, Human
aggcaaauccagauuuuuccac

SEQ ID NO: 45899 - RNA, 22 nt, Human
aggcaacaugacucacuugcac

SEQ ID NO: 45900 - RNA, 22 nt, Human
aggcaacaugggccaggcagaa

SEQ ID NO: 45901 - RNA, 20 nt, Human
aggcaacucaaguuuuugcc

SEQ ID NO: 45902 - RNA, 22 nt, Human
aggcaacugacaguuucugcuu

SEQ ID NO: 45903 - RNA, 22 nt, Human
aggcaacuuuuggggaugaugg

SEQ ID NO: 45904 - RNA, 22 nt, Human
aggcaagcauuuaaccacucau

SEQ ID NO: 45905 - RNA, 22 nt, Human
aggcaagccgugccugucucaa

SEQ ID NO: 45906 - RNA, 22 nt, Human
aggcaagcgcagaagcggagga

SEQ ID NO: 45907 - RNA, 22 nt, Human
aggcaagggggcgccaccuucc

SEQ ID NO: 45908 - RNA, 23 nt, Human
aggcaauacaaggcaucucugga

SEQ ID NO: 45909 - RNA, 22 nt, Human
aggcaauagguuccucaucuuu

SEQ ID NO: 45910 - RNA, 22 nt, Human
aggcaaucaguguagaguaaca

SEQ ID NO: 45911 - RNA, 22 nt, Human
aggcaauuguuuguguaauagg

SEQ ID NO: 45912 - RNA, 22 nt, Human
aggcacaaaagcagggugacca

SEQ ID NO: 45913 - RNA, 19 nt, Human
aggcacaauucugagaagc

SEQ ID NO: 45914 - RNA, 22 nt, Human
aggcacagaauggcauucagug

SEQ ID NO: 45915 - RNA, 22 nt, Human
aggcacaggccucagcacccag

SEQ ID NO: 45916 - RNA, 22 nt, Human
aggcacaguuucauccccgggc

SEQ ID NO: 45917 - RNA, 22 nt, Human
aggcaccgcuccucaguccaga

SEQ ID NO: 45918 - RNA, 22 nt, Human
aggcaccucuuaggcugcuacu

SEQ ID NO: 45919 - RNA, 17 nt, Human
aggcaccucuuccugcu

SEQ ID NO: 45920 - RNA, 22 nt, Human
aggcaccuggaucuuggaauuc

SEQ ID NO: 45921 - RNA, 22 nt, Human
aggcaccuugcgguccagugaa

SEQ ID NO: 45922 - RNA, 22 nt, Human
aggcacguggcgccaggaguga

SEQ ID NO: 45923 - RNA, 23 nt, Human
aggcacucgacagaaauauugga

SEQ ID NO: 45924 - RNA, 22 nt, Human
aggcacugaagaacucuuuuug

SEQ ID NO: 45925 - RNA, 22 nt, Human
aggcacugacaauucuggacug

SEQ ID NO: 45926 - RNA, 22 nt, Human
aggcacugcagauuacaggcgc

SEQ ID NO: 45927 - RNA, 22 nt, Human
aggcacugugcagucccaagca

SEQ ID NO: 45928 - RNA, 21 nt, Human
aggcacuguuugugguuuggg

SEQ ID NO: 45929 - RNA, 21 nt, Human
aggcacuuaaccaauguuagc

SEQ ID NO: 45930 - RNA, 22 nt, Human
aggcacuuaaccuacuaacuga

SEQ ID NO: 45931 - RNA, 22 nt, Human
aggcacuuugaaauuuggagcu

SEQ ID NO: 45932 - RNA, 22 nt, Human
aggcacuuuuugcauuuuagaa

SEQ ID NO: 45933 - RNA, 22 nt, Human
aggcagaaaauagucauccaaa

SEQ ID NO: 45934 - RNA, 22 nt, Human
aggcagaagccagccagggucc

SEQ ID NO: 45935 - RNA, 22 nt, Human
aggcagagagcaguggccgucu

SEQ ID NO: 45936 - RNA, 20 nt, Human
aggcagagcgcacuuuuaga

SEQ ID NO: 45937 - RNA, 22 nt, Human
aggcagagcugauguucuguga

SEQ ID NO: 45938 - RNA, 22 nt, Human
aggcagagcuggguuuugaaau

SEQ ID NO: 45939 - RNA, 22 nt, Human
aggcagaggaaggguggauuug

SEQ ID NO: 45940 - RNA, 19 nt, Human
aggcagaggcuuggcuagc

SEQ ID NO: 45941 - RNA, 22 nt, Human
aggcagaucaguacaggguuaa

SEQ ID NO: 45942 - RNA, 22 nt, Human
aggcagauuacuugaggccagg

SEQ ID NO: 45943 - RNA, 22 nt, Human
aggcagcagagguugaggaaag

SEQ ID NO: 45944 - RNA, 18 nt, Human
aggcagcagcaucuucuc

SEQ ID NO: 45945 - RNA, 19 nt, Human
aggcagcaggccagggaug

SEQ ID NO: 45946 - RNA, 23 nt, Human
aggcagcagguuguccaggguga

SEQ ID NO: 45947 - RNA, 22 nt, Human
aggcagcaugggccccagcucc

SEQ ID NO: 45948 - RNA, 16 nt, Human
aggcagcauguuagug

SEQ ID NO: 45949 - RNA, 19 nt, Human
aggcagcauucuggggcuu

SEQ ID NO: 45950 - RNA, 22 nt, Human
aggcagcauuugaauccagguc

SEQ ID NO: 45951 - RNA, 22 nt, Human
aggcagccagauggcagccugc

SEQ ID NO: 45952 - RNA, 22 nt, Human
aggcagccaguucagguuucuu

SEQ ID NO: 45953 - RNA, 22 nt, Human
aggcagccaucugcaggaagga

SEQ ID NO: 45954 - RNA, 22 nt, Human
aggcagccauuaccaagggcau

SEQ ID NO: 45955 - RNA, 22 nt, Human
aggccugggucucgugccuacc

SEQ ID NO: 45956 - RNA, 22 nt, Human
aggccuggugugccggaugcag

SEQ ID NO: 45957 - RNA, 22 nt, Human
aggccuguaguuccucuuucca

SEQ ID NO: 45958 - RNA, 22 nt, Human
aggccugucccagcugaggacg

SEQ ID NO: 45959 - RNA, 22 nt, Human
aggccugucuggggcucagcca

SEQ ID NO: 45960 - RNA, 22 nt, Human
aggccuguuuccuuggguugcu

SEQ ID NO: 45961 - RNA, 22 nt, Human
aggccuuuguggagcucauggc

SEQ ID NO: 45962 - RNA, 16 nt, Human
aggcgaagguucauuu

SEQ ID NO: 45963 - RNA, 23 nt, Human
aggcgagcucuucuccagcacgu

SEQ ID NO: 45964 - RNA, 22 nt, Human
aggcgcagcacgugagaguugg

SEQ ID NO: 45965 - RNA, 22 nt, Human
aggcggcuccgggagugugggc

SEQ ID NO: 45966 - RNA, 22 nt, Human
aggcgguggccaaggagcggga

SEQ ID NO: 45967 - RNA, 19 nt, Human
aggcuaaagagucuugcgu

SEQ ID NO: 45968 - RNA, 22 nt, Human
aggcuaaggagugugaugcuca

SEQ ID NO: 45969 - RNA, 22 nt, Human
aggcuaagugggugucagggcc

SEQ ID NO: 45970 - RNA, 22 nt, Human
aggcuaauauggcacaugaaca

SEQ ID NO: 45971 - RNA, 22 nt, Human
aggcuagcuguuucagggcuag

SEQ ID NO: 45972 - RNA, 22 nt, Human
aggcuaggaacagcccggcccu

SEQ ID NO: 45973 - RNA, 22 nt, Human
aggcuaggggaacacuagaauc

SEQ ID NO: 45974 - RNA, 22 nt, Human
aggcuaggguaacagauguggc

SEQ ID NO: 45975 - RNA, 22 nt, Human
aggcuagucaagucaagcagug

SEQ ID NO: 45976 - RNA, 22 nt, Human
aggcuaugauauuauugagaca

SEQ ID NO: 45977 - RNA, 20 nt, Human
aggcucacucaccuugugga

SEQ ID NO: 45978 - RNA, 22 nt, Human
aggcucagacaggaaaaguaac

SEQ ID NO: 45979 - RNA, 20 nt, Human
aggcucagagcaguaguaca

SEQ ID NO: 45980 - RNA, 22 nt, Human
aggcucagauccuuguguccug

SEQ ID NO: 45981 - RNA, 22 nt, Human
aggcucagcaucugauucauau

SEQ ID NO: 45982 - RNA, 22 nt, Human
aggcucagcugguggugaucgc

SEQ ID NO: 45983 - RNA, 22 nt, Human
aggcucagggacucccucccuc

SEQ ID NO: 45984 - RNA, 22 nt, Human
aggcucaggugccucauucaca

SEQ ID NO: 45985 - RNA, 22 nt, Human
aggcucaucugagcagaaaccu

SEQ ID NO: 45986 - RNA, 22 nt, Human
aucuuuagagucaucugagugu

SEQ ID NO: 45987 - RNA, 22 nt, Human
aucuuuagugugaauuuauuga

SEQ ID NO: 45988 - RNA, 21 nt, Human
aucuuuauuacgcagagaaga

SEQ ID NO: 45989 - RNA, 22 nt, Human
aucuuuauuuauugagcacuua

SEQ ID NO: 45990 - RNA, 22 nt, Human
aucuuucaaucaggaaaaaucu

SEQ ID NO: 45991 - RNA, 22 nt, Human
aucuuucagagcuccaucaggg

SEQ ID NO: 45992 - RNA, 22 nt, Human
aucuuucagggccauuuguauu

SEQ ID NO: 45993 - RNA, 22 nt, Human
aucuuucaguuucauaccaauu

SEQ ID NO: 45994 - RNA, 22 nt, Human
aucuuucaucucuauuauuuga

SEQ ID NO: 45995 - RNA, 22 nt, Human
aucuuucuuauuugaagaaaga

SEQ ID NO: 45996 - RNA, 22 nt, Human
aucuuugaucuuuauugcuaag

SEQ ID NO: 45997 - RNA, 22 nt, Human
aucuuugcccagagacucagcc

SEQ ID NO: 45998 - RNA, 22 nt, Human
aucuuugcuauuguaaaucacg

SEQ ID NO: 45999 - RNA, 22 nt, Human
aucuuuggggcauccaggaaaa

SEQ ID NO: 46000 - RNA, 22 nt, Human
aucuuuggguacaaacuugccu

SEQ ID NO: 46001 - RNA, 22 nt, Human
aucuuuggugcaugauacuuug

SEQ ID NO: 46002 - RNA, 20 nt, Human
aucuuugucucuguaguugu

SEQ ID NO: 46003 - RNA, 22 nt, Human
aucuuugugaaucucaacuugg

SEQ ID NO: 46004 - RNA, 22 nt, Human
aucuuuguuaucucagaucuug

SEQ ID NO: 46005 - RNA, 22 nt, Human
aucuuuguuuugaugcagaucu

SEQ ID NO: 46006 - RNA, 22 nt, Human
augaaaacggaccagagcuauu

SEQ ID NO: 46007 - RNA, 22 nt, Human
augaaaacuuuagccucauuag

SEQ ID NO: 46008 - RNA, 22 nt, Human
augaaaauucuaugcaggccag

SEQ ID NO: 46009 - RNA, 22 nt, Human
augaaacacacacgcgcauacu

SEQ ID NO: 46010 - RNA, 22 nt, Human
augaaacaguguguauagcaaa

SEQ ID NO: 46011 - RNA, 22 nt, Human
augaaacucuaacuuaacaagu

SEQ ID NO: 46012 - RNA, 22 nt, Human
augaaacucuagcuuucagcac

SEQ ID NO: 46013 - RNA, 22 nt, Human
augaaagugaagguuuacuaag

SEQ ID NO: 46014 - RNA, 22 nt, Human
augaaauaaauacccacacaua

SEQ ID NO: 46015 - RNA, 22 nt, Human
augaaauaucuugaagaaauuc

SEQ ID NO: 46016 - RNA, 22 nt, Human
augaaauauucuuugguaagaa

SEQ ID NO: 46017 - RNA, 22 nt, Human
augaaaugaaguuggccuggcu

SEQ ID NO: 46018 - RNA, 22 nt, Human
augaaauggugguuuuccauuu

SEQ ID NO: 46019 - RNA, 22 nt, Human
augaaauguauucagauaugua

SEQ ID NO: 46020 - RNA, 22 nt, Human
augaaauguuggucccaaucgc

SEQ ID NO: 46021 - RNA, 22 nt, Human
augaaauuugaccaauuauuua

SEQ ID NO: 46022 - RNA, 22 nt, Human
augaacaaaaacaaggccuguu

SEQ ID NO: 46023 - RNA, 22 nt, Human
augaacaagagagggaagauuc

SEQ ID NO: 46024 - RNA, 22 nt, Human
augaacaaucuguugacuucug

SEQ ID NO: 46025 - RNA, 22 nt, Human
augaacacaauacgugcaugca

SEQ ID NO: 46026 - RNA, 22 nt, Human
augaacacauguacacauuucu

SEQ ID NO: 46027 - RNA, 18 nt, Human
augaacacugagcugaau

SEQ ID NO: 46028 - RNA, 22 nt, Human
augaacaucggaaaugagacug

SEQ ID NO: 46029 - RNA, 22 nt, Human
augaaccuugauuuguucaucu

SEQ ID NO: 46030 - RNA, 22 nt, Human
augaacuaucaucaguuccacc

SEQ ID NO: 46031 - RNA, 22 nt, Human
augaagacuauuugaaggugcc

SEQ ID NO: 46032 - RNA, 22 nt, Human
augaagauaagaccaggcugga

SEQ ID NO: 46033 - RNA, 22 nt, Human
augaagaugguucaacuggccu

SEQ ID NO: 46034 - RNA, 22 nt, Human
augaagaugugaaggcuggauu

SEQ ID NO: 46035 - RNA, 22 nt, Human
augaagauuucccagagacaug

SEQ ID NO: 46036 - RNA, 22 nt, Human
augaagcaauuagaaacuugaa

SEQ ID NO: 46037 - RNA, 22 nt, Human
augaagcagaauuucccacucu

SEQ ID NO: 46038 - RNA, 22 nt, Human
augaagcagauuuauuacucac

SEQ ID NO: 46039 - RNA, 22 nt, Human
augaagcauuacaggaugacag

SEQ ID NO: 46040 - RNA, 22 nt, Human
augaaggauagggcaaaauuuu

SEQ ID NO: 46041 - RNA, 22 nt, Human
augaauaaaacauuuuaaucag

SEQ ID NO: 46042 - RNA, 22 nt, Human
augaauaaguaaacuccuuugg

SEQ ID NO: 46043 - RNA, 22 nt, Human
augaaucaagugagaacagcau

SEQ ID NO: 46044 - RNA, 22 nt, Human
augaauccagcaaacagugagg

SEQ ID NO: 46045 - RNA, 22 nt, Human
augaaucuguuuuuugucaaua

SEQ ID NO: 46046 - RNA, 22 nt, Human
augaaugaaauacagaguacuu

SEQ ID NO: 46047 - RNA, 22 nt, Human
augaaugaagaacaucugugcc

SEQ ID NO: 46048 - RNA, 22 nt, Human
augaaugaaugagaguagguca

SEQ ID NO: 46049 - RNA, 22 nt, Human
augaaugacugucuacuuuggg

SEQ ID NO: 46050 - RNA, 22 nt, Human
augaaugauuuuauguaaauga

SEQ ID NO: 46051 - RNA, 22 nt, Human
augaaugcaauauuuuaugaca

SEQ ID NO: 46052 - RNA, 22 nt, Human
augaaugcagcacuguuuuucu

SEQ ID NO: 46053 - RNA, 22 nt, Human
augaaugcaugcuuauuuugca

SEQ ID NO: 46054 - RNA, 22 nt, Human
augaaugcuuauuaaauugaaa

SEQ ID NO: 46055 - RNA, 22 nt, Human
augacaaaauaaauggucucug

SEQ ID NO: 46056 - RNA, 22 nt, Human
augacaaaaugaaugcagcuag

SEQ ID NO: 46057 - RNA, 22 nt, Human
augacaagggaggguccugcua

SEQ ID NO: 46058 - RNA, 22 nt, Human
augacacaauuuuagagcugaa

SEQ ID NO: 46059 - RNA, 22 nt, Human
augacacuguccuaguaaggaa

SEQ ID NO: 46060 - RNA, 22 nt, Human
augacagaugcuguggggaggu

SEQ ID NO: 46061 - RNA, 22 nt, Human
augacaggaauaacuaugaugg

SEQ ID NO: 46062 - RNA, 22 nt, Human
augacagugggucuugcaaaga

SEQ ID NO: 46063 - RNA, 22 nt, Human
augacaguucuacacuuaaucu

SEQ ID NO: 46064 - RNA, 22 nt, Human
agguaaauucagcagugacauu

SEQ ID NO: 46065 - RNA, 22 nt, Human
agguaacacuacuuaguauacu

SEQ ID NO: 46066 - RNA, 22 nt, Human
agguaacuagcauuagcuucug

SEQ ID NO: 46067 - RNA, 22 nt, Human
agguaagcaugguggcugcugu

SEQ ID NO: 46068 - RNA, 22 nt, Human
agguaaggaaauugaggcaauu

SEQ ID NO: 46069 - RNA, 22 nt, Human
agguaaggcuguaagcuaagcc

SEQ ID NO: 46070 - RNA, 22 nt, Human
agguaaggggcucccaaguacc

SEQ ID NO: 46071 - RNA, 22 nt, Human
agguaaggggcucccaaguccc

SEQ ID NO: 46072 - RNA, 22 nt, Human
agguaagggucacaguucauau

SEQ ID NO: 46073 - RNA, 22 nt, Human
agguaauuuuguguuaaugauu

SEQ ID NO: 46074 - RNA, 18 nt, Human
agguacacauacuucuca

SEQ ID NO: 46075 - RNA, 22 nt, Human
agguacagaugaaagucuaguu

SEQ ID NO: 46076 - RNA, 22 nt, Human
agguacagcaauauaagagguc

SEQ ID NO: 46077 - RNA, 22 nt, Human
agguacagggugaaaguuuaug

SEQ ID NO: 46078 - RNA, 21 nt, Human
agguacaggucuugugagucu

SEQ ID NO: 46079 - RNA, 23 nt, Human
agguacauauacuuggaggucag

SEQ ID NO: 46080 - RNA, 22 nt, Human
agguacauguuccagauacgua

SEQ ID NO: 46081 - RNA, 22 nt, Human
agguaccauaugcgggagcaac

SEQ ID NO: 46082 - RNA, 22 nt, Human
agguagaucaacuggggaggga

SEQ ID NO: 46083 - RNA, 22 nt, Human
agguagcuggugcugggcuccu

SEQ ID NO: 46084 - RNA, 22 nt, Human
agguaggauggguggagaugau

SEQ ID NO: 46085 - RNA, 22 nt, Human
agguaggggguuugggaacugc

SEQ ID NO: 46086 - RNA, 22 nt, Human
agguaggguuaauggagauaua

SEQ ID NO: 46087 - RNA, 22 nt, Human
agguagguuaaauuucuuuauc

SEQ ID NO: 46088 - RNA, 22 nt, Human
agguauaagucucauuucuguu

SEQ ID NO: 46089 - RNA, 22 nt, Human
agguaucugguaagaggcagac

SEQ ID NO: 46090 - RNA, 22 nt, Human
agguaugugggugagaggagga

SEQ ID NO: 46091 - RNA, 22 nt, Human
agguauucagagagaugcuuuu

SEQ ID NO: 46092 - RNA, 22 nt, Human
agguauuucauggagcaagcag

SEQ ID NO: 46093 - RNA, 22 nt, Human
agguauuuccuuuaaagaaacu

SEQ ID NO: 46094 - RNA, 22 nt, Human
agguauuugucucagauugggu

SEQ ID NO: 46095 - RNA, 22 nt, Human
agguauuuguuacagcagcacc

SEQ ID NO: 46096 - RNA, 22 nt, Human
agguauuuuaaguccaccagag

SEQ ID NO: 46097 - RNA, 22 nt, Human
agguauuuuauagauaaguaaa

SEQ ID NO: 46098 - RNA, 22 nt, Human
aggucaagggcaagagugaggu

SEQ ID NO: 46099 - RNA, 22 nt, Human
aggucacaggcuuugaaaucaa

SEQ ID NO: 46100 - RNA, 22 nt, Human
aggucacaggguugaaguacuu

SEQ ID NO: 46101 - RNA, 22 nt, Human
aggucaccauggcaugcuccac

SEQ ID NO: 46102 - RNA, 22 nt, Human
aggucacccguuugacuaucca

SEQ ID NO: 46103 - RNA, 22 nt, Human
augcauauugauuauagauuca

SEQ ID NO: 46104 - RNA, 21 nt, Human
augcauauuuuaaguuguguc

SEQ ID NO: 46105 - RNA, 22 nt, Human
augcaucacuaaauagugccgu

SEQ ID NO: 46106 - RNA, 19 nt, Human
augcaucugcauugacagg

SEQ ID NO: 46107 - RNA, 22 nt, Human
augcaucuuuucaagguauuuc

SEQ ID NO: 46108 - RNA, 22 nt, Human
augcaugaaagaauccaagccu

SEQ ID NO: 46109 - RNA, 22 nt, Human
augcaugaugaacuugcuuuca

SEQ ID NO: 46110 - RNA, 21 nt, Human
augcauguuccauaaaguggg

SEQ ID NO: 46111 - RNA, 22 nt, Human
augcauucagcggaaugcuuag

SEQ ID NO: 46112 - RNA, 22 nt, Human
augcauucuggaaaguagcaau

SEQ ID NO: 46113 - RNA, 22 nt, Human
augcauugcugcuuucaaaaca

SEQ ID NO: 46114 - RNA, 22 nt, Human
augcauugcuugaggguaggaa

SEQ ID NO: 46115 - RNA, 22 nt, Human
augcauuguaugaaaggaaaua

SEQ ID NO: 46116 - RNA, 22 nt, Human
augcauugucugguuucauuuu

SEQ ID NO: 46117 - RNA, 19 nt, Human
augcauuguuugaaguuga

SEQ ID NO: 46118 - RNA, 22 nt, Human
augcauuugacgggauauauuu

SEQ ID NO: 46119 - RNA, 22 nt, Human
augccaaagauguuugauagaa

SEQ ID NO: 46120 - RNA, 22 nt, Human
augccaaagcccaaguucauca

SEQ ID NO: 46121 - RNA, 22 nt, Human
augccaaagggagcacuuuggg

SEQ ID NO: 46122 - RNA, 20 nt, Human
augccaagcuaucuagaauc

SEQ ID NO: 46123 - RNA, 22 nt, Human
augccaagcucuaucccugacc

SEQ ID NO: 46124 - RNA, 21 nt, Human
augccaagucuuaaugagggc

SEQ ID NO: 46125 - RNA, 22 nt, Human
augccagaagagucugcaggga

SEQ ID NO: 46126 - RNA, 23 nt, Human
augccaggcugccuggccagccu

SEQ ID NO: 46127 - RNA, 22 nt, Human
augccaggcuguuuggccucag

SEQ ID NO: 46128 - RNA, 22 nt, Human
augccagggucauccccugggu

SEQ ID NO: 46129 - RNA, 22 nt, Human
augccagucaaagaagaugaca

SEQ ID NO: 46130 - RNA, 22 nt, Human
augccaguguuauaaauagaua

SEQ ID NO: 46131 - RNA, 22 nt, Human
augccauugcuuuaaaauuaag

SEQ ID NO: 46132 - RNA, 22 nt, Human
augccauuuuauacucauucaa

SEQ ID NO: 46133 - RNA, 22 nt, Human
augcccaaugucacaauuuuug

SEQ ID NO: 46134 - RNA, 22 nt, Human
augcccaggcccauaccuagau

SEQ ID NO: 46135 - RNA, 22 nt, Human
augcccucuguuucccaaggcc

SEQ ID NO: 46136 - RNA, 23 nt, Human
augcccugugcagaaauguggaa

SEQ ID NO: 46137 - RNA, 20 nt, Human
augccucuaauuuugcaaac

SEQ ID NO: 46138 - RNA, 22 nt, Human
augccuggucccaccucuaggu

SEQ ID NO: 46139 - RNA, 22 nt, Human
augccuguaaucccagugcuuu

SEQ ID NO: 46140 - RNA, 22 nt, Human
augccuguuugaaauuggaccu

SEQ ID NO: 46141 - RNA, 22 nt, Human
augccuuauuccaacaaucuag

SEQ ID NO: 46142 - RNA, 22 nt, Human
augccuuucccaacaggguggg

SEQ ID NO: 46143 - RNA, 22 nt, Human
augccuuucuuuggugcagguu

SEQ ID NO: 46144 - RNA, 20 nt, Human
augccuuugauagucaggcu

SEQ ID NO: 46145 - RNA, 22 nt, Human
augccuuuggagaauccaacau

SEQ ID NO: 46146 - RNA, 22 nt, Human
augcggagccccaagcuugaag

SEQ ID NO: 46147 - RNA, 22 nt, Human
augcguguuuguauacacacaa

SEQ ID NO: 46148 - RNA, 22 nt, Human
augcuaaaugcuggggguacau

SEQ ID NO: 46149 - RNA, 22 nt, Human
augcuaaauguuaauguuaccu

SEQ ID NO: 46150 - RNA, 22 nt, Human
augcuacaacauuaucuggggu

SEQ ID NO: 46151 - RNA, 22 nt, Human
augcuacaggagccccacuuag

SEQ ID NO: 46152 - RNA, 18 nt, Human
augcuacaggcagguguc

SEQ ID NO: 46153 - RNA, 22 nt, Human
augcuacuauccuucugcuuaa

SEQ ID NO: 46154 - RNA, 23 nt, Human
augcuagcugugccaacaccaua

SEQ ID NO: 46155 - RNA, 22 nt, Human
augcuauaaacucuaggucauu

SEQ ID NO: 46156 - RNA, 22 nt, Human
augcuauacucaaagaaauuca

SEQ ID NO: 46157 - RNA, 22 nt, Human
augcucaguagcuggcugaccc

SEQ ID NO: 46158 - RNA, 22 nt, Human
augcucauuuuauugagaauga

SEQ ID NO: 46159 - RNA, 22 nt, Human
augcuccaccuuuugcaggaac

SEQ ID NO: 46160 - RNA, 22 nt, Human
augcuccagugugaugcuucau

SEQ ID NO: 46161 - RNA, 22 nt, Human
augcucuaagcuuagugaggca

SEQ ID NO: 46162 - RNA, 18 nt, Human
augcucuagucuuuccug

SEQ ID NO: 46163 - RNA, 22 nt, Human
augcucucuguccugcucagag

SEQ ID NO: 46164 - RNA, 22 nt, Human
augcucuggaguacgugaaauu

SEQ ID NO: 46165 - RNA, 22 nt, Human
augcucugggcuuuugaagugg

SEQ ID NO: 46166 - RNA, 22 nt, Human
augcugaaaauuggauuugaau

SEQ ID NO: 46167 - RNA, 22 nt, Human
augcugacuucucucugcagug

SEQ ID NO: 46168 - RNA, 22 nt, Human
augcugagacuggagcagcugg

SEQ ID NO: 46169 - RNA, 22 nt, Human
augcugagguguguuuaauuua

SEQ ID NO: 46170 - RNA, 22 nt, Human
augcugaucuguaauaagauuu

SEQ ID NO: 46171 - RNA, 22 nt, Human
augcugcagucaggccagauug

SEQ ID NO: 46172 - RNA, 22 nt, Human
augcuggauugagagcaagggg

SEQ ID NO: 46173 - RNA, 21 nt, Human
auuagaagguauuuagggccu

SEQ ID NO: 46174 - RNA, 22 nt, Human
auuagaaugaaguauaggauuu

SEQ ID NO: 46175 - RNA, 22 nt, Human
auuagaaugcaggguucauugu

SEQ ID NO: 46176 - RNA, 23 nt, Human
auuagacacuuuggguugucuuc

SEQ ID NO: 46177 - RNA, 22 nt, Human
auuagagaaauguugccaagau

SEQ ID NO: 46178 - RNA, 22 nt, Human
auuagagcaguaauuguggcag

SEQ ID NO: 46179 - RNA, 22 nt, Human
auuagagcuguuagugaagugc

SEQ ID NO: 46180 - RNA, 22 nt, Human
auuagagguuguuuuguaaaga

SEQ ID NO: 46181 - RNA, 22 nt, Human
auuagauauuugcuguuggauu

SEQ ID NO: 46182 - RNA, 22 nt, Human
auuagcaacauggugaauaugu

SEQ ID NO: 46183 - RNA, 22 nt, Human
auuagcaaguuguuauccuuug

SEQ ID NO: 46184 - RNA, 22 nt, Human
auuagcaauugugcaucuagua

SEQ ID NO: 46185 - RNA, 22 nt, Human
auuagccuuaauaauuuagaag

SEQ ID NO: 46186 - RNA, 22 nt, Human
auuagcuguugugaaaggggug

SEQ ID NO: 46187 - RNA, 22 nt, Human
auuagcuuaucccauuucugaa

SEQ ID NO: 46188 - RNA, 22 nt, Human
auuagcuuuaaaccacagcagu

SEQ ID NO: 46189 - RNA, 22 nt, Human
auuagcuuuauuugaaauagga

SEQ ID NO: 46190 - RNA, 22 nt, Human
auuaggaaauguguugcaagca

SEQ ID NO: 46191 - RNA, 22 nt, Human
auuaggauguuccuaugcacau

SEQ ID NO: 46192 - RNA, 22 nt, Human
auuaggauuugguauggucaua

SEQ ID NO: 46193 - RNA, 22 nt, Human
auuaggcaauucugggcaucuc

SEQ ID NO: 46194 - RNA, 22 nt, Human
auuaggugggguuguuacuguu

SEQ ID NO: 46195 - RNA, 22 nt, Human
auuagguugagguacucagagc

SEQ ID NO: 46196 - RNA, 22 nt, Human
auuagucaguauuuguuugcca

SEQ ID NO: 46197 - RNA, 22 nt, Human
auuagucuacugucuaauaaau

SEQ ID NO: 46198 - RNA, 22 nt, Human
auuagugauaugugacuagacc

SEQ ID NO: 46199 - RNA, 20 nt, Human
auuagugcaucuggacaugc

SEQ ID NO: 46200 - RNA, 22 nt, Human
auuaguguacaucucacacgca

SEQ ID NO: 46201 - RNA, 22 nt, Human
auuagugucugugaauaauucu

SEQ ID NO: 46202 - RNA, 22 nt, Human
auuaguguggacccuaauuuaa

SEQ ID NO: 46203 - RNA, 22 nt, Human
auuaguguguaggcuggaaaaa

SEQ ID NO: 46204 - RNA, 22 nt, Human
auuaguguuguaagaagcugcc

SEQ ID NO: 46205 - RNA, 22 nt, Human
auuaguugggguggagaaggau

SEQ ID NO: 46206 - RNA, 22 nt, Human
auuauaaagaacaugugugugg

SEQ ID NO: 46207 - RNA, 22 nt, Human
auuauaaauauuuucuaggggu

SEQ ID NO: 46208 - RNA, 22 nt, Human
auuauaggcuugagccaccgug

SEQ ID NO: 46209 - RNA, 22 nt, Human
auuauauuugaaagguuggaag

SEQ ID NO: 46210 - RNA, 22 nt, Human
auuaucagaaauucaaagggug

SEQ ID NO: 46211 - RNA, 23 nt, Human
auuauccagugcacuucacagcu

SEQ ID NO: 46212 - RNA, 22 nt, Human
auuaucuugauaaaauggcagu

SEQ ID NO: 46213 - RNA, 22 nt, Human
auuaugaaguugagggacccug

SEQ ID NO: 46214 - RNA, 22 nt, Human
auuaugcugguuuacacauuuu

SEQ ID NO: 46215 - RNA, 22 nt, Human
auuauggacaucaaauaacucu

SEQ ID NO: 46216 - RNA, 22 nt, Human
auuauggguauaacacaguuau

SEQ ID NO: 46217 - RNA, 22 nt, Human
auuauguauuugguauaguuug

SEQ ID NO: 46218 - RNA, 22 nt, Human
auuaugucuuuagauauuuggu

SEQ ID NO: 46219 - RNA, 22 nt, Human
auuauuaaaauguguuucucuu

SEQ ID NO: 46220 - RNA, 21 nt, Human
auuauuauaaagaccacaggg

SEQ ID NO: 46221 - RNA, 22 nt, Human
auuauuauaaagugcaugaccu

SEQ ID NO: 46222 - RNA, 22 nt, Human
auuauuaugguugcucuuuucc

SEQ ID NO: 46223 - RNA, 22 nt, Human
auuauucaauguuauuucagug

SEQ ID NO: 46224 - RNA, 22 nt, Human
auuauucauggucuuccacaau

SEQ ID NO: 46225 - RNA, 22 nt, Human
auuauucauugguaggcaagcu

SEQ ID NO: 46226 - RNA, 22 nt, Human
auuauugcugacaugguguuga

SEQ ID NO: 46227 - RNA, 22 nt, Human
auuauuuauccucuuggucuau

SEQ ID NO: 46228 - RNA, 22 nt, Human
auuauuucucacucacauaaua

SEQ ID NO: 46229 - RNA, 22 nt, Human
auuauuugcuuggcucaucuaa

SEQ ID NO: 46230 - RNA, 15 nt, Human
auuauuugugcucag

SEQ ID NO: 46231 - RNA, 22 nt, Human
auucaaacaggaagaaaucauu

SEQ ID NO: 46232 - RNA, 22 nt, Human
auucaaaguacuagcuauuuuu

SEQ ID NO: 46233 - RNA, 22 nt, Human
auucaaauuaaguuaauucagc

SEQ ID NO: 46234 - RNA, 22 nt, Human
auucaagagcccauguuuccug

SEQ ID NO: 46235 - RNA, 22 nt, Human
auucaagagcuggcuuugaaau

SEQ ID NO: 46236 - RNA, 22 nt, Human
auucaagaggaacaaugaagau

SEQ ID NO: 46237 - RNA, 22 nt, Human
auucaagcugaauggugacaga

SEQ ID NO: 46238 - RNA, 22 nt, Human
auucaagguuuauucaguuuag

SEQ ID NO: 46239 - RNA, 22 nt, Human
auucaauaaauaugcuacaugg

SEQ ID NO: 46240 - RNA, 22 nt, Human
auucacaaaaugauauagauac

SEQ ID NO: 46241 - RNA, 22 nt, Human
aguaaacaggcaugauaguguu

SEQ ID NO: 46242 - RNA, 22 nt, Human
aguaaacauuuucauauuuucu

SEQ ID NO: 46243 - RNA, 22 nt, Human
aguaaauuucugcauguguacu

SEQ ID NO: 46244 - RNA, 22 nt, Human
aguaacacaagagguccuugcg

SEQ ID NO: 46245 - RNA, 22 nt, Human
aguaacaggauccaaagaaugu

SEQ ID NO: 46246 - RNA, 22 nt, Human
aguaacaguaacaucuuccuag

SEQ ID NO: 46247 - RNA, 22 nt, Human
aguaacaugcuaauuugauuau

SEQ ID NO: 46248 - RNA, 21 nt, Human
aguaacauuuuguuguuuaca

SEQ ID NO: 46249 - RNA, 22 nt, Human
aguaacuaugcuugagaaucag

SEQ ID NO: 46250 - RNA, 22 nt, Human
aguaacucuccuuugacauauu

SEQ ID NO: 46251 - RNA, 20 nt, Human
aguaacuuagcaacucuagg

SEQ ID NO: 46252 - RNA, 22 nt, Human
aguaaggcaaugccacuaagau

SEQ ID NO: 46253 - RNA, 22 nt, Human
aguaaggcauuuuucauguuua

SEQ ID NO: 46254 - RNA, 22 nt, Human
aguaagugagucacugugcugg

SEQ ID NO: 46255 - RNA, 22 nt, Human
aguaaucaauuuuucgguggau

SEQ ID NO: 46256 - RNA, 22 nt, Human
aguaaugaagauuuguugcaca

SEQ ID NO: 46257 - RNA, 22 nt, Human
aguacaacauuagaguaucuua

SEQ ID NO: 46258 - RNA, 22 nt, Human
aguacaauuuaaugaagauagc

SEQ ID NO: 46259 - RNA, 22 nt, Human
aguacacacaguagaauagagu

SEQ ID NO: 46260 - RNA, 22 nt, Human
aguacaguuauaaguggucuug

SEQ ID NO: 46261 - RNA, 22 nt, Human
aguacaugcagaacuaacagau

SEQ ID NO: 46262 - RNA, 23 nt, Human
aguacauuugacccaaauaagcu

SEQ ID NO: 46263 - RNA, 22 nt, Human
aguaccaugcuuccugacuggu

SEQ ID NO: 46264 - RNA, 22 nt, Human
aguaccugauuucacagaccag

SEQ ID NO: 46265 - RNA, 20 nt, Human
aguaccuuuuguauguuacc

SEQ ID NO: 46266 - RNA, 22 nt, Human
aguacugucagcaggguguuga

SEQ ID NO: 46267 - RNA, 22 nt, Human
aguacuuuuuugauaucugagu

SEQ ID NO: 46268 - RNA, 22 nt, Human
aguagacauuuugcaacaucug

SEQ ID NO: 46269 - RNA, 22 nt, Human
aguagaggccaggccucccugg

SEQ ID NO: 46270 - RNA, 22 nt, Human
aguagauucucauugaucuggu

SEQ ID NO: 46271 - RNA, 22 nt, Human
aguagauuucugcugaagcuuu

SEQ ID NO: 46272 - RNA, 22 nt, Human
aguagauuuuugaauguaaguu

SEQ ID NO: 46273 - RNA, 22 nt, Human
aguagcagaaggucuugaaggg

SEQ ID NO: 46274 - RNA, 20 nt, Human
aguagcaguaauauggaaga

SEQ ID NO: 46275 - RNA, 22 nt, Human
aguagcagugacagcugaggua

SEQ ID NO: 46276 - RNA, 20 nt, Human
aguaggggaaugcaagagca

SEQ ID NO: 46277 - RNA, 22 nt, Human
aguaguggcuuccuggagugcu

SEQ ID NO: 46278 - RNA, 22 nt, Human
aguaguggggccaggguuugaa

SEQ ID NO: 46279 - RNA, 22 nt, Human
aguauaaagugguuuucagcac

SEQ ID NO: 46280 - RNA, 22 nt, Human
aguauaauuagauaucaaaagu

SEQ ID NO: 46281 - RNA, 22 nt, Human
aguauaauuuacauuugguauu

SEQ ID NO: 46282 - RNA, 23 nt, Human
agucucagcuggaaacauguguc

SEQ ID NO: 46283 - RNA, 22 nt, Human
agucucaucaggcauguaguca

SEQ ID NO: 46284 - RNA, 22 nt, Human
agucuccacacuggcagaugcc

SEQ ID NO: 46285 - RNA, 22 nt, Human
agucuccacccaugacaguaca

SEQ ID NO: 46286 - RNA, 22 nt, Human
agucuccagaaauauagcagug

SEQ ID NO: 46287 - RNA, 22 nt, Human
agucuccucuuuccuuguuauu

SEQ ID NO: 46288 - RNA, 22 nt, Human
agucucuccacauuguuauaaa

SEQ ID NO: 46289 - RNA, 22 nt, Human
agucucugggcaugguugugac

SEQ ID NO: 46290 - RNA, 22 nt, Human
agucucuggggaggaguggaaa

SEQ ID NO: 46291 - RNA, 20 nt, Human
agucucuguagugccugaga

SEQ ID NO: 46292 - RNA, 22 nt, Human
agucucuuaauuuuuucuaagu

SEQ ID NO: 46293 - RNA, 22 nt, Human
agucucuuacccaagcagaaug

SEQ ID NO: 46294 - RNA, 22 nt, Human
agucucuuauucccuauugcug

SEQ ID NO: 46295 - RNA, 22 nt, Human
agucucuuccucaugcauaugu

SEQ ID NO: 46296 - RNA, 22 nt, Human
agucucuuccuucaaggcuggu

SEQ ID NO: 46297 - RNA, 22 nt, Human
agucucuuucuaaauaagguca

SEQ ID NO: 46298 - RNA, 22 nt, Human
agucucuuuugcgaagaguguu

SEQ ID NO: 46299 - RNA, 22 nt, Human
agucucuuuugguuccaaaaau

SEQ ID NO: 46300 - RNA, 22 nt, Human
agucugaaggcaaucugcugac

SEQ ID NO: 46301 - RNA, 22 nt, Human
agucugaaguagucuuuagugu

SEQ ID NO: 46302 - RNA, 22 nt, Human
agucugacuuggccaggagcug

SEQ ID NO: 46303 - RNA, 22 nt, Human
agucugagucuaaaggcuugag

SEQ ID NO: 46304 - RNA, 22 nt, Human
agucugcaggcugugauuuuuu

SEQ ID NO: 46305 - RNA, 22 nt, Human
agucugcauucacagcaauuau

SEQ ID NO: 46306 - RNA, 20 nt, Human
agucugccugcuccuucucc

SEQ ID NO: 46307 - RNA, 22 nt, Human
agucuggaccugcugggucucc

SEQ ID NO: 46308 - RNA, 19 nt, Human
agucuggaguaaaaggaau

SEQ ID NO: 46309 - RNA, 20 nt, Human
agucuggcaugaugcaggca

SEQ ID NO: 46310 - RNA, 22 nt, Human
agucugggauguauaaacugaa

SEQ ID NO: 46311 - RNA, 22 nt, Human
agucugguagaggaagaggccu

SEQ ID NO: 46312 - RNA, 22 nt, Human
agucugguauuggucuuuaauc

SEQ ID NO: 46313 - RNA, 22 nt, Human
agucuggucuguucauggguca

SEQ ID NO: 46314 - RNA, 22 nt, Human
agucuggugagaacauaaauag

SEQ ID NO: 46315 - RNA, 19 nt, Human
agucugguggcgugcaugu

SEQ ID NO: 46316 - RNA, 22 nt, Human
agucuggugguauuuuguagug

SEQ ID NO: 46317 - RNA, 22 nt, Human
agucugucagucauucuaacaa

SEQ ID NO: 46318 - RNA, 19 nt, Human
agucugucugcuuucccuc

SEQ ID NO: 46319 - RNA, 22 nt, Human
agucugugaacuuggcagggaa

SEQ ID NO: 46320 - RNA, 22 nt, Human
agucugugacucauuggaucuc

SEQ ID NO: 46321 - RNA, 22 nt, Human
agucugugagugauguaccugc

SEQ ID NO: 46322 - RNA, 22 nt, Human
agucugugcuguuggugaggau

SEQ ID NO: 46323 - RNA, 23 nt, Human
agucugugcuuggugggagggcc

SEQ ID NO: 46324 - RNA, 22 nt, Human
agucugugugaaugugggcuuu

SEQ ID NO: 46325 - RNA, 22 nt, Human
agucuuaacuaugcaaguacua

SEQ ID NO: 46326 - RNA, 23 nt, Human
agucuuacugucccagaacaggg

SEQ ID NO: 46327 - RNA, 22 nt, Human
agucuuagauaagugaccaaug

SEQ ID NO: 46328 - RNA, 22 nt, Human
agucuuagauuuuauuuugguc

SEQ ID NO: 46329 - RNA, 22 nt, Human
agucuuaguaugguuuuagguu

SEQ ID NO: 46330 - RNA, 22 nt, Human
agucuuaugguuaaauagaugc

SEQ ID NO: 46331 - RNA, 22 nt, Human
agucuuaugugauuuaucuuuc

SEQ ID NO: 46332 - RNA, 22 nt, Human
agucuucagcagccuucucagg

SEQ ID NO: 46333 - RNA, 22 nt, Human
agucuucagcauagcauauggc

SEQ ID NO: 46334 - RNA, 22 nt, Human
agucuucuagcuggguuugguu

SEQ ID NO: 46335 - RNA, 22 nt, Human
agucuucucauuucacaugcuu

SEQ ID NO: 46336 - RNA, 22 nt, Human
agucuucuggguguuuccagag

SEQ ID NO: 46337 - RNA, 19 nt, Human
agucuuguauuuuucaagc

SEQ ID NO: 46338 - RNA, 18 nt, Human
agucuuguucuguugccc

SEQ ID NO: 46339 - RNA, 22 nt, Human
agucuuuacauguguuauauau

SEQ ID NO: 46340 - RNA, 22 nt, Human
agucuuuagagucuuaguguuu

SEQ ID NO: 46341 - RNA, 22 nt, Human
agucuuugaaguucugacagag

SEQ ID NO: 46342 - RNA, 22 nt, Human
agucuuugguuauaagagacag

SEQ ID NO: 46343 - RNA, 22 nt, Human
agugaaacagagcacagcaugc

SEQ ID NO: 46344 - RNA, 22 nt, Human
agugaaaggaaaaacugauauu

SEQ ID NO: 46345 - RNA, 22 nt, Human
agugaaagguugagaauauucu

SEQ ID NO: 46346 - RNA, 22 nt, Human
agugaaauagcauuuaugaagc

SEQ ID NO: 46347 - RNA, 22 nt, Human
agugaaaugacugaaucagaua

SEQ ID NO: 46348 - RNA, 19 nt, Human
agugaaauggaguauucaa

SEQ ID NO: 46349 - RNA, 21 nt, Human
agugaaauugcaucagaggga

SEQ ID NO: 46350 - RNA, 22 nt, Human
agugaacaaagguagugagcau

SEQ ID NO: 46351 - RNA, 22 nt, Human
agugaacaaggaugccaccucu

SEQ ID NO: 46352 - RNA, 22 nt, Human
agugaacaaguuaagaacacua

SEQ ID NO: 46353 - RNA, 22 nt, Human
agugaacaguuuggaacacaug

SEQ ID NO: 46354 - RNA, 22 nt, Human
agugaagaggaaguggggcaca

SEQ ID NO: 46355 - RNA, 23 nt, Human
agugaagcugguuagugaugacc

SEQ ID NO: 46356 - RNA, 22 nt, Human
agugaagguuuacagggccccu

SEQ ID NO: 46357 - RNA, 22 nt, Human
agugaauacaugucacucagca

SEQ ID NO: 46358 - RNA, 22 nt, Human
agugaauauuuuuagacaccca

SEQ ID NO: 46359 - RNA, 23 nt, Human
agugcucccaggaccuggggcag

SEQ ID NO: 46360 - RNA, 22 nt, Human
agugcuccuauggaucaguugu

SEQ ID NO: 46361 - RNA, 22 nt, Human
agugcucugaucuccuuggguu

SEQ ID NO: 46362 - RNA, 21 nt, Human
agugcugaaaaagcaugucuc

SEQ ID NO: 46363 - RNA, 22 nt, Human
agugcugaacauagaauggaca

SEQ ID NO: 46364 - RNA, 22 nt, Human
agugcugaagacuggcuaggga

SEQ ID NO: 46365 - RNA, 22 nt, Human
agugcugagugauugcaaagga

SEQ ID NO: 46366 - RNA, 22 nt, Human
agugcuggguacuguucccauu

SEQ ID NO: 46367 - RNA, 22 nt, Human
agugcuguaacaacuuauuugg

SEQ ID NO: 46368 - RNA, 22 nt, Human
agugcuguccaguuucacaggu

SEQ ID NO: 46369 - RNA, 20 nt, Human
agugcuguggcugaauaaga

SEQ ID NO: 46370 - RNA, 22 nt, Human
agugcuuaauagauguccagca

SEQ ID NO: 46371 - RNA, 22 nt, Human
agugcuuucagugugcucuuuu

SEQ ID NO: 46372 - RNA, 22 nt, Human
agugcuuuccuucuugugacau

SEQ ID NO: 46373 - RNA, 22 nt, Human
agugcuuucuugcuccaucagu

SEQ ID NO: 46374 - RNA, 22 nt, Human
agugcuuugagcguuugaaaag

SEQ ID NO: 46375 - RNA, 22 nt, Human
agugcuuuuauuauauacagga

SEQ ID NO: 46376 - RNA, 22 nt, Human
aguggacaaccaugcugagauu

SEQ ID NO: 46377 - RNA, 22 nt, Human
aguggacauucugcacuuggag

SEQ ID NO: 46378 - RNA, 22 nt, Human
aguggacucuucccagugcuug

SEQ ID NO: 46379 - RNA, 22 nt, Human
aguggacuuuuaguauccuuau

SEQ ID NO: 46380 - RNA, 22 nt, Human
aguggagaccccacuucuacau

SEQ ID NO: 46381 - RNA, 22 nt, Human
aguggaguugaguugauggauu

SEQ ID NO: 46382 - RNA, 22 nt, Human
aguggcaaaagcaggcuuaggc

SEQ ID NO: 46383 - RNA, 22 nt, Human
aguggcaagucaaugauaguga

SEQ ID NO: 46384 - RNA, 22 nt, Human
aguggcagaagccaagucugca

SEQ ID NO: 46385 - RNA, 22 nt, Human
aguggcagacacaaugugggca

SEQ ID NO: 46386 - RNA, 22 nt, Human
aguggcagaguugaauaauuga

SEQ ID NO: 46387 - RNA, 19 nt, Human
aguggcagaucuggaagua

SEQ ID NO: 46388 - RNA, 22 nt, Human
aguggcaggaucucgguucacu

SEQ ID NO: 46389 - RNA, 17 nt, Human
aguggcaggcagauggg

SEQ ID NO: 46390 - RNA, 20 nt, Human
aguggcaggcgaucauuacu

SEQ ID NO: 46391 - RNA, 22 nt, Human
gcaaacauuuggucuagugugu

SEQ ID NO: 46392 - RNA, 22 nt, Human
gcaaacuguuggaguagagucu

SEQ ID NO: 46393 - RNA, 22 nt, Human
gcaaagaaagccaaggucuaac

SEQ ID NO: 46394 - RNA, 22 nt, Human
gcaaagauauuagaauagagua

SEQ ID NO: 46395 - RNA, 22 nt, Human
gcaaagcagucuucugugccua

SEQ ID NO: 46396 - RNA, 22 nt, Human
gcaaaggcuagagacacaggga

SEQ ID NO: 46397 - RNA, 22 nt, Human
gcaaagggaaaguggcaggguc

SEQ ID NO: 46398 - RNA, 22 nt, Human
gcaaaguauuaaccaacaggau

SEQ ID NO: 46399 - RNA, 22 nt, Human
gcaaaguauuaaguauuaaguu

SEQ ID NO: 46400 - RNA, 22 nt, Human
gcaaaguuccuacuuuacugga

SEQ ID NO: 46401 - RNA, 22 nt, Human
gcaaauagaagauucuguugac

SEQ ID NO: 46402 - RNA, 21 nt, Human
gcaaaugaguuaacuaacuca

SEQ ID NO: 46403 - RNA, 22 nt, Human
gcaaaugcuaaaguguagagac

SEQ ID NO: 46404 - RNA, 20 nt, Human
gcaaauggaucccacaagcc

SEQ ID NO: 46405 - RNA, 22 nt, Human
gcaaauucaacagcacauucuc

SEQ ID NO: 46406 - RNA, 22 nt, Human
gcaacaaguguaaacaugcauu

SEQ ID NO: 46407 - RNA, 18 nt, Human
gcaacagaucaacagaaa

SEQ ID NO: 46408 - RNA, 22 nt, Human
gcaacagcauucucauugacau

SEQ ID NO: 46409 - RNA, 22 nt, Human
gcaacagcccagguucugugug

SEQ ID NO: 46410 - RNA, 17 nt, Human
gcaaccagcccccaucu

SEQ ID NO: 46411 - RNA, 20 nt, Human
gcaacucacccacagcagcu

SEQ ID NO: 46412 - RNA, 22 nt, Human
gcaacugugauuuguuaucuug

SEQ ID NO: 46413 - RNA, 22 nt, Human
gcaacuuuagaaaaaucuauaa

SEQ ID NO: 46414 - RNA, 22 nt, Human
gcaacuuuagggccagcaagua

SEQ ID NO: 46415 - RNA, 22 nt, Human
ggucacacaccaggaccugcag

SEQ ID NO: 46416 - RNA, 22 nt, Human
ggucacauucugaggaaucagg

SEQ ID NO: 46417 - RNA, 22 nt, Human
ggucacuccaccuucuccaccu

SEQ ID NO: 46418 - RNA, 22 nt, Human
ggucacugagcuguaauucugu

SEQ ID NO: 46419 - RNA, 23 nt, Human
ggucacuggcaagcagugcagag

SEQ ID NO: 46420 - RNA, 20 nt, Human
ggucacuguggcugcaggau

SEQ ID NO: 46421 - RNA, 22 nt, Human
ggucacuucagauaacuggugu

SEQ ID NO: 46422 - RNA, 22 nt, Human
ggucacuucuuucaucgaaacu

SEQ ID NO: 46423 - RNA, 22 nt, Human
ggucagaacaagcaaauaauag

SEQ ID NO: 46424 - RNA, 22 nt, Human
ggucagaaggauucugggaaau

SEQ ID NO: 46425 - RNA, 22 nt, Human
ggucagaagugcaaaaucaguu

SEQ ID NO: 46426 - RNA, 22 nt, Human
ggucagaggggauuccuuggga

SEQ ID NO: 46427 - RNA, 22 nt, Human
ggucagagggugggcugccugu

SEQ ID NO: 46428 - RNA, 20 nt, Human
ggucagccuggggcuccagg

SEQ ID NO: 46429 - RNA, 22 nt, Human
ggucagccuuggauuugguagc

SEQ ID NO: 46430 - RNA, 22 nt, Human
ggucagcucuuugggcuggugg

SEQ ID NO: 46431 - RNA, 22 nt, Human
ggucaggguauaaucaagugag

SEQ ID NO: 46432 - RNA, 22 nt, Human
ggucagguggcuucuguccucu

SEQ ID NO: 46433 - RNA, 22 nt, Human
ggucaguggcaggggguacuuc

SEQ ID NO: 46434 - RNA, 22 nt, Human
ggucaguguacacaugugcagg

SEQ ID NO: 46435 - RNA, 22 nt, Human
ggucaugcugugaaucagugcu

SEQ ID NO: 46436 - RNA, 22 nt, Human
ggucauugaaaucagaaggguu

SEQ ID NO: 46437 - RNA, 22 nt, Human
ggucauugucagagccuguacu

SEQ ID NO: 46438 - RNA, 22 nt, Human
gguccaaggcucgguggcgggg

SEQ ID NO: 46439 - RNA, 22 nt, Human
gguccaccuccaagcuggggac

SEQ ID NO: 46440 - RNA, 22 nt, Human
gguccagaagcugguaggguag

SEQ ID NO: 46441 - RNA, 22 nt, Human
gguccagggaacuuugaaggau

SEQ ID NO: 46442 - RNA, 22 nt, Human
gguccaggggguagauauguga

SEQ ID NO: 46443 - RNA, 22 nt, Human
gguccagguauguggugugaau

SEQ ID NO: 46444 - RNA, 22 nt, Human
gguccagguccugugacagcag

SEQ ID NO: 46445 - RNA, 22 nt, Human
gguccagguuugcucuacuugu

SEQ ID NO: 46446 - RNA, 22 nt, Human
ggucccagcugcucaagaggcu

SEQ ID NO: 46447 - RNA, 22 nt, Human
ggucccaggaaucuguguucua

SEQ ID NO: 46448 - RNA, 22 nt, Human
ggucccaggcucccucuugucc

SEQ ID NO: 46449 - RNA, 22 nt, Human
ggucccaguccucucccugcua

SEQ ID NO: 46450 - RNA, 22 nt, Human
ggucccaguugcccaggucagg

SEQ ID NO: 46451 - RNA, 22 nt, Human
ggucccugaagaugccugagga

SEQ ID NO: 46452 - RNA, 22 nt, Human
ggucccugcccaaagcccuugg

SEQ ID NO: 46453 - RNA, 22 nt, Human
ggucccugcccaccugggagcu

SEQ ID NO: 46454 - RNA, 22 nt, Human
ggucccugcugaagccuuggug

SEQ ID NO: 46455 - RNA, 22 nt, Human
ggucccugguucccucugagcu

SEQ ID NO: 46456 - RNA, 18 nt, Human
gguccugaaugccugcua

SEQ ID NO: 46457 - RNA, 22 nt, Human
gguccugaguaccuauguuuau

SEQ ID NO: 46458 - RNA, 22 nt, Human
gguccuggaaguguaaguggca

SEQ ID NO: 46459 - RNA, 18 nt, Human
gguccugggccuggcuca

SEQ ID NO: 46460 - RNA, 22 nt, Human
gguccugucugacaucacugcu

SEQ ID NO: 46461 - RNA, 22 nt, Human
ggucgagucacuuguugccuuu

SEQ ID NO: 46462 - RNA, 22 nt, Human
ggucgucucagucugacugaag

SEQ ID NO: 46463 - RNA, 22 nt, Human
ggucuaaaaugagucuuccuag

SEQ ID NO: 46464 - RNA, 22 nt, Human
ggucuagaugaaauuaaauguu

SEQ ID NO: 46465 - RNA, 22 nt, Human
ggucucagaucuuuauuaaggc

SEQ ID NO: 46466 - RNA, 22 nt, Human
ggucucagugaaggagugugcu

SEQ ID NO: 46467 - RNA, 19 nt, Human
ggucucagugcagcugcag

SEQ ID NO: 46468 - RNA, 22 nt, Human
ggucuccaaagcugcauugaug

SEQ ID NO: 46469 - RNA, 22 nt, Human
ggucuccauuccuucaucucac

SEQ ID NO: 46470 - RNA, 22 nt, Human
ggucuccugaggcugccacacc

SEQ ID NO: 46471 - RNA, 22 nt, Human
ggucucugaacuuccacugcgc

SEQ ID NO: 46472 - RNA, 20 nt, Human
ggucucugacagcugguugc

SEQ ID NO: 46473 - RNA, 22 nt, Human
ggucucugacuuagagauggau

SEQ ID NO: 46474 - RNA, 22 nt, Human
ggucucugagugaggaccuggg

SEQ ID NO: 46475 - RNA, 22 nt, Human
ggucucugcucagaugccacuu

SEQ ID NO: 46476 - RNA, 22 nt, Human
ggucucuggccuuggagauuga

SEQ ID NO: 46477 - RNA, 22 nt, Human
ggucucugucacugaguggccc

SEQ ID NO: 46478 - RNA, 22 nt, Human
ggucugaaauuaugucacugcu

SEQ ID NO: 46479 - RNA, 22 nt, Human
ggucugagagccacugaauccc

SEQ ID NO: 46480 - RNA, 22 nt, Human
ggucugagguuugggauucacu

SEQ ID NO: 46481 - RNA, 22 nt, Human
ggucugaguagagggcuggcga

SEQ ID NO: 46482 - RNA, 22 nt, Human
ggucugagugggcaggggccgg

SEQ ID NO: 46483 - RNA, 22 nt, Human
ggucugaguggggccugagauu

SEQ ID NO: 46484 - RNA, 22 nt, Human
ggucuggaagcgucccaaaggu

SEQ ID NO: 46485 - RNA, 22 nt, Human
ggucuggaauaagguccaggaa

SEQ ID NO: 46486 - RNA, 22 nt, Human
ggucuggagcuaaucuuguugg

SEQ ID NO: 46487 - RNA, 22 nt, Human
ggucuggccucgggcaccccca

SEQ ID NO: 46488 - RNA, 22 nt, Human
ggucuggccuggcauucuaugg

SEQ ID NO: 46489 - RNA, 17 nt, Human
ggucuggggccauuggc

SEQ ID NO: 46490 - RNA, 22 nt, Human
ggucugugugcuuugggaagug

SEQ ID NO: 46491 - RNA, 21 nt, Human
ggucuucaaagcuuuuacgau

SEQ ID NO: 46492 - RNA, 22 nt, Human
ggucuucagcuuugcaugucuu

SEQ ID NO: 46493 - RNA, 22 nt, Human
ggugaagccagggcaucaauau

SEQ ID NO: 46494 - RNA, 22 nt, Human
ggugaagcguauuuguggagcu

SEQ ID NO: 46495 - RNA, 22 nt, Human
ggugaaguaauaccagguguac

SEQ ID NO: 46496 - RNA, 22 nt, Human
ggugacagccgcuugcccugua

SEQ ID NO: 46497 - RNA, 22 nt, Human
ggugacagccgcuuggcgcuag

SEQ ID NO: 46498 - RNA, 22 nt, Human
ggugacagugguuaaaauuugu

SEQ ID NO: 46499 - RNA, 22 nt, Human
ggugacauaguuacuucaggcu

SEQ ID NO: 46500 - RNA, 22 nt, Human
gcagcuguucagcuggccagau

SEQ ID NO: 46501 - RNA, 22 nt, Human
gcagcuuggauuucuguaguuu

SEQ ID NO: 46502 - RNA, 22 nt, Human
gcagcuuuaaacauuggaaaua

SEQ ID NO: 46503 - RNA, 22 nt, Human
gcagcuuuaaucugaauaagua

SEQ ID NO: 46504 - RNA, 22 nt, Human
gcagcuuucuacuuccuacagc

SEQ ID NO: 46505 - RNA, 22 nt, Human
gcagcuuugucacggagugucg

SEQ ID NO: 46506 - RNA, 18 nt, Human
gcagcuuuugauucaccc

SEQ ID NO: 46507 - RNA, 22 nt, Human
gcagcuuuuuggaugucaguua

SEQ ID NO: 46508 - RNA, 22 nt, Human
gcaggaagcauagaagaaugcc

SEQ ID NO: 46509 - RNA, 22 nt, Human
gcaggaagccuuaccaagccca

SEQ ID NO: 46510 - RNA, 22 nt, Human
gcaggaagggaaagguugacuc

SEQ ID NO: 46511 - RNA, 22 nt, Human
gcaggaaucuaacccaaggaga

SEQ ID NO: 46512 - RNA, 22 nt, Human
gcaggacaaaauuuccagggug

SEQ ID NO: 46513 - RNA, 16 nt, Human
gcaggacacucagaca

SEQ ID NO: 46514 - RNA, 22 nt, Human
gcaggaccaggcacgagggcca

SEQ ID NO: 46515 - RNA, 22 nt, Human
gcaggacuuuguggaugaugga

SEQ ID NO: 46516 - RNA, 22 nt, Human
gcaggagcugcucuccugacga

SEQ ID NO: 46517 - RNA, 22 nt, Human
gcaggagcuggaaagugauguu

SEQ ID NO: 46518 - RNA, 16 nt, Human
gcaggaguaccacuug

SEQ ID NO: 46519 - RNA, 22 nt, Human
gcaggaguaucuauacauuaaa

SEQ ID NO: 46520 - RNA, 22 nt, Human
gcaggagucacugacuuggucc

SEQ ID NO: 46521 - RNA, 22 nt, Human
gcaggaguggagaccaugggga

SEQ ID NO: 46522 - RNA, 22 nt, Human
gcaggaguguauuugcauguaa

SEQ ID NO: 46523 - RNA, 22 nt, Human
gcaggaguuaaaauauguaaug

SEQ ID NO: 46524 - RNA, 22 nt, Human
gcaggaguuaggguaaaaauga

SEQ ID NO: 46525 - RNA, 22 nt, Human
gcaggaguucaauugcccauga

SEQ ID NO: 46526 - RNA, 22 nt, Human
gcaggaugagugaguacauuua

SEQ ID NO: 46527 - RNA, 22 nt, Human
gcaggaugggagcuucacucug

SEQ ID NO: 46528 - RNA, 22 nt, Human
gcaggaugggagcuucacuuug

SEQ ID NO: 46529 - RNA, 22 nt, Human
gcaggauggguguagcccagca

SEQ ID NO: 46530 - RNA, 22 nt, Human
gcaggcacuccuaggaccauca

SEQ ID NO: 46531 - RNA, 22 nt, Human
gcaggcagguggcaucuuguga

SEQ ID NO: 46532 - RNA, 22 nt, Human
gcaggcaguuauuuaguagaau

SEQ ID NO: 46533 - RNA, 22 nt, Human
gcagcuguagaggggagaaaga

SEQ ID NO: 46534 - RNA, 22 nt, Human
gcagcugucacuuucacaaugc

SEQ ID NO: 46535 - RNA, 22 nt, Human
gcagcugucauuuacaacaggg

SEQ ID NO: 46536 - RNA, 22 nt, Human
gcagcugugggccucggagagc

SEQ ID NO: 46537 - RNA, 22 nt, Human
gcagcuucaguaggugaagaca

SEQ ID NO: 46538 - RNA, 23 nt, Human
gcagcuugugguuuaguagaggg

SEQ ID NO: 46539 - RNA, 22 nt, Human
gcagcuuuaaaggaggcucuga

SEQ ID NO: 46540 - RNA, 22 nt, Human
gcagcuuuguaaaguaugaagc

SEQ ID NO: 46541 - RNA, 22 nt, Human
gcaggaacccagacaaccaggg

SEQ ID NO: 46542 - RNA, 23 nt, Human
gcaggaacucaggguaggcagca

SEQ ID NO: 46543 - RNA, 22 nt, Human
gcaggaacuugggugaagucag

SEQ ID NO: 46544 - RNA, 22 nt, Human
gcaggaagaggcucgaagcccc

SEQ ID NO: 46545 - RNA, 22 nt, Human
gcaggaagaugagcucagguaa

SEQ ID NO: 46546 - RNA, 22 nt, Human
gcaggaauauaguauuucgagg

SEQ ID NO: 46547 - RNA, 22 nt, Human
gcaggacauucagugaaugggc

SEQ ID NO: 46548 - RNA, 22 nt, Human
gcaggaccucuggaugcaaugc

SEQ ID NO: 46549 - RNA, 22 nt, Human
gcaggacuugaauccaggcagu

SEQ ID NO: 46550 - RNA, 22 nt, Human
gcaggagaacaaagcaagcugc

SEQ ID NO: 46551 - RNA, 18 nt, Human
gcaggagauggguggggu

SEQ ID NO: 46552 - RNA, 22 nt, Human
gcaggagcagucaggggcagcu

SEQ ID NO: 46553 - RNA, 22 nt, Human
gcaggagccacuucagggaugc

SEQ ID NO: 46554 - RNA, 22 nt, Human
gcaggagccaggccgagcuggu

SEQ ID NO: 46555 - RNA, 22 nt, Human
gcaggagccagggauuccagga

SEQ ID NO: 46556 - RNA, 22 nt, Human
gcaggagcccuggcauguucuu

SEQ ID NO: 46557 - RNA, 22 nt, Human
gcaggaggagcauuaacugagc

SEQ ID NO: 46558 - RNA, 22 nt, Human
gcaggaggccagguaugcuuua

SEQ ID NO: 46559 - RNA, 22 nt, Human
gcaggagucagcccuaccuuga

SEQ ID NO: 46560 - RNA, 22 nt, Human
gcaggagugacauggaugugga

SEQ ID NO: 46561 - RNA, 22 nt, Human
gcaggaguuagagguuuaaucu

SEQ ID NO: 46562 - RNA, 23 nt, Human
gcaggaguuccuggacuccagga

SEQ ID NO: 46563 - RNA, 22 nt, Human
gcaggaugccagggcagcagcg

SEQ ID NO: 46564 - RNA, 22 nt, Human
gcaggaugguggaaggccugcu

SEQ ID NO: 46565 - RNA, 19 nt, Human
gcaggcacagcccugggug

SEQ ID NO: 46566 - RNA, 22 nt, Human
gcaggcaccggguugcuccccu

SEQ ID NO: 46567 - RNA, 22 nt, Human
gcaggcaccucguggaguggaa

SEQ ID NO: 46568 - RNA, 17 nt, Human
gcaggcacugcugccug

SEQ ID NO: 46569 - RNA, 15 nt, Human
gcaggcagaucaccg

SEQ ID NO: 46570 - RNA, 22 nt, Human
gcaggcagaucaccugucagga

SEQ ID NO: 46571 - RNA, 22 nt, Human
gcaggcaggaaggacuaaguaa

SEQ ID NO: 46572 - RNA, 22 nt, Human
gcaggcaggagcccaacugccu

SEQ ID NO: 46573 - RNA, 22 nt, Human
gcaggcaggcuuccuugaacug

SEQ ID NO: 46574 - RNA, 20 nt, Human
gcaggcagggaaugggggug

SEQ ID NO: 46575 - RNA, 22 nt, Human
gcaggccacugucuccucuggg

SEQ ID NO: 46576 - RNA, 22 nt, Human
gcaggccagcugugcagauggg

SEQ ID NO: 46577 - RNA, 20 nt, Human
gcaggcccucucucuagucu

SEQ ID NO: 46578 - RNA, 22 nt, Human
gcaggccuaagagaaggcauug

SEQ ID NO: 46579 - RNA, 18 nt, Human
gcaggccuagaacuuggu

SEQ ID NO: 46580 - RNA, 22 nt, Human
gcaggccucuaauucaccgcag

SEQ ID NO: 46581 - RNA, 22 nt, Human
gcaggccugacuguagggggca

SEQ ID NO: 46582 - RNA, 22 nt, Human
gcaggccugguuuacaugguag

SEQ ID NO: 46583 - RNA, 22 nt, Human
gcaggccuuuaucccugccuca

SEQ ID NO: 46584 - RNA, 14 nt, Human
gcaggcggaucacu

SEQ ID NO: 46585 - RNA, 22 nt, Human
gcaggcguguuucacgugccag

SEQ ID NO: 46586 - RNA, 22 nt, Human
gcaggcuaugaguuucucacca

SEQ ID NO: 46587 - RNA, 22 nt, Human
gcaggcucccuugcagagcagg

SEQ ID NO: 46588 - RNA, 22 nt, Human
gcaggcugaaacucggggucua

SEQ ID NO: 46589 - RNA, 22 nt, Human
gcaggcugaguugggaaaccaa

SEQ ID NO: 46590 - RNA, 21 nt, Human
gcaggcuggucaaaccucagu

SEQ ID NO: 46591 - RNA, 22 nt, Human
gcaggcugugaggcucagaugg

SEQ ID NO: 46592 - RNA, 22 nt, Human
gcaggcugugguauguugggca

SEQ ID NO: 46593 - RNA, 22 nt, Human
gcaggcuucucucuucccuacc

SEQ ID NO: 46594 - RNA, 22 nt, Human
gcaggcuugcccggccuccuuc

SEQ ID NO: 46595 - RNA, 22 nt, Human
gcaggcuuugacuuggggcagc

SEQ ID NO: 46596 - RNA, 22 nt, Human
gcagggaaacaggugcuaagga

SEQ ID NO: 46597 - RNA, 22 nt, Human
gcagggaagaucuuggagcugc

SEQ ID NO: 46598 - RNA, 22 nt, Human
gcagggaaguuugaucuuuuuc

SEQ ID NO: 46599 - RNA, 22 nt, Human
gcagggacaucuuugucuagua

SEQ ID NO: 46600 - RNA, 22 nt, Human
gcagggaccagggccagaucca

SEQ ID NO: 46601 - RNA, 21 nt, Human
gcagggaccgcgacuucuggg

SEQ ID NO: 46602 - RNA, 22 nt, Human
gcagggaccugccacugcuguc

SEQ ID NO: 46603 - RNA, 22 nt, Human
gcagggauugugcagggggcua

SEQ ID NO: 46604 - RNA, 22 nt, Human
gcagggcaaauguggaaaggag

SEQ ID NO: 46605 - RNA, 22 nt, Human
gcagggcacacaagaaugauaa

SEQ ID NO: 46606 - RNA, 22 nt, Human
gcagggcagagggagaaucucu

SEQ ID NO: 46607 - RNA, 22 nt, Human
gcagggcaguaagagcuagagu

SEQ ID NO: 46608 - RNA, 22 nt, Human
gcagggcaugggcccugucugc

SEQ ID NO: 46609 - RNA, 22 nt, Human
gcagggccagggcucaggcugu

SEQ ID NO: 46610 - RNA, 22 nt, Human
gugggagcuucaucaagcaguu

SEQ ID NO: 46611 - RNA, 22 nt, Human
gugggagcuuuggcaucaggcu

SEQ ID NO: 46612 - RNA, 22 nt, Human
gugggaguggagcucagcaugu

SEQ ID NO: 46613 - RNA, 22 nt, Human
gugggaguggggaagcagagug

SEQ ID NO: 46614 - RNA, 22 nt, Human
gugggcagaggagagaacauua

SEQ ID NO: 46615 - RNA, 22 nt, Human
gugggcagauacauuugauaug

SEQ ID NO: 46616 - RNA, 22 nt, Human
gugggcaggagugagcaacagg

SEQ ID NO: 46617 - RNA, 22 nt, Human
gugggcaggcccuaggcgauuu

SEQ ID NO: 46618 - RNA, 22 nt, Human
gugggcaguggggucuucugcc

SEQ ID NO: 46619 - RNA, 22 nt, Human
gugggcaguuggugauucucgu

SEQ ID NO: 46620 - RNA, 19 nt, Human
gugggccaggcagaaggcu

SEQ ID NO: 46621 - RNA, 22 nt, Human
gugggccaguuccucacaggua

SEQ ID NO: 46622 - RNA, 22 nt, Human
gugggccucuugaggguggcua

SEQ ID NO: 46623 - RNA, 22 nt, Human
gugggccugaugcugccaugag

SEQ ID NO: 46624 - RNA, 22 nt, Human
gugggcugcauguuuacuauuc

SEQ ID NO: 46625 - RNA, 22 nt, Human
gugggcuggagcaaugauuuca

SEQ ID NO: 46626 - RNA, 22 nt, Human
gugggcuuguuuugaugagauc

SEQ ID NO: 46627 - RNA, 22 nt, Human
guggggagcagccuuagccccu

SEQ ID NO: 46628 - RNA, 22 nt, Human
guggggcugcuuaggcugcgca

SEQ ID NO: 46629 - RNA, 22 nt, Human
gugggggcaggcagugcuagga

SEQ ID NO: 46630 - RNA, 22 nt, Human
guggggucucucuguaccuccc

SEQ ID NO: 46631 - RNA, 22 nt, Human
gugggucuggcuuugaggguca

SEQ ID NO: 46632 - RNA, 22 nt, Human
gugggugauguacuggaggcca

SEQ ID NO: 46633 - RNA, 22 nt, Human
guggguggaucaccugagguca

SEQ ID NO: 46634 - RNA, 22 nt, Human
gugggugugagugacggcgucc

SEQ ID NO: 46635 - RNA, 22 nt, Human
guggguguggaacugugagacc

SEQ ID NO: 46636 - RNA, 22 nt, Human
gugggugugguucguuuaagac

SEQ ID NO: 46637 - RNA, 22 nt, Human
gugguauuuaugacagugcccg

SEQ ID NO: 46638 - RNA, 22 nt, Human
guggucagaaaucucaguggca

SEQ ID NO: 46639 - RNA, 22 nt, Human
guggucagccccggugagcccu

SEQ ID NO: 46640 - RNA, 22 nt, Human
guggucagugguacaguuugaa

SEQ ID NO: 46641 - RNA, 22 nt, Human
gugguccucauaauucagugag

SEQ ID NO: 46642 - RNA, 22 nt, Human
gugguccugaguagcuuuagaa

SEQ ID NO: 46643 - RNA, 18 nt, Human
guggucuuucugucuucu

SEQ ID NO: 46644 - RNA, 22 nt, Human
guggugcaggaagcaucuggcu

SEQ ID NO: 46645 - RNA, 22 nt, Human
guggugcaggugucacugcaga

SEQ ID NO: 46646 - RNA, 22 nt, Human
guggugcauccuugaguaagcu

SEQ ID NO: 46647 - RNA, 22 nt, Human
guggugcaugcaugcauaugua

SEQ ID NO: 46648 - RNA, 22 nt, Human
guggugugugcuuagggcuagg

SEQ ID NO: 46649 - RNA, 21 nt, Human
gugguuauuuucauuagcauc

SEQ ID NO: 46650 - RNA, 22 nt, Human
gugguucagugucauauuaacg

SEQ ID NO: 46651 - RNA, 22 nt, Human
gugguuguuuccagguuugaaa

SEQ ID NO: 46652 - RNA, 22 nt, Human
gugguuuguuuuauuccuggaa

SEQ ID NO: 46653 - RNA, 22 nt, Human
gugguuuuacaaagagaaagau

SEQ ID NO: 46654 - RNA, 19 nt, Human
gugguuuucugaggagucu

SEQ ID NO: 46655 - RNA, 22 nt, Human
gugguuuugccauuacaaguaa

SEQ ID NO: 46656 - RNA, 22 nt, Human
gugguuuugcuuuaugagugaa

SEQ ID NO: 46657 - RNA, 22 nt, Human
gugguuuuuagauuucuacagu

SEQ ID NO: 46658 - RNA, 22 nt, Human
guguaaacacccuuacuguggc

SEQ ID NO: 46659 - RNA, 18 nt, Human
guguaaacagccauugag

SEQ ID NO: 46660 - RNA, 22 nt, Human
guguacaaaaugucuccaugga

SEQ ID NO: 46661 - RNA, 22 nt, Human
guguacacuugaacugacgguu

SEQ ID NO: 46662 - RNA, 22 nt, Human
guguacaggaugacuguacuua

SEQ ID NO: 46663 - RNA, 22 nt, Human
guguaguauaagguuaaaaccu

SEQ ID NO: 46664 - RNA, 22 nt, Human
guguauaacuaucuaucuagua

SEQ ID NO: 46665 - RNA, 22 nt, Human
guguauaauaaugugagcuaaa

SEQ ID NO: 46666 - RNA, 22 nt, Human
guguaucaaagcacagacuuca

SEQ ID NO: 46667 - RNA, 22 nt, Human
guguaugauuucaaauggcuag

SEQ ID NO: 46668 - RNA, 22 nt, Human
guguauggacacaugucauguu

SEQ ID NO: 46669 - RNA, 19 nt, Human
guguauguaaguugugagg

SEQ ID NO: 46670 - RNA, 22 nt, Human
guguauguguuuauagggaggu

SEQ ID NO: 46671 - RNA, 22 nt, Human
gugucaaauccacuccucuuuu

SEQ ID NO: 46672 - RNA, 22 nt, Human
gugucaauaaauagcggugugg

SEQ ID NO: 46673 - RNA, 22 nt, Human
gugucaaugagguuuauuuuug

SEQ ID NO: 46674 - RNA, 22 nt, Human
gugucacaggcccagcucuuca

SEQ ID NO: 46675 - RNA, 22 nt, Human
gugucaggcagucagcauggag

SEQ ID NO: 46676 - RNA, 22 nt, Human
gugucaggggcagccaggaaau

SEQ ID NO: 46677 - RNA, 20 nt, Human
gugucaguaaauauuaugug

SEQ ID NO: 46678 - RNA, 22 nt, Human
gugucaugggguuuguuauaca

SEQ ID NO: 46679 - RNA, 23 nt, Human
gugucauuacuguaauuauugug

SEQ ID NO: 46680 - RNA, 22 nt, Human
guguccagaugaggagacgaug

SEQ ID NO: 46681 - RNA, 22 nt, Human
guguccagcguggaaugagggu

SEQ ID NO: 46682 - RNA, 22 nt, Human
guguccagucauagcccagggc

SEQ ID NO: 46683 - RNA, 22 nt, Human
guguccaucucuguaugcugcu

SEQ ID NO: 46684 - RNA, 22 nt, Human
gugucccaggagaggagacaau

SEQ ID NO: 46685 - RNA, 22 nt, Human
guguccucuuauugcucuuggc

SEQ ID NO: 46686 - RNA, 22 nt, Human
guguccugagugaggccuggcc

SEQ ID NO: 46687 - RNA, 23 nt, Human
gccugccugaccugugcaaaguc

SEQ ID NO: 46688 - RNA, 22 nt, Human
gccugccugcugucaucugccu

SEQ ID NO: 46689 - RNA, 22 nt, Human
gccugccuggagcuugagguga

SEQ ID NO: 46690 - RNA, 22 nt, Human
gccugcucugaguguggggggu

SEQ ID NO: 46691 - RNA, 22 nt, Human
gccugcugaagccagagugugu

SEQ ID NO: 46692 - RNA, 22 nt, Human
gccugcugcauccaggcuauug

SEQ ID NO: 46693 - RNA, 23 nt, Human
gccugcugucacagcgggcccag

SEQ ID NO: 46694 - RNA, 22 nt, Human
gccugcuguuaacugcaggaau

SEQ ID NO: 46695 - RNA, 22 nt, Human
gccugcuuugugccugaucuuu

SEQ ID NO: 46696 - RNA, 22 nt, Human
gccuggacaccgcccuugcaga

SEQ ID NO: 46697 - RNA, 23 nt, Human
gccuggagaaaagcugcaguuca

SEQ ID NO: 46698 - RNA, 22 nt, Human
gccuggagcccaguguggggcu

SEQ ID NO: 46699 - RNA, 22 nt, Human
gccuggagccucagcaaggagg

SEQ ID NO: 46700 - RNA, 22 nt, Human
gccuggagcucuccacuugggg

SEQ ID NO: 46701 - RNA, 22 nt, Human
gccuggagggcucuagagaggc

SEQ ID NO: 46702 - RNA, 22 nt, Human
gccuggaggggacagucucugg

SEQ ID NO: 46703 - RNA, 22 nt, Human
gccuggaguagcauggcaagcc

SEQ ID NO: 46704 - RNA, 20 nt, Human
gccuggaguuaguuuuccuu

SEQ ID NO: 46705 - RNA, 22 nt, Human
gccuggaguucagccaaguccc

SEQ ID NO: 46706 - RNA, 22 nt, Human
gccuggaguugaaacuauuauu

SEQ ID NO: 46707 - RNA, 22 nt, Human
gccuggcaccacagccuuucag

SEQ ID NO: 46708 - RNA, 22 nt, Human
gccuggcacucaaucaucugcu

SEQ ID NO: 46709 - RNA, 22 nt, Human
gccuggcacucacugaagaggc

SEQ ID NO: 46710 - RNA, 22 nt, Human
gccuggcaggccucaugagggg

SEQ ID NO: 46711 - RNA, 22 nt, Human
gccuggcaguugacaguuugcu

SEQ ID NO: 46712 - RNA, 17 nt, Human
gccuggcccagccuggc

SEQ ID NO: 46713 - RNA, 22 nt, Human
gccuggcccagggcuccgcagg

SEQ ID NO: 46714 - RNA, 22 nt, Human
gccuggcccagggcucuuguug

SEQ ID NO: 46715 - RNA, 22 nt, Human
gccuggccgcuccgagcuccgc

SEQ ID NO: 46716 - RNA, 22 nt, Human
gccuggcucacagagcagccuu

SEQ ID NO: 46717 - RNA, 22 nt, Human
gccuggcucccucugcagcucc

SEQ ID NO: 46718 - RNA, 22 nt, Human
gccuggcuccuaaggacuggcu

SEQ ID NO: 46719 - RNA, 22 nt, Human
gugugcaugcauagacaccaca

SEQ ID NO: 46720 - RNA, 22 nt, Human
gugugcauguauauacuuuuau

SEQ ID NO: 46721 - RNA, 22 nt, Human
gugugccacugccugaggaccc

SEQ ID NO: 46722 - RNA, 22 nt, Human
gugugcccuggcuccagcacca

SEQ ID NO: 46723 - RNA, 22 nt, Human
gugugccuaugaguggugaaca

SEQ ID NO: 46724 - RNA, 22 nt, Human
gugugccucgccaagcugucgg

SEQ ID NO: 46725 - RNA, 22 nt, Human
gugugccugacaugaugguuaa

SEQ ID NO: 46726 - RNA, 22 nt, Human
gugugcgcuggugcuuggucaa

SEQ ID NO: 46727 - RNA, 18 nt, Human
gugugcucagagagugag

SEQ ID NO: 46728 - RNA, 22 nt, Human
gugugcugagugacugucauca

SEQ ID NO: 46729 - RNA, 22 nt, Human
gugugcugcccaacucgcagau

SEQ ID NO: 46730 - RNA, 22 nt, Human
guguggaaacagagagggcaac

SEQ ID NO: 46731 - RNA, 22 nt, Human
guguggcaccuccuuuccagcu

SEQ ID NO: 46732 - RNA, 22 nt, Human
guguggccaauuaugggcauuc

SEQ ID NO: 46733 - RNA, 20 nt, Human
guguggccaggagcugcgcu

SEQ ID NO: 46734 - RNA, 22 nt, Human
guguggcccugcguccugaguc

SEQ ID NO: 46735 - RNA, 22 nt, Human
guguggcuagaagugucuuguu

SEQ ID NO: 46736 - RNA, 22 nt, Human
guguggcugaaaucaaggcagg

SEQ ID NO: 46737 - RNA, 22 nt, Human
guguggcugugggagauguuca

SEQ ID NO: 46738 - RNA, 22 nt, Human
guguggcuugggugaggcgccu

SEQ ID NO: 46739 - RNA, 22 nt, Human
gugugggacgggugaguggcca

SEQ ID NO: 46740 - RNA, 22 nt, Human
gugugggcuaugugcgugggca

SEQ ID NO: 46741 - RNA, 18 nt, Human
gugugggcuccuccgagu

SEQ ID NO: 46742 - RNA, 22 nt, Human
guguggggagcugcagccacau

SEQ ID NO: 46743 - RNA, 22 nt, Human
guguggggcucagugggaaugu

SEQ ID NO: 46744 - RNA, 22 nt, Human
gugugggugggacaucaucuuu

SEQ ID NO: 46745 - RNA, 22 nt, Human
guguguaaaccuccaaucuggg

SEQ ID NO: 46746 - RNA, 22 nt, Human
guguguauuuaaaggauaguug

SEQ ID NO: 46747 - RNA, 22 nt, Human
guguguccaggcgggagucaag

SEQ ID NO: 46748 - RNA, 22 nt, Human
gugugucccuacaacagcuuca

SEQ ID NO: 46749 - RNA, 21 nt, Human
gugugucuaauguaguggaaa

SEQ ID NO: 46750 - RNA, 22 nt, Human
gugugugcaagagguuuauuga

SEQ ID NO: 46751 - RNA, 23 nt, Human
guguguggaaagugcaugggccu

SEQ ID NO: 46752 - RNA, 22 nt, Human
guguguggaaaguuuuccaugg

SEQ ID NO: 46753 - RNA, 22 nt, Human
guguguggacgucugagcccag

SEQ ID NO: 46754 - RNA, 22 nt, Human
guguguguauauauacacacac

SEQ ID NO: 46755 - RNA, 22 nt, Human
guguguguaucugccuaucaca

SEQ ID NO: 46756 - RNA, 22 nt, Human
gugugugugcauauaacauaua

SEQ ID NO: 46757 - RNA, 22 nt, Human
gugugugugcaucucuuuuauu

SEQ ID NO: 46758 - RNA, 22 nt, Human
guguguguguaaaaauccagag

SEQ ID NO: 46759 - RNA, 22 nt, Human
guguguucagcaagagguaagg

SEQ ID NO: 46760 - RNA, 22 nt, Human
guguguucccguuuccuucacu

SEQ ID NO: 46761 - RNA, 22 nt, Human
guguuaaaugcaaucacaugca

SEQ ID NO: 46762 - RNA, 22 nt, Human
guguuaauuauuggugaauaga

SEQ ID NO: 46763 - RNA, 22 nt, Human
guguuacuaaaauuugauucuu

SEQ ID NO: 46764 - RNA, 23 nt, Human
guguuacuaaagaugaacauuua

SEQ ID NO: 46765 - RNA, 23 nt, Human
guguuacucugauaggugcuuuu

SEQ ID NO: 46766 - RNA, 22 nt, Human
guguuacuuaauuagaaucugc

SEQ ID NO: 46767 - RNA, 22 nt, Human
guguuacuugccauacagaaaa

SEQ ID NO: 46768 - RNA, 22 nt, Human
guguucaucccaaugcugauag

SEQ ID NO: 46769 - RNA, 22 nt, Human
guguucauggaugucaauuuga

SEQ ID NO: 46770 - RNA, 22 nt, Human
guguucauugcuagugaggugu

SEQ ID NO: 46771 - RNA, 22 nt, Human
guguuccauguuugagguaguu

SEQ ID NO: 46772 - RNA, 22 nt, Human
guguucugcagaccagcaucau

SEQ ID NO: 46773 - RNA, 22 nt, Human
guguucugggaugauuguagug

SEQ ID NO: 46774 - RNA, 22 nt, Human
guguucuuuauuuagugaugcu

SEQ ID NO: 46775 - RNA, 22 nt, Human
guguugaugacauuuuagaaac

SEQ ID NO: 46776 - RNA, 21 nt, Human
guguuggcauauggugguuga

SEQ ID NO: 46777 - RNA, 22 nt, Human
guguuuaacaucugguuuauac

SEQ ID NO: 46778 - RNA, 22 nt, Human
guguuuaauagguagcugaauc

SEQ ID NO: 46779 - RNA, 22 nt, Human
guguuuaaugcagaugugggug

SEQ ID NO: 46780 - RNA, 22 nt, Human
guguuuagugugcagacaugca

SEQ ID NO: 46781 - RNA, 22 nt, Human
guguuuauaggagugaaugcug

SEQ ID NO: 46782 - RNA, 22 nt, Human
guguuuccccuccuggagaagg

SEQ ID NO: 46783 - RNA, 22 nt, Human
guguuuccucacuucucugacu

SEQ ID NO: 46784 - RNA, 22 nt, Human
guguuuccucuagaagccaugg

SEQ ID NO: 46785 - RNA, 22 nt, Human
guguuuguuuagugcagagaga

SEQ ID NO: 46786 - RNA, 22 nt, Human
guguuuuaagaaagaagcucag

SEQ ID NO: 46787 - RNA, 22 nt, Human
guguuuucucuccagcaggcag

SEQ ID NO: 46788 - RNA, 22 nt, Human
guuaaacaagcuggacacugaa

SEQ ID NO: 46789 - RNA, 22 nt, Human
guuaaacugaaaggcucguuca

SEQ ID NO: 46790 - RNA, 22 nt, Human
guuaaagaagaauaguuccuuu

SEQ ID NO: 46791 - RNA, 22 nt, Human
guuaaauucgaugauggauaaa

SEQ ID NO: 46792 - RNA, 22 nt, Human
guuaacaacacugugagugcug

SEQ ID NO: 46793 - RNA, 22 nt, Human
guuaacauaggcuuagggguuu

SEQ ID NO: 46794 - RNA, 22 nt, Human
guuaacauucaauuaaacaguc

SEQ ID NO: 46795 - RNA, 22 nt, Human
guuaacuuucaggugcauguuu

SEQ ID NO: 46796 - RNA, 21 nt, Human
guuaagccuugaggugauugu

SEQ ID NO: 46797 - RNA, 22 nt, Human
guuaaggcugagcaggacacug

SEQ ID NO: 46798 - RNA, 22 nt, Human
guuaaguaaacuaugauuuauc

SEQ ID NO: 46799 - RNA, 23 nt, Human
guuaauaaugaacacuuucuccc

SEQ ID NO: 46800 - RNA, 22 nt, Human
guuaauguuaucugaagacagu

SEQ ID NO: 46801 - RNA, 18 nt, Human
guuaauuuugaaguucau

SEQ ID NO: 46802 - RNA, 22 nt, Human
guuacaaacucaggugccaaaa

SEQ ID NO: 46803 - RNA, 22 nt, Human
guuacaaaggucauaaaagugu

SEQ ID NO: 46804 - RNA, 22 nt, Human
gcguggguccaagaaucuguga

SEQ ID NO: 46805 - RNA, 22 nt, Human
gcguguaugcaggucugugcag

SEQ ID NO: 46806 - RNA, 22 nt, Human
gcguuauuuccugucugauuuc

SEQ ID NO: 46807 - RNA, 22 nt, Human
gcuaaaaggagcacuagagauu

SEQ ID NO: 46808 - RNA, 22 nt, Human
gcuaaaguuuccgucuuucauu

SEQ ID NO: 46809 - RNA, 22 nt, Human
gcuaaauaaucuucuucugaca

SEQ ID NO: 46810 - RNA, 22 nt, Human
gcuaaauuuaagccuuucuccu

SEQ ID NO: 46811 - RNA, 22 nt, Human
gcuaagaaggccauaucagaga

SEQ ID NO: 46812 - RNA, 22 nt, Human
gcuaagaggcuauaucuuucuc

SEQ ID NO: 46813 - RNA, 22 nt, Human
gcuaagggaggcaugccguggu

SEQ ID NO: 46814 - RNA, 22 nt, Human
gcuaagggauaggcugccuccu

SEQ ID NO: 46815 - RNA, 22 nt, Human
gcuaaucaauguuaaggcugug

SEQ ID NO: 46816 - RNA, 22 nt, Human
gcuaaugauagcaagauaaaca

SEQ ID NO: 46817 - RNA, 22 nt, Human
gcuacacaaaaggagagugagu

SEQ ID NO: 46818 - RNA, 22 nt, Human
gcuacacaauagcguucacuua

SEQ ID NO: 46819 - RNA, 23 nt, Human
gcuacagcugacugucauucccu

SEQ ID NO: 46820 - RNA, 22 nt, Human
gcuacaggagcugucacaugcu

SEQ ID NO: 46821 - RNA, 20 nt, Human
gcuaccagaacaaggccauu

SEQ ID NO: 46822 - RNA, 22 nt, Human
gcuacccugggaaucucccuca

SEQ ID NO: 46823 - RNA, 19 nt, Human
gcuacugaggcccaggacc

SEQ ID NO: 46824 - RNA, 22 nt, Human
gcuacugauugaccuuggagag

SEQ ID NO: 46825 - RNA, 17 nt, Human
gcuacugguuaccucua

SEQ ID NO: 46826 - RNA, 22 nt, Human
gcuagaaaaugaaagauaauuu

SEQ ID NO: 46827 - RNA, 22 nt, Human
gcuagcagagugcauccuucua

SEQ ID NO: 46828 - RNA, 22 nt, Human
gcugcuuugugaaaaucauuca

SEQ ID NO: 46829 - RNA, 22 nt, Human
gcugcuuuucacagagacaaga

SEQ ID NO: 46830 - RNA, 22 nt, Human
gcugcuuuuuggauuuggcaca

SEQ ID NO: 46831 - RNA, 22 nt, Human
gcuggaaaugaauggagaggug

SEQ ID NO: 46832 - RNA, 22 nt, Human
gcuggaagggaggcccagccgg

SEQ ID NO: 46833 - RNA, 22 nt, Human
gcuggacaggccacauggagga

SEQ ID NO: 46834 - RNA, 22 nt, Human
gcuggaccaggugugcacaggc

SEQ ID NO: 46835 - RNA, 22 nt, Human
gcuggacucaggggacucaggg

SEQ ID NO: 46836 - RNA, 22 nt, Human
gcuggacuuagagguggaaaag

SEQ ID NO: 46837 - RNA, 22 nt, Human
gcuggagaaacugcagcugagg

SEQ ID NO: 46838 - RNA, 22 nt, Human
gcuggagaacccaggaggaaga

SEQ ID NO: 46839 - RNA, 22 nt, Human
gcuggagaccucagagaaccca

SEQ ID NO: 46840 - RNA, 22 nt, Human
gcuggagaggggucacucugag

SEQ ID NO: 46841 - RNA, 22 nt, Human
gcuggagauacugcucaguauc

SEQ ID NO: 46842 - RNA, 22 nt, Human
gcuggagauaguaggauccaua

SEQ ID NO: 46843 - RNA, 22 nt, Human
gcuggagccauuggcuuggccu

SEQ ID NO: 46844 - RNA, 22 nt, Human
gcuggagcgugauccuugaucu

SEQ ID NO: 46845 - RNA, 22 nt, Human
gcuggagcuugagaggacaggg

SEQ ID NO: 46846 - RNA, 22 nt, Human
gcuggaggaucacuugagccca

SEQ ID NO: 46847 - RNA, 22 nt, Human
gcugguccucaagggcacagcc

SEQ ID NO: 46848 - RNA, 22 nt, Human
gcuggugagauuuuauguuucc

SEQ ID NO: 46849 - RNA, 22 nt, Human
gcuggugagcaaaggagaagga

SEQ ID NO: 46850 - RNA, 22 nt, Human
gcuggugcauuagcugcaguuc

SEQ ID NO: 46851 - RNA, 22 nt, Human
gcuggugccuuguuguuguuac

SEQ ID NO: 46852 - RNA, 22 nt, Human
gcuggugcucugggcccugagg

SEQ ID NO: 46853 - RNA, 22 nt, Human
gcugguggcagagacaucaggu

SEQ ID NO: 46854 - RNA, 22 nt, Human
gcugguggcagagcuccgcggc

SEQ ID NO: 46855 - RNA, 22 nt, Human
gcuggugguaaggaggaaaaag

SEQ ID NO: 46856 - RNA, 22 nt, Human
gcugguggugggccaguucugu

SEQ ID NO: 46857 - RNA, 22 nt, Human
gcuggugguuaccgugcuaaug

SEQ ID NO: 46858 - RNA, 22 nt, Human
gcugguuagaaaacagagcuca

SEQ ID NO: 46859 - RNA, 22 nt, Human
gcugguuaggugagggugcgcc

SEQ ID NO: 46860 - RNA, 22 nt, Human
gcuguaacuuuuucauuuucaa

SEQ ID NO: 46861 - RNA, 22 nt, Human
gcuguagguaaggauggcaaag

SEQ ID NO: 46862 - RNA, 22 nt, Human
gcuguaggucauuuaaucaccu

SEQ ID NO: 46863 - RNA, 22 nt, Human
gcuguaugaguucauguguaga

SEQ ID NO: 46864 - RNA, 22 nt, Human
gcuguauuggaacacauccaug

SEQ ID NO: 46865 - RNA, 22 nt, Human
gcuguauuuauuuucuaggguu

SEQ ID NO: 46866 - RNA, 22 nt, Human
gcugucacacaugggaucucag

SEQ ID NO: 46867 - RNA, 22 nt, Human
gcugucacucaccaggccugca

SEQ ID NO: 46868 - RNA, 22 nt, Human
gcugucacuggcauguuccggg

SEQ ID NO: 46869 - RNA, 22 nt, Human
gcugucagcgcccaaggagcuc

SEQ ID NO: 46870 - RNA, 22 nt, Human
gcugucaguuuuacccacagac

SEQ ID NO: 46871 - RNA, 22 nt, Human
gcuguccagagcaugggagcaa

SEQ ID NO: 46872 - RNA, 22 nt, Human
gcuguccagcuccagccagcca

SEQ ID NO: 46873 - RNA, 22 nt, Human
gcuguccauccacuucccagcg

SEQ ID NO: 46874 - RNA, 22 nt, Human
gcuguccaugucuggccucagu

SEQ ID NO: 46875 - RNA, 23 nt, Human
gcuguccccaugcuccaucccug

SEQ ID NO: 46876 - RNA, 22 nt, Human
gcugucccgaaccccugguaau

SEQ ID NO: 46877 - RNA, 22 nt, Human
gcugucccuuucacaagguuuu

SEQ ID NO: 46878 - RNA, 22 nt, Human
gcuguccucugaucucuggagg

SEQ ID NO: 46879 - RNA, 22 nt, Human
gcuguccuggggagggagaaug

SEQ ID NO: 46880 - RNA, 22 nt, Human
gcugucucauacaaggcccugc

SEQ ID NO: 46881 - RNA, 22 nt, Human
gcugucuccauagcuguguguc

SEQ ID NO: 46882 - RNA, 21 nt, Human
gcugucuccuccuugcaccag

SEQ ID NO: 46883 - RNA, 21 nt, Human
gcugucucuggcuccugggaa

SEQ ID NO: 46884 - RNA, 22 nt, Human
gcugucugacuccaaguuggag

SEQ ID NO: 46885 - RNA, 22 nt, Human
gcugucugcaagccaggaaaug

SEQ ID NO: 46886 - RNA, 22 nt, Human
gcugucugcugggucgcucagg

SEQ ID NO: 46887 - RNA, 20 nt, Human
gcugucuggauuagaagccu

SEQ ID NO: 46888 - RNA, 22 nt, Human
gcugucuggguugagggcccug

SEQ ID NO: 46889 - RNA, 23 nt, Human
gcugucugucaucucugcgggag

SEQ ID NO: 46890 - RNA, 22 nt, Human
gcugucugucucugugacuuaa

SEQ ID NO: 46891 - RNA, 22 nt, Human
gcugucuucacuuccugguuuc

SEQ ID NO: 46892 - RNA, 22 nt, Human
gcugucuuuccccugcuccaga

SEQ ID NO: 46893 - RNA, 22 nt, Human
gcugugagaaacagggaguguc

SEQ ID NO: 46894 - RNA, 22 nt, Human
gcugugagccgcugcugagcau

SEQ ID NO: 46895 - RNA, 22 nt, Human
gcugugagugagcugccuaggc

SEQ ID NO: 46896 - RNA, 22 nt, Human
gcugugaguggaguucugugcu

SEQ ID NO: 46897 - RNA, 22 nt, Human
gcugugcagccaagugccucug

SEQ ID NO: 46898 - RNA, 22 nt, Human
gcuguggaguacagagcugguu

SEQ ID NO: 46899 - RNA, 22 nt, Human
gcuguggcaauguuuauaauua

SEQ ID NO: 46900 - RNA, 22 nt, Human
gcuguggccaacaaaccacuuu

SEQ ID NO: 46901 - RNA, 22 nt, Human
gcuguggccgggcccaggccgc

SEQ ID NO: 46902 - RNA, 20 nt, Human
gcuguggccgugccagacuc

SEQ ID NO: 46903 - RNA, 22 nt, Human
gcuguggccuaguuuguuauau

SEQ ID NO: 46904 - RNA, 22 nt, Human
gcuguggccuccagcacucccc

SEQ ID NO: 46905 - RNA, 22 nt, Human
gcuguggcuuucuguuucuguu

SEQ ID NO: 46906 - RNA, 19 nt, Human
gcugugggacagcagggug

SEQ ID NO: 46907 - RNA, 22 nt, Human
gcugugggccauggccaaguga

SEQ ID NO: 46908 - RNA, 22 nt, Human
gcuguggguacaaauacacaau

SEQ ID NO: 46909 - RNA, 22 nt, Human
gcuguggguuccuggcauuuga

SEQ ID NO: 46910 - RNA, 22 nt, Human
gcuguggguuuccaauccugga

SEQ ID NO: 46911 - RNA, 22 nt, Human
gcuguguaggauccuguuguau

SEQ ID NO: 46912 - RNA, 22 nt, Human
gcuguguccaggugggggugac

SEQ ID NO: 46913 - RNA, 22 nt, Human
gcugugucuguuuuacgucaag

SEQ ID NO: 46914 - RNA, 22 nt, Human
gcugugugcucacguaguggaa

SEQ ID NO: 46915 - RNA, 22 nt, Human
gcuguguggcaaagggauuaca

SEQ ID NO: 46916 - RNA, 22 nt, Human
gcuguguguucaauaaugugau

SEQ ID NO: 46917 - RNA, 22 nt, Human
gcuguguuuuauguuagguuaa

SEQ ID NO: 46918 - RNA, 23 nt, Human
gcuguuagauuuaauaagcauuu

SEQ ID NO: 46919 - RNA, 22 nt, Human
gcuguucacaucuggaccauuu

SEQ ID NO: 46920 - RNA, 20 nt, Human
gcuguucacauuauuaguag

SEQ ID NO: 46921 - RNA, 22 nt, Human
gcuguucacauuuugggccaaa

SEQ ID NO: 46922 - RNA, 22 nt, Human
gcuguucuagcuucaguuucgc

SEQ ID NO: 46923 - RNA, 22 nt, Human
gcuguucuaggagcugugagca

SEQ ID NO: 46924 - RNA, 18 nt, Human
gcuguucuucgcacuggc

SEQ ID NO: 46925 - RNA, 22 nt, Human
gcuguucuuuggucaaagguau

SEQ ID NO: 46926 - RNA, 20 nt, Human
gcuguugccaguacagaugg

SEQ ID NO: 46927 - RNA, 23 nt, Human
gcuguuucacaacagccguguuu

SEQ ID NO: 46928 - RNA, 22 nt, Human
gcuguuucggccuccuggggaa

SEQ ID NO: 46929 - RNA, 22 nt, Human
gcuguuucuaccagaagaauca

SEQ ID NO: 46930 - RNA, 17 nt, Human
gcuguuucuccagaagu

SEQ ID NO: 46931 - RNA, 22 nt, Human
gcuguuucucuugagucaaaau

SEQ ID NO: 46932 - RNA, 22 nt, Human
gcuguuucugaguagcuaggcu

SEQ ID NO: 46933 - RNA, 22 nt, Human
gcuguuucugguucuguuccua

SEQ ID NO: 46934 - RNA, 22 nt, Human
gcuuaaaagccacuuagucuau

SEQ ID NO: 46935 - RNA, 22 nt, Human
gcuuaaaauccaugauuuuuac

SEQ ID NO: 46936 - RNA, 22 nt, Human
gcuuaaaucccaaugcuagacc

SEQ ID NO: 46937 - RNA, 23 nt, Human
gcuguacaggaaccaguuuggag

SEQ ID NO: 46938 - RNA, 19 nt, Human
gcuguacaguaaggagaca

SEQ ID NO: 46939 - RNA, 22 nt, Human
gcuguagauggacuggcaucca

SEQ ID NO: 46940 - RNA, 22 nt, Human
gcuguaggaagacagaaugcag

SEQ ID NO: 46941 - RNA, 19 nt, Human
gcuguauuaaagauacaug

SEQ ID NO: 46942 - RNA, 22 nt, Human
gcuguauucaacagugaaaaga

SEQ ID NO: 46943 - RNA, 22 nt, Human
gcuguauuuauaugaaggcaug

SEQ ID NO: 46944 - RNA, 22 nt, Human
gcugucacaaauuggguucuuu

SEQ ID NO: 46945 - RNA, 22 nt, Human
gcugucacaagcaucuggggca

SEQ ID NO: 46946 - RNA, 22 nt, Human
gcugucacacauggccccagcu

SEQ ID NO: 46947 - RNA, 22 nt, Human
gcugucagucacauuguuacag

SEQ ID NO: 46948 - RNA, 22 nt, Human
gcugucagugaggugagacaug

SEQ ID NO: 46949 - RNA, 20 nt, Human
gcugucccaggccaaagggc

SEQ ID NO: 46950 - RNA, 22 nt, Human
gcugucccgcugacuuccagcu

SEQ ID NO: 46951 - RNA, 22 nt, Human
gcuguccugggaacaggcacua

SEQ ID NO: 46952 - RNA, 22 nt, Human
gcuguccuuccuggcuggggug

SEQ ID NO: 46953 - RNA, 23 nt, Human
gcugucgccagagccccaccuac

SEQ ID NO: 46954 - RNA, 22 nt, Human
gcugucgugugcaagugacaga

SEQ ID NO: 46955 - RNA, 22 nt, Human
gcugucucaugggugcuagucc

SEQ ID NO: 46956 - RNA, 22 nt, Human
gcugucucgccugacacuggcu

SEQ ID NO: 46957 - RNA, 22 nt, Human
gcugucucucccaggauccaug

SEQ ID NO: 46958 - RNA, 20 nt, Human
gcugucugacaguucccaga

SEQ ID NO: 46959 - RNA, 19 nt, Human
gcugucugaugcugagguc

SEQ ID NO: 46960 - RNA, 22 nt, Human
gcugucugcaucucuagagcuu

SEQ ID NO: 46961 - RNA, 22 nt, Human
gcugucuggcauggcguggcug

SEQ ID NO: 46962 - RNA, 22 nt, Human
gcugucugggaggccuccacuu

SEQ ID NO: 46963 - RNA, 22 nt, Human
gcugucugggaugucacugcug

SEQ ID NO: 46964 - RNA, 22 nt, Human
gcugucugggugcccaaaagaa

SEQ ID NO: 46965 - RNA, 22 nt, Human
gcuucauuaauagaauuaguau

SEQ ID NO: 46966 - RNA, 22 nt, Human
gcuucauuugagaaccucugug

SEQ ID NO: 46967 - RNA, 20 nt, Human
gcuucauuugcaagucuagu

SEQ ID NO: 46968 - RNA, 22 nt, Human
gcuuccagaccccagucccuca

SEQ ID NO: 46969 - RNA, 22 nt, Human
gcuuccagacgaucauguaaga

SEQ ID NO: 46970 - RNA, 22 nt, Human
gcuuccagagagccccgccugg

SEQ ID NO: 46971 - RNA, 19 nt, Human
gcuuccagcacugcaggag

SEQ ID NO: 46972 - RNA, 22 nt, Human
gcuuccagccuuuucuccucug

SEQ ID NO: 46973 - RNA, 22 nt, Human
gcuuccaguccucagaggcugg

SEQ ID NO: 46974 - RNA, 22 nt, Human
gcuuccaucuaugucuucauca

SEQ ID NO: 46975 - RNA, 19 nt, Human
gcuucccaccagccagccc

SEQ ID NO: 46976 - RNA, 22 nt, Human
gcuuccccuccaagcacugccu

SEQ ID NO: 46977 - RNA, 22 nt, Human
gcuuccuaaaugcacagggcag

SEQ ID NO: 46978 - RNA, 17 nt, Human
gcuuccucaugcaguuc

SEQ ID NO: 46979 - RNA, 22 nt, Human
gcuuccucccugcugcucacua

SEQ ID NO: 46980 - RNA, 22 nt, Human
gcuuccuccuggaggucacuca

SEQ ID NO: 46981 - RNA, 22 nt, Human
gcuuccucgcugggcagaggca

SEQ ID NO: 46982 - RNA, 22 nt, Human
gcuuccugagacaacauugagu

SEQ ID NO: 46983 - RNA, 22 nt, Human
gcuuccugauauucauacuguu

SEQ ID NO: 46984 - RNA, 22 nt, Human
gcuuccuggaacaacuguugcu

SEQ ID NO: 46985 - RNA, 22 nt, Human
gcuuccuguauccuccuguacc

SEQ ID NO: 46986 - RNA, 22 nt, Human
gcuuccuguccaggccccacau

SEQ ID NO: 46987 - RNA, 17 nt, Human
gcuuccugugcugggga

SEQ ID NO: 46988 - RNA, 22 nt, Human
gcuucuaaccugcuuccuguag

SEQ ID NO: 46989 - RNA, 22 nt, Human
gcuucuaauuuuuuacagaaua

SEQ ID NO: 46990 - RNA, 22 nt, Human
gcuucuaucccuccacugcacu

SEQ ID NO: 46991 - RNA, 22 nt, Human
gcuucuauuacuacuuugagau

SEQ ID NO: 46992 - RNA, 22 nt, Human
gcuucuccagaccuucaucccc

SEQ ID NO: 46993 - RNA, 22 nt, Human
gcuucuccucccgcucccaggc

SEQ ID NO: 46994 - RNA, 22 nt, Human
gcuucucggggagguuagccag

SEQ ID NO: 46995 - RNA, 22 nt, Human
gcuucucucucagacugcaagc

SEQ ID NO: 46996 - RNA, 22 nt, Human
gcuucucuggccugcagggcau

SEQ ID NO: 46997 - RNA, 22 nt, Human
gcuucucuuaaugccuggcuuu

SEQ ID NO: 46998 - RNA, 22 nt, Human
gcuucugaugucagacuucugg

SEQ ID NO: 46999 - RNA, 22 nt, Human
gcuucugcagagccguccugag

SEQ ID NO: 47000 - RNA, 22 nt, Human
gcuucugccuugcacuuuguca

SEQ ID NO: 47001 - RNA, 22 nt, Human
gcuucugcgcacgcuucuuccc

SEQ ID NO: 47002 - RNA, 22 nt, Human
gcuucuggaagcugcuucugcc

SEQ ID NO: 47003 - RNA, 22 nt, Human
gcuucugggcaccugaacagga

SEQ ID NO: 47004 - RNA, 22 nt, Human
gcuucugugguugucacgacua

SEQ ID NO: 47005 - RNA, 22 nt, Human
gcuucuugccuguguagagaau

SEQ ID NO: 47006 - RNA, 22 nt, Human
gcuucuuuggcaacccugacau

SEQ ID NO: 47007 - RNA, 22 nt, Human
gcuugacuaggcucuggcgaca

SEQ ID NO: 47008 - RNA, 22 nt, Human
gcuugaugauaccuaggagaug

SEQ ID NO: 47009 - RNA, 22 nt, Human
gcuugcagugguuggcaugacc

SEQ ID NO: 47010 - RNA, 22 nt, Human
gcuugcaugauauggcaucugg

SEQ ID NO: 47011 - RNA, 22 nt, Human
gcuugcauucuggaucuauggu

SEQ ID NO: 47012 - RNA, 20 nt, Human
gcuugcccacaucugcacug

SEQ ID NO: 47013 - RNA, 17 nt, Human
gcuugccuugucuuccu

SEQ ID NO: 47014 - RNA, 19 nt, Human
gcuugcuggcgggggucug

SEQ ID NO: 47015 - RNA, 22 nt, Human
gcuugcuggugccugcaggcuc

SEQ ID NO: 47016 - RNA, 22 nt, Human
gcuuggaguagaaugcauucuu

SEQ ID NO: 47017 - RNA, 22 nt, Human
gcuuggcacacuuggaccugag

SEQ ID NO: 47018 - RNA, 22 nt, Human
gcuuggcagcaacaggcauccc

SEQ ID NO: 47019 - RNA, 22 nt, Human
gcuuggcaggucugggauuguu

SEQ ID NO: 47020 - RNA, 18 nt, Human
gcuuggcugcagagagag

SEQ ID NO: 47021 - RNA, 22 nt, Human
gcuuggcuggagaaaguuaccu

SEQ ID NO: 47022 - RNA, 22 nt, Human
gcuuggcugugagcuuugcugu

SEQ ID NO: 47023 - RNA, 22 nt, Human
gcuuggcuguguucaagggcgg

SEQ ID NO: 47024 - RNA, 22 nt, Human
gcuuggcuuugucuuguucacu

SEQ ID NO: 47025 - RNA, 22 nt, Human
gcuugggagaggcuuccucuuu

SEQ ID NO: 47026 - RNA, 22 nt, Human
gcuugggaggcaagcauuccau

SEQ ID NO: 47027 - RNA, 22 nt, Human
gcuugggcuuaacuguagguuc

SEQ ID NO: 47028 - RNA, 22 nt, Human
gcuuguuugugccucugcagaa

SEQ ID NO: 47029 - RNA, 22 nt, Human
gcuuuaaaccucuacucugucc

SEQ ID NO: 47030 - RNA, 22 nt, Human
gcuuuaagucucaguuuguuag

SEQ ID NO: 47031 - RNA, 22 nt, Human
gcuuuaaugcuucguggggcca

SEQ ID NO: 47032 - RNA, 22 nt, Human
gcuuuacacagaugaauauuuc

SEQ ID NO: 47033 - RNA, 22 nt, Human
gcuuuacagagaaaguuugccu

SEQ ID NO: 47034 - RNA, 22 nt, Human
gcuuuacagggcacaaagggag

SEQ ID NO: 47035 - RNA, 22 nt, Human
gcuuuacauuuuggaaagguga

SEQ ID NO: 47036 - RNA, 22 nt, Human
gcuuuagaaaugaguaaauuag

SEQ ID NO: 47037 - RNA, 22 nt, Human
gcuuuagaaauguaggagauac

SEQ ID NO: 47038 - RNA, 22 nt, Human
gcuuuagaagacacucuguuuu

SEQ ID NO: 47039 - RNA, 22 nt, Human
gcuuuagacauaaaguucuuca

SEQ ID NO: 47040 - RNA, 22 nt, Human
gcuuuagauacucccaaugucc

SEQ ID NO: 47041 - RNA, 22 nt, Human
gcuuuauagcccuauuacauga

SEQ ID NO: 47042 - RNA, 22 nt, Human
gcuuuaugagugaggcaggaua

SEQ ID NO: 47043 - RNA, 22 nt, Human
gcuuuaugugaguagcacuguc

SEQ ID NO: 47044 - RNA, 17 nt, Human
gcuuuccuugccccucc

SEQ ID NO: 47045 - RNA, 22 nt, Human
gcuuucugccugggcuccauuu

SEQ ID NO: 47046 - RNA, 22 nt, Human
gcuuucuggagccugggggaac

SEQ ID NO: 47047 - RNA, 22 nt, Human
ggagugaguacuggaguagcug

SEQ ID NO: 47048 - RNA, 22 nt, Human
ggaguggcacucugaggcgggg

SEQ ID NO: 47049 - RNA, 22 nt, Human
ggaguggcagcgaggaucagau

SEQ ID NO: 47050 - RNA, 22 nt, Human
ggaguggcagcuaggcugucag

SEQ ID NO: 47051 - RNA, 22 nt, Human
ggaguggcaggccacagugcug

SEQ ID NO: 47052 - RNA, 22 nt, Human
ggaguggccacgacugggagau

SEQ ID NO: 47053 - RNA, 19 nt, Human
ggaguggguaguuaguggu

SEQ ID NO: 47054 - RNA, 22 nt, Human
ggagugugauuguucucuguua

SEQ ID NO: 47055 - RNA, 22 nt, Human
ggaguuaaggccuaagaaauag

SEQ ID NO: 47056 - RNA, 22 nt, Human
ggaguucaaaucuuuuggaucu

SEQ ID NO: 47057 - RNA, 22 nt, Human
ggaguucacugugcaggcucug

SEQ ID NO: 47058 - RNA, 22 nt, Human
ggaguugauuuuggauauauua

SEQ ID NO: 47059 - RNA, 22 nt, Human
ggaguuggaggcuccagggaac

SEQ ID NO: 47060 - RNA, 22 nt, Human
ggauaaucugggagaaaacuga

SEQ ID NO: 47061 - RNA, 23 nt, Human
ggauacaaagauuaauaguagag

SEQ ID NO: 47062 - RNA, 22 nt, Human
ggauacagcggcuucugcgcga

SEQ ID NO: 47063 - RNA, 22 nt, Human
ggauaggaauugagaugcuauu

SEQ ID NO: 47064 - RNA, 17 nt, Human
ggauagugcugggcugg

SEQ ID NO: 47065 - RNA, 22 nt, Human
ggauaguucuggauauuuuaag

SEQ ID NO: 47066 - RNA, 22 nt, Human
ggaucaaagggaaccuguuagg

SEQ ID NO: 47067 - RNA, 22 nt, Human
ggauccaguccagggcugugug

SEQ ID NO: 47068 - RNA, 22 nt, Human
ggaucugggcucugccaaucag

SEQ ID NO: 47069 - RNA, 22 nt, Human
ggaucugggguagagcaguggg

SEQ ID NO: 47070 - RNA, 22 nt, Human
ggaucugguuacguaagagucu

SEQ ID NO: 47071 - RNA, 22 nt, Human
ggaucuguuuugccucugaggg

SEQ ID NO: 47072 - RNA, 22 nt, Human
ggaucuucagccagcaggugcc

SEQ ID NO: 47073 - RNA, 22 nt, Human
ggaucuuuaaguucuuuuccau

SEQ ID NO: 47074 - RNA, 22 nt, Human
ggaugaggaagauuacugagaa

SEQ ID NO: 47075 - RNA, 22 nt, Human
ggaugcaggaacacagcgaccu

SEQ ID NO: 47076 - RNA, 22 nt, Human
ggaugcaggggcagcagagccu

SEQ ID NO: 47077 - RNA, 22 nt, Human
ggaugcugcuaucaggcuucga

SEQ ID NO: 47078 - RNA, 22 nt, Human
ggaugcugcugcacauccugca

SEQ ID NO: 47079 - RNA, 22 nt, Human
ggaugcuggggaccaaucucug

SEQ ID NO: 47080 - RNA, 22 nt, Human
ggaugcuuagguuguuuuauua

SEQ ID NO: 47081 - RNA, 22 nt, Human
ggauggcauguugggcucuguu

SEQ ID NO: 47082 - RNA, 22 nt, Human
ggauggccuucuugcucaggaa

SEQ ID NO: 47083 - RNA, 22 nt, Human
ggaugggaacuugguagggcau

SEQ ID NO: 47084 - RNA, 23 nt, Human
ggaugggcaagccuagugccuac

SEQ ID NO: 47085 - RNA, 22 nt, Human
ggaugggcccgggacggcgcug

SEQ ID NO: 47086 - RNA, 22 nt, Human
ggaugggugacuuugggcaaug

SEQ ID NO: 47087 - RNA, 22 nt, Human
ggaugucuuuacuuugggauuu

SEQ ID NO: 47088 - RNA, 22 nt, Human
ggaugugaaucugggcugagac

SEQ ID NO: 47089 - RNA, 22 nt, Human
ggauuaacagcuccuggguggu

SEQ ID NO: 47090 - RNA, 22 nt, Human
ggauucagugucuguuaauagu

SEQ ID NO: 47091 - RNA, 22 nt, Human
ggauucugccuuguugcuucaa

SEQ ID NO: 47092 - RNA, 22 nt, Human
ggauugagagcacugguagcug

SEQ ID NO: 47093 - RNA, 22 nt, Human
ggauuuccagcuucauugucua

SEQ ID NO: 47094 - RNA, 22 nt, Human
ggauuucuuccuuccucagaag

SEQ ID NO: 47095 - RNA, 22 nt, Human
ggauuugaauuguugaaaugau

SEQ ID NO: 47096 - RNA, 21 nt, Human
ggauuuuaaaaacugcaccug

SEQ ID NO: 47097 - RNA, 22 nt, Human
ggcaaaaaccacaauuacuuuu

SEQ ID NO: 47098 - RNA, 22 nt, Human
ggcaaagcggcccuguggccag

SEQ ID NO: 47099 - RNA, 22 nt, Human
ggcaaauuugucuuaagacacc

SEQ ID NO: 47100 - RNA, 22 nt, Human
ggcaacaacuggacauagcugg

SEQ ID NO: 47101 - RNA, 22 nt, Human
ggcaacaugaugucaaccagga

SEQ ID NO: 47102 - RNA, 22 nt, Human
ggcaacaugggaaaauuaaccu

SEQ ID NO: 47103 - RNA, 22 nt, Human
ggcaacauucuccagauccuuu

SEQ ID NO: 47104 - RNA, 22 nt, Human
ggcaaggccugcagcucagugu

SEQ ID NO: 47105 - RNA, 22 nt, Human
ggcaaggguugaagauaaggua

SEQ ID NO: 47106 - RNA, 22 nt, Human
ggcaaguauuugugcaucuaca

SEQ ID NO: 47107 - RNA, 22 nt, Human
ggcaagugauccuggagcaccg

SEQ ID NO: 47108 - RNA, 22 nt, Human
ggcaagugcuuccccaaccaca

SEQ ID NO: 47109 - RNA, 22 nt, Human
ggcaagugguagaacaucugag

SEQ ID NO: 47110 - RNA, 22 nt, Human
ggcaauaaaaguauccaguuuc

SEQ ID NO: 47111 - RNA, 23 nt, Human
ggcaauaacgagcuugucucuga

SEQ ID NO: 47112 - RNA, 22 nt, Human
ggcaauaguuguggguucuuua

SEQ ID NO: 47113 - RNA, 22 nt, Human
ggcaauauggugaaaccccauc

SEQ ID NO: 47114 - RNA, 22 nt, Human
ggcaauuacguauuagucaugu

SEQ ID NO: 47115 - RNA, 22 nt, Human
ggcaauuuggucauuuguauug

SEQ ID NO: 47116 - RNA, 22 nt, Human
ggcacacagcggaauuugcucu

SEQ ID NO: 47117 - RNA, 22 nt, Human
uaugaacacacuuuggaaguga

SEQ ID NO: 47118 - RNA, 22 nt, Human
uaugaagaaaucuuugaaaauc

SEQ ID NO: 47119 - RNA, 19 nt, Human
uaugaagaauguggcaaag

SEQ ID NO: 47120 - RNA, 22 nt, Human
uaugaagacaaugauagcauga

SEQ ID NO: 47121 - RNA, 20 nt, Human
uaugaagacucaaguagggc

SEQ ID NO: 47122 - RNA, 20 nt, Human
uaugaagauaugugaacagc

SEQ ID NO: 47123 - RNA, 22 nt, Human
uaugaagcucucacuguguguc

SEQ ID NO: 47124 - RNA, 22 nt, Human
uaugaagcuuugaaaagcuuac

SEQ ID NO: 47125 - RNA, 22 nt, Human
uaugaaggauacaccucugauu

SEQ ID NO: 47126 - RNA, 22 nt, Human
uaugaauauaccacaauuuagg

SEQ ID NO: 47127 - RNA, 22 nt, Human
uaugaaugcuccaguaacuuuc

SEQ ID NO: 47128 - RNA, 22 nt, Human
uaugacaaagagaggcccaugc

SEQ ID NO: 47129 - RNA, 22 nt, Human
uaugacaagaaauacagaggua

SEQ ID NO: 47130 - RNA, 19 nt, Human
uaugacaaguacuaguucu

SEQ ID NO: 47131 - RNA, 22 nt, Human
uaugacaaugugggccuaaggg

SEQ ID NO: 47132 - RNA, 22 nt, Human
uaugacaccauuuuggucagug

SEQ ID NO: 47133 - RNA, 22 nt, Human
uaugacagcaaauauccaugag

SEQ ID NO: 47134 - RNA, 22 nt, Human
uaugacagugaaaaaaaucaga

SEQ ID NO: 47135 - RNA, 22 nt, Human
uaugacaugugaucucaagagg

SEQ ID NO: 47136 - RNA, 22 nt, Human
uaugaccuuaggaagcaagaag

SEQ ID NO: 47137 - RNA, 22 nt, Human
uaugagaaaggagaaugacuuu

SEQ ID NO: 47138 - RNA, 22 nt, Human
uaugagaaauuauaccuagguu

SEQ ID NO: 47139 - RNA, 22 nt, Human
uaugagaagaacaggugacuuu

SEQ ID NO: 47140 - RNA, 22 nt, Human
uaugagauaaauggugcccccu

SEQ ID NO: 47141 - RNA, 22 nt, Human
uaugagauaauagauguguaaa

SEQ ID NO: 47142 - RNA, 22 nt, Human
uaugagaucccuuuuccuagag

SEQ ID NO: 47143 - RNA, 20 nt, Human
uaugagauuugaccucaaca

SEQ ID NO: 47144 - RNA, 19 nt, Human
uaugagcugacaaaggccu

SEQ ID NO: 47145 - RNA, 22 nt, Human
uaugagcuuccaguguugcaug

SEQ ID NO: 47146 - RNA, 17 nt, Human
uaugaggcaguuuguga

SEQ ID NO: 47147 - RNA, 22 nt, Human
uaugagguagguauuauacuua

SEQ ID NO: 47148 - RNA, 22 nt, Human
uaugaguacugugaacgagaau

SEQ ID NO: 47149 - RNA, 22 nt, Human
uaugaguggcguagagguaggg

SEQ ID NO: 47150 - RNA, 22 nt, Human
uaugauaaccuguuguaguuug

SEQ ID NO: 47151 - RNA, 23 nt, Human
uaugauccuccacaccuucucuc

SEQ ID NO: 47152 - RNA, 22 nt, Human
uaugcaaacuaaguuguuuccu

SEQ ID NO: 47153 - RNA, 22 nt, Human
uaugcaaagccacccagggacg

SEQ ID NO: 47154 - RNA, 22 nt, Human
uaugcaaaucauuagauuuccu

SEQ ID NO: 47155 - RNA, 22 nt, Human
uaugcaacagcauuauuacaau

SEQ ID NO: 47156 - RNA, 22 nt, Human
aguggcaggcggagauguagga

SEQ ID NO: 47157 - RNA, 22 nt, Human
aguggcaguagaugagcugguu

SEQ ID NO: 47158 - RNA, 22 nt, Human
aguggcaucccuuuaacagggu

SEQ ID NO: 47159 - RNA, 22 nt, Human
aguggccacuagaagcucagcu

SEQ ID NO: 47160 - RNA, 22 nt, Human
aguggcggggauuagcaguguu

SEQ ID NO: 47161 - RNA, 22 nt, Human
aguggcugauuacaaacugagu

SEQ ID NO: 47162 - RNA, 22 nt, Human
aguggcugcuggaguggagaug

SEQ ID NO: 47163 - RNA, 22 nt, Human
aguggcugcuucugguugcucc

SEQ ID NO: 47164 - RNA, 22 nt, Human
aguggcuggagccccaggcugg

SEQ ID NO: 47165 - RNA, 22 nt, Human
aguggcuguacuauuuuuucau

SEQ ID NO: 47166 - RNA, 21 nt, Human
aguggcugucaagggggccuu

SEQ ID NO: 47167 - RNA, 22 nt, Human
agugggagaaugaauaagggcc

SEQ ID NO: 47168 - RNA, 22 nt, Human
agugggagagaagcaaguagua

SEQ ID NO: 47169 - RNA, 21 nt, Human
agugggauacuggaagguaga

SEQ ID NO: 47170 - RNA, 22 nt, Human
agugggccaaauggaggcaagu

SEQ ID NO: 47171 - RNA, 22 nt, Human
agugggccuuagaagguucccu

SEQ ID NO: 47172 - RNA, 22 nt, Human
agugggcugguggcagggagaa

SEQ ID NO: 47173 - RNA, 22 nt, Human
agugggcuuacugagggagugu

SEQ ID NO: 47174 - RNA, 22 nt, Human
aguggggagguccaggccaccc

SEQ ID NO: 47175 - RNA, 22 nt, Human
agugggguccucaguaugguuc

SEQ ID NO: 47176 - RNA, 22 nt, Human
agugggugagcuuggucuagau

SEQ ID NO: 47177 - RNA, 20 nt, Human
agugggugaugaaggaauag

SEQ ID NO: 47178 - RNA, 22 nt, Human
aguggguggcgcagaggaggaa

SEQ ID NO: 47179 - RNA, 22 nt, Human
agugguaacuaaguccugcuua

SEQ ID NO: 47180 - RNA, 22 nt, Human
agugguauaagucugaagauca

SEQ ID NO: 47181 - RNA, 22 nt, Human
aguggucuccccaguagaauaa

SEQ ID NO: 47182 - RNA, 22 nt, Human
aguggugaggggcaugugugau

SEQ ID NO: 47183 - RNA, 22 nt, Human
aguggugauaaccgcuaucaua

SEQ ID NO: 47184 - RNA, 22 nt, Human
aguggugcuagguggaauauag

SEQ ID NO: 47185 - RNA, 22 nt, Human
aguggugcugcgcgcggagcuc

SEQ ID NO: 47186 - RNA, 22 nt, Human
agugguucaguuuuggucuggc

SEQ ID NO: 47187 - RNA, 22 nt, Human
agugguucuugaucuguagagu

SEQ ID NO: 47188 - RNA, 22 nt, Human
aguguaagugaucauugauagu

SEQ ID NO: 47189 - RNA, 22 nt, Human
aguguacaagaccuuauuguug

SEQ ID NO: 47190 - RNA, 20 nt, Human
aguguacagacacuagaaau

SEQ ID NO: 47191 - RNA, 22 nt, Human
aguguacaguuuguaguacuac

SEQ ID NO: 47192 - RNA, 22 nt, Human
aguguacauaguuaggaacauc

SEQ ID NO: 47193 - RNA, 22 nt, Human
aguguacaucagaacauaucaa

SEQ ID NO: 47194 - RNA, 22 nt, Human
aguguacauguacacauuagua

SEQ ID NO: 47195 - RNA, 22 nt, Human
aguguacauucuguuugaggua

SEQ ID NO: 47196 - RNA, 22 nt, Human
aguguagacauaggucuggucu

SEQ ID NO: 47197 - RNA, 22 nt, Human
aguguauaugugcugagaaacg

SEQ ID NO: 47198 - RNA, 22 nt, Human
aguguaugaacuuaagagagag

SEQ ID NO: 47199 - RNA, 22 nt, Human
aguguaugugaaacuuuccaaa

SEQ ID NO: 47200 - RNA, 22 nt, Human
aguguauuaaugcuccaggagu

SEQ ID NO: 47201 - RNA, 22 nt, Human
aguguauuaguuguccagcagu

SEQ ID NO: 47202 - RNA, 22 nt, Human
aguguauuaugcagcggagguc

SEQ ID NO: 47203 - RNA, 22 nt, Human
aguguauugauuggaacagccu

SEQ ID NO: 47204 - RNA, 22 nt, Human
aguguauugucucacaguucuu

SEQ ID NO: 47205 - RNA, 22 nt, Human
aguguauuugccuauaaaaaug

SEQ ID NO: 47206 - RNA, 20 nt, Human
aguguauuuggguagagugu

SEQ ID NO: 47207 - RNA, 22 nt, Human
agugucaaaugugugccaagcu

SEQ ID NO: 47208 - RNA, 22 nt, Human
agugucaaauuaaauaaucugg

SEQ ID NO: 47209 - RNA, 22 nt, Human
agugucaaguacaugguaguga

SEQ ID NO: 47210 - RNA, 22 nt, Human
agugucacaaaccugccuugua

SEQ ID NO: 47211 - RNA, 19 nt, Human
agugucagaauucauugaa

SEQ ID NO: 47212 - RNA, 22 nt, Human
agugucauaugccacugcaucc

SEQ ID NO: 47213 - RNA, 19 nt, Human
agugucaucagcuacucag

SEQ ID NO: 47214 - RNA, 21 nt, Human
agugucauuugaucauuguua

SEQ ID NO: 47215 - RNA, 22 nt, Human
agugucauuuuguccaucuucu

SEQ ID NO: 47216 - RNA, 22 nt, Human
aguguccccuccaagggccugg

SEQ ID NO: 47217 - RNA, 22 nt, Human
aguguccuccucugggagccag

SEQ ID NO: 47218 - RNA, 22 nt, Human
aguguccuugagguuccuagga

SEQ ID NO: 47219 - RNA, 21 nt, Human
aguguccuugaucuugccuug

SEQ ID NO: 47220 - RNA, 22 nt, Human
aguguccuugauuccuguuguu

SEQ ID NO: 47221 - RNA, 21 nt, Human
agugucucuggaagcacgugu

SEQ ID NO: 47222 - RNA, 22 nt, Human
agugucugaaccaccggggcau

SEQ ID NO: 47223 - RNA, 22 nt, Human
agugucugaaccugcaguggga

SEQ ID NO: 47224 - RNA, 22 nt, Human
agugucugaacugggugcugac

SEQ ID NO: 47225 - RNA, 22 nt, Human
agugucugaagccucagcccga

SEQ ID NO: 47226 - RNA, 21 nt, Human
agugucugagcgcugcuucug

SEQ ID NO: 47227 - RNA, 22 nt, Human
agugucugaugcacaguugucc

SEQ ID NO: 47228 - RNA, 22 nt, Human
agugucugccaacugcaugguc

SEQ ID NO: 47229 - RNA, 22 nt, Human
agugucugccagcugccaggug

SEQ ID NO: 47230 - RNA, 22 nt, Human
agugucugccuauuuuucaagc

SEQ ID NO: 47231 - RNA, 22 nt, Human
agugucugcggcggggaggcgg

SEQ ID NO: 47232 - RNA, 18 nt, Human
agugucuggauauuuggg

SEQ ID NO: 47233 - RNA, 20 nt, Human
agugucuggauuuuguaacc

SEQ ID NO: 47234 - RNA, 20 nt, Human
agugucugggccucaggccc

SEQ ID NO: 47235 - RNA, 22 nt, Human
auucuguauuucuaauaagauc

SEQ ID NO: 47236 - RNA, 21 nt, Human
auucugucaucccagcuacuu

SEQ ID NO: 47237 - RNA, 22 nt, Human
auucuguguguacugagauggg

SEQ ID NO: 47238 - RNA, 22 nt, Human
auucuuaauuccaaagacugag

SEQ ID NO: 47239 - RNA, 22 nt, Human
auucuuacaaagcagagucugu

SEQ ID NO: 47240 - RNA, 22 nt, Human
auucuuacaaaugaaacugcaa

SEQ ID NO: 47241 - RNA, 22 nt, Human
auucuucacaccuguuccuguu

SEQ ID NO: 47242 - RNA, 22 nt, Human
auucuucaucagagaugcacua

SEQ ID NO: 47243 - RNA, 23 nt, Human
auucuucauuaucuucuagaaaa

SEQ ID NO: 47244 - RNA, 22 nt, Human
auucuucuaauaugaucguguu

SEQ ID NO: 47245 - RNA, 22 nt, Human
auucuucucccuuagggcccag

SEQ ID NO: 47246 - RNA, 19 nt, Human
auucuucucuuccugcugu

SEQ ID NO: 47247 - RNA, 22 nt, Human
auucuugcaguauacaacuacu

SEQ ID NO: 47248 - RNA, 22 nt, Human
auucuuggcccguccucacgca

SEQ ID NO: 47249 - RNA, 21 nt, Human
auucuuggcuuagcucucugg

SEQ ID NO: 47250 - RNA, 22 nt, Human
auucuuguaaauuuugugugaa

SEQ ID NO: 47251 - RNA, 22 nt, Human
auucuuuaguuggcuucuugcc

SEQ ID NO: 47252 - RNA, 22 nt, Human
auucuuugaacaguuuuccugu

SEQ ID NO: 47253 - RNA, 21 nt, Human
auucuuugaugugcaauaagu

SEQ ID NO: 47254 - RNA, 22 nt, Human
auucuuuucccaacugcuuuaa

SEQ ID NO: 47255 - RNA, 22 nt, Human
auucuuuuuuaaggaauagaac

SEQ ID NO: 47256 - RNA, 22 nt, Human
auugaaaaauucacaauucugg

SEQ ID NO: 47257 - RNA, 22 nt, Human
auugaaaaugacauuugugccc

SEQ ID NO: 47258 - RNA, 22 nt, Human
auugaaagaguuuucugcugca

SEQ ID NO: 47259 - RNA, 22 nt, Human
auugaaagcauggauuuggauu

SEQ ID NO: 47260 - RNA, 22 nt, Human
auugaacagaaaccaucagagu

SEQ ID NO: 47261 - RNA, 22 nt, Human
auugaacauacauauccacacc

SEQ ID NO: 47262 - RNA, 22 nt, Human
auugaacucugcaggagcugcc

SEQ ID NO: 47263 - RNA, 22 nt, Human
auugaacuguagucuucugucu

SEQ ID NO: 47264 - RNA, 22 nt, Human
auugaacugucuuugaagaaau

SEQ ID NO: 47265 - RNA, 22 nt, Human
aguaauaaacucuuuuuaucuc

SEQ ID NO: 47266 - RNA, 22 nt, Human
aguaaugaauacgguauuugaa

SEQ ID NO: 47267 - RNA, 21 nt, Human
aguacaaaaauuccuuucuca

SEQ ID NO: 47268 - RNA, 22 nt, Human
aguacaaaaugcagcaucauca

SEQ ID NO: 47269 - RNA, 22 nt, Human
aguacaaagugcuccugguucu

SEQ ID NO: 47270 - RNA, 22 nt, Human
aguacaaguagaaugcuacaag

SEQ ID NO: 47271 - RNA, 22 nt, Human
aguacaagugaugugguaaaaa

SEQ ID NO: 47272 - RNA, 20 nt, Human
aguacaauguaugauucaga

SEQ ID NO: 47273 - RNA, 22 nt, Human
aguacaauuauauuuagauggu

SEQ ID NO: 47274 - RNA, 22 nt, Human
aguacacagaguuauuuugugu

SEQ ID NO: 47275 - RNA, 22 nt, Human
aguacacuggcaaauguggugg

SEQ ID NO: 47276 - RNA, 22 nt, Human
aguacauauugaguggugauau

SEQ ID NO: 47277 - RNA, 21 nt, Human
aguacaucucaaauguaaauc

SEQ ID NO: 47278 - RNA, 22 nt, Human
aguacaugugguccuggccaga

SEQ ID NO: 47279 - RNA, 22 nt, Human
aguacauuuauuaaugguaaaa

SEQ ID NO: 47280 - RNA, 22 nt, Human
aguacccuagggugggagcuca

SEQ ID NO: 47281 - RNA, 22 nt, Human
aguaccuuugcauggauuuuuu

SEQ ID NO: 47282 - RNA, 22 nt, Human
aguacuuagaaaguuaauauaa

SEQ ID NO: 47283 - RNA, 22 nt, Human
aguacuuucuuccgagagagaa

SEQ ID NO: 47284 - RNA, 22 nt, Human
aguacuuugcacuuugcucaga

SEQ ID NO: 47285 - RNA, 22 nt, Human
aguacuuuuuguucaauugugc

SEQ ID NO: 47286 - RNA, 22 nt, Human
aguagaaagaaggcacugggcc

SEQ ID NO: 47287 - RNA, 22 nt, Human
aguagaaaguugcaggaggaau

SEQ ID NO: 47288 - RNA, 22 nt, Human
aguagaaauguaagaaggauua

SEQ ID NO: 47289 - RNA, 22 nt, Human
aguagaauguucuaugucaaug

SEQ ID NO: 47290 - RNA, 22 nt, Human
aguagacagacagaacacagcc

SEQ ID NO: 47291 - RNA, 22 nt, Human
aguagacaugagcaaugauaau

SEQ ID NO: 47292 - RNA, 22 nt, Human
aguagauagauucuaagcacua

SEQ ID NO: 47293 - RNA, 22 nt, Human
aguagcaauggcucugagcuau

SEQ ID NO: 47294 - RNA, 22 nt, Human
aguagcaccagggaagcagggc

SEQ ID NO: 47295 - RNA, 22 nt, Human
aguagcaguuuggcugaauuua

SEQ ID NO: 47296 - RNA, 22 nt, Human
aguaggcagaaguggcauucgg

SEQ ID NO: 47297 - RNA, 22 nt, Human
aguaggcauugugaaacugcau

SEQ ID NO: 47298 - RNA, 22 nt, Human
aguaggguguugcuauaacaag

SEQ ID NO: 47299 - RNA, 22 nt, Human
aguagucacuucacccauccca

SEQ ID NO: 47300 - RNA, 22 nt, Human
aguagucacuucuauuaauggc

SEQ ID NO: 47301 - RNA, 22 nt, Human
aguagucagcagauaauauagg

SEQ ID NO: 47302 - RNA, 18 nt, Human
aguaguggguuuagcuuc

SEQ ID NO: 47303 - RNA, 22 nt, Human
aguaguuuccauuucugaguuu

SEQ ID NO: 47304 - RNA, 22 nt, Human
aguaguuugggcagugacagau

SEQ ID NO: 47305 - RNA, 22 nt, Human
aguauacaguaaugacauaucu

SEQ ID NO: 47306 - RNA, 22 nt, Human
aguauacugaaaguaaauauga

SEQ ID NO: 47307 - RNA, 22 nt, Human
aguauauaguggcgcuguaugc

SEQ ID NO: 47308 - RNA, 22 nt, Human
aguauauugcucuuaaucauag

SEQ ID NO: 47309 - RNA, 22 nt, Human
aguauauugguguuauuccuca

SEQ ID NO: 47310 - RNA, 22 nt, Human
aguauauuuaccauuggguggg

SEQ ID NO: 47311 - RNA, 22 nt, Human
aguaucaaagggcaugugguua

SEQ ID NO: 47312 - RNA, 22 nt, Human
aguaucagcagagcuuaaaaga

SEQ ID NO: 47313 - RNA, 21 nt, Human
aguaucauaaugaauaguucu

SEQ ID NO: 47314 - RNA, 22 nt, Human
aguaucauguuggaauuaauca

SEQ ID NO: 47315 - RNA, 22 nt, Human
aguaucucaaagugguuuaugg

SEQ ID NO: 47316 - RNA, 22 nt, Human
aguaugaaaguuaaucaauuua

SEQ ID NO: 47317 - RNA, 22 nt, Human
aguaugaagaauacauagauga

SEQ ID NO: 47318 - RNA, 22 nt, Human
aguaugaagauuauaauuuuuc

SEQ ID NO: 47319 - RNA, 22 nt, Human
aguaugaauacagauuuucucu

SEQ ID NO: 47320 - RNA, 22 nt, Human
aguaugaauugcuuugccugua

SEQ ID NO: 47321 - RNA, 22 nt, Human
aguauguggcacagaauuucuu

SEQ ID NO: 47322 - RNA, 21 nt, Human
aguauguguuagggauaauuu

SEQ ID NO: 47323 - RNA, 22 nt, Human
aguauuacccucagaacuugau

SEQ ID NO: 47324 - RNA, 23 nt, Human
aguauucaaaaggcaagcuauau

SEQ ID NO: 47325 - RNA, 22 nt, Human
aguauuguaaacuuccuaagga

SEQ ID NO: 47326 - RNA, 22 nt, Human
aguauuuagagacacaagaugg

SEQ ID NO: 47327 - RNA, 22 nt, Human
aguauuuagcauagugguuagu

SEQ ID NO: 47328 - RNA, 22 nt, Human
aguauuucuucauaugauuacu

SEQ ID NO: 47329 - RNA, 22 nt, Human
aguauuugaagauguugaguac

SEQ ID NO: 47330 - RNA, 22 nt, Human
aguauuuguggauuuguauugg

SEQ ID NO: 47331 - RNA, 22 nt, Human
aguauuuguugaaugagugaau

SEQ ID NO: 47332 - RNA, 22 nt, Human
agucaaacaaauguuuauugag

SEQ ID NO: 47333 - RNA, 22 nt, Human
agucaaaugaguaaauauauaa

SEQ ID NO: 47334 - RNA, 22 nt, Human
agucaacacauuaaaccuaggg

SEQ ID NO: 47335 - RNA, 22 nt, Human
agucaacauuugagaugcaaug

SEQ ID NO: 47336 - RNA, 20 nt, Human
agucacaggccuggaacaug

SEQ ID NO: 47337 - RNA, 22 nt, Human
agucacaggguacacaaggauu

SEQ ID NO: 47338 - RNA, 22 nt, Human
agucacagguucuugggauuag

SEQ ID NO: 47339 - RNA, 22 nt, Human
agucacaguuccuacccaguaa

SEQ ID NO: 47340 - RNA, 22 nt, Human
agucacaguuucccugagagag

SEQ ID NO: 47341 - RNA, 22 nt, Human
agucacauagaaguggguuuaa

SEQ ID NO: 47342 - RNA, 22 nt, Human
agucacaucgauuauaaaauuu

SEQ ID NO: 47343 - RNA, 23 nt, Human
agucacaucuuagcagccagguc

SEQ ID NO: 47344 - RNA, 22 nt, Human
agucacaugagcacuaauuagg

SEQ ID NO: 47345 - RNA, 22 nt, Human
agucacaugcauuuucuucaau

SEQ ID NO: 47346 - RNA, 22 nt, Human
agucacucugcuacaugacagc

SEQ ID NO: 47347 - RNA, 22 nt, Human
agucacugagauggugaggcua

SEQ ID NO: 47348 - RNA, 22 nt, Human
agugucuggugagggcucucuc

SEQ ID NO: 47349 - RNA, 22 nt, Human
agugucugugaggggaauuccu

SEQ ID NO: 47350 - RNA, 22 nt, Human
agugucuguguuuucuauugcu

SEQ ID NO: 47351 - RNA, 22 nt, Human
agugucuguuacgcuugcagaa

SEQ ID NO: 47352 - RNA, 22 nt, Human
agugucuguugcuuuugcagug

SEQ ID NO: 47353 - RNA, 22 nt, Human
agugucuucaugauguggcagc

SEQ ID NO: 47354 - RNA, 22 nt, Human
agugucuuuauagacugacaau

SEQ ID NO: 47355 - RNA, 22 nt, Human
agugucuuugucaaauuacagg

SEQ ID NO: 47356 - RNA, 22 nt, Human
agugugagcccuggaguggugc

SEQ ID NO: 47357 - RNA, 22 nt, Human
agugugagccuacaggccaaag

SEQ ID NO: 47358 - RNA, 22 nt, Human
agugugagcuaauagcagagcc

SEQ ID NO: 47359 - RNA, 22 nt, Human
agugugagugcucauguccauc

SEQ ID NO: 47360 - RNA, 22 nt, Human
agugugcauuugcagaagaccc

SEQ ID NO: 47361 - RNA, 22 nt, Human
agugugcucaauucaagucuuu

SEQ ID NO: 47362 - RNA, 22 nt, Human
aguguggagcaucgagggcaga

SEQ ID NO: 47363 - RNA, 22 nt, Human
aguguggagccacugaguggcu

SEQ ID NO: 47364 - RNA, 17 nt, Human
aguguggcccugguuaa

SEQ ID NO: 47365 - RNA, 22 nt, Human
aguguggggucaccggcccagg

SEQ ID NO: 47366 - RNA, 23 nt, Human
aguguguaagguacuuugcugcu

SEQ ID NO: 47367 - RNA, 22 nt, Human
aguguguaaugccaggggcugc

SEQ ID NO: 47368 - RNA, 22 nt, Human
aguguguaauucagugcccagc

SEQ ID NO: 47369 - RNA, 22 nt, Human
aguguguagcacaugguaagca

SEQ ID NO: 47370 - RNA, 22 nt, Human
agugugucuuauccugggagaa

SEQ ID NO: 47371 - RNA, 17 nt, Human
agugugugaaauggugg

SEQ ID NO: 47372 - RNA, 22 nt, Human
agugugugaccuuuuaauuuaa

SEQ ID NO: 47373 - RNA, 21 nt, Human
agugugugauaggcaggaaga

SEQ ID NO: 47374 - RNA, 22 nt, Human
agugagauguguaaucaggggu

SEQ ID NO: 47375 - RNA, 20 nt, Human
agugagauugcugcucuagc

SEQ ID NO: 47376 - RNA, 23 nt, Human
agugagcagcuguagggcaagga

SEQ ID NO: 47377 - RNA, 22 nt, Human
agugagcaucuucaggagccaa

SEQ ID NO: 47378 - RNA, 22 nt, Human
agugagggacuagugcugggga

SEQ ID NO: 47379 - RNA, 22 nt, Human
agugaggggcagcugagugggc

SEQ ID NO: 47380 - RNA, 22 nt, Human
agugaggucauacuggagaggg

SEQ ID NO: 47381 - RNA, 22 nt, Human
agugaguauuuguugagugcua

SEQ ID NO: 47382 - RNA, 22 nt, Human
agugaguggagagcucuagguu

SEQ ID NO: 47383 - RNA, 22 nt, Human
agugaguggauguaggaauugg

SEQ ID NO: 47384 - RNA, 19 nt, Human
agugaguggggaaggcccu

SEQ ID NO: 47385 - RNA, 22 nt, Human
agugauauuagcaaaugguuau

SEQ ID NO: 47386 - RNA, 22 nt, Human
agugauggagcuuccucugcua

SEQ ID NO: 47387 - RNA, 22 nt, Human
agugauggcaucggguccagca

SEQ ID NO: 47388 - RNA, 22 nt, Human
agugauggggcccugcacugau

SEQ ID NO: 47389 - RNA, 22 nt, Human
agugaugucacaaacuauggug

SEQ ID NO: 47390 - RNA, 22 nt, Human
agugauuaauuguaaaaauucu

SEQ ID NO: 47391 - RNA, 22 nt, Human
agugauuagaaaguacacuugg

SEQ ID NO: 47392 - RNA, 22 nt, Human
agugauucuuuaaagugguauu

SEQ ID NO: 47393 - RNA, 22 nt, Human
agugauuugaggauuauugcuc

SEQ ID NO: 47394 - RNA, 22 nt, Human
agugauuugcaguauuuacuaa

SEQ ID NO: 47395 - RNA, 22 nt, Human
agugcaaaauucagaagcaauu

SEQ ID NO: 47396 - RNA, 22 nt, Human
agugcaaagggcuguugagaag

SEQ ID NO: 47397 - RNA, 22 nt, Human
agugcaacagcaguucucuuua

SEQ ID NO: 47398 - RNA, 20 nt, Human
agugcaagaaagcacagcug

SEQ ID NO: 47399 - RNA, 22 nt, Human
agugcaauguguacagaaaaau

SEQ ID NO: 47400 - RNA, 22 nt, Human
agugcagaggcugggaaaugcu

SEQ ID NO: 47401 - RNA, 22 nt, Human
agugcagcaugaagcacaugug

SEQ ID NO: 47402 - RNA, 22 nt, Human
agugcagcaugcuggggaggcu

SEQ ID NO: 47403 - RNA, 22 nt, Human
agugcagcuuauaaagcaucaa

SEQ ID NO: 47404 - RNA, 22 nt, Human
agugcaggccccaggccaggcc

SEQ ID NO: 47405 - RNA, 22 nt, Human
agugcaguaaaugggcauuaug

SEQ ID NO: 47406 - RNA, 22 nt, Human
agugcagugaugaauaaugguu

SEQ ID NO: 47407 - RNA, 22 nt, Human
agugcagugguuaggagccagg

SEQ ID NO: 47408 - RNA, 22 nt, Human
agugcauacccuucuaaaaagu

SEQ ID NO: 47409 - RNA, 22 nt, Human
agugcauagggggaugcacagc

SEQ ID NO: 47410 - RNA, 22 nt, Human
agugcaugaaagcauacaaggc

SEQ ID NO: 47411 - RNA, 22 nt, Human
agugcauuccuggggaagaagc

SEQ ID NO: 47412 - RNA, 22 nt, Human
agugccaaaucgagggcucuga

SEQ ID NO: 47413 - RNA, 23 nt, Human
agugccagggagaucaggacgga

SEQ ID NO: 47414 - RNA, 22 nt, Human
agugccaguuaauaagaaaugg

SEQ ID NO: 47415 - RNA, 22 nt, Human
agugcccaccucucuucagcua

SEQ ID NO: 47416 - RNA, 22 nt, Human
agugcccggacaacuggacaga

SEQ ID NO: 47417 - RNA, 22 nt, Human
agugcccugcuggggcaggaga

SEQ ID NO: 47418 - RNA, 22 nt, Human
agugcccuggacggcggcccca

SEQ ID NO: 47419 - RNA, 22 nt, Human
agugcccugucacuggaacuga

SEQ ID NO: 47420 - RNA, 22 nt, Human
agugccucuugucuacgguuuu

SEQ ID NO: 47421 - RNA, 22 nt, Human
agugccuggaccccaugacaua

SEQ ID NO: 47422 - RNA, 22 nt, Human
agugccuuggguauuuugagua

SEQ ID NO: 47423 - RNA, 22 nt, Human
agugcgugguuuacagcuaguu

SEQ ID NO: 47424 - RNA, 22 nt, Human
agugcuauaaagguagaccaca

SEQ ID NO: 47425 - RNA, 22 nt, Human
agugcucaccugucaggucaag

SEQ ID NO: 47426 - RNA, 23 nt, Human
agugcucagggcauuaggcuaga

SEQ ID NO: 47427 - RNA, 22 nt, Human
agugcuccaaagguuggucauu

SEQ ID NO: 47428 - RNA, 22 nt, Human
agugcuggaaagggacggagga

SEQ ID NO: 47429 - RNA, 22 nt, Human
agugcuggagggaggcagguuc

SEQ ID NO: 47430 - RNA, 22 nt, Human
agugcugucuccuucccccggg

SEQ ID NO: 47431 - RNA, 22 nt, Human
agugcuuaaaacccugcacuag

SEQ ID NO: 47432 - RNA, 22 nt, Human
agugcuuauaccaaagacucuu

SEQ ID NO: 47433 - RNA, 22 nt, Human
agugcuuuaccuagauaauguu

SEQ ID NO: 47434 - RNA, 22 nt, Human
agugcuuuauguuguugugcaa

SEQ ID NO: 47435 - RNA, 22 nt, Human
aguggagaagaggauggucucc

SEQ ID NO: 47436 - RNA, 22 nt, Human
aguggagcaggcggcgcucacu

SEQ ID NO: 47437 - RNA, 22 nt, Human
aguggagcuuuuccuaucagag

SEQ ID NO: 47438 - RNA, 22 nt, Human
aguggagguuacagcuguacau

SEQ ID NO: 47439 - RNA, 22 nt, Human
aguggagguuauugaguuaagg

SEQ ID NO: 47440 - RNA, 22 nt, Human
aguggagugaguggcagaagga

SEQ ID NO: 47441 - RNA, 22 nt, Human
aguggauggucacugauccagu

SEQ ID NO: 47442 - RNA, 22 nt, Human
aguggcagaacuaccuuuuuau

SEQ ID NO: 47443 - RNA, 22 nt, Human
aguggcagaagucacuggguag

SEQ ID NO: 47444 - RNA, 22 nt, Human
aguggcagacagagacaguacc

SEQ ID NO: 47445 - RNA, 22 nt, Human
aguggcagagaccccagccagc

SEQ ID NO: 47446 - RNA, 22 nt, Human
aguggcagagccaagauaugau

SEQ ID NO: 47447 - RNA, 22 nt, Human
aguggcagagccaaguagagcc

SEQ ID NO: 47448 - RNA, 22 nt, Human
aguggcagagguugacugcagu

SEQ ID NO: 47449 - RNA, 22 nt, Human
aguggcagaucucuggucugga

SEQ ID NO: 47450 - RNA, 22 nt, Human
aguggcagguguuucguggugc

SEQ ID NO: 47451 - RNA, 22 nt, Human
aguggcaguggaaagcacacgg

SEQ ID NO: 47452 - RNA, 22 nt, Human
aguggcaguggggcagggcccu

SEQ ID NO: 47453 - RNA, 22 nt, Human
aguggcaguuugggagcuacag

SEQ ID NO: 47454 - RNA, 22 nt, Human
aguggcaguuuuauauuucaug

SEQ ID NO: 47455 - RNA, 22 nt, Human
aguggcaucaaaucaagguuug

SEQ ID NO: 47456 - RNA, 22 nt, Human
aguggcaucuaaguuuuagaaa

SEQ ID NO: 47457 - RNA, 22 nt, Human
aguggcauuuuaauggauguca

SEQ ID NO: 47458 - RNA, 22 nt, Human
aguggccaccaugccagcucuc

SEQ ID NO: 47459 - RNA, 22 nt, Human
aguggccacugacuuggaaauc

SEQ ID NO: 47460 - RNA, 22 nt, Human
aguggccagcagccuagccuag

SEQ ID NO: 47461 - RNA, 22 nt, Human
aguggccagugcugcucugggg

SEQ ID NO: 47462 - RNA, 22 nt, Human
aguggcuaauaacagcuaaaca

SEQ ID NO: 47463 - RNA, 22 nt, Human
aguggcucuccaagaagucaca

SEQ ID NO: 47464 - RNA, 22 nt, Human
aguggcugcuaugaucaggaca

SEQ ID NO: 47465 - RNA, 22 nt, Human
aguggcugcugacuuuaauaca

SEQ ID NO: 47466 - RNA, 22 nt, Human
aguugggauucuugguucuggg

SEQ ID NO: 47467 - RNA, 19 nt, Human
aguuggggcagggaagaga

SEQ ID NO: 47468 - RNA, 22 nt, Human
aguuguaagagacagauauaaa

SEQ ID NO: 47469 - RNA, 22 nt, Human
aguugucagucaaagacauuug

SEQ ID NO: 47470 - RNA, 22 nt, Human
aguugucccggucuagccacuu

SEQ ID NO: 47471 - RNA, 22 nt, Human
aguuuaacuuuguaaacgugag

SEQ ID NO: 47472 - RNA, 22 nt, Human
aguuuacaaaguuucacuguuc

SEQ ID NO: 47473 - RNA, 22 nt, Human
aguuuacacuuuugauucuuau

SEQ ID NO: 47474 - RNA, 22 nt, Human
aguuuacauauuugucggaguc

SEQ ID NO: 47475 - RNA, 21 nt, Human
aguuuagaccaagccuuucca

SEQ ID NO: 47476 - RNA, 22 nt, Human
aguuuaggcaggcuccuauggu

SEQ ID NO: 47477 - RNA, 22 nt, Human
aguuuaugaaacacagauuuga

SEQ ID NO: 47478 - RNA, 22 nt, Human
aguuuauguagaauuggcaaua

SEQ ID NO: 47479 - RNA, 22 nt, Human
aguuuauucucuggucuuagua

SEQ ID NO: 47480 - RNA, 22 nt, Human
aguuucaauucuuuucacaaag

SEQ ID NO: 47481 - RNA, 22 nt, Human
aguuucacagaggguuagacgc

SEQ ID NO: 47482 - RNA, 22 nt, Human
aguuucacuaaggucugugugu

SEQ ID NO: 47483 - RNA, 22 nt, Human
auaauggauucagaaccgucaa

SEQ ID NO: 47484 - RNA, 22 nt, Human
auaauggccgggggcugaaugc

SEQ ID NO: 47485 - RNA, 22 nt, Human
auaauggcuucugaguauuagg

SEQ ID NO: 47486 - RNA, 22 nt, Human
auaauguacaacugcuuuuaau

SEQ ID NO: 47487 - RNA, 22 nt, Human
auaaugucugcagagccacaca

SEQ ID NO: 47488 - RNA, 22 nt, Human
auaaugugauauuucauuuaca

SEQ ID NO: 47489 - RNA, 20 nt, Human
auaauuacauagagauugcc

SEQ ID NO: 47490 - RNA, 16 nt, Human
auaauuacugcuacuu

SEQ ID NO: 47491 - RNA, 22 nt, Human
aguuuggaaaaugagacaagga

SEQ ID NO: 47492 - RNA, 22 nt, Human
aguuuggaagagaaaaauauuu

SEQ ID NO: 47493 - RNA, 22 nt, Human
aguuuggaagucaggcuuuucu

SEQ ID NO: 47494 - RNA, 22 nt, Human
aguuuguaaguucauuaugagu

SEQ ID NO: 47495 - RNA, 22 nt, Human
aguuuguaauaaugaaggaagu

SEQ ID NO: 47496 - RNA, 22 nt, Human
aguuuguaugccaacagcaaag

SEQ ID NO: 47497 - RNA, 22 nt, Human
aguuuuaagaugcgcuucuguu

SEQ ID NO: 47498 - RNA, 22 nt, Human
aguuuuaugcaguguucugaua

SEQ ID NO: 47499 - RNA, 22 nt, Human
aguuuuauguucacagaaggau

SEQ ID NO: 47500 - RNA, 22 nt, Human
aguuuucacacucaccaaaagg

SEQ ID NO: 47501 - RNA, 22 nt, Human
aguuuucauuaccaugcugcaa

SEQ ID NO: 47502 - RNA, 22 nt, Human
aguuuuccuuuauugaguacca

SEQ ID NO: 47503 - RNA, 22 nt, Human
aguuuucucuguguucugcuua

SEQ ID NO: 47504 - RNA, 22 nt, Human
aguuuucugauguguagugaga

SEQ ID NO: 47505 - RNA, 22 nt, Human
aguuuucugggaucacuggaau

SEQ ID NO: 47506 - RNA, 22 nt, Human
aguuuucuguucuacaauuuga

SEQ ID NO: 47507 - RNA, 22 nt, Human
aguuuuguaauucucaaaaaua

SEQ ID NO: 47508 - RNA, 22 nt, Human
aguuuuucuccccuggcuucau

SEQ ID NO: 47509 - RNA, 19 nt, Human
aguuuuuggaaauccugcu

SEQ ID NO: 47510 - RNA, 22 nt, Human
auaaaaaugagggcgguagcua

SEQ ID NO: 47511 - RNA, 22 nt, Human
auaaaagucugcuuauuugggc

SEQ ID NO: 47512 - RNA, 22 nt, Human
auaaaaucaacuggcuccaguu

SEQ ID NO: 47513 - RNA, 22 nt, Human
auaaacaagacuggccaacuuu

SEQ ID NO: 47514 - RNA, 22 nt, Human
auaaacagccugcccaaauugg

SEQ ID NO: 47515 - RNA, 22 nt, Human
auaaacagcuccauuuagugcc

SEQ ID NO: 47516 - RNA, 22 nt, Human
auaaacaguaaaugugagcagu

SEQ ID NO: 47517 - RNA, 22 nt, Human
auaaaccagaaguaaaagcuac

SEQ ID NO: 47518 - RNA, 22 nt, Human
auaaacugaagggaacacugag

SEQ ID NO: 47519 - RNA, 23 nt, Human
auaaacugucaaaagccagcccu

SEQ ID NO: 47520 - RNA, 22 nt, Human
auaaacuugagucucagaguau

SEQ ID NO: 47521 - RNA, 22 nt, Human
auaaagauagaaugcuuuccug

SEQ ID NO: 47522 - RNA, 22 nt, Human
auaaagcaagcauaccauuaag

SEQ ID NO: 47523 - RNA, 22 nt, Human
auaaagcaugcuuguuuggaga

SEQ ID NO: 47524 - RNA, 22 nt, Human
auaaagcuauuccucucuuuuu

SEQ ID NO: 47525 - RNA, 22 nt, Human
auaaaggcaacaccaggguaug

SEQ ID NO: 47526 - RNA, 17 nt, Human
auaaaggcaaguauuau

SEQ ID NO: 47527 - RNA, 22 nt, Human
auaaagucucauggguaaaugu

SEQ ID NO: 47528 - RNA, 18 nt, Human
auaaagugcuaauaaugg

SEQ ID NO: 47529 - RNA, 22 nt, Human
auaaaguggaaguguuaaaggg

SEQ ID NO: 47530 - RNA, 22 nt, Human
auaaaguuuaaaagucaauagu

SEQ ID NO: 47531 - RNA, 19 nt, Human
auaaauaaaaagugggaga

SEQ ID NO: 47532 - RNA, 22 nt, Human
auaaaucuauuggacaugugug

SEQ ID NO: 47533 - RNA, 23 nt, Human
auaaauuacuaucucccuagagc

SEQ ID NO: 47534 - RNA, 22 nt, Human
auaaauugugcuuuugacaucu

SEQ ID NO: 47535 - RNA, 22 nt, Human
auaaauuuucuugcuguacuua

SEQ ID NO: 47536 - RNA, 20 nt, Human
auaacaaggcucugcaagcu

SEQ ID NO: 47537 - RNA, 22 nt, Human
auaacaugagccagauugaaag

SEQ ID NO: 47538 - RNA, 22 nt, Human
auaaccaugauuaaucuaagaa

SEQ ID NO: 47539 - RNA, 22 nt, Human
auaaccuaggaggguagaggua

SEQ ID NO: 47540 - RNA, 20 nt, Human
auaaccugcccagaggauga

SEQ ID NO: 47541 - RNA, 22 nt, Human
auaaccuuggcuaguauugugc

SEQ ID NO: 47542 - RNA, 22 nt, Human
auaacgaaggcugaugcgggau

SEQ ID NO: 47543 - RNA, 22 nt, Human
auaacuuagaguaggcaaaagu

SEQ ID NO: 47544 - RNA, 22 nt, Human
auaacuucaucaaauaggcaca

SEQ ID NO: 47545 - RNA, 22 nt, Human
auaacuugauguuauuugucca

SEQ ID NO: 47546 - RNA, 22 nt, Human
auaagacacgcaaauagguacg

SEQ ID NO: 47547 - RNA, 22 nt, Human
auaagacacgccccacucacuc

SEQ ID NO: 47548 - RNA, 22 nt, Human
auaagaggaauuacagaagagg

SEQ ID NO: 47549 - RNA, 22 nt, Human
auaagagucuuguuuucuuauu

SEQ ID NO: 47550 - RNA, 22 nt, Human
auaagaugagaucagcuuucug

SEQ ID NO: 47551 - RNA, 23 nt, Human
auaagccuuuucuuucugcccca

SEQ ID NO: 47552 - RNA, 22 nt, Human
auaagcucuggacagccacauu

SEQ ID NO: 47553 - RNA, 22 nt, Human
auaagcuuccuguuagaaaccg

SEQ ID NO: 47554 - RNA, 22 nt, Human
auaagcuuugcuggagagaccu

SEQ ID NO: 47555 - RNA, 22 nt, Human
auaagcuuuugauucacuucag

SEQ ID NO: 47556 - RNA, 22 nt, Human
auaaggaaguugcagaagugga

SEQ ID NO: 47557 - RNA, 22 nt, Human
auaaggaaugauguaucaguuu

SEQ ID NO: 47558 - RNA, 22 nt, Human
auaaggaauuuagaauagggaa

SEQ ID NO: 47559 - RNA, 22 nt, Human
auaaggcaagcugucaguuugu

SEQ ID NO: 47560 - RNA, 22 nt, Human
auaaggcacacauagauagggu

SEQ ID NO: 47561 - RNA, 22 nt, Human
auaaggcagugacuucaucuau

SEQ ID NO: 47562 - RNA, 22 nt, Human
auaagguauaaggccuauuuuu

SEQ ID NO: 47563 - RNA, 22 nt, Human
auaaguucagguaaagaaauca

SEQ ID NO: 47564 - RNA, 22 nt, Human
auaaguuugucuuuguaaagau

SEQ ID NO: 47565 - RNA, 22 nt, Human
auaauaacaccugaauaggaaa

SEQ ID NO: 47566 - RNA, 22 nt, Human
auaauaaugaaagccacugugu

SEQ ID NO: 47567 - RNA, 23 nt, Human
auaauaauuauggcagcaaagug

SEQ ID NO: 47568 - RNA, 22 nt, Human
auaauagcuaacacagagugcu

SEQ ID NO: 47569 - RNA, 22 nt, Human
auaauaucgcuccuuuuuuuga

SEQ ID NO: 47570 - RNA, 22 nt, Human
auaaucauuuuaauuagugguu

SEQ ID NO: 47571 - RNA, 22 nt, Human
auaauccugcuuuuucacuauu

SEQ ID NO: 47572 - RNA, 22 nt, Human
auaaucuguggaugguuuugag

SEQ ID NO: 47573 - RNA, 22 nt, Human
auaaucuuucuuuuccagauag

SEQ ID NO: 47574 - RNA, 22 nt, Human
auaaugaaauaugaggaagguc

SEQ ID NO: 47575 - RNA, 22 nt, Human
auaaugacauucuuagacugga

SEQ ID NO: 47576 - RNA, 22 nt, Human
auaaugagcuuuugaauacuga

SEQ ID NO: 47577 - RNA, 22 nt, Human
auaaugcgccucagaaaacaga

SEQ ID NO: 47578 - RNA, 22 nt, Human
auaaugcugggagaaauuguua

SEQ ID NO: 47579 - RNA, 22 nt, Human
auaauggcuugugguguuauuc

SEQ ID NO: 47580 - RNA, 21 nt, Human
auaauguacaaaaacugucuu

SEQ ID NO: 47581 - RNA, 22 nt, Human
auaauuaggucuuauaacgucu

SEQ ID NO: 47582 - RNA, 22 nt, Human
auaauugugggcagugugauau

SEQ ID NO: 47583 - RNA, 22 nt, Human
auaauuuaaauuaguaugugau

SEQ ID NO: 47584 - RNA, 22 nt, Human
auaauuuaauuuucacaguggu

SEQ ID NO: 47585 - RNA, 20 nt, Human
auaauuuacccugcaccacu

SEQ ID NO: 47586 - RNA, 22 nt, Human
auaauuuacuaagcucuaccuu

SEQ ID NO: 47587 - RNA, 22 nt, Human
auacaaaaauuagccgggagua

SEQ ID NO: 47588 - RNA, 22 nt, Human
auacaaagacaaaucucaaucu

SEQ ID NO: 47589 - RNA, 20 nt, Human
auacaaagagauugauguau

SEQ ID NO: 47590 - RNA, 22 nt, Human
auacaaaguauuaauccuggau

SEQ ID NO: 47591 - RNA, 22 nt, Human
auacaaauccucugggauggua

SEQ ID NO: 47592 - RNA, 22 nt, Human
auagcaagcguucccaagccac

SEQ ID NO: 47593 - RNA, 22 nt, Human
auagcaauuaagcuccagaauu

SEQ ID NO: 47594 - RNA, 22 nt, Human
auagcaauuugcccaauuaccu

SEQ ID NO: 47595 - RNA, 22 nt, Human
auagcacaucacuccagugagu

SEQ ID NO: 47596 - RNA, 22 nt, Human
auagcacuuauuguaugcugag

SEQ ID NO: 47597 - RNA, 22 nt, Human
auagcagcauuucuuccaagga

SEQ ID NO: 47598 - RNA, 22 nt, Human
auagcauacauguuguuacuug

SEQ ID NO: 47599 - RNA, 22 nt, Human
auagcauauaaguuauaaaacu

SEQ ID NO: 47600 - RNA, 22 nt, Human
auagccaggagaugauggggga

SEQ ID NO: 47601 - RNA, 22 nt, Human
auagcuucagaauugagauauc

SEQ ID NO: 47602 - RNA, 22 nt, Human
auaggacagcagacaauuagua

SEQ ID NO: 47603 - RNA, 22 nt, Human
auaggaugauaaaauuagaaac

SEQ ID NO: 47604 - RNA, 22 nt, Human
auaggcaagcacaaagucagga

SEQ ID NO: 47605 - RNA, 22 nt, Human
auaggcagacucuuuuuggagg

SEQ ID NO: 47606 - RNA, 22 nt, Human
auaggcuuggcuuauucuuggg

SEQ ID NO: 47607 - RNA, 22 nt, Human
auagggccuaaaaaguauugcu

SEQ ID NO: 47608 - RNA, 22 nt, Human
auaauuaucucagacacuuguu

SEQ ID NO: 47609 - RNA, 22 nt, Human
auaauucagguuuucuggcaca

SEQ ID NO: 47610 - RNA, 22 nt, Human
auaauugaugaggcuuuggaca

SEQ ID NO: 47611 - RNA, 22 nt, Human
auaauuuggcuuccuagaugua

SEQ ID NO: 47612 - RNA, 22 nt, Human
auacaaaauauauacuggagac

SEQ ID NO: 47613 - RNA, 17 nt, Human
auacaaagccauaaacc

SEQ ID NO: 47614 - RNA, 22 nt, Human
auacaaagcuaaauaugguuuc

SEQ ID NO: 47615 - RNA, 22 nt, Human
auacaaaguauugauccugagu

SEQ ID NO: 47616 - RNA, 22 nt, Human
auacaacuuuacaugcaauucc

SEQ ID NO: 47617 - RNA, 22 nt, Human
auacaagacucagcacagacgg

SEQ ID NO: 47618 - RNA, 18 nt, Human
auacaagcucuguuacuu

SEQ ID NO: 47619 - RNA, 22 nt, Human
auacaagugagaaaacugaaga

SEQ ID NO: 47620 - RNA, 22 nt, Human
auacaaguucucauguguaucu

SEQ ID NO: 47621 - RNA, 22 nt, Human
auacaauccagccauugccaca

SEQ ID NO: 47622 - RNA, 22 nt, Human
auacaaugaaguauagaugaaa

SEQ ID NO: 47623 - RNA, 22 nt, Human
auacaaugggugcaaagaugug

SEQ ID NO: 47624 - RNA, 22 nt, Human
auacacacaaucagguuuugua

SEQ ID NO: 47625 - RNA, 22 nt, Human
auacacacugcuauccuuuuuu

SEQ ID NO: 47626 - RNA, 22 nt, Human
auacacagcgaugagaggaggc

SEQ ID NO: 47627 - RNA, 22 nt, Human
auacacauauguguguauaugu

SEQ ID NO: 47628 - RNA, 15 nt, Human
auacacaugagggag

SEQ ID NO: 47629 - RNA, 22 nt, Human
auacacgugccauguuggugug

SEQ ID NO: 47630 - RNA, 22 nt, Human
auacacguguguguacaugcac

SEQ ID NO: 47631 - RNA, 22 nt, Human
auacacugaguccuuuucucau

SEQ ID NO: 47632 - RNA, 22 nt, Human
auacacuggacaucauugcauu

SEQ ID NO: 47633 - RNA, 22 nt, Human
auacacuguucacuagaucuuc

SEQ ID NO: 47634 - RNA, 22 nt, Human
auacagaaaaguggauagccag

SEQ ID NO: 47635 - RNA, 22 nt, Human
auacagaacaagccucaccucc

SEQ ID NO: 47636 - RNA, 21 nt, Human
auacagaacauugauccaaga

SEQ ID NO: 47637 - RNA, 22 nt, Human
auacagaagaacuauagccacu

SEQ ID NO: 47638 - RNA, 22 nt, Human
auacagaaguuuuccacuuauu

SEQ ID NO: 47639 - RNA, 22 nt, Human
auacagaauucacuacaguuuc

SEQ ID NO: 47640 - RNA, 18 nt, Human
auacagagaccucaagga

SEQ ID NO: 47641 - RNA, 19 nt, Human
auacagagcuuccuaauuu

SEQ ID NO: 47642 - RNA, 22 nt, Human
auacagaugagaucaggcauaa

SEQ ID NO: 47643 - RNA, 22 nt, Human
auacagaugggucagauuucau

SEQ ID NO: 47644 - RNA, 22 nt, Human
auacagauguugaauguuauau

SEQ ID NO: 47645 - RNA, 22 nt, Human
auacagcuuucuuucacaugag

SEQ ID NO: 47646 - RNA, 22 nt, Human
auacaggugugagggucucuuu

SEQ ID NO: 47647 - RNA, 22 nt, Human
auacaguaaccacauucuauag

SEQ ID NO: 47648 - RNA, 19 nt, Human
auacaguaagguguuugcc

SEQ ID NO: 47649 - RNA, 22 nt, Human
auacaguaauugcccugcaaug

SEQ ID NO: 47650 - RNA, 22 nt, Human
auacaguauaacuaauaaaccc

SEQ ID NO: 47651 - RNA, 22 nt, Human
auacagugcacaaccugugcag

SEQ ID NO: 47652 - RNA, 17 nt, Human
auacaguuuauuuuaca

SEQ ID NO: 47653 - RNA, 22 nt, Human
auacauacauguacacauaaau

SEQ ID NO: 47654 - RNA, 22 nt, Human
auacauaggagaauaacuucag

SEQ ID NO: 47655 - RNA, 22 nt, Human
auacauauaugguacuuccugg

SEQ ID NO: 47656 - RNA, 22 nt, Human
auacaucuuccuuuuaaaaugc

SEQ ID NO: 47657 - RNA, 22 nt, Human
auacaucuugucagauucaugu

SEQ ID NO: 47658 - RNA, 22 nt, Human
auacaugacagcauagcauccu

SEQ ID NO: 47659 - RNA, 19 nt, Human
auacaugcauuuacaugcu

SEQ ID NO: 47660 - RNA, 22 nt, Human
auacaugcuuggguguagugcg

SEQ ID NO: 47661 - RNA, 22 nt, Human
auacauggaagaugcuuagcac

SEQ ID NO: 47662 - RNA, 22 nt, Human
auacauuccuacugacuagcua

SEQ ID NO: 47663 - RNA, 22 nt, Human
auaccauuuccauguuacauua

SEQ ID NO: 47664 - RNA, 22 nt, Human
auacccuuuacaggaacagcaa

SEQ ID NO: 47665 - RNA, 22 nt, Human
auaccuguguauccacaagcgu

SEQ ID NO: 47666 - RNA, 22 nt, Human
auaccuuuuacucauuauccau

SEQ ID NO: 47667 - RNA, 22 nt, Human
auacuaagcccaagaacacaug

SEQ ID NO: 47668 - RNA, 22 nt, Human
auacuaagcucauuacauuuug

SEQ ID NO: 47669 - RNA, 22 nt, Human
auacuacaagguaugugcuaaa

SEQ ID NO: 47670 - RNA, 22 nt, Human
auacuacacuaugcauggaugu

SEQ ID NO: 47671 - RNA, 22 nt, Human
auacuacauuauuagagccugg

SEQ ID NO: 47672 - RNA, 21 nt, Human
auacuacauuucucugacuuu

SEQ ID NO: 47673 - RNA, 22 nt, Human
auacuacauuugaaaauugcag

SEQ ID NO: 47674 - RNA, 22 nt, Human
auacucaauuuguuggaaagca

SEQ ID NO: 47675 - RNA, 22 nt, Human
auacucuuuaugacauuccagc

SEQ ID NO: 47676 - RNA, 22 nt, Human
auacugaauuagguaaagcaua

SEQ ID NO: 47677 - RNA, 22 nt, Human
auacuguuggcuuuggugaugg

SEQ ID NO: 47678 - RNA, 22 nt, Human
auacuguuucucuucuacauga

SEQ ID NO: 47679 - RNA, 22 nt, Human
auacuuaguuuuaauccauuag

SEQ ID NO: 47680 - RNA, 22 nt, Human
auacuucaacauaucagucaga

SEQ ID NO: 47681 - RNA, 22 nt, Human
auacuucaugcuucaugucugu

SEQ ID NO: 47682 - RNA, 22 nt, Human
auacuuccugcuucccugaucu

SEQ ID NO: 47683 - RNA, 22 nt, Human
auacuucucaugggcucugagc

SEQ ID NO: 47684 - RNA, 22 nt, Human
auacuucuuuaagaguaagucu

SEQ ID NO: 47685 - RNA, 21 nt, Human
auacuuugaauuacagccuug

SEQ ID NO: 47686 - RNA, 22 nt, Human
auagaaaacagauguccuuaaa

SEQ ID NO: 47687 - RNA, 22 nt, Human
auagaaauggcagcuggugcua

SEQ ID NO: 47688 - RNA, 22 nt, Human
auagaaauguauuuuggacuag

SEQ ID NO: 47689 - RNA, 22 nt, Human
auagaacagaaacagaugcaca

SEQ ID NO: 47690 - RNA, 22 nt, Human
auagaaccuguugugaaauuca

SEQ ID NO: 47691 - RNA, 22 nt, Human
auagaacuccaucccucugacc

SEQ ID NO: 47692 - RNA, 22 nt, Human
auagaagauagcuuuuguuucu

SEQ ID NO: 47693 - RNA, 22 nt, Human
auagaagcugauaaacuacuuc

SEQ ID NO: 47694 - RNA, 22 nt, Human
auagaagcuuuuaaauaacagg

SEQ ID NO: 47695 - RNA, 22 nt, Human
auagaauaaggcacagauucuu

SEQ ID NO: 47696 - RNA, 22 nt, Human
auagaauagcauagaaaauuga

SEQ ID NO: 47697 - RNA, 22 nt, Human
auagaaucuuuguaaaacacuu

SEQ ID NO: 47698 - RNA, 22 nt, Human
auagaauuuguacuuguagaac

SEQ ID NO: 47699 - RNA, 22 nt, Human
auagacacagcuaugauuugag

SEQ ID NO: 47700 - RNA, 22 nt, Human
auagacauagccguaauuuauu

SEQ ID NO: 47701 - RNA, 22 nt, Human
auaugggggggcgugcagagga

SEQ ID NO: 47702 - RNA, 22 nt, Human
auaugguaagaguauauuuacu

SEQ ID NO: 47703 - RNA, 22 nt, Human
auauguacacuuacguuacaaa

SEQ ID NO: 47704 - RNA, 22 nt, Human
auauguauagccagucuuuagg

SEQ ID NO: 47705 - RNA, 22 nt, Human
auauguccaccuguaugcuaaa

SEQ ID NO: 47706 - RNA, 22 nt, Human
auaugucgcuacaucauuagau

SEQ ID NO: 47707 - RNA, 22 nt, Human
auaugugaaguggguuauuuug

SEQ ID NO: 47708 - RNA, 22 nt, Human
auaugugaaugauaucacuuug

SEQ ID NO: 47709 - RNA, 22 nt, Human
auauguguacgugcaguauaua

SEQ ID NO: 47710 - RNA, 20 nt, Human
auauguguacguguauacau

SEQ ID NO: 47711 - RNA, 22 nt, Human
auauguguauuugguuagccua

SEQ ID NO: 47712 - RNA, 22 nt, Human
auaugugucgugcuacugccca

SEQ ID NO: 47713 - RNA, 22 nt, Human
auauguuagggaacaauuugag

SEQ ID NO: 47714 - RNA, 22 nt, Human
auauuaagaugcuauugguuuu

SEQ ID NO: 47715 - RNA, 22 nt, Human
auauuaauuauuuacacaugag

SEQ ID NO: 47716 - RNA, 22 nt, Human
auauuaggugcucaauacaugc

SEQ ID NO: 47717 - RNA, 22 nt, Human
auauuagguuggugcaaaagua

SEQ ID NO: 47718 - RNA, 22 nt, Human
auauuaugcuaagggaaauaag

SEQ ID NO: 47719 - RNA, 22 nt, Human
auauuauucuaguaacagugau

SEQ ID NO: 47720 - RNA, 22 nt, Human
auauuauuuucccuggaguugu

SEQ ID NO: 47721 - RNA, 22 nt, Human
auauucaagugaggauggcuaa

SEQ ID NO: 47722 - RNA, 22 nt, Human
auauuccuguuuuuaacacuuu

SEQ ID NO: 47723 - RNA, 22 nt, Human
auauucucugcugcuuuugugu

SEQ ID NO: 47724 - RNA, 22 nt, Human
auauugaacccuacagacugua

SEQ ID NO: 47725 - RNA, 20 nt, Human
auauugcaaggaagcuggau

SEQ ID NO: 47726 - RNA, 22 nt, Human
auauugcaauagaugcaucauu

SEQ ID NO: 47727 - RNA, 22 nt, Human
auagggcugccaucacagaaga

SEQ ID NO: 47728 - RNA, 22 nt, Human
auagguccaaggagaggucuuu

SEQ ID NO: 47729 - RNA, 22 nt, Human
auaggugugugguucauggccc

SEQ ID NO: 47730 - RNA, 22 nt, Human
auaguaacuggcauguuuauga

SEQ ID NO: 47731 - RNA, 22 nt, Human
auaguacauggguguccucaca

SEQ ID NO: 47732 - RNA, 22 nt, Human
auaguacuccaccaguacaugu

SEQ ID NO: 47733 - RNA, 22 nt, Human
auagucaaccuuguaauuagcc

SEQ ID NO: 47734 - RNA, 22 nt, Human
auagucacucuguuagguguuu

SEQ ID NO: 47735 - RNA, 22 nt, Human
auagucuuagaucagauaaagu

SEQ ID NO: 47736 - RNA, 21 nt, Human
auagugauagauaacugaguu

SEQ ID NO: 47737 - RNA, 22 nt, Human
auagugucagaaaaucauaaga

SEQ ID NO: 47738 - RNA, 22 nt, Human
auagugucuuucuucacaggca

SEQ ID NO: 47739 - RNA, 22 nt, Human
auaguguuguauguacagucug

SEQ ID NO: 47740 - RNA, 22 nt, Human
auaguuaugcucuagacaagaa

SEQ ID NO: 47741 - RNA, 22 nt, Human
auaguucacuaauagcaaaagc

SEQ ID NO: 47742 - RNA, 22 nt, Human
auaguuuaaggaacuaugcgau

SEQ ID NO: 47743 - RNA, 22 nt, Human
auaguuuccauugcugaccaaa

SEQ ID NO: 47744 - RNA, 22 nt, Human
auaguuugcuuuaauacaacug

SEQ ID NO: 47745 - RNA, 22 nt, Human
auaguuuugcugucagguccua

SEQ ID NO: 47746 - RNA, 22 nt, Human
auauaaagagcuuaguauagug

SEQ ID NO: 47747 - RNA, 22 nt, Human
auauaacauacauacagaaaag

SEQ ID NO: 47748 - RNA, 22 nt, Human
auauaaguguguggcuguuagu

SEQ ID NO: 47749 - RNA, 22 nt, Human
auauaaguuaguggucauguuu

SEQ ID NO: 47750 - RNA, 22 nt, Human
auauaaugauuuucuggugagu

SEQ ID NO: 47751 - RNA, 22 nt, Human
auauacacagagcuuaugguga

SEQ ID NO: 47752 - RNA, 22 nt, Human
auauacacaucuuuuuaaauau

SEQ ID NO: 47753 - RNA, 22 nt, Human
auauacacuguuucaguugaag

SEQ ID NO: 47754 - RNA, 22 nt, Human
auauacaguauguacugugguu

SEQ ID NO: 47755 - RNA, 20 nt, Human
auauaccaucccacaacagg

SEQ ID NO: 47756 - RNA, 22 nt, Human
auauacugaggagacuuuauau

SEQ ID NO: 47757 - RNA, 22 nt, Human
auauacuguaggccacuauaag

SEQ ID NO: 47758 - RNA, 22 nt, Human
auauacuguguuccauggacca

SEQ ID NO: 47759 - RNA, 22 nt, Human
auauagaauacacagggaaagu

SEQ ID NO: 47760 - RNA, 22 nt, Human
auauagaucaaaugaugcuaau

SEQ ID NO: 47761 - RNA, 22 nt, Human
auauagauuccaugguuccuuu

SEQ ID NO: 47762 - RNA, 19 nt, Human
auauagcauuauucaauuu

SEQ ID NO: 47763 - RNA, 22 nt, Human
auauagcugagggguauuauaa

SEQ ID NO: 47764 - RNA, 22 nt, Human
auauaggcagaaaggaaggcaa

SEQ ID NO: 47765 - RNA, 20 nt, Human
auauaggcauaguaaaauga

SEQ ID NO: 47766 - RNA, 22 nt, Human
auauaguuggguuucauucuac

SEQ ID NO: 47767 - RNA, 22 nt, Human
auauauaaccuggauaaggcuu

SEQ ID NO: 47768 - RNA, 22 nt, Human
auauauacuuugacacauucug

SEQ ID NO: 47769 - RNA, 22 nt, Human
auauauaucgaguucaugucuc

SEQ ID NO: 47770 - RNA, 22 nt, Human
auauaucugcaguacugaagaa

SEQ ID NO: 47771 - RNA, 22 nt, Human
auauaugaagaagucuugauua

SEQ ID NO: 47772 - RNA, 22 nt, Human
auauaugcauguguacuuaugu

SEQ ID NO: 47773 - RNA, 19 nt, Human
auauauguauacaaugugg

SEQ ID NO: 47774 - RNA, 22 nt, Human
auauaugugcaggcucacacau

SEQ ID NO: 47775 - RNA, 22 nt, Human
auauauuacaaaagaggaagga

SEQ ID NO: 47776 - RNA, 22 nt, Human
auauauuguaucuuucaugggg

SEQ ID NO: 47777 - RNA, 22 nt, Human
auauauuuugaauagccucugu

SEQ ID NO: 47778 - RNA, 22 nt, Human
auauauuuugcggucacguggc

SEQ ID NO: 47779 - RNA, 22 nt, Human
auauauuuuuugagacagaguc

SEQ ID NO: 47780 - RNA, 22 nt, Human
auaucaaacgaaguuauuuuaa

SEQ ID NO: 47781 - RNA, 22 nt, Human
auaucaaagcuaguggaaauuu

SEQ ID NO: 47782 - RNA, 22 nt, Human
auaucacaggaaaggaagauac

SEQ ID NO: 47783 - RNA, 22 nt, Human
auaucacagguguuuaccugau

SEQ ID NO: 47784 - RNA, 22 nt, Human
auaucauucugauguauaucuu

SEQ ID NO: 47785 - RNA, 22 nt, Human
auauccaccauucugcaccuuc

SEQ ID NO: 47786 - RNA, 22 nt, Human
auauccuuuucggaagagcagc

SEQ ID NO: 47787 - RNA, 22 nt, Human
auaucuaggcugaauguaaaau

SEQ ID NO: 47788 - RNA, 21 nt, Human
auaucuucuucaaaccacuca

SEQ ID NO: 47789 - RNA, 22 nt, Human
auaucuuggccccaggauuuua

SEQ ID NO: 47790 - RNA, 22 nt, Human
auaucuuuuagagcaagcuugu

SEQ ID NO: 47791 - RNA, 22 nt, Human
auaugaaaauguuuuagcugua

SEQ ID NO: 47792 - RNA, 22 nt, Human
auaugaaaguaagcaugugugu

SEQ ID NO: 47793 - RNA, 22 nt, Human
auaugacagaauguguguguau

SEQ ID NO: 47794 - RNA, 22 nt, Human
auaugagaauuggaaaauauca

SEQ ID NO: 47795 - RNA, 22 nt, Human
auaugaguugauuuuuagaaua

SEQ ID NO: 47796 - RNA, 22 nt, Human
auaugaguuucccacuucugga

SEQ ID NO: 47797 - RNA, 22 nt, Human
auaugauuccacuauuguaugg

SEQ ID NO: 47798 - RNA, 22 nt, Human
auaugauuguccuuagcaaauu

SEQ ID NO: 47799 - RNA, 22 nt, Human
auaugcacacucugcccacaga

SEQ ID NO: 47800 - RNA, 22 nt, Human
auaugcacauacauacauaggu

SEQ ID NO: 47801 - RNA, 22 nt, Human
auaugcacgcauacacacauaa

SEQ ID NO: 47802 - RNA, 22 nt, Human
auaugcauucauacuuagugga

SEQ ID NO: 47803 - RNA, 22 nt, Human
auaugcuauguauguaaaugag

SEQ ID NO: 47804 - RNA, 22 nt, Human
auaugcuuccaaguuauuccac

SEQ ID NO: 47805 - RNA, 22 nt, Human
auaugcuugacucuuucacauc

SEQ ID NO: 47806 - RNA, 22 nt, Human
auaugcuuugggauuagaucau

SEQ ID NO: 47807 - RNA, 22 nt, Human
auauggaagagccugggaauuu

SEQ ID NO: 47808 - RNA, 18 nt, Human
auauggaaugccuggcua

SEQ ID NO: 47809 - RNA, 22 nt, Human
auauggaaugguaaucuacaau

SEQ ID NO: 47810 - RNA, 22 nt, Human
aucuguguguugaguucucagc

SEQ ID NO: 47811 - RNA, 22 nt, Human
aucuguuauugaauaggugcua

SEQ ID NO: 47812 - RNA, 23 nt, Human
aucuguucaucugacacagauuc

SEQ ID NO: 47813 - RNA, 22 nt, Human
aucuguucuucaaaauauuaca

SEQ ID NO: 47814 - RNA, 22 nt, Human
aucuguuguuuuucaccaccca

SEQ ID NO: 47815 - RNA, 22 nt, Human
aucuuacauucccucaccauuu

SEQ ID NO: 47816 - RNA, 22 nt, Human
aucuuagaaguuugauaaaauc

SEQ ID NO: 47817 - RNA, 23 nt, Human
aucuuagcauagacuugaguccc

SEQ ID NO: 47818 - RNA, 22 nt, Human
aucuuaugagacccauaaagau

SEQ ID NO: 47819 - RNA, 22 nt, Human
aucuucaaagcacaucguuugu

SEQ ID NO: 47820 - RNA, 22 nt, Human
aucuucaacaacaaauugccuc

SEQ ID NO: 47821 - RNA, 22 nt, Human
aucuucaacucagagagugcug

SEQ ID NO: 47822 - RNA, 22 nt, Human
aucuucaacuuuggggcugccu

SEQ ID NO: 47823 - RNA, 22 nt, Human
aucuucaauauuuuuguguaga

SEQ ID NO: 47824 - RNA, 16 nt, Human
aucuuccaaaguuauu

SEQ ID NO: 47825 - RNA, 22 nt, Human
aucuucccaggcuggggagagg

SEQ ID NO: 47826 - RNA, 22 nt, Human
aucuucuauagauauucugaag

SEQ ID NO: 47827 - RNA, 22 nt, Human
aucuucuucaaggaucuggagc

SEQ ID NO: 47828 - RNA, 22 nt, Human
aucuugaagguucuaccauaca

SEQ ID NO: 47829 - RNA, 22 nt, Human
aucuugaaugaaugacucuuua

SEQ ID NO: 47830 - RNA, 22 nt, Human
aucuugaucaaggcuaucauga

SEQ ID NO: 47831 - RNA, 22 nt, Human
aucuugggaauuuuccaggagu

SEQ ID NO: 47832 - RNA, 18 nt, Human
aucuuguuuuuggauuaa

SEQ ID NO: 47833 - RNA, 22 nt, Human
aucuuuacaagaaauucuuuua

SEQ ID NO: 47834 - RNA, 22 nt, Human
aucuuuacaguguaagugcaga

SEQ ID NO: 47835 - RNA, 22 nt, Human
aucuuuagauuagaaacucuaa

SEQ ID NO: 47836 - RNA, 19 nt, Human
aucuuuagcaacuuucaaa

SEQ ID NO: 47837 - RNA, 22 nt, Human
aucuuuaggaaccuaaccuauu

SEQ ID NO: 47838 - RNA, 19 nt, Human
aucuuuagggauguggcuu

SEQ ID NO: 47839 - RNA, 22 nt, Human
aucuuuagucaggcguggguau

SEQ ID NO: 47840 - RNA, 22 nt, Human
aucuuugaugacuaaugcuuug

SEQ ID NO: 47841 - RNA, 22 nt, Human
aucuuuggaucgcucccccuuc

SEQ ID NO: 47842 - RNA, 22 nt, Human
aucuuugggcaaugaugaggga

SEQ ID NO: 47843 - RNA, 22 nt, Human
aucuuugguacuauucuuauca

SEQ ID NO: 47844 - RNA, 22 nt, Human
aucuuuguugcucucauuucug

SEQ ID NO: 47845 - RNA, 22 nt, Human
aucuuuuacauuacugcccaga

SEQ ID NO: 47846 - RNA, 22 nt, Human
aucuuuuaugagcguucugaca

SEQ ID NO: 47847 - RNA, 22 nt, Human
aucuuuuuaucuguuuggaaca

SEQ ID NO: 47848 - RNA, 22 nt, Human
augaaaaguucgaucuagaagg

SEQ ID NO: 47849 - RNA, 22 nt, Human
augaaaauguacauguguauaa

SEQ ID NO: 47850 - RNA, 22 nt, Human
augaaaauugacagcggaagua

SEQ ID NO: 47851 - RNA, 22 nt, Human
augaaacaaaccucuauggagu

SEQ ID NO: 47852 - RNA, 22 nt, Human
augaaacagaguacuuaauaua

SEQ ID NO: 47853 - RNA, 22 nt, Human
augaaacagugaauuagucaag

SEQ ID NO: 47854 - RNA, 23 nt, Human
augaaacaucacaaugguaccau

SEQ ID NO: 47855 - RNA, 22 nt, Human
augaaacaugagaaauggagag

SEQ ID NO: 47856 - RNA, 22 nt, Human
augaaagcacgugggaagauaa

SEQ ID NO: 47857 - RNA, 22 nt, Human
augaaagcucagugcacugaca

SEQ ID NO: 47858 - RNA, 22 nt, Human
augaaaguaccuguaauauguu

SEQ ID NO: 47859 - RNA, 23 nt, Human
augaaaguucuuaaaaugucaug

SEQ ID NO: 47860 - RNA, 22 nt, Human
augaaaugagucaaugcgacua

SEQ ID NO: 47861 - RNA, 23 nt, Human
augaaaugauacuuuauucacug

SEQ ID NO: 47862 - RNA, 22 nt, Human
cagaggucuccaucacccuccu

SEQ ID NO: 47863 - RNA, 22 nt, Human
cagaggucugaugcgucccugc

SEQ ID NO: 47864 - RNA, 22 nt, Human
cagaggugcauacaggucauua

SEQ ID NO: 47865 - RNA, 22 nt, Human
cagaguacauaggagcaaauca

SEQ ID NO: 47866 - RNA, 22 nt, Human
cagaguaucccuuuagaauuaa

SEQ ID NO: 47867 - RNA, 22 nt, Human
cagagucaauguccaagaagcu

SEQ ID NO: 47868 - RNA, 22 nt, Human
cagagucagcuagucuugggau

SEQ ID NO: 47869 - RNA, 22 nt, Human
cagagucauaucagagaauaug

SEQ ID NO: 47870 - RNA, 22 nt, Human
cagagucauugacuuccaggag

SEQ ID NO: 47871 - RNA, 22 nt, Human
cagaguccugcaccagcuccag

SEQ ID NO: 47872 - RNA, 22 nt, Human
cagagucuggacugcaggcucc

SEQ ID NO: 47873 - RNA, 17 nt, Human
cagagucugucugcauc

SEQ ID NO: 47874 - RNA, 22 nt, Human
cagagugaacagugggaugugc

SEQ ID NO: 47875 - RNA, 22 nt, Human
cagagugagggccugcaccugc

SEQ ID NO: 47876 - RNA, 22 nt, Human
cagagugauaaauauagaaauu

SEQ ID NO: 47877 - RNA, 22 nt, Human
cagaguggaguuuuucagcggg

SEQ ID NO: 47878 - RNA, 22 nt, Human
cagaguggcgacccccucagcu

SEQ ID NO: 47879 - RNA, 18 nt, Human
cagagugggccaagagac

SEQ ID NO: 47880 - RNA, 16 nt, Human
cagaguguaaacagga

SEQ ID NO: 47881 - RNA, 22 nt, Human
cagaguguuucuuugggugggu

SEQ ID NO: 47882 - RNA, 22 nt, Human
cagaguuuaaacaaaugaaaua

SEQ ID NO: 47883 - RNA, 22 nt, Human
cagaguuucgguaagcauagaa

SEQ ID NO: 47884 - RNA, 22 nt, Human
cagauaaauagauagauaaacu

SEQ ID NO: 47885 - RNA, 22 nt, Human
cagauaauccaaguaguuuuca

SEQ ID NO: 47886 - RNA, 22 nt, Human
cagauacagcuagcuccguggc

SEQ ID NO: 47887 - RNA, 22 nt, Human
cagauacuguaaaauuucagua

SEQ ID NO: 47888 - RNA, 22 nt, Human
cagauagaaugcaagaccucuc

SEQ ID NO: 47889 - RNA, 22 nt, Human
cagauauaaauggaugugguag

SEQ ID NO: 47890 - RNA, 22 nt, Human
cagauauauuuuauuuggucaa

SEQ ID NO: 47891 - RNA, 22 nt, Human
cagauaugcugagacuccugug

SEQ ID NO: 47892 - RNA, 22 nt, Human
cagauauuaggagcucaauaau

SEQ ID NO: 47893 - RNA, 22 nt, Human
cagaucaaacaaaauggguuag

SEQ ID NO: 47894 - RNA, 22 nt, Human
cagaucauaacagauacauaga

SEQ ID NO: 47895 - RNA, 22 nt, Human
cagaucaugggacugucucagc

SEQ ID NO: 47896 - RNA, 22 nt, Human
cagauccacccuuguagugaca

SEQ ID NO: 47897 - RNA, 22 nt, Human
cagaucuagagcuuuuccaucu

SEQ ID NO: 47898 - RNA, 22 nt, Human
cagaucugagccaagcucgaug

SEQ ID NO: 47899 - RNA, 22 nt, Human
cagaucugcuccucuguccaug

SEQ ID NO: 47900 - RNA, 22 nt, Human
cagaucuguaguaaaagaucuc

SEQ ID NO: 47901 - RNA, 22 nt, Human
cagaugaagaucauagaauagu

SEQ ID NO: 47902 - RNA, 22 nt, Human
cagaugaaguuugccuagagcu

SEQ ID NO: 47903 - RNA, 18 nt, Human
cagaugagaugcaaucuc

SEQ ID NO: 47904 - RNA, 22 nt, Human
cagaugaggcaaccucauugcu

SEQ ID NO: 47905 - RNA, 23 nt, Human
cagaugagguuggcagcaugguc

SEQ ID NO: 47906 - RNA, 22 nt, Human
cagaugcaggucugcucaccug

SEQ ID NO: 47907 - RNA, 22 nt, Human
cagaugcuuuugauucuggggu

SEQ ID NO: 47908 - RNA, 22 nt, Human
cagauggaaggcauagagguuu

SEQ ID NO: 47909 - RNA, 22 nt, Human
cagauggaggauaaaacaugca

SEQ ID NO: 47910 - RNA, 22 nt, Human
cagauggcacagauuuagagug

SEQ ID NO: 47911 - RNA, 22 nt, Human
cagauggcauuuccuuucuggc

SEQ ID NO: 47912 - RNA, 19 nt, Human
cagauggccaccuacuugc

SEQ ID NO: 47913 - RNA, 22 nt, Human
cagauguaaucugacagcugga

SEQ ID NO: 47914 - RNA, 22 nt, Human
cagauguaauuacucaagucaa

SEQ ID NO: 47915 - RNA, 22 nt, Human
cagauguacaugaagggcaaug

SEQ ID NO: 47916 - RNA, 22 nt, Human
cagauuaagugcucaacagugu

SEQ ID NO: 47917 - RNA, 22 nt, Human
cagauucugcagucaacuugcu

SEQ ID NO: 47918 - RNA, 22 nt, Human
cagauucuucauugccccauuc

SEQ ID NO: 47919 - RNA, 22 nt, Human
auggccucuagcugagaccaau

SEQ ID NO: 47920 - RNA, 22 nt, Human
auggccugaugcaccuguccca

SEQ ID NO: 47921 - RNA, 22 nt, Human
auggccugcagugcugccacag

SEQ ID NO: 47922 - RNA, 22 nt, Human
auggcuaauacgccacuggaca

SEQ ID NO: 47923 - RNA, 18 nt, Human
auggcucaggaauggcuu

SEQ ID NO: 47924 - RNA, 21 nt, Human
auggcucaggccaucaaugga

SEQ ID NO: 47925 - RNA, 22 nt, Human
auggcuccauccuguugcuagu

SEQ ID NO: 47926 - RNA, 22 nt, Human
auggcucucuagggcccagguu

SEQ ID NO: 47927 - RNA, 22 nt, Human
auggcucucuccuuacugcugc

SEQ ID NO: 47928 - RNA, 22 nt, Human
auggcucucuugaccuaggcac

SEQ ID NO: 47929 - RNA, 19 nt, Human
auggcucugggaucacugc

SEQ ID NO: 47930 - RNA, 22 nt, Human
auggcugcagagaccugaagaa

SEQ ID NO: 47931 - RNA, 22 nt, Human
auggcugcagccggcccugcgc

SEQ ID NO: 47932 - RNA, 22 nt, Human
auggcugcccacguuggugcuu

SEQ ID NO: 47933 - RNA, 22 nt, Human
auggcugccccaaauuguugcu

SEQ ID NO: 47934 - RNA, 22 nt, Human
auggcugccuagaggugagaug

SEQ ID NO: 47935 - RNA, 22 nt, Human
auggcugccuuaauucuucagc

SEQ ID NO: 47936 - RNA, 22 nt, Human
auggcugcucuggauggagucc

SEQ ID NO: 47937 - RNA, 22 nt, Human
auggcuggcacuggccuggguu

SEQ ID NO: 47938 - RNA, 22 nt, Human
auggcuggcauccaggugggcu

SEQ ID NO: 47939 - RNA, 22 nt, Human
auggcugggauuuccuuugcgu

SEQ ID NO: 47940 - RNA, 22 nt, Human
auggcuggucucccauggaaaa

SEQ ID NO: 47941 - RNA, 22 nt, Human
auggcuggugauacuggaguga

SEQ ID NO: 47942 - RNA, 21 nt, Human
auggcugguggcucagccucc

SEQ ID NO: 47943 - RNA, 22 nt, Human
auggcuguagucaucugaaggc

SEQ ID NO: 47944 - RNA, 22 nt, Human
auggcugugaaggucacacccu

SEQ ID NO: 47945 - RNA, 22 nt, Human
auggcugugagacaaagagcug

SEQ ID NO: 47946 - RNA, 19 nt, Human
auggcuguguuccaguaaa

SEQ ID NO: 47947 - RNA, 22 nt, Human
auggcuguuuugugacuucuca

SEQ ID NO: 47948 - RNA, 22 nt, Human
auggcuuaugaauaacaguagg

SEQ ID NO: 47949 - RNA, 22 nt, Human
auggcuuccaaggcccuccgug

SEQ ID NO: 47950 - RNA, 22 nt, Human
auggcuucgaguauauacauag

SEQ ID NO: 47951 - RNA, 22 nt, Human
auggcuucuagcauugucacaa

SEQ ID NO: 47952 - RNA, 18 nt, Human
auggcuucugaguggagg

SEQ ID NO: 47953 - RNA, 22 nt, Human
auggcuucugucuuggaaacuu

SEQ ID NO: 47954 - RNA, 22 nt, Human
auggcuugauagaaagcuaguu

SEQ ID NO: 47955 - RNA, 22 nt, Human
auggcuuuguuccaauaaaacu

SEQ ID NO: 47956 - RNA, 22 nt, Human
augggacacguuuuaaggaaaa

SEQ ID NO: 47957 - RNA, 22 nt, Human
augggagaggguaggaauuacu

SEQ ID NO: 47958 - RNA, 22 nt, Human
augggagccaucgcauuugcug

SEQ ID NO: 47959 - RNA, 22 nt, Human
augggaggaucacuugaggcca

SEQ ID NO: 47960 - RNA, 22 nt, Human
augggaggcagacacuaaguuc

SEQ ID NO: 47961 - RNA, 22 nt, Human
augggaggcagcagagcccagc

SEQ ID NO: 47962 - RNA, 22 nt, Human
augggagugugguuagagaccu

SEQ ID NO: 47963 - RNA, 22 nt, Human
augggaugaucaccugagcuca

SEQ ID NO: 47964 - RNA, 22 nt, Human
augggcagacagggagcucacg

SEQ ID NO: 47965 - RNA, 22 nt, Human
augggcagaguggggacaggaa

SEQ ID NO: 47966 - RNA, 22 nt, Human
augggcaggcacuggcucucag

SEQ ID NO: 47967 - RNA, 22 nt, Human
augggcaggccucucauuucug

SEQ ID NO: 47968 - RNA, 22 nt, Human
augggcagggcaguguauaaga

SEQ ID NO: 47969 - RNA, 18 nt, Human
augggcagguaagaucca

SEQ ID NO: 47970 - RNA, 22 nt, Human
augggcaguaacaguggcaguc

SEQ ID NO: 47971 - RNA, 16 nt, Human
augggcagugaggaag

SEQ ID NO: 47972 - RNA, 22 nt, Human
augggccaaguaaacauucuca

SEQ ID NO: 47973 - RNA, 22 nt, Human
augggccacacacgauugggug

SEQ ID NO: 47974 - RNA, 22 nt, Human
augggccagcaccauguuaagc

SEQ ID NO: 47975 - RNA, 22 nt, Human
augggccaggcuugggaugaca

SEQ ID NO: 47976 - RNA, 21 nt, Human
augggccagggauacagagag

SEQ ID NO: 47977 - RNA, 22 nt, Human
augggccuguuccuaugcuggu

SEQ ID NO: 47978 - RNA, 22 nt, Human
augggcugaaagaguaagcugu

SEQ ID NO: 47979 - RNA, 22 nt, Human
augggcugacccagucguggca

SEQ ID NO: 47980 - RNA, 22 nt, Human
cagcagcagacauuugaucuuc

SEQ ID NO: 47981 - RNA, 22 nt, Human
cagcagcagccccaggaagguu

SEQ ID NO: 47982 - RNA, 22 nt, Human
cagcagcaguggcugcagaaca

SEQ ID NO: 47983 - RNA, 22 nt, Human
cagcagcaugaauucgagccac

SEQ ID NO: 47984 - RNA, 22 nt, Human
cagcagcauugcucuggauucc

SEQ ID NO: 47985 - RNA, 20 nt, Human
cagcagccaaacuucuauuc

SEQ ID NO: 47986 - RNA, 22 nt, Human
cagcagccacuagagggcucac

SEQ ID NO: 47987 - RNA, 22 nt, Human
cagcagccauguaccacacuca

SEQ ID NO: 47988 - RNA, 22 nt, Human
cagcagccgagagggggcucug

SEQ ID NO: 47989 - RNA, 22 nt, Human
cagcagccucaaguuuauuuuc

SEQ ID NO: 47990 - RNA, 22 nt, Human
cagcagccuccacucgccccac

SEQ ID NO: 47991 - RNA, 22 nt, Human
cagcagccugccuugggagcuu

SEQ ID NO: 47992 - RNA, 22 nt, Human
cagcagcuaccugcucuugugg

SEQ ID NO: 47993 - RNA, 22 nt, Human
cagcagcugcaaauggaaacag

SEQ ID NO: 47994 - RNA, 23 nt, Human
cagcagcugccugguuuuuuggu

SEQ ID NO: 47995 - RNA, 22 nt, Human
cagcagcugguuauaccugugg

SEQ ID NO: 47996 - RNA, 22 nt, Human
cagcaggacccaggaauccugc

SEQ ID NO: 47997 - RNA, 22 nt, Human
cagcaggacguccaagugcuau

SEQ ID NO: 47998 - RNA, 22 nt, Human
cagcaggauaugguggagagag

SEQ ID NO: 47999 - RNA, 22 nt, Human
cagcaggauuugaaaggaagag

SEQ ID NO: 48000 - RNA, 22 nt, Human
cagcaggcaggugggccaaguc

SEQ ID NO: 48001 - RNA, 22 nt, Human
cagcaggcucugaguggcugcc

SEQ ID NO: 48002 - RNA, 22 nt, Human
cagcagggcccccgggugcgcc

SEQ ID NO: 48003 - RNA, 22 nt, Human
cagcaggggugucauuguaguu

SEQ ID NO: 48004 - RNA, 22 nt, Human
cagcaggguuaagugacucacc

SEQ ID NO: 48005 - RNA, 22 nt, Human
cagcaggugcugccugucaccc

SEQ ID NO: 48006 - RNA, 22 nt, Human
cagcagguggacacacucaccu

SEQ ID NO: 48007 - RNA, 22 nt, Human
cagcagguucuacgggugagau

SEQ ID NO: 48008 - RNA, 22 nt, Human
cagcaguagucucuguggcuuu

SEQ ID NO: 48009 - RNA, 22 nt, Human
cagcagucaggcaaaugggagg

SEQ ID NO: 48010 - RNA, 22 nt, Human
cagcagucccugcaguggggaa

SEQ ID NO: 48011 - RNA, 22 nt, Human
cagcaguggaacuacccaggga

SEQ ID NO: 48012 - RNA, 22 nt, Human
cagcaguguacaaggugucaga

SEQ ID NO: 48013 - RNA, 22 nt, Human
cagcagugucuccagcaucaca

SEQ ID NO: 48014 - RNA, 21 nt, Human
cagcagugugucugagcuaga

SEQ ID NO: 48015 - RNA, 22 nt, Human
cagcaguugaaauugacaugug

SEQ ID NO: 48016 - RNA, 22 nt, Human
cagcaguuuccuaugguucagc

SEQ ID NO: 48017 - RNA, 22 nt, Human
cagcaguuuugaaguguggaga

SEQ ID NO: 48018 - RNA, 22 nt, Human
cagcauaggacaggguuucauc

SEQ ID NO: 48019 - RNA, 22 nt, Human
cagcaucccagagcccagagcu

SEQ ID NO: 48020 - RNA, 22 nt, Human
cagcaucucacuucccagaagg

SEQ ID NO: 48021 - RNA, 22 nt, Human
cagcaucuccugugcagaggga

SEQ ID NO: 48022 - RNA, 22 nt, Human
cagcaucuggauuuccuccacu

SEQ ID NO: 48023 - RNA, 22 nt, Human
cagcaucuguauccuaggcuga

SEQ ID NO: 48024 - RNA, 22 nt, Human
cagcaucuguucccaacgagau

SEQ ID NO: 48025 - RNA, 22 nt, Human
cagcaucuguuggauggauaag

SEQ ID NO: 48026 - RNA, 22 nt, Human
cagcaucuuucucuucuggagu

SEQ ID NO: 48027 - RNA, 22 nt, Human
cagcaugacagucugcagcaga

SEQ ID NO: 48028 - RNA, 22 nt, Human
ucaguaguuuugaucugagcag

SEQ ID NO: 48029 - RNA, 22 nt, Human
ucaguauagcuucuaaacuaac

SEQ ID NO: 48030 - RNA, 22 nt, Human
ucaguaucuacuaucuugauga

SEQ ID NO: 48031 - RNA, 22 nt, Human
ucagucaugaccauggggugga

SEQ ID NO: 48032 - RNA, 21 nt, Human
ucagucauugccuccuucugg

SEQ ID NO: 48033 - RNA, 22 nt, Human
ucaguccacuaagacccuuguu

SEQ ID NO: 48034 - RNA, 22 nt, Human
ucaguccaggauugggagugac

SEQ ID NO: 48035 - RNA, 22 nt, Human
ucaguccccagaugugugcugu

SEQ ID NO: 48036 - RNA, 22 nt, Human
ucagucccuaaggauaugggcu

SEQ ID NO: 48037 - RNA, 21 nt, Human
ucagucccuggguguguccca

SEQ ID NO: 48038 - RNA, 22 nt, Human
ucagucccuuaaagguggcagc

SEQ ID NO: 48039 - RNA, 22 nt, Human
ucagucccuucuccaggucagc

SEQ ID NO: 48040 - RNA, 22 nt, Human
ucaguccuauccaaacuauaua

SEQ ID NO: 48041 - RNA, 22 nt, Human
ucaguccucacuugguucuaag

SEQ ID NO: 48042 - RNA, 23 nt, Human
ucaguccuguaggggcuccaggu

SEQ ID NO: 48043 - RNA, 21 nt, Human
ucaguccuguuagccuuuggg

SEQ ID NO: 48044 - RNA, 22 nt, Human
ucagucucuggggcuucuguuu

SEQ ID NO: 48045 - RNA, 17 nt, Human
ucagucucuguccugga

SEQ ID NO: 48046 - RNA, 23 nt, Human
ucagucuucccugucaguaauag

SEQ ID NO: 48047 - RNA, 22 nt, Human
ucagucuucuagcaaauccagg

SEQ ID NO: 48048 - RNA, 22 nt, Human
ucagucuugcuucucuuggguc

SEQ ID NO: 48049 - RNA, 22 nt, Human
ucagucuuucccucccucaguu

SEQ ID NO: 48050 - RNA, 22 nt, Human
ucagucuuugcuuaugacaaua

SEQ ID NO: 48051 - RNA, 22 nt, Human
ucagugaaaugcauauucuucg

SEQ ID NO: 48052 - RNA, 22 nt, Human
ucagugaaccuucuguggcagg

SEQ ID NO: 48053 - RNA, 20 nt, Human
ucagugauuaucucugagug

SEQ ID NO: 48054 - RNA, 23 nt, Human
ucagugcaaaaauaggauuuugg

SEQ ID NO: 48055 - RNA, 22 nt, Human
ucagugcagggugggagagaga

SEQ ID NO: 48056 - RNA, 22 nt, Human
ucagugcaucacagaacuuugu

SEQ ID NO: 48057 - RNA, 22 nt, Human
ucagugccaauucugccauggg

SEQ ID NO: 48058 - RNA, 22 nt, Human
ucagugccaguuugcuccuucu

SEQ ID NO: 48059 - RNA, 22 nt, Human
ucagugcucaggggagccgagg

SEQ ID NO: 48060 - RNA, 22 nt, Human
ucagugcuuauauucugagccu

SEQ ID NO: 48061 - RNA, 22 nt, Human
ucagugcuuuugagaagcuccu

SEQ ID NO: 48062 - RNA, 22 nt, Human
ucaguggucuaggcaauauaua

SEQ ID NO: 48063 - RNA, 22 nt, Human
ucaguggucuuggcugauuguu

SEQ ID NO: 48064 - RNA, 21 nt, Human
ucaguguauuuaagaauguug

SEQ ID NO: 48065 - RNA, 22 nt, Human
ucagugucacaggaugcuaugc

SEQ ID NO: 48066 - RNA, 22 nt, Human
ucagugucauaucaagaagaug

SEQ ID NO: 48067 - RNA, 22 nt, Human
ucaguguccggagccugagugc

SEQ ID NO: 48068 - RNA, 22 nt, Human
ucagugucuauagauaagguuu

SEQ ID NO: 48069 - RNA, 22 nt, Human
ucagugucugugggcaggaugg

SEQ ID NO: 48070 - RNA, 22 nt, Human
ucagugucuucucuuuccuacc

SEQ ID NO: 48071 - RNA, 22 nt, Human
ucagugugacugauggcuuuau

SEQ ID NO: 48072 - RNA, 22 nt, Human
ucagugugaggucuuccacccg

SEQ ID NO: 48073 - RNA, 22 nt, Human
ucagugugaguaccaugcucag

SEQ ID NO: 48074 - RNA, 23 nt, Human
ucagugugcaagaauggagaagc

SEQ ID NO: 48075 - RNA, 22 nt, Human
ucaguguggguaagcaugcugu

SEQ ID NO: 48076 - RNA, 22 nt, Human
ucaguguguuauucuacuuuca

SEQ ID NO: 48077 - RNA, 22 nt, Human
ucaguguuaaucagugguaccu

SEQ ID NO: 48078 - RNA, 22 nt, Human
ucaguguuagacaaguuuggaa

SEQ ID NO: 48079 - RNA, 22 nt, Human
ucaguguucuggauuuggggca

SEQ ID NO: 48080 - RNA, 22 nt, Human
ucaguguucuuauuuaauuagg

SEQ ID NO: 48081 - RNA, 22 nt, Human
ucaguguuggagauaauugcac

SEQ ID NO: 48082 - RNA, 22 nt, Human
ucaguguuggucaagaaucagu

SEQ ID NO: 48083 - RNA, 22 nt, Human
ucaguguuuacaugcauccuug

SEQ ID NO: 48084 - RNA, 22 nt, Human
ucaguguuuccuagagcauaua

SEQ ID NO: 48085 - RNA, 22 nt, Human
ucaguguuuccugugguacagc

SEQ ID NO: 48086 - RNA, 22 nt, Human
ucaguuaacaacuauuuauuga

SEQ ID NO: 48087 - RNA, 20 nt, Human
ucaguuaaguugcugaaucu

SEQ ID NO: 48088 - RNA, 22 nt, Human
ucaguuaauauggguaaagcau

SEQ ID NO: 48089 - RNA, 22 nt, Human
ucaguuaccugacagugguuau

SEQ ID NO: 48090 - RNA, 22 nt, Human
ucaguuacucaacagaggugga

SEQ ID NO: 48091 - RNA, 22 nt, Human
ucaguuacucugauguccugug

SEQ ID NO: 48092 - RNA, 22 nt, Human
ucaguuagggccucagaagaca

SEQ ID NO: 48093 - RNA, 23 nt, Human
ucaguuauuggugauaaagcugg

SEQ ID NO: 48094 - RNA, 22 nt, Human
ucaguucaguauacacuauucu

SEQ ID NO: 48095 - RNA, 21 nt, Human
ucaguuccuaagggaggccgc

SEQ ID NO: 48096 - RNA, 22 nt, Human
ucaguucuaagugcuuuacaug

SEQ ID NO: 48097 - RNA, 22 nt, Human
ucaguucugcuagaaaaacagu

SEQ ID NO: 48098 - RNA, 22 nt, Human
ucaguugcaugggaaguucaga

SEQ ID NO: 48099 - RNA, 22 nt, Human
ucaguugcuagaagggggaacc

SEQ ID NO: 48100 - RNA, 22 nt, Human
ucaguugcuguguaauguuuuc

SEQ ID NO: 48101 - RNA, 22 nt, Human
ucaguuuagaguuauuuaaucu

SEQ ID NO: 48102 - RNA, 22 nt, Human
ucaguuuauagauauugcugau

SEQ ID NO: 48103 - RNA, 22 nt, Human
ucaguuuccugguuuugacauu

SEQ ID NO: 48104 - RNA, 22 nt, Human
ucaguuucuccaucgcuccagu

SEQ ID NO: 48105 - RNA, 22 nt, Human
ucaguuucuuuacucauagaau

SEQ ID NO: 48106 - RNA, 22 nt, Human
ucaguuugaauguuagcacagu

SEQ ID NO: 48107 - RNA, 22 nt, Human
ucaguuuuuaaaugauauaauu

SEQ ID NO: 48108 - RNA, 22 nt, Human
ucaguuuuuaagaguuaugcga

SEQ ID NO: 48109 - RNA, 22 nt, Human
ucauaaaaguacucauguucau

SEQ ID NO: 48110 - RNA, 22 nt, Human
ucauaaagauacuaagugaguu

SEQ ID NO: 48111 - RNA, 22 nt, Human
ucauaaagcucuuccaaaugua

SEQ ID NO: 48112 - RNA, 22 nt, Human
ucauaaagugaaggaugauggg

SEQ ID NO: 48113 - RNA, 22 nt, Human
ucauaaaguuacccaaauuuua

SEQ ID NO: 48114 - RNA, 22 nt, Human
ucauaaauauuugugggggcuu

SEQ ID NO: 48115 - RNA, 22 nt, Human
ucauaaaugcagugucauaaau

SEQ ID NO: 48116 - RNA, 22 nt, Human
ucauaaauuaucuauuuggcua

SEQ ID NO: 48117 - RNA, 22 nt, Human
ucauaacacuggugauuaagaa

SEQ ID NO: 48118 - RNA, 22 nt, Human
ucauaacaggcugagaggauuu

SEQ ID NO: 48119 - RNA, 22 nt, Human
ucauaauuguauacauuuaugg

SEQ ID NO: 48120 - RNA, 22 nt, Human
ucauacaacuaagaguuucaga

SEQ ID NO: 48121 - RNA, 22 nt, Human
ucauacaagaucacuuuggcca

SEQ ID NO: 48122 - RNA, 22 nt, Human
ucauacacaagagcauguaaca

SEQ ID NO: 48123 - RNA, 20 nt, Human
ucauacacaugagcaugcag

SEQ ID NO: 48124 - RNA, 22 nt, Human
ucauagaaauggaaaguauauu

SEQ ID NO: 48125 - RNA, 22 nt, Human
ucauagaagcaccagaagauau

SEQ ID NO: 48126 - RNA, 22 nt, Human
ucauagaagcacucagcucccu

SEQ ID NO: 48127 - RNA, 22 nt, Human
ucauagaugugcugugcacaaa

SEQ ID NO: 48128 - RNA, 22 nt, Human
ucauaguuauggagauuaagga

SEQ ID NO: 48129 - RNA, 22 nt, Human
ucauauaagagcuuuagaguca

SEQ ID NO: 48130 - RNA, 22 nt, Human
ucauauacugccuuguagauua

SEQ ID NO: 48131 - RNA, 22 nt, Human
ucauauuuauauguuggcacag

SEQ ID NO: 48132 - RNA, 22 nt, Human
ucauauuucaaaauggcuggag

SEQ ID NO: 48133 - RNA, 22 nt, Human
ucaucaaaggauugcaugauuu

SEQ ID NO: 48134 - RNA, 22 nt, Human
ucaucacaauuuuaugacccuc

SEQ ID NO: 48135 - RNA, 22 nt, Human
ucaucacauguguagucauccc

SEQ ID NO: 48136 - RNA, 22 nt, Human
ucaucacuguaucauugauaga

SEQ ID NO: 48137 - RNA, 22 nt, Human
gggagcaguuaaaaugauuccu

SEQ ID NO: 48138 - RNA, 22 nt, Human
gggagccaaggagagaggccuu

SEQ ID NO: 48139 - RNA, 22 nt, Human
gggagccagccauccagaaccu

SEQ ID NO: 48140 - RNA, 22 nt, Human
gggagccccaccucggugcccg

SEQ ID NO: 48141 - RNA, 22 nt, Human
gggagcuauuuauagaggcuga

SEQ ID NO: 48142 - RNA, 21 nt, Human
gggagcugacagcagcacggc

SEQ ID NO: 48143 - RNA, 22 nt, Human
gggagcugaccugcagguuccc

SEQ ID NO: 48144 - RNA, 22 nt, Human
gggagcugagggaccucugugg

SEQ ID NO: 48145 - RNA, 22 nt, Human
gggagcugccaccaccccuggg

SEQ ID NO: 48146 - RNA, 21 nt, Human
gggagcuggaaacugggugac

SEQ ID NO: 48147 - RNA, 20 nt, Human
gggagcuggaauugucuuag

SEQ ID NO: 48148 - RNA, 22 nt, Human
gggagcuggaucgcgcgcccgg

SEQ ID NO: 48149 - RNA, 22 nt, Human
gggagcuggccuacuauuagau

SEQ ID NO: 48150 - RNA, 22 nt, Human
gggagcuggcggauuccccagg

SEQ ID NO: 48151 - RNA, 22 nt, Human
gggagcuguaguccagauaccg

SEQ ID NO: 48152 - RNA, 22 nt, Human
gggagcugucaucaguguuguc

SEQ ID NO: 48153 - RNA, 23 nt, Human
gggagcuguggugaaaagaggug

SEQ ID NO: 48154 - RNA, 22 nt, Human
gggaggaaagagaaguggucca

SEQ ID NO: 48155 - RNA, 21 nt, Human
gggaggaagcugcuucucucu

SEQ ID NO: 48156 - RNA, 22 nt, Human
gggaggaaugcaacuuauuuag

SEQ ID NO: 48157 - RNA, 22 nt, Human
gggaggacgguccagggcaaag

SEQ ID NO: 48158 - RNA, 22 nt, Human
ucauccugaagaaccugcuucc

SEQ ID NO: 48159 - RNA, 22 nt, Human
ucauccuuuugcaugggaaggc

SEQ ID NO: 48160 - RNA, 22 nt, Human
ucaucucaaaacccaaggggca

SEQ ID NO: 48161 - RNA, 22 nt, Human
ucaucucuagacaggaggcugg

SEQ ID NO: 48162 - RNA, 22 nt, Human
ucaucucuuuuguauugggguu

SEQ ID NO: 48163 - RNA, 22 nt, Human
ucaucugaaauuguauauguag

SEQ ID NO: 48164 - RNA, 22 nt, Human
ucaucugaccacuuuaucucuc

SEQ ID NO: 48165 - RNA, 22 nt, Human
ucaucugaggcaccagagcaua

SEQ ID NO: 48166 - RNA, 22 nt, Human
ucaucugagguuugaggcaguu

SEQ ID NO: 48167 - RNA, 23 nt, Human
ucaucuguaacagccuaugaaau

SEQ ID NO: 48168 - RNA, 22 nt, Human
ucaucugucccaggcuuuuuuc

SEQ ID NO: 48169 - RNA, 22 nt, Human
ucaucugucugagagacuucug

SEQ ID NO: 48170 - RNA, 22 nt, Human
ucaucuguuauuuaugccugag

SEQ ID NO: 48171 - RNA, 22 nt, Human
ucaucuguucauacacaugcgu

SEQ ID NO: 48172 - RNA, 22 nt, Human
ucaucuuaggugaugagacagu

SEQ ID NO: 48173 - RNA, 22 nt, Human
ucaucuuccucauuucuccagg

SEQ ID NO: 48174 - RNA, 22 nt, Human
ucaucuuuaccccuugcuucaa

SEQ ID NO: 48175 - RNA, 22 nt, Human
ucaugaaaauagaucagaaauu

SEQ ID NO: 48176 - RNA, 20 nt, Human
ucaugaagccuacaaacauc

SEQ ID NO: 48177 - RNA, 22 nt, Human
ucaugaaucguggaaugauuua

SEQ ID NO: 48178 - RNA, 22 nt, Human
ucaugacaucuguuuaucucaa

SEQ ID NO: 48179 - RNA, 18 nt, Human
ucaugaggaaggagaaga

SEQ ID NO: 48180 - RNA, 22 nt, Human
ucaugaguggauuaauauggcu

SEQ ID NO: 48181 - RNA, 22 nt, Human
ucaugauuuccugguuaaggac

SEQ ID NO: 48182 - RNA, 22 nt, Human
ucaugcaacaacacauucuggc

SEQ ID NO: 48183 - RNA, 22 nt, Human
ucaugcaaggcugaaacauggu

SEQ ID NO: 48184 - RNA, 19 nt, Human
ucaugcaaucagugaacug

SEQ ID NO: 48185 - RNA, 22 nt, Human
ucaugcaaugagucaggaggca

SEQ ID NO: 48186 - RNA, 19 nt, Human
ucaugcacuuugauguaac

SEQ ID NO: 48187 - RNA, 23 nt, Human
ucaugcagccuggaaccucccag

SEQ ID NO: 48188 - RNA, 22 nt, Human
ucaugcaggaccaccccagcau

SEQ ID NO: 48189 - RNA, 22 nt, Human
ucaugcaggcagccuuuaguaa

SEQ ID NO: 48190 - RNA, 22 nt, Human
ucaugccagcuuugcuuguccc

SEQ ID NO: 48191 - RNA, 17 nt, Human
ucaugcccaacuauuac

SEQ ID NO: 48192 - RNA, 22 nt, Human
ucaugccugauuauguuacuca

SEQ ID NO: 48193 - RNA, 21 nt, Human
ucauggaaguaacaaacauau

SEQ ID NO: 48194 - RNA, 22 nt, Human
ucauggauggccgggaggugau

SEQ ID NO: 48195 - RNA, 22 nt, Human
ucauggcacuuagugucucaaa

SEQ ID NO: 48196 - RNA, 22 nt, Human
ucauggcauuguuaaggguuuu

SEQ ID NO: 48197 - RNA, 22 nt, Human
ucauggcuaaugcaguauauuc

SEQ ID NO: 48198 - RNA, 22 nt, Human
ucauggcugaaacaguaacaca

SEQ ID NO: 48199 - RNA, 20 nt, Human
ucauggcugcugagagguuc

SEQ ID NO: 48200 - RNA, 22 nt, Human
ucauggggaaagcccgcccuca

SEQ ID NO: 48201 - RNA, 22 nt, Human
ucaugggugcuccagguggcug

SEQ ID NO: 48202 - RNA, 22 nt, Human
ucaugguucaugaguguccuuu

SEQ ID NO: 48203 - RNA, 22 nt, Human
ucauguaaguauagaaagcagu

SEQ ID NO: 48204 - RNA, 21 nt, Human
ucauguaaugcaugaaguaaa

SEQ ID NO: 48205 - RNA, 22 nt, Human
ucauguacauguaagucagaaa

SEQ ID NO: 48206 - RNA, 22 nt, Human
ucauguauuugugauagaugac

SEQ ID NO: 48207 - RNA, 22 nt, Human
ucaugucaguuucuucuauaaa

SEQ ID NO: 48208 - RNA, 19 nt, Human
ucaugucucucaucuguga

SEQ ID NO: 48209 - RNA, 23 nt, Human
ucauguggaaaaggaucuggucu

SEQ ID NO: 48210 - RNA, 22 nt, Human
ucauguguguuucauguaugga

SEQ ID NO: 48211 - RNA, 22 nt, Human
ucauguugaauuaucguuccca

SEQ ID NO: 48212 - RNA, 22 nt, Human
ucauguuuuaguaaagugaagg

SEQ ID NO: 48213 - RNA, 22 nt, Human
ucauguuuuugccauaugacuc

SEQ ID NO: 48214 - RNA, 22 nt, Human
ucauuaaauguuuguugugcca

SEQ ID NO: 48215 - RNA, 22 nt, Human
ucauuaagaaaugaggaguccc

SEQ ID NO: 48216 - RNA, 20 nt, Human
ucauuacagugcuaagaugu

SEQ ID NO: 48217 - RNA, 22 nt, Human
ucauuacaucuuggccaaaacu

SEQ ID NO: 48218 - RNA, 22 nt, Human
ucauuauucucuuuaauguucu

SEQ ID NO: 48219 - RNA, 22 nt, Human
ucauucacugcccagcagugua

SEQ ID NO: 48220 - RNA, 22 nt, Human
ucauucagagagaauguuccag

SEQ ID NO: 48221 - RNA, 19 nt, Human
ucauucaggaccaguggau

SEQ ID NO: 48222 - RNA, 22 nt, Human
ucauucauaaaaauuaguuggc

SEQ ID NO: 48223 - RNA, 22 nt, Human
ucauucauugcuuacccugugu

SEQ ID NO: 48224 - RNA, 22 nt, Human
ucauuccuuauccguaucuuuu

SEQ ID NO: 48225 - RNA, 22 nt, Human
ucauucucagacucuuggccuc

SEQ ID NO: 48226 - RNA, 22 nt, Human
ucauucuggaugacuuucuaga

SEQ ID NO: 48227 - RNA, 22 nt, Human
ucauucuugcguaugccauggu

SEQ ID NO: 48228 - RNA, 19 nt, Human
ucauugaacauaauuacuu

SEQ ID NO: 48229 - RNA, 22 nt, Human
ucauugaagacuuacuggcuuc

SEQ ID NO: 48230 - RNA, 22 nt, Human
ucauugaagcauuuuguguauu

SEQ ID NO: 48231 - RNA, 22 nt, Human
ucauugaauauggggccauaca

SEQ ID NO: 48232 - RNA, 22 nt, Human
ucauugaauucuggggguugag

SEQ ID NO: 48233 - RNA, 22 nt, Human
ucauugagcuguauggacacaa

SEQ ID NO: 48234 - RNA, 22 nt, Human
ucauugcaccccagucccagcu

SEQ ID NO: 48235 - RNA, 22 nt, Human
ucauugcacuccagccugggca

SEQ ID NO: 48236 - RNA, 22 nt, Human
ucauugcagcuucagguguuca

SEQ ID NO: 48237 - RNA, 22 nt, Human
ucauugcaguagggagagaccc

SEQ ID NO: 48238 - RNA, 22 nt, Human
ucauugcauuuauucacuggca

SEQ ID NO: 48239 - RNA, 22 nt, Human
ucauuguuauguuuugcugucu

SEQ ID NO: 48240 - RNA, 22 nt, Human
ucauuguugacauaccaagagc

SEQ ID NO: 48241 - RNA, 21 nt, Human
ucauuguugcaugguaggggg

SEQ ID NO: 48242 - RNA, 19 nt, Human
ucauuguugguuugucggg

SEQ ID NO: 48243 - RNA, 22 nt, Human
ucauuuacaugucuuucucuga

SEQ ID NO: 48244 - RNA, 19 nt, Human
ucauuuacgguuuugauga

SEQ ID NO: 48245 - RNA, 22 nt, Human
ucauuuacuguaggagugaacc

SEQ ID NO: 48246 - RNA, 22 nt, Human
gugaaauuguauuuggcauuga

SEQ ID NO: 48247 - RNA, 19 nt, Human
gugaacaaggagaauggga

SEQ ID NO: 48248 - RNA, 22 nt, Human
gugaacaaggagacuacaacuu

SEQ ID NO: 48249 - RNA, 22 nt, Human
gugaacaguucauuuuaucaug

SEQ ID NO: 48250 - RNA, 22 nt, Human
gugaacugcugaguuuuaucau

SEQ ID NO: 48251 - RNA, 22 nt, Human
gugaacuuccagaugauaaaca

SEQ ID NO: 48252 - RNA, 22 nt, Human
gugaagagcuguugcagagauu

SEQ ID NO: 48253 - RNA, 22 nt, Human
gugaagaugccucaggugaccc

SEQ ID NO: 48254 - RNA, 22 nt, Human
gugaaggauaaggaucuaaauu

SEQ ID NO: 48255 - RNA, 22 nt, Human
gugaaggcagccaucgacaguu

SEQ ID NO: 48256 - RNA, 22 nt, Human
gugaaggccguccuuggggacu

SEQ ID NO: 48257 - RNA, 22 nt, Human
gugaaggcugugugaaaguucu

SEQ ID NO: 48258 - RNA, 22 nt, Human
gugaaggcuugacgucaucagg

SEQ ID NO: 48259 - RNA, 22 nt, Human
gugaagguagacugggcuuccu

SEQ ID NO: 48260 - RNA, 22 nt, Human
gugaagguggggagccucaguu

SEQ ID NO: 48261 - RNA, 22 nt, Human
gugaaguuuuaguauauguaga

SEQ ID NO: 48262 - RNA, 22 nt, Human
gugaauaaaacaccugccaaga

SEQ ID NO: 48263 - RNA, 22 nt, Human
gugaauaacuuucuauguuaau

SEQ ID NO: 48264 - RNA, 22 nt, Human
gugaauaaucacccuucuggau

SEQ ID NO: 48265 - RNA, 22 nt, Human
gugaauaugaucuuauuuggaa

SEQ ID NO: 48266 - RNA, 21 nt, Human
gugaauaugcagcagaggcag

SEQ ID NO: 48267 - RNA, 22 nt, Human
gugaaugacauauuuuguacug

SEQ ID NO: 48268 - RNA, 22 nt, Human
gugaauuuaguuuguaagaagg

SEQ ID NO: 48269 - RNA, 22 nt, Human
gugacaaaugcaaauugggcug

SEQ ID NO: 48270 - RNA, 22 nt, Human
gugacaauauuagcucaggggc

SEQ ID NO: 48271 - RNA, 22 nt, Human
gugacacugguuuagguaugua

SEQ ID NO: 48272 - RNA, 22 nt, Human
gugacagagugagacccugucu

SEQ ID NO: 48273 - RNA, 22 nt, Human
gugacagaguuuuagaucucau

SEQ ID NO: 48274 - RNA, 22 nt, Human
gugacagauuauagggagcguu

SEQ ID NO: 48275 - RNA, 22 nt, Human
gugacaugguuugccgucccug

SEQ ID NO: 48276 - RNA, 22 nt, Human
gugacauugcuaggaacagauu

SEQ ID NO: 48277 - RNA, 22 nt, Human
gugacauuuauuagaugcuuac

SEQ ID NO: 48278 - RNA, 22 nt, Human
gugaccagacagagucuagccc

SEQ ID NO: 48279 - RNA, 22 nt, Human
gugaccagugaugcugaggagu

SEQ ID NO: 48280 - RNA, 22 nt, Human
gugaccauaauagauuaugagu

SEQ ID NO: 48281 - RNA, 22 nt, Human
gugaccauccugguaaugaauc

SEQ ID NO: 48282 - RNA, 22 nt, Human
gugaccauuugacauauccuug

SEQ ID NO: 48283 - RNA, 23 nt, Human
gugacccaaggaccuuccagaau

SEQ ID NO: 48284 - RNA, 22 nt, Human
gugacccagaggcugacuaaca

SEQ ID NO: 48285 - RNA, 22 nt, Human
gugacgugcagguguggccagc

SEQ ID NO: 48286 - RNA, 22 nt, Human
gugacucucacuuuaccugacu

SEQ ID NO: 48287 - RNA, 22 nt, Human
gugacucuccacuaguaugaaa

SEQ ID NO: 48288 - RNA, 22 nt, Human
gugacuguuguuugcuacgugc

SEQ ID NO: 48289 - RNA, 22 nt, Human
gugagaaauggaacuucauacg

SEQ ID NO: 48290 - RNA, 22 nt, Human
gugagacacgugugugaccugg

SEQ ID NO: 48291 - RNA, 22 nt, Human
gugagacucgccuuuguguagc

SEQ ID NO: 48292 - RNA, 22 nt, Human
gugagagaaauuggagggaaug

SEQ ID NO: 48293 - RNA, 22 nt, Human
gugagagguuccuguuagaacu

SEQ ID NO: 48294 - RNA, 22 nt, Human
gugagcagggcaggacugggga

SEQ ID NO: 48295 - RNA, 22 nt, Human
gugagcaguggccaggguccua

SEQ ID NO: 48296 - RNA, 22 nt, Human
gugagccauucuacuccuaacc

SEQ ID NO: 48297 - RNA, 22 nt, Human
gugagccgaguauaguucauag

SEQ ID NO: 48298 - RNA, 22 nt, Human
gugagcguggucuucugugggu

SEQ ID NO: 48299 - RNA, 22 nt, Human
gugagcuuugugguaaugaagu

SEQ ID NO: 48300 - RNA, 22 nt, Human
gugaggauacuuaagagaacac

SEQ ID NO: 48301 - RNA, 22 nt, Human
gugaggaucaaaugaaauagca

SEQ ID NO: 48302 - RNA, 22 nt, Human
gugaggauugcucuggagaauu

SEQ ID NO: 48303 - RNA, 22 nt, Human
gugaggcagagaugccaaaacu

SEQ ID NO: 48304 - RNA, 22 nt, Human
gugagggauaauaugcgggguu

SEQ ID NO: 48305 - RNA, 22 nt, Human
gugagggcagaacccccaggcc

SEQ ID NO: 48306 - RNA, 22 nt, Human
gugaggggaguaaagccauguu

SEQ ID NO: 48307 - RNA, 22 nt, Human
gugaggggucuggacgcacagu

SEQ ID NO: 48308 - RNA, 22 nt, Human
gugagguaaaaucgguaagaug

SEQ ID NO: 48309 - RNA, 22 nt, Human
gugagguacaauuuuauacccu

SEQ ID NO: 48310 - RNA, 23 nt, Human
gugagguauauugaaaucaugcu

SEQ ID NO: 48311 - RNA, 22 nt, Human
gguaacaguuacaguaacagua

SEQ ID NO: 48312 - RNA, 22 nt, Human
gguaauaaaauugugucaaaca

SEQ ID NO: 48313 - RNA, 22 nt, Human
gguaauaagaucuguuacaugg

SEQ ID NO: 48314 - RNA, 17 nt, Human
gguacaaacccauuuuu

SEQ ID NO: 48315 - RNA, 23 nt, Human
gguaccagcacagaguggagagg

SEQ ID NO: 48316 - RNA, 22 nt, Human
gguagaaagauggaacguugaa

SEQ ID NO: 48317 - RNA, 22 nt, Human
gguagaaauaaucuucaggcug

SEQ ID NO: 48318 - RNA, 19 nt, Human
gguagaagggaaguguuuu

SEQ ID NO: 48319 - RNA, 23 nt, Human
gguagagccgcgcccugggggaa

SEQ ID NO: 48320 - RNA, 22 nt, Human
gguagcacauugcauuaggaga

SEQ ID NO: 48321 - RNA, 22 nt, Human
gguagcguuaucaauuugagug

SEQ ID NO: 48322 - RNA, 22 nt, Human
gguaggcacuggugggaagaga

SEQ ID NO: 48323 - RNA, 22 nt, Human
gguagggaaggcucugcgggga

SEQ ID NO: 48324 - RNA, 22 nt, Human
gguagggcaaaguagggcaccu

SEQ ID NO: 48325 - RNA, 22 nt, Human
gguagucaguguuaguuugauu

SEQ ID NO: 48326 - RNA, 22 nt, Human
gguaguucuucauggguuucau

SEQ ID NO: 48327 - RNA, 22 nt, Human
gguauacaagagcaauuuaggg

SEQ ID NO: 48328 - RNA, 22 nt, Human
gguauacugcaugacauugggg

SEQ ID NO: 48329 - RNA, 22 nt, Human
gguaugaauucacuacuuccaa

SEQ ID NO: 48330 - RNA, 21 nt, Human
gguauucugugucaccuuugg

SEQ ID NO: 48331 - RNA, 22 nt, Human
ggucaaaguugaagaagggcau

SEQ ID NO: 48332 - RNA, 22 nt, Human
ggucacaccccaaguacauucg

SEQ ID NO: 48333 - RNA, 19 nt, Human
ggucacagggguuacaagg

SEQ ID NO: 48334 - RNA, 22 nt, Human
ggucacaucuaaauggagcauu

SEQ ID NO: 48335 - RNA, 22 nt, Human
ggucacaugagaugcugcccuc

SEQ ID NO: 48336 - RNA, 22 nt, Human
ggucacaugcggggcuguagcc

SEQ ID NO: 48337 - RNA, 22 nt, Human
ggucacaugguugagcuugauc

SEQ ID NO: 48338 - RNA, 22 nt, Human
ggucacccaugaucacaucacc

SEQ ID NO: 48339 - RNA, 18 nt, Human
ggucacugagaugcuacu

SEQ ID NO: 48340 - RNA, 22 nt, Human
ggucacuggucucugcuuccau

SEQ ID NO: 48341 - RNA, 22 nt, Human
ggucagagaaaaguaggguguu

SEQ ID NO: 48342 - RNA, 22 nt, Human
ggucagagaugaggucuaaagu

SEQ ID NO: 48343 - RNA, 22 nt, Human
ggucagagccguuagcauucag

SEQ ID NO: 48344 - RNA, 22 nt, Human
ggucagaggaggaauaggacau

SEQ ID NO: 48345 - RNA, 22 nt, Human
ggucagcaauuuggacugggcu

SEQ ID NO: 48346 - RNA, 19 nt, Human
ggucagcaguuuagggucu

SEQ ID NO: 48347 - RNA, 22 nt, Human
ggucagcaucugguugagggca

SEQ ID NO: 48348 - RNA, 22 nt, Human
ggucagccccugcucaaggccg

SEQ ID NO: 48349 - RNA, 22 nt, Human
ggucaggaaaagacuccccaga

SEQ ID NO: 48350 - RNA, 19 nt, Human
ggucaggaauuugacaaua

SEQ ID NO: 48351 - RNA, 21 nt, Human
ggucagggggugccuccaggu

SEQ ID NO: 48352 - RNA, 22 nt, Human
ggucagugccuaucaugugggc

SEQ ID NO: 48353 - RNA, 22 nt, Human
ggucagugcgauuucccacucc

SEQ ID NO: 48354 - RNA, 22 nt, Human
ggucagugcugccagagugacc

SEQ ID NO: 48355 - RNA, 18 nt, Human
gguggcggggauggaggu

SEQ ID NO: 48356 - RNA, 22 nt, Human
gguggcucacgccuguaagccc

SEQ ID NO: 48357 - RNA, 22 nt, Human
gguggcucagugucaggcccug

SEQ ID NO: 48358 - RNA, 22 nt, Human
gguggcucggccagugcaggcc

SEQ ID NO: 48359 - RNA, 22 nt, Human
gguggcucguuuuucuugaaag

SEQ ID NO: 48360 - RNA, 19 nt, Human
gguggcucucccucaggga

SEQ ID NO: 48361 - RNA, 22 nt, Human
gguggcucuguugucaacugau

SEQ ID NO: 48362 - RNA, 22 nt, Human
gguggcugcaauggcuaacuuc

SEQ ID NO: 48363 - RNA, 22 nt, Human
gguggcugugagcauuauguga

SEQ ID NO: 48364 - RNA, 22 nt, Human
ggugggacagguaggaguggcu

SEQ ID NO: 48365 - RNA, 22 nt, Human
ggugggaguggaacguggaaga

SEQ ID NO: 48366 - RNA, 22 nt, Human
ggugggagugggcacaguuacg

SEQ ID NO: 48367 - RNA, 22 nt, Human
ggugggcacauucagucucugu

SEQ ID NO: 48368 - RNA, 22 nt, Human
ggugggcacccgagacuggauc

SEQ ID NO: 48369 - RNA, 22 nt, Human
ggugggcaggucacucugccuc

SEQ ID NO: 48370 - RNA, 22 nt, Human
gguggggccagggcuccaaccu

SEQ ID NO: 48371 - RNA, 22 nt, Human
gguggggucacgacagagggaa

SEQ ID NO: 48372 - RNA, 22 nt, Human
ggugggguuuuaggcugcugca

SEQ ID NO: 48373 - RNA, 22 nt, Human
ggugguguuuggaaggaggugc

SEQ ID NO: 48374 - RNA, 22 nt, Human
gguguaagaugucagcugagca

SEQ ID NO: 48375 - RNA, 22 nt, Human
gguguauaccuacacauuuuug

SEQ ID NO: 48376 - RNA, 17 nt, Human
gguguauggggagggaa

SEQ ID NO: 48377 - RNA, 22 nt, Human
ggugucacaggaggccgugugg

SEQ ID NO: 48378 - RNA, 22 nt, Human
ggugucagccugggagccuagc

SEQ ID NO: 48379 - RNA, 22 nt, Human
ggugucaggaaaaucucagugu

SEQ ID NO: 48380 - RNA, 20 nt, Human
ggugucagggccaugccugg

SEQ ID NO: 48381 - RNA, 22 nt, Human
ggugucaguugcucaucagagu

SEQ ID NO: 48382 - RNA, 21 nt, Human
gguguccagaggaguccccag

SEQ ID NO: 48383 - RNA, 22 nt, Human
gguguccuacagggccgcaggc

SEQ ID NO: 48384 - RNA, 19 nt, Human
gguguccuagagauaagag

SEQ ID NO: 48385 - RNA, 22 nt, Human
gguguccucacuauagcaaguc

SEQ ID NO: 48386 - RNA, 22 nt, Human
gguguccuucguccgcuggcau

SEQ ID NO: 48387 - RNA, 22 nt, Human
gguguccuugcagaaggcggcg

SEQ ID NO: 48388 - RNA, 22 nt, Human
gguguccuuguugaacgaaaau

SEQ ID NO: 48389 - RNA, 22 nt, Human
ggugucuggacagugagccagg

SEQ ID NO: 48390 - RNA, 22 nt, Human
ggugugaaauguucaguguuac

SEQ ID NO: 48391 - RNA, 22 nt, Human
ggugugccuggggcuuagcugc

SEQ ID NO: 48392 - RNA, 22 nt, Human
gguguggcugugaguuuuugau

SEQ ID NO: 48393 - RNA, 22 nt, Human
ggugugggggcagcucugauau

SEQ ID NO: 48394 - RNA, 22 nt, Human
ggugugggucagcuuuauuaau

SEQ ID NO: 48395 - RNA, 22 nt, Human
ggugugguuugaagggagaugg

SEQ ID NO: 48396 - RNA, 18 nt, Human
gguguguaacguguuuuc

SEQ ID NO: 48397 - RNA, 22 nt, Human
ggugugucugccaggaacugca

SEQ ID NO: 48398 - RNA, 22 nt, Human
ggugugugaggagucacuuagu

SEQ ID NO: 48399 - RNA, 22 nt, Human
gguguguguggauuagcaugcc

SEQ ID NO: 48400 - RNA, 22 nt, Human
gguguuaaacaugauccauuac

SEQ ID NO: 48401 - RNA, 22 nt, Human
gguguucuuaguggcacuggca

SEQ ID NO: 48402 - RNA, 22 nt, Human
gguguugcaguugaagacuggu

SEQ ID NO: 48403 - RNA, 22 nt, Human
gguguugggcucacugguccuu

SEQ ID NO: 48404 - RNA, 22 nt, Human
gguguuguacauucuguggauu

SEQ ID NO: 48405 - RNA, 19 nt, Human
gguguuucuucauuuucca

SEQ ID NO: 48406 - RNA, 22 nt, Human
gguuaaaaauaauuuacuuggc

SEQ ID NO: 48407 - RNA, 21 nt, Human
gguuacaacaguuaaacagag

SEQ ID NO: 48408 - RNA, 22 nt, Human
gguuacauggaagaaauauaau

SEQ ID NO: 48409 - RNA, 19 nt, Human
gguuaccagugugucuggc

SEQ ID NO: 48410 - RNA, 22 nt, Human
gguuacucaagccugccuucuc

SEQ ID NO: 48411 - RNA, 22 nt, Human
gguuagagggcaugcgaucuuu

SEQ ID NO: 48412 - RNA, 22 nt, Human
gguuauauaauucagugcuuuc

SEQ ID NO: 48413 - RNA, 19 nt, Human
gguuauuugaggguuaaga

SEQ ID NO: 48414 - RNA, 23 nt, Human
gguuauuugcauccuguaauuau

SEQ ID NO: 48415 - RNA, 22 nt, Human
gguuauuuugguugucuaaggc

SEQ ID NO: 48416 - RNA, 22 nt, Human
gguucacuccgaucucugccuc

SEQ ID NO: 48417 - RNA, 22 nt, Human
gguucacucucaagucugccua

SEQ ID NO: 48418 - RNA, 22 nt, Human
gguucagggaugugggugaugc

SEQ ID NO: 48419 - RNA, 17 nt, Human
gguucaguucugcauuc

SEQ ID NO: 48420 - RNA, 23 nt, Human
gguuccaggaacacagccugaug

SEQ ID NO: 48421 - RNA, 22 nt, Human
gguuccaggcauggcaggaugu

SEQ ID NO: 48422 - RNA, 22 nt, Human
gguuccuucugaggucccugua

SEQ ID NO: 48423 - RNA, 22 nt, Human
gguucuaggauuaggaggccca

SEQ ID NO: 48424 - RNA, 22 nt, Human
gguucucuaacuuugacuggag

SEQ ID NO: 48425 - RNA, 22 nt, Human
gguucugaaguggucccauucc

SEQ ID NO: 48426 - RNA, 22 nt, Human
gguucuuuggcagucugauuga

SEQ ID NO: 48427 - RNA, 22 nt, Human
gguucuuuguauauaucacuuu

SEQ ID NO: 48428 - RNA, 22 nt, Human
gguugaauaucuuuauguuggu

SEQ ID NO: 48429 - RNA, 16 nt, Human
ggugucagauguccag

SEQ ID NO: 48430 - RNA, 22 nt, Human
ggugucagugaagguagaguuu

SEQ ID NO: 48431 - RNA, 22 nt, Human
ggugucagugagagcacaguac

SEQ ID NO: 48432 - RNA, 21 nt, Human
ggugucaguuuuggucauuag

SEQ ID NO: 48433 - RNA, 22 nt, Human
gguguccaucaggcugugcuuc

SEQ ID NO: 48434 - RNA, 22 nt, Human
ggugucccaggccagcugugug

SEQ ID NO: 48435 - RNA, 22 nt, Human
gguguccuacugcuugguugcu

SEQ ID NO: 48436 - RNA, 22 nt, Human
gguguccuugcuccuucagcuu

SEQ ID NO: 48437 - RNA, 22 nt, Human
ggugucucagcugcuggcaggg

SEQ ID NO: 48438 - RNA, 22 nt, Human
ggugucugaugguggcuucuca

SEQ ID NO: 48439 - RNA, 22 nt, Human
ggugucugcuucccuccagcug

SEQ ID NO: 48440 - RNA, 22 nt, Human
ggugucugugauggcauauaac

SEQ ID NO: 48441 - RNA, 19 nt, Human
ggugugccaaaugggaaug

SEQ ID NO: 48442 - RNA, 22 nt, Human
ggugugccacuucacugagcag

SEQ ID NO: 48443 - RNA, 22 nt, Human
ggugugcuugggcuucgcaggg

SEQ ID NO: 48444 - RNA, 22 nt, Human
gguguggaucaucugaggucag

SEQ ID NO: 48445 - RNA, 22 nt, Human
ggugugggaacuacagguuuuu

SEQ ID NO: 48446 - RNA, 22 nt, Human
gguguggggagguucugcuucu

SEQ ID NO: 48447 - RNA, 22 nt, Human
ggugugggggcaaguuugagau

SEQ ID NO: 48448 - RNA, 22 nt, Human
gguguuaacaaagauugaaaug

SEQ ID NO: 48449 - RNA, 22 nt, Human
gguguuggaacauggugagauu

SEQ ID NO: 48450 - RNA, 22 nt, Human
gguguugggagagcugguuuug

SEQ ID NO: 48451 - RNA, 21 nt, Human
gguuaaaagacacaucuguuu

SEQ ID NO: 48452 - RNA, 20 nt, Human
gguuacauugucuacaugug

SEQ ID NO: 48453 - RNA, 22 nt, Human
gguuaggaucagauccuggagg

SEQ ID NO: 48454 - RNA, 22 nt, Human
gguuaucauaguuguuaucagg

SEQ ID NO: 48455 - RNA, 22 nt, Human
gguuauuaguuucaccuggacu

SEQ ID NO: 48456 - RNA, 22 nt, Human
gguuauuuuugauucuguggau

SEQ ID NO: 48457 - RNA, 22 nt, Human
gguucacacuuucaugauuuca

SEQ ID NO: 48458 - RNA, 22 nt, Human
gguucauucugaagucuucagc

SEQ ID NO: 48459 - RNA, 22 nt, Human
gguuccaccuggcgagggguau

SEQ ID NO: 48460 - RNA, 22 nt, Human
gguuccagaccacggguguucu

SEQ ID NO: 48461 - RNA, 22 nt, Human
gguuccagaguauuucauuuca

SEQ ID NO: 48462 - RNA, 22 nt, Human
gguuccagagugggcugggaaa

SEQ ID NO: 48463 - RNA, 22 nt, Human
gguuccugaucguugucucucu

SEQ ID NO: 48464 - RNA, 22 nt, Human
gguucuagugacacugaauuga

SEQ ID NO: 48465 - RNA, 20 nt, Human
ucugaacacaauauaucccc

SEQ ID NO: 48466 - RNA, 22 nt, Human
ucugaacaugaugucaucugga

SEQ ID NO: 48467 - RNA, 22 nt, Human
ucugaacauggcuuccucuuca

SEQ ID NO: 48468 - RNA, 22 nt, Human
guuguacagcauccagugcaga

SEQ ID NO: 48469 - RNA, 22 nt, Human
guugucuuagucagaaauaugc

SEQ ID NO: 48470 - RNA, 22 nt, Human
guugugcaaccaucaccaccau

SEQ ID NO: 48471 - RNA, 22 nt, Human
guugugcaccacuguugauuga

SEQ ID NO: 48472 - RNA, 22 nt, Human
guugugcagucagacugccugg

SEQ ID NO: 48473 - RNA, 22 nt, Human
guuguugaucacaugcauaucu

SEQ ID NO: 48474 - RNA, 22 nt, Human
guuuaauuuuagguugucaagc

SEQ ID NO: 48475 - RNA, 21 nt, Human
guuuacaaggcuuugcuccug

SEQ ID NO: 48476 - RNA, 22 nt, Human
guuuacacauaacuccuaucaa

SEQ ID NO: 48477 - RNA, 18 nt, Human
guuuacacauucuagaaa

SEQ ID NO: 48478 - RNA, 22 nt, Human
guuuacauguacucauuauacu

SEQ ID NO: 48479 - RNA, 22 nt, Human
guuuacauugcuguuugugucu

SEQ ID NO: 48480 - RNA, 22 nt, Human
guuuacugucuugcacagugca

SEQ ID NO: 48481 - RNA, 22 nt, Human
guuuacuguuaaccaacgaaug

SEQ ID NO: 48482 - RNA, 22 nt, Human
guuuagaauggcaaaauuaagu

SEQ ID NO: 48483 - RNA, 22 nt, Human
guuuagaccaaucauaauuuau

SEQ ID NO: 48484 - RNA, 22 nt, Human
guuuagaugagauuuuagaaca

SEQ ID NO: 48485 - RNA, 22 nt, Human
guuuauaaauucugcuuuuguu

SEQ ID NO: 48486 - RNA, 22 nt, Human
guuuauauucaacggaguaucu

SEQ ID NO: 48487 - RNA, 21 nt, Human
guuuaugaaucuuguccugcu

SEQ ID NO: 48488 - RNA, 22 nt, Human
guuuaugaauugcauucccuuu

SEQ ID NO: 48489 - RNA, 22 nt, Human
guuuauuauucaacuucauguu

SEQ ID NO: 48490 - RNA, 22 nt, Human
guuucaaaaugaugcuguaacu

SEQ ID NO: 48491 - RNA, 22 nt, Human
guuucaaagucagaaaaggagg

SEQ ID NO: 48492 - RNA, 22 nt, Human
guuucaauuugacccaaaucuu

SEQ ID NO: 48493 - RNA, 22 nt, Human
guuucacacauccugcacauag

SEQ ID NO: 48494 - RNA, 22 nt, Human
guuucacagggccauggaggaa

SEQ ID NO: 48495 - RNA, 22 nt, Human
guuucacagucugcagaauuuu

SEQ ID NO: 48496 - RNA, 22 nt, Human
guuucagaaaugguuuaugcaa

SEQ ID NO: 48497 - RNA, 22 nt, Human
guuucagaguuagugcuggcug

SEQ ID NO: 48498 - RNA, 22 nt, Human
guuucagauauauuuguacuua

SEQ ID NO: 48499 - RNA, 22 nt, Human
guuucaugccauuuccagauug

SEQ ID NO: 48500 - RNA, 22 nt, Human
guuucauggagagcugaauauu

SEQ ID NO: 48501 - RNA, 22 nt, Human
guuucauuaccugacccaugag

SEQ ID NO: 48502 - RNA, 22 nt, Human
guuuccacuuauaugguaccua

SEQ ID NO: 48503 - RNA, 22 nt, Human
guuuccagagaucauuuacaua

SEQ ID NO: 48504 - RNA, 22 nt, Human
guuuccagcuuucugaugcuug

SEQ ID NO: 48505 - RNA, 22 nt, Human
guuuccaggaaggguugggagg

SEQ ID NO: 48506 - RNA, 22 nt, Human
guuuccaggcugggcagcgagc

SEQ ID NO: 48507 - RNA, 22 nt, Human
guuuccauauuuuuagugccaa

SEQ ID NO: 48508 - RNA, 22 nt, Human
guuuccaucuccaggacauaau

SEQ ID NO: 48509 - RNA, 22 nt, Human
guuuccuacacuguaguauuau

SEQ ID NO: 48510 - RNA, 22 nt, Human
guuuccuauguccauugaggga

SEQ ID NO: 48511 - RNA, 22 nt, Human
guuuccugaaguuauuucaucc

SEQ ID NO: 48512 - RNA, 22 nt, Human
guuuccugacuguggaauuaua

SEQ ID NO: 48513 - RNA, 22 nt, Human
guuuccugaugugggagaucuu

SEQ ID NO: 48514 - RNA, 22 nt, Human
guuuccuggaaacugcuccacu

SEQ ID NO: 48515 - RNA, 22 nt, Human
guuucuaagcacaugugagugu

SEQ ID NO: 48516 - RNA, 22 nt, Human
guuucuaagggagagcugccag

SEQ ID NO: 48517 - RNA, 22 nt, Human
guuucucaacaugcuuucuaac

SEQ ID NO: 48518 - RNA, 22 nt, Human
guuucucaagcuugaaugcaca

SEQ ID NO: 48519 - RNA, 22 nt, Human
guuucucacaaggcugcaaucc

SEQ ID NO: 48520 - RNA, 22 nt, Human
guuucucacuuccaguagccaa

SEQ ID NO: 48521 - RNA, 22 nt, Human
guuucucagcaugucaguacaa

SEQ ID NO: 48522 - RNA, 22 nt, Human
guuucucaguuuggucugcaga

SEQ ID NO: 48523 - RNA, 22 nt, Human
guuucucuguaccucuguccca

SEQ ID NO: 48524 - RNA, 22 nt, Human
guuucugauucuagaggcaggc

SEQ ID NO: 48525 - RNA, 22 nt, Human
guuucuggcgccggggcaggcc

SEQ ID NO: 48526 - RNA, 22 nt, Human
guuucuguaagacugaauugac

SEQ ID NO: 48527 - RNA, 22 nt, Human
guuucuuaaguuacaaaaucuu

SEQ ID NO: 48528 - RNA, 22 nt, Human
guuucuuaccacuuggaccucu

SEQ ID NO: 48529 - RNA, 22 nt, Human
guuucuuagacagacauuaucu

SEQ ID NO: 48530 - RNA, 22 nt, Human
guuucuuauuugcagguugcuu

SEQ ID NO: 48531 - RNA, 22 nt, Human
guuugaaagaccaauuagauuu

SEQ ID NO: 48532 - RNA, 22 nt, Human
guuugaaaguggcaaguccuug

SEQ ID NO: 48533 - RNA, 22 nt, Human
guuugaaaugucugcaagggaa

SEQ ID NO: 48534 - RNA, 22 nt, Human
guuugacacggugcgucuucag

SEQ ID NO: 48535 - RNA, 22 nt, Human
guuugacacugagauaaauaaa

SEQ ID NO: 48536 - RNA, 22 nt, Human
guuugauuugauccggagagau

SEQ ID NO: 48537 - RNA, 22 nt, Human
guuugcauuuauuagucuucug

SEQ ID NO: 48538 - RNA, 22 nt, Human
guuugcauuucuugaacuauau

SEQ ID NO: 48539 - RNA, 18 nt, Human
guuugcuacauucacuug

SEQ ID NO: 48540 - RNA, 22 nt, Human
guuuggauagugagagauacuu

SEQ ID NO: 48541 - RNA, 22 nt, Human
guuuggcaguuuuagagugcaa

SEQ ID NO: 48542 - RNA, 22 nt, Human
guuuggcaucucacuuaaaccg

SEQ ID NO: 48543 - RNA, 22 nt, Human
guuuggcucugggugccugugc

SEQ ID NO: 48544 - RNA, 22 nt, Human
guuuggugacacauaguuugau

SEQ ID NO: 48545 - RNA, 22 nt, Human
guuuggugagcagcuuggguau

SEQ ID NO: 48546 - RNA, 22 nt, Human
guuuggugagcuaagauuauuu

SEQ ID NO: 48547 - RNA, 22 nt, Human
guuuguaauuaccucuuuugac

SEQ ID NO: 48548 - RNA, 22 nt, Human
guuugucccacuucuggcagaa

SEQ ID NO: 48549 - RNA, 22 nt, Human
guuuguguaacaugaugaugau

SEQ ID NO: 48550 - RNA, 22 nt, Human
guuugugucaaugacuucugca

SEQ ID NO: 48551 - RNA, 22 nt, Human
guuuguucacuaugacuguggu

SEQ ID NO: 48552 - RNA, 20 nt, Human
guuuuaaggcacaggccuuu

SEQ ID NO: 48553 - RNA, 21 nt, Human
guuuuaagggagaaaaccuag

SEQ ID NO: 48554 - RNA, 22 nt, Human
guuuuauaggcuguugcuauau

SEQ ID NO: 48555 - RNA, 20 nt, Human
guuuuaugccaguucugugu

SEQ ID NO: 48556 - RNA, 22 nt, Human
guuuuauuggaacacagccaug

SEQ ID NO: 48557 - RNA, 22 nt, Human
guuuuauuuccaugagagaccg

SEQ ID NO: 48558 - RNA, 22 nt, Human
guuuuccacuggauuguuugga

SEQ ID NO: 48559 - RNA, 22 nt, Human
guuuuccauggaggucugaccu

SEQ ID NO: 48560 - RNA, 22 nt, Human
guuuuccugagcccagagaugc

SEQ ID NO: 48561 - RNA, 22 nt, Human
guuuuccuucucagccauugcc

SEQ ID NO: 48562 - RNA, 22 nt, Human
guuuucucaggaugguguguac

SEQ ID NO: 48563 - RNA, 22 nt, Human
guuuucugauuagcaaaucuga

SEQ ID NO: 48564 - RNA, 22 nt, Human
guuuucugccgguggugggcuc

SEQ ID NO: 48565 - RNA, 22 nt, Human
guuuucugccugaaggugacca

SEQ ID NO: 48566 - RNA, 22 nt, Human
guuuucuggcaguuauuccuua

SEQ ID NO: 48567 - RNA, 21 nt, Human
guuuucuuugauagagggaag

SEQ ID NO: 48568 - RNA, 22 nt, Human
guuuugaaaugaaagaaccaag

SEQ ID NO: 48569 - RNA, 22 nt, Human
guuuugaagaagaccuugaaac

SEQ ID NO: 48570 - RNA, 22 nt, Human
guuuugaauacuacuagaacuu

SEQ ID NO: 48571 - RNA, 22 nt, Human
guuuugcagagugcaauaaauc

SEQ ID NO: 48572 - RNA, 22 nt, Human
guuuuggagucaggcuuagaug

SEQ ID NO: 48573 - RNA, 19 nt, Human
guuuuguuugcagaacuua

SEQ ID NO: 48574 - RNA, 22 nt, Human
uaccaaauguaaucauucuaau

SEQ ID NO: 48575 - RNA, 21 nt, Human
uaccaagaaguuugggaaagc

SEQ ID NO: 48576 - RNA, 22 nt, Human
uaccaagucaucuauucccaug

SEQ ID NO: 48577 - RNA, 22 nt, Human
uaccaccuccauccuccuuuca

SEQ ID NO: 48578 - RNA, 22 nt, Human
uaccacuacauuugcuaauggc

SEQ ID NO: 48579 - RNA, 22 nt, Human
uaccagccucuguugggggugg

SEQ ID NO: 48580 - RNA, 22 nt, Human
uaccagcuuccuucaagaugug

SEQ ID NO: 48581 - RNA, 22 nt, Human
uaccaguaauguaacuuugcaa

SEQ ID NO: 48582 - RNA, 22 nt, Human
uaccaguugauguuuuaaauag

SEQ ID NO: 48583 - RNA, 22 nt, Human
uaccaugaucaggcucauccuu

SEQ ID NO: 48584 - RNA, 22 nt, Human
uaccaugauguuugaguuacua

SEQ ID NO: 48585 - RNA, 22 nt, Human
uaccauuuacuugaaaauaaaa

SEQ ID NO: 48586 - RNA, 22 nt, Human
uaccauuucuacauaucuuguc

SEQ ID NO: 48587 - RNA, 22 nt, Human
uacccagcaaucccuagagguu

SEQ ID NO: 48588 - RNA, 22 nt, Human
uacccaggggcugagcagaggu

SEQ ID NO: 48589 - RNA, 22 nt, Human
uacccagugcaacuggagucuc

SEQ ID NO: 48590 - RNA, 22 nt, Human
uacccaguuccacacacugaug

SEQ ID NO: 48591 - RNA, 22 nt, Human
uaccccaagagugucugccaug

SEQ ID NO: 48592 - RNA, 22 nt, Human
uaccuagaccaguuacaaugca

SEQ ID NO: 48593 - RNA, 22 nt, Human
uaccucucggggucuguuugug

SEQ ID NO: 48594 - RNA, 23 nt, Human
uaccugaaguaagcauucaucca

SEQ ID NO: 48595 - RNA, 22 nt, Human
uaccugagaagaaacccguguu

SEQ ID NO: 48596 - RNA, 22 nt, Human
uaccuggauaucauucauucuc

SEQ ID NO: 48597 - RNA, 22 nt, Human
uaccuguggcuuguuggaugga

SEQ ID NO: 48598 - RNA, 22 nt, Human
uaccuugaaaagaaggugcuca

SEQ ID NO: 48599 - RNA, 22 nt, Human
uaccuugaaccccaagcuuugc

SEQ ID NO: 48600 - RNA, 20 nt, Human
uaccuugaaccuccaccugg

SEQ ID NO: 48601 - RNA, 22 nt, Human
uaccuuggaggccaagcaguuu

SEQ ID NO: 48602 - RNA, 22 nt, Human
uaccuugggcuauuaucuuuga

SEQ ID NO: 48603 - RNA, 22 nt, Human
uaccuugugagcuuucuaacau

SEQ ID NO: 48604 - RNA, 22 nt, Human
uaccuuugaucuggaauuuuaa

SEQ ID NO: 48605 - RNA, 22 nt, Human
uaccuuuugcuuauuaugacac

SEQ ID NO: 48606 - RNA, 22 nt, Human
uacgaauccuguggaugaaugu

SEQ ID NO: 48607 - RNA, 22 nt, Human
uacgugcacucauaccugaaau

SEQ ID NO: 48608 - RNA, 22 nt, Human
uacguguguucguguaagcacu

SEQ ID NO: 48609 - RNA, 22 nt, Human
uacguuuuaaacacggagccag

SEQ ID NO: 48610 - RNA, 22 nt, Human
uacuaaacccucgauggaucuu

SEQ ID NO: 48611 - RNA, 22 nt, Human
uacuaaguagcagaacuaagaa

SEQ ID NO: 48612 - RNA, 22 nt, Human
uacuacaaggccgaagcucuca

SEQ ID NO: 48613 - RNA, 22 nt, Human
uacuagaaccucacaacaaucc

SEQ ID NO: 48614 - RNA, 22 nt, Human
uacuagaaugccacuguuagug

SEQ ID NO: 48615 - RNA, 22 nt, Human
uacuagcuaacauucucaccaa

SEQ ID NO: 48616 - RNA, 22 nt, Human
uacuaggcaauuauguaaauaa

SEQ ID NO: 48617 - RNA, 22 nt, Human
uacuauaacuucgaaguccugg

SEQ ID NO: 48618 - RNA, 22 nt, Human
uacuaucucuucuaacuucaga

SEQ ID NO: 48619 - RNA, 22 nt, Human
uacuauuuugacaugaaauuga

SEQ ID NO: 48620 - RNA, 22 nt, Human
uacuauuuuugcaacguauaca

SEQ ID NO: 48621 - RNA, 22 nt, Human
uacucaaaaaguuaugaaucau

SEQ ID NO: 48622 - RNA, 22 nt, Human
uacucaaacucacuaagacaga

SEQ ID NO: 48623 - RNA, 22 nt, Human
uacucaauuucuuauggguuuc

SEQ ID NO: 48624 - RNA, 22 nt, Human
guucuucaggcugagcagagag

SEQ ID NO: 48625 - RNA, 22 nt, Human
guucuucaucuuaaccaucugu

SEQ ID NO: 48626 - RNA, 22 nt, Human
guucuucccuuuggggauugug

SEQ ID NO: 48627 - RNA, 21 nt, Human
guucuugcaggauuuccuucc

SEQ ID NO: 48628 - RNA, 22 nt, Human
guucuuugacuccaagaaagua

SEQ ID NO: 48629 - RNA, 22 nt, Human
guugaaacuuaguugaaauuua

SEQ ID NO: 48630 - RNA, 22 nt, Human
guugaaagaucauguggcugcc

SEQ ID NO: 48631 - RNA, 22 nt, Human
guugaaagaugucuugguuccc

SEQ ID NO: 48632 - RNA, 19 nt, Human
guugaaaguaggugagggu

SEQ ID NO: 48633 - RNA, 22 nt, Human
guugaaauccuaacccccuagu

SEQ ID NO: 48634 - RNA, 22 nt, Human
guugaaaugagggauuaaucag

SEQ ID NO: 48635 - RNA, 21 nt, Human
guugaauauccauguaugugu

SEQ ID NO: 48636 - RNA, 22 nt, Human
guugaguguugugcaugcacca

SEQ ID NO: 48637 - RNA, 22 nt, Human
guugaugaaaaugaauugcaug

SEQ ID NO: 48638 - RNA, 22 nt, Human
guugcacaguuccucaagcagg

SEQ ID NO: 48639 - RNA, 22 nt, Human
guugcagacacuccacagucga

SEQ ID NO: 48640 - RNA, 22 nt, Human
guugcagacggggugcacugaa

SEQ ID NO: 48641 - RNA, 22 nt, Human
guugcagcaucacugcugagug

SEQ ID NO: 48642 - RNA, 22 nt, Human
guugccaggggcugcugucacc

SEQ ID NO: 48643 - RNA, 23 nt, Human
guugccuuugcaucuucauccau

SEQ ID NO: 48644 - RNA, 22 nt, Human
guugcugaaggcaugccagaga

SEQ ID NO: 48645 - RNA, 22 nt, Human
guugcuucucuuaaguccagcu

SEQ ID NO: 48646 - RNA, 22 nt, Human
guugcuuuacagcuggugacag

SEQ ID NO: 48647 - RNA, 20 nt, Human
guugcuuuagucugguuugg

SEQ ID NO: 48648 - RNA, 22 nt, Human
guuggaauuugcucauccauuu

SEQ ID NO: 48649 - RNA, 22 nt, Human
guuggcacuucauaauaugaaa

SEQ ID NO: 48650 - RNA, 22 nt, Human
guuggcagaaagcuuucgaucg

SEQ ID NO: 48651 - RNA, 22 nt, Human
guuggccauuaauuggaggaca

SEQ ID NO: 48652 - RNA, 22 nt, Human
guuggcucauuuuauagacagc

SEQ ID NO: 48653 - RNA, 22 nt, Human
guuggcuuugcucucuguccua

SEQ ID NO: 48654 - RNA, 22 nt, Human
guugggaaggugaacaugaugc

SEQ ID NO: 48655 - RNA, 22 nt, Human
guugggcuuauguaauuuuaag

SEQ ID NO: 48656 - RNA, 22 nt, Human
guugguccuuugagcaagaucc

SEQ ID NO: 48657 - RNA, 22 nt, Human
guuggugaugccacacauauuu

SEQ ID NO: 48658 - RNA, 22 nt, Human
guugguuagauuuccucacuuu

SEQ ID NO: 48659 - RNA, 22 nt, Human
guuguacagcauuccauauagg

SEQ ID NO: 48660 - RNA, 22 nt, Human
guuguauucuucaauaucagag

SEQ ID NO: 48661 - RNA, 22 nt, Human
guugugaauagugccgcaauaa

SEQ ID NO: 48662 - RNA, 22 nt, Human
guuguucucccuaacaauuacu

SEQ ID NO: 48663 - RNA, 22 nt, Human
guuguuuguaaugacaggagac

SEQ ID NO: 48664 - RNA, 22 nt, Human
guuuaacaucugugaagcugcu

SEQ ID NO: 48665 - RNA, 22 nt, Human
guuuaacauuguaccaacaccu

SEQ ID NO: 48666 - RNA, 22 nt, Human
guuuaaccauugcauauccaua

SEQ ID NO: 48667 - RNA, 22 nt, Human
guuuaaguuucagaagcuaaga

SEQ ID NO: 48668 - RNA, 22 nt, Human
guuuaaucagaggaauuauaga

SEQ ID NO: 48669 - RNA, 22 nt, Human
guuuacaaauauuuuaaauggu

SEQ ID NO: 48670 - RNA, 22 nt, Human
guuuacacuccaggcuggggug

SEQ ID NO: 48671 - RNA, 22 nt, Human
guuuacaugcagaaaaucaaug

SEQ ID NO: 48672 - RNA, 22 nt, Human
guuuacauguuuuucucuuaca

SEQ ID NO: 48673 - RNA, 22 nt, Human
guuuacauuaaguauuagcauc

SEQ ID NO: 48674 - RNA, 18 nt, Human
guuuacauuacugaauag

SEQ ID NO: 48675 - RNA, 22 nt, Human
guuuacuggagaagaugaccug

SEQ ID NO: 48676 - RNA, 22 nt, Human
guuuagauuucaugaagacacu

SEQ ID NO: 48677 - RNA, 20 nt, Human
guuuauacagaagaccccaa

SEQ ID NO: 48678 - RNA, 22 nt, Human
guuuauacagugcaugguguua

SEQ ID NO: 48679 - RNA, 22 nt, Human
guuuauaugaacuucauaccca

SEQ ID NO: 48680 - RNA, 22 nt, Human
guuuaucacaauaaauaauucu

SEQ ID NO: 48681 - RNA, 22 nt, Human
guuuauuauacaacaaaagcua

SEQ ID NO: 48682 - RNA, 22 nt, Human
guuuauucuucagcaacaucug

SEQ ID NO: 48683 - RNA, 22 nt, Human
uacuuguucuuucaagagauag

SEQ ID NO: 48684 - RNA, 22 nt, Human
uacuuuaaaaacugauaauuca

SEQ ID NO: 48685 - RNA, 22 nt, Human
uacuuuaucagcgucaaaggua

SEQ ID NO: 48686 - RNA, 22 nt, Human
uacuuucaguuucagcugaagu

SEQ ID NO: 48687 - RNA, 22 nt, Human
uacuuucuagcucuccccaguu

SEQ ID NO: 48688 - RNA, 22 nt, Human
uacuuucuuucccaagaggugg

SEQ ID NO: 48689 - RNA, 22 nt, Human
uacuuugaccaccaucugauua

SEQ ID NO: 48690 - RNA, 22 nt, Human
uacuuugagaugaugcugaucg

SEQ ID NO: 48691 - RNA, 22 nt, Human
uacuuugcggcgcggaggagca

SEQ ID NO: 48692 - RNA, 22 nt, Human
uacuuuggaagaguucauacag

SEQ ID NO: 48693 - RNA, 22 nt, Human
uacuuuggggacaauauggaau

SEQ ID NO: 48694 - RNA, 22 nt, Human
uacuuugguugaauauguaaug

SEQ ID NO: 48695 - RNA, 22 nt, Human
uacuuugucauucuaaccuucc

SEQ ID NO: 48696 - RNA, 22 nt, Human
uacuuuuaaaauucacagguau

SEQ ID NO: 48697 - RNA, 22 nt, Human
uacuuuuagccuauuugauucu

SEQ ID NO: 48698 - RNA, 22 nt, Human
uacuuuucauaaugaagcagca

SEQ ID NO: 48699 - RNA, 22 nt, Human
uacuuuuccuggaaccacugcu

SEQ ID NO: 48700 - RNA, 22 nt, Human
uacuuuuugucucuuugaaugu

SEQ ID NO: 48701 - RNA, 22 nt, Human
uagaaaaguaugggacugacau

SEQ ID NO: 48702 - RNA, 22 nt, Human
uagaaaccaucucacugcucag

SEQ ID NO: 48703 - RNA, 22 nt, Human
uagaaacucaggauacucuucc

SEQ ID NO: 48704 - RNA, 22 nt, Human
uagaaagagcuuugcuuccuuu

SEQ ID NO: 48705 - RNA, 22 nt, Human
uagaaagcagaaaccaucagag

SEQ ID NO: 48706 - RNA, 22 nt, Human
uagaaagcaguugugggggcuc

SEQ ID NO: 48707 - RNA, 22 nt, Human
uagaaagcaugcaaguuugaug

SEQ ID NO: 48708 - RNA, 22 nt, Human
uagaaagcccuguguucacugc

SEQ ID NO: 48709 - RNA, 22 nt, Human
uagaaagcguuaaaucuacaga

SEQ ID NO: 48710 - RNA, 22 nt, Human
uagaaaguaaacacgaagucuc

SEQ ID NO: 48711 - RNA, 22 nt, Human
uagaaaguaaaucaguuuuauu

SEQ ID NO: 48712 - RNA, 21 nt, Human
uagaaaucagcuggugccucu

SEQ ID NO: 48713 - RNA, 22 nt, Human
uagaaauccccagucucauagu

SEQ ID NO: 48714 - RNA, 20 nt, Human
uagaaaucuuauaaaagacu

SEQ ID NO: 48715 - RNA, 22 nt, Human
uagaaaucuuguuacuaugugu

SEQ ID NO: 48716 - RNA, 22 nt, Human
uagaaaugauugguugagcucu

SEQ ID NO: 48717 - RNA, 22 nt, Human
uagaaaugcaguguacuguguc

SEQ ID NO: 48718 - RNA, 22 nt, Human
uagaaauguuagauguauugag

SEQ ID NO: 48719 - RNA, 22 nt, Human
uagaacacuugaccacugcucc

SEQ ID NO: 48720 - RNA, 22 nt, Human
uagaacagaguuccagugauca

SEQ ID NO: 48721 - RNA, 22 nt, Human
uagaacaugacuuauuuuugga

SEQ ID NO: 48722 - RNA, 22 nt, Human
uagaacaugugaaaauauagcc

SEQ ID NO: 48723 - RNA, 22 nt, Human
uagaaccaccuucuccuuuacc

SEQ ID NO: 48724 - RNA, 19 nt, Human
uagaaccuggauuucagga

SEQ ID NO: 48725 - RNA, 22 nt, Human
uagaacuaaagaacaacuuuga

SEQ ID NO: 48726 - RNA, 19 nt, Human
uagaacugaggacuugcau

SEQ ID NO: 48727 - RNA, 22 nt, Human
uagaacuucuuacagcuaaguu

SEQ ID NO: 48728 - RNA, 22 nt, Human
uagaacuugaaugugaaaucag

SEQ ID NO: 48729 - RNA, 22 nt, Human
uagaagaaagugaagcugggga

SEQ ID NO: 48730 - RNA, 22 nt, Human
uagaagaacaugucaaacuaua

SEQ ID NO: 48731 - RNA, 22 nt, Human
uagaagagacauagccuguggu

SEQ ID NO: 48732 - RNA, 22 nt, Human
uagaagauucuaaaguggagag

SEQ ID NO: 48733 - RNA, 19 nt, Human
uagaagcacuaggcaaacu

SEQ ID NO: 48734 - RNA, 22 nt, Human
uagaagcagcaggacucauggu

SEQ ID NO: 48735 - RNA, 22 nt, Human
uagaagcaguaauagaaauagg

SEQ ID NO: 48736 - RNA, 22 nt, Human
uagaaggcccauucauuuguuc

SEQ ID NO: 48737 - RNA, 22 nt, Human
uagaagucucucaagaaacaua

SEQ ID NO: 48738 - RNA, 22 nt, Human
uagaagugaaagacuugauguc

SEQ ID NO: 48739 - RNA, 22 nt, Human
uagaauacuagugaagucaucg

SEQ ID NO: 48740 - RNA, 22 nt, Human
uagaaucaagcaguagagcaga

SEQ ID NO: 48741 - RNA, 22 nt, Human
ugaaaugcuucucugaaaauac

SEQ ID NO: 48742 - RNA, 22 nt, Human
ugaaauguaaauaggacuagaa

SEQ ID NO: 48743 - RNA, 22 nt, Human
ugaaaugucuuugcaauugaaa

SEQ ID NO: 48744 - RNA, 22 nt, Human
ugaaauguguaauguggaugcc

SEQ ID NO: 48745 - RNA, 22 nt, Human
ugaaauuagaaauauguauggg

SEQ ID NO: 48746 - RNA, 22 nt, Human
ugaacaacugcaaaaaucucca

SEQ ID NO: 48747 - RNA, 21 nt, Human
ugaacacagauuugucugauu

SEQ ID NO: 48748 - RNA, 22 nt, Human
ugaacacaguucugaugagcuu

SEQ ID NO: 48749 - RNA, 22 nt, Human
ugaacacauuucuggccaauuu

SEQ ID NO: 48750 - RNA, 19 nt, Human
ugaacagagaggacucugg

SEQ ID NO: 48751 - RNA, 22 nt, Human
ugaacagauguggagguaccuu

SEQ ID NO: 48752 - RNA, 23 nt, Human
ugaacaguaugugggacauugag

SEQ ID NO: 48753 - RNA, 22 nt, Human
ugaacagucauuuagaaugugc

SEQ ID NO: 48754 - RNA, 22 nt, Human
ugaacagugggcaugugaagac

SEQ ID NO: 48755 - RNA, 22 nt, Human
ugaacagugguucaugucacgg

SEQ ID NO: 48756 - RNA, 22 nt, Human
ugaacaguguaucuagaucaug

SEQ ID NO: 48757 - RNA, 22 nt, Human
ugaacaugcuguugauggccug

SEQ ID NO: 48758 - RNA, 22 nt, Human
ugaacauuggcacaaggcagca

SEQ ID NO: 48759 - RNA, 22 nt, Human
ugaacauugucacauuccuagc

SEQ ID NO: 48760 - RNA, 22 nt, Human
ugaaccacaugcaaagugaaua

SEQ ID NO: 48761 - RNA, 22 nt, Human
ugaaccaucuggcuccagaaga

SEQ ID NO: 48762 - RNA, 22 nt, Human
ugaaccuuuugcuaagaaguua

SEQ ID NO: 48763 - RNA, 22 nt, Human
ugaacuccaaauacugcugauu

SEQ ID NO: 48764 - RNA, 21 nt, Human
ugaacucuggucaucuucauu

SEQ ID NO: 48765 - RNA, 22 nt, Human
ugaacuguacaucccuaaccua

SEQ ID NO: 48766 - RNA, 22 nt, Human
ugaacuuacaaauuaaaagacu

SEQ ID NO: 48767 - RNA, 22 nt, Human
ugaacuuagugggaauaucucu

SEQ ID NO: 48768 - RNA, 22 nt, Human
ugaacuuuuucucuacgggcca

SEQ ID NO: 48769 - RNA, 22 nt, Human
ugaagaaacgcagagagguagg

SEQ ID NO: 48770 - RNA, 22 nt, Human
ugaagaagccaauugguaggcu

SEQ ID NO: 48771 - RNA, 22 nt, Human
ugaagaaugugaauugguagcu

SEQ ID NO: 48772 - RNA, 22 nt, Human
ugaagaauguugcagugagcau

SEQ ID NO: 48773 - RNA, 22 nt, Human
ugaagacaaagucaggcccaga

SEQ ID NO: 48774 - RNA, 22 nt, Human
ugaagacaguuuuacucaugag

SEQ ID NO: 48775 - RNA, 22 nt, Human
ugaagacuuugcucuuaaccac

SEQ ID NO: 48776 - RNA, 20 nt, Human
ugaagagugcgcacauugcc

SEQ ID NO: 48777 - RNA, 22 nt, Human
ugaagauaaauuguacugaaga

SEQ ID NO: 48778 - RNA, 17 nt, Human
ugaagaugcauggcagc

SEQ ID NO: 48779 - RNA, 22 nt, Human
ugaagauuuucggguacuugau

SEQ ID NO: 48780 - RNA, 22 nt, Human
ugaagauuuuguagcuuucagc

SEQ ID NO: 48781 - RNA, 22 nt, Human
ugaagcaagauagaaagcugcu

SEQ ID NO: 48782 - RNA, 22 nt, Human
ugaagcacagaccugggcauca

SEQ ID NO: 48783 - RNA, 22 nt, Human
ugaagcacauuucuugagauga

SEQ ID NO: 48784 - RNA, 22 nt, Human
ugaagcagagaauuugacaguc

SEQ ID NO: 48785 - RNA, 22 nt, Human
ugaagcagagugaaggugaauu

SEQ ID NO: 48786 - RNA, 22 nt, Human
ugaagcagauggucuggucauu

SEQ ID NO: 48787 - RNA, 19 nt, Human
ugaagcagcaaacucucag

SEQ ID NO: 48788 - RNA, 22 nt, Human
ugaagcagcaccauuuuagagc

SEQ ID NO: 48789 - RNA, 20 nt, Human
ugaagcagccuugauucugu

SEQ ID NO: 48790 - RNA, 22 nt, Human
ugaagcaggaaacuucuuguuu

SEQ ID NO: 48791 - RNA, 22 nt, Human
ugaagcaguuacuggguguuaa

SEQ ID NO: 48792 - RNA, 21 nt, Human
augcauggauuucagugagag

SEQ ID NO: 48793 - RNA, 22 nt, Human
augcauguauuaucuagaugag

SEQ ID NO: 48794 - RNA, 22 nt, Human
augcauguauucaugugugaca

SEQ ID NO: 48795 - RNA, 22 nt, Human
augcaugugugaauuauuugac

SEQ ID NO: 48796 - RNA, 22 nt, Human
augcaugugugagagcaagagg

SEQ ID NO: 48797 - RNA, 22 nt, Human
augcauguguguuuacaugcuu

SEQ ID NO: 48798 - RNA, 22 nt, Human
augcauguuaagcucuuaaaau

SEQ ID NO: 48799 - RNA, 22 nt, Human
augcauguuuauagggugcuuc

SEQ ID NO: 48800 - RNA, 22 nt, Human
augcauucaugaagauugcaca

SEQ ID NO: 48801 - RNA, 22 nt, Human
augcauucauucauucuuucua

SEQ ID NO: 48802 - RNA, 22 nt, Human
augcauuggucagggucuuagg

SEQ ID NO: 48803 - RNA, 22 nt, Human
augcauuguaacgaugugcaca

SEQ ID NO: 48804 - RNA, 22 nt, Human
augccaagaaucauaugccagg

SEQ ID NO: 48805 - RNA, 22 nt, Human
augccaagcuucagcugaaacu

SEQ ID NO: 48806 - RNA, 22 nt, Human
augccaaguacaggcacugcuc

SEQ ID NO: 48807 - RNA, 22 nt, Human
augccaaguaugauucacaugu

SEQ ID NO: 48808 - RNA, 22 nt, Human
augccaauaaauguuaauaucu

SEQ ID NO: 48809 - RNA, 22 nt, Human
augccacauaaccaguucacuu

SEQ ID NO: 48810 - RNA, 22 nt, Human
augccacugacauggacaauuu

SEQ ID NO: 48811 - RNA, 22 nt, Human
augccagacauuaacgacuaug

SEQ ID NO: 48812 - RNA, 22 nt, Human
augccagcuauagacuuguuau

SEQ ID NO: 48813 - RNA, 22 nt, Human
augccaggaacaaacaguggug

SEQ ID NO: 48814 - RNA, 22 nt, Human
augccaggagauggagcagagu

SEQ ID NO: 48815 - RNA, 22 nt, Human
augccaggccccacgcugggca

SEQ ID NO: 48816 - RNA, 22 nt, Human
augccagggucccuucagagau

SEQ ID NO: 48817 - RNA, 22 nt, Human
augccagguacagggguagggu

SEQ ID NO: 48818 - RNA, 22 nt, Human
augccaucaaugacagaguuag

SEQ ID NO: 48819 - RNA, 22 nt, Human
augccauuguauauucauugau

SEQ ID NO: 48820 - RNA, 22 nt, Human
augccccaggaggugccaucca

SEQ ID NO: 48821 - RNA, 22 nt, Human
augcccgauaccuaguuaacuc

SEQ ID NO: 48822 - RNA, 22 nt, Human
augcccugaaagauucaaaggc

SEQ ID NO: 48823 - RNA, 22 nt, Human
augcccugcaucaagugacacu

SEQ ID NO: 48824 - RNA, 22 nt, Human
augcccugccaagcaggcuaaa

SEQ ID NO: 48825 - RNA, 22 nt, Human
augcccugcucucgggaaggga

SEQ ID NO: 48826 - RNA, 22 nt, Human
augcccugcugcuggggcagug

SEQ ID NO: 48827 - RNA, 22 nt, Human
augcccuggacuagcuauacuu

SEQ ID NO: 48828 - RNA, 22 nt, Human
augcccugggagugcuguacca

SEQ ID NO: 48829 - RNA, 22 nt, Human
augcccugugacucuccuggac

SEQ ID NO: 48830 - RNA, 22 nt, Human
augcccugugguucaugugaga

SEQ ID NO: 48831 - RNA, 22 nt, Human
augcccuuaugccagaggcaau

SEQ ID NO: 48832 - RNA, 22 nt, Human
augcccuucaacgugaggauuu

SEQ ID NO: 48833 - RNA, 22 nt, Human
augccugcuuacuccaggugcu

SEQ ID NO: 48834 - RNA, 22 nt, Human
augccuggacuguaucccagau

SEQ ID NO: 48835 - RNA, 22 nt, Human
augccugucucagggucuguuu

SEQ ID NO: 48836 - RNA, 22 nt, Human
augccuuaaggcgagauacuua

SEQ ID NO: 48837 - RNA, 22 nt, Human
augccuuuaagagauacugagg

SEQ ID NO: 48838 - RNA, 22 nt, Human
augcgagugaugcagaguggcu

SEQ ID NO: 48839 - RNA, 22 nt, Human
augcggugaauugacuguuucu

SEQ ID NO: 48840 - RNA, 22 nt, Human
augcgugcagggguccuccugg

SEQ ID NO: 48841 - RNA, 22 nt, Human
augcuaaaaacuugaucauuau

SEQ ID NO: 48842 - RNA, 22 nt, Human
augcuaaauccagaagcaguca

SEQ ID NO: 48843 - RNA, 22 nt, Human
augcuaaauggccaguaccaaa

SEQ ID NO: 48844 - RNA, 22 nt, Human
augcuaaugagcuaaggagucc

SEQ ID NO: 48845 - RNA, 22 nt, Human
augcuacagcccucuuugcaua

SEQ ID NO: 48846 - RNA, 22 nt, Human
augcuacaggaagacgucaggc

SEQ ID NO: 48847 - RNA, 22 nt, Human
augcuacaggauucuccuuauc

SEQ ID NO: 48848 - RNA, 22 nt, Human
augcuauuuaccacacaucauu

SEQ ID NO: 48849 - RNA, 22 nt, Human
augcuauuuuacauaggaaugg

SEQ ID NO: 48850 - RNA, 22 nt, Human
augcucuagagcucuuuucacu

SEQ ID NO: 48851 - RNA, 22 nt, Human
augcucuauaaauaugacaugu

SEQ ID NO: 48852 - RNA, 22 nt, Human
augcugaaauuuauugguaagg

SEQ ID NO: 48853 - RNA, 22 nt, Human
augcugaagaguucaugauuau

SEQ ID NO: 48854 - RNA, 22 nt, Human
augcugaauaguucacucuucu

SEQ ID NO: 48855 - RNA, 21 nt, Human
augcugaaucuuguugugcuc

SEQ ID NO: 48856 - RNA, 22 nt, Human
augcugaaugaaagaaauuagu

SEQ ID NO: 48857 - RNA, 22 nt, Human
augcugacagacuauuaacuau

SEQ ID NO: 48858 - RNA, 22 nt, Human
augcugagaaaccugucuggca

SEQ ID NO: 48859 - RNA, 22 nt, Human
augcugagcagagcugacaugc

SEQ ID NO: 48860 - RNA, 18 nt, Human
augcugcccucugagggu

SEQ ID NO: 48861 - RNA, 16 nt, Human
augcugcuauuagagg

SEQ ID NO: 48862 - RNA, 22 nt, Human
augcugggaaacugaaaggaau

SEQ ID NO: 48863 - RNA, 22 nt, Human
augccuggacugacaugcacug

SEQ ID NO: 48864 - RNA, 22 nt, Human
augccuggauuugggacucaaa

SEQ ID NO: 48865 - RNA, 22 nt, Human
augccuuugccacagauuagga

SEQ ID NO: 48866 - RNA, 22 nt, Human
augcgcuuugugugaagcagug

SEQ ID NO: 48867 - RNA, 22 nt, Human
augcgugugugcaaaccauugc

SEQ ID NO: 48868 - RNA, 22 nt, Human
augcuaaagcuuugcuuucauu

SEQ ID NO: 48869 - RNA, 22 nt, Human
augcuaaauaacugguuugacu

SEQ ID NO: 48870 - RNA, 22 nt, Human
augcuaaggcccaggagaaaau

SEQ ID NO: 48871 - RNA, 22 nt, Human
augcuaauguuuguggaagaua

SEQ ID NO: 48872 - RNA, 22 nt, Human
augcuacacuauuugcugagca

SEQ ID NO: 48873 - RNA, 22 nt, Human
augcuacagaguuugaauaugu

SEQ ID NO: 48874 - RNA, 22 nt, Human
augcuacagcaucucucaucag

SEQ ID NO: 48875 - RNA, 22 nt, Human
augcuacauagauacaaaaaug

SEQ ID NO: 48876 - RNA, 22 nt, Human
augcuacauuuugguuuauaaa

SEQ ID NO: 48877 - RNA, 22 nt, Human
augcuacgaaugagagcauaua

SEQ ID NO: 48878 - RNA, 22 nt, Human
augcuaucuucagcaccuaggg

SEQ ID NO: 48879 - RNA, 22 nt, Human
augcucacuucagagaagauga

SEQ ID NO: 48880 - RNA, 22 nt, Human
augcuccuuggcuucaaagcca

SEQ ID NO: 48881 - RNA, 22 nt, Human
augcucuacuuacggcuuucag

SEQ ID NO: 48882 - RNA, 22 nt, Human
augcucuagacauacuggcuau

SEQ ID NO: 48883 - RNA, 17 nt, Human
augcucuauagucagug

SEQ ID NO: 48884 - RNA, 23 nt, Human
augcucuauuugggauaugacag

SEQ ID NO: 48885 - RNA, 22 nt, Human
augcucugggcaggagcccugg

SEQ ID NO: 48886 - RNA, 23 nt, Human
augcucugggcugugggaccugc

SEQ ID NO: 48887 - RNA, 22 nt, Human
augcucuugaggcuaaagacau

SEQ ID NO: 48888 - RNA, 22 nt, Human
augcugaaccuuaacuuggagc

SEQ ID NO: 48889 - RNA, 22 nt, Human
augcugaacugagauguaacuu

SEQ ID NO: 48890 - RNA, 22 nt, Human
augcugaaggugaauugacaau

SEQ ID NO: 48891 - RNA, 22 nt, Human
augcugaauauuagccucauga

SEQ ID NO: 48892 - RNA, 22 nt, Human
augcugaauugaugcgagggag

SEQ ID NO: 48893 - RNA, 22 nt, Human
augcugagauccucaggccaga

SEQ ID NO: 48894 - RNA, 22 nt, Human
augcugaggacaaagagaucaa

SEQ ID NO: 48895 - RNA, 22 nt, Human
augcugagguuguuguccuauu

SEQ ID NO: 48896 - RNA, 22 nt, Human
augcugcacaagccacauguag

SEQ ID NO: 48897 - RNA, 22 nt, Human
augcuggcagccgagugcucca

SEQ ID NO: 48898 - RNA, 22 nt, Human
augcugggaagacaagguggag

SEQ ID NO: 48899 - RNA, 22 nt, Human
augcuggucucauuggguuagg

SEQ ID NO: 48900 - RNA, 22 nt, Human
augcugucgaaaccaaacaucu

SEQ ID NO: 48901 - RNA, 22 nt, Human
auggaaagcuaagccauuuacc

SEQ ID NO: 48902 - RNA, 22 nt, Human
auggaaaggcuguggaaacuua

SEQ ID NO: 48903 - RNA, 22 nt, Human
auggaaaugauggaacauuaaa

SEQ ID NO: 48904 - RNA, 22 nt, Human
auggaaauguaacuucugauuc

SEQ ID NO: 48905 - RNA, 22 nt, Human
auggaacaugaauuaauauggu

SEQ ID NO: 48906 - RNA, 22 nt, Human
auggaacugaucaggagugcca

SEQ ID NO: 48907 - RNA, 22 nt, Human
auggaagaaagagacaauuuga

SEQ ID NO: 48908 - RNA, 22 nt, Human
auggaaggcuuuaugacucaaa

SEQ ID NO: 48909 - RNA, 22 nt, Human
auggaagguccuacagagcgca

SEQ ID NO: 48910 - RNA, 22 nt, Human
auggaaguuggaaccauucaua

SEQ ID NO: 48911 - RNA, 22 nt, Human
auggaaugcucccuggggacau

SEQ ID NO: 48912 - RNA, 22 nt, Human
auggaaugggaagcagagccau

SEQ ID NO: 48913 - RNA, 22 nt, Human
auggaauugaagacagcauagg

SEQ ID NO: 48914 - RNA, 22 nt, Human
auggaauuuggacuggaagucc

SEQ ID NO: 48915 - RNA, 22 nt, Human
auggaauuuggagauuaggcau

SEQ ID NO: 48916 - RNA, 22 nt, Human
auggacaaauguaaggcauaau

SEQ ID NO: 48917 - RNA, 22 nt, Human
auggacaaugccaauacaguuu

SEQ ID NO: 48918 - RNA, 22 nt, Human
auggacaaugugaaacuacaag

SEQ ID NO: 48919 - RNA, 22 nt, Human
auggacagacacuggccuucug

SEQ ID NO: 48920 - RNA, 22 nt, Human
auggacagcaacuggaagcuuc

SEQ ID NO: 48921 - RNA, 22 nt, Human
auggacaggcugagcuuccuca

SEQ ID NO: 48922 - RNA, 22 nt, Human
auggacagguggauagguggau

SEQ ID NO: 48923 - RNA, 22 nt, Human
auggacauuugaguuauuucca

SEQ ID NO: 48924 - RNA, 22 nt, Human
auggacuuaagagucagaagcu

SEQ ID NO: 48925 - RNA, 22 nt, Human
auggagcaaauggggcugcagg

SEQ ID NO: 48926 - RNA, 22 nt, Human
auggagcacacgccaucacaua

SEQ ID NO: 48927 - RNA, 22 nt, Human
auggagcagcagaaggggcuug

SEQ ID NO: 48928 - RNA, 22 nt, Human
auggagccauuccugaagacuu

SEQ ID NO: 48929 - RNA, 22 nt, Human
auggagcugugugaauauucau

SEQ ID NO: 48930 - RNA, 22 nt, Human
auggagguggaagaaugaguua

SEQ ID NO: 48931 - RNA, 22 nt, Human
auggagugguacuuacuuggcu

SEQ ID NO: 48932 - RNA, 22 nt, Human
auggaguguggccaggcaguaa

SEQ ID NO: 48933 - RNA, 22 nt, Human
auggauaaauacuuggugguau

SEQ ID NO: 48934 - RNA, 22 nt, Human
auggauaacccaguucauuucu

SEQ ID NO: 48935 - RNA, 22 nt, Human
auggauaagaacaaauaucuga

SEQ ID NO: 48936 - RNA, 22 nt, Human
auggauggaacucugcuguggu

SEQ ID NO: 48937 - RNA, 22 nt, Human
auggauggccugagcacagcug

SEQ ID NO: 48938 - RNA, 22 nt, Human
auggaugggauauugcuugcca

SEQ ID NO: 48939 - RNA, 22 nt, Human
auggcaaaaauuaacagaucaa

SEQ ID NO: 48940 - RNA, 22 nt, Human
auggcaagcaagcugaagagau

SEQ ID NO: 48941 - RNA, 22 nt, Human
auggcacagauguucugauuau

SEQ ID NO: 48942 - RNA, 22 nt, Human
auggcaccuuccccagagcuca

SEQ ID NO: 48943 - RNA, 22 nt, Human
auggcagaccugggcuggagaa

SEQ ID NO: 48944 - RNA, 22 nt, Human
auggcagagaacaaagcaacaa

SEQ ID NO: 48945 - RNA, 22 nt, Human
auggcagaguccuaagccuuua

SEQ ID NO: 48946 - RNA, 22 nt, Human
auggcagauccacaguuugaag

SEQ ID NO: 48947 - RNA, 22 nt, Human
auggcagcaaagaggccuucuu

SEQ ID NO: 48948 - RNA, 19 nt, Human
auggcagcagcagcucucc

SEQ ID NO: 48949 - RNA, 22 nt, Human
auggcagcagggcuugauuaug

SEQ ID NO: 48950 - RNA, 22 nt, Human
auggcagccaguguuggaggaa

SEQ ID NO: 48951 - RNA, 22 nt, Human
auggcagcccacgauggcaaug

SEQ ID NO: 48952 - RNA, 22 nt, Human
auggcagccugagcagaggaau

SEQ ID NO: 48953 - RNA, 22 nt, Human
auggcaguacguugaaaauuuu

SEQ ID NO: 48954 - RNA, 22 nt, Human
auggcaguauuuguaucacaga

SEQ ID NO: 48955 - RNA, 22 nt, Human
auggcagucagagacaggcaga

SEQ ID NO: 48956 - RNA, 22 nt, Human
auggcaguggaaugggaugagu

SEQ ID NO: 48957 - RNA, 22 nt, Human
auggcaguuucacucugggauu

SEQ ID NO: 48958 - RNA, 22 nt, Human
auggcauuguuuauagauugca

SEQ ID NO: 48959 - RNA, 22 nt, Human
auggcauuugaaucugucuuuu

SEQ ID NO: 48960 - RNA, 22 nt, Human
auggcauuugucaagauaagua

SEQ ID NO: 48961 - RNA, 22 nt, Human
auggccaacugaaaugaaagau

SEQ ID NO: 48962 - RNA, 22 nt, Human
auggccaagcaugccuguggcc

SEQ ID NO: 48963 - RNA, 22 nt, Human
auggccaagcuuacucuguugu

SEQ ID NO: 48964 - RNA, 22 nt, Human
auggccagcaagguagggcaau

SEQ ID NO: 48965 - RNA, 22 nt, Human
auggccagcaaguucagaauuu

SEQ ID NO: 48966 - RNA, 22 nt, Human
auggccagccacuccugauggc

SEQ ID NO: 48967 - RNA, 22 nt, Human
auggccagcucagagcacucag

SEQ ID NO: 48968 - RNA, 22 nt, Human
auggccagucuguuggacagca

SEQ ID NO: 48969 - RNA, 22 nt, Human
auggcccaaaaccuccucccuc

SEQ ID NO: 48970 - RNA, 22 nt, Human
auggcccacucuggucccggca

SEQ ID NO: 48971 - RNA, 22 nt, Human
auggcccagacucagacuggug

SEQ ID NO: 48972 - RNA, 22 nt, Human
auggcccucaguccuuccuugg

SEQ ID NO: 48973 - RNA, 22 nt, Human
auggcccugcuaccacuuuucu

SEQ ID NO: 48974 - RNA, 22 nt, Human
auggcccuggcccagaccccac

SEQ ID NO: 48975 - RNA, 22 nt, Human
auggcccuuuauuccuucuucc

SEQ ID NO: 48976 - RNA, 22 nt, Human
auggccuggggagcaugggaag

SEQ ID NO: 48977 - RNA, 22 nt, Human
auggccuggggauuccugagca

SEQ ID NO: 48978 - RNA, 22 nt, Human
auggccuuucucaguggugcuu

SEQ ID NO: 48979 - RNA, 17 nt, Human
auggcucaccugugggc

SEQ ID NO: 48980 - RNA, 22 nt, Human
auggcagccuguggacagucaa

SEQ ID NO: 48981 - RNA, 22 nt, Human
auggcagcuuucauuguccaca

SEQ ID NO: 48982 - RNA, 22 nt, Human
auggcaggaugagacaacaauu

SEQ ID NO: 48983 - RNA, 22 nt, Human
auggcagggcacagcucuaguu

SEQ ID NO: 48984 - RNA, 22 nt, Human
auggcagggcagccucucagag

SEQ ID NO: 48985 - RNA, 22 nt, Human
auggcagugauaggcuagugau

SEQ ID NO: 48986 - RNA, 22 nt, Human
auggcaguugcccagccaaucc

SEQ ID NO: 48987 - RNA, 22 nt, Human
auggcauuaggaccaugagccu

SEQ ID NO: 48988 - RNA, 22 nt, Human
auggcauugaguaaagucagua

SEQ ID NO: 48989 - RNA, 22 nt, Human
auggcauugcaagggcaggagg

SEQ ID NO: 48990 - RNA, 22 nt, Human
auggccaaaucuaaacuguugg

SEQ ID NO: 48991 - RNA, 22 nt, Human
auggccaagaauauuucucaac

SEQ ID NO: 48992 - RNA, 22 nt, Human
auggccaagaucacagacuuca

SEQ ID NO: 48993 - RNA, 22 nt, Human
auggccaagcauauacagauug

SEQ ID NO: 48994 - RNA, 21 nt, Human
auggccacuauggugcagcag

SEQ ID NO: 48995 - RNA, 22 nt, Human
auggccagcccuucccgcagcu

SEQ ID NO: 48996 - RNA, 22 nt, Human
auggccagccugguacuuggca

SEQ ID NO: 48997 - RNA, 22 nt, Human
auggccagcuagcacuugcauu

SEQ ID NO: 48998 - RNA, 22 nt, Human
auggccaggcaccucuggcuga

SEQ ID NO: 48999 - RNA, 22 nt, Human
auggccagggccaaaagagaug

SEQ ID NO: 49000 - RNA, 22 nt, Human
auggccagucaagccucuggcu

SEQ ID NO: 49001 - RNA, 22 nt, Human
auggccaguguugagaucaggc

SEQ ID NO: 49002 - RNA, 22 nt, Human
auggccaugccaguuuacagcc

SEQ ID NO: 49003 - RNA, 22 nt, Human
auggcccaggccuccuguggcu

SEQ ID NO: 49004 - RNA, 22 nt, Human
auggcccugaccuugaugaccu

SEQ ID NO: 49005 - RNA, 22 nt, Human
auggcccugcugguuugaucgu

SEQ ID NO: 49006 - RNA, 22 nt, Human
auggccuccgacccaugacgug

SEQ ID NO: 49007 - RNA, 22 nt, Human
auggccuggccagagcucugcu

SEQ ID NO: 49008 - RNA, 22 nt, Human
auggccuuagugaugauuaaua

SEQ ID NO: 49009 - RNA, 22 nt, Human
auggccuuggcugcagagacau

SEQ ID NO: 49010 - RNA, 22 nt, Human
auuagcaacucuuauguaagca

SEQ ID NO: 49011 - RNA, 22 nt, Human
auuagcaacugucuugaaaaca

SEQ ID NO: 49012 - RNA, 22 nt, Human
auuagcaaucacgcagucauuu

SEQ ID NO: 49013 - RNA, 22 nt, Human
auuagcaauugcccugugcaau

SEQ ID NO: 49014 - RNA, 22 nt, Human
auuagcagcuuucuggucucua

SEQ ID NO: 49015 - RNA, 22 nt, Human
auuagcauaaguguucggugca

SEQ ID NO: 49016 - RNA, 22 nt, Human
auuagcauugcuacucucaaga

SEQ ID NO: 49017 - RNA, 22 nt, Human
auuagcuauaugcuaugugcca

SEQ ID NO: 49018 - RNA, 20 nt, Human
auuagcucaggugaggucau

SEQ ID NO: 49019 - RNA, 22 nt, Human
auuagcuuaggcaugaagagaa

SEQ ID NO: 49020 - RNA, 22 nt, Human
auuagcuuaguguuuccguaau

SEQ ID NO: 49021 - RNA, 21 nt, Human
auuagcuucaaaagcuugucu

SEQ ID NO: 49022 - RNA, 22 nt, Human
auuagcuuuaaagacuuugauu

SEQ ID NO: 49023 - RNA, 22 nt, Human
auuagcuuugguggaaaggagu

SEQ ID NO: 49024 - RNA, 22 nt, Human
auuaggaagaggaugucagcau

SEQ ID NO: 49025 - RNA, 20 nt, Human
auuaggauuuuaggucauca

SEQ ID NO: 49026 - RNA, 22 nt, Human
auuaggcacuagaaugucaauu

SEQ ID NO: 49027 - RNA, 22 nt, Human
auuaggcauucaugcagcuccu

SEQ ID NO: 49028 - RNA, 22 nt, Human
auuaggcauucugaaugagguc

SEQ ID NO: 49029 - RNA, 22 nt, Human
auuagggcuggaugcaaggaaa

SEQ ID NO: 49030 - RNA, 22 nt, Human
auuagguaaucuuuagauacac

SEQ ID NO: 49031 - RNA, 22 nt, Human
auuagguuagugugcaagagaa

SEQ ID NO: 49032 - RNA, 22 nt, Human
auuaguaaaacauuguauaugu

SEQ ID NO: 49033 - RNA, 22 nt, Human
auuaguagcacacagagaucag

SEQ ID NO: 49034 - RNA, 22 nt, Human
auuaguagcuguaauaacuggg

SEQ ID NO: 49035 - RNA, 22 nt, Human
auuaguaguaguuagcagccuc

SEQ ID NO: 49036 - RNA, 22 nt, Human
auuagucuucucauuuggaucc

SEQ ID NO: 49037 - RNA, 22 nt, Human
auuagugucauguugaggacuu

SEQ ID NO: 49038 - RNA, 22 nt, Human
auuaguuuggugcaaaaguaau

SEQ ID NO: 49039 - RNA, 22 nt, Human
auuauaaaccuuugaggguggg

SEQ ID NO: 49040 - RNA, 22 nt, Human
auuauacaaggcuggugccuaa

SEQ ID NO: 49041 - RNA, 22 nt, Human
auuauacauuuuguguagagau

SEQ ID NO: 49042 - RNA, 22 nt, Human
auuauauaaaauucuggaagcu

SEQ ID NO: 49043 - RNA, 22 nt, Human
auuaucagccgucccacuacau

SEQ ID NO: 49044 - RNA, 22 nt, Human
auuauccagcaccaaugucaga

SEQ ID NO: 49045 - RNA, 22 nt, Human
auuauccucagaaaacauguga

SEQ ID NO: 49046 - RNA, 22 nt, Human
auuaugcucaccuggcaacuug

SEQ ID NO: 49047 - RNA, 22 nt, Human
auuauggacguuaauuuuggaa

SEQ ID NO: 49048 - RNA, 22 nt, Human
auuauggagaaauauguacagg

SEQ ID NO: 49049 - RNA, 22 nt, Human
auuauguaacugugguucagca

SEQ ID NO: 49050 - RNA, 22 nt, Human
auuauuacuccugauuguacug

SEQ ID NO: 49051 - RNA, 22 nt, Human
auuauuauauagggaaaguccc

SEQ ID NO: 49052 - RNA, 21 nt, Human
auuauuauuucuguguccagc

SEQ ID NO: 49053 - RNA, 22 nt, Human
auuauucaaauucccacuauac

SEQ ID NO: 49054 - RNA, 22 nt, Human
auuauucaaucauauuaaaagu

SEQ ID NO: 49055 - RNA, 22 nt, Human
auuauucucuggaggaaagauu

SEQ ID NO: 49056 - RNA, 22 nt, Human
auuauucuugagguguuuauug

SEQ ID NO: 49057 - RNA, 22 nt, Human
auuauugucaucuuaaucuuaa

SEQ ID NO: 49058 - RNA, 22 nt, Human
auuauuguguaaaaugaggcuu

SEQ ID NO: 49059 - RNA, 22 nt, Human
auuauuguuuuaauaguagaga

SEQ ID NO: 49060 - RNA, 22 nt, Human
auuauuuguguccacagaauac

SEQ ID NO: 49061 - RNA, 22 nt, Human
auucaaaccucauuuauuguuc

SEQ ID NO: 49062 - RNA, 22 nt, Human
auucaaagagcugccagaacug

SEQ ID NO: 49063 - RNA, 22 nt, Human
auucaaagaucaugaucucuac

SEQ ID NO: 49064 - RNA, 22 nt, Human
auucaaaguaauaaccagaacu

SEQ ID NO: 49065 - RNA, 22 nt, Human
auucaaaguagaugaaguuuca

SEQ ID NO: 49066 - RNA, 21 nt, Human
auucaacuagaugauuauuuc

SEQ ID NO: 49067 - RNA, 22 nt, Human
auucaacuguaaacuuguucac

SEQ ID NO: 49068 - RNA, 22 nt, Human
auucaacuuacaaaggagaaga

SEQ ID NO: 49069 - RNA, 22 nt, Human
auucaaguaaacacugaaggaa

SEQ ID NO: 49070 - RNA, 22 nt, Human
auucaaguacaguuuucuucuu

SEQ ID NO: 49071 - RNA, 22 nt, Human
auucacaacaaaaggauaugag

SEQ ID NO: 49072 - RNA, 16 nt, Human
auucacaaggcaucgg

SEQ ID NO: 49073 - RNA, 22 nt, Human
auucacaaguucuagggauuag

SEQ ID NO: 49074 - RNA, 22 nt, Human
auucacaauagcagcuugcaug

SEQ ID NO: 49075 - RNA, 22 nt, Human
auucacagaauaguuuuaccag

SEQ ID NO: 49076 - RNA, 20 nt, Human
auucacaggcacaaaacccu

SEQ ID NO: 49077 - RNA, 22 nt, Human
auucacagggacaaugggagag

SEQ ID NO: 49078 - RNA, 22 nt, Human
auucacagggcuuuccgcaugg

SEQ ID NO: 49079 - RNA, 22 nt, Human
auucacaguuuccucauauucu

SEQ ID NO: 49080 - RNA, 20 nt, Human
auucacauauaccagggagg

SEQ ID NO: 49081 - RNA, 19 nt, Human
auucacaucccugggaagg

SEQ ID NO: 49082 - RNA, 15 nt, Human
auucacauugcuuca

SEQ ID NO: 49083 - RNA, 22 nt, Human
auucacauuuuauuucacugga

SEQ ID NO: 49084 - RNA, 20 nt, Human
auucaccaaaucaucccagg

SEQ ID NO: 49085 - RNA, 22 nt, Human
auucacuagguugcaaaacugu

SEQ ID NO: 49086 - RNA, 22 nt, Human
auucacuguggguccuuuggau

SEQ ID NO: 49087 - RNA, 22 nt, Human
auucagaaagauaugccugguu

SEQ ID NO: 49088 - RNA, 20 nt, Human
auucagaauaggcauguaaa

SEQ ID NO: 49089 - RNA, 22 nt, Human
auucagaauuuuggggagcuaa

SEQ ID NO: 49090 - RNA, 22 nt, Human
auucagaucauauuuauagcuu

SEQ ID NO: 49091 - RNA, 22 nt, Human
auucagcacaucuuuguacagc

SEQ ID NO: 49092 - RNA, 22 nt, Human
auucagcaguuccugcuucagu

SEQ ID NO: 49093 - RNA, 22 nt, Human
auucagcaugcaauuagguaau

SEQ ID NO: 49094 - RNA, 22 nt, Human
auucagcauuggcaccauggau

SEQ ID NO: 49095 - RNA, 22 nt, Human
auucagcucugaaucagcagac

SEQ ID NO: 49096 - RNA, 22 nt, Human
auucagucaaaaaugauggaga

SEQ ID NO: 49097 - RNA, 22 nt, Human
auucagucaaaccacuggucau

SEQ ID NO: 49098 - RNA, 22 nt, Human
auucagugggugcucagcacaa

SEQ ID NO: 49099 - RNA, 22 nt, Human
auucaguuagaucauccuaauu

SEQ ID NO: 49100 - RNA, 22 nt, Human
auucaguuaguagauuugguca

SEQ ID NO: 49101 - RNA, 22 nt, Human
auucaguuccuugaggguauag

SEQ ID NO: 49102 - RNA, 22 nt, Human
auucaguucuaaggucagugcc

SEQ ID NO: 49103 - RNA, 22 nt, Human
auucauagcucaguacagacuc

SEQ ID NO: 49104 - RNA, 22 nt, Human
auucauaucauagaguuauuga

SEQ ID NO: 49105 - RNA, 22 nt, Human
auucaugugccacuggugaaca

SEQ ID NO: 49106 - RNA, 22 nt, Human
auucauuagccacuaacuagca

SEQ ID NO: 49107 - RNA, 22 nt, Human
auucauuuagagggauuaagca

SEQ ID NO: 49108 - RNA, 22 nt, Human
auuccacaagaccauaaauuag

SEQ ID NO: 49109 - RNA, 22 nt, Human
auuccacagcuacguuuugagc

SEQ ID NO: 49110 - RNA, 22 nt, Human
auuccacaguguguggugagga

SEQ ID NO: 49111 - RNA, 22 nt, Human
auuccacauaggccuucaugac

SEQ ID NO: 49112 - RNA, 22 nt, Human
auuccagagagguucuggaggu

SEQ ID NO: 49113 - RNA, 22 nt, Human
cagguuccaguugcagggacuu

SEQ ID NO: 49114 - RNA, 22 nt, Human
cagguucuggguccuggguccu

SEQ ID NO: 49115 - RNA, 22 nt, Human
cagguucuuaaguaacagcaca

SEQ ID NO: 49116 - RNA, 22 nt, Human
cagguucuuguuucaaacagac

SEQ ID NO: 49117 - RNA, 22 nt, Human
cagguugguauucaucuccaca

SEQ ID NO: 49118 - RNA, 22 nt, Human
caguaaauacauaucagagaag

SEQ ID NO: 49119 - RNA, 22 nt, Human
auucauguagugauugagucac

SEQ ID NO: 49120 - RNA, 22 nt, Human
auucauuuagguauucacuuac

SEQ ID NO: 49121 - RNA, 19 nt, Human
auucauuuuugccuucuaa

SEQ ID NO: 49122 - RNA, 22 nt, Human
auuccaaaaggauguuagaaug

SEQ ID NO: 49123 - RNA, 22 nt, Human
auuccaaaggcuggccuggagg

SEQ ID NO: 49124 - RNA, 22 nt, Human
auuccacacaguaauacucaau

SEQ ID NO: 49125 - RNA, 22 nt, Human
auuccacaggacuaccaaugug

SEQ ID NO: 49126 - RNA, 22 nt, Human
auuccacaggagcugguuuucu

SEQ ID NO: 49127 - RNA, 22 nt, Human
auuccacagugccuuccgugaa

SEQ ID NO: 49128 - RNA, 20 nt, Human
auuccacuuauaugaggucc

SEQ ID NO: 49129 - RNA, 21 nt, Human
auuccacuuuuccuucaggga

SEQ ID NO: 49130 - RNA, 22 nt, Human
auuccagauguuacugaaaggc

SEQ ID NO: 49131 - RNA, 22 nt, Human
auuccaggacuaaaggaacagc

SEQ ID NO: 49132 - RNA, 20 nt, Human
auuccauaguuggcacuuuu

SEQ ID NO: 49133 - RNA, 22 nt, Human
auuccauuacagaucuuuuccu

SEQ ID NO: 49134 - RNA, 22 nt, Human
auucccaccaacaauguacagg

SEQ ID NO: 49135 - RNA, 22 nt, Human
auucccaccaagcaggccaugc

SEQ ID NO: 49136 - RNA, 22 nt, Human
auucccaccugaaaaagguagg

SEQ ID NO: 49137 - RNA, 22 nt, Human
auucccacuagcucuuuauaga

SEQ ID NO: 49138 - RNA, 22 nt, Human
auuccugaagaagguauguugc

SEQ ID NO: 49139 - RNA, 22 nt, Human
auuccugacugcuagucauuca

SEQ ID NO: 49140 - RNA, 22 nt, Human
auuccugacuguuagaguuugc

SEQ ID NO: 49141 - RNA, 22 nt, Human
auuccugauuaacgaccuuuca

SEQ ID NO: 49142 - RNA, 22 nt, Human
auuccuuggcauucuggacuug

SEQ ID NO: 49143 - RNA, 22 nt, Human
auuccuugggaauuauugaaug

SEQ ID NO: 49144 - RNA, 22 nt, Human
auuccuuguuucacugaaaagg

SEQ ID NO: 49145 - RNA, 22 nt, Human
auucuaacacaugcucuaagaa

SEQ ID NO: 49146 - RNA, 23 nt, Human
auucuaagaugugaucuuauaac

SEQ ID NO: 49147 - RNA, 22 nt, Human
auucuaagcacgcugaagucuu

SEQ ID NO: 49148 - RNA, 22 nt, Human
auucuaagucuuguucacauuc

SEQ ID NO: 49149 - RNA, 22 nt, Human
auucuaagugcuuguggugguu

SEQ ID NO: 49150 - RNA, 22 nt, Human
auucuaauggcagagacuccug

SEQ ID NO: 49151 - RNA, 22 nt, Human
auucuaauuaguucuacauguu

SEQ ID NO: 49152 - RNA, 22 nt, Human
auucuacaacccaauaauaauu

SEQ ID NO: 49153 - RNA, 22 nt, Human
auucuacugcaaauccugacca

SEQ ID NO: 49154 - RNA, 22 nt, Human
auucuagaacagagguuucuaa

SEQ ID NO: 49155 - RNA, 22 nt, Human
auucuagaguuucaauccaagg

SEQ ID NO: 49156 - RNA, 22 nt, Human
auucuagauaagaaaagggcug

SEQ ID NO: 49157 - RNA, 22 nt, Human
auucuagccaaccaucugagau

SEQ ID NO: 49158 - RNA, 22 nt, Human
auucuagcucaucuacuuucca

SEQ ID NO: 49159 - RNA, 22 nt, Human
auucuaggcuugaaacaugaag

SEQ ID NO: 49160 - RNA, 22 nt, Human
auucuauagacagaaggucaau

SEQ ID NO: 49161 - RNA, 22 nt, Human
auucucaaagccagagucaacg

SEQ ID NO: 49162 - RNA, 22 nt, Human
auucucaauggcuacuuucaua

SEQ ID NO: 49163 - RNA, 20 nt, Human
auucucacauggcuccgggc

SEQ ID NO: 49164 - RNA, 17 nt, Human
auucucaguguacagug

SEQ ID NO: 49165 - RNA, 22 nt, Human
auucuccacacauccagaccuu

SEQ ID NO: 49166 - RNA, 22 nt, Human
auucucuagucucuuccauaaa

SEQ ID NO: 49167 - RNA, 22 nt, Human
auucucucuucugcugcccgug

SEQ ID NO: 49168 - RNA, 22 nt, Human
auucucugaagucuuucagggc

SEQ ID NO: 49169 - RNA, 22 nt, Human
auucucugccauugcgguggau

SEQ ID NO: 49170 - RNA, 22 nt, Human
auucucugcugcacugauaaca

SEQ ID NO: 49171 - RNA, 22 nt, Human
auucucuguagauggcuugaga

SEQ ID NO: 49172 - RNA, 22 nt, Human
auucucugugucugcuuuccca

SEQ ID NO: 49173 - RNA, 22 nt, Human
auucucuguucaaggaugguga

SEQ ID NO: 49174 - RNA, 22 nt, Human
auucucuguuuccaagaugaaa

SEQ ID NO: 49175 - RNA, 22 nt, Human
auucugagaggcacaaugugga

SEQ ID NO: 49176 - RNA, 22 nt, Human
auucugagcuacuaauuaggca

SEQ ID NO: 49177 - RNA, 21 nt, Human
auucugagucuuggggucuca

SEQ ID NO: 49178 - RNA, 22 nt, Human
auucugaguuagagucagccag

SEQ ID NO: 49179 - RNA, 22 nt, Human
auucugauaucuuauucuagcu

SEQ ID NO: 49180 - RNA, 22 nt, Human
auucugauucauuaggucuagg

SEQ ID NO: 49181 - RNA, 22 nt, Human
auucugccucacaggcagcugg

SEQ ID NO: 49182 - RNA, 22 nt, Human
auucugcucaugagcucccggg

SEQ ID NO: 49183 - RNA, 20 nt, Human
auucugcuuucugauagagc

SEQ ID NO: 49184 - RNA, 22 nt, Human
auucuggacaaugagaaacugg

SEQ ID NO: 49185 - RNA, 22 nt, Human
auucugggucugggugugauca

SEQ ID NO: 49186 - RNA, 22 nt, Human
auucugggugacuacgugauca

SEQ ID NO: 49187 - RNA, 22 nt, Human
auucuggguuugcuguacaaag

SEQ ID NO: 49188 - RNA, 17 nt, Human
auucuguaagguuggau

SEQ ID NO: 49189 - RNA, 22 nt, Human
auucuguaauugaacuguguug

SEQ ID NO: 49190 - RNA, 22 nt, Human
auucuguauggggaaacuagag

SEQ ID NO: 49191 - RNA, 22 nt, Human
auucuguauuuggauauaaggg

SEQ ID NO: 49192 - RNA, 22 nt, Human
auucugucagaucuuacuggau

SEQ ID NO: 49193 - RNA, 22 nt, Human
auucugucauuucaagaaaaac

SEQ ID NO: 49194 - RNA, 22 nt, Human
auucuuaaauuuaggucuguga

SEQ ID NO: 49195 - RNA, 22 nt, Human
auucuuauuuaaauagagucug

SEQ ID NO: 49196 - RNA, 22 nt, Human
auucuucaaagagugucaaagu

SEQ ID NO: 49197 - RNA, 22 nt, Human
auucuucacauggauaggaucu

SEQ ID NO: 49198 - RNA, 22 nt, Human
auucuucaccugagucagucua

SEQ ID NO: 49199 - RNA, 22 nt, Human
auucuucauacagacaaguccu

SEQ ID NO: 49200 - RNA, 22 nt, Human
auucuucaucacuaccuuguga

SEQ ID NO: 49201 - RNA, 22 nt, Human
auucuugauauagauaguuaau

SEQ ID NO: 49202 - RNA, 22 nt, Human
auucuugcuucacacuccucug

SEQ ID NO: 49203 - RNA, 19 nt, Human
auucuuggugcaccuugua

SEQ ID NO: 49204 - RNA, 19 nt, Human
auucuuguuaagugucauc

SEQ ID NO: 49205 - RNA, 17 nt, Human
auucuuugaugucucug

SEQ ID NO: 49206 - RNA, 22 nt, Human
auucuuuggacaauaaguggug

SEQ ID NO: 49207 - RNA, 19 nt, Human
auucuuugguguccauuuc

SEQ ID NO: 49208 - RNA, 22 nt, Human
auucuuuuaaauggcaguagua

SEQ ID NO: 49209 - RNA, 22 nt, Human
auugaaaauauaauucuaggag

SEQ ID NO: 49210 - RNA, 22 nt, Human
auugaaagauuuugggcucaug

SEQ ID NO: 49211 - RNA, 22 nt, Human
auugaaagcacaaagaacaagu

SEQ ID NO: 49212 - RNA, 22 nt, Human
auugaaaggcaaaguaggaagc

SEQ ID NO: 49213 - RNA, 22 nt, Human
auugaacagaaaaacucagaga

SEQ ID NO: 49214 - RNA, 22 nt, Human
auugaacagcccagguuuaccu

SEQ ID NO: 49215 - RNA, 22 nt, Human
auugaacauuguucuaggaggc

SEQ ID NO: 49216 - RNA, 22 nt, Human
auugaacugaauccuggauugc

SEQ ID NO: 49217 - RNA, 22 nt, Human
auugaagauucugacaucagaa

SEQ ID NO: 49218 - RNA, 22 nt, Human
auugaauagcugcuuguuguau

SEQ ID NO: 49219 - RNA, 22 nt, Human
auugaaucugcacuaguauuuu

SEQ ID NO: 49220 - RNA, 22 nt, Human
auugacaaaucugaacauacgg

SEQ ID NO: 49221 - RNA, 22 nt, Human
auugacaagaaagauauuuuua

SEQ ID NO: 49222 - RNA, 22 nt, Human
auugacaagugagcugggcugc

SEQ ID NO: 49223 - RNA, 22 nt, Human
auugacaauuagcccuuaggug

SEQ ID NO: 49224 - RNA, 22 nt, Human
auugacaauucuaugcagagca

SEQ ID NO: 49225 - RNA, 22 nt, Human
auugacagaaaauuggauggca

SEQ ID NO: 49226 - RNA, 22 nt, Human
auugacagcaggggcugucacu

SEQ ID NO: 49227 - RNA, 22 nt, Human
auugacauguaggcuacaagga

SEQ ID NO: 49228 - RNA, 22 nt, Human
auuuagacaccagcuuguaagg

SEQ ID NO: 49229 - RNA, 22 nt, Human
auuuagacauguaucugauagc

SEQ ID NO: 49230 - RNA, 22 nt, Human
auuuagagaauaagacauaaau

SEQ ID NO: 49231 - RNA, 22 nt, Human
auuuagagugaaacauuaugca

SEQ ID NO: 49232 - RNA, 22 nt, Human
auuuagcuuucucucacuggug

SEQ ID NO: 49233 - RNA, 22 nt, Human
auuuaggaauguucugcacaaa

SEQ ID NO: 49234 - RNA, 22 nt, Human
auuuagguagcugucuaagugu

SEQ ID NO: 49235 - RNA, 22 nt, Human
auuuaguagagaaauuaagaaa

SEQ ID NO: 49236 - RNA, 22 nt, Human
cauaacuugguguuggaaacug

SEQ ID NO: 49237 - RNA, 22 nt, Human
cauaagaaauaaugaugaugac

SEQ ID NO: 49238 - RNA, 22 nt, Human
cauaagaaauuuaacagaacuu

SEQ ID NO: 49239 - RNA, 22 nt, Human
cauaagaauauuccauccuuug

SEQ ID NO: 49240 - RNA, 22 nt, Human
cauaagaaucuuccagggcaug

SEQ ID NO: 49241 - RNA, 22 nt, Human
cauaaguugcagagggugcauu

SEQ ID NO: 49242 - RNA, 19 nt, Human
cauaauacaguggaucuga

SEQ ID NO: 49243 - RNA, 22 nt, Human
cauaauauacuacauugaugaa

SEQ ID NO: 49244 - RNA, 22 nt, Human
cauaauccauuugcacugcaga

SEQ ID NO: 49245 - RNA, 22 nt, Human
cauaaucccccauuugugacau

SEQ ID NO: 49246 - RNA, 22 nt, Human
cauaaugugugucauacagacu

SEQ ID NO: 49247 - RNA, 22 nt, Human
cauaauuaggcaguugaucauu

SEQ ID NO: 49248 - RNA, 22 nt, Human
cauaauuugugguaguggggga

SEQ ID NO: 49249 - RNA, 18 nt, Human
cauaauuuucuuucuuua

SEQ ID NO: 49250 - RNA, 22 nt, Human
cauaauuuuuuuaagucagaac

SEQ ID NO: 49251 - RNA, 22 nt, Human
cauacaagcgugcaugugcuug

SEQ ID NO: 49252 - RNA, 22 nt, Human
cauacaaucaaguucuuuauua

SEQ ID NO: 49253 - RNA, 19 nt, Human
cauacaauuaccauaggau

SEQ ID NO: 49254 - RNA, 22 nt, Human
cauacauaugcauguguguaua

SEQ ID NO: 49255 - RNA, 22 nt, Human
cauacauauguggaugucauau

SEQ ID NO: 49256 - RNA, 22 nt, Human
cauacauugcucauucaguauc

SEQ ID NO: 49257 - RNA, 21 nt, Human
cauaccauucucuaagcaaaa

SEQ ID NO: 49258 - RNA, 22 nt, Human
cauaccuuucucaagcacaugu

SEQ ID NO: 49259 - RNA, 22 nt, Human
cauacucacuguuguaucuucg

SEQ ID NO: 49260 - RNA, 22 nt, Human
cauacuuugggauaagagugga

SEQ ID NO: 49261 - RNA, 22 nt, Human
cauacuuuugcccugacauucu

SEQ ID NO: 49262 - RNA, 22 nt, Human
cauagaauaugugugauuguua

SEQ ID NO: 49263 - RNA, 22 nt, Human
cauagacaaagaucagaagagu

SEQ ID NO: 49264 - RNA, 22 nt, Human
cauagacauugauagguuauau

SEQ ID NO: 49265 - RNA, 22 nt, Human
cauagauagagguuccuaauag

SEQ ID NO: 49266 - RNA, 22 nt, Human
cauaggcucuucagagaacuga

SEQ ID NO: 49267 - RNA, 22 nt, Human
cauaguaagugcauaauaaaug

SEQ ID NO: 49268 - RNA, 22 nt, Human
cauaguuauaaggcaacacugu

SEQ ID NO: 49269 - RNA, 22 nt, Human
cauaguuuuagguagaaacugg

SEQ ID NO: 49270 - RNA, 22 nt, Human
cauauacacuuccaccucugug

SEQ ID NO: 49271 - RNA, 20 nt, Human
cauauauaccuagaagugga

SEQ ID NO: 49272 - RNA, 22 nt, Human
cauauaucuaccugcaauugca

SEQ ID NO: 49273 - RNA, 22 nt, Human
cauaucauaggucuuggauaau

SEQ ID NO: 49274 - RNA, 22 nt, Human
cauaucauuugcuuauaaaucu

SEQ ID NO: 49275 - RNA, 22 nt, Human
cauauccagguuucuuugguuu

SEQ ID NO: 49276 - RNA, 22 nt, Human
cauaucuuaugguuuucuaagu

SEQ ID NO: 49277 - RNA, 22 nt, Human
cauauguauuucucauaauuag

SEQ ID NO: 49278 - RNA, 22 nt, Human
cauauucuuuaagcaaugcucu

SEQ ID NO: 49279 - RNA, 22 nt, Human
cauauugcugucauugucccuc

SEQ ID NO: 49280 - RNA, 22 nt, Human
caucaaagcuuuuuucuguguu

SEQ ID NO: 49281 - RNA, 22 nt, Human
caucaaaguugguauauuugca

SEQ ID NO: 49282 - RNA, 22 nt, Human
caucaaauacuacauggguugg

SEQ ID NO: 49283 - RNA, 20 nt, Human
caucaacaccuugucagccu

SEQ ID NO: 49284 - RNA, 22 nt, Human
caucaaguagguccuuucaaga

SEQ ID NO: 49285 - RNA, 19 nt, Human
caucaaguggaguaucucg

SEQ ID NO: 49286 - RNA, 22 nt, Human
caucaauaggguuugaaagcaa

SEQ ID NO: 49287 - RNA, 22 nt, Human
caucacaaauguaauaaugucu

SEQ ID NO: 49288 - RNA, 22 nt, Human
caucacaugccuaucaugagcu

SEQ ID NO: 49289 - RNA, 19 nt, Human
caucacauggucugaugaa

SEQ ID NO: 49290 - RNA, 21 nt, Human
caucacauuacucaaaguccu

SEQ ID NO: 49291 - RNA, 22 nt, Human
caucacauuagucucaagagaa

SEQ ID NO: 49292 - RNA, 22 nt, Human
caucacugcuucuaaaauggug

SEQ ID NO: 49293 - RNA, 22 nt, Human
caucacugucaccaucuuuccu

SEQ ID NO: 49294 - RNA, 22 nt, Human
caucacuuuuaaaggugaucga

SEQ ID NO: 49295 - RNA, 20 nt, Human
caucagaaauccugacccac

SEQ ID NO: 49296 - RNA, 22 nt, Human
caucagaacaaaucgguuaaga

SEQ ID NO: 49297 - RNA, 22 nt, Human
caucagaaggaaggacgauuau

SEQ ID NO: 49298 - RNA, 22 nt, Human
caucagaauagcucuguggaua

SEQ ID NO: 49299 - RNA, 22 nt, Human
caucagaauguuauggggggcu

SEQ ID NO: 49300 - RNA, 22 nt, Human
caucagagucagagcucuuucu

SEQ ID NO: 49301 - RNA, 22 nt, Human
caucagcagucacaugaugcug

SEQ ID NO: 49302 - RNA, 22 nt, Human
caucagcucuucauucuugauu

SEQ ID NO: 49303 - RNA, 22 nt, Human
caucaggaaaggacgucuagcc

SEQ ID NO: 49304 - RNA, 22 nt, Human
caucaggacagcuucuuuucac

SEQ ID NO: 49305 - RNA, 20 nt, Human
caucaggacccucaguuuuu

SEQ ID NO: 49306 - RNA, 22 nt, Human
caucaggauaaguuccaggugg

SEQ ID NO: 49307 - RNA, 22 nt, Human
caucaguaaggcaacauagcuu

SEQ ID NO: 49308 - RNA, 18 nt, Human
caucaguauccacuaggu

SEQ ID NO: 49309 - RNA, 23 nt, Human
caucagugagggggaaucacuaa

SEQ ID NO: 49310 - RNA, 22 nt, Human
caucagugcggcaucugucauc

SEQ ID NO: 49311 - RNA, 22 nt, Human
caucagugguaacugaaugguu

SEQ ID NO: 49312 - RNA, 22 nt, Human
caucaguguguugccuugcuca

SEQ ID NO: 49313 - RNA, 22 nt, Human
caucaguguuggcuucucagag

SEQ ID NO: 49314 - RNA, 22 nt, Human
caucaguuuuagaggggugaaa

SEQ ID NO: 49315 - RNA, 22 nt, Human
caucauauauuucuacaagugc

SEQ ID NO: 49316 - RNA, 22 nt, Human
caucauauggaauuuaaaguca

SEQ ID NO: 49317 - RNA, 22 nt, Human
caucaucucucccccaggccug

SEQ ID NO: 49318 - RNA, 22 nt, Human
caucaugccccgcuacagugca

SEQ ID NO: 49319 - RNA, 19 nt, Human
caucauuaucaguucacug

SEQ ID NO: 49320 - RNA, 22 nt, Human
caucauugaacacuucuuccug

SEQ ID NO: 49321 - RNA, 23 nt, Human
caucauuguuaugggugcuacua

SEQ ID NO: 49322 - RNA, 22 nt, Human
caucauuuaauuauaggggcug

SEQ ID NO: 49323 - RNA, 22 nt, Human
caucauuucacuuagaugaagu

SEQ ID NO: 49324 - RNA, 22 nt, Human
caucauuuuauuaaccaagaaa

SEQ ID NO: 49325 - RNA, 22 nt, Human
cauccaaacucucauuaucugu

SEQ ID NO: 49326 - RNA, 22 nt, Human
cauccaauguccuauuaagacu

SEQ ID NO: 49327 - RNA, 22 nt, Human
cauccacuagaaugacagaguu

SEQ ID NO: 49328 - RNA, 22 nt, Human
cauccagaguccaaggcugggc

SEQ ID NO: 49329 - RNA, 22 nt, Human
cauccagggcagccauggccug

SEQ ID NO: 49330 - RNA, 22 nt, Human
cauccauaugaggcacauuggu

SEQ ID NO: 49331 - RNA, 22 nt, Human
cauccauucauuaauucuaaag

SEQ ID NO: 49332 - RNA, 22 nt, Human
caucccugcccucaugccuaua

SEQ ID NO: 49333 - RNA, 22 nt, Human
caucccugcugguggaaggggu

SEQ ID NO: 49334 - RNA, 22 nt, Human
caucccugucugccacucugaa

SEQ ID NO: 49335 - RNA, 22 nt, Human
cauccugaaagaaacauuuccu

SEQ ID NO: 49336 - RNA, 22 nt, Human
cauccugaagaagccgcacugu

SEQ ID NO: 49337 - RNA, 22 nt, Human
auuuggaacuuauaauaaguuu

SEQ ID NO: 49338 - RNA, 22 nt, Human
auuuggaagguuuacaaagaga

SEQ ID NO: 49339 - RNA, 22 nt, Human
auuuggaauagcuguagaaaua

SEQ ID NO: 49340 - RNA, 22 nt, Human
auuuggagacaggauuuuucag

SEQ ID NO: 49341 - RNA, 21 nt, Human
auuuggcaaaggcgaugcaca

SEQ ID NO: 49342 - RNA, 22 nt, Human
auuuggcaaauaauuugagggu

SEQ ID NO: 49343 - RNA, 22 nt, Human
auuuggcauaggcagaggccca

SEQ ID NO: 49344 - RNA, 22 nt, Human
auuuggcuaccaugaggauggg

SEQ ID NO: 49345 - RNA, 22 nt, Human
auuuggcuauugaauuauuccu

SEQ ID NO: 49346 - RNA, 22 nt, Human
auuuggcuguaguaacuggauc

SEQ ID NO: 49347 - RNA, 22 nt, Human
auuugggaaugugcauuauacu

SEQ ID NO: 49348 - RNA, 22 nt, Human
auuugggaguugcuagugaguu

SEQ ID NO: 49349 - RNA, 22 nt, Human
auuuggggcucaccagggcuga

SEQ ID NO: 49350 - RNA, 21 nt, Human
auuuggucaaggacaacucug

SEQ ID NO: 49351 - RNA, 22 nt, Human
auuuggucccuuguuguguccc

SEQ ID NO: 49352 - RNA, 22 nt, Human
auuugguguuguuuggagccua

SEQ ID NO: 49353 - RNA, 22 nt, Human
auugcuguggaaauauaagaug

SEQ ID NO: 49354 - RNA, 22 nt, Human
auugcuugaauuaccauguaau

SEQ ID NO: 49355 - RNA, 22 nt, Human
auugcuuuagaaagaaaaauau

SEQ ID NO: 49356 - RNA, 22 nt, Human
auugcuuuuagugaaauuauau

SEQ ID NO: 49357 - RNA, 22 nt, Human
auugcuuuuccuuaacacaugc

SEQ ID NO: 49358 - RNA, 22 nt, Human
auuggaaauacaguagaaaaau

SEQ ID NO: 49359 - RNA, 22 nt, Human
auuggaacggcuccgcgucuga

SEQ ID NO: 49360 - RNA, 22 nt, Human
auuggaacugauugaugauaau

SEQ ID NO: 49361 - RNA, 22 nt, Human
auuggaauggcuuugcaugucc

SEQ ID NO: 49362 - RNA, 21 nt, Human
auuggcacaccuuuuauugga

SEQ ID NO: 49363 - RNA, 22 nt, Human
auuggcacugcacaugauugcu

SEQ ID NO: 49364 - RNA, 22 nt, Human
auuggcagggccagcaucuccc

SEQ ID NO: 49365 - RNA, 22 nt, Human
auuggcaguuagugacgaggcu

SEQ ID NO: 49366 - RNA, 22 nt, Human
auuggccugaaacugguucagc

SEQ ID NO: 49367 - RNA, 22 nt, Human
auuggcuuucuuuugugaaaau

SEQ ID NO: 49368 - RNA, 22 nt, Human
auugggcuuuauguaggggaag

SEQ ID NO: 49369 - RNA, 22 nt, Human
auuggucuccacuuguuuuaga

SEQ ID NO: 49370 - RNA, 22 nt, Human
auuggucucugcuaaagggagg

SEQ ID NO: 49371 - RNA, 22 nt, Human
auuggugcucuggcacauuccu

SEQ ID NO: 49372 - RNA, 22 nt, Human
auuguaaaguacuguguacaau

SEQ ID NO: 49373 - RNA, 22 nt, Human
auuguaagagguuuggcugugu

SEQ ID NO: 49374 - RNA, 22 nt, Human
auuguacagaugagguaaguga

SEQ ID NO: 49375 - RNA, 22 nt, Human
auuguacagcucugagaggggg

SEQ ID NO: 49376 - RNA, 22 nt, Human
auuguacuacaccauaguacug

SEQ ID NO: 49377 - RNA, 22 nt, Human
auuguauaacagcauguauuuu

SEQ ID NO: 49378 - RNA, 22 nt, Human
auuguauacaagcuuaauuguu

SEQ ID NO: 49379 - RNA, 22 nt, Human
auuguaucuugucauuaugcau

SEQ ID NO: 49380 - RNA, 22 nt, Human
auuguauuuaggagaaaagggu

SEQ ID NO: 49381 - RNA, 22 nt, Human
auuguauuuccagcuugaaugu

SEQ ID NO: 49382 - RNA, 20 nt, Human
auugucagccuucagaggag

SEQ ID NO: 49383 - RNA, 22 nt, Human
auugucaguuuaauauagucaa

SEQ ID NO: 49384 - RNA, 22 nt, Human
auugucauuccagucauuguua

SEQ ID NO: 49385 - RNA, 22 nt, Human
auuguccaucuccacauuaaug

SEQ ID NO: 49386 - RNA, 22 nt, Human
auuguccuaucucagugccaug

SEQ ID NO: 49387 - RNA, 22 nt, Human
auugucuaauugacuuggugug

SEQ ID NO: 49388 - RNA, 22 nt, Human
auugucucuuucaauaacuugu

SEQ ID NO: 49389 - RNA, 22 nt, Human
auugucuuacauacuguggagg

SEQ ID NO: 49390 - RNA, 22 nt, Human
auugucuuagucagcucggacu

SEQ ID NO: 49391 - RNA, 22 nt, Human
auugucuucuggucuuaucuuu

SEQ ID NO: 49392 - RNA, 22 nt, Human
auugucuuggaaccaaggucuu

SEQ ID NO: 49393 - RNA, 22 nt, Human
auugucuuuaaccucugagggg

SEQ ID NO: 49394 - RNA, 22 nt, Human
auugucuuuccacugagaaguu

SEQ ID NO: 49395 - RNA, 22 nt, Human
auugucuuuggugcuuccagga

SEQ ID NO: 49396 - RNA, 20 nt, Human
auugugaauacugcauaugu

SEQ ID NO: 49397 - RNA, 22 nt, Human
auugugauuagagaauauagag

SEQ ID NO: 49398 - RNA, 22 nt, Human
auugugcaaauauuaucuguag

SEQ ID NO: 49399 - RNA, 22 nt, Human
auugugcaccaccuuguggcag

SEQ ID NO: 49400 - RNA, 22 nt, Human
auugugcagauaguaauuagga

SEQ ID NO: 49401 - RNA, 22 nt, Human
auugugcagcucugcucuuauu

SEQ ID NO: 49402 - RNA, 22 nt, Human
auugugcaucuacugugugcag

SEQ ID NO: 49403 - RNA, 22 nt, Human
auuguguccucauugaccuuca

SEQ ID NO: 49404 - RNA, 22 nt, Human
auuguguuugaaugaggcucca

SEQ ID NO: 49405 - RNA, 22 nt, Human
auuguuaacuauagcaucuggu

SEQ ID NO: 49406 - RNA, 22 nt, Human
auuguuaauaacuauuacauug

SEQ ID NO: 49407 - RNA, 18 nt, Human
auuguuaauagaguacuu

SEQ ID NO: 49408 - RNA, 21 nt, Human
auuguuaguaauaguccacac

SEQ ID NO: 49409 - RNA, 22 nt, Human
auuguucaauguaauaauuuug

SEQ ID NO: 49410 - RNA, 22 nt, Human
auuguucagaguagggcucugu

SEQ ID NO: 49411 - RNA, 22 nt, Human
auuguucuaaggguuuaauuaa

SEQ ID NO: 49412 - RNA, 21 nt, Human
auuguucuggaggaaaggauu

SEQ ID NO: 49413 - RNA, 22 nt, Human
auuguucuggauauuuacauug

SEQ ID NO: 49414 - RNA, 22 nt, Human
auuguugacuugauuacucaac

SEQ ID NO: 49415 - RNA, 20 nt, Human
auuguugcugcugcuguuga

SEQ ID NO: 49416 - RNA, 22 nt, Human
auuguuuaaagauacaucccug

SEQ ID NO: 49417 - RNA, 20 nt, Human
auuguuucauuuaauguaca

SEQ ID NO: 49418 - RNA, 22 nt, Human
auuguuuccccggaauuauuca

SEQ ID NO: 49419 - RNA, 23 nt, Human
auuguuuuuggcucucagggaau

SEQ ID NO: 49420 - RNA, 22 nt, Human
auuuaaaugcuuaagaggguuu

SEQ ID NO: 49421 - RNA, 22 nt, Human
auuuaagggauuuggagaccaa

SEQ ID NO: 49422 - RNA, 22 nt, Human
auuuacagccuugccaucuaua

SEQ ID NO: 49423 - RNA, 22 nt, Human
auuuacauuccauggugguuac

SEQ ID NO: 49424 - RNA, 22 nt, Human
auuuaccagcugugcacugaua

SEQ ID NO: 49425 - RNA, 22 nt, Human
auuuacugagguaaauaaacug

SEQ ID NO: 49426 - RNA, 21 nt, Human
auuuagaaggaaauuuugcaa

SEQ ID NO: 49427 - RNA, 22 nt, Human
auuuagcaagaguacaaaauaa

SEQ ID NO: 49428 - RNA, 17 nt, Human
auuuagcaaguagacag

SEQ ID NO: 49429 - RNA, 22 nt, Human
auuuagucuguaacaguacagu

SEQ ID NO: 49430 - RNA, 22 nt, Human
auuuagugaaacccauaaagca

SEQ ID NO: 49431 - RNA, 22 nt, Human
auuuaguguauucuaauaugug

SEQ ID NO: 49432 - RNA, 22 nt, Human
auuuaguguguauugcuauuau

SEQ ID NO: 49433 - RNA, 22 nt, Human
auuuaugacaaccaaagaguga

SEQ ID NO: 49434 - RNA, 22 nt, Human
auuuaugacagaagauaugcug

SEQ ID NO: 49435 - RNA, 22 nt, Human
auuuaugacguguucggucaau

SEQ ID NO: 49436 - RNA, 22 nt, Human
auuuaugacuggugaauagaac

SEQ ID NO: 49437 - RNA, 22 nt, Human
auuuaugauagcugcauuaaag

SEQ ID NO: 49438 - RNA, 22 nt, Human
auuuaugauuagccuauuguug

SEQ ID NO: 49439 - RNA, 22 nt, Human
auuuaugcaucccagcauguga

SEQ ID NO: 49440 - RNA, 22 nt, Human
auuuauuccuuuauggcuggag

SEQ ID NO: 49441 - RNA, 22 nt, Human
auuuauugagacuuaacaaccc

SEQ ID NO: 49442 - RNA, 22 nt, Human
auuuauugagagggaggggaau

SEQ ID NO: 49443 - RNA, 22 nt, Human
auuuauugguuugcauggugaa

SEQ ID NO: 49444 - RNA, 22 nt, Human
auuucaagggguccuugcuugg

SEQ ID NO: 49445 - RNA, 22 nt, Human
auuucacaucuaucucagauuu

SEQ ID NO: 49446 - RNA, 22 nt, Human
caaugacauggauaaucauauu

SEQ ID NO: 49447 - RNA, 22 nt, Human
caaugauagauuuuacaaauua

SEQ ID NO: 49448 - RNA, 22 nt, Human
caaugcugugcuccucaugagg

SEQ ID NO: 49449 - RNA, 22 nt, Human
caaugcuucugagggaauuaca

SEQ ID NO: 49450 - RNA, 22 nt, Human
caaugguugauuaaaauuuagc

SEQ ID NO: 49451 - RNA, 22 nt, Human
caauguaucaaccagaaaguuc

SEQ ID NO: 49452 - RNA, 22 nt, Human
caaugucugggagaccugugau

SEQ ID NO: 49453 - RNA, 22 nt, Human
caauguguguguuuuucucaac

SEQ ID NO: 49454 - RNA, 22 nt, Human
caauguguuugcauauuaaaau

SEQ ID NO: 49455 - RNA, 22 nt, Human
caauguuuucaacugacaagua

SEQ ID NO: 49456 - RNA, 21 nt, Human
caauuacagauggcucagggg

SEQ ID NO: 49457 - RNA, 22 nt, Human
caauuacugguccacagaaauu

SEQ ID NO: 49458 - RNA, 22 nt, Human
caauuagcugguacugacagga

SEQ ID NO: 49459 - RNA, 22 nt, Human
caauuauucagugacuuaagag

SEQ ID NO: 49460 - RNA, 22 nt, Human
caauucaaaccagucugucucu

SEQ ID NO: 49461 - RNA, 19 nt, Human
caauucugcaacacugucc

SEQ ID NO: 49462 - RNA, 22 nt, Human
caauucuuggagaagaagcaua

SEQ ID NO: 49463 - RNA, 22 nt, Human
caauugaacagaugaguuaaau

SEQ ID NO: 49464 - RNA, 22 nt, Human
caauugcuuuguggaagccuuu

SEQ ID NO: 49465 - RNA, 22 nt, Human
caauuucaaugaggccacaggg

SEQ ID NO: 49466 - RNA, 22 nt, Human
caauuucacuaauaauauuuac

SEQ ID NO: 49467 - RNA, 23 nt, Human
caauuucauaugauucuaccuaa

SEQ ID NO: 49468 - RNA, 22 nt, Human
caauuucaucuugugcuucaau

SEQ ID NO: 49469 - RNA, 22 nt, Human
caauuucaugccauguauugcu

SEQ ID NO: 49470 - RNA, 22 nt, Human
caauuucauuaauagauauaga

SEQ ID NO: 49471 - RNA, 22 nt, Human
caauuuccuucauagaugacug

SEQ ID NO: 49472 - RNA, 22 nt, Human
caauuucuaacauuccauggau

SEQ ID NO: 49473 - RNA, 22 nt, Human
caauuucuggaacuaauucuga

SEQ ID NO: 49474 - RNA, 22 nt, Human
caauuucugggccucacacaag

SEQ ID NO: 49475 - RNA, 22 nt, Human
caauuugcccuguuaaauuuuc

SEQ ID NO: 49476 - RNA, 22 nt, Human
caauuuuacucuuccucuucca

SEQ ID NO: 49477 - RNA, 22 nt, Human
caauuuuauugguccaaauaca

SEQ ID NO: 49478 - RNA, 22 nt, Human
caauuuucaauuccuucagaua

SEQ ID NO: 49479 - RNA, 22 nt, Human
caauuuuuguacuuauaguacu

SEQ ID NO: 49480 - RNA, 22 nt, Human
caauuuuuuccaugcucuuaca

SEQ ID NO: 49481 - RNA, 22 nt, Human
cacaaaauaucaagcacuuuua

SEQ ID NO: 49482 - RNA, 22 nt, Human
cacaaagcccucccugcgccag

SEQ ID NO: 49483 - RNA, 22 nt, Human
cacaaauccaauuuaauucugg

SEQ ID NO: 49484 - RNA, 22 nt, Human
cacaaaugacugaaacgacugu

SEQ ID NO: 49485 - RNA, 22 nt, Human
cacaacuuuaggaaccacauuc

SEQ ID NO: 49486 - RNA, 22 nt, Human
cacaagacuuauuuguguagaa

SEQ ID NO: 49487 - RNA, 22 nt, Human
cacaagagagugcgcguugcaa

SEQ ID NO: 49488 - RNA, 22 nt, Human
caagggcagauagcugguccaa

SEQ ID NO: 49489 - RNA, 22 nt, Human
caagggcagcagccucaagcgg

SEQ ID NO: 49490 - RNA, 22 nt, Human
caagggcaggagaggauggaug

SEQ ID NO: 49491 - RNA, 22 nt, Human
caagggccaucugagggcacug

SEQ ID NO: 49492 - RNA, 22 nt, Human
caagggcucuaagucacaagau

SEQ ID NO: 49493 - RNA, 22 nt, Human
caagggcugaacacagguuuca

SEQ ID NO: 49494 - RNA, 22 nt, Human
caagggcugcuaucagcuacug

SEQ ID NO: 49495 - RNA, 22 nt, Human
caagggggcaggaucacacuug

SEQ ID NO: 49496 - RNA, 22 nt, Human
caagggugaaggcuccuccagg

SEQ ID NO: 49497 - RNA, 22 nt, Human
caagggugguauugggagcaua

SEQ ID NO: 49498 - RNA, 22 nt, Human
caaggguucugugccuccugcu

SEQ ID NO: 49499 - RNA, 22 nt, Human
caaggucagcgugaaguucugu

SEQ ID NO: 49500 - RNA, 22 nt, Human
caaggucccagccccucuuggc

SEQ ID NO: 49501 - RNA, 22 nt, Human
caagguuuugcuuguaagggaa

SEQ ID NO: 49502 - RNA, 22 nt, Human
caaguacaaaaugauauuuagu

SEQ ID NO: 49503 - RNA, 22 nt, Human
caaguacugugauagcugaagu

SEQ ID NO: 49504 - RNA, 22 nt, Human
caaguaugagaaagcuauuacc

SEQ ID NO: 49505 - RNA, 22 nt, Human
caagucaagcaugcccuuauuu

SEQ ID NO: 49506 - RNA, 22 nt, Human
caagucacuuaugugcagauau

SEQ ID NO: 49507 - RNA, 22 nt, Human
caaguccaggucaauuuaaagc

SEQ ID NO: 49508 - RNA, 22 nt, Human
caaguccucgcuucuagcugug

SEQ ID NO: 49509 - RNA, 22 nt, Human
caaguccucugguuucaaauag

SEQ ID NO: 49510 - RNA, 22 nt, Human
caaguccuuagaugguucuuug

SEQ ID NO: 49511 - RNA, 22 nt, Human
caagugagccuccucuuuuuaa

SEQ ID NO: 49512 - RNA, 22 nt, Human
caagugucuucaaaggcuaaaa

SEQ ID NO: 49513 - RNA, 19 nt, Human
caaguuaaaaugaggucau

SEQ ID NO: 49514 - RNA, 22 nt, Human
caaguuauggcuucccaguagg

SEQ ID NO: 49515 - RNA, 22 nt, Human
caaguuauuucauuggaacaau

SEQ ID NO: 49516 - RNA, 22 nt, Human
caaguucacaugcauccuugcu

SEQ ID NO: 49517 - RNA, 20 nt, Human
caaguucaccuucuccucuc

SEQ ID NO: 49518 - RNA, 22 nt, Human
caaguucacguugcuuuuugag

SEQ ID NO: 49519 - RNA, 21 nt, Human
caaguucagaagguugggcug

SEQ ID NO: 49520 - RNA, 22 nt, Human
caaguucauuguagcauuauug

SEQ ID NO: 49521 - RNA, 22 nt, Human
caaguucuacugggacaucagu

SEQ ID NO: 49522 - RNA, 19 nt, Human
caaguucuggagauuaggg

SEQ ID NO: 49523 - RNA, 22 nt, Human
caaguucuuaacucugagcagc

SEQ ID NO: 49524 - RNA, 22 nt, Human
caaguugcucugccucuguagg

SEQ ID NO: 49525 - RNA, 22 nt, Human
caaguuuacuacuaccugugug

SEQ ID NO: 49526 - RNA, 22 nt, Human
caauaauauccugugcuguuug

SEQ ID NO: 49527 - RNA, 18 nt, Human
caauagaaacaguaggaa

SEQ ID NO: 49528 - RNA, 22 nt, Human
caauagauguuuuugcuuacca

SEQ ID NO: 49529 - RNA, 22 nt, Human
caauaucagguccgcguaaguc

SEQ ID NO: 49530 - RNA, 22 nt, Human
caaucacuccacaauaugguuc

SEQ ID NO: 49531 - RNA, 21 nt, Human
caaucacuuuugcaccaagcu

SEQ ID NO: 49532 - RNA, 22 nt, Human
caaucccaucaccaucugcucu

SEQ ID NO: 49533 - RNA, 22 nt, Human
caaugaaaaugaggacuccugu

SEQ ID NO: 49534 - RNA, 22 nt, Human
caaugaaauugagauccagaga

SEQ ID NO: 49535 - RNA, 22 nt, Human
caaugacaucucccugcucuaa

SEQ ID NO: 49536 - RNA, 22 nt, Human
caaugauggcuaggcagcugcu

SEQ ID NO: 49537 - RNA, 22 nt, Human
caaugauucugcaacugugugc

SEQ ID NO: 49538 - RNA, 20 nt, Human
caaugcacacagcugcuucu

SEQ ID NO: 49539 - RNA, 22 nt, Human
caaugcacauggacaucaggcu

SEQ ID NO: 49540 - RNA, 22 nt, Human
caaugcuaggcagauccugcgu

SEQ ID NO: 49541 - RNA, 22 nt, Human
caaugcuucaggcuccuuauag

SEQ ID NO: 49542 - RNA, 22 nt, Human
caaugcuuuauuuccuccccuu

SEQ ID NO: 49543 - RNA, 22 nt, Human
caauggcacugcccaaagagaa

SEQ ID NO: 49544 - RNA, 22 nt, Human
caauggccucccaagcaggggg

SEQ ID NO: 49545 - RNA, 22 nt, Human
caaugucuaguuucccaaaucc

SEQ ID NO: 49546 - RNA, 22 nt, Human
caaugugucaggaaaagggcca

SEQ ID NO: 49547 - RNA, 22 nt, Human
caauguuuuuccuuccuuaaua

SEQ ID NO: 49548 - RNA, 22 nt, Human
caauuacuuuugcaccaauaua

SEQ ID NO: 49549 - RNA, 22 nt, Human
caauuagaggaggaagcucaua

SEQ ID NO: 49550 - RNA, 22 nt, Human
caauucaaaugcauaguucaca

SEQ ID NO: 49551 - RNA, 22 nt, Human
caauucaauggcaaaguauugu

SEQ ID NO: 49552 - RNA, 22 nt, Human
caauucaucuggguagguagcc

SEQ ID NO: 49553 - RNA, 22 nt, Human
caauucugaggccugcuuuguu

SEQ ID NO: 49554 - RNA, 22 nt, Human
caauucugcaagugacugaccu

SEQ ID NO: 49555 - RNA, 22 nt, Human
uacagguggaucacuaguauag

SEQ ID NO: 49556 - RNA, 22 nt, Human
uacaguaacuggaauucuucuu

SEQ ID NO: 49557 - RNA, 22 nt, Human
uacaguaaugugucccugcagg

SEQ ID NO: 49558 - RNA, 22 nt, Human
uacaguaguaucuucauuuguu

SEQ ID NO: 49559 - RNA, 22 nt, Human
uacaguaucuucuggcaagcau

SEQ ID NO: 49560 - RNA, 18 nt, Human
uacaguauuuucucgccu

SEQ ID NO: 49561 - RNA, 20 nt, Human
uacagucagggcacaggcag

SEQ ID NO: 49562 - RNA, 22 nt, Human
uacagugacuggacuuugucau

SEQ ID NO: 49563 - RNA, 22 nt, Human
uacagugagacuggcucaggga

SEQ ID NO: 49564 - RNA, 22 nt, Human
uacagugaggugguuuccuuua

SEQ ID NO: 49565 - RNA, 22 nt, Human
uacagugauuucuacugguguu

SEQ ID NO: 49566 - RNA, 22 nt, Human
uacagugcauagaggcaugaua

SEQ ID NO: 49567 - RNA, 22 nt, Human
uacagugcuugguaucuaguaa

SEQ ID NO: 49568 - RNA, 22 nt, Human
uacaguguauguauuuguaggu

SEQ ID NO: 49569 - RNA, 22 nt, Human
uacaguuaaaaaguucaauggu

SEQ ID NO: 49570 - RNA, 22 nt, Human
uacaguuacccuggaaagaaau

SEQ ID NO: 49571 - RNA, 22 nt, Human
uacaguuacgcugagaaacgaa

SEQ ID NO: 49572 - RNA, 22 nt, Human
uacaguucuuugaaggaucuag

SEQ ID NO: 49573 - RNA, 22 nt, Human
uacauaauaaggggcauggugu

SEQ ID NO: 49574 - RNA, 22 nt, Human
uacauacaagcauucaauuuua

SEQ ID NO: 49575 - RNA, 22 nt, Human
uacauacacaaaugcugaaugg

SEQ ID NO: 49576 - RNA, 22 nt, Human
uacauacauguauguguguauu

SEQ ID NO: 49577 - RNA, 22 nt, Human
uacauacuccauaaugacagca

SEQ ID NO: 49578 - RNA, 22 nt, Human
uacauacuuuuucuugcaagca

SEQ ID NO: 49579 - RNA, 22 nt, Human
uacauagcuccuagugaugcau

SEQ ID NO: 49580 - RNA, 22 nt, Human
uacauaguauucacauuguuuu

SEQ ID NO: 49581 - RNA, 22 nt, Human
uacauauagacaguuacucuag

SEQ ID NO: 49582 - RNA, 22 nt, Human
uacauauccaggcugagaagau

SEQ ID NO: 49583 - RNA, 22 nt, Human
uacauaugaacuuuauaacuug

SEQ ID NO: 49584 - RNA, 22 nt, Human
uacauaugaguucguucuaugc

SEQ ID NO: 49585 - RNA, 22 nt, Human
uacauauucaacguucaguauu

SEQ ID NO: 49586 - RNA, 22 nt, Human
uacauauucuaccccuuuuucu

SEQ ID NO: 49587 - RNA, 22 nt, Human
uacaucaagauaaaaacuguca

SEQ ID NO: 49588 - RNA, 22 nt, Human
uacaucaaggaacaccugguau

SEQ ID NO: 49589 - RNA, 21 nt, Human
uacaucaugcuacuucucuga

SEQ ID NO: 49590 - RNA, 22 nt, Human
uacaucauggugagcaggaggc

SEQ ID NO: 49591 - RNA, 22 nt, Human
uacaucauguaagcagaaucau

SEQ ID NO: 49592 - RNA, 22 nt, Human
uacauccaaaugaauuagaauu

SEQ ID NO: 49593 - RNA, 19 nt, Human
uacauccucuuccucuuug

SEQ ID NO: 49594 - RNA, 22 nt, Human
uacaucuagccuuacaauuauu

SEQ ID NO: 49595 - RNA, 22 nt, Human
uacaucuaucuagaugcucaga

SEQ ID NO: 49596 - RNA, 22 nt, Human
uacaucuuugucuaugaccagc

SEQ ID NO: 49597 - RNA, 22 nt, Human
uacaugaagaaaauuaagcagu

SEQ ID NO: 49598 - RNA, 22 nt, Human
uacaugaauuugagucagagga

SEQ ID NO: 49599 - RNA, 19 nt, Human
uacaugcagcaggcacgca

SEQ ID NO: 49600 - RNA, 18 nt, Human
uacaugcauaaaugaagc

SEQ ID NO: 49601 - RNA, 23 nt, Human
uacaugcuauaauuucacccuca

SEQ ID NO: 49602 - RNA, 19 nt, Human
uacaugcucuugguucagg

SEQ ID NO: 49603 - RNA, 22 nt, Human
uacaugcuucuauaugugaagu

SEQ ID NO: 49604 - RNA, 22 nt, Human
uacauggugguggcacuugacu

SEQ ID NO: 49605 - RNA, 22 nt, Human
uacaugguuggcccauucuucu

SEQ ID NO: 49606 - RNA, 22 nt, Human
uacauguaagacaugagacucu

SEQ ID NO: 49607 - RNA, 22 nt, Human
uacauguacaugcauagguaga

SEQ ID NO: 49608 - RNA, 22 nt, Human
uacauguauguuuaucuugaga

SEQ ID NO: 49609 - RNA, 22 nt, Human
uacaugucuacaugcauuuuug

SEQ ID NO: 49610 - RNA, 22 nt, Human
uacaugugcuggguucuuggcc

SEQ ID NO: 49611 - RNA, 22 nt, Human
uacaugugguagggagggcagu

SEQ ID NO: 49612 - RNA, 22 nt, Human
uacauguucaaauuugucuuuc

SEQ ID NO: 49613 - RNA, 22 nt, Human
uacauguuuacuccaagucagg

SEQ ID NO: 49614 - RNA, 22 nt, Human
uacauuaacuuacguccacaug

SEQ ID NO: 49615 - RNA, 22 nt, Human
uacauuauccugucuuuguccu

SEQ ID NO: 49616 - RNA, 22 nt, Human
uacauuauuucaucagucaucu

SEQ ID NO: 49617 - RNA, 20 nt, Human
uacauucaaaacaaacucug

SEQ ID NO: 49618 - RNA, 22 nt, Human
uacauucaaacgauuuauugau

SEQ ID NO: 49619 - RNA, 22 nt, Human
uacauucaacaugucacuaugu

SEQ ID NO: 49620 - RNA, 15 nt, Human
uacauucauuuccac

SEQ ID NO: 49621 - RNA, 22 nt, Human
uacauuccaaaggaaacuggcu

SEQ ID NO: 49622 - RNA, 22 nt, Human
uacauuccacaagcauugcuuu

SEQ ID NO: 49623 - RNA, 22 nt, Human
uacauucccccaauuaccaaug

SEQ ID NO: 49624 - RNA, 22 nt, Human
uacauucuggaaaggcacagac

SEQ ID NO: 49625 - RNA, 22 nt, Human
uacauugaaagucauuuaaucc

SEQ ID NO: 49626 - RNA, 21 nt, Human
uacauugaagaaugggaauga

SEQ ID NO: 49627 - RNA, 21 nt, Human
uacauugacuacaaauaaagc

SEQ ID NO: 49628 - RNA, 22 nt, Human
uacauugacucucugucccuaa

SEQ ID NO: 49629 - RNA, 22 nt, Human
uacauugaguauuauuuagcca

SEQ ID NO: 49630 - RNA, 22 nt, Human
uacauugcuuucuaauacaucu

SEQ ID NO: 49631 - RNA, 22 nt, Human
uacauuguacuuacaaauagug

SEQ ID NO: 49632 - RNA, 22 nt, Human
uacauugugauguuucaauaca

SEQ ID NO: 49633 - RNA, 22 nt, Human
uacauuguguuaaaacagaaga

SEQ ID NO: 49634 - RNA, 21 nt, Human
uacauuugagagcuauaagcu

SEQ ID NO: 49635 - RNA, 22 nt, Human
uacauuugcuuugauuuucagc

SEQ ID NO: 49636 - RNA, 22 nt, Human
uaccaaagaauauuuuaaauag

SEQ ID NO: 49637 - RNA, 22 nt, Human
uaccaagguaguggagacagaa

SEQ ID NO: 49638 - RNA, 22 nt, Human
uaccaaguguauuaugcuuugu

SEQ ID NO: 49639 - RNA, 22 nt, Human
uaccaauucuauuuuggauuga

SEQ ID NO: 49640 - RNA, 22 nt, Human
uaccacaguuuaucuauucagc

SEQ ID NO: 49641 - RNA, 22 nt, Human
uaccaccucaaccucaucugac

SEQ ID NO: 49642 - RNA, 22 nt, Human
uaccagcaacuggaagucagau

SEQ ID NO: 49643 - RNA, 22 nt, Human
uaccagcaaugcuagucaacuc

SEQ ID NO: 49644 - RNA, 22 nt, Human
uaccagcaauguaugaguguuu

SEQ ID NO: 49645 - RNA, 22 nt, Human
uaccagccucaguugugagccc

SEQ ID NO: 49646 - RNA, 22 nt, Human
uaccaggaauggggucaccguc

SEQ ID NO: 49647 - RNA, 22 nt, Human
uaccaggagcccccuucugguc

SEQ ID NO: 49648 - RNA, 22 nt, Human
uaccaggaguuacaggcagcag

SEQ ID NO: 49649 - RNA, 22 nt, Human
uaccagggaacagggauauuaa

SEQ ID NO: 49650 - RNA, 22 nt, Human
uaccaguaauugcuugugcugu

SEQ ID NO: 49651 - RNA, 22 nt, Human
uaccauaacguaaugaacuuga

SEQ ID NO: 49652 - RNA, 19 nt, Human
uaccauguugacuuuccug

SEQ ID NO: 49653 - RNA, 22 nt, Human
uaccauuauucacaugaucuuu

SEQ ID NO: 49654 - RNA, 22 nt, Human
uacaagaagaggcagagcugga

SEQ ID NO: 49655 - RNA, 22 nt, Human
uacaagaaggauggagcccacu

SEQ ID NO: 49656 - RNA, 22 nt, Human
uacaagaaugucuuaaaagcuc

SEQ ID NO: 49657 - RNA, 22 nt, Human
uacaagacgagggaaguucuuu

SEQ ID NO: 49658 - RNA, 22 nt, Human
uacaagagacaccagggaggcu

SEQ ID NO: 49659 - RNA, 22 nt, Human
uacaagauaagaauuggcaagg

SEQ ID NO: 49660 - RNA, 22 nt, Human
uacaagcucgggcagcucauua

SEQ ID NO: 49661 - RNA, 22 nt, Human
uacaagcugacccugaagauga

SEQ ID NO: 49662 - RNA, 22 nt, Human
uacaagcuuuuguguauaaaug

SEQ ID NO: 49663 - RNA, 22 nt, Human
uacaaggaaaauuuuauaguaa

SEQ ID NO: 49664 - RNA, 22 nt, Human
uaugagaauaaucugguaaaua

SEQ ID NO: 49665 - RNA, 23 nt, Human
uaugagaauuaagugcgagugcc

SEQ ID NO: 49666 - RNA, 22 nt, Human
uaugagcaagaguuugugaagg

SEQ ID NO: 49667 - RNA, 22 nt, Human
uaugagcagacagugguuuuac

SEQ ID NO: 49668 - RNA, 22 nt, Human
uaugagcuuuggaaugagaaac

SEQ ID NO: 49669 - RNA, 22 nt, Human
uaugagguauuacaggaaauau

SEQ ID NO: 49670 - RNA, 20 nt, Human
uaugaguauuacuuucagga

SEQ ID NO: 49671 - RNA, 22 nt, Human
uaugaguuguggcuuagucaca

SEQ ID NO: 49672 - RNA, 22 nt, Human
uaugauaugcacuuuaucagaa

SEQ ID NO: 49673 - RNA, 22 nt, Human
uaugauuuguagacauuugauu

SEQ ID NO: 49674 - RNA, 22 nt, Human
uaugcaacaucugguagaaauc

SEQ ID NO: 49675 - RNA, 22 nt, Human
uaugcacaauaugaucuauuug

SEQ ID NO: 49676 - RNA, 22 nt, Human
uaugcacacaucgcagcaggaa

SEQ ID NO: 49677 - RNA, 22 nt, Human
uaugcacaccuggguccuuguc

SEQ ID NO: 49678 - RNA, 22 nt, Human
uaugcacagaaguuugcugaau

SEQ ID NO: 49679 - RNA, 22 nt, Human
uaugcagugagcacuauuuaua

SEQ ID NO: 49680 - RNA, 22 nt, Human
uaugcauacaaugagauauucc

SEQ ID NO: 49681 - RNA, 22 nt, Human
uaugcauaugaccccaagcuug

SEQ ID NO: 49682 - RNA, 22 nt, Human
uaugcaugugguauaugcuuau

SEQ ID NO: 49683 - RNA, 22 nt, Human
uaugccaaggaucaauauguau

SEQ ID NO: 49684 - RNA, 22 nt, Human
uaugccagacugugagcuucuu

SEQ ID NO: 49685 - RNA, 22 nt, Human
uaugccagcacuuagaugagau

SEQ ID NO: 49686 - RNA, 22 nt, Human
uaugcuaacugggggaaaagag

SEQ ID NO: 49687 - RNA, 22 nt, Human
uaugcuacuagaaauaaaaugg

SEQ ID NO: 49688 - RNA, 22 nt, Human
uaugcuauucuucagaguguuc

SEQ ID NO: 49689 - RNA, 22 nt, Human
uaugcuauuuuaaugaagaugu

SEQ ID NO: 49690 - RNA, 22 nt, Human
uaugcucuccucccagucccag

SEQ ID NO: 49691 - RNA, 22 nt, Human
uaugcugugcuagauacaauau

SEQ ID NO: 49692 - RNA, 22 nt, Human
uaugcuuucauucauaugugag

SEQ ID NO: 49693 - RNA, 22 nt, Human
uaugcuuugaaaaugugcugaa

SEQ ID NO: 49694 - RNA, 22 nt, Human
uaugcuuugauuuccucagcug

SEQ ID NO: 49695 - RNA, 22 nt, Human
uauggaaacuaauucauuuuuc

SEQ ID NO: 49696 - RNA, 22 nt, Human
uauggacaucugaaguugcaga

SEQ ID NO: 49697 - RNA, 22 nt, Human
uauggaugaguuccugaggagu

SEQ ID NO: 49698 - RNA, 22 nt, Human
uauggauguuuaucuacaggcu

SEQ ID NO: 49699 - RNA, 22 nt, Human
uauggcauaucugggagacucu

SEQ ID NO: 49700 - RNA, 23 nt, Human
uauggcaugguacuuccagcaga

SEQ ID NO: 49701 - RNA, 22 nt, Human
uauggcauuuuguaagggcuug

SEQ ID NO: 49702 - RNA, 22 nt, Human
uauggccaaucggguggacgcc

SEQ ID NO: 49703 - RNA, 22 nt, Human
uauggcuuaaaauuucagcaug

SEQ ID NO: 49704 - RNA, 22 nt, Human
uauggcuucauugugcuccgca

SEQ ID NO: 49705 - RNA, 22 nt, Human
uauggcuucugggccaaauuua

SEQ ID NO: 49706 - RNA, 22 nt, Human
uauggcuugaguuucagacuau

SEQ ID NO: 49707 - RNA, 20 nt, Human
uauggcuuggcaaagcuuca

SEQ ID NO: 49708 - RNA, 22 nt, Human
uauggcuuuaaauugaaggagu

SEQ ID NO: 49709 - RNA, 22 nt, Human
uauggcuuucuccauagggcag

SEQ ID NO: 49710 - RNA, 22 nt, Human
uauggcuuuuggcuucucucug

SEQ ID NO: 49711 - RNA, 22 nt, Human
uauggguaggguuugauaagau

SEQ ID NO: 49712 - RNA, 22 nt, Human
uauggguauaaacagguccuaa

SEQ ID NO: 49713 - RNA, 22 nt, Human
uauggguaucaaugacaaacau

SEQ ID NO: 49714 - RNA, 21 nt, Human
uaugguaaccagacaagaaug

SEQ ID NO: 49715 - RNA, 22 nt, Human
uaugguuauccucaaaagagga

SEQ ID NO: 49716 - RNA, 22 nt, Human
uauguaaguugcaaaugaagga

SEQ ID NO: 49717 - RNA, 22 nt, Human
uauguacaagcacacaugugac

SEQ ID NO: 49718 - RNA, 22 nt, Human
uauguacaaucagcaguucaua

SEQ ID NO: 49719 - RNA, 22 nt, Human
uauguacacuuaaguuugagaa

SEQ ID NO: 49720 - RNA, 22 nt, Human
uauguacagggauagaacuuga

SEQ ID NO: 49721 - RNA, 22 nt, Human
uauguacaguccuuaacuuaaa

SEQ ID NO: 49722 - RNA, 22 nt, Human
uauguacaucguugaauucaaa

SEQ ID NO: 49723 - RNA, 22 nt, Human
uauguacauggagagcaauuga

SEQ ID NO: 49724 - RNA, 22 nt, Human
uauguacauguuaaagggcaaa

SEQ ID NO: 49725 - RNA, 22 nt, Human
uauguacuuuccugggaauguu

SEQ ID NO: 49726 - RNA, 22 nt, Human
uauguagaugucauauaaauug

SEQ ID NO: 49727 - RNA, 22 nt, Human
uauguagucaaguggauauaug

SEQ ID NO: 49728 - RNA, 22 nt, Human
uauguauaaaugcaugugugga

SEQ ID NO: 49729 - RNA, 22 nt, Human
uauguauaaucacagaguguca

SEQ ID NO: 49730 - RNA, 22 nt, Human
uauguauagagucuuuuaaauu

SEQ ID NO: 49731 - RNA, 22 nt, Human
uauguauaugguagaaguaugu

SEQ ID NO: 49732 - RNA, 22 nt, Human
uauguauucucagauuuacuaa

SEQ ID NO: 49733 - RNA, 22 nt, Human
uaugucaaaaaagauuauguuu

SEQ ID NO: 49734 - RNA, 22 nt, Human
uaugucaaaguuaagaaauagg

SEQ ID NO: 49735 - RNA, 22 nt, Human
uaugucaacugugcugguuaau

SEQ ID NO: 49736 - RNA, 22 nt, Human
uaugucaugucuuagagaauga

SEQ ID NO: 49737 - RNA, 22 nt, Human
uaugucugcuugguuuuggaau

SEQ ID NO: 49738 - RNA, 22 nt, Human
uaugucuggcauguuguaauua

SEQ ID NO: 49739 - RNA, 22 nt, Human
uaugucuucgucaccuaucuca

SEQ ID NO: 49740 - RNA, 22 nt, Human
uaugucuugaaaugagaagcca

SEQ ID NO: 49741 - RNA, 22 nt, Human
uaugucuuuugcuugcaaauag

SEQ ID NO: 49742 - RNA, 20 nt, Human
uaugugauuuucucaucaau

SEQ ID NO: 49743 - RNA, 22 nt, Human
uaugugcaguuugcucuuaaca

SEQ ID NO: 49744 - RNA, 22 nt, Human
uauguggccauucuguuugugu

SEQ ID NO: 49745 - RNA, 22 nt, Human
uauguguaaucauaucugauac

SEQ ID NO: 49746 - RNA, 22 nt, Human
uaugugucccuugguguagcaa

SEQ ID NO: 49747 - RNA, 22 nt, Human
uauguguccuaagcaaucaucc

SEQ ID NO: 49748 - RNA, 22 nt, Human
uauguguggagccagccuggag

SEQ ID NO: 49749 - RNA, 16 nt, Human
uaugugugugggagug

SEQ ID NO: 49750 - RNA, 22 nt, Human
uauguguuugacacccugcaag

SEQ ID NO: 49751 - RNA, 22 nt, Human
uauguuaaauguuugauguuua

SEQ ID NO: 49752 - RNA, 22 nt, Human
uauguuaacauguuaggaacug

SEQ ID NO: 49753 - RNA, 22 nt, Human
uauguuacaaaguuuuucuaaa

SEQ ID NO: 49754 - RNA, 22 nt, Human
uauguuacuucuguaucugcuu

SEQ ID NO: 49755 - RNA, 22 nt, Human
uauguucagaagaagaaugggg

SEQ ID NO: 49756 - RNA, 22 nt, Human
uauguucaucuggugcaucagu

SEQ ID NO: 49757 - RNA, 22 nt, Human
uauguucuagacuuuugcugug

SEQ ID NO: 49758 - RNA, 22 nt, Human
uauguucucugcucuaggaugu

SEQ ID NO: 49759 - RNA, 22 nt, Human
uauguucugacucuacauggga

SEQ ID NO: 49760 - RNA, 22 nt, Human
uauguucugucuguacagauuu

SEQ ID NO: 49761 - RNA, 22 nt, Human
uauguucuuuacaucugugcaa

SEQ ID NO: 49762 - RNA, 22 nt, Human
uauguugagcauucagugaucu

SEQ ID NO: 49763 - RNA, 22 nt, Human
uauguugaucauagguaaaaga

SEQ ID NO: 49764 - RNA, 22 nt, Human
uauguuuaguauccauuuucag

SEQ ID NO: 49765 - RNA, 22 nt, Human
uauguuucugggcuugauauuu

SEQ ID NO: 49766 - RNA, 22 nt, Human
uauguuuuucaagugcacacua

SEQ ID NO: 49767 - RNA, 22 nt, Human
uauuaaagggaaguuaugcaug

SEQ ID NO: 49768 - RNA, 22 nt, Human
uauuaaauguuauuuggguugu

SEQ ID NO: 49769 - RNA, 22 nt, Human
ugcagagccccagauuggagag

SEQ ID NO: 49770 - RNA, 20 nt, Human
ugcagagcuggcuggcuccu

SEQ ID NO: 49771 - RNA, 22 nt, Human
ugcagaggcauuuauugaugua

SEQ ID NO: 49772 - RNA, 22 nt, Human
ugcagaggcuggcucgccgggu

SEQ ID NO: 49773 - RNA, 22 nt, Human
uaguaaaugugaaaugugggga

SEQ ID NO: 49774 - RNA, 22 nt, Human
uaguaagccucuccagagacag

SEQ ID NO: 49775 - RNA, 19 nt, Human
uaguacaaaagcagccaua

SEQ ID NO: 49776 - RNA, 19 nt, Human
uaguacacacucuaauucc

SEQ ID NO: 49777 - RNA, 22 nt, Human
uaguacacucuguaaguuuaaa

SEQ ID NO: 49778 - RNA, 22 nt, Human
uaguacagagacacuggaggaa

SEQ ID NO: 49779 - RNA, 22 nt, Human
uaguacaguuccaucaaagcag

SEQ ID NO: 49780 - RNA, 22 nt, Human
uaguacuacguuuucuacuauc

SEQ ID NO: 49781 - RNA, 22 nt, Human
uaguagaauccaaaccaacagu

SEQ ID NO: 49782 - RNA, 22 nt, Human
uaguagcaaaacucaucucuuu

SEQ ID NO: 49783 - RNA, 22 nt, Human
uaguauaauuguucuggaauca

SEQ ID NO: 49784 - RNA, 22 nt, Human
uaguauaucuuuaguacauagu

SEQ ID NO: 49785 - RNA, 22 nt, Human
uaguauauuuuguugcaauuca

SEQ ID NO: 49786 - RNA, 22 nt, Human
uaguauucagcuucucaggcaa

SEQ ID NO: 49787 - RNA, 20 nt, Human
uaguauuugcauaaggauag

SEQ ID NO: 49788 - RNA, 22 nt, Human
uagucaaaagcuucacucggaa

SEQ ID NO: 49789 - RNA, 22 nt, Human
uagucaaaccucagaauacccc

SEQ ID NO: 49790 - RNA, 22 nt, Human
uagucaacuagugagcauaugg

SEQ ID NO: 49791 - RNA, 22 nt, Human
uagucacaggaaguuucaaugu

SEQ ID NO: 49792 - RNA, 22 nt, Human
uagucacaugaucacaggaucg

SEQ ID NO: 49793 - RNA, 22 nt, Human
uagucaccuuuggcaccugcaa

SEQ ID NO: 49794 - RNA, 22 nt, Human
uagucaguaugaaauugcucaa

SEQ ID NO: 49795 - RNA, 22 nt, Human
uagucaguugggucuaguggca

SEQ ID NO: 49796 - RNA, 22 nt, Human
uagucauucuccuuacaaagcc

SEQ ID NO: 49797 - RNA, 22 nt, Human
uaguccagguuaaucccugccu

SEQ ID NO: 49798 - RNA, 22 nt, Human
uaguccauugauuagcucauuu

SEQ ID NO: 49799 - RNA, 22 nt, Human
uaguccauuuucacacugcuga

SEQ ID NO: 49800 - RNA, 22 nt, Human
uaguccugaccagcuggauguu

SEQ ID NO: 49801 - RNA, 22 nt, Human
uagucucuaggaggggaaaaga

SEQ ID NO: 49802 - RNA, 19 nt, Human
uagucuuuauucuuaauuu

SEQ ID NO: 49803 - RNA, 22 nt, Human
uagucuuucauuuggagcauuu

SEQ ID NO: 49804 - RNA, 22 nt, Human
uagucuuuugagaaguauaucu

SEQ ID NO: 49805 - RNA, 22 nt, Human
uagucuuuuuaauaaauaaugc

SEQ ID NO: 49806 - RNA, 22 nt, Human
uagugaaagucaaagacagcua

SEQ ID NO: 49807 - RNA, 22 nt, Human
uagugaaaugagaauguaugac

SEQ ID NO: 49808 - RNA, 22 nt, Human
uagugaauuccuaauaggaaga

SEQ ID NO: 49809 - RNA, 22 nt, Human
uagugauuaaaggcagaauguu

SEQ ID NO: 49810 - RNA, 22 nt, Human
ucagccagaaagugauuuucag

SEQ ID NO: 49811 - RNA, 22 nt, Human
ucagccagagggggcaaaggaa

SEQ ID NO: 49812 - RNA, 22 nt, Human
ucagccagcucuuggacucuga

SEQ ID NO: 49813 - RNA, 22 nt, Human
ucagccaggcagcccccugguc

SEQ ID NO: 49814 - RNA, 22 nt, Human
ucagccaggcccuaagagauug

SEQ ID NO: 49815 - RNA, 22 nt, Human
ucagccagugccuugaucuugc

SEQ ID NO: 49816 - RNA, 22 nt, Human
ucagccaguuaagucaagaaau

SEQ ID NO: 49817 - RNA, 22 nt, Human
ucagccaguuugauucuauuug

SEQ ID NO: 49818 - RNA, 22 nt, Human
ucagccauggugagagugagag

SEQ ID NO: 49819 - RNA, 22 nt, Human
ucagcccaacccugcacaagga

SEQ ID NO: 49820 - RNA, 22 nt, Human
ucagcccaguuuuaucaucugu

SEQ ID NO: 49821 - RNA, 19 nt, Human
ucagcccaucagacucaca

SEQ ID NO: 49822 - RNA, 22 nt, Human
ucagcccugggcuuccucaugg

SEQ ID NO: 49823 - RNA, 22 nt, Human
ucagccucucugaguccagacc

SEQ ID NO: 49824 - RNA, 23 nt, Human
ucagccucuuaggacuucucacc

SEQ ID NO: 49825 - RNA, 22 nt, Human
ucagccugcgucauggugacac

SEQ ID NO: 49826 - RNA, 18 nt, Human
ucagccuguugucugccu

SEQ ID NO: 49827 - RNA, 20 nt, Human
ucagccuucucauccugggg

SEQ ID NO: 49828 - RNA, 22 nt, Human
ucagcuauugaggguggugagu

SEQ ID NO: 49829 - RNA, 22 nt, Human
ucagcucacucugcuuccuggg

SEQ ID NO: 49830 - RNA, 22 nt, Human
ucagcuccagaguugcacagug

SEQ ID NO: 49831 - RNA, 22 nt, Human
ucagcuccucaugcaggggaua

SEQ ID NO: 49832 - RNA, 22 nt, Human
ucagcucugccuguggaggcac

SEQ ID NO: 49833 - RNA, 22 nt, Human
ucagcucuguuuugaguggaac

SEQ ID NO: 49834 - RNA, 20 nt, Human
ucagcucuuagaggucgcuu

SEQ ID NO: 49835 - RNA, 22 nt, Human
ucagcugagcuccagcucauag

SEQ ID NO: 49836 - RNA, 22 nt, Human
ucagcugcaguuucacaagcac

SEQ ID NO: 49837 - RNA, 22 nt, Human
ucagcugccuuucccaugcuag

SEQ ID NO: 49838 - RNA, 22 nt, Human
ucagcugcgacaggggccugag

SEQ ID NO: 49839 - RNA, 22 nt, Human
ucagcugcucaaauuuauguca

SEQ ID NO: 49840 - RNA, 22 nt, Human
ucagcugcucuguugagcugaa

SEQ ID NO: 49841 - RNA, 22 nt, Human
ucagcuggggcccccucugucc

SEQ ID NO: 49842 - RNA, 18 nt, Human
ucagcuggguuucugggu

SEQ ID NO: 49843 - RNA, 22 nt, Human
ucagcuguguaucccagggccu

SEQ ID NO: 49844 - RNA, 22 nt, Human
ucagcuucacccagaguuguag

SEQ ID NO: 49845 - RNA, 22 nt, Human
ucagcuucagaucagcuagaga

SEQ ID NO: 49846 - RNA, 22 nt, Human
ucagcuuccucugugguuccag

SEQ ID NO: 49847 - RNA, 21 nt, Human
ucagcuugcuucauuauuaug

SEQ ID NO: 49848 - RNA, 22 nt, Human
ucagcuugugggucagccucug

SEQ ID NO: 49849 - RNA, 22 nt, Human
ucagcuuucuauguugcuaaac

SEQ ID NO: 49850 - RNA, 22 nt, Human
ucagcuuucucaaagaagcugg

SEQ ID NO: 49851 - RNA, 21 nt, Human
ucagcuuugcaacugcacauc

SEQ ID NO: 49852 - RNA, 22 nt, Human
ucagcuuuuuacaugugaaaua

SEQ ID NO: 49853 - RNA, 22 nt, Human
ucaggaaacuacaguugaacua

SEQ ID NO: 49854 - RNA, 22 nt, Human
ucaggaaagaguaauguauaca

SEQ ID NO: 49855 - RNA, 22 nt, Human
ucaggaaagaguguauccauca

SEQ ID NO: 49856 - RNA, 22 nt, Human
ucaggaaagaguuagaugauua

SEQ ID NO: 49857 - RNA, 22 nt, Human
ucaggaaagguuuguugaaugg

SEQ ID NO: 49858 - RNA, 22 nt, Human
ucaggaaauggugauuugguug

SEQ ID NO: 49859 - RNA, 22 nt, Human
ucaggaaaugucccagguugug

SEQ ID NO: 49860 - RNA, 22 nt, Human
ucaggaacacaggggcccaugc

SEQ ID NO: 49861 - RNA, 22 nt, Human
ucaggaacccccgcugggugaa

SEQ ID NO: 49862 - RNA, 22 nt, Human
ucaggaacuucuaggaaagcug

SEQ ID NO: 49863 - RNA, 22 nt, Human
ucaggaagaaagaagggagugu

SEQ ID NO: 49864 - RNA, 22 nt, Human
ucaggaagaagacggggcagga

SEQ ID NO: 49865 - RNA, 22 nt, Human
ucaggaagccacuccacagaga

SEQ ID NO: 49866 - RNA, 22 nt, Human
ucaggaagcucuugcugauucu

SEQ ID NO: 49867 - RNA, 22 nt, Human
ucaggaaggcacuugguguguu

SEQ ID NO: 49868 - RNA, 22 nt, Human
ucaggaagugccuaggcuggcc

SEQ ID NO: 49869 - RNA, 19 nt, Human
ucaggaaguugaugaggug

SEQ ID NO: 49870 - RNA, 22 nt, Human
ucaggaaguuuugaaucaacug

SEQ ID NO: 49871 - RNA, 22 nt, Human
ucaggacaaccuguuuucagac

SEQ ID NO: 49872 - RNA, 22 nt, Human
ucaggacagagaucagaacuuc

SEQ ID NO: 49873 - RNA, 22 nt, Human
ucaggacaguucccugcaaauu

SEQ ID NO: 49874 - RNA, 22 nt, Human
ucaggacauuugucagcaggag

SEQ ID NO: 49875 - RNA, 22 nt, Human
ucaggagaaaauaucaggaagu

SEQ ID NO: 49876 - RNA, 22 nt, Human
ucaggagaaagccaauuagagu

SEQ ID NO: 49877 - RNA, 22 nt, Human
ucaggagacuggcagugcccac

SEQ ID NO: 49878 - RNA, 22 nt, Human
ucaggagagagaaauuggggcu

SEQ ID NO: 49879 - RNA, 21 nt, Human
ucaggagagcccaucuacaaa

SEQ ID NO: 49880 - RNA, 22 nt, Human
ucaggagaguguucaguggagg

SEQ ID NO: 49881 - RNA, 22 nt, Human
ucaggagcaacaucuuugaauc

SEQ ID NO: 49882 - RNA, 22 nt, Human
ucaguaaaagggugcuuuacuc

SEQ ID NO: 49883 - RNA, 22 nt, Human
ucaguaaaauaaaacaugggac

SEQ ID NO: 49884 - RNA, 22 nt, Human
ucaguaaaauuacagaucuaca

SEQ ID NO: 49885 - RNA, 22 nt, Human
ucaguaaacagguuuaaguccu

SEQ ID NO: 49886 - RNA, 22 nt, Human
ucaguaaaggggaggugauggg

SEQ ID NO: 49887 - RNA, 22 nt, Human
ucaguaaagucucuagagggua

SEQ ID NO: 49888 - RNA, 22 nt, Human
ucaguaaauaacucagaugcuc

SEQ ID NO: 49889 - RNA, 22 nt, Human
ucaguaaaugaaugaauauaug

SEQ ID NO: 49890 - RNA, 22 nt, Human
ucaguaaaugagcaaaaauuuc

SEQ ID NO: 49891 - RNA, 23 nt, Human
ucaguaaaugguaaagucucuuc

SEQ ID NO: 49892 - RNA, 22 nt, Human
ucaguaaccuuuagcacaguug

SEQ ID NO: 49893 - RNA, 22 nt, Human
ucaguaacuggguugaagcuag

SEQ ID NO: 49894 - RNA, 22 nt, Human
ucaguaacuuacuuauucaccu

SEQ ID NO: 49895 - RNA, 22 nt, Human
ucaguaacuucaugaccaagca

SEQ ID NO: 49896 - RNA, 22 nt, Human
ucaguaauauucuuuaaaauac

SEQ ID NO: 49897 - RNA, 23 nt, Human
ucaguaccacagcugcaugaccu

SEQ ID NO: 49898 - RNA, 18 nt, Human
ucaguacugcagagagaa

SEQ ID NO: 49899 - RNA, 22 nt, Human
ucaguacuucaguagauggagc

SEQ ID NO: 49900 - RNA, 22 nt, Human
ucaguacuucccauucugagcu

SEQ ID NO: 49901 - RNA, 22 nt, Human
ucaguaucaggcuggaauuaag

SEQ ID NO: 49902 - RNA, 22 nt, Human
ucaguaucaugcgguagccaug

SEQ ID NO: 49903 - RNA, 18 nt, Human
ucaguauuaccucaggca

SEQ ID NO: 49904 - RNA, 22 nt, Human
ucagucaccuugacuauagcug

SEQ ID NO: 49905 - RNA, 22 nt, Human
ucagucacuuuugccugcuaca

SEQ ID NO: 49906 - RNA, 22 nt, Human
ucagucaucccagcuuucaucu

SEQ ID NO: 49907 - RNA, 22 nt, Human
ucagucauuguccuuaaaacac

SEQ ID NO: 49908 - RNA, 22 nt, Human
ucaguccaggggcugugauguc

SEQ ID NO: 49909 - RNA, 22 nt, Human
ucaguccugaugacaggcccaa

SEQ ID NO: 49910 - RNA, 22 nt, Human
ucagucuauccagcucagaucc

SEQ ID NO: 49911 - RNA, 22 nt, Human
ucagucuucaaaucugagucgu

SEQ ID NO: 49912 - RNA, 22 nt, Human
ucagucuucccuccagugcaac

SEQ ID NO: 49913 - RNA, 22 nt, Human
ucagucuucuaaagggaugcaa

SEQ ID NO: 49914 - RNA, 22 nt, Human
ucagucuuuuucucuuaaguac

SEQ ID NO: 49915 - RNA, 22 nt, Human
ucagugaaugagauaacuuuag

SEQ ID NO: 49916 - RNA, 23 nt, Human
ucagugauguugaaccuagcagu

SEQ ID NO: 49917 - RNA, 22 nt, Human
ucagugcaaaaaaugggcuaga

SEQ ID NO: 49918 - RNA, 22 nt, Human
ucagugcacaaugacgguggcu

SEQ ID NO: 49919 - RNA, 22 nt, Human
ucagugcacccaauucucucca

SEQ ID NO: 49920 - RNA, 22 nt, Human
ucagugcagaauagugaugcau

SEQ ID NO: 49921 - RNA, 22 nt, Human
ucagugcaguagaacuuuaguu

SEQ ID NO: 49922 - RNA, 22 nt, Human
ucagugcauuaauaauaucagu

SEQ ID NO: 49923 - RNA, 22 nt, Human
ucagugcauucauggguggcug

SEQ ID NO: 49924 - RNA, 22 nt, Human
ucagugcuccuaaagugaaugc

SEQ ID NO: 49925 - RNA, 22 nt, Human
ucagugcugccauggcagggcc

SEQ ID NO: 49926 - RNA, 22 nt, Human
ucaguggaacugucugggugag

SEQ ID NO: 49927 - RNA, 22 nt, Human
ucaguggagcuaagcaugagau

SEQ ID NO: 49928 - RNA, 22 nt, Human
ucaguggaguauggaugaaguc

SEQ ID NO: 49929 - RNA, 22 nt, Human
ugcugucuguuuacuggcuaua

SEQ ID NO: 49930 - RNA, 22 nt, Human
ugcugugacagagucucaugga

SEQ ID NO: 49931 - RNA, 22 nt, Human
ugcugugagaccauuuguugag

SEQ ID NO: 49932 - RNA, 22 nt, Human
ugcugugcaaaggugaugugag

SEQ ID NO: 49933 - RNA, 22 nt, Human
ugcugugcuggcggcagaggcc

SEQ ID NO: 49934 - RNA, 22 nt, Human
ugcugugggcaguacauaagcu

SEQ ID NO: 49935 - RNA, 22 nt, Human
ugcuguguaaaaggugauugaa

SEQ ID NO: 49936 - RNA, 20 nt, Human
ugcuguguggcccagcauga

SEQ ID NO: 49937 - RNA, 22 nt, Human
ugcuguguuaaauacaagcaug

SEQ ID NO: 49938 - RNA, 22 nt, Human
ugcuguguuacugagauccggc

SEQ ID NO: 49939 - RNA, 22 nt, Human
ugcuguuauacuuagcugguua

SEQ ID NO: 49940 - RNA, 22 nt, Human
ugcuguuaucacauuuuguaaa

SEQ ID NO: 49941 - RNA, 22 nt, Human
ugcuguuucauuuuccucaucc

SEQ ID NO: 49942 - RNA, 22 nt, Human
ugcuuaaaaacaguaugguagu

SEQ ID NO: 49943 - RNA, 22 nt, Human
ugcuuaaaauaguucauuuuug

SEQ ID NO: 49944 - RNA, 22 nt, Human
ugcuuaaaaugaugauuauuuu

SEQ ID NO: 49945 - RNA, 22 nt, Human
ugcuuaaaauuuuccaaggauu

SEQ ID NO: 49946 - RNA, 22 nt, Human
ugcuuaaacauacuauuuauau

SEQ ID NO: 49947 - RNA, 22 nt, Human
ugcuuaauagugcacugguuuc

SEQ ID NO: 49948 - RNA, 22 nt, Human
ugcuuaaucaagaagccuauuu

SEQ ID NO: 49949 - RNA, 22 nt, Human
ugcuuaauccaaccuggcugac

SEQ ID NO: 49950 - RNA, 19 nt, Human
ugcuuaauuccuaguaggu

SEQ ID NO: 49951 - RNA, 19 nt, Human
ugcuuaccaucugugcugg

SEQ ID NO: 49952 - RNA, 22 nt, Human
ugcuuagaaucuggacuuguug

SEQ ID NO: 49953 - RNA, 22 nt, Human
ugcuuagacgucaaguacagcc

SEQ ID NO: 49954 - RNA, 22 nt, Human
ugcuuagaugaggcagcaggag

SEQ ID NO: 49955 - RNA, 22 nt, Human
ugcuuauuaaacaugcauauuc

SEQ ID NO: 49956 - RNA, 22 nt, Human
ugcuucaaaaaguuguuagagg

SEQ ID NO: 49957 - RNA, 22 nt, Human
ugcuucaaggccaugucaagcu

SEQ ID NO: 49958 - RNA, 22 nt, Human
ugcuucacuggcuccacauagg

SEQ ID NO: 49959 - RNA, 19 nt, Human
ugcuucagaaauagaaagc

SEQ ID NO: 49960 - RNA, 22 nt, Human
ugcuucagugcucugagccugu

SEQ ID NO: 49961 - RNA, 22 nt, Human
ugcuucaugaggcugagagaag

SEQ ID NO: 49962 - RNA, 22 nt, Human
ugcuucauuuccuuauauugua

SEQ ID NO: 49963 - RNA, 22 nt, Human
ugcuucauuuugacuuagccag

SEQ ID NO: 49964 - RNA, 22 nt, Human
ugcuuccaauucaaaucugugg

SEQ ID NO: 49965 - RNA, 22 nt, Human
ugcuuccacuaaugagcugugu

SEQ ID NO: 49966 - RNA, 22 nt, Human
ugcuuccagccuucccaaugcu

SEQ ID NO: 49967 - RNA, 22 nt, Human
ugcuuccuucccguucuucucc

SEQ ID NO: 49968 - RNA, 22 nt, Human
ugcuucgcccccuggugcagcu

SEQ ID NO: 49969 - RNA, 22 nt, Human
ugcuucucagccugucuggaaa

SEQ ID NO: 49970 - RNA, 22 nt, Human
ugcuucucccaaccagggccug

SEQ ID NO: 49971 - RNA, 22 nt, Human
ugcuucucuguucuaacccuug

SEQ ID NO: 49972 - RNA, 22 nt, Human
ugcuucugaacucagcaugugg

SEQ ID NO: 49973 - RNA, 22 nt, Human
ugcuucugacuaagcugcauga

SEQ ID NO: 49974 - RNA, 22 nt, Human
ugcuucugacugggucaguuga

SEQ ID NO: 49975 - RNA, 22 nt, Human
ugcuucugcaacuugaauguac

SEQ ID NO: 49976 - RNA, 22 nt, Human
ugcuucugcauucaauguugga

SEQ ID NO: 49977 - RNA, 22 nt, Human
ugcuucugggcaaaugugugug

SEQ ID NO: 49978 - RNA, 19 nt, Human
ugcuucuggggcuucucca

SEQ ID NO: 49979 - RNA, 22 nt, Human
ugcuucuggguaggccucagga

SEQ ID NO: 49980 - RNA, 17 nt, Human
ugcuucuguauugcugg

SEQ ID NO: 49981 - RNA, 22 nt, Human
ugcuucuuuaugauguaugauu

SEQ ID NO: 49982 - RNA, 19 nt, Human
ugcuugccugccuuuccca

SEQ ID NO: 49983 - RNA, 22 nt, Human
ugcuuggcuucauuuaaguuuu

SEQ ID NO: 49984 - RNA, 21 nt, Human
ugcuugggggcuucaggagcu

SEQ ID NO: 49985 - RNA, 22 nt, Human
ugcuugucaggauaagcucugg

SEQ ID NO: 49986 - RNA, 22 nt, Human
ugcuugucucagauaaaacuau

SEQ ID NO: 49987 - RNA, 22 nt, Human
ugcuugucucucugugcccacu

SEQ ID NO: 49988 - RNA, 22 nt, Human
ugcuugucuucaggauuauggu

SEQ ID NO: 49989 - RNA, 22 nt, Human
ugcuugugacagaacugugucc

SEQ ID NO: 49990 - RNA, 22 nt, Human
ugcuuuaaaccauggaugugag

SEQ ID NO: 49991 - RNA, 22 nt, Human
ucagagcacuuggcucauggca

SEQ ID NO: 49992 - RNA, 22 nt, Human
ucagagccccuccgcuguccca

SEQ ID NO: 49993 - RNA, 22 nt, Human
ucagagcucaugagcagagcca

SEQ ID NO: 49994 - RNA, 20 nt, Human
ucagagcugcaggagagaaa

SEQ ID NO: 49995 - RNA, 22 nt, Human
ucagagcuucaccuguuacauu

SEQ ID NO: 49996 - RNA, 22 nt, Human
ucagaggaaagggaacauaguc

SEQ ID NO: 49997 - RNA, 22 nt, Human
ucagaggaaaggucagauggcu

SEQ ID NO: 49998 - RNA, 22 nt, Human
ucagaggaagccuuggugggag

SEQ ID NO: 49999 - RNA, 22 nt, Human
ucagaggaauaaugcugcauuu

SEQ ID NO: 50000 - RNA, 22 nt, Human
ucagaggaauuugcuuuucaug

SEQ ID NO: 50001 - RNA, 22 nt, Human
ucagaggacgcacuaggguugu

SEQ ID NO: 50002 - RNA, 22 nt, Human
ucagaggagcugcagaacgcug

SEQ ID NO: 50003 - RNA, 22 nt, Human
ucagaggauagaaauacuuauu

SEQ ID NO: 50004 - RNA, 22 nt, Human
ucagaggcaaagaacuuuauua

SEQ ID NO: 50005 - RNA, 22 nt, Human
ucagaggccuugguuaugguau

SEQ ID NO: 50006 - RNA, 22 nt, Human
ucagaggcucacugucuacuuu

SEQ ID NO: 50007 - RNA, 22 nt, Human
ucagaggcugcauuuuuaucca

SEQ ID NO: 50008 - RNA, 22 nt, Human
ucagaggcuuucaauguguuuu

SEQ ID NO: 50009 - RNA, 22 nt, Human
ucagagguggccccugcccuca

SEQ ID NO: 50010 - RNA, 22 nt, Human
ucagagguuacccaugggacag

SEQ ID NO: 50011 - RNA, 22 nt, Human
ucagaguauuucauucuuaggu

SEQ ID NO: 50012 - RNA, 22 nt, Human
ucagagucuaaauagaagaaua

SEQ ID NO: 50013 - RNA, 22 nt, Human
ucagagucuuggcaauagguua

SEQ ID NO: 50014 - RNA, 21 nt, Human
ucagaguggaagacaguuuga

SEQ ID NO: 50015 - RNA, 22 nt, Human
ucagagugguagccuauuuucu

SEQ ID NO: 50016 - RNA, 22 nt, Human
ucagagugugacuuggucauga

SEQ ID NO: 50017 - RNA, 22 nt, Human
ucagaguuccucauagauccag

SEQ ID NO: 50018 - RNA, 22 nt, Human
ucagaguuggcaguaaaacaca

SEQ ID NO: 50019 - RNA, 22 nt, Human
ucagaguuucugauuuaguagg

SEQ ID NO: 50020 - RNA, 22 nt, Human
ucagauaauuaaucaugaaauu

SEQ ID NO: 50021 - RNA, 22 nt, Human
ucagaucaggaugcagcaacau

SEQ ID NO: 50022 - RNA, 22 nt, Human
ucagaucauggaucuauuacuu

SEQ ID NO: 50023 - RNA, 22 nt, Human
ucagauccgagugugccaagga

SEQ ID NO: 50024 - RNA, 22 nt, Human
ucagaucuaauuggauuauuau

SEQ ID NO: 50025 - RNA, 22 nt, Human
ucagaugcccuuuguuuuagac

SEQ ID NO: 50026 - RNA, 22 nt, Human
ucagaugcuaaagauggaauua

SEQ ID NO: 50027 - RNA, 22 nt, Human
ucagaugcuuagugacuacaca

SEQ ID NO: 50028 - RNA, 22 nt, Human
ucagauggaggcaauguuaccu

SEQ ID NO: 50029 - RNA, 22 nt, Human
ucagauggcacacagagccugc

SEQ ID NO: 50030 - RNA, 18 nt, Human
ucagauuuaacuguaucc

SEQ ID NO: 50031 - RNA, 22 nt, Human
ucagauuuauguggcuaggcuc

SEQ ID NO: 50032 - RNA, 22 nt, Human
ucagauuucugaaagcccucuc

SEQ ID NO: 50033 - RNA, 22 nt, Human
ucagauuuguccuacuaggcac

SEQ ID NO: 50034 - RNA, 22 nt, Human
ucagauuuuccacagacuggaa

SEQ ID NO: 50035 - RNA, 20 nt, Human
ucagauuuuucuaacuuuga

SEQ ID NO: 50036 - RNA, 22 nt, Human
ucagcaaaauguggcuagugcu

SEQ ID NO: 50037 - RNA, 22 nt, Human
ucagcaaacauugauuggacuu

SEQ ID NO: 50038 - RNA, 22 nt, Human
ucagcaacuauuuaucaaauuc

SEQ ID NO: 50039 - RNA, 22 nt, Human
ucagcaaguauuuucugaaugc

SEQ ID NO: 50040 - RNA, 22 nt, Human
ucagcaauaugauaggcuuugu

SEQ ID NO: 50041 - RNA, 22 nt, Human
ucagcaauccucccacaggugg

SEQ ID NO: 50042 - RNA, 22 nt, Human
ucagcaaugagaacuggcauuu

SEQ ID NO: 50043 - RNA, 22 nt, Human
ucagcaaugugauacugugcaa

SEQ ID NO: 50044 - RNA, 22 nt, Human
ucagcacuauacauuuugaaua

SEQ ID NO: 50045 - RNA, 22 nt, Human
ucagcacucgcuaccuaguaaa

SEQ ID NO: 50046 - RNA, 22 nt, Human
ucagcacugaaauucuucacau

SEQ ID NO: 50047 - RNA, 22 nt, Human
ucagcacuuugaagcagaagga

SEQ ID NO: 50048 - RNA, 22 nt, Human
ucagcacuuuuacucucuuugc

SEQ ID NO: 50049 - RNA, 22 nt, Human
ucagcagaaaggcacuagauga

SEQ ID NO: 50050 - RNA, 22 nt, Human
ucagcagaauguggcaugucac

SEQ ID NO: 50051 - RNA, 22 nt, Human
ucagcagacaguuagcuauauu

SEQ ID NO: 50052 - RNA, 22 nt, Human
ucagcagagcgagaccaaguca

SEQ ID NO: 50053 - RNA, 22 nt, Human
ucagcagaguuucaucuuggga

SEQ ID NO: 50054 - RNA, 21 nt, Human
ucagcagcuuuugcagucccu

SEQ ID NO: 50055 - RNA, 21 nt, Human
ucagcaggcaccagaaggcug

SEQ ID NO: 50056 - RNA, 22 nt, Human
ucagcaggcagaaaucugcaga

SEQ ID NO: 50057 - RNA, 22 nt, Human
ucagcaggcucugguugaccau

SEQ ID NO: 50058 - RNA, 17 nt, Human
ucagcaggggccaagcu

SEQ ID NO: 50059 - RNA, 22 nt, Human
ucagcaggggccguugggugga

SEQ ID NO: 50060 - RNA, 22 nt, Human
ucagcaggguuugacuucuaau

SEQ ID NO: 50061 - RNA, 22 nt, Human
ucagcaggugccucagauucuu

SEQ ID NO: 50062 - RNA, 22 nt, Human
ucagcagguggugggcagguga

SEQ ID NO: 50063 - RNA, 22 nt, Human
ucagcaguugcccccucccagc

SEQ ID NO: 50064 - RNA, 21 nt, Human
ucagcauccugagcuguccuc

SEQ ID NO: 50065 - RNA, 22 nt, Human
ucagcaucucaaccuucucuac

SEQ ID NO: 50066 - RNA, 22 nt, Human
ucagcauguacuucuccuccau

SEQ ID NO: 50067 - RNA, 22 nt, Human
ucagcauuccugaagacaagca

SEQ ID NO: 50068 - RNA, 22 nt, Human
ucagccacuucccucuggucag

SEQ ID NO: 50069 - RNA, 22 nt, Human
ucagccagagguggaugaguca

SEQ ID NO: 50070 - RNA, 20 nt, Human
ucagccagcuaacaugggga

SEQ ID NO: 50071 - RNA, 22 nt, Human
ucagccaggcacaauggcagcu

SEQ ID NO: 50072 - RNA, 22 nt, Human
ucagccaggccaccuucagcuu

SEQ ID NO: 50073 - RNA, 22 nt, Human
ucagccagggcucuggccucag

SEQ ID NO: 50074 - RNA, 22 nt, Human
ucagccagugugcaccuggagu

SEQ ID NO: 50075 - RNA, 23 nt, Human
ucagcccacaucuagucauuagc

SEQ ID NO: 50076 - RNA, 18 nt, Human
ucagcccagagcccaguu

SEQ ID NO: 50077 - RNA, 22 nt, Human
ucagcccaggaaugagccuucu

SEQ ID NO: 50078 - RNA, 22 nt, Human
ucagcccaguuaagaaccuguu

SEQ ID NO: 50079 - RNA, 22 nt, Human
ucagcccggguucgcaaacacu

SEQ ID NO: 50080 - RNA, 22 nt, Human
ucagaagcaggagugugcacaa

SEQ ID NO: 50081 - RNA, 22 nt, Human
ucagaagccgggcagguuuugg

SEQ ID NO: 50082 - RNA, 22 nt, Human
ucagaagccuugauuaucuaga

SEQ ID NO: 50083 - RNA, 22 nt, Human
ucagaaggaugugcagguggca

SEQ ID NO: 50084 - RNA, 20 nt, Human
ucagaaggcuccagagcaga

SEQ ID NO: 50085 - RNA, 22 nt, Human
ucagaagguuuuuagcaaagga

SEQ ID NO: 50086 - RNA, 22 nt, Human
ucagaaguagcuccccuucauu

SEQ ID NO: 50087 - RNA, 22 nt, Human
ucagaaguccaauaccauggga

SEQ ID NO: 50088 - RNA, 22 nt, Human
ucagaagucccagaauucacau

SEQ ID NO: 50089 - RNA, 22 nt, Human
ucagaagucccuugcaucuuag

SEQ ID NO: 50090 - RNA, 22 nt, Human
ucagaaguugagauauucaggg

SEQ ID NO: 50091 - RNA, 22 nt, Human
ucagaaguugauaaaguaguug

SEQ ID NO: 50092 - RNA, 20 nt, Human
ucagaaguuuccuggagcau

SEQ ID NO: 50093 - RNA, 23 nt, Human
ucagaaguuugguuguaacaugg

SEQ ID NO: 50094 - RNA, 22 nt, Human
ucagaauauauucauguuguca

SEQ ID NO: 50095 - RNA, 22 nt, Human
ucagaaucgguggggccaggaa

SEQ ID NO: 50096 - RNA, 22 nt, Human
ucagaaucuuucuagagucuag

SEQ ID NO: 50097 - RNA, 22 nt, Human
ucagaauggcccauaaauaguc

SEQ ID NO: 50098 - RNA, 22 nt, Human
ucagaauuacacagggccuuga

SEQ ID NO: 50099 - RNA, 22 nt, Human
ucagaauucagagggagugggg

SEQ ID NO: 50100 - RNA, 22 nt, Human
ucagcagacauuauuuucuggc

SEQ ID NO: 50101 - RNA, 22 nt, Human
ucagcagacuaggcagauuacu

SEQ ID NO: 50102 - RNA, 22 nt, Human
ucagcaggcacaccaaaaacug

SEQ ID NO: 50103 - RNA, 22 nt, Human
ucagcagggaggcucugugccc

SEQ ID NO: 50104 - RNA, 22 nt, Human
ucagcagggcauacugagccua

SEQ ID NO: 50105 - RNA, 22 nt, Human
ucagcagggccaugcucucucu

SEQ ID NO: 50106 - RNA, 22 nt, Human
ucagcagucacauguuguccca

SEQ ID NO: 50107 - RNA, 22 nt, Human
ucagcaguggcucucaugcagu

SEQ ID NO: 50108 - RNA, 22 nt, Human
ucagcaguggguccugagggug

SEQ ID NO: 50109 - RNA, 22 nt, Human
ucagcaguucaaccccgucaga

SEQ ID NO: 50110 - RNA, 22 nt, Human
ucagcaguuuuauaugcagcuu

SEQ ID NO: 50111 - RNA, 17 nt, Human
ucagcauacacagagaa

SEQ ID NO: 50112 - RNA, 22 nt, Human
ucagcaucacgugguccgagaa

SEQ ID NO: 50113 - RNA, 22 nt, Human
ucagcauucuuuacaaggauga

SEQ ID NO: 50114 - RNA, 22 nt, Human
ucagcauuguggcagagaaugg

SEQ ID NO: 50115 - RNA, 22 nt, Human
ucagcauuucagaaguggcaua

SEQ ID NO: 50116 - RNA, 22 nt, Human
ucagccaagcagccaucaucug

SEQ ID NO: 50117 - RNA, 22 nt, Human
ucagccagcauuaccccugacu

SEQ ID NO: 50118 - RNA, 22 nt, Human
ucagccaguauuugagugcuca

SEQ ID NO: 50119 - RNA, 22 nt, Human
ucagccaguuuguuuauuccgg

SEQ ID NO: 50120 - RNA, 22 nt, Human
ucagccaugucaggggaaugac

SEQ ID NO: 50121 - RNA, 22 nt, Human
ucagcccaccugguguggggcu

SEQ ID NO: 50122 - RNA, 22 nt, Human
ucagcccagaccaccucauugc

SEQ ID NO: 50123 - RNA, 19 nt, Human
ucagcccaggcugggaagc

SEQ ID NO: 50124 - RNA, 22 nt, Human
ucagcccagggacagaggcccc

SEQ ID NO: 50125 - RNA, 22 nt, Human
ucagcccaggucacguaaucaa

SEQ ID NO: 50126 - RNA, 22 nt, Human
ucagccccacggggucagccaa

SEQ ID NO: 50127 - RNA, 22 nt, Human
ucagcccuagaaagucuaagca

SEQ ID NO: 50128 - RNA, 22 nt, Human
ucagcccugaggacagaggcag

SEQ ID NO: 50129 - RNA, 22 nt, Human
ucagcccuggcacugucuccca

SEQ ID NO: 50130 - RNA, 22 nt, Human
ucagcccuuccuggagcuuuua

SEQ ID NO: 50131 - RNA, 22 nt, Human
ucagcccuugauguuugggggu

SEQ ID NO: 50132 - RNA, 22 nt, Human
ucagccuacacuccaacagcau

SEQ ID NO: 50133 - RNA, 22 nt, Human
ucagccucagguguucagauuu

SEQ ID NO: 50134 - RNA, 22 nt, Human
ucagccuggugauuccucuguc

SEQ ID NO: 50135 - RNA, 20 nt, Human
ucagccuugaaugcuugaaa

SEQ ID NO: 50136 - RNA, 22 nt, Human
ucagccuugcuucuggacuggu

SEQ ID NO: 50137 - RNA, 22 nt, Human
ucagccuuguggcccugcucca

SEQ ID NO: 50138 - RNA, 16 nt, Human
ucagcuauagggauug

SEQ ID NO: 50139 - RNA, 17 nt, Human
ucagcucagagcaccug

SEQ ID NO: 50140 - RNA, 22 nt, Human
ucagcuccuauacuuuguccug

SEQ ID NO: 50141 - RNA, 22 nt, Human
ucagcuccucagagccucaguu

SEQ ID NO: 50142 - RNA, 22 nt, Human
ucagcucugcaaggucaccucc

SEQ ID NO: 50143 - RNA, 22 nt, Human
ucagcucuguguacaguuagca

SEQ ID NO: 50144 - RNA, 22 nt, Human
ucagcugcagcaggcaccauuu

SEQ ID NO: 50145 - RNA, 22 nt, Human
ucagcugcauaagucaccuugc

SEQ ID NO: 50146 - RNA, 22 nt, Human
ucagcugccccaguggccccag

SEQ ID NO: 50147 - RNA, 22 nt, Human
ucagcugccucucccuggaaga

SEQ ID NO: 50148 - RNA, 22 nt, Human
ucagcuggaagauggugcagaa

SEQ ID NO: 50149 - RNA, 22 nt, Human
ucagcuggagacugcucaauga

SEQ ID NO: 50150 - RNA, 22 nt, Human
ucagcuggcagguucugggaag

SEQ ID NO: 50151 - RNA, 22 nt, Human
ucagcugggaaguucucgcuug

SEQ ID NO: 50152 - RNA, 22 nt, Human
ucagcuggugccacucagucaa

SEQ ID NO: 50153 - RNA, 21 nt, Human
ucagcuguagagauuacauuc

SEQ ID NO: 50154 - RNA, 22 nt, Human
ucagcuguaucagaaauacaau

SEQ ID NO: 50155 - RNA, 22 nt, Human
ucagcuguccgcagcccacuuc

SEQ ID NO: 50156 - RNA, 22 nt, Human
ucagcuuauauuuuuaguguaa

SEQ ID NO: 50157 - RNA, 23 nt, Human
ucagcuucauugucuucuauggc

SEQ ID NO: 50158 - RNA, 22 nt, Human
ucagcuucccuaucugaccaua

SEQ ID NO: 50159 - RNA, 22 nt, Human
ucagcuucucaaaauggcuuag

SEQ ID NO: 50160 - RNA, 22 nt, Human
ucagcuucuuucacuuaacaug

SEQ ID NO: 50161 - RNA, 21 nt, Human
ucagcuugaaucuagagauag

SEQ ID NO: 50162 - RNA, 22 nt, Human
ucagcuugcuaaaagggcaucu

SEQ ID NO: 50163 - RNA, 22 nt, Human
ucagcuuuccuugcuuuagauu

SEQ ID NO: 50164 - RNA, 22 nt, Human
ucagcuuucucucgccaucagg

SEQ ID NO: 50165 - RNA, 22 nt, Human
ucagcuuuggucacauugaguu

SEQ ID NO: 50166 - RNA, 22 nt, Human
ucagcuuuugucagaaauugua

SEQ ID NO: 50167 - RNA, 21 nt, Human
ucaggaaacaccucuuaagga

SEQ ID NO: 50168 - RNA, 22 nt, Human
ucaggaaagaagaugcucagug

SEQ ID NO: 50169 - RNA, 22 nt, Human
ucaggaaagccuagaagagaac

SEQ ID NO: 50170 - RNA, 22 nt, Human
ucaggaaagcugcggucaccug

SEQ ID NO: 50171 - RNA, 22 nt, Human
ucaggaaauacaagugacauca

SEQ ID NO: 50172 - RNA, 22 nt, Human
ucaggaaauuaaacacuugaaa

SEQ ID NO: 50173 - RNA, 22 nt, Human
ucaggaacagcagggaggaaag

SEQ ID NO: 50174 - RNA, 22 nt, Human
ucaggaacauaaugugagucag

SEQ ID NO: 50175 - RNA, 22 nt, Human
ucaggaacccuggucuccugcu

SEQ ID NO: 50176 - RNA, 22 nt, Human
ucaggaagaaauucuguaucuu

SEQ ID NO: 50177 - RNA, 21 nt, Human
ucaggaagagcuucucccacu

SEQ ID NO: 50178 - RNA, 22 nt, Human
ucaggaagcauccugagguguc

SEQ ID NO: 50179 - RNA, 22 nt, Human
ucaggaagcuacugccagcagc

SEQ ID NO: 50180 - RNA, 22 nt, Human
ucaggaagggcucagucugugc

SEQ ID NO: 50181 - RNA, 22 nt, Human
ucaggaaguugaggcguagaga

SEQ ID NO: 50182 - RNA, 22 nt, Human
ucaggaaugaggauaaacauug

SEQ ID NO: 50183 - RNA, 22 nt, Human
ucaggacaacaagacuuguuua

SEQ ID NO: 50184 - RNA, 22 nt, Human
ucaggacaauagugauuuuuac

SEQ ID NO: 50185 - RNA, 22 nt, Human
ucaggacacccugugcuuccuu

SEQ ID NO: 50186 - RNA, 22 nt, Human
ucaggacacuuggcacaagguc

SEQ ID NO: 50187 - RNA, 22 nt, Human
ucaggacuucauuaccucaggu

SEQ ID NO: 50188 - RNA, 22 nt, Human
ucaggagaaggcaauguggaaa

SEQ ID NO: 50189 - RNA, 22 nt, Human
ucaggagacaaagggugcggag

SEQ ID NO: 50190 - RNA, 18 nt, Human
ucaggagacacagacgca

SEQ ID NO: 50191 - RNA, 22 nt, Human
ucaggagcagccuuggagagcg

SEQ ID NO: 50192 - RNA, 22 nt, Human
ucaggagcagggggaagcucug

SEQ ID NO: 50193 - RNA, 22 nt, Human
ucaggagcugcauuauccugug

SEQ ID NO: 50194 - RNA, 22 nt, Human
ucaggagcuuagaugcuuugac

SEQ ID NO: 50195 - RNA, 22 nt, Human
ucaggagcuugguagugugauu

SEQ ID NO: 50196 - RNA, 22 nt, Human
ucaggaggacagauaaggauag

SEQ ID NO: 50197 - RNA, 22 nt, Human
ucaggaggccgugugcucagug

SEQ ID NO: 50198 - RNA, 23 nt, Human
ucagggacaugaugugucauauc

SEQ ID NO: 50199 - RNA, 22 nt, Human
ucagggacauuuagacacugau

SEQ ID NO: 50200 - RNA, 22 nt, Human
ucagggacuaggugcugccuga

SEQ ID NO: 50201 - RNA, 22 nt, Human
ucagggagccuggacuucaagg

SEQ ID NO: 50202 - RNA, 19 nt, Human
ucagggaguuuacagcaug

SEQ ID NO: 50203 - RNA, 22 nt, Human
ucagggauuaaggucaaaggug

SEQ ID NO: 50204 - RNA, 22 nt, Human
ucagggcaagauugguuaauaa

SEQ ID NO: 50205 - RNA, 22 nt, Human
ucagggcacaggccuguggguu

SEQ ID NO: 50206 - RNA, 16 nt, Human
ucagggcagaauggca

SEQ ID NO: 50207 - RNA, 21 nt, Human
ucagggcagcugcucuucaga

SEQ ID NO: 50208 - RNA, 21 nt, Human
ucagggcagugggagguuccu

SEQ ID NO: 50209 - RNA, 22 nt, Human
uguaaaaggaaaucaaagcacu

SEQ ID NO: 50210 - RNA, 23 nt, Human
uguaaaaugggguaguguuacca

SEQ ID NO: 50211 - RNA, 22 nt, Human
uguaaaccagggucauccuuag

SEQ ID NO: 50212 - RNA, 23 nt, Human
uguaaaccauuuugcaucccaug

SEQ ID NO: 50213 - RNA, 22 nt, Human
uguaaacuagggcugauaaggg

SEQ ID NO: 50214 - RNA, 22 nt, Human
uguaaacugaggguagcugauu

SEQ ID NO: 50215 - RNA, 22 nt, Human
uguaaacugcuucucaccaagg

SEQ ID NO: 50216 - RNA, 22 nt, Human
uguaaagagaaugguauaugga

SEQ ID NO: 50217 - RNA, 22 nt, Human
uguaaauaauuccuaggcuuuu

SEQ ID NO: 50218 - RNA, 20 nt, Human
uguaaauaggcauuguaguu

SEQ ID NO: 50219 - RNA, 22 nt, Human
uguaaaugaaguaugcuuuacu

SEQ ID NO: 50220 - RNA, 22 nt, Human
uguaaauggucagauaaaccua

SEQ ID NO: 50221 - RNA, 22 nt, Human
uguaaaugugaauuuccuuuuc

SEQ ID NO: 50222 - RNA, 22 nt, Human
uguaaauuggaaaucaaucaag

SEQ ID NO: 50223 - RNA, 23 nt, Human
uguaaauuuuguagucacauuuu

SEQ ID NO: 50224 - RNA, 22 nt, Human
uguaacaaaauaccuuggauug

SEQ ID NO: 50225 - RNA, 22 nt, Human
uguaacaaauacccuugaaguu

SEQ ID NO: 50226 - RNA, 22 nt, Human
uguaacaacauuugauuuuuag

SEQ ID NO: 50227 - RNA, 22 nt, Human
uguaacaaguaauccaugggag

SEQ ID NO: 50228 - RNA, 21 nt, Human
uguaacaaguucccuagguga

SEQ ID NO: 50229 - RNA, 22 nt, Human
uguaacaaugaauauagugacu

SEQ ID NO: 50230 - RNA, 22 nt, Human
uguaacaauuucuuacuauugu

SEQ ID NO: 50231 - RNA, 22 nt, Human
uguaacacucaaucuguuuaac

SEQ ID NO: 50232 - RNA, 22 nt, Human
uguaacagagcuuuuuuauagc

SEQ ID NO: 50233 - RNA, 22 nt, Human
uguaacaguaguuacuauucuu

SEQ ID NO: 50234 - RNA, 22 nt, Human
uguaaccugacugcuuugcucu

SEQ ID NO: 50235 - RNA, 22 nt, Human
uguaacuguggucuagggacug

SEQ ID NO: 50236 - RNA, 20 nt, Human
uguaagaaguaggaggguua

SEQ ID NO: 50237 - RNA, 22 nt, Human
uguaagauucuaagaguuaaug

SEQ ID NO: 50238 - RNA, 22 nt, Human
uguaaggaggaaaauuaguggu

SEQ ID NO: 50239 - RNA, 22 nt, Human
uguaaggugcucauguauuucu

SEQ ID NO: 50240 - RNA, 22 nt, Human
uguaaguaguaauggaaggaca

SEQ ID NO: 50241 - RNA, 22 nt, Human
uccauuuucuaaguaucacuua

SEQ ID NO: 50242 - RNA, 22 nt, Human
ucccaaauauaaugcaagagac

SEQ ID NO: 50243 - RNA, 21 nt, Human
ucccaagaauaugcauaaguu

SEQ ID NO: 50244 - RNA, 22 nt, Human
ucccaagaccuggcauccaagu

SEQ ID NO: 50245 - RNA, 22 nt, Human
ucccaagacgaugugcuuggcc

SEQ ID NO: 50246 - RNA, 22 nt, Human
ucccaagagcaagaacuugcug

SEQ ID NO: 50247 - RNA, 22 nt, Human
ucccaagauuagguuggaaagg

SEQ ID NO: 50248 - RNA, 22 nt, Human
ucccaagauuauugagggaggg

SEQ ID NO: 50249 - RNA, 22 nt, Human
ucccaagcccuggaugccucag

SEQ ID NO: 50250 - RNA, 21 nt, Human
ucccaagcugcuggcucagcu

SEQ ID NO: 50251 - RNA, 22 nt, Human
ucccaaggccucuaguugauua

SEQ ID NO: 50252 - RNA, 22 nt, Human
ucccacacagcccgcucaccgg

SEQ ID NO: 50253 - RNA, 22 nt, Human
ucccacagggcuucucuguaca

SEQ ID NO: 50254 - RNA, 22 nt, Human
ucccacagugaaguucaugaua

SEQ ID NO: 50255 - RNA, 22 nt, Human
ucccacauaugcaauccugaau

SEQ ID NO: 50256 - RNA, 22 nt, Human
ucccaccaggugaccauuucau

SEQ ID NO: 50257 - RNA, 22 nt, Human
ucccaccccuugacucuuuaag

SEQ ID NO: 50258 - RNA, 22 nt, Human
ucccacucccaggcaggccucu

SEQ ID NO: 50259 - RNA, 22 nt, Human
ucccacugcuuugcucugcuca

SEQ ID NO: 50260 - RNA, 21 nt, Human
ucccacuggcccagggcucca

SEQ ID NO: 50261 - RNA, 22 nt, Human
ucccacugugaauccaaggccu

SEQ ID NO: 50262 - RNA, 22 nt, Human
ucccagaaguccagccaugggc

SEQ ID NO: 50263 - RNA, 22 nt, Human
ucccagagauuuccucuccuuc

SEQ ID NO: 50264 - RNA, 22 nt, Human
ucccagagcagaugugcuaaag

SEQ ID NO: 50265 - RNA, 22 nt, Human
ucccagagcaguacuccaggag

SEQ ID NO: 50266 - RNA, 22 nt, Human
ucccagagcccaaguuggagag

SEQ ID NO: 50267 - RNA, 22 nt, Human
ucccagaggcaguugguaacuu

SEQ ID NO: 50268 - RNA, 22 nt, Human
ucccagaggcuccagucucuau

SEQ ID NO: 50269 - RNA, 19 nt, Human
ucccagagucuagagguug

SEQ ID NO: 50270 - RNA, 22 nt, Human
ucccagagucuucuccuguaau

SEQ ID NO: 50271 - RNA, 22 nt, Human
ucccagagugugggcaucaagg

SEQ ID NO: 50272 - RNA, 22 nt, Human
ucccagauucuucugugugggc

SEQ ID NO: 50273 - RNA, 22 nt, Human
ucccagcaagaaaggggguggc

SEQ ID NO: 50274 - RNA, 22 nt, Human
ucccagcacuguaauucuuugg

SEQ ID NO: 50275 - RNA, 22 nt, Human
ucccagcagagccagcaagccg

SEQ ID NO: 50276 - RNA, 22 nt, Human
ucccagcagaugagcugaccua

SEQ ID NO: 50277 - RNA, 22 nt, Human
ucccagcaggaguccaguuccc

SEQ ID NO: 50278 - RNA, 22 nt, Human
ucccagcauuaaugccugucag

SEQ ID NO: 50279 - RNA, 22 nt, Human
ucccagcccagacuucuccagu

SEQ ID NO: 50280 - RNA, 22 nt, Human
ucccagccggugccuggguccc

SEQ ID NO: 50281 - RNA, 22 nt, Human
ucccagccugacagugcaucaa

SEQ ID NO: 50282 - RNA, 22 nt, Human
ucccaggaaaacacucgaggac

SEQ ID NO: 50283 - RNA, 19 nt, Human
ucccaggaagcaaauguca

SEQ ID NO: 50284 - RNA, 22 nt, Human
ucccaggaaugucugaaaguga

SEQ ID NO: 50285 - RNA, 22 nt, Human
ucccaggagcaccuuuugagcc

SEQ ID NO: 50286 - RNA, 22 nt, Human
ucccaggaggugcuuccuagga

SEQ ID NO: 50287 - RNA, 22 nt, Human
ucccaggauguuggcggcaggu

SEQ ID NO: 50288 - RNA, 22 nt, Human
ucccaggccauaaaacucagag

SEQ ID NO: 50289 - RNA, 22 nt, Human
ucccagggcacucacccucccu

SEQ ID NO: 50290 - RNA, 22 nt, Human
ucccagggcagcuguccagaag

SEQ ID NO: 50291 - RNA, 22 nt, Human
ucccagggggaugaacacugcc

SEQ ID NO: 50292 - RNA, 22 nt, Human
ucccaggguccucuucuggaau

SEQ ID NO: 50293 - RNA, 21 nt, Human
ucccagggucuuaugggaugu

SEQ ID NO: 50294 - RNA, 22 nt, Human
ucccagggugaaaugcaguagg

SEQ ID NO: 50295 - RNA, 22 nt, Human
ucccagggugcgccugcccucg

SEQ ID NO: 50296 - RNA, 22 nt, Human
ucccagugagaugaaacaggua

SEQ ID NO: 50297 - RNA, 20 nt, Human
ucccaucacgccugugccag

SEQ ID NO: 50298 - RNA, 22 nt, Human
ucccaucacuagcaucugcacc

SEQ ID NO: 50299 - RNA, 22 nt, Human
ucccaucagucauugguugagg

SEQ ID NO: 50300 - RNA, 23 nt, Human
ucccaucuauugugaucaaugcc

SEQ ID NO: 50301 - RNA, 22 nt, Human
ucccauggucuauauagaggca

SEQ ID NO: 50302 - RNA, 22 nt, Human
ucccauguaagaaggagacagg

SEQ ID NO: 50303 - RNA, 22 nt, Human
ucccauguuaccaaggagucac

SEQ ID NO: 50304 - RNA, 22 nt, Human
ucccauugccauagauaggaca

SEQ ID NO: 50305 - RNA, 22 nt, Human
uccccaaaauacauggacgugu

SEQ ID NO: 50306 - RNA, 22 nt, Human
uccccacacagauacagaguag

SEQ ID NO: 50307 - RNA, 22 nt, Human
uccccacacuuucacuccuggc

SEQ ID NO: 50308 - RNA, 22 nt, Human
uccccacagcagaagaucugag

SEQ ID NO: 50309 - RNA, 21 nt, Human
uccccacauuucuaaacagac

SEQ ID NO: 50310 - RNA, 22 nt, Human
uccccaccccagaacuacuagg

SEQ ID NO: 50311 - RNA, 22 nt, Human
uccccagaggaauaugagauug

SEQ ID NO: 50312 - RNA, 22 nt, Human
uccccagaugacaucaaaaggc

SEQ ID NO: 50313 - RNA, 22 nt, Human
uccccagauucaugucugcugu

SEQ ID NO: 50314 - RNA, 22 nt, Human
uccccaggaaauucugauucuu

SEQ ID NO: 50315 - RNA, 22 nt, Human
uccccaggagcaaugauucagu

SEQ ID NO: 50316 - RNA, 22 nt, Human
uccccaggaguuuuacuuugca

SEQ ID NO: 50317 - RNA, 22 nt, Human
uccccaggggccugggcacagu

SEQ ID NO: 50318 - RNA, 22 nt, Human
cacaggagaaaggggaagcucg

SEQ ID NO: 50319 - RNA, 22 nt, Human
cacaggagaacccacagauucu

SEQ ID NO: 50320 - RNA, 22 nt, Human
cacaggagagcugggaggugcc

SEQ ID NO: 50321 - RNA, 22 nt, Human
cacaggagagguuaaugggggc

SEQ ID NO: 50322 - RNA, 18 nt, Human
cacaggagccacacucac

SEQ ID NO: 50323 - RNA, 22 nt, Human
cacaggagggagcgggcagcca

SEQ ID NO: 50324 - RNA, 23 nt, Human
cacaggcagaaaucaagacggua

SEQ ID NO: 50325 - RNA, 20 nt, Human
cacaggccccaagaccugua

SEQ ID NO: 50326 - RNA, 22 nt, Human
cacaggccugucucuuucuaac

SEQ ID NO: 50327 - RNA, 18 nt, Human
cacaggcucccagugagg

SEQ ID NO: 50328 - RNA, 22 nt, Human
cacaggcuccggccuugcagcc

SEQ ID NO: 50329 - RNA, 22 nt, Human
cacaggcucuucucacuugauu

SEQ ID NO: 50330 - RNA, 22 nt, Human
cacaggcugggaagccuaggcc

SEQ ID NO: 50331 - RNA, 22 nt, Human
cacaggcuuccaguccccagcu

SEQ ID NO: 50332 - RNA, 21 nt, Human
cacaggcuucuauacacaaug

SEQ ID NO: 50333 - RNA, 22 nt, Human
cacagggaaccaaggcugggcc

SEQ ID NO: 50334 - RNA, 22 nt, Human
cacagggaggacaucaacagug

SEQ ID NO: 50335 - RNA, 22 nt, Human
cacagggaggcagccaugcucc

SEQ ID NO: 50336 - RNA, 22 nt, Human
cacagggaguuacagaagcacu

SEQ ID NO: 50337 - RNA, 22 nt, Human
cacagggcagagaccugggugc

SEQ ID NO: 50338 - RNA, 22 nt, Human
cacagggcaggccccaggccuc

SEQ ID NO: 50339 - RNA, 22 nt, Human
cacagggcuaaaugaaggguug

SEQ ID NO: 50340 - RNA, 22 nt, Human
cacagggcuuugauggcugagu

SEQ ID NO: 50341 - RNA, 22 nt, Human
cacaggggcaaacuguagggga

SEQ ID NO: 50342 - RNA, 22 nt, Human
cacagguacauccuuaucccca

SEQ ID NO: 50343 - RNA, 22 nt, Human
cacaggugcuccucggggagcu

SEQ ID NO: 50344 - RNA, 22 nt, Human
cacagguggcuccaaguuagag

SEQ ID NO: 50345 - RNA, 22 nt, Human
cacagguguaugaauaugucca

SEQ ID NO: 50346 - RNA, 22 nt, Human
cacaggugugugccuuaucaaa

SEQ ID NO: 50347 - RNA, 23 nt, Human
cacagguguuucaucuucucagu

SEQ ID NO: 50348 - RNA, 22 nt, Human
cacagguuagguauuauacuau

SEQ ID NO: 50349 - RNA, 22 nt, Human
cacagguucaccucagguaggu

SEQ ID NO: 50350 - RNA, 22 nt, Human
cacaguaacuggcguguaguaa

SEQ ID NO: 50351 - RNA, 22 nt, Human
cacaguaagaaaugaagaggua

SEQ ID NO: 50352 - RNA, 20 nt, Human
cacaguauucuuccuuaaaa

SEQ ID NO: 50353 - RNA, 22 nt, Human
cacagucaauguagaaauauga

SEQ ID NO: 50354 - RNA, 22 nt, Human
cacagucuccucucuuagccug

SEQ ID NO: 50355 - RNA, 22 nt, Human
cacagucuuaucccaaccacca

SEQ ID NO: 50356 - RNA, 22 nt, Human
cacagugaauuucaaguguugu

SEQ ID NO: 50357 - RNA, 18 nt, Human
cacagugacuucugauac

SEQ ID NO: 50358 - RNA, 22 nt, Human
cacagugauugauuuuuacuuu

SEQ ID NO: 50359 - RNA, 22 nt, Human
cacagugcucggguuuuauguc

SEQ ID NO: 50360 - RNA, 22 nt, Human
cacaguguagacuaauaauaga

SEQ ID NO: 50361 - RNA, 22 nt, Human
cacaguguaguuaaugugacau

SEQ ID NO: 50362 - RNA, 22 nt, Human
cacaguuagcuccagucuuagc

SEQ ID NO: 50363 - RNA, 22 nt, Human
cacaguuauauguucacaagga

SEQ ID NO: 50364 - RNA, 22 nt, Human
cacaguugucugauuucuuccu

SEQ ID NO: 50365 - RNA, 22 nt, Human
cacauaaauggugccauguuuu

SEQ ID NO: 50366 - RNA, 22 nt, Human
cacauaauaaauguuccugaug

SEQ ID NO: 50367 - RNA, 22 nt, Human
cacauacaaggcacacuggagg

SEQ ID NO: 50368 - RNA, 19 nt, Human
cacauacagaaaagaguaa

SEQ ID NO: 50369 - RNA, 22 nt, Human
cacauacaugcacaccuaaaua

SEQ ID NO: 50370 - RNA, 22 nt, Human
cacauauaugaaaugaggaauu

SEQ ID NO: 50371 - RNA, 22 nt, Human
cacagguggcuucuuucaucuu

SEQ ID NO: 50372 - RNA, 17 nt, Human
cacaggugugguuugag

SEQ ID NO: 50373 - RNA, 22 nt, Human
cacagguucaaauucaggucgc

SEQ ID NO: 50374 - RNA, 22 nt, Human
cacaguaacuccugaccccucg

SEQ ID NO: 50375 - RNA, 22 nt, Human
cacaguaagguaucccagugaa

SEQ ID NO: 50376 - RNA, 22 nt, Human
cacaguacgcacccgauacaug

SEQ ID NO: 50377 - RNA, 22 nt, Human
cacaguacuuaauucucuaaau

SEQ ID NO: 50378 - RNA, 22 nt, Human
cacaguauucacugggcagauu

SEQ ID NO: 50379 - RNA, 22 nt, Human
cacaguccagacuccuggaguu

SEQ ID NO: 50380 - RNA, 22 nt, Human
cacaguccuacagagaucagag

SEQ ID NO: 50381 - RNA, 22 nt, Human
cacaguccugccagagggccuu

SEQ ID NO: 50382 - RNA, 22 nt, Human
cacagugaagcaugcagacauc

SEQ ID NO: 50383 - RNA, 22 nt, Human
cacagugacagcuauacagaga

SEQ ID NO: 50384 - RNA, 22 nt, Human
cacagugaguauuuaguaccua

SEQ ID NO: 50385 - RNA, 22 nt, Human
cacagugcaaucggccacaaau

SEQ ID NO: 50386 - RNA, 22 nt, Human
cacagugcacuaagcuccgggg

SEQ ID NO: 50387 - RNA, 22 nt, Human
cacaguggaaacagcuaagccu

SEQ ID NO: 50388 - RNA, 22 nt, Human
cacaguggcaaaggggcuuggg

SEQ ID NO: 50389 - RNA, 22 nt, Human
cacaguggcagguguggguugu

SEQ ID NO: 50390 - RNA, 22 nt, Human
cacaguggcuuugcuggucucg

SEQ ID NO: 50391 - RNA, 22 nt, Human
cacaguguggcaaauuucaacu

SEQ ID NO: 50392 - RNA, 22 nt, Human
cacaguguuugauuuaggggcc

SEQ ID NO: 50393 - RNA, 22 nt, Human
cacaguugaggucugguuguuu

SEQ ID NO: 50394 - RNA, 22 nt, Human
cacaguuuaugaucucagugaa

SEQ ID NO: 50395 - RNA, 22 nt, Human
cacaguuucaauaauuauucuu

SEQ ID NO: 50396 - RNA, 22 nt, Human
cacaguuucugaacacuuugca

SEQ ID NO: 50397 - RNA, 22 nt, Human
cacaguuugggucuccggggca

SEQ ID NO: 50398 - RNA, 22 nt, Human
cacaguuugguuuugcuguaau

SEQ ID NO: 50399 - RNA, 22 nt, Human
cacaguuuuaucuuauacugau

SEQ ID NO: 50400 - RNA, 22 nt, Human
cacauacauacguauguauaca

SEQ ID NO: 50401 - RNA, 22 nt, Human
cacauacauucauguuacucua

SEQ ID NO: 50402 - RNA, 22 nt, Human
cacauacugagaaucacaccca

SEQ ID NO: 50403 - RNA, 22 nt, Human
cacauauaaccuagacaaggcc

SEQ ID NO: 50404 - RNA, 22 nt, Human
cacauauaugggccccugaggg

SEQ ID NO: 50405 - RNA, 22 nt, Human
cacauauuguaguucaccagga

SEQ ID NO: 50406 - RNA, 22 nt, Human
cacauauuugaugaagcuuugu

SEQ ID NO: 50407 - RNA, 22 nt, Human
cacaucagguagaccuacagag

SEQ ID NO: 50408 - RNA, 22 nt, Human
cacaucauucaauggugauauu

SEQ ID NO: 50409 - RNA, 22 nt, Human
cacaucccuggaguuacccagu

SEQ ID NO: 50410 - RNA, 22 nt, Human
cacauccuucagcugagcccag

SEQ ID NO: 50411 - RNA, 22 nt, Human
cacaucugcucugggcagcacu

SEQ ID NO: 50412 - RNA, 22 nt, Human
cacaugaagaccuaauuggauu

SEQ ID NO: 50413 - RNA, 22 nt, Human
cacaugaaggcuggggucguga

SEQ ID NO: 50414 - RNA, 22 nt, Human
cacaugacacuauuuuguucua

SEQ ID NO: 50415 - RNA, 22 nt, Human
cacaugaucacuucuugaaaau

SEQ ID NO: 50416 - RNA, 22 nt, Human
cacaugcaguuuuccagcaguc

SEQ ID NO: 50417 - RNA, 22 nt, Human
cacaugcauaccuauguguaua

SEQ ID NO: 50418 - RNA, 22 nt, Human
cacaugcaucacgacuuccuuu

SEQ ID NO: 50419 - RNA, 22 nt, Human
cacaugcaugccaggcucacag

SEQ ID NO: 50420 - RNA, 22 nt, Human
cacaugcauuggcaaaagugua

SEQ ID NO: 50421 - RNA, 22 nt, Human
cacaugcccagaacuucucauu

SEQ ID NO: 50422 - RNA, 22 nt, Human
cacaugcuagaauaaaucucca

SEQ ID NO: 50423 - RNA, 22 nt, Human
cacaugcucauuggcacuguuc

SEQ ID NO: 50424 - RNA, 22 nt, Human
cacaugcuccauacagaauggg

SEQ ID NO: 50425 - RNA, 20 nt, Human
cacaugcuguguguuucucu

SEQ ID NO: 50426 - RNA, 22 nt, Human
cacauggcagaaucaugcaucu

SEQ ID NO: 50427 - RNA, 22 nt, Human
cacaggagcuguggggcagugu

SEQ ID NO: 50428 - RNA, 22 nt, Human
cacaggaggaggccagagcgua

SEQ ID NO: 50429 - RNA, 22 nt, Human
cacaggaggcaaugguaagauu

SEQ ID NO: 50430 - RNA, 22 nt, Human
cacaggaguuaacauaauuaag

SEQ ID NO: 50431 - RNA, 22 nt, Human
cacaggcaccccugacugcuca

SEQ ID NO: 50432 - RNA, 22 nt, Human
cacaggcacgccucuggccagg

SEQ ID NO: 50433 - RNA, 22 nt, Human
cacaggcaggagguucuccagu

SEQ ID NO: 50434 - RNA, 18 nt, Human
cacaggcaggugauaggu

SEQ ID NO: 50435 - RNA, 20 nt, Human
cacaggccuugugagcagac

SEQ ID NO: 50436 - RNA, 20 nt, Human
cacaggcuauaugagagcca

SEQ ID NO: 50437 - RNA, 20 nt, Human
cacaggcuuacaguuuagau

SEQ ID NO: 50438 - RNA, 22 nt, Human
cacaggcuuuucugacauaggc

SEQ ID NO: 50439 - RNA, 19 nt, Human
cacagggagaccacauguc

SEQ ID NO: 50440 - RNA, 22 nt, Human
cacagggcagugauuguccaca

SEQ ID NO: 50441 - RNA, 22 nt, Human
cacagggccuggggcagcugcu

SEQ ID NO: 50442 - RNA, 22 nt, Human
cacagggccuugugugacugca

SEQ ID NO: 50443 - RNA, 22 nt, Human
cacagggcuucucauggggugc

SEQ ID NO: 50444 - RNA, 22 nt, Human
cacaggguuguucugaggauuc

SEQ ID NO: 50445 - RNA, 22 nt, Human
cacagguccuuccugcccuggg

SEQ ID NO: 50446 - RNA, 22 nt, Human
cacaggugccaucucuucaugg

SEQ ID NO: 50447 - RNA, 22 nt, Human
cacagguguccaauaccugcuu

SEQ ID NO: 50448 - RNA, 22 nt, Human
cacagguguguccuggucuugu

SEQ ID NO: 50449 - RNA, 22 nt, Human
cacagguguucuugcagugaaa

SEQ ID NO: 50450 - RNA, 22 nt, Human
cacagguuagcagcuugaaacu

SEQ ID NO: 50451 - RNA, 22 nt, Human
cacagguugggggaguugauaa

SEQ ID NO: 50452 - RNA, 22 nt, Human
cacagguuucaaggauaagaug

SEQ ID NO: 50453 - RNA, 22 nt, Human
cacagguuugacaaggauaaaa

SEQ ID NO: 50454 - RNA, 22 nt, Human
cacaguaaccccaggacuggga

SEQ ID NO: 50455 - RNA, 22 nt, Human
cacaguacugcuuugggaugug

SEQ ID NO: 50456 - RNA, 22 nt, Human
cacaguaucccucuuucucccc

SEQ ID NO: 50457 - RNA, 22 nt, Human
cacaguaucuuuugaguaagca

SEQ ID NO: 50458 - RNA, 22 nt, Human
cacaguauuuguuuuucugagu

SEQ ID NO: 50459 - RNA, 23 nt, Human
cacagucauuuacuuugccauca

SEQ ID NO: 50460 - RNA, 22 nt, Human
cacagucccauucgagaguaau

SEQ ID NO: 50461 - RNA, 22 nt, Human
cacagucccgugcuuaccaugu

SEQ ID NO: 50462 - RNA, 22 nt, Human
cacagucucuguugcugggacc

SEQ ID NO: 50463 - RNA, 22 nt, Human
cacagugaacauucugucaggg

SEQ ID NO: 50464 - RNA, 22 nt, Human
cacagugacuggcacauaguaa

SEQ ID NO: 50465 - RNA, 22 nt, Human
cacagugagcugggcaucaguu

SEQ ID NO: 50466 - RNA, 22 nt, Human
cacagugcaugaugggcagaag

SEQ ID NO: 50467 - RNA, 22 nt, Human
cacagugcgaaagaaacccagc

SEQ ID NO: 50468 - RNA, 22 nt, Human
cacaguuucuauaggucagaau

SEQ ID NO: 50469 - RNA, 22 nt, Human
cacaguuugcauaggaaaaaca

SEQ ID NO: 50470 - RNA, 22 nt, Human
cacaguuugguauagaagugau

SEQ ID NO: 50471 - RNA, 22 nt, Human
cacaguuuugcccagggcuucu

SEQ ID NO: 50472 - RNA, 22 nt, Human
cacaguuuugucuugguuucca

SEQ ID NO: 50473 - RNA, 22 nt, Human
cacauaauacauguuccacuua

SEQ ID NO: 50474 - RNA, 22 nt, Human
cacauaaucaccaaguccuuuc

SEQ ID NO: 50475 - RNA, 22 nt, Human
cacauacaaugguguuauuugg

SEQ ID NO: 50476 - RNA, 22 nt, Human
cacauagauaggcagaagaaca

SEQ ID NO: 50477 - RNA, 22 nt, Human
cacauauaccagccgcgguacg

SEQ ID NO: 50478 - RNA, 23 nt, Human
cacauauagcagccacuaagguc

SEQ ID NO: 50479 - RNA, 22 nt, Human
cacauccgaggagggugagaug

SEQ ID NO: 50480 - RNA, 22 nt, Human
cacaugaacaugcuggaaaagc

SEQ ID NO: 50481 - RNA, 22 nt, Human
cacaugaagagagucuaguaau

SEQ ID NO: 50482 - RNA, 22 nt, Human
cacaugaauucacauguauuuu

SEQ ID NO: 50483 - RNA, 23 nt, Human
cacaugaccugaccuaggcuagg

SEQ ID NO: 50484 - RNA, 19 nt, Human
cacaugagggcugagggac

SEQ ID NO: 50485 - RNA, 22 nt, Human
cacaugaggugacuuccaagcu

SEQ ID NO: 50486 - RNA, 22 nt, Human
cacaugaucgucaugugaaagu

SEQ ID NO: 50487 - RNA, 22 nt, Human
cacaugcaaguccucaguucua

SEQ ID NO: 50488 - RNA, 22 nt, Human
cacaugcaggagccaauguaca

SEQ ID NO: 50489 - RNA, 21 nt, Human
cacaugcaugcacagguugua

SEQ ID NO: 50490 - RNA, 22 nt, Human
cacauggaagagauacagugag

SEQ ID NO: 50491 - RNA, 16 nt, Human
cacauauauuuauaug

SEQ ID NO: 50492 - RNA, 22 nt, Human
cacaucaagcauccaugaguuu

SEQ ID NO: 50493 - RNA, 22 nt, Human
cacaucauagagacucaaucca

SEQ ID NO: 50494 - RNA, 22 nt, Human
cacauccuaucagucacgguuu

SEQ ID NO: 50495 - RNA, 22 nt, Human
cacauccuucauacucagcucu

SEQ ID NO: 50496 - RNA, 22 nt, Human
cacaucuacugaaugagcagug

SEQ ID NO: 50497 - RNA, 22 nt, Human
cacaucuacugauauuccagga

SEQ ID NO: 50498 - RNA, 22 nt, Human
cacaucuauggagacagagagu

SEQ ID NO: 50499 - RNA, 22 nt, Human
cacaucugcgcucugccucaua

SEQ ID NO: 50500 - RNA, 22 nt, Human
cacaucuggguucucuucuuca

SEQ ID NO: 50501 - RNA, 22 nt, Human
cacaucuuccagaguagcuaaa

SEQ ID NO: 50502 - RNA, 22 nt, Human
cacaugaagauucaacuggaug

SEQ ID NO: 50503 - RNA, 22 nt, Human
cacaugaauugaugccaagugc

SEQ ID NO: 50504 - RNA, 22 nt, Human
cacaugaccacucuuuacuucu

SEQ ID NO: 50505 - RNA, 22 nt, Human
cacaugagacaauuaaagacuu

SEQ ID NO: 50506 - RNA, 22 nt, Human
cacaugagguggagaugaauga

SEQ ID NO: 50507 - RNA, 22 nt, Human
cacaugagugagaacaugcagu

SEQ ID NO: 50508 - RNA, 23 nt, Human
cacaugcaggcaguggccuucaa

SEQ ID NO: 50509 - RNA, 22 nt, Human
cacaugcaguuuacgucacuga

SEQ ID NO: 50510 - RNA, 22 nt, Human
cacaugcauaaggauaauuacu

SEQ ID NO: 50511 - RNA, 22 nt, Human
cacaugcuuagauuucagugga

SEQ ID NO: 50512 - RNA, 22 nt, Human
cacaugcuucuuuugauuauga

SEQ ID NO: 50513 - RNA, 23 nt, Human
cacauggaggaccguucuuauaa

SEQ ID NO: 50514 - RNA, 23 nt, Human
cacauggauuaaaugagaccaca

SEQ ID NO: 50515 - RNA, 22 nt, Human
cacauggccuguguggccagac

SEQ ID NO: 50516 - RNA, 22 nt, Human
cacauguacagaagcaggcugg

SEQ ID NO: 50517 - RNA, 22 nt, Human
cacauguccuggcgcugagccc

SEQ ID NO: 50518 - RNA, 17 nt, Human
cacaugucuacauggau

SEQ ID NO: 50519 - RNA, 22 nt, Human
cacaugugcaaauacugaggcu

SEQ ID NO: 50520 - RNA, 22 nt, Human
cacauguuugcuacauuuuucu

SEQ ID NO: 50521 - RNA, 22 nt, Human
cacauucacauuuuucccucua

SEQ ID NO: 50522 - RNA, 22 nt, Human
cacauucagguggcauguuaga

SEQ ID NO: 50523 - RNA, 22 nt, Human
cacauucaucaguguuguacug

SEQ ID NO: 50524 - RNA, 22 nt, Human
cacauucauggaguuugccugu

SEQ ID NO: 50525 - RNA, 22 nt, Human
cacauuccccagagcuggggcu

SEQ ID NO: 50526 - RNA, 22 nt, Human
cacauuccuggugcucagcagc

SEQ ID NO: 50527 - RNA, 22 nt, Human
cacauugaaaugacccaauaau

SEQ ID NO: 50528 - RNA, 22 nt, Human
cacauugaacuugucugguggg

SEQ ID NO: 50529 - RNA, 22 nt, Human
cacauuguagagauuagaaaga

SEQ ID NO: 50530 - RNA, 22 nt, Human
cacauuuaaaaaauccacgauc

SEQ ID NO: 50531 - RNA, 22 nt, Human
cacauuuaagugcuuguucaga

SEQ ID NO: 50532 - RNA, 22 nt, Human
cacauuuacauauaaaacuuuc

SEQ ID NO: 50533 - RNA, 18 nt, Human
cacauuuaccuggcuccc

SEQ ID NO: 50534 - RNA, 22 nt, Human
cacauuuagguuccuauagcca

SEQ ID NO: 50535 - RNA, 22 nt, Human
cacauuuaucucucuccgguga

SEQ ID NO: 50536 - RNA, 23 nt, Human
cagaggcaucggauucaacauca

SEQ ID NO: 50537 - RNA, 22 nt, Human
cagaggcauuacugaaaaggug

SEQ ID NO: 50538 - RNA, 22 nt, Human
cagaggccaguggacaagggcc

SEQ ID NO: 50539 - RNA, 22 nt, Human
cagaggccuucaauacucauuu

SEQ ID NO: 50540 - RNA, 22 nt, Human
cagaggcugaugugggaugggc

SEQ ID NO: 50541 - RNA, 22 nt, Human
cagaggcuuauaccugauuagg

SEQ ID NO: 50542 - RNA, 22 nt, Human
cagagggaaaaggggaguaaua

SEQ ID NO: 50543 - RNA, 22 nt, Human
cagagggacaguguaaugcaua

SEQ ID NO: 50544 - RNA, 22 nt, Human
cagagggaguuucugagguugc

SEQ ID NO: 50545 - RNA, 22 nt, Human
cagagggcacaugguuuccuca

SEQ ID NO: 50546 - RNA, 22 nt, Human
cagagggcacucggagugacau

SEQ ID NO: 50547 - RNA, 22 nt, Human
cagagggcucaguccugcugga

SEQ ID NO: 50548 - RNA, 22 nt, Human
cagaggguggaggccaggcucu

SEQ ID NO: 50549 - RNA, 22 nt, Human
cagaggguugaugugaggcuua

SEQ ID NO: 50550 - RNA, 22 nt, Human
cagagguacagccauugaagau

SEQ ID NO: 50551 - RNA, 22 nt, Human
cagagguauuuugauaaacgcc

SEQ ID NO: 50552 - RNA, 19 nt, Human
cagaggugauauaugccca

SEQ ID NO: 50553 - RNA, 21 nt, Human
cagagguggccugaccucuga

SEQ ID NO: 50554 - RNA, 23 nt, Human
cagaggugucagugcccaguguc

SEQ ID NO: 50555 - RNA, 22 nt, Human
cagagguguuggugaauggaga

SEQ ID NO: 50556 - RNA, 22 nt, Human
cagagguugagcaaaaaugaua

SEQ ID NO: 50557 - RNA, 20 nt, Human
cagaguaauuauuacccuuu

SEQ ID NO: 50558 - RNA, 22 nt, Human
cagaguacugggagaacagaag

SEQ ID NO: 50559 - RNA, 22 nt, Human
cagagucaugggccgucaggca

SEQ ID NO: 50560 - RNA, 22 nt, Human
cagagucucugggaggcugggu

SEQ ID NO: 50561 - RNA, 22 nt, Human
cagagugauggcaccugcuggg

SEQ ID NO: 50562 - RNA, 22 nt, Human
cagaguggcacucugcuggaug

SEQ ID NO: 50563 - RNA, 22 nt, Human
cagaguggcagucccaggccca

SEQ ID NO: 50564 - RNA, 22 nt, Human
cagagugggcugucagccacca

SEQ ID NO: 50565 - RNA, 22 nt, Human
cagaguggugcaagggcagugu

SEQ ID NO: 50566 - RNA, 22 nt, Human
cagaguguauucugcaguugca

SEQ ID NO: 50567 - RNA, 22 nt, Human
cagaguuugcaagggcagaagc

SEQ ID NO: 50568 - RNA, 22 nt, Human
cagaguuuuauguaugcaugua

SEQ ID NO: 50569 - RNA, 22 nt, Human
cagauaaaauuaauauuaccaa

SEQ ID NO: 50570 - RNA, 22 nt, Human
cagauaaaggcuuacuaguagu

SEQ ID NO: 50571 - RNA, 22 nt, Human
cagauaacacaaagaaaugggc

SEQ ID NO: 50572 - RNA, 22 nt, Human
cagauacagguuuuuguuagau

SEQ ID NO: 50573 - RNA, 22 nt, Human
cagauagcaaauggguaagcua

SEQ ID NO: 50574 - RNA, 22 nt, Human
cagauagcguuugagagcauaa

SEQ ID NO: 50575 - RNA, 22 nt, Human
cagauaugauaggauuagcaca

SEQ ID NO: 50576 - RNA, 23 nt, Human
cagaucauauauccagcuguaag

SEQ ID NO: 50577 - RNA, 18 nt, Human
cagauccaggcagcuauu

SEQ ID NO: 50578 - RNA, 22 nt, Human
cagauccaucucucagaaagag

SEQ ID NO: 50579 - RNA, 22 nt, Human
cagauccuuaggacaaccaucc

SEQ ID NO: 50580 - RNA, 21 nt, Human
cagaucuguagguacuaccau

SEQ ID NO: 50581 - RNA, 22 nt, Human
cagaugaacugugacugaaaau

SEQ ID NO: 50582 - RNA, 19 nt, Human
cagaugagaaaagugaggu

SEQ ID NO: 50583 - RNA, 22 nt, Human
cagaugaggggcauauaacaau

SEQ ID NO: 50584 - RNA, 22 nt, Human
cagaugcugcuauuucacccug

SEQ ID NO: 50585 - RNA, 22 nt, Human
cagaugcuuguuggcuggucuc

SEQ ID NO: 50586 - RNA, 22 nt, Human
cagauggagucccguggaguuc

SEQ ID NO: 50587 - RNA, 22 nt, Human
cagauggcagggcagcucugca

SEQ ID NO: 50588 - RNA, 22 nt, Human
cagauggcugccuucuugcugu

SEQ ID NO: 50589 - RNA, 20 nt, Human
cagaugggacguggaggagu

SEQ ID NO: 50590 - RNA, 22 nt, Human
cagauguauaugcauaaaaagu

SEQ ID NO: 50591 - RNA, 22 nt, Human
cagaugugagcuggggagagug

SEQ ID NO: 50592 - RNA, 22 nt, Human
cagaugugauucuucccucagc

SEQ ID NO: 50593 - RNA, 22 nt, Human
cagaugugcaugaugggaaggg

SEQ ID NO: 50594 - RNA, 22 nt, Human
cagauguggaaugcagcaggcu

SEQ ID NO: 50595 - RNA, 22 nt, Human
cagauuaacacggagcuuaaca

SEQ ID NO: 50596 - RNA, 22 nt, Human
cagauucacuaauagcuggccu

SEQ ID NO: 50597 - RNA, 22 nt, Human
cagauuccaguuuguggcuccc

SEQ ID NO: 50598 - RNA, 22 nt, Human
cagauuccggucaucucuccuu

SEQ ID NO: 50599 - RNA, 22 nt, Human
cagauucuuaauuuaugggauu

SEQ ID NO: 50600 - RNA, 22 nt, Human
cagauuuaccuaacuccaaguu

SEQ ID NO: 50601 - RNA, 22 nt, Human
cagauuuacucccugcugcugc

SEQ ID NO: 50602 - RNA, 22 nt, Human
cagauuuagaguggggcuugga

SEQ ID NO: 50603 - RNA, 22 nt, Human
cagauuuaggcuuaguccaagc

SEQ ID NO: 50604 - RNA, 22 nt, Human
cagauuucuauuucaaauacau

SEQ ID NO: 50605 - RNA, 22 nt, Human
cagcaaagcuuaauuuauaucu

SEQ ID NO: 50606 - RNA, 21 nt, Human
cagcaaaucauugggcagacu

SEQ ID NO: 50607 - RNA, 22 nt, Human
cagcaaccuaaauccacuaacu

SEQ ID NO: 50608 - RNA, 22 nt, Human
cagcaacggaaaauacacauag

SEQ ID NO: 50609 - RNA, 22 nt, Human
cagcaacugugccugacacaca

SEQ ID NO: 50610 - RNA, 22 nt, Human
cagcaacuuaggcagaacaucu

SEQ ID NO: 50611 - RNA, 22 nt, Human
cagcaagacaggauucccgugg

SEQ ID NO: 50612 - RNA, 21 nt, Human
cagcaagacauguuuaucaag

SEQ ID NO: 50613 - RNA, 22 nt, Human
cagcaaggacugggcaugugaa

SEQ ID NO: 50614 - RNA, 22 nt, Human
cagcaaggccauuggaugcagu

SEQ ID NO: 50615 - RNA, 22 nt, Human
cagcaagggauaaacaaggacg

SEQ ID NO: 50616 - RNA, 22 nt, Human
cagcaauaacucaaagccauuu

SEQ ID NO: 50617 - RNA, 22 nt, Human
cagcaauaguguguuuguuuca

SEQ ID NO: 50618 - RNA, 22 nt, Human
cagcacaauuuucaggagucca

SEQ ID NO: 50619 - RNA, 22 nt, Human
cagcacagcugaggggcugucu

SEQ ID NO: 50620 - RNA, 22 nt, Human
cagcacaggaagugggccuuca

SEQ ID NO: 50621 - RNA, 22 nt, Human
cagcacaggcaggggaacuaua

SEQ ID NO: 50622 - RNA, 22 nt, Human
cagcacaggucaguuuuuuaag

SEQ ID NO: 50623 - RNA, 23 nt, Human
cagcacaguacauuuccugucuc

SEQ ID NO: 50624 - RNA, 22 nt, Human
cagcacaguagaguaguuguaa

SEQ ID NO: 50625 - RNA, 22 nt, Human
cagcacaguccuuugcuuacug

SEQ ID NO: 50626 - RNA, 22 nt, Human
ccuagagucucucugcaggagu

SEQ ID NO: 50627 - RNA, 22 nt, Human
ccuagaugggauggcggccggg

SEQ ID NO: 50628 - RNA, 22 nt, Human
ccuagcaauaaagauaucauuu

SEQ ID NO: 50629 - RNA, 22 nt, Human
ccuaggaagcugagauugcagu

SEQ ID NO: 50630 - RNA, 22 nt, Human
ccuaggagagggaaaaucuagg

SEQ ID NO: 50631 - RNA, 22 nt, Human
ccuaggcaagaguuggugugga

SEQ ID NO: 50632 - RNA, 20 nt, Human
ccuaggcaugcugagucucc

SEQ ID NO: 50633 - RNA, 19 nt, Human
ccuaggcauuguccaaggg

SEQ ID NO: 50634 - RNA, 22 nt, Human
ccuaggcccuaggcuuccauca

SEQ ID NO: 50635 - RNA, 22 nt, Human
ccuaggcuuguuuucaucagcu

SEQ ID NO: 50636 - RNA, 22 nt, Human
ccuagggagccugagagcagug

SEQ ID NO: 50637 - RNA, 22 nt, Human
ccuaguuuucauucagcagccu

SEQ ID NO: 50638 - RNA, 22 nt, Human
ccuauacaggcuucuuuacaug

SEQ ID NO: 50639 - RNA, 22 nt, Human
ccucaaaucuuuagaguuauuu

SEQ ID NO: 50640 - RNA, 20 nt, Human
ccucaagcagacugacagcu

SEQ ID NO: 50641 - RNA, 22 nt, Human
ccucacagcuuuucaaagugga

SEQ ID NO: 50642 - RNA, 22 nt, Human
ccucacaguguucgugucagau

SEQ ID NO: 50643 - RNA, 22 nt, Human
ccucacccagucaccuaggugg

SEQ ID NO: 50644 - RNA, 22 nt, Human
ccucagaauaguccucagauca

SEQ ID NO: 50645 - RNA, 22 nt, Human
cagaggcuggauggacuugccu

SEQ ID NO: 50646 - RNA, 22 nt, Human
cagaggcuggcggccgccccga

SEQ ID NO: 50647 - RNA, 22 nt, Human
cagaggcuguguaggcagacug

SEQ ID NO: 50648 - RNA, 22 nt, Human
cagaggcuuggcauuaucaugc

SEQ ID NO: 50649 - RNA, 22 nt, Human
cagagggacaguaugaugaaag

SEQ ID NO: 50650 - RNA, 22 nt, Human
cagagggaucaucuuccugaag

SEQ ID NO: 50651 - RNA, 22 nt, Human
cagagggcucggcggccgcucc

SEQ ID NO: 50652 - RNA, 22 nt, Human
cagagggcugcccugaguucgu

SEQ ID NO: 50653 - RNA, 22 nt, Human
cagaggggcugacacccuuggc

SEQ ID NO: 50654 - RNA, 22 nt, Human
cagagggugugaaggggaugaa

SEQ ID NO: 50655 - RNA, 22 nt, Human
cagagguacaagcuaaguuggg

SEQ ID NO: 50656 - RNA, 22 nt, Human
cagagguagaaggcaugcagug

SEQ ID NO: 50657 - RNA, 22 nt, Human
cagagguagccgagugcaaucg

SEQ ID NO: 50658 - RNA, 22 nt, Human
cagaggucaagaucugaaguga

SEQ ID NO: 50659 - RNA, 22 nt, Human
cagaggucccuguucuuaagga

SEQ ID NO: 50660 - RNA, 22 nt, Human
cagaggugcuggagugaguccu

SEQ ID NO: 50661 - RNA, 22 nt, Human
cagagguggggaguauuucaag

SEQ ID NO: 50662 - RNA, 22 nt, Human
cagagguuaccuagagcaagaa

SEQ ID NO: 50663 - RNA, 22 nt, Human
cagaguaaaccugucaucaaga

SEQ ID NO: 50664 - RNA, 22 nt, Human
cagagucagagcaccugggauu

SEQ ID NO: 50665 - RNA, 22 nt, Human
cagagucaguauugaauugaaa

SEQ ID NO: 50666 - RNA, 22 nt, Human
cagagucccagaugccccuccu

SEQ ID NO: 50667 - RNA, 22 nt, Human
cagaguccuggacacagagaca

SEQ ID NO: 50668 - RNA, 19 nt, Human
cagaguccuugaccagucc

SEQ ID NO: 50669 - RNA, 22 nt, Human
cagagugaaaacugagcucaaa

SEQ ID NO: 50670 - RNA, 22 nt, Human
cagagugaaauaggggaucaag

SEQ ID NO: 50671 - RNA, 22 nt, Human
cagagugcauggugcuguucau

SEQ ID NO: 50672 - RNA, 22 nt, Human
cagaguggagaaagcauuuagu

SEQ ID NO: 50673 - RNA, 22 nt, Human
cagaguggagauguguguggaa

SEQ ID NO: 50674 - RNA, 22 nt, Human
cagaguguaucuguguaagcau

SEQ ID NO: 50675 - RNA, 22 nt, Human
cagaguguugaccauaagccca

SEQ ID NO: 50676 - RNA, 19 nt, Human
cagaguuacauggcugugg

SEQ ID NO: 50677 - RNA, 22 nt, Human
cagaguuuuaucauacguggau

SEQ ID NO: 50678 - RNA, 22 nt, Human
cagaguuuugugaacaacuugg

SEQ ID NO: 50679 - RNA, 22 nt, Human
cagauaacugaaauaucauacc

SEQ ID NO: 50680 - RNA, 22 nt, Human
cagauagcaauuugggcagggg

SEQ ID NO: 50681 - RNA, 22 nt, Human
cagauaggaaaagcuaggcaua

SEQ ID NO: 50682 - RNA, 22 nt, Human
cagauauauuuuccuuauuagg

SEQ ID NO: 50683 - RNA, 22 nt, Human
cagauauguggauucuauuagc

SEQ ID NO: 50684 - RNA, 22 nt, Human
cagaucuaucuguugauggugc

SEQ ID NO: 50685 - RNA, 22 nt, Human
cagaucuguuugccagaucagc

SEQ ID NO: 50686 - RNA, 22 nt, Human
cagaucuuguacucauuauuga

SEQ ID NO: 50687 - RNA, 22 nt, Human
cagaugaacuaggcugcacuug

SEQ ID NO: 50688 - RNA, 22 nt, Human
cagaugaaggccugaaugucua

SEQ ID NO: 50689 - RNA, 22 nt, Human
cagaugaaguauuacagacauu

SEQ ID NO: 50690 - RNA, 22 nt, Human
cagaugagaguggccaggguuc

SEQ ID NO: 50691 - RNA, 22 nt, Human
cagaugaggacagaugacuggg

SEQ ID NO: 50692 - RNA, 22 nt, Human
cagaugagggcuggaggugagc

SEQ ID NO: 50693 - RNA, 22 nt, Human
cagaugcagcaaaaugacaggc

SEQ ID NO: 50694 - RNA, 22 nt, Human
cagaugcuaaguuaucagcagg

SEQ ID NO: 50695 - RNA, 22 nt, Human
cagaugcuauagugcugccaua

SEQ ID NO: 50696 - RNA, 22 nt, Human
cagaugcugccugggaaugucu

SEQ ID NO: 50697 - RNA, 22 nt, Human
cagaugcugcucaccugauuau

SEQ ID NO: 50698 - RNA, 22 nt, Human
cagaugcugguaugggggaggu

SEQ ID NO: 50699 - RNA, 22 nt, Human
cagaugcuucgugggugagcac

SEQ ID NO: 50700 - RNA, 22 nt, Human
cagauggaacacagaaaggaga

SEQ ID NO: 50701 - RNA, 16 nt, Human
cagauggaucuaacuc

SEQ ID NO: 50702 - RNA, 22 nt, Human
cagauggauuuuguaggcugau

SEQ ID NO: 50703 - RNA, 20 nt, Human
cagauggcacgucagggcau

SEQ ID NO: 50704 - RNA, 22 nt, Human
cagauggggcaaggccaucugu

SEQ ID NO: 50705 - RNA, 22 nt, Human
cagaugugccuccagggcuuug

SEQ ID NO: 50706 - RNA, 22 nt, Human
cagauguuugucuauaugcuuu

SEQ ID NO: 50707 - RNA, 19 nt, Human
cagauguuuucaguucauu

SEQ ID NO: 50708 - RNA, 22 nt, Human
cagauuaguugugcuauggccu

SEQ ID NO: 50709 - RNA, 22 nt, Human
cagauucucacuguauucaggu

SEQ ID NO: 50710 - RNA, 22 nt, Human
cagauucuccaggggcugcaga

SEQ ID NO: 50711 - RNA, 22 nt, Human
cagauucugaagucuagcugcu

SEQ ID NO: 50712 - RNA, 22 nt, Human
cagauucugggcccagcuuguc

SEQ ID NO: 50713 - RNA, 22 nt, Human
cagauuuaggucacuagaauuu

SEQ ID NO: 50714 - RNA, 22 nt, Human
cagauuuauuuuacauccuuca

SEQ ID NO: 50715 - RNA, 22 nt, Human
cagauuucaaggaggcacucca

SEQ ID NO: 50716 - RNA, 22 nt, Human
cagauuucagcucauauauuau

SEQ ID NO: 50717 - RNA, 22 nt, Human
cagauuuggggucuccuguuag

SEQ ID NO: 50718 - RNA, 22 nt, Human
cagcaaaacagccguugccugg

SEQ ID NO: 50719 - RNA, 22 nt, Human
cagcaaaggggaugcguccuaa

SEQ ID NO: 50720 - RNA, 22 nt, Human
cagcaaagguagaagcacagga

SEQ ID NO: 50721 - RNA, 22 nt, Human
cagcaaaguaagcugacaugua

SEQ ID NO: 50722 - RNA, 22 nt, Human
cagcaaauuuuaauacugcuuu

SEQ ID NO: 50723 - RNA, 22 nt, Human
cagcaacucuccugugcucaaa

SEQ ID NO: 50724 - RNA, 22 nt, Human
cagcaacuggucauugcucucc

SEQ ID NO: 50725 - RNA, 22 nt, Human
cagcaagacuucagggcuuggu

SEQ ID NO: 50726 - RNA, 22 nt, Human
cagcaagagaggcagggcaaau

SEQ ID NO: 50727 - RNA, 22 nt, Human
cagcaagauggugaaugagacg

SEQ ID NO: 50728 - RNA, 21 nt, Human
cagcaaggaagucgaguaggu

SEQ ID NO: 50729 - RNA, 22 nt, Human
cagcaagggauaaagaguuacu

SEQ ID NO: 50730 - RNA, 22 nt, Human
cagcaagucauccaggaugaug

SEQ ID NO: 50731 - RNA, 22 nt, Human
cagcaagugauggaaaucagag

SEQ ID NO: 50732 - RNA, 19 nt, Human
cagcaauaaugccagaugg

SEQ ID NO: 50733 - RNA, 22 nt, Human
cagcaauggcaggcggagagug

SEQ ID NO: 50734 - RNA, 22 nt, Human
cagcacacagugacucgcaccu

SEQ ID NO: 50735 - RNA, 22 nt, Human
cagcacagcuggcucuggaagc

SEQ ID NO: 50736 - RNA, 22 nt, Human
cagcacaguacaaggcacggau

SEQ ID NO: 50737 - RNA, 21 nt, Human
cagcacaguacugggucuugc

SEQ ID NO: 50738 - RNA, 22 nt, Human
cagcacagugcagaugcugacu

SEQ ID NO: 50739 - RNA, 22 nt, Human
cagcacaguuucccccaugagc

SEQ ID NO: 50740 - RNA, 22 nt, Human
cagcaccccuccuggcuaugaa

SEQ ID NO: 50741 - RNA, 22 nt, Human
cagcaccugcucuuagacacgg

SEQ ID NO: 50742 - RNA, 22 nt, Human
cagcagaaaauaccuguaacuc

SEQ ID NO: 50743 - RNA, 22 nt, Human
ccucuggccaucccccauuaag

SEQ ID NO: 50744 - RNA, 22 nt, Human
ccucuggcuguaccacuggcac

SEQ ID NO: 50745 - RNA, 22 nt, Human
ccucuggcuuacuguuggguuu

SEQ ID NO: 50746 - RNA, 22 nt, Human
ccucuggggguccucagagucu

SEQ ID NO: 50747 - RNA, 22 nt, Human
ccucuggggugagugggccacu

SEQ ID NO: 50748 - RNA, 22 nt, Human
ccucugggugggaggccgggcg

SEQ ID NO: 50749 - RNA, 18 nt, Human
ccucuggguuuuguuccc

SEQ ID NO: 50750 - RNA, 22 nt, Human
ccucuguaguaagagaacauau

SEQ ID NO: 50751 - RNA, 22 nt, Human
ccucuguccuggggaguggagc

SEQ ID NO: 50752 - RNA, 22 nt, Human
ccucugugccucguguccucug

SEQ ID NO: 50753 - RNA, 22 nt, Human
ccucugugcuuuguccagccuc

SEQ ID NO: 50754 - RNA, 22 nt, Human
cagcagaguuuggcuucuaaug

SEQ ID NO: 50755 - RNA, 22 nt, Human
cagcagaucaauguagaauauu

SEQ ID NO: 50756 - RNA, 22 nt, Human
cagcagauuugggaaacacugu

SEQ ID NO: 50757 - RNA, 22 nt, Human
cagcagcaacaauagcggucac

SEQ ID NO: 50758 - RNA, 22 nt, Human
cagcagcaccuauuauaguguu

SEQ ID NO: 50759 - RNA, 22 nt, Human
cagcagcagauucagcgucugg

SEQ ID NO: 50760 - RNA, 22 nt, Human
cagcagcaggcgcacggccguc

SEQ ID NO: 50761 - RNA, 22 nt, Human
cagcagcaguguucuagaaucu

SEQ ID NO: 50762 - RNA, 22 nt, Human
cagcagcaucaggucugugguu

SEQ ID NO: 50763 - RNA, 22 nt, Human
cagcagccagacaagauacauc

SEQ ID NO: 50764 - RNA, 19 nt, Human
cagcagccagggggccccu

SEQ ID NO: 50765 - RNA, 20 nt, Human
cagcagccauucuaguagua

SEQ ID NO: 50766 - RNA, 22 nt, Human
cagcagcccuuuggcugaacug

SEQ ID NO: 50767 - RNA, 22 nt, Human
cagcagcuaaggcauguuccug

SEQ ID NO: 50768 - RNA, 22 nt, Human
cagcagcuacuuggagcagcag

SEQ ID NO: 50769 - RNA, 22 nt, Human
cagcagcuagaggaagggcaga

SEQ ID NO: 50770 - RNA, 22 nt, Human
cagcagcucagucucucaguag

SEQ ID NO: 50771 - RNA, 22 nt, Human
cagcagcugacuccaagagagc

SEQ ID NO: 50772 - RNA, 22 nt, Human
cagcagcugggaaggaggcuga

SEQ ID NO: 50773 - RNA, 22 nt, Human
cagcagcuuugccaagucagcc

SEQ ID NO: 50774 - RNA, 22 nt, Human
cagcaggaaagacaucugagca

SEQ ID NO: 50775 - RNA, 22 nt, Human
cagcaggaaguacuagcuuuga

SEQ ID NO: 50776 - RNA, 23 nt, Human
cagcaggagggugccugggcugc

SEQ ID NO: 50777 - RNA, 22 nt, Human
cagcaggcccaggugcugguga

SEQ ID NO: 50778 - RNA, 22 nt, Human
cagcaggcggcccgcgggcccg

SEQ ID NO: 50779 - RNA, 20 nt, Human
cagcaggcuauggggcaccc

SEQ ID NO: 50780 - RNA, 22 nt, Human
cagcaggcugcgauugcucauu

SEQ ID NO: 50781 - RNA, 22 nt, Human
cagcagggggcagcgcagauca

SEQ ID NO: 50782 - RNA, 22 nt, Human
cagcaggguagguuguaucagu

SEQ ID NO: 50783 - RNA, 22 nt, Human
cagcaggucccacugagggccc

SEQ ID NO: 50784 - RNA, 22 nt, Human
cagcagguccugggcguggccu

SEQ ID NO: 50785 - RNA, 22 nt, Human
cagcaggucugcauuugagguc

SEQ ID NO: 50786 - RNA, 22 nt, Human
cagcaggugcaggugcggccgc

SEQ ID NO: 50787 - RNA, 22 nt, Human
cagcagguguccuuuuggugga

SEQ ID NO: 50788 - RNA, 22 nt, Human
cagcaguacuucucagagguau

SEQ ID NO: 50789 - RNA, 22 nt, Human
cagcagucaggccugugggaga

SEQ ID NO: 50790 - RNA, 22 nt, Human
cagcagugaugugugaggguuc

SEQ ID NO: 50791 - RNA, 22 nt, Human
cagcagugcuucagugugagau

SEQ ID NO: 50792 - RNA, 22 nt, Human
cagcaguggcugcaggcagcug

SEQ ID NO: 50793 - RNA, 22 nt, Human
cagcaguguggaagcugagggg

SEQ ID NO: 50794 - RNA, 22 nt, Human
cagcaguucacacuuaacaagu

SEQ ID NO: 50795 - RNA, 22 nt, Human
cagcaguuguuucggauuggga

SEQ ID NO: 50796 - RNA, 22 nt, Human
cagcauacugcaucaaaugagg

SEQ ID NO: 50797 - RNA, 22 nt, Human
cagcauagcugauuaaggcaaa

SEQ ID NO: 50798 - RNA, 22 nt, Human
cagcaucaccaacuugagcaau

SEQ ID NO: 50799 - RNA, 22 nt, Human
cagcaucaccgccauuucugau

SEQ ID NO: 50800 - RNA, 22 nt, Human
cagcauccguucucaggacuga

SEQ ID NO: 50801 - RNA, 22 nt, Human
cagcauccuuugcugguuuccc

SEQ ID NO: 50802 - RNA, 22 nt, Human
cagcaucguguggaaaguggua

SEQ ID NO: 50803 - RNA, 22 nt, Human
cagcaucucugccugccugcaa

SEQ ID NO: 50804 - RNA, 22 nt, Human
cagcaucucugggagaagcauc

SEQ ID NO: 50805 - RNA, 22 nt, Human
cagcaucucuuuuugcauuccu

SEQ ID NO: 50806 - RNA, 22 nt, Human
cagcaucuguaggacuccucuu

SEQ ID NO: 50807 - RNA, 22 nt, Human
cagcaucuguuuuucugaccca

SEQ ID NO: 50808 - RNA, 22 nt, Human
cagcaucuucaugugcaucucc

SEQ ID NO: 50809 - RNA, 22 nt, Human
cagcaucuucuccaaagcugcc

SEQ ID NO: 50810 - RNA, 22 nt, Human
cagcaugaaaaguguugcuauc

SEQ ID NO: 50811 - RNA, 22 nt, Human
cagcaugaaacaauugagccca

SEQ ID NO: 50812 - RNA, 22 nt, Human
cagcaugaauguguucguaggg

SEQ ID NO: 50813 - RNA, 22 nt, Human
cagcaugaugagugcaguuugg

SEQ ID NO: 50814 - RNA, 22 nt, Human
cagcaugcagccccuggcagcu

SEQ ID NO: 50815 - RNA, 22 nt, Human
cagcaugcccagacugagcuaa

SEQ ID NO: 50816 - RNA, 22 nt, Human
cagcauggacccaucgcugagu

SEQ ID NO: 50817 - RNA, 22 nt, Human
cagcauggggcuuggagucagc

SEQ ID NO: 50818 - RNA, 18 nt, Human
cagcauuagcagcuucca

SEQ ID NO: 50819 - RNA, 22 nt, Human
cagcauuguaagaaugaagacc

SEQ ID NO: 50820 - RNA, 22 nt, Human
cagcauuuggaggagaggcuuu

SEQ ID NO: 50821 - RNA, 22 nt, Human
cagccacuguggucuagcugca

SEQ ID NO: 50822 - RNA, 22 nt, Human
cagccagaaagucuguuaggga

SEQ ID NO: 50823 - RNA, 22 nt, Human
cagccagaaccuaggaugagcu

SEQ ID NO: 50824 - RNA, 22 nt, Human
cagccagagaggaaggaaugca

SEQ ID NO: 50825 - RNA, 22 nt, Human
cagccagaucagggcagggguu

SEQ ID NO: 50826 - RNA, 22 nt, Human
cagccagcugaauguaccauga

SEQ ID NO: 50827 - RNA, 22 nt, Human
cagccagcugucccaagugccu

SEQ ID NO: 50828 - RNA, 22 nt, Human
cagccagugguugaagaugcag

SEQ ID NO: 50829 - RNA, 22 nt, Human
cagccagugugaccgaggagga

SEQ ID NO: 50830 - RNA, 22 nt, Human
cagccauacugacaucaacaaa

SEQ ID NO: 50831 - RNA, 22 nt, Human
cagccaugagucuaagcaguuu

SEQ ID NO: 50832 - RNA, 22 nt, Human
cagcccagagccaguucccgcu

SEQ ID NO: 50833 - RNA, 22 nt, Human
cagcccagcacuaaguagauuu

SEQ ID NO: 50834 - RNA, 22 nt, Human
cagcccagcagacuguuaccac

SEQ ID NO: 50835 - RNA, 21 nt, Human
cagcccagcccauugacagug

SEQ ID NO: 50836 - RNA, 22 nt, Human
cagcccagccuugucucuuuau

SEQ ID NO: 50837 - RNA, 22 nt, Human
cagcccaggacugcagguguuu

SEQ ID NO: 50838 - RNA, 16 nt, Human
cagcccaggggcgggc

SEQ ID NO: 50839 - RNA, 19 nt, Human
cagcccagggugcuaccaa

SEQ ID NO: 50840 - RNA, 22 nt, Human
cagccccagcacuuagcugagu

SEQ ID NO: 50841 - RNA, 22 nt, Human
cagccccuuccuggcaucugga

SEQ ID NO: 50842 - RNA, 19 nt, Human
cagcccucuuaccacugug

SEQ ID NO: 50843 - RNA, 22 nt, Human
cagcccugaaacaaccuccucu

SEQ ID NO: 50844 - RNA, 22 nt, Human
cagcccugagagaaccaucuau

SEQ ID NO: 50845 - RNA, 22 nt, Human
cagcccugagcaaggcuuuuaa

SEQ ID NO: 50846 - RNA, 22 nt, Human
cagcccugaguuagcccacgga

SEQ ID NO: 50847 - RNA, 22 nt, Human
cagcccugcucuuagugucucc

SEQ ID NO: 50848 - RNA, 22 nt, Human
cagcccugggaguuggggccga

SEQ ID NO: 50849 - RNA, 22 nt, Human
cagcccugucccugagggaccu

SEQ ID NO: 50850 - RNA, 22 nt, Human
cagccucuaagcacagccucuc

SEQ ID NO: 50851 - RNA, 22 nt, Human
cagccucugagccuuggcagau

SEQ ID NO: 50852 - RNA, 18 nt, Human
cagccucugauugguugc

SEQ ID NO: 50853 - RNA, 22 nt, Human
cagccucuugcacuuugaaggc

SEQ ID NO: 50854 - RNA, 22 nt, Human
cagccucuuuccacaucaggca

SEQ ID NO: 50855 - RNA, 22 nt, Human
cagccugcagggcugccuguug

SEQ ID NO: 50856 - RNA, 22 nt, Human
cagccugcccuggaagcccagc

SEQ ID NO: 50857 - RNA, 22 nt, Human
cagccuugauggaugaggaagu

SEQ ID NO: 50858 - RNA, 22 nt, Human
cagccuuuauggaaaggccugg

SEQ ID NO: 50859 - RNA, 22 nt, Human
cagcgaggugaaggguacaagc

SEQ ID NO: 50860 - RNA, 22 nt, Human
cagcugcugccucauccacuuu

SEQ ID NO: 50861 - RNA, 22 nt, Human
cagcugcuguaacagaauacuu

SEQ ID NO: 50862 - RNA, 22 nt, Human
cagcugcuguuacugcuuauua

SEQ ID NO: 50863 - RNA, 22 nt, Human
ccuuggcaaaccagggcagcug

SEQ ID NO: 50864 - RNA, 22 nt, Human
ccuuggcaggggagaaauauau

SEQ ID NO: 50865 - RNA, 22 nt, Human
ccuuggcauguggcauguggcu

SEQ ID NO: 50866 - RNA, 22 nt, Human
ccuuggcuaggcagcggcuguc

SEQ ID NO: 50867 - RNA, 22 nt, Human
ccuuggcugaggagggagcuga

SEQ ID NO: 50868 - RNA, 23 nt, Human
caggacaugggaggaaguauggc

SEQ ID NO: 50869 - RNA, 22 nt, Human
caggacccaucagccaggcacu

SEQ ID NO: 50870 - RNA, 22 nt, Human
caggaccccauauucacugaac

SEQ ID NO: 50871 - RNA, 22 nt, Human
caggacuauguucaacagauag

SEQ ID NO: 50872 - RNA, 22 nt, Human
caggacucacuucucacauccc

SEQ ID NO: 50873 - RNA, 22 nt, Human
caggacuguauccuuggagaaa

SEQ ID NO: 50874 - RNA, 22 nt, Human
caggagaagucucuagggggug

SEQ ID NO: 50875 - RNA, 22 nt, Human
caggagacuauggcccaaggcc

SEQ ID NO: 50876 - RNA, 22 nt, Human
caggagacucagcauccaggau

SEQ ID NO: 50877 - RNA, 15 nt, Human
caggagaggaagguu

SEQ ID NO: 50878 - RNA, 22 nt, Human
caggagaggaggcuacuucuua

SEQ ID NO: 50879 - RNA, 22 nt, Human
caggagaucuuaggaauucuua

SEQ ID NO: 50880 - RNA, 22 nt, Human
caggagcaggcccaaggacaca

SEQ ID NO: 50881 - RNA, 22 nt, Human
caggagccagcugucccaacca

SEQ ID NO: 50882 - RNA, 22 nt, Human
caggagcccguugcuccggcgg

SEQ ID NO: 50883 - RNA, 22 nt, Human
caggagcuacucagguuggguu

SEQ ID NO: 50884 - RNA, 22 nt, Human
caggagcucacugucuaauggg

SEQ ID NO: 50885 - RNA, 22 nt, Human
caggagcucuuaaggaugugau

SEQ ID NO: 50886 - RNA, 22 nt, Human
caggaggaaacuggauucacuu

SEQ ID NO: 50887 - RNA, 22 nt, Human
caggaggagcuggccgccucau

SEQ ID NO: 50888 - RNA, 22 nt, Human
caggaggaggguacaccaucag

SEQ ID NO: 50889 - RNA, 20 nt, Human
caggaggcaaggucaagguc

SEQ ID NO: 50890 - RNA, 22 nt, Human
caggaggcagagguugcaguga

SEQ ID NO: 50891 - RNA, 22 nt, Human
caggaggccaacugugggacuu

SEQ ID NO: 50892 - RNA, 22 nt, Human
caggaggcgucuucaguuuguu

SEQ ID NO: 50893 - RNA, 22 nt, Human
caggaggcuuugggauccaagu

SEQ ID NO: 50894 - RNA, 22 nt, Human
caggagguugguagcaguagau

SEQ ID NO: 50895 - RNA, 22 nt, Human
caggagucccucuggccagcau

SEQ ID NO: 50896 - RNA, 22 nt, Human
caggaguccugaaaucugauga

SEQ ID NO: 50897 - RNA, 22 nt, Human
caggagucucucuugagcccag

SEQ ID NO: 50898 - RNA, 22 nt, Human
caggagugcagguggugaggca

SEQ ID NO: 50899 - RNA, 22 nt, Human
caggagugucuccacacagcaa

SEQ ID NO: 50900 - RNA, 22 nt, Human
caggauauaucucuaguguugg

SEQ ID NO: 50901 - RNA, 22 nt, Human
caggauauuaccuaauauuuga

SEQ ID NO: 50902 - RNA, 22 nt, Human
caggauccuggcugcauggacg

SEQ ID NO: 50903 - RNA, 22 nt, Human
caggaugagaggcccagggaag

SEQ ID NO: 50904 - RNA, 21 nt, Human
caggaugaugauaauucaugg

SEQ ID NO: 50905 - RNA, 22 nt, Human
caggaugcagugggacccaggg

SEQ ID NO: 50906 - RNA, 22 nt, Human
caggaugcggccugacucuaag

SEQ ID NO: 50907 - RNA, 22 nt, Human
caggauggagaguuguugguug

SEQ ID NO: 50908 - RNA, 22 nt, Human
caggauggcagagaaaagggug

SEQ ID NO: 50909 - RNA, 22 nt, Human
caggauggccccggggcugugc

SEQ ID NO: 50910 - RNA, 22 nt, Human
caggauguucaagggaccuaug

SEQ ID NO: 50911 - RNA, 22 nt, Human
caggcaagauccagaggcugcu

SEQ ID NO: 50912 - RNA, 22 nt, Human
caggcaagcaaggggucuugaa

SEQ ID NO: 50913 - RNA, 22 nt, Human
caggcaaggacucugguaauuu

SEQ ID NO: 50914 - RNA, 22 nt, Human
caggcaaggaggcacugaggga

SEQ ID NO: 50915 - RNA, 22 nt, Human
caggcaauaaaggguugguugg

SEQ ID NO: 50916 - RNA, 22 nt, Human
caggcacaagaagcaaauguua

SEQ ID NO: 50917 - RNA, 22 nt, Human
caggcacacagcacauggccug

SEQ ID NO: 50918 - RNA, 22 nt, Human
caggcacacaggcucccugggc

SEQ ID NO: 50919 - RNA, 22 nt, Human
caggcacacagggaauuuggcu

SEQ ID NO: 50920 - RNA, 22 nt, Human
caggcacacauccgugagagau

SEQ ID NO: 50921 - RNA, 22 nt, Human
caggcacacccacuggugcaga

SEQ ID NO: 50922 - RNA, 22 nt, Human
caggcacagacgcaaacuucuu

SEQ ID NO: 50923 - RNA, 22 nt, Human
caggcacagagagaauaccuuu

SEQ ID NO: 50924 - RNA, 17 nt, Human
caggcacaugaagccag

SEQ ID NO: 50925 - RNA, 22 nt, Human
caggcaccucacguggguccca

SEQ ID NO: 50926 - RNA, 22 nt, Human
caggcacucauucagagaggug

SEQ ID NO: 50927 - RNA, 22 nt, Human
caggcacugugcuagauccuug

SEQ ID NO: 50928 - RNA, 22 nt, Human
caggcacuguguuaggcacugu

SEQ ID NO: 50929 - RNA, 22 nt, Human
caggcagaagaaguggaaggac

SEQ ID NO: 50930 - RNA, 22 nt, Human
caggcagagacccucuccuaaa

SEQ ID NO: 50931 - RNA, 22 nt, Human
caggcagagugagguggucuaa

SEQ ID NO: 50932 - RNA, 22 nt, Human
caggcagaugcugacaagaguu

SEQ ID NO: 50933 - RNA, 22 nt, Human
caggcagccugagggaucuggg

SEQ ID NO: 50934 - RNA, 22 nt, Human
caggcagcucgaugccuuguug

SEQ ID NO: 50935 - RNA, 22 nt, Human
caggcagcugacugucagauau

SEQ ID NO: 50936 - RNA, 22 nt, Human
caggcagcugcgacaagagagc

SEQ ID NO: 50937 - RNA, 22 nt, Human
caggcagcugcuggguucagcc

SEQ ID NO: 50938 - RNA, 22 nt, Human
caggcaggagacauuugguugg

SEQ ID NO: 50939 - RNA, 22 nt, Human
caggcaggagaggaggauuucu

SEQ ID NO: 50940 - RNA, 22 nt, Human
caggcaguggcucacagcaacc

SEQ ID NO: 50941 - RNA, 22 nt, Human
caggcauagaagggcaagaaua

SEQ ID NO: 50942 - RNA, 22 nt, Human
caggcauguggcccagggguga

SEQ ID NO: 50943 - RNA, 22 nt, Human
caggcauugugacgaguguucu

SEQ ID NO: 50944 - RNA, 22 nt, Human
caggccaaaauucaggcauucu

SEQ ID NO: 50945 - RNA, 22 nt, Human
caggccaacugcauggugacca

SEQ ID NO: 50946 - RNA, 22 nt, Human
caggccaagccuccccagcucc

SEQ ID NO: 50947 - RNA, 22 nt, Human
caggccaauaaaugugauggcc

SEQ ID NO: 50948 - RNA, 22 nt, Human
caggccaauaucacaugcuaug

SEQ ID NO: 50949 - RNA, 22 nt, Human
caggccaauuucuugucauuua

SEQ ID NO: 50950 - RNA, 22 nt, Human
caggccacaaguuggguucaag

SEQ ID NO: 50951 - RNA, 22 nt, Human
caggccacacggcggcucccug

SEQ ID NO: 50952 - RNA, 22 nt, Human
caggccagaggcuguuguugcg

SEQ ID NO: 50953 - RNA, 22 nt, Human
caggccagcagggccuccgugg

SEQ ID NO: 50954 - RNA, 22 nt, Human
caggccagcuuccugacauccu

SEQ ID NO: 50955 - RNA, 22 nt, Human
caggccagugugcuucccaggc

SEQ ID NO: 50956 - RNA, 22 nt, Human
caggccaguuuugauuuaagcc

SEQ ID NO: 50957 - RNA, 22 nt, Human
caggccauuaccgcugagaccc

SEQ ID NO: 50958 - RNA, 22 nt, Human
caggcccacgaggcacacagag

SEQ ID NO: 50959 - RNA, 22 nt, Human
caggcccagaggccucuuccca

SEQ ID NO: 50960 - RNA, 22 nt, Human
caggcccagcccagcccuucga

SEQ ID NO: 50961 - RNA, 22 nt, Human
caggcccaggggucuggcccac

SEQ ID NO: 50962 - RNA, 22 nt, Human
caggcccauaaugcaaauauuu

SEQ ID NO: 50963 - RNA, 22 nt, Human
caggcccaugagggcagccaca

SEQ ID NO: 50964 - RNA, 21 nt, Human
caggccccaggccuggggugc

SEQ ID NO: 50965 - RNA, 22 nt, Human
caggcccucgcccgcagcgacc

SEQ ID NO: 50966 - RNA, 22 nt, Human
caggcccucugcacccucgucu

SEQ ID NO: 50967 - RNA, 22 nt, Human
caggcccugccuugagggaccu

SEQ ID NO: 50968 - RNA, 22 nt, Human
caggcccugcugcugagaccuu

SEQ ID NO: 50969 - RNA, 21 nt, Human
caggccgggugagcaggcagc

SEQ ID NO: 50970 - RNA, 22 nt, Human
caggccucccggugcacacuga

SEQ ID NO: 50971 - RNA, 22 nt, Human
caggccuccuaugagcacuagc

SEQ ID NO: 50972 - RNA, 22 nt, Human
cucccugggccucaguuucucu

SEQ ID NO: 50973 - RNA, 22 nt, Human
cucccuggucuuucccaucauu

SEQ ID NO: 50974 - RNA, 22 nt, Human
cucccugguguccccuccagga

SEQ ID NO: 50975 - RNA, 22 nt, Human
cucccuuccaaugacuaugcuu

SEQ ID NO: 50976 - RNA, 22 nt, Human
cucccuucugagccuuuuguua

SEQ ID NO: 50977 - RNA, 22 nt, Human
cuccucagaagaggguaacaca

SEQ ID NO: 50978 - RNA, 22 nt, Human
cuccucagagagcagcuugggg

SEQ ID NO: 50979 - RNA, 21 nt, Human
cuccucaggaccagccacagg

SEQ ID NO: 50980 - RNA, 22 nt, Human
cuccucagggcugguuacaugg

SEQ ID NO: 50981 - RNA, 22 nt, Human
cuccucaguugucccauggaga

SEQ ID NO: 50982 - RNA, 22 nt, Human
cuccuccacagaccuacugaau

SEQ ID NO: 50983 - RNA, 22 nt, Human
cuccuccacuaggcaaaaugug

SEQ ID NO: 50984 - RNA, 22 nt, Human
cuccucccaauugccaagugcu

SEQ ID NO: 50985 - RNA, 22 nt, Human
cuccucccugcgauugcucugc

SEQ ID NO: 50986 - RNA, 16 nt, Human
cuccucuccuucagga

SEQ ID NO: 50987 - RNA, 22 nt, Human
cuccucuggcuuccuggaggca

SEQ ID NO: 50988 - RNA, 22 nt, Human
cuccucuuuacccgcauggucu

SEQ ID NO: 50989 - RNA, 22 nt, Human
cuccugagaggaucucuguugu

SEQ ID NO: 50990 - RNA, 22 nt, Human
cuccugagggaugcuuaggcuu

SEQ ID NO: 50991 - RNA, 22 nt, Human
cuccugcaagccuccccaagca

SEQ ID NO: 50992 - RNA, 22 nt, Human
cuccugcagcccucagcagcca

SEQ ID NO: 50993 - RNA, 22 nt, Human
cuccugcaugguugugcuauug

SEQ ID NO: 50994 - RNA, 22 nt, Human
cuccugccugugggacugagga

SEQ ID NO: 50995 - RNA, 22 nt, Human
cuccugcuccugcuugcaagga

SEQ ID NO: 50996 - RNA, 22 nt, Human
cuccuggaccaccuuguggcca

SEQ ID NO: 50997 - RNA, 22 nt, Human
cuccuggagcagcaggcgcagg

SEQ ID NO: 50998 - RNA, 22 nt, Human
cuccuggaguccuuuccuauuc

SEQ ID NO: 50999 - RNA, 22 nt, Human
cuccuggaugcaggcugucugc

SEQ ID NO: 51000 - RNA, 22 nt, Human
cuccuggcacucaguguggaag

SEQ ID NO: 51001 - RNA, 22 nt, Human
cuccuggcaggcugagugaaau

SEQ ID NO: 51002 - RNA, 22 nt, Human
cuccuggccccagaucccaauc

SEQ ID NO: 51003 - RNA, 22 nt, Human
caggugcuucuguaagaaagac

SEQ ID NO: 51004 - RNA, 22 nt, Human
cagguggcaaaugaguagcauu

SEQ ID NO: 51005 - RNA, 22 nt, Human
cagguggcagaggucucuggaa

SEQ ID NO: 51006 - RNA, 19 nt, Human
cagguggcgcucuacaggg

SEQ ID NO: 51007 - RNA, 22 nt, Human
cagguggcugagcugaccuuug

SEQ ID NO: 51008 - RNA, 22 nt, Human
cagguggcuucucugcagccuu

SEQ ID NO: 51009 - RNA, 22 nt, Human
caggugggcugccucuccagcu

SEQ ID NO: 51010 - RNA, 22 nt, Human
cagguggggggcuuccgagccu

SEQ ID NO: 51011 - RNA, 22 nt, Human
cagguggguguaugaaugcaaa

SEQ ID NO: 51012 - RNA, 23 nt, Human
caggugguagagaaaaauccaga

SEQ ID NO: 51013 - RNA, 22 nt, Human
cagguggucaggcaaggacacg

SEQ ID NO: 51014 - RNA, 22 nt, Human
caggugguugagagcuguaggc

SEQ ID NO: 51015 - RNA, 22 nt, Human
caggugguuguuuggauucuaa

SEQ ID NO: 51016 - RNA, 22 nt, Human
caggugguuugauaggauaacu

SEQ ID NO: 51017 - RNA, 22 nt, Human
cagguguacacauuguguuuau

SEQ ID NO: 51018 - RNA, 22 nt, Human
caggugucagcagcacuguacu

SEQ ID NO: 51019 - RNA, 22 nt, Human
cagguguuauacaugaaauuua

SEQ ID NO: 51020 - RNA, 22 nt, Human
cagguguugucuaaagcuucag

SEQ ID NO: 51021 - RNA, 22 nt, Human
cagguguuucaaaugugaaacu

SEQ ID NO: 51022 - RNA, 22 nt, Human
cagguuaguauuuuuaguucau

SEQ ID NO: 51023 - RNA, 15 nt, Human
cagguuaguuuccag

SEQ ID NO: 51024 - RNA, 22 nt, Human
cagguucccagguccagggcuu

SEQ ID NO: 51025 - RNA, 22 nt, Human
cagguucccuugcagcuaagug

SEQ ID NO: 51026 - RNA, 22 nt, Human
cagguucuggagaugcagagau

SEQ ID NO: 51027 - RNA, 22 nt, Human
cagguuggucggcaaguacaca

SEQ ID NO: 51028 - RNA, 22 nt, Human
cagguuucauuggcagcuucau

SEQ ID NO: 51029 - RNA, 22 nt, Human
cagguuucuaguucuaagaaua

SEQ ID NO: 51030 - RNA, 22 nt, Human
caguaaacacuagcauucuugg

SEQ ID NO: 51031 - RNA, 22 nt, Human
caguaaagcauguaugucuuca

SEQ ID NO: 51032 - RNA, 22 nt, Human
caguaaauaguggagauguggg

SEQ ID NO: 51033 - RNA, 22 nt, Human
caguaaauauaggaacguggaa

SEQ ID NO: 51034 - RNA, 22 nt, Human
caguaaaugugauuuuucuugu

SEQ ID NO: 51035 - RNA, 22 nt, Human
caguaaauuuuauuugugggug

SEQ ID NO: 51036 - RNA, 22 nt, Human
caguaacacaaccacuccguga

SEQ ID NO: 51037 - RNA, 22 nt, Human
caguaacuaggacaaggaggaa

SEQ ID NO: 51038 - RNA, 22 nt, Human
caguaauaacacagaaaguuug

SEQ ID NO: 51039 - RNA, 22 nt, Human
caguaauaccccuggcucaggu

SEQ ID NO: 51040 - RNA, 22 nt, Human
caguaauagauuugagaguggu

SEQ ID NO: 51041 - RNA, 22 nt, Human
caguaaugggcaagacaauaug

SEQ ID NO: 51042 - RNA, 22 nt, Human
caguacaagaggccaccugccc

SEQ ID NO: 51043 - RNA, 23 nt, Human
caguacaauguggaaaaggagug

SEQ ID NO: 51044 - RNA, 22 nt, Human
caguacuuaacuuauaggagag

SEQ ID NO: 51045 - RNA, 22 nt, Human
caguacuugggggguucuaagu

SEQ ID NO: 51046 - RNA, 22 nt, Human
caguacuuugaagauauuuuag

SEQ ID NO: 51047 - RNA, 22 nt, Human
caguagaauuauuauaaaacau

SEQ ID NO: 51048 - RNA, 22 nt, Human
caguagacacauuaauauggaa

SEQ ID NO: 51049 - RNA, 22 nt, Human
caguagacacauuuguuuuucc

SEQ ID NO: 51050 - RNA, 22 nt, Human
caguagcaggcaggugcuuuug

SEQ ID NO: 51051 - RNA, 22 nt, Human
caguagcagggauuauuuuagg

SEQ ID NO: 51052 - RNA, 22 nt, Human
caguagcaugcaccaggagggu

SEQ ID NO: 51053 - RNA, 22 nt, Human
caguagcauguaauaaagacag

SEQ ID NO: 51054 - RNA, 22 nt, Human
caguagcccacuaguaugcagu

SEQ ID NO: 51055 - RNA, 22 nt, Human
caguagcuuacuuuucuugauc

SEQ ID NO: 51056 - RNA, 22 nt, Human
caguagugaaaagcagcccagc

SEQ ID NO: 51057 - RNA, 22 nt, Human
caguaguggggagcccaguguc

SEQ ID NO: 51058 - RNA, 22 nt, Human
caguaguguugcugagugucag

SEQ ID NO: 51059 - RNA, 22 nt, Human
caguaguuauuaguugccacug

SEQ ID NO: 51060 - RNA, 22 nt, Human
caguauacgacuaacgcaugac

SEQ ID NO: 51061 - RNA, 22 nt, Human
caguauauuuuagagaaguccc

SEQ ID NO: 51062 - RNA, 22 nt, Human
caguaugucuacuggacaaagu

SEQ ID NO: 51063 - RNA, 22 nt, Human
caguauguuuauuagaacugca

SEQ ID NO: 51064 - RNA, 22 nt, Human
caguauuugguaauuggcuacc

SEQ ID NO: 51065 - RNA, 22 nt, Human
caguauuuuuaagcugcuuugu

SEQ ID NO: 51066 - RNA, 22 nt, Human
cagucaaacuuauaggcacauu

SEQ ID NO: 51067 - RNA, 22 nt, Human
cagucaacagagagcccgucag

SEQ ID NO: 51068 - RNA, 22 nt, Human
cagucacauugcccugcauuua

SEQ ID NO: 51069 - RNA, 22 nt, Human
cagucaccaccagguggcagua

SEQ ID NO: 51070 - RNA, 22 nt, Human
cagucaccugaagacuugacca

SEQ ID NO: 51071 - RNA, 22 nt, Human
cagucacuuacaaaaauauaau

SEQ ID NO: 51072 - RNA, 22 nt, Human
cagucagucaauacucuuugag

SEQ ID NO: 51073 - RNA, 22 nt, Human
caguccaggccuggaggagcca

SEQ ID NO: 51074 - RNA, 20 nt, Human
caguccaggcugcagcaucu

SEQ ID NO: 51075 - RNA, 20 nt, Human
cagucccaauccagggccag

SEQ ID NO: 51076 - RNA, 22 nt, Human
cagucccacaagaucuccacaa

SEQ ID NO: 51077 - RNA, 22 nt, Human
cagucccagaagagccugggag

SEQ ID NO: 51078 - RNA, 22 nt, Human
cagucccagcugcucagaaggc

SEQ ID NO: 51079 - RNA, 22 nt, Human
cagucccaucucccagguggcu

SEQ ID NO: 51080 - RNA, 22 nt, Human
cagucccuaguggagcucacag

SEQ ID NO: 51081 - RNA, 22 nt, Human
caguuacagagccaguuagaga

SEQ ID NO: 51082 - RNA, 22 nt, Human
caguuacagcugcaccagagcc

SEQ ID NO: 51083 - RNA, 22 nt, Human
caguuaccaucuucagugauga

SEQ ID NO: 51084 - RNA, 22 nt, Human
caguuacucaauaauucuugcg

SEQ ID NO: 51085 - RNA, 22 nt, Human
caguuauaagacuaagcuauuc

SEQ ID NO: 51086 - RNA, 21 nt, Human
caguuauucuugaugugugug

SEQ ID NO: 51087 - RNA, 22 nt, Human
caguucaaaauuuugaagaagg

SEQ ID NO: 51088 - RNA, 22 nt, Human
caguucagcuagaagaaacaaa

SEQ ID NO: 51089 - RNA, 21 nt, Human
caguucgucuuagaaaauggc

SEQ ID NO: 51090 - RNA, 22 nt, Human
caguucuaauuaauaggaguaa

SEQ ID NO: 51091 - RNA, 22 nt, Human
caguucucuugaucgucucuug

SEQ ID NO: 51092 - RNA, 22 nt, Human
caguucugagcuuucccagaag

SEQ ID NO: 51093 - RNA, 22 nt, Human
caguucuggaguuucauucuuu

SEQ ID NO: 51094 - RNA, 22 nt, Human
caguucugguuugcagauauau

SEQ ID NO: 51095 - RNA, 22 nt, Human
caguugaaaagauuuuauucug

SEQ ID NO: 51096 - RNA, 17 nt, Human
caguugaaauguuugga

SEQ ID NO: 51097 - RNA, 22 nt, Human
caguugaggacucaccuuugaa

SEQ ID NO: 51098 - RNA, 21 nt, Human
caguugauagagaucuugagc

SEQ ID NO: 51099 - RNA, 22 nt, Human
caguugccuacuacauggcagg

SEQ ID NO: 51100 - RNA, 22 nt, Human
caguugccuguuuccuugugug

SEQ ID NO: 51101 - RNA, 22 nt, Human
caguuuaaaugagugacugcag

SEQ ID NO: 51102 - RNA, 22 nt, Human
caguuuaaccuauccauuaugu

SEQ ID NO: 51103 - RNA, 22 nt, Human
caguuuaggucauccuugcuuu

SEQ ID NO: 51104 - RNA, 22 nt, Human
caguuuauaguuguuaugugug

SEQ ID NO: 51105 - RNA, 19 nt, Human
caguuuaugcuuuggggac

SEQ ID NO: 51106 - RNA, 22 nt, Human
caguuuccuuguuuaccuacug

SEQ ID NO: 51107 - RNA, 15 nt, Human
caguuucugaucauc

SEQ ID NO: 51108 - RNA, 22 nt, Human
caguuucugggcguucacaggu

SEQ ID NO: 51109 - RNA, 22 nt, Human
caguuucuucaucugcagaauc

SEQ ID NO: 51110 - RNA, 22 nt, Human
caguuucuuggaugccaauuuc

SEQ ID NO: 51111 - RNA, 19 nt, Human
caguuuguccagaggggac

SEQ ID NO: 51112 - RNA, 22 nt, Human
caguuugugcuaggcacuauuu

SEQ ID NO: 51113 - RNA, 22 nt, Human
caguuuuacccaagcuuauuuu

SEQ ID NO: 51114 - RNA, 22 nt, Human
caguuuuagcuagagcaaacca

SEQ ID NO: 51115 - RNA, 22 nt, Human
caguuuuaggacauguggaugu

SEQ ID NO: 51116 - RNA, 22 nt, Human
caguuuuagggcaaugugaaga

SEQ ID NO: 51117 - RNA, 22 nt, Human
caguuuuaucaucugugaaaug

SEQ ID NO: 51118 - RNA, 22 nt, Human
caguuuuaugucgaauguauac

SEQ ID NO: 51119 - RNA, 22 nt, Human
caguuuuccaugacucagagag

SEQ ID NO: 51120 - RNA, 22 nt, Human
caguuuuucaaaauuacaugau

SEQ ID NO: 51121 - RNA, 22 nt, Human
cucugccaguuucuggccucag

SEQ ID NO: 51122 - RNA, 22 nt, Human
cucugcccacgucuugcccaga

SEQ ID NO: 51123 - RNA, 22 nt, Human
cucugcccgcggaugccacguc

SEQ ID NO: 51124 - RNA, 19 nt, Human
cucugcccuacagaaagcu

SEQ ID NO: 51125 - RNA, 22 nt, Human
cucugcccucgcacaucugcca

SEQ ID NO: 51126 - RNA, 19 nt, Human
cucugccucuggcuguggc

SEQ ID NO: 51127 - RNA, 22 nt, Human
cucugccugccacuguucaggc

SEQ ID NO: 51128 - RNA, 22 nt, Human
cucugccugcccaccgacccau

SEQ ID NO: 51129 - RNA, 22 nt, Human
cucugcuaagcaugaacaauua

SEQ ID NO: 51130 - RNA, 22 nt, Human
cucugcucaccagccaugugau

SEQ ID NO: 51131 - RNA, 22 nt, Human
cucugcugcccaugaugguaua

SEQ ID NO: 51132 - RNA, 22 nt, Human
cucugcuggcagcccccgggcc

SEQ ID NO: 51133 - RNA, 22 nt, Human
cucugcugguagcucauuccau

SEQ ID NO: 51134 - RNA, 22 nt, Human
cucugcuguucuuauguguccu

SEQ ID NO: 51135 - RNA, 22 nt, Human
cucugcuucauccaccacuggc

SEQ ID NO: 51136 - RNA, 22 nt, Human
cucugcuuuccucuuacacacu

SEQ ID NO: 51137 - RNA, 22 nt, Human
cucugcuuuuuagggagccuag

SEQ ID NO: 51138 - RNA, 22 nt, Human
cucuggaagaauacacuuagaa

SEQ ID NO: 51139 - RNA, 22 nt, Human
cucuggaagugauggcagguca

SEQ ID NO: 51140 - RNA, 21 nt, Human
cucuggaggcaagggagagug

SEQ ID NO: 51141 - RNA, 22 nt, Human
cucuggaggccguuggcccuua

SEQ ID NO: 51142 - RNA, 22 nt, Human
cucuggagguugagcccagcaa

SEQ ID NO: 51143 - RNA, 22 nt, Human
cucuggaguaagagcuaugaaa

SEQ ID NO: 51144 - RNA, 22 nt, Human
cucuggaguucucaugaggaac

SEQ ID NO: 51145 - RNA, 21 nt, Human
cucuggaguuugaaggcuggg

SEQ ID NO: 51146 - RNA, 22 nt, Human
cucuggauugcugugagaugcu

SEQ ID NO: 51147 - RNA, 22 nt, Human
cucuggcagagcuguagacuuc

SEQ ID NO: 51148 - RNA, 22 nt, Human
cucuggcucccgcagcccccau

SEQ ID NO: 51149 - RNA, 19 nt, Human
cucuggcuccugggcugcc

SEQ ID NO: 51150 - RNA, 22 nt, Human
cucuggcucuguugagauuugu

SEQ ID NO: 51151 - RNA, 22 nt, Human
cucuggcuggcauugcuggacu

SEQ ID NO: 51152 - RNA, 22 nt, Human
cucuggcugucccgaugagcag

SEQ ID NO: 51153 - RNA, 22 nt, Human
cucuggcuguuugcagcucaag

SEQ ID NO: 51154 - RNA, 22 nt, Human
cucuggcuuaguaugcuccaaa

SEQ ID NO: 51155 - RNA, 22 nt, Human
cucuggcuugguaaaaacuucu

SEQ ID NO: 51156 - RNA, 22 nt, Human
cucuggcuuuaaggaugccaca

SEQ ID NO: 51157 - RNA, 22 nt, Human
cucugggaauucugagcaagca

SEQ ID NO: 51158 - RNA, 22 nt, Human
cucugggaccauggcaagugcg

SEQ ID NO: 51159 - RNA, 22 nt, Human
cucugggacuagaaccccaggg

SEQ ID NO: 51160 - RNA, 17 nt, Human
cucugggcagccugggg

SEQ ID NO: 51161 - RNA, 22 nt, Human
cucugggcaggaccaguggacc

SEQ ID NO: 51162 - RNA, 22 nt, Human
cucugggccaccgcugguguau

SEQ ID NO: 51163 - RNA, 19 nt, Human
cucugggcugcaucuuggu

SEQ ID NO: 51164 - RNA, 22 nt, Human
cucugggcuucaagucagauuu

SEQ ID NO: 51165 - RNA, 22 nt, Human
cucugggguuaagcuuccaugg

SEQ ID NO: 51166 - RNA, 23 nt, Human
cucuggguccgauguccugacag

SEQ ID NO: 51167 - RNA, 22 nt, Human
cucugggucuaccuguggccag

SEQ ID NO: 51168 - RNA, 22 nt, Human
cucugggucuauaaugcagcug

SEQ ID NO: 51169 - RNA, 22 nt, Human
cucuggguucagaacagcaagc

SEQ ID NO: 51170 - RNA, 22 nt, Human
cucugguuuuucuuccauuaag

SEQ ID NO: 51171 - RNA, 22 nt, Human
cucuguauagaaaggaaacauu

SEQ ID NO: 51172 - RNA, 22 nt, Human
cucuguaugggauuuacugguu

SEQ ID NO: 51173 - RNA, 22 nt, Human
cucuguccacagguuugucccu

SEQ ID NO: 51174 - RNA, 22 nt, Human
cucuguccuugcacaguuccua

SEQ ID NO: 51175 - RNA, 22 nt, Human
cucugugaaccccuccuuucuu

SEQ ID NO: 51176 - RNA, 22 nt, Human
cucugugauuuugugagccaga

SEQ ID NO: 51177 - RNA, 22 nt, Human
cucugugcccuacugcucagcu

SEQ ID NO: 51178 - RNA, 22 nt, Human
cucugugcuuaugcuccauggg

SEQ ID NO: 51179 - RNA, 22 nt, Human
cucugugguaaaauagcaguau

SEQ ID NO: 51180 - RNA, 22 nt, Human
cucugugugguagauuccauua

SEQ ID NO: 51181 - RNA, 22 nt, Human
cucuguguuccggguugcugcu

SEQ ID NO: 51182 - RNA, 21 nt, Human
cucuguguugaggguguugag

SEQ ID NO: 51183 - RNA, 22 nt, Human
cucuguuacagcccccugccuc

SEQ ID NO: 51184 - RNA, 22 nt, Human
cucuuaaaaacuugauauauuu

SEQ ID NO: 51185 - RNA, 22 nt, Human
cucuuaaaauuaccuuugcaaa

SEQ ID NO: 51186 - RNA, 22 nt, Human
cucuuaaagaauguuccagcug

SEQ ID NO: 51187 - RNA, 20 nt, Human
cucuuaaauguaaaguaggc

SEQ ID NO: 51188 - RNA, 20 nt, Human
cucuuaauugcucacauuag

SEQ ID NO: 51189 - RNA, 22 nt, Human
cucuuacacagauuccucuagc

SEQ ID NO: 51190 - RNA, 22 nt, Human
ucuaaagagaguggguacaugu

SEQ ID NO: 51191 - RNA, 22 nt, Human
ucuaaauguaucacaucuggau

SEQ ID NO: 51192 - RNA, 22 nt, Human
ucuaaaugucaguacagaauga

SEQ ID NO: 51193 - RNA, 22 nt, Human
ucuaacagaaauucugacaaaa

SEQ ID NO: 51194 - RNA, 19 nt, Human
ucuaacagcuuucauucua

SEQ ID NO: 51195 - RNA, 22 nt, Human
ucuaacauugaauggcugauua

SEQ ID NO: 51196 - RNA, 22 nt, Human
ucuaaccuuguggucugcuggu

SEQ ID NO: 51197 - RNA, 22 nt, Human
ucuaacuaacuacaguaagagg

SEQ ID NO: 51198 - RNA, 22 nt, Human
ucuaacuuguauguauaguuuu

SEQ ID NO: 51199 - RNA, 22 nt, Human
ucuaagaaagauuaagaaauuu

SEQ ID NO: 51200 - RNA, 21 nt, Human
ucuaagaacaugauucucccu

SEQ ID NO: 51201 - RNA, 22 nt, Human
ucuaagaauugaaguggcucuu

SEQ ID NO: 51202 - RNA, 22 nt, Human
ucuaagaucuacuauacaugug

SEQ ID NO: 51203 - RNA, 22 nt, Human
ucuaagcagaacugaagcucug

SEQ ID NO: 51204 - RNA, 22 nt, Human
ucuaagccuaggaaaugaguuu

SEQ ID NO: 51205 - RNA, 22 nt, Human
ucuaaggagcgcuccagaaaaa

SEQ ID NO: 51206 - RNA, 22 nt, Human
ucuaaggucaggggaaaguuug

SEQ ID NO: 51207 - RNA, 22 nt, Human
ucuaaguuuggugauuaccaau

SEQ ID NO: 51208 - RNA, 22 nt, Human
ucuaauaaauaaaugcucuagg

SEQ ID NO: 51209 - RNA, 22 nt, Human
ucuaaucuacaaaaggaaauuc

SEQ ID NO: 51210 - RNA, 20 nt, Human
ucuaauuaaaauugucuagu

SEQ ID NO: 51211 - RNA, 22 nt, Human
ucuaauuccauuaaauugaugu

SEQ ID NO: 51212 - RNA, 22 nt, Human
ucuaauugaaucuaagcauguu

SEQ ID NO: 51213 - RNA, 23 nt, Human
ucuacaaagcugugucaggaccc

SEQ ID NO: 51214 - RNA, 22 nt, Human
ucuacaaugagaaaugaucagu

SEQ ID NO: 51215 - RNA, 22 nt, Human
ucuacacugggggcuuugagca

SEQ ID NO: 51216 - RNA, 22 nt, Human
ucuacacuguagaauuauaagg

SEQ ID NO: 51217 - RNA, 22 nt, Human
ucuacagagagucauagacuca

SEQ ID NO: 51218 - RNA, 22 nt, Human
ucuacaggguaaggggcuugcc

SEQ ID NO: 51219 - RNA, 22 nt, Human
ucuacagggucagaguuucaug

SEQ ID NO: 51220 - RNA, 22 nt, Human
ucuacagucaaguuauauugcu

SEQ ID NO: 51221 - RNA, 22 nt, Human
ucuacaguguuugguuugagga

SEQ ID NO: 51222 - RNA, 22 nt, Human
ucuacauuuucacaaggucucc

SEQ ID NO: 51223 - RNA, 22 nt, Human
ucuaccuggaguccguuguuaa

SEQ ID NO: 51224 - RNA, 22 nt, Human
ucuacuauguuucuuaaauaga

SEQ ID NO: 51225 - RNA, 17 nt, Human
ucuacuccugaaggaag

SEQ ID NO: 51226 - RNA, 22 nt, Human
ucuacugcacuggugucucauc

SEQ ID NO: 51227 - RNA, 22 nt, Human
ucuacuguggaggcaaauccuu

SEQ ID NO: 51228 - RNA, 22 nt, Human
ucuacuucuccuucauuuccca

SEQ ID NO: 51229 - RNA, 22 nt, Human
ucuagaaaaacaaaguaucuga

SEQ ID NO: 51230 - RNA, 22 nt, Human
ucuagaaacagguuucuagaaa

SEQ ID NO: 51231 - RNA, 22 nt, Human
ucuagaaauuuugccuuguauu

SEQ ID NO: 51232 - RNA, 22 nt, Human
ucuagaagggugccgaucuuag

SEQ ID NO: 51233 - RNA, 22 nt, Human
ucuagaaguccaaaguuaaaua

SEQ ID NO: 51234 - RNA, 22 nt, Human
ucuagaauagauucugcugauc

SEQ ID NO: 51235 - RNA, 22 nt, Human
ucuagaaugacaugcaagagua

SEQ ID NO: 51236 - RNA, 22 nt, Human
ucuagaauucccuuuugacaau

SEQ ID NO: 51237 - RNA, 22 nt, Human
ucuagagaaaaaacucaaguga

SEQ ID NO: 51238 - RNA, 22 nt, Human
ucuagagaaguuuccuuuugaa

SEQ ID NO: 51239 - RNA, 22 nt, Human
ucuagagauacauuggucauuu

SEQ ID NO: 51240 - RNA, 22 nt, Human
ucuagagauuggacuuccuaga

SEQ ID NO: 51241 - RNA, 22 nt, Human
ucuagauguacugcugaagagu

SEQ ID NO: 51242 - RNA, 22 nt, Human
ucuagcagguggcggccagcga

SEQ ID NO: 51243 - RNA, 22 nt, Human
ucuagcaucuaauuauggaauc

SEQ ID NO: 51244 - RNA, 22 nt, Human
ucuagcuuugagaucaguagcc

SEQ ID NO: 51245 - RNA, 22 nt, Human
ucuaggaauuucaucuaguucu

SEQ ID NO: 51246 - RNA, 22 nt, Human
ucuaggagaaccaucagggagg

SEQ ID NO: 51247 - RNA, 17 nt, Human
ucuaggagagcagagcu

SEQ ID NO: 51248 - RNA, 22 nt, Human
ucuaggagcugagaguguguac

SEQ ID NO: 51249 - RNA, 22 nt, Human
ucuaggaguugauaaaagggcu

SEQ ID NO: 51250 - RNA, 20 nt, Human
ucuaggcaggcaggcucgug

SEQ ID NO: 51251 - RNA, 22 nt, Human
ucuaggcauuguuauuacaacu

SEQ ID NO: 51252 - RNA, 22 nt, Human
ucuagggagaguuguuaugggu

SEQ ID NO: 51253 - RNA, 22 nt, Human
ucuagggggacagcuggcugug

SEQ ID NO: 51254 - RNA, 22 nt, Human
ucuagggugaugauucaggaug

SEQ ID NO: 51255 - RNA, 22 nt, Human
ucuaggguugaggccacaggga

SEQ ID NO: 51256 - RNA, 22 nt, Human
ucuagguggaugaggaacauag

SEQ ID NO: 51257 - RNA, 22 nt, Human
ucuaguccuaggagaggaguca

SEQ ID NO: 51258 - RNA, 22 nt, Human
ucuaguuagugguugauacugu

SEQ ID NO: 51259 - RNA, 22 nt, Human
ucuaguuuaagaucuguuaguc

SEQ ID NO: 51260 - RNA, 22 nt, Human
ucuaguuuuagcuugaguugca

SEQ ID NO: 51261 - RNA, 22 nt, Human
ucuauaaagggccagauaguag

SEQ ID NO: 51262 - RNA, 22 nt, Human
ucuauaauccuauuucaacugc

SEQ ID NO: 51263 - RNA, 22 nt, Human
ucuauaauggaaaguggaugug

SEQ ID NO: 51264 - RNA, 22 nt, Human
ucuauacugaugggauacuauu

SEQ ID NO: 51265 - RNA, 22 nt, Human
ucuauauuauacauccaggauu

SEQ ID NO: 51266 - RNA, 22 nt, Human
ucuauauuccagauacagauua

SEQ ID NO: 51267 - RNA, 22 nt, Human
ucuaugcuugagacagaugggg

SEQ ID NO: 51268 - RNA, 19 nt, Human
ucuaugggcuuuuuguagu

SEQ ID NO: 51269 - RNA, 22 nt, Human
ucuauggggccucacaggcacu

SEQ ID NO: 51270 - RNA, 21 nt, Human
ucuauguacgcaucuaugccu

SEQ ID NO: 51271 - RNA, 22 nt, Human
ucuaugucuccaccuucgcaga

SEQ ID NO: 51272 - RNA, 22 nt, Human
ucuaugugcccuuugugugaug

SEQ ID NO: 51273 - RNA, 22 nt, Human
ucuauuaaugauucaauagugu

SEQ ID NO: 51274 - RNA, 22 nt, Human
ucuauugcagauggaugcccuc

SEQ ID NO: 51275 - RNA, 22 nt, Human
ucuauuguaggcauguagcuug

SEQ ID NO: 51276 - RNA, 22 nt, Human
ucuauuuaggagacccugguuc

SEQ ID NO: 51277 - RNA, 22 nt, Human
uuaaacaccugucuaguguagc

SEQ ID NO: 51278 - RNA, 22 nt, Human
uuaaacauuuuugaugaucgau

SEQ ID NO: 51279 - RNA, 22 nt, Human
uuaaaccacugaguggagacua

SEQ ID NO: 51280 - RNA, 22 nt, Human
uuaaaccacuuuguugcaagua

SEQ ID NO: 51281 - RNA, 23 nt, Human
uuaaacuucagugcagaacacuc

SEQ ID NO: 51282 - RNA, 22 nt, Human
uuaaagagucuacugcacaucc

SEQ ID NO: 51283 - RNA, 22 nt, Human
uuaaagaguuuauuacuuguaa

SEQ ID NO: 51284 - RNA, 22 nt, Human
uuaaagcaguuuguauacaugg

SEQ ID NO: 51285 - RNA, 22 nt, Human
uuaaagcaugcugcuuuuccau

SEQ ID NO: 51286 - RNA, 22 nt, Human
uuaaagccugacuguggacuac

SEQ ID NO: 51287 - RNA, 22 nt, Human
uuaaagcuagguggaacaaauu

SEQ ID NO: 51288 - RNA, 22 nt, Human
uuaaagcugcugaauccuauuu

SEQ ID NO: 51289 - RNA, 22 nt, Human
uuaaagcuguagaguuacuugc

SEQ ID NO: 51290 - RNA, 22 nt, Human
uuaaagucuauguacuacacuu

SEQ ID NO: 51291 - RNA, 22 nt, Human
uuaaaguguuaacugaagcuua

SEQ ID NO: 51292 - RNA, 22 nt, Human
uuaaaguucauuaaaugagcca

SEQ ID NO: 51293 - RNA, 22 nt, Human
uuaaauagucaaaucaguggca

SEQ ID NO: 51294 - RNA, 22 nt, Human
uuaaauauuauguugucugcaa

SEQ ID NO: 51295 - RNA, 22 nt, Human
uuaaaugacgggacuggguuuu

SEQ ID NO: 51296 - RNA, 22 nt, Human
uuaaaugagauguucagauauu

SEQ ID NO: 51297 - RNA, 22 nt, Human
uuaaauuaggacucuaguucug

SEQ ID NO: 51298 - RNA, 22 nt, Human
uuaaauucauuccaacuuuuga

SEQ ID NO: 51299 - RNA, 22 nt, Human
ucugcaagcucaguucugacuu

SEQ ID NO: 51300 - RNA, 22 nt, Human
ucugcaagggcacagccaaccc

SEQ ID NO: 51301 - RNA, 22 nt, Human
ucugcaagggguucuuuaggcc

SEQ ID NO: 51302 - RNA, 22 nt, Human
ucugcaaguagaugacagugag

SEQ ID NO: 51303 - RNA, 22 nt, Human
ucugcaaguuuaucacuuggga

SEQ ID NO: 51304 - RNA, 22 nt, Human
ucugcacaauugaucauggcaa

SEQ ID NO: 51305 - RNA, 22 nt, Human
ucugcacaccgccaggcugacu

SEQ ID NO: 51306 - RNA, 22 nt, Human
ucugcacagagacccuugccag

SEQ ID NO: 51307 - RNA, 22 nt, Human
ucugcacagauucucugagaau

SEQ ID NO: 51308 - RNA, 22 nt, Human
ucugcacaggcguagguugacu

SEQ ID NO: 51309 - RNA, 22 nt, Human
ucugcacccacguaccuuggcu

SEQ ID NO: 51310 - RNA, 22 nt, Human
ucugcaccccgcagggucaggu

SEQ ID NO: 51311 - RNA, 22 nt, Human
ucugcaccuuucuuaaaaaucg

SEQ ID NO: 51312 - RNA, 22 nt, Human
ucugcagaauucgaggaagaaa

SEQ ID NO: 51313 - RNA, 22 nt, Human
ucugcagacacuggggucugga

SEQ ID NO: 51314 - RNA, 22 nt, Human
ucugcagacuugauaaccacug

SEQ ID NO: 51315 - RNA, 22 nt, Human
ucugcagagauucugggcugag

SEQ ID NO: 51316 - RNA, 17 nt, Human
ucugcagaggcaaaccu

SEQ ID NO: 51317 - RNA, 22 nt, Human
ucugcagagggagugcuggguc

SEQ ID NO: 51318 - RNA, 22 nt, Human
ucugcagcccaaagucucuuag

SEQ ID NO: 51319 - RNA, 22 nt, Human
ucugcagcgugcaggcuggugc

SEQ ID NO: 51320 - RNA, 22 nt, Human
ucugcaggccucgacaaggcca

SEQ ID NO: 51321 - RNA, 22 nt, Human
ucugcaggcucuagaugagguu

SEQ ID NO: 51322 - RNA, 22 nt, Human
ucugcagguagagcucaggaau

SEQ ID NO: 51323 - RNA, 22 nt, Human
ucugcaggucacgcuccagccu

SEQ ID NO: 51324 - RNA, 22 nt, Human
ucugcaucauuuuucagagccg

SEQ ID NO: 51325 - RNA, 22 nt, Human
ucugcaucucuuauaaaugaug

SEQ ID NO: 51326 - RNA, 22 nt, Human
ucugcaucuguguugagugccc

SEQ ID NO: 51327 - RNA, 22 nt, Human
ucugcauuacaugccauagaca

SEQ ID NO: 51328 - RNA, 22 nt, Human
ucugcauuauuggaaaguccuu

SEQ ID NO: 51329 - RNA, 22 nt, Human
ucugcauuuuuaacaagauccc

SEQ ID NO: 51330 - RNA, 22 nt, Human
ucugcauuuuuacaagaucccc

SEQ ID NO: 51331 - RNA, 22 nt, Human
ucugccacacugguucagugga

SEQ ID NO: 51332 - RNA, 22 nt, Human
ucugccaccaccuacacuagua

SEQ ID NO: 51333 - RNA, 20 nt, Human
ucugccacugcacucugccc

SEQ ID NO: 51334 - RNA, 22 nt, Human
ucugccacugugaugcaugaua

SEQ ID NO: 51335 - RNA, 22 nt, Human
ucugccacuuaccuccauguac

SEQ ID NO: 51336 - RNA, 22 nt, Human
ucugccagcaccaugauccuuc

SEQ ID NO: 51337 - RNA, 22 nt, Human
ucugccaggccugcuuccgggg

SEQ ID NO: 51338 - RNA, 22 nt, Human
ucugccaggcuuggugcuagau

SEQ ID NO: 51339 - RNA, 16 nt, Human
ucugccagggacaggc

SEQ ID NO: 51340 - RNA, 22 nt, Human
ucugccagugguuuggcccuga

SEQ ID NO: 51341 - RNA, 23 nt, Human
ucugccagugugugccaggagcc

SEQ ID NO: 51342 - RNA, 17 nt, Human
ucugccaguuuuagaau

SEQ ID NO: 51343 - RNA, 22 nt, Human
ucugcccugcagggagcaguaa

SEQ ID NO: 51344 - RNA, 22 nt, Human
ucugcccugccauucacuggaa

SEQ ID NO: 51345 - RNA, 22 nt, Human
ucugccuagugggacagcagcc

SEQ ID NO: 51346 - RNA, 22 nt, Human
ucugccugaaucucuuagaaca

SEQ ID NO: 51347 - RNA, 22 nt, Human
ucugccugagaaguggggugcc

SEQ ID NO: 51348 - RNA, 22 nt, Human
ucugccugagcagagggaggcc

SEQ ID NO: 51349 - RNA, 22 nt, Human
ucugccugaggacugacaccag

SEQ ID NO: 51350 - RNA, 22 nt, Human
ucugccugagggagcugaggaa

SEQ ID NO: 51351 - RNA, 18 nt, Human
ucugccugcagggcaucu

SEQ ID NO: 51352 - RNA, 22 nt, Human
ucugccugccagucugguccuc

SEQ ID NO: 51353 - RNA, 22 nt, Human
ucugccugccgagaacaccuac

SEQ ID NO: 51354 - RNA, 22 nt, Human
ucugccugcggcugcagguggc

SEQ ID NO: 51355 - RNA, 22 nt, Human
ucugccugcuaacuccugcacc

SEQ ID NO: 51356 - RNA, 22 nt, Human
ucugccuggacccuggugagcu

SEQ ID NO: 51357 - RNA, 22 nt, Human
ucugccuggagaguucuucucu

SEQ ID NO: 51358 - RNA, 22 nt, Human
ucugccuggauuccauucucca

SEQ ID NO: 51359 - RNA, 22 nt, Human
ucugccuggccuggagggcaca

SEQ ID NO: 51360 - RNA, 22 nt, Human
ucugccuguaauauuuggagaa

SEQ ID NO: 51361 - RNA, 22 nt, Human
ucugccugucuccuugaauugu

SEQ ID NO: 51362 - RNA, 22 nt, Human
ucugccuguggauacaugcucu

SEQ ID NO: 51363 - RNA, 22 nt, Human
ucugccuguucaagucuucuag

SEQ ID NO: 51364 - RNA, 22 nt, Human
ucugccuuagcaauugucaagg

SEQ ID NO: 51365 - RNA, 22 nt, Human
ucugccuucgcugcucccugaa

SEQ ID NO: 51366 - RNA, 22 nt, Human
ucugccuuguuugagcuuugac

SEQ ID NO: 51367 - RNA, 22 nt, Human
ucugcgugaauuugcauugugg

SEQ ID NO: 51368 - RNA, 22 nt, Human
ucugcguggcgugguucugugc

SEQ ID NO: 51369 - RNA, 22 nt, Human
ucugcguugcucacgcugggag

SEQ ID NO: 51370 - RNA, 22 nt, Human
ucugcucacauggcuccaugca

SEQ ID NO: 51371 - RNA, 22 nt, Human
ucugcugccugcagggcagaga

SEQ ID NO: 51372 - RNA, 22 nt, Human
ucugcugcuacagacucucuag

SEQ ID NO: 51373 - RNA, 22 nt, Human
ucugcuggaaaaccagggaauu

SEQ ID NO: 51374 - RNA, 20 nt, Human
ucugcuggccaaaacuucac

SEQ ID NO: 51375 - RNA, 22 nt, Human
ucugcuguacuuuuggucuguu

SEQ ID NO: 51376 - RNA, 22 nt, Human
ucugcugucuuuucugggugag

SEQ ID NO: 51377 - RNA, 22 nt, Human
ucugcugugaaaggugaauauu

SEQ ID NO: 51378 - RNA, 22 nt, Human
ucugcugugauuugcuaccugu

SEQ ID NO: 51379 - RNA, 22 nt, Human
ucugcuguguugaaugauuggu

SEQ ID NO: 51380 - RNA, 22 nt, Human
ucugcuucacuuccccaagcuu

SEQ ID NO: 51381 - RNA, 23 nt, Human
ucugcuucuguauuuuuucccau

SEQ ID NO: 51382 - RNA, 22 nt, Human
ucugcuuucaaauucacuuagu

SEQ ID NO: 51383 - RNA, 22 nt, Human
ucugcuuuuucauugacugaaa

SEQ ID NO: 51384 - RNA, 22 nt, Human
ucuggaaggggaucugugguca

SEQ ID NO: 51385 - RNA, 23 nt, Human
ucuggaaugguacucacuggagu

SEQ ID NO: 51386 - RNA, 22 nt, Human
ucuggaauuaaacucaggagac

SEQ ID NO: 51387 - RNA, 22 nt, Human
ucuggaauugcugugugaguuc

SEQ ID NO: 51388 - RNA, 22 nt, Human
ucuggaauuuucuagggcauca

SEQ ID NO: 51389 - RNA, 22 nt, Human
ucuggacauccuggagaaugac

SEQ ID NO: 51390 - RNA, 22 nt, Human
ucuggacuccaugcugccugga

SEQ ID NO: 51391 - RNA, 22 nt, Human
ucuggagaccuagcccuguugu

SEQ ID NO: 51392 - RNA, 22 nt, Human
ucuggagagaucuuccacaaca

SEQ ID NO: 51393 - RNA, 22 nt, Human
ucuggagagcagaugccucugg

SEQ ID NO: 51394 - RNA, 23 nt, Human
ugacaaagcgagacuccagcuca

SEQ ID NO: 51395 - RNA, 22 nt, Human
ugacaacaaggauccugccugg

SEQ ID NO: 51396 - RNA, 23 nt, Human
ugacaacagcucucagccauguc

SEQ ID NO: 51397 - RNA, 22 nt, Human
ugacaacaucauuuuugugugg

SEQ ID NO: 51398 - RNA, 22 nt, Human
ugacaagaagaccugguaauga

SEQ ID NO: 51399 - RNA, 22 nt, Human
ugacaagagcauucccacaccu

SEQ ID NO: 51400 - RNA, 22 nt, Human
ugacaauacagagagagcaaaa

SEQ ID NO: 51401 - RNA, 22 nt, Human
ugacaauagcgauuuaucuugc

SEQ ID NO: 51402 - RNA, 22 nt, Human
ugacaauauugagucuuagguu

SEQ ID NO: 51403 - RNA, 22 nt, Human
ugacaauggguggacaagauag

SEQ ID NO: 51404 - RNA, 22 nt, Human
ugacacaaacaagauauuugcc

SEQ ID NO: 51405 - RNA, 22 nt, Human
ugacacaauugagugguacuau

SEQ ID NO: 51406 - RNA, 22 nt, Human
ugacacagaauuuggcuaucac

SEQ ID NO: 51407 - RNA, 19 nt, Human
ugacacagcuagguuugcu

SEQ ID NO: 51408 - RNA, 22 nt, Human
ucuguugcaaugugcaugguga

SEQ ID NO: 51409 - RNA, 22 nt, Human
ucuguuuaaugggaaugauacu

SEQ ID NO: 51410 - RNA, 22 nt, Human
ucuguuuaggcaaaauagcuac

SEQ ID NO: 51411 - RNA, 22 nt, Human
ucuguuuaugugucuaaauaaa

SEQ ID NO: 51412 - RNA, 22 nt, Human
ucuguuucuuccuagccaugcu

SEQ ID NO: 51413 - RNA, 22 nt, Human
ucuguuuucucuguauuuugac

SEQ ID NO: 51414 - RNA, 23 nt, Human
ucuguuuugcaacaugugacaag

SEQ ID NO: 51415 - RNA, 22 nt, Human
ucuuaaaaguaugccaauugga

SEQ ID NO: 51416 - RNA, 22 nt, Human
ucuuaaagccaagcauaaacca

SEQ ID NO: 51417 - RNA, 22 nt, Human
ucuuaaagcuuacuucaauugu

SEQ ID NO: 51418 - RNA, 20 nt, Human
ucuuaaauccccagggccau

SEQ ID NO: 51419 - RNA, 22 nt, Human
ucuuaauucugugucuucacua

SEQ ID NO: 51420 - RNA, 22 nt, Human
ucuuaauugagaacaguguagg

SEQ ID NO: 51421 - RNA, 22 nt, Human
ucuuacauauacgucauuuagu

SEQ ID NO: 51422 - RNA, 22 nt, Human
ucuuagaaguuuauggcacgga

SEQ ID NO: 51423 - RNA, 22 nt, Human
ucuuagaugaauaaaaaguuau

SEQ ID NO: 51424 - RNA, 22 nt, Human
ucuuagcacagcuauauaaguu

SEQ ID NO: 51425 - RNA, 22 nt, Human
ucuuagcagugcugagaagaau

SEQ ID NO: 51426 - RNA, 22 nt, Human
ucuuagcauuuguuaauaccca

SEQ ID NO: 51427 - RNA, 22 nt, Human
ucuuaggaguagaauucucaca

SEQ ID NO: 51428 - RNA, 22 nt, Human
ucuuaguuguuugcugucuaac

SEQ ID NO: 51429 - RNA, 22 nt, Human
ucuuauaaaaggacucccauuu

SEQ ID NO: 51430 - RNA, 22 nt, Human
ucuuaugggaaagauguaauua

SEQ ID NO: 51431 - RNA, 22 nt, Human
ucuuauuugcaacuggcucaga

SEQ ID NO: 51432 - RNA, 22 nt, Human
ucuucaaaauauuccauccauu

SEQ ID NO: 51433 - RNA, 22 nt, Human
ucuucaaacccugguuuuguga

SEQ ID NO: 51434 - RNA, 22 nt, Human
uuccagcaggcagacaggagau

SEQ ID NO: 51435 - RNA, 22 nt, Human
uuccagccaugguuucccuaug

SEQ ID NO: 51436 - RNA, 20 nt, Human
uuccagccgccacuuccgcc

SEQ ID NO: 51437 - RNA, 22 nt, Human
uuccagccuuuauccauccaga

SEQ ID NO: 51438 - RNA, 22 nt, Human
uuccaggaaaacaguuggaagu

SEQ ID NO: 51439 - RNA, 22 nt, Human
uuccaggaacacucuguguccc

SEQ ID NO: 51440 - RNA, 22 nt, Human
uuccaggaagacaucucaggaa

SEQ ID NO: 51441 - RNA, 22 nt, Human
uuccaggacaagauguuucagg

SEQ ID NO: 51442 - RNA, 22 nt, Human
uuccaggacucguucuggcuca

SEQ ID NO: 51443 - RNA, 22 nt, Human
uuccaggagaggaaaccugauu

SEQ ID NO: 51444 - RNA, 22 nt, Human
uuccaggaugcugcugcuuuuu

SEQ ID NO: 51445 - RNA, 22 nt, Human
uuccaggaugggcuguccuacu

SEQ ID NO: 51446 - RNA, 21 nt, Human
uuccaggauugcuuauuuuua

SEQ ID NO: 51447 - RNA, 22 nt, Human
uuccaggcacaucccaacucca

SEQ ID NO: 51448 - RNA, 23 nt, Human
uuccaggcagagcagggauuaga

SEQ ID NO: 51449 - RNA, 22 nt, Human
uuccaggcgcacgucggccuua

SEQ ID NO: 51450 - RNA, 22 nt, Human
uuccaggcuauccggugaaggg

SEQ ID NO: 51451 - RNA, 22 nt, Human
uuccaggcuccugcaguuucua

SEQ ID NO: 51452 - RNA, 22 nt, Human
uuccagggcagcaagugaaugg

SEQ ID NO: 51453 - RNA, 22 nt, Human
uuccagggcuagguaaugggua

SEQ ID NO: 51454 - RNA, 22 nt, Human
uuccaggggcagcagugauggu

SEQ ID NO: 51455 - RNA, 22 nt, Human
uuccaggguuaauuuauauggu

SEQ ID NO: 51456 - RNA, 22 nt, Human
uuccaguaaugugacuuugagc

SEQ ID NO: 51457 - RNA, 22 nt, Human
uuccaguccagggcuguuucca

SEQ ID NO: 51458 - RNA, 23 nt, Human
uuccagugagacugagaggucuu

SEQ ID NO: 51459 - RNA, 22 nt, Human
uuccagugaugggcaauuuggu

SEQ ID NO: 51460 - RNA, 22 nt, Human
uuccagugugcuuuuauguuag

SEQ ID NO: 51461 - RNA, 22 nt, Human
uuccaguucccaugaggauuaa

SEQ ID NO: 51462 - RNA, 22 nt, Human
uuccaguuggagccugccuuua

SEQ ID NO: 51463 - RNA, 21 nt, Human
uuccaguuuuaauuaaauugu

SEQ ID NO: 51464 - RNA, 22 nt, Human
uuccauaacugaccgaaugcau

SEQ ID NO: 51465 - RNA, 22 nt, Human
uuccauacgacugaggucucgg

SEQ ID NO: 51466 - RNA, 20 nt, Human
uuccauagcacccugugggu

SEQ ID NO: 51467 - RNA, 22 nt, Human
uuccauauuggaaggcacaggc

SEQ ID NO: 51468 - RNA, 22 nt, Human
uuccauccauaucuuguugagg

SEQ ID NO: 51469 - RNA, 22 nt, Human
uuccauccaugucccguuucug

SEQ ID NO: 51470 - RNA, 22 nt, Human
uuccauccuaauaaaagaaguu

SEQ ID NO: 51471 - RNA, 19 nt, Human
uuccaucuaucuucuuacu

SEQ ID NO: 51472 - RNA, 22 nt, Human
uuccaugaaggagacugagaag

SEQ ID NO: 51473 - RNA, 22 nt, Human
uuccaugcaagaaguauggcuc

SEQ ID NO: 51474 - RNA, 22 nt, Human
uuccaugccuagaacaggauuc

SEQ ID NO: 51475 - RNA, 22 nt, Human
uuccaugcuaagacacgcaggg

SEQ ID NO: 51476 - RNA, 22 nt, Human
uuccaugugaguacacugugau

SEQ ID NO: 51477 - RNA, 22 nt, Human
uuccauuuuucuaacucucaga

SEQ ID NO: 51478 - RNA, 22 nt, Human
uucccaaagcuuugucugugaa

SEQ ID NO: 51479 - RNA, 22 nt, Human
uucccaauauucugcuuuuaug

SEQ ID NO: 51480 - RNA, 22 nt, Human
uucccacacuccauauaauuca

SEQ ID NO: 51481 - RNA, 22 nt, Human
uucccacagagauuacauugaa

SEQ ID NO: 51482 - RNA, 22 nt, Human
uucccacagucacugggagaag

SEQ ID NO: 51483 - RNA, 22 nt, Human
uucccagacuccacacugaggc

SEQ ID NO: 51484 - RNA, 19 nt, Human
uucccagagccaugaguga

SEQ ID NO: 51485 - RNA, 22 nt, Human
uucccagaggcaaagucuggau

SEQ ID NO: 51486 - RNA, 22 nt, Human
uucccaggacucugggugucuu

SEQ ID NO: 51487 - RNA, 22 nt, Human
uucccaggcugugcuaccagag

SEQ ID NO: 51488 - RNA, 22 nt, Human
uucccaguauuaccuucaggaa

SEQ ID NO: 51489 - RNA, 22 nt, Human
uucccagucccaagaaaagcca

SEQ ID NO: 51490 - RNA, 22 nt, Human
uucccagugaggaagcaaugca

SEQ ID NO: 51491 - RNA, 22 nt, Human
uucccaguuagucauuuuuaca

SEQ ID NO: 51492 - RNA, 22 nt, Human
uucccauagugaccgaugcuga

SEQ ID NO: 51493 - RNA, 22 nt, Human
uuccccaggggcuccugccuuu

SEQ ID NO: 51494 - RNA, 22 nt, Human
uuccccaggugauucucauggc

SEQ ID NO: 51495 - RNA, 22 nt, Human
uuccccaguaacauacauguga

SEQ ID NO: 51496 - RNA, 22 nt, Human
uuccccucucagaucuggccua

SEQ ID NO: 51497 - RNA, 22 nt, Human
uuccccuugggcuguggaggag

SEQ ID NO: 51498 - RNA, 22 nt, Human
uucccucccccagccuggcagg

SEQ ID NO: 51499 - RNA, 22 nt, Human
uucccugguuaaccauuuucug

SEQ ID NO: 51500 - RNA, 22 nt, Human
uucccuuccucacucuacuugu

SEQ ID NO: 51501 - RNA, 21 nt, Human
uucccuucugguuuugagaga

SEQ ID NO: 51502 - RNA, 22 nt, Human
uucccuugaccccagacccugg

SEQ ID NO: 51503 - RNA, 22 nt, Human
uucccuuuguuaaauuggaaga

SEQ ID NO: 51504 - RNA, 22 nt, Human
uuccggaagguucucuagaauu

SEQ ID NO: 51505 - RNA, 22 nt, Human
uuccggaauggcaggguagcuc

SEQ ID NO: 51506 - RNA, 22 nt, Human
uuccuaaaagaauacacuggau

SEQ ID NO: 51507 - RNA, 22 nt, Human
uuccuaacaaacuucagugaau

SEQ ID NO: 51508 - RNA, 22 nt, Human
uuccuaaccucuagcugcauau

SEQ ID NO: 51509 - RNA, 22 nt, Human
uuccuaaguccugccagcaguc

SEQ ID NO: 51510 - RNA, 22 nt, Human
uuccuacaucaccagggggagu

SEQ ID NO: 51511 - RNA, 22 nt, Human
uuccuauagaaagcuguguaga

SEQ ID NO: 51512 - RNA, 22 nt, Human
uuccuauggccagagucaaaga

SEQ ID NO: 51513 - RNA, 22 nt, Human
uuccuauggcucaguugcauuu

SEQ ID NO: 51514 - RNA, 20 nt, Human
uuccucaggagaggauguua

SEQ ID NO: 51515 - RNA, 22 nt, Human
uuccucaggcuucccuuugucc

SEQ ID NO: 51516 - RNA, 22 nt, Human
uuccucagggaggcuagcagua

SEQ ID NO: 51517 - RNA, 22 nt, Human
ugaagcaggaucguuugcuuca

SEQ ID NO: 51518 - RNA, 22 nt, Human
ugaagcaggugaauggaugucg

SEQ ID NO: 51519 - RNA, 22 nt, Human
ugaagccagggacugacacuuc

SEQ ID NO: 51520 - RNA, 22 nt, Human
ugaagccauaggacagaggaua

SEQ ID NO: 51521 - RNA, 22 nt, Human
ugaagccccuaagucccaggca

SEQ ID NO: 51522 - RNA, 22 nt, Human
ugaagcccugucuuauggaaga

SEQ ID NO: 51523 - RNA, 22 nt, Human
ugaagcccugugucagcuucca

SEQ ID NO: 51524 - RNA, 22 nt, Human
ugaagcuagaauguccauauuu

SEQ ID NO: 51525 - RNA, 22 nt, Human
ugaagcugccugcucacagcca

SEQ ID NO: 51526 - RNA, 22 nt, Human
ugaagcuuguauuuaaauaagu

SEQ ID NO: 51527 - RNA, 22 nt, Human
ugaagcuuuccuguggucagga

SEQ ID NO: 51528 - RNA, 22 nt, Human
ugaaggagaauuaauaggcauu

SEQ ID NO: 51529 - RNA, 22 nt, Human
ugaaggagauuuuuagggaggc

SEQ ID NO: 51530 - RNA, 22 nt, Human
ugaaggagcugauguaaggggu

SEQ ID NO: 51531 - RNA, 22 nt, Human
ugaaggcaacugagaaaaagca

SEQ ID NO: 51532 - RNA, 22 nt, Human
ugaaggcagugaguuuguguuu

SEQ ID NO: 51533 - RNA, 22 nt, Human
ugaaggcauaaaucuugggaac

SEQ ID NO: 51534 - RNA, 22 nt, Human
ugaaggccaaaagacgggcuuc

SEQ ID NO: 51535 - RNA, 17 nt, Human
ugaaggccaugaccacg

SEQ ID NO: 51536 - RNA, 23 nt, Human
ugaaggcccuggagccacgaggc

SEQ ID NO: 51537 - RNA, 22 nt, Human
ugaaggccucugguacaugcca

SEQ ID NO: 51538 - RNA, 22 nt, Human
ugaaggcugguaguuugggcug

SEQ ID NO: 51539 - RNA, 22 nt, Human
ugaaggcuuuuuaaagcauuug

SEQ ID NO: 51540 - RNA, 21 nt, Human
ugaagggguggcagugugcuu

SEQ ID NO: 51541 - RNA, 22 nt, Human
ugaaggguggcauggcaggcag

SEQ ID NO: 51542 - RNA, 22 nt, Human
ugaagguaauggaaucuccuga

SEQ ID NO: 51543 - RNA, 22 nt, Human
ugaaggugaaugucuaugggga

SEQ ID NO: 51544 - RNA, 22 nt, Human
ugaagguggcauaggagagaug

SEQ ID NO: 51545 - RNA, 19 nt, Human
ugaaguccuaaccuccagu

SEQ ID NO: 51546 - RNA, 22 nt, Human
ugaagucuauuaacugauuucu

SEQ ID NO: 51547 - RNA, 22 nt, Human
ugcacagaugggcuuguucaua

SEQ ID NO: 51548 - RNA, 22 nt, Human
ugcacagcuggcucuccuuuuc

SEQ ID NO: 51549 - RNA, 20 nt, Human
ugcacagcugugaauaggau

SEQ ID NO: 51550 - RNA, 18 nt, Human
ugcacagcugugggcugg

SEQ ID NO: 51551 - RNA, 22 nt, Human
ugcacaggaggcuguggagaag

SEQ ID NO: 51552 - RNA, 21 nt, Human
ugcacagggcccaggagagcc

SEQ ID NO: 51553 - RNA, 22 nt, Human
ugcacagugaccccuggugacu

SEQ ID NO: 51554 - RNA, 20 nt, Human
ugcacauggcagccaucuag

SEQ ID NO: 51555 - RNA, 22 nt, Human
ugcacaugugccuguggcacau

SEQ ID NO: 51556 - RNA, 22 nt, Human
ugcacauuaguguuugagaugc

SEQ ID NO: 51557 - RNA, 22 nt, Human
ugcaccauacccauuccccucu

SEQ ID NO: 51558 - RNA, 22 nt, Human
ugcaccauuuugucaggcuacu

SEQ ID NO: 51559 - RNA, 22 nt, Human
ugcaccugagaggucucugagg

SEQ ID NO: 51560 - RNA, 22 nt, Human
ugcaccuuguccauuuuuggcc

SEQ ID NO: 51561 - RNA, 22 nt, Human
ugcacguauggcaguggagccc

SEQ ID NO: 51562 - RNA, 19 nt, Human
ugcacguuggaaucaccug

SEQ ID NO: 51563 - RNA, 22 nt, Human
ugcacuauuucgccaugguugu

SEQ ID NO: 51564 - RNA, 22 nt, Human
ugcacugaauaguagacuguac

SEQ ID NO: 51565 - RNA, 22 nt, Human
ugcacugcuuugcaaagcugag

SEQ ID NO: 51566 - RNA, 22 nt, Human
ugcacuguugcuuuauaugauu

SEQ ID NO: 51567 - RNA, 22 nt, Human
ugcacuucaaaaaugucacuga

SEQ ID NO: 51568 - RNA, 22 nt, Human
ugcacuuggcugugaucucuag

SEQ ID NO: 51569 - RNA, 22 nt, Human
ugcacuuugcaggcauggaaac

SEQ ID NO: 51570 - RNA, 21 nt, Human
ugcagaaaugguuuuucuaag

SEQ ID NO: 51571 - RNA, 22 nt, Human
ugcagaaauucagaaagcauaa

SEQ ID NO: 51572 - RNA, 22 nt, Human
ugcagaacgggucuucuagcac

SEQ ID NO: 51573 - RNA, 22 nt, Human
ugcagaagaaugagcuuggagu

SEQ ID NO: 51574 - RNA, 22 nt, Human
ugcagaagaauguaggcauaag

SEQ ID NO: 51575 - RNA, 22 nt, Human
ugcagaaggaggaggaaaucca

SEQ ID NO: 51576 - RNA, 22 nt, Human
ugcagaagugagucaugaggaa

SEQ ID NO: 51577 - RNA, 22 nt, Human
ugcagaauguggacaguggguu

SEQ ID NO: 51578 - RNA, 22 nt, Human
ugcagacaagucgugggaucuu

SEQ ID NO: 51579 - RNA, 22 nt, Human
ugcagacaagugcaucuaaccc

SEQ ID NO: 51580 - RNA, 22 nt, Human
ugcagaccucccauggcugccu

SEQ ID NO: 51581 - RNA, 22 nt, Human
ugcagagaaaguguagacaggc

SEQ ID NO: 51582 - RNA, 19 nt, Human
ugcagagagaggcaaagaa

SEQ ID NO: 51583 - RNA, 22 nt, Human
ugcagagagcccugccuuccuc

SEQ ID NO: 51584 - RNA, 22 nt, Human
ugcagagaucugggcgucggcu

SEQ ID NO: 51585 - RNA, 22 nt, Human
ugcagagauuuggcucuuaaag

SEQ ID NO: 51586 - RNA, 22 nt, Human
ugcagagcuucauugcauaggc

SEQ ID NO: 51587 - RNA, 22 nt, Human
ugcagaggagcuggaaggcugg

SEQ ID NO: 51588 - RNA, 21 nt, Human
ugcagaggcacaaacaagccc

SEQ ID NO: 51589 - RNA, 22 nt, Human
ugcagaggcgccgugggugggg

SEQ ID NO: 51590 - RNA, 23 nt, Human
ugcagagggacugaagccagcuu

SEQ ID NO: 51591 - RNA, 22 nt, Human
ugcagagggagugacgguucac

SEQ ID NO: 51592 - RNA, 22 nt, Human
ugcagaggugaaagacuagcaa

SEQ ID NO: 51593 - RNA, 22 nt, Human
ugcagagguguugcugagauaa

SEQ ID NO: 51594 - RNA, 22 nt, Human
ugcagagguuugugguguugcu

SEQ ID NO: 51595 - RNA, 22 nt, Human
ugcagauaauacuagaacuuac

SEQ ID NO: 51596 - RNA, 22 nt, Human
ugcagaugagagggaguuuuua

SEQ ID NO: 51597 - RNA, 22 nt, Human
ugcagauggggaucaguggcuc

SEQ ID NO: 51598 - RNA, 22 nt, Human
ugcagcaacaagauagaauggc

SEQ ID NO: 51599 - RNA, 18 nt, Human
ugcagcaagugcuaaaua

SEQ ID NO: 51600 - RNA, 22 nt, Human
ugcagcaauguaguuugggaca

SEQ ID NO: 51601 - RNA, 22 nt, Human
ugcagcaccacaccuggcuaau

SEQ ID NO: 51602 - RNA, 22 nt, Human
ugcagcacuugccaaacuaacu

SEQ ID NO: 51603 - RNA, 22 nt, Human
ugcagcagacugaguaugagaa

SEQ ID NO: 51604 - RNA, 22 nt, Human
ugcagcagccaagguucugugc

SEQ ID NO: 51605 - RNA, 22 nt, Human
ugcagcaguguuccuuggcuug

SEQ ID NO: 51606 - RNA, 22 nt, Human
ugcagcaguuuaaugcaggguu

SEQ ID NO: 51607 - RNA, 22 nt, Human
ugcagcauauagcuuagugaug

SEQ ID NO: 51608 - RNA, 22 nt, Human
ugcagcaugcaggagaggcucu

SEQ ID NO: 51609 - RNA, 18 nt, Human
ugcagcauguucccauaa

SEQ ID NO: 51610 - RNA, 22 nt, Human
ugcagcauuauucacaguagcc

SEQ ID NO: 51611 - RNA, 22 nt, Human
ugcagcauugaaauagcuaggc

SEQ ID NO: 51612 - RNA, 23 nt, Human
ugcagccacucaggagcucagug

SEQ ID NO: 51613 - RNA, 22 nt, Human
ugcagccauuugaaaagcaguu

SEQ ID NO: 51614 - RNA, 22 nt, Human
ugcagccucucugcuucaggaa

SEQ ID NO: 51615 - RNA, 21 nt, Human
ugcagccucugcccagcagug

SEQ ID NO: 51616 - RNA, 22 nt, Human
ugcagccuugaccuccagugcu

SEQ ID NO: 51617 - RNA, 22 nt, Human
ugcagccuugccuccucccagc

SEQ ID NO: 51618 - RNA, 22 nt, Human
ugcagcuagcgugccuagugaa

SEQ ID NO: 51619 - RNA, 23 nt, Human
ugcagcucaaagauggguaaaug

SEQ ID NO: 51620 - RNA, 22 nt, Human
ugcagcucaggauucucagggc

SEQ ID NO: 51621 - RNA, 22 nt, Human
ugcagcucauauuagagagaag

SEQ ID NO: 51622 - RNA, 22 nt, Human
ugcagcucauugcuggggucug

SEQ ID NO: 51623 - RNA, 22 nt, Human
ugcagcucgggcuuaggguggg

SEQ ID NO: 51624 - RNA, 22 nt, Human
ugcagcucugaacagucaugaa

SEQ ID NO: 51625 - RNA, 22 nt, Human
ugcagcucuuacggagggcggg

SEQ ID NO: 51626 - RNA, 22 nt, Human
uugcugaacccugcccucuaau

SEQ ID NO: 51627 - RNA, 22 nt, Human
uugcugaagcugccaaaccagu

SEQ ID NO: 51628 - RNA, 22 nt, Human
uugcugaaguaugaaaaagaca

SEQ ID NO: 51629 - RNA, 22 nt, Human
uugcugaaguauugugaauccu

SEQ ID NO: 51630 - RNA, 22 nt, Human
uugcugaauugaauccuuuggu

SEQ ID NO: 51631 - RNA, 22 nt, Human
uugcugaugcccuuguccaggc

SEQ ID NO: 51632 - RNA, 22 nt, Human
uugcugauucaugauuugagaa

SEQ ID NO: 51633 - RNA, 22 nt, Human
uugcugauucuguauuuaaggu

SEQ ID NO: 51634 - RNA, 22 nt, Human
uugcuggaagguggcuggaauc

SEQ ID NO: 51635 - RNA, 19 nt, Human
uugcuggagaaaaaggaga

SEQ ID NO: 51636 - RNA, 19 nt, Human
uugcuggcauuugaucucu

SEQ ID NO: 51637 - RNA, 22 nt, Human
uugcuguaaguaucuuucuacc

SEQ ID NO: 51638 - RNA, 22 nt, Human
uugcuguaggcugauugcugaa

SEQ ID NO: 51639 - RNA, 22 nt, Human
uugcuguagggggaaaauacuu

SEQ ID NO: 51640 - RNA, 22 nt, Human
uugcugugaaaccaugggaagu

SEQ ID NO: 51641 - RNA, 22 nt, Human
uugcuguguaacuccuggccug

SEQ ID NO: 51642 - RNA, 22 nt, Human
uugcuguuuuacuuacaagcuc

SEQ ID NO: 51643 - RNA, 22 nt, Human
uugcuuagagccaaucuugauu

SEQ ID NO: 51644 - RNA, 22 nt, Human
uugcuucagagggagacacuuu

SEQ ID NO: 51645 - RNA, 22 nt, Human
uugcuucauuuugggacucuag

SEQ ID NO: 51646 - RNA, 22 nt, Human
uugcuuccaguccaagucuguu

SEQ ID NO: 51647 - RNA, 22 nt, Human
uugcuuccuggcagggcgagcg

SEQ ID NO: 51648 - RNA, 22 nt, Human
uugcuuccuuuacagaugggca

SEQ ID NO: 51649 - RNA, 18 nt, Human
uugcuucuuuucucuagg

SEQ ID NO: 51650 - RNA, 22 nt, Human
uugcuugaacccaggaagugga

SEQ ID NO: 51651 - RNA, 22 nt, Human
uugcuugcccugcagcauacuu

SEQ ID NO: 51652 - RNA, 22 nt, Human
uugcuugucuucccuuuaccuc

SEQ ID NO: 51653 - RNA, 22 nt, Human
uugcuuuaccauuugaucucua

SEQ ID NO: 51654 - RNA, 22 nt, Human
uugcuuuaccugugguauauuu

SEQ ID NO: 51655 - RNA, 22 nt, Human
uugcuuuaucucuuaugccuca

SEQ ID NO: 51656 - RNA, 22 nt, Human
uugcuuuauguguaugacuuga

SEQ ID NO: 51657 - RNA, 22 nt, Human
uugcuuuauuccuagcccuugu

SEQ ID NO: 51658 - RNA, 22 nt, Human
uugcuuuguuacugcaguuucc

SEQ ID NO: 51659 - RNA, 22 nt, Human
uugcuuuuaaucuuuguacauc

SEQ ID NO: 51660 - RNA, 22 nt, Human
uugcuuuugggaaaacaugccu

SEQ ID NO: 51661 - RNA, 22 nt, Human
uugcuuuugucucggguuugga

SEQ ID NO: 51662 - RNA, 22 nt, Human
uuggaaaaacacgauagugguu

SEQ ID NO: 51663 - RNA, 22 nt, Human
uuggaaaagcguucucuguagc

SEQ ID NO: 51664 - RNA, 22 nt, Human
uuggaaaaugaggcacagagag

SEQ ID NO: 51665 - RNA, 22 nt, Human
uuggaaacuuucaagcauaaug

SEQ ID NO: 51666 - RNA, 22 nt, Human
uuggaaauacagcaguuacuuu

SEQ ID NO: 51667 - RNA, 22 nt, Human
uuggaaauacgaguaguaucau

SEQ ID NO: 51668 - RNA, 23 nt, Human
uuggaaauggggagaacagauuc

SEQ ID NO: 51669 - RNA, 22 nt, Human
uuggaacacaauguuucuuuca

SEQ ID NO: 51670 - RNA, 22 nt, Human
uuggaacucguguuacuuguau

SEQ ID NO: 51671 - RNA, 22 nt, Human
uuggaacugauggccuucaucc

SEQ ID NO: 51672 - RNA, 22 nt, Human
uuggaagacauuaaagagagug

SEQ ID NO: 51673 - RNA, 21 nt, Human
uuggaagauaaugcuuaugau

SEQ ID NO: 51674 - RNA, 23 nt, Human
uuggaagccagacagcugugcag

SEQ ID NO: 51675 - RNA, 22 nt, Human
uuggaagccuaguuaagaugaa

SEQ ID NO: 51676 - RNA, 22 nt, Human
uuggaaggaagaaccgcgguag

SEQ ID NO: 51677 - RNA, 22 nt, Human
uuggaaggagccuaaaagagac

SEQ ID NO: 51678 - RNA, 22 nt, Human
uuggaaggagucuuuggggaug

SEQ ID NO: 51679 - RNA, 22 nt, Human
uuggaaggcugaauggccucuc

SEQ ID NO: 51680 - RNA, 22 nt, Human
uuggaagggaaccgaguuugcu

SEQ ID NO: 51681 - RNA, 23 nt, Human
uuggaagggaagagcauuugaga

SEQ ID NO: 51682 - RNA, 22 nt, Human
uuggaaggggcagaguggcugc

SEQ ID NO: 51683 - RNA, 22 nt, Human
uuggaaggugagucccuggguu

SEQ ID NO: 51684 - RNA, 22 nt, Human
uuggaauaaaaacaacucacag

SEQ ID NO: 51685 - RNA, 22 nt, Human
uuggaauagauuuguuagaaaa

SEQ ID NO: 51686 - RNA, 22 nt, Human
uuggaauagggaggcuggcaua

SEQ ID NO: 51687 - RNA, 22 nt, Human
uuggaaucauucuuaaaggucu

SEQ ID NO: 51688 - RNA, 22 nt, Human
uuggaauguuuuaauauaaauu

SEQ ID NO: 51689 - RNA, 22 nt, Human
uuggaauuaaaaggagaacuuc

SEQ ID NO: 51690 - RNA, 22 nt, Human
uuggaauucagcuugcuuauaa

SEQ ID NO: 51691 - RNA, 22 nt, Human
uuggaauugcucauaagagaga

SEQ ID NO: 51692 - RNA, 22 nt, Human
uuggaauuuagggaauauucau

SEQ ID NO: 51693 - RNA, 22 nt, Human
uuggaauuucauguaagugacu

SEQ ID NO: 51694 - RNA, 22 nt, Human
uuggaauuugcuucagcuaaua

SEQ ID NO: 51695 - RNA, 22 nt, Human
uuggaccaaggucugcucuuuc

SEQ ID NO: 51696 - RNA, 21 nt, Human
uuggaccauacaaguuaugca

SEQ ID NO: 51697 - RNA, 22 nt, Human
uuggaccaucagcuccuccugg

SEQ ID NO: 51698 - RNA, 18 nt, Human
uuggaccugugucagggc

SEQ ID NO: 51699 - RNA, 22 nt, Human
ugcucugucaagaaaagaugcc

SEQ ID NO: 51700 - RNA, 22 nt, Human
ugcugaaaacucaaccauugug

SEQ ID NO: 51701 - RNA, 23 nt, Human
ugcugaaguguuggcccugccca

SEQ ID NO: 51702 - RNA, 22 nt, Human
ugcugaaucaaaacaaagguuu

SEQ ID NO: 51703 - RNA, 22 nt, Human
ugcugaaucccacccuccagug

SEQ ID NO: 51704 - RNA, 22 nt, Human
ugcugaaugggauauguugagc

SEQ ID NO: 51705 - RNA, 22 nt, Human
ugcugaaugggugauuuuggag

SEQ ID NO: 51706 - RNA, 22 nt, Human
ugcugaauuuacauuuuuguag

SEQ ID NO: 51707 - RNA, 22 nt, Human
ugcugacuccuggcugugacac

SEQ ID NO: 51708 - RNA, 19 nt, Human
ugcugacugagcugcaaaa

SEQ ID NO: 51709 - RNA, 22 nt, Human
ugcugagacaguggauaggggc

SEQ ID NO: 51710 - RNA, 22 nt, Human
ugcugagagauuuaaagggcca

SEQ ID NO: 51711 - RNA, 22 nt, Human
ugcugagaugaauagagaccuc

SEQ ID NO: 51712 - RNA, 22 nt, Human
ugcugagcccagaacggccugg

SEQ ID NO: 51713 - RNA, 22 nt, Human
ugcugaggcauuuggacagagu

SEQ ID NO: 51714 - RNA, 22 nt, Human
ugcugaggcuagaccuggaagu

SEQ ID NO: 51715 - RNA, 22 nt, Human
ugcugagggagcaucaaagaaa

SEQ ID NO: 51716 - RNA, 22 nt, Human
ugcugaggucacggcggccaga

SEQ ID NO: 51717 - RNA, 22 nt, Human
ugcugagguuucugacuaugga

SEQ ID NO: 51718 - RNA, 21 nt, Human
ugcugaugucagagaagcaag

SEQ ID NO: 51719 - RNA, 22 nt, Human
ugcugcacucaccaacagauaa

SEQ ID NO: 51720 - RNA, 20 nt, Human
ugcugcagacagggccauug

SEQ ID NO: 51721 - RNA, 22 nt, Human
ugcugcagaucagcugaguccu

SEQ ID NO: 51722 - RNA, 22 nt, Human
ugcugcagauugcagauuaacu

SEQ ID NO: 51723 - RNA, 22 nt, Human
ugcugcagcggcauggucuuug

SEQ ID NO: 51724 - RNA, 22 nt, Human
ugcugcaggaauucucaaggga

SEQ ID NO: 51725 - RNA, 22 nt, Human
ugcugcaggccaggucguuguc

SEQ ID NO: 51726 - RNA, 22 nt, Human
ugcugcaggccuuggcugggaa

SEQ ID NO: 51727 - RNA, 22 nt, Human
ugcugcagugggauuagccuga

SEQ ID NO: 51728 - RNA, 22 nt, Human
ugcugcaguuauugaaacuaug

SEQ ID NO: 51729 - RNA, 22 nt, Human
ugcugcaguucacccugccguc

SEQ ID NO: 51730 - RNA, 20 nt, Human
ugcugcaguuucaugggacu

SEQ ID NO: 51731 - RNA, 22 nt, Human
ugcugcauuuaucuucucaaac

SEQ ID NO: 51732 - RNA, 22 nt, Human
ugcugccacauuuaaagagggg

SEQ ID NO: 51733 - RNA, 22 nt, Human
ugcugccagagagacagggacu

SEQ ID NO: 51734 - RNA, 22 nt, Human
ugcugccaggucuugcugucca

SEQ ID NO: 51735 - RNA, 22 nt, Human
ugagcccagucugucugacaug

SEQ ID NO: 51736 - RNA, 22 nt, Human
ugagcccaugcucuuucuacga

SEQ ID NO: 51737 - RNA, 22 nt, Human
ugagcccauguagcacuuccau

SEQ ID NO: 51738 - RNA, 22 nt, Human
ugagcccuaccugcucaucucc

SEQ ID NO: 51739 - RNA, 22 nt, Human
ugagcccucuucccauuuuauu

SEQ ID NO: 51740 - RNA, 21 nt, Human
ugagcccuugccucagagccc

SEQ ID NO: 51741 - RNA, 22 nt, Human
ugagccguggucucugagggug

SEQ ID NO: 51742 - RNA, 22 nt, Human
ugagccugaguucaaggcugca

SEQ ID NO: 51743 - RNA, 22 nt, Human
ugagcuaaguacucucaucaag

SEQ ID NO: 51744 - RNA, 22 nt, Human
ugagcuccuggucacaauuauc

SEQ ID NO: 51745 - RNA, 22 nt, Human
ugagcugacacccaaucauacu

SEQ ID NO: 51746 - RNA, 22 nt, Human
ugagcugaguggcaggucucag

SEQ ID NO: 51747 - RNA, 22 nt, Human
ugagcugcccccuggccugcuc

SEQ ID NO: 51748 - RNA, 19 nt, Human
ugagcugccgucuucccug

SEQ ID NO: 51749 - RNA, 22 nt, Human
ugagcuggcacuuuuccuggga

SEQ ID NO: 51750 - RNA, 22 nt, Human
ugagcugggaagagcagccaga

SEQ ID NO: 51751 - RNA, 23 nt, Human
ugagcugggccugcaggggucuc

SEQ ID NO: 51752 - RNA, 22 nt, Human
ugagcuggucacuccuucugaa

SEQ ID NO: 51753 - RNA, 22 nt, Human
ugagcugugaggguacagauau

SEQ ID NO: 51754 - RNA, 22 nt, Human
ugagcuguggugggguagagga

SEQ ID NO: 51755 - RNA, 22 nt, Human
ugagcuuauacaugugaaguca

SEQ ID NO: 51756 - RNA, 22 nt, Human
ugagcuuuguggguaaagagag

SEQ ID NO: 51757 - RNA, 22 nt, Human
ugaggaaaaugucuuauagauu

SEQ ID NO: 51758 - RNA, 22 nt, Human
ugaggaacugccagacuguuuu

SEQ ID NO: 51759 - RNA, 22 nt, Human
ugaggaagggugugacggcacc

SEQ ID NO: 51760 - RNA, 22 nt, Human
ugaggagcuucuggaaagugca

SEQ ID NO: 51761 - RNA, 22 nt, Human
ugaggagucgagaagggguaau

SEQ ID NO: 51762 - RNA, 22 nt, Human
ugaggaguuuuucuagagcuaa

SEQ ID NO: 51763 - RNA, 22 nt, Human
ugaggaugagaugagauaacac

SEQ ID NO: 51764 - RNA, 22 nt, Human
ugaggauggaaugcugugcaag

SEQ ID NO: 51765 - RNA, 22 nt, Human
ugaggauggggagauggugucu

SEQ ID NO: 51766 - RNA, 22 nt, Human
ugaggaugguguuggagagggc

SEQ ID NO: 51767 - RNA, 22 nt, Human
ugaggaugguuaaagaacauug

SEQ ID NO: 51768 - RNA, 22 nt, Human
ugaggcaaaaacacugauuagg

SEQ ID NO: 51769 - RNA, 22 nt, Human
ugaggcaacagaaagggccaau

SEQ ID NO: 51770 - RNA, 22 nt, Human
ugaggcaagggauggccccgug

SEQ ID NO: 51771 - RNA, 22 nt, Human
ugaggcaaguacuuucccuuuu

SEQ ID NO: 51772 - RNA, 22 nt, Human
ugaggcaagucucaaucuuuga

SEQ ID NO: 51773 - RNA, 22 nt, Human
ugaggcaauguccuucauccuu

SEQ ID NO: 51774 - RNA, 22 nt, Human
ugaggcacaggcagugcccccg

SEQ ID NO: 51775 - RNA, 19 nt, Human
ugaggcacaugauaagaac

SEQ ID NO: 51776 - RNA, 22 nt, Human
ugaggcaggacugagcgggaug

SEQ ID NO: 51777 - RNA, 22 nt, Human
ugaggcaggagaaucacaugaa

SEQ ID NO: 51778 - RNA, 22 nt, Human
ugaggcagggagaguggauaug

SEQ ID NO: 51779 - RNA, 22 nt, Human
ugaggcaguauucuccauucca

SEQ ID NO: 51780 - RNA, 22 nt, Human
ugaggcaguauuuuagugacuu

SEQ ID NO: 51781 - RNA, 22 nt, Human
ugaggcagucacccccuccugc

SEQ ID NO: 51782 - RNA, 22 nt, Human
ugaggcagugcugggaagccug

SEQ ID NO: 51783 - RNA, 22 nt, Human
ugaggccacaguaucagaacag

SEQ ID NO: 51784 - RNA, 22 nt, Human
ugaggccacuuccccacagccc

SEQ ID NO: 51785 - RNA, 22 nt, Human
ugaggccagaguuuuuaauucc

SEQ ID NO: 51786 - RNA, 16 nt, Human
ugaggccagccauuuc

SEQ ID NO: 51787 - RNA, 22 nt, Human
ugaggccaggcaaaggcgaucu

SEQ ID NO: 51788 - RNA, 22 nt, Human
ugaggccagucucaucacaggc

SEQ ID NO: 51789 - RNA, 22 nt, Human
ugaggccauggucuucccaguc

SEQ ID NO: 51790 - RNA, 22 nt, Human
ugaggcccaucugagauuuuga

SEQ ID NO: 51791 - RNA, 18 nt, Human
ugaggcccgcagaggugg

SEQ ID NO: 51792 - RNA, 22 nt, Human
ugaggcccucugggcugguccu

SEQ ID NO: 51793 - RNA, 22 nt, Human
ugaggccucugugccauccagg

SEQ ID NO: 51794 - RNA, 22 nt, Human
ugaggccugacagaccaagccu

SEQ ID NO: 51795 - RNA, 21 nt, Human
ugaggccugccagucucagaa

SEQ ID NO: 51796 - RNA, 22 nt, Human
ugaggccugcccuggggaaguu

SEQ ID NO: 51797 - RNA, 22 nt, Human
ugaggccugcuuggaauugaau

SEQ ID NO: 51798 - RNA, 22 nt, Human
ugaggccugucauugucuuguu

SEQ ID NO: 51799 - RNA, 22 nt, Human
ugaggcucaagaaucugcauuu

SEQ ID NO: 51800 - RNA, 22 nt, Human
ugaggcucacgaacagaagacu

SEQ ID NO: 51801 - RNA, 22 nt, Human
ugaggcucagagaagugcuguu

SEQ ID NO: 51802 - RNA, 18 nt, Human
ugaggcucagagacggug

SEQ ID NO: 51803 - RNA, 20 nt, Human
ugaggcucagagagguugag

SEQ ID NO: 51804 - RNA, 18 nt, Human
ugaggcucagcuccuggu

SEQ ID NO: 51805 - RNA, 22 nt, Human
ugaggcucauucugcaugccaa

SEQ ID NO: 51806 - RNA, 22 nt, Human
ugaggcuccagccaggccagca

SEQ ID NO: 51807 - RNA, 22 nt, Human
ugaggcucuccaagcagaugag

SEQ ID NO: 51808 - RNA, 21 nt, Human
ugaggcucuguugugccugca

SEQ ID NO: 51809 - RNA, 22 nt, Human
ugaggcugaaacuggcgauaga

SEQ ID NO: 51810 - RNA, 22 nt, Human
ugaggcugagauaucagggagg

SEQ ID NO: 51811 - RNA, 22 nt, Human
ugaggcugccuugggaagaggg

SEQ ID NO: 51812 - RNA, 22 nt, Human
ugaggcuuagagaagaugggau

SEQ ID NO: 51813 - RNA, 22 nt, Human
ugaggcuuggcaaaagaguggu

SEQ ID NO: 51814 - RNA, 22 nt, Human
ugagggaauauugauagauccg

SEQ ID NO: 51815 - RNA, 22 nt, Human
ugagggagagggcgaaaaugaa

SEQ ID NO: 51816 - RNA, 22 nt, Human
ugcugugauaauucaaugagcu

SEQ ID NO: 51817 - RNA, 22 nt, Human
ugcugugauggagaauucugga

SEQ ID NO: 51818 - RNA, 18 nt, Human
ugcugugcacagcccuau

SEQ ID NO: 51819 - RNA, 22 nt, Human
ugcugugcuccauugucuucac

SEQ ID NO: 51820 - RNA, 22 nt, Human
ugcugugcucuuuaaggugcug

SEQ ID NO: 51821 - RNA, 22 nt, Human
ugcugugggauauauguucaaa

SEQ ID NO: 51822 - RNA, 22 nt, Human
ugcuguguuccucaguuucaug

SEQ ID NO: 51823 - RNA, 22 nt, Human
ugcuguugacggacuggcugcu

SEQ ID NO: 51824 - RNA, 22 nt, Human
ugcuuaaaaaguaacugcugau

SEQ ID NO: 51825 - RNA, 22 nt, Human
ugcuuaaacacauacauacaua

SEQ ID NO: 51826 - RNA, 22 nt, Human
ugcuuaaacauccagacaguau

SEQ ID NO: 51827 - RNA, 22 nt, Human
ugcuuaaaguaguggauuguua

SEQ ID NO: 51828 - RNA, 22 nt, Human
ugcuuaaauagcuggaggcuac

SEQ ID NO: 51829 - RNA, 22 nt, Human
ugcuuaauacguauuugcugga

SEQ ID NO: 51830 - RNA, 22 nt, Human
ugcuuaauaggaguugaacauu

SEQ ID NO: 51831 - RNA, 22 nt, Human
ugcuuaauguacgugaguguac

SEQ ID NO: 51832 - RNA, 17 nt, Human
ugcuuaauuuugacugg

SEQ ID NO: 51833 - RNA, 22 nt, Human
ugcuuacaacuuuauugaggaa

SEQ ID NO: 51834 - RNA, 22 nt, Human
ugcuuaggaugcuagcaggcau

SEQ ID NO: 51835 - RNA, 22 nt, Human
ugcuuagggcuccuccaauaga

SEQ ID NO: 51836 - RNA, 22 nt, Human
ugcuuauaauguuacugacaac

SEQ ID NO: 51837 - RNA, 22 nt, Human
ugcuuaucguuuaguacauugc

SEQ ID NO: 51838 - RNA, 23 nt, Human
ugcuuauucaaaaggugcuuuca

SEQ ID NO: 51839 - RNA, 22 nt, Human
ugcuucaaaaggcagcuuaaug

SEQ ID NO: 51840 - RNA, 22 nt, Human
ugcuucaaggacacugacuuuu

SEQ ID NO: 51841 - RNA, 22 nt, Human
ugcuucaaguugaaauauucuu

SEQ ID NO: 51842 - RNA, 22 nt, Human
ugcuucacaagaauucaggacc

SEQ ID NO: 51843 - RNA, 22 nt, Human
ugcuucaggagaugucaccaug

SEQ ID NO: 51844 - RNA, 22 nt, Human
ugcuuggagaaucagucccagc

SEQ ID NO: 51845 - RNA, 18 nt, Human
ugcuuggagcauuuacca

SEQ ID NO: 51846 - RNA, 22 nt, Human
ugcuugucacauacaggagcau

SEQ ID NO: 51847 - RNA, 22 nt, Human
ugcuugucacccugccugagug

SEQ ID NO: 51848 - RNA, 20 nt, Human
ugcuugucaugcacucaggc

SEQ ID NO: 51849 - RNA, 22 nt, Human
ugcuugucccucuuuaugaugg

SEQ ID NO: 51850 - RNA, 21 nt, Human
ugcuugucugccuagaggcuu

SEQ ID NO: 51851 - RNA, 22 nt, Human
ugcuugucuucaggaaugcuga

SEQ ID NO: 51852 - RNA, 22 nt, Human
ugcuugugagaguuuuuucaga

SEQ ID NO: 51853 - RNA, 22 nt, Human
ugcuugugugagggccugggag

SEQ ID NO: 51854 - RNA, 22 nt, Human
ugcuuuaaaguauuucucgcaa

SEQ ID NO: 51855 - RNA, 22 nt, Human
ugcauuuccagauuucuggagu

SEQ ID NO: 51856 - RNA, 22 nt, Human
ugcauuugcuggggaugugauu

SEQ ID NO: 51857 - RNA, 22 nt, Human
ugcauuuggggcagacuagcag

SEQ ID NO: 51858 - RNA, 22 nt, Human
ugcauuugucuugucucaugaa

SEQ ID NO: 51859 - RNA, 22 nt, Human
ugcauuuguuaccuuauugcag

SEQ ID NO: 51860 - RNA, 22 nt, Human
ugccaaaaugggcuuuauaccg

SEQ ID NO: 51861 - RNA, 22 nt, Human
ugccaaauaugcacguguaugc

SEQ ID NO: 51862 - RNA, 19 nt, Human
ugccaaauccaugcccagg

SEQ ID NO: 51863 - RNA, 22 nt, Human
ugccaaaugccaccacagcugc

SEQ ID NO: 51864 - RNA, 22 nt, Human
ugccaaauuuguaucuuaagga

SEQ ID NO: 51865 - RNA, 22 nt, Human
ugccaaauuuucucagagaugc

SEQ ID NO: 51866 - RNA, 22 nt, Human
ugccaagaccacaauugcuuuu

SEQ ID NO: 51867 - RNA, 22 nt, Human
ugccaaggguaugggcaagaua

SEQ ID NO: 51868 - RNA, 22 nt, Human
ugccaaucuuugugauaauugc

SEQ ID NO: 51869 - RNA, 22 nt, Human
ugccaauuugccccuuugcuga

SEQ ID NO: 51870 - RNA, 22 nt, Human
ugccacacagucugguagaaua

SEQ ID NO: 51871 - RNA, 22 nt, Human
ugccacagacaggacagaacag

SEQ ID NO: 51872 - RNA, 22 nt, Human
ugccacaguuguuugugcucua

SEQ ID NO: 51873 - RNA, 22 nt, Human
ugccagaagauucucuaucaga

SEQ ID NO: 51874 - RNA, 22 nt, Human
ugccagacuuucuuaccagugu

SEQ ID NO: 51875 - RNA, 22 nt, Human
ugccagagaaucaccucuccuu

SEQ ID NO: 51876 - RNA, 22 nt, Human
ugccagagaggagaaagcauuu

SEQ ID NO: 51877 - RNA, 18 nt, Human
ugccagccgacuggccug

SEQ ID NO: 51878 - RNA, 22 nt, Human
ugccagcuacucuguaggcuga

SEQ ID NO: 51879 - RNA, 22 nt, Human
ugccagcuccugcagcuccugu

SEQ ID NO: 51880 - RNA, 22 nt, Human
ugccagcuguucccacccaaaa

SEQ ID NO: 51881 - RNA, 22 nt, Human
ugccagcuuguggucagaggcu

SEQ ID NO: 51882 - RNA, 22 nt, Human
ugccaggaagugugugggccug

SEQ ID NO: 51883 - RNA, 22 nt, Human
ugccaggagucaggccaggcag

SEQ ID NO: 51884 - RNA, 22 nt, Human
ugccaggcaacugcccagccau

SEQ ID NO: 51885 - RNA, 22 nt, Human
ugccaggcaggacccuagaacc

SEQ ID NO: 51886 - RNA, 22 nt, Human
ugccaggcagugucagauugag

SEQ ID NO: 51887 - RNA, 22 nt, Human
ugccaggccaauucuauuugac

SEQ ID NO: 51888 - RNA, 22 nt, Human
ugccaggcccagcagggcggcc

SEQ ID NO: 51889 - RNA, 22 nt, Human
ugccaggccucaggagucucca

SEQ ID NO: 51890 - RNA, 22 nt, Human
ugccaggcuaaguggaggacuu

SEQ ID NO: 51891 - RNA, 22 nt, Human
ugccaggcucaggaugucccug

SEQ ID NO: 51892 - RNA, 22 nt, Human
ugccagggacccugucggcccu

SEQ ID NO: 51893 - RNA, 22 nt, Human
ugccagggagcccugcugacca

SEQ ID NO: 51894 - RNA, 21 nt, Human
ugccagggauuuacagagccu

SEQ ID NO: 51895 - RNA, 22 nt, Human
ugccagggccauagggagucua

SEQ ID NO: 51896 - RNA, 22 nt, Human
ugccagugaaacguggucucau

SEQ ID NO: 51897 - RNA, 22 nt, Human
ugccagugucugcuaucugaga

SEQ ID NO: 51898 - RNA, 22 nt, Human
ugccauauugaugugcuguacc

SEQ ID NO: 51899 - RNA, 22 nt, Human
ugccaucucuuccucgugcugc

SEQ ID NO: 51900 - RNA, 22 nt, Human
ugccauggccuagaccugugau

SEQ ID NO: 51901 - RNA, 22 nt, Human
ugccauugggcagucauugaag

SEQ ID NO: 51902 - RNA, 19 nt, Human
ugccauuugacugaaugua

SEQ ID NO: 51903 - RNA, 22 nt, Human
ugccauuugcugguuuucugau

SEQ ID NO: 51904 - RNA, 22 nt, Human
ugcccaagauucuuacaucaug

SEQ ID NO: 51905 - RNA, 22 nt, Human
ugcccaaggauccauuggcugg

SEQ ID NO: 51906 - RNA, 20 nt, Human
ugcccacaucacucaggagu

SEQ ID NO: 51907 - RNA, 22 nt, Human
ugcccacugugucaaagaaaua

SEQ ID NO: 51908 - RNA, 18 nt, Human
ugcccagaaaagcaggga

SEQ ID NO: 51909 - RNA, 22 nt, Human
ugcccagcacugugccagucac

SEQ ID NO: 51910 - RNA, 22 nt, Human
ugcccagccaguuuaugguaau

SEQ ID NO: 51911 - RNA, 22 nt, Human
ugcccaggauugugaggucagg

SEQ ID NO: 51912 - RNA, 22 nt, Human
ugcccaggcuggaaugcagugg

SEQ ID NO: 51913 - RNA, 22 nt, Human
ugcccaggcuggagugcagagg

SEQ ID NO: 51914 - RNA, 21 nt, Human
ugcccaggggccaaccgcugc

SEQ ID NO: 51915 - RNA, 22 nt, Human
ugcccauggcaggauuucugaa

SEQ ID NO: 51916 - RNA, 22 nt, Human
ugcccauguuucucuguauccc

SEQ ID NO: 51917 - RNA, 22 nt, Human
ugcccauuauucagccauuaaa

SEQ ID NO: 51918 - RNA, 23 nt, Human
ugcccauugcaucuugguacugg

SEQ ID NO: 51919 - RNA, 20 nt, Human
ugccccaggccugcaccugc

SEQ ID NO: 51920 - RNA, 19 nt, Human
ugccccugcagucuaccca

SEQ ID NO: 51921 - RNA, 22 nt, Human
ugccccuucuacccgucucugu

SEQ ID NO: 51922 - RNA, 22 nt, Human
ugcccucauuauaagaggcuca

SEQ ID NO: 51923 - RNA, 22 nt, Human
ugcccuccacaguggcuccacc

SEQ ID NO: 51924 - RNA, 23 nt, Human
ugcccucccaaugcuucggucac

SEQ ID NO: 51925 - RNA, 22 nt, Human
ugcccucccacauuauggcugu

SEQ ID NO: 51926 - RNA, 22 nt, Human
ugcccucccuguacugucagga

SEQ ID NO: 51927 - RNA, 22 nt, Human
ugcccucuuaggucugcgcagc

SEQ ID NO: 51928 - RNA, 22 nt, Human
ugcccugaagcacccucacccu

SEQ ID NO: 51929 - RNA, 22 nt, Human
ugcccugcaugcagggagcugu

SEQ ID NO: 51930 - RNA, 22 nt, Human
ugcccugccaagacugaguggu

SEQ ID NO: 51931 - RNA, 22 nt, Human
ugcccugcccuugcuauuucua

SEQ ID NO: 51932 - RNA, 22 nt, Human
ugcccugcuaaccuugguucca

SEQ ID NO: 51933 - RNA, 22 nt, Human
ugcccuggaaccaucuacaguc

SEQ ID NO: 51934 - RNA, 22 nt, Human
ugcccuggcacacacacagcug

SEQ ID NO: 51935 - RNA, 22 nt, Human
ugcccuggcuccucccacgcug

SEQ ID NO: 51936 - RNA, 22 nt, Human
ugcccugggaggcuuuccuguu

SEQ ID NO: 51937 - RNA, 22 nt, Human
ugcccugggcuuugcuaugacu

SEQ ID NO: 51938 - RNA, 22 nt, Human
ugcccuggggucuggagcagca

SEQ ID NO: 51939 - RNA, 22 nt, Human
ugcccugucuaagcugucagua

SEQ ID NO: 51940 - RNA, 22 nt, Human
ugcccugugccagacuuccugg

SEQ ID NO: 51941 - RNA, 22 nt, Human
ugcccugugcuggaaucuuccc

SEQ ID NO: 51942 - RNA, 22 nt, Human
ugcccuuauaaaggaggccuga

SEQ ID NO: 51943 - RNA, 22 nt, Human
ugcccuugaggacagcucccag

SEQ ID NO: 51944 - RNA, 22 nt, Human
ugcccuuggguaacuugcugau

SEQ ID NO: 51945 - RNA, 22 nt, Human
ugccgccugguuucuccgcccc

SEQ ID NO: 51946 - RNA, 22 nt, Human
ugccgugcccauauugugggug

SEQ ID NO: 51947 - RNA, 23 nt, Human
ugccguguuagaaauguuuuaca

SEQ ID NO: 51948 - RNA, 22 nt, Human
ugccuacccaugguuagacaua

SEQ ID NO: 51949 - RNA, 22 nt, Human
ugccuaggcuggaaugcagugg

SEQ ID NO: 51950 - RNA, 22 nt, Human
ugccuauucaauauaugcauuu

SEQ ID NO: 51951 - RNA, 22 nt, Human
ugccucaggcaccuggcagguu

SEQ ID NO: 51952 - RNA, 22 nt, Human
ugccucagucagcuucccuggg

SEQ ID NO: 51953 - RNA, 22 nt, Human
uuugagugcccauguuucccag

SEQ ID NO: 51954 - RNA, 22 nt, Human
uuugaguugcuuauuuaauagg

SEQ ID NO: 51955 - RNA, 22 nt, Human
uuugauaagagcugcugaaacu

SEQ ID NO: 51956 - RNA, 22 nt, Human
uuugauaauuaaaaauuguagu

SEQ ID NO: 51957 - RNA, 22 nt, Human
uuugauacugagaaaaacaaau

SEQ ID NO: 51958 - RNA, 17 nt, Human
uuugauagaaucagagu

SEQ ID NO: 51959 - RNA, 19 nt, Human
uuugauagggcauaauaua

SEQ ID NO: 51960 - RNA, 22 nt, Human
uuugauaugcaaaauuauggac

SEQ ID NO: 51961 - RNA, 22 nt, Human
uuugaugaaagcuacuauuuac

SEQ ID NO: 51962 - RNA, 19 nt, Human
uuugaugagaauuuaagca

SEQ ID NO: 51963 - RNA, 22 nt, Human
uuugauucuguaaaauaacagg

SEQ ID NO: 51964 - RNA, 22 nt, Human
uuugauugucaccuaccuugca

SEQ ID NO: 51965 - RNA, 22 nt, Human
uuugauuuucagcaauaguggc

SEQ ID NO: 51966 - RNA, 22 nt, Human
uuugcaaaaugucuuguguuag

SEQ ID NO: 51967 - RNA, 22 nt, Human
uuugcaaacauucagggcucca

SEQ ID NO: 51968 - RNA, 22 nt, Human
uuugcaaacuuuccucuggacc

SEQ ID NO: 51969 - RNA, 22 nt, Human
uuugcaaagaaauuauugcugu

SEQ ID NO: 51970 - RNA, 22 nt, Human
uuugcaaaguccauugaaguua

SEQ ID NO: 51971 - RNA, 22 nt, Human
uuugcaaagugcuugcagagua

SEQ ID NO: 51972 - RNA, 22 nt, Human
uggcucugaucagauguccagu

SEQ ID NO: 51973 - RNA, 22 nt, Human
uggcucuggagcuccugggccc

SEQ ID NO: 51974 - RNA, 22 nt, Human
uggcucuggagcuggcggcuga

SEQ ID NO: 51975 - RNA, 22 nt, Human
uggcucuggcgugaagcccaga

SEQ ID NO: 51976 - RNA, 22 nt, Human
uggcucugggaaucuguugcuu

SEQ ID NO: 51977 - RNA, 21 nt, Human
uggcucuggguaggagagugc

SEQ ID NO: 51978 - RNA, 22 nt, Human
uggcucugguaacauuggguag

SEQ ID NO: 51979 - RNA, 22 nt, Human
uggcucuggugcgggcuccugc

SEQ ID NO: 51980 - RNA, 22 nt, Human
uggcucugucaaacugcacaca

SEQ ID NO: 51981 - RNA, 22 nt, Human
uggcucugugcuucuaguaucu

SEQ ID NO: 51982 - RNA, 23 nt, Human
uggcucuguggaucccucaggag

SEQ ID NO: 51983 - RNA, 21 nt, Human
uggcucuguucaauauaugga

SEQ ID NO: 51984 - RNA, 22 nt, Human
uggcucuguugagguauggauu

SEQ ID NO: 51985 - RNA, 22 nt, Human
uggcucuguuguaaagaaauuu

SEQ ID NO: 51986 - RNA, 22 nt, Human
uggcugaagugggcaggaggga

SEQ ID NO: 51987 - RNA, 22 nt, Human
uggcugaauaaaauaugguguu

SEQ ID NO: 51988 - RNA, 22 nt, Human
uggcugagaaaaugguuuuagg

SEQ ID NO: 51989 - RNA, 22 nt, Human
uggcugagagaagacggggaag

SEQ ID NO: 51990 - RNA, 16 nt, Human
uggcugagagaggguu

SEQ ID NO: 51991 - RNA, 22 nt, Human
uggcugagagcaauugacucug

SEQ ID NO: 51992 - RNA, 23 nt, Human
uggcugagauccuacuguuugcu

SEQ ID NO: 51993 - RNA, 21 nt, Human
uggcugagccaggugugugga

SEQ ID NO: 51994 - RNA, 22 nt, Human
uggcugagcucccuguguguug

SEQ ID NO: 51995 - RNA, 22 nt, Human
uggcugagggcacuaugaagcc

SEQ ID NO: 51996 - RNA, 22 nt, Human
uggcugaggucuggggcuucug

SEQ ID NO: 51997 - RNA, 22 nt, Human
uggcugagguuaugcugguugu

SEQ ID NO: 51998 - RNA, 22 nt, Human
uggcugaguguuccaaggagca

SEQ ID NO: 51999 - RNA, 22 nt, Human
uggcugcaagggcacggacccu

SEQ ID NO: 52000 - RNA, 22 nt, Human
uggcugcagaaccuccucagga

SEQ ID NO: 52001 - RNA, 22 nt, Human
uggcugcagacaccuauggcag

SEQ ID NO: 52002 - RNA, 22 nt, Human
uggcugcaggggugucugacau

SEQ ID NO: 52003 - RNA, 22 nt, Human
uggcugccgacuggcucuuggc

SEQ ID NO: 52004 - RNA, 21 nt, Human
uggcugccuacaugcugcagg

SEQ ID NO: 52005 - RNA, 22 nt, Human
uggcugccuagucccucagccu

SEQ ID NO: 52006 - RNA, 22 nt, Human
uggcugccuuucaccucaucuc

SEQ ID NO: 52007 - RNA, 22 nt, Human
uggcugcuagccagagcuucag

SEQ ID NO: 52008 - RNA, 22 nt, Human
uggcugcucaagggaggaggcu

SEQ ID NO: 52009 - RNA, 22 nt, Human
uggcugcugcagacagacagga

SEQ ID NO: 52010 - RNA, 22 nt, Human
uggcugcugcuuggucuucuuc

SEQ ID NO: 52011 - RNA, 18 nt, Human
uggcugcuggaguagggu

SEQ ID NO: 52012 - RNA, 22 nt, Human
uggcugcuuaaaauugcugcaa

SEQ ID NO: 52013 - RNA, 18 nt, Human
uggcugcuuccagguaca

SEQ ID NO: 52014 - RNA, 22 nt, Human
uggcuggaggcaugcaagcucc

SEQ ID NO: 52015 - RNA, 22 nt, Human
uggcuggagucuggugcuagcc

SEQ ID NO: 52016 - RNA, 22 nt, Human
uggcuggcgccgggcuagccac

SEQ ID NO: 52017 - RNA, 22 nt, Human
uggcuggcuagaauggaaaugu

SEQ ID NO: 52018 - RNA, 22 nt, Human
uggcuggcugucaaggaaagcc

SEQ ID NO: 52019 - RNA, 22 nt, Human
uggcuggggagccccgacuccc

SEQ ID NO: 52020 - RNA, 22 nt, Human
uggcugguuuuggugagcuccg

SEQ ID NO: 52021 - RNA, 22 nt, Human
uggcuguagaaucagagacuug

SEQ ID NO: 52022 - RNA, 22 nt, Human
uggcugucagcugccuggugcg

SEQ ID NO: 52023 - RNA, 22 nt, Human
uggcugucagucgccugcauuc

SEQ ID NO: 52024 - RNA, 22 nt, Human
uggcugugaauggcaaauaauc

SEQ ID NO: 52025 - RNA, 22 nt, Human
uggcugugauuugcacgagaug

SEQ ID NO: 52026 - RNA, 22 nt, Human
uggcugugugccaggcugucug

SEQ ID NO: 52027 - RNA, 22 nt, Human
uggcuguguuaccacuucaugu

SEQ ID NO: 52028 - RNA, 22 nt, Human
uggcuuaagauuuaugcuuuua

SEQ ID NO: 52029 - RNA, 22 nt, Human
uggcuucaaagguagcauacaa

SEQ ID NO: 52030 - RNA, 22 nt, Human
uggcuucacugcucaagugauu

SEQ ID NO: 52031 - RNA, 22 nt, Human
uggcuucagagucugaguucuu

SEQ ID NO: 52032 - RNA, 21 nt, Human
uggcuucagccauuuucucug

SEQ ID NO: 52033 - RNA, 17 nt, Human
uggcuucaggcugagca

SEQ ID NO: 52034 - RNA, 22 nt, Human
uggcuucaguuucccagucugg

SEQ ID NO: 52035 - RNA, 20 nt, Human
uggcuucauaaugguuucug

SEQ ID NO: 52036 - RNA, 22 nt, Human
uggcuucaucacucgggcugcc

SEQ ID NO: 52037 - RNA, 22 nt, Human
uggcuucauggcugugcaaucu

SEQ ID NO: 52038 - RNA, 22 nt, Human
uggcuucauuauuguuuuuccu

SEQ ID NO: 52039 - RNA, 22 nt, Human
uggcuucauucagcaugacagu

SEQ ID NO: 52040 - RNA, 22 nt, Human
uggcuucauucuccugugaaua

SEQ ID NO: 52041 - RNA, 22 nt, Human
uggcuucauucuguaguuaaaa

SEQ ID NO: 52042 - RNA, 22 nt, Human
uggcuuccagagcugcuccacc

SEQ ID NO: 52043 - RNA, 22 nt, Human
uggcuucccaggaaaggagaag

SEQ ID NO: 52044 - RNA, 22 nt, Human
uggcuuccccuaccuuccaauu

SEQ ID NO: 52045 - RNA, 17 nt, Human
uggcuucccugggccac

SEQ ID NO: 52046 - RNA, 22 nt, Human
uggcuuccgccgcgggccucgg

SEQ ID NO: 52047 - RNA, 22 nt, Human
uggcuuccuaaacugauuucca

SEQ ID NO: 52048 - RNA, 22 nt, Human
uggcuuccuccagagcaggagg

SEQ ID NO: 52049 - RNA, 22 nt, Human
uggcuuccugcacagugucugc

SEQ ID NO: 52050 - RNA, 22 nt, Human
uggcuuccugcauggauccucu

SEQ ID NO: 52051 - RNA, 22 nt, Human
uggcuucuaaaguuucuuuuag

SEQ ID NO: 52052 - RNA, 22 nt, Human
uggcuucuagcaguguugauuu

SEQ ID NO: 52053 - RNA, 22 nt, Human
uggcuucuauugcuguggcauu

SEQ ID NO: 52054 - RNA, 18 nt, Human
uggcuucuauuuuacuca

SEQ ID NO: 52055 - RNA, 22 nt, Human
uggcuucucccuacaacaugcc

SEQ ID NO: 52056 - RNA, 18 nt, Human
uggcuucugaacaacugc

SEQ ID NO: 52057 - RNA, 22 nt, Human
uggcuucugagcauugaaacgu

SEQ ID NO: 52058 - RNA, 23 nt, Human
uggcuucugccccauucucucca

SEQ ID NO: 52059 - RNA, 22 nt, Human
uggcuucugggauguguugaca

SEQ ID NO: 52060 - RNA, 22 nt, Human
uggcuucugucccugcuacauu

SEQ ID NO: 52061 - RNA, 19 nt, Human
uggcuucuucgguguuccc

SEQ ID NO: 52062 - RNA, 18 nt, Human
uggcuucuugagcuaaca

SEQ ID NO: 52063 - RNA, 22 nt, Human
cucuuacauucuuuuacuagca

SEQ ID NO: 52064 - RNA, 22 nt, Human
cucuuaguaaugccaugaagca

SEQ ID NO: 52065 - RNA, 22 nt, Human
cucuuaguuuguaaaaauaauu

SEQ ID NO: 52066 - RNA, 22 nt, Human
cucuucagguuucugcucugga

SEQ ID NO: 52067 - RNA, 22 nt, Human
cucuucaguuggucacuauucu

SEQ ID NO: 52068 - RNA, 22 nt, Human
cucuucaguuguugcauauucu

SEQ ID NO: 52069 - RNA, 22 nt, Human
cucuucccagcuccacgagagg

SEQ ID NO: 52070 - RNA, 22 nt, Human
cucuuccucucaugcggucaua

SEQ ID NO: 52071 - RNA, 22 nt, Human
cucuucuugccugaugaggcag

SEQ ID NO: 52072 - RNA, 22 nt, Human
cucuucuuggcccccaugaggg

SEQ ID NO: 52073 - RNA, 22 nt, Human
cucuucuuuaguccagaccauc

SEQ ID NO: 52074 - RNA, 22 nt, Human
cucuugcaucuguuguauuggu

SEQ ID NO: 52075 - RNA, 22 nt, Human
cucuugcugucaaagcagggua

SEQ ID NO: 52076 - RNA, 22 nt, Human
cucuugggauuugcaggcucag

SEQ ID NO: 52077 - RNA, 20 nt, Human
cucuugggcccaaagggccu

SEQ ID NO: 52078 - RNA, 22 nt, Human
cucuugguaagacauuagaggu

SEQ ID NO: 52079 - RNA, 22 nt, Human
cucuugguggguggccuguuga

SEQ ID NO: 52080 - RNA, 22 nt, Human
cucuuguuuccuuucugcaguc

SEQ ID NO: 52081 - RNA, 19 nt, Human
cucuuuacucccuugccuu

SEQ ID NO: 52082 - RNA, 22 nt, Human
cucuuuacucuguguuauuguu

SEQ ID NO: 52083 - RNA, 22 nt, Human
cucuuucaguucugauagucuc

SEQ ID NO: 52084 - RNA, 22 nt, Human
cucuuuccucagccacagucua

SEQ ID NO: 52085 - RNA, 22 nt, Human
cucuuucucgccgcccgcaguc

SEQ ID NO: 52086 - RNA, 19 nt, Human
cucuuuggagauccuugga

SEQ ID NO: 52087 - RNA, 22 nt, Human
cucuuuggauguuuaugauaag

SEQ ID NO: 52088 - RNA, 16 nt, Human
cucuuuggcuuccaag

SEQ ID NO: 52089 - RNA, 22 nt, Human
cucuuuggugcaccuugcaguc

SEQ ID NO: 52090 - RNA, 22 nt, Human
cucuuuguagccuuugcauauu

SEQ ID NO: 52091 - RNA, 22 nt, Human
cucuuuuaugugacguguguga

SEQ ID NO: 52092 - RNA, 22 nt, Human
cucuuuucaaaauuucacugca

SEQ ID NO: 52093 - RNA, 22 nt, Human
cugaaaaacgggauuuggcugg

SEQ ID NO: 52094 - RNA, 22 nt, Human
cugaaacuggaguccuuauauc

SEQ ID NO: 52095 - RNA, 20 nt, Human
cugaaagacguaacagugca

SEQ ID NO: 52096 - RNA, 22 nt, Human
cugaaagcauuaacuccacuuc

SEQ ID NO: 52097 - RNA, 22 nt, Human
cugaaaggagagcugcaaggau

SEQ ID NO: 52098 - RNA, 22 nt, Human
cugaaaggcaguggguagugug

SEQ ID NO: 52099 - RNA, 22 nt, Human
cugaaagggagaacaccaagag

SEQ ID NO: 52100 - RNA, 22 nt, Human
cugaaauauagaugugaacagu

SEQ ID NO: 52101 - RNA, 22 nt, Human
cugaaauauuuuaaucucagga

SEQ ID NO: 52102 - RNA, 22 nt, Human
cugaaauguuaaauacuuggcu

SEQ ID NO: 52103 - RNA, 23 nt, Human
cugaaauucagaugcuaaagaua

SEQ ID NO: 52104 - RNA, 22 nt, Human
cugaacacugagucuaccuccc

SEQ ID NO: 52105 - RNA, 22 nt, Human
cagggcacagaucggggcgcac

SEQ ID NO: 52106 - RNA, 22 nt, Human
cagggcagaacauauagauagu

SEQ ID NO: 52107 - RNA, 22 nt, Human
cagggcagaaggcacucuacuc

SEQ ID NO: 52108 - RNA, 22 nt, Human
cagggcaggaauuugacauugc

SEQ ID NO: 52109 - RNA, 22 nt, Human
cagggcaguaacgggaacaucu

SEQ ID NO: 52110 - RNA, 22 nt, Human
cagggcagugaagaacacacgu

SEQ ID NO: 52111 - RNA, 22 nt, Human
cagggcauaagaugaggcugua

SEQ ID NO: 52112 - RNA, 22 nt, Human
cagggcauccgugcuccaugcu

SEQ ID NO: 52113 - RNA, 22 nt, Human
cagggcaugaggugugcuucuc

SEQ ID NO: 52114 - RNA, 22 nt, Human
cagggccaagccccuuuggcug

SEQ ID NO: 52115 - RNA, 22 nt, Human
cagggccaaguuggugccuuuu

SEQ ID NO: 52116 - RNA, 22 nt, Human
cagggccacacggaagggaaca

SEQ ID NO: 52117 - RNA, 22 nt, Human
cagggccacugcaugagguuca

SEQ ID NO: 52118 - RNA, 22 nt, Human
cagggccacuguagaugaggag

SEQ ID NO: 52119 - RNA, 22 nt, Human
cagggccagagagggcuggcug

SEQ ID NO: 52120 - RNA, 22 nt, Human
cagggccauaucuugugcacca

SEQ ID NO: 52121 - RNA, 22 nt, Human
cagggcccaggccacuggguug

SEQ ID NO: 52122 - RNA, 22 nt, Human
cagggcccagucccugcuguca

SEQ ID NO: 52123 - RNA, 18 nt, Human
cagggccccagaauuauc

SEQ ID NO: 52124 - RNA, 22 nt, Human
cagggccccagggaugucugcu

SEQ ID NO: 52125 - RNA, 22 nt, Human
cagggccuccuaaggcaucuaa

SEQ ID NO: 52126 - RNA, 22 nt, Human
cagggcuagugacaccccaguc

SEQ ID NO: 52127 - RNA, 22 nt, Human
cagggcucaccacugggauccu

SEQ ID NO: 52128 - RNA, 22 nt, Human
cagggcucacucggcuggcguc

SEQ ID NO: 52129 - RNA, 22 nt, Human
cagggcugaacugagcuuguga

SEQ ID NO: 52130 - RNA, 22 nt, Human
cagggcuggauuucauuucuag

SEQ ID NO: 52131 - RNA, 22 nt, Human
cagggcugguuugucgaagaaa

SEQ ID NO: 52132 - RNA, 22 nt, Human
cagggcugucuccaaaggcccc

SEQ ID NO: 52133 - RNA, 17 nt, Human
cagggcugucugccuag

SEQ ID NO: 52134 - RNA, 22 nt, Human
cagggcuguuagcugcugcucu

SEQ ID NO: 52135 - RNA, 22 nt, Human
cagggcuuacuggaggcugcuu

SEQ ID NO: 52136 - RNA, 22 nt, Human
cagggcuucgauggauggaugg

SEQ ID NO: 52137 - RNA, 22 nt, Human
cagggcuucgugucucagugcu

SEQ ID NO: 52138 - RNA, 22 nt, Human
cagggcuucuauaccaauucau

SEQ ID NO: 52139 - RNA, 22 nt, Human
cagggcuugcaggagaaaguuu

SEQ ID NO: 52140 - RNA, 22 nt, Human
cagggcuuggaucuguggucag

SEQ ID NO: 52141 - RNA, 22 nt, Human
cagggcuuugugugccugggga

SEQ ID NO: 52142 - RNA, 22 nt, Human
caggggacaguaugguggauga

SEQ ID NO: 52143 - RNA, 22 nt, Human
caggggcaagaaugcugucagc

SEQ ID NO: 52144 - RNA, 22 nt, Human
caggggccggcuguccgugccc

SEQ ID NO: 52145 - RNA, 22 nt, Human
caggggccuggcugucuaggaa

SEQ ID NO: 52146 - RNA, 22 nt, Human
caggggcugagaaggaacgucc

SEQ ID NO: 52147 - RNA, 22 nt, Human
caggggcuuaagugacagaagg

SEQ ID NO: 52148 - RNA, 22 nt, Human
cagggggugcaggcccugugac

SEQ ID NO: 52149 - RNA, 22 nt, Human
cagggguggcugcagcagaggu

SEQ ID NO: 52150 - RNA, 22 nt, Human
cagggucaagagacuccagcag

SEQ ID NO: 52151 - RNA, 22 nt, Human
cagggucauggcaccugcacgg

SEQ ID NO: 52152 - RNA, 22 nt, Human
cagggucuuauaaggccaauuu

SEQ ID NO: 52153 - RNA, 23 nt, Human
cagggugaccaauguggccauca

SEQ ID NO: 52154 - RNA, 22 nt, Human
caggguggcacaucacagcauu

SEQ ID NO: 52155 - RNA, 22 nt, Human
caggguggcccuguggucucau

SEQ ID NO: 52156 - RNA, 22 nt, Human
caggguggggaaauagcgcccu

SEQ ID NO: 52157 - RNA, 22 nt, Human
caggguugcaugcaucuguggg

SEQ ID NO: 52158 - RNA, 22 nt, Human
caggguugggguagauaagaaa

SEQ ID NO: 52159 - RNA, 22 nt, Human
cagguaaagcuucaaaucacuu

SEQ ID NO: 52160 - RNA, 22 nt, Human
cagguaaggucacauucugaag

SEQ ID NO: 52161 - RNA, 22 nt, Human
cagguacaaagcuacugccuga

SEQ ID NO: 52162 - RNA, 22 nt, Human
cagguaggauggaagggcucaa

SEQ ID NO: 52163 - RNA, 22 nt, Human
cagguauuaauaaauggagagu

SEQ ID NO: 52164 - RNA, 20 nt, Human
cagguauuacaucugcaccu

SEQ ID NO: 52165 - RNA, 20 nt, Human
cagguauuacuuccuuuaug

SEQ ID NO: 52166 - RNA, 22 nt, Human
cagguauuuucaaggcuugugu

SEQ ID NO: 52167 - RNA, 22 nt, Human
caggucagagguagaugagaug

SEQ ID NO: 52168 - RNA, 18 nt, Human
caggucagccuggccuca

SEQ ID NO: 52169 - RNA, 22 nt, Human
cagguccaacuauuuaucugug

SEQ ID NO: 52170 - RNA, 22 nt, Human
cagguccacagcccaucacugc

SEQ ID NO: 52171 - RNA, 22 nt, Human
cagguccacggcgcccaggggu

SEQ ID NO: 52172 - RNA, 22 nt, Human
cagugagggaagaucucagcac

SEQ ID NO: 52173 - RNA, 22 nt, Human
cagugagggcccccuuccaggu

SEQ ID NO: 52174 - RNA, 21 nt, Human
cagugagguccccagccuagg

SEQ ID NO: 52175 - RNA, 17 nt, Human
cagugaucauuacauua

SEQ ID NO: 52176 - RNA, 22 nt, Human
cagugauuaaaacaugacagcc

SEQ ID NO: 52177 - RNA, 19 nt, Human
cagugauuaauucaucuua

SEQ ID NO: 52178 - RNA, 22 nt, Human
cagugcaaacucccugaggugg

SEQ ID NO: 52179 - RNA, 20 nt, Human
cagugcaacugaagaacuga

SEQ ID NO: 52180 - RNA, 22 nt, Human
cagugcaagugacugaucaagg

SEQ ID NO: 52181 - RNA, 22 nt, Human
cagugcaauauucaaaguggag

SEQ ID NO: 52182 - RNA, 22 nt, Human
cagugcagaacacauggaaaau

SEQ ID NO: 52183 - RNA, 22 nt, Human
cagugcagaggccagggaggau

SEQ ID NO: 52184 - RNA, 17 nt, Human
cagugcagauaagugag

SEQ ID NO: 52185 - RNA, 22 nt, Human
cagugcaggaagugagaugccu

SEQ ID NO: 52186 - RNA, 22 nt, Human
cagugcaggcuuguggccgcag

SEQ ID NO: 52187 - RNA, 22 nt, Human
cagugcagguuuagggcugggg

SEQ ID NO: 52188 - RNA, 22 nt, Human
cagugcagucaaggaagaacca

SEQ ID NO: 52189 - RNA, 22 nt, Human
cagugcaguuucccagaugcug

SEQ ID NO: 52190 - RNA, 22 nt, Human
cagugcauaaucuaaauggggg

SEQ ID NO: 52191 - RNA, 22 nt, Human
cagugccaaggagaaggacagc

SEQ ID NO: 52192 - RNA, 22 nt, Human
cagugccaaggcucuuggucug

SEQ ID NO: 52193 - RNA, 22 nt, Human
cagugccacaggaauggccaau

SEQ ID NO: 52194 - RNA, 21 nt, Human
cagugccagccacaggacgcc

SEQ ID NO: 52195 - RNA, 22 nt, Human
cagugccaugucugagccccua

SEQ ID NO: 52196 - RNA, 19 nt, Human
cagugcccgacgcaggucu

SEQ ID NO: 52197 - RNA, 22 nt, Human
cagugcccuuccaggacugcag

SEQ ID NO: 52198 - RNA, 22 nt, Human
cagugccucaggccagccugca

SEQ ID NO: 52199 - RNA, 22 nt, Human
cagugccucuuaagugucaccc

SEQ ID NO: 52200 - RNA, 22 nt, Human
cagugccuggauagcaacauga

SEQ ID NO: 52201 - RNA, 22 nt, Human
cagugccugucuuauucuuaca

SEQ ID NO: 52202 - RNA, 22 nt, Human
cagugcuauuuggacacaggga

SEQ ID NO: 52203 - RNA, 22 nt, Human
cagugcucccgcugccgcugug

SEQ ID NO: 52204 - RNA, 22 nt, Human
cagugcugcaucuccaugccag

SEQ ID NO: 52205 - RNA, 22 nt, Human
cagugcugcucucuguaagaga

SEQ ID NO: 52206 - RNA, 22 nt, Human
cagugcuggagauggguggaac

SEQ ID NO: 52207 - RNA, 22 nt, Human
cagugcuggaggggugcuugca

SEQ ID NO: 52208 - RNA, 22 nt, Human
cagugcuggcuguuaggacagu

SEQ ID NO: 52209 - RNA, 22 nt, Human
cagugcugggcagaggagagcg

SEQ ID NO: 52210 - RNA, 22 nt, Human
cagugcugguguaggcugacca

SEQ ID NO: 52211 - RNA, 18 nt, Human
cagugcuguuaacaguga

SEQ ID NO: 52212 - RNA, 19 nt, Human
cagugcuguucauucagug

SEQ ID NO: 52213 - RNA, 20 nt, Human
cagugcuuccuccuuucuuu

SEQ ID NO: 52214 - RNA, 22 nt, Human
cagugcuuuuuuaccuuccaac

SEQ ID NO: 52215 - RNA, 22 nt, Human
caguggaagcuggcugugaaga

SEQ ID NO: 52216 - RNA, 19 nt, Human
caguggagauuggaggagg

SEQ ID NO: 52217 - RNA, 22 nt, Human
caguggaggccuugggaccuuu

SEQ ID NO: 52218 - RNA, 22 nt, Human
caguggaugucucauaguguga

SEQ ID NO: 52219 - RNA, 22 nt, Human
caguggauuaaggagggcagcu

SEQ ID NO: 52220 - RNA, 22 nt, Human
caguggcaguuagaaaauauuc

SEQ ID NO: 52221 - RNA, 22 nt, Human
caguggcugguuagggacagga

SEQ ID NO: 52222 - RNA, 22 nt, Human
caguggcugugaccagggaccu

SEQ ID NO: 52223 - RNA, 22 nt, Human
caucaguguggcaguucacugu

SEQ ID NO: 52224 - RNA, 22 nt, Human
caucauaauaacccagacacag

SEQ ID NO: 52225 - RNA, 22 nt, Human
caucaucaaaagugacagagaa

SEQ ID NO: 52226 - RNA, 22 nt, Human
caucaucaccugcuauacgauc

SEQ ID NO: 52227 - RNA, 22 nt, Human
caucaucugugcuggagagccu

SEQ ID NO: 52228 - RNA, 22 nt, Human
caucaugaagaugagaaagcau

SEQ ID NO: 52229 - RNA, 22 nt, Human
caucaugucugcaggaaugugu

SEQ ID NO: 52230 - RNA, 22 nt, Human
caucauuaccaucauuaguagu

SEQ ID NO: 52231 - RNA, 22 nt, Human
caucauuaccuuguaaccaaua

SEQ ID NO: 52232 - RNA, 22 nt, Human
cauccaagaaaauuuucucucu

SEQ ID NO: 52233 - RNA, 22 nt, Human
cauccagaccgugccaugcugc

SEQ ID NO: 52234 - RNA, 22 nt, Human
cauccagugggacagagaaacc

SEQ ID NO: 52235 - RNA, 22 nt, Human
cauccauagccucaauaaauag

SEQ ID NO: 52236 - RNA, 22 nt, Human
cauccauucagugcaaaucaca

SEQ ID NO: 52237 - RNA, 22 nt, Human
cauccccaauuagcgcccagcu

SEQ ID NO: 52238 - RNA, 22 nt, Human
caucccugauuccuaguacagu

SEQ ID NO: 52239 - RNA, 22 nt, Human
caucccugguuccuguguuuaa

SEQ ID NO: 52240 - RNA, 22 nt, Human
cauccguugugcuguugcucuc

SEQ ID NO: 52241 - RNA, 21 nt, Human
cauccguuuauaucucugugg

SEQ ID NO: 52242 - RNA, 22 nt, Human
cauccugacccaugggagggga

SEQ ID NO: 52243 - RNA, 22 nt, Human
cauccugagaggucucucuacc

SEQ ID NO: 52244 - RNA, 22 nt, Human
cauccugguuaccccauaguca

SEQ ID NO: 52245 - RNA, 18 nt, Human
caucuacaaaugccagaa

SEQ ID NO: 52246 - RNA, 22 nt, Human
caucuagaaaaaagaccuguug

SEQ ID NO: 52247 - RNA, 23 nt, Human
caucuagcauccagugaguagug

SEQ ID NO: 52248 - RNA, 22 nt, Human
caucucacagcaaacugcugaa

SEQ ID NO: 52249 - RNA, 22 nt, Human
caucucaggucugugguucacu

SEQ ID NO: 52250 - RNA, 21 nt, Human
caucucaguggguugguggau

SEQ ID NO: 52251 - RNA, 22 nt, Human
caucucaucagugagagucagc

SEQ ID NO: 52252 - RNA, 20 nt, Human
caucuccugccuccauguuc

SEQ ID NO: 52253 - RNA, 22 nt, Human
caucucuucauuagcauuauug

SEQ ID NO: 52254 - RNA, 22 nt, Human
caucugaagagcuuugcaagag

SEQ ID NO: 52255 - RNA, 22 nt, Human
caucugaagugaauugcuuuuu

SEQ ID NO: 52256 - RNA, 22 nt, Human
caucugaauaaagacuugcaga

SEQ ID NO: 52257 - RNA, 22 nt, Human
caucugagggaaaacauguagu

SEQ ID NO: 52258 - RNA, 22 nt, Human
caucugcugacuugacaaguac

SEQ ID NO: 52259 - RNA, 22 nt, Human
caucugcuguaauuaacaagcc

SEQ ID NO: 52260 - RNA, 22 nt, Human
caucuggcagacccugccuccg

SEQ ID NO: 52261 - RNA, 22 nt, Human
caucugguuuaaaagaagaaag

SEQ ID NO: 52262 - RNA, 22 nt, Human
caucuguaggugacacaugagu

SEQ ID NO: 52263 - RNA, 22 nt, Human
caucugucuccucaucgccugu

SEQ ID NO: 52264 - RNA, 22 nt, Human
caucugucugcuguuagcugca

SEQ ID NO: 52265 - RNA, 22 nt, Human
caucuuaaaaugugucauaacu

SEQ ID NO: 52266 - RNA, 22 nt, Human
caucuuaacaggucucugaggg

SEQ ID NO: 52267 - RNA, 22 nt, Human
caucuuaauuucuaacaggcac

SEQ ID NO: 52268 - RNA, 22 nt, Human
caucuucacauauuuccaauga

SEQ ID NO: 52269 - RNA, 22 nt, Human
caucuucauuuuguccaguacu

SEQ ID NO: 52270 - RNA, 22 nt, Human
caucuugaugcuuugacagguu

SEQ ID NO: 52271 - RNA, 22 nt, Human
caucuugcuucaucugcugugu

SEQ ID NO: 52272 - RNA, 22 nt, Human
caucuugugaauuucugauucu

SEQ ID NO: 52273 - RNA, 22 nt, Human
caucuuuaaaaugggaacaaca

SEQ ID NO: 52274 - RNA, 22 nt, Human
caucuuucuuagaacuuucagu

SEQ ID NO: 52275 - RNA, 22 nt, Human
caucuuugccauaugauguaau

SEQ ID NO: 52276 - RNA, 22 nt, Human
caucuuuguaacuuccacauaa

SEQ ID NO: 52277 - RNA, 22 nt, Human
caucuuuguuuuggauauaauc

SEQ ID NO: 52278 - RNA, 22 nt, Human
caugaaauaugcuaccugucuu

SEQ ID NO: 52279 - RNA, 22 nt, Human
caugaaaucugaguauguuucc

SEQ ID NO: 52280 - RNA, 22 nt, Human
caugaaauguguuaaucucuug

SEQ ID NO: 52281 - RNA, 22 nt, Human
caugcaaaugugcuaaucugaa

SEQ ID NO: 52282 - RNA, 22 nt, Human
caugcacaaagguaagaugcgu

SEQ ID NO: 52283 - RNA, 22 nt, Human
caugcacaacauacucaagagg

SEQ ID NO: 52284 - RNA, 22 nt, Human
caugcacacacgugcauguacg

SEQ ID NO: 52285 - RNA, 18 nt, Human
caugcagagggaucugug

SEQ ID NO: 52286 - RNA, 22 nt, Human
caugcagauauuuuuauugugg

SEQ ID NO: 52287 - RNA, 22 nt, Human
caugcagcagaauaaugacuau

SEQ ID NO: 52288 - RNA, 22 nt, Human
caugcagcaggaucucauuccc

SEQ ID NO: 52289 - RNA, 22 nt, Human
caugcaggaggaaaaagcagcu

SEQ ID NO: 52290 - RNA, 22 nt, Human
caugcagugaaauugauaucca

SEQ ID NO: 52291 - RNA, 22 nt, Human
caugcagugacucagacacagg

SEQ ID NO: 52292 - RNA, 22 nt, Human
caugcagugccucuggauucuu

SEQ ID NO: 52293 - RNA, 22 nt, Human
caugcagugcuuugcgccgggc

SEQ ID NO: 52294 - RNA, 22 nt, Human
caugcaguuucucuaugcguag

SEQ ID NO: 52295 - RNA, 22 nt, Human
caugcauagccagcauuguaug

SEQ ID NO: 52296 - RNA, 22 nt, Human
caugcauauuacuagcacagca

SEQ ID NO: 52297 - RNA, 22 nt, Human
caugcaucuggucuuggaaaua

SEQ ID NO: 52298 - RNA, 22 nt, Human
caugcauggucaugcugggacu

SEQ ID NO: 52299 - RNA, 22 nt, Human
caugcauucagaaucucucaca

SEQ ID NO: 52300 - RNA, 20 nt, Human
caugccugcugguaucuggc

SEQ ID NO: 52301 - RNA, 22 nt, Human
caugccuguaaucccagcucuu

SEQ ID NO: 52302 - RNA, 22 nt, Human
caugcuaaccagagacauaaag

SEQ ID NO: 52303 - RNA, 22 nt, Human
caugcuaagucauaaaagagua

SEQ ID NO: 52304 - RNA, 22 nt, Human
caugcuaauuaauuccaccugc

SEQ ID NO: 52305 - RNA, 22 nt, Human
caugcuauuuauacauaagucu

SEQ ID NO: 52306 - RNA, 22 nt, Human
caugcucacuuuuauacuguaa

SEQ ID NO: 52307 - RNA, 22 nt, Human
caugcucuagauucucucuaau

SEQ ID NO: 52308 - RNA, 22 nt, Human
caugcucuccauuggacacaga

SEQ ID NO: 52309 - RNA, 22 nt, Human
caugcucucuggcaacuugugu

SEQ ID NO: 52310 - RNA, 22 nt, Human
caugcugugcaucuugaugacc

SEQ ID NO: 52311 - RNA, 22 nt, Human
caugcuuccuccaaacuacccu

SEQ ID NO: 52312 - RNA, 22 nt, Human
caugcuuuucaaucuaucuuaa

SEQ ID NO: 52313 - RNA, 23 nt, Human
cauggaaaacugaaagcugaccu

SEQ ID NO: 52314 - RNA, 22 nt, Human
cauggaacaaggaagauguuug

SEQ ID NO: 52315 - RNA, 22 nt, Human
cauggaacuguauaaaggcacu

SEQ ID NO: 52316 - RNA, 22 nt, Human
cauggaaugugaguuguuuagu

SEQ ID NO: 52317 - RNA, 22 nt, Human
cauggaggacccucagggagcu

SEQ ID NO: 52318 - RNA, 22 nt, Human
cauggauagaugaaugcuuaaa

SEQ ID NO: 52319 - RNA, 22 nt, Human
cauggauugaauauaaauuaga

SEQ ID NO: 52320 - RNA, 22 nt, Human
cauggcaacaacucuuuauucc

SEQ ID NO: 52321 - RNA, 22 nt, Human
cauggcacugagcagguaugca

SEQ ID NO: 52322 - RNA, 22 nt, Human
cauggcagagccugcagguggg

SEQ ID NO: 52323 - RNA, 22 nt, Human
cauggcauugcauaacggggcu

SEQ ID NO: 52324 - RNA, 22 nt, Human
cauggccacaugauaaucaagu

SEQ ID NO: 52325 - RNA, 22 nt, Human
cauggccacauuggaccgaagc

SEQ ID NO: 52326 - RNA, 22 nt, Human
cauggccaggccaagagaguac

SEQ ID NO: 52327 - RNA, 22 nt, Human
cauggccagggcagauggcagg

SEQ ID NO: 52328 - RNA, 22 nt, Human
cauggcucggggacaggaggua

SEQ ID NO: 52329 - RNA, 22 nt, Human
cauggcugaacacucagugacu

SEQ ID NO: 52330 - RNA, 19 nt, Human
cauggcugcugcuugggag

SEQ ID NO: 52331 - RNA, 22 nt, Human
cauggcugggagacggcugagg

SEQ ID NO: 52332 - RNA, 22 nt, Human
cauggcuggugcaccucuggga

SEQ ID NO: 52333 - RNA, 22 nt, Human
cauggcuugcaagcauaggaga

SEQ ID NO: 52334 - RNA, 22 nt, Human
cauggcuuggagcaggaugaga

SEQ ID NO: 52335 - RNA, 22 nt, Human
cauggcuuguaauaaauuuaua

SEQ ID NO: 52336 - RNA, 22 nt, Human
caugggcaccuuaaaaugaggc

SEQ ID NO: 52337 - RNA, 22 nt, Human
caugggcagaaguggcaucauu

SEQ ID NO: 52338 - RNA, 22 nt, Human
caugggcaguuggcagggcuca

SEQ ID NO: 52339 - RNA, 22 nt, Human
caugggcucuucuggacugcac

SEQ ID NO: 52340 - RNA, 22 nt, Human
caugggcuuuggaggcuggagg

SEQ ID NO: 52341 - RNA, 22 nt, Human
cauggggaugaggcugagacuu

SEQ ID NO: 52342 - RNA, 22 nt, Human
cauggggcccaugugcuccaag

SEQ ID NO: 52343 - RNA, 22 nt, Human
caugggguggugggcaaccuca

SEQ ID NO: 52344 - RNA, 20 nt, Human
caugguggaggagcagggcc

SEQ ID NO: 52345 - RNA, 22 nt, Human
cauguacaaggaugcucagagu

SEQ ID NO: 52346 - RNA, 22 nt, Human
cauguacacacaaagggacaau

SEQ ID NO: 52347 - RNA, 22 nt, Human
cauguauaagcgcuaggagugc

SEQ ID NO: 52348 - RNA, 22 nt, Human
cauguauaguuggaacuacauc

SEQ ID NO: 52349 - RNA, 22 nt, Human
caugucaacaggcccagaaaau

SEQ ID NO: 52350 - RNA, 22 nt, Human
caugucaagaaagagauuugaa

SEQ ID NO: 52351 - RNA, 22 nt, Human
caugucaagacugaagauccag

SEQ ID NO: 52352 - RNA, 22 nt, Human
caugucaagcuuaucucugugg

SEQ ID NO: 52353 - RNA, 22 nt, Human
caugucaauaaauauaacugca

SEQ ID NO: 52354 - RNA, 22 nt, Human
cauguccauuuaugcacagaaa

SEQ ID NO: 52355 - RNA, 22 nt, Human
caugucugccaauuuggaagga

SEQ ID NO: 52356 - RNA, 22 nt, Human
caugucuguguacacaugcaca

SEQ ID NO: 52357 - RNA, 22 nt, Human
cugccuuuggggaguuagaggg

SEQ ID NO: 52358 - RNA, 22 nt, Human
cugcgcagggguggcgccagaa

SEQ ID NO: 52359 - RNA, 22 nt, Human
cugcgugcaugucugcgugcau

SEQ ID NO: 52360 - RNA, 22 nt, Human
cugcguguuccugaagcgcgcu

SEQ ID NO: 52361 - RNA, 22 nt, Human
cugcuagcccaggaugcaggga

SEQ ID NO: 52362 - RNA, 19 nt, Human
cugcucagagcagcuccag

SEQ ID NO: 52363 - RNA, 19 nt, Human
cugcucaggucagucuguc

SEQ ID NO: 52364 - RNA, 22 nt, Human
cugcuccaagccagcccugcag

SEQ ID NO: 52365 - RNA, 22 nt, Human
cugcuccacaccguccauacuc

SEQ ID NO: 52366 - RNA, 22 nt, Human
cugcuccaccuccgggucaggc

SEQ ID NO: 52367 - RNA, 22 nt, Human
cugcuccagacaccugcagggg

SEQ ID NO: 52368 - RNA, 22 nt, Human
cugcuccaggaacagagcugcu

SEQ ID NO: 52369 - RNA, 22 nt, Human
cugcuccaggauuucaggccag

SEQ ID NO: 52370 - RNA, 22 nt, Human
cugcuccaguagccccaugugg

SEQ ID NO: 52371 - RNA, 19 nt, Human
cugcucccuccuucuggca

SEQ ID NO: 52372 - RNA, 22 nt, Human
cugcuccuccccaucaggcagc

SEQ ID NO: 52373 - RNA, 22 nt, Human
cugcucggcgcgcauggcugcc

SEQ ID NO: 52374 - RNA, 22 nt, Human
cugcucuaacugcauuaguuuu

SEQ ID NO: 52375 - RNA, 22 nt, Human
cugcucuaauaucagauagacu

SEQ ID NO: 52376 - RNA, 22 nt, Human
cugcucuagguauugaggcuaa

SEQ ID NO: 52377 - RNA, 22 nt, Human
cugcucuaggucauggguacuu

SEQ ID NO: 52378 - RNA, 22 nt, Human
cugcucuagguccauugcggga

SEQ ID NO: 52379 - RNA, 22 nt, Human
cugcucucuguuccccuggauc

SEQ ID NO: 52380 - RNA, 22 nt, Human
cugcucucuuucagagacaggu

SEQ ID NO: 52381 - RNA, 21 nt, Human
cugcucugacagugaggccag

SEQ ID NO: 52382 - RNA, 22 nt, Human
cugcucugagaggcucuuccua

SEQ ID NO: 52383 - RNA, 22 nt, Human
cugcucuggcuguguacuucag

SEQ ID NO: 52384 - RNA, 22 nt, Human
cugcucuguauaugagcaggaa

SEQ ID NO: 52385 - RNA, 22 nt, Human
cugcucuguuaauuaaacuuug

SEQ ID NO: 52386 - RNA, 22 nt, Human
cugcucuucacacuacacccgu

SEQ ID NO: 52387 - RNA, 22 nt, Human
cugcugaaguuguuggucuuuu

SEQ ID NO: 52388 - RNA, 22 nt, Human
cugcugacagcccugcuucagg

SEQ ID NO: 52389 - RNA, 22 nt, Human
cugcugagacuggcuuuguguc

SEQ ID NO: 52390 - RNA, 22 nt, Human
cuggaggucuacagugguagcu

SEQ ID NO: 52391 - RNA, 22 nt, Human
cuggaggugccuagaugagcuc

SEQ ID NO: 52392 - RNA, 22 nt, Human
cuggaggugggggcaagagugu

SEQ ID NO: 52393 - RNA, 22 nt, Human
cuggaguacaggaaucuuccca

SEQ ID NO: 52394 - RNA, 22 nt, Human
cuggagucagcaaggacgaggc

SEQ ID NO: 52395 - RNA, 22 nt, Human
cuggagucucuucuguagcuac

SEQ ID NO: 52396 - RNA, 22 nt, Human
cuggagugauacucagaaugug

SEQ ID NO: 52397 - RNA, 22 nt, Human
cuggagugcaguggcaugauca

SEQ ID NO: 52398 - RNA, 22 nt, Human
cuggaguuuuggaaaaaugcuu

SEQ ID NO: 52399 - RNA, 22 nt, Human
cuggaucaugcauugcuugucc

SEQ ID NO: 52400 - RNA, 22 nt, Human
cuggauccaacagaguuggguu

SEQ ID NO: 52401 - RNA, 21 nt, Human
cuggaucugucaucgaguuuu

SEQ ID NO: 52402 - RNA, 22 nt, Human
cuggaucuucagagaucaccag

SEQ ID NO: 52403 - RNA, 22 nt, Human
cuggauguccagguagaaguuu

SEQ ID NO: 52404 - RNA, 22 nt, Human
cuggauucaugccaggccaccc

SEQ ID NO: 52405 - RNA, 22 nt, Human
cuggauucuuucauaaaaguca

SEQ ID NO: 52406 - RNA, 22 nt, Human
cuggauuuacugaguuuuauca

SEQ ID NO: 52407 - RNA, 22 nt, Human
cuggauuuugaugagcaguuuu

SEQ ID NO: 52408 - RNA, 19 nt, Human
cuggcaaaugcuuuggcca

SEQ ID NO: 52409 - RNA, 22 nt, Human
cuggcaagugguugggauggau

SEQ ID NO: 52410 - RNA, 22 nt, Human
cuggcacaaaagaaaacugcca

SEQ ID NO: 52411 - RNA, 22 nt, Human
cuggcacacagcaggcucucag

SEQ ID NO: 52412 - RNA, 22 nt, Human
cuggcacaggauccgagaccuu

SEQ ID NO: 52413 - RNA, 22 nt, Human
cuggcacauagucagcacucaa

SEQ ID NO: 52414 - RNA, 22 nt, Human
cuggcacauuguaauauauaca

SEQ ID NO: 52415 - RNA, 22 nt, Human
cuggcacgcccacguaggcacu

SEQ ID NO: 52416 - RNA, 22 nt, Human
cuggcagacuuaccaucagaca

SEQ ID NO: 52417 - RNA, 22 nt, Human
cuggcagauagccacgccuguc

SEQ ID NO: 52418 - RNA, 22 nt, Human
cuggcagauuggggucagcagu

SEQ ID NO: 52419 - RNA, 22 nt, Human
cuggcagcagagcucaacauag

SEQ ID NO: 52420 - RNA, 22 nt, Human
cuggcagcagcuucuggaucga

SEQ ID NO: 52421 - RNA, 22 nt, Human
cuggcagcaggucacacgcaga

SEQ ID NO: 52422 - RNA, 22 nt, Human
cuggcagcauggagccugugcu

SEQ ID NO: 52423 - RNA, 22 nt, Human
cuggcagcguguuuaugaacau

SEQ ID NO: 52424 - RNA, 22 nt, Human
cuggcagcucuacucagagccu

SEQ ID NO: 52425 - RNA, 22 nt, Human
cuggcagcugcccgagaugccc

SEQ ID NO: 52426 - RNA, 22 nt, Human
cuggcagcugugugaagaacug

SEQ ID NO: 52427 - RNA, 22 nt, Human
cuggcaggaagaggaaagguca

SEQ ID NO: 52428 - RNA, 22 nt, Human
cuggcaggcggcagagcccagg

SEQ ID NO: 52429 - RNA, 22 nt, Human
cuggcaggcucucuggucgguu

SEQ ID NO: 52430 - RNA, 22 nt, Human
cuggcagggcagggguuugugc

SEQ ID NO: 52431 - RNA, 22 nt, Human
cuggcaguggggccucaguguu

SEQ ID NO: 52432 - RNA, 22 nt, Human
cuggcagugugacccuggacag

SEQ ID NO: 52433 - RNA, 21 nt, Human
cuggcaugaggagcuuuguuu

SEQ ID NO: 52434 - RNA, 22 nt, Human
cuggcaugcccaggguaugugg

SEQ ID NO: 52435 - RNA, 22 nt, Human
cuggcaugccuugggugccucu

SEQ ID NO: 52436 - RNA, 22 nt, Human
cuggcaugcuaauacagccugu

SEQ ID NO: 52437 - RNA, 22 nt, Human
cuggcauugagggucacaaggc

SEQ ID NO: 52438 - RNA, 22 nt, Human
cuggccaagcuucucuaagcag

SEQ ID NO: 52439 - RNA, 22 nt, Human
cuggccaaugccuggggaauag

SEQ ID NO: 52440 - RNA, 22 nt, Human
cuggccacaacuagcccaggac

SEQ ID NO: 52441 - RNA, 22 nt, Human
cuggccacaugugugcugagca

SEQ ID NO: 52442 - RNA, 23 nt, Human
cuggccaccaucuuucuggcuuc

SEQ ID NO: 52443 - RNA, 22 nt, Human
cuggccacugcaccucuuccuu

SEQ ID NO: 52444 - RNA, 22 nt, Human
cuggccacugguggucauaggc

SEQ ID NO: 52445 - RNA, 22 nt, Human
cuggccagagguuccucugccc

SEQ ID NO: 52446 - RNA, 22 nt, Human
cuggccaggagguaaccagaug

SEQ ID NO: 52447 - RNA, 22 nt, Human
cuggccaggcauccccugaucc

SEQ ID NO: 52448 - RNA, 22 nt, Human
cuggccaggccccuugcagggc

SEQ ID NO: 52449 - RNA, 22 nt, Human
cuggccaggcggccccugcaug

SEQ ID NO: 52450 - RNA, 17 nt, Human
cuggccaguguacuugg

SEQ ID NO: 52451 - RNA, 22 nt, Human
cuggcccagagcucuggccuuu

SEQ ID NO: 52452 - RNA, 22 nt, Human
cuggcccagucucagaguguca

SEQ ID NO: 52453 - RNA, 22 nt, Human
cuggcccauggugagcucuggg

SEQ ID NO: 52454 - RNA, 22 nt, Human
cuggcccauugccuucucucuc

SEQ ID NO: 52455 - RNA, 22 nt, Human
cuggccccaggcagccugcugg

SEQ ID NO: 52456 - RNA, 22 nt, Human
cuggccccgguuccuaaaaacc

SEQ ID NO: 52457 - RNA, 22 nt, Human
cuggcccucggaguccagcugc

SEQ ID NO: 52458 - RNA, 22 nt, Human
cuggcccugccagagaucaaca

SEQ ID NO: 52459 - RNA, 22 nt, Human
cuggcccuuaggaaaacaaagu

SEQ ID NO: 52460 - RNA, 22 nt, Human
cuggcccuucucuugcuuccug

SEQ ID NO: 52461 - RNA, 22 nt, Human
cuggccgcaguguggaguugug

SEQ ID NO: 52462 - RNA, 22 nt, Human
cuggccgccgucccaaccucga

SEQ ID NO: 52463 - RNA, 23 nt, Human
cuggccuccgacacuggccaaga

SEQ ID NO: 52464 - RNA, 19 nt, Human
cuggccuguguccugugcu

SEQ ID NO: 52465 - RNA, 21 nt, Human
cuggccuucaacugauuggau

SEQ ID NO: 52466 - RNA, 22 nt, Human
cuggccuuggugcuugcagaca

SEQ ID NO: 52467 - RNA, 22 nt, Human
cuggccuuuaaaaugaccuuau

SEQ ID NO: 52468 - RNA, 22 nt, Human
cuggcgagcaggaggcgacggc

SEQ ID NO: 52469 - RNA, 22 nt, Human
cuggcucaccuccgcuccagca

SEQ ID NO: 52470 - RNA, 22 nt, Human
cuggcucaggaaaguugcugcu

SEQ ID NO: 52471 - RNA, 23 nt, Human
cuggcucauccugguugcagugg

SEQ ID NO: 52472 - RNA, 22 nt, Human
cuggcucaugugaugagggcaa

SEQ ID NO: 52473 - RNA, 22 nt, Human
ccagaaaauauggcuaagguga

SEQ ID NO: 52474 - RNA, 22 nt, Human
ccagaaacagaugacaagcccu

SEQ ID NO: 52475 - RNA, 22 nt, Human
ccagaaagacuuuuuagguacg

SEQ ID NO: 52476 - RNA, 22 nt, Human
ccagaaagguaaacacuggauu

SEQ ID NO: 52477 - RNA, 22 nt, Human
ccagaaaguucagcugugaaug

SEQ ID NO: 52478 - RNA, 22 nt, Human
ccagaacacaguggaagaauau

SEQ ID NO: 52479 - RNA, 22 nt, Human
ccagaacugagaaaauaaauuu

SEQ ID NO: 52480 - RNA, 22 nt, Human
ccagaagaaaaagcugguauua

SEQ ID NO: 52481 - RNA, 21 nt, Human
ccagaagcugcuugcaggcua

SEQ ID NO: 52482 - RNA, 22 nt, Human
ccagaagcuucaaggagauucu

SEQ ID NO: 52483 - RNA, 22 nt, Human
ccagaaggcggagauugcagug

SEQ ID NO: 52484 - RNA, 19 nt, Human
ccagaagggcagcuaugga

SEQ ID NO: 52485 - RNA, 22 nt, Human
ccagaagucaggaaugagucuu

SEQ ID NO: 52486 - RNA, 22 nt, Human
ccagaauagaaggcagcuguca

SEQ ID NO: 52487 - RNA, 22 nt, Human
ccagaaucaucaucugaagccu

SEQ ID NO: 52488 - RNA, 22 nt, Human
ccagaaucccauugucacuuca

SEQ ID NO: 52489 - RNA, 22 nt, Human
ccagaaugugugaaauuugaug

SEQ ID NO: 52490 - RNA, 22 nt, Human
ccagaauucagaaagggcauaa

SEQ ID NO: 52491 - RNA, 22 nt, Human
ccagacaggggcuguuccugcu

SEQ ID NO: 52492 - RNA, 22 nt, Human
ccagaccacccuggccaugcac

SEQ ID NO: 52493 - RNA, 22 nt, Human
ccagaccuaaccagcuuuugua

SEQ ID NO: 52494 - RNA, 22 nt, Human
ccagaccugcaaggcugagagg

SEQ ID NO: 52495 - RNA, 21 nt, Human
ccagacuggccuaugugguag

SEQ ID NO: 52496 - RNA, 22 nt, Human
ccagacuguggaguuccuggug

SEQ ID NO: 52497 - RNA, 22 nt, Human
ccagagaaaaaugugucccugu

SEQ ID NO: 52498 - RNA, 22 nt, Human
ccagagaaaagaggccaaggau

SEQ ID NO: 52499 - RNA, 17 nt, Human
cauuuguugaucaguug

SEQ ID NO: 52500 - RNA, 22 nt, Human
cauuuguuggucagauuguagu

SEQ ID NO: 52501 - RNA, 22 nt, Human
cauuuguuuauaaguuccccag

SEQ ID NO: 52502 - RNA, 22 nt, Human
cauuuuaagaugaccugguuuc

SEQ ID NO: 52503 - RNA, 19 nt, Human
cauuuucccaucauccuuu

SEQ ID NO: 52504 - RNA, 22 nt, Human
cauuuuccucugcugguguuca

SEQ ID NO: 52505 - RNA, 22 nt, Human
cauuuucucaaugaacccucuu

SEQ ID NO: 52506 - RNA, 22 nt, Human
cauuuuggcuauuguaaauagu

SEQ ID NO: 52507 - RNA, 22 nt, Human
cauuuugugcuagacacuaugg

SEQ ID NO: 52508 - RNA, 22 nt, Human
ccaaaaauuagauacacauaua

SEQ ID NO: 52509 - RNA, 22 nt, Human
ccaaaauguuugaaugcaugug

SEQ ID NO: 52510 - RNA, 22 nt, Human
ccaaaauuaagccucuuauguu

SEQ ID NO: 52511 - RNA, 22 nt, Human
ccaaaauuauuacauuuguagg

SEQ ID NO: 52512 - RNA, 22 nt, Human
ccaaaccauccaucuccaggcu

SEQ ID NO: 52513 - RNA, 22 nt, Human
ccaaacugugucgucugcauag

SEQ ID NO: 52514 - RNA, 21 nt, Human
ccaaagaacugccauuuguca

SEQ ID NO: 52515 - RNA, 22 nt, Human
ccaaaggcggaacugagucucu

SEQ ID NO: 52516 - RNA, 22 nt, Human
ccaaaguccuuucuccaccugc

SEQ ID NO: 52517 - RNA, 22 nt, Human
ccaaauauuaacaaaguaauuu

SEQ ID NO: 52518 - RNA, 22 nt, Human
ccaaaucaggggccacaagcau

SEQ ID NO: 52519 - RNA, 22 nt, Human
ccaacagguguucuguuuuuca

SEQ ID NO: 52520 - RNA, 22 nt, Human
ccaacaguccagaugagauggu

SEQ ID NO: 52521 - RNA, 22 nt, Human
ccaagagcuucccauagcuucu

SEQ ID NO: 52522 - RNA, 22 nt, Human
ccaagaggcagaaugcagagaa

SEQ ID NO: 52523 - RNA, 22 nt, Human
ccaagaugaucuuuacaguguu

SEQ ID NO: 52524 - RNA, 22 nt, Human
ccaagcuacuuaggagucugag

SEQ ID NO: 52525 - RNA, 22 nt, Human
ccaagcugacugugcuguugug

SEQ ID NO: 52526 - RNA, 22 nt, Human
ccaagcugagcaccaucugauc

SEQ ID NO: 52527 - RNA, 17 nt, Human
ccaaggcuauuuguagu

SEQ ID NO: 52528 - RNA, 22 nt, Human
ccaaggcuggagugcaguggcg

SEQ ID NO: 52529 - RNA, 22 nt, Human
ccaaggcuucccagagaugcuc

SEQ ID NO: 52530 - RNA, 22 nt, Human
ccaagggaaggauguauaugau

SEQ ID NO: 52531 - RNA, 22 nt, Human
ccaagggcuauuuacagaacag

SEQ ID NO: 52532 - RNA, 22 nt, Human
ccaagguugagaaacuguagga

SEQ ID NO: 52533 - RNA, 22 nt, Human
ccaaguccugcugccacucuac

SEQ ID NO: 52534 - RNA, 22 nt, Human
ccaauaauucuucaaguguuuu

SEQ ID NO: 52535 - RNA, 22 nt, Human
ccaaugcagauaagacaaacac

SEQ ID NO: 52536 - RNA, 22 nt, Human
ccaauucaccuccuaugcacau

SEQ ID NO: 52537 - RNA, 23 nt, Human
ccaauucagauauuggcuugugc

SEQ ID NO: 52538 - RNA, 22 nt, Human
ccaauuuuauucuucugcaagu

SEQ ID NO: 52539 - RNA, 22 nt, Human
ccacaaggggacucguuaaaug

SEQ ID NO: 52540 - RNA, 21 nt, Human
ccacaauucuaguuacauaug

SEQ ID NO: 52541 - RNA, 22 nt, Human
ccacaauuuuaugauuuaggag

SEQ ID NO: 52542 - RNA, 22 nt, Human
ccacacagauaaguguuuucua

SEQ ID NO: 52543 - RNA, 22 nt, Human
ccacacagggggaugaguuauu

SEQ ID NO: 52544 - RNA, 22 nt, Human
ccacacagucaguuuccaagaa

SEQ ID NO: 52545 - RNA, 22 nt, Human
ccacacuaaacugcucaaacca

SEQ ID NO: 52546 - RNA, 22 nt, Human
ccacacuccccgcaggcguagg

SEQ ID NO: 52547 - RNA, 22 nt, Human
ccacagaaagccugggaagugg

SEQ ID NO: 52548 - RNA, 22 nt, Human
ccacagaaaguugucuagagua

SEQ ID NO: 52549 - RNA, 22 nt, Human
ccacagaaucgcuaguggagca

SEQ ID NO: 52550 - RNA, 22 nt, Human
ccacagaauucugucuccagga

SEQ ID NO: 52551 - RNA, 22 nt, Human
ccacagagcauuagauuucaga

SEQ ID NO: 52552 - RNA, 22 nt, Human
ccacagaggacaacugccuggc

SEQ ID NO: 52553 - RNA, 22 nt, Human
ccacagagucuuccuucucuuc

SEQ ID NO: 52554 - RNA, 22 nt, Human
ccacagauuauuucuaaacagg

SEQ ID NO: 52555 - RNA, 22 nt, Human
ccacagcaccgcugccaguccc

SEQ ID NO: 52556 - RNA, 22 nt, Human
ccacagcugaaagcagaggcuc

SEQ ID NO: 52557 - RNA, 22 nt, Human
ccacagcuucuuauaucacugg

SEQ ID NO: 52558 - RNA, 22 nt, Human
ccacaggaaguuaugaguacua

SEQ ID NO: 52559 - RNA, 22 nt, Human
ccacaggacacaacugcugacc

SEQ ID NO: 52560 - RNA, 22 nt, Human
ccacaggacaguuaaugugcag

SEQ ID NO: 52561 - RNA, 22 nt, Human
ccacagggaacaugacagccuu

SEQ ID NO: 52562 - RNA, 22 nt, Human
ccacagggcacaagggagguug

SEQ ID NO: 52563 - RNA, 22 nt, Human
ccacagggugucaucagcuuga

SEQ ID NO: 52564 - RNA, 22 nt, Human
ccacaguaaauggauucagacc

SEQ ID NO: 52565 - RNA, 22 nt, Human
ccacaguaagagauaguuuaug

SEQ ID NO: 52566 - RNA, 22 nt, Human
ccacaguagcauccaaacagua

SEQ ID NO: 52567 - RNA, 22 nt, Human
ccacaguccgggcuggcaggac

SEQ ID NO: 52568 - RNA, 22 nt, Human
ccacagucuagcuagaaggcau

SEQ ID NO: 52569 - RNA, 22 nt, Human
ccacagucuaugcaacaagguc

SEQ ID NO: 52570 - RNA, 22 nt, Human
ccacagugaguuagauugacca

SEQ ID NO: 52571 - RNA, 22 nt, Human
ccacagugaguucuguacucug

SEQ ID NO: 52572 - RNA, 22 nt, Human
ccacagugauucacuuuugaag

SEQ ID NO: 52573 - RNA, 22 nt, Human
ccacaguguggcauaaacugua

SEQ ID NO: 52574 - RNA, 22 nt, Human
ccacaguuuaggaagucacucu

SEQ ID NO: 52575 - RNA, 22 nt, Human
ccacaguuugccagccaggaau

SEQ ID NO: 52576 - RNA, 22 nt, Human
ccacaucagaaauguuuacuca

SEQ ID NO: 52577 - RNA, 22 nt, Human
ccacaucuguucuuaguucuga

SEQ ID NO: 52578 - RNA, 22 nt, Human
ccacaugaaauugcuuauauuu

SEQ ID NO: 52579 - RNA, 22 nt, Human
ccacaugugcacugcuguaugg

SEQ ID NO: 52580 - RNA, 22 nt, Human
ccacauucaccagcugcacgac

SEQ ID NO: 52581 - RNA, 22 nt, Human
ccacauucaguccaggcuugga

SEQ ID NO: 52582 - RNA, 22 nt, Human
ccacauucucauguaauccuuu

SEQ ID NO: 52583 - RNA, 22 nt, Human
ccaccagcuuugccacccugcu

SEQ ID NO: 52584 - RNA, 22 nt, Human
ccaccagcuuuggcggugacag

SEQ ID NO: 52585 - RNA, 22 nt, Human
ccaccaggcacucacagggaag

SEQ ID NO: 52586 - RNA, 22 nt, Human
ccacccagcagaggaggcaaga

SEQ ID NO: 52587 - RNA, 22 nt, Human
ccaccccuguagagggacagac

SEQ ID NO: 52588 - RNA, 22 nt, Human
ccacccugagccgcaagagcag

SEQ ID NO: 52589 - RNA, 22 nt, Human
ccacccuggacaggccucugag

SEQ ID NO: 52590 - RNA, 20 nt, Human
ccacccuguccggggcggag

SEQ ID NO: 52591 - RNA, 22 nt, Human
ccacccuuccauucuuccucuu

SEQ ID NO: 52592 - RNA, 23 nt, Human
ccaccuggacucugggcaggugc

SEQ ID NO: 52593 - RNA, 22 nt, Human
ccaccuggggccucugagucuc

SEQ ID NO: 52594 - RNA, 23 nt, Human
ccagggccccuacaccacugucc

SEQ ID NO: 52595 - RNA, 22 nt, Human
ccagggccucguguucugagug

SEQ ID NO: 52596 - RNA, 22 nt, Human
ccagggcuccccagaaguaccc

SEQ ID NO: 52597 - RNA, 22 nt, Human
ccagggcugccgcaucccuggu

SEQ ID NO: 52598 - RNA, 22 nt, Human
ccagggcugccuggccgugugu

SEQ ID NO: 52599 - RNA, 22 nt, Human
ccagggcuucaguuagugguga

SEQ ID NO: 52600 - RNA, 19 nt, Human
ccagggcuuuaaguugagg

SEQ ID NO: 52601 - RNA, 22 nt, Human
ccaggggccugugaaggugccc

SEQ ID NO: 52602 - RNA, 22 nt, Human
ccaggggcucucagggugugug

SEQ ID NO: 52603 - RNA, 22 nt, Human
ccagggguuggagguugcagug

SEQ ID NO: 52604 - RNA, 21 nt, Human
ccaggguccagcugccauggu

SEQ ID NO: 52605 - RNA, 22 nt, Human
ccagggucuucgaggcagcaau

SEQ ID NO: 52606 - RNA, 22 nt, Human
ccagggucuuggagaggagugc

SEQ ID NO: 52607 - RNA, 22 nt, Human
ccagggugaccagcuggccuag

SEQ ID NO: 52608 - RNA, 22 nt, Human
ccauuagaagauguaauagaga

SEQ ID NO: 52609 - RNA, 22 nt, Human
ccauuaguaccucuggaaaauu

SEQ ID NO: 52610 - RNA, 22 nt, Human
ccauuccaugugcuacacauaa

SEQ ID NO: 52611 - RNA, 22 nt, Human
ccauucugacaccuaauucugu

SEQ ID NO: 52612 - RNA, 22 nt, Human
ccauucugagucuuaugucuuu

SEQ ID NO: 52613 - RNA, 20 nt, Human
ccauucugggugcagucugg

SEQ ID NO: 52614 - RNA, 22 nt, Human
ccauugaauccucagcugcuag

SEQ ID NO: 52615 - RNA, 21 nt, Human
ccauugagaccauggaggagu

SEQ ID NO: 52616 - RNA, 19 nt, Human
ccauuguaaagaaaaaugu

SEQ ID NO: 52617 - RNA, 22 nt, Human
ccauuguaguaucuguuuuagu

SEQ ID NO: 52618 - RNA, 22 nt, Human
ccauuuggcaagaaagagucau

SEQ ID NO: 52619 - RNA, 22 nt, Human
ccauuugucaccucugcacucc

SEQ ID NO: 52620 - RNA, 22 nt, Human
ccauuugugcuucuucaaagca

SEQ ID NO: 52621 - RNA, 22 nt, Human
ccauuuguuguguauuaauauu

SEQ ID NO: 52622 - RNA, 22 nt, Human
ccauuuugucuccugaaaucua

SEQ ID NO: 52623 - RNA, 22 nt, Human
ccauuuuucauaaacuauccaa

SEQ ID NO: 52624 - RNA, 22 nt, Human
cccaaaaugugcauguucgaau

SEQ ID NO: 52625 - RNA, 22 nt, Human
cccaaagaaaacaguaccucag

SEQ ID NO: 52626 - RNA, 22 nt, Human
cccaaaggaaggacaaggcaga

SEQ ID NO: 52627 - RNA, 22 nt, Human
cccaacacucaccuccggauua

SEQ ID NO: 52628 - RNA, 22 nt, Human
cccaaccagaaauugacagaga

SEQ ID NO: 52629 - RNA, 22 nt, Human
cccaagaucuaggacagaaaga

SEQ ID NO: 52630 - RNA, 22 nt, Human
cccaaggaagacgcuugugaua

SEQ ID NO: 52631 - RNA, 22 nt, Human
cccaaggccuucaagccagcuc

SEQ ID NO: 52632 - RNA, 22 nt, Human
cccaauuucuuccucauuugcc

SEQ ID NO: 52633 - RNA, 20 nt, Human
cccacacccuucccacuugg

SEQ ID NO: 52634 - RNA, 22 nt, Human
cccacaggcaggugcaugggcu

SEQ ID NO: 52635 - RNA, 22 nt, Human
cccacaggcccugcugccuuga

SEQ ID NO: 52636 - RNA, 22 nt, Human
cccacaggugugagcuugcugg

SEQ ID NO: 52637 - RNA, 22 nt, Human
cccaccccuggacaggugagug

SEQ ID NO: 52638 - RNA, 22 nt, Human
cccacucuggcucccuucuagu

SEQ ID NO: 52639 - RNA, 22 nt, Human
cccacuguguugcagucuagug

SEQ ID NO: 52640 - RNA, 20 nt, Human
cccagaagcuuaacagagca

SEQ ID NO: 52641 - RNA, 22 nt, Human
cccagaaggcuugccaggaagc

SEQ ID NO: 52642 - RNA, 21 nt, Human
cccagaaguuccauggggggc

SEQ ID NO: 52643 - RNA, 22 nt, Human
cccagacauaacagcagagagg

SEQ ID NO: 52644 - RNA, 23 nt, Human
cccagaccuugugcugcccuugg

SEQ ID NO: 52645 - RNA, 22 nt, Human
cccagacucaucccugggagcu

SEQ ID NO: 52646 - RNA, 22 nt, Human
cccagacugcagagcgggcaga

SEQ ID NO: 52647 - RNA, 22 nt, Human
cccagagaauuccacauagagg

SEQ ID NO: 52648 - RNA, 22 nt, Human
cccagagagcacaggugguggg

SEQ ID NO: 52649 - RNA, 22 nt, Human
cccagagagcuuucuuugugcu

SEQ ID NO: 52650 - RNA, 20 nt, Human
cccagagcacuuuuucaugu

SEQ ID NO: 52651 - RNA, 20 nt, Human
cccagagccauagccagaca

SEQ ID NO: 52652 - RNA, 22 nt, Human
cccagagccgguggugcucaca

SEQ ID NO: 52653 - RNA, 21 nt, Human
cccagagccuagggagggcac

SEQ ID NO: 52654 - RNA, 18 nt, Human
cccagaggaaugccugga

SEQ ID NO: 52655 - RNA, 22 nt, Human
cccagaggaggaucucggcccg

SEQ ID NO: 52656 - RNA, 22 nt, Human
cccagagggaagggaaugaggu

SEQ ID NO: 52657 - RNA, 22 nt, Human
cccagaggugacaucccauucu

SEQ ID NO: 52658 - RNA, 22 nt, Human
cccagaguauuugugauguuag

SEQ ID NO: 52659 - RNA, 22 nt, Human
cccagagucaagcuuaccauua

SEQ ID NO: 52660 - RNA, 22 nt, Human
cccagagucacaugggguguuc

SEQ ID NO: 52661 - RNA, 22 nt, Human
cccagaguuggucaggggaccc

SEQ ID NO: 52662 - RNA, 22 nt, Human
cccagcacaggcaauuccauac

SEQ ID NO: 52663 - RNA, 22 nt, Human
cccagcagaccgcugugauggc

SEQ ID NO: 52664 - RNA, 23 nt, Human
cccagcagauuguaaagugucca

SEQ ID NO: 52665 - RNA, 22 nt, Human
cccagcagccuugucccuucuc

SEQ ID NO: 52666 - RNA, 22 nt, Human
cccagcagcuugcacagugcug

SEQ ID NO: 52667 - RNA, 22 nt, Human
cccagcaggaggagguugcagu

SEQ ID NO: 52668 - RNA, 22 nt, Human
cccagcaggugccaucacucug

SEQ ID NO: 52669 - RNA, 22 nt, Human
cccagcaucccagugggcagca

SEQ ID NO: 52670 - RNA, 22 nt, Human
cccagcauccucagggagcggg

SEQ ID NO: 52671 - RNA, 22 nt, Human
cccagccaaaagcaaguuuacc

SEQ ID NO: 52672 - RNA, 22 nt, Human
cccagccagccucuucccauau

SEQ ID NO: 52673 - RNA, 22 nt, Human
cccagcccacgguccugggugg

SEQ ID NO: 52674 - RNA, 22 nt, Human
cccagcccagcguucgaggggu

SEQ ID NO: 52675 - RNA, 18 nt, Human
cccagccucuccuuucua

SEQ ID NO: 52676 - RNA, 22 nt, Human
cccagccucuggauucugcccu

SEQ ID NO: 52677 - RNA, 22 nt, Human
cccagccucuggguucugccgg

SEQ ID NO: 52678 - RNA, 22 nt, Human
cccagccucuguuugcuccucu

SEQ ID NO: 52679 - RNA, 22 nt, Human
cccagccuggugcacugugggg

SEQ ID NO: 52680 - RNA, 18 nt, Human
cccagcuccacuucccuc

SEQ ID NO: 52681 - RNA, 22 nt, Human
cccagcucccugguauuugugc

SEQ ID NO: 52682 - RNA, 22 nt, Human
cccagcuccgagcuccgagccg

SEQ ID NO: 52683 - RNA, 22 nt, Human
cccagcuccuuggaugggcagg

SEQ ID NO: 52684 - RNA, 22 nt, Human
cccagcucucugcucuuagccu

SEQ ID NO: 52685 - RNA, 22 nt, Human
cccagcucugccaucuacccac

SEQ ID NO: 52686 - RNA, 22 nt, Human
cccagcucuuccugggagcuaa

SEQ ID NO: 52687 - RNA, 22 nt, Human
cccagcucuuuuagcggcaucu

SEQ ID NO: 52688 - RNA, 22 nt, Human
cccagcugcaccucuauggccu

SEQ ID NO: 52689 - RNA, 23 nt, Human
cccagcugcagacaagggagggu

SEQ ID NO: 52690 - RNA, 17 nt, Human
cccagcugcgucugagg

SEQ ID NO: 52691 - RNA, 18 nt, Human
cccagcuggugggucagu

SEQ ID NO: 52692 - RNA, 22 nt, Human
cccagcuguggcagaggccggg

SEQ ID NO: 52693 - RNA, 22 nt, Human
cccagcuucugagggggccuug

SEQ ID NO: 52694 - RNA, 19 nt, Human
cccagcuugaccaccugcu

SEQ ID NO: 52695 - RNA, 22 nt, Human
cccagcuugcccaggacugagg

SEQ ID NO: 52696 - RNA, 22 nt, Human
cccaggaaacccgaaggcgacc

SEQ ID NO: 52697 - RNA, 22 nt, Human
cccaggaaagagacugcugggu

SEQ ID NO: 52698 - RNA, 22 nt, Human
cccaggaaaguggaggcggcug

SEQ ID NO: 52699 - RNA, 22 nt, Human
cccaggaagaaauucugauuug

SEQ ID NO: 52700 - RNA, 22 nt, Human
cccaggaagaggggucaggugu

SEQ ID NO: 52701 - RNA, 22 nt, Human
cccaggaagagugaguggcauu

SEQ ID NO: 52702 - RNA, 22 nt, Human
cccaggaaggagcuguguauuu

SEQ ID NO: 52703 - RNA, 22 nt, Human
cccaggaagguggucuguggcu

SEQ ID NO: 52704 - RNA, 22 nt, Human
cccaggaaguugagacugcagu

SEQ ID NO: 52705 - RNA, 22 nt, Human
cccaggaaguugaugcagagga

SEQ ID NO: 52706 - RNA, 22 nt, Human
cccaggaaugaggggcggaggc

SEQ ID NO: 52707 - RNA, 22 nt, Human
cccaggacucggcacucuccuu

SEQ ID NO: 52708 - RNA, 22 nt, Human
cccaggagaauauaauguucuu

SEQ ID NO: 52709 - RNA, 22 nt, Human
cccaggagaauauuuuuggguc

SEQ ID NO: 52710 - RNA, 22 nt, Human
cccaggagacagaaacagaggu

SEQ ID NO: 52711 - RNA, 22 nt, Human
cccaggagaccuagaucuguuu

SEQ ID NO: 52712 - RNA, 22 nt, Human
cccaggagauaacguucccaag

SEQ ID NO: 52713 - RNA, 22 nt, Human
cccaggagaucuggaucucguc

SEQ ID NO: 52714 - RNA, 22 nt, Human
ccaggaaguaugacccaacaga

SEQ ID NO: 52715 - RNA, 22 nt, Human
ccaggacaggaguuggcuucgc

SEQ ID NO: 52716 - RNA, 22 nt, Human
ccaggacagggagacgggagcc

SEQ ID NO: 52717 - RNA, 22 nt, Human
gaaaauugaaucaguagcugau

SEQ ID NO: 52718 - RNA, 22 nt, Human
gaaacaacuacuauugauuucu

SEQ ID NO: 52719 - RNA, 22 nt, Human
gaaacacuaugccaagacaggg

SEQ ID NO: 52720 - RNA, 22 nt, Human
gaaacagcuuuaagugauacug

SEQ ID NO: 52721 - RNA, 22 nt, Human
gaaacauucagucaacaguguu

SEQ ID NO: 52722 - RNA, 22 nt, Human
gaaacauucauaugagaaaccu

SEQ ID NO: 52723 - RNA, 20 nt, Human
gaaacauuggcagcaacuga

SEQ ID NO: 52724 - RNA, 22 nt, Human
gaaaccagauaagggaggcuga

SEQ ID NO: 52725 - RNA, 22 nt, Human
gaaacccugagagguggucugg

SEQ ID NO: 52726 - RNA, 22 nt, Human
gaaacguuguggaaaauccucu

SEQ ID NO: 52727 - RNA, 22 nt, Human
gaaacugaguaggcuagagcac

SEQ ID NO: 52728 - RNA, 22 nt, Human
gaaacuguauguaguuuuuggg

SEQ ID NO: 52729 - RNA, 22 nt, Human
gaaagacucuugaugucuuugg

SEQ ID NO: 52730 - RNA, 21 nt, Human
gaaagcacagaaaggacucuu

SEQ ID NO: 52731 - RNA, 22 nt, Human
gaaagcacaguucugaccaugu

SEQ ID NO: 52732 - RNA, 22 nt, Human
gaaagcagcuaagucuuaugau

SEQ ID NO: 52733 - RNA, 22 nt, Human
gaaagcaguaaaugggucccau

SEQ ID NO: 52734 - RNA, 22 nt, Human
gaaagcaguauuuaguucuguu

SEQ ID NO: 52735 - RNA, 22 nt, Human
gaaagccauagcccagcuuuac

SEQ ID NO: 52736 - RNA, 22 nt, Human
gaaagcuaaaugaggucuuaca

SEQ ID NO: 52737 - RNA, 22 nt, Human
gaaagcugaaccaggaaccaug

SEQ ID NO: 52738 - RNA, 22 nt, Human
gaaaggaaauugagggacgcau

SEQ ID NO: 52739 - RNA, 19 nt, Human
ccuagagggaaggcaggac

SEQ ID NO: 52740 - RNA, 22 nt, Human
ccuagcagaagcugcaaugccu

SEQ ID NO: 52741 - RNA, 22 nt, Human
ccuagcagggagaggauaccug

SEQ ID NO: 52742 - RNA, 21 nt, Human
ccuaggaggcuuaauuaggcu

SEQ ID NO: 52743 - RNA, 22 nt, Human
ccuagggauguguuagccagau

SEQ ID NO: 52744 - RNA, 22 nt, Human
ccuaugccugucacucugcgcu

SEQ ID NO: 52745 - RNA, 21 nt, Human
ccuauugaauauaggaagauu

SEQ ID NO: 52746 - RNA, 22 nt, Human
ccuauugacaauucucuucucc

SEQ ID NO: 52747 - RNA, 22 nt, Human
ccucaaaggccuggcaccagaa

SEQ ID NO: 52748 - RNA, 22 nt, Human
ccucaaauaaguuuuauuuauc

SEQ ID NO: 52749 - RNA, 23 nt, Human
ccucaaauguagccuuuuuccca

SEQ ID NO: 52750 - RNA, 22 nt, Human
ccucaagaugcacugaacauau

SEQ ID NO: 52751 - RNA, 19 nt, Human
ccucaaguaugaagaggcc

SEQ ID NO: 52752 - RNA, 22 nt, Human
ccucaaguuggaaauaaaaugu

SEQ ID NO: 52753 - RNA, 22 nt, Human
ccucacacaguuaucucuucau

SEQ ID NO: 52754 - RNA, 22 nt, Human
ccucacagagcccagaugucua

SEQ ID NO: 52755 - RNA, 22 nt, Human
ccucacagucaguucuuagucu

SEQ ID NO: 52756 - RNA, 22 nt, Human
ccucacccacuacacucaaggg

SEQ ID NO: 52757 - RNA, 22 nt, Human
ccucaccucagucugggccuca

SEQ ID NO: 52758 - RNA, 22 nt, Human
ccucaccuuuucucugauugcu

SEQ ID NO: 52759 - RNA, 22 nt, Human
ccucacugaagaggugacauuu

SEQ ID NO: 52760 - RNA, 22 nt, Human
ccucacugcuauguguuugcuc

SEQ ID NO: 52761 - RNA, 22 nt, Human
ccucacugucacuuauaguggu

SEQ ID NO: 52762 - RNA, 22 nt, Human
ccucacugucaucaguaguuau

SEQ ID NO: 52763 - RNA, 22 nt, Human
ccucacuuuccuuucuccuggg

SEQ ID NO: 52764 - RNA, 22 nt, Human
ccucagaacggaaaugguuuug

SEQ ID NO: 52765 - RNA, 22 nt, Human
ccucagaagacuuuagggaaga

SEQ ID NO: 52766 - RNA, 22 nt, Human
ccucagaccccugcugagcuuc

SEQ ID NO: 52767 - RNA, 22 nt, Human
ccucagacgcaggccuaugggc

SEQ ID NO: 52768 - RNA, 22 nt, Human
ccucagacucagugcguuguga

SEQ ID NO: 52769 - RNA, 22 nt, Human
ccucagagaaagguauggcuga

SEQ ID NO: 52770 - RNA, 22 nt, Human
ccucagagaaaugucuauucaa

SEQ ID NO: 52771 - RNA, 22 nt, Human
ccucagaggcaugguuagaaua

SEQ ID NO: 52772 - RNA, 22 nt, Human
ccucagaggugaacaucagugc

SEQ ID NO: 52773 - RNA, 22 nt, Human
ccucagagguguggcaucucug

SEQ ID NO: 52774 - RNA, 22 nt, Human
ccucagcagacacgcuucucac

SEQ ID NO: 52775 - RNA, 22 nt, Human
ccucagcucccaugagaucugc

SEQ ID NO: 52776 - RNA, 22 nt, Human
ccucagcucuucccugugcaca

SEQ ID NO: 52777 - RNA, 22 nt, Human
ccucaggaaaugaauaaauggc

SEQ ID NO: 52778 - RNA, 20 nt, Human
ccucaggaugagggugagca

SEQ ID NO: 52779 - RNA, 22 nt, Human
ccucaggcagugguauggaugg

SEQ ID NO: 52780 - RNA, 22 nt, Human
ccucaggccucugccucauugg

SEQ ID NO: 52781 - RNA, 22 nt, Human
ccucaggcuagcuacugucccu

SEQ ID NO: 52782 - RNA, 22 nt, Human
ccucaggcugcucacacuuguc

SEQ ID NO: 52783 - RNA, 22 nt, Human
ccucaggcuucgucuuccaccc

SEQ ID NO: 52784 - RNA, 22 nt, Human
ccucagggccaucucugucccu

SEQ ID NO: 52785 - RNA, 22 nt, Human
ccucagucuugaauuagccaga

SEQ ID NO: 52786 - RNA, 22 nt, Human
ccucagugagaugcucagcgaa

SEQ ID NO: 52787 - RNA, 20 nt, Human
ccucaguguccuggacuggg

SEQ ID NO: 52788 - RNA, 23 nt, Human
ccucaugaaggucugcuuccugg

SEQ ID NO: 52789 - RNA, 22 nt, Human
ccucaugguacuuacuguagcu

SEQ ID NO: 52790 - RNA, 22 nt, Human
ccucauguugcucgcaucugca

SEQ ID NO: 52791 - RNA, 22 nt, Human
ccucauuaacacaaugucauuu

SEQ ID NO: 52792 - RNA, 22 nt, Human
ccuccacugcuucccagcuuug

SEQ ID NO: 52793 - RNA, 20 nt, Human
ccuccacugucacugaccug

SEQ ID NO: 52794 - RNA, 22 nt, Human
ccuccagacuuuggccauccuc

SEQ ID NO: 52795 - RNA, 22 nt, Human
ccuccagaggguuucccaugaa

SEQ ID NO: 52796 - RNA, 22 nt, Human
ccuccagcgcgauccacuccgg

SEQ ID NO: 52797 - RNA, 22 nt, Human
ccuccagucaccuggaugagaa

SEQ ID NO: 52798 - RNA, 22 nt, Human
ccucccaccauuuagagagagc

SEQ ID NO: 52799 - RNA, 23 nt, Human
ccucccaccuauuucacuuucuu

SEQ ID NO: 52800 - RNA, 22 nt, Human
ccucccaggcauugccauuuuc

SEQ ID NO: 52801 - RNA, 23 nt, Human
ccucccaggcugcgagucccgag

SEQ ID NO: 52802 - RNA, 22 nt, Human
ccuccccacccacggcuggugg

SEQ ID NO: 52803 - RNA, 22 nt, Human
ccuccccugcucagaacucugg

SEQ ID NO: 52804 - RNA, 19 nt, Human
ccuccccuuggaccagcaa

SEQ ID NO: 52805 - RNA, 22 nt, Human
ccucccugcgcuccugcggcgg

SEQ ID NO: 52806 - RNA, 22 nt, Human
ccuccucuggugcugccaaccc

SEQ ID NO: 52807 - RNA, 22 nt, Human
ccuccugcggcguccgcgcucu

SEQ ID NO: 52808 - RNA, 22 nt, Human
ccuccuggagcauuggugagga

SEQ ID NO: 52809 - RNA, 22 nt, Human
ccuccugggagagcacggaggg

SEQ ID NO: 52810 - RNA, 22 nt, Human
ccuccuggugacaaggcaaagc

SEQ ID NO: 52811 - RNA, 22 nt, Human
ccuccugguugcaaugaaaugg

SEQ ID NO: 52812 - RNA, 22 nt, Human
ccuccuguuguccugcuggggc

SEQ ID NO: 52813 - RNA, 22 nt, Human
ccuccuuccugggacagagcug

SEQ ID NO: 52814 - RNA, 22 nt, Human
ccuccuuuccuguuuuccugag

SEQ ID NO: 52815 - RNA, 22 nt, Human
ccucguccacaauccuugcaca

SEQ ID NO: 52816 - RNA, 22 nt, Human
ccucuauagaugugugcaucua

SEQ ID NO: 52817 - RNA, 22 nt, Human
ccucucagccggacugucaggc

SEQ ID NO: 52818 - RNA, 22 nt, Human
ccucucaguauugaacuuuaua

SEQ ID NO: 52819 - RNA, 22 nt, Human
ccucucccacguggcagaggcu

SEQ ID NO: 52820 - RNA, 22 nt, Human
ccucucccaggcgcggcggcag

SEQ ID NO: 52821 - RNA, 22 nt, Human
ccucuccccucccaaggcggga

SEQ ID NO: 52822 - RNA, 22 nt, Human
ccucuccuugcacccgucccgc

SEQ ID NO: 52823 - RNA, 22 nt, Human
ccucucucagcuugcugcaacu

SEQ ID NO: 52824 - RNA, 22 nt, Human
ccucucuccaagggaaauccua

SEQ ID NO: 52825 - RNA, 22 nt, Human
ccucucuccuuccuuugccaaa

SEQ ID NO: 52826 - RNA, 23 nt, Human
ugggaaauguagccuuggcauga

SEQ ID NO: 52827 - RNA, 22 nt, Human
ugggaaauguguuucuggacca

SEQ ID NO: 52828 - RNA, 19 nt, Human
ugggaacuuguuagacaug

SEQ ID NO: 52829 - RNA, 18 nt, Human
ugggaagaaauucuucuc

SEQ ID NO: 52830 - RNA, 22 nt, Human
ugggaagaggaugaggcauaug

SEQ ID NO: 52831 - RNA, 22 nt, Human
ugggaagaggcgggaggcuguu

SEQ ID NO: 52832 - RNA, 22 nt, Human
ugggaagagggguauaaagaag

SEQ ID NO: 52833 - RNA, 22 nt, Human
ugggaagcacgcucagcagaaa

SEQ ID NO: 52834 - RNA, 22 nt, Human
ugggaaggauacguuacaagau

SEQ ID NO: 52835 - RNA, 22 nt, Human
ugggaaggcagucacuguccua

SEQ ID NO: 52836 - RNA, 22 nt, Human
ugggaaguaggacagugcaguu

SEQ ID NO: 52837 - RNA, 22 nt, Human
ugggaauggaugcuaagugcua

SEQ ID NO: 52838 - RNA, 22 nt, Human
ugggaauguagaauguaaacca

SEQ ID NO: 52839 - RNA, 22 nt, Human
ugggaauguggcaaggcauaga

SEQ ID NO: 52840 - RNA, 22 nt, Human
ugggaauugaggugauugugag

SEQ ID NO: 52841 - RNA, 22 nt, Human
ugggacacacaaggucagcucu

SEQ ID NO: 52842 - RNA, 22 nt, Human
ugggacagugaccccagagguc

SEQ ID NO: 52843 - RNA, 21 nt, Human
ugggacagugauggcuccucc

SEQ ID NO: 52844 - RNA, 22 nt, Human
ugggacaugcuuggaaucuaga

SEQ ID NO: 52845 - RNA, 22 nt, Human
ugggaccagauaaagggagguc

SEQ ID NO: 52846 - RNA, 21 nt, Human
ugggaccuagcuuugcacagg

SEQ ID NO: 52847 - RNA, 16 nt, Human
ugggaccuguggccaa

SEQ ID NO: 52848 - RNA, 20 nt, Human
ugggacugacccaucugagc

SEQ ID NO: 52849 - RNA, 22 nt, Human
ugggagaacacugcucuggaug

SEQ ID NO: 52850 - RNA, 22 nt, Human
ugggagaacccagggucaggcu

SEQ ID NO: 52851 - RNA, 22 nt, Human
ugggagaagcauggggugcaga

SEQ ID NO: 52852 - RNA, 22 nt, Human
ugggagacacuggugggagcuu

SEQ ID NO: 52853 - RNA, 22 nt, Human
ugggagagagaauucccagugg

SEQ ID NO: 52854 - RNA, 22 nt, Human
ugggagagcacugcagccccgg

SEQ ID NO: 52855 - RNA, 19 nt, Human
ugggagaggcaacagagua

SEQ ID NO: 52856 - RNA, 22 nt, Human
ugggagagucuaaaaccgaggu

SEQ ID NO: 52857 - RNA, 22 nt, Human
ugggagauaauucauuguguuc

SEQ ID NO: 52858 - RNA, 22 nt, Human
ugggagauauugcuguggcugu

SEQ ID NO: 52859 - RNA, 22 nt, Human
ugggagcaaaugacugggagau

SEQ ID NO: 52860 - RNA, 22 nt, Human
ugggagcaagcuacuuagggaa

SEQ ID NO: 52861 - RNA, 22 nt, Human
ugggagcaagcuggugcuggag

SEQ ID NO: 52862 - RNA, 22 nt, Human
ugggagcacccugaggagcuuc

SEQ ID NO: 52863 - RNA, 22 nt, Human
ugggagcagccucagcuucggg

SEQ ID NO: 52864 - RNA, 22 nt, Human
ugggagcaggcugaugauaggu

SEQ ID NO: 52865 - RNA, 22 nt, Human
ugggagcccaagggagcugccg

SEQ ID NO: 52866 - RNA, 22 nt, Human
ugggagccuggcaggccagagg

SEQ ID NO: 52867 - RNA, 22 nt, Human
ugggagcugggguuggacgucu

SEQ ID NO: 52868 - RNA, 22 nt, Human
ugggaggaaugucacugagcca

SEQ ID NO: 52869 - RNA, 22 nt, Human
ugggaggcuuccagaccuugcu

SEQ ID NO: 52870 - RNA, 22 nt, Human
ugggaggugauuaaauuauggg

SEQ ID NO: 52871 - RNA, 22 nt, Human
ugggaguacuaugugauaggau

SEQ ID NO: 52872 - RNA, 22 nt, Human
ugggagucagucguucucagag

SEQ ID NO: 52873 - RNA, 22 nt, Human
ugggagugcaccugggacacga

SEQ ID NO: 52874 - RNA, 18 nt, Human
ugggagugggaguggaua

SEQ ID NO: 52875 - RNA, 22 nt, Human
ugggaguggggcauagaaggua

SEQ ID NO: 52876 - RNA, 22 nt, Human
ugggaguguucuuggcuugcuu

SEQ ID NO: 52877 - RNA, 22 nt, Human
ugggaguuuguuagaaaugcag

SEQ ID NO: 52878 - RNA, 22 nt, Human
ugggauaagguaugugaaguac

SEQ ID NO: 52879 - RNA, 22 nt, Human
ugggauagaaauuuagaacaag

SEQ ID NO: 52880 - RNA, 23 nt, Human
ugggauagaauuucauggcugcu

SEQ ID NO: 52881 - RNA, 22 nt, Human
ugggauaguagcugagagacaa

SEQ ID NO: 52882 - RNA, 22 nt, Human
ugggauauaguaaaacaugaau

SEQ ID NO: 52883 - RNA, 22 nt, Human
ugggaugagcuauauagaaagu

SEQ ID NO: 52884 - RNA, 22 nt, Human
ugggaugauagguaaguaauua

SEQ ID NO: 52885 - RNA, 22 nt, Human
uggcagagaacacacaugauuc

SEQ ID NO: 52886 - RNA, 22 nt, Human
uggcagagaaccugggcuuugu

SEQ ID NO: 52887 - RNA, 22 nt, Human
uggcagagacuccuccugggag

SEQ ID NO: 52888 - RNA, 22 nt, Human
uggcagagagacucuccuugau

SEQ ID NO: 52889 - RNA, 22 nt, Human
uggcagagagagugcagucgac

SEQ ID NO: 52890 - RNA, 22 nt, Human
uggcagagaugaagaguuguuu

SEQ ID NO: 52891 - RNA, 19 nt, Human
uggcagaggcaguuuguac

SEQ ID NO: 52892 - RNA, 21 nt, Human
uggcagagugcagucuauaca

SEQ ID NO: 52893 - RNA, 22 nt, Human
uggcagaguucgcugugccuuu

SEQ ID NO: 52894 - RNA, 22 nt, Human
uggcagauaaacaugugauaaa

SEQ ID NO: 52895 - RNA, 22 nt, Human
uggcagcaauuugugauguuga

SEQ ID NO: 52896 - RNA, 22 nt, Human
uggcagcagaacaugaaaccca

SEQ ID NO: 52897 - RNA, 22 nt, Human
uggcagcauguuauguaaggaa

SEQ ID NO: 52898 - RNA, 22 nt, Human
uggcagccugcgugaaggagcu

SEQ ID NO: 52899 - RNA, 22 nt, Human
uggcagcuacagacagagguga

SEQ ID NO: 52900 - RNA, 22 nt, Human
uggcagcuauggucuaagggcc

SEQ ID NO: 52901 - RNA, 22 nt, Human
uggcagcuccggguaggggcug

SEQ ID NO: 52902 - RNA, 22 nt, Human
uggcagcuccuggggccagcac

SEQ ID NO: 52903 - RNA, 22 nt, Human
uggcagcucuguucaacaugag

SEQ ID NO: 52904 - RNA, 22 nt, Human
uggcagcuggagggcaauggcc

SEQ ID NO: 52905 - RNA, 22 nt, Human
uggcagcuggcucugcgcaggc

SEQ ID NO: 52906 - RNA, 23 nt, Human
uggcagcuguguaagagaaagca

SEQ ID NO: 52907 - RNA, 22 nt, Human
uggcaggaaaaacauuggagau

SEQ ID NO: 52908 - RNA, 22 nt, Human
uggcaggaaaguaacagagcac

SEQ ID NO: 52909 - RNA, 22 nt, Human
uggcaggaaauacccugccuag

SEQ ID NO: 52910 - RNA, 22 nt, Human
uggcaggaaggagacucagccc

SEQ ID NO: 52911 - RNA, 20 nt, Human
uggcaggagccacuggaagc

SEQ ID NO: 52912 - RNA, 22 nt, Human
uggcaggagguuuucuccagga

SEQ ID NO: 52913 - RNA, 22 nt, Human
uggcaggaucuuugagagugaa

SEQ ID NO: 52914 - RNA, 22 nt, Human
uggcaggcugaguuggccuggu

SEQ ID NO: 52915 - RNA, 22 nt, Human
uggcagggagccaccggucaug

SEQ ID NO: 52916 - RNA, 22 nt, Human
uggcagggaguucguucacaac

SEQ ID NO: 52917 - RNA, 22 nt, Human
uggcagggaguugcaggauuuc

SEQ ID NO: 52918 - RNA, 18 nt, Human
uggcaggggcaguacgcc

SEQ ID NO: 52919 - RNA, 22 nt, Human
uggcaggguacaccuuaacacc

SEQ ID NO: 52920 - RNA, 22 nt, Human
uggcagggucuugcuguguugc

SEQ ID NO: 52921 - RNA, 22 nt, Human
uggcagguacccauuggcugua

SEQ ID NO: 52922 - RNA, 22 nt, Human
uggcagguagaguucugagaug

SEQ ID NO: 52923 - RNA, 22 nt, Human
uggcaggugccuguaaucucag

SEQ ID NO: 52924 - RNA, 22 nt, Human
uggcagguuuccuccucauagu

SEQ ID NO: 52925 - RNA, 22 nt, Human
uggcagguuucguuaaaaaugg

SEQ ID NO: 52926 - RNA, 22 nt, Human
uggcaguccagacccuggacuc

SEQ ID NO: 52927 - RNA, 22 nt, Human
uggcaguccccugugccuggaa

SEQ ID NO: 52928 - RNA, 22 nt, Human
uggcagugaaagacaauugggc

SEQ ID NO: 52929 - RNA, 22 nt, Human
uggcagugaagcugucuuuagg

SEQ ID NO: 52930 - RNA, 23 nt, Human
uggcagugcccagggagaugauc

SEQ ID NO: 52931 - RNA, 22 nt, Human
uggcaguggauaggggagcggu

SEQ ID NO: 52932 - RNA, 22 nt, Human
uggcaguggcuuugcuggugga

SEQ ID NO: 52933 - RNA, 22 nt, Human
uggcaguggugucugcacaggc

SEQ ID NO: 52934 - RNA, 22 nt, Human
uggcaguguccuacugguuggu

SEQ ID NO: 52935 - RNA, 22 nt, Human
uaacuuugaagggaauuuuacu

SEQ ID NO: 52936 - RNA, 22 nt, Human
uaacuuugagaacuuucuggug

SEQ ID NO: 52937 - RNA, 22 nt, Human
uaacuuuuacauuuggcucacu

SEQ ID NO: 52938 - RNA, 22 nt, Human
uaacuuuugugaucugucgauu

SEQ ID NO: 52939 - RNA, 21 nt, Human
uaacuuuugugccuaucuugu

SEQ ID NO: 52940 - RNA, 22 nt, Human
uaagaaacaugauuaauggcag

SEQ ID NO: 52941 - RNA, 22 nt, Human
uaagaaacauuuuuaugacagu

SEQ ID NO: 52942 - RNA, 22 nt, Human
uaagaaacuaaugcaauaagag

SEQ ID NO: 52943 - RNA, 22 nt, Human
uaagaaauuuaguuauagaaug

SEQ ID NO: 52944 - RNA, 22 nt, Human
uaagaacaagauguuccuguuu

SEQ ID NO: 52945 - RNA, 22 nt, Human
uaagaacucgugaucauuugaa

SEQ ID NO: 52946 - RNA, 22 nt, Human
uaagaacuucggacauguuauc

SEQ ID NO: 52947 - RNA, 22 nt, Human
uaagaagcaguucacaaguaaa

SEQ ID NO: 52948 - RNA, 22 nt, Human
uaagaagguaguuuccaaguca

SEQ ID NO: 52949 - RNA, 18 nt, Human
uaagaagguggcuccagc

SEQ ID NO: 52950 - RNA, 22 nt, Human
uaagaaguaccucuuuuccuga

SEQ ID NO: 52951 - RNA, 22 nt, Human
uaagaaguguugccuaaugcaa

SEQ ID NO: 52952 - RNA, 22 nt, Human
uaagaaguguuugcccagccau

SEQ ID NO: 52953 - RNA, 22 nt, Human
uaagaauaccucucagcucuuu

SEQ ID NO: 52954 - RNA, 22 nt, Human
uaagaauaguguuugccuuugg

SEQ ID NO: 52955 - RNA, 22 nt, Human
gugcuuuagguguuuggcugaa

SEQ ID NO: 52956 - RNA, 22 nt, Human
gugcuuucugcaugguuccuac

SEQ ID NO: 52957 - RNA, 19 nt, Human
gugcuuuuuaagagcucag

SEQ ID NO: 52958 - RNA, 22 nt, Human
guggaaaacugagaaaauugcu

SEQ ID NO: 52959 - RNA, 22 nt, Human
guggaaaagaaagucuuccuug

SEQ ID NO: 52960 - RNA, 22 nt, Human
guggaaauuuuaggaucaucuu

SEQ ID NO: 52961 - RNA, 22 nt, Human
guggaagaggcaagauagcucu

SEQ ID NO: 52962 - RNA, 22 nt, Human
guggaagccuaagaguagggag

SEQ ID NO: 52963 - RNA, 22 nt, Human
guggaaggaagagauggcccca

SEQ ID NO: 52964 - RNA, 22 nt, Human
guggaaggaauuaacagacuag

SEQ ID NO: 52965 - RNA, 22 nt, Human
guggaagggacugccuagagga

SEQ ID NO: 52966 - RNA, 22 nt, Human
guggaaggugcuagaacaagga

SEQ ID NO: 52967 - RNA, 22 nt, Human
guggaauuuuuaccuaugaaug

SEQ ID NO: 52968 - RNA, 22 nt, Human
guggacacaggagagagaacug

SEQ ID NO: 52969 - RNA, 22 nt, Human
guggacagcuucuaggugccag

SEQ ID NO: 52970 - RNA, 22 nt, Human
guggacuggcagugaccuuggu

SEQ ID NO: 52971 - RNA, 22 nt, Human
guggagagagugacagcaucuu

SEQ ID NO: 52972 - RNA, 23 nt, Human
guggagagauuaguaauucaccc

SEQ ID NO: 52973 - RNA, 22 nt, Human
guggagagcaaauaauuggaau

SEQ ID NO: 52974 - RNA, 22 nt, Human
guggaggaagggauucagacca

SEQ ID NO: 52975 - RNA, 22 nt, Human
guggaggacaaaagaagccuuu

SEQ ID NO: 52976 - RNA, 22 nt, Human
guggaggcagugacacaguagc

SEQ ID NO: 52977 - RNA, 22 nt, Human
guggaggguuugcaaugugcag

SEQ ID NO: 52978 - RNA, 22 nt, Human
guggagugcaacgguuggaguu

SEQ ID NO: 52979 - RNA, 22 nt, Human
guggauggacaugggcaagagg

SEQ ID NO: 52980 - RNA, 22 nt, Human
guggauggagcuggaagccauu

SEQ ID NO: 52981 - RNA, 22 nt, Human
guggauuacaagacaguugaga

SEQ ID NO: 52982 - RNA, 22 nt, Human
guggcaacaaaagagccuagug

SEQ ID NO: 52983 - RNA, 22 nt, Human
guggcagaaacuggcagaggag

SEQ ID NO: 52984 - RNA, 22 nt, Human
guggcagaaaugggacuuugag

SEQ ID NO: 52985 - RNA, 22 nt, Human
guggcagagauagaacuggaau

SEQ ID NO: 52986 - RNA, 22 nt, Human
guggcagagccaaggcuggagc

SEQ ID NO: 52987 - RNA, 22 nt, Human
guggcagaguucaggcguuugg

SEQ ID NO: 52988 - RNA, 22 nt, Human
guggcagcauggcuuuuagcug

SEQ ID NO: 52989 - RNA, 22 nt, Human
guggcagcuacauuuaaugcaa

SEQ ID NO: 52990 - RNA, 22 nt, Human
guggcagcucucuugauuuccc

SEQ ID NO: 52991 - RNA, 22 nt, Human
guggcagcugguaugcagacag

SEQ ID NO: 52992 - RNA, 22 nt, Human
guggcaggagacuggaagaugg

SEQ ID NO: 52993 - RNA, 22 nt, Human
guggcaggaucacggcucacug

SEQ ID NO: 52994 - RNA, 20 nt, Human
guggcaggcagugaaggagc

SEQ ID NO: 52995 - RNA, 22 nt, Human
guggcagggguauuccagcuga

SEQ ID NO: 52996 - RNA, 22 nt, Human
guggcagggugcucaucaugca

SEQ ID NO: 52997 - RNA, 22 nt, Human
guggcagguggagccuccugca

SEQ ID NO: 52998 - RNA, 22 nt, Human
guggcagguuccguagacagca

SEQ ID NO: 52999 - RNA, 22 nt, Human
guggcagucaucaaggacagau

SEQ ID NO: 53000 - RNA, 22 nt, Human
guggcagucggaagucaggaga

SEQ ID NO: 53001 - RNA, 22 nt, Human
guggcaguggagacccgagccu

SEQ ID NO: 53002 - RNA, 22 nt, Human
guggcaguucugugucucuugu

SEQ ID NO: 53003 - RNA, 22 nt, Human
guggcaguugcuguggcaauaa

SEQ ID NO: 53004 - RNA, 22 nt, Human
guggcaguuuugacaucacaaa

SEQ ID NO: 53005 - RNA, 22 nt, Human
guggcauucucggcaccaucug

SEQ ID NO: 53006 - RNA, 22 nt, Human
guggcauugccuucugcaggaa

SEQ ID NO: 53007 - RNA, 22 nt, Human
guggcauuugaacaaucacaua

SEQ ID NO: 53008 - RNA, 22 nt, Human
guggcauuuuagaacagcugac

SEQ ID NO: 53009 - RNA, 22 nt, Human
guggccaagagauaaaauugug

SEQ ID NO: 53010 - RNA, 22 nt, Human
guggccagaaguuaagugguua

SEQ ID NO: 53011 - RNA, 22 nt, Human
guggccagaaucuugaggccuu

SEQ ID NO: 53012 - RNA, 22 nt, Human
guggccagaggucccauguguc

SEQ ID NO: 53013 - RNA, 18 nt, Human
guggccagccuggucuug

SEQ ID NO: 53014 - RNA, 22 nt, Human
guggccaggacauugccaggca

SEQ ID NO: 53015 - RNA, 22 nt, Human
guggccaggagaccuugggcau

SEQ ID NO: 53016 - RNA, 22 nt, Human
guggccaggccgacugccaggc

SEQ ID NO: 53017 - RNA, 22 nt, Human
guggccaguggugggcgcccug

SEQ ID NO: 53018 - RNA, 22 nt, Human
guggccaucuuuggcccugacu

SEQ ID NO: 53019 - RNA, 22 nt, Human
guggcccacacagacagcaucu

SEQ ID NO: 53020 - RNA, 22 nt, Human
guggcccucugauagggucagg

SEQ ID NO: 53021 - RNA, 22 nt, Human
guggcccuuggaguugugaccu

SEQ ID NO: 53022 - RNA, 23 nt, Human
guggccuccccggaaugccucgc

SEQ ID NO: 53023 - RNA, 22 nt, Human
guggccugagcuucagaguugg

SEQ ID NO: 53024 - RNA, 19 nt, Human
guggccugcgcugggugcg

SEQ ID NO: 53025 - RNA, 22 nt, Human
guggccuggaugagcuucgaca

SEQ ID NO: 53026 - RNA, 22 nt, Human
guggccugggguuuguucugag

SEQ ID NO: 53027 - RNA, 22 nt, Human
guggccuuauuauguacaaaau

SEQ ID NO: 53028 - RNA, 22 nt, Human
guggccuuuaucuuagguaucc

SEQ ID NO: 53029 - RNA, 22 nt, Human
guggccuuucuugggcuacaga

SEQ ID NO: 53030 - RNA, 22 nt, Human
guggcucacagcaauguuuccu

SEQ ID NO: 53031 - RNA, 22 nt, Human
guggcucagcggagcucugcac

SEQ ID NO: 53032 - RNA, 22 nt, Human
guggcucuaggugagcauggag

SEQ ID NO: 53033 - RNA, 22 nt, Human
guggcucuccauugacauggaa

SEQ ID NO: 53034 - RNA, 22 nt, Human
guggcugcagagccagcaagcu

SEQ ID NO: 53035 - RNA, 22 nt, Human
guggcugcuacagagcuggagg

SEQ ID NO: 53036 - RNA, 22 nt, Human
guggcugcugguacucugggaa

SEQ ID NO: 53037 - RNA, 22 nt, Human
guggcugcuguccucucugguu

SEQ ID NO: 53038 - RNA, 22 nt, Human
guggcuggaguaugaggaaagg

SEQ ID NO: 53039 - RNA, 22 nt, Human
guggcuguauagccaagucaga

SEQ ID NO: 53040 - RNA, 22 nt, Human
guggcuucacauggcauuuggc

SEQ ID NO: 53041 - RNA, 22 nt, Human
guggcuucaucaacugugcuua

SEQ ID NO: 53042 - RNA, 22 nt, Human
guggcuuccaagacuaagucac

SEQ ID NO: 53043 - RNA, 22 nt, Human
guggcuucuggcugggccucag

SEQ ID NO: 53044 - RNA, 22 nt, Human
gugugccaggaacuggcugcug

SEQ ID NO: 53045 - RNA, 22 nt, Human
gugugccucccauuagggugua

SEQ ID NO: 53046 - RNA, 22 nt, Human
gugugccuguaucaugguaacc

SEQ ID NO: 53047 - RNA, 22 nt, Human
gugugcgccgacacagccaggu

SEQ ID NO: 53048 - RNA, 22 nt, Human
gugugcucccucugucgucaua

SEQ ID NO: 53049 - RNA, 22 nt, Human
gugugcuguuguucagguagaa

SEQ ID NO: 53050 - RNA, 22 nt, Human
guguggccucaacgggaugcaa

SEQ ID NO: 53051 - RNA, 22 nt, Human
guguggcuaggauggcuuugcu

SEQ ID NO: 53052 - RNA, 22 nt, Human
guguggcuuucuggguuuaauu

SEQ ID NO: 53053 - RNA, 22 nt, Human
gugugggcagggccgugcuccc

SEQ ID NO: 53054 - RNA, 22 nt, Human
guguggggccaggaucagggcu

SEQ ID NO: 53055 - RNA, 22 nt, Human
guguggucgaaguucucccgga

SEQ ID NO: 53056 - RNA, 22 nt, Human
gugugguggcccuccuucaggc

SEQ ID NO: 53057 - RNA, 23 nt, Human
guguguccauucgcacucuuagg

SEQ ID NO: 53058 - RNA, 22 nt, Human
gugugucccuuggaaccucagc

SEQ ID NO: 53059 - RNA, 22 nt, Human
guguguccucuuaacuauuaug

SEQ ID NO: 53060 - RNA, 22 nt, Human
gugugucugaaguugaguagac

SEQ ID NO: 53061 - RNA, 22 nt, Human
gugugucuugaccaggaucgga

SEQ ID NO: 53062 - RNA, 22 nt, Human
gugugugccaucaagagcuuuc

SEQ ID NO: 53063 - RNA, 20 nt, Human
gugugugcuccaugcaugcu

SEQ ID NO: 53064 - RNA, 22 nt, Human
guguguggcauguccuauuuug

SEQ ID NO: 53065 - RNA, 22 nt, Human
guguguggggccuucggguccu

SEQ ID NO: 53066 - RNA, 22 nt, Human
gugugugucuccgcggccguag

SEQ ID NO: 53067 - RNA, 23 nt, Human
guguguucccggaguagcucccg

SEQ ID NO: 53068 - RNA, 22 nt, Human
guguuaaccagcuaaacuuugc

SEQ ID NO: 53069 - RNA, 22 nt, Human
guguuaaugaaaaacaacucau

SEQ ID NO: 53070 - RNA, 22 nt, Human
guguuacauauaccugagcuua

SEQ ID NO: 53071 - RNA, 22 nt, Human
guguuacauauauacccacacc

SEQ ID NO: 53072 - RNA, 22 nt, Human
ucuguacuuccuuuaaacuuua

SEQ ID NO: 53073 - RNA, 20 nt, Human
ucuguagucuguggcaagac

SEQ ID NO: 53074 - RNA, 22 nt, Human
ucuguaguuuacaguauuucag

SEQ ID NO: 53075 - RNA, 22 nt, Human
ucuguauauauuaaugaaauuc

SEQ ID NO: 53076 - RNA, 22 nt, Human
ucuguaucuaauuuuacaguag

SEQ ID NO: 53077 - RNA, 22 nt, Human
ucuguauucuauggcaguuggu

SEQ ID NO: 53078 - RNA, 22 nt, Human
ucuguauuuuaagaugcuguuu

SEQ ID NO: 53079 - RNA, 22 nt, Human
ucugucaaaaguuuucaauaaa

SEQ ID NO: 53080 - RNA, 22 nt, Human
ucugucacccaggcuggagugc

SEQ ID NO: 53081 - RNA, 22 nt, Human
ucugucacuuauuaagauggau

SEQ ID NO: 53082 - RNA, 22 nt, Human
ucugucauaagugcugaaguau

SEQ ID NO: 53083 - RNA, 22 nt, Human
ucugucaucaaauaugcuuucu

SEQ ID NO: 53084 - RNA, 22 nt, Human
ucugucauccaggcuggaauau

SEQ ID NO: 53085 - RNA, 22 nt, Human
ucugucaucuguaacaggaggg

SEQ ID NO: 53086 - RNA, 22 nt, Human
ucugucauuagccuugacugua

SEQ ID NO: 53087 - RNA, 19 nt, Human
ucugucauuucuucuguac

SEQ ID NO: 53088 - RNA, 22 nt, Human
ucuguccaacacucucuagaca

SEQ ID NO: 53089 - RNA, 22 nt, Human
ucuguccacaagcacaggcucu

SEQ ID NO: 53090 - RNA, 20 nt, Human
ucuguccaccagccucgccu

SEQ ID NO: 53091 - RNA, 22 nt, Human
ucuguccagaacguacaucuug

SEQ ID NO: 53092 - RNA, 22 nt, Human
ucuguccagcucucaggagaca

SEQ ID NO: 53093 - RNA, 22 nt, Human
ucuguccauucagaauggcccu

SEQ ID NO: 53094 - RNA, 22 nt, Human
ucuguccauucagccauccauc

SEQ ID NO: 53095 - RNA, 22 nt, Human
ucuguccauuuauaagccccca

SEQ ID NO: 53096 - RNA, 22 nt, Human
ucugucucucaagggccguccu

SEQ ID NO: 53097 - RNA, 21 nt, Human
ucugucucuccacugcccugc

SEQ ID NO: 53098 - RNA, 22 nt, Human
ucugucugcaccuaagcacagu

SEQ ID NO: 53099 - RNA, 22 nt, Human
ucugucugccuugugagggcac

SEQ ID NO: 53100 - RNA, 22 nt, Human
ucugucugcucauuuaccucag

SEQ ID NO: 53101 - RNA, 22 nt, Human
ucugucugcuucacuugcauuu

SEQ ID NO: 53102 - RNA, 18 nt, Human
ucugucuguacaaguauc

SEQ ID NO: 53103 - RNA, 22 nt, Human
ucugucuguccagggcccccgc

SEQ ID NO: 53104 - RNA, 18 nt, Human
ucugucuguguugucuuu

SEQ ID NO: 53105 - RNA, 22 nt, Human
ucugucuuagcaucuuugcuca

SEQ ID NO: 53106 - RNA, 22 nt, Human
ucugucuucaucagcaugugau

SEQ ID NO: 53107 - RNA, 22 nt, Human
ucugugaaacagcucuggcaug

SEQ ID NO: 53108 - RNA, 22 nt, Human
ucugugacugauggaggcuuuu

SEQ ID NO: 53109 - RNA, 22 nt, Human
ucugugauaggaaaauaaaugg

SEQ ID NO: 53110 - RNA, 22 nt, Human
ucugugcaaguauuugacauuu

SEQ ID NO: 53111 - RNA, 22 nt, Human
ucugugcaccagaaugauauuu

SEQ ID NO: 53112 - RNA, 22 nt, Human
ucugugcaccuucuaaugagua

SEQ ID NO: 53113 - RNA, 22 nt, Human
ucugugcacugugucauuaggu

SEQ ID NO: 53114 - RNA, 22 nt, Human
ucugugcagauguagaccaguu

SEQ ID NO: 53115 - RNA, 22 nt, Human
ucugugcaggauuugaggaacc

SEQ ID NO: 53116 - RNA, 22 nt, Human
ucugugccaucagucuccagag

SEQ ID NO: 53117 - RNA, 22 nt, Human
ucugugccuucucccagacuua

SEQ ID NO: 53118 - RNA, 20 nt, Human
ucugugcuacacuccagauu

SEQ ID NO: 53119 - RNA, 22 nt, Human
ucugugcucaaguucugccucu

SEQ ID NO: 53120 - RNA, 22 nt, Human
ucugugcucuucucaguaucac

SEQ ID NO: 53121 - RNA, 22 nt, Human
ucugugcugccauccuguggcc

SEQ ID NO: 53122 - RNA, 22 nt, Human
ucugugcuggacugauuucaua

SEQ ID NO: 53123 - RNA, 19 nt, Human
ucugugcugggaggcagca

SEQ ID NO: 53124 - RNA, 19 nt, Human
ucuguggagcucagaguag

SEQ ID NO: 53125 - RNA, 22 nt, Human
ucuguggagugaccugggcuuu

SEQ ID NO: 53126 - RNA, 22 nt, Human
ucuguggaguuagacugguauc

SEQ ID NO: 53127 - RNA, 22 nt, Human
ucuguggauuuuaguguucaug

SEQ ID NO: 53128 - RNA, 21 nt, Human
ucuguggcagcaugaugaggu

SEQ ID NO: 53129 - RNA, 22 nt, Human
ucuguggcauagugcuugggaa

SEQ ID NO: 53130 - RNA, 23 nt, Human
ucuguggccccuucgccccacuc

SEQ ID NO: 53131 - RNA, 22 nt, Human
ucuguggccuguguccaagugc

SEQ ID NO: 53132 - RNA, 19 nt, Human
ucuguggcuguggggagga

SEQ ID NO: 53133 - RNA, 22 nt, Human
ucuguggcuguuaucuuuauau

SEQ ID NO: 53134 - RNA, 18 nt, Human
ucugugggaucagugagg

SEQ ID NO: 53135 - RNA, 22 nt, Human
ucugugggcauuuauaaucugg

SEQ ID NO: 53136 - RNA, 22 nt, Human
ucugugggugccuccagcagug

SEQ ID NO: 53137 - RNA, 21 nt, Human
ucugugguauggccaucuucc

SEQ ID NO: 53138 - RNA, 23 nt, Human
ucuguguagccaggucuggaggg

SEQ ID NO: 53139 - RNA, 22 nt, Human
ucuguguccugcuagcugucuu

SEQ ID NO: 53140 - RNA, 22 nt, Human
ucugugucguucugugcucugg

SEQ ID NO: 53141 - RNA, 22 nt, Human
ucugugucugcagaaguucagc

SEQ ID NO: 53142 - RNA, 22 nt, Human
ucugugugauuucagggaaguc

SEQ ID NO: 53143 - RNA, 20 nt, Human
ucugugugccaucaccuaac

SEQ ID NO: 53144 - RNA, 22 nt, Human
ucugugugggauaguuugagga

SEQ ID NO: 53145 - RNA, 22 nt, Human
ucuguguguugucaggaggauu

SEQ ID NO: 53146 - RNA, 22 nt, Human
ucuguguugagaaggaucauga

SEQ ID NO: 53147 - RNA, 22 nt, Human
ucuguuaacaggagagaaugau

SEQ ID NO: 53148 - RNA, 22 nt, Human
ucuguuagcugucaaaguguuu

SEQ ID NO: 53149 - RNA, 22 nt, Human
ucuguuauacaacaaguaacag

SEQ ID NO: 53150 - RNA, 20 nt, Human
ucuguuauuauuacauugcc

SEQ ID NO: 53151 - RNA, 22 nt, Human
ucuguuauucugucuauugcca

SEQ ID NO: 53152 - RNA, 22 nt, Human
ucuguucagaauuguaacacuc

SEQ ID NO: 53153 - RNA, 19 nt, Human
uaaguagucaaauaguaac

SEQ ID NO: 53154 - RNA, 22 nt, Human
uaaguauguuagaaaaucaagu

SEQ ID NO: 53155 - RNA, 22 nt, Human
uaaguauuggccuauagcuaga

SEQ ID NO: 53156 - RNA, 22 nt, Human
uaagucaguagaacugugguca

SEQ ID NO: 53157 - RNA, 22 nt, Human
uaagucaucacauugcagagau

SEQ ID NO: 53158 - RNA, 22 nt, Human
uaagucaucccauaacagugcu

SEQ ID NO: 53159 - RNA, 22 nt, Human
uaaguccuaauggcagaagucu

SEQ ID NO: 53160 - RNA, 22 nt, Human
uaaguccuagcuuugguaggaa

SEQ ID NO: 53161 - RNA, 22 nt, Human
uaaguccuauuccaggucucuc

SEQ ID NO: 53162 - RNA, 22 nt, Human
uaagucguggaugauucuucgg

SEQ ID NO: 53163 - RNA, 22 nt, Human
uaagugaauauuuucuucugua

SEQ ID NO: 53164 - RNA, 22 nt, Human
uaagugaauccuugagaagaaa

SEQ ID NO: 53165 - RNA, 22 nt, Human
uaagugagcccucagaguaugg

SEQ ID NO: 53166 - RNA, 22 nt, Human
uaagugaugaaagcagaugucu

SEQ ID NO: 53167 - RNA, 22 nt, Human
uaagugaugauaguaccuagaa

SEQ ID NO: 53168 - RNA, 22 nt, Human
uaagugaugucuugguuaauga

SEQ ID NO: 53169 - RNA, 21 nt, Human
uaagugcaaagagacagauac

SEQ ID NO: 53170 - RNA, 18 nt, Human
uaaguggacacaggucac

SEQ ID NO: 53171 - RNA, 22 nt, Human
uaagugggugaagaggaaauau

SEQ ID NO: 53172 - RNA, 22 nt, Human
uaagugucucucgaauuaugcu

SEQ ID NO: 53173 - RNA, 22 nt, Human
uaaguguuauuauucucacuuu

SEQ ID NO: 53174 - RNA, 19 nt, Human
uaaguguuggugaauuucu

SEQ ID NO: 53175 - RNA, 22 nt, Human
uaaguguuguuuucaagagaua

SEQ ID NO: 53176 - RNA, 22 nt, Human
uaaguuagaucuuaauuaaagu

SEQ ID NO: 53177 - RNA, 22 nt, Human
uaaguucagaguucucauuugu

SEQ ID NO: 53178 - RNA, 22 nt, Human
uaaguucugaguaaauacuguu

SEQ ID NO: 53179 - RNA, 22 nt, Human
uaaguugauuauaaccacugga

SEQ ID NO: 53180 - RNA, 22 nt, Human
uaaguuuaccacuuucagaauu

SEQ ID NO: 53181 - RNA, 22 nt, Human
uaauaagucuguuguuuaauug

SEQ ID NO: 53182 - RNA, 21 nt, Human
uaauaauuccacuacagagua

SEQ ID NO: 53183 - RNA, 22 nt, Human
uaauacacaagggccagcucuu

SEQ ID NO: 53184 - RNA, 22 nt, Human
uaauacagauacaaaggaggac

SEQ ID NO: 53185 - RNA, 22 nt, Human
uaauaccuagagaugauacaaa

SEQ ID NO: 53186 - RNA, 22 nt, Human
uaauacugaaagggaaaugucc

SEQ ID NO: 53187 - RNA, 21 nt, Human
uaauacugaaagugacaucug

SEQ ID NO: 53188 - RNA, 23 nt, Human
uaauacugcuucagaggcuuaga

SEQ ID NO: 53189 - RNA, 22 nt, Human
uaauacuuuugccuuguauuca

SEQ ID NO: 53190 - RNA, 22 nt, Human
guuagaaagugucugcuugggu

SEQ ID NO: 53191 - RNA, 22 nt, Human
guuagaauaaaaggucagagag

SEQ ID NO: 53192 - RNA, 22 nt, Human
guuagacaugcagaaucucagg

SEQ ID NO: 53193 - RNA, 22 nt, Human
guuagaccauagaaagagcauc

SEQ ID NO: 53194 - RNA, 22 nt, Human
guuagagggaaaaaucauuugc

SEQ ID NO: 53195 - RNA, 22 nt, Human
guuagcaaaauguuuuugaggc

SEQ ID NO: 53196 - RNA, 22 nt, Human
guuagcaugauuccugcucauu

SEQ ID NO: 53197 - RNA, 22 nt, Human
guuaggaauuuguuacugugua

SEQ ID NO: 53198 - RNA, 22 nt, Human
guuaggauguggggacuuuggg

SEQ ID NO: 53199 - RNA, 22 nt, Human
guuaggcagcccaagaugucag

SEQ ID NO: 53200 - RNA, 22 nt, Human
guuaggcagugugguauagcag

SEQ ID NO: 53201 - RNA, 22 nt, Human
guuaggcaugaguguguauuaa

SEQ ID NO: 53202 - RNA, 22 nt, Human
guuagugcuuauuaaauaguau

SEQ ID NO: 53203 - RNA, 22 nt, Human
guuaguuugaacuugucuaugu

SEQ ID NO: 53204 - RNA, 22 nt, Human
guuauaaaggugauaaugguca

SEQ ID NO: 53205 - RNA, 22 nt, Human
guuauaaaugacugcaaaaguu

SEQ ID NO: 53206 - RNA, 21 nt, Human
guuauacauucuauggauuug

SEQ ID NO: 53207 - RNA, 22 nt, Human
guuauacuuaugugcaaaaaua

SEQ ID NO: 53208 - RNA, 20 nt, Human
guuauaggagagggaauuau

SEQ ID NO: 53209 - RNA, 22 nt, Human
guuauauucaaaaugaggcugu

SEQ ID NO: 53210 - RNA, 22 nt, Human
guuauauugccaaguauauugu

SEQ ID NO: 53211 - RNA, 22 nt, Human
guuaucaugcuucaucaucacu

SEQ ID NO: 53212 - RNA, 22 nt, Human
guuaugaagucauucacaaaua

SEQ ID NO: 53213 - RNA, 22 nt, Human
guuauguaaucuaacacucagu

SEQ ID NO: 53214 - RNA, 22 nt, Human
guuauguacuuuuuaaaucuug

SEQ ID NO: 53215 - RNA, 22 nt, Human
guuauguaugggggccuuauga

SEQ ID NO: 53216 - RNA, 22 nt, Human
guuauucaacuugugucucuua

SEQ ID NO: 53217 - RNA, 18 nt, Human
guuauucucucugcagua

SEQ ID NO: 53218 - RNA, 22 nt, Human
guuauucucuuggccuaauuau

SEQ ID NO: 53219 - RNA, 22 nt, Human
guuauucuugguggcccugcug

SEQ ID NO: 53220 - RNA, 21 nt, Human
guuauugaccuccaggcuggc

SEQ ID NO: 53221 - RNA, 22 nt, Human
guuauuguccauuuauuuagca

SEQ ID NO: 53222 - RNA, 22 nt, Human
guuauuguguuuguucagggca

SEQ ID NO: 53223 - RNA, 22 nt, Human
guuauuuaacuuuguagcaugg

SEQ ID NO: 53224 - RNA, 22 nt, Human
guuauuuuaucucugagagguu

SEQ ID NO: 53225 - RNA, 22 nt, Human
guucaaagcuccugguacagua

SEQ ID NO: 53226 - RNA, 22 nt, Human
guucaaaggccuguggaaaggg

SEQ ID NO: 53227 - RNA, 21 nt, Human
guucaaauccugacacuacac

SEQ ID NO: 53228 - RNA, 22 nt, Human
guucaaaucucaggacuucaga

SEQ ID NO: 53229 - RNA, 22 nt, Human
guucaaauugauuuugguaaag

SEQ ID NO: 53230 - RNA, 22 nt, Human
guucaagguuuuacagagugua

SEQ ID NO: 53231 - RNA, 21 nt, Human
guucaaguauuuuuuucgcug

SEQ ID NO: 53232 - RNA, 22 nt, Human
guucaagugucaaguguuggaa

SEQ ID NO: 53233 - RNA, 22 nt, Human
guucaaguuaugccuuuacccu

SEQ ID NO: 53234 - RNA, 22 nt, Human
guucacagcaaaccuaugaacu

SEQ ID NO: 53235 - RNA, 22 nt, Human
guucacagggauccuuguugaa

SEQ ID NO: 53236 - RNA, 22 nt, Human
guucacagguucucuuucuaag

SEQ ID NO: 53237 - RNA, 22 nt, Human
guucacaguucagccuguaaca

SEQ ID NO: 53238 - RNA, 22 nt, Human
guucacaguuuuauaccugaga

SEQ ID NO: 53239 - RNA, 22 nt, Human
guucacaucacuucacugaacc

SEQ ID NO: 53240 - RNA, 22 nt, Human
guucacauuaacucaccggugc

SEQ ID NO: 53241 - RNA, 22 nt, Human
guucagauuucaugaguaauug

SEQ ID NO: 53242 - RNA, 22 nt, Human
guucagcaaguacucaguccac

SEQ ID NO: 53243 - RNA, 22 nt, Human
guucagcacaggugcucagaca

SEQ ID NO: 53244 - RNA, 22 nt, Human
guucagggagggacagaugaag

SEQ ID NO: 53245 - RNA, 22 nt, Human
guucagugguguauccccagug

SEQ ID NO: 53246 - RNA, 22 nt, Human
guucagugucucucuauuuuau

SEQ ID NO: 53247 - RNA, 22 nt, Human
guucauauuuaacuaagauagg

SEQ ID NO: 53248 - RNA, 22 nt, Human
guucaucacucagagaccuccc

SEQ ID NO: 53249 - RNA, 22 nt, Human
guucauccaugucagcguauau

SEQ ID NO: 53250 - RNA, 22 nt, Human
guucaugcuacccuuuccuaau

SEQ ID NO: 53251 - RNA, 22 nt, Human
guucauguuuguguauugcuca

SEQ ID NO: 53252 - RNA, 22 nt, Human
guucauucaaucuauuugcuuc

SEQ ID NO: 53253 - RNA, 22 nt, Human
guucauucaucaaauauuuacu

SEQ ID NO: 53254 - RNA, 22 nt, Human
guucauuuaggaaaggaagagu

SEQ ID NO: 53255 - RNA, 22 nt, Human
guucauuuuucccuaaugagua

SEQ ID NO: 53256 - RNA, 22 nt, Human
guuccaaacaagucauaaagua

SEQ ID NO: 53257 - RNA, 22 nt, Human
guuccaaagcaaaggaggugag

SEQ ID NO: 53258 - RNA, 22 nt, Human
guuccaaagucucugagcugag

SEQ ID NO: 53259 - RNA, 22 nt, Human
guuccaaaguuagaguguauug

SEQ ID NO: 53260 - RNA, 22 nt, Human
guuccaaauuuggaucuuuagg

SEQ ID NO: 53261 - RNA, 22 nt, Human
guuccaggcaagugggauagga

SEQ ID NO: 53262 - RNA, 20 nt, Human
ucuugcagcuccuguaccau

SEQ ID NO: 53263 - RNA, 22 nt, Human
ucuugcagcuucaucugcaauu

SEQ ID NO: 53264 - RNA, 22 nt, Human
ucuugcaguugcgcagugcaug

SEQ ID NO: 53265 - RNA, 22 nt, Human
ucuugcauacacuauauguaca

SEQ ID NO: 53266 - RNA, 22 nt, Human
ucuugcaugauauucuguauuu

SEQ ID NO: 53267 - RNA, 22 nt, Human
ucuugcauuucagaguucagag

SEQ ID NO: 53268 - RNA, 22 nt, Human
ucuugcuaaagaccaacacauu

SEQ ID NO: 53269 - RNA, 22 nt, Human
ucuugcugagacuggcaaguuu

SEQ ID NO: 53270 - RNA, 22 nt, Human
ucuugcuucugcucaaggggag

SEQ ID NO: 53271 - RNA, 18 nt, Human
ucuuggaguaaugaucaa

SEQ ID NO: 53272 - RNA, 22 nt, Human
ucuuggcaaauuuuugaggcuc

SEQ ID NO: 53273 - RNA, 22 nt, Human
ucuuggcaguggaauaccagga

SEQ ID NO: 53274 - RNA, 22 nt, Human
ucuuggcaugcaugggcaauca

SEQ ID NO: 53275 - RNA, 22 nt, Human
ucuuggccagaugcacuuccuc

SEQ ID NO: 53276 - RNA, 22 nt, Human
ucuuggcuauccaaguuaucca

SEQ ID NO: 53277 - RNA, 22 nt, Human
ucuuggcuccuguugucaucag

SEQ ID NO: 53278 - RNA, 22 nt, Human
ucuuggcuggucauuuaaaauc

SEQ ID NO: 53279 - RNA, 20 nt, Human
ucuuggcugugugaggacac

SEQ ID NO: 53280 - RNA, 22 nt, Human
ucuuggcuuucuccuagggaug

SEQ ID NO: 53281 - RNA, 19 nt, Human
ucuuggcuuugucuacugu

SEQ ID NO: 53282 - RNA, 22 nt, Human
ucuugggauagugucucauggc

SEQ ID NO: 53283 - RNA, 22 nt, Human
ucuugggaucucuucaccaccu

SEQ ID NO: 53284 - RNA, 22 nt, Human
ucuugggcauguguuugauuuc

SEQ ID NO: 53285 - RNA, 21 nt, Human
ucuuggggaggagggcugcac

SEQ ID NO: 53286 - RNA, 22 nt, Human
ucuugguauacgcauggcauug

SEQ ID NO: 53287 - RNA, 21 nt, Human
ucuugguuccguguguuugau

SEQ ID NO: 53288 - RNA, 22 nt, Human
ucuuguaauuaacuagaaagau

SEQ ID NO: 53289 - RNA, 22 nt, Human
ucuugucaugcccuugguaacu

SEQ ID NO: 53290 - RNA, 22 nt, Human
ucuugugcuugcagcuggggag

SEQ ID NO: 53291 - RNA, 22 nt, Human
ucuuguuaaagugaagauacug

SEQ ID NO: 53292 - RNA, 22 nt, Human
ucuuguuucuucuaagcagcag

SEQ ID NO: 53293 - RNA, 22 nt, Human
ucuuguuuggauuuugggcagu

SEQ ID NO: 53294 - RNA, 23 nt, Human
ucuuuacagcagcaggauuugga

SEQ ID NO: 53295 - RNA, 23 nt, Human
ucuuuacauacugaugaguucuc

SEQ ID NO: 53296 - RNA, 22 nt, Human
ucuuuacauaguguggacuacu

SEQ ID NO: 53297 - RNA, 22 nt, Human
ucuuuacuggaauggaacuuuc

SEQ ID NO: 53298 - RNA, 22 nt, Human
ucuuuacuuguguauuguauau

SEQ ID NO: 53299 - RNA, 23 nt, Human
ucuuuagaagaacaucagaaaug

SEQ ID NO: 53300 - RNA, 22 nt, Human
ucuuuagagccuuuccucccga

SEQ ID NO: 53301 - RNA, 22 nt, Human
ucuuuagagcucagaaauacag

SEQ ID NO: 53302 - RNA, 20 nt, Human
ucuuuagauuuaucuuaugu

SEQ ID NO: 53303 - RNA, 19 nt, Human
ucuuuagccagagcucugg

SEQ ID NO: 53304 - RNA, 22 nt, Human
ucuuuagcuagaaauacucuaa

SEQ ID NO: 53305 - RNA, 20 nt, Human
ucuuuaguuccuggcccuuu

SEQ ID NO: 53306 - RNA, 22 nt, Human
ucuuuauaaaagucauuauguc

SEQ ID NO: 53307 - RNA, 21 nt, Human
ucuuuaugacuugcccauuug

SEQ ID NO: 53308 - RNA, 22 nt, Human
uacacagaggcagcugucugcu

SEQ ID NO: 53309 - RNA, 22 nt, Human
uacacagauuucaguaucauca

SEQ ID NO: 53310 - RNA, 22 nt, Human
uacacagccuguaaugaugacu

SEQ ID NO: 53311 - RNA, 22 nt, Human
uacacaguagaguauaaugcgu

SEQ ID NO: 53312 - RNA, 22 nt, Human
uacacaguauaugggaucacag

SEQ ID NO: 53313 - RNA, 22 nt, Human
uacacaguuccauuuaagccag

SEQ ID NO: 53314 - RNA, 22 nt, Human
uacacauaaaaugcucauggua

SEQ ID NO: 53315 - RNA, 22 nt, Human
uacacauacaccaaugugguca

SEQ ID NO: 53316 - RNA, 22 nt, Human
uacacaucacuguaucuuucag

SEQ ID NO: 53317 - RNA, 22 nt, Human
uacacauccuucugaacaaccu

SEQ ID NO: 53318 - RNA, 22 nt, Human
uacacaucucugucaguaguga

SEQ ID NO: 53319 - RNA, 22 nt, Human
uacacaucuggagaagcccugu

SEQ ID NO: 53320 - RNA, 22 nt, Human
uacacaugacaguggacugaga

SEQ ID NO: 53321 - RNA, 22 nt, Human
uacacaugcucagauuccugug

SEQ ID NO: 53322 - RNA, 22 nt, Human
uacacauguauuuauguguaca

SEQ ID NO: 53323 - RNA, 22 nt, Human
uacacauuacauaauacuaucu

SEQ ID NO: 53324 - RNA, 22 nt, Human
uacaccagguguuauggucaau

SEQ ID NO: 53325 - RNA, 22 nt, Human
uacaccagguuaccaaucacug

SEQ ID NO: 53326 - RNA, 22 nt, Human
uacaccaguaucuuaagcauga

SEQ ID NO: 53327 - RNA, 22 nt, Human
uacacugagcaggaagaagugg

SEQ ID NO: 53328 - RNA, 22 nt, Human
uacacuggauuagcuguccuac

SEQ ID NO: 53329 - RNA, 22 nt, Human
uacacuguacgcucugcuucaa

SEQ ID NO: 53330 - RNA, 22 nt, Human
uacacugucagauuucgauugc

SEQ ID NO: 53331 - RNA, 22 nt, Human
uacacugugagguuuccaaggg

SEQ ID NO: 53332 - RNA, 19 nt, Human
uacacuuguaaugagcaga

SEQ ID NO: 53333 - RNA, 22 nt, Human
uacacuuguucaaacagcaaaa

SEQ ID NO: 53334 - RNA, 22 nt, Human
uacagaaaaacuggcauugaag

SEQ ID NO: 53335 - RNA, 22 nt, Human
uacagaaacagcgugguuagaa

SEQ ID NO: 53336 - RNA, 22 nt, Human
uacagaagcuuuugaaaagaug

SEQ ID NO: 53337 - RNA, 23 nt, Human
uacagaaggaguagucacuaaga

SEQ ID NO: 53338 - RNA, 22 nt, Human
uacagaaguaaauaccaaaagc

SEQ ID NO: 53339 - RNA, 22 nt, Human
uacagaaguugguuuuaguuua

SEQ ID NO: 53340 - RNA, 22 nt, Human
uacagaauauagaagcuggaag

SEQ ID NO: 53341 - RNA, 22 nt, Human
uacagaauauuucugcccugag

SEQ ID NO: 53342 - RNA, 22 nt, Human
uacagaaucuaugcuucacagu

SEQ ID NO: 53343 - RNA, 21 nt, Human
uacagaaugcgcuucagucug

SEQ ID NO: 53344 - RNA, 22 nt, Human
uacagaauguuaugaagcauag

SEQ ID NO: 53345 - RNA, 22 nt, Human
uacagacaaagugcuauagggu

SEQ ID NO: 53346 - RNA, 20 nt, Human
uacagacaugacaauaaugg

SEQ ID NO: 53347 - RNA, 22 nt, Human
uacagagacccacaagagacug

SEQ ID NO: 53348 - RNA, 22 nt, Human
uacagagacuuuauggcacaaa

SEQ ID NO: 53349 - RNA, 22 nt, Human
uacagagagauaaguguaaaag

SEQ ID NO: 53350 - RNA, 22 nt, Human
uacagagaugccgaagagugaa

SEQ ID NO: 53351 - RNA, 22 nt, Human
uacagaggagaccaaggcucag

SEQ ID NO: 53352 - RNA, 22 nt, Human
uacagaggaggugguugggagu

SEQ ID NO: 53353 - RNA, 22 nt, Human
uacagaggggacauggaagaca

SEQ ID NO: 53354 - RNA, 22 nt, Human
uacagauauagggcgagcuuag

SEQ ID NO: 53355 - RNA, 22 nt, Human
uacagauauguuccaugcaucg

SEQ ID NO: 53356 - RNA, 22 nt, Human
uacagauauuguacaguuauag

SEQ ID NO: 53357 - RNA, 21 nt, Human
uacagaugaggagaccaaggc

SEQ ID NO: 53358 - RNA, 22 nt, Human
uacagauugagguuuuuaauau

SEQ ID NO: 53359 - RNA, 22 nt, Human
uacagcaaagaaacccucaguc

SEQ ID NO: 53360 - RNA, 21 nt, Human
uacagcaacggagguuuucua

SEQ ID NO: 53361 - RNA, 22 nt, Human
uacagcacggugcauuuacuac

SEQ ID NO: 53362 - RNA, 22 nt, Human
uacagcagggcgcugugaugaa

SEQ ID NO: 53363 - RNA, 22 nt, Human
uacagcauauacagaaugaaca

SEQ ID NO: 53364 - RNA, 22 nt, Human
uacagcauugcauuuuccuuug

SEQ ID NO: 53365 - RNA, 20 nt, Human
uacagccccugcuucuguug

SEQ ID NO: 53366 - RNA, 20 nt, Human
uacagccuauucaccacaua

SEQ ID NO: 53367 - RNA, 22 nt, Human
uacagccucgaacuccugcauu

SEQ ID NO: 53368 - RNA, 22 nt, Human
uacagccuguuaccuauauuug

SEQ ID NO: 53369 - RNA, 22 nt, Human
uacagcgaaaauuuagcuugau

SEQ ID NO: 53370 - RNA, 22 nt, Human
uacagcuccaaaaaucacuguu

SEQ ID NO: 53371 - RNA, 22 nt, Human
uaagcacuuuauaugcuuuauc

SEQ ID NO: 53372 - RNA, 22 nt, Human
uaagcaguuuuucuuguauuaa

SEQ ID NO: 53373 - RNA, 21 nt, Human
uaagcauaucagauagacucu

SEQ ID NO: 53374 - RNA, 22 nt, Human
uaagcauauuccagucaugucc

SEQ ID NO: 53375 - RNA, 22 nt, Human
uaagcauuguuucugaggaugg

SEQ ID NO: 53376 - RNA, 22 nt, Human
uaagccaaaaucaggacacaga

SEQ ID NO: 53377 - RNA, 21 nt, Human
uaagccaccaugugaaaccag

SEQ ID NO: 53378 - RNA, 22 nt, Human
uaagccacuagucuguuaugaa

SEQ ID NO: 53379 - RNA, 22 nt, Human
uaagccacugagauuugggguu

SEQ ID NO: 53380 - RNA, 22 nt, Human
uaagccagauacaccacugaaa

SEQ ID NO: 53381 - RNA, 22 nt, Human
uaagccaucaucauggcuuugg

SEQ ID NO: 53382 - RNA, 22 nt, Human
uaagccugguucauaauuugcu

SEQ ID NO: 53383 - RNA, 22 nt, Human
uaaggaaaguacauguuuugac

SEQ ID NO: 53384 - RNA, 22 nt, Human
uaaggaaggggaaagacauguc

SEQ ID NO: 53385 - RNA, 22 nt, Human
uaaggacagcagcuacuuuucc

SEQ ID NO: 53386 - RNA, 22 nt, Human
uaaggacauuagaaaugaugcu

SEQ ID NO: 53387 - RNA, 22 nt, Human
uaaggaggcagucauuaucagg

SEQ ID NO: 53388 - RNA, 22 nt, Human
uaaggaggcugcugugaagaaa

SEQ ID NO: 53389 - RNA, 22 nt, Human
uaaggagggggaaugauuggca

SEQ ID NO: 53390 - RNA, 22 nt, Human
uaaggaggugcccacucucagg

SEQ ID NO: 53391 - RNA, 22 nt, Human
uaaggcaaacaggaaagcaggc

SEQ ID NO: 53392 - RNA, 22 nt, Human
uaaggcaaaggggaaguuauca

SEQ ID NO: 53393 - RNA, 22 nt, Human
uaaggcaaagugauuucuuaaa

SEQ ID NO: 53394 - RNA, 22 nt, Human
uaaggcaagagcagggucuuug

SEQ ID NO: 53395 - RNA, 22 nt, Human
uaaggcacccauguucauacag

SEQ ID NO: 53396 - RNA, 22 nt, Human
uaaggcacccuucugaguagag

SEQ ID NO: 53397 - RNA, 22 nt, Human
uaaggcaccuguccaggcuggg

SEQ ID NO: 53398 - RNA, 22 nt, Human
uaaggcagaaauaugagcaggg

SEQ ID NO: 53399 - RNA, 22 nt, Human
uaaggcagccucaggguagggu

SEQ ID NO: 53400 - RNA, 22 nt, Human
uaaggcaggaacuggcuguuuu

SEQ ID NO: 53401 - RNA, 22 nt, Human
uaaggcaggcuuucauccagag

SEQ ID NO: 53402 - RNA, 22 nt, Human
uaaggcagguagaugacuacgg

SEQ ID NO: 53403 - RNA, 22 nt, Human
uaaggcaguagugucuguaggg

SEQ ID NO: 53404 - RNA, 22 nt, Human
uaaggcaugaguuuauuucaua

SEQ ID NO: 53405 - RNA, 22 nt, Human
uaaggcaugcuagcaguaugaa

SEQ ID NO: 53406 - RNA, 22 nt, Human
uaaggcauuauagagacagccu

SEQ ID NO: 53407 - RNA, 22 nt, Human
uaaggcauucucaugcugugaa

SEQ ID NO: 53408 - RNA, 23 nt, Human
uaaggcauuuuuucuguaucagu

SEQ ID NO: 53409 - RNA, 22 nt, Human
uaaggccaaacuauuauaguuc

SEQ ID NO: 53410 - RNA, 22 nt, Human
uaaggccaaguucauauacaac

SEQ ID NO: 53411 - RNA, 22 nt, Human
uaaggccaauuacauauguuca

SEQ ID NO: 53412 - RNA, 22 nt, Human
uaaggccagcaugaaugcagca

SEQ ID NO: 53413 - RNA, 20 nt, Human
uaaggcuguuuuguauuccu

SEQ ID NO: 53414 - RNA, 22 nt, Human
uaaggcuuauauacuuagacau

SEQ ID NO: 53415 - RNA, 22 nt, Human
uaaggcuucuuggaauacugca

SEQ ID NO: 53416 - RNA, 22 nt, Human
uaaggcuuuauuuuuacaaugc

SEQ ID NO: 53417 - RNA, 17 nt, Human
uaagggggaaacggagc

SEQ ID NO: 53418 - RNA, 22 nt, Human
uaagguaauuguugcugaaauu

SEQ ID NO: 53419 - RNA, 22 nt, Human
uaaggucauggugaauaauaag

SEQ ID NO: 53420 - RNA, 22 nt, Human
uaagguuucuaguuucuaaacu

SEQ ID NO: 53421 - RNA, 22 nt, Human
uaagguuugaagaagacugagc

SEQ ID NO: 53422 - RNA, 22 nt, Human
uaagguuugcuuaucuucgccu

SEQ ID NO: 53423 - RNA, 22 nt, Human
uaagguuuguggggagcaaaag

SEQ ID NO: 53424 - RNA, 22 nt, Human
uaaguaauuugugcagagauac

SEQ ID NO: 53425 - RNA, 22 nt, Human
uaaguacauuugggaccaccug

SEQ ID NO: 53426 - RNA, 22 nt, Human
uaaguaguuuguagccccauag

SEQ ID NO: 53427 - RNA, 22 nt, Human
uaagucaggaggucuccugaca

SEQ ID NO: 53428 - RNA, 22 nt, Human
uaagucauagauuaauggccac

SEQ ID NO: 53429 - RNA, 22 nt, Human
uaagucauggagcugggauuga

SEQ ID NO: 53430 - RNA, 22 nt, Human
uaagucauuaggcugaguucaa

SEQ ID NO: 53431 - RNA, 18 nt, Human
uaagucauuuugccagca

SEQ ID NO: 53432 - RNA, 22 nt, Human
uaaguccaccucauucuucagc

SEQ ID NO: 53433 - RNA, 22 nt, Human
uaaguccaguguucucucugug

SEQ ID NO: 53434 - RNA, 22 nt, Human
uaaguccuagaugauucacaga

SEQ ID NO: 53435 - RNA, 22 nt, Human
uaagugaaauaagucagauaca

SEQ ID NO: 53436 - RNA, 22 nt, Human
uaagugagaaagacauuaacug

SEQ ID NO: 53437 - RNA, 22 nt, Human
uaagugaugaagaccuguuugg

SEQ ID NO: 53438 - RNA, 22 nt, Human
uaagugaugagcacaguaauua

SEQ ID NO: 53439 - RNA, 23 nt, Human
uaagugauuccaaguuucaggga

SEQ ID NO: 53440 - RNA, 22 nt, Human
uaagugauuuguaguauacuau

SEQ ID NO: 53441 - RNA, 22 nt, Human
uaagugcaugauugaacuuggc

SEQ ID NO: 53442 - RNA, 22 nt, Human
uaaguggaagguuauaugcuaa

SEQ ID NO: 53443 - RNA, 19 nt, Human
ugacugccucaggggugga

SEQ ID NO: 53444 - RNA, 22 nt, Human
ugacuggauugucauuacgacg

SEQ ID NO: 53445 - RNA, 22 nt, Human
ugacugugccgugccccuagga

SEQ ID NO: 53446 - RNA, 22 nt, Human
ugacuuuaaagcucacucuuuu

SEQ ID NO: 53447 - RNA, 22 nt, Human
ugacuuuagaauuuuauccaga

SEQ ID NO: 53448 - RNA, 22 nt, Human
ugacuuuagacuuagucaaguu

SEQ ID NO: 53449 - RNA, 22 nt, Human
ugacuuugugcaagugaauuau

SEQ ID NO: 53450 - RNA, 22 nt, Human
ugacuuuuggaccucacugucc

SEQ ID NO: 53451 - RNA, 22 nt, Human
ugagaaaaguguggaggucaau

SEQ ID NO: 53452 - RNA, 22 nt, Human
ugagaaaauccagaggcuaguu

SEQ ID NO: 53453 - RNA, 18 nt, Human
ugagaaacugacacaugg

SEQ ID NO: 53454 - RNA, 22 nt, Human
ugagaaagugggugccuagcaa

SEQ ID NO: 53455 - RNA, 22 nt, Human
ugagaaauuacuucagugaugg

SEQ ID NO: 53456 - RNA, 22 nt, Human
ugagaaauucgacauauauuua

SEQ ID NO: 53457 - RNA, 18 nt, Human
ugagaaccauguucauuc

SEQ ID NO: 53458 - RNA, 18 nt, Human
ugagaacuaggcauugca

SEQ ID NO: 53459 - RNA, 22 nt, Human
ugagaacugccuguauuuaucu

SEQ ID NO: 53460 - RNA, 22 nt, Human
ugagaacuugugcuauugcaca

SEQ ID NO: 53461 - RNA, 22 nt, Human
ugagaagauuugcucuucugag

SEQ ID NO: 53462 - RNA, 22 nt, Human
ugagaagcauuaggaagaacau

SEQ ID NO: 53463 - RNA, 22 nt, Human
ugagaagcccacacucuuuccu

SEQ ID NO: 53464 - RNA, 22 nt, Human
ugagaaggcucaggcuuagaga

SEQ ID NO: 53465 - RNA, 19 nt, Human
ugagaagguuuccgugggu

SEQ ID NO: 53466 - RNA, 21 nt, Human
ugagaaguaugucuucagcca

SEQ ID NO: 53467 - RNA, 22 nt, Human
ugagaauaacagccuguguucc

SEQ ID NO: 53468 - RNA, 22 nt, Human
ugagaauaagagauaguuuauu

SEQ ID NO: 53469 - RNA, 22 nt, Human
ugagaauacugcauuguuagga

SEQ ID NO: 53470 - RNA, 22 nt, Human
ugagaaucagcugcacagaggu

SEQ ID NO: 53471 - RNA, 18 nt, Human
ugagaauguaagaaaugg

SEQ ID NO: 53472 - RNA, 22 nt, Human
ugagaauuacaaaugagucaca

SEQ ID NO: 53473 - RNA, 22 nt, Human
ugagaauuugcauuucuaacaa

SEQ ID NO: 53474 - RNA, 22 nt, Human
ugagacaaaauugacagacaaa

SEQ ID NO: 53475 - RNA, 22 nt, Human
ugagacacucucgggcacauuu

SEQ ID NO: 53476 - RNA, 22 nt, Human
ugagacaggcuuccuucuuggg

SEQ ID NO: 53477 - RNA, 22 nt, Human
ugagacaguaauuguauaguuu

SEQ ID NO: 53478 - RNA, 22 nt, Human
ugagaccuguaaugagaaauug

SEQ ID NO: 53479 - RNA, 22 nt, Human
ugagaccuuaaaagguauguca

SEQ ID NO: 53480 - RNA, 22 nt, Human
uaauauguguuacugacuuuuu

SEQ ID NO: 53481 - RNA, 22 nt, Human
uaaucacaauucagaugucuua

SEQ ID NO: 53482 - RNA, 22 nt, Human
uaaucacuuuucauuaguaccu

SEQ ID NO: 53483 - RNA, 19 nt, Human
uaauccaaggcugcucuua

SEQ ID NO: 53484 - RNA, 22 nt, Human
uaauccagcgggugauugcaca

SEQ ID NO: 53485 - RNA, 22 nt, Human
uaauccguacauuauucugaac

SEQ ID NO: 53486 - RNA, 22 nt, Human
uaauccugaucaauuuuagcuu

SEQ ID NO: 53487 - RNA, 22 nt, Human
uaauccuggugaguuugaaaaa

SEQ ID NO: 53488 - RNA, 22 nt, Human
uaauccuuuaugguuuuccucc

SEQ ID NO: 53489 - RNA, 22 nt, Human
uaaucuagaacauaugagagca

SEQ ID NO: 53490 - RNA, 22 nt, Human
uaaucuagucccacauggaauu

SEQ ID NO: 53491 - RNA, 22 nt, Human
uaaucucuuuuaggacagagcc

SEQ ID NO: 53492 - RNA, 22 nt, Human
uaaucuguauuccuacuuugca

SEQ ID NO: 53493 - RNA, 22 nt, Human
uaaucuguugacuaacuuggga

SEQ ID NO: 53494 - RNA, 22 nt, Human
uaaugaacaucuuaaucugaaa

SEQ ID NO: 53495 - RNA, 22 nt, Human
uaaugacuaagcaucauuaaac

SEQ ID NO: 53496 - RNA, 22 nt, Human
uaaugagacucaauugugugug

SEQ ID NO: 53497 - RNA, 22 nt, Human
uaaugcaauuuagcaaaguuuu

SEQ ID NO: 53498 - RNA, 22 nt, Human
uaaugcaggugcccuuggguuu

SEQ ID NO: 53499 - RNA, 22 nt, Human
uaaugcaguagguauuaaagaa

SEQ ID NO: 53500 - RNA, 22 nt, Human
uaaugccacggcagggaacagc

SEQ ID NO: 53501 - RNA, 22 nt, Human
uaaugcugccaagccaugcaga

SEQ ID NO: 53502 - RNA, 22 nt, Human
uaauggagauuuagcacuuacg

SEQ ID NO: 53503 - RNA, 22 nt, Human
uaauggauuaacgucccugucg

SEQ ID NO: 53504 - RNA, 22 nt, Human
uaauggcauugauuacaugaaa

SEQ ID NO: 53505 - RNA, 22 nt, Human
uaaugguuuuuuggagacugcu

SEQ ID NO: 53506 - RNA, 22 nt, Human
uaauguaccuccagauguugua

SEQ ID NO: 53507 - RNA, 22 nt, Human
uaaugucuaugggccagauaau

SEQ ID NO: 53508 - RNA, 22 nt, Human
uaaugugauauuccuguccuuu

SEQ ID NO: 53509 - RNA, 22 nt, Human
uaaugugugucaucaguagagu

SEQ ID NO: 53510 - RNA, 22 nt, Human
uaauguuacacugcaugguuca

SEQ ID NO: 53511 - RNA, 22 nt, Human
uaauuacuggaaauuucaaaua

SEQ ID NO: 53512 - RNA, 23 nt, Human
uaauuagauguugauuccugaga

SEQ ID NO: 53513 - RNA, 22 nt, Human
uaauuaguguccagcuucugcu

SEQ ID NO: 53514 - RNA, 22 nt, Human
uaauuauaaacugcaguaggua

SEQ ID NO: 53515 - RNA, 22 nt, Human
uaauuauaacaugcuuucuggc

SEQ ID NO: 53516 - RNA, 22 nt, Human
uaauuauugucugaagaguuau

SEQ ID NO: 53517 - RNA, 22 nt, Human
uaauucagcugaacaacugugu

SEQ ID NO: 53518 - RNA, 22 nt, Human
uaauuccaaguugagacaugca

SEQ ID NO: 53519 - RNA, 22 nt, Human
uaauuccaccuuuuuccaacuu

SEQ ID NO: 53520 - RNA, 22 nt, Human
uaauuccuagaaauuauucuca

SEQ ID NO: 53521 - RNA, 22 nt, Human
uaauuccuuaagcugaagacuu

SEQ ID NO: 53522 - RNA, 22 nt, Human
uaauucuagauugacauuuuga

SEQ ID NO: 53523 - RNA, 22 nt, Human
uaauugaaaucauuucaauuca

SEQ ID NO: 53524 - RNA, 22 nt, Human
uaauugcagggagccugggggc

SEQ ID NO: 53525 - RNA, 22 nt, Human
uaauugcuaaaugaaggagaag

SEQ ID NO: 53526 - RNA, 22 nt, Human
uaauugcuauuuaaugugguga

SEQ ID NO: 53527 - RNA, 22 nt, Human
uaauugcugaacuacuaucccu

SEQ ID NO: 53528 - RNA, 22 nt, Human
uaauugcuuuauccuguuagaa

SEQ ID NO: 53529 - RNA, 22 nt, Human
uaauugucuuaggugugaugau

SEQ ID NO: 53530 - RNA, 22 nt, Human
uaauugucuuagucugugcagg

SEQ ID NO: 53531 - RNA, 22 nt, Human
uaauuuauagaauuucuuggau

SEQ ID NO: 53532 - RNA, 22 nt, Human
uaauuuaugaugcaaagaaaag

SEQ ID NO: 53533 - RNA, 22 nt, Human
uaauuuaugguauguguguaau

SEQ ID NO: 53534 - RNA, 21 nt, Human
uaauuuauucagcacaguguu

SEQ ID NO: 53535 - RNA, 22 nt, Human
uaauuuauuucaacugccaagg

SEQ ID NO: 53536 - RNA, 22 nt, Human
uaauuucuaauucauuuucagu

SEQ ID NO: 53537 - RNA, 22 nt, Human
uaauuucuagggacuaaggugc

SEQ ID NO: 53538 - RNA, 22 nt, Human
uaauuucuucaucucugcagcu

SEQ ID NO: 53539 - RNA, 20 nt, Human
uaauuugauaucuauaaguu

SEQ ID NO: 53540 - RNA, 22 nt, Human
uaauuuuaacugugcuguuugg

SEQ ID NO: 53541 - RNA, 22 nt, Human
uacaaacuaacaugucucaucc

SEQ ID NO: 53542 - RNA, 22 nt, Human
uacaaacuccgaaguuuguacc

SEQ ID NO: 53543 - RNA, 18 nt, Human
uacaaacuccuugaaggc

SEQ ID NO: 53544 - RNA, 22 nt, Human
uacaaacuuguuuuaaguaagu

SEQ ID NO: 53545 - RNA, 22 nt, Human
uacaaagagguaauugcauaua

SEQ ID NO: 53546 - RNA, 22 nt, Human
uacaaagaguuuggucucuaga

SEQ ID NO: 53547 - RNA, 22 nt, Human
uacaaagcaguuccaacacgaa

SEQ ID NO: 53548 - RNA, 22 nt, Human
uacaaagcuacucgagggcagg

SEQ ID NO: 53549 - RNA, 22 nt, Human
uacaaaggacagcagaaaaaua

SEQ ID NO: 53550 - RNA, 22 nt, Human
uacaaaggagacucuguauuua

SEQ ID NO: 53551 - RNA, 22 nt, Human
uacaaaggaguagagaaggcuu

SEQ ID NO: 53552 - RNA, 21 nt, Human
uacaaagggaaauucuggcuc

SEQ ID NO: 53553 - RNA, 22 nt, Human
uacaaaguaauguauaauaucg

SEQ ID NO: 53554 - RNA, 22 nt, Human
uacaaagucaccagcuucuugc

SEQ ID NO: 53555 - RNA, 22 nt, Human
uacaaagugaaauaauucugag

SEQ ID NO: 53556 - RNA, 22 nt, Human
uacaaagugauuuuggaauuga

SEQ ID NO: 53557 - RNA, 22 nt, Human
uacaaaguuugggguccucaaa

SEQ ID NO: 53558 - RNA, 22 nt, Human
uacaaaguuuucuuggauugag

SEQ ID NO: 53559 - RNA, 22 nt, Human
uacaaaugaccauagccacuua

SEQ ID NO: 53560 - RNA, 22 nt, Human
uacaaaugccugacacacagau

SEQ ID NO: 53561 - RNA, 22 nt, Human
uaguacaguuuaaauauuaaua

SEQ ID NO: 53562 - RNA, 22 nt, Human
uaguagcaggggguaccucuca

SEQ ID NO: 53563 - RNA, 22 nt, Human
uaguauuuaaucacuuuugucu

SEQ ID NO: 53564 - RNA, 22 nt, Human
uaguauuuauaaucaugcuuaa

SEQ ID NO: 53565 - RNA, 22 nt, Human
uaguauuuuagaaaaccaugaa

SEQ ID NO: 53566 - RNA, 22 nt, Human
uagucaaauggcagggauauuu

SEQ ID NO: 53567 - RNA, 22 nt, Human
uagucaaucaguauguauugga

SEQ ID NO: 53568 - RNA, 22 nt, Human
uagucacacaauuguguacauu

SEQ ID NO: 53569 - RNA, 22 nt, Human
uagucacuuuuuuaccaugugc

SEQ ID NO: 53570 - RNA, 22 nt, Human
uagucagggaugcaauuaugug

SEQ ID NO: 53571 - RNA, 22 nt, Human
uaguccacagacucuacagcau

SEQ ID NO: 53572 - RNA, 22 nt, Human
uaguccagaaacugagcuuaua

SEQ ID NO: 53573 - RNA, 22 nt, Human
uaguccaguaaaacagcuaacg

SEQ ID NO: 53574 - RNA, 20 nt, Human
uaguccaguaggggggcuuu

SEQ ID NO: 53575 - RNA, 22 nt, Human
uaguccauuaaauuagauucaa

SEQ ID NO: 53576 - RNA, 22 nt, Human
uaguccuuacuuacuagaauaa

SEQ ID NO: 53577 - RNA, 22 nt, Human
uaguccuuuccggcugcuauaa

SEQ ID NO: 53578 - RNA, 22 nt, Human
uagucuaagaaaucuuuacuuu

SEQ ID NO: 53579 - RNA, 19 nt, Human
uagucucugaugaggcuuu

SEQ ID NO: 53580 - RNA, 22 nt, Human
uagucuuaaguaauucauggaa

SEQ ID NO: 53581 - RNA, 22 nt, Human
uagugaauaguccaaucccgca

SEQ ID NO: 53582 - RNA, 22 nt, Human
uagugauuuccauuucaggguu

SEQ ID NO: 53583 - RNA, 20 nt, Human
uagugcaaaggcagccauag

SEQ ID NO: 53584 - RNA, 22 nt, Human
uagugcaaaggucuugcaccag

SEQ ID NO: 53585 - RNA, 22 nt, Human
uagugcaagguuuugccaacuu

SEQ ID NO: 53586 - RNA, 22 nt, Human
uagugcaaugugaggcaguacc

SEQ ID NO: 53587 - RNA, 22 nt, Human
uagugcauaacauuuaaagguc

SEQ ID NO: 53588 - RNA, 22 nt, Human
uagugccaccuuccaaguauca

SEQ ID NO: 53589 - RNA, 22 nt, Human
uacaaguuccauuuugaaagug

SEQ ID NO: 53590 - RNA, 22 nt, Human
uacaauaugugaacuuuggugu

SEQ ID NO: 53591 - RNA, 22 nt, Human
uacaauauguggccuuuuguga

SEQ ID NO: 53592 - RNA, 22 nt, Human
uacaaucacccaaagagccaga

SEQ ID NO: 53593 - RNA, 22 nt, Human
uacaaucaggauaauaauagug

SEQ ID NO: 53594 - RNA, 22 nt, Human
uacaaucaggcucuagcuucuc

SEQ ID NO: 53595 - RNA, 22 nt, Human
uacaaugcaaaauacugucugc

SEQ ID NO: 53596 - RNA, 21 nt, Human
uacaaugcacaggagagccuc

SEQ ID NO: 53597 - RNA, 22 nt, Human
uacaaugcagugaccuccuuua

SEQ ID NO: 53598 - RNA, 22 nt, Human
uacaaugcugugcauguaaugg

SEQ ID NO: 53599 - RNA, 22 nt, Human
uacaaugcuguuuguuucuacu

SEQ ID NO: 53600 - RNA, 22 nt, Human
uacaauguucgcauucucucug

SEQ ID NO: 53601 - RNA, 22 nt, Human
uacaauucuuuguaaggugguc

SEQ ID NO: 53602 - RNA, 19 nt, Human
uacaauuggcuuuccauug

SEQ ID NO: 53603 - RNA, 22 nt, Human
uacaauuuaguggugugugguu

SEQ ID NO: 53604 - RNA, 22 nt, Human
uacacaccugccugcagacucu

SEQ ID NO: 53605 - RNA, 22 nt, Human
uacacacugugauaaugaagca

SEQ ID NO: 53606 - RNA, 22 nt, Human
uacacacuuacuggagaugaag

SEQ ID NO: 53607 - RNA, 22 nt, Human
uacacagacucuucaauucaga

SEQ ID NO: 53608 - RNA, 22 nt, Human
uacacagggagagauuggaaac

SEQ ID NO: 53609 - RNA, 22 nt, Human
uacacaggggagcaugguugac

SEQ ID NO: 53610 - RNA, 22 nt, Human
uacacagugaguccucucugcc

SEQ ID NO: 53611 - RNA, 22 nt, Human
uacacaguuuugcucccaugau

SEQ ID NO: 53612 - RNA, 22 nt, Human
uacacauaggaggguaauaaaa

SEQ ID NO: 53613 - RNA, 22 nt, Human
uacacauaggucugaauaaaaa

SEQ ID NO: 53614 - RNA, 22 nt, Human
uacacauauguccauuaaucag

SEQ ID NO: 53615 - RNA, 22 nt, Human
uacacaucuggugugacugcca

SEQ ID NO: 53616 - RNA, 22 nt, Human
uacacaugaucauuuaguagca

SEQ ID NO: 53617 - RNA, 22 nt, Human
uacacauguuuggcaaguaugu

SEQ ID NO: 53618 - RNA, 22 nt, Human
uacacauuagucaagaguuuga

SEQ ID NO: 53619 - RNA, 22 nt, Human
uacacauuuugcggguacaugu

SEQ ID NO: 53620 - RNA, 22 nt, Human
uacaccagaaucucugugggga

SEQ ID NO: 53621 - RNA, 22 nt, Human
uacaccugcugagccuguccuc

SEQ ID NO: 53622 - RNA, 22 nt, Human
uacaccugggacccauccaaga

SEQ ID NO: 53623 - RNA, 22 nt, Human
uacacguguguguauguacaua

SEQ ID NO: 53624 - RNA, 20 nt, Human
uacacuaaguaugaagugcu

SEQ ID NO: 53625 - RNA, 22 nt, Human
uacacuaugggcuuuguguaau

SEQ ID NO: 53626 - RNA, 21 nt, Human
uacacucauccucucccaagg

SEQ ID NO: 53627 - RNA, 22 nt, Human
uacacugaaagagaggauugaa

SEQ ID NO: 53628 - RNA, 22 nt, Human
uacacugagaugacuuugguuu

SEQ ID NO: 53629 - RNA, 22 nt, Human
uacacuggacaggaguaggaag

SEQ ID NO: 53630 - RNA, 22 nt, Human
uacacuggccccagggcggggc

SEQ ID NO: 53631 - RNA, 22 nt, Human
uacacuggcuguuuugcagaaa

SEQ ID NO: 53632 - RNA, 22 nt, Human
uacacuggggcucugggaguga

SEQ ID NO: 53633 - RNA, 22 nt, Human
uacacugucuuagaaaggggca

SEQ ID NO: 53634 - RNA, 22 nt, Human
uacacuguuugaacuguggucg

SEQ ID NO: 53635 - RNA, 22 nt, Human
uacacuguuuuuggaaagaaga

SEQ ID NO: 53636 - RNA, 22 nt, Human
uacacuuuucaauguagucugu

SEQ ID NO: 53637 - RNA, 22 nt, Human
uacacuuuucugguuacucuug

SEQ ID NO: 53638 - RNA, 22 nt, Human
uacagaaaaacaucuggagccg

SEQ ID NO: 53639 - RNA, 22 nt, Human
uacagaaagaccucucgggaaa

SEQ ID NO: 53640 - RNA, 22 nt, Human
uacagaaagggaugauugaucu

SEQ ID NO: 53641 - RNA, 22 nt, Human
uacagaaauacugggggguucu

SEQ ID NO: 53642 - RNA, 22 nt, Human
uacagaaaucacaucgcuuuga

SEQ ID NO: 53643 - RNA, 20 nt, Human
uacagaaugcaauaaaaugg

SEQ ID NO: 53644 - RNA, 22 nt, Human
uacagagaauaauaggacaggu

SEQ ID NO: 53645 - RNA, 22 nt, Human
uacagagagagggguuaccagg

SEQ ID NO: 53646 - RNA, 22 nt, Human
uacagagagcuccggacauuca

SEQ ID NO: 53647 - RNA, 22 nt, Human
uacagagaguacagcauccaca

SEQ ID NO: 53648 - RNA, 22 nt, Human
uacagagauacucuagaucaaa

SEQ ID NO: 53649 - RNA, 22 nt, Human
uacagagauuuauugcuaaggc

SEQ ID NO: 53650 - RNA, 22 nt, Human
uacagaggcuggguuuucaggg

SEQ ID NO: 53651 - RNA, 22 nt, Human
uacagagugguuguccaacucu

SEQ ID NO: 53652 - RNA, 22 nt, Human
uacagaguguuauuacagaauc

SEQ ID NO: 53653 - RNA, 22 nt, Human
uacagauagaauuagugaguua

SEQ ID NO: 53654 - RNA, 22 nt, Human
uacagauaggaggaaucugaaa

SEQ ID NO: 53655 - RNA, 22 nt, Human
uacagauauguaugcacuuuuu

SEQ ID NO: 53656 - RNA, 22 nt, Human
uacagauuuugugaagaagugu

SEQ ID NO: 53657 - RNA, 23 nt, Human
uacagcaaggacaacauaggugg

SEQ ID NO: 53658 - RNA, 22 nt, Human
uacagcaaugccugaaauagua

SEQ ID NO: 53659 - RNA, 22 nt, Human
uacagcaaugcuacaagaugac

SEQ ID NO: 53660 - RNA, 22 nt, Human
uacagcaaugguucuaagaguc

SEQ ID NO: 53661 - RNA, 21 nt, Human
uacagcaccgaguaggcccuc

SEQ ID NO: 53662 - RNA, 22 nt, Human
uacagcacugugcauagugguu

SEQ ID NO: 53663 - RNA, 22 nt, Human
uacagcagacugaagguugugu

SEQ ID NO: 53664 - RNA, 22 nt, Human
uacagcagagugggaugcaucu

SEQ ID NO: 53665 - RNA, 22 nt, Human
uacagcauguccuuagcaaggc

SEQ ID NO: 53666 - RNA, 22 nt, Human
uacagccaucauguauguauau

SEQ ID NO: 53667 - RNA, 22 nt, Human
uacagcccaagaaguuuauacg

SEQ ID NO: 53668 - RNA, 22 nt, Human
uacagccucacauuuacuuaca

SEQ ID NO: 53669 - RNA, 22 nt, Human
uacagccuccacaggccaagug

SEQ ID NO: 53670 - RNA, 23 nt, Human
uacagcugcagaaucaggcuaag

SEQ ID NO: 53671 - RNA, 22 nt, Human
uacagcuggacugguagcugug

SEQ ID NO: 53672 - RNA, 18 nt, Human
uacagcuugaguugacug

SEQ ID NO: 53673 - RNA, 18 nt, Human
uacaggaagggguucucg

SEQ ID NO: 53674 - RNA, 22 nt, Human
uacaggaaguaaguaaugaaau

SEQ ID NO: 53675 - RNA, 22 nt, Human
uacaggagagauuuaguaauca

SEQ ID NO: 53676 - RNA, 17 nt, Human
uacaggagagcaggaac

SEQ ID NO: 53677 - RNA, 22 nt, Human
uacaggagcauggggaagggau

SEQ ID NO: 53678 - RNA, 22 nt, Human
ugaguauuuucccuaucaaugu

SEQ ID NO: 53679 - RNA, 22 nt, Human
ugagucacacauuucuucauac

SEQ ID NO: 53680 - RNA, 22 nt, Human
ugagucacagccuugccuuggu

SEQ ID NO: 53681 - RNA, 22 nt, Human
ugagucaccucucagaagccac

SEQ ID NO: 53682 - RNA, 22 nt, Human
ugagucacuaucacuuucucug

SEQ ID NO: 53683 - RNA, 22 nt, Human
ugagucaugggcuugagguuac

SEQ ID NO: 53684 - RNA, 22 nt, Human
ugaguccaccuuaguauauggg

SEQ ID NO: 53685 - RNA, 22 nt, Human
ugaguccaggugcuuaccugga

SEQ ID NO: 53686 - RNA, 22 nt, Human
ugaguccauguggaggggaggu

SEQ ID NO: 53687 - RNA, 22 nt, Human
ugaguccauugauggauaguga

SEQ ID NO: 53688 - RNA, 22 nt, Human
ugaguccuggcuuugggaugua

SEQ ID NO: 53689 - RNA, 22 nt, Human
ugagucucugcacuaaggagag

SEQ ID NO: 53690 - RNA, 22 nt, Human
ugagucuguauguccagauuua

SEQ ID NO: 53691 - RNA, 22 nt, Human
ugagucuucuuccgggauugcu

SEQ ID NO: 53692 - RNA, 22 nt, Human
ugagugaauucaaguaaagggc

SEQ ID NO: 53693 - RNA, 22 nt, Human
ugagugccuacggcacaggcgc

SEQ ID NO: 53694 - RNA, 22 nt, Human
ugagugcuaagaauaaucugca

SEQ ID NO: 53695 - RNA, 22 nt, Human
ugaguggacaccugcuucuuua

SEQ ID NO: 53696 - RNA, 22 nt, Human
ugaguggacgugaggcugagua

SEQ ID NO: 53697 - RNA, 19 nt, Human
ugagugggccccugcagac

SEQ ID NO: 53698 - RNA, 22 nt, Human
ugcaaauguguggugaggcauu

SEQ ID NO: 53699 - RNA, 22 nt, Human
ugcaaauguguuuuaaaccaaa

SEQ ID NO: 53700 - RNA, 22 nt, Human
ugcaaauuauugggccccaacu

SEQ ID NO: 53701 - RNA, 23 nt, Human
ugcaacaaugaggaaagcuacug

SEQ ID NO: 53702 - RNA, 22 nt, Human
ugcaacaggagaguucagggca

SEQ ID NO: 53703 - RNA, 22 nt, Human
ugcaacauuauuaaacuaagca

SEQ ID NO: 53704 - RNA, 22 nt, Human
ugcaagaaagguggggccaggc

SEQ ID NO: 53705 - RNA, 22 nt, Human
ugcaagaaaugugaagcuacaa

SEQ ID NO: 53706 - RNA, 22 nt, Human
ugcaagaaguccucucugggug

SEQ ID NO: 53707 - RNA, 22 nt, Human
ugcaagaauuguauacccucau

SEQ ID NO: 53708 - RNA, 22 nt, Human
ugcaagagguuggauuuuaaga

SEQ ID NO: 53709 - RNA, 23 nt, Human
ugcaagaguuccaaacuguucaa

SEQ ID NO: 53710 - RNA, 20 nt, Human
ugcaagauggguggggagaa

SEQ ID NO: 53711 - RNA, 22 nt, Human
ugcaagcacucaaugcaaacag

SEQ ID NO: 53712 - RNA, 21 nt, Human
ugcaagcagcagagauauggg

SEQ ID NO: 53713 - RNA, 19 nt, Human
ugcaagcuuuuucuuguua

SEQ ID NO: 53714 - RNA, 22 nt, Human
ugcaaggcacccacucugcuuu

SEQ ID NO: 53715 - RNA, 22 nt, Human
ugcaagggcuuagggggcugug

SEQ ID NO: 53716 - RNA, 22 nt, Human
ugcaagggugacagguugcucu

SEQ ID NO: 53717 - RNA, 22 nt, Human
ugcaaggguguuugagcugccc

SEQ ID NO: 53718 - RNA, 22 nt, Human
ugcaaguaaccaucacuaucuc

SEQ ID NO: 53719 - RNA, 22 nt, Human
ugcaaguaacuuguuugggagg

SEQ ID NO: 53720 - RNA, 22 nt, Human
ugcaauaaagugcuauaaaucc

SEQ ID NO: 53721 - RNA, 22 nt, Human
ugcaauaaguauugcuuacaug

SEQ ID NO: 53722 - RNA, 21 nt, Human
ugcaauauauauuugccugaa

SEQ ID NO: 53723 - RNA, 22 nt, Human
ugcaauaucagauucaacacau

SEQ ID NO: 53724 - RNA, 23 nt, Human
ugcaauaugucagugcaaagugg

SEQ ID NO: 53725 - RNA, 22 nt, Human
ugcaauauguugcauuguaugg

SEQ ID NO: 53726 - RNA, 22 nt, Human
ugcaauauuuuauauccaacaa

SEQ ID NO: 53727 - RNA, 22 nt, Human
ugcaaucucggcacuuugggag

SEQ ID NO: 53728 - RNA, 22 nt, Human
ugcaauguguuagaugguuuua

SEQ ID NO: 53729 - RNA, 22 nt, Human
ugcaauuaauuuacaugcuuaa

SEQ ID NO: 53730 - RNA, 22 nt, Human
ugcaauuagcguauuaguuuau

SEQ ID NO: 53731 - RNA, 21 nt, Human
ugcaauuuagacuugaacauu

SEQ ID NO: 53732 - RNA, 22 nt, Human
ugcaauuugacgucagcacagu

SEQ ID NO: 53733 - RNA, 22 nt, Human
ugcaauuuggcuuccauuuucu

SEQ ID NO: 53734 - RNA, 22 nt, Human
ugcaauuuuaauacauuagagg

SEQ ID NO: 53735 - RNA, 22 nt, Human
ugcacaaagcauucuagacgca

SEQ ID NO: 53736 - RNA, 22 nt, Human
ugcacacacacguagagaaaag

SEQ ID NO: 53737 - RNA, 22 nt, Human
ugcacacacaggagucuccucc

SEQ ID NO: 53738 - RNA, 22 nt, Human
ugcacacacaugcagagggaga

SEQ ID NO: 53739 - RNA, 22 nt, Human
ugcacacaccgugcuucacuga

SEQ ID NO: 53740 - RNA, 20 nt, Human
ugcacacagaaauuugcauu

SEQ ID NO: 53741 - RNA, 22 nt, Human
ugcacacagaugguacaugcau

SEQ ID NO: 53742 - RNA, 22 nt, Human
ugcacacauguauguauaugug

SEQ ID NO: 53743 - RNA, 22 nt, Human
ugcacacauguuuacaagcauc

SEQ ID NO: 53744 - RNA, 22 nt, Human
ugcacagacaacucuuucuaga

SEQ ID NO: 53745 - RNA, 20 nt, Human
ugcacagacaaugagcccag

SEQ ID NO: 53746 - RNA, 22 nt, Human
ugcacagacauacacauauaug

SEQ ID NO: 53747 - RNA, 22 nt, Human
ugcacagaugcuaggaggugaa

SEQ ID NO: 53748 - RNA, 22 nt, Human
ugcacagcugccuccucucugc

SEQ ID NO: 53749 - RNA, 23 nt, Human
ugcacaggacggccuuauaagua

SEQ ID NO: 53750 - RNA, 22 nt, Human
ugcacaggccuugaagggagag

SEQ ID NO: 53751 - RNA, 22 nt, Human
ugcacagggagggggccagcuc

SEQ ID NO: 53752 - RNA, 22 nt, Human
ugcacaggugagacucaggaag

SEQ ID NO: 53753 - RNA, 22 nt, Human
ugcacaggugguccaucugcac

SEQ ID NO: 53754 - RNA, 22 nt, Human
ugcacagugaccacugagcaag

SEQ ID NO: 53755 - RNA, 22 nt, Human
ugcacaguuaauaugugacaga

SEQ ID NO: 53756 - RNA, 22 nt, Human
ugcacauucacuuagguauugu

SEQ ID NO: 53757 - RNA, 22 nt, Human
ugcacauugaaugagcaaacug

SEQ ID NO: 53758 - RNA, 22 nt, Human
ugcaccaagcccagcuggagaa

SEQ ID NO: 53759 - RNA, 22 nt, Human
ugcaccaagucuggcacugaau

SEQ ID NO: 53760 - RNA, 22 nt, Human
ugcaccacccgugggaggacug

SEQ ID NO: 53761 - RNA, 22 nt, Human
ugcaccguugcacuccagagug

SEQ ID NO: 53762 - RNA, 21 nt, Human
ugcaccuguucacugcaguuc

SEQ ID NO: 53763 - RNA, 22 nt, Human
ugcaccuucauuuuaggcagcu

SEQ ID NO: 53764 - RNA, 22 nt, Human
ugcaccuuguugcuuuuacgaa

SEQ ID NO: 53765 - RNA, 22 nt, Human
ugcacgugggcucucugcucuu

SEQ ID NO: 53766 - RNA, 22 nt, Human
ugcacgugugagcauucacaug

SEQ ID NO: 53767 - RNA, 18 nt, Human
ugcacuagaugcuggcag

SEQ ID NO: 53768 - RNA, 22 nt, Human
ugcacugauguuuugccaagga

SEQ ID NO: 53769 - RNA, 22 nt, Human
ugcacuggggucccagcgcacg

SEQ ID NO: 53770 - RNA, 22 nt, Human
ugcacuguaugguaucuggaca

SEQ ID NO: 53771 - RNA, 18 nt, Human
ugcacugugcugaguggc

SEQ ID NO: 53772 - RNA, 21 nt, Human
ugcacuucaguggcuaaauuc

SEQ ID NO: 53773 - RNA, 22 nt, Human
ugcacuucauuguaaauuguac

SEQ ID NO: 53774 - RNA, 22 nt, Human
ugcacuuuauuuccucucacac

SEQ ID NO: 53775 - RNA, 22 nt, Human
ugcacuuuuauaucacucuggc

SEQ ID NO: 53776 - RNA, 22 nt, Human
ugcagaaaccaauucaaguaag

SEQ ID NO: 53777 - RNA, 22 nt, Human
ugcagaaagcauugacucuucc

SEQ ID NO: 53778 - RNA, 21 nt, Human
ugcagaaagcggcuugaagca

SEQ ID NO: 53779 - RNA, 22 nt, Human
ugcagaaauaacucauauugca

SEQ ID NO: 53780 - RNA, 22 nt, Human
ugcagaaaucacauuuaacccu

SEQ ID NO: 53781 - RNA, 22 nt, Human
ugcagaagacacaagguaacgu

SEQ ID NO: 53782 - RNA, 22 nt, Human
ugcagaagcagagccgguggcc

SEQ ID NO: 53783 - RNA, 22 nt, Human
ugcagaaggccugacauugcac

SEQ ID NO: 53784 - RNA, 20 nt, Human
ugcagaauccugugaucagu

SEQ ID NO: 53785 - RNA, 21 nt, Human
ugcagacagggacagaaugga

SEQ ID NO: 53786 - RNA, 22 nt, Human
ugcagagaccacugugccuucc

SEQ ID NO: 53787 - RNA, 22 nt, Human
ugcagagacuugugugcauuug

SEQ ID NO: 53788 - RNA, 22 nt, Human
ugcagagagaccccugggccag

SEQ ID NO: 53789 - RNA, 16 nt, Human
ugcagagagcauggug

SEQ ID NO: 53790 - RNA, 22 nt, Human
ugcagagagccagcucucucgg

SEQ ID NO: 53791 - RNA, 22 nt, Human
ugcagagaguuagggcccguau

SEQ ID NO: 53792 - RNA, 21 nt, Human
ugcagagauaucugaagcaga

SEQ ID NO: 53793 - RNA, 22 nt, Human
ugcagagauccuggacugagcg

SEQ ID NO: 53794 - RNA, 22 nt, Human
ugcagagcagcaacugcgugcg

SEQ ID NO: 53795 - RNA, 22 nt, Human
uacaggagcugcucugugauac

SEQ ID NO: 53796 - RNA, 22 nt, Human
uacaggaggauuaucaaaggau

SEQ ID NO: 53797 - RNA, 22 nt, Human
uacaggcacugaaaugcuuauu

SEQ ID NO: 53798 - RNA, 19 nt, Human
uacaggcaguuucuacaau

SEQ ID NO: 53799 - RNA, 22 nt, Human
uacaggcucuugucagacguau

SEQ ID NO: 53800 - RNA, 22 nt, Human
uacagggauuccugccgcucgc

SEQ ID NO: 53801 - RNA, 22 nt, Human
uacagggcaugugcagacacau

SEQ ID NO: 53802 - RNA, 22 nt, Human
uacagggguaacaguggggaau

SEQ ID NO: 53803 - RNA, 22 nt, Human
uacagguagagucucuaguuua

SEQ ID NO: 53804 - RNA, 22 nt, Human
uacagguagggucuauguuaga

SEQ ID NO: 53805 - RNA, 22 nt, Human
uacaggucuucugccuucacuc

SEQ ID NO: 53806 - RNA, 22 nt, Human
uacaggugcucuacagacagga

SEQ ID NO: 53807 - RNA, 22 nt, Human
uagaaaucagcaggcauaugua

SEQ ID NO: 53808 - RNA, 22 nt, Human
uagaaaucauuuagaaguauug

SEQ ID NO: 53809 - RNA, 22 nt, Human
uagaaaucuacuuagacuuucu

SEQ ID NO: 53810 - RNA, 22 nt, Human
uagaaauguaggcuuccugaca

SEQ ID NO: 53811 - RNA, 22 nt, Human
uagaacagaggguugcccagau

SEQ ID NO: 53812 - RNA, 22 nt, Human
uagaacaggaauaagggaaaua

SEQ ID NO: 53813 - RNA, 22 nt, Human
uagaacaugcucauguauaaau

SEQ ID NO: 53814 - RNA, 22 nt, Human
uagaacaugggauagaguuuuu

SEQ ID NO: 53815 - RNA, 22 nt, Human
uagaaccuccagaguggccccc

SEQ ID NO: 53816 - RNA, 22 nt, Human
uagaacuaagaguuaucauuua

SEQ ID NO: 53817 - RNA, 22 nt, Human
ugcaguuuuaucacauauauag

SEQ ID NO: 53818 - RNA, 22 nt, Human
ugcaguuuuccuucaacauugu

SEQ ID NO: 53819 - RNA, 22 nt, Human
ugcaguuuugccaggcaaugga

SEQ ID NO: 53820 - RNA, 22 nt, Human
ugcaguuuuggccauugaaggc

SEQ ID NO: 53821 - RNA, 22 nt, Human
ugcauaaacuucucugguguga

SEQ ID NO: 53822 - RNA, 22 nt, Human
ugcauaaagugccauaguauua

SEQ ID NO: 53823 - RNA, 22 nt, Human
ugcauaauacguuuccuauaac

SEQ ID NO: 53824 - RNA, 22 nt, Human
ugcauacacuucaaaugagcau

SEQ ID NO: 53825 - RNA, 22 nt, Human
ugcauacuuuuaaugacuguuu

SEQ ID NO: 53826 - RNA, 20 nt, Human
ugcauaguugcugcaguuga

SEQ ID NO: 53827 - RNA, 18 nt, Human
ugcauauacugccuaucu

SEQ ID NO: 53828 - RNA, 23 nt, Human
ugcauaucagaaauuucauaugg

SEQ ID NO: 53829 - RNA, 22 nt, Human
ugcauauuauaaagagaauuag

SEQ ID NO: 53830 - RNA, 22 nt, Human
ugcauauuguccuugauauuau

SEQ ID NO: 53831 - RNA, 22 nt, Human
ugcauauugugaaaauguagau

SEQ ID NO: 53832 - RNA, 22 nt, Human
ugcaucaaauucugaaauuagc

SEQ ID NO: 53833 - RNA, 23 nt, Human
ugcaucaauaaagccaggguuug

SEQ ID NO: 53834 - RNA, 22 nt, Human
ugcaucauuaagguacaguugg

SEQ ID NO: 53835 - RNA, 22 nt, Human
ugcaucauuuauaaugucuuug

SEQ ID NO: 53836 - RNA, 22 nt, Human
ugcaucugauucucaggcagaa

SEQ ID NO: 53837 - RNA, 22 nt, Human
ugcaucuggccuuugcuggcua

SEQ ID NO: 53838 - RNA, 22 nt, Human
ugcaucuguucagagcugucga

SEQ ID NO: 53839 - RNA, 22 nt, Human
ugcaugaacggaggguaagcug

SEQ ID NO: 53840 - RNA, 22 nt, Human
ugcaugaggacucagagcuucu

SEQ ID NO: 53841 - RNA, 22 nt, Human
ugcaugcacccagccggguauu

SEQ ID NO: 53842 - RNA, 22 nt, Human
ugcaugcacguaucugcgugug

SEQ ID NO: 53843 - RNA, 22 nt, Human
ugcaugcacuuggcuggcacgu

SEQ ID NO: 53844 - RNA, 22 nt, Human
ugcaugcagcauaugaggccuc

SEQ ID NO: 53845 - RNA, 22 nt, Human
ugcaugcaugauguuugguagc

SEQ ID NO: 53846 - RNA, 22 nt, Human
ugcauggacgugacuuggccaa

SEQ ID NO: 53847 - RNA, 22 nt, Human
ugcauggagauauacuauuuga

SEQ ID NO: 53848 - RNA, 21 nt, Human
ugcauggaggaaaguuauaga

SEQ ID NO: 53849 - RNA, 22 nt, Human
ugcauggauaaaaguauauuau

SEQ ID NO: 53850 - RNA, 22 nt, Human
ugcauggauuugacauguguac

SEQ ID NO: 53851 - RNA, 23 nt, Human
ugcauggggcuauacugcuguuc

SEQ ID NO: 53852 - RNA, 22 nt, Human
ugcaugucaaggcacucaggau

SEQ ID NO: 53853 - RNA, 23 nt, Human
ugcaugugaauucauacuuguuu

SEQ ID NO: 53854 - RNA, 22 nt, Human
ugcaugugcccacucuggcuua

SEQ ID NO: 53855 - RNA, 22 nt, Human
ugcaugugucgggccugugcua

SEQ ID NO: 53856 - RNA, 22 nt, Human
ugcaugugugacaaggacaguu

SEQ ID NO: 53857 - RNA, 19 nt, Human
ugcauguguucucccauug

SEQ ID NO: 53858 - RNA, 22 nt, Human
ugcauguguuucccagcaagcu

SEQ ID NO: 53859 - RNA, 22 nt, Human
ugcauguguuugccacagugag

SEQ ID NO: 53860 - RNA, 22 nt, Human
ugcauguuaagaaaauauugag

SEQ ID NO: 53861 - RNA, 22 nt, Human
ugcauguuucuguauguuaaug

SEQ ID NO: 53862 - RNA, 22 nt, Human
ugcauuaaaaccaucgaccauc

SEQ ID NO: 53863 - RNA, 22 nt, Human
ugcauuaaaaugugccucucuu

SEQ ID NO: 53864 - RNA, 22 nt, Human
ugcauuaagaauuucugaggau

SEQ ID NO: 53865 - RNA, 22 nt, Human
ugcauuaagcacacuuuugaau

SEQ ID NO: 53866 - RNA, 22 nt, Human
ugcauuaaggccauugaaauuu

SEQ ID NO: 53867 - RNA, 22 nt, Human
ugcauuauggcugagucucuca

SEQ ID NO: 53868 - RNA, 22 nt, Human
ugcauuauucuuuuuugguagg

SEQ ID NO: 53869 - RNA, 22 nt, Human
ugcauucaaauccugauccugc

SEQ ID NO: 53870 - RNA, 22 nt, Human
ugcauucaauacaguaagaaua

SEQ ID NO: 53871 - RNA, 22 nt, Human
ugcauucaguuggucagcuuuu

SEQ ID NO: 53872 - RNA, 19 nt, Human
ugcauugagggcugucuca

SEQ ID NO: 53873 - RNA, 22 nt, Human
ugcauugagucauuucaguaug

SEQ ID NO: 53874 - RNA, 22 nt, Human
ugcauugauagaaaaacaugga

SEQ ID NO: 53875 - RNA, 22 nt, Human
ugcauugccucuauucauuaua

SEQ ID NO: 53876 - RNA, 22 nt, Human
ugcauuggaaacucagcagcac

SEQ ID NO: 53877 - RNA, 22 nt, Human
ugcauuggucauuuagaaaaua

SEQ ID NO: 53878 - RNA, 22 nt, Human
ugcauuguugaauauuucauag

SEQ ID NO: 53879 - RNA, 22 nt, Human
ugcauuguuuagaacucuuugg

SEQ ID NO: 53880 - RNA, 18 nt, Human
ugcauuuaguacaucuag

SEQ ID NO: 53881 - RNA, 22 nt, Human
ugcauuugaguugggagcaggc

SEQ ID NO: 53882 - RNA, 22 nt, Human
ugcauuuguucagugaaauguu

SEQ ID NO: 53883 - RNA, 22 nt, Human
ugcauuuucuuccaccaauauc

SEQ ID NO: 53884 - RNA, 22 nt, Human
ugccaaaauggccaaaagcuag

SEQ ID NO: 53885 - RNA, 22 nt, Human
ugccaaauauucucuacgugcu

SEQ ID NO: 53886 - RNA, 22 nt, Human
ugccaagcuagaacguucccag

SEQ ID NO: 53887 - RNA, 22 nt, Human
ugccaaggagcuggaucagggc

SEQ ID NO: 53888 - RNA, 22 nt, Human
ugccaaguagccugcagugacu

SEQ ID NO: 53889 - RNA, 22 nt, Human
ugccaagugcuuacuuggcccu

SEQ ID NO: 53890 - RNA, 22 nt, Human
ugccaaguggagcucaggaauc

SEQ ID NO: 53891 - RNA, 22 nt, Human
ugccaauucgcagugaguauuu

SEQ ID NO: 53892 - RNA, 23 nt, Human
ugccacaagaucugugaauaaga

SEQ ID NO: 53893 - RNA, 22 nt, Human
ugccacacucacuucuguggac

SEQ ID NO: 53894 - RNA, 22 nt, Human
ugccacagagcaauucugcuga

SEQ ID NO: 53895 - RNA, 22 nt, Human
ugccacagaggugaagcccacu

SEQ ID NO: 53896 - RNA, 19 nt, Human
ugccacagauaaaaacuga

SEQ ID NO: 53897 - RNA, 22 nt, Human
ugccacagcagugcuuugacag

SEQ ID NO: 53898 - RNA, 22 nt, Human
ugccacaguuucauggauucug

SEQ ID NO: 53899 - RNA, 22 nt, Human
ugccacauggugcauuuccuag

SEQ ID NO: 53900 - RNA, 22 nt, Human
ugccaccaucuggcuguguuga

SEQ ID NO: 53901 - RNA, 22 nt, Human
ugccacccagccaggaguggga

SEQ ID NO: 53902 - RNA, 23 nt, Human
ugccacccuucucuucccagcuu

SEQ ID NO: 53903 - RNA, 22 nt, Human
ugccaccuaguggucuuuaguc

SEQ ID NO: 53904 - RNA, 22 nt, Human
ugccaccuugugcagcaggagg

SEQ ID NO: 53905 - RNA, 22 nt, Human
ugccacuggacccagaacucuu

SEQ ID NO: 53906 - RNA, 22 nt, Human
ugccacuggcucaauggugcag

SEQ ID NO: 53907 - RNA, 22 nt, Human
ugccacuggggcuaggacuguu

SEQ ID NO: 53908 - RNA, 22 nt, Human
ugccagaagugcuuuauaagug

SEQ ID NO: 53909 - RNA, 22 nt, Human
ugccagagaagacccagucacu

SEQ ID NO: 53910 - RNA, 22 nt, Human
ugccagagaguggcuggguguc

SEQ ID NO: 53911 - RNA, 22 nt, Human
ugccagagccaggcuuuaggaa

SEQ ID NO: 53912 - RNA, 22 nt, Human
ugccagcagaaauaaauacuug

SEQ ID NO: 53913 - RNA, 22 nt, Human
ugccagccagggaagcucaccc

SEQ ID NO: 53914 - RNA, 22 nt, Human
ugccagccagguucugaggcua

SEQ ID NO: 53915 - RNA, 22 nt, Human
ugccagccuccugauaucaucc

SEQ ID NO: 53916 - RNA, 22 nt, Human
uagaucuuucacuacuguguag

SEQ ID NO: 53917 - RNA, 22 nt, Human
uagaugaaaggucuagcacagu

SEQ ID NO: 53918 - RNA, 22 nt, Human
uagaugaacagaaagccacugu

SEQ ID NO: 53919 - RNA, 22 nt, Human
uagaugaaggcugagcaccugu

SEQ ID NO: 53920 - RNA, 22 nt, Human
uagaugaccuuguguuaggcaa

SEQ ID NO: 53921 - RNA, 22 nt, Human
uagaugauggaaaaaagcaaua

SEQ ID NO: 53922 - RNA, 22 nt, Human
uagaugcauagagcacagcaca

SEQ ID NO: 53923 - RNA, 22 nt, Human
uagaugcuguagaaauacuuau

SEQ ID NO: 53924 - RNA, 22 nt, Human
uagaugcuugucaguuucuguc

SEQ ID NO: 53925 - RNA, 18 nt, Human
uagauggcagucugcaga

SEQ ID NO: 53926 - RNA, 23 nt, Human
uagauguauuaagugcauuuuca

SEQ ID NO: 53927 - RNA, 22 nt, Human
uagauguuccacauauauaugu

SEQ ID NO: 53928 - RNA, 22 nt, Human
uagauguugaagucauauuugg

SEQ ID NO: 53929 - RNA, 22 nt, Human
uagauguuugagaaguuuaugu

SEQ ID NO: 53930 - RNA, 23 nt, Human
uagauguuuggggaacuuugccc

SEQ ID NO: 53931 - RNA, 22 nt, Human
uagauuaucccugauuugucca

SEQ ID NO: 53932 - RNA, 22 nt, Human
uagauucaugcaguaugcuagu

SEQ ID NO: 53933 - RNA, 22 nt, Human
uagauucauuuuagcaaaaguu

SEQ ID NO: 53934 - RNA, 22 nt, Human
ugccaggcucagccccuaucuu

SEQ ID NO: 53935 - RNA, 22 nt, Human
ugccaggcuccggaacgacagu

SEQ ID NO: 53936 - RNA, 22 nt, Human
ugccaggcugaacagggucuua

SEQ ID NO: 53937 - RNA, 20 nt, Human
ugccaggcugcacgccugcc

SEQ ID NO: 53938 - RNA, 22 nt, Human
ugccaggcugcccuccagucug

SEQ ID NO: 53939 - RNA, 22 nt, Human
ugccaggcuuagagcaggggcu

SEQ ID NO: 53940 - RNA, 22 nt, Human
ugccaggguccugagggccuug

SEQ ID NO: 53941 - RNA, 23 nt, Human
ugccaggguuuguuugugguuca

SEQ ID NO: 53942 - RNA, 22 nt, Human
ugccagugggugugcagagacu

SEQ ID NO: 53943 - RNA, 22 nt, Human
ugccaguguggaacuaggaaga

SEQ ID NO: 53944 - RNA, 22 nt, Human
ugccauccaucaguauuugugg

SEQ ID NO: 53945 - RNA, 18 nt, Human
ugccauccccagucaagu

SEQ ID NO: 53946 - RNA, 22 nt, Human
ugccauccugugucaugcucau

SEQ ID NO: 53947 - RNA, 22 nt, Human
ugccaucugaaaauuacauccu

SEQ ID NO: 53948 - RNA, 22 nt, Human
ugccaucuuccuuccucugcac

SEQ ID NO: 53949 - RNA, 22 nt, Human
ugccaucuucucuggggauguu

SEQ ID NO: 53950 - RNA, 22 nt, Human
ugccauggaaguggccagaccu

SEQ ID NO: 53951 - RNA, 22 nt, Human
ugccauggaaucaccuccagcu

SEQ ID NO: 53952 - RNA, 22 nt, Human
ugccauggauuaaguggguggc

SEQ ID NO: 53953 - RNA, 20 nt, Human
ugccaugguaacagagugug

SEQ ID NO: 53954 - RNA, 22 nt, Human
ugccauggugacugcaggaggu

SEQ ID NO: 53955 - RNA, 22 nt, Human
ugccauuuaaaaaugaccaaau

SEQ ID NO: 53956 - RNA, 22 nt, Human
ugccauuuagugcaucauuagu

SEQ ID NO: 53957 - RNA, 22 nt, Human
ugccauuuauaaccaguggccu

SEQ ID NO: 53958 - RNA, 22 nt, Human
ugccauuucucaggcuauuuca

SEQ ID NO: 53959 - RNA, 22 nt, Human
ugccauuucuuucaauauucuu

SEQ ID NO: 53960 - RNA, 22 nt, Human
ugccauuuguuacuaucaggac

SEQ ID NO: 53961 - RNA, 22 nt, Human
ugcccaaacugacauuggcagu

SEQ ID NO: 53962 - RNA, 22 nt, Human
ugcccaagcagaggagugauuc

SEQ ID NO: 53963 - RNA, 22 nt, Human
ugcccaagguggccuuuuacuc

SEQ ID NO: 53964 - RNA, 22 nt, Human
ugcccacaggaagacaccagcg

SEQ ID NO: 53965 - RNA, 22 nt, Human
ugcccacauucugaagcucccu

SEQ ID NO: 53966 - RNA, 22 nt, Human
ugcccacucuuuugauuugugu

SEQ ID NO: 53967 - RNA, 22 nt, Human
ugcccagagccucuuaccucca

SEQ ID NO: 53968 - RNA, 19 nt, Human
ugcccagaguguaugcgca

SEQ ID NO: 53969 - RNA, 22 nt, Human
ugcccagcacccagcaugaugc

SEQ ID NO: 53970 - RNA, 22 nt, Human
ugcccagccaauuuguuauguu

SEQ ID NO: 53971 - RNA, 22 nt, Human
ugcccaggaucuggcgaugcuc

SEQ ID NO: 53972 - RNA, 19 nt, Human
ugcccaggccucccaaaag

SEQ ID NO: 53973 - RNA, 22 nt, Human
ugcccaggcuucacccucagag

SEQ ID NO: 53974 - RNA, 22 nt, Human
ugcccaggguggagugcagcgg

SEQ ID NO: 53975 - RNA, 22 nt, Human
ugcccaugcaugacagauggcu

SEQ ID NO: 53976 - RNA, 22 nt, Human
ugccccagaccuacugaauggg

SEQ ID NO: 53977 - RNA, 22 nt, Human
ugcccccugguggccagagccg

SEQ ID NO: 53978 - RNA, 22 nt, Human
ugcccccuuuucuuguuacacu

SEQ ID NO: 53979 - RNA, 22 nt, Human
ugccccucuugcuggcccuguc

SEQ ID NO: 53980 - RNA, 22 nt, Human
ugccccugaugccuagaacaga

SEQ ID NO: 53981 - RNA, 19 nt, Human
ugccccuuaagaguuucuc

SEQ ID NO: 53982 - RNA, 22 nt, Human
ugcccguucauucauacuuaac

SEQ ID NO: 53983 - RNA, 22 nt, Human
ugcccucagaauugcucccugc

SEQ ID NO: 53984 - RNA, 22 nt, Human
ugcccuccuccugagcccaugu

SEQ ID NO: 53985 - RNA, 22 nt, Human
ugcccucuaggcuacaguucca

SEQ ID NO: 53986 - RNA, 22 nt, Human
ugcccucugccuccucugcaga

SEQ ID NO: 53987 - RNA, 22 nt, Human
ugcccugcagugagugcgucug

SEQ ID NO: 53988 - RNA, 22 nt, Human
ugcccugccaagaccaaguggu

SEQ ID NO: 53989 - RNA, 22 nt, Human
ugcccugccaagacucaguggu

SEQ ID NO: 53990 - RNA, 22 nt, Human
ugcccugcugugccuggagcca

SEQ ID NO: 53991 - RNA, 22 nt, Human
ugcccugcuucucuugggacag

SEQ ID NO: 53992 - RNA, 22 nt, Human
ugcccuggcauuggguuggaua

SEQ ID NO: 53993 - RNA, 22 nt, Human
ugcccuggggagcccagccagg

SEQ ID NO: 53994 - RNA, 22 nt, Human
ugcccuggugaagugcucuccu

SEQ ID NO: 53995 - RNA, 22 nt, Human
ugcccugguuacacuggagucc

SEQ ID NO: 53996 - RNA, 22 nt, Human
ugcccugucgcucacucccacc

SEQ ID NO: 53997 - RNA, 17 nt, Human
ugcccugugccuggugu

SEQ ID NO: 53998 - RNA, 22 nt, Human
ugcccuguggggauuuccagcc

SEQ ID NO: 53999 - RNA, 22 nt, Human
ugcccuguggguaucugauggc

SEQ ID NO: 54000 - RNA, 22 nt, Human
ugcccuguuccugccuccagcu

SEQ ID NO: 54001 - RNA, 22 nt, Human
ugcccuuacacauggaaaggga

SEQ ID NO: 54002 - RNA, 22 nt, Human
ugcccuuaggaaggcucaccaa

SEQ ID NO: 54003 - RNA, 22 nt, Human
ugcccuuaugaaagaggcccaa

SEQ ID NO: 54004 - RNA, 22 nt, Human
ugcccuugaaauacgcuugggg

SEQ ID NO: 54005 - RNA, 22 nt, Human
ugccgcagugcggggagggccc

SEQ ID NO: 54006 - RNA, 22 nt, Human
ugccgcgcgcccagguuaggug

SEQ ID NO: 54007 - RNA, 20 nt, Human
ugccgggcagccugaggagu

SEQ ID NO: 54008 - RNA, 22 nt, Human
ugccuaaaccauuccccuuccu

SEQ ID NO: 54009 - RNA, 22 nt, Human
ugccuacauuccuugcuuaugg

SEQ ID NO: 54010 - RNA, 22 nt, Human
ugccuacuaguacuauuuugug

SEQ ID NO: 54011 - RNA, 22 nt, Human
ugccucagagugggcuugcuau

SEQ ID NO: 54012 - RNA, 19 nt, Human
ugccucagggcuuugagga

SEQ ID NO: 54013 - RNA, 22 nt, Human
ugccucaguuucaucugcagaa

SEQ ID NO: 54014 - RNA, 22 nt, Human
ugccuccauguuucagcaucua

SEQ ID NO: 54015 - RNA, 22 nt, Human
ugccuccuucaggagggcccgg

SEQ ID NO: 54016 - RNA, 22 nt, Human
ugccucugcugcuguggcauca

SEQ ID NO: 54017 - RNA, 22 nt, Human
ugccucugugggccuuccuggc

SEQ ID NO: 54018 - RNA, 22 nt, Human
ugccucugugugcaggugagca

SEQ ID NO: 54019 - RNA, 22 nt, Human
ugccugaacaugaauaguuuau

SEQ ID NO: 54020 - RNA, 22 nt, Human
ugccugacugcugccaccacua

SEQ ID NO: 54021 - RNA, 22 nt, Human
ugccugaguuuaacccucagag

SEQ ID NO: 54022 - RNA, 22 nt, Human
ugccugcauuuuguggcuggcu

SEQ ID NO: 54023 - RNA, 22 nt, Human
ugccugcccugaaaacugccca

SEQ ID NO: 54024 - RNA, 22 nt, Human
ugccugcgaggcaugggugaga

SEQ ID NO: 54025 - RNA, 22 nt, Human
uaguccaucuugaauucaguga

SEQ ID NO: 54026 - RNA, 22 nt, Human
uagucccauuuugagguauuug

SEQ ID NO: 54027 - RNA, 22 nt, Human
uaguccucagcugaacugcugc

SEQ ID NO: 54028 - RNA, 22 nt, Human
uaguccugaccuugccaccagc

SEQ ID NO: 54029 - RNA, 22 nt, Human
uaguccuggauugguggaggca

SEQ ID NO: 54030 - RNA, 22 nt, Human
uaguccuugcugggcacagagu

SEQ ID NO: 54031 - RNA, 22 nt, Human
uaguccuuuaauaguuaaugug

SEQ ID NO: 54032 - RNA, 22 nt, Human
uagucucugcuuugcccuuggc

SEQ ID NO: 54033 - RNA, 22 nt, Human
uagucucuggagacucuagggg

SEQ ID NO: 54034 - RNA, 22 nt, Human
uagucuuccuggaagaaguguu

SEQ ID NO: 54035 - RNA, 22 nt, Human
uagugaaacaguuaucaaucug

SEQ ID NO: 54036 - RNA, 22 nt, Human
uagugaaaccugacagaucaug

SEQ ID NO: 54037 - RNA, 22 nt, Human
uagugaaauaugugcugauagc

SEQ ID NO: 54038 - RNA, 22 nt, Human
uagugauucccuaucaacccug

SEQ ID NO: 54039 - RNA, 22 nt, Human
uagugauugcugauauuccauu

SEQ ID NO: 54040 - RNA, 22 nt, Human
uagugcaacagggaaagagugu

SEQ ID NO: 54041 - RNA, 22 nt, Human
uagugcaaucucuuccucagca

SEQ ID NO: 54042 - RNA, 22 nt, Human
uagugcaauuccccauacuaac

SEQ ID NO: 54043 - RNA, 22 nt, Human
uagugcaggguuuuaagcacug

SEQ ID NO: 54044 - RNA, 22 nt, Human
uagugcagguuaauaggacuuc

SEQ ID NO: 54045 - RNA, 22 nt, Human
uagugcauaccuaacauuuuug

SEQ ID NO: 54046 - RNA, 22 nt, Human
uagugccaaagccuggugucau

SEQ ID NO: 54047 - RNA, 22 nt, Human
uagugccaucuugagcugcuuu

SEQ ID NO: 54048 - RNA, 22 nt, Human
uagugcuugagucucuccguac

SEQ ID NO: 54049 - RNA, 22 nt, Human
uagugcuuuaaguuuacagaga

SEQ ID NO: 54050 - RNA, 22 nt, Human
ucacaucuuuaggcuuacaggu

SEQ ID NO: 54051 - RNA, 22 nt, Human
ucacaugaaaugcuguaaagaa

SEQ ID NO: 54052 - RNA, 20 nt, Human
ucacaugagcuggggcaggc

SEQ ID NO: 54053 - RNA, 22 nt, Human
ucacaugcccuguauuuaccag

SEQ ID NO: 54054 - RNA, 22 nt, Human
ucacaugcugugggaucuguau

SEQ ID NO: 54055 - RNA, 22 nt, Human
ucacaugucaaaaacuacauaa

SEQ ID NO: 54056 - RNA, 22 nt, Human
ucacaugucagucuuaaacaga

SEQ ID NO: 54057 - RNA, 22 nt, Human
ucacauguguggcagugcaagu

SEQ ID NO: 54058 - RNA, 22 nt, Human
ucacauuaggaaguaauguugu

SEQ ID NO: 54059 - RNA, 18 nt, Human
ucacauuauaauguaaca

SEQ ID NO: 54060 - RNA, 22 nt, Human
ucacauugccgucugugcacuu

SEQ ID NO: 54061 - RNA, 22 nt, Human
ucacauuguaggucauuugcaa

SEQ ID NO: 54062 - RNA, 21 nt, Human
ucacauuucucauggguaaau

SEQ ID NO: 54063 - RNA, 22 nt, Human
ucacauuuuuuacuggacuuaa

SEQ ID NO: 54064 - RNA, 22 nt, Human
ucaccaaggcauuuucacagca

SEQ ID NO: 54065 - RNA, 22 nt, Human
ucaccaccagaagagcuauucu

SEQ ID NO: 54066 - RNA, 22 nt, Human
ucaccacuaggaauuguguagu

SEQ ID NO: 54067 - RNA, 22 nt, Human
ucaccacugaacagaccuuugg

SEQ ID NO: 54068 - RNA, 22 nt, Human
ucaccaggcuccuguuaagaug

SEQ ID NO: 54069 - RNA, 22 nt, Human
ucaccaggcuggaaugcagugg

SEQ ID NO: 54070 - RNA, 22 nt, Human
ucaccagggagcuuguccucug

SEQ ID NO: 54071 - RNA, 22 nt, Human
ucaccauccucaccuagaaaug

SEQ ID NO: 54072 - RNA, 22 nt, Human
ucaccauuggcaauuauaaaac

SEQ ID NO: 54073 - RNA, 22 nt, Human
ucacccaagaccaucggaagug

SEQ ID NO: 54074 - RNA, 22 nt, Human
ucacccaggauauugaagucag

SEQ ID NO: 54075 - RNA, 19 nt, Human
ucacccaggcugcuggcuc

SEQ ID NO: 54076 - RNA, 22 nt, Human
ucacccaggcuggugcgcagug

SEQ ID NO: 54077 - RNA, 22 nt, Human
ucacccaggguguuuggugucu

SEQ ID NO: 54078 - RNA, 22 nt, Human
ucacccagguccaggcucuggc

SEQ ID NO: 54079 - RNA, 22 nt, Human
ucaccccuggcccagucuugga

SEQ ID NO: 54080 - RNA, 22 nt, Human
ucacccuugauaauguucuucu

SEQ ID NO: 54081 - RNA, 22 nt, Human
ucaccucaccacccuuaugguu

SEQ ID NO: 54082 - RNA, 22 nt, Human
ucaccuguauuaauacagaacu

SEQ ID NO: 54083 - RNA, 22 nt, Human
ucacgagaggcacagaauagag

SEQ ID NO: 54084 - RNA, 23 nt, Human
ucacuaaaguguuuagugcagau

SEQ ID NO: 54085 - RNA, 21 nt, Human
ucacuacaauguucucuuaua

SEQ ID NO: 54086 - RNA, 22 nt, Human
ucacuacauuuuagacaguaaa

SEQ ID NO: 54087 - RNA, 22 nt, Human
ucacucaagcaucuacagggau

SEQ ID NO: 54088 - RNA, 22 nt, Human
ucacucagaaauagaaugaacc

SEQ ID NO: 54089 - RNA, 22 nt, Human
ucacuccucaggcuagcaucau

SEQ ID NO: 54090 - RNA, 22 nt, Human
ucacuccucauugcugcccauu

SEQ ID NO: 54091 - RNA, 22 nt, Human
ucacucugaaugguacugagga

SEQ ID NO: 54092 - RNA, 22 nt, Human
ucacucugagaggucacuggaa

SEQ ID NO: 54093 - RNA, 22 nt, Human
ucacucugcaggaaggagcagc

SEQ ID NO: 54094 - RNA, 15 nt, Human
ucacucuggaaggga

SEQ ID NO: 54095 - RNA, 22 nt, Human
ucacucugggcccuacugggcu

SEQ ID NO: 54096 - RNA, 22 nt, Human
ucacugaaaguaauucuaguga

SEQ ID NO: 54097 - RNA, 22 nt, Human
ucacugaaccagggaucucuag

SEQ ID NO: 54098 - RNA, 22 nt, Human
ucacugaacucucauagagaaa

SEQ ID NO: 54099 - RNA, 22 nt, Human
ucacugaaggaagacacuguca

SEQ ID NO: 54100 - RNA, 22 nt, Human
ucacugaagucuucaaguagga

SEQ ID NO: 54101 - RNA, 22 nt, Human
ucacugaauuucaagcuagugg

SEQ ID NO: 54102 - RNA, 22 nt, Human
ucacugacguggggcuacuuga

SEQ ID NO: 54103 - RNA, 22 nt, Human
ucacugaugcuuaugaaagugu

SEQ ID NO: 54104 - RNA, 22 nt, Human
ucacugcuauauuggauacuga

SEQ ID NO: 54105 - RNA, 22 nt, Human
ucacugcucucuaagcaucgcc

SEQ ID NO: 54106 - RNA, 22 nt, Human
ucacugcucugaaaguacaggg

SEQ ID NO: 54107 - RNA, 21 nt, Human
ucacuggacgugagccagggg

SEQ ID NO: 54108 - RNA, 22 nt, Human
ucacuggagaaaaguaauguau

SEQ ID NO: 54109 - RNA, 22 nt, Human
ucacuggauucucuuuuguucc

SEQ ID NO: 54110 - RNA, 22 nt, Human
ucacugggagaugugggaaggg

SEQ ID NO: 54111 - RNA, 22 nt, Human
ucacugggcccugaggugggac

SEQ ID NO: 54112 - RNA, 22 nt, Human
ucacuggugugagaggagcaaa

SEQ ID NO: 54113 - RNA, 22 nt, Human
ucacuguaauagguuugaagau

SEQ ID NO: 54114 - RNA, 22 nt, Human
ucacuguaccuuccauuucauu

SEQ ID NO: 54115 - RNA, 22 nt, Human
ucacuguaucauguugcacuua

SEQ ID NO: 54116 - RNA, 22 nt, Human
ucacuguaugucuuuuuuugau

SEQ ID NO: 54117 - RNA, 22 nt, Human
ucacuguauuugcugaugcaua

SEQ ID NO: 54118 - RNA, 22 nt, Human
ucacugugaauguuaucaucuu

SEQ ID NO: 54119 - RNA, 23 nt, Human
ucacugugcccauugagguagag

SEQ ID NO: 54120 - RNA, 22 nt, Human
ucacuguguccuuucugcguag

SEQ ID NO: 54121 - RNA, 22 nt, Human
ucacuuagauggggaucaucac

SEQ ID NO: 54122 - RNA, 22 nt, Human
ucacuuaggugcaaagggaacu

SEQ ID NO: 54123 - RNA, 22 nt, Human
ucacuucugaagguaguuggca

SEQ ID NO: 54124 - RNA, 22 nt, Human
ucacuugacuccaguuucuucu

SEQ ID NO: 54125 - RNA, 22 nt, Human
ucacuugacuuuccagucuugg

SEQ ID NO: 54126 - RNA, 22 nt, Human
ucacuuuacagaugggaaaacu

SEQ ID NO: 54127 - RNA, 22 nt, Human
ucacuuuagaggaaacauugag

SEQ ID NO: 54128 - RNA, 22 nt, Human
ucacuuugacagagaaaugaau

SEQ ID NO: 54129 - RNA, 22 nt, Human
ucacuuuugaucccuaugcagu

SEQ ID NO: 54130 - RNA, 22 nt, Human
ucagaaaagagaaaaucuuaua

SEQ ID NO: 54131 - RNA, 22 nt, Human
ucagaaaauaacuguuaguuug

SEQ ID NO: 54132 - RNA, 22 nt, Human
ucagaaaccccaacaauggaga

SEQ ID NO: 54133 - RNA, 22 nt, Human
ucagaaagaacacaggcaguag

SEQ ID NO: 54134 - RNA, 21 nt, Human
ucagauucucucauuuugaug

SEQ ID NO: 54135 - RNA, 22 nt, Human
ucagauuuacugcagagcagau

SEQ ID NO: 54136 - RNA, 22 nt, Human
ucagauuucuucuugcaacggc

SEQ ID NO: 54137 - RNA, 22 nt, Human
ucagauuuuccagccuuucucu

SEQ ID NO: 54138 - RNA, 17 nt, Human
ucagcaaagacaaagga

SEQ ID NO: 54139 - RNA, 22 nt, Human
ucagcaagaagcugugggcuuc

SEQ ID NO: 54140 - RNA, 22 nt, Human
ucagcaaggcugcauucucauc

SEQ ID NO: 54141 - RNA, 20 nt, Human
ucagcacagcugacaagguu

SEQ ID NO: 54142 - RNA, 22 nt, Human
ucagcaccaguuauccucaggg

SEQ ID NO: 54143 - RNA, 22 nt, Human
ucagcacugucuuuuauuugaa

SEQ ID NO: 54144 - RNA, 22 nt, Human
ucagcacuuacuaguggccuuu

SEQ ID NO: 54145 - RNA, 22 nt, Human
ucagcagaggagugucuugccc

SEQ ID NO: 54146 - RNA, 22 nt, Human
ucagcagauggguuguguuggc

SEQ ID NO: 54147 - RNA, 23 nt, Human
ucagcagcagaagugcugggaug

SEQ ID NO: 54148 - RNA, 21 nt, Human
ucagcagcaucugccuagagu

SEQ ID NO: 54149 - RNA, 22 nt, Human
ucagcaggcaccggaaguguuu

SEQ ID NO: 54150 - RNA, 22 nt, Human
ucagcaggcaggaggcaugcca

SEQ ID NO: 54151 - RNA, 22 nt, Human
ucagcaggcccauccuccaggc

SEQ ID NO: 54152 - RNA, 22 nt, Human
ucagcaggcugucagcaggggc

SEQ ID NO: 54153 - RNA, 22 nt, Human
ucagcagggagaggagaaugca

SEQ ID NO: 54154 - RNA, 22 nt, Human
ucagcagggcugggagcuguga

SEQ ID NO: 54155 - RNA, 22 nt, Human
ucagcagggcugugguguggcu

SEQ ID NO: 54156 - RNA, 22 nt, Human
ucagcaggucugaggcggggcc

SEQ ID NO: 54157 - RNA, 22 nt, Human
ucagcaggugaacaucaugcca

SEQ ID NO: 54158 - RNA, 22 nt, Human
ucagcagugcagggugaggcag

SEQ ID NO: 54159 - RNA, 22 nt, Human
ucagcauaucuugagcuucaug

SEQ ID NO: 54160 - RNA, 22 nt, Human
ucagcauauguuuggagugucc

SEQ ID NO: 54161 - RNA, 19 nt, Human
ucagcaucaauuugguccu

SEQ ID NO: 54162 - RNA, 22 nt, Human
ucagcaucaguauuguuuagga

SEQ ID NO: 54163 - RNA, 22 nt, Human
ucagcaucuacagcuuugcuau

SEQ ID NO: 54164 - RNA, 20 nt, Human
ucagcaugcuccucagacau

SEQ ID NO: 54165 - RNA, 18 nt, Human
uaguggaacugcucuggg

SEQ ID NO: 54166 - RNA, 22 nt, Human
uaguggagaggauguggagaaa

SEQ ID NO: 54167 - RNA, 22 nt, Human
uaguggaggguguagcugcugg

SEQ ID NO: 54168 - RNA, 22 nt, Human
uaguggaguagaaaccaaagaa

SEQ ID NO: 54169 - RNA, 22 nt, Human
uaguggcaaaagcauuuugggu

SEQ ID NO: 54170 - RNA, 22 nt, Human
uaguggggaaggaggacaagaa

SEQ ID NO: 54171 - RNA, 22 nt, Human
uaguguaaacuuaugcugagcc

SEQ ID NO: 54172 - RNA, 22 nt, Human
uaguguaaugacauuuagacga

SEQ ID NO: 54173 - RNA, 22 nt, Human
uaguguaugucuaacauacacu

SEQ ID NO: 54174 - RNA, 22 nt, Human
uagugucaaacagggauuagaa

SEQ ID NO: 54175 - RNA, 22 nt, Human
uagugucaaauagccugagcuu

SEQ ID NO: 54176 - RNA, 22 nt, Human
uagugucagagaaucuugguuu

SEQ ID NO: 54177 - RNA, 23 nt, Human
uagugucauccucagcuucuguu

SEQ ID NO: 54178 - RNA, 22 nt, Human
uagugucucggggcccaggauu

SEQ ID NO: 54179 - RNA, 22 nt, Human
uagugucugaaugcaccuguuu

SEQ ID NO: 54180 - RNA, 22 nt, Human
uagugugguaaauaaauguuuu

SEQ ID NO: 54181 - RNA, 22 nt, Human
uagugugguaucuucuauggaa

SEQ ID NO: 54182 - RNA, 22 nt, Human
uaguguguaugguaaugaugaa

SEQ ID NO: 54183 - RNA, 22 nt, Human
uaguuaaaccaccauucuggua

SEQ ID NO: 54184 - RNA, 22 nt, Human
uaguuaaagcccuaaauugaua

SEQ ID NO: 54185 - RNA, 22 nt, Human
uaguuaauucuuuaagaacaag

SEQ ID NO: 54186 - RNA, 22 nt, Human
uaguuacaauuaugcauggaaa

SEQ ID NO: 54187 - RNA, 22 nt, Human
uaguuacagaagauaaggguau

SEQ ID NO: 54188 - RNA, 22 nt, Human
uaguuacagaucuaggacuguu

SEQ ID NO: 54189 - RNA, 22 nt, Human
uaguuacagcaggcaggauaua

SEQ ID NO: 54190 - RNA, 22 nt, Human
uaguuacaggaguuucugaaau

SEQ ID NO: 54191 - RNA, 22 nt, Human
uaguuacauaaaguggacuguu

SEQ ID NO: 54192 - RNA, 22 nt, Human
uaguuagagaugaauuuugucu

SEQ ID NO: 54193 - RNA, 21 nt, Human
uaguucuacuucagucucaug

SEQ ID NO: 54194 - RNA, 22 nt, Human
uaguucuguguagcucaagagu

SEQ ID NO: 54195 - RNA, 22 nt, Human
uaguugaaagggauuauugugg

SEQ ID NO: 54196 - RNA, 22 nt, Human
uaguuuacucaucuauaaaaug

SEQ ID NO: 54197 - RNA, 22 nt, Human
uaguuuagcauacaucuucagg

SEQ ID NO: 54198 - RNA, 22 nt, Human
uaguuuagcuuagccuucuggu

SEQ ID NO: 54199 - RNA, 22 nt, Human
uaguuuagugaaugguuaaaga

SEQ ID NO: 54200 - RNA, 22 nt, Human
uaguuuaugcugcugcagugag

SEQ ID NO: 54201 - RNA, 22 nt, Human
uaguuuccauguuauacaguuu

SEQ ID NO: 54202 - RNA, 22 nt, Human
uaguuuccuaggcuguauuguu

SEQ ID NO: 54203 - RNA, 22 nt, Human
uaguuucuaaacugaacuguca

SEQ ID NO: 54204 - RNA, 22 nt, Human
uaguuucugaggauugaaagau

SEQ ID NO: 54205 - RNA, 22 nt, Human
uaguuucugccucggaagcuga

SEQ ID NO: 54206 - RNA, 22 nt, Human
uaguuucugguucuugcucugg

SEQ ID NO: 54207 - RNA, 22 nt, Human
uaguuucuucaccuguaaaaug

SEQ ID NO: 54208 - RNA, 22 nt, Human
uaguuuuacaucagccauuguu

SEQ ID NO: 54209 - RNA, 22 nt, Human
uaguuuuagucccauuuuacag

SEQ ID NO: 54210 - RNA, 22 nt, Human
uaguuuugauuaguauugucuu

SEQ ID NO: 54211 - RNA, 22 nt, Human
uaguuuuuucaacaaauggugc

SEQ ID NO: 54212 - RNA, 22 nt, Human
uauaaacuccucuugcauuccu

SEQ ID NO: 54213 - RNA, 22 nt, Human
uauaaagcugacucaugaaacu

SEQ ID NO: 54214 - RNA, 22 nt, Human
uauaaaucuuuguuccuagaau

SEQ ID NO: 54215 - RNA, 22 nt, Human
uauaaaugcacuuuugaaauau

SEQ ID NO: 54216 - RNA, 22 nt, Human
uauaaccuggauucuggcacua

SEQ ID NO: 54217 - RNA, 22 nt, Human
uauaacugagaagauacauagu

SEQ ID NO: 54218 - RNA, 22 nt, Human
uauaagcacauccuugacugau

SEQ ID NO: 54219 - RNA, 22 nt, Human
uauaagccauccagccuguggu

SEQ ID NO: 54220 - RNA, 22 nt, Human
uauaagccucgaugguaagccu

SEQ ID NO: 54221 - RNA, 22 nt, Human
uauaagugacagauuauccaaa

SEQ ID NO: 54222 - RNA, 22 nt, Human
uauaauccugcuucacauugaa

SEQ ID NO: 54223 - RNA, 22 nt, Human
uauaaucugguuuuauuaagag

SEQ ID NO: 54224 - RNA, 22 nt, Human
uauaauguuuuccauggacuga

SEQ ID NO: 54225 - RNA, 22 nt, Human
uauaauuuaucaugucacaguu

SEQ ID NO: 54226 - RNA, 22 nt, Human
uauacacauuacaguuucagga

SEQ ID NO: 54227 - RNA, 22 nt, Human
uauacacauuuuuaccuauagu

SEQ ID NO: 54228 - RNA, 21 nt, Human
uauacagcaaagucuggagca

SEQ ID NO: 54229 - RNA, 22 nt, Human
uauacaggaaauuuuggaacag

SEQ ID NO: 54230 - RNA, 22 nt, Human
uauacaguuugaguucuugcau

SEQ ID NO: 54231 - RNA, 22 nt, Human
uauaccaugugugcacacuccc

SEQ ID NO: 54232 - RNA, 22 nt, Human
uauacugauuugucuauacucu

SEQ ID NO: 54233 - RNA, 22 nt, Human
uauacuuuccugcaacuuugau

SEQ ID NO: 54234 - RNA, 22 nt, Human
uauagaacaaguuauuuaugcu

SEQ ID NO: 54235 - RNA, 22 nt, Human
uauagaaguaagcauugugaug

SEQ ID NO: 54236 - RNA, 22 nt, Human
uauagagguggaaacugagguu

SEQ ID NO: 54237 - RNA, 22 nt, Human
uauagagucauguuuacucuaa

SEQ ID NO: 54238 - RNA, 22 nt, Human
uauagauagacugacgauacag

SEQ ID NO: 54239 - RNA, 22 nt, Human
uauagaucuugcuauuuaagga

SEQ ID NO: 54240 - RNA, 22 nt, Human
uauagcaaaauaguuuccacac

SEQ ID NO: 54241 - RNA, 22 nt, Human
uauagcaacuccaaagagacuu

SEQ ID NO: 54242 - RNA, 22 nt, Human
uauagcaauucagaauacaugu

SEQ ID NO: 54243 - RNA, 22 nt, Human
ucauacaucuguccuggagcuc

SEQ ID NO: 54244 - RNA, 22 nt, Human
ucauacauguuguguucaaaug

SEQ ID NO: 54245 - RNA, 22 nt, Human
ucauagaaguaguauccacauu

SEQ ID NO: 54246 - RNA, 22 nt, Human
ucauagaaugaguuaaugaacu

SEQ ID NO: 54247 - RNA, 22 nt, Human
ucauagcuaagcuccagagugc

SEQ ID NO: 54248 - RNA, 22 nt, Human
ucauaggaguagcagugagagg

SEQ ID NO: 54249 - RNA, 22 nt, Human
ucauaguucuguuuugaaggau

SEQ ID NO: 54250 - RNA, 22 nt, Human
ucauaguuuaguuaguaugauu

SEQ ID NO: 54251 - RNA, 22 nt, Human
ucauauagagggcauacaaaug

SEQ ID NO: 54252 - RNA, 22 nt, Human
ucauauauuuaguugugcaaca

SEQ ID NO: 54253 - RNA, 22 nt, Human
ucauaugucacucaugggcaua

SEQ ID NO: 54254 - RNA, 22 nt, Human
ucauauuuaggccuuuaauuca

SEQ ID NO: 54255 - RNA, 22 nt, Human
ucauauuuaguucacgcucaau

SEQ ID NO: 54256 - RNA, 22 nt, Human
ucauauuuugcaaggucagcua

SEQ ID NO: 54257 - RNA, 23 nt, Human
ucaucaaacagcugcucaagaaa

SEQ ID NO: 54258 - RNA, 23 nt, Human
ucaucaaaggaaguacgugucac

SEQ ID NO: 54259 - RNA, 22 nt, Human
ucaucaaagucaaagaaugacu

SEQ ID NO: 54260 - RNA, 22 nt, Human
ucaucagagcucccccaaacgu

SEQ ID NO: 54261 - RNA, 22 nt, Human
ucaucagcuccaugagguacuc

SEQ ID NO: 54262 - RNA, 22 nt, Human
ucaucagucagaacuuaagcuu

SEQ ID NO: 54263 - RNA, 22 nt, Human
ucaucaguguccuuaucacuua

SEQ ID NO: 54264 - RNA, 22 nt, Human
ucauccaaggauuuuauugcau

SEQ ID NO: 54265 - RNA, 22 nt, Human
ucauccagagcuucauaaguaa

SEQ ID NO: 54266 - RNA, 22 nt, Human
ucauccaguucacauggugagu

SEQ ID NO: 54267 - RNA, 22 nt, Human
ucauccauacuauugagaggca

SEQ ID NO: 54268 - RNA, 22 nt, Human
ucauccaugaagagugacagaa

SEQ ID NO: 54269 - RNA, 22 nt, Human
ucauccaugucagagcauguau

SEQ ID NO: 54270 - RNA, 22 nt, Human
ucaucccuaaggacagcucugc

SEQ ID NO: 54271 - RNA, 22 nt, Human
ucauccuguauccucagaccau

SEQ ID NO: 54272 - RNA, 22 nt, Human
ucauccugucucacuuuuugcu

SEQ ID NO: 54273 - RNA, 22 nt, Human
ucaucuauuuauguagaacaag

SEQ ID NO: 54274 - RNA, 19 nt, Human
ucaucucacagggccuggc

SEQ ID NO: 54275 - RNA, 22 nt, Human
ucaucucagggcgacaucaugu

SEQ ID NO: 54276 - RNA, 22 nt, Human
ucaucugaagauugcuguucaa

SEQ ID NO: 54277 - RNA, 22 nt, Human
ucaucugggagcuuguuagaaa

SEQ ID NO: 54278 - RNA, 22 nt, Human
ucaucugugcaggacucagaag

SEQ ID NO: 54279 - RNA, 22 nt, Human
ucaucuguggcugcuuuugugc

SEQ ID NO: 54280 - RNA, 22 nt, Human
ucaucuguuucucuguaguucu

SEQ ID NO: 54281 - RNA, 22 nt, Human
ucaucuugcaguguguguucug

SEQ ID NO: 54282 - RNA, 22 nt, Human
ucaucuugcugccauugcuuua

SEQ ID NO: 54283 - RNA, 22 nt, Human
ucaucuuuccucaaaagaucca

SEQ ID NO: 54284 - RNA, 22 nt, Human
ucaucuuuguaucccuaacaca

SEQ ID NO: 54285 - RNA, 22 nt, Human
ucaugaggauuuacuagacuag

SEQ ID NO: 54286 - RNA, 22 nt, Human
ucaugagucugcaaauuaugga

SEQ ID NO: 54287 - RNA, 22 nt, Human
ucaugcaaaagacuugaacuuu

SEQ ID NO: 54288 - RNA, 22 nt, Human
ucaugcaaacucuaguccuuua

SEQ ID NO: 54289 - RNA, 22 nt, Human
ucaugcaaauacuguuccagaa

SEQ ID NO: 54290 - RNA, 22 nt, Human
ucaugcaacgauccuccaaaug

SEQ ID NO: 54291 - RNA, 22 nt, Human
ucaugcacuacauaacgauguu

SEQ ID NO: 54292 - RNA, 23 nt, Human
ucaugcagagaaggacugcuuac

SEQ ID NO: 54293 - RNA, 22 nt, Human
ucaugcagaggaaggcuaguuu

SEQ ID NO: 54294 - RNA, 22 nt, Human
ucaugcaggacuuacaagagau

SEQ ID NO: 54295 - RNA, 21 nt, Human
ucaugcaggcagaguuuggua

SEQ ID NO: 54296 - RNA, 22 nt, Human
ucaugcagugaaucuuucuugc

SEQ ID NO: 54297 - RNA, 22 nt, Human
ucaugcaguuucuuaucugcca

SEQ ID NO: 54298 - RNA, 22 nt, Human
uggaagagacacuuacauucag

SEQ ID NO: 54299 - RNA, 19 nt, Human
uggaagaggaagggaaaua

SEQ ID NO: 54300 - RNA, 22 nt, Human
uggaagaugaauaaagauucua

SEQ ID NO: 54301 - RNA, 23 nt, Human
uggaagcaaucacuguagugaau

SEQ ID NO: 54302 - RNA, 22 nt, Human
uggaagccaaggucagaaggag

SEQ ID NO: 54303 - RNA, 22 nt, Human
uggaagcucaaggcagggugag

SEQ ID NO: 54304 - RNA, 18 nt, Human
uggaagcuggcagauuuu

SEQ ID NO: 54305 - RNA, 17 nt, Human
uggaagcuucauguugg

SEQ ID NO: 54306 - RNA, 22 nt, Human
uggaaggagcuaaggaccuggg

SEQ ID NO: 54307 - RNA, 22 nt, Human
uggaaggcaacggagugagcug

SEQ ID NO: 54308 - RNA, 20 nt, Human
uggaaggcaucugcauuauu

SEQ ID NO: 54309 - RNA, 22 nt, Human
uggaaggccuguuguguccuag

SEQ ID NO: 54310 - RNA, 21 nt, Human
uggaaggcugcucugccaggg

SEQ ID NO: 54311 - RNA, 22 nt, Human
uggaaggcuuugcuguccuugc

SEQ ID NO: 54312 - RNA, 22 nt, Human
uggaagggagcuggaauuugga

SEQ ID NO: 54313 - RNA, 21 nt, Human
uggaagucuugaguagggggc

SEQ ID NO: 54314 - RNA, 22 nt, Human
uggaagugcuaaacuggagugu

SEQ ID NO: 54315 - RNA, 22 nt, Human
uggaaguggcagaggaaguggu

SEQ ID NO: 54316 - RNA, 22 nt, Human
uggaauaaagcagcuuuaguuc

SEQ ID NO: 54317 - RNA, 22 nt, Human
uggaauaaagugcuuugaucag

SEQ ID NO: 54318 - RNA, 22 nt, Human
uggaaucaguuacaugugguug

SEQ ID NO: 54319 - RNA, 22 nt, Human
uggaaucucugguaucugggga

SEQ ID NO: 54320 - RNA, 22 nt, Human
uggaaucucuuuggggacugaa

SEQ ID NO: 54321 - RNA, 22 nt, Human
uggaaucuuuaggaagcacaua

SEQ ID NO: 54322 - RNA, 22 nt, Human
uggaaugaaaauggagaucuug

SEQ ID NO: 54323 - RNA, 22 nt, Human
uggaaugaagacauguuguuug

SEQ ID NO: 54324 - RNA, 21 nt, Human
uggaaugaggcugagcagugc

SEQ ID NO: 54325 - RNA, 20 nt, Human
uggaauggguccuugaaaaa

SEQ ID NO: 54326 - RNA, 22 nt, Human
uggaauguagcaaguguuguca

SEQ ID NO: 54327 - RNA, 22 nt, Human
uggaauguauagauguuaugua

SEQ ID NO: 54328 - RNA, 23 nt, Human
uggaaugucugauucugcucuag

SEQ ID NO: 54329 - RNA, 22 nt, Human
uggaaugugcuacuguugauuu

SEQ ID NO: 54330 - RNA, 22 nt, Human
uggaauguugcauaagaucuga

SEQ ID NO: 54331 - RNA, 22 nt, Human
uggaauguugggauuuaagugu

SEQ ID NO: 54332 - RNA, 22 nt, Human
uggaauguuuuccuaaaucaga

SEQ ID NO: 54333 - RNA, 22 nt, Human
uggaauuaauaggggauauaca

SEQ ID NO: 54334 - RNA, 20 nt, Human
uggacagaauuagacacuuu

SEQ ID NO: 54335 - RNA, 22 nt, Human
uggacagagaggaaggccauuu

SEQ ID NO: 54336 - RNA, 23 nt, Human
uggacagcagcagcagugucacc

SEQ ID NO: 54337 - RNA, 22 nt, Human
uggacagccaugcaaaugagcu

SEQ ID NO: 54338 - RNA, 22 nt, Human
uggacaggcuccuagggguucc

SEQ ID NO: 54339 - RNA, 23 nt, Human
uggacaggguaacuggugguuuu

SEQ ID NO: 54340 - RNA, 22 nt, Human
uggacaguaagagaagauguag

SEQ ID NO: 54341 - RNA, 22 nt, Human
uggacaucuuagucaugucaau

SEQ ID NO: 54342 - RNA, 22 nt, Human
uggacaugagcugagugggugu

SEQ ID NO: 54343 - RNA, 22 nt, Human
uggacaugucuucuccaagaaa

SEQ ID NO: 54344 - RNA, 21 nt, Human
uggaccaaaguaauuugccuu

SEQ ID NO: 54345 - RNA, 22 nt, Human
uggaccacauagugaggccccc

SEQ ID NO: 54346 - RNA, 22 nt, Human
uggaccacucuggugcccaugu

SEQ ID NO: 54347 - RNA, 20 nt, Human
uggaccauaaacaccaggua

SEQ ID NO: 54348 - RNA, 22 nt, Human
uggaccaugagcugcagguguu

SEQ ID NO: 54349 - RNA, 22 nt, Human
uggacccaccccagggccugcu

SEQ ID NO: 54350 - RNA, 22 nt, Human
uggacccugaagcaacagggag

SEQ ID NO: 54351 - RNA, 23 nt, Human
uggacccugcacaccagcucuac

SEQ ID NO: 54352 - RNA, 22 nt, Human
uauucuugucuuuuccagaaau

SEQ ID NO: 54353 - RNA, 22 nt, Human
uauugaaauccauuacguucuu

SEQ ID NO: 54354 - RNA, 22 nt, Human
uauugaagagauaagugacaga

SEQ ID NO: 54355 - RNA, 22 nt, Human
uauugagacuuccaguauauga

SEQ ID NO: 54356 - RNA, 22 nt, Human
uauugaugcuuggauugggcca

SEQ ID NO: 54357 - RNA, 22 nt, Human
uauugauuccugcuuucugcuc

SEQ ID NO: 54358 - RNA, 22 nt, Human
uauugcagaagaaaugaaugaa

SEQ ID NO: 54359 - RNA, 22 nt, Human
uauugcaucucuucauaucugu

SEQ ID NO: 54360 - RNA, 22 nt, Human
uauugcaugugauagaggcagg

SEQ ID NO: 54361 - RNA, 22 nt, Human
uauugcauuucccacguucacu

SEQ ID NO: 54362 - RNA, 22 nt, Human
uauugcugaaaugcugaguuca

SEQ ID NO: 54363 - RNA, 22 nt, Human
uauugcugacugucuucugagu

SEQ ID NO: 54364 - RNA, 22 nt, Human
uauugcugaugcugaagggaag

SEQ ID NO: 54365 - RNA, 22 nt, Human
uauugcugccucguccaggcug

SEQ ID NO: 54366 - RNA, 22 nt, Human
uauugcuggggugggccauguu

SEQ ID NO: 54367 - RNA, 22 nt, Human
uauugcuggugcuguucugaau

SEQ ID NO: 54368 - RNA, 22 nt, Human
uauugcuguucuuuaaaugaag

SEQ ID NO: 54369 - RNA, 22 nt, Human
uauugcuuuuauuucuauggac

SEQ ID NO: 54370 - RNA, 22 nt, Human
uauuggaaggaagcaagagagg

SEQ ID NO: 54371 - RNA, 22 nt, Human
uauuggaaggcauuagugaaua

SEQ ID NO: 54372 - RNA, 22 nt, Human
uauuggaagugaacaccaggcu

SEQ ID NO: 54373 - RNA, 22 nt, Human
uauuggaccacagacuuuaagg

SEQ ID NO: 54374 - RNA, 22 nt, Human
uauuggauagcuugugcagaau

SEQ ID NO: 54375 - RNA, 22 nt, Human
uauuggucaaguugaggacccu

SEQ ID NO: 54376 - RNA, 22 nt, Human
uauuggucaauuucaccuugau

SEQ ID NO: 54377 - RNA, 22 nt, Human
uauuggucugcuuaaguggauu

SEQ ID NO: 54378 - RNA, 22 nt, Human
uauuggucuuggaagguuuugu

SEQ ID NO: 54379 - RNA, 22 nt, Human
uauuguacaugguuaugcagga

SEQ ID NO: 54380 - RNA, 22 nt, Human
uauuguacauuuccaaauugcu

SEQ ID NO: 54381 - RNA, 22 nt, Human
uauuguacugaggaauaaagcu

SEQ ID NO: 54382 - RNA, 22 nt, Human
uauuguccauggcugcuuuggu

SEQ ID NO: 54383 - RNA, 22 nt, Human
uauuguccaugugucuguuagc

SEQ ID NO: 54384 - RNA, 22 nt, Human
uauugucuucaacucuacuuuu

SEQ ID NO: 54385 - RNA, 22 nt, Human
uauugugaagggaaaaauagug

SEQ ID NO: 54386 - RNA, 22 nt, Human
uauugugaguucagacuaaaaa

SEQ ID NO: 54387 - RNA, 22 nt, Human
uauugugcauguugaauaacua

SEQ ID NO: 54388 - RNA, 22 nt, Human
uauuuacuuuuaaauugagaac

SEQ ID NO: 54389 - RNA, 22 nt, Human
uauuuagaugcauuuggauugc

SEQ ID NO: 54390 - RNA, 21 nt, Human
uauuuauuaauuuguaaggcu

SEQ ID NO: 54391 - RNA, 19 nt, Human
uauuucaaagugccgucua

SEQ ID NO: 54392 - RNA, 22 nt, Human
uauuucacaugugggaaacaua

SEQ ID NO: 54393 - RNA, 22 nt, Human
uauuucacucaguauaccauag

SEQ ID NO: 54394 - RNA, 22 nt, Human
uauuucagaguuguuuucuguc

SEQ ID NO: 54395 - RNA, 22 nt, Human
uauuucagcaagaagaaugugg

SEQ ID NO: 54396 - RNA, 22 nt, Human
uauuuccaagcugaauccaaug

SEQ ID NO: 54397 - RNA, 22 nt, Human
uauuuccacccucaguaaggaa

SEQ ID NO: 54398 - RNA, 22 nt, Human
uauuuccagaggaguauagaag

SEQ ID NO: 54399 - RNA, 22 nt, Human
uauuuccagcaguaagaagaca

SEQ ID NO: 54400 - RNA, 22 nt, Human
uauuuccaggccccacucuaga

SEQ ID NO: 54401 - RNA, 22 nt, Human
uauuuccuguggauacuuuuag

SEQ ID NO: 54402 - RNA, 22 nt, Human
uauuucucuucaaaauugaugu

SEQ ID NO: 54403 - RNA, 22 nt, Human
uauuucucuuuguagggauaua

SEQ ID NO: 54404 - RNA, 22 nt, Human
uauuucugaggcccaggaagug

SEQ ID NO: 54405 - RNA, 22 nt, Human
uauuucugauugcucaugaggc

SEQ ID NO: 54406 - RNA, 22 nt, Human
uauuucugggaguucagaaauu

SEQ ID NO: 54407 - RNA, 22 nt, Human
uauuucuguaugcauaaaagga

SEQ ID NO: 54408 - RNA, 22 nt, Human
uauuucugucagccagauaugg

SEQ ID NO: 54409 - RNA, 22 nt, Human
uauuugaagauucuucugaugu

SEQ ID NO: 54410 - RNA, 22 nt, Human
uauuugagcgaagcaguguuuu

SEQ ID NO: 54411 - RNA, 22 nt, Human
uauuugauagagauaaaugaua

SEQ ID NO: 54412 - RNA, 22 nt, Human
uauuugcaggacauagauaugg

SEQ ID NO: 54413 - RNA, 22 nt, Human
uauuugcugacagugcuggagc

SEQ ID NO: 54414 - RNA, 21 nt, Human
uauuugcugccaucuuugagg

SEQ ID NO: 54415 - RNA, 22 nt, Human
uauuugcugugcuuauuccauu

SEQ ID NO: 54416 - RNA, 22 nt, Human
uauuuggauagacagggagaug

SEQ ID NO: 54417 - RNA, 22 nt, Human
uauuuguagaauggauuaaggg

SEQ ID NO: 54418 - RNA, 22 nt, Human
uggaggcauuucuuuuuggucg

SEQ ID NO: 54419 - RNA, 22 nt, Human
uggaggcauuugauguucauaa

SEQ ID NO: 54420 - RNA, 22 nt, Human
uggaggcauuuuagguugucac

SEQ ID NO: 54421 - RNA, 22 nt, Human
uggaggccacaugaacgcugcg

SEQ ID NO: 54422 - RNA, 19 nt, Human
uggaggccaggacacaggu

SEQ ID NO: 54423 - RNA, 22 nt, Human
uggaggccggacugagaggcau

SEQ ID NO: 54424 - RNA, 19 nt, Human
uggaggccucaggaaaaga

SEQ ID NO: 54425 - RNA, 22 nt, Human
uggagggaacaaaggaguccca

SEQ ID NO: 54426 - RNA, 23 nt, Human
uggagggcagaauaacagacuac

SEQ ID NO: 54427 - RNA, 22 nt, Human
uggagggcauagcuguucuuuc

SEQ ID NO: 54428 - RNA, 22 nt, Human
uggagggcaucuguggucaggc

SEQ ID NO: 54429 - RNA, 22 nt, Human
uggagggcuaagcugagggaua

SEQ ID NO: 54430 - RNA, 22 nt, Human
uggagggcucuuucaccuggua

SEQ ID NO: 54431 - RNA, 22 nt, Human
uggagguacauaaugagagggu

SEQ ID NO: 54432 - RNA, 22 nt, Human
uggagguccugcaggauggcac

SEQ ID NO: 54433 - RNA, 22 nt, Human
uggagguccuggcuggguuuua

SEQ ID NO: 54434 - RNA, 22 nt, Human
uggaggucugcaaggcgcugga

SEQ ID NO: 54435 - RNA, 22 nt, Human
uggaggugacggggccucguug

SEQ ID NO: 54436 - RNA, 22 nt, Human
uggagguugggaugcuugugau

SEQ ID NO: 54437 - RNA, 18 nt, Human
uggagucagugacaccag

SEQ ID NO: 54438 - RNA, 20 nt, Human
uggagucaugggacacucac

SEQ ID NO: 54439 - RNA, 22 nt, Human
uggaguccgcuccaaguucucu

SEQ ID NO: 54440 - RNA, 22 nt, Human
uggaguccuuguuggaagugaa

SEQ ID NO: 54441 - RNA, 22 nt, Human
uggagucugugaugcucugggu

SEQ ID NO: 54442 - RNA, 20 nt, Human
uggaguuguucugcuagguc

SEQ ID NO: 54443 - RNA, 22 nt, Human
uggauaaaaugacauuaccuga

SEQ ID NO: 54444 - RNA, 22 nt, Human
uggauaaacucacuguaaguug

SEQ ID NO: 54445 - RNA, 23 nt, Human
uggauaaagcugugcugcauagg

SEQ ID NO: 54446 - RNA, 22 nt, Human
uggauaaauggugcuaucaccc

SEQ ID NO: 54447 - RNA, 22 nt, Human
uggauaugcccagggcacccua

SEQ ID NO: 54448 - RNA, 22 nt, Human
uggauauguuggaggugaaggu

SEQ ID NO: 54449 - RNA, 22 nt, Human
uggaucugcucuaugaacugcu

SEQ ID NO: 54450 - RNA, 21 nt, Human
uggaucugugaucuggggcac

SEQ ID NO: 54451 - RNA, 22 nt, Human
uggaucuugaugcuccaagagu

SEQ ID NO: 54452 - RNA, 20 nt, Human
uggaugcugcacguagaugg

SEQ ID NO: 54453 - RNA, 22 nt, Human
uggaugcugcugucagggaugg

SEQ ID NO: 54454 - RNA, 22 nt, Human
uggaugcuguaggacacgcucu

SEQ ID NO: 54455 - RNA, 19 nt, Human
uggauggagccugugguug

SEQ ID NO: 54456 - RNA, 22 nt, Human
uggauggaucucaagggaauua

SEQ ID NO: 54457 - RNA, 22 nt, Human
uggauggauugacgaaggcagc

SEQ ID NO: 54458 - RNA, 22 nt, Human
uggauggggcagcuuaggugug

SEQ ID NO: 54459 - RNA, 22 nt, Human
uggaugguucugggcggcagca

SEQ ID NO: 54460 - RNA, 17 nt, Human
uggaugugggaucugga

SEQ ID NO: 54461 - RNA, 22 nt, Human
uccacuggcccaccuccucagu

SEQ ID NO: 54462 - RNA, 22 nt, Human
uccacugguauccacagugggg

SEQ ID NO: 54463 - RNA, 22 nt, Human
uccacuucuauugggucuuggu

SEQ ID NO: 54464 - RNA, 22 nt, Human
uccagaaaaaguaauuuauuug

SEQ ID NO: 54465 - RNA, 22 nt, Human
uccagaaacuucauuugcaagc

SEQ ID NO: 54466 - RNA, 22 nt, Human
uccagaaacuuuuccagucuca

SEQ ID NO: 54467 - RNA, 22 nt, Human
uccagaaaguacaugggauuca

SEQ ID NO: 54468 - RNA, 21 nt, Human
uccagaccucccucuccuagc

SEQ ID NO: 54469 - RNA, 23 nt, Human
uccagacucuaaagcccuccaca

SEQ ID NO: 54470 - RNA, 19 nt, Human
uccagacuguccaggcuau

SEQ ID NO: 54471 - RNA, 22 nt, Human
uccagagaaaucuagucuuaca

SEQ ID NO: 54472 - RNA, 22 nt, Human
uccagagaauucuacgcagugc

SEQ ID NO: 54473 - RNA, 22 nt, Human
uccagagagaaaaacaagcuuu

SEQ ID NO: 54474 - RNA, 22 nt, Human
uccagagagauaguggcuaaua

SEQ ID NO: 54475 - RNA, 22 nt, Human
uccagagagccacggacagggg

SEQ ID NO: 54476 - RNA, 22 nt, Human
uccagagagguuucuccaugcu

SEQ ID NO: 54477 - RNA, 22 nt, Human
uccagagauaacuauuuaggag

SEQ ID NO: 54478 - RNA, 22 nt, Human
uccagagaucacacugggcagg

SEQ ID NO: 54479 - RNA, 22 nt, Human
uccagagauccaaagaauauga

SEQ ID NO: 54480 - RNA, 22 nt, Human
uccagagccuauauguucaacu

SEQ ID NO: 54481 - RNA, 22 nt, Human
uccagagccuuuccacccacuu

SEQ ID NO: 54482 - RNA, 22 nt, Human
uccagagcuaauucagcagcug

SEQ ID NO: 54483 - RNA, 22 nt, Human
uccagagcugagggucaguaga

SEQ ID NO: 54484 - RNA, 22 nt, Human
uccagaggugaacacccaggca

SEQ ID NO: 54485 - RNA, 22 nt, Human
uccagaguacggaagagucauc

SEQ ID NO: 54486 - RNA, 22 nt, Human
uccagaguuugagucuccuucc

SEQ ID NO: 54487 - RNA, 22 nt, Human
uccagauagaguccuguuagua

SEQ ID NO: 54488 - RNA, 19 nt, Human
uccagaugauauggauuac

SEQ ID NO: 54489 - RNA, 22 nt, Human
uccagauggauuuaagaccuaa

SEQ ID NO: 54490 - RNA, 22 nt, Human
uccagcaaagugauaggauuuc

SEQ ID NO: 54491 - RNA, 20 nt, Human
uccagcacccucacagagaa

SEQ ID NO: 54492 - RNA, 22 nt, Human
uccagcagugcucuagagcgug

SEQ ID NO: 54493 - RNA, 22 nt, Human
uccagcaugacuaguuccccau

SEQ ID NO: 54494 - RNA, 21 nt, Human
uccagccaguaaaugcucagc

SEQ ID NO: 54495 - RNA, 22 nt, Human
uccagcccacaccugaagcugg

SEQ ID NO: 54496 - RNA, 18 nt, Human
uccagcccacauuuucug

SEQ ID NO: 54497 - RNA, 22 nt, Human
uccagcccagcuccucucagaa

SEQ ID NO: 54498 - RNA, 22 nt, Human
uccagcccaucccuagccuggg

SEQ ID NO: 54499 - RNA, 22 nt, Human
uccagccccgggauguucuuca

SEQ ID NO: 54500 - RNA, 19 nt, Human
uccagccccucugugugug

SEQ ID NO: 54501 - RNA, 20 nt, Human
uccagccccugcauguugcu

SEQ ID NO: 54502 - RNA, 22 nt, Human
uccagcccuguggcuuccaccc

SEQ ID NO: 54503 - RNA, 22 nt, Human
uccagccuaauguucuucccac

SEQ ID NO: 54504 - RNA, 22 nt, Human
uccagccuaggggaacagcugc

SEQ ID NO: 54505 - RNA, 22 nt, Human
uccagccuccuauuuacccuaa

SEQ ID NO: 54506 - RNA, 17 nt, Human
uccagccuccucugcug

SEQ ID NO: 54507 - RNA, 22 nt, Human
uccagccuuccuuuucacucuc

SEQ ID NO: 54508 - RNA, 21 nt, Human
uccagccuuucccucacuucc

SEQ ID NO: 54509 - RNA, 22 nt, Human
uccagccuuucuacucacugag

SEQ ID NO: 54510 - RNA, 22 nt, Human
uccagcucaggguuggcucaag

SEQ ID NO: 54511 - RNA, 22 nt, Human
uccagcucaucugucuccauua

SEQ ID NO: 54512 - RNA, 22 nt, Human
uccagcucuaaggcugauagcc

SEQ ID NO: 54513 - RNA, 22 nt, Human
uccagcucugauucucacuagc

SEQ ID NO: 54514 - RNA, 18 nt, Human
uccagcucugccacuuac

SEQ ID NO: 54515 - RNA, 22 nt, Human
uccagcucugcugugcgccggu

SEQ ID NO: 54516 - RNA, 22 nt, Human
uccagcucuucaguucugcaaa

SEQ ID NO: 54517 - RNA, 20 nt, Human
uccagcugacauucucuuuc

SEQ ID NO: 54518 - RNA, 22 nt, Human
uccagcugagguggccucugug

SEQ ID NO: 54519 - RNA, 22 nt, Human
uccagcugcaaggggcacagcu

SEQ ID NO: 54520 - RNA, 22 nt, Human
uccagcugccaaccgggccccg

SEQ ID NO: 54521 - RNA, 22 nt, Human
uccagcuggccuaacuucaggg

SEQ ID NO: 54522 - RNA, 22 nt, Human
uccagcuggggacaugggcuuc

SEQ ID NO: 54523 - RNA, 22 nt, Human
uccagcuggggcaguggcuggg

SEQ ID NO: 54524 - RNA, 20 nt, Human
uccagcugucuuucagagac

SEQ ID NO: 54525 - RNA, 21 nt, Human
uccagcugugauuaugaaugu

SEQ ID NO: 54526 - RNA, 22 nt, Human
uccagcugugcuccaggaggug

SEQ ID NO: 54527 - RNA, 22 nt, Human
uccagcuguuccaucagcucuu

SEQ ID NO: 54528 - RNA, 19 nt, Human
uccagcuguuuugagucac

SEQ ID NO: 54529 - RNA, 22 nt, Human
uccagcuucuugacuugguggu

SEQ ID NO: 54530 - RNA, 22 nt, Human
uccagcuugacaaaugauuuua

SEQ ID NO: 54531 - RNA, 22 nt, Human
uccaggaacucuugauggugau

SEQ ID NO: 54532 - RNA, 22 nt, Human
uccaggaagcagcuacagaucc

SEQ ID NO: 54533 - RNA, 22 nt, Human
uccaggaagccacacugggccu

SEQ ID NO: 54534 - RNA, 20 nt, Human
uauuuguauuugggaaaguu

SEQ ID NO: 54535 - RNA, 22 nt, Human
uauuugucacugcacuugaaau

SEQ ID NO: 54536 - RNA, 22 nt, Human
uauuugugagacugacugaagu

SEQ ID NO: 54537 - RNA, 22 nt, Human
uauuuguuccagagauaaaaau

SEQ ID NO: 54538 - RNA, 22 nt, Human
uauuuuaucugccagaguggag

SEQ ID NO: 54539 - RNA, 22 nt, Human
uauuuucuguggaggaccagau

SEQ ID NO: 54540 - RNA, 22 nt, Human
uauuuugacgauuuuaugcaaa

SEQ ID NO: 54541 - RNA, 22 nt, Human
uauuuugcguugagucagauuu

SEQ ID NO: 54542 - RNA, 22 nt, Human
uauuuugcuuuagcugacuguu

SEQ ID NO: 54543 - RNA, 22 nt, Human
uauuuuugccucucagauaaaa

SEQ ID NO: 54544 - RNA, 22 nt, Human
ucaaaaaguugaagaguugggg

SEQ ID NO: 54545 - RNA, 22 nt, Human
ucaaaaauuuucugaggaugag

SEQ ID NO: 54546 - RNA, 22 nt, Human
ucaaaacaaucauuggaugugc

SEQ ID NO: 54547 - RNA, 22 nt, Human
ucaaaagacacaggaggcuagu

SEQ ID NO: 54548 - RNA, 22 nt, Human
ucaaaauuaaaccaacguccag

SEQ ID NO: 54549 - RNA, 22 nt, Human
ucaaaauuagugaccaaaggca

SEQ ID NO: 54550 - RNA, 22 nt, Human
ucaaacaccaucugaccuuaug

SEQ ID NO: 54551 - RNA, 22 nt, Human
ucaaacagaggaacaauuguuu

SEQ ID NO: 54552 - RNA, 22 nt, Human
ucaaacugaauuaaacacuugu

SEQ ID NO: 54553 - RNA, 22 nt, Human
ucaaagaagauuacccucccau

SEQ ID NO: 54554 - RNA, 20 nt, Human
ucaaagaagauucagcucaa

SEQ ID NO: 54555 - RNA, 22 nt, Human
ucaaagaauguuaugaggguag

SEQ ID NO: 54556 - RNA, 20 nt, Human
ucaaagacaagcucucaucc

SEQ ID NO: 54557 - RNA, 21 nt, Human
ucaaagacuggggcugugugc

SEQ ID NO: 54558 - RNA, 22 nt, Human
ucaaagagcuauucaguugugg

SEQ ID NO: 54559 - RNA, 22 nt, Human
ucaaagaugaugcugaaguuau

SEQ ID NO: 54560 - RNA, 20 nt, Human
ucaaagcaaagggagaugau

SEQ ID NO: 54561 - RNA, 19 nt, Human
ucaaagcaagcauguucug

SEQ ID NO: 54562 - RNA, 22 nt, Human
ucaaagcacuggggaaagccug

SEQ ID NO: 54563 - RNA, 22 nt, Human
ucaaaggaaacacaagcuucug

SEQ ID NO: 54564 - RNA, 22 nt, Human
ucaaaggaaacgugguccuggc

SEQ ID NO: 54565 - RNA, 22 nt, Human
ucaaaggauaacugagggcagu

SEQ ID NO: 54566 - RNA, 19 nt, Human
ucaaaggcaaggaggaacu

SEQ ID NO: 54567 - RNA, 22 nt, Human
ucaaaggguagcccagggaaga

SEQ ID NO: 54568 - RNA, 22 nt, Human
ucaaaguagggguaagccaggc

SEQ ID NO: 54569 - RNA, 22 nt, Human
ucaaaguauaauugcuuuuuug

SEQ ID NO: 54570 - RNA, 22 nt, Human
ucaaaguauaucccuucgaaac

SEQ ID NO: 54571 - RNA, 22 nt, Human
uggcaggaagcaucuauagguc

SEQ ID NO: 54572 - RNA, 22 nt, Human
uggcaggagagcgucagaucag

SEQ ID NO: 54573 - RNA, 22 nt, Human
uggcaggaggaugaggcggcua

SEQ ID NO: 54574 - RNA, 20 nt, Human
uggcaggaggcagcagugga

SEQ ID NO: 54575 - RNA, 21 nt, Human
uggcaggcagcuggaagcuug

SEQ ID NO: 54576 - RNA, 22 nt, Human
uggcaggcaggcagccuucuga

SEQ ID NO: 54577 - RNA, 19 nt, Human
uggcaggcccaggauggac

SEQ ID NO: 54578 - RNA, 22 nt, Human
uggcaggcgggagccauagagg

SEQ ID NO: 54579 - RNA, 19 nt, Human
uggcagggagaguuugaag

SEQ ID NO: 54580 - RNA, 18 nt, Human
uggcagggaggaaauaua

SEQ ID NO: 54581 - RNA, 19 nt, Human
uggcagggagugauauuag

SEQ ID NO: 54582 - RNA, 22 nt, Human
uggcaggggaggugcuugcuua

SEQ ID NO: 54583 - RNA, 22 nt, Human
uggcaggguggcaacuuuuggu

SEQ ID NO: 54584 - RNA, 19 nt, Human
uggcagguagugagcaguc

SEQ ID NO: 54585 - RNA, 18 nt, Human
uggcagguccagcugugg

SEQ ID NO: 54586 - RNA, 22 nt, Human
uggcagguggagacagcagagc

SEQ ID NO: 54587 - RNA, 22 nt, Human
uggcagguggcacagccuggga

SEQ ID NO: 54588 - RNA, 22 nt, Human
uggcagguuggccuuugguuca

SEQ ID NO: 54589 - RNA, 16 nt, Human
uggcagguuuuuaucu

SEQ ID NO: 54590 - RNA, 22 nt, Human
uggcagucauuaucgcugaguc

SEQ ID NO: 54591 - RNA, 22 nt, Human
uggcagucuuguaggcaucucc

SEQ ID NO: 54592 - RNA, 22 nt, Human
uggcagugaaccaaggcuccaa

SEQ ID NO: 54593 - RNA, 18 nt, Human
uggcagugagguaggcau

SEQ ID NO: 54594 - RNA, 23 nt, Human
uggcagugaucaaaagcuuacau

SEQ ID NO: 54595 - RNA, 18 nt, Human
uggcagugccaccuucuc

SEQ ID NO: 54596 - RNA, 22 nt, Human
uggcagugccccuugaccagug

SEQ ID NO: 54597 - RNA, 22 nt, Human
uggcagugcugcagugcccuua

SEQ ID NO: 54598 - RNA, 22 nt, Human
uggcaguggcucagagugcaga

SEQ ID NO: 54599 - RNA, 22 nt, Human
uggcagugggaauggacaaaca

SEQ ID NO: 54600 - RNA, 22 nt, Human
uggcagugguaccggcucucag

SEQ ID NO: 54601 - RNA, 22 nt, Human
uggcagugucuuaucaggagug

SEQ ID NO: 54602 - RNA, 19 nt, Human
uggcagugugggguaugaa

SEQ ID NO: 54603 - RNA, 22 nt, Human
uggcagugugugagcuguuauu

SEQ ID NO: 54604 - RNA, 22 nt, Human
uggcaguguugugccacauucc

SEQ ID NO: 54605 - RNA, 22 nt, Human
uggcaguuggaaaaacgguuug

SEQ ID NO: 54606 - RNA, 22 nt, Human
uggcaguuuucaagaguucugu

SEQ ID NO: 54607 - RNA, 22 nt, Human
uggcauauaaagauguguucaa

SEQ ID NO: 54608 - RNA, 22 nt, Human
uggcauccacaaaugcuuagau

SEQ ID NO: 54609 - RNA, 22 nt, Human
uggcauccagauacccugaggg

SEQ ID NO: 54610 - RNA, 22 nt, Human
uggcauccagccaugugauuuu

SEQ ID NO: 54611 - RNA, 22 nt, Human
uggcauccucccucaagcugaa

SEQ ID NO: 54612 - RNA, 20 nt, Human
uggcaucucucaauuguagg

SEQ ID NO: 54613 - RNA, 22 nt, Human
uggcaugaauuuagcuuuccau

SEQ ID NO: 54614 - RNA, 22 nt, Human
uggcauggccagugcugggagu

SEQ ID NO: 54615 - RNA, 22 nt, Human
uggcauggguggagagagcaca

SEQ ID NO: 54616 - RNA, 22 nt, Human
uggcauguucucuuagcagcuc

SEQ ID NO: 54617 - RNA, 22 nt, Human
uggcauguuugcuugugcauau

SEQ ID NO: 54618 - RNA, 22 nt, Human
uggcauugacgcugaccugcac

SEQ ID NO: 54619 - RNA, 22 nt, Human
uggcauuggaauuuguguugca

SEQ ID NO: 54620 - RNA, 19 nt, Human
uggcauugguccagauaaa

SEQ ID NO: 54621 - RNA, 22 nt, Human
uggcauuucaccuuucauuucc

SEQ ID NO: 54622 - RNA, 22 nt, Human
uggcauuuuccaaugauauguu

SEQ ID NO: 54623 - RNA, 22 nt, Human
uggcauuuuguagcuguguauc

SEQ ID NO: 54624 - RNA, 22 nt, Human
uggcauuuuguucaguauaugg

SEQ ID NO: 54625 - RNA, 23 nt, Human
uggccaagauaaucucaguuuuc

SEQ ID NO: 54626 - RNA, 22 nt, Human
uggccaagaugcgaccucucag

SEQ ID NO: 54627 - RNA, 20 nt, Human
uggccaccacuguauaucaa

SEQ ID NO: 54628 - RNA, 22 nt, Human
uggccacuuggcaugugugcca

SEQ ID NO: 54629 - RNA, 22 nt, Human
uggccagaguugaggggguuuc

SEQ ID NO: 54630 - RNA, 22 nt, Human
uggccagcccucuucccacacu

SEQ ID NO: 54631 - RNA, 21 nt, Human
uggccagcugcucgucuccuc

SEQ ID NO: 54632 - RNA, 21 nt, Human
uggccagcuggagucuccaca

SEQ ID NO: 54633 - RNA, 17 nt, Human
uggccaggccccgccag

SEQ ID NO: 54634 - RNA, 19 nt, Human
uggccagguacugucugcu

SEQ ID NO: 54635 - RNA, 23 nt, Human
uggccagguagaggagguaguga

SEQ ID NO: 54636 - RNA, 22 nt, Human
uggccagguugggcuuugcagc

SEQ ID NO: 54637 - RNA, 22 nt, Human
uggccaguagagcucagauagu

SEQ ID NO: 54638 - RNA, 22 nt, Human
uggccagugauuaaugacgcuu

SEQ ID NO: 54639 - RNA, 22 nt, Human
uggccagugccugccagugcag

SEQ ID NO: 54640 - RNA, 22 nt, Human
uggccaguggacuaaguucuga

SEQ ID NO: 54641 - RNA, 22 nt, Human
uggccaugacauggaggcuuug

SEQ ID NO: 54642 - RNA, 22 nt, Human
uggccaugggauagugcagggg

SEQ ID NO: 54643 - RNA, 22 nt, Human
uggcccagcccugcucuagggc

SEQ ID NO: 54644 - RNA, 22 nt, Human
uggcccaggggcucuugguguu

SEQ ID NO: 54645 - RNA, 20 nt, Human
uggcccaguggggcagggug

SEQ ID NO: 54646 - RNA, 22 nt, Human
uggccccugaggagcaucagcc

SEQ ID NO: 54647 - RNA, 22 nt, Human
uggcccgaagauccgaggguca

SEQ ID NO: 54648 - RNA, 22 nt, Human
uggcccgccggaagaagauguc

SEQ ID NO: 54649 - RNA, 17 nt, Human
uggcccuagacuccagc

SEQ ID NO: 54650 - RNA, 22 nt, Human
uggcccuauuuggaaauagagc

SEQ ID NO: 54651 - RNA, 22 nt, Human
uggcccucagcacugagaccuu

SEQ ID NO: 54652 - RNA, 22 nt, Human
uggcccugcacccagagcaguu

SEQ ID NO: 54653 - RNA, 22 nt, Human
uccaggaauagaucagagauuu

SEQ ID NO: 54654 - RNA, 22 nt, Human
uccaggacagaguagaagcagc

SEQ ID NO: 54655 - RNA, 23 nt, Human
uccaggacccugguagacacaca

SEQ ID NO: 54656 - RNA, 22 nt, Human
uccaggaccucccaggcuagag

SEQ ID NO: 54657 - RNA, 22 nt, Human
uccaggaccugacugggccugc

SEQ ID NO: 54658 - RNA, 18 nt, Human
uccaggacucugcguggc

SEQ ID NO: 54659 - RNA, 21 nt, Human
uccaggacuugagaauuccag

SEQ ID NO: 54660 - RNA, 22 nt, Human
uccaggagaaggccauccagcg

SEQ ID NO: 54661 - RNA, 22 nt, Human
uccaggagcauccaggugaagc

SEQ ID NO: 54662 - RNA, 23 nt, Human
uccaggagcaugcuggcuggcga

SEQ ID NO: 54663 - RNA, 22 nt, Human
uccaggagcucauccacgucaa

SEQ ID NO: 54664 - RNA, 22 nt, Human
uccaggaggguuuucugccuuc

SEQ ID NO: 54665 - RNA, 22 nt, Human
uccaggagguagugcuuaauuu

SEQ ID NO: 54666 - RNA, 22 nt, Human
uccaggaggugaggggaccaaa

SEQ ID NO: 54667 - RNA, 22 nt, Human
uccaggagguugagacugcagu

SEQ ID NO: 54668 - RNA, 22 nt, Human
uccaggagguuuggaggaagca

SEQ ID NO: 54669 - RNA, 22 nt, Human
uccaggaguuugaccugugggc

SEQ ID NO: 54670 - RNA, 22 nt, Human
uccaggaugcccgcuuuugcuu

SEQ ID NO: 54671 - RNA, 22 nt, Human
uccaggcaaagccuuguagacg

SEQ ID NO: 54672 - RNA, 22 nt, Human
uccaggcauaagccuugagugu

SEQ ID NO: 54673 - RNA, 16 nt, Human
uccaggcauaucugag

SEQ ID NO: 54674 - RNA, 19 nt, Human
uccaggcauccuucaggcu

SEQ ID NO: 54675 - RNA, 22 nt, Human
uccaggcaucuguauuuuuuaa

SEQ ID NO: 54676 - RNA, 22 nt, Human
uccaggcaugucugaguccuuc

SEQ ID NO: 54677 - RNA, 22 nt, Human
uccaggcauguugggaagauga

SEQ ID NO: 54678 - RNA, 22 nt, Human
uccaggccaauguagcaggccc

SEQ ID NO: 54679 - RNA, 22 nt, Human
uccaggccacgaccuccuggau

SEQ ID NO: 54680 - RNA, 22 nt, Human
uccaggccacugcagaggcucu

SEQ ID NO: 54681 - RNA, 20 nt, Human
ucccuggaggugguggcauc

SEQ ID NO: 54682 - RNA, 22 nt, Human
ucccuggagguguuugcucagg

SEQ ID NO: 54683 - RNA, 22 nt, Human
ucccuggccauuccucuaggcc

SEQ ID NO: 54684 - RNA, 22 nt, Human
ucccuggcugggggcugccuug

SEQ ID NO: 54685 - RNA, 22 nt, Human
ucccugggaaaugucaguuuca

SEQ ID NO: 54686 - RNA, 22 nt, Human
ucccugggaccggcagcucaca

SEQ ID NO: 54687 - RNA, 22 nt, Human
ucccugggacucagacauggaa

SEQ ID NO: 54688 - RNA, 22 nt, Human
ucccugggccacagcugugagc

SEQ ID NO: 54689 - RNA, 23 nt, Human
ucccugggcccgugccagcggug

SEQ ID NO: 54690 - RNA, 22 nt, Human
ucccugggcuucuccagacuug

SEQ ID NO: 54691 - RNA, 20 nt, Human
ucccuggggcccuacuuccu

SEQ ID NO: 54692 - RNA, 22 nt, Human
ucccugggguaacauuagaggg

SEQ ID NO: 54693 - RNA, 22 nt, Human
ucccuguaagguucugagauuu

SEQ ID NO: 54694 - RNA, 22 nt, Human
ucccuguccaaagucuuccuau

SEQ ID NO: 54695 - RNA, 22 nt, Human
ucccugugaaucagaagcaggu

SEQ ID NO: 54696 - RNA, 22 nt, Human
ucccugugagucaacuaaacaa

SEQ ID NO: 54697 - RNA, 22 nt, Human
ucccugugggaugaggacucug

SEQ ID NO: 54698 - RNA, 22 nt, Human
ucccuucaagauuuggggaaau

SEQ ID NO: 54699 - RNA, 22 nt, Human
ucccuuguccucuucgucacug

SEQ ID NO: 54700 - RNA, 22 nt, Human
ucccuuguccugugggaagagc

SEQ ID NO: 54701 - RNA, 22 nt, Human
ucccuuugaucacuaacagaac

SEQ ID NO: 54702 - RNA, 22 nt, Human
uccgaugcuuccagggccaccu

SEQ ID NO: 54703 - RNA, 22 nt, Human
uccgcagaggaggaguugcugu

SEQ ID NO: 54704 - RNA, 23 nt, Human
uccggcaacuucacuccucccgc

SEQ ID NO: 54705 - RNA, 22 nt, Human
uccggcagcaucuggagggaug

SEQ ID NO: 54706 - RNA, 22 nt, Human
uccgguccggguacuccucucu

SEQ ID NO: 54707 - RNA, 22 nt, Human
uccguugacagggcacuugaca

SEQ ID NO: 54708 - RNA, 22 nt, Human
uccguugacuuggaagcccuga

SEQ ID NO: 54709 - RNA, 22 nt, Human
uccguugagucagcuucggacc

SEQ ID NO: 54710 - RNA, 22 nt, Human
uccuaagaagcaugggucccaa

SEQ ID NO: 54711 - RNA, 18 nt, Human
uccuaagauuugugagaa

SEQ ID NO: 54712 - RNA, 22 nt, Human
uccuaauugcuucauguguugu

SEQ ID NO: 54713 - RNA, 22 nt, Human
uccuagaaggaucauucuagug

SEQ ID NO: 54714 - RNA, 22 nt, Human
uccuaggaauacugccugaaau

SEQ ID NO: 54715 - RNA, 22 nt, Human
uccuaggccuggccugguggau

SEQ ID NO: 54716 - RNA, 22 nt, Human
uccuagucacaggaaaauuuca

SEQ ID NO: 54717 - RNA, 18 nt, Human
uccuagugaaaugccugu

SEQ ID NO: 54718 - RNA, 22 nt, Human
uccucacacccauaccacugac

SEQ ID NO: 54719 - RNA, 22 nt, Human
uccucacagaguggcaggcaau

SEQ ID NO: 54720 - RNA, 22 nt, Human
uccucacagcaugaccaggcag

SEQ ID NO: 54721 - RNA, 22 nt, Human
uccucagaauccaaacugcagu

SEQ ID NO: 54722 - RNA, 22 nt, Human
uccucagacacccugcuggcuu

SEQ ID NO: 54723 - RNA, 22 nt, Human
uccucagacuucccuuugugua

SEQ ID NO: 54724 - RNA, 22 nt, Human
uccucagauaccuggcagauca

SEQ ID NO: 54725 - RNA, 23 nt, Human
uccucagcauguuuugucaugua

SEQ ID NO: 54726 - RNA, 22 nt, Human
uccucagcauuagcacagacau

SEQ ID NO: 54727 - RNA, 22 nt, Human
uccucagcuuugguuuacucau

SEQ ID NO: 54728 - RNA, 22 nt, Human
uccucaggaucuaggagugcuu

SEQ ID NO: 54729 - RNA, 22 nt, Human
uccucaggcugccuggaagacu

SEQ ID NO: 54730 - RNA, 22 nt, Human
uccucagggaagaugagccuca

SEQ ID NO: 54731 - RNA, 22 nt, Human
uccucagggcggccuccgucuu

SEQ ID NO: 54732 - RNA, 22 nt, Human
uccucaggucaaagcaggagaa

SEQ ID NO: 54733 - RNA, 22 nt, Human
uccucaguaaggcauggcuuug

SEQ ID NO: 54734 - RNA, 19 nt, Human
uccucagugacaaccucag

SEQ ID NO: 54735 - RNA, 22 nt, Human
uccucagugcuagccaacugcc

SEQ ID NO: 54736 - RNA, 22 nt, Human
uccucaguuuucuaguauggca

SEQ ID NO: 54737 - RNA, 22 nt, Human
uccucauagacugacugcuugc

SEQ ID NO: 54738 - RNA, 22 nt, Human
uccucaucuguaccuuggggua

SEQ ID NO: 54739 - RNA, 23 nt, Human
uccuccaaccagcagcugcauaa

SEQ ID NO: 54740 - RNA, 22 nt, Human
uccuccagaccacuucugugcg

SEQ ID NO: 54741 - RNA, 22 nt, Human
uccuccagagauuugaguuauu

SEQ ID NO: 54742 - RNA, 22 nt, Human
uccuccagcuacuaggcaaaua

SEQ ID NO: 54743 - RNA, 22 nt, Human
uccuccagggggaucuucagcc

SEQ ID NO: 54744 - RNA, 22 nt, Human
uccuccagugguacuggccaau

SEQ ID NO: 54745 - RNA, 20 nt, Human
uccucccccaccuuugcagc

SEQ ID NO: 54746 - RNA, 17 nt, Human
uccuccccgcaguugca

SEQ ID NO: 54747 - RNA, 22 nt, Human
uccucccuguaccauuccucug

SEQ ID NO: 54748 - RNA, 22 nt, Human
uccucccuucucacugggaagg

SEQ ID NO: 54749 - RNA, 22 nt, Human
uccuccucuaucagacagugcc

SEQ ID NO: 54750 - RNA, 22 nt, Human
uccuccuuuccccgcuggagcc

SEQ ID NO: 54751 - RNA, 23 nt, Human
uccuccuuuugcuugugcuuccc

SEQ ID NO: 54752 - RNA, 23 nt, Human
uccucgcaggagggagaugaugc

SEQ ID NO: 54753 - RNA, 22 nt, Human
uccucuccaugucucacgccac

SEQ ID NO: 54754 - RNA, 22 nt, Human
uccucugagacaucagguugag

SEQ ID NO: 54755 - RNA, 22 nt, Human
uccucugcuccaggcuggacuu

SEQ ID NO: 54756 - RNA, 22 nt, Human
uccucugguccugcagcagauc

SEQ ID NO: 54757 - RNA, 22 nt, Human
uccucuucagagggaccucggg

SEQ ID NO: 54758 - RNA, 22 nt, Human
uccucuucuaagcucauucagg

SEQ ID NO: 54759 - RNA, 22 nt, Human
uccucuucuguggauucccuga

SEQ ID NO: 54760 - RNA, 22 nt, Human
uccucuugggaauaccuuucua

SEQ ID NO: 54761 - RNA, 22 nt, Human
uccugaaaauaauuucacaaga

SEQ ID NO: 54762 - RNA, 22 nt, Human
uccugaaauuuguuuuaauucu

SEQ ID NO: 54763 - RNA, 22 nt, Human
uccugaacagcuccugagcaug

SEQ ID NO: 54764 - RNA, 22 nt, Human
uccugaagaacgaagucaugua

SEQ ID NO: 54765 - RNA, 22 nt, Human
uccugaagaaggcagauauuug

SEQ ID NO: 54766 - RNA, 22 nt, Human
uccugaagaggcuacacugcuu

SEQ ID NO: 54767 - RNA, 22 nt, Human
uccugaagccugagugaugacu

SEQ ID NO: 54768 - RNA, 22 nt, Human
uccugaaguauggguauggagu

SEQ ID NO: 54769 - RNA, 22 nt, Human
uccugaauccaggagaguaggg

SEQ ID NO: 54770 - RNA, 20 nt, Human
uccugaauuuccuuucugcu

SEQ ID NO: 54771 - RNA, 22 nt, Human
uccugaccacacugccuucugc

SEQ ID NO: 54772 - RNA, 22 nt, Human
uccugaccacuaggaccaggcu

SEQ ID NO: 54773 - RNA, 22 nt, Human
uccugacccaccaagucuguaa

SEQ ID NO: 54774 - RNA, 22 nt, Human
uccugaccugaacuggggucuu

SEQ ID NO: 54775 - RNA, 22 nt, Human
uccugagacaucucugcugguc

SEQ ID NO: 54776 - RNA, 22 nt, Human
uccugagagcagaguccaggug

SEQ ID NO: 54777 - RNA, 22 nt, Human
uccugagagguuuauaacgcag

SEQ ID NO: 54778 - RNA, 22 nt, Human
uccugagauaggaguugaaggc

SEQ ID NO: 54779 - RNA, 22 nt, Human
uccugagcaacacagcuaagug

SEQ ID NO: 54780 - RNA, 22 nt, Human
uccugagccccagggagguugg

SEQ ID NO: 54781 - RNA, 22 nt, Human
uccugagccugacaaucaccau

SEQ ID NO: 54782 - RNA, 22 nt, Human
uccugagcugccgcaucagcag

SEQ ID NO: 54783 - RNA, 22 nt, Human
uccugagcuucaguuucuucau

SEQ ID NO: 54784 - RNA, 22 nt, Human
uccugaggaaaguucaugaaug

SEQ ID NO: 54785 - RNA, 22 nt, Human
ucaggaggccugaguagcucua

SEQ ID NO: 54786 - RNA, 21 nt, Human
ucaggaggcucagacuccugc

SEQ ID NO: 54787 - RNA, 22 nt, Human
ucaggagggaguguggauagag

SEQ ID NO: 54788 - RNA, 22 nt, Human
ucaggagggauuguugccuauu

SEQ ID NO: 54789 - RNA, 22 nt, Human
ucaggaguaaagaagacuugac

SEQ ID NO: 54790 - RNA, 22 nt, Human
ucauucugcaucacucuugcuc

SEQ ID NO: 54791 - RNA, 22 nt, Human
ucauugaaaacucagcaucuac

SEQ ID NO: 54792 - RNA, 22 nt, Human
uggcugccugaaugcaagacag

SEQ ID NO: 54793 - RNA, 22 nt, Human
uggcugccugaucgagcaggug

SEQ ID NO: 54794 - RNA, 22 nt, Human
uggcugccuucccugcuggagg

SEQ ID NO: 54795 - RNA, 22 nt, Human
uggcugcugcucacucagccuc

SEQ ID NO: 54796 - RNA, 22 nt, Human
uggcuggaauauguggagacca

SEQ ID NO: 54797 - RNA, 22 nt, Human
uggcuggagagggucccaugag

SEQ ID NO: 54798 - RNA, 19 nt, Human
uggcuggagaucugcuacu

SEQ ID NO: 54799 - RNA, 22 nt, Human
uggcuggagcauuccuugucuu

SEQ ID NO: 54800 - RNA, 22 nt, Human
uggcuggagccccucaagagca

SEQ ID NO: 54801 - RNA, 22 nt, Human
uggcuggagcgcccuccucugc

SEQ ID NO: 54802 - RNA, 22 nt, Human
uggcuggagggacccacucaga

SEQ ID NO: 54803 - RNA, 21 nt, Human
uggcuggauagaugggaacug

SEQ ID NO: 54804 - RNA, 22 nt, Human
uggcuggauaucaggcaagggg

SEQ ID NO: 54805 - RNA, 22 nt, Human
uggcuggaugugagaucaagag

SEQ ID NO: 54806 - RNA, 22 nt, Human
uggcuggcaguaggcuaguggc

SEQ ID NO: 54807 - RNA, 22 nt, Human
uggcuggcaguuaucuuuggau

SEQ ID NO: 54808 - RNA, 22 nt, Human
uggcuggcccugggagugcaga

SEQ ID NO: 54809 - RNA, 23 nt, Human
uggcuggcgccugccucacccug

SEQ ID NO: 54810 - RNA, 22 nt, Human
uggcuggcguuggggccaguga

SEQ ID NO: 54811 - RNA, 22 nt, Human
uggcuggcuuguucacugacug

SEQ ID NO: 54812 - RNA, 22 nt, Human
uggcuggcuuucuuguauuuac

SEQ ID NO: 54813 - RNA, 22 nt, Human
uggcugggagcuggaacugggc

SEQ ID NO: 54814 - RNA, 22 nt, Human
uggcuggggccugaauccugca

SEQ ID NO: 54815 - RNA, 22 nt, Human
uggcuggucacaugguaggucu

SEQ ID NO: 54816 - RNA, 22 nt, Human
uggcugugcggccucgggcaga

SEQ ID NO: 54817 - RNA, 22 nt, Human
uggcuguggacucagauggcuc

SEQ ID NO: 54818 - RNA, 22 nt, Human
uggcugugggauaugugacuga

SEQ ID NO: 54819 - RNA, 22 nt, Human
uggcugugggaugagagccuca

SEQ ID NO: 54820 - RNA, 22 nt, Human
uggcugugucaucauagcugug

SEQ ID NO: 54821 - RNA, 22 nt, Human
uggcugugucccuguccagagu

SEQ ID NO: 54822 - RNA, 22 nt, Human
uggcuguuacucuuuucauuuc

SEQ ID NO: 54823 - RNA, 22 nt, Human
uggcuuaguucuagaaauuugg

SEQ ID NO: 54824 - RNA, 22 nt, Human
uggcuuaucacauuguccaugg

SEQ ID NO: 54825 - RNA, 18 nt, Human
uggcuucagaguaaaaug

SEQ ID NO: 54826 - RNA, 22 nt, Human
uggcuucagaucugccccggag

SEQ ID NO: 54827 - RNA, 22 nt, Human
uggcuucaggagcaccuggcuu

SEQ ID NO: 54828 - RNA, 22 nt, Human
uggcuucaguuccuguguuguu

SEQ ID NO: 54829 - RNA, 22 nt, Human
uggcuucauggcaagucuuagu

SEQ ID NO: 54830 - RNA, 21 nt, Human
uggcuucauuugcaacccacu

SEQ ID NO: 54831 - RNA, 22 nt, Human
uggcuuccagaacugagcaaca

SEQ ID NO: 54832 - RNA, 22 nt, Human
uggcuuccuaggagcccgugcu

SEQ ID NO: 54833 - RNA, 22 nt, Human
uggcuuccuguguaaugaggug

SEQ ID NO: 54834 - RNA, 22 nt, Human
uggcuuccuguuucccagaaag

SEQ ID NO: 54835 - RNA, 18 nt, Human
uggcuucucaaagcccag

SEQ ID NO: 54836 - RNA, 22 nt, Human
uggcuucucauuugcauuaaac

SEQ ID NO: 54837 - RNA, 22 nt, Human
uggcuucuccagaaaucuuggu

SEQ ID NO: 54838 - RNA, 22 nt, Human
uggcuucucccgacacccuggc

SEQ ID NO: 54839 - RNA, 22 nt, Human
uggcuucucccucugccugauu

SEQ ID NO: 54840 - RNA, 22 nt, Human
uggcuucucgccugucaucccg

SEQ ID NO: 54841 - RNA, 22 nt, Human
uggcuucucugugugagggaga

SEQ ID NO: 54842 - RNA, 18 nt, Human
uggcuucugcuagcugga

SEQ ID NO: 54843 - RNA, 19 nt, Human
uggcuucuggcaacagaug

SEQ ID NO: 54844 - RNA, 22 nt, Human
uggcuucugguuuauccuuaua

SEQ ID NO: 54845 - RNA, 22 nt, Human
uggcuucuugacuucuuggcug

SEQ ID NO: 54846 - RNA, 22 nt, Human
uggcuucuugaucuuggacuug

SEQ ID NO: 54847 - RNA, 22 nt, Human
uggcuucuugggaugggucauu

SEQ ID NO: 54848 - RNA, 22 nt, Human
uggcuugggagauucucgaacu

SEQ ID NO: 54849 - RNA, 22 nt, Human
uggcuuuacaucaaauugagua

SEQ ID NO: 54850 - RNA, 22 nt, Human
uggcuuuaggagcuauauaccu

SEQ ID NO: 54851 - RNA, 22 nt, Human
uggcuuuaggguuccuucuacc

SEQ ID NO: 54852 - RNA, 22 nt, Human
uggcuuuauacuuaagcacaau

SEQ ID NO: 54853 - RNA, 22 nt, Human
uggcuuuauccaucaucgccaa

SEQ ID NO: 54854 - RNA, 22 nt, Human
uggcuuuuguugguaccaccuu

SEQ ID NO: 54855 - RNA, 22 nt, Human
ugggaaagcugcagaaauucuc

SEQ ID NO: 54856 - RNA, 19 nt, Human
ugggaaaguaacauacaaa

SEQ ID NO: 54857 - RNA, 22 nt, Human
ugggaaaguaauugucauccuu

SEQ ID NO: 54858 - RNA, 22 nt, Human
ugggaaagucuuuauuucucuu

SEQ ID NO: 54859 - RNA, 18 nt, Human
ugggaaaguuuauagaau

SEQ ID NO: 54860 - RNA, 22 nt, Human
ugggaaauauucuaaaagucuu

SEQ ID NO: 54861 - RNA, 22 nt, Human
ugggaacaacaugcacugccac

SEQ ID NO: 54862 - RNA, 22 nt, Human
ugggaacaguagcugcugagcu

SEQ ID NO: 54863 - RNA, 22 nt, Human
ugggaagaagcagagaacugga

SEQ ID NO: 54864 - RNA, 22 nt, Human
ugggaagaguuagagacagcug

SEQ ID NO: 54865 - RNA, 22 nt, Human
ugggaagauaugagugaccaac

SEQ ID NO: 54866 - RNA, 22 nt, Human
ugggaagcuacucaugcaggca

SEQ ID NO: 54867 - RNA, 22 nt, Human
ugggaaggauaccuuggaacau

SEQ ID NO: 54868 - RNA, 22 nt, Human
ugggaagggaguuucuuggagu

SEQ ID NO: 54869 - RNA, 22 nt, Human
ugggaagggucaacagcuggaa

SEQ ID NO: 54870 - RNA, 22 nt, Human
ugggaagggucugaaucugaga

SEQ ID NO: 54871 - RNA, 22 nt, Human
ugggaaggugauuuuccaaaag

SEQ ID NO: 54872 - RNA, 22 nt, Human
ugggaagguuagcaguuuguca

SEQ ID NO: 54873 - RNA, 22 nt, Human
ugggaauagaacaagauagaga

SEQ ID NO: 54874 - RNA, 23 nt, Human
ugggaaugacaucuagagcagag

SEQ ID NO: 54875 - RNA, 23 nt, Human
ugggaauugcaggggguucugcc

SEQ ID NO: 54876 - RNA, 22 nt, Human
ugggacacccucacgccugcac

SEQ ID NO: 54877 - RNA, 22 nt, Human
ugggacagguuggagagaagca

SEQ ID NO: 54878 - RNA, 22 nt, Human
ugggacucacucuuuuggccag

SEQ ID NO: 54879 - RNA, 22 nt, Human
ugggacuuaauaugcccuugau

SEQ ID NO: 54880 - RNA, 22 nt, Human
ugggacuucaaugcaaugaggu

SEQ ID NO: 54881 - RNA, 22 nt, Human
ugggacuugccucgagggcugc

SEQ ID NO: 54882 - RNA, 20 nt, Human
ugggagaagaacacuggaac

SEQ ID NO: 54883 - RNA, 22 nt, Human
ugggagaagacguacuuuagac

SEQ ID NO: 54884 - RNA, 22 nt, Human
ugggagaagagaaauuacugcc

SEQ ID NO: 54885 - RNA, 22 nt, Human
ugggagaagcagugggacagua

SEQ ID NO: 54886 - RNA, 22 nt, Human
ugggagaaucuugcucugcuac

SEQ ID NO: 54887 - RNA, 21 nt, Human
ugggagacacagccuugagcu

SEQ ID NO: 54888 - RNA, 22 nt, Human
ugggagagauaggcuucuggac

SEQ ID NO: 54889 - RNA, 22 nt, Human
ugggagaguuuguuuagaguga

SEQ ID NO: 54890 - RNA, 22 nt, Human
ugggagauaaagcaucuguucu

SEQ ID NO: 54891 - RNA, 20 nt, Human
ugggagaugaucuccuugcu

SEQ ID NO: 54892 - RNA, 22 nt, Human
ugggagaugguucugagacuuu

SEQ ID NO: 54893 - RNA, 22 nt, Human
ugggagcaccuugagggcagaa

SEQ ID NO: 54894 - RNA, 22 nt, Human
ugggagcagccaacauggccuu

SEQ ID NO: 54895 - RNA, 22 nt, Human
ugggagcaggaagcaggaagua

SEQ ID NO: 54896 - RNA, 22 nt, Human
ugggagcaguucagguguggcu

SEQ ID NO: 54897 - RNA, 23 nt, Human
ugggagcucaagggaggcugccc

SEQ ID NO: 54898 - RNA, 22 nt, Human
ugggaggaucucuugaggccag

SEQ ID NO: 54899 - RNA, 22 nt, Human
uccaccaugauuuagcacuggc

SEQ ID NO: 54900 - RNA, 22 nt, Human
uccacccaguguuucuacaggu

SEQ ID NO: 54901 - RNA, 19 nt, Human
uccaccccagccagcucug

SEQ ID NO: 54902 - RNA, 18 nt, Human
uccaccgcgugcaccucu

SEQ ID NO: 54903 - RNA, 22 nt, Human
uccacgccaaaauuuguagcuu

SEQ ID NO: 54904 - RNA, 21 nt, Human
uccacucguauucuguuggca

SEQ ID NO: 54905 - RNA, 22 nt, Human
uccacuggaacaacucugaggc

SEQ ID NO: 54906 - RNA, 22 nt, Human
uccacuguggucccuugcugcc

SEQ ID NO: 54907 - RNA, 22 nt, Human
uccacuugcccucuucugugcu

SEQ ID NO: 54908 - RNA, 22 nt, Human
uccagaaaauucagaaauuguu

SEQ ID NO: 54909 - RNA, 22 nt, Human
uccaaauacauuuacuguauuu

SEQ ID NO: 54910 - RNA, 23 nt, Human
uccaaauaccugucaccuugucu

SEQ ID NO: 54911 - RNA, 21 nt, Human
uccaaaucccauucuguaguc

SEQ ID NO: 54912 - RNA, 22 nt, Human
uccaaauugacaguagugauua

SEQ ID NO: 54913 - RNA, 21 nt, Human
uccaacaugccugauggugcc

SEQ ID NO: 54914 - RNA, 22 nt, Human
uccaagaagagccuuucuccuc

SEQ ID NO: 54915 - RNA, 22 nt, Human
uccaagaagcucagcaaacauc

SEQ ID NO: 54916 - RNA, 22 nt, Human
uccaagaagcuuacaaucuaau

SEQ ID NO: 54917 - RNA, 23 nt, Human
uccaagaaguagggccuggacuu

SEQ ID NO: 54918 - RNA, 22 nt, Human
uccaagaaguuuauguuguuuc

SEQ ID NO: 54919 - RNA, 22 nt, Human
uccaagaauacagauuugugaa

SEQ ID NO: 54920 - RNA, 22 nt, Human
uccaagaaucagucucuuuugg

SEQ ID NO: 54921 - RNA, 22 nt, Human
uccaagaguauaguuuauuggc

SEQ ID NO: 54922 - RNA, 22 nt, Human
uccaaggaaguuugcacuauug

SEQ ID NO: 54923 - RNA, 22 nt, Human
uccaaggagucuuaaguuacau

SEQ ID NO: 54924 - RNA, 19 nt, Human
uccaaggcauggcccagug

SEQ ID NO: 54925 - RNA, 22 nt, Human
uccaagggaaacugcacuucua

SEQ ID NO: 54926 - RNA, 22 nt, Human
uccaagggcagcagccauagcc

SEQ ID NO: 54927 - RNA, 22 nt, Human
uccaagggcuuuggcgugaagu

SEQ ID NO: 54928 - RNA, 22 nt, Human
uccaaggucagcgagagucacu

SEQ ID NO: 54929 - RNA, 22 nt, Human
uccaaguucuaggaacugcugc

SEQ ID NO: 54930 - RNA, 22 nt, Human
uccaaguuucuucugcacaaca

SEQ ID NO: 54931 - RNA, 22 nt, Human
uccaauguguuuguggcaugga

SEQ ID NO: 54932 - RNA, 23 nt, Human
uccaauucaauugggucaggaag

SEQ ID NO: 54933 - RNA, 19 nt, Human
uccaauuucuauucauguu

SEQ ID NO: 54934 - RNA, 21 nt, Human
uccacaauagggaaauucacc

SEQ ID NO: 54935 - RNA, 22 nt, Human
uccacaauggcagagaaauguc

SEQ ID NO: 54936 - RNA, 22 nt, Human
uccacacuugcugucugcugag

SEQ ID NO: 54937 - RNA, 22 nt, Human
uccacagcacaaagccagugug

SEQ ID NO: 54938 - RNA, 22 nt, Human
uccacaggaaagcaccucccau

SEQ ID NO: 54939 - RNA, 22 nt, Human
uccacaggcaagucucuuggca

SEQ ID NO: 54940 - RNA, 22 nt, Human
uccacagggauguugaguucuu

SEQ ID NO: 54941 - RNA, 22 nt, Human
uccacagguaugaggccccacc

SEQ ID NO: 54942 - RNA, 22 nt, Human
uccacagguccggcaugaacag

SEQ ID NO: 54943 - RNA, 22 nt, Human
uccacagucuauuuuuagucua

SEQ ID NO: 54944 - RNA, 22 nt, Human
uccacagugguugaacuaguaa

SEQ ID NO: 54945 - RNA, 22 nt, Human
uccacagugguugaacuaguuu

SEQ ID NO: 54946 - RNA, 22 nt, Human
uccacaugacuucuaauaacug

SEQ ID NO: 54947 - RNA, 22 nt, Human
uccaccacuuccugcagccauu

SEQ ID NO: 54948 - RNA, 22 nt, Human
uccaccagagcccucuuugcgg

SEQ ID NO: 54949 - RNA, 22 nt, Human
uccaccagcagccugucagccu

SEQ ID NO: 54950 - RNA, 21 nt, Human
uccaccagcucuuccucuuca

SEQ ID NO: 54951 - RNA, 22 nt, Human
uccaccagcuucuucaccagcu

SEQ ID NO: 54952 - RNA, 22 nt, Human
uccaccaggcuccauguucagu

SEQ ID NO: 54953 - RNA, 22 nt, Human
uccacccagcacacugugguag

SEQ ID NO: 54954 - RNA, 21 nt, Human
uccacccucucugcucccagu

SEQ ID NO: 54955 - RNA, 22 nt, Human
uccacccugcuuuugucuuuga

SEQ ID NO: 54956 - RNA, 22 nt, Human
uccaccuagcauucaccuccua

SEQ ID NO: 54957 - RNA, 22 nt, Human
uccacgugagcuucgugugcag

SEQ ID NO: 54958 - RNA, 22 nt, Human
uccacugacaggugaauggaua

SEQ ID NO: 54959 - RNA, 22 nt, Human
uccacugcagcuucugauggaa

SEQ ID NO: 54960 - RNA, 22 nt, Human
uccacuuuagcaaugauugaau

SEQ ID NO: 54961 - RNA, 22 nt, Human
uccacuuuucuuccaucaucau

SEQ ID NO: 54962 - RNA, 22 nt, Human
uccagaaaauuuuacagugccu

SEQ ID NO: 54963 - RNA, 22 nt, Human
uccagaaaugcaagccaggugu

SEQ ID NO: 54964 - RNA, 19 nt, Human
uccagaagucccugagcgg

SEQ ID NO: 54965 - RNA, 22 nt, Human
uccagaauauuugggaaagaug

SEQ ID NO: 54966 - RNA, 22 nt, Human
uccagacauuuuauagcagucu

SEQ ID NO: 54967 - RNA, 22 nt, Human
uccagaccauggauggcugcaa

SEQ ID NO: 54968 - RNA, 22 nt, Human
uccagaccaugugagaggcgca

SEQ ID NO: 54969 - RNA, 22 nt, Human
uccagacucuuuaaguucauuu

SEQ ID NO: 54970 - RNA, 22 nt, Human
uccagacuguucacauuggcau

SEQ ID NO: 54971 - RNA, 22 nt, Human
uccagagaacgaugaaagcugg

SEQ ID NO: 54972 - RNA, 22 nt, Human
uccagagacuugcaugugcuug

SEQ ID NO: 54973 - RNA, 22 nt, Human
uccagagcaaaguuugcuaaca

SEQ ID NO: 54974 - RNA, 22 nt, Human
uccagagcagguggucagaagg

SEQ ID NO: 54975 - RNA, 18 nt, Human
uccagagcagucuuuggc

SEQ ID NO: 54976 - RNA, 22 nt, Human
uccagagccccagucuaguggg

SEQ ID NO: 54977 - RNA, 22 nt, Human
uccagagccugcgcacuggcug

SEQ ID NO: 54978 - RNA, 18 nt, Human
uccagagcuacuguggug

SEQ ID NO: 54979 - RNA, 22 nt, Human
uccagagcuacuugcucaacuu

SEQ ID NO: 54980 - RNA, 22 nt, Human
uccagagcugagcagucauucu

SEQ ID NO: 54981 - RNA, 22 nt, Human
uccagagcugggucugugcuca

SEQ ID NO: 54982 - RNA, 18 nt, Human
uccagagcuggugcuucu

SEQ ID NO: 54983 - RNA, 22 nt, Human
uccagagcuguaugauuuuuuu

SEQ ID NO: 54984 - RNA, 14 nt, Human
uccagagcuuuccg

SEQ ID NO: 54985 - RNA, 20 nt, Human
uccagaggccacauccagug

SEQ ID NO: 54986 - RNA, 22 nt, Human
uccagagggcgauggcuggggg

SEQ ID NO: 54987 - RNA, 22 nt, Human
uccagagucuccuguuguuguu

SEQ ID NO: 54988 - RNA, 22 nt, Human
uccagagugacaaaugacugau

SEQ ID NO: 54989 - RNA, 22 nt, Human
uccagaguuguaaguguugaca

SEQ ID NO: 54990 - RNA, 20 nt, Human
uccagauauuaagacaggca

SEQ ID NO: 54991 - RNA, 22 nt, Human
uccagaugcugcacauuccuga

SEQ ID NO: 54992 - RNA, 21 nt, Human
uccagcacagaugaccucccc

SEQ ID NO: 54993 - RNA, 22 nt, Human
uccagcacccaauguggcuaag

SEQ ID NO: 54994 - RNA, 23 nt, Human
uccagcagagccuuccaggaggg

SEQ ID NO: 54995 - RNA, 23 nt, Human
uccagcagccaagaaggguagaa

SEQ ID NO: 54996 - RNA, 22 nt, Human
uccagcagcccgaaggcccauc

SEQ ID NO: 54997 - RNA, 22 nt, Human
uccagcaguccaugugagacac

SEQ ID NO: 54998 - RNA, 22 nt, Human
uccagcauucuuagaccucuau

SEQ ID NO: 54999 - RNA, 22 nt, Human
uccagccaagccuugguagcug

SEQ ID NO: 55000 - RNA, 22 nt, Human
uccagccaaucaacuauuguuu

SEQ ID NO: 55001 - RNA, 22 nt, Human
uccagccacucagcagggauug

SEQ ID NO: 55002 - RNA, 20 nt, Human
uccagcccagguccugccug

SEQ ID NO: 55003 - RNA, 22 nt, Human
uccagccccgaggccggcgacg

SEQ ID NO: 55004 - RNA, 22 nt, Human
uccagccccuuuuacucauuca

SEQ ID NO: 55005 - RNA, 20 nt, Human
uccagcccucaugucgcuca

SEQ ID NO: 55006 - RNA, 22 nt, Human
uccagcccucuggcccgcggug

SEQ ID NO: 55007 - RNA, 20 nt, Human
uccagcccugcuucucucuu

SEQ ID NO: 55008 - RNA, 19 nt, Human
uccagcccuguucccuuuu

SEQ ID NO: 55009 - RNA, 22 nt, Human
ucucagaggugcccuggcaucu

SEQ ID NO: 55010 - RNA, 22 nt, Human
ucucagaguuuagagcugagcc

SEQ ID NO: 55011 - RNA, 22 nt, Human
ucucagcaacgauccggaguaa

SEQ ID NO: 55012 - RNA, 22 nt, Human
ucucagcacguuguuuucauug

SEQ ID NO: 55013 - RNA, 20 nt, Human
ucucagcauaagaacccuuc

SEQ ID NO: 55014 - RNA, 22 nt, Human
ucucagcucuuuuuucacagaa

SEQ ID NO: 55015 - RNA, 22 nt, Human
ucucagcugacugcuuuccucg

SEQ ID NO: 55016 - RNA, 22 nt, Human
ucucaggaaaaaucccuagcuu

SEQ ID NO: 55017 - RNA, 22 nt, Human
ucucaggacuccucuggccaua

SEQ ID NO: 55018 - RNA, 22 nt, Human
ucucaggacuuugggaagcuca

SEQ ID NO: 55019 - RNA, 22 nt, Human
ucucaggagccacagcgggagu

SEQ ID NO: 55020 - RNA, 22 nt, Human
ucucaggaguagugggauccau

SEQ ID NO: 55021 - RNA, 22 nt, Human
ucucaggcacugggugccaacu

SEQ ID NO: 55022 - RNA, 22 nt, Human
ucucaggcaugguuuguucauc

SEQ ID NO: 55023 - RNA, 22 nt, Human
ucucaggcuaccuugcacaagg

SEQ ID NO: 55024 - RNA, 22 nt, Human
ucucaggcuguguguggaggac

SEQ ID NO: 55025 - RNA, 22 nt, Human
ucucagggagggcgagucagcg

SEQ ID NO: 55026 - RNA, 18 nt, Human
ucucagggcauacccaga

SEQ ID NO: 55027 - RNA, 22 nt, Human
uccagaaacugcugagauaaga

SEQ ID NO: 55028 - RNA, 22 nt, Human
uccagaauacucugaaaucauu

SEQ ID NO: 55029 - RNA, 20 nt, Human
uccagacaucuagcucaguu

SEQ ID NO: 55030 - RNA, 22 nt, Human
uccagaccuagggcaccccagu

SEQ ID NO: 55031 - RNA, 22 nt, Human
uccagacucugucacuuccuag

SEQ ID NO: 55032 - RNA, 17 nt, Human
uccagagaggcuucccu

SEQ ID NO: 55033 - RNA, 18 nt, Human
uccagagagggagaagug

SEQ ID NO: 55034 - RNA, 20 nt, Human
uccagagaguggcaaagcuc

SEQ ID NO: 55035 - RNA, 22 nt, Human
uccagagaucucucuucccugu

SEQ ID NO: 55036 - RNA, 17 nt, Human
uccagagcacagagcuc

SEQ ID NO: 55037 - RNA, 22 nt, Human
uccagagcaugcagaucaucaa

SEQ ID NO: 55038 - RNA, 22 nt, Human
uccagagccccaauucaccucu

SEQ ID NO: 55039 - RNA, 22 nt, Human
uccagagccuucgauaagaaga

SEQ ID NO: 55040 - RNA, 22 nt, Human
uccagagccuuucugcuugaca

SEQ ID NO: 55041 - RNA, 22 nt, Human
uccagagcucugggcauagcug

SEQ ID NO: 55042 - RNA, 22 nt, Human
uccagagcuguccuacugugag

SEQ ID NO: 55043 - RNA, 22 nt, Human
uccagaggcagcugcggucagg

SEQ ID NO: 55044 - RNA, 22 nt, Human
uccagaggcuccaaagggagau

SEQ ID NO: 55045 - RNA, 22 nt, Human
uccagaggcucugagggagagu

SEQ ID NO: 55046 - RNA, 22 nt, Human
uccagaggggcagcccugugcu

SEQ ID NO: 55047 - RNA, 18 nt, Human
uccagagguguuggagcc

SEQ ID NO: 55048 - RNA, 22 nt, Human
uccagcaccuggaggcgucccc

SEQ ID NO: 55049 - RNA, 22 nt, Human
uccagcagaaccagagaccugg

SEQ ID NO: 55050 - RNA, 22 nt, Human
uccagcagaccaucaaggcuca

SEQ ID NO: 55051 - RNA, 22 nt, Human
uccagcagacucaucagcaagg

SEQ ID NO: 55052 - RNA, 22 nt, Human
uccagcagagguugauaauacc

SEQ ID NO: 55053 - RNA, 22 nt, Human
uccagcagagucucugaggggg

SEQ ID NO: 55054 - RNA, 18 nt, Human
uccagcagcauaguuucc

SEQ ID NO: 55055 - RNA, 22 nt, Human
uccagcagggaauuaguagucu

SEQ ID NO: 55056 - RNA, 22 nt, Human
uccagcagguccgagacaaguu

SEQ ID NO: 55057 - RNA, 18 nt, Human
uccagcaggucugaggug

SEQ ID NO: 55058 - RNA, 22 nt, Human
uccagcaguaaggaaaguacau

SEQ ID NO: 55059 - RNA, 20 nt, Human
uccagcaguaugcuauacuu

SEQ ID NO: 55060 - RNA, 22 nt, Human
uccagcagugcucaggacucac

SEQ ID NO: 55061 - RNA, 22 nt, Human
uccagcauguuugugcugcuga

SEQ ID NO: 55062 - RNA, 22 nt, Human
uccagcauuagaugugaaauug

SEQ ID NO: 55063 - RNA, 23 nt, Human
uccagccaaaucuggcugacagu

SEQ ID NO: 55064 - RNA, 22 nt, Human
uccagccaacugccuagggagc

SEQ ID NO: 55065 - RNA, 22 nt, Human
uccagccaccaccuugauugcc

SEQ ID NO: 55066 - RNA, 20 nt, Human
uccagccacuuccgcugguc

SEQ ID NO: 55067 - RNA, 22 nt, Human
uccagccaugacucggacagug

SEQ ID NO: 55068 - RNA, 22 nt, Human
uccagccaugcaugacaaucac

SEQ ID NO: 55069 - RNA, 22 nt, Human
uccagcccagcuguccccuuca

SEQ ID NO: 55070 - RNA, 22 nt, Human
uccagccccggcuuccuuacag

SEQ ID NO: 55071 - RNA, 22 nt, Human
uccagcccgacugggccugccg

SEQ ID NO: 55072 - RNA, 22 nt, Human
uccagcccgagggcgcugauga

SEQ ID NO: 55073 - RNA, 22 nt, Human
uccagcccucagccaaguggaa

SEQ ID NO: 55074 - RNA, 22 nt, Human
uccagcccuccugggaucacag

SEQ ID NO: 55075 - RNA, 22 nt, Human
uccagcccugcccauucucucg

SEQ ID NO: 55076 - RNA, 22 nt, Human
uccagcucaaagugcuccuguc

SEQ ID NO: 55077 - RNA, 20 nt, Human
uccagcucaguuuuuuuguc

SEQ ID NO: 55078 - RNA, 22 nt, Human
uccagcuccacagccucccugu

SEQ ID NO: 55079 - RNA, 23 nt, Human
uccagcucccuucaauggcacug

SEQ ID NO: 55080 - RNA, 20 nt, Human
uccagcuccguguucuuccu

SEQ ID NO: 55081 - RNA, 22 nt, Human
uccagcugacacuuaaggggag

SEQ ID NO: 55082 - RNA, 22 nt, Human
uccagcugacaucuccugaggg

SEQ ID NO: 55083 - RNA, 22 nt, Human
uccagcuggcccggccaugaau

SEQ ID NO: 55084 - RNA, 22 nt, Human
uccagcuggcuucggaagugga

SEQ ID NO: 55085 - RNA, 20 nt, Human
uccagcugggaacagcugau

SEQ ID NO: 55086 - RNA, 22 nt, Human
uccagcuggggccgaaguggau

SEQ ID NO: 55087 - RNA, 18 nt, Human
uccagcuugcacuuaaau

SEQ ID NO: 55088 - RNA, 22 nt, Human
uccagcuugccuggucuuuugg

SEQ ID NO: 55089 - RNA, 22 nt, Human
uccagcuuuggcucuagcuaca

SEQ ID NO: 55090 - RNA, 22 nt, Human
uccaggaaacacucaagccaug

SEQ ID NO: 55091 - RNA, 22 nt, Human
uccaggaaacagcaucucagca

SEQ ID NO: 55092 - RNA, 22 nt, Human
uccaggaaaucauaaauugcuu

SEQ ID NO: 55093 - RNA, 22 nt, Human
uccaggaacugaagccaggugu

SEQ ID NO: 55094 - RNA, 22 nt, Human
uccaggaagagguguguuggga

SEQ ID NO: 55095 - RNA, 22 nt, Human
uccaggaagcaguguuuggagc

SEQ ID NO: 55096 - RNA, 22 nt, Human
uccaggaauagucauguuuuag

SEQ ID NO: 55097 - RNA, 20 nt, Human
uccaggaaugguagaggacu

SEQ ID NO: 55098 - RNA, 22 nt, Human
uccaggaauuuccccuuuccug

SEQ ID NO: 55099 - RNA, 22 nt, Human
uccaggacagcggcaggcagau

SEQ ID NO: 55100 - RNA, 22 nt, Human
uccaggacugguucacacggug

SEQ ID NO: 55101 - RNA, 22 nt, Human
uccaggacuuagugaccuaaaa

SEQ ID NO: 55102 - RNA, 22 nt, Human
uccaggacuuggcaggagauga

SEQ ID NO: 55103 - RNA, 22 nt, Human
uccaggagaaaacugacggugg

SEQ ID NO: 55104 - RNA, 22 nt, Human
uccaggagaccagauguaggcc

SEQ ID NO: 55105 - RNA, 22 nt, Human
uccaggaggaggaaggcugcca

SEQ ID NO: 55106 - RNA, 22 nt, Human
uccaggaggccucauuuccugu

SEQ ID NO: 55107 - RNA, 22 nt, Human
uccaggaggcucugguugacgu

SEQ ID NO: 55108 - RNA, 22 nt, Human
uccaggagggauugggcugugg

SEQ ID NO: 55109 - RNA, 22 nt, Human
uccaggagggguaggcaguaug

SEQ ID NO: 55110 - RNA, 22 nt, Human
uccaggaguccuggguggcccc

SEQ ID NO: 55111 - RNA, 22 nt, Human
uccaggagugauaaggccacug

SEQ ID NO: 55112 - RNA, 22 nt, Human
uccaggagugugugcuaauggg

SEQ ID NO: 55113 - RNA, 22 nt, Human
uccaggcaaggauaauaaacau

SEQ ID NO: 55114 - RNA, 22 nt, Human
uccaggcaagggaggagcaugg

SEQ ID NO: 55115 - RNA, 22 nt, Human
uccaggcacgaggcccugugca

SEQ ID NO: 55116 - RNA, 23 nt, Human
uccaggcacgcauuucuucuagc

SEQ ID NO: 55117 - RNA, 22 nt, Human
uccaggcacuauauauacuuuu

SEQ ID NO: 55118 - RNA, 22 nt, Human
uccaggcagagcaacaaaauau

SEQ ID NO: 55119 - RNA, 22 nt, Human
uccucuuucucaacauuaguua

SEQ ID NO: 55120 - RNA, 19 nt, Human
uccugaaaacuucuggaau

SEQ ID NO: 55121 - RNA, 22 nt, Human
uccugaaauucugguugucacu

SEQ ID NO: 55122 - RNA, 22 nt, Human
uccugaagcucucuuaaggaaa

SEQ ID NO: 55123 - RNA, 22 nt, Human
uccugaaggccugaguuccacc

SEQ ID NO: 55124 - RNA, 22 nt, Human
uccugaagucacaggcucugag

SEQ ID NO: 55125 - RNA, 22 nt, Human
uccugaauuccucuuugcaucc

SEQ ID NO: 55126 - RNA, 22 nt, Human
uccugaauugaacucaguuaau

SEQ ID NO: 55127 - RNA, 22 nt, Human
uccugaauuguugagaagcagc

SEQ ID NO: 55128 - RNA, 22 nt, Human
uccugaccauuccuugucucca

SEQ ID NO: 55129 - RNA, 22 nt, Human
uccugaccucuugcucugaccu

SEQ ID NO: 55130 - RNA, 22 nt, Human
uccugacuccagguccugugug

SEQ ID NO: 55131 - RNA, 22 nt, Human
uccugacuuggcuguuggcccu

SEQ ID NO: 55132 - RNA, 22 nt, Human
uccugagaaggcacagcuugca

SEQ ID NO: 55133 - RNA, 22 nt, Human
uccugagaauagaguugcaugu

SEQ ID NO: 55134 - RNA, 22 nt, Human
uccugagagcagcugcuuugga

SEQ ID NO: 55135 - RNA, 20 nt, Human
uccugagaggcucuuggaga

SEQ ID NO: 55136 - RNA, 22 nt, Human
uccugagaggugugaggugcag

SEQ ID NO: 55137 - RNA, 22 nt, Human
uccugagauaaaucucauguga

SEQ ID NO: 55138 - RNA, 22 nt, Human
uccugagauccuuuuagggauc

SEQ ID NO: 55139 - RNA, 22 nt, Human
uccugagaugagacagugcugc

SEQ ID NO: 55140 - RNA, 23 nt, Human
uccugagaugagacagugcugcc

SEQ ID NO: 55141 - RNA, 20 nt, Human
uccugagauuuaagggguuc

SEQ ID NO: 55142 - RNA, 22 nt, Human
uccugagcaccuaugccauggc

SEQ ID NO: 55143 - RNA, 22 nt, Human
uccugagcccuguaggacccug

SEQ ID NO: 55144 - RNA, 22 nt, Human
uccugagcugacacuuggggag

SEQ ID NO: 55145 - RNA, 22 nt, Human
uccugaggaaugugaagagaac

SEQ ID NO: 55146 - RNA, 22 nt, Human
uccugagggacugguuccucgc

SEQ ID NO: 55147 - RNA, 22 nt, Human
uccugagggcgauucagcaggu

SEQ ID NO: 55148 - RNA, 22 nt, Human
uccugagggcucggggcucaug

SEQ ID NO: 55149 - RNA, 23 nt, Human
uccugaggguuucccagccuugg

SEQ ID NO: 55150 - RNA, 22 nt, Human
uccugagguuuuaaaacuauuc

SEQ ID NO: 55151 - RNA, 22 nt, Human
uccugaugauauugcucuuucu

SEQ ID NO: 55152 - RNA, 22 nt, Human
uccugauuagguuuccauagcu

SEQ ID NO: 55153 - RNA, 20 nt, Human
uccugcaaaaggacaaguuu

SEQ ID NO: 55154 - RNA, 22 nt, Human
uccugcacaccuugagcuugga

SEQ ID NO: 55155 - RNA, 22 nt, Human
uccugcacauuaguauuuuuua

SEQ ID NO: 55156 - RNA, 22 nt, Human
uccugcagcugauaaauacagu

SEQ ID NO: 55157 - RNA, 21 nt, Human
uccugcaggaggccugagagg

SEQ ID NO: 55158 - RNA, 22 nt, Human
uccugcaggggcugaggaacca

SEQ ID NO: 55159 - RNA, 22 nt, Human
uccugccaccggggguggcgau

SEQ ID NO: 55160 - RNA, 22 nt, Human
uccugccaccugcacagcuccc

SEQ ID NO: 55161 - RNA, 22 nt, Human
uccugccagcuggggcugcuuc

SEQ ID NO: 55162 - RNA, 22 nt, Human
uccugccucuugccuucuucac

SEQ ID NO: 55163 - RNA, 22 nt, Human
uccugcgagugcgcuuuugguc

SEQ ID NO: 55164 - RNA, 22 nt, Human
uccugcuagagaauaacagcac

SEQ ID NO: 55165 - RNA, 22 nt, Human
uccugcugccauuucaagugcu

SEQ ID NO: 55166 - RNA, 22 nt, Human
ugucacaauaucccaaucugcc

SEQ ID NO: 55167 - RNA, 22 nt, Human
ugucacaauuuauuucucuuga

SEQ ID NO: 55168 - RNA, 22 nt, Human
ugucacacugaccacaucugua

SEQ ID NO: 55169 - RNA, 22 nt, Human
ugucacagagcgugcaacagaa

SEQ ID NO: 55170 - RNA, 22 nt, Human
ugucacagucucgugagcaucu

SEQ ID NO: 55171 - RNA, 22 nt, Human
ugucacauauauaauguucaau

SEQ ID NO: 55172 - RNA, 21 nt, Human
ugucacauguggaugguauuu

SEQ ID NO: 55173 - RNA, 22 nt, Human
ugucacauguguggcauuuuuc

SEQ ID NO: 55174 - RNA, 21 nt, Human
ugucacauugucccugcugcu

SEQ ID NO: 55175 - RNA, 22 nt, Human
ugucaccacuggcugaaacacc

SEQ ID NO: 55176 - RNA, 22 nt, Human
ugucaccaugcgaggcuaauuu

SEQ ID NO: 55177 - RNA, 19 nt, Human
ugucaccuucugucaguuu

SEQ ID NO: 55178 - RNA, 22 nt, Human
ugucaccuugaugauggccuag

SEQ ID NO: 55179 - RNA, 22 nt, Human
ugucaccuuuacccuuuuauag

SEQ ID NO: 55180 - RNA, 22 nt, Human
ugucacuacaucauaaauauau

SEQ ID NO: 55181 - RNA, 22 nt, Human
ugucacucaaguuccaauuuac

SEQ ID NO: 55182 - RNA, 19 nt, Human
ugucacugucauggcccag

SEQ ID NO: 55183 - RNA, 22 nt, Human
ugucagaccugugauuucagca

SEQ ID NO: 55184 - RNA, 22 nt, Human
ugucagagcaaugagguucagc

SEQ ID NO: 55185 - RNA, 20 nt, Human
ugucagauaacuagcuguua

SEQ ID NO: 55186 - RNA, 22 nt, Human
ugucagaugugucuccaagugc

SEQ ID NO: 55187 - RNA, 22 nt, Human
ugucagcagaucuccugcagcc

SEQ ID NO: 55188 - RNA, 22 nt, Human
ugucagcaguaucucuaucuca

SEQ ID NO: 55189 - RNA, 22 nt, Human
ugucagcaguuuuuaguggagg

SEQ ID NO: 55190 - RNA, 22 nt, Human
ugucagcaucauuuguugaagg

SEQ ID NO: 55191 - RNA, 22 nt, Human
ugucagcauugaugaaaugugg

SEQ ID NO: 55192 - RNA, 22 nt, Human
ugucagccuugcuuuagcgguu

SEQ ID NO: 55193 - RNA, 22 nt, Human
ugucaggacacagcuuucugug

SEQ ID NO: 55194 - RNA, 22 nt, Human
ugucaggagccaccagcacucc

SEQ ID NO: 55195 - RNA, 22 nt, Human
ugucagggauuuaaagacacaa

SEQ ID NO: 55196 - RNA, 19 nt, Human
ugucaggggugugcugugc

SEQ ID NO: 55197 - RNA, 22 nt, Human
ugucagguugguuuucagagaa

SEQ ID NO: 55198 - RNA, 18 nt, Human
ugucaguaaagugacaga

SEQ ID NO: 55199 - RNA, 19 nt, Human
ugucaguaguugucuaggg

SEQ ID NO: 55200 - RNA, 22 nt, Human
ugucagugaacuggaaggccug

SEQ ID NO: 55201 - RNA, 22 nt, Human
ugucagugaccuagcacggugc

SEQ ID NO: 55202 - RNA, 22 nt, Human
ugucagugaguuaguugcaagu

SEQ ID NO: 55203 - RNA, 22 nt, Human
ugucagugguaagguugggagu

SEQ ID NO: 55204 - RNA, 22 nt, Human
ugucagugguagacccagaggu

SEQ ID NO: 55205 - RNA, 22 nt, Human
ugucaguguauacauacaguau

SEQ ID NO: 55206 - RNA, 22 nt, Human
ugucaguguuuuaugugcccuu

SEQ ID NO: 55207 - RNA, 21 nt, Human
ugucaguuauaaucaccacag

SEQ ID NO: 55208 - RNA, 22 nt, Human
ugucaguucucacuuacauaaa

SEQ ID NO: 55209 - RNA, 22 nt, Human
ugucauaaaacacaagcuguug

SEQ ID NO: 55210 - RNA, 22 nt, Human
ugucauacaugcuugagcuaca

SEQ ID NO: 55211 - RNA, 22 nt, Human
ugucauaugcugucauagccau

SEQ ID NO: 55212 - RNA, 22 nt, Human
ugucauauguugaugaaagaga

SEQ ID NO: 55213 - RNA, 23 nt, Human
ugucaucuccagacucccagugc

SEQ ID NO: 55214 - RNA, 22 nt, Human
ugucaucugaauuucucaucac

SEQ ID NO: 55215 - RNA, 22 nt, Human
ugucaucugcggguggcacugc

SEQ ID NO: 55216 - RNA, 22 nt, Human
ugucaucuuguccagccaggca

SEQ ID NO: 55217 - RNA, 22 nt, Human
ugucaugaguuauuucauagga

SEQ ID NO: 55218 - RNA, 22 nt, Human
ugucaugccaccguuucccaga

SEQ ID NO: 55219 - RNA, 22 nt, Human
ugucaugcccaggagcaaggua

SEQ ID NO: 55220 - RNA, 22 nt, Human
ugucaugcuuauguuacauacu

SEQ ID NO: 55221 - RNA, 22 nt, Human
ugucauggacuggauuucugcu

SEQ ID NO: 55222 - RNA, 22 nt, Human
ugucauggcugaaagugggggc

SEQ ID NO: 55223 - RNA, 22 nt, Human
ugucaugggcauuuauugaggg

SEQ ID NO: 55224 - RNA, 22 nt, Human
ugucaugguauuugugagcugc

SEQ ID NO: 55225 - RNA, 22 nt, Human
ugucauguguucuuaaauacau

SEQ ID NO: 55226 - RNA, 22 nt, Human
ugucauuaguuucagccauucu

SEQ ID NO: 55227 - RNA, 20 nt, Human
ugucauucuucuuucacagg

SEQ ID NO: 55228 - RNA, 22 nt, Human
uccugggcuugcuccuccagcu

SEQ ID NO: 55229 - RNA, 22 nt, Human
uccugggcuuuguuucucuccu

SEQ ID NO: 55230 - RNA, 22 nt, Human
uccuggggaggguucuggcucc

SEQ ID NO: 55231 - RNA, 22 nt, Human
uccuggggccagcacuggugga

SEQ ID NO: 55232 - RNA, 22 nt, Human
uccugggguccugacugcuucc

SEQ ID NO: 55233 - RNA, 22 nt, Human
uccuggguagagaccugaugaa

SEQ ID NO: 55234 - RNA, 22 nt, Human
uccuggguccauggcagccgaa

SEQ ID NO: 55235 - RNA, 22 nt, Human
uccugggugaaagaacaggcag

SEQ ID NO: 55236 - RNA, 23 nt, Human
uccuggguuugaauucuagucuu

SEQ ID NO: 55237 - RNA, 22 nt, Human
uccugguaggcuaugucauguc

SEQ ID NO: 55238 - RNA, 22 nt, Human
uccuggugaggacuccaagaua

SEQ ID NO: 55239 - RNA, 22 nt, Human
uccuggugcugacacccauagc

SEQ ID NO: 55240 - RNA, 19 nt, Human
uccuggugcuugacacuga

SEQ ID NO: 55241 - RNA, 18 nt, Human
uccugguggagaaguggu

SEQ ID NO: 55242 - RNA, 22 nt, Human
uccugguggugccagcugcagg

SEQ ID NO: 55243 - RNA, 22 nt, Human
uccugguguuacuaaauugaaa

SEQ ID NO: 55244 - RNA, 22 nt, Human
uccugguguuuaugucacauag

SEQ ID NO: 55245 - RNA, 20 nt, Human
uccuguccgcgccuugcguc

SEQ ID NO: 55246 - RNA, 23 nt, Human
uccugugaagccauguuuguugu

SEQ ID NO: 55247 - RNA, 22 nt, Human
uccugugacggagcgccagagg

SEQ ID NO: 55248 - RNA, 21 nt, Human
uccugugaggaccugucagug

SEQ ID NO: 55249 - RNA, 22 nt, Human
uccugugccuccaccugcuccg

SEQ ID NO: 55250 - RNA, 22 nt, Human
uccugugcuguuaauagugaua

SEQ ID NO: 55251 - RNA, 22 nt, Human
uccugugcuuuggaugcuuaga

SEQ ID NO: 55252 - RNA, 20 nt, Human
uccuguggacauugcuggcc

SEQ ID NO: 55253 - RNA, 22 nt, Human
uccuguggcguuaucaugugau

SEQ ID NO: 55254 - RNA, 22 nt, Human
uccuguggcucuguggaaccuu

SEQ ID NO: 55255 - RNA, 22 nt, Human
uccuguggcuuccacgaccuaa

SEQ ID NO: 55256 - RNA, 22 nt, Human
uccuguguuaaagggggugcua

SEQ ID NO: 55257 - RNA, 22 nt, Human
uccuguguuacccuugcaguga

SEQ ID NO: 55258 - RNA, 22 nt, Human
uccuguuuaucugugugacucg

SEQ ID NO: 55259 - RNA, 22 nt, Human
uccuuaaaggacuagaagucaa

SEQ ID NO: 55260 - RNA, 22 nt, Human
uccuuaaagugcaccuccucau

SEQ ID NO: 55261 - RNA, 22 nt, Human
uccuuaauaaguacuucauugu

SEQ ID NO: 55262 - RNA, 22 nt, Human
uccuuagcacccaccaaggacu

SEQ ID NO: 55263 - RNA, 22 nt, Human
uccuuagccagggcagcucaaa

SEQ ID NO: 55264 - RNA, 22 nt, Human
uccuuaggaaaaugaugagggg

SEQ ID NO: 55265 - RNA, 22 nt, Human
uccuuagggauuuuuccaguca

SEQ ID NO: 55266 - RNA, 22 nt, Human
uccuuagguauuuagcaugaau

SEQ ID NO: 55267 - RNA, 22 nt, Human
uccuuauagcccaagugaugga

SEQ ID NO: 55268 - RNA, 20 nt, Human
uccuucagacgacaagcaag

SEQ ID NO: 55269 - RNA, 22 nt, Human
uccuucagaggacggcagccag

SEQ ID NO: 55270 - RNA, 22 nt, Human
uccuucagcuacucaguuucca

SEQ ID NO: 55271 - RNA, 22 nt, Human
uccuucagcucucuauuuagau

SEQ ID NO: 55272 - RNA, 22 nt, Human
uccuucaggccucauucucaua

SEQ ID NO: 55273 - RNA, 22 nt, Human
uccuucaggguugaggccgacu

SEQ ID NO: 55274 - RNA, 19 nt, Human
uccuucagucagaucuggg

SEQ ID NO: 55275 - RNA, 21 nt, Human
uccuucaguucugcacuuucu

SEQ ID NO: 55276 - RNA, 22 nt, Human
uccuucccaggugucgccgccu

SEQ ID NO: 55277 - RNA, 22 nt, Human
uccuucccccucaagagaacuu

SEQ ID NO: 55278 - RNA, 22 nt, Human
uccuuccuuccugaaauuuuag

SEQ ID NO: 55279 - RNA, 22 nt, Human
uccuucugaaaaaugcacacga

SEQ ID NO: 55280 - RNA, 22 nt, Human
uccuucuuucaccucauaguca

SEQ ID NO: 55281 - RNA, 22 nt, Human
uccuucuuucccccuagucauu

SEQ ID NO: 55282 - RNA, 22 nt, Human
uccuucuuugacaaguggcaga

SEQ ID NO: 55283 - RNA, 22 nt, Human
uccuugacugugaggaacuagc

SEQ ID NO: 55284 - RNA, 22 nt, Human
ucuggcugggaagggggcccga

SEQ ID NO: 55285 - RNA, 22 nt, Human
ucuggcuguguaagguagcacc

SEQ ID NO: 55286 - RNA, 22 nt, Human
ucuggcuucaguaggguucacu

SEQ ID NO: 55287 - RNA, 23 nt, Human
ucuggcuuccaguggguucaacc

SEQ ID NO: 55288 - RNA, 22 nt, Human
ucuggcuucgcagcucccagcc

SEQ ID NO: 55289 - RNA, 22 nt, Human
ucuggcuugaacaauuagguaa

SEQ ID NO: 55290 - RNA, 22 nt, Human
ucuggcuuggcgcugcccucug

SEQ ID NO: 55291 - RNA, 22 nt, Human
ucuggcuuggguagguaguuca

SEQ ID NO: 55292 - RNA, 22 nt, Human
ucuggcuuuauuccuucacuga

SEQ ID NO: 55293 - RNA, 22 nt, Human
ucuggcuuuauuuucaucaucu

SEQ ID NO: 55294 - RNA, 21 nt, Human
ucuggcuuucauuccccuucu

SEQ ID NO: 55295 - RNA, 21 nt, Human
ucugggaaauugggaaagaag

SEQ ID NO: 55296 - RNA, 22 nt, Human
ucugggaacacacgucacuuca

SEQ ID NO: 55297 - RNA, 22 nt, Human
ucugggaacagcuuagcuccag

SEQ ID NO: 55298 - RNA, 22 nt, Human
ucugggaacauggcuuggaauc

SEQ ID NO: 55299 - RNA, 22 nt, Human
ucugggaagcugcgugccuguu

SEQ ID NO: 55300 - RNA, 22 nt, Human
ucugggaaguuggcagccagcu

SEQ ID NO: 55301 - RNA, 22 nt, Human
ucugggaaugaauaagaccugu

SEQ ID NO: 55302 - RNA, 22 nt, Human
ucugggaaugaggcccagcgau

SEQ ID NO: 55303 - RNA, 22 nt, Human
ucugggagaagcugaugugaag

SEQ ID NO: 55304 - RNA, 22 nt, Human
ucugggagacguguguugucag

SEQ ID NO: 55305 - RNA, 22 nt, Human
ucugggagagaguugauaaagg

SEQ ID NO: 55306 - RNA, 22 nt, Human
ucugggagagcugcugucagag

SEQ ID NO: 55307 - RNA, 22 nt, Human
ucugggagagucacaggcauug

SEQ ID NO: 55308 - RNA, 22 nt, Human
ucugggagagucuaacuuguuu

SEQ ID NO: 55309 - RNA, 22 nt, Human
ucugggagauccaagcagaacu

SEQ ID NO: 55310 - RNA, 22 nt, Human
ucugggagcagcucagcagauu

SEQ ID NO: 55311 - RNA, 20 nt, Human
ucugggagggacaagucucc

SEQ ID NO: 55312 - RNA, 22 nt, Human
ucugggaggucacauuggucuu

SEQ ID NO: 55313 - RNA, 22 nt, Human
ucugggaguaaggccuaggcau

SEQ ID NO: 55314 - RNA, 22 nt, Human
ucugggaguggguccaaggaau

SEQ ID NO: 55315 - RNA, 22 nt, Human
ucugggaguuucugugggagcu

SEQ ID NO: 55316 - RNA, 22 nt, Human
ucugggaugagaucagagacac

SEQ ID NO: 55317 - RNA, 22 nt, Human
ucugggcagccaugugccuggc

SEQ ID NO: 55318 - RNA, 22 nt, Human
ucugggcagccgccccauagga

SEQ ID NO: 55319 - RNA, 23 nt, Human
ucugggcauaucuagucacaucg

SEQ ID NO: 55320 - RNA, 22 nt, Human
ucugggccugucucagagcugg

SEQ ID NO: 55321 - RNA, 22 nt, Human
ucugggcucuuaguguacccuc

SEQ ID NO: 55322 - RNA, 15 nt, Human
ucugggcugugagca

SEQ ID NO: 55323 - RNA, 20 nt, Human
ucugggcuucccccagcucc

SEQ ID NO: 55324 - RNA, 18 nt, Human
ucugggcuucccgaggcu

SEQ ID NO: 55325 - RNA, 22 nt, Human
ucuggggaauguucauuucuga

SEQ ID NO: 55326 - RNA, 22 nt, Human
ucuggggacggggcccagcaau

SEQ ID NO: 55327 - RNA, 22 nt, Human
ucuggggagcagcccuggugag

SEQ ID NO: 55328 - RNA, 22 nt, Human
ucuggggagucaaagagaccug

SEQ ID NO: 55329 - RNA, 22 nt, Human
ucuggggaugagugaugucgua

SEQ ID NO: 55330 - RNA, 22 nt, Human
ucugggguuggugcuuacacca

SEQ ID NO: 55331 - RNA, 22 nt, Human
ucuggguccgggacuguggaug

SEQ ID NO: 55332 - RNA, 22 nt, Human
ucuggguccgggggugaauuga

SEQ ID NO: 55333 - RNA, 22 nt, Human
ucugggugagcugccucggguc

SEQ ID NO: 55334 - RNA, 22 nt, Human
ucugggugccacugucuguaca

SEQ ID NO: 55335 - RNA, 21 nt, Human
ucuggguguaaaucuuauuug

SEQ ID NO: 55336 - RNA, 22 nt, Human
ucuggguguagggccuggcaac

SEQ ID NO: 55337 - RNA, 22 nt, Human
uccugcagagccgcccucaggu

SEQ ID NO: 55338 - RNA, 22 nt, Human
uccugcagcauccgucgucugu

SEQ ID NO: 55339 - RNA, 22 nt, Human
uccugcagccauuagaggucaa

SEQ ID NO: 55340 - RNA, 22 nt, Human
uccugcagccuugggcuggagc

SEQ ID NO: 55341 - RNA, 22 nt, Human
uccugcagcucugagaagcauc

SEQ ID NO: 55342 - RNA, 18 nt, Human
uccugcagcuucuaugua

SEQ ID NO: 55343 - RNA, 22 nt, Human
uccugcaggccagaggggugag

SEQ ID NO: 55344 - RNA, 22 nt, Human
uccugcagguggaugauucucu

SEQ ID NO: 55345 - RNA, 19 nt, Human
uccugcagguggcuugcag

SEQ ID NO: 55346 - RNA, 22 nt, Human
uccugcagugugucuccugcac

SEQ ID NO: 55347 - RNA, 22 nt, Human
uccugcaguuacaucccagcca

SEQ ID NO: 55348 - RNA, 20 nt, Human
uccugcaguuccuaggaggg

SEQ ID NO: 55349 - RNA, 22 nt, Human
uccugccaggagugcuggcccu

SEQ ID NO: 55350 - RNA, 22 nt, Human
uccugcccagagcucuccacuc

SEQ ID NO: 55351 - RNA, 18 nt, Human
uccugccugcgggcuccc

SEQ ID NO: 55352 - RNA, 18 nt, Human
uccugccugugccccagg

SEQ ID NO: 55353 - RNA, 22 nt, Human
uccugccuugccugggacauca

SEQ ID NO: 55354 - RNA, 22 nt, Human
uccugcgguucaugcucauucu

SEQ ID NO: 55355 - RNA, 23 nt, Human
uccugcugaaagcuccagcuggc

SEQ ID NO: 55356 - RNA, 22 nt, Human
uccugcuggaaacuuccucuug

SEQ ID NO: 55357 - RNA, 22 nt, Human
uccugcuuaacauauggucaag

SEQ ID NO: 55358 - RNA, 20 nt, Human
uccugcuuccaccagagcac

SEQ ID NO: 55359 - RNA, 22 nt, Human
uccugcuuccuugucuuuagac

SEQ ID NO: 55360 - RNA, 19 nt, Human
uccugcuuucuacucugcu

SEQ ID NO: 55361 - RNA, 22 nt, Human
uccuggacaagcccuucacccu

SEQ ID NO: 55362 - RNA, 22 nt, Human
uccuggagaaacucagagaucu

SEQ ID NO: 55363 - RNA, 22 nt, Human
uccuggagagaggccuggaaga

SEQ ID NO: 55364 - RNA, 22 nt, Human
uccuggagagugggcgagcaca

SEQ ID NO: 55365 - RNA, 22 nt, Human
uccuggaggaauaaguuuucca

SEQ ID NO: 55366 - RNA, 22 nt, Human
uccuggaggagauccaaucuga

SEQ ID NO: 55367 - RNA, 22 nt, Human
uccuggaggcaaaugaagacuc

SEQ ID NO: 55368 - RNA, 22 nt, Human
uccuggaggcaaaugagcacau

SEQ ID NO: 55369 - RNA, 22 nt, Human
uccuggaggcacucgcuggggc

SEQ ID NO: 55370 - RNA, 22 nt, Human
uccuggaguaggccuuagccau

SEQ ID NO: 55371 - RNA, 20 nt, Human
uccuggagucugguuuggcu

SEQ ID NO: 55372 - RNA, 22 nt, Human
uccuggaguugucuguacucau

SEQ ID NO: 55373 - RNA, 17 nt, Human
uccuggauccauggugg

SEQ ID NO: 55374 - RNA, 22 nt, Human
uccuggauggccugcaggcggu

SEQ ID NO: 55375 - RNA, 22 nt, Human
uccuggauuuaacccuggcucu

SEQ ID NO: 55376 - RNA, 22 nt, Human
uccuggauuuagaagagccucc

SEQ ID NO: 55377 - RNA, 22 nt, Human
uccuggcacaacccuuuaccag

SEQ ID NO: 55378 - RNA, 22 nt, Human
uccuggcagagagcaugaggcc

SEQ ID NO: 55379 - RNA, 22 nt, Human
uccuggcagggaacuugucagc

SEQ ID NO: 55380 - RNA, 17 nt, Human
uccuggcaguccccugg

SEQ ID NO: 55381 - RNA, 22 nt, Human
uccuggcagugcuuguuuugga

SEQ ID NO: 55382 - RNA, 22 nt, Human
uccuggcaguucagcccccuaa

SEQ ID NO: 55383 - RNA, 22 nt, Human
uccuggcauaauggcuuugcuc

SEQ ID NO: 55384 - RNA, 22 nt, Human
uccuggccagaggacaaagcug

SEQ ID NO: 55385 - RNA, 22 nt, Human
uccuggccauaggcuauuucag

SEQ ID NO: 55386 - RNA, 22 nt, Human
uccuggcccgaucccugugaag

SEQ ID NO: 55387 - RNA, 22 nt, Human
uccuggcccggccgggccugcu

SEQ ID NO: 55388 - RNA, 22 nt, Human
uccuggccuccguucucugcau

SEQ ID NO: 55389 - RNA, 22 nt, Human
uccuggcuaacacggugacacc

SEQ ID NO: 55390 - RNA, 22 nt, Human
uccuggcuaguuuugcugaaau

SEQ ID NO: 55391 - RNA, 22 nt, Human
uccuggcucaggccccuggugc

SEQ ID NO: 55392 - RNA, 22 nt, Human
uccuggcuccagcagcucuucc

SEQ ID NO: 55393 - RNA, 17 nt, Human
uccuggcucugccacug

SEQ ID NO: 55394 - RNA, 22 nt, Human
uccuggcucugcugccuccuag

SEQ ID NO: 55395 - RNA, 22 nt, Human
uccuggcugcaccagugacccu

SEQ ID NO: 55396 - RNA, 22 nt, Human
uccuggcugccgucguccugcg

SEQ ID NO: 55397 - RNA, 22 nt, Human
uccuggcuuccugcucuuguca

SEQ ID NO: 55398 - RNA, 21 nt, Human
uccuggcuuuaugcuaccucu

SEQ ID NO: 55399 - RNA, 22 nt, Human
uccuggcuuuucuuggcucauc

SEQ ID NO: 55400 - RNA, 22 nt, Human
ugugaggaguaggcugagggug

SEQ ID NO: 55401 - RNA, 22 nt, Human
ugugaggauggaguucuacagg

SEQ ID NO: 55402 - RNA, 22 nt, Human
ugugaggaugugagcgugaacc

SEQ ID NO: 55403 - RNA, 22 nt, Human
ugugaggccucugcaggagcag

SEQ ID NO: 55404 - RNA, 22 nt, Human
ugugagguaacgcugcucuguu

SEQ ID NO: 55405 - RNA, 22 nt, Human
ugugaguaauaaagucauuuuu

SEQ ID NO: 55406 - RNA, 22 nt, Human
ugugaguacugcuauuuauaua

SEQ ID NO: 55407 - RNA, 22 nt, Human
ugugaguuauuuucaggaguuu

SEQ ID NO: 55408 - RNA, 22 nt, Human
ugugaucacaucugggcugaag

SEQ ID NO: 55409 - RNA, 22 nt, Human
ugugaucucuauaggauucaau

SEQ ID NO: 55410 - RNA, 22 nt, Human
ugugaugucagugguaucaaag

SEQ ID NO: 55411 - RNA, 22 nt, Human
ugugauuauuugauuaacaugu

SEQ ID NO: 55412 - RNA, 22 nt, Human
ugugauuucaucugaggccagg

SEQ ID NO: 55413 - RNA, 22 nt, Human
ugugcaaaauaauaaaucacug

SEQ ID NO: 55414 - RNA, 22 nt, Human
ugugcaaaguguacaaauuaau

SEQ ID NO: 55415 - RNA, 22 nt, Human
ugugcaaauuaaguagauuuuc

SEQ ID NO: 55416 - RNA, 22 nt, Human
ugugcaaucuugagcaauuuau

SEQ ID NO: 55417 - RNA, 22 nt, Human
ugugcaauuucaauuuacacag

SEQ ID NO: 55418 - RNA, 22 nt, Human
ugugcagaaacugggaaggaag

SEQ ID NO: 55419 - RNA, 22 nt, Human
ugugcagagaagccacuggggg

SEQ ID NO: 55420 - RNA, 22 nt, Human
ugugcagcaaaauagaaucuuu

SEQ ID NO: 55421 - RNA, 22 nt, Human
ugugcagugugaccagggcugc

SEQ ID NO: 55422 - RNA, 22 nt, Human
ugugcaguucaaacccguguug

SEQ ID NO: 55423 - RNA, 20 nt, Human
ugugcaugaacugagggauu

SEQ ID NO: 55424 - RNA, 22 nt, Human
ugugcauguaccuuauucugga

SEQ ID NO: 55425 - RNA, 22 nt, Human
ugugcaugucugggccuguaag

SEQ ID NO: 55426 - RNA, 22 nt, Human
ugugccagaaaauaugcugagg

SEQ ID NO: 55427 - RNA, 22 nt, Human
ugugccagaauguuuuuauaca

SEQ ID NO: 55428 - RNA, 22 nt, Human
ugugccagugccuuggguauua

SEQ ID NO: 55429 - RNA, 20 nt, Human
ugugcccaauguccagguuc

SEQ ID NO: 55430 - RNA, 22 nt, Human
ugugcccagacugccucaguga

SEQ ID NO: 55431 - RNA, 22 nt, Human
ugugcccaucccucuggagugu

SEQ ID NO: 55432 - RNA, 22 nt, Human
ugugccuacugauagagccaag

SEQ ID NO: 55433 - RNA, 22 nt, Human
ugugccucauguaucuggauga

SEQ ID NO: 55434 - RNA, 22 nt, Human
ugugccugucccgcauucuggu

SEQ ID NO: 55435 - RNA, 22 nt, Human
ugugccuucucaguccugcuca

SEQ ID NO: 55436 - RNA, 22 nt, Human
ugugcgcguguauauauguaua

SEQ ID NO: 55437 - RNA, 22 nt, Human
ugugcgcuccggcgagucagcg

SEQ ID NO: 55438 - RNA, 23 nt, Human
ugugcgugaugcuuuguugaagg

SEQ ID NO: 55439 - RNA, 22 nt, Human
ugugcgugauggaccgggccug

SEQ ID NO: 55440 - RNA, 22 nt, Human
ugugcgugguucccggggccau

SEQ ID NO: 55441 - RNA, 22 nt, Human
ugugcucagucuuuggcuggga

SEQ ID NO: 55442 - RNA, 23 nt, Human
ugugcucccaaauguaggucuau

SEQ ID NO: 55443 - RNA, 22 nt, Human
ugugcucugcaaucaguucuuu

SEQ ID NO: 55444 - RNA, 22 nt, Human
ugugcucugccccugacuguuu

SEQ ID NO: 55445 - RNA, 22 nt, Human
ugugcucuguggaucugagcaa

SEQ ID NO: 55446 - RNA, 22 nt, Human
uguguccugugaucucuagggu

SEQ ID NO: 55447 - RNA, 22 nt, Human
uguguccuuucuaaugcccaga

SEQ ID NO: 55448 - RNA, 23 nt, Human
ugugucugaggauauaugugcau

SEQ ID NO: 55449 - RNA, 20 nt, Human
ugugucuuccuuucuuuaug

SEQ ID NO: 55450 - RNA, 22 nt, Human
ugugugaacucucugauguaca

SEQ ID NO: 55451 - RNA, 22 nt, Human
ugugugaaggagccacuguuca

SEQ ID NO: 55452 - RNA, 22 nt, Human
ugugugaauggauuauucuauu

SEQ ID NO: 55453 - RNA, 20 nt, Human
ugugugaauuagggcauguu

SEQ ID NO: 55454 - RNA, 22 nt, Human
ugugugacacauugauaugugc

SEQ ID NO: 55455 - RNA, 22 nt, Human
ugugugaccuggggugagauag

SEQ ID NO: 55456 - RNA, 21 nt, Human
ugugugaccuuggacuugagc

SEQ ID NO: 55457 - RNA, 22 nt, Human
ugugugcacugccuuuugugga

SEQ ID NO: 55458 - RNA, 22 nt, Human
ugugugcagccucugucuuugg

SEQ ID NO: 55459 - RNA, 22 nt, Human
ugugugcaugcuuggggcagca

SEQ ID NO: 55460 - RNA, 22 nt, Human
ugugugcauuagcauucuaggg

SEQ ID NO: 55461 - RNA, 22 nt, Human
ugugugccagccuacgaggagc

SEQ ID NO: 55462 - RNA, 22 nt, Human
ugugugcuuaagggcugaaccu

SEQ ID NO: 55463 - RNA, 22 nt, Human
ugugugcuuauagucuaguagu

SEQ ID NO: 55464 - RNA, 22 nt, Human
uguguggccuccauaggguacu

SEQ ID NO: 55465 - RNA, 22 nt, Human
uguguggugaagcagagaugcu

SEQ ID NO: 55466 - RNA, 22 nt, Human
uguguguagaaagggcccuggu

SEQ ID NO: 55467 - RNA, 22 nt, Human
uguguguccuugaccucagugg

SEQ ID NO: 55468 - RNA, 22 nt, Human
ugugugugggcggaacggcccc

SEQ ID NO: 55469 - RNA, 20 nt, Human
uguguguguacuucuaaaua

SEQ ID NO: 55470 - RNA, 23 nt, Human
uguguguguauucuacgcaaggu

SEQ ID NO: 55471 - RNA, 22 nt, Human
uguguguuaucuuaguucaucu

SEQ ID NO: 55472 - RNA, 19 nt, Human
uguguguuuauauauguau

SEQ ID NO: 55473 - RNA, 22 nt, Human
uguguuauugccacugaagacc

SEQ ID NO: 55474 - RNA, 22 nt, Human
uguguucaaucaccaaagguau

SEQ ID NO: 55475 - RNA, 22 nt, Human
uguguucaaucccuagucucag

SEQ ID NO: 55476 - RNA, 22 nt, Human
uguguucaaugacuucaucuuu

SEQ ID NO: 55477 - RNA, 22 nt, Human
uguguucacccuagcacuuaac

SEQ ID NO: 55478 - RNA, 22 nt, Human
uguguucagaauuugcugcuuu

SEQ ID NO: 55479 - RNA, 19 nt, Human
uguguucauucaucagagg

SEQ ID NO: 55480 - RNA, 22 nt, Human
uguguucauuuaacuguucuuu

SEQ ID NO: 55481 - RNA, 22 nt, Human
uguguucuaugguucagggugg

SEQ ID NO: 55482 - RNA, 23 nt, Human
uguguucucacacagaugcagua

SEQ ID NO: 55483 - RNA, 22 nt, Human
uguguucuccaacuguagauuu

SEQ ID NO: 55484 - RNA, 22 nt, Human
uguguuggaaauagggucuuug

SEQ ID NO: 55485 - RNA, 22 nt, Human
uguguuggcugccggcacagga

SEQ ID NO: 55486 - RNA, 22 nt, Human
uguguugguagaucugaggucu

SEQ ID NO: 55487 - RNA, 22 nt, Human
uguguugugucaccuaucaugc

SEQ ID NO: 55488 - RNA, 22 nt, Human
uguguuuaaagaggaagugaga

SEQ ID NO: 55489 - RNA, 22 nt, Human
uguguuucucugaggggucccu

SEQ ID NO: 55490 - RNA, 22 nt, Human
uguguuucugagaaucccaccu

SEQ ID NO: 55491 - RNA, 21 nt, Human
uguguuugagacuauguuucc

SEQ ID NO: 55492 - RNA, 22 nt, Human
uguguuugaggcauguugcaga

SEQ ID NO: 55493 - RNA, 22 nt, Human
uguguuuuacaaauucucuuaa

SEQ ID NO: 55494 - RNA, 22 nt, Human
uguguuuugaacucaucuacug

SEQ ID NO: 55495 - RNA, 22 nt, Human
uguguuuuggaaggaacaugca

SEQ ID NO: 55496 - RNA, 22 nt, Human
uguuaaaaauucagcucuagau

SEQ ID NO: 55497 - RNA, 22 nt, Human
uguuaaacagauauugcccaca

SEQ ID NO: 55498 - RNA, 22 nt, Human
uguuaaaccuaguacagguccu

SEQ ID NO: 55499 - RNA, 22 nt, Human
uguuaaacuguauugcauaagg

SEQ ID NO: 55500 - RNA, 22 nt, Human
uguuaaaguggauaagcugaau

SEQ ID NO: 55501 - RNA, 22 nt, Human
uguuaaauguauuauguguucu

SEQ ID NO: 55502 - RNA, 22 nt, Human
uguuaacagguaacugaggcug

SEQ ID NO: 55503 - RNA, 22 nt, Human
uguuaaucaaucaacaguauua

SEQ ID NO: 55504 - RNA, 22 nt, Human
uguuacagaaauauugcuucuu

SEQ ID NO: 55505 - RNA, 22 nt, Human
uguuacaguacuacaauucugc

SEQ ID NO: 55506 - RNA, 22 nt, Human
uguuacagugacuaauguuuua

SEQ ID NO: 55507 - RNA, 22 nt, Human
uguuacucugggguugugguga

SEQ ID NO: 55508 - RNA, 22 nt, Human
uguuacugugguuaccagaagc

SEQ ID NO: 55509 - RNA, 22 nt, Human
uguuacuuggugucucuggcug

SEQ ID NO: 55510 - RNA, 22 nt, Human
uguuagaaauuauuaguaauau

SEQ ID NO: 55511 - RNA, 22 nt, Human
uguuagauauucauuaauagga

SEQ ID NO: 55512 - RNA, 22 nt, Human
uguuagcagagcagcugacaga

SEQ ID NO: 55513 - RNA, 22 nt, Human
uguuaucucagacugaguuacu

SEQ ID NO: 55514 - RNA, 22 nt, Human
uguuaucugcacguagaguuuu

SEQ ID NO: 55515 - RNA, 22 nt, Human
uguuaugaguccucauauacua

SEQ ID NO: 55516 - RNA, 22 nt, Human
uguuauucuaguggaucacguc

SEQ ID NO: 55517 - RNA, 22 nt, Human
uguuauugauaucuaaugcucu

SEQ ID NO: 55518 - RNA, 18 nt, Human
ucuauauggacauagaga

SEQ ID NO: 55519 - RNA, 22 nt, Human
ucuauauuuugaaagguauuua

SEQ ID NO: 55520 - RNA, 22 nt, Human
ucuaugaaaagucuauucauuc

SEQ ID NO: 55521 - RNA, 22 nt, Human
ucuaugaaccucugcaaugaca

SEQ ID NO: 55522 - RNA, 22 nt, Human
ucuaugaaguucagagaucuau

SEQ ID NO: 55523 - RNA, 22 nt, Human
ucuauguccuuucucccauucc

SEQ ID NO: 55524 - RNA, 22 nt, Human
ucuauuacuuaccacuaauuca

SEQ ID NO: 55525 - RNA, 21 nt, Human
ucuauucauuacaguuauuug

SEQ ID NO: 55526 - RNA, 22 nt, Human
ucuauucauucaauuuagcucu

SEQ ID NO: 55527 - RNA, 22 nt, Human
ucuauucugauaaaugcaugga

SEQ ID NO: 55528 - RNA, 22 nt, Human
ucuauuuacagaaagcagaauu

SEQ ID NO: 55529 - RNA, 22 nt, Human
ucuauuuaccaaauguaguucc

SEQ ID NO: 55530 - RNA, 22 nt, Human
ucuauuugcugguugcuucugu

SEQ ID NO: 55531 - RNA, 22 nt, Human
ucuauuuguucucaggaucauc

SEQ ID NO: 55532 - RNA, 22 nt, Human
ucucaaacuguguauuauaauu

SEQ ID NO: 55533 - RNA, 22 nt, Human
ucucaaauaggccuugguccug

SEQ ID NO: 55534 - RNA, 23 nt, Human
ucucaaauaugaucugggucauc

SEQ ID NO: 55535 - RNA, 23 nt, Human
ucucaaaucuuugcguuguaucu

SEQ ID NO: 55536 - RNA, 22 nt, Human
ucucaaauucccuuuuccuccu

SEQ ID NO: 55537 - RNA, 23 nt, Human
ucucaagccagaccaggccucgc

SEQ ID NO: 55538 - RNA, 22 nt, Human
ucucaagcuaguguuuauagua

SEQ ID NO: 55539 - RNA, 22 nt, Human
ucucaagcuuguugguauguuu

SEQ ID NO: 55540 - RNA, 22 nt, Human
ucucaaggacuuugggcacuaa

SEQ ID NO: 55541 - RNA, 18 nt, Human
ucucaaucgcugcagucu

SEQ ID NO: 55542 - RNA, 19 nt, Human
ucucaauguucagaaagcu

SEQ ID NO: 55543 - RNA, 22 nt, Human
ucucacaagcucaaggauuagu

SEQ ID NO: 55544 - RNA, 21 nt, Human
ucucacaauaugaugccagau

SEQ ID NO: 55545 - RNA, 22 nt, Human
ucucacacuucuguguugcaca

SEQ ID NO: 55546 - RNA, 22 nt, Human
ucucacagaucagcagggggcu

SEQ ID NO: 55547 - RNA, 23 nt, Human
ucucacagcgaucuaggaagagg

SEQ ID NO: 55548 - RNA, 22 nt, Human
ucucacagggcuaggcccugcc

SEQ ID NO: 55549 - RNA, 22 nt, Human
ucucacagugagccugaggucg

SEQ ID NO: 55550 - RNA, 22 nt, Human
ucucaccaaagccuugaccaua

SEQ ID NO: 55551 - RNA, 22 nt, Human
ucucacccaacgugcaaugagu

SEQ ID NO: 55552 - RNA, 22 nt, Human
ucucacugauuugagaccaagg

SEQ ID NO: 55553 - RNA, 22 nt, Human
ucucagaaauacuauguuguca

SEQ ID NO: 55554 - RNA, 22 nt, Human
ucucagaauaaauuccuaacuu

SEQ ID NO: 55555 - RNA, 22 nt, Human
ucuucuguggcucucaccaccc

SEQ ID NO: 55556 - RNA, 22 nt, Human
ucuucuguuaccacagcgauga

SEQ ID NO: 55557 - RNA, 22 nt, Human
ucuucuguuuuagauugcauac

SEQ ID NO: 55558 - RNA, 22 nt, Human
ucuucuuaaaguauguucucuu

SEQ ID NO: 55559 - RNA, 22 nt, Human
ucuucuuuuugucccacagaau

SEQ ID NO: 55560 - RNA, 22 nt, Human
ucuugaaagcaugagauggaca

SEQ ID NO: 55561 - RNA, 22 nt, Human
ucuugaaaggagauuggaggca

SEQ ID NO: 55562 - RNA, 22 nt, Human
ucuugaaguccuuacauuugau

SEQ ID NO: 55563 - RNA, 22 nt, Human
ucuugagguuauuaagcuguua

SEQ ID NO: 55564 - RNA, 22 nt, Human
ucuugauucauguucccugcau

SEQ ID NO: 55565 - RNA, 22 nt, Human
ucuugauuuauucuacccagaa

SEQ ID NO: 55566 - RNA, 22 nt, Human
ucuugcaccacacaaaaauuug

SEQ ID NO: 55567 - RNA, 22 nt, Human
ucuugcagaaaauaguauagau

SEQ ID NO: 55568 - RNA, 22 nt, Human
ucuugcagacagcuuccagccu

SEQ ID NO: 55569 - RNA, 22 nt, Human
ucuugcagacucacaagguacu

SEQ ID NO: 55570 - RNA, 22 nt, Human
ucuugcagaggcacugugucag

SEQ ID NO: 55571 - RNA, 22 nt, Human
ucuugcugcuguccacacagua

SEQ ID NO: 55572 - RNA, 22 nt, Human
ucuuggaacuuauuauuguaga

SEQ ID NO: 55573 - RNA, 22 nt, Human
ucuuggaaucuccauagaguga

SEQ ID NO: 55574 - RNA, 22 nt, Human
ucuuggagaauggcagagaagc

SEQ ID NO: 55575 - RNA, 22 nt, Human
ucuuggagacucuuguauauuu

SEQ ID NO: 55576 - RNA, 22 nt, Human
ucuuggagauagggucuuaaug

SEQ ID NO: 55577 - RNA, 20 nt, Human
ucuuggcaaaugggaguguc

SEQ ID NO: 55578 - RNA, 18 nt, Human
ucuuggcagcaucuggca

SEQ ID NO: 55579 - RNA, 22 nt, Human
ucuuggccagguguggugccuc

SEQ ID NO: 55580 - RNA, 22 nt, Human
ucuuggccccaacccucuauuu

SEQ ID NO: 55581 - RNA, 21 nt, Human
ucuuggccuaaguucacugaa

SEQ ID NO: 55582 - RNA, 22 nt, Human
ucuuggcuaguaccuuccugcc

SEQ ID NO: 55583 - RNA, 22 nt, Human
ucuuggcugcagagccggcaag

SEQ ID NO: 55584 - RNA, 22 nt, Human
ucuuggcugcugccaauuuacu

SEQ ID NO: 55585 - RNA, 23 nt, Human
ucuuggcuggacaagucacucac

SEQ ID NO: 55586 - RNA, 22 nt, Human
ucuuggcugugcaugcaucuuc

SEQ ID NO: 55587 - RNA, 22 nt, Human
ucuugggaagcccauuuccacc

SEQ ID NO: 55588 - RNA, 22 nt, Human
ucuugggaccauuuacacauac

SEQ ID NO: 55589 - RNA, 22 nt, Human
ucuugggagucccaggacauag

SEQ ID NO: 55590 - RNA, 22 nt, Human
ucuugggcaauuucucuagagg

SEQ ID NO: 55591 - RNA, 22 nt, Human
ucuugguuaggggaaauaggca

SEQ ID NO: 55592 - RNA, 22 nt, Human
ucuuguauuugauuccuuccaa

SEQ ID NO: 55593 - RNA, 22 nt, Human
ucuugucacuacuguuaugcau

SEQ ID NO: 55594 - RNA, 22 nt, Human
ucuuguccuaagagcuggauuc

SEQ ID NO: 55595 - RNA, 21 nt, Human
ucuugugugcugcccugcuac

SEQ ID NO: 55596 - RNA, 22 nt, Human
ucuuguuacaguuuauuacaug

SEQ ID NO: 55597 - RNA, 22 nt, Human
ucuuguuaucaggaaaacagua

SEQ ID NO: 55598 - RNA, 23 nt, Human
ucuuguuuccuuugcgcuaucca

SEQ ID NO: 55599 - RNA, 22 nt, Human
ucuuguuuugaacucaucagga

SEQ ID NO: 55600 - RNA, 22 nt, Human
ucuuuaaaguuggagcuugcaa

SEQ ID NO: 55601 - RNA, 22 nt, Human
ucuuuaauaucugccccagagc

SEQ ID NO: 55602 - RNA, 22 nt, Human
ucuuuaaugugauuguaauuau

SEQ ID NO: 55603 - RNA, 22 nt, Human
ucuuuaauucagcaugaugcgg

SEQ ID NO: 55604 - RNA, 22 nt, Human
ucuuuaauuguggaagagcagc

SEQ ID NO: 55605 - RNA, 22 nt, Human
ucuuuacaguccucugucaauc

SEQ ID NO: 55606 - RNA, 22 nt, Human
ucuuuagagcacgggaaaaaca

SEQ ID NO: 55607 - RNA, 22 nt, Human
ucuuuagauguuuagaggaaga

SEQ ID NO: 55608 - RNA, 22 nt, Human
ucuuuaguauugaguuauggua

SEQ ID NO: 55609 - RNA, 19 nt, Human
ucuuuagucacauuuuuau

SEQ ID NO: 55610 - RNA, 22 nt, Human
ucuuuagugaccaucucauucu

SEQ ID NO: 55611 - RNA, 22 nt, Human
ucuuuauacaaacugggaaaca

SEQ ID NO: 55612 - RNA, 22 nt, Human
ucuuuauguugauuuccucagg

SEQ ID NO: 55613 - RNA, 22 nt, Human
ucuuucaaagcaaaaugaggcu

SEQ ID NO: 55614 - RNA, 22 nt, Human
ucuuucaaagcuguaguagauu

SEQ ID NO: 55615 - RNA, 22 nt, Human
ucuuucagccacuuaccugucu

SEQ ID NO: 55616 - RNA, 22 nt, Human
ucuuucauucuagucugagguu

SEQ ID NO: 55617 - RNA, 19 nt, Human
ucuuucauuucuagcucug

SEQ ID NO: 55618 - RNA, 22 nt, Human
ucuuuccacagcauguccaugc

SEQ ID NO: 55619 - RNA, 22 nt, Human
ucuuuccacauucucuguuuag

SEQ ID NO: 55620 - RNA, 22 nt, Human
ucuuuccauggccacacagucu

SEQ ID NO: 55621 - RNA, 22 nt, Human
ucuuucccgccagagcaugagu

SEQ ID NO: 55622 - RNA, 17 nt, Human
ucuuucccugggagaug

SEQ ID NO: 55623 - RNA, 22 nt, Human
ucuuuccuacuuuauugugaac

SEQ ID NO: 55624 - RNA, 22 nt, Human
ucuuuccuagaggcugaugagu

SEQ ID NO: 55625 - RNA, 17 nt, Human
ucuuuccugccaugcuc

SEQ ID NO: 55626 - RNA, 21 nt, Human
ucuuuccugcccaguugcccu

SEQ ID NO: 55627 - RNA, 22 nt, Human
ucuuucuacaucauuugcuucu

SEQ ID NO: 55628 - RNA, 22 nt, Human
ucuuucuuacaaagaaaacggu

SEQ ID NO: 55629 - RNA, 22 nt, Human
ucuuucuuauuagccauuguuc

SEQ ID NO: 55630 - RNA, 22 nt, Human
ucuuucuuccuggagcccaaca

SEQ ID NO: 55631 - RNA, 22 nt, Human
ucuuucuucuuucauaguguga

SEQ ID NO: 55632 - RNA, 22 nt, Human
ucuuucuugcaaggaugcagga

SEQ ID NO: 55633 - RNA, 22 nt, Human
ucucccacuggccuuguaugau

SEQ ID NO: 55634 - RNA, 22 nt, Human
ucucccauucagcuugcaguca

SEQ ID NO: 55635 - RNA, 22 nt, Human
ucuccccaaaggacucacucuc

SEQ ID NO: 55636 - RNA, 22 nt, Human
ucuccccagacccuggacauaa

SEQ ID NO: 55637 - RNA, 22 nt, Human
ucuccccagggguauggguauu

SEQ ID NO: 55638 - RNA, 21 nt, Human
ucuccccauucuuauucccau

SEQ ID NO: 55639 - RNA, 22 nt, Human
ucucccucuuugucugcuuugg

SEQ ID NO: 55640 - RNA, 16 nt, Human
ucucccuugucaccug

SEQ ID NO: 55641 - RNA, 22 nt, Human
ucuccgaucacagguuuucaau

SEQ ID NO: 55642 - RNA, 22 nt, Human
ucuccucaccaccagcagcaga

SEQ ID NO: 55643 - RNA, 22 nt, Human
ucuccucccaggcucuuccagg

SEQ ID NO: 55644 - RNA, 22 nt, Human
ucuccucuacugggucugcaga

SEQ ID NO: 55645 - RNA, 22 nt, Human
ucuccucugugccacagcuugg

SEQ ID NO: 55646 - RNA, 22 nt, Human
ucuccugcagucagcagucuca

SEQ ID NO: 55647 - RNA, 22 nt, Human
ucuccugcuucaacugauggac

SEQ ID NO: 55648 - RNA, 22 nt, Human
ucuccuggauggaccuucucuu

SEQ ID NO: 55649 - RNA, 22 nt, Human
ucuccuggcauuugguugagua

SEQ ID NO: 55650 - RNA, 22 nt, Human
ucuccuggccuuuagguuaagg

SEQ ID NO: 55651 - RNA, 22 nt, Human
ucuccugggaggacaaggaagg

SEQ ID NO: 55652 - RNA, 22 nt, Human
ucuccugggcuugguugaaguu

SEQ ID NO: 55653 - RNA, 22 nt, Human
ucuccugggugcuuuaucagaa

SEQ ID NO: 55654 - RNA, 22 nt, Human
ucuccugucuucucagcacccc

SEQ ID NO: 55655 - RNA, 18 nt, Human
ucuccuuccaaaucuuca

SEQ ID NO: 55656 - RNA, 22 nt, Human
ucuccuugacaggcaggcagac

SEQ ID NO: 55657 - RNA, 22 nt, Human
ucuccuuugaaaguuaggacug

SEQ ID NO: 55658 - RNA, 22 nt, Human
ucucgugcaggccuugcucgga

SEQ ID NO: 55659 - RNA, 22 nt, Human
ucucuaaaugcucucccauccc

SEQ ID NO: 55660 - RNA, 22 nt, Human
ucucuacacaggauucacauga

SEQ ID NO: 55661 - RNA, 19 nt, Human
ucucuacacuacauuucua

SEQ ID NO: 55662 - RNA, 22 nt, Human
ucucuacauaaccucaauacuc

SEQ ID NO: 55663 - RNA, 22 nt, Human
ucucuagcuuccuuaggaacac

SEQ ID NO: 55664 - RNA, 22 nt, Human
ucuccccuguuggccagguuuu

SEQ ID NO: 55665 - RNA, 22 nt, Human
ucucccuacugacuccaggacc

SEQ ID NO: 55666 - RNA, 22 nt, Human
ucucccuagggccgcuggcuaa

SEQ ID NO: 55667 - RNA, 23 nt, Human
ucucccugagguuguuagcauua

SEQ ID NO: 55668 - RNA, 22 nt, Human
ucuccuaggcuggagugcagug

SEQ ID NO: 55669 - RNA, 22 nt, Human
ucuccucuauuucuguauguau

SEQ ID NO: 55670 - RNA, 22 nt, Human
ucuccugacaugucuggaggaa

SEQ ID NO: 55671 - RNA, 22 nt, Human
ucuccugauaucugcagaccua

SEQ ID NO: 55672 - RNA, 22 nt, Human
ucuccugcucccaacugcugca

SEQ ID NO: 55673 - RNA, 22 nt, Human
ucuccuggaagaauaccacacu

SEQ ID NO: 55674 - RNA, 22 nt, Human
ucuccuggcaugugggucaucu

SEQ ID NO: 55675 - RNA, 23 nt, Human
ucuccuggcugcacuguggccac

SEQ ID NO: 55676 - RNA, 22 nt, Human
ucuccuggguaaaaggguugau

SEQ ID NO: 55677 - RNA, 18 nt, Human
ucuccuggguaggggccu

SEQ ID NO: 55678 - RNA, 22 nt, Human
ucuccuggucaccucagaaguc

SEQ ID NO: 55679 - RNA, 20 nt, Human
ucuccuggucugguccgugc

SEQ ID NO: 55680 - RNA, 23 nt, Human
ucuccuguccuaauuaccacccc

SEQ ID NO: 55681 - RNA, 22 nt, Human
ucuccuugcuacccaguauguc

SEQ ID NO: 55682 - RNA, 21 nt, Human
ucucguuguauggucuugggg

SEQ ID NO: 55683 - RNA, 22 nt, Human
ucucuaaagaagccucccuaaa

SEQ ID NO: 55684 - RNA, 22 nt, Human
ucucuaaagauagcugccucga

SEQ ID NO: 55685 - RNA, 22 nt, Human
ucucuaaagcacuuuaaccaca

SEQ ID NO: 55686 - RNA, 22 nt, Human
ucucuaaaucugguucacuugc

SEQ ID NO: 55687 - RNA, 19 nt, Human
ucucuaaccucaagagguu

SEQ ID NO: 55688 - RNA, 21 nt, Human
ucucuacaaauuauguuaggu

SEQ ID NO: 55689 - RNA, 22 nt, Human
ucucuacagacacuguugacuu

SEQ ID NO: 55690 - RNA, 22 nt, Human
ucucuacagauccuauauagaa

SEQ ID NO: 55691 - RNA, 22 nt, Human
ucucuacagcacccgcaugcua

SEQ ID NO: 55692 - RNA, 18 nt, Human
ucucuaccagaagugacg

SEQ ID NO: 55693 - RNA, 22 nt, Human
ucucuaggcagugucagaauca

SEQ ID NO: 55694 - RNA, 22 nt, Human
ucucuagggaucuguuuuaauu

SEQ ID NO: 55695 - RNA, 22 nt, Human
ucucucagaggccaggguccug

SEQ ID NO: 55696 - RNA, 22 nt, Human
ucucucagauggggcacuagua

SEQ ID NO: 55697 - RNA, 22 nt, Human
ucucucccaaaucugcagauag

SEQ ID NO: 55698 - RNA, 22 nt, Human
ucucucuaggcaucuauuuuca

SEQ ID NO: 55699 - RNA, 22 nt, Human
ucucucugagcccugcuuuuuc

SEQ ID NO: 55700 - RNA, 23 nt, Human
ucucucuggcaaauuucacauau

SEQ ID NO: 55701 - RNA, 22 nt, Human
ucucucuuuuuaaucauguaau

SEQ ID NO: 55702 - RNA, 22 nt, Human
ucucugaagcuguuguagucuc

SEQ ID NO: 55703 - RNA, 18 nt, Human
ucucugaauauuuuaugu

SEQ ID NO: 55704 - RNA, 22 nt, Human
ucucugacagugaaagaguuca

SEQ ID NO: 55705 - RNA, 21 nt, Human
ucucugacccaggaagagggc

SEQ ID NO: 55706 - RNA, 22 nt, Human
ucucugagaauaucccauaaga

SEQ ID NO: 55707 - RNA, 22 nt, Human
ucucugagcccaauguagcaau

SEQ ID NO: 55708 - RNA, 22 nt, Human
ucucugagcuggauuuguucuu

SEQ ID NO: 55709 - RNA, 20 nt, Human
ucucugagcuucucuugggg

SEQ ID NO: 55710 - RNA, 20 nt, Human
ucucugaguuuccuaauuug

SEQ ID NO: 55711 - RNA, 22 nt, Human
ucucugaguuuuaaggaugaug

SEQ ID NO: 55712 - RNA, 22 nt, Human
ucucugcauccccagggcucuc

SEQ ID NO: 55713 - RNA, 22 nt, Human
ucucugcccaugagcaaucugc

SEQ ID NO: 55714 - RNA, 20 nt, Human
ucucugcuguccacauuugc

SEQ ID NO: 55715 - RNA, 19 nt, Human
ucucugcuucucuuggcau

SEQ ID NO: 55716 - RNA, 22 nt, Human
ucucuggagggcuccaggcggg

SEQ ID NO: 55717 - RNA, 20 nt, Human
ucucuggcaagaagcugcag

SEQ ID NO: 55718 - RNA, 22 nt, Human
ucucuggcagggauaucuggcu

SEQ ID NO: 55719 - RNA, 20 nt, Human
ucucuggccagaaacaacag

SEQ ID NO: 55720 - RNA, 22 nt, Human
ucucugggaauucacaagcccu

SEQ ID NO: 55721 - RNA, 22 nt, Human
ucucugggaauuuuuuggacau

SEQ ID NO: 55722 - RNA, 21 nt, Human
ucucugggaggacuugugaga

SEQ ID NO: 55723 - RNA, 22 nt, Human
ucucugggaucagguggcccag

SEQ ID NO: 55724 - RNA, 22 nt, Human
ucucugggaucguuuugggcuc

SEQ ID NO: 55725 - RNA, 22 nt, Human
ucucuggggaugcuuauucuug

SEQ ID NO: 55726 - RNA, 22 nt, Human
ucucuggggauggaccugggag

SEQ ID NO: 55727 - RNA, 22 nt, Human
ucucuggggguagaacucaggc

SEQ ID NO: 55728 - RNA, 22 nt, Human
ucucuggguaugguaacguugg

SEQ ID NO: 55729 - RNA, 22 nt, Human
ucucugggugauggcagggcac

SEQ ID NO: 55730 - RNA, 22 nt, Human
ucucuggucccaccuggccauu

SEQ ID NO: 55731 - RNA, 22 nt, Human
ucucugguuauuaacuaacucc

SEQ ID NO: 55732 - RNA, 22 nt, Human
ucucuguaaaauguggaugaua

SEQ ID NO: 55733 - RNA, 20 nt, Human
ucucuguaaaucuucuuuua

SEQ ID NO: 55734 - RNA, 22 nt, Human
ucucuguaaggaagaauuagau

SEQ ID NO: 55735 - RNA, 22 nt, Human
ucucuguagagacagcacugug

SEQ ID NO: 55736 - RNA, 22 nt, Human
ucucuguaucccagaaccaaaa

SEQ ID NO: 55737 - RNA, 22 nt, Human
ucucuguauucugauauucacu

SEQ ID NO: 55738 - RNA, 22 nt, Human
ucucugucugagccuggcagac

SEQ ID NO: 55739 - RNA, 22 nt, Human
ucucugugacugcagcuuugca

SEQ ID NO: 55740 - RNA, 22 nt, Human
ucucuguggcauccacucaacu

SEQ ID NO: 55741 - RNA, 22 nt, Human
ucucugugucucauguuccuau

SEQ ID NO: 55742 - RNA, 21 nt, Human
ucucuguguucaaggugccag

SEQ ID NO: 55743 - RNA, 22 nt, Human
ucucuguucauggcacuauguc

SEQ ID NO: 55744 - RNA, 22 nt, Human
ucucuuaaaagaguaauagaga

SEQ ID NO: 55745 - RNA, 22 nt, Human
ucucuuaaauacuucacaucuc

SEQ ID NO: 55746 - RNA, 22 nt, Human
ucucuuaauucagaggcaguua

SEQ ID NO: 55747 - RNA, 22 nt, Human
ucucuucagcccauuauaaggg

SEQ ID NO: 55748 - RNA, 22 nt, Human
ucucuuccaguaagagucuuua

SEQ ID NO: 55749 - RNA, 22 nt, Human
ucucuuccaguggcuuugauuu

SEQ ID NO: 55750 - RNA, 21 nt, Human
ucucuucccaucaggacacua

SEQ ID NO: 55751 - RNA, 22 nt, Human
ucucuucccuuuaugguaugug

SEQ ID NO: 55752 - RNA, 22 nt, Human
ucucuucuaauuaggguccaug

SEQ ID NO: 55753 - RNA, 22 nt, Human
ucucuucugaaaccugucuuua

SEQ ID NO: 55754 - RNA, 20 nt, Human
ucucuucuggggagauaaaa

SEQ ID NO: 55755 - RNA, 22 nt, Human
ucucuugaagauugaagacaaa

SEQ ID NO: 55756 - RNA, 22 nt, Human
ucucuugagcucaguucugaug

SEQ ID NO: 55757 - RNA, 22 nt, Human
ucucuuggaaagcuugcccacu

SEQ ID NO: 55758 - RNA, 22 nt, Human
ucucuuguaauuuaaaaaaucu

SEQ ID NO: 55759 - RNA, 23 nt, Human
ucucuuucaagagcuuaaugugc

SEQ ID NO: 55760 - RNA, 22 nt, Human
ucucuuucuauaugugagucuu

SEQ ID NO: 55761 - RNA, 22 nt, Human
ucucuuucuauugcaccaugcu

SEQ ID NO: 55762 - RNA, 21 nt, Human
ucucuuucuggaagcuucccu

SEQ ID NO: 55763 - RNA, 21 nt, Human
ucucuuugggaacauuaauca

SEQ ID NO: 55764 - RNA, 18 nt, Human
ucucuuuuccccucauug

SEQ ID NO: 55765 - RNA, 22 nt, Human
ucugaaagagaguacauacagu

SEQ ID NO: 55766 - RNA, 22 nt, Human
uuagaacaguguuugccucgcu

SEQ ID NO: 55767 - RNA, 22 nt, Human
uuagaacaucugugucuuuaug

SEQ ID NO: 55768 - RNA, 22 nt, Human
uuagaacuuaaacuucagaaag

SEQ ID NO: 55769 - RNA, 22 nt, Human
uuagaacuuaagaauacugucu

SEQ ID NO: 55770 - RNA, 22 nt, Human
uuagaagcaggcugugucccca

SEQ ID NO: 55771 - RNA, 22 nt, Human
uuagaaguaaggucagauuucu

SEQ ID NO: 55772 - RNA, 20 nt, Human
uuagaaguggcuauuuccuc

SEQ ID NO: 55773 - RNA, 22 nt, Human
ucuggaggcaacuaaccuaguu

SEQ ID NO: 55774 - RNA, 22 nt, Human
ucuggaggcucugagggugagu

SEQ ID NO: 55775 - RNA, 18 nt, Human
ucuggagggaagcuuuga

SEQ ID NO: 55776 - RNA, 23 nt, Human
ucuggaggggacacugcagaugc

SEQ ID NO: 55777 - RNA, 22 nt, Human
ucuggagggguuuagagggaca

SEQ ID NO: 55778 - RNA, 22 nt, Human
ucuggaguaacucuguuucugg

SEQ ID NO: 55779 - RNA, 22 nt, Human
ucuggaguaggaccugaaaaua

SEQ ID NO: 55780 - RNA, 22 nt, Human
ucuggaguagggucugggaauu

SEQ ID NO: 55781 - RNA, 21 nt, Human
ucuggagucaucuuuaccaua

SEQ ID NO: 55782 - RNA, 22 nt, Human
ucuggaguccagauccauuugg

SEQ ID NO: 55783 - RNA, 22 nt, Human
ucuggaguguccaguucuacuc

SEQ ID NO: 55784 - RNA, 22 nt, Human
ucuggaguugcauguuuuggcu

SEQ ID NO: 55785 - RNA, 22 nt, Human
ucuggaucaccacuucugccuc

SEQ ID NO: 55786 - RNA, 22 nt, Human
ucuggauccuaugcacuggacu

SEQ ID NO: 55787 - RNA, 22 nt, Human
ucuggaucggguuccucagguc

SEQ ID NO: 55788 - RNA, 22 nt, Human
ucuggaucuccagcacuuauca

SEQ ID NO: 55789 - RNA, 23 nt, Human
ucuggaugccaccacauacuaac

SEQ ID NO: 55790 - RNA, 22 nt, Human
ucuggaugggaugaggcaacaa

SEQ ID NO: 55791 - RNA, 22 nt, Human
ucuggauguugcggaguacaga

SEQ ID NO: 55792 - RNA, 20 nt, Human
ucuggcacacugagaagcuc

SEQ ID NO: 55793 - RNA, 22 nt, Human
ucuggcagaggaaggaggccug

SEQ ID NO: 55794 - RNA, 22 nt, Human
ucuggcagcgaagcguguacuu

SEQ ID NO: 55795 - RNA, 22 nt, Human
ucuggcaggaccaugaagcgua

SEQ ID NO: 55796 - RNA, 21 nt, Human
ucuggcaggcacgggcccagc

SEQ ID NO: 55797 - RNA, 22 nt, Human
ucuggcagggucagggcccagg

SEQ ID NO: 55798 - RNA, 22 nt, Human
ucuggcaggucaaucauucuuu

SEQ ID NO: 55799 - RNA, 20 nt, Human
ucuggcaggugaacgagcug

SEQ ID NO: 55800 - RNA, 22 nt, Human
ucuggcagugagcaacuugaca

SEQ ID NO: 55801 - RNA, 21 nt, Human
ucuggcaguggucuuucaaau

SEQ ID NO: 55802 - RNA, 22 nt, Human
ucuggcauggauuugagugucu

SEQ ID NO: 55803 - RNA, 22 nt, Human
ucuggcauuucaggcaucuaua

SEQ ID NO: 55804 - RNA, 22 nt, Human
ucuggcccaugauccugcuaac

SEQ ID NO: 55805 - RNA, 22 nt, Human
ucuggccccggucuucacagcu

SEQ ID NO: 55806 - RNA, 20 nt, Human
ucuggccccuuccuguccug

SEQ ID NO: 55807 - RNA, 21 nt, Human
ucuggcccuagguugggccuc

SEQ ID NO: 55808 - RNA, 22 nt, Human
ucuggcccuauggcauguaccu

SEQ ID NO: 55809 - RNA, 22 nt, Human
ucuggccuauuucugucagauc

SEQ ID NO: 55810 - RNA, 22 nt, Human
ucuggccuccuccaccagggaa

SEQ ID NO: 55811 - RNA, 22 nt, Human
ucuggccugaaaguccaugcuu

SEQ ID NO: 55812 - RNA, 22 nt, Human
ucuggccuguguugguggcccc

SEQ ID NO: 55813 - RNA, 17 nt, Human
ucuggccuuccugaacu

SEQ ID NO: 55814 - RNA, 22 nt, Human
ucuggcuagauugaugaguccc

SEQ ID NO: 55815 - RNA, 18 nt, Human
ucuggcucaggacugaac

SEQ ID NO: 55816 - RNA, 22 nt, Human
ucuggcucauaggaaggccauu

SEQ ID NO: 55817 - RNA, 22 nt, Human
ucuggcucaucucuccagguaa

SEQ ID NO: 55818 - RNA, 22 nt, Human
ucuggcuccaccuccuuuacua

SEQ ID NO: 55819 - RNA, 22 nt, Human
ucuggcuccacucugugcaugc

SEQ ID NO: 55820 - RNA, 22 nt, Human
ucuggcuccaggaccgggcaca

SEQ ID NO: 55821 - RNA, 19 nt, Human
ucuggcuccgccucuuagu

SEQ ID NO: 55822 - RNA, 22 nt, Human
ucuggcucuccagugcucuuag

SEQ ID NO: 55823 - RNA, 22 nt, Human
ucuggcucuguguccucaccca

SEQ ID NO: 55824 - RNA, 20 nt, Human
ucuggcucuuugcuccuccc

SEQ ID NO: 55825 - RNA, 22 nt, Human
ucuggcugaagcuuuugcagcu

SEQ ID NO: 55826 - RNA, 22 nt, Human
ucuggcugauucccugggacug

SEQ ID NO: 55827 - RNA, 22 nt, Human
ucuggcuggcagugauggugug

SEQ ID NO: 55828 - RNA, 22 nt, Human
ucuggcugggugagagcuucuc

SEQ ID NO: 55829 - RNA, 22 nt, Human
ucuggcugucauuggaggcccc

SEQ ID NO: 55830 - RNA, 22 nt, Human
ucuggcuguuguuagguuccug

SEQ ID NO: 55831 - RNA, 22 nt, Human
ucuggcuguuuuagaugagcuc

SEQ ID NO: 55832 - RNA, 22 nt, Human
ucuggcuucaacuuuacugaaa

SEQ ID NO: 55833 - RNA, 22 nt, Human
ucuggcuucccacucugccggg

SEQ ID NO: 55834 - RNA, 22 nt, Human
ucuggcuucuaugaauguccuu

SEQ ID NO: 55835 - RNA, 22 nt, Human
ucuggcuugagcuucgaccagu

SEQ ID NO: 55836 - RNA, 22 nt, Human
ucuggcuugcuggcuugguccc

SEQ ID NO: 55837 - RNA, 22 nt, Human
ucuggcuuggacacaaucuucc

SEQ ID NO: 55838 - RNA, 22 nt, Human
ucuggcuugucucagggucuga

SEQ ID NO: 55839 - RNA, 22 nt, Human
ucuggcuuucucagcauggcau

SEQ ID NO: 55840 - RNA, 18 nt, Human
ucuggcuuuguuccuugu

SEQ ID NO: 55841 - RNA, 22 nt, Human
ucuggcuuuuauucaguuggca

SEQ ID NO: 55842 - RNA, 22 nt, Human
ucugggaaauggcuacuuguca

SEQ ID NO: 55843 - RNA, 22 nt, Human
ucugggaaccagugcggcuggg

SEQ ID NO: 55844 - RNA, 22 nt, Human
ucugggaaccauugguggggau

SEQ ID NO: 55845 - RNA, 22 nt, Human
ucugggaacuauaucugguggu

SEQ ID NO: 55846 - RNA, 22 nt, Human
ucugggaacugagcuccccuag

SEQ ID NO: 55847 - RNA, 22 nt, Human
ucugggaagccuguaugcagaa

SEQ ID NO: 55848 - RNA, 22 nt, Human
ucugggaagcugguccuguucu

SEQ ID NO: 55849 - RNA, 22 nt, Human
ucugggaaggagccugagaauu

SEQ ID NO: 55850 - RNA, 22 nt, Human
ucugggaaguccucugucaugc

SEQ ID NO: 55851 - RNA, 22 nt, Human
ucugggaauaaaacuagggacu

SEQ ID NO: 55852 - RNA, 22 nt, Human
ucugggaaugaggcuugggcaa

SEQ ID NO: 55853 - RNA, 22 nt, Human
ucugggagagcacguggcugac

SEQ ID NO: 55854 - RNA, 22 nt, Human
ucugggagaguagauaaaggaa

SEQ ID NO: 55855 - RNA, 22 nt, Human
ucugggagcacacgcagugauc

SEQ ID NO: 55856 - RNA, 22 nt, Human
ucugggagccaugccuuggagu

SEQ ID NO: 55857 - RNA, 22 nt, Human
ucugggagccugaaagugaaug

SEQ ID NO: 55858 - RNA, 22 nt, Human
ucugggagggagccucagaauc

SEQ ID NO: 55859 - RNA, 22 nt, Human
ucugggaggggcugccauugcu

SEQ ID NO: 55860 - RNA, 22 nt, Human
ucugggagguaaccaugcugau

SEQ ID NO: 55861 - RNA, 22 nt, Human
ucugggagguggcagggugcau

SEQ ID NO: 55862 - RNA, 22 nt, Human
ucugggaguuagaauacauggg

SEQ ID NO: 55863 - RNA, 22 nt, Human
ucugggauaagaccacagauuu

SEQ ID NO: 55864 - RNA, 22 nt, Human
ucugggauagggccagaacaug

SEQ ID NO: 55865 - RNA, 22 nt, Human
ucugggaugaagccagaaacuu

SEQ ID NO: 55866 - RNA, 22 nt, Human
ucugggcagccucaggccaggg

SEQ ID NO: 55867 - RNA, 22 nt, Human
ucugggccgcugcguuccauga

SEQ ID NO: 55868 - RNA, 22 nt, Human
ucugggccuuggaguggggaga

SEQ ID NO: 55869 - RNA, 22 nt, Human
ucugggcucugggaauuaggga

SEQ ID NO: 55870 - RNA, 22 nt, Human
ucugggcuggcuuuaugcugac

SEQ ID NO: 55871 - RNA, 22 nt, Human
ucugggcugggcuuaggaaccc

SEQ ID NO: 55872 - RNA, 22 nt, Human
ucugggcugugggaauucaaca

SEQ ID NO: 55873 - RNA, 17 nt, Human
ucugggcuucagugguc

SEQ ID NO: 55874 - RNA, 22 nt, Human
ucugggcuuggauuggcucugc

SEQ ID NO: 55875 - RNA, 22 nt, Human
ucugggcuuuaguuuguuaucu

SEQ ID NO: 55876 - RNA, 21 nt, Human
ucugggcuuucuuauaaggca

SEQ ID NO: 55877 - RNA, 21 nt, Human
ucuggggaagacaucuaggau

SEQ ID NO: 55878 - RNA, 22 nt, Human
ucuggggaccauggcaucuaaa

SEQ ID NO: 55879 - RNA, 22 nt, Human
ugagaaggaaacaauggcuuuu

SEQ ID NO: 55880 - RNA, 17 nt, Human
ugagaaguaggcaucau

SEQ ID NO: 55881 - RNA, 22 nt, Human
ugagaauauuugaagauguuag

SEQ ID NO: 55882 - RNA, 22 nt, Human
ucuguguuuugugccuacugcu

SEQ ID NO: 55883 - RNA, 18 nt, Human
ucugaaagcaccggugaa

SEQ ID NO: 55884 - RNA, 18 nt, Human
ucugaaagcccuuuucca

SEQ ID NO: 55885 - RNA, 22 nt, Human
ucugaaagcuagaaaaugcucu

SEQ ID NO: 55886 - RNA, 22 nt, Human
ucugaaagggcuaaauaauuug

SEQ ID NO: 55887 - RNA, 22 nt, Human
ucugaaaugaacucuugaacuu

SEQ ID NO: 55888 - RNA, 22 nt, Human
ucugaaauguucucuuguuuug

SEQ ID NO: 55889 - RNA, 21 nt, Human
ucugaacaacauacgaaucuu

SEQ ID NO: 55890 - RNA, 22 nt, Human
ucugaacaagggcaccuuccag

SEQ ID NO: 55891 - RNA, 19 nt, Human
ucugaacaaugcaguuccc

SEQ ID NO: 55892 - RNA, 22 nt, Human
ucugaacacugagugucaucac

SEQ ID NO: 55893 - RNA, 22 nt, Human
ucugaacauccagcaaugcaca

SEQ ID NO: 55894 - RNA, 22 nt, Human
ucugaacauccuacaacauuuu

SEQ ID NO: 55895 - RNA, 22 nt, Human
ucugaagaacugaguaaacaug

SEQ ID NO: 55896 - RNA, 22 nt, Human
ucugaagacauaugauauggug

SEQ ID NO: 55897 - RNA, 22 nt, Human
ucugaagagcuuuggaaguaug

SEQ ID NO: 55898 - RNA, 22 nt, Human
ucugaagaggcucuugauaaga

SEQ ID NO: 55899 - RNA, 22 nt, Human
ucugaagagucuugcaagaaag

SEQ ID NO: 55900 - RNA, 22 nt, Human
ucugaagauucuuuccacuauu

SEQ ID NO: 55901 - RNA, 22 nt, Human
ucugaagcagaaaauggggaua

SEQ ID NO: 55902 - RNA, 22 nt, Human
ucugaaggugcuagagaaagcu

SEQ ID NO: 55903 - RNA, 22 nt, Human
ucugaagguuacuucugcucag

SEQ ID NO: 55904 - RNA, 22 nt, Human
ucugaauaauguccuuguauca

SEQ ID NO: 55905 - RNA, 22 nt, Human
ucugaaucacagucauucagcu

SEQ ID NO: 55906 - RNA, 22 nt, Human
ucugaauguaucgaauugaggc

SEQ ID NO: 55907 - RNA, 19 nt, Human
ucugaauuauuuauguacc

SEQ ID NO: 55908 - RNA, 22 nt, Human
ucugaauucaguauggucuuuc

SEQ ID NO: 55909 - RNA, 21 nt, Human
ucugacaaucucauuucaaac

SEQ ID NO: 55910 - RNA, 22 nt, Human
ucugacaggucauuuucuauag

SEQ ID NO: 55911 - RNA, 22 nt, Human
ucugacagucacaguggaggau

SEQ ID NO: 55912 - RNA, 22 nt, Human
ucugacagucucuucuuuagcu

SEQ ID NO: 55913 - RNA, 22 nt, Human
ucugaccaggcucagccaaggc

SEQ ID NO: 55914 - RNA, 22 nt, Human
ucugacccacaagcauccugga

SEQ ID NO: 55915 - RNA, 22 nt, Human
ucugacccguggcucugccucc

SEQ ID NO: 55916 - RNA, 22 nt, Human
ucugaccugcaggcacagcaau

SEQ ID NO: 55917 - RNA, 22 nt, Human
ucugacugaaccaauuauuuac

SEQ ID NO: 55918 - RNA, 22 nt, Human
ucugacuuggcgcucuugucuu

SEQ ID NO: 55919 - RNA, 22 nt, Human
ucugagaaaauaggaaacuuga

SEQ ID NO: 55920 - RNA, 17 nt, Human
ucugagaaaggagaauc

SEQ ID NO: 55921 - RNA, 22 nt, Human
ucugagaaauuucuuugugaug

SEQ ID NO: 55922 - RNA, 22 nt, Human
ucugagaagcuagaggacaaag

SEQ ID NO: 55923 - RNA, 22 nt, Human
ucugagaaggaagcucugugua

SEQ ID NO: 55924 - RNA, 23 nt, Human
ucugagaagguuucagccagacu

SEQ ID NO: 55925 - RNA, 22 nt, Human
ucugagacaacuuagcccucga

SEQ ID NO: 55926 - RNA, 20 nt, Human
ucugagaccuuuccacaccc

SEQ ID NO: 55927 - RNA, 22 nt, Human
ucugagacugcagugagccgcu

SEQ ID NO: 55928 - RNA, 22 nt, Human
ucugagagcaggaggagcugcu

SEQ ID NO: 55929 - RNA, 22 nt, Human
ucugagagccacugaacagcaa

SEQ ID NO: 55930 - RNA, 22 nt, Human
ucugagaguagagcugccucuu

SEQ ID NO: 55931 - RNA, 22 nt, Human
ucugagaguccaucuccaagcc

SEQ ID NO: 55932 - RNA, 22 nt, Human
ucugagcacaucacacagcuca

SEQ ID NO: 55933 - RNA, 22 nt, Human
ucugagcagcuuuguuuugugu

SEQ ID NO: 55934 - RNA, 22 nt, Human
ucugagccaaaauaaacagcau

SEQ ID NO: 55935 - RNA, 22 nt, Human
ucugagccguauggcuuggcua

SEQ ID NO: 55936 - RNA, 22 nt, Human
ucugagccuauuucaaauuccu

SEQ ID NO: 55937 - RNA, 23 nt, Human
ucugagcugucuuuucagcagaa

SEQ ID NO: 55938 - RNA, 22 nt, Human
ucugagcuucugccugcugcaa

SEQ ID NO: 55939 - RNA, 22 nt, Human
ucugagcuuuagcugggauuuu

SEQ ID NO: 55940 - RNA, 22 nt, Human
ucugaggaaaaguucuugucac

SEQ ID NO: 55941 - RNA, 22 nt, Human
ucugaggaccuacugaagaguu

SEQ ID NO: 55942 - RNA, 22 nt, Human
ucugaggauagaggcaauagga

SEQ ID NO: 55943 - RNA, 22 nt, Human
ucugaggcauacccaggccccc

SEQ ID NO: 55944 - RNA, 22 nt, Human
ucugaggccccagcccugcaca

SEQ ID NO: 55945 - RNA, 22 nt, Human
ucugaggcccuacccugagccu

SEQ ID NO: 55946 - RNA, 22 nt, Human
ucugaggcccugcaggcagugu

SEQ ID NO: 55947 - RNA, 22 nt, Human
ucugaggccuagagaggggcuu

SEQ ID NO: 55948 - RNA, 22 nt, Human
ucugaggccugaagcagcagag

SEQ ID NO: 55949 - RNA, 22 nt, Human
ucugaggccuuggcagcuaagg

SEQ ID NO: 55950 - RNA, 22 nt, Human
ucugaggcuauguucaggcuaa

SEQ ID NO: 55951 - RNA, 19 nt, Human
ucugaggcuucuccccuug

SEQ ID NO: 55952 - RNA, 22 nt, Human
ucugagggcuguacuaugcacg

SEQ ID NO: 55953 - RNA, 19 nt, Human
ucugaggguccagaugcau

SEQ ID NO: 55954 - RNA, 22 nt, Human
ucugaggguuacuuuauuaggc

SEQ ID NO: 55955 - RNA, 22 nt, Human
ucugaggucacagauuucaaga

SEQ ID NO: 55956 - RNA, 22 nt, Human
ucugagguccugugauuucucu

SEQ ID NO: 55957 - RNA, 22 nt, Human
ucugaggucuaugacuuugcuu

SEQ ID NO: 55958 - RNA, 22 nt, Human
ucugaggucucaugacuugcau

SEQ ID NO: 55959 - RNA, 17 nt, Human
ucugaggugaggaugca

SEQ ID NO: 55960 - RNA, 22 nt, Human
ucugagguggacgauggagccu

SEQ ID NO: 55961 - RNA, 23 nt, Human
ucugagguggcucuugcuuugaa

SEQ ID NO: 55962 - RNA, 22 nt, Human
ucugagguuacugcuuuguaga

SEQ ID NO: 55963 - RNA, 22 nt, Human
ucugagguuauugucugccauu

SEQ ID NO: 55964 - RNA, 22 nt, Human
ucugagguucuguuuucaacug

SEQ ID NO: 55965 - RNA, 22 nt, Human
ucugagucuuggggucccuauu

SEQ ID NO: 55966 - RNA, 22 nt, Human
ucugagugaucagaugcauugc

SEQ ID NO: 55967 - RNA, 22 nt, Human
ucugagugcacuaggaggggca

SEQ ID NO: 55968 - RNA, 22 nt, Human
ucugaguuuaggaccaggcuga

SEQ ID NO: 55969 - RNA, 22 nt, Human
ucugauaacaaccaugucuggc

SEQ ID NO: 55970 - RNA, 22 nt, Human
ucugauaacucuggccccaggc

SEQ ID NO: 55971 - RNA, 22 nt, Human
ucugauaagacagcugauuuga

SEQ ID NO: 55972 - RNA, 22 nt, Human
ucugauaagugguguauacugu

SEQ ID NO: 55973 - RNA, 22 nt, Human
ucugauaaugugcuucgugacc

SEQ ID NO: 55974 - RNA, 22 nt, Human
ucugauauaaaagugacauuca

SEQ ID NO: 55975 - RNA, 22 nt, Human
ucugauaucgcacuaaacucug

SEQ ID NO: 55976 - RNA, 21 nt, Human
ucugaugguagaugagaugug

SEQ ID NO: 55977 - RNA, 22 nt, Human
ucugauguggagacacuguuuu

SEQ ID NO: 55978 - RNA, 22 nt, Human
ucugauguggcagcugcaucua

SEQ ID NO: 55979 - RNA, 21 nt, Human
ucugauguucacacccuguau

SEQ ID NO: 55980 - RNA, 23 nt, Human
ucugauguucucuuaugcuguag

SEQ ID NO: 55981 - RNA, 22 nt, Human
ucugauuacuugaguuauuuag

SEQ ID NO: 55982 - RNA, 22 nt, Human
ucugauucauucaugugcacca

SEQ ID NO: 55983 - RNA, 22 nt, Human
ucugauuucucuuguggaugcu

SEQ ID NO: 55984 - RNA, 22 nt, Human
ucugcaaacuggcucuuacugc

SEQ ID NO: 55985 - RNA, 22 nt, Human
ucugcaaacuuaaguugaaaua

SEQ ID NO: 55986 - RNA, 22 nt, Human
ucugcaacagugcccuguaaau

SEQ ID NO: 55987 - RNA, 22 nt, Human
ucugcaagcuaaggaagcaucu

SEQ ID NO: 55988 - RNA, 22 nt, Human
ucugcaagugacccgggcccag

SEQ ID NO: 55989 - RNA, 22 nt, Human
ucugcacaaaacugucgcagaa

SEQ ID NO: 55990 - RNA, 22 nt, Human
ucugcacacuuuuauugaccuc

SEQ ID NO: 55991 - RNA, 22 nt, Human
uucaacauuugauacaagucag

SEQ ID NO: 55992 - RNA, 22 nt, Human
uucaacauuuuugaguuuaggu

SEQ ID NO: 55993 - RNA, 22 nt, Human
uucaacugggcggaucugagaa

SEQ ID NO: 55994 - RNA, 22 nt, Human
uucaagaaagaguggcuauucc

SEQ ID NO: 55995 - RNA, 22 nt, Human
uucaagaagcccaaagacuagc

SEQ ID NO: 55996 - RNA, 22 nt, Human
ugagcugugaucuaugauaaau

SEQ ID NO: 55997 - RNA, 22 nt, Human
ugagcugugcuacgcccuggga

SEQ ID NO: 55998 - RNA, 22 nt, Human
ugagcuguguccugggggcagu

SEQ ID NO: 55999 - RNA, 22 nt, Human
ugagcuuauucauaaaagugca

SEQ ID NO: 56000 - RNA, 20 nt, Human
ugagcuucagauaucgugca

SEQ ID NO: 56001 - RNA, 22 nt, Human
ugagcuugcagugccagccuug

SEQ ID NO: 56002 - RNA, 22 nt, Human
ugagcuugcuacauagaucaga

SEQ ID NO: 56003 - RNA, 22 nt, Human
ugaggaaauugaggcucacaga

SEQ ID NO: 56004 - RNA, 22 nt, Human
ugaggaacucaccaggcagaga

SEQ ID NO: 56005 - RNA, 22 nt, Human
ugaggaagcaaaggcuugugug

SEQ ID NO: 56006 - RNA, 22 nt, Human
ugaggaagugguuguaugguuu

SEQ ID NO: 56007 - RNA, 22 nt, Human
ugaggaaguugaucucaucagu

SEQ ID NO: 56008 - RNA, 22 nt, Human
ugaggaaguuguuucucuucua

SEQ ID NO: 56009 - RNA, 22 nt, Human
ugaggaaugugacaaaaccaag

SEQ ID NO: 56010 - RNA, 22 nt, Human
ugaggaauguuuugagugccga

SEQ ID NO: 56011 - RNA, 22 nt, Human
ugaggacaugagugggacagag

SEQ ID NO: 56012 - RNA, 22 nt, Human
ugaggacauugagacuggagac

SEQ ID NO: 56013 - RNA, 22 nt, Human
ugaggacauuggucaggacaug

SEQ ID NO: 56014 - RNA, 22 nt, Human
ugaggacauuuaucuuggcgca

SEQ ID NO: 56015 - RNA, 22 nt, Human
ugaggacuuuccauguuaaugu

SEQ ID NO: 56016 - RNA, 22 nt, Human
ugaggagcaggguggcuuacuc

SEQ ID NO: 56017 - RNA, 22 nt, Human
ugaggagcgggcagggaugcag

SEQ ID NO: 56018 - RNA, 22 nt, Human
ugaggaggcccagguuggggcu

SEQ ID NO: 56019 - RNA, 22 nt, Human
ugaggaggucagagucuggcug

SEQ ID NO: 56020 - RNA, 22 nt, Human
ugaggaggugggcacacagagu

SEQ ID NO: 56021 - RNA, 22 nt, Human
ugaggaguguggauggagcuug

SEQ ID NO: 56022 - RNA, 22 nt, Human
ugaggauggcagugugcucagc

SEQ ID NO: 56023 - RNA, 22 nt, Human
ugaggauggucccgaggacacu

SEQ ID NO: 56024 - RNA, 21 nt, Human
ugaggaugugcagcagcagga

SEQ ID NO: 56025 - RNA, 22 nt, Human
ugaggcaaaaguuaugugguag

SEQ ID NO: 56026 - RNA, 22 nt, Human
ugaggcaagcugggcccaugga

SEQ ID NO: 56027 - RNA, 22 nt, Human
ugaggcaaucccuaggguaagg

SEQ ID NO: 56028 - RNA, 22 nt, Human
ugaggcacauccaggccagcuc

SEQ ID NO: 56029 - RNA, 19 nt, Human
ugaggcacuagucuggucc

SEQ ID NO: 56030 - RNA, 22 nt, Human
ugaggcacugggagagcacacu

SEQ ID NO: 56031 - RNA, 22 nt, Human
ugaggcagauauuuauuggguu

SEQ ID NO: 56032 - RNA, 22 nt, Human
ugaggcagcccacuuuccuuag

SEQ ID NO: 56033 - RNA, 22 nt, Human
ugaggcagcuuuuucugugugu

SEQ ID NO: 56034 - RNA, 22 nt, Human
ugaggcaggaauggggaaaagu

SEQ ID NO: 56035 - RNA, 22 nt, Human
ugaggcaggacauggacaacug

SEQ ID NO: 56036 - RNA, 22 nt, Human
ugaggcaggacuugcauaaagu

SEQ ID NO: 56037 - RNA, 22 nt, Human
ugaggcaggagaauggcgggaa

SEQ ID NO: 56038 - RNA, 22 nt, Human
ugaggcaggaggauugcaggau

SEQ ID NO: 56039 - RNA, 22 nt, Human
ugaggcaggaguuaaugugcuc

SEQ ID NO: 56040 - RNA, 22 nt, Human
ugaggcaggaguucaggcugcg

SEQ ID NO: 56041 - RNA, 22 nt, Human
ugaggcagguaagcaaguuuug

SEQ ID NO: 56042 - RNA, 22 nt, Human
ugaggcagguggauuacaaggu

SEQ ID NO: 56043 - RNA, 22 nt, Human
ugaggcagugauguuuaagcac

SEQ ID NO: 56044 - RNA, 22 nt, Human
ugaggcaguugagcuuccugag

SEQ ID NO: 56045 - RNA, 22 nt, Human
ugaggcauuaaagggaggucaa

SEQ ID NO: 56046 - RNA, 22 nt, Human
ugaggccaaaaugacucaaaug

SEQ ID NO: 56047 - RNA, 19 nt, Human
ugaggccaaggucacagau

SEQ ID NO: 56048 - RNA, 22 nt, Human
ugaggccagccacagccacccu

SEQ ID NO: 56049 - RNA, 22 nt, Human
ugaggccaggacccccagcagg

SEQ ID NO: 56050 - RNA, 22 nt, Human
ugaggccaggaucccaggcucu

SEQ ID NO: 56051 - RNA, 22 nt, Human
ugaggccaugcccgugccggcc

SEQ ID NO: 56052 - RNA, 17 nt, Human
ugaggccauggcaccau

SEQ ID NO: 56053 - RNA, 20 nt, Human
ugaggcccagcagagucggg

SEQ ID NO: 56054 - RNA, 22 nt, Human
ugaggccccgaagcugagguuu

SEQ ID NO: 56055 - RNA, 22 nt, Human
ugaggcccggguggaggaaugc

SEQ ID NO: 56056 - RNA, 21 nt, Human
ugaggccucuccugggcuggc

SEQ ID NO: 56057 - RNA, 18 nt, Human
ugaggccucugcugggcc

SEQ ID NO: 56058 - RNA, 22 nt, Human
ugaggccucuugguauggugug

SEQ ID NO: 56059 - RNA, 17 nt, Human
ugaggccugcaucagug

SEQ ID NO: 56060 - RNA, 22 nt, Human
ugaggccuggagggaggaguuu

SEQ ID NO: 56061 - RNA, 22 nt, Human
ugaggcuaaaggugaccagauu

SEQ ID NO: 56062 - RNA, 22 nt, Human
ugaggcucaagaaagauuuguu

SEQ ID NO: 56063 - RNA, 22 nt, Human
ugaggcucagagcaccugcucc

SEQ ID NO: 56064 - RNA, 22 nt, Human
ugaggcucagugagcccugcag

SEQ ID NO: 56065 - RNA, 22 nt, Human
ugaggcucuuccuccccugcuc

SEQ ID NO: 56066 - RNA, 18 nt, Human
ugaggcugaauauggggc

SEQ ID NO: 56067 - RNA, 23 nt, Human
ugaggcugauugauuuuugcuca

SEQ ID NO: 56068 - RNA, 22 nt, Human
ugaggcuguucuaccagggcca

SEQ ID NO: 56069 - RNA, 21 nt, Human
ugaggcuguuguaccagggag

SEQ ID NO: 56070 - RNA, 22 nt, Human
ugaggcuuagagaauuaaguga

SEQ ID NO: 56071 - RNA, 22 nt, Human
ugaggcuuccaacaugugagaa

SEQ ID NO: 56072 - RNA, 23 nt, Human
ugagggacaugguggcuucugag

SEQ ID NO: 56073 - RNA, 19 nt, Human
ugagggacauugggagcag

SEQ ID NO: 56074 - RNA, 22 nt, Human
ugagggacucccggcccugcca

SEQ ID NO: 56075 - RNA, 22 nt, Human
ugagggagcugaccuuucugug

SEQ ID NO: 56076 - RNA, 22 nt, Human
ugagggaggccuccaucugcca

SEQ ID NO: 56077 - RNA, 22 nt, Human
ugagggcugacaggaggacagc

SEQ ID NO: 56078 - RNA, 22 nt, Human
ugaggggagacagaguggacuc

SEQ ID NO: 56079 - RNA, 22 nt, Human
ugaggggagcccgcccuggacg

SEQ ID NO: 56080 - RNA, 22 nt, Human
ugaggggagcuagcaugccuug

SEQ ID NO: 56081 - RNA, 22 nt, Human
ugaggggguuaauuaggagagu

SEQ ID NO: 56082 - RNA, 22 nt, Human
ugagggugcauuuagcauguag

SEQ ID NO: 56083 - RNA, 22 nt, Human
ugaggguggccuuguguggacu

SEQ ID NO: 56084 - RNA, 22 nt, Human
ugagggugugcggcccagacag

SEQ ID NO: 56085 - RNA, 22 nt, Human
ugagguaauaaguguuuguuuu

SEQ ID NO: 56086 - RNA, 22 nt, Human
ugagguagaaaaagcuuguagu

SEQ ID NO: 56087 - RNA, 22 nt, Human
ugagguagcugcuauuuguagu

SEQ ID NO: 56088 - RNA, 22 nt, Human
ugagguagcuguuuagaaagac

SEQ ID NO: 56089 - RNA, 22 nt, Human
ugagguaggaauuuguauuggg

SEQ ID NO: 56090 - RNA, 22 nt, Human
ugagguaggauaagacaaugag

SEQ ID NO: 56091 - RNA, 22 nt, Human
ugagguagguaccauuaucacu

SEQ ID NO: 56092 - RNA, 22 nt, Human
ugagguaggugguaagagauac

SEQ ID NO: 56093 - RNA, 22 nt, Human
ugagguagguggugaaaaauga

SEQ ID NO: 56094 - RNA, 22 nt, Human
ugagguaggugguggcagccau

SEQ ID NO: 56095 - RNA, 22 nt, Human
ugagguagugcuugucauguuu

SEQ ID NO: 56096 - RNA, 22 nt, Human
ugagguaugagguucuaugauc

SEQ ID NO: 56097 - RNA, 22 nt, Human
ugaggucccagggguagugugc

SEQ ID NO: 56098 - RNA, 22 nt, Human
ugagguggaaggauccuuugaa

SEQ ID NO: 56099 - RNA, 22 nt, Human
ugagguggcuagggaggcacuc

SEQ ID NO: 56100 - RNA, 22 nt, Human
ugauguuauuagauacaaacca

SEQ ID NO: 56101 - RNA, 22 nt, Human
ugauuaacguuuuaggcauacu

SEQ ID NO: 56102 - RNA, 22 nt, Human
ugauuaacugucuauuaaucau

SEQ ID NO: 56103 - RNA, 22 nt, Human
ugauuaaguucaaaauauagaa

SEQ ID NO: 56104 - RNA, 22 nt, Human
ugauuaauaucaccaccauugg

SEQ ID NO: 56105 - RNA, 22 nt, Human
ugauuacaaaagauuguuugaa

SEQ ID NO: 56106 - RNA, 22 nt, Human
ugauuacaauugucuuagauuu

SEQ ID NO: 56107 - RNA, 22 nt, Human
ugauuacacagcaguaauuuca

SEQ ID NO: 56108 - RNA, 22 nt, Human
ugauuacauugguaauguuuau

SEQ ID NO: 56109 - RNA, 22 nt, Human
ugauuagacaaaggaaucaugc

SEQ ID NO: 56110 - RNA, 22 nt, Human
ugauuagauaguaagugacuaa

SEQ ID NO: 56111 - RNA, 22 nt, Human
ucuguuaaccuggucuuggcuu

SEQ ID NO: 56112 - RNA, 22 nt, Human
ucuguuaucucaagucacaaga

SEQ ID NO: 56113 - RNA, 22 nt, Human
ucuguuauucugcucaguauag

SEQ ID NO: 56114 - RNA, 20 nt, Human
ucuguuauugcauguacaua

SEQ ID NO: 56115 - RNA, 22 nt, Human
ucuguucaagacugaggugaca

SEQ ID NO: 56116 - RNA, 23 nt, Human
ucuguucaaggcuuucuccuuga

SEQ ID NO: 56117 - RNA, 19 nt, Human
ucuguucacauuguuucgc

SEQ ID NO: 56118 - RNA, 22 nt, Human
ucuguucacugagcaauggcaa

SEQ ID NO: 56119 - RNA, 22 nt, Human
ucuguucagaagaggugaaagu

SEQ ID NO: 56120 - RNA, 22 nt, Human
ucuguucagacacuuuacaugu

SEQ ID NO: 56121 - RNA, 22 nt, Human
ucuguucaguugauuagacaga

SEQ ID NO: 56122 - RNA, 22 nt, Human
ucuguuccaguagaaaggugca

SEQ ID NO: 56123 - RNA, 22 nt, Human
ucuguucuucuccacuguaugu

SEQ ID NO: 56124 - RNA, 22 nt, Human
ucuguucuugcuuuucuccaac

SEQ ID NO: 56125 - RNA, 22 nt, Human
ucuguucuuuccaacaagacag

SEQ ID NO: 56126 - RNA, 22 nt, Human
ucuguuggacauucaucugcag

SEQ ID NO: 56127 - RNA, 22 nt, Human
ucuguuuauucaauuucuauau

SEQ ID NO: 56128 - RNA, 17 nt, Human
ucuguuucuccuuucuu

SEQ ID NO: 56129 - RNA, 22 nt, Human
ucuguuugcuggugcauggguu

SEQ ID NO: 56130 - RNA, 22 nt, Human
ucuuaaaccacaaaauucagag

SEQ ID NO: 56131 - RNA, 22 nt, Human
ucuuaaacuuugcuguaauucu

SEQ ID NO: 56132 - RNA, 22 nt, Human
ucuuaaaugacugauaagagga

SEQ ID NO: 56133 - RNA, 22 nt, Human
ucuuaacagugcuacagagcag

SEQ ID NO: 56134 - RNA, 22 nt, Human
ucuuaacauauuauuuuagcac

SEQ ID NO: 56135 - RNA, 22 nt, Human
ucuuaacugacaguuuaauggg

SEQ ID NO: 56136 - RNA, 22 nt, Human
ucuuaagaaagugacaaauagg

SEQ ID NO: 56137 - RNA, 22 nt, Human
ucuuaagcagagaagaaguuga

SEQ ID NO: 56138 - RNA, 20 nt, Human
ucuuacaaucguuacaucca

SEQ ID NO: 56139 - RNA, 22 nt, Human
ucuuacaccauucaaauauuuu

SEQ ID NO: 56140 - RNA, 22 nt, Human
ucuuacagaaaauagauaacau

SEQ ID NO: 56141 - RNA, 22 nt, Human
ucuuacagccacucugugaagc

SEQ ID NO: 56142 - RNA, 22 nt, Human
ucuuagaaauuccccaguggcu

SEQ ID NO: 56143 - RNA, 22 nt, Human
ucuuagaaugucaacugauguu

SEQ ID NO: 56144 - RNA, 22 nt, Human
ucuuagcaaauacuacuuagaa

SEQ ID NO: 56145 - RNA, 22 nt, Human
ucuuagcagacuuggcuacugu

SEQ ID NO: 56146 - RNA, 22 nt, Human
ucuuagguguaugucauuaggg

SEQ ID NO: 56147 - RNA, 16 nt, Human
ucuuaguuguguggua

SEQ ID NO: 56148 - RNA, 22 nt, Human
ucuuauaaucucuauuuuaaug

SEQ ID NO: 56149 - RNA, 20 nt, Human
ucuuauacagaaaacauuuu

SEQ ID NO: 56150 - RNA, 21 nt, Human
ucuuauacagcaauagaucug

SEQ ID NO: 56151 - RNA, 22 nt, Human
ucuuauagcucaaaggaagagu

SEQ ID NO: 56152 - RNA, 22 nt, Human
ucuuauugucuagauugagaug

SEQ ID NO: 56153 - RNA, 20 nt, Human
ucuuauugucuugaggaguu

SEQ ID NO: 56154 - RNA, 22 nt, Human
ucuuauuuagagaggacuagag

SEQ ID NO: 56155 - RNA, 22 nt, Human
ucuuauuuuguuagaugcugua

SEQ ID NO: 56156 - RNA, 22 nt, Human
ucuucaaaaacugcaccuugcu

SEQ ID NO: 56157 - RNA, 22 nt, Human
ucuucaaaaauacagguuuuca

SEQ ID NO: 56158 - RNA, 22 nt, Human
ucuucaaacccuggcucuuccu

SEQ ID NO: 56159 - RNA, 22 nt, Human
ucuucaauauguguuuaauauu

SEQ ID NO: 56160 - RNA, 22 nt, Human
ucuucacaaagcuguuguuaaa

SEQ ID NO: 56161 - RNA, 22 nt, Human
ucuucacauuuuaagaaguucu

SEQ ID NO: 56162 - RNA, 22 nt, Human
ucuucacugaugucucucaaau

SEQ ID NO: 56163 - RNA, 22 nt, Human
ucuucagaagaucacaucagug

SEQ ID NO: 56164 - RNA, 22 nt, Human
ucuucagacccuuagcugugau

SEQ ID NO: 56165 - RNA, 22 nt, Human
ucuucagaggagcugaauauau

SEQ ID NO: 56166 - RNA, 22 nt, Human
ucuucagagugaaagucuguga

SEQ ID NO: 56167 - RNA, 22 nt, Human
ucuucagcucugaggcucuggc

SEQ ID NO: 56168 - RNA, 22 nt, Human
ucuucaggguaugggaaaggga

SEQ ID NO: 56169 - RNA, 22 nt, Human
ucuucagguuaacuugucuuuu

SEQ ID NO: 56170 - RNA, 22 nt, Human
ucuucauauauaaaguggaaua

SEQ ID NO: 56171 - RNA, 22 nt, Human
ucuucaucucagauuaacagga

SEQ ID NO: 56172 - RNA, 22 nt, Human
ucuucaugaaugaaucuuugac

SEQ ID NO: 56173 - RNA, 22 nt, Human
ucuucaugauacccuaagccac

SEQ ID NO: 56174 - RNA, 22 nt, Human
ucuucauguugcuguagggaga

SEQ ID NO: 56175 - RNA, 22 nt, Human
ucuucauguugcuuauucuggg

SEQ ID NO: 56176 - RNA, 22 nt, Human
ucuuccaaaauuagucucaguu

SEQ ID NO: 56177 - RNA, 18 nt, Human
ucuuccaacacugacacc

SEQ ID NO: 56178 - RNA, 22 nt, Human
ucuuccaaggugcagaucuucu

SEQ ID NO: 56179 - RNA, 22 nt, Human
ucuuccaaugguuucuagauuu

SEQ ID NO: 56180 - RNA, 22 nt, Human
ucuuccagaaucucagagggcu

SEQ ID NO: 56181 - RNA, 22 nt, Human
ucuuccagcaaugugaaaucac

SEQ ID NO: 56182 - RNA, 22 nt, Human
ucuuccagccaauagcguccuu

SEQ ID NO: 56183 - RNA, 22 nt, Human
ucuuccagcuccccacgguguc

SEQ ID NO: 56184 - RNA, 22 nt, Human
ucuuccaggaccuggggcucca

SEQ ID NO: 56185 - RNA, 22 nt, Human
ucuuccaggagggcauuucuuu

SEQ ID NO: 56186 - RNA, 22 nt, Human
ucuuccaggagggugggcaaac

SEQ ID NO: 56187 - RNA, 22 nt, Human
ucuuccaguguagacaucugcc

SEQ ID NO: 56188 - RNA, 22 nt, Human
ucuucccacugcccaugggcag

SEQ ID NO: 56189 - RNA, 22 nt, Human
ucuucccccgugcuccagugca

SEQ ID NO: 56190 - RNA, 21 nt, Human
ucuucccucaggauguccugc

SEQ ID NO: 56191 - RNA, 22 nt, Human
ucuuccucaauguaacaacccc

SEQ ID NO: 56192 - RNA, 22 nt, Human
ucuuccugcuuggugugucugg

SEQ ID NO: 56193 - RNA, 22 nt, Human
ucuuccuggauggggguugaug

SEQ ID NO: 56194 - RNA, 22 nt, Human
ucuuccuggcauugaugcugca

SEQ ID NO: 56195 - RNA, 22 nt, Human
ucuuccuucgcccuugcuguuu

SEQ ID NO: 56196 - RNA, 22 nt, Human
ucuuccuugcuccuugucacuu

SEQ ID NO: 56197 - RNA, 22 nt, Human
ucuuccuuguaagggcuuuaga

SEQ ID NO: 56198 - RNA, 22 nt, Human
ucuuccuuucauucauguguua

SEQ ID NO: 56199 - RNA, 22 nt, Human
ucuucuaugaaucauuggaaca

SEQ ID NO: 56200 - RNA, 22 nt, Human
ucuucucaaaaaauguaggugg

SEQ ID NO: 56201 - RNA, 22 nt, Human
ucuucuccauaaucaacacucu

SEQ ID NO: 56202 - RNA, 22 nt, Human
ucuucucuguggccugguggug

SEQ ID NO: 56203 - RNA, 22 nt, Human
ucuucuguauuguuaacucagg

SEQ ID NO: 56204 - RNA, 22 nt, Human
ucuucugugagaauucaagcaa

SEQ ID NO: 56205 - RNA, 22 nt, Human
ucuucugugaucuauguguuuu

SEQ ID NO: 56206 - RNA, 20 nt, Human
ucuucuguugccuuguucug

SEQ ID NO: 56207 - RNA, 22 nt, Human
ucuucuucccaucccucaaaug

SEQ ID NO: 56208 - RNA, 22 nt, Human
ucuucuuuaugucauaugccag

SEQ ID NO: 56209 - RNA, 22 nt, Human
ugcaauuucaggcauauauugu

SEQ ID NO: 56210 - RNA, 22 nt, Human
ugcaauuuucagaaauuccaaa

SEQ ID NO: 56211 - RNA, 22 nt, Human
ugcaauuuuuaucaauucagca

SEQ ID NO: 56212 - RNA, 22 nt, Human
ugcaauuuuuuagcacaaggag

SEQ ID NO: 56213 - RNA, 22 nt, Human
ugcacaaacacagagaauagau

SEQ ID NO: 56214 - RNA, 21 nt, Human
ugcacaaacuuucuguggcuu

SEQ ID NO: 56215 - RNA, 22 nt, Human
ugcacaagucagaguaacauuu

SEQ ID NO: 56216 - RNA, 22 nt, Human
ugcacacaaaugugaacgugcc

SEQ ID NO: 56217 - RNA, 22 nt, Human
ugcacacaaguuggagaaugaa

SEQ ID NO: 56218 - RNA, 22 nt, Human
ugcacacacgcggcacaucugu

SEQ ID NO: 56219 - RNA, 22 nt, Human
ugcacacagccagugaguggca

SEQ ID NO: 56220 - RNA, 22 nt, Human
ugcacacaguggacaagucuug

SEQ ID NO: 56221 - RNA, 22 nt, Human
ugcacacauuaaggauacacag

SEQ ID NO: 56222 - RNA, 22 nt, Human
ugcacagagcuggacuccgcgg

SEQ ID NO: 56223 - RNA, 22 nt, Human
ugcacagauagugauagauagc

SEQ ID NO: 56224 - RNA, 22 nt, Human
uucaagacuccaagaaauuagu

SEQ ID NO: 56225 - RNA, 22 nt, Human
uucaagaguccaggagagucug

SEQ ID NO: 56226 - RNA, 22 nt, Human
uucaagaugcacaguggcauuc

SEQ ID NO: 56227 - RNA, 22 nt, Human
uucaagauggcaccagugagug

SEQ ID NO: 56228 - RNA, 22 nt, Human
uucaagcaccaaauuaguaggc

SEQ ID NO: 56229 - RNA, 22 nt, Human
uucaagcagagauauuucaaga

SEQ ID NO: 56230 - RNA, 22 nt, Human
uucaaggaaaccagcauuuggu

SEQ ID NO: 56231 - RNA, 22 nt, Human
uucaagguucagggagaaauug

SEQ ID NO: 56232 - RNA, 19 nt, Human
uucaaguaaacuauuauua

SEQ ID NO: 56233 - RNA, 22 nt, Human
uucaaguaaaucacuuuuuguc

SEQ ID NO: 56234 - RNA, 22 nt, Human
uucaaguacauuguguuuuccu

SEQ ID NO: 56235 - RNA, 22 nt, Human
uucaaguacuguagauuucagg

SEQ ID NO: 56236 - RNA, 22 nt, Human
uucaaguagaaaguauugauga

SEQ ID NO: 56237 - RNA, 22 nt, Human
uucaaguaggccagcugcaugg

SEQ ID NO: 56238 - RNA, 22 nt, Human
uucaagucauguuaacugcuuc

SEQ ID NO: 56239 - RNA, 22 nt, Human
uucaaguccuuuggaaggccug

SEQ ID NO: 56240 - RNA, 22 nt, Human
uucaaguuaccuuuaaacagcu

SEQ ID NO: 56241 - RNA, 22 nt, Human
uucaaguucauguguagucagu

SEQ ID NO: 56242 - RNA, 22 nt, Human
uucaaguuuguauuucuguauu

SEQ ID NO: 56243 - RNA, 22 nt, Human
uucaauagaaaugacauucuuu

SEQ ID NO: 56244 - RNA, 22 nt, Human
uucaauagcauacuuuugcucu

SEQ ID NO: 56245 - RNA, 22 nt, Human
uucaaugagcccggggccauag

SEQ ID NO: 56246 - RNA, 22 nt, Human
uucaauucaauucuaaauauau

SEQ ID NO: 56247 - RNA, 22 nt, Human
uucaauucuaaacuaauauucu

SEQ ID NO: 56248 - RNA, 22 nt, Human
uucaauucugcucugaucuuag

SEQ ID NO: 56249 - RNA, 22 nt, Human
uucaauuucauaauaucuagcu

SEQ ID NO: 56250 - RNA, 18 nt, Human
uucacaagggcuugguuu

SEQ ID NO: 56251 - RNA, 22 nt, Human
uucacaagucuggaauaugcua

SEQ ID NO: 56252 - RNA, 22 nt, Human
uucacaauaauguccauccucu

SEQ ID NO: 56253 - RNA, 22 nt, Human
uucacaaucuggcuuagcauug

SEQ ID NO: 56254 - RNA, 22 nt, Human
uucacaaugccagcaaccacuu

SEQ ID NO: 56255 - RNA, 22 nt, Human
uucacaauggcaaaccauuaaa

SEQ ID NO: 56256 - RNA, 22 nt, Human
uucacacucucacucccugacc

SEQ ID NO: 56257 - RNA, 22 nt, Human
uucacacugucccggguggaaa

SEQ ID NO: 56258 - RNA, 22 nt, Human
uucacagaccaggaggcuguga

SEQ ID NO: 56259 - RNA, 20 nt, Human
uucacagaggacucagguca

SEQ ID NO: 56260 - RNA, 22 nt, Human
uucacaggauauaugugcaggg

SEQ ID NO: 56261 - RNA, 22 nt, Human
uucacaguaaguaggauaguug

SEQ ID NO: 56262 - RNA, 22 nt, Human
uucacaguggcuuaggcuaugg

SEQ ID NO: 56263 - RNA, 22 nt, Human
uucacagugugaucuaugggca

SEQ ID NO: 56264 - RNA, 22 nt, Human
uucacauaaaagcuccaaagaa

SEQ ID NO: 56265 - RNA, 17 nt, Human
uucacauccgagaacaa

SEQ ID NO: 56266 - RNA, 22 nt, Human
uucacaucuauaacuuagauaa

SEQ ID NO: 56267 - RNA, 22 nt, Human
uucacauguuggacauagagga

SEQ ID NO: 56268 - RNA, 22 nt, Human
uucacauuacaaggccauauuu

SEQ ID NO: 56269 - RNA, 22 nt, Human
uucacauuccgcggcuauuuuc

SEQ ID NO: 56270 - RNA, 22 nt, Human
uucacauugguucuugauagcu

SEQ ID NO: 56271 - RNA, 20 nt, Human
uucacauuucuguagugauu

SEQ ID NO: 56272 - RNA, 22 nt, Human
uucacauuugaaaggaaagaua

SEQ ID NO: 56273 - RNA, 22 nt, Human
uucaccagagguuagaauauuu

SEQ ID NO: 56274 - RNA, 22 nt, Human
uucaccagauuuuguauaguca

SEQ ID NO: 56275 - RNA, 18 nt, Human
uucaccagugugaugggu

SEQ ID NO: 56276 - RNA, 22 nt, Human
uucaccaugggaugacaacagu

SEQ ID NO: 56277 - RNA, 22 nt, Human
uucacccacuagagaacucagg

SEQ ID NO: 56278 - RNA, 22 nt, Human
uucacccuggaccagaaauugg

SEQ ID NO: 56279 - RNA, 22 nt, Human
uucaccugugacagguagaguu

SEQ ID NO: 56280 - RNA, 22 nt, Human
uucaccuguguuuuguggcuga

SEQ ID NO: 56281 - RNA, 19 nt, Human
uucacuaggucacaagguc

SEQ ID NO: 56282 - RNA, 22 nt, Human
uucacuauaaaguuucaacuuu

SEQ ID NO: 56283 - RNA, 22 nt, Human
uucacucuucggcaucucugua

SEQ ID NO: 56284 - RNA, 22 nt, Human
uucacugaauuaauuuccuucu

SEQ ID NO: 56285 - RNA, 22 nt, Human
uucacugccaacuaacauggaa

SEQ ID NO: 56286 - RNA, 22 nt, Human
uucacugcugggugauuggguu

SEQ ID NO: 56287 - RNA, 22 nt, Human
uucacuguaugagagggcuuga

SEQ ID NO: 56288 - RNA, 22 nt, Human
uucacugugauggugcagaggc

SEQ ID NO: 56289 - RNA, 22 nt, Human
uucacuuauagggauguuauug

SEQ ID NO: 56290 - RNA, 22 nt, Human
uucagaaaaaacuucaauaagu

SEQ ID NO: 56291 - RNA, 22 nt, Human
uucagaaacccauugggucucu

SEQ ID NO: 56292 - RNA, 22 nt, Human
uucagaaaggauaauuggaagg

SEQ ID NO: 56293 - RNA, 22 nt, Human
uucagaaagugaaucuuguuau

SEQ ID NO: 56294 - RNA, 20 nt, Human
uucagaaauaaggaaugagg

SEQ ID NO: 56295 - RNA, 22 nt, Human
uucagaaaucgaguuucauguc

SEQ ID NO: 56296 - RNA, 22 nt, Human
uucagaacaauaugaacagaac

SEQ ID NO: 56297 - RNA, 22 nt, Human
uucagaaguuuucaaaacuaag

SEQ ID NO: 56298 - RNA, 22 nt, Human
uucagaauauuauuuuaaaggc

SEQ ID NO: 56299 - RNA, 22 nt, Human
uucagaaugagaauggaugggu

SEQ ID NO: 56300 - RNA, 22 nt, Human
uucagaaugauuucagcgagca

SEQ ID NO: 56301 - RNA, 22 nt, Human
uucagaaugugaccuuauuugg

SEQ ID NO: 56302 - RNA, 19 nt, Human
uucagaauugggaggugau

SEQ ID NO: 56303 - RNA, 22 nt, Human
uucagacuggcuacauuuucau

SEQ ID NO: 56304 - RNA, 22 nt, Human
uucagacuuaaaagaucccagc

SEQ ID NO: 56305 - RNA, 22 nt, Human
uucagacuuuguggggcccucc

SEQ ID NO: 56306 - RNA, 22 nt, Human
uucagagagaaaccagugggaa

SEQ ID NO: 56307 - RNA, 22 nt, Human
uucagagcagauauugaagggu

SEQ ID NO: 56308 - RNA, 22 nt, Human
uucagagccagcaacacuaggc

SEQ ID NO: 56309 - RNA, 16 nt, Human
uucagagcggcucaua

SEQ ID NO: 56310 - RNA, 22 nt, Human
uucagaggcuguaugacuagau

SEQ ID NO: 56311 - RNA, 22 nt, Human
uucagagggacauucaagggaa

SEQ ID NO: 56312 - RNA, 22 nt, Human
uucagagguagagaggaucuug

SEQ ID NO: 56313 - RNA, 20 nt, Human
uucagaggugaaguuguggu

SEQ ID NO: 56314 - RNA, 22 nt, Human
uucagaggugggcugagaggau

SEQ ID NO: 56315 - RNA, 22 nt, Human
uucagagguuagagcaguggga

SEQ ID NO: 56316 - RNA, 22 nt, Human
uucagcaaacacgaugcuuguu

SEQ ID NO: 56317 - RNA, 22 nt, Human
uucagcaaauggacuguucagg

SEQ ID NO: 56318 - RNA, 22 nt, Human
ucuugcagaagaagcugccaag

SEQ ID NO: 56319 - RNA, 22 nt, Human
ucuugcagagggcccuucugcu

SEQ ID NO: 56320 - RNA, 22 nt, Human
ucuugcaggcaugaaaggacuc

SEQ ID NO: 56321 - RNA, 22 nt, Human
ucuugcaggcggcucagcaacc

SEQ ID NO: 56322 - RNA, 22 nt, Human
ucuugccucuuccccuuuccau

SEQ ID NO: 56323 - RNA, 22 nt, Human
ucuugcuagaaucauuuggaga

SEQ ID NO: 56324 - RNA, 22 nt, Human
ucuugcuaggagcuauggaaga

SEQ ID NO: 56325 - RNA, 22 nt, Human
ucuugcugaaaacaaaucucuu

SEQ ID NO: 56326 - RNA, 22 nt, Human
ucuugcuguguauugcaucucc

SEQ ID NO: 56327 - RNA, 22 nt, Human
ucuugcuguuacagaauuaaca

SEQ ID NO: 56328 - RNA, 20 nt, Human
ucuuggaaaaaguucagaau

SEQ ID NO: 56329 - RNA, 22 nt, Human
ucuuggaacccuaugugauuuc

SEQ ID NO: 56330 - RNA, 22 nt, Human
ucuuggaauaccccgaagguca

SEQ ID NO: 56331 - RNA, 22 nt, Human
ucuuggacucaaaauugccuua

SEQ ID NO: 56332 - RNA, 22 nt, Human
ucuuggaggagaguaaguaccu

SEQ ID NO: 56333 - RNA, 22 nt, Human
ucuuggaguauugggccucagg

SEQ ID NO: 56334 - RNA, 22 nt, Human
ucuuggcaaguggcagauucuu

SEQ ID NO: 56335 - RNA, 22 nt, Human
ucuuggccacuaccaccuggag

SEQ ID NO: 56336 - RNA, 22 nt, Human
ucuuggccccaccugugccagc

SEQ ID NO: 56337 - RNA, 22 nt, Human
ucuuggcuacuuaggaggauuc

SEQ ID NO: 56338 - RNA, 22 nt, Human
ucuuggcucccuuguaggcccu

SEQ ID NO: 56339 - RNA, 21 nt, Human
ucuuggcucugccacuuauua

SEQ ID NO: 56340 - RNA, 22 nt, Human
ucuuggcugcguccuggcugug

SEQ ID NO: 56341 - RNA, 22 nt, Human
ucuuggcuguaccauugacuag

SEQ ID NO: 56342 - RNA, 22 nt, Human
ucuuggcuucuguauuuccugu

SEQ ID NO: 56343 - RNA, 22 nt, Human
ucuugggaaauguuugcgagcu

SEQ ID NO: 56344 - RNA, 22 nt, Human
ucuuggucuuucauccuucaac

SEQ ID NO: 56345 - RNA, 22 nt, Human
ucuuguauguguauuuugcugu

SEQ ID NO: 56346 - RNA, 21 nt, Human
ucuuguccuugcucucccacu

SEQ ID NO: 56347 - RNA, 22 nt, Human
ucuugugugguggaagauaugg

SEQ ID NO: 56348 - RNA, 22 nt, Human
ucuuguuucuguauauaaugac

SEQ ID NO: 56349 - RNA, 22 nt, Human
ucuuuaacaggaauuauuacag

SEQ ID NO: 56350 - RNA, 22 nt, Human
ucuuuaagaguaauuauuuugg

SEQ ID NO: 56351 - RNA, 22 nt, Human
ucuuuaagaguucauuugcaug

SEQ ID NO: 56352 - RNA, 22 nt, Human
ucuuuaaggugauuucugcuac

SEQ ID NO: 56353 - RNA, 18 nt, Human
ucuuuaaguugucagagu

SEQ ID NO: 56354 - RNA, 22 nt, Human
ucuuuaauauaaaggaaugaau

SEQ ID NO: 56355 - RNA, 22 nt, Human
ucuuuaaucauaaccaagaugg

SEQ ID NO: 56356 - RNA, 22 nt, Human
ugcaggcucugguuuauagugc

SEQ ID NO: 56357 - RNA, 22 nt, Human
ugcaggcugcaccccugcccug

SEQ ID NO: 56358 - RNA, 22 nt, Human
ugcaggcugccuucacagagcc

SEQ ID NO: 56359 - RNA, 22 nt, Human
ugcaggcugggaagagggacaa

SEQ ID NO: 56360 - RNA, 22 nt, Human
ugcaggcuguaaucugaggcua

SEQ ID NO: 56361 - RNA, 17 nt, Human
ugcaggcuguuauagcc

SEQ ID NO: 56362 - RNA, 21 nt, Human
ugcaggcuguuuaagaggcaa

SEQ ID NO: 56363 - RNA, 22 nt, Human
ugcaggcuuuagccccauggcu

SEQ ID NO: 56364 - RNA, 22 nt, Human
ugcagggaaaacccaggaugcu

SEQ ID NO: 56365 - RNA, 22 nt, Human
ugcagggaauccagucuagggu

SEQ ID NO: 56366 - RNA, 22 nt, Human
ugcagggaaugcuugcagcaug

SEQ ID NO: 56367 - RNA, 22 nt, Human
ugcagggagcucuggggugcag

SEQ ID NO: 56368 - RNA, 23 nt, Human
ugcagggcaaguuagagacccca

SEQ ID NO: 56369 - RNA, 22 nt, Human
ugcagggcaguggagguugagu

SEQ ID NO: 56370 - RNA, 22 nt, Human
ugcagggcauaggguccaguuu

SEQ ID NO: 56371 - RNA, 22 nt, Human
ugcagggcaucuuugaagugug

SEQ ID NO: 56372 - RNA, 20 nt, Human
ugcagggccuaaaaagggaa

SEQ ID NO: 56373 - RNA, 22 nt, Human
ugcagggccuugggaugugucc

SEQ ID NO: 56374 - RNA, 22 nt, Human
ugcagggccuuguugaugugcu

SEQ ID NO: 56375 - RNA, 22 nt, Human
ugcagggcuacaggacuacaac

SEQ ID NO: 56376 - RNA, 22 nt, Human
ugcagggcuauaacuccauucu

SEQ ID NO: 56377 - RNA, 22 nt, Human
ugcagggugcacaguggggugc

SEQ ID NO: 56378 - RNA, 23 nt, Human
ugcagguagggcccagcagucuu

SEQ ID NO: 56379 - RNA, 22 nt, Human
ugcaggucaaucuucagguucc

SEQ ID NO: 56380 - RNA, 22 nt, Human
ugcaggucucugcaaggccuau

SEQ ID NO: 56381 - RNA, 22 nt, Human
ugcaggugcguuuucaagccuc

SEQ ID NO: 56382 - RNA, 22 nt, Human
ugcagguggauaucucaucaga

SEQ ID NO: 56383 - RNA, 23 nt, Human
ugcaggugugcagagggcucuug

SEQ ID NO: 56384 - RNA, 22 nt, Human
ugcaggugugggcaggggagca

SEQ ID NO: 56385 - RNA, 22 nt, Human
ugcaggugugugcaagggaggg

SEQ ID NO: 56386 - RNA, 22 nt, Human
ugcagucagcauuagcaaaaua

SEQ ID NO: 56387 - RNA, 22 nt, Human
ugcaguccuaaauauauagcug

SEQ ID NO: 56388 - RNA, 22 nt, Human
ugcaguccuggugaggggacau

SEQ ID NO: 56389 - RNA, 22 nt, Human
ugcagugaggcaguuggguugg

SEQ ID NO: 56390 - RNA, 22 nt, Human
ugcagugauuaaaguguuaaau

SEQ ID NO: 56391 - RNA, 22 nt, Human
ugcaguggaacaauuucaacag

SEQ ID NO: 56392 - RNA, 22 nt, Human
ugcaguggaaucuggagagcag

SEQ ID NO: 56393 - RNA, 22 nt, Human
ugcaguggaggccgugagacag

SEQ ID NO: 56394 - RNA, 22 nt, Human
ugcagugggccggaggccaggg

SEQ ID NO: 56395 - RNA, 21 nt, Human
ugcagugucccuaacaguggu

SEQ ID NO: 56396 - RNA, 22 nt, Human
ugcagugugcuagauuuggacu

SEQ ID NO: 56397 - RNA, 22 nt, Human
ugcaguguggccaugucagcua

SEQ ID NO: 56398 - RNA, 22 nt, Human
ugcaguguucagugaucucucc

SEQ ID NO: 56399 - RNA, 22 nt, Human
ugcaguguuccuguagccugcc

SEQ ID NO: 56400 - RNA, 22 nt, Human
ugcaguguuuggaugcugaguc

SEQ ID NO: 56401 - RNA, 22 nt, Human
ugcaguuuucucacccccacaa

SEQ ID NO: 56402 - RNA, 22 nt, Human
ugcauaaaauaugagaaaugua

SEQ ID NO: 56403 - RNA, 22 nt, Human
ugcauaaauauuguugggagua

SEQ ID NO: 56404 - RNA, 22 nt, Human
ugcauaauggaugauuucacaa

SEQ ID NO: 56405 - RNA, 22 nt, Human
ugcauacacaugugcacauacg

SEQ ID NO: 56406 - RNA, 22 nt, Human
ugcauacauaaucgagaccagu

SEQ ID NO: 56407 - RNA, 22 nt, Human
ugcauacuuguauguguuacau

SEQ ID NO: 56408 - RNA, 22 nt, Human
ugcauauacccgcauuuacaua

SEQ ID NO: 56409 - RNA, 19 nt, Human
ugcauauaucuaugaaaga

SEQ ID NO: 56410 - RNA, 22 nt, Human
ugcauauuuucugauucagaag

SEQ ID NO: 56411 - RNA, 22 nt, Human
ugcaucaaaacuggacuccuuc

SEQ ID NO: 56412 - RNA, 22 nt, Human
ugcaucaaccuaauaucagcuc

SEQ ID NO: 56413 - RNA, 19 nt, Human
ugcauccaaagccccacca

SEQ ID NO: 56414 - RNA, 22 nt, Human
ugcauccuccuuuguccucuug

SEQ ID NO: 56415 - RNA, 22 nt, Human
ugcauccuguucuagguuuggg

SEQ ID NO: 56416 - RNA, 22 nt, Human
ugcaucuuacguuuugaaaggg

SEQ ID NO: 56417 - RNA, 21 nt, Human
ugcaucuucaagguuggcagg

SEQ ID NO: 56418 - RNA, 22 nt, Human
ugcaugaaauauuuucuguagg

SEQ ID NO: 56419 - RNA, 22 nt, Human
ugcaugaacacaugugcaugua

SEQ ID NO: 56420 - RNA, 22 nt, Human
ugcaugacaauugccgucaagu

SEQ ID NO: 56421 - RNA, 22 nt, Human
ugcaugaugacuaaggugguga

SEQ ID NO: 56422 - RNA, 22 nt, Human
ugcaugcaacaauucuucuaua

SEQ ID NO: 56423 - RNA, 22 nt, Human
ugcaugcacauguagguauggu

SEQ ID NO: 56424 - RNA, 22 nt, Human
ugcaugcauaaauguacacaca

SEQ ID NO: 56425 - RNA, 23 nt, Human
ugcaugcuaacacagugcacagg

SEQ ID NO: 56426 - RNA, 22 nt, Human
ugcaugcuccacagcccauuca

SEQ ID NO: 56427 - RNA, 22 nt, Human
uucugagagugccagaaguucu

SEQ ID NO: 56428 - RNA, 20 nt, Human
uucugagauuagguuacaaa

SEQ ID NO: 56429 - RNA, 22 nt, Human
uucugagauuguuaggcacuaa

SEQ ID NO: 56430 - RNA, 22 nt, Human
uucugagccagagucaguuaug

SEQ ID NO: 56431 - RNA, 22 nt, Human
uucugaggaggagcaaaaacuc

SEQ ID NO: 56432 - RNA, 22 nt, Human
uucugaggcacuggcucuccca

SEQ ID NO: 56433 - RNA, 22 nt, Human
uucugaggccauuaccaauaaa

SEQ ID NO: 56434 - RNA, 22 nt, Human
uucugagggaaccuuguucuug

SEQ ID NO: 56435 - RNA, 22 nt, Human
uucugauaacaaacaccaauuu

SEQ ID NO: 56436 - RNA, 22 nt, Human
uucugauacuggaaucgaugcc

SEQ ID NO: 56437 - RNA, 22 nt, Human
uucugauuguuggaggaugcuu

SEQ ID NO: 56438 - RNA, 22 nt, Human
uucugcagcccaacaguaguuu

SEQ ID NO: 56439 - RNA, 22 nt, Human
uucugcaggaugcucugguggu

SEQ ID NO: 56440 - RNA, 22 nt, Human
uucugcaggcuguacaagaagc

SEQ ID NO: 56441 - RNA, 22 nt, Human
uucugcauaggcuauauuuguu

SEQ ID NO: 56442 - RNA, 22 nt, Human
uucugcaucccagaagaggaca

SEQ ID NO: 56443 - RNA, 22 nt, Human
uucugcauccuaugaucgcaua

SEQ ID NO: 56444 - RNA, 22 nt, Human
uucugcaugcccucuguguggc

SEQ ID NO: 56445 - RNA, 22 nt, Human
uucugcauggagaaacugaguc

SEQ ID NO: 56446 - RNA, 17 nt, Human
uucugcaugugaagaug

SEQ ID NO: 56447 - RNA, 22 nt, Human
uucugcauuggagucuauucuu

SEQ ID NO: 56448 - RNA, 22 nt, Human
uucugcauuuaaaauauuacua

SEQ ID NO: 56449 - RNA, 22 nt, Human
uucugccaaaggcuuuguuuug

SEQ ID NO: 56450 - RNA, 22 nt, Human
uucugccaucugcagaagggga

SEQ ID NO: 56451 - RNA, 22 nt, Human
uucugccuuggcaggguggucc

SEQ ID NO: 56452 - RNA, 22 nt, Human
uucugcuauacuuaugaauaca

SEQ ID NO: 56453 - RNA, 22 nt, Human
uucugcuaugaaaaaagugcug

SEQ ID NO: 56454 - RNA, 22 nt, Human
uucugcucaguaguaagagugc

SEQ ID NO: 56455 - RNA, 22 nt, Human
uucugcugaagucacugggagc

SEQ ID NO: 56456 - RNA, 22 nt, Human
uucugcugcugcugcacccaau

SEQ ID NO: 56457 - RNA, 22 nt, Human
uucugcuguaguugcaucuguu

SEQ ID NO: 56458 - RNA, 21 nt, Human
uucugcugugccaugccucug

SEQ ID NO: 56459 - RNA, 21 nt, Human
uucugcuguucaccaccaccc

SEQ ID NO: 56460 - RNA, 22 nt, Human
uucugcuuauucuguagccuuu

SEQ ID NO: 56461 - RNA, 22 nt, Human
uucugcuucacuggccuggagg

SEQ ID NO: 56462 - RNA, 22 nt, Human
uucugcuucugugugucccagg

SEQ ID NO: 56463 - RNA, 20 nt, Human
uucugcuugcaaauaucaag

SEQ ID NO: 56464 - RNA, 22 nt, Human
uucuggaaaagaaaguuaagau

SEQ ID NO: 56465 - RNA, 19 nt, Human
uucuggaaacccagguaau

SEQ ID NO: 56466 - RNA, 22 nt, Human
uucuggaaacccucagccagug

SEQ ID NO: 56467 - RNA, 22 nt, Human
uucuggaaaucagcagagggug

SEQ ID NO: 56468 - RNA, 22 nt, Human
uucuggaaaugcacaacuaauu

SEQ ID NO: 56469 - RNA, 23 nt, Human
uucuggaagauuuacuugagaca

SEQ ID NO: 56470 - RNA, 22 nt, Human
uucuggaaguggaauuuuugua

SEQ ID NO: 56471 - RNA, 22 nt, Human
uucuggaaguuggaaauagcag

SEQ ID NO: 56472 - RNA, 22 nt, Human
ucuuuacaagucacauuuucug

SEQ ID NO: 56473 - RNA, 22 nt, Human
ucuuuacaaucuaagcauaguu

SEQ ID NO: 56474 - RNA, 22 nt, Human
ucuuuacacaagacaagaauaa

SEQ ID NO: 56475 - RNA, 21 nt, Human
ucuuuacauuugccucuugca

SEQ ID NO: 56476 - RNA, 22 nt, Human
ucuuuagacauccaguuucucu

SEQ ID NO: 56477 - RNA, 22 nt, Human
ucuuuagcuaacuggaugccaa

SEQ ID NO: 56478 - RNA, 22 nt, Human
ucuuuaucaagucuguucuuug

SEQ ID NO: 56479 - RNA, 22 nt, Human
ucuuuaucaggugaagagggac

SEQ ID NO: 56480 - RNA, 22 nt, Human
ucuuuaucuggcucagagacac

SEQ ID NO: 56481 - RNA, 22 nt, Human
ucuuuaugagaaaaagauugua

SEQ ID NO: 56482 - RNA, 22 nt, Human
ucuuuauguuuacuccagcuga

SEQ ID NO: 56483 - RNA, 22 nt, Human
ucuuuauguuugaaaguacaau

SEQ ID NO: 56484 - RNA, 22 nt, Human
ucuuuauugcuacugguuuguc

SEQ ID NO: 56485 - RNA, 22 nt, Human
ucuuuauuuuaugcuugugcaa

SEQ ID NO: 56486 - RNA, 22 nt, Human
ucuuucaaaguaacaaccacga

SEQ ID NO: 56487 - RNA, 22 nt, Human
ucuuucaagggcccuaguuugg

SEQ ID NO: 56488 - RNA, 22 nt, Human
ucuuucaaugugaaaccaugua

SEQ ID NO: 56489 - RNA, 22 nt, Human
ucuuucagaaacuuugucugcg

SEQ ID NO: 56490 - RNA, 22 nt, Human
ucuuuccaaggacucuguagca

SEQ ID NO: 56491 - RNA, 22 nt, Human
ucuuuccaaguaauacuuccca

SEQ ID NO: 56492 - RNA, 22 nt, Human
ucuuuccagaggaauuuuuaga

SEQ ID NO: 56493 - RNA, 22 nt, Human
ucuuuccccuacauuugguuaa

SEQ ID NO: 56494 - RNA, 23 nt, Human
ucuuuccucagcacacaccaaga

SEQ ID NO: 56495 - RNA, 22 nt, Human
ucuuuccucugagcuccuguag

SEQ ID NO: 56496 - RNA, 22 nt, Human
ucuuucggccauagcgaugauu

SEQ ID NO: 56497 - RNA, 22 nt, Human
ucuuucuacauuuuauaugcuu

SEQ ID NO: 56498 - RNA, 22 nt, Human
ucuuucugcacuuaguggggcu

SEQ ID NO: 56499 - RNA, 22 nt, Human
ucuuucuugguauucugagcua

SEQ ID NO: 56500 - RNA, 22 nt, Human
ucuuucuugugggugcccuuuu

SEQ ID NO: 56501 - RNA, 22 nt, Human
ucuuugaaaagauauuccuccu

SEQ ID NO: 56502 - RNA, 22 nt, Human
ucuuugaaguaucuuaaauggu

SEQ ID NO: 56503 - RNA, 22 nt, Human
ucuuugaauacaggaagcauga

SEQ ID NO: 56504 - RNA, 22 nt, Human
ucuuugaauccuuuacaucuga

SEQ ID NO: 56505 - RNA, 22 nt, Human
ucuuugauacagauguaagcug

SEQ ID NO: 56506 - RNA, 22 nt, Human
ucuuugaucagccuuucacuga

SEQ ID NO: 56507 - RNA, 22 nt, Human
ucuuugauggagagauagauau

SEQ ID NO: 56508 - RNA, 22 nt, Human
ucuuugaugggagaucugagag

SEQ ID NO: 56509 - RNA, 22 nt, Human
ucuuugcaaauguuauuaucuu

SEQ ID NO: 56510 - RNA, 17 nt, Human
ucuuugcaaugagacug

SEQ ID NO: 56511 - RNA, 22 nt, Human
ucuuugcagccccaggaagugg

SEQ ID NO: 56512 - RNA, 22 nt, Human
ucuuugcaucccuuccauaguu

SEQ ID NO: 56513 - RNA, 22 nt, Human
ucuuugcuccacacucuagaga

SEQ ID NO: 56514 - RNA, 22 nt, Human
ucuuuggaagcuuucagagaag

SEQ ID NO: 56515 - RNA, 22 nt, Human
ucuuuggaaggagcaguuuuug

SEQ ID NO: 56516 - RNA, 22 nt, Human
ucuuuggaaugcuagcauucua

SEQ ID NO: 56517 - RNA, 22 nt, Human
ucuuuggacauguugagguugc

SEQ ID NO: 56518 - RNA, 22 nt, Human
ucuuuggacuuuccaauuuguu

SEQ ID NO: 56519 - RNA, 22 nt, Human
ucuuuggaguguuaucaguaau

SEQ ID NO: 56520 - RNA, 22 nt, Human
ucuuuggauaucgcuagaccgu

SEQ ID NO: 56521 - RNA, 22 nt, Human
ucuuuggauauguauggauaga

SEQ ID NO: 56522 - RNA, 22 nt, Human
ucuuuggaucccaacuggcugg

SEQ ID NO: 56523 - RNA, 22 nt, Human
ucuuuggaugcguuacuuuuac

SEQ ID NO: 56524 - RNA, 19 nt, Human
ucuuuggcuaaauugggug

SEQ ID NO: 56525 - RNA, 22 nt, Human
ucuuuggcuuugccacacccaa

SEQ ID NO: 56526 - RNA, 22 nt, Human
ucuuugggagauguuauuuaua

SEQ ID NO: 56527 - RNA, 22 nt, Human
ucuuugguugcacugcaggugu

SEQ ID NO: 56528 - RNA, 22 nt, Human
ucuuuguaacugucuauugaga

SEQ ID NO: 56529 - RNA, 22 nt, Human
ucuuuguaagacauguaagucc

SEQ ID NO: 56530 - RNA, 22 nt, Human
ucuuuguaaguuauauguagua

SEQ ID NO: 56531 - RNA, 22 nt, Human
ucuuuguacaggaaggcacugu

SEQ ID NO: 56532 - RNA, 18 nt, Human
ucuuuguuuccuucuugc

SEQ ID NO: 56533 - RNA, 22 nt, Human
ucuuuuaaaagcccugcugucu

SEQ ID NO: 56534 - RNA, 22 nt, Human
ucuuuuaagccucuggcauagg

SEQ ID NO: 56535 - RNA, 22 nt, Human
ucuuuuagaaaaguugaaugua

SEQ ID NO: 56536 - RNA, 22 nt, Human
ugcccguggccuggggcagcuu

SEQ ID NO: 56537 - RNA, 22 nt, Human
ugcccucucaaguugagucaga

SEQ ID NO: 56538 - RNA, 22 nt, Human
ugcccucugcaggccgccaugg

SEQ ID NO: 56539 - RNA, 22 nt, Human
ugcccugaugauccuccucgca

SEQ ID NO: 56540 - RNA, 22 nt, Human
ugcccugcagacccugcagugu

SEQ ID NO: 56541 - RNA, 19 nt, Human
ugcccugcccgcagccuug

SEQ ID NO: 56542 - RNA, 22 nt, Human
ugcccugcggcuaucuagauga

SEQ ID NO: 56543 - RNA, 22 nt, Human
ugcccugcuaaauauagguagc

SEQ ID NO: 56544 - RNA, 22 nt, Human
ugcccugcuguggcucugccca

SEQ ID NO: 56545 - RNA, 22 nt, Human
ugcccugcuugguuuauuuuca

SEQ ID NO: 56546 - RNA, 22 nt, Human
ugcccuggaggggcuuacaguc

SEQ ID NO: 56547 - RNA, 22 nt, Human
ugcccuggcgcugucucuaugg

SEQ ID NO: 56548 - RNA, 22 nt, Human
ugcccuggcucuccacuaguuu

SEQ ID NO: 56549 - RNA, 22 nt, Human
ugcccuggcuggagugcagugg

SEQ ID NO: 56550 - RNA, 21 nt, Human
ugcccuggggcucuucccuca

SEQ ID NO: 56551 - RNA, 22 nt, Human
ugcccugguagacacagacugu

SEQ ID NO: 56552 - RNA, 22 nt, Human
ugccuaacuccaccaggcaggu

SEQ ID NO: 56553 - RNA, 22 nt, Human
ugccuagccuucuucaugccau

SEQ ID NO: 56554 - RNA, 22 nt, Human
ugccuagggccuaaccagagcc

SEQ ID NO: 56555 - RNA, 23 nt, Human
ugccuauucagcagagugauagc

SEQ ID NO: 56556 - RNA, 22 nt, Human
ugccucagagaccugacaguac

SEQ ID NO: 56557 - RNA, 22 nt, Human
ugccucagcugaggccgcucca

SEQ ID NO: 56558 - RNA, 22 nt, Human
ugccucaguuucuccauaugaa

SEQ ID NO: 56559 - RNA, 22 nt, Human
ugccuccaggaggggcagcucu

SEQ ID NO: 56560 - RNA, 22 nt, Human
ugccucccucucugccacugga

SEQ ID NO: 56561 - RNA, 22 nt, Human
ugccucuggccuuuggugccca

SEQ ID NO: 56562 - RNA, 22 nt, Human
ugccucugggugaccaaggagc

SEQ ID NO: 56563 - RNA, 22 nt, Human
ugccucuguugagccuuggcug

SEQ ID NO: 56564 - RNA, 22 nt, Human
ugccugaggagucagggcaggu

SEQ ID NO: 56565 - RNA, 22 nt, Human
ugccugaugcaggaguaucaga

SEQ ID NO: 56566 - RNA, 22 nt, Human
ugccugcagcgucuccagcagg

SEQ ID NO: 56567 - RNA, 22 nt, Human
ugccugccaaugaugcuugugu

SEQ ID NO: 56568 - RNA, 17 nt, Human
ugccugccagcauugga

SEQ ID NO: 56569 - RNA, 22 nt, Human
ugccugccaugcagaaagcuga

SEQ ID NO: 56570 - RNA, 18 nt, Human
ugccugccccguaagggu

SEQ ID NO: 56571 - RNA, 22 nt, Human
ugccugcccuuuccacacagcc

SEQ ID NO: 56572 - RNA, 22 nt, Human
ugccugccugcauagucccacg

SEQ ID NO: 56573 - RNA, 22 nt, Human
ugccugcuagauauccagguga

SEQ ID NO: 56574 - RNA, 22 nt, Human
ugccugcuaggcccugcugggu

SEQ ID NO: 56575 - RNA, 22 nt, Human
ugccugcugccacugcuguuac

SEQ ID NO: 56576 - RNA, 22 nt, Human
ugccugcugccuuucaucccaa

SEQ ID NO: 56577 - RNA, 22 nt, Human
ugccugcuuucuccucaacuca

SEQ ID NO: 56578 - RNA, 22 nt, Human
ugccuggaugugcuggccucac

SEQ ID NO: 56579 - RNA, 22 nt, Human
ugccuggcaccccagucugcac

SEQ ID NO: 56580 - RNA, 22 nt, Human
ugccuggcagcuugaaagaaau

SEQ ID NO: 56581 - RNA, 22 nt, Human
ugccuggcucuaucaguggugg

SEQ ID NO: 56582 - RNA, 22 nt, Human
ugccuggcugggcugcucaugg

SEQ ID NO: 56583 - RNA, 22 nt, Human
ugccugggacaugcuguggacu

SEQ ID NO: 56584 - RNA, 22 nt, Human
ugccugggacuguacuaaauuu

SEQ ID NO: 56585 - RNA, 22 nt, Human
ugccugggagugaccaagacuc

SEQ ID NO: 56586 - RNA, 22 nt, Human
ugccugggaucugugcccuuug

SEQ ID NO: 56587 - RNA, 22 nt, Human
ugaaaucaucugccaauaaguu

SEQ ID NO: 56588 - RNA, 22 nt, Human
ugaaaugagagcacagaauaaa

SEQ ID NO: 56589 - RNA, 22 nt, Human
ugaaaugagcauuuauucuuua

SEQ ID NO: 56590 - RNA, 22 nt, Human
ugaaaugaucaguuugguuacu

SEQ ID NO: 56591 - RNA, 22 nt, Human
ugaaaugauuauaugguguuug

SEQ ID NO: 56592 - RNA, 19 nt, Human
ugaaauggcaguugcuaaa

SEQ ID NO: 56593 - RNA, 22 nt, Human
ugaaauggcccaaacacccagu

SEQ ID NO: 56594 - RNA, 22 nt, Human
ugaaauguaagcauagagguug

SEQ ID NO: 56595 - RNA, 22 nt, Human
ugaaauguacaagugcuuuuuu

SEQ ID NO: 56596 - RNA, 22 nt, Human
ugaaauguacauaaaaacgcac

SEQ ID NO: 56597 - RNA, 22 nt, Human
ugaaaugucucacuuagacuuu

SEQ ID NO: 56598 - RNA, 22 nt, Human
ugaaauguggagaugguaagua

SEQ ID NO: 56599 - RNA, 22 nt, Human
ugaaauguguccauguuauuuc

SEQ ID NO: 56600 - RNA, 22 nt, Human
ugaaauguugccaugaggucuc

SEQ ID NO: 56601 - RNA, 22 nt, Human
ugaaauuaugcauuguuguacc

SEQ ID NO: 56602 - RNA, 22 nt, Human
ugaaauucauuguuuuaugugu

SEQ ID NO: 56603 - RNA, 22 nt, Human
ugaaauuuaggugcagauaaau

SEQ ID NO: 56604 - RNA, 21 nt, Human
ugaacaaaguucuuaucguga

SEQ ID NO: 56605 - RNA, 22 nt, Human
ugaacaacagauguccauuguu

SEQ ID NO: 56606 - RNA, 22 nt, Human
ugaacacauaaaagcaaagggu

SEQ ID NO: 56607 - RNA, 22 nt, Human
ugaacacgcuucauacagaggg

SEQ ID NO: 56608 - RNA, 22 nt, Human
ugaacacuguauauucuucuug

SEQ ID NO: 56609 - RNA, 22 nt, Human
ugaacagaucaauagaacugac

SEQ ID NO: 56610 - RNA, 18 nt, Human
ugaacagaugaguugaag

SEQ ID NO: 56611 - RNA, 22 nt, Human
ugaacaguuacuuuguagaaga

SEQ ID NO: 56612 - RNA, 22 nt, Human
ugaaccaggcacauuuccuaca

SEQ ID NO: 56613 - RNA, 22 nt, Human
ugaacccaggagguugcaguga

SEQ ID NO: 56614 - RNA, 22 nt, Human
ugaacccugaccucuggaagga

SEQ ID NO: 56615 - RNA, 22 nt, Human
ugaaccuuuguguuggaccugg

SEQ ID NO: 56616 - RNA, 22 nt, Human
ugaaccuuuugaauaaggacca

SEQ ID NO: 56617 - RNA, 22 nt, Human
ugaacugagcaguuuccuggga

SEQ ID NO: 56618 - RNA, 18 nt, Human
ugaacuuuggugucucuc

SEQ ID NO: 56619 - RNA, 18 nt, Human
ugaacuuuuccugcugcu

SEQ ID NO: 56620 - RNA, 22 nt, Human
ugaagaaaggugugggauacuc

SEQ ID NO: 56621 - RNA, 22 nt, Human
ugaagaauaaaugguugagacu

SEQ ID NO: 56622 - RNA, 22 nt, Human
ugaagaaucccagggaauuugg

SEQ ID NO: 56623 - RNA, 22 nt, Human
ugaagacaagugugcugguguu

SEQ ID NO: 56624 - RNA, 22 nt, Human
ugaagagaagaaaauuaucuuu

SEQ ID NO: 56625 - RNA, 22 nt, Human
ugaagagauagaaguacaugcu

SEQ ID NO: 56626 - RNA, 19 nt, Human
ugaagagcugucaaaagug

SEQ ID NO: 56627 - RNA, 20 nt, Human
ugaagaggaagaggacggcc

SEQ ID NO: 56628 - RNA, 22 nt, Human
ugaagagugcuugagauuuuaa

SEQ ID NO: 56629 - RNA, 22 nt, Human
ugaagauaacaguaagguauug

SEQ ID NO: 56630 - RNA, 22 nt, Human
ugaagauauuuuaaaauacuga

SEQ ID NO: 56631 - RNA, 22 nt, Human
ugaagaucugucaaccccauau

SEQ ID NO: 56632 - RNA, 22 nt, Human
ugaagaugucagcagggguggu

SEQ ID NO: 56633 - RNA, 22 nt, Human
ugaagauuuaagcaucucaauu

SEQ ID NO: 56634 - RNA, 22 nt, Human
ugaagauuuccaccaaaucaca

SEQ ID NO: 56635 - RNA, 20 nt, Human
ugaagauuuuguguuuagaa

SEQ ID NO: 56636 - RNA, 22 nt, Human
ugaagcaaauuguuuagccuga

SEQ ID NO: 56637 - RNA, 22 nt, Human
ugaagcaauagagacaagacca

SEQ ID NO: 56638 - RNA, 22 nt, Human
ugaagcagcuucuuucugucaa

SEQ ID NO: 56639 - RNA, 19 nt, Human
ugaagcaggcagagaagau

SEQ ID NO: 56640 - RNA, 22 nt, Human
ugaagcaggguggccagauugu

SEQ ID NO: 56641 - RNA, 22 nt, Human
ugaagcaguucucagaaguggg

SEQ ID NO: 56642 - RNA, 22 nt, Human
ugaagccacacuagcuuguccu

SEQ ID NO: 56643 - RNA, 22 nt, Human
ugaagccaccgaaccagaagag

SEQ ID NO: 56644 - RNA, 22 nt, Human
ugaagccacuuuccagaaucac

SEQ ID NO: 56645 - RNA, 17 nt, Human
ugcuagggggagaguag

SEQ ID NO: 56646 - RNA, 22 nt, Human
ugcuauaagaauuauauuacuc

SEQ ID NO: 56647 - RNA, 22 nt, Human
ugcuauacauguacauauuagu

SEQ ID NO: 56648 - RNA, 22 nt, Human
ugcuaucaccaacucugcuaag

SEQ ID NO: 56649 - RNA, 22 nt, Human
ugcuauuaaugaggcugcauuu

SEQ ID NO: 56650 - RNA, 19 nt, Human
ugcuauuuagaacgccugg

SEQ ID NO: 56651 - RNA, 19 nt, Human
ugcuauuugaagaagugua

SEQ ID NO: 56652 - RNA, 22 nt, Human
ugcuauuugggggcuacaugau

SEQ ID NO: 56653 - RNA, 22 nt, Human
ugcuauuugugagugucuucgu

SEQ ID NO: 56654 - RNA, 22 nt, Human
ugcuauuuuguuuucaguccau

SEQ ID NO: 56655 - RNA, 22 nt, Human
ugcucacaauuaucagaaguau

SEQ ID NO: 56656 - RNA, 19 nt, Human
ugcucacucucagucccuc

SEQ ID NO: 56657 - RNA, 22 nt, Human
ugcucagaauugcgcuggugga

SEQ ID NO: 56658 - RNA, 22 nt, Human
ugcucagagcucuggugcaggu

SEQ ID NO: 56659 - RNA, 22 nt, Human
ugcucagcagaucucaggagau

SEQ ID NO: 56660 - RNA, 22 nt, Human
ugcucagcuggugccagggucc

SEQ ID NO: 56661 - RNA, 22 nt, Human
ugcucaggaggaggcugugagg

SEQ ID NO: 56662 - RNA, 20 nt, Human
ugcucaggauggagaggugu

SEQ ID NO: 56663 - RNA, 22 nt, Human
ugcucagggagcuuccuggugg

SEQ ID NO: 56664 - RNA, 22 nt, Human
ugcucaguagcagugugcugcu

SEQ ID NO: 56665 - RNA, 22 nt, Human
ugcucaguccuaccuuggcucc

SEQ ID NO: 56666 - RNA, 22 nt, Human
ugcucaguccuccugcagugcc

SEQ ID NO: 56667 - RNA, 21 nt, Human
ugcucaugagcccacagcugc

SEQ ID NO: 56668 - RNA, 21 nt, Human
ugcucaugcaaugcaugucca

SEQ ID NO: 56669 - RNA, 19 nt, Human
ugcucauggggacuucucc

SEQ ID NO: 56670 - RNA, 22 nt, Human
ugcucauugcugauuuacaugu

SEQ ID NO: 56671 - RNA, 22 nt, Human
ugcuccacuaagccaucccauu

SEQ ID NO: 56672 - RNA, 22 nt, Human
ugcuccagcaccaagagcucca

SEQ ID NO: 56673 - RNA, 22 nt, Human
ugcuccagcuggagaugggggc

SEQ ID NO: 56674 - RNA, 22 nt, Human
ugcuccaggagcacuuuccauu

SEQ ID NO: 56675 - RNA, 22 nt, Human
ugcuccaggcaagcugagaguu

SEQ ID NO: 56676 - RNA, 18 nt, Human
ugcuccaggcccaugggc

SEQ ID NO: 56677 - RNA, 22 nt, Human
ugcuccaggcugcugaagaucu

SEQ ID NO: 56678 - RNA, 22 nt, Human
ugcuccaggugugccucucaug

SEQ ID NO: 56679 - RNA, 22 nt, Human
ugcuccagugccugccccacag

SEQ ID NO: 56680 - RNA, 22 nt, Human
ugcucccaaaccugacaggcuc

SEQ ID NO: 56681 - RNA, 22 nt, Human
ugcucccacacuacucggaggc

SEQ ID NO: 56682 - RNA, 22 nt, Human
ugcucccagcuccugcagcaac

SEQ ID NO: 56683 - RNA, 22 nt, Human
ugcucccaggcauucucuguug

SEQ ID NO: 56684 - RNA, 22 nt, Human
ugcucccugacccaggucuucu

SEQ ID NO: 56685 - RNA, 20 nt, Human
ugcucccuugcgagucgcug

SEQ ID NO: 56686 - RNA, 22 nt, Human
ugcuccgggaaagagcagccgc

SEQ ID NO: 56687 - RNA, 22 nt, Human
ugcuccguucuucugcuucuug

SEQ ID NO: 56688 - RNA, 22 nt, Human
ugcuccugacaguuuuaggcuc

SEQ ID NO: 56689 - RNA, 22 nt, Human
ugcuccugcugcaugcaucucc

SEQ ID NO: 56690 - RNA, 22 nt, Human
ugcuccuggcaucucugcgucc

SEQ ID NO: 56691 - RNA, 17 nt, Human
ugcuccugggacaagga

SEQ ID NO: 56692 - RNA, 21 nt, Human
ugcuccuuagcugccccugcc

SEQ ID NO: 56693 - RNA, 21 nt, Human
ugcuccuuuaccccacaagac

SEQ ID NO: 56694 - RNA, 22 nt, Human
ugcucuagcucauaggacucau

SEQ ID NO: 56695 - RNA, 22 nt, Human
ugcucuccugcuccucagccca

SEQ ID NO: 56696 - RNA, 19 nt, Human
ugcucucuggugcuucaug

SEQ ID NO: 56697 - RNA, 22 nt, Human
ugcucugcacaucccucacaaa

SEQ ID NO: 56698 - RNA, 22 nt, Human
ugcucuggaccaugacuaugug

SEQ ID NO: 56699 - RNA, 19 nt, Human
ugcucuggagccagcucuc

SEQ ID NO: 56700 - RNA, 22 nt, Human
ugcucuggagggugaagcuuuu

SEQ ID NO: 56701 - RNA, 22 nt, Human
ugcucugggggaagccagcugu

SEQ ID NO: 56702 - RNA, 21 nt, Human
ugcucugguguuuuauuuaac

SEQ ID NO: 56703 - RNA, 22 nt, Human
uucuuuggggaauauucugguu

SEQ ID NO: 56704 - RNA, 22 nt, Human
uucuuuggggucuccagcauag

SEQ ID NO: 56705 - RNA, 22 nt, Human
uucuuuguagcaaaacguguau

SEQ ID NO: 56706 - RNA, 22 nt, Human
uucuuugugcugaagaagcccu

SEQ ID NO: 56707 - RNA, 20 nt, Human
uucuuuguuccuuacauuug

SEQ ID NO: 56708 - RNA, 22 nt, Human
uucuuuuaaugucuggcuuuca

SEQ ID NO: 56709 - RNA, 22 nt, Human
uucuuuuaauugugggggagug

SEQ ID NO: 56710 - RNA, 22 nt, Human
uucuuuuacauuaagauuucag

SEQ ID NO: 56711 - RNA, 22 nt, Human
uucuuuuccuguggcucaucca

SEQ ID NO: 56712 - RNA, 22 nt, Human
uucuuuucggccugugagaagg

SEQ ID NO: 56713 - RNA, 22 nt, Human
uucuuuucuuuaggcauugugu

SEQ ID NO: 56714 - RNA, 22 nt, Human
uucuuuugcaagacuauugauu

SEQ ID NO: 56715 - RNA, 22 nt, Human
uucuuuugggaauuacguaugc

SEQ ID NO: 56716 - RNA, 23 nt, Human
uugaaaaauauagucccauuguc

SEQ ID NO: 56717 - RNA, 22 nt, Human
uugaaaacauuuauauuagaau

SEQ ID NO: 56718 - RNA, 22 nt, Human
uugaaacagacaaguaaauguc

SEQ ID NO: 56719 - RNA, 22 nt, Human
uugaaacaguagcucauagacc

SEQ ID NO: 56720 - RNA, 22 nt, Human
uugaaacuaugaagacaaccau

SEQ ID NO: 56721 - RNA, 22 nt, Human
uugaaagaacaauucugugaug

SEQ ID NO: 56722 - RNA, 22 nt, Human
uugaaagaacucuucagagaua

SEQ ID NO: 56723 - RNA, 22 nt, Human
uugaaagaagaagcugcgaugu

SEQ ID NO: 56724 - RNA, 22 nt, Human
uugaaagaaggugguagagaau

SEQ ID NO: 56725 - RNA, 23 nt, Human
uugaaagguagcuggcagcuaga

SEQ ID NO: 56726 - RNA, 22 nt, Human
uugaaaguaauaacuuuguuca

SEQ ID NO: 56727 - RNA, 22 nt, Human
uugaaauaaggaagcucgaaau

SEQ ID NO: 56728 - RNA, 22 nt, Human
uugaaauccaauuaucauaugu

SEQ ID NO: 56729 - RNA, 22 nt, Human
uugaaaugaaauauuuaagcuc

SEQ ID NO: 56730 - RNA, 22 nt, Human
uugaaaugcagauuccaaucca

SEQ ID NO: 56731 - RNA, 22 nt, Human
uugaaauggcagcagcugaccu

SEQ ID NO: 56732 - RNA, 22 nt, Human
uugaacaaucaaaagaauucau

SEQ ID NO: 56733 - RNA, 22 nt, Human
uugaacacuaaguuuccaggcu

SEQ ID NO: 56734 - RNA, 22 nt, Human
uugaacaguuuugucagguuca

SEQ ID NO: 56735 - RNA, 22 nt, Human
uugaacauuaacuucagucuau

SEQ ID NO: 56736 - RNA, 22 nt, Human
uugaacauuuucuauguuauag

SEQ ID NO: 56737 - RNA, 22 nt, Human
uugaagaaagucauauauaaug

SEQ ID NO: 56738 - RNA, 22 nt, Human
uugaagaacauaauagcuacuu

SEQ ID NO: 56739 - RNA, 22 nt, Human
uugaagaaguaauuuuaagucu

SEQ ID NO: 56740 - RNA, 22 nt, Human
uugaagaccuuuagugcuaugu

SEQ ID NO: 56741 - RNA, 22 nt, Human
uugaagagucuagauugguuau

SEQ ID NO: 56742 - RNA, 22 nt, Human
uugaagagugcauuagcauauu

SEQ ID NO: 56743 - RNA, 22 nt, Human
uugaagcauuguggcuuguauu

SEQ ID NO: 56744 - RNA, 22 nt, Human
uugaagcauuugcuauagcauu

SEQ ID NO: 56745 - RNA, 22 nt, Human
uugaaggacaucuuguuucuag

SEQ ID NO: 56746 - RNA, 22 nt, Human
uugaaggaggcgaaaauugguc

SEQ ID NO: 56747 - RNA, 22 nt, Human
uugaagucaguucauauuuuua

SEQ ID NO: 56748 - RNA, 22 nt, Human
uugaaguucugcauuucuaaua

SEQ ID NO: 56749 - RNA, 22 nt, Human
uugaaguugguguggaaaguag

SEQ ID NO: 56750 - RNA, 22 nt, Human
uugaauaauaugcuucguucuc

SEQ ID NO: 56751 - RNA, 23 nt, Human
uugaauaggguggcaacaaacug

SEQ ID NO: 56752 - RNA, 22 nt, Human
uugaaucauuacaauagauaag

SEQ ID NO: 56753 - RNA, 22 nt, Human
uugaaucucuugaaucucuguu

SEQ ID NO: 56754 - RNA, 22 nt, Human
uugaaucuggguacuuguaaua

SEQ ID NO: 56755 - RNA, 22 nt, Human
uugaaugaagggaugaccgaag

SEQ ID NO: 56756 - RNA, 22 nt, Human
uugaaugaagucccuuuuuacu

SEQ ID NO: 56757 - RNA, 20 nt, Human
uugaaugaaugucuggcuca

SEQ ID NO: 56758 - RNA, 22 nt, Human
uugaaugaauucuacuuccaga

SEQ ID NO: 56759 - RNA, 16 nt, Human
uugaaugacugugugc

SEQ ID NO: 56760 - RNA, 22 nt, Human
uugaaugagaaguuauugccau

SEQ ID NO: 56761 - RNA, 22 nt, Human
uugaaugauccuaucuagcaca

SEQ ID NO: 56762 - RNA, 22 nt, Human
uugaaugauuaaagucaucuga

SEQ ID NO: 56763 - RNA, 22 nt, Human
uugaaugcaucuuugagcuccu

SEQ ID NO: 56764 - RNA, 22 nt, Human
uugaauguaggucuuggugagc

SEQ ID NO: 56765 - RNA, 22 nt, Human
uugaauuauaagugugucuacu

SEQ ID NO: 56766 - RNA, 22 nt, Human
uugaauuauauguauguccuuu

SEQ ID NO: 56767 - RNA, 22 nt, Human
uugaauugaaacauacccuggu

SEQ ID NO: 56768 - RNA, 22 nt, Human
uugacaaaaauaacacagcaua

SEQ ID NO: 56769 - RNA, 22 nt, Human
uugacaaaacaacacagauuuc

SEQ ID NO: 56770 - RNA, 22 nt, Human
uugacaaagauauauucaugcu

SEQ ID NO: 56771 - RNA, 22 nt, Human
uugacaaaggaccuugcuauuu

SEQ ID NO: 56772 - RNA, 22 nt, Human
uugacaauugggagauauaaag

SEQ ID NO: 56773 - RNA, 22 nt, Human
uugacacauuagagcuuguaaa

SEQ ID NO: 56774 - RNA, 22 nt, Human
uugacagagcuaggucaacucu

SEQ ID NO: 56775 - RNA, 22 nt, Human
uugacagcaaagauugugccua

SEQ ID NO: 56776 - RNA, 22 nt, Human
uugacagcuacggagcagcugu

SEQ ID NO: 56777 - RNA, 22 nt, Human
uugacaguugcaauggugaucu

SEQ ID NO: 56778 - RNA, 21 nt, Human
uugaccaagggugcgugcucc

SEQ ID NO: 56779 - RNA, 22 nt, Human
uugacccaaggcccuggaauug

SEQ ID NO: 56780 - RNA, 22 nt, Human
uugacucuaaauuuacuuuucc

SEQ ID NO: 56781 - RNA, 22 nt, Human
uugacugugaugggcucagcug

SEQ ID NO: 56782 - RNA, 22 nt, Human
uugacuguugcugccauucugg

SEQ ID NO: 56783 - RNA, 22 nt, Human
uugacuuuacaguuuucuuagg

SEQ ID NO: 56784 - RNA, 22 nt, Human
uugacuuuucuuggucacauga

SEQ ID NO: 56785 - RNA, 22 nt, Human
uugagaaaaccaucguaagaau

SEQ ID NO: 56786 - RNA, 22 nt, Human
uugagaaaccuggcaguagaga

SEQ ID NO: 56787 - RNA, 19 nt, Human
uugagaaaguugauuuggg

SEQ ID NO: 56788 - RNA, 22 nt, Human
uugagaaauaagcaugucuaga

SEQ ID NO: 56789 - RNA, 19 nt, Human
uugagaaaugggaaaagca

SEQ ID NO: 56790 - RNA, 22 nt, Human
uugagaaauguuuuuuaagcug

SEQ ID NO: 56791 - RNA, 19 nt, Human
uugagaacaccaaguacug

SEQ ID NO: 56792 - RNA, 22 nt, Human
uugagaagaaauaguuugcaau

SEQ ID NO: 56793 - RNA, 22 nt, Human
uugagaauguguuuugcuaagu

SEQ ID NO: 56794 - RNA, 22 nt, Human
uugagacucgagucucucagac

SEQ ID NO: 56795 - RNA, 22 nt, Human
uugagaggauggauuagacaaa

SEQ ID NO: 56796 - RNA, 22 nt, Human
uugagaguagagauggcagggc

SEQ ID NO: 56797 - RNA, 22 nt, Human
uugagagucauuuaagguguug

SEQ ID NO: 56798 - RNA, 22 nt, Human
uugagagugccaagcauccucc

SEQ ID NO: 56799 - RNA, 22 nt, Human
uugagaguuugggggcaauaug

SEQ ID NO: 56800 - RNA, 22 nt, Human
uugagauagaucucaucuuccc

SEQ ID NO: 56801 - RNA, 22 nt, Human
uugagaugacuuaaauuuggga

SEQ ID NO: 56802 - RNA, 22 nt, Human
uugagauggagccucagucuug

SEQ ID NO: 56803 - RNA, 22 nt, Human
uugagaugggcuuuauguucag

SEQ ID NO: 56804 - RNA, 22 nt, Human
uugagcaaaggaguaaaaugca

SEQ ID NO: 56805 - RNA, 22 nt, Human
uugagcaaaucagaaguuuaga

SEQ ID NO: 56806 - RNA, 22 nt, Human
uugagcaaaucagauuguaauu

SEQ ID NO: 56807 - RNA, 21 nt, Human
uugagcagaaauguguaugcc

SEQ ID NO: 56808 - RNA, 22 nt, Human
uugagcaucaauuaagugaguu

SEQ ID NO: 56809 - RNA, 22 nt, Human
uugagcaucuuauagaaagagc

SEQ ID NO: 56810 - RNA, 21 nt, Human
uugagcauguacuuugugcuu

SEQ ID NO: 56811 - RNA, 22 nt, Human
uugagcucuccucaucacccug

SEQ ID NO: 56812 - RNA, 20 nt, Human
uugaggagauauugaauacu

SEQ ID NO: 56813 - RNA, 23 nt, Human
uugaggagcagcgcuuuuuaccg

SEQ ID NO: 56814 - RNA, 22 nt, Human
ugaaugaccuuugaggauggaa

SEQ ID NO: 56815 - RNA, 21 nt, Human
ugaaugaggaggauggcauuu

SEQ ID NO: 56816 - RNA, 22 nt, Human
ugaaugagugaguucagaccuc

SEQ ID NO: 56817 - RNA, 22 nt, Human
ugaaugaguuuggcugcuguuc

SEQ ID NO: 56818 - RNA, 22 nt, Human
ugaaugaucuaguuuuguagac

SEQ ID NO: 56819 - RNA, 21 nt, Human
ugaaugaugccccagaguugu

SEQ ID NO: 56820 - RNA, 22 nt, Human
ugaaugaugguguguucuugcc

SEQ ID NO: 56821 - RNA, 22 nt, Human
ugaaugauuucuuaggcaauug

SEQ ID NO: 56822 - RNA, 22 nt, Human
ugaaugauuugggugcauucag

SEQ ID NO: 56823 - RNA, 22 nt, Human
ugaaugcagagacugugggaaa

SEQ ID NO: 56824 - RNA, 21 nt, Human
ugaaugcuucgucauccuggc

SEQ ID NO: 56825 - RNA, 22 nt, Human
ugaauguuugaugagaaauaga

SEQ ID NO: 56826 - RNA, 22 nt, Human
ugaauuagcaguagacagacug

SEQ ID NO: 56827 - RNA, 22 nt, Human
ugaauucaccugaaagucugga

SEQ ID NO: 56828 - RNA, 22 nt, Human
ugaauucuggcucuucuguuua

SEQ ID NO: 56829 - RNA, 22 nt, Human
ugaauuguacaguaugugaauu

SEQ ID NO: 56830 - RNA, 22 nt, Human
ugaauuguggcuuuuuccaauu

SEQ ID NO: 56831 - RNA, 22 nt, Human
ugaauuuaucaaagauucuuaa

SEQ ID NO: 56832 - RNA, 22 nt, Human
ugacaaacccugcaaauagcuc

SEQ ID NO: 56833 - RNA, 22 nt, Human
ugacaaagaggaacagcagggg

SEQ ID NO: 56834 - RNA, 22 nt, Human
ugacaaagccucauccuucaga

SEQ ID NO: 56835 - RNA, 22 nt, Human
ugacaaagguguugccagaggg

SEQ ID NO: 56836 - RNA, 23 nt, Human
ugacaaagucaucucuccuucuu

SEQ ID NO: 56837 - RNA, 22 nt, Human
ugacaaagugaggucuucagua

SEQ ID NO: 56838 - RNA, 20 nt, Human
ugacaaaugaucugauuuuc

SEQ ID NO: 56839 - RNA, 22 nt, Human
ugacaaauucauauuucagagg

SEQ ID NO: 56840 - RNA, 22 nt, Human
ugacaacauugaguuaugugca

SEQ ID NO: 56841 - RNA, 22 nt, Human
ugacaacuuuacaaaauucuuc

SEQ ID NO: 56842 - RNA, 22 nt, Human
ugacaagaaagcgucuucuuuu

SEQ ID NO: 56843 - RNA, 22 nt, Human
ugacaagaauuugggacuguua

SEQ ID NO: 56844 - RNA, 22 nt, Human
ugacaagcuuuacagaauugaa

SEQ ID NO: 56845 - RNA, 22 nt, Human
ugacaaguuggaaagcagugca

SEQ ID NO: 56846 - RNA, 22 nt, Human
ugacaaguuuccuggugauuuu

SEQ ID NO: 56847 - RNA, 22 nt, Human
ugacaauggauauuaguugugg

SEQ ID NO: 56848 - RNA, 22 nt, Human
ugacaauggggcacauggaaag

SEQ ID NO: 56849 - RNA, 22 nt, Human
ugacaauuguugugaauucuuc

SEQ ID NO: 56850 - RNA, 22 nt, Human
ugacacagauuagagacauacc

SEQ ID NO: 56851 - RNA, 22 nt, Human
ugacacaggcagcucccagcac

SEQ ID NO: 56852 - RNA, 23 nt, Human
ugacacaggucaaaaauaagaug

SEQ ID NO: 56853 - RNA, 22 nt, Human
ugacacugccgaaacuguagag

SEQ ID NO: 56854 - RNA, 22 nt, Human
ugacacuuccaguuaaaaauau

SEQ ID NO: 56855 - RNA, 22 nt, Human
ugacacuucuccaucaagucaa

SEQ ID NO: 56856 - RNA, 22 nt, Human
ugacacuugagagggacacgga

SEQ ID NO: 56857 - RNA, 22 nt, Human
ugacacuuggaagcuuggcaac

SEQ ID NO: 56858 - RNA, 22 nt, Human
ugacacuuugugacucugagaa

SEQ ID NO: 56859 - RNA, 22 nt, Human
ugacagaaagaauaugucaauc

SEQ ID NO: 56860 - RNA, 22 nt, Human
ugacagaaauaguucuuaauuu

SEQ ID NO: 56861 - RNA, 22 nt, Human
ugacagaacagguugggagcaa

SEQ ID NO: 56862 - RNA, 22 nt, Human
ugacagaacuuuuucacaucuc

SEQ ID NO: 56863 - RNA, 22 nt, Human
ugagugagacauccugucuuaa

SEQ ID NO: 56864 - RNA, 22 nt, Human
ugagugagcuggggagccggug

SEQ ID NO: 56865 - RNA, 20 nt, Human
ugagugauggaggcggguca

SEQ ID NO: 56866 - RNA, 21 nt, Human
ugagugccaccugcuggccaa

SEQ ID NO: 56867 - RNA, 22 nt, Human
ugagugcuuuaaauguuauuuu

SEQ ID NO: 56868 - RNA, 18 nt, Human
ugaguggaaugagggggc

SEQ ID NO: 56869 - RNA, 22 nt, Human
ugaguggagacuguguguagag

SEQ ID NO: 56870 - RNA, 20 nt, Human
ugaguggccacugggucgca

SEQ ID NO: 56871 - RNA, 16 nt, Human
ugagugggagaagggg

SEQ ID NO: 56872 - RNA, 19 nt, Human
ugagugggagcccagguau

SEQ ID NO: 56873 - RNA, 22 nt, Human
ugagugggaugaguuagaggug

SEQ ID NO: 56874 - RNA, 22 nt, Human
ugagugggauuaaaugagguga

SEQ ID NO: 56875 - RNA, 22 nt, Human
ugagugugaggugggagcuugg

SEQ ID NO: 56876 - RNA, 22 nt, Human
ugagugugcuaggugucucggu

SEQ ID NO: 56877 - RNA, 22 nt, Human
ugaguguggggaaugucaugag

SEQ ID NO: 56878 - RNA, 22 nt, Human
ugaguguguauuauguaucagg

SEQ ID NO: 56879 - RNA, 21 nt, Human
ugaguuaaaaugucagugcca

SEQ ID NO: 56880 - RNA, 22 nt, Human
ugaguuaagcagguagcaagcu

SEQ ID NO: 56881 - RNA, 21 nt, Human
ugaguuaaggauccaauucug

SEQ ID NO: 56882 - RNA, 22 nt, Human
ugaguuaaucucuacgauagaa

SEQ ID NO: 56883 - RNA, 22 nt, Human
ugaguuacugccuaguaacuug

SEQ ID NO: 56884 - RNA, 22 nt, Human
ugaguuauauauacuggcucug

SEQ ID NO: 56885 - RNA, 22 nt, Human
ugaguuaucuaaaauagucaaa

SEQ ID NO: 56886 - RNA, 22 nt, Human
ugaguuauggagaauaaaguca

SEQ ID NO: 56887 - RNA, 22 nt, Human
ugaguucaaguccaaguugcug

SEQ ID NO: 56888 - RNA, 22 nt, Human
ugaguucagauccuggcucugc

SEQ ID NO: 56889 - RNA, 22 nt, Human
ugaguucuaggcuuaaaacuaa

SEQ ID NO: 56890 - RNA, 22 nt, Human
ugaguucuucacauuaccuacg

SEQ ID NO: 56891 - RNA, 22 nt, Human
ugaguugcccugcccugugcuu

SEQ ID NO: 56892 - RNA, 19 nt, Human
ugaguuuaaugcaaaacug

SEQ ID NO: 56893 - RNA, 22 nt, Human
ugaguuugguaucuaggggguc

SEQ ID NO: 56894 - RNA, 22 nt, Human
ugaguuuuguaauauucaagau

SEQ ID NO: 56895 - RNA, 22 nt, Human
ugauaauguucgagaaugaaga

SEQ ID NO: 56896 - RNA, 22 nt, Human
ugauacagaauugauaucugag

SEQ ID NO: 56897 - RNA, 22 nt, Human
ugauacagagcaagcaucuuuu

SEQ ID NO: 56898 - RNA, 22 nt, Human
ugauacccuuuggcugcgagca

SEQ ID NO: 56899 - RNA, 22 nt, Human
ugauagaaaaugcugucaagcu

SEQ ID NO: 56900 - RNA, 22 nt, Human
ugauagagcacuaaguagugua

SEQ ID NO: 56901 - RNA, 23 nt, Human
ugauagaugucauggucuugagu

SEQ ID NO: 56902 - RNA, 22 nt, Human
ugauauggaaggaagauguaca

SEQ ID NO: 56903 - RNA, 22 nt, Human
ugauauuugcugacugcauugu

SEQ ID NO: 56904 - RNA, 22 nt, Human
ugaucaaaacauuacuccacca

SEQ ID NO: 56905 - RNA, 22 nt, Human
ugaucacaagucugaagaauga

SEQ ID NO: 56906 - RNA, 22 nt, Human
ugaucagcaucuucccagcucg

SEQ ID NO: 56907 - RNA, 22 nt, Human
ugaucagucccaugaucuucca

SEQ ID NO: 56908 - RNA, 22 nt, Human
ugaucaguguugguucuaucua

SEQ ID NO: 56909 - RNA, 22 nt, Human
ugaucauccaguuucuugucca

SEQ ID NO: 56910 - RNA, 21 nt, Human
ugaucauuuguguaaaggaga

SEQ ID NO: 56911 - RNA, 22 nt, Human
ugauccccuucccaguaagccu

SEQ ID NO: 56912 - RNA, 22 nt, Human
ugaucccuggacuugaguaagu

SEQ ID NO: 56913 - RNA, 22 nt, Human
ugauccuuccccuugaggaugg

SEQ ID NO: 56914 - RNA, 21 nt, Human
ugauccuuucccccauguugc

SEQ ID NO: 56915 - RNA, 22 nt, Human
ugaucugaaggacaugggaccc

SEQ ID NO: 56916 - RNA, 22 nt, Human
ugaucugguccuacugugggca

SEQ ID NO: 56917 - RNA, 22 nt, Human
ugaucuuuacugcuguuuauaa

SEQ ID NO: 56918 - RNA, 22 nt, Human
ugaucuuugguaguacgauaau

SEQ ID NO: 56919 - RNA, 22 nt, Human
ugaucuuuuuggucauuugggu

SEQ ID NO: 56920 - RNA, 22 nt, Human
ugaugaaacugagguuccaaga

SEQ ID NO: 56921 - RNA, 22 nt, Human
ugaugaaauguugaggcaguga

SEQ ID NO: 56922 - RNA, 22 nt, Human
ugaugaauaaacuugagaguca

SEQ ID NO: 56923 - RNA, 22 nt, Human
ugaugacaaacuuuccugaugc

SEQ ID NO: 56924 - RNA, 22 nt, Human
ugaugaggagacuguggcuugg

SEQ ID NO: 56925 - RNA, 22 nt, Human
ugaugagggaacugguucauac

SEQ ID NO: 56926 - RNA, 22 nt, Human
ugaugagggagauuugagccca

SEQ ID NO: 56927 - RNA, 22 nt, Human
uugaggaggaaaaggggguacc

SEQ ID NO: 56928 - RNA, 22 nt, Human
uugaggagguaguacagaguau

SEQ ID NO: 56929 - RNA, 22 nt, Human
uugaggagguaugacuagguac

SEQ ID NO: 56930 - RNA, 22 nt, Human
uugaggagugugaggucuccca

SEQ ID NO: 56931 - RNA, 22 nt, Human
uugaggcacagauuuuaguggc

SEQ ID NO: 56932 - RNA, 22 nt, Human
uugaggcagcccuuaauuggga

SEQ ID NO: 56933 - RNA, 22 nt, Human
uugaggcauuacuguaaugaga

SEQ ID NO: 56934 - RNA, 22 nt, Human
uugaggccugcuggaagguguu

SEQ ID NO: 56935 - RNA, 22 nt, Human
uugagggaaauaacugaugcuu

SEQ ID NO: 56936 - RNA, 22 nt, Human
uugagggaacaugagaaucauc

SEQ ID NO: 56937 - RNA, 22 nt, Human
uugagggacuuucucuauuauu

SEQ ID NO: 56938 - RNA, 22 nt, Human
uugagggagauguugacuucag

SEQ ID NO: 56939 - RNA, 18 nt, Human
uugagggaggggcagagu

SEQ ID NO: 56940 - RNA, 22 nt, Human
uugagguaggcauuguucaaaa

SEQ ID NO: 56941 - RNA, 22 nt, Human
uugagguaggcggacuccucca

SEQ ID NO: 56942 - RNA, 22 nt, Human
uugagguaguggccuccaaaug

SEQ ID NO: 56943 - RNA, 22 nt, Human
uugagguauaguugacaauuua

SEQ ID NO: 56944 - RNA, 22 nt, Human
uugagguauugauauuuuauga

SEQ ID NO: 56945 - RNA, 22 nt, Human
uugaggucaucugaaguacuag

SEQ ID NO: 56946 - RNA, 22 nt, Human
uugagguccccaguacccacug

SEQ ID NO: 56947 - RNA, 23 nt, Human
uugaggucggcucucugagccug

SEQ ID NO: 56948 - RNA, 22 nt, Human
uugagucugcccaaauuaagaa

SEQ ID NO: 56949 - RNA, 22 nt, Human
uugagucugugcccuaugcugu

SEQ ID NO: 56950 - RNA, 23 nt, Human
uugagucuuauaggauugaggug

SEQ ID NO: 56951 - RNA, 22 nt, Human
uugaguucuggucuuuuaaaag

SEQ ID NO: 56952 - RNA, 22 nt, Human
uugaguuuccugacagcgaagg

SEQ ID NO: 56953 - RNA, 22 nt, Human
uugauacacaauggaacaaugu

SEQ ID NO: 56954 - RNA, 22 nt, Human
uugauacaggccuucuagauga

SEQ ID NO: 56955 - RNA, 22 nt, Human
uugauacaggcucuauuucauc

SEQ ID NO: 56956 - RNA, 22 nt, Human
uugauaucucugcuguguuagg

SEQ ID NO: 56957 - RNA, 22 nt, Human
uugauauucccgauuuaaggua

SEQ ID NO: 56958 - RNA, 22 nt, Human
uugaucucuuguguaugguaga

SEQ ID NO: 56959 - RNA, 22 nt, Human
uugaucuucaucgaaauauugu

SEQ ID NO: 56960 - RNA, 22 nt, Human
uugaucuuggacuuuccagccu

SEQ ID NO: 56961 - RNA, 22 nt, Human
uugaugagaccauugccgcguc

SEQ ID NO: 56962 - RNA, 22 nt, Human
uugaugaucuuacggcagagga

SEQ ID NO: 56963 - RNA, 22 nt, Human
uugauguaaacuuugauuucau

SEQ ID NO: 56964 - RNA, 22 nt, Human
uugauguaaagauaguuucugu

SEQ ID NO: 56965 - RNA, 22 nt, Human
uugauguagggauuccuguaaa

SEQ ID NO: 56966 - RNA, 22 nt, Human
uugauguagguuuaucuauugu

SEQ ID NO: 56967 - RNA, 22 nt, Human
uugauguugcucuuaacaguau

SEQ ID NO: 56968 - RNA, 22 nt, Human
uugauuaaaaugagacaucauu

SEQ ID NO: 56969 - RNA, 22 nt, Human
uugauucaaaacaggagguagg

SEQ ID NO: 56970 - RNA, 22 nt, Human
uugauucaguaaagcuaaauuu

SEQ ID NO: 56971 - RNA, 18 nt, Human
uugauucauauuaaccau

SEQ ID NO: 56972 - RNA, 22 nt, Human
ugauugauacaacucaauccaa

SEQ ID NO: 56973 - RNA, 22 nt, Human
ugauugauggaggugauuuacc

SEQ ID NO: 56974 - RNA, 22 nt, Human
ugauugcuucuuugcuaucugu

SEQ ID NO: 56975 - RNA, 22 nt, Human
ugauuuaaaagaaacauugucu

SEQ ID NO: 56976 - RNA, 22 nt, Human
ugauuuacaauuguaaaaguuu

SEQ ID NO: 56977 - RNA, 22 nt, Human
ugauuuacaguagugucuaaac

SEQ ID NO: 56978 - RNA, 22 nt, Human
ugauuucaaguagugacaugcu

SEQ ID NO: 56979 - RNA, 22 nt, Human
ugauuucauaguauauacauga

SEQ ID NO: 56980 - RNA, 21 nt, Human
ugauuuccaucuuaaaauaaa

SEQ ID NO: 56981 - RNA, 22 nt, Human
ugauuucccucaucauaacaga

SEQ ID NO: 56982 - RNA, 15 nt, Human
ugauuuccuacuaac

SEQ ID NO: 56983 - RNA, 22 nt, Human
ugauuuccucuacuagcaauua

SEQ ID NO: 56984 - RNA, 22 nt, Human
ugauuuccuggcuuuggaguuc

SEQ ID NO: 56985 - RNA, 22 nt, Human
ugauuucucuccguuauuucag

SEQ ID NO: 56986 - RNA, 22 nt, Human
ugauuuuauuggugaggaaauu

SEQ ID NO: 56987 - RNA, 22 nt, Human
ugauuuuuagcuauucugaaga

SEQ ID NO: 56988 - RNA, 22 nt, Human
ugcaaaaacagccuugaggccu

SEQ ID NO: 56989 - RNA, 22 nt, Human
ugcaaaaacugcaauugcuuuu

SEQ ID NO: 56990 - RNA, 22 nt, Human
ugcaaaauaaugaacgauuuuu

SEQ ID NO: 56991 - RNA, 22 nt, Human
ugcaaacaccacagagacaauu

SEQ ID NO: 56992 - RNA, 22 nt, Human
ugcaaacacuucaacgugcauc

SEQ ID NO: 56993 - RNA, 22 nt, Human
ugcaaacagaaaagcuacuuug

SEQ ID NO: 56994 - RNA, 20 nt, Human
ugcaaacauuacuugggugu

SEQ ID NO: 56995 - RNA, 22 nt, Human
ugcaaagaaggggaggaggauu

SEQ ID NO: 56996 - RNA, 22 nt, Human
ugcaaagauaugagaagcugua

SEQ ID NO: 56997 - RNA, 21 nt, Human
ugcaaagcugcugaaguggua

SEQ ID NO: 56998 - RNA, 22 nt, Human
ugcaaaggcaucugggaagguu

SEQ ID NO: 56999 - RNA, 22 nt, Human
ugcaaaguugcaucaaaaccca

SEQ ID NO: 57000 - RNA, 23 nt, Human
ugcaaauaacaaggaguuuaagg

SEQ ID NO: 57001 - RNA, 22 nt, Human
ugcaaauaagcuauuauggaau

SEQ ID NO: 57002 - RNA, 22 nt, Human
ugcaaauagccuauauuuauag

SEQ ID NO: 57003 - RNA, 22 nt, Human
ugcaaauauugggacagucuag

SEQ ID NO: 57004 - RNA, 22 nt, Human
ugcaaaucauaaacaauagugu

SEQ ID NO: 57005 - RNA, 22 nt, Human
ugcaaaugaguugcagaucagg

SEQ ID NO: 57006 - RNA, 18 nt, Human
ugcaaauggcuguuugau

SEQ ID NO: 57007 - RNA, 19 nt, Human
ugcaaauguaggaagaaua

SEQ ID NO: 57008 - RNA, 23 nt, Human
ugcaaauuaggccgggacucagc

SEQ ID NO: 57009 - RNA, 22 nt, Human
ugcaaauucaaacauuuuccug

SEQ ID NO: 57010 - RNA, 22 nt, Human
ugcaaauucagaagaacugccc

SEQ ID NO: 57011 - RNA, 22 nt, Human
ugcaaauuccauuuaaacacua

SEQ ID NO: 57012 - RNA, 22 nt, Human
ugcaaauucuuuacucugugau

SEQ ID NO: 57013 - RNA, 22 nt, Human
ugcaaauugcaugauguguauc

SEQ ID NO: 57014 - RNA, 22 nt, Human
ugcaaauuuaaugaaacuaugu

SEQ ID NO: 57015 - RNA, 22 nt, Human
ugcaaauuugacuucacacauc

SEQ ID NO: 57016 - RNA, 22 nt, Human
ugcaacagacuuuauuaacucu

SEQ ID NO: 57017 - RNA, 22 nt, Human
ugcaacaguggggcaugcugaa

SEQ ID NO: 57018 - RNA, 22 nt, Human
ugcaaccugacccagccagccc

SEQ ID NO: 57019 - RNA, 22 nt, Human
ugcaacuuguuuggagagaaag

SEQ ID NO: 57020 - RNA, 22 nt, Human
ugcaagacgugaaauugagaca

SEQ ID NO: 57021 - RNA, 22 nt, Human
ugcaagagcccaccacacacuu

SEQ ID NO: 57022 - RNA, 22 nt, Human
ugcaagaggcaucuuuuaaaaa

SEQ ID NO: 57023 - RNA, 22 nt, Human
ugcaagaucacgguguugagag

SEQ ID NO: 57024 - RNA, 22 nt, Human
ugcaagcaaguuuuugaagugg

SEQ ID NO: 57025 - RNA, 22 nt, Human
ugcaagcaauccaggaaggcua

SEQ ID NO: 57026 - RNA, 22 nt, Human
ugcaaggauauuuagucuagug

SEQ ID NO: 57027 - RNA, 20 nt, Human
ugcaaggccagggucaggag

SEQ ID NO: 57028 - RNA, 22 nt, Human
ugcaaggcugccucugaggacc

SEQ ID NO: 57029 - RNA, 22 nt, Human
ugcaaggcuugcaauggugauc

SEQ ID NO: 57030 - RNA, 22 nt, Human
ugcaagguccaguauaacuuaa

SEQ ID NO: 57031 - RNA, 22 nt, Human
ugcaaggugcuuuuugguguca

SEQ ID NO: 57032 - RNA, 22 nt, Human
ugcaaguaauuccagcuacuga

SEQ ID NO: 57033 - RNA, 22 nt, Human
ugcaagugccaugugcacagug

SEQ ID NO: 57034 - RNA, 22 nt, Human
ugcaauaaggaguaauaguaaa

SEQ ID NO: 57035 - RNA, 22 nt, Human
ugcaaucagaaaguucagcggu

SEQ ID NO: 57036 - RNA, 22 nt, Human
ugcaaugaauuacuucccaaac

SEQ ID NO: 57037 - RNA, 22 nt, Human
ugcaaugagaauauauuaacca

SEQ ID NO: 57038 - RNA, 22 nt, Human
ugcaauuuggggaagaaagaga

SEQ ID NO: 57039 - RNA, 22 nt, Human
ugcacaaaggcucccugcugag

SEQ ID NO: 57040 - RNA, 22 nt, Human
ugaccuuucucugggugcuugg

SEQ ID NO: 57041 - RNA, 22 nt, Human
ugacggcugggggcagugguca

SEQ ID NO: 57042 - RNA, 22 nt, Human
ugacuaaaauaggacauuaacu

SEQ ID NO: 57043 - RNA, 22 nt, Human
ugacuauguggccuugaccaag

SEQ ID NO: 57044 - RNA, 22 nt, Human
ugacuauuuuuuauagauucca

SEQ ID NO: 57045 - RNA, 22 nt, Human
ugacucaccaucggaguuugaa

SEQ ID NO: 57046 - RNA, 18 nt, Human
ugacucacccugucagug

SEQ ID NO: 57047 - RNA, 22 nt, Human
ugacucacuuaauuuacaaguc

SEQ ID NO: 57048 - RNA, 22 nt, Human
ugacuccacaauuugacuuaua

SEQ ID NO: 57049 - RNA, 22 nt, Human
ugacucucccaaguuugaggga

SEQ ID NO: 57050 - RNA, 20 nt, Human
ugacucugcaaccgucucuc

SEQ ID NO: 57051 - RNA, 20 nt, Human
ugacucuggucccaguauga

SEQ ID NO: 57052 - RNA, 22 nt, Human
ugacucuuaaauauacuguuga

SEQ ID NO: 57053 - RNA, 22 nt, Human
ugacucuuggugauuacugggu

SEQ ID NO: 57054 - RNA, 22 nt, Human
ugacugccccuuccauuccugc

SEQ ID NO: 57055 - RNA, 17 nt, Human
ugacuuaacagcaaggc

SEQ ID NO: 57056 - RNA, 22 nt, Human
ugacuuccagcaacuuccucca

SEQ ID NO: 57057 - RNA, 22 nt, Human
ugacuuccugcacucaggugau

SEQ ID NO: 57058 - RNA, 22 nt, Human
ugacuucucuggccuggugcag

SEQ ID NO: 57059 - RNA, 22 nt, Human
ugacuucugauugcuucuauuu

SEQ ID NO: 57060 - RNA, 20 nt, Human
ugacuucugggauuuguggu

SEQ ID NO: 57061 - RNA, 22 nt, Human
ugacuucugggugagccagcau

SEQ ID NO: 57062 - RNA, 22 nt, Human
ugacuugucaaagaaaugugug

SEQ ID NO: 57063 - RNA, 22 nt, Human
ugacuuuaaaauaacaaguuua

SEQ ID NO: 57064 - RNA, 21 nt, Human
ugacuuuauauugugucagga

SEQ ID NO: 57065 - RNA, 21 nt, Human
ugacuuuauuugacagcccag

SEQ ID NO: 57066 - RNA, 17 nt, Human
ugacuuuauuugcuugg

SEQ ID NO: 57067 - RNA, 22 nt, Human
ugacuuuggauaagaaaaugag

SEQ ID NO: 57068 - RNA, 22 nt, Human
ugacuuuggcuuaagcagcagu

SEQ ID NO: 57069 - RNA, 22 nt, Human
ugagaaaaguacauggagaagc

SEQ ID NO: 57070 - RNA, 22 nt, Human
ugagaaacacaggcaugaauag

SEQ ID NO: 57071 - RNA, 22 nt, Human
ugagaaacauaugagagauuug

SEQ ID NO: 57072 - RNA, 20 nt, Human
ugagaaaguagagacucagg

SEQ ID NO: 57073 - RNA, 22 nt, Human
ugagaaauauugcacagugagg

SEQ ID NO: 57074 - RNA, 22 nt, Human
ugagaaaugggucugcugaaga

SEQ ID NO: 57075 - RNA, 22 nt, Human
ugagaacauacaaacagagaaa

SEQ ID NO: 57076 - RNA, 22 nt, Human
ugagaacauugggaaagcuaug

SEQ ID NO: 57077 - RNA, 22 nt, Human
ugagaacauuugcagggagagu

SEQ ID NO: 57078 - RNA, 22 nt, Human
ugagaaccaugaaaagcuguca

SEQ ID NO: 57079 - RNA, 22 nt, Human
ugagaaccucgaagauuuugcc

SEQ ID NO: 57080 - RNA, 22 nt, Human
ugagaacugaggauuugaauuc

SEQ ID NO: 57081 - RNA, 22 nt, Human
ugauucaguugguuuuguucag

SEQ ID NO: 57082 - RNA, 22 nt, Human
ugauucaucagaauaggaguuu

SEQ ID NO: 57083 - RNA, 22 nt, Human
ugauuccugugcuuauuccagu

SEQ ID NO: 57084 - RNA, 22 nt, Human
ugauucuauggaaggcauaagg

SEQ ID NO: 57085 - RNA, 22 nt, Human
ugauucucaaagguagacuggg

SEQ ID NO: 57086 - RNA, 22 nt, Human
ugauucucugauggagaaagac

SEQ ID NO: 57087 - RNA, 22 nt, Human
ugauucugaucaucaucauggu

SEQ ID NO: 57088 - RNA, 22 nt, Human
ugauucugccccuuggcucugg

SEQ ID NO: 57089 - RNA, 22 nt, Human
ugauucugcuuugauccuugug

SEQ ID NO: 57090 - RNA, 18 nt, Human
ugauucugugaugugguc

SEQ ID NO: 57091 - RNA, 22 nt, Human
ugauucuguucuccuugagaau

SEQ ID NO: 57092 - RNA, 22 nt, Human
ugauucuuucuccaccaauuca

SEQ ID NO: 57093 - RNA, 22 nt, Human
ugauugaauucaaaugcaaucu

SEQ ID NO: 57094 - RNA, 22 nt, Human
ugauuguuuccuauguacaccu

SEQ ID NO: 57095 - RNA, 22 nt, Human
ugauuuacacaucaaagcagca

SEQ ID NO: 57096 - RNA, 22 nt, Human
ugauuuacccguccaggcccua

SEQ ID NO: 57097 - RNA, 22 nt, Human
ugauuuacucccacuuagagcc

SEQ ID NO: 57098 - RNA, 22 nt, Human
ugauuuaggaaacagcuacagg

SEQ ID NO: 57099 - RNA, 22 nt, Human
ugauuuccaaaaggcuucuaag

SEQ ID NO: 57100 - RNA, 22 nt, Human
ugauuuccaguugcugggugcu

SEQ ID NO: 57101 - RNA, 22 nt, Human
ugauuuccugugcgcccuuagg

SEQ ID NO: 57102 - RNA, 22 nt, Human
ugauuucucuuggcaauauguu

SEQ ID NO: 57103 - RNA, 22 nt, Human
ugauuugauucuucuuggagua

SEQ ID NO: 57104 - RNA, 22 nt, Human
ugauuugcauggagaauaacag

SEQ ID NO: 57105 - RNA, 22 nt, Human
ugauuuuacuuagcaugauguu

SEQ ID NO: 57106 - RNA, 20 nt, Human
ugauuuucugaaacagcaca

SEQ ID NO: 57107 - RNA, 22 nt, Human
ugauuuuuggaucugagcugca

SEQ ID NO: 57108 - RNA, 22 nt, Human
ugcaaaaagagcgaggagcccu

SEQ ID NO: 57109 - RNA, 22 nt, Human
ugcaaaaaggcagacuggugau

SEQ ID NO: 57110 - RNA, 17 nt, Human
ugcaaacaaucacauau

SEQ ID NO: 57111 - RNA, 22 nt, Human
ugcaaacagaaaguuuauugug

SEQ ID NO: 57112 - RNA, 22 nt, Human
ugcaaacuagcaucaacuagua

SEQ ID NO: 57113 - RNA, 22 nt, Human
ugcaaagaagcaacauccuugu

SEQ ID NO: 57114 - RNA, 22 nt, Human
ugcaaagaagccuuugccuucu

SEQ ID NO: 57115 - RNA, 22 nt, Human
ugcaaagauuuaucuuucucca

SEQ ID NO: 57116 - RNA, 22 nt, Human
ugcaaagcaauguaggucagcu

SEQ ID NO: 57117 - RNA, 22 nt, Human
ugcaaagucgcaaaauucuucu

SEQ ID NO: 57118 - RNA, 22 nt, Human
ugcaaagugcuagcccacacca

SEQ ID NO: 57119 - RNA, 22 nt, Human
ugcaaaguugaggaaggcaugg

SEQ ID NO: 57120 - RNA, 22 nt, Human
ugcaaaugaugaaacuaacuuu

SEQ ID NO: 57121 - RNA, 22 nt, Human
ugcaaaugcccauuuauuuucu

SEQ ID NO: 57122 - RNA, 22 nt, Human
ugcaaaugggaaacccagcagu

SEQ ID NO: 57123 - RNA, 22 nt, Human
ugcaaaugucaaggguuagugu

SEQ ID NO: 57124 - RNA, 22 nt, Human
ugcaaauugcgauuuuuauuag

SEQ ID NO: 57125 - RNA, 22 nt, Human
ugcaaccugcacucugucuuua

SEQ ID NO: 57126 - RNA, 22 nt, Human
ugcaacucuggaucuucuggua

SEQ ID NO: 57127 - RNA, 22 nt, Human
ugcaagaaacauauuccacaag

SEQ ID NO: 57128 - RNA, 22 nt, Human
ugcaagaaggcaauaaacucuu

SEQ ID NO: 57129 - RNA, 21 nt, Human
ugcaagaaucaggaagcugcc

SEQ ID NO: 57130 - RNA, 22 nt, Human
ugcaagaaugacccaucuaccc

SEQ ID NO: 57131 - RNA, 22 nt, Human
ugcaagagcccaaacuauauac

SEQ ID NO: 57132 - RNA, 22 nt, Human
ugcaagagcccagggccaggaa

SEQ ID NO: 57133 - RNA, 22 nt, Human
ugcaagagcuguggcaaaagca

SEQ ID NO: 57134 - RNA, 22 nt, Human
ugcaagaggaauucuagaagca

SEQ ID NO: 57135 - RNA, 22 nt, Human
ugcaagaggagacuguacucag

SEQ ID NO: 57136 - RNA, 22 nt, Human
ugcaagaggauuguaucaauaa

SEQ ID NO: 57137 - RNA, 22 nt, Human
ugcaagagguaaaaugaaagga

SEQ ID NO: 57138 - RNA, 22 nt, Human
ugcaagauauuaucuuugcugc

SEQ ID NO: 57139 - RNA, 22 nt, Human
ugcaagaucuugucucugccac

SEQ ID NO: 57140 - RNA, 22 nt, Human
ugcaaggaagggacagcugaga

SEQ ID NO: 57141 - RNA, 22 nt, Human
ugcaaggcuauucacauguauu

SEQ ID NO: 57142 - RNA, 22 nt, Human
ugcaagggguuuaugcagauga

SEQ ID NO: 57143 - RNA, 22 nt, Human
ugcaaggguagaagugauggca

SEQ ID NO: 57144 - RNA, 22 nt, Human
ugcaaguaguccagccuuuggg

SEQ ID NO: 57145 - RNA, 22 nt, Human
ugcaaguaugacagccccaugg

SEQ ID NO: 57146 - RNA, 22 nt, Human
ugcaagugauucuguuuucuca

SEQ ID NO: 57147 - RNA, 22 nt, Human
ugcaauaacccaugagauagaa

SEQ ID NO: 57148 - RNA, 22 nt, Human
ugcaauaacuacuuuaauguug

SEQ ID NO: 57149 - RNA, 22 nt, Human
ugcaauaauguaugucacuccc

SEQ ID NO: 57150 - RNA, 22 nt, Human
ugcaauauuuggcacugagaug

SEQ ID NO: 57151 - RNA, 19 nt, Human
ugcaaucagcuacccaggu

SEQ ID NO: 57152 - RNA, 22 nt, Human
ugcaauccacuauucuaaagcc

SEQ ID NO: 57153 - RNA, 22 nt, Human
ugcaaugauauugucaaagcau

SEQ ID NO: 57154 - RNA, 21 nt, Human
ugcaaugcauugacagcagca

SEQ ID NO: 57155 - RNA, 23 nt, Human
ugcaauggcaugauuucagcuca

SEQ ID NO: 57156 - RNA, 22 nt, Human
ugcaauuacugggagguuuuau

SEQ ID NO: 57157 - RNA, 22 nt, Human
ugcaauuagcauuguauucuua

SEQ ID NO: 57158 - RNA, 22 nt, Human
ugcaauuuaugugcaagugguu

SEQ ID NO: 57159 - RNA, 22 nt, Human
ugcacaaacuugugucccaggg

SEQ ID NO: 57160 - RNA, 22 nt, Human
ugcacaaauuuguguaugcuca

SEQ ID NO: 57161 - RNA, 17 nt, Human
ugcacaagagacaauag

SEQ ID NO: 57162 - RNA, 22 nt, Human
ugcacacacggagauaggcuuu

SEQ ID NO: 57163 - RNA, 22 nt, Human
ugcacacacucguguauaugag

SEQ ID NO: 57164 - RNA, 19 nt, Human
ugcacacagauaaguaucu

SEQ ID NO: 57165 - RNA, 22 nt, Human
ugcacacaguucucaggaaaga

SEQ ID NO: 57166 - RNA, 22 nt, Human
ugcacacauaugagcaugugug

SEQ ID NO: 57167 - RNA, 22 nt, Human
ugcacagagcaggcaccagcgg

SEQ ID NO: 57168 - RNA, 22 nt, Human
ugcacagagggaggcauaaaau

SEQ ID NO: 57169 - RNA, 22 nt, Human
ugcacagaucugguggcaagga

SEQ ID NO: 57170 - RNA, 22 nt, Human
ugcacagcgggugucugucagg

SEQ ID NO: 57171 - RNA, 22 nt, Human
uggaacaaacauggugauggcu

SEQ ID NO: 57172 - RNA, 22 nt, Human
uggaacaaauuuuggggaccuu

SEQ ID NO: 57173 - RNA, 22 nt, Human
uggaacaacucccucggagccu

SEQ ID NO: 57174 - RNA, 22 nt, Human
uggaacaagaagcaggucgcuu

SEQ ID NO: 57175 - RNA, 22 nt, Human
uggaacaagacagcauagagcu

SEQ ID NO: 57176 - RNA, 22 nt, Human
uggaacaaucccgguuuagcuc

SEQ ID NO: 57177 - RNA, 22 nt, Human
uggaacacaagucauugagggg

SEQ ID NO: 57178 - RNA, 22 nt, Human
uggaacacaucuaaggaagcag

SEQ ID NO: 57179 - RNA, 22 nt, Human
uggaaccuggcauuagggacac

SEQ ID NO: 57180 - RNA, 22 nt, Human
uggaaccuggccugagcuacca

SEQ ID NO: 57181 - RNA, 22 nt, Human
uggaacuaagguagaaacuauu

SEQ ID NO: 57182 - RNA, 22 nt, Human
uggaagaaaauucaaucgaguu

SEQ ID NO: 57183 - RNA, 20 nt, Human
uggaagaagaacucaggcuu

SEQ ID NO: 57184 - RNA, 22 nt, Human
uggaagaagcuacaagcgguga

SEQ ID NO: 57185 - RNA, 22 nt, Human
uggaagacaauguacaugcagu

SEQ ID NO: 57186 - RNA, 20 nt, Human
uggaagacacugaagggcca

SEQ ID NO: 57187 - RNA, 22 nt, Human
uggaagacagugacugguugug

SEQ ID NO: 57188 - RNA, 22 nt, Human
uggaagagggagcuggguggcc

SEQ ID NO: 57189 - RNA, 22 nt, Human
uggaagagguggaaguggcuuc

SEQ ID NO: 57190 - RNA, 22 nt, Human
uggagcugagcaccuccagggc

SEQ ID NO: 57191 - RNA, 18 nt, Human
uggagcugagggcaaugc

SEQ ID NO: 57192 - RNA, 22 nt, Human
uggagcugauacagcuggcuuu

SEQ ID NO: 57193 - RNA, 22 nt, Human
uggagcugggaguccugggcug

SEQ ID NO: 57194 - RNA, 22 nt, Human
uggagcugggauuugaacugca

SEQ ID NO: 57195 - RNA, 23 nt, Human
uggagcugggcagcugggaaagu

SEQ ID NO: 57196 - RNA, 22 nt, Human
uggagcuguagccaccacccug

SEQ ID NO: 57197 - RNA, 22 nt, Human
uggaggaaaaaaccaggcagag

SEQ ID NO: 57198 - RNA, 23 nt, Human
uggaggaaacacaucagaagacc

SEQ ID NO: 57199 - RNA, 22 nt, Human
uggaggaaguggcuggccagaa

SEQ ID NO: 57200 - RNA, 22 nt, Human
uggaggaaguugcuggaaguca

SEQ ID NO: 57201 - RNA, 22 nt, Human
uggaggacguguccaccaugaa

SEQ ID NO: 57202 - RNA, 22 nt, Human
uggaggagaauuuauggucgaa

SEQ ID NO: 57203 - RNA, 22 nt, Human
uggaggaugccauccaggauac

SEQ ID NO: 57204 - RNA, 22 nt, Human
uggaggaugccuggggaggccu

SEQ ID NO: 57205 - RNA, 22 nt, Human
uggaggauuaaucuggaaagau

SEQ ID NO: 57206 - RNA, 19 nt, Human
uggaggcaagacauggagg

SEQ ID NO: 57207 - RNA, 22 nt, Human
uggaggcacuaaauggccacaa

SEQ ID NO: 57208 - RNA, 22 nt, Human
uggaggcaggagacagggcaaa

SEQ ID NO: 57209 - RNA, 22 nt, Human
uggaggcauaggccugggcccu

SEQ ID NO: 57210 - RNA, 22 nt, Human
uggaggcaucagagugcuuggc

SEQ ID NO: 57211 - RNA, 22 nt, Human
uggaggcauugugacugcugaa

SEQ ID NO: 57212 - RNA, 22 nt, Human
uggaggccaaggcaggcggauc

SEQ ID NO: 57213 - RNA, 22 nt, Human
uggaggccaggaaggcagcgag

SEQ ID NO: 57214 - RNA, 20 nt, Human
uggaggccaggauacuuugu

SEQ ID NO: 57215 - RNA, 22 nt, Human
uggaggccauaccuccugacau

SEQ ID NO: 57216 - RNA, 22 nt, Human
uggaggcccccaggcaacagca

SEQ ID NO: 57217 - RNA, 22 nt, Human
uggaggccgaauuagagcguug

SEQ ID NO: 57218 - RNA, 22 nt, Human
uggaggcugguuucugcugagg

SEQ ID NO: 57219 - RNA, 22 nt, Human
uggagggaacccaggcugcucu

SEQ ID NO: 57220 - RNA, 22 nt, Human
uggaggggcaauggagcgcgga

SEQ ID NO: 57221 - RNA, 22 nt, Human
uggagggucaccccuugcugag

SEQ ID NO: 57222 - RNA, 22 nt, Human
uggaggucgcuagcgagcgggc

SEQ ID NO: 57223 - RNA, 22 nt, Human
uggaggucuuacccagggcuau

SEQ ID NO: 57224 - RNA, 22 nt, Human
uggagguggcacaagggagguc

SEQ ID NO: 57225 - RNA, 22 nt, Human
uggagguggggcucaggaaucu

SEQ ID NO: 57226 - RNA, 20 nt, Human
uggagguggucugcuguccu

SEQ ID NO: 57227 - RNA, 22 nt, Human
uggagguguauaagguagcuuc

SEQ ID NO: 57228 - RNA, 23 nt, Human
uggagguuuuacugaguugagga

SEQ ID NO: 57229 - RNA, 22 nt, Human
uggagucaguggcuauugggca

SEQ ID NO: 57230 - RNA, 22 nt, Human
uggagucaucuuaaucuaggca

SEQ ID NO: 57231 - RNA, 22 nt, Human
uggagucaugauggcugcugau

SEQ ID NO: 57232 - RNA, 20 nt, Human
uggagucugacagaugggua

SEQ ID NO: 57233 - RNA, 22 nt, Human
uggagugcaguugggaggacac

SEQ ID NO: 57234 - RNA, 20 nt, Human
uggagugcuguguugagaag

SEQ ID NO: 57235 - RNA, 22 nt, Human
uggaguggacuucaugaggcca

SEQ ID NO: 57236 - RNA, 22 nt, Human
uggaguuaaaaacaggaugcac

SEQ ID NO: 57237 - RNA, 22 nt, Human
uggaguuagauaaaccugggua

SEQ ID NO: 57238 - RNA, 22 nt, Human
uggaguuccuuugaaaggcucu

SEQ ID NO: 57239 - RNA, 22 nt, Human
uggaguugugucaucuuuguaa

SEQ ID NO: 57240 - RNA, 23 nt, Human
uggauaaaauacuuacauucaac

SEQ ID NO: 57241 - RNA, 21 nt, Human
uggauaaaggcacuuuucauc

SEQ ID NO: 57242 - RNA, 22 nt, Human
uggauaaauagauacacuugca

SEQ ID NO: 57243 - RNA, 22 nt, Human
uggaucugguucccugagccuu

SEQ ID NO: 57244 - RNA, 22 nt, Human
uggaucuucacaagagagggcg

SEQ ID NO: 57245 - RNA, 22 nt, Human
uggaugagauuaaagugagguu

SEQ ID NO: 57246 - RNA, 22 nt, Human
uggaugagucugagauugggca

SEQ ID NO: 57247 - RNA, 22 nt, Human
uggauggccccacuggauccau

SEQ ID NO: 57248 - RNA, 22 nt, Human
uggaugugagaaggaucaggcu

SEQ ID NO: 57249 - RNA, 22 nt, Human
uggaugugucgcccuggcucuc

SEQ ID NO: 57250 - RNA, 22 nt, Human
uggauuaaagauuaaaaugaca

SEQ ID NO: 57251 - RNA, 22 nt, Human
uggauuagugcugaaaugaugg

SEQ ID NO: 57252 - RNA, 22 nt, Human
uggauuaguuaagaaauguuag

SEQ ID NO: 57253 - RNA, 22 nt, Human
uggauuaguuucaaggcagcaa

SEQ ID NO: 57254 - RNA, 22 nt, Human
uggauuauuguaagacaaagua

SEQ ID NO: 57255 - RNA, 22 nt, Human
uggauuuaccacagggccacag

SEQ ID NO: 57256 - RNA, 22 nt, Human
uggauuuauggagaccgaaagu

SEQ ID NO: 57257 - RNA, 22 nt, Human
uggauuuauuagguuggugaaa

SEQ ID NO: 57258 - RNA, 22 nt, Human
uggauuuccagacagcuuaauu

SEQ ID NO: 57259 - RNA, 22 nt, Human
uggcaaaaguuuuagguuauuu

SEQ ID NO: 57260 - RNA, 22 nt, Human
uggcaaagacgcuagcuaagau

SEQ ID NO: 57261 - RNA, 22 nt, Human
uggcaaagacugcaaggacuuu

SEQ ID NO: 57262 - RNA, 22 nt, Human
uggcaaagaugguucucaccau

SEQ ID NO: 57263 - RNA, 22 nt, Human
uggcaaaguuuaucaggaauau

SEQ ID NO: 57264 - RNA, 22 nt, Human
uggcaaauauuuuguuuuguaa

SEQ ID NO: 57265 - RNA, 22 nt, Human
uggcaaauuccaaaguuaauuc

SEQ ID NO: 57266 - RNA, 22 nt, Human
uggcaaccagguggucuagggu

SEQ ID NO: 57267 - RNA, 17 nt, Human
uggcaagaauggaaaug

SEQ ID NO: 57268 - RNA, 17 nt, Human
uggcaagacagcucagg

SEQ ID NO: 57269 - RNA, 22 nt, Human
uggcaagccugagauccgggag

SEQ ID NO: 57270 - RNA, 22 nt, Human
uggcaagcuggguuggguagcc

SEQ ID NO: 57271 - RNA, 22 nt, Human
uggcaaggccacaggugcaguu

SEQ ID NO: 57272 - RNA, 22 nt, Human
uggcaaguggcauagaauagcc

SEQ ID NO: 57273 - RNA, 22 nt, Human
uggcaauauccacaauuacuuu

SEQ ID NO: 57274 - RNA, 22 nt, Human
uggcacacagagaagacacuug

SEQ ID NO: 57275 - RNA, 20 nt, Human
uggcacagaacccuugccua

SEQ ID NO: 57276 - RNA, 22 nt, Human
uggcacagacagcacagcaaug

SEQ ID NO: 57277 - RNA, 22 nt, Human
uggcacagaccuuaucuucucu

SEQ ID NO: 57278 - RNA, 22 nt, Human
uggcacagagggacccagcagc

SEQ ID NO: 57279 - RNA, 22 nt, Human
uggcacagccaucuucuccugc

SEQ ID NO: 57280 - RNA, 22 nt, Human
uggcacaggcgguaagggugug

SEQ ID NO: 57281 - RNA, 22 nt, Human
uggcacauccacagaaucugga

SEQ ID NO: 57282 - RNA, 22 nt, Human
uggcacaugguaagacucagua

SEQ ID NO: 57283 - RNA, 22 nt, Human
uggcaccaaaagcagacguauu

SEQ ID NO: 57284 - RNA, 22 nt, Human
uggcaccaccagacaccaggag

SEQ ID NO: 57285 - RNA, 23 nt, Human
uggcaccaggcauucuaggggua

SEQ ID NO: 57286 - RNA, 16 nt, Human
uuguggcuuuugcaca

SEQ ID NO: 57287 - RNA, 20 nt, Human
uugugguuuagauuaucuga

SEQ ID NO: 57288 - RNA, 22 nt, Human
uuguguaacuugagcaaacaca

SEQ ID NO: 57289 - RNA, 22 nt, Human
uuguguaagaugcaauauggua

SEQ ID NO: 57290 - RNA, 22 nt, Human
uuguguaaugaaguuaucaugu

SEQ ID NO: 57291 - RNA, 22 nt, Human
uugugucccccuuugagagcca

SEQ ID NO: 57292 - RNA, 22 nt, Human
uugugucccuggagcuucugug

SEQ ID NO: 57293 - RNA, 21 nt, Human
uuguguccuucuaaagggcca

SEQ ID NO: 57294 - RNA, 22 nt, Human
uugugucuggauuucagcuuuc

SEQ ID NO: 57295 - RNA, 22 nt, Human
uugugugacuccuagaguagag

SEQ ID NO: 57296 - RNA, 22 nt, Human
uugugugucuucuucacugccc

SEQ ID NO: 57297 - RNA, 22 nt, Human
uugugugugagccuucaccaca

SEQ ID NO: 57298 - RNA, 22 nt, Human
uuguguguuuguagaaaaucca

SEQ ID NO: 57299 - RNA, 22 nt, Human
ugcaccuuuuagaagucauuuu

SEQ ID NO: 57300 - RNA, 22 nt, Human
ugcacuacugugauacacagcc

SEQ ID NO: 57301 - RNA, 22 nt, Human
ugcacugggaaagaaggaggga

SEQ ID NO: 57302 - RNA, 22 nt, Human
ugcacugguggugagugaggga

SEQ ID NO: 57303 - RNA, 23 nt, Human
ugcacuucuccauagaugcaucu

SEQ ID NO: 57304 - RNA, 22 nt, Human
ugcacuugaggauuuuccacag

SEQ ID NO: 57305 - RNA, 21 nt, Human
ugcacuuugggggacaggcug

SEQ ID NO: 57306 - RNA, 22 nt, Human
ugcagaaagucacauucccuuu

SEQ ID NO: 57307 - RNA, 22 nt, Human
ugcagaaccaguccucagaccc

SEQ ID NO: 57308 - RNA, 22 nt, Human
ugcagaagaaaacagcugugug

SEQ ID NO: 57309 - RNA, 20 nt, Human
ugcagaagaacguucugguu

SEQ ID NO: 57310 - RNA, 19 nt, Human
ugcagaagacacaguggug

SEQ ID NO: 57311 - RNA, 22 nt, Human
ugcagaagcagagaguugccaa

SEQ ID NO: 57312 - RNA, 22 nt, Human
ugcagaagcugcaggucagugg

SEQ ID NO: 57313 - RNA, 22 nt, Human
ugcagaaguauuccaggcccca

SEQ ID NO: 57314 - RNA, 22 nt, Human
ugcagaauauucuggugacaau

SEQ ID NO: 57315 - RNA, 23 nt, Human
ugcagacuucgaggagggggaua

SEQ ID NO: 57316 - RNA, 22 nt, Human
ugcagagaaaacuccuggguac

SEQ ID NO: 57317 - RNA, 22 nt, Human
ugcagagaagaggacaguucua

SEQ ID NO: 57318 - RNA, 22 nt, Human
ugcagagagauccucaggguuu

SEQ ID NO: 57319 - RNA, 22 nt, Human
ugcagagauugaacaagaagga

SEQ ID NO: 57320 - RNA, 20 nt, Human
ugcagagcugacauuaccug

SEQ ID NO: 57321 - RNA, 22 nt, Human
ugcagaggcccagcgguucuuc

SEQ ID NO: 57322 - RNA, 19 nt, Human
ugcagaggguaggaaggcc

SEQ ID NO: 57323 - RNA, 22 nt, Human
ugcagaguaaaagcagaugcua

SEQ ID NO: 57324 - RNA, 22 nt, Human
ugcagaguagcuauaccauuuu

SEQ ID NO: 57325 - RNA, 22 nt, Human
ugcagaguagugaggggacaga

SEQ ID NO: 57326 - RNA, 22 nt, Human
ugcagagucacccagauaauua

SEQ ID NO: 57327 - RNA, 22 nt, Human
ugcagagugaggaagaacugca

SEQ ID NO: 57328 - RNA, 22 nt, Human
ugcagaguggauucuguauacc

SEQ ID NO: 57329 - RNA, 21 nt, Human
ugcagauaauugaaagcugac

SEQ ID NO: 57330 - RNA, 22 nt, Human
ugcagauacaguauguggaagc

SEQ ID NO: 57331 - RNA, 22 nt, Human
ugcagcaaauggggcccguccu

SEQ ID NO: 57332 - RNA, 23 nt, Human
ugcagcaaccuuggaagcauuuc

SEQ ID NO: 57333 - RNA, 22 nt, Human
ugcagcaagaccggauaugucg

SEQ ID NO: 57334 - RNA, 22 nt, Human
ugcagcaaggggcccugauagg

SEQ ID NO: 57335 - RNA, 22 nt, Human
ugcagcaauggucccugcccuc

SEQ ID NO: 57336 - RNA, 22 nt, Human
ugcagcaauuuuuuaggcauuc

SEQ ID NO: 57337 - RNA, 22 nt, Human
ugcagcagaauauggcugcagg

SEQ ID NO: 57338 - RNA, 21 nt, Human
ugcagcagaguaagcagggga

SEQ ID NO: 57339 - RNA, 22 nt, Human
ugcagcagcagggaggaggcuc

SEQ ID NO: 57340 - RNA, 22 nt, Human
ugcagcaggagccaggccuggu

SEQ ID NO: 57341 - RNA, 22 nt, Human
ugcagcagggaccucuauguga

SEQ ID NO: 57342 - RNA, 22 nt, Human
ugcagcagucagucaggccugg

SEQ ID NO: 57343 - RNA, 22 nt, Human
ugcagccaauucauucauucuu

SEQ ID NO: 57344 - RNA, 22 nt, Human
ugcagccacaugaccugggucu

SEQ ID NO: 57345 - RNA, 22 nt, Human
ugcagccaccaccucugcugaa

SEQ ID NO: 57346 - RNA, 22 nt, Human
ugcagccagacuuugugcgaaa

SEQ ID NO: 57347 - RNA, 22 nt, Human
ugcagccagcaagugaauacau

SEQ ID NO: 57348 - RNA, 22 nt, Human
ugcagccaggaaauauuugcug

SEQ ID NO: 57349 - RNA, 22 nt, Human
ugcagccaucgcagagucugua

SEQ ID NO: 57350 - RNA, 22 nt, Human
ugcagccauuuucugccaaugc

SEQ ID NO: 57351 - RNA, 22 nt, Human
ugcagcccagccccagaaccuu

SEQ ID NO: 57352 - RNA, 22 nt, Human
ugcagccugguggucacuggag

SEQ ID NO: 57353 - RNA, 22 nt, Human
ugcagcucaagcuggugaggug

SEQ ID NO: 57354 - RNA, 22 nt, Human
ugcagcucugggguaaggggug

SEQ ID NO: 57355 - RNA, 22 nt, Human
ugcagcucuguaugcugauuau

SEQ ID NO: 57356 - RNA, 22 nt, Human
ugcagcugaaccuagagucugu

SEQ ID NO: 57357 - RNA, 17 nt, Human
ugcagcugauggggaaa

SEQ ID NO: 57358 - RNA, 22 nt, Human
ugcagcugcaaguccaggucag

SEQ ID NO: 57359 - RNA, 22 nt, Human
ugcagcugcaggagggugggag

SEQ ID NO: 57360 - RNA, 17 nt, Human
ugcagcugcucccaggc

SEQ ID NO: 57361 - RNA, 22 nt, Human
ugcagcuggauuuaucuuuucc

SEQ ID NO: 57362 - RNA, 22 nt, Human
ugcagcugggacauuuuugaua

SEQ ID NO: 57363 - RNA, 22 nt, Human
ugcagcugggucugcccuggcu

SEQ ID NO: 57364 - RNA, 22 nt, Human
ugcagcugugccugaaaaguac

SEQ ID NO: 57365 - RNA, 20 nt, Human
ugcagcuucucaucuucaaa

SEQ ID NO: 57366 - RNA, 22 nt, Human
ugcaggaaaaccaacacgccuu

SEQ ID NO: 57367 - RNA, 22 nt, Human
ugcaggaacagaacucacuccc

SEQ ID NO: 57368 - RNA, 22 nt, Human
ugcaggaagacuucccaagcca

SEQ ID NO: 57369 - RNA, 22 nt, Human
ugcaggaagcaaccagguccaa

SEQ ID NO: 57370 - RNA, 21 nt, Human
ugcaggaaguauggugccuau

SEQ ID NO: 57371 - RNA, 22 nt, Human
ugcaggaauagcuacagagcug

SEQ ID NO: 57372 - RNA, 22 nt, Human
ugcaggacauuaguuaugaauu

SEQ ID NO: 57373 - RNA, 23 nt, Human
ugcaggacuacucgagcacugcu

SEQ ID NO: 57374 - RNA, 22 nt, Human
ugcaggacuucaggacucugag

SEQ ID NO: 57375 - RNA, 22 nt, Human
ugcaggagagcuggucuggccc

SEQ ID NO: 57376 - RNA, 22 nt, Human
ugcaggagcccuugggcucugg

SEQ ID NO: 57377 - RNA, 22 nt, Human
ugcaggagggaggguuacaguu

SEQ ID NO: 57378 - RNA, 18 nt, Human
ugcaggagugaccccggc

SEQ ID NO: 57379 - RNA, 22 nt, Human
ugcaggccggcccuaggccuca

SEQ ID NO: 57380 - RNA, 22 nt, Human
ugcaggccuaugguggggcccc

SEQ ID NO: 57381 - RNA, 22 nt, Human
ugcaggccucacaccuggcacc

SEQ ID NO: 57382 - RNA, 22 nt, Human
ugcaggccucagacuuagccau

SEQ ID NO: 57383 - RNA, 22 nt, Human
ugcaggcucaccugccagggcc

SEQ ID NO: 57384 - RNA, 22 nt, Human
ugcaggcucaucucaagaguag

SEQ ID NO: 57385 - RNA, 22 nt, Human
ugcaggcuccacguuguugucc

SEQ ID NO: 57386 - RNA, 22 nt, Human
ugcaggcugcuggcaguagcuu

SEQ ID NO: 57387 - RNA, 22 nt, Human
ugcaggcuggaggagggacuaa

SEQ ID NO: 57388 - RNA, 22 nt, Human
ugcaggcuggcagugcugaaau

SEQ ID NO: 57389 - RNA, 18 nt, Human
ugcaggcugggguuccuc

SEQ ID NO: 57390 - RNA, 21 nt, Human
ugcaggcugugcgcuccugcc

SEQ ID NO: 57391 - RNA, 18 nt, Human
ugcaggcuguugaaacug

SEQ ID NO: 57392 - RNA, 22 nt, Human
ugcagggaaagggcacugggcu

SEQ ID NO: 57393 - RNA, 22 nt, Human
ugcagggaccccgaggcucucu

SEQ ID NO: 57394 - RNA, 22 nt, Human
ugcagggaggccccgcagcccu

SEQ ID NO: 57395 - RNA, 22 nt, Human
ugcagggauccuagcugaagag

SEQ ID NO: 57396 - RNA, 22 nt, Human
ugcagggaugcuagagguaaga

SEQ ID NO: 57397 - RNA, 22 nt, Human
ugcagggauuagaggccgggga

SEQ ID NO: 57398 - RNA, 22 nt, Human
ugcagggauuauguagggguug

SEQ ID NO: 57399 - RNA, 22 nt, Human
ugcauuccuuugucuguuaaag

SEQ ID NO: 57400 - RNA, 22 nt, Human
ugcauucuaugauaucaaaaca

SEQ ID NO: 57401 - RNA, 22 nt, Human
ugcauucugaacguaaauguga

SEQ ID NO: 57402 - RNA, 22 nt, Human
ugcauucugacuuaguuaauau

SEQ ID NO: 57403 - RNA, 22 nt, Human
ugcauucuuggaagaagcucuc

SEQ ID NO: 57404 - RNA, 22 nt, Human
ugcauugcauuugucaugaaga

SEQ ID NO: 57405 - RNA, 22 nt, Human
ugcauuggguugacauacuaaa

SEQ ID NO: 57406 - RNA, 22 nt, Human
ugcauuguaggauguuuagcag

SEQ ID NO: 57407 - RNA, 22 nt, Human
ugcauuguugaugaguugaaua

SEQ ID NO: 57408 - RNA, 22 nt, Human
ugcccugugugugcaagcacug

SEQ ID NO: 57409 - RNA, 22 nt, Human
ugcccuguuaucuuggaagagu

SEQ ID NO: 57410 - RNA, 22 nt, Human
ugcccuguucacuucaugguuc

SEQ ID NO: 57411 - RNA, 22 nt, Human
ugcccuugggauuuagguaagg

SEQ ID NO: 57412 - RNA, 22 nt, Human
ugccgcuccaggucucgcggug

SEQ ID NO: 57413 - RNA, 22 nt, Human
ugccgcugucgccaccauggcu

SEQ ID NO: 57414 - RNA, 22 nt, Human
ugccgugucccauugugcucug

SEQ ID NO: 57415 - RNA, 22 nt, Human
ugccuaagucugcagucacuug

SEQ ID NO: 57416 - RNA, 22 nt, Human
ugccuacccugcccgcagacac

SEQ ID NO: 57417 - RNA, 22 nt, Human
ugccuagaacuuuauucuuuau

SEQ ID NO: 57418 - RNA, 22 nt, Human
ugccuagcauaguauuugucac

SEQ ID NO: 57419 - RNA, 22 nt, Human
ugccuaggaaaccucaugcuuc

SEQ ID NO: 57420 - RNA, 22 nt, Human
ugccuaguaggguuguuguagg

SEQ ID NO: 57421 - RNA, 22 nt, Human
ugccucagaguugucccuacca

SEQ ID NO: 57422 - RNA, 23 nt, Human
ugccucaguggaaugugagggug

SEQ ID NO: 57423 - RNA, 22 nt, Human
ugccucauaacacuccuggagu

SEQ ID NO: 57424 - RNA, 23 nt, Human
ugccuccaccgagggccaggcau

SEQ ID NO: 57425 - RNA, 17 nt, Human
ugccuccagcaggguga

SEQ ID NO: 57426 - RNA, 22 nt, Human
ugccucgugucugagucuguuc

SEQ ID NO: 57427 - RNA, 22 nt, Human
ugccucugcugcauauucaccu

SEQ ID NO: 57428 - RNA, 22 nt, Human
ugccucugugggcagagcugcc

SEQ ID NO: 57429 - RNA, 22 nt, Human
ugccucuuggagccuuuccucu

SEQ ID NO: 57430 - RNA, 22 nt, Human
ugccugaaugaucagucagauu

SEQ ID NO: 57431 - RNA, 22 nt, Human
ugccugaauucaauuccuggcu

SEQ ID NO: 57432 - RNA, 22 nt, Human
ugccugagggaguaagaguccu

SEQ ID NO: 57433 - RNA, 22 nt, Human
ugccugcaucuuggaggcccca

SEQ ID NO: 57434 - RNA, 22 nt, Human
ugccugccaggugcuucuucau

SEQ ID NO: 57435 - RNA, 22 nt, Human
ugccugcccacgacuacagcag

SEQ ID NO: 57436 - RNA, 20 nt, Human
ugccugcccagguccugcac

SEQ ID NO: 57437 - RNA, 22 nt, Human
ugccugccccacaagggguugc

SEQ ID NO: 57438 - RNA, 22 nt, Human
ugccugccucaggccgagugcu

SEQ ID NO: 57439 - RNA, 21 nt, Human
ugccugccuccuuuggcuagg

SEQ ID NO: 57440 - RNA, 22 nt, Human
ugccugcucugugccacaguug

SEQ ID NO: 57441 - RNA, 22 nt, Human
ugccugcucuugagacuuacaa

SEQ ID NO: 57442 - RNA, 22 nt, Human
ugccugcugcuaagcucuuugu

SEQ ID NO: 57443 - RNA, 22 nt, Human
ugccugcuuguguaccugguga

SEQ ID NO: 57444 - RNA, 19 nt, Human
ugccuggacaaaugugggg

SEQ ID NO: 57445 - RNA, 22 nt, Human
ugccuggauacucauuaauuuc

SEQ ID NO: 57446 - RNA, 22 nt, Human
ugccuggauucgguuguuguca

SEQ ID NO: 57447 - RNA, 22 nt, Human
ugccuggccagacccuauagag

SEQ ID NO: 57448 - RNA, 21 nt, Human
ugccuggccuuugcuuuuccu

SEQ ID NO: 57449 - RNA, 20 nt, Human
ugccugggaaggcguggagg

SEQ ID NO: 57450 - RNA, 22 nt, Human
ugccuggguccaggccaagccu

SEQ ID NO: 57451 - RNA, 22 nt, Human
ugccuggguguaaagggccaac

SEQ ID NO: 57452 - RNA, 22 nt, Human
ugccuggguugacucuuagcug

SEQ ID NO: 57453 - RNA, 22 nt, Human
ugccugguauuugaauaaagag

SEQ ID NO: 57454 - RNA, 22 nt, Human
ugccuguaauaaugcuaagcac

SEQ ID NO: 57455 - RNA, 19 nt, Human
ugccugucaguagaucuca

SEQ ID NO: 57456 - RNA, 22 nt, Human
ugccugucuuaauaucuggaaa

SEQ ID NO: 57457 - RNA, 22 nt, Human
ugccugugacccaaggaugcga

SEQ ID NO: 57458 - RNA, 22 nt, Human
ugccugugcccuucuuggcauu

SEQ ID NO: 57459 - RNA, 22 nt, Human
ugccugugguuccaguuuuuuc

SEQ ID NO: 57460 - RNA, 22 nt, Human
ugccuguguaugugcaugcaca

SEQ ID NO: 57461 - RNA, 22 nt, Human
ugccuguguccccuucuuggca

SEQ ID NO: 57462 - RNA, 22 nt, Human
ugccuucacugagcuuauggga

SEQ ID NO: 57463 - RNA, 22 nt, Human
ugccuuccuaauggugggguuu

SEQ ID NO: 57464 - RNA, 22 nt, Human
ugccuucuucucccuggcucag

SEQ ID NO: 57465 - RNA, 22 nt, Human
ugccuugcacauaauauacauu

SEQ ID NO: 57466 - RNA, 22 nt, Human
ugccuugccacugcucuuaaug

SEQ ID NO: 57467 - RNA, 16 nt, Human
ugccuugcugucaguc

SEQ ID NO: 57468 - RNA, 22 nt, Human
ugccuugcuuaacaagauggca

SEQ ID NO: 57469 - RNA, 22 nt, Human
ugccuugcuucaaucaaaccgu

SEQ ID NO: 57470 - RNA, 22 nt, Human
ugccuuguccuucgucagggcu

SEQ ID NO: 57471 - RNA, 22 nt, Human
ugccuuuaacaagaucuccaga

SEQ ID NO: 57472 - RNA, 22 nt, Human
ugccuuuaaggaaucauucuug

SEQ ID NO: 57473 - RNA, 22 nt, Human
ugccuuuacugauuagcugugu

SEQ ID NO: 57474 - RNA, 22 nt, Human
ugccuuuagggaaaagcaagcu

SEQ ID NO: 57475 - RNA, 22 nt, Human
ugccuuugcaauugaggaggau

SEQ ID NO: 57476 - RNA, 22 nt, Human
ugccuuuuaccuuguaauucug

SEQ ID NO: 57477 - RNA, 22 nt, Human
ugccuuuugaagccucacaggu

SEQ ID NO: 57478 - RNA, 22 nt, Human
ugccuuuuguuagggcugccag

SEQ ID NO: 57479 - RNA, 22 nt, Human
ugcgauguaugcaguauuuguu

SEQ ID NO: 57480 - RNA, 22 nt, Human
ugcgcaggagcucugccaggag

SEQ ID NO: 57481 - RNA, 22 nt, Human
ugcgcgcuggcgucacuuagca

SEQ ID NO: 57482 - RNA, 22 nt, Human
ugcggcagccaccgcguggccc

SEQ ID NO: 57483 - RNA, 22 nt, Human
ugcgggucccagggucacaggc

SEQ ID NO: 57484 - RNA, 22 nt, Human
ugcggguugguggcauaugcag

SEQ ID NO: 57485 - RNA, 23 nt, Human
ugcguacggcugccagugugacu

SEQ ID NO: 57486 - RNA, 22 nt, Human
ugcguggcgcagcgugugggau

SEQ ID NO: 57487 - RNA, 22 nt, Human
ugcguuauugugucuggcuaug

SEQ ID NO: 57488 - RNA, 22 nt, Human
ugcguuuaguuucaagacacgu

SEQ ID NO: 57489 - RNA, 21 nt, Human
ugcuaagugucacaugucugc

SEQ ID NO: 57490 - RNA, 22 nt, Human
ugcuaauaucuagaaguuuguu

SEQ ID NO: 57491 - RNA, 22 nt, Human
ugcuaauguccugaccguucug

SEQ ID NO: 57492 - RNA, 22 nt, Human
ugcuaauguuucauuuuuagau

SEQ ID NO: 57493 - RNA, 22 nt, Human
ugcuacaaauucguaaucaauu

SEQ ID NO: 57494 - RNA, 22 nt, Human
ugcuacacuuaaaucagucacc

SEQ ID NO: 57495 - RNA, 22 nt, Human
ugcuacagagccaggaagagug

SEQ ID NO: 57496 - RNA, 23 nt, Human
ugcuacucaaaguguggucccag

SEQ ID NO: 57497 - RNA, 22 nt, Human
ugcuagaauuugcagaagcaua

SEQ ID NO: 57498 - RNA, 22 nt, Human
ugcuaggagaggcagcacagcg

SEQ ID NO: 57499 - RNA, 22 nt, Human
ugcuaggcauugucugggagua

SEQ ID NO: 57500 - RNA, 22 nt, Human
ugcuagguaagaagggggcucc

SEQ ID NO: 57501 - RNA, 22 nt, Human
ugcuagugcaggguuuucaguu

SEQ ID NO: 57502 - RNA, 22 nt, Human
ugcuauaagcuccacgcuguag

SEQ ID NO: 57503 - RNA, 22 nt, Human
ugcuauaaguagacauucaaca

SEQ ID NO: 57504 - RNA, 22 nt, Human
ugcuauacggagcaucuucagg

SEQ ID NO: 57505 - RNA, 22 nt, Human
ugcuauguugccuaguguaaua

SEQ ID NO: 57506 - RNA, 22 nt, Human
ugcuauuagaagccaugcuguu

SEQ ID NO: 57507 - RNA, 22 nt, Human
ugcuauuuggaaaagcauuugg

SEQ ID NO: 57508 - RNA, 22 nt, Human
ugcuauuuuggucuacagcacu

SEQ ID NO: 57509 - RNA, 17 nt, Human
ugcucaaauacuuuuga

SEQ ID NO: 57510 - RNA, 23 nt, Human
ugcucaauagaccauaauaucca

SEQ ID NO: 57511 - RNA, 22 nt, Human
ugcucacagcccagaacauaau

SEQ ID NO: 57512 - RNA, 22 nt, Human
ugcucagauuacagccccacau

SEQ ID NO: 57513 - RNA, 22 nt, Human
ugcucagccgugagcagagccg

SEQ ID NO: 57514 - RNA, 22 nt, Human
uggcaccaggcgggguggcugu

SEQ ID NO: 57515 - RNA, 22 nt, Human
uggcaccagggaacaagcauuu

SEQ ID NO: 57516 - RNA, 22 nt, Human
uggcacccaguggagcugugcu

SEQ ID NO: 57517 - RNA, 22 nt, Human
ugcauuucagaagaaaauucgg

SEQ ID NO: 57518 - RNA, 22 nt, Human
uuuauucacucauucagccagu

SEQ ID NO: 57519 - RNA, 22 nt, Human
uuuauuccaaagcuugcacuuu

SEQ ID NO: 57520 - RNA, 22 nt, Human
uuuauucuaacuugcugcucua

SEQ ID NO: 57521 - RNA, 22 nt, Human
uuuauucuugagagugagaaga

SEQ ID NO: 57522 - RNA, 22 nt, Human
uuuauugcauacacaaauguca

SEQ ID NO: 57523 - RNA, 22 nt, Human
uuuauugggugcagugcccaca

SEQ ID NO: 57524 - RNA, 22 nt, Human
uuuauuguuaucaugggugagu

SEQ ID NO: 57525 - RNA, 19 nt, Human
uuuauuugagacaugccuu

SEQ ID NO: 57526 - RNA, 22 nt, Human
uuuauuuggcaucucugccaag

SEQ ID NO: 57527 - RNA, 22 nt, Human
uuucaaaagcguacguagugaa

SEQ ID NO: 57528 - RNA, 22 nt, Human
uuucaaacuaugugucaggcag

SEQ ID NO: 57529 - RNA, 22 nt, Human
uuucaaacuccagcucaccaau

SEQ ID NO: 57530 - RNA, 22 nt, Human
uuucaaacugggagugagggga

SEQ ID NO: 57531 - RNA, 22 nt, Human
uuucaaacuuaaauaccuuucc

SEQ ID NO: 57532 - RNA, 22 nt, Human
uuucaaacuuuacucuugaauc

SEQ ID NO: 57533 - RNA, 22 nt, Human
uuucaaagaccauuaacuauca

SEQ ID NO: 57534 - RNA, 22 nt, Human
uuucaaagaguuguaaauuacu

SEQ ID NO: 57535 - RNA, 22 nt, Human
uuucaaagguuuugucaugucu

SEQ ID NO: 57536 - RNA, 22 nt, Human
uuucaaaguaaggauuuucauc

SEQ ID NO: 57537 - RNA, 22 nt, Human
uuucaaaguggagaauuagaca

SEQ ID NO: 57538 - RNA, 22 nt, Human
uuucaaauagaaucuuuccaaa

SEQ ID NO: 57539 - RNA, 23 nt, Human
uuucaacaaugcuuagagaaaac

SEQ ID NO: 57540 - RNA, 22 nt, Human
uuucaacagaucugucuucagg

SEQ ID NO: 57541 - RNA, 23 nt, Human
uuucaacaggcagagaagacuua

SEQ ID NO: 57542 - RNA, 17 nt, Human
uuucaacaucacucagc

SEQ ID NO: 57543 - RNA, 22 nt, Human
uuucaacucaugcuaaaggaag

SEQ ID NO: 57544 - RNA, 22 nt, Human
uuucaacuugaagaauugauac

SEQ ID NO: 57545 - RNA, 22 nt, Human
uuucaagaauugaagaggauuu

SEQ ID NO: 57546 - RNA, 22 nt, Human
uuucaagacucauugaguauug

SEQ ID NO: 57547 - RNA, 22 nt, Human
uuucaagagaaaacuaaccuau

SEQ ID NO: 57548 - RNA, 22 nt, Human
uuucaagcaugucaaguuaguc

SEQ ID NO: 57549 - RNA, 22 nt, Human
uuucaaggcuaauccacaguau

SEQ ID NO: 57550 - RNA, 22 nt, Human
uuucaaggugcaggaggguuuu

SEQ ID NO: 57551 - RNA, 22 nt, Human
uuucaagucaguagcuaaucau

SEQ ID NO: 57552 - RNA, 22 nt, Human
uuucaaguggcgagauaaggaa

SEQ ID NO: 57553 - RNA, 22 nt, Human
uuucaaguuguuuauauccaga

SEQ ID NO: 57554 - RNA, 22 nt, Human
uuucaauuccaccaaagcgccc

SEQ ID NO: 57555 - RNA, 22 nt, Human
uuucacaaacugaggagacaau

SEQ ID NO: 57556 - RNA, 19 nt, Human
uuucacaaagagagcguga

SEQ ID NO: 57557 - RNA, 22 nt, Human
uuucacaaagcauagcacuuua

SEQ ID NO: 57558 - RNA, 22 nt, Human
uuucacaacugcuuauuugaga

SEQ ID NO: 57559 - RNA, 22 nt, Human
uuucacacccacuaggacuguu

SEQ ID NO: 57560 - RNA, 22 nt, Human
uuucacacuagucagaauacca

SEQ ID NO: 57561 - RNA, 22 nt, Human
uuucacagaaagaagcuaguuu

SEQ ID NO: 57562 - RNA, 22 nt, Human
uuucacagauauaagauuucac

SEQ ID NO: 57563 - RNA, 18 nt, Human
uuucacagauucaugacu

SEQ ID NO: 57564 - RNA, 22 nt, Human
uuucacagcuagugagcuucua

SEQ ID NO: 57565 - RNA, 22 nt, Human
uuucacagcugggaagagauau

SEQ ID NO: 57566 - RNA, 22 nt, Human
uuucacaggaguccuuucuaua

SEQ ID NO: 57567 - RNA, 22 nt, Human
uuucacaggaugcuguuuuaua

SEQ ID NO: 57568 - RNA, 22 nt, Human
uuucacaggccuuuuguagccc

SEQ ID NO: 57569 - RNA, 22 nt, Human
uuucacaucagagguagauuag

SEQ ID NO: 57570 - RNA, 22 nt, Human
uuucacauguggaaugccaggu

SEQ ID NO: 57571 - RNA, 23 nt, Human
uuucacauuaauguuuagcagga

SEQ ID NO: 57572 - RNA, 22 nt, Human
uuucacauuagauaugucauuu

SEQ ID NO: 57573 - RNA, 22 nt, Human
uuucaccaagguaaccuuugau

SEQ ID NO: 57574 - RNA, 22 nt, Human
uuucaccucagucuuuuuauau

SEQ ID NO: 57575 - RNA, 22 nt, Human
uuucacuguuaggaguaugcua

SEQ ID NO: 57576 - RNA, 22 nt, Human
uuucagaaauggcacugaaauc

SEQ ID NO: 57577 - RNA, 22 nt, Human
uuucagaaggggagaaagguca

SEQ ID NO: 57578 - RNA, 23 nt, Human
uuucagaagugguccuaggaagc

SEQ ID NO: 57579 - RNA, 22 nt, Human
uuucagacaggacuucauaugu

SEQ ID NO: 57580 - RNA, 22 nt, Human
uuucagacaucacauggguuug

SEQ ID NO: 57581 - RNA, 22 nt, Human
uuucagacugcugugugaaacu

SEQ ID NO: 57582 - RNA, 22 nt, Human
uuucagagccuuuaucucucua

SEQ ID NO: 57583 - RNA, 22 nt, Human
uuucagagcucuaggcucucag

SEQ ID NO: 57584 - RNA, 22 nt, Human
uuucagaggaaaucucauugag

SEQ ID NO: 57585 - RNA, 22 nt, Human
uuucagaggaggaaggcaguua

SEQ ID NO: 57586 - RNA, 22 nt, Human
uuucagagggcagaucuggggc

SEQ ID NO: 57587 - RNA, 22 nt, Human
uuucagagucagcuccucucua

SEQ ID NO: 57588 - RNA, 22 nt, Human
uuucagaugcaauuaauuuuca

SEQ ID NO: 57589 - RNA, 22 nt, Human
uuucagaugguauauacaguag

SEQ ID NO: 57590 - RNA, 22 nt, Human
uuucagaugugugucucugaag

SEQ ID NO: 57591 - RNA, 17 nt, Human
uuucagauucacuuucu

SEQ ID NO: 57592 - RNA, 22 nt, Human
uuucagcacuuuaggcagcagg

SEQ ID NO: 57593 - RNA, 22 nt, Human
uuucaggccauagcacagggaa

SEQ ID NO: 57594 - RNA, 22 nt, Human
uuucagggaaguguugaaaagg

SEQ ID NO: 57595 - RNA, 22 nt, Human
uuucaggguacauggagcaaau

SEQ ID NO: 57596 - RNA, 22 nt, Human
uuucagucauggauucacugag

SEQ ID NO: 57597 - RNA, 22 nt, Human
uuucagucuguaaaggugagga

SEQ ID NO: 57598 - RNA, 22 nt, Human
uuucagugaaagcuacuguuag

SEQ ID NO: 57599 - RNA, 22 nt, Human
uuucaguggaccacaguuugau

SEQ ID NO: 57600 - RNA, 22 nt, Human
uuucagugugcuccugagggcu

SEQ ID NO: 57601 - RNA, 20 nt, Human
uuucaguuaucuugaccuuc

SEQ ID NO: 57602 - RNA, 23 nt, Human
uuucaguugagaaugcacggacc

SEQ ID NO: 57603 - RNA, 22 nt, Human
uuucaguugccaagcuaauucu

SEQ ID NO: 57604 - RNA, 22 nt, Human
uuucaguuuaugucuugaauua

SEQ ID NO: 57605 - RNA, 22 nt, Human
uuucaguuuccagcuuugucau

SEQ ID NO: 57606 - RNA, 22 nt, Human
uuucauaaucugucaagugggg

SEQ ID NO: 57607 - RNA, 22 nt, Human
uuucauagccuucuaaugaguu

SEQ ID NO: 57608 - RNA, 22 nt, Human
uuucauagcugaaaauguugaa

SEQ ID NO: 57609 - RNA, 22 nt, Human
uuucauaugggcauuggcaaua

SEQ ID NO: 57610 - RNA, 22 nt, Human
uuucaucuauuugcuuugugaa

SEQ ID NO: 57611 - RNA, 22 nt, Human
uuucaucuuauuugucuacauc

SEQ ID NO: 57612 - RNA, 22 nt, Human
uuucaugcacaaaugagcaagg

SEQ ID NO: 57613 - RNA, 22 nt, Human
uuucaugcucauggaacacagc

SEQ ID NO: 57614 - RNA, 22 nt, Human
uuucauguacuuuuuugauaga

SEQ ID NO: 57615 - RNA, 22 nt, Human
uuucauguggcgaugucucugg

SEQ ID NO: 57616 - RNA, 22 nt, Human
uuucauguuaguugguucuugg

SEQ ID NO: 57617 - RNA, 22 nt, Human
uuucauguuauuaauagugcug

SEQ ID NO: 57618 - RNA, 22 nt, Human
uuucauguuggggaguugagug

SEQ ID NO: 57619 - RNA, 22 nt, Human
uuucauguuuauggaaaaugag

SEQ ID NO: 57620 - RNA, 22 nt, Human
uuucauuacuuguuaaggguag

SEQ ID NO: 57621 - RNA, 22 nt, Human
uuucauuauaaaaaguuggcuu

SEQ ID NO: 57622 - RNA, 22 nt, Human
uuucauuauucaugcuaguuau

SEQ ID NO: 57623 - RNA, 22 nt, Human
uuucauugagacuauagacauc

SEQ ID NO: 57624 - RNA, 22 nt, Human
uuucauugaugggugauagaaa

SEQ ID NO: 57625 - RNA, 22 nt, Human
uuucauugucuacauaugacau

SEQ ID NO: 57626 - RNA, 17 nt, Human
uuucuggaaugggcaaa

SEQ ID NO: 57627 - RNA, 22 nt, Human
uuucuggcagcgggacaggggu

SEQ ID NO: 57628 - RNA, 22 nt, Human
uuucugggacuggggagauucu

SEQ ID NO: 57629 - RNA, 20 nt, Human
uuucuggguacucucccucu

SEQ ID NO: 57630 - RNA, 22 nt, Human
uuucuguaauuaaaagggcagg

SEQ ID NO: 57631 - RNA, 22 nt, Human
uuucuguauuuugucauaaccu

SEQ ID NO: 57632 - RNA, 20 nt, Human
uuucugugaggacuguacug

SEQ ID NO: 57633 - RNA, 22 nt, Human
uggccacccccaaugucaguag

SEQ ID NO: 57634 - RNA, 22 nt, Human
uggccaccuuauggcuauugga

SEQ ID NO: 57635 - RNA, 22 nt, Human
uggccagacagagaggcuuugu

SEQ ID NO: 57636 - RNA, 17 nt, Human
uggccagagcaggcccc

SEQ ID NO: 57637 - RNA, 22 nt, Human
uggccagauucaugcauguauc

SEQ ID NO: 57638 - RNA, 22 nt, Human
uggccagcccuucagccaugcc

SEQ ID NO: 57639 - RNA, 22 nt, Human
uggccaguaauagcuucuggug

SEQ ID NO: 57640 - RNA, 22 nt, Human
uggccauagcucagcuccuuca

SEQ ID NO: 57641 - RNA, 22 nt, Human
uggccaugaaggaggcagcaga

SEQ ID NO: 57642 - RNA, 22 nt, Human
uggcccagagcacugcugggca

SEQ ID NO: 57643 - RNA, 22 nt, Human
uggcccagcucagggugggcgg

SEQ ID NO: 57644 - RNA, 22 nt, Human
uggcccaggccaaagcccugga

SEQ ID NO: 57645 - RNA, 22 nt, Human
uggcccaggcgaggugggcaga

SEQ ID NO: 57646 - RNA, 22 nt, Human
uggcccagggaguucauggugu

SEQ ID NO: 57647 - RNA, 22 nt, Human
uggcccagggcacagcagggag

SEQ ID NO: 57648 - RNA, 22 nt, Human
uggcccagggucuacagccuca

SEQ ID NO: 57649 - RNA, 22 nt, Human
uggcccaggucucucugagccc

SEQ ID NO: 57650 - RNA, 22 nt, Human
uggcccaggugcaagagacaga

SEQ ID NO: 57651 - RNA, 22 nt, Human
uggcccaggugcacccagaggc

SEQ ID NO: 57652 - RNA, 22 nt, Human
uggcccaguagaaaagggaucg

SEQ ID NO: 57653 - RNA, 22 nt, Human
uggcccaguauguauaaucuua

SEQ ID NO: 57654 - RNA, 22 nt, Human
uggcccagucagcaggagaggg

SEQ ID NO: 57655 - RNA, 22 nt, Human
uggcccgaccucugcucaugca

SEQ ID NO: 57656 - RNA, 22 nt, Human
uggcccgggaguuuugaagagu

SEQ ID NO: 57657 - RNA, 22 nt, Human
uggcccucagucuugcuccugc

SEQ ID NO: 57658 - RNA, 22 nt, Human
uggcccugacagguccugggca

SEQ ID NO: 57659 - RNA, 22 nt, Human
uggcccugacugauguggaggg

SEQ ID NO: 57660 - RNA, 22 nt, Human
uggcccugaggacccagugugg

SEQ ID NO: 57661 - RNA, 22 nt, Human
uggcccugccgccacgacgucu

SEQ ID NO: 57662 - RNA, 22 nt, Human
uggcccuggcugaguuagauuu

SEQ ID NO: 57663 - RNA, 22 nt, Human
uggcccuguccucauuucaucu

SEQ ID NO: 57664 - RNA, 22 nt, Human
uggcccugucugcacacaggau

SEQ ID NO: 57665 - RNA, 22 nt, Human
uggcccugugacugaguucuag

SEQ ID NO: 57666 - RNA, 22 nt, Human
uggcccuguggaggucagugag

SEQ ID NO: 57667 - RNA, 22 nt, Human
uggcccuguggcuucagaacag

SEQ ID NO: 57668 - RNA, 22 nt, Human
uggcccuguucuguaccucaua

SEQ ID NO: 57669 - RNA, 22 nt, Human
uggcccuuugggugcaggggca

SEQ ID NO: 57670 - RNA, 22 nt, Human
uggcccuuugguuuaugacuga

SEQ ID NO: 57671 - RNA, 22 nt, Human
uggccggggcugauggacagug

SEQ ID NO: 57672 - RNA, 22 nt, Human
uggccuagagaagccaaaagau

SEQ ID NO: 57673 - RNA, 22 nt, Human
uggccucaccacuagcugggug

SEQ ID NO: 57674 - RNA, 22 nt, Human
uggccucagauuucaggggugg

SEQ ID NO: 57675 - RNA, 21 nt, Human
uggccucccacacuuccaugg

SEQ ID NO: 57676 - RNA, 22 nt, Human
uggccuccucgggcugacccug

SEQ ID NO: 57677 - RNA, 22 nt, Human
uggccucuccuggcagcaucca

SEQ ID NO: 57678 - RNA, 20 nt, Human
uggccucugagaugccacgg

SEQ ID NO: 57679 - RNA, 20 nt, Human
uggccucuguagaggccaag

SEQ ID NO: 57680 - RNA, 22 nt, Human
uggccucugugggagcugagca

SEQ ID NO: 57681 - RNA, 22 nt, Human
uggccugaauuauggcagaucu

SEQ ID NO: 57682 - RNA, 22 nt, Human
uggccugacugucaggcuguau

SEQ ID NO: 57683 - RNA, 22 nt, Human
uggccugcuuucuuagguguuc

SEQ ID NO: 57684 - RNA, 22 nt, Human
uggccuggcccugaggcccugu

SEQ ID NO: 57685 - RNA, 22 nt, Human
uggccugggccugccggugcaa

SEQ ID NO: 57686 - RNA, 22 nt, Human
uggccugggucacaccaggguc

SEQ ID NO: 57687 - RNA, 22 nt, Human
uggccuggugcucaggcaguag

SEQ ID NO: 57688 - RNA, 22 nt, Human
uggccuuccuggugacucauga

SEQ ID NO: 57689 - RNA, 22 nt, Human
uggccuugagaugcagcagcca

SEQ ID NO: 57690 - RNA, 22 nt, Human
uggccuugcccagcgccuaggu

SEQ ID NO: 57691 - RNA, 22 nt, Human
uggccuuggcagugagaagagu

SEQ ID NO: 57692 - RNA, 22 nt, Human
uggcgagcuuuguucuccagga

SEQ ID NO: 57693 - RNA, 22 nt, Human
uggcgcaacucauucauggugu

SEQ ID NO: 57694 - RNA, 21 nt, Human
uggcggggacuuguggcugcc

SEQ ID NO: 57695 - RNA, 22 nt, Human
uggcggggcagcucuggcuucu

SEQ ID NO: 57696 - RNA, 21 nt, Human
uggcuaaacccuaguaaauua

SEQ ID NO: 57697 - RNA, 23 nt, Human
uggcuaaaggcucuaguccugcu

SEQ ID NO: 57698 - RNA, 22 nt, Human
uggcuaacaguuaagauuucau

SEQ ID NO: 57699 - RNA, 22 nt, Human
uggcuacaagguggcuauucua

SEQ ID NO: 57700 - RNA, 22 nt, Human
uggcuacaaguguguuuaguuu

SEQ ID NO: 57701 - RNA, 22 nt, Human
uggcuacagacauuccuaggga

SEQ ID NO: 57702 - RNA, 22 nt, Human
uggcuacagcuuggccacagag

SEQ ID NO: 57703 - RNA, 22 nt, Human
uggcuacauuuauacucucauu

SEQ ID NO: 57704 - RNA, 22 nt, Human
uggcuaccugauuucuuuucag

SEQ ID NO: 57705 - RNA, 20 nt, Human
uggcuagcauuaaaaugacu

SEQ ID NO: 57706 - RNA, 22 nt, Human
uggcuaggacucauccuguuuc

SEQ ID NO: 57707 - RNA, 22 nt, Human
uggcuaggcuccaagagcugga

SEQ ID NO: 57708 - RNA, 22 nt, Human
uggcuaugacuucguacugucu

SEQ ID NO: 57709 - RNA, 22 nt, Human
uggcuaugaggagcgcaggugu

SEQ ID NO: 57710 - RNA, 22 nt, Human
uggcucaaguaacaaaaauaua

SEQ ID NO: 57711 - RNA, 22 nt, Human
uggcucacaaucucccaugaag

SEQ ID NO: 57712 - RNA, 22 nt, Human
uggcucacuguagccuugaccu

SEQ ID NO: 57713 - RNA, 22 nt, Human
uggcucacuuccguggagaggu

SEQ ID NO: 57714 - RNA, 22 nt, Human
uggcucagaaggcugccuucac

SEQ ID NO: 57715 - RNA, 22 nt, Human
uggcucagagcagggacucugg

SEQ ID NO: 57716 - RNA, 22 nt, Human
uggcucagagccuugagagcug

SEQ ID NO: 57717 - RNA, 22 nt, Human
uggcucagaguucaucuuuuag

SEQ ID NO: 57718 - RNA, 22 nt, Human
uggcucagcagguuagaaacua

SEQ ID NO: 57719 - RNA, 22 nt, Human
uggcucagccagcccuaggaac

SEQ ID NO: 57720 - RNA, 22 nt, Human
uggcucagccauucguguugcc

SEQ ID NO: 57721 - RNA, 22 nt, Human
uggcucagccuggcccuuucau

SEQ ID NO: 57722 - RNA, 22 nt, Human
uggcucagcgcggccuggucuu

SEQ ID NO: 57723 - RNA, 22 nt, Human
uggcucagcgguggcagcagac

SEQ ID NO: 57724 - RNA, 22 nt, Human
uggcucagcuuacuuuugaggg

SEQ ID NO: 57725 - RNA, 22 nt, Human
uggcucaggccacuucuuuuau

SEQ ID NO: 57726 - RNA, 22 nt, Human
uggcucagucuggguugacuga

SEQ ID NO: 57727 - RNA, 22 nt, Human
uggcucaugcaucuuuucuaca

SEQ ID NO: 57728 - RNA, 22 nt, Human
uggcuccacuacuggguguguu

SEQ ID NO: 57729 - RNA, 22 nt, Human
uggcuccacucuccaggaguuu

SEQ ID NO: 57730 - RNA, 22 nt, Human
uggcuccagaagggagggcgcc

SEQ ID NO: 57731 - RNA, 22 nt, Human
uggcuccagcguccacguccug

SEQ ID NO: 57732 - RNA, 22 nt, Human
uggcuccaucauccaugcaaga

SEQ ID NO: 57733 - RNA, 22 nt, Human
uggcucccgcuugcaccuaaga

SEQ ID NO: 57734 - RNA, 22 nt, Human
uggcuccuaaugcugcccagac

SEQ ID NO: 57735 - RNA, 18 nt, Human
uggcagagugucuguucu

SEQ ID NO: 57736 - RNA, 21 nt, Human
uggcagaguugaguaguuaug

SEQ ID NO: 57737 - RNA, 22 nt, Human
uggcagaguuggagguggaaga

SEQ ID NO: 57738 - RNA, 20 nt, Human
uggcagaguugucccaccca

SEQ ID NO: 57739 - RNA, 22 nt, Human
uggcagauaaaauaauagggaa

SEQ ID NO: 57740 - RNA, 22 nt, Human
uggcagauaaccugcugugccc

SEQ ID NO: 57741 - RNA, 22 nt, Human
uggcagauuuucucuggaggag

SEQ ID NO: 57742 - RNA, 22 nt, Human
uggcagcaauuagcuagagcug

SEQ ID NO: 57743 - RNA, 21 nt, Human
uggcagcacccacacccucug

SEQ ID NO: 57744 - RNA, 22 nt, Human
uggcagcacuugaacuugagcc

SEQ ID NO: 57745 - RNA, 22 nt, Human
uggcagcagacaucugaggucu

SEQ ID NO: 57746 - RNA, 22 nt, Human
uggcagcagccauggaaggccc

SEQ ID NO: 57747 - RNA, 22 nt, Human
uggcagcaguggagguagaaag

SEQ ID NO: 57748 - RNA, 22 nt, Human
uggcagcaugucccggccucag

SEQ ID NO: 57749 - RNA, 22 nt, Human
uggcagccacaucucguggauu

SEQ ID NO: 57750 - RNA, 18 nt, Human
uggcagccagcugcuccu

SEQ ID NO: 57751 - RNA, 22 nt, Human
uggcagccaucagagcaggggu

SEQ ID NO: 57752 - RNA, 19 nt, Human
uggcagccuccacuuuugc

SEQ ID NO: 57753 - RNA, 22 nt, Human
uggcagccucccagcugcauuc

SEQ ID NO: 57754 - RNA, 22 nt, Human
uggcagcuagcuguuuucaugc

SEQ ID NO: 57755 - RNA, 22 nt, Human
uggcagcuauuacaaggaaguc

SEQ ID NO: 57756 - RNA, 22 nt, Human
uggcagcucauuuggaaaugga

SEQ ID NO: 57757 - RNA, 22 nt, Human
uggcagcugccauguccacgug

SEQ ID NO: 57758 - RNA, 22 nt, Human
uggcagcugcguuguguuucug

SEQ ID NO: 57759 - RNA, 22 nt, Human
uggcagcugguacagugggucu

SEQ ID NO: 57760 - RNA, 22 nt, Human
uggcagcugucuguggggucuc

SEQ ID NO: 57761 - RNA, 22 nt, Human
uggcagcuguguccagguagaa

SEQ ID NO: 57762 - RNA, 15 nt, Human
uggcagcuuguuaag

SEQ ID NO: 57763 - RNA, 22 nt, Human
uggcagcuuuuuguuucaggcu

SEQ ID NO: 57764 - RNA, 22 nt, Human
uggcaggaagacguggggcacc

SEQ ID NO: 57765 - RNA, 22 nt, Human
uuugcaaauacagaggucuugc

SEQ ID NO: 57766 - RNA, 22 nt, Human
uuugcaaauauguguuucuauu

SEQ ID NO: 57767 - RNA, 22 nt, Human
uuugcaaauucuugucuagccu

SEQ ID NO: 57768 - RNA, 22 nt, Human
uuugcaagaagaauggcacaaa

SEQ ID NO: 57769 - RNA, 22 nt, Human
uuugcaauaguccuggccugua

SEQ ID NO: 57770 - RNA, 22 nt, Human
uuugcaaugguaguuguugcuc

SEQ ID NO: 57771 - RNA, 22 nt, Human
uuugcacuagcauuuguccaug

SEQ ID NO: 57772 - RNA, 22 nt, Human
uuugcacuuaacuuauuugaaa

SEQ ID NO: 57773 - RNA, 22 nt, Human
uuugcagaugagaaaacugugg

SEQ ID NO: 57774 - RNA, 22 nt, Human
uuugcagcuucugguggccucu

SEQ ID NO: 57775 - RNA, 22 nt, Human
uuugcagggcugguaggaccac

SEQ ID NO: 57776 - RNA, 22 nt, Human
uuugcagucuggccugcuuugg

SEQ ID NO: 57777 - RNA, 22 nt, Human
uuugcauaagucauguccagug

SEQ ID NO: 57778 - RNA, 22 nt, Human
uuugcauuauauuuauagaaga

SEQ ID NO: 57779 - RNA, 22 nt, Human
uuugcauucuagaaaaauuucu

SEQ ID NO: 57780 - RNA, 22 nt, Human
uuugcauugcagugguuuacag

SEQ ID NO: 57781 - RNA, 22 nt, Human
uuugcauuuauaaguuggugga

SEQ ID NO: 57782 - RNA, 22 nt, Human
uuugcauuucuaaugagcuccg

SEQ ID NO: 57783 - RNA, 22 nt, Human
uuugcauuugcaaauaaugaaa

SEQ ID NO: 57784 - RNA, 22 nt, Human
uuugcauuuguuuagaaccuga

SEQ ID NO: 57785 - RNA, 21 nt, Human
uuugcauuuuacaugugggga

SEQ ID NO: 57786 - RNA, 22 nt, Human
uuugccaggcuugcaugaauuu

SEQ ID NO: 57787 - RNA, 22 nt, Human
uuugccaguauuuuauugauga

SEQ ID NO: 57788 - RNA, 22 nt, Human
uuugcuauaaaagggucacacg

SEQ ID NO: 57789 - RNA, 20 nt, Human
uuugcuaugcauaucugacc

SEQ ID NO: 57790 - RNA, 22 nt, Human
uuugcuauugugaauagugcca

SEQ ID NO: 57791 - RNA, 22 nt, Human
uuugcugaauaaaugugugacu

SEQ ID NO: 57792 - RNA, 22 nt, Human
uuugcugaauagauuguaaacu

SEQ ID NO: 57793 - RNA, 22 nt, Human
uuugcugaccccauucugaguc

SEQ ID NO: 57794 - RNA, 22 nt, Human
uuugcugaguugaaguuugagg

SEQ ID NO: 57795 - RNA, 18 nt, Human
uuugcugaugagcaucau

SEQ ID NO: 57796 - RNA, 22 nt, Human
uuugcugugaauccauuacugu

SEQ ID NO: 57797 - RNA, 22 nt, Human
uuugcuuaaaagcggagcaaga

SEQ ID NO: 57798 - RNA, 22 nt, Human
uuugcuuucccuuguagaaagu

SEQ ID NO: 57799 - RNA, 22 nt, Human
uuuggaaaaagccugaacauag

SEQ ID NO: 57800 - RNA, 22 nt, Human
uuuggaaaauauugaacugguu

SEQ ID NO: 57801 - RNA, 22 nt, Human
uuuggaaacugaugguacauuc

SEQ ID NO: 57802 - RNA, 17 nt, Human
uuuggaaagugaucauu

SEQ ID NO: 57803 - RNA, 22 nt, Human
uuuggaaggugaggcaugaagg

SEQ ID NO: 57804 - RNA, 22 nt, Human
uuuggaauagcauagaagcuca

SEQ ID NO: 57805 - RNA, 22 nt, Human
uuuggaauccucaguaugauca

SEQ ID NO: 57806 - RNA, 22 nt, Human
uuuggaaugacagauaucaaua

SEQ ID NO: 57807 - RNA, 22 nt, Human
uuuggaaugguaccuucaguug

SEQ ID NO: 57808 - RNA, 22 nt, Human
uuuggaauuccauuucugcauu

SEQ ID NO: 57809 - RNA, 22 nt, Human
uuuggacuaucuguguggcuuu

SEQ ID NO: 57810 - RNA, 22 nt, Human
uuuggagagaguuaaauauguu

SEQ ID NO: 57811 - RNA, 22 nt, Human
uuuggagagaugaaguucugug

SEQ ID NO: 57812 - RNA, 22 nt, Human
uuuggaguuuaacaacuugaag

SEQ ID NO: 57813 - RNA, 22 nt, Human
uuuggauuccaugcucuccggg

SEQ ID NO: 57814 - RNA, 22 nt, Human
uuuggcaagaaaaugugauuga

SEQ ID NO: 57815 - RNA, 22 nt, Human
uuuggcaagugggaaauuagua

SEQ ID NO: 57816 - RNA, 22 nt, Human
uuuggcagagucauuucagaaa

SEQ ID NO: 57817 - RNA, 22 nt, Human
uuuggcauagcucuuuguuccu

SEQ ID NO: 57818 - RNA, 22 nt, Human
uuuggccaugcucaaggguaua

SEQ ID NO: 57819 - RNA, 22 nt, Human
uuuggccuuaguccagaagaag

SEQ ID NO: 57820 - RNA, 22 nt, Human
uuuggcucaucucaguccuagg

SEQ ID NO: 57821 - RNA, 22 nt, Human
uuuggcucucacuugcacucag

SEQ ID NO: 57822 - RNA, 22 nt, Human
uuuggcucugcgucuucaccca

SEQ ID NO: 57823 - RNA, 20 nt, Human
uuuggcuucaagugcauugc

SEQ ID NO: 57824 - RNA, 22 nt, Human
uuuggcuuuagugccuucugau

SEQ ID NO: 57825 - RNA, 22 nt, Human
uuugggaagaaguugcaaauuu

SEQ ID NO: 57826 - RNA, 22 nt, Human
uuugggaagugggagcaaggug

SEQ ID NO: 57827 - RNA, 22 nt, Human
uuugggaaucuuugugcaugac

SEQ ID NO: 57828 - RNA, 18 nt, Human
uuugggauccucuuuucu

SEQ ID NO: 57829 - RNA, 21 nt, Human
uuugggcaaaauuaaaugaga

SEQ ID NO: 57830 - RNA, 22 nt, Human
uuugggcaguagauguaucacu

SEQ ID NO: 57831 - RNA, 22 nt, Human
uuugggcaguccuggaauuugu

SEQ ID NO: 57832 - RNA, 22 nt, Human
uuugggcucacuaugcugaaga

SEQ ID NO: 57833 - RNA, 22 nt, Human
uuugguaaaugcagguucuucu

SEQ ID NO: 57834 - RNA, 22 nt, Human
uuugguaaguacccaccugggu

SEQ ID NO: 57835 - RNA, 22 nt, Human
uuugguaauguuucauugcaga

SEQ ID NO: 57836 - RNA, 22 nt, Human
uuuggucacuggauuuggcugu

SEQ ID NO: 57837 - RNA, 22 nt, Human
uuugguccauuauaugcuguca

SEQ ID NO: 57838 - RNA, 22 nt, Human
uuugguccuaagcugcucucua

SEQ ID NO: 57839 - RNA, 22 nt, Human
uuugguccugagcaaaacuaug

SEQ ID NO: 57840 - RNA, 22 nt, Human
uuuggugauagugcagagaaau

SEQ ID NO: 57841 - RNA, 22 nt, Human
uuugguuaauuuaggcuugcau

SEQ ID NO: 57842 - RNA, 22 nt, Human
uuugguuuuuaauacaaaguac

SEQ ID NO: 57843 - RNA, 22 nt, Human
uuugguuuuuaccugcugagag

SEQ ID NO: 57844 - RNA, 22 nt, Human
uggguagaaacaaggcuggacu

SEQ ID NO: 57845 - RNA, 22 nt, Human
uggguagagacacagucugggg

SEQ ID NO: 57846 - RNA, 22 nt, Human
uggguagagcaggcuggggcuu

SEQ ID NO: 57847 - RNA, 22 nt, Human
uggguagagugcugacaaugcc

SEQ ID NO: 57848 - RNA, 22 nt, Human
uggguagggagcuggaauccua

SEQ ID NO: 57849 - RNA, 22 nt, Human
uggguagguguggccugaaugu

SEQ ID NO: 57850 - RNA, 22 nt, Human
ugggucacuauuugcagagacg

SEQ ID NO: 57851 - RNA, 22 nt, Human
ugggucagagcagaccucugga

SEQ ID NO: 57852 - RNA, 22 nt, Human
ugggucagaggaccucguggcc

SEQ ID NO: 57853 - RNA, 22 nt, Human
ugggucccaggaaggaccagca

SEQ ID NO: 57854 - RNA, 22 nt, Human
ugggucccucaugagaggcauu

SEQ ID NO: 57855 - RNA, 22 nt, Human
uggguccuaaaugcagucacau

SEQ ID NO: 57856 - RNA, 22 nt, Human
uggguccucgucuuccaaggca

SEQ ID NO: 57857 - RNA, 22 nt, Human
uggguccugucuccuuguucug

SEQ ID NO: 57858 - RNA, 22 nt, Human
uggguccuugccaucuuggagu

SEQ ID NO: 57859 - RNA, 22 nt, Human
ugggucuuuaugggggccagga

SEQ ID NO: 57860 - RNA, 20 nt, Human
ugggugagaguguuugcucu

SEQ ID NO: 57861 - RNA, 22 nt, Human
ugggugagcggcugcacacccg

SEQ ID NO: 57862 - RNA, 22 nt, Human
ugggugaguggagggcauucua

SEQ ID NO: 57863 - RNA, 21 nt, Human
ugggugcaagcugcggaugcu

SEQ ID NO: 57864 - RNA, 22 nt, Human
uggguggaauaaaucaguucug

SEQ ID NO: 57865 - RNA, 22 nt, Human
uggguggauuaggauaggguau

SEQ ID NO: 57866 - RNA, 22 nt, Human
ugggugguggcaguaaugagaa

SEQ ID NO: 57867 - RNA, 19 nt, Human
ugggugugaccaucucugc

SEQ ID NO: 57868 - RNA, 22 nt, Human
ugggugugagcccgggagccgc

SEQ ID NO: 57869 - RNA, 22 nt, Human
ugggugugcccagauggugucc

SEQ ID NO: 57870 - RNA, 22 nt, Human
ugguaaaugcuauuccuauauu

SEQ ID NO: 57871 - RNA, 22 nt, Human
ugguaagaacccaucagagaag

SEQ ID NO: 57872 - RNA, 22 nt, Human
ugguaaggauuguagaaacgaa

SEQ ID NO: 57873 - RNA, 22 nt, Human
ugguaagggcucucuuucuggc

SEQ ID NO: 57874 - RNA, 21 nt, Human
ugguaauguucaguauccacu

SEQ ID NO: 57875 - RNA, 22 nt, Human
ugguaauuuauuuugagagauu

SEQ ID NO: 57876 - RNA, 22 nt, Human
ugguacaaagccucuuugccuc

SEQ ID NO: 57877 - RNA, 22 nt, Human
ugguacaagaguauuugcgguu

SEQ ID NO: 57878 - RNA, 22 nt, Human
ugguacaagcagacucagcaga

SEQ ID NO: 57879 - RNA, 22 nt, Human
ugguacaaguucuggcauguga

SEQ ID NO: 57880 - RNA, 22 nt, Human
ugcuuuggccacuagaauucag

SEQ ID NO: 57881 - RNA, 22 nt, Human
ugcuuuuauuuaauaucuugca

SEQ ID NO: 57882 - RNA, 22 nt, Human
ugcuuuuuaguacugucuuauu

SEQ ID NO: 57883 - RNA, 22 nt, Human
uggaaaaaaauuggcuagcuuc

SEQ ID NO: 57884 - RNA, 22 nt, Human
uggaaaacauaaagcuuuuccu

SEQ ID NO: 57885 - RNA, 22 nt, Human
uggaaacacucaagcuuauauu

SEQ ID NO: 57886 - RNA, 22 nt, Human
uggaaacuaagacuagagagac

SEQ ID NO: 57887 - RNA, 22 nt, Human
uggaaacuauaaaagcaccuuc

SEQ ID NO: 57888 - RNA, 22 nt, Human
uggaaacucuaccucucuaaga

SEQ ID NO: 57889 - RNA, 22 nt, Human
uggaaacugcaguucccgggga

SEQ ID NO: 57890 - RNA, 22 nt, Human
uggaaacugggaguuaaaugua

SEQ ID NO: 57891 - RNA, 22 nt, Human
uggaaagaauuccuaugguuca

SEQ ID NO: 57892 - RNA, 22 nt, Human
uggaaagagaaacucuugcuaa

SEQ ID NO: 57893 - RNA, 22 nt, Human
uggaaagaugaagauguuuaag

SEQ ID NO: 57894 - RNA, 22 nt, Human
uggaaagcgaggaguuggcauu

SEQ ID NO: 57895 - RNA, 22 nt, Human
uggaaagguguaaagcagaacc

SEQ ID NO: 57896 - RNA, 22 nt, Human
uggaaagucucuuuugacugua

SEQ ID NO: 57897 - RNA, 22 nt, Human
uggaaagugcucuagacuuucu

SEQ ID NO: 57898 - RNA, 22 nt, Human
uggaaauaugcuccauucuuuu

SEQ ID NO: 57899 - RNA, 22 nt, Human
uggaaauuacuaacacuuagag

SEQ ID NO: 57900 - RNA, 22 nt, Human
uggaacaaauuacaauuaacuu

SEQ ID NO: 57901 - RNA, 22 nt, Human
uggaacaagggcguggcggucg

SEQ ID NO: 57902 - RNA, 22 nt, Human
uggaacaaggguucauuuaaau

SEQ ID NO: 57903 - RNA, 22 nt, Human
uggaacacacuucaaggagaaa

SEQ ID NO: 57904 - RNA, 22 nt, Human
uggaacacagugauugauagcg

SEQ ID NO: 57905 - RNA, 22 nt, Human
uggaacacaucucgcugcaggg

SEQ ID NO: 57906 - RNA, 22 nt, Human
uggaacaccuugcuccagaaag

SEQ ID NO: 57907 - RNA, 22 nt, Human
uggaaccuaaaaaugucauugc

SEQ ID NO: 57908 - RNA, 22 nt, Human
uggaagaauaggauagaagaac

SEQ ID NO: 57909 - RNA, 22 nt, Human
uggaagaaugcuccacagggaa

SEQ ID NO: 57910 - RNA, 22 nt, Human
uggaagaccagacuucccgaac

SEQ ID NO: 57911 - RNA, 23 nt, Human
uggaagacuccucucuuggcugc

SEQ ID NO: 57912 - RNA, 22 nt, Human
uggaagaggccagaaaguggga

SEQ ID NO: 57913 - RNA, 22 nt, Human
uggaagaggcccaugacugccu

SEQ ID NO: 57914 - RNA, 22 nt, Human
uggaagauaagagauugggaag

SEQ ID NO: 57915 - RNA, 22 nt, Human
uggaagcacaggaucaguggaa

SEQ ID NO: 57916 - RNA, 22 nt, Human
uggaagcacuuggguuuuguug

SEQ ID NO: 57917 - RNA, 22 nt, Human
uggaagcagugauucuugucug

SEQ ID NO: 57918 - RNA, 22 nt, Human
uggaagccguaggguuugggaa

SEQ ID NO: 57919 - RNA, 22 nt, Human
uggaagccucaguuugccuucu

SEQ ID NO: 57920 - RNA, 22 nt, Human
uggaagcgagacagagaucucc

SEQ ID NO: 57921 - RNA, 22 nt, Human
uggaagcggugcuggcccaugg

SEQ ID NO: 57922 - RNA, 22 nt, Human
uggaagcuucugaccauuuuug

SEQ ID NO: 57923 - RNA, 22 nt, Human
uggaaggcacugggagaagacu

SEQ ID NO: 57924 - RNA, 22 nt, Human
uggaaggcaugggaacuguucu

SEQ ID NO: 57925 - RNA, 17 nt, Human
uggaaggcuucaauauu

SEQ ID NO: 57926 - RNA, 22 nt, Human
uggaagggaacagguggguguu

SEQ ID NO: 57927 - RNA, 21 nt, Human
uggaagggaagucuugguugu

SEQ ID NO: 57928 - RNA, 22 nt, Human
uggaagggguuacgcagcagga

SEQ ID NO: 57929 - RNA, 22 nt, Human
uggaagugagaaguuuccucag

SEQ ID NO: 57930 - RNA, 17 nt, Human
uggaagugaggacacug

SEQ ID NO: 57931 - RNA, 22 nt, Human
uggaagugauuacaauguagua

SEQ ID NO: 57932 - RNA, 22 nt, Human
uggaagugccuugcuggcugug

SEQ ID NO: 57933 - RNA, 22 nt, Human
uggaaguugaaucucagucaug

SEQ ID NO: 57934 - RNA, 22 nt, Human
uggaauaaugaccacagaaaca

SEQ ID NO: 57935 - RNA, 22 nt, Human
uggaauacuguaaagaaaaauc

SEQ ID NO: 57936 - RNA, 22 nt, Human
uggaauagaggugcugauauua

SEQ ID NO: 57937 - RNA, 22 nt, Human
uggaaucccgcaauggaggauu

SEQ ID NO: 57938 - RNA, 22 nt, Human
uggaaucugugcuguuuuagug

SEQ ID NO: 57939 - RNA, 22 nt, Human
uggaaugacaaguuguucagag

SEQ ID NO: 57940 - RNA, 22 nt, Human
uggaaugcauggcucugugacg

SEQ ID NO: 57941 - RNA, 22 nt, Human
uggaauggaaacaaacugagga

SEQ ID NO: 57942 - RNA, 22 nt, Human
uggaauguaaacucugugaggg

SEQ ID NO: 57943 - RNA, 22 nt, Human
uggaauguaaagcgugugauaa

SEQ ID NO: 57944 - RNA, 22 nt, Human
uggaauguaaucagaauaugaa

SEQ ID NO: 57945 - RNA, 22 nt, Human
uggaauguaaucaugugguggu

SEQ ID NO: 57946 - RNA, 22 nt, Human
uggaaugucaaaagucugcuau

SEQ ID NO: 57947 - RNA, 22 nt, Human
uggaauguggauaagggugucu

SEQ ID NO: 57948 - RNA, 22 nt, Human
uggaauguuaaaccucaaugau

SEQ ID NO: 57949 - RNA, 22 nt, Human
uggaauguuaugaugaugguaa

SEQ ID NO: 57950 - RNA, 19 nt, Human
uggaauguuccaaggaggc

SEQ ID NO: 57951 - RNA, 22 nt, Human
uggaauguuuccccagccugca

SEQ ID NO: 57952 - RNA, 22 nt, Human
uggaauguuugacuuauucagu

SEQ ID NO: 57953 - RNA, 22 nt, Human
uuuucagaauuagcauaccauu

SEQ ID NO: 57954 - RNA, 22 nt, Human
uuuucagagagcuuuuaugucc

SEQ ID NO: 57955 - RNA, 22 nt, Human
uuuucaggccagaagauagacc

SEQ ID NO: 57956 - RNA, 22 nt, Human
uuuucaguaaugucuacauaau

SEQ ID NO: 57957 - RNA, 22 nt, Human
uuuucagugggcaaugauguga

SEQ ID NO: 57958 - RNA, 22 nt, Human
uuuucaguuauagaaugguaga

SEQ ID NO: 57959 - RNA, 22 nt, Human
uuuucauaguaauggugcaugu

SEQ ID NO: 57960 - RNA, 22 nt, Human
uuuucaugugaugugacauuuc

SEQ ID NO: 57961 - RNA, 22 nt, Human
uuuucauuagaaugacugagaa

SEQ ID NO: 57962 - RNA, 22 nt, Human
uuuucauuguuacuaugagcua

SEQ ID NO: 57963 - RNA, 23 nt, Human
uuuuccagaaucgacucuguaga

SEQ ID NO: 57964 - RNA, 22 nt, Human
uuuuccagauggauacuagaau

SEQ ID NO: 57965 - RNA, 22 nt, Human
uuuuccagauuggacuuagucc

SEQ ID NO: 57966 - RNA, 22 nt, Human
uuuuccucaggaaugcuaagcu

SEQ ID NO: 57967 - RNA, 22 nt, Human
uuuuccucuguaugcgugagau

SEQ ID NO: 57968 - RNA, 23 nt, Human
uuuuccuguggagacaugacugg

SEQ ID NO: 57969 - RNA, 22 nt, Human
uuuuccuucaccucuugagccu

SEQ ID NO: 57970 - RNA, 19 nt, Human
uuuuccuucuauauguuuc

SEQ ID NO: 57971 - RNA, 22 nt, Human
uuuuccuuucaucaggacaaag

SEQ ID NO: 57972 - RNA, 23 nt, Human
uuuuccuuuggacaggcuguauu

SEQ ID NO: 57973 - RNA, 22 nt, Human
uuuucuaacaucuaguaauuug

SEQ ID NO: 57974 - RNA, 22 nt, Human
uuuucuauuaacucauuuugca

SEQ ID NO: 57975 - RNA, 22 nt, Human
uuuucucaggugcuuaucuaag

SEQ ID NO: 57976 - RNA, 22 nt, Human
uuuucuccccagagaccaucau

SEQ ID NO: 57977 - RNA, 17 nt, Human
uuuucucucuuggauuc

SEQ ID NO: 57978 - RNA, 22 nt, Human
uuuucugagcucagugacuuac

SEQ ID NO: 57979 - RNA, 22 nt, Human
uuuucugccugcguguuuagga

SEQ ID NO: 57980 - RNA, 22 nt, Human
uuuucuguaagaggacuuuaau

SEQ ID NO: 57981 - RNA, 20 nt, Human
uuuucugugccaagaaaacu

SEQ ID NO: 57982 - RNA, 22 nt, Human
uuuucugugcccugcuagcugg

SEQ ID NO: 57983 - RNA, 22 nt, Human
uuuucuguguauccaggcuucc

SEQ ID NO: 57984 - RNA, 22 nt, Human
uuuucugugugucccucgacag

SEQ ID NO: 57985 - RNA, 22 nt, Human
uuuucuuauggugaagcacaaa

SEQ ID NO: 57986 - RNA, 22 nt, Human
uuuucuuccuggauuuuggcau

SEQ ID NO: 57987 - RNA, 22 nt, Human
uuuucuuggaguggcuguccuu

SEQ ID NO: 57988 - RNA, 22 nt, Human
uuuugaaagccagguuuguaug

SEQ ID NO: 57989 - RNA, 22 nt, Human
uuuugaagaagaugggaauuua

SEQ ID NO: 57990 - RNA, 22 nt, Human
uuuugaauaauucagaaacagc

SEQ ID NO: 57991 - RNA, 22 nt, Human
uuuugcugguuuaucucuauua

SEQ ID NO: 57992 - RNA, 22 nt, Human
uuuugcuguguccuugagccgg

SEQ ID NO: 57993 - RNA, 22 nt, Human
uuuugcuuaaucuagauuuugc

SEQ ID NO: 57994 - RNA, 22 nt, Human
uuuuggaugagcccagauuucu

SEQ ID NO: 57995 - RNA, 22 nt, Human
uuuuggcaaaggcauucucuuu

SEQ ID NO: 57996 - RNA, 22 nt, Human
uuuuggcuccagugguuugugc

SEQ ID NO: 57997 - RNA, 18 nt, Human
ugguuccuugaaggggca

SEQ ID NO: 57998 - RNA, 23 nt, Human
ugguucuaggccuauaauuauau

SEQ ID NO: 57999 - RNA, 23 nt, Human
ugguugcagugccaaguaucacg

SEQ ID NO: 58000 - RNA, 22 nt, Human
ugguuguauaaugucacuaagc

SEQ ID NO: 58001 - RNA, 22 nt, Human
ugguugugcacggagcugcagg

SEQ ID NO: 58002 - RNA, 22 nt, Human
ugguugugguccuccacaucgc

SEQ ID NO: 58003 - RNA, 22 nt, Human
ugguuuaccccuguccuauauc

SEQ ID NO: 58004 - RNA, 22 nt, Human
ugguuuacucuguaaaccagga

SEQ ID NO: 58005 - RNA, 22 nt, Human
ugguuucaugagaugagaauuu

SEQ ID NO: 58006 - RNA, 22 nt, Human
ugguuucccauuaucugcagga

SEQ ID NO: 58007 - RNA, 22 nt, Human
ugguuugagagugugagcuuuu

SEQ ID NO: 58008 - RNA, 22 nt, Human
ugguuuuaaaagauguuugaga

SEQ ID NO: 58009 - RNA, 22 nt, Human
ugguuuuagaguauauucaggg

SEQ ID NO: 58010 - RNA, 22 nt, Human
ugguuuuagaugccuuuacugc

SEQ ID NO: 58011 - RNA, 22 nt, Human
ugguuuucuggugguggcagug

SEQ ID NO: 58012 - RNA, 22 nt, Human
ugguuuugcuaaaauagaaaga

SEQ ID NO: 58013 - RNA, 22 nt, Human
ugguuuuugguguucacagagg

SEQ ID NO: 58014 - RNA, 22 nt, Human
uguaaaagacauuucuaagcaa

SEQ ID NO: 58015 - RNA, 22 nt, Human
uguaaaagguuguucuuucguu

SEQ ID NO: 58016 - RNA, 22 nt, Human
uguaaaauaauucuccauguuu

SEQ ID NO: 58017 - RNA, 22 nt, Human
uguaaacaaaugcauucuugcu

SEQ ID NO: 58018 - RNA, 18 nt, Human
uguaaacacuuucauucu

SEQ ID NO: 58019 - RNA, 22 nt, Human
uguaaacaguaggacuaaagag

SEQ ID NO: 58020 - RNA, 22 nt, Human
uguaaacauaccagagccaagu

SEQ ID NO: 58021 - RNA, 22 nt, Human
uguaaacauaucagacuuucuu

SEQ ID NO: 58022 - RNA, 23 nt, Human
uguaaacaucacccccuggaguu

SEQ ID NO: 58023 - RNA, 22 nt, Human
uguaaagagaaggcuuauaaag

SEQ ID NO: 58024 - RNA, 22 nt, Human
uguaaagauccuuagcaacauc

SEQ ID NO: 58025 - RNA, 22 nt, Human
uguaaaguuuuauuguuccuuc

SEQ ID NO: 58026 - RNA, 22 nt, Human
uguaaauaguuagcuugccucu

SEQ ID NO: 58027 - RNA, 22 nt, Human
uguaaauugaaggaaauuugug

SEQ ID NO: 58028 - RNA, 17 nt, Human
uguaacaacuccuauua

SEQ ID NO: 58029 - RNA, 20 nt, Human
uguaacaaucuggauguugc

SEQ ID NO: 58030 - RNA, 20 nt, Human
uguaacacaugagcuuugag

SEQ ID NO: 58031 - RNA, 22 nt, Human
uguaacauauagcauguucuug

SEQ ID NO: 58032 - RNA, 22 nt, Human
uguaacaucacagugauguuug

SEQ ID NO: 58033 - RNA, 22 nt, Human
uguaacaugguucuuacucuca

SEQ ID NO: 58034 - RNA, 23 nt, Human
uguaacuucuuaaauucuucacu

SEQ ID NO: 58035 - RNA, 23 nt, Human
uguaacuugauggaaugagcuau

SEQ ID NO: 58036 - RNA, 23 nt, Human
uguaacuuugggcauguugcuuc

SEQ ID NO: 58037 - RNA, 22 nt, Human
uguaagaagggccagagcucca

SEQ ID NO: 58038 - RNA, 22 nt, Human
uguaagauaugaguacauguaa

SEQ ID NO: 58039 - RNA, 22 nt, Human
uguaagauuugcuauguguugu

SEQ ID NO: 58040 - RNA, 17 nt, Human
uguaagcaggugagaga

SEQ ID NO: 58041 - RNA, 22 nt, Human
uguaagccuucccugagaaagu

SEQ ID NO: 58042 - RNA, 22 nt, Human
uguaagugcucagcugaugguu

SEQ ID NO: 58043 - RNA, 22 nt, Human
uguaauaaugaggcauccagcc

SEQ ID NO: 58044 - RNA, 22 nt, Human
uguaauaccacuguuggacauu

SEQ ID NO: 58045 - RNA, 22 nt, Human
uguaauauuguagugacaguac

SEQ ID NO: 58046 - RNA, 22 nt, Human
uguaaucauuacaguacaugga

SEQ ID NO: 58047 - RNA, 22 nt, Human
uguaaugaaaaggaggaaauag

SEQ ID NO: 58048 - RNA, 22 nt, Human
uguaaugggcuacuaggaagag

SEQ ID NO: 58049 - RNA, 22 nt, Human
uguaauguuagaaacaauugcu

SEQ ID NO: 58050 - RNA, 22 nt, Human
uguaauuaacguucuuguuaga

SEQ ID NO: 58051 - RNA, 22 nt, Human
uguaauuauuucugugcaguca

SEQ ID NO: 58052 - RNA, 22 nt, Human
uguaauuugcauggcugaaugc

SEQ ID NO: 58053 - RNA, 22 nt, Human
uguacaaggccaucuacaugcu

SEQ ID NO: 58054 - RNA, 22 nt, Human
uguacaaugccagggaacacca

SEQ ID NO: 58055 - RNA, 22 nt, Human
uguacaauguguuuguuggcuu

SEQ ID NO: 58056 - RNA, 22 nt, Human
uguacacaacgugcagguuugu

SEQ ID NO: 58057 - RNA, 22 nt, Human
uguacacaaugauaaauuauua

SEQ ID NO: 58058 - RNA, 22 nt, Human
uguacacaaugugcagguuugu

SEQ ID NO: 58059 - RNA, 22 nt, Human
uguacacaauucuuaacauaca

SEQ ID NO: 58060 - RNA, 22 nt, Human
uguacacaugguguacacuccc

SEQ ID NO: 58061 - RNA, 22 nt, Human
uguacacauuaagcucuuuaga

SEQ ID NO: 58062 - RNA, 22 nt, Human
uggcuccuggcagguguuucaa

SEQ ID NO: 58063 - RNA, 22 nt, Human
uggcuccuucauucuccugcca

SEQ ID NO: 58064 - RNA, 22 nt, Human
uggcuccuuuccgggucuccag

SEQ ID NO: 58065 - RNA, 22 nt, Human
uggcucucaauggcuguacuau

SEQ ID NO: 58066 - RNA, 22 nt, Human
uggcucuccagagccuauggua

SEQ ID NO: 58067 - RNA, 22 nt, Human
uggcucuccagcucuaaggccu

SEQ ID NO: 58068 - RNA, 22 nt, Human
uggcucucccaauaccuuucug

SEQ ID NO: 58069 - RNA, 22 nt, Human
uggcucucuacaggucaagacc

SEQ ID NO: 58070 - RNA, 22 nt, Human
uggcucugagucugcccuuggc

SEQ ID NO: 58071 - RNA, 18 nt, Human
uggcucugccacucaccg

SEQ ID NO: 58072 - RNA, 22 nt, Human
uggcucugccccauaccccugc

SEQ ID NO: 58073 - RNA, 22 nt, Human
uggcucugcgucuguucguggg

SEQ ID NO: 58074 - RNA, 22 nt, Human
uggcucuggccaccgggagggc

SEQ ID NO: 58075 - RNA, 22 nt, Human
uggcucugucacugugagcuau

SEQ ID NO: 58076 - RNA, 22 nt, Human
uggcucuguggauguucugacc

SEQ ID NO: 58077 - RNA, 22 nt, Human
uggcucuguugugcugagccag

SEQ ID NO: 58078 - RNA, 22 nt, Human
uggcucuguuuguuaacuagac

SEQ ID NO: 58079 - RNA, 22 nt, Human
uggcucuguuuuaugaguacca

SEQ ID NO: 58080 - RNA, 22 nt, Human
uggcucuuaaggucccugugcu

SEQ ID NO: 58081 - RNA, 22 nt, Human
uggcucuuggugcuaguuucug

SEQ ID NO: 58082 - RNA, 22 nt, Human
uggcucuuucugucugggaucc

SEQ ID NO: 58083 - RNA, 22 nt, Human
uggcucuuuucacguccccucu

SEQ ID NO: 58084 - RNA, 22 nt, Human
uggcugaaggaagauucuucua

SEQ ID NO: 58085 - RNA, 22 nt, Human
uggcugaauaauauucuguugu

SEQ ID NO: 58086 - RNA, 22 nt, Human
uggcugagaccaucagggugua

SEQ ID NO: 58087 - RNA, 22 nt, Human
uggcugagccacuuguucagau

SEQ ID NO: 58088 - RNA, 22 nt, Human
uggcugagccuuuggggcuuuc

SEQ ID NO: 58089 - RNA, 22 nt, Human
uggcugaggagagggcggaagu

SEQ ID NO: 58090 - RNA, 22 nt, Human
uggcugaggagggucuucuggu

SEQ ID NO: 58091 - RNA, 22 nt, Human
uggcugagguaacuaugaauaa

SEQ ID NO: 58092 - RNA, 22 nt, Human
uggcugaguuucaugcaucaug

SEQ ID NO: 58093 - RNA, 21 nt, Human
uggcugcacuguggcuuucau

SEQ ID NO: 58094 - RNA, 22 nt, Human
uggcugcagaucugugggacac

SEQ ID NO: 58095 - RNA, 22 nt, Human
uggcugcagugcuugagauguc

SEQ ID NO: 58096 - RNA, 22 nt, Human
uggcugccuagugucugagcag

SEQ ID NO: 58097 - RNA, 22 nt, Human
uggcugcugagaaggcagcugu

SEQ ID NO: 58098 - RNA, 21 nt, Human
uggcugcuggcccucucucca

SEQ ID NO: 58099 - RNA, 22 nt, Human
uggcuggaagucagaaauggga

SEQ ID NO: 58100 - RNA, 22 nt, Human
uggcuggaauggagcugagccu

SEQ ID NO: 58101 - RNA, 22 nt, Human
uggcuggacagugggcagugga

SEQ ID NO: 58102 - RNA, 22 nt, Human
uggcuggaguauaggaguagga

SEQ ID NO: 58103 - RNA, 22 nt, Human
uggcuggauaauauucuguugu

SEQ ID NO: 58104 - RNA, 22 nt, Human
uggcuggauaucagaggaagug

SEQ ID NO: 58105 - RNA, 22 nt, Human
uggcuggcaaggcuggagucag

SEQ ID NO: 58106 - RNA, 18 nt, Human
uggcuggcagugggcagc

SEQ ID NO: 58107 - RNA, 22 nt, Human
uggcuggcauagccauugcucc

SEQ ID NO: 58108 - RNA, 22 nt, Human
uggcuggcuagugggcaggauu

SEQ ID NO: 58109 - RNA, 22 nt, Human
uggcuggcuggaccacaccugc

SEQ ID NO: 58110 - RNA, 22 nt, Human
uuuuggcucuugguaggucaga

SEQ ID NO: 58111 - RNA, 19 nt, Human
uuuuggcuggagugaucug

SEQ ID NO: 58112 - RNA, 22 nt, Human
uuuuggggagaacgguugcuau

SEQ ID NO: 58113 - RNA, 22 nt, Human
uuuugguacaugcaauagcaau

SEQ ID NO: 58114 - RNA, 21 nt, Human
uuuugguccuggcuuaggagc

SEQ ID NO: 58115 - RNA, 22 nt, Human
uuuuggugaauuuaagugcugu

SEQ ID NO: 58116 - RNA, 17 nt, Human
uuuuggugaccuuggcc

SEQ ID NO: 58117 - RNA, 22 nt, Human
uuuuggugauuuuacugaaggu

SEQ ID NO: 58118 - RNA, 22 nt, Human
uuuugguuuggcuccaaauagg

SEQ ID NO: 58119 - RNA, 22 nt, Human
uuuuguaagaaacugccaagcc

SEQ ID NO: 58120 - RNA, 22 nt, Human
uuuugucagugagaacagaguu

SEQ ID NO: 58121 - RNA, 22 nt, Human
uuuugugagcccauaaaugcca

SEQ ID NO: 58122 - RNA, 22 nt, Human
uuuugugagcuccuuggaggua

SEQ ID NO: 58123 - RNA, 22 nt, Human
uuuugugauggcauuacauuua

SEQ ID NO: 58124 - RNA, 17 nt, Human
uuuuguucaucuucaaa

SEQ ID NO: 58125 - RNA, 22 nt, Human
uuuuguuguaauauaccuaucc

SEQ ID NO: 58126 - RNA, 22 nt, Human
uuuuguuuaaaauccuggaugg

SEQ ID NO: 58127 - RNA, 22 nt, Human
uuuuuaagcuccuuugauguca

SEQ ID NO: 58128 - RNA, 19 nt, Human
uuuuuacaaguagguguga

SEQ ID NO: 58129 - RNA, 22 nt, Human
uuuuuacagucauggucacuca

SEQ ID NO: 58130 - RNA, 22 nt, Human
uuuuuagaguguuaccaguaua

SEQ ID NO: 58131 - RNA, 22 nt, Human
uuuuuagccaagccauaggucu

SEQ ID NO: 58132 - RNA, 22 nt, Human
uuuuuauaccaccucucacuua

SEQ ID NO: 58133 - RNA, 22 nt, Human
uuuuuaucuacagauucucagc

SEQ ID NO: 58134 - RNA, 22 nt, Human
uuuuucccaaaggcaauugccu

SEQ ID NO: 58135 - RNA, 22 nt, Human
uuuuuccuagcgauuugucagc

SEQ ID NO: 58136 - RNA, 20 nt, Human
uuuuuccuucucuacaggca

SEQ ID NO: 58137 - RNA, 22 nt, Human
uuuuucugagaauaugagagga

SEQ ID NO: 58138 - RNA, 22 nt, Human
uuuuucugccauucaaagagga

SEQ ID NO: 58139 - RNA, 22 nt, Human
uuuuugagauggauuuagcucu

SEQ ID NO: 58140 - RNA, 22 nt, Human
uuuuugaucugagcaguuggag

SEQ ID NO: 58141 - RNA, 22 nt, Human
uuuuugcuccacaacuuugaag

SEQ ID NO: 58142 - RNA, 22 nt, Human
uuuuuggcccuuagcucuguau

SEQ ID NO: 58143 - RNA, 22 nt, Human
uuuuuguagucauuagaagagg

SEQ ID NO: 58144 - RNA, 22 nt, Human
uuuuugucuagcgucucuaguu

SEQ ID NO: 58145 - RNA, 22 nt, Human
uuuuugugaaaucuccagacau

SEQ ID NO: 58146 - RNA, 22 nt, Human
uuuuugugauaugacacuguau

SEQ ID NO: 58147 - RNA, 22 nt, Human
uuuuuguucccagagaauuugu

SEQ ID NO: 58148 - RNA, 22 nt, Human
uuuuuguugcagagaggccacu

SEQ ID NO: 58149 - RNA, 22 nt, Human
uuuuuuacagaaucauuaauca

SEQ ID NO: 58150 - RNA, 22 nt, Human
uuuuuuaguuaggucagaaugu

SEQ ID NO: 58151 - RNA, 22 nt, Human
uuuuuucagccugucugugcca

SEQ ID NO: 58152 - RNA, 22 nt, Human
uuuuuuccucugugauggcaaa

SEQ ID NO: 58153 - RNA, 22 nt, Human
uuuuuugcacacucugcuaaau

SEQ ID NO: 58154 - RNA, 22 nt, Human
uuuuuuguuggguagaacggaa

SEQ ID NO: 58155 - RNA, 22 nt, Human
uggaucugacuggcuuuucuuc

SEQ ID NO: 58156 - RNA, 22 nt, Human
uggaugaaaaaugagaauuuuc

SEQ ID NO: 58157 - RNA, 22 nt, Human
uggaugagaaacucuggugacu

SEQ ID NO: 58158 - RNA, 22 nt, Human
uggaugaggcuggguuaggcag

SEQ ID NO: 58159 - RNA, 22 nt, Human
uggaugagggcugagcacuggg

SEQ ID NO: 58160 - RNA, 22 nt, Human
uggaugaguucaaugaggcaga

SEQ ID NO: 58161 - RNA, 22 nt, Human
uggaugccugggccuccuucca

SEQ ID NO: 58162 - RNA, 22 nt, Human
uggauggagacugauaugggua

SEQ ID NO: 58163 - RNA, 22 nt, Human
uggauggcuggggaagagcagg

SEQ ID NO: 58164 - RNA, 22 nt, Human
uggauggguugaaaugugagcc

SEQ ID NO: 58165 - RNA, 20 nt, Human
uggaugucaaauuaggcugg

SEQ ID NO: 58166 - RNA, 22 nt, Human
uggauuaguuuaacaauguggc

SEQ ID NO: 58167 - RNA, 22 nt, Human
uggauucaaauuucagcucugu

SEQ ID NO: 58168 - RNA, 20 nt, Human
uggauucuggagcugcccuc

SEQ ID NO: 58169 - RNA, 18 nt, Human
uggauugaauugagaggu

SEQ ID NO: 58170 - RNA, 21 nt, Human
uggauugaggugacagugugc

SEQ ID NO: 58171 - RNA, 22 nt, Human
uggauugauaaaaugggauguu

SEQ ID NO: 58172 - RNA, 22 nt, Human
uggauugcagcagcuccugugg

SEQ ID NO: 58173 - RNA, 19 nt, Human
uggauuuauauucuuuauc

SEQ ID NO: 58174 - RNA, 22 nt, Human
uggauuugcuaccuucugauau

SEQ ID NO: 58175 - RNA, 22 nt, Human
uggcaaaaugagcaauuacuuu

SEQ ID NO: 58176 - RNA, 22 nt, Human
uggcaaagaccgcaauuacuuu

SEQ ID NO: 58177 - RNA, 22 nt, Human
uggcaaaggaaaugauuuaaga

SEQ ID NO: 58178 - RNA, 22 nt, Human
uggcaaaggaaccuauuuuaaa

SEQ ID NO: 58179 - RNA, 22 nt, Human
uggcaaauuuuggcaagcugaa

SEQ ID NO: 58180 - RNA, 22 nt, Human
uggcaacaagaaaggcagaggg

SEQ ID NO: 58181 - RNA, 22 nt, Human
uggcaacaccuggaagacaugg

SEQ ID NO: 58182 - RNA, 22 nt, Human
uggcaacauggacaggucugcc

SEQ ID NO: 58183 - RNA, 22 nt, Human
uggcaacaugucgaagugcugu

SEQ ID NO: 58184 - RNA, 22 nt, Human
uggcaagaauauuggaccagaa

SEQ ID NO: 58185 - RNA, 22 nt, Human
uggcaagcagagucuggugggg

SEQ ID NO: 58186 - RNA, 18 nt, Human
uggcaaguaaugacaaaa

SEQ ID NO: 58187 - RNA, 22 nt, Human
uggcaauaaagaccaacagguu

SEQ ID NO: 58188 - RNA, 22 nt, Human
uggcaauaauuguaauucaauu

SEQ ID NO: 58189 - RNA, 22 nt, Human
uggcaauauaaucaucugcucu

SEQ ID NO: 58190 - RNA, 22 nt, Human
uggcaaugagcaggugcucugg

SEQ ID NO: 58191 - RNA, 21 nt, Human
uggcaauggccaacagucauc

SEQ ID NO: 58192 - RNA, 22 nt, Human
uggcaauguggaaugguccagg

SEQ ID NO: 58193 - RNA, 22 nt, Human
uggcaauguggcaucaacgaag

SEQ ID NO: 58194 - RNA, 22 nt, Human
uggcaauguuagcaaagcauuu

SEQ ID NO: 58195 - RNA, 22 nt, Human
uggcaauuuucuagcagauggc

SEQ ID NO: 58196 - RNA, 22 nt, Human
uggcacagaaaaaugcuccauu

SEQ ID NO: 58197 - RNA, 16 nt, Human
uggcacagagcagaua

SEQ ID NO: 58198 - RNA, 17 nt, Human
uggcacagaggugcuau

SEQ ID NO: 58199 - RNA, 23 nt, Human
uggcacagcaggugugcuuuguu

SEQ ID NO: 58200 - RNA, 22 nt, Human
uggcacagccacugaaucggga

SEQ ID NO: 58201 - RNA, 22 nt, Human
uggcacagcccagagcucuuga

SEQ ID NO: 58202 - RNA, 22 nt, Human
uggcacaggagcacugcccugg

SEQ ID NO: 58203 - RNA, 22 nt, Human
uggcacuggaaucguagccuug

SEQ ID NO: 58204 - RNA, 22 nt, Human
uggcacugggaugcuacuguua

SEQ ID NO: 58205 - RNA, 22 nt, Human
uggcagaaguucacuaguagcu

SEQ ID NO: 58206 - RNA, 22 nt, Human
uggcagaaugaagacuggggcc

SEQ ID NO: 58207 - RNA, 21 nt, Human
uggcagacaggaggagcucac

SEQ ID NO: 58208 - RNA, 22 nt, Human
uguccucaaggagcuucagucu

SEQ ID NO: 58209 - RNA, 22 nt, Human
uguccucaggaccuggcacagu

SEQ ID NO: 58210 - RNA, 22 nt, Human
uguccucuaauuggccucuugc

SEQ ID NO: 58211 - RNA, 22 nt, Human
uguccucuguuaggggauagcg

SEQ ID NO: 58212 - RNA, 22 nt, Human
uguccugcaagcccuaaugaau

SEQ ID NO: 58213 - RNA, 22 nt, Human
uguccugggaacucacagucca

SEQ ID NO: 58214 - RNA, 22 nt, Human
uguccugggccggcgacugguc

SEQ ID NO: 58215 - RNA, 22 nt, Human
uguccuggggacaagaggcccu

SEQ ID NO: 58216 - RNA, 22 nt, Human
uguccuggugcuccagguggcu

SEQ ID NO: 58217 - RNA, 22 nt, Human
uguccugugaccuggcaccaca

SEQ ID NO: 58218 - RNA, 22 nt, Human
uguccugugauuccagcucuuc

SEQ ID NO: 58219 - RNA, 22 nt, Human
uguccuguucuggcgugagugg

SEQ ID NO: 58220 - RNA, 22 nt, Human
uguccuuagggauauaaaauau

SEQ ID NO: 58221 - RNA, 22 nt, Human
uguccuuaucuccaaacaauca

SEQ ID NO: 58222 - RNA, 22 nt, Human
uguccuuuacugauugcuucug

SEQ ID NO: 58223 - RNA, 22 nt, Human
uguccuuugggagggcacagcu

SEQ ID NO: 58224 - RNA, 22 nt, Human
uguccuuuguucccugucucug

SEQ ID NO: 58225 - RNA, 22 nt, Human
uguccuuuuccccaaauucacu

SEQ ID NO: 58226 - RNA, 22 nt, Human
uguccuuuuggcugucuauggu

SEQ ID NO: 58227 - RNA, 22 nt, Human
ugucgauucagcucuucagaga

SEQ ID NO: 58228 - RNA, 22 nt, Human
ugucggccacgagggagccgcg

SEQ ID NO: 58229 - RNA, 22 nt, Human
ugucgggcaugcauucugagaa

SEQ ID NO: 58230 - RNA, 22 nt, Human
ugucuacaagccuuguucggca

SEQ ID NO: 58231 - RNA, 22 nt, Human
ugucuacuccugugcuagcucc

SEQ ID NO: 58232 - RNA, 22 nt, Human
ugucuagaggccaacaggaaag

SEQ ID NO: 58233 - RNA, 22 nt, Human
ugucuauguauacauguguaua

SEQ ID NO: 58234 - RNA, 22 nt, Human
ugucuauuaauuccacauaaaa

SEQ ID NO: 58235 - RNA, 22 nt, Human
ugucucagaauggcucauaaua

SEQ ID NO: 58236 - RNA, 22 nt, Human
ugucucagaguaucccugaacu

SEQ ID NO: 58237 - RNA, 22 nt, Human
ugucucagcugugcuucauugg

SEQ ID NO: 58238 - RNA, 18 nt, Human
ugucucaggcugaaacag

SEQ ID NO: 58239 - RNA, 22 nt, Human
ugucucaggggcauugaaauaa

SEQ ID NO: 58240 - RNA, 22 nt, Human
ugucucaucucuuaaccccacu

SEQ ID NO: 58241 - RNA, 22 nt, Human
ugucuccaaaacaaucucagau

SEQ ID NO: 58242 - RNA, 22 nt, Human
ugucuccacaggugucagcuca

SEQ ID NO: 58243 - RNA, 22 nt, Human
ugucuccaccaucaucuuacca

SEQ ID NO: 58244 - RNA, 22 nt, Human
ugucuccagaaagcaccaggag

SEQ ID NO: 58245 - RNA, 22 nt, Human
ugucuccauagaguagcuugau

SEQ ID NO: 58246 - RNA, 22 nt, Human
ugucuccaugugauaguggccu

SEQ ID NO: 58247 - RNA, 22 nt, Human
ugucuccuaaugucuguuuccu

SEQ ID NO: 58248 - RNA, 22 nt, Human
ugucuccucaacucaugcucga

SEQ ID NO: 58249 - RNA, 22 nt, Human
ugucuccucauacugucauauu

SEQ ID NO: 58250 - RNA, 22 nt, Human
ugucucuccacacagccagugc

SEQ ID NO: 58251 - RNA, 22 nt, Human
ugucucucugcccccauugcuc

SEQ ID NO: 58252 - RNA, 22 nt, Human
ugucucugaaauauguggcucc

SEQ ID NO: 58253 - RNA, 22 nt, Human
ugucucugaacagcuuacuaaa

SEQ ID NO: 58254 - RNA, 22 nt, Human
ugucucuggcccaugagcagag

SEQ ID NO: 58255 - RNA, 22 nt, Human
ugucucuuacuuugauucuugg

SEQ ID NO: 58256 - RNA, 22 nt, Human
ugucucuucugccuccagcugu

SEQ ID NO: 58257 - RNA, 22 nt, Human
ugucucuuuggccucccauaug

SEQ ID NO: 58258 - RNA, 22 nt, Human
ugucucuuuggguuccucuugg

SEQ ID NO: 58259 - RNA, 22 nt, Human
ugucugaaacuuaugauauacu

SEQ ID NO: 58260 - RNA, 22 nt, Human
ugucugaaacuugguccuaugc

SEQ ID NO: 58261 - RNA, 22 nt, Human
ugucugaaagaggacgagcugg

SEQ ID NO: 58262 - RNA, 22 nt, Human
ugucugaaaggcuuuuucucac

SEQ ID NO: 58263 - RNA, 18 nt, Human
ugucugaagccacuuuuu

SEQ ID NO: 58264 - RNA, 22 nt, Human
uggcugcccccucccguggaca

SEQ ID NO: 58265 - RNA, 20 nt, Human
uggcugcccgaggcacacac

SEQ ID NO: 58266 - RNA, 21 nt, Human
uggcugccuggcucugugguu

SEQ ID NO: 58267 - RNA, 22 nt, Human
uggcugcguuuuccgauguauu

SEQ ID NO: 58268 - RNA, 22 nt, Human
uggcugcuuguuuuagugaggc

SEQ ID NO: 58269 - RNA, 22 nt, Human
uggcuggaaacaggagauucag

SEQ ID NO: 58270 - RNA, 22 nt, Human
uggcuggaccugggcuggaauu

SEQ ID NO: 58271 - RNA, 22 nt, Human
uggcuggagaacuuggggaucu

SEQ ID NO: 58272 - RNA, 22 nt, Human
uggcuggaggaaggaacugagg

SEQ ID NO: 58273 - RNA, 22 nt, Human
uggcuggaggguuagugagaua

SEQ ID NO: 58274 - RNA, 22 nt, Human
uggcuggagugggagaaguuua

SEQ ID NO: 58275 - RNA, 22 nt, Human
uggcuggauuauuggcuaguac

SEQ ID NO: 58276 - RNA, 23 nt, Human
uggcuggcagaaacugaagcaug

SEQ ID NO: 58277 - RNA, 18 nt, Human
uggcuggcucugucaucu

SEQ ID NO: 58278 - RNA, 22 nt, Human
uggcuggcuguccagcugggca

SEQ ID NO: 58279 - RNA, 22 nt, Human
uggcugggcccccaccugccuc

SEQ ID NO: 58280 - RNA, 19 nt, Human
uggcugggcgugccuccgu

SEQ ID NO: 58281 - RNA, 22 nt, Human
uggcuggggccacaguuuuccu

SEQ ID NO: 58282 - RNA, 19 nt, Human
uggcugggugccaauggcc

SEQ ID NO: 58283 - RNA, 20 nt, Human
uggcugugggcaucuguuuc

SEQ ID NO: 58284 - RNA, 22 nt, Human
uggcuguggguggaaggaaacc

SEQ ID NO: 58285 - RNA, 22 nt, Human
uggcuucaaaaucuaguggucu

SEQ ID NO: 58286 - RNA, 23 nt, Human
uggcuucaacucugucggcagcc

SEQ ID NO: 58287 - RNA, 22 nt, Human
uggcuucaaggugauaauuuac

SEQ ID NO: 58288 - RNA, 22 nt, Human
uggcuucaagucuagguucuac

SEQ ID NO: 58289 - RNA, 22 nt, Human
uggcuucagacuucugcuacgu

SEQ ID NO: 58290 - RNA, 22 nt, Human
uggcuucagagacagaaucuau

SEQ ID NO: 58291 - RNA, 17 nt, Human
uggcuucagauguacau

SEQ ID NO: 58292 - RNA, 22 nt, Human
uggcuucagucucaucuuggaa

SEQ ID NO: 58293 - RNA, 22 nt, Human
uggcuucauguaguuugaguug

SEQ ID NO: 58294 - RNA, 22 nt, Human
uggcuuccaaaggaaugggccu

SEQ ID NO: 58295 - RNA, 22 nt, Human
uggcuuccaaauuaucccuaga

SEQ ID NO: 58296 - RNA, 22 nt, Human
uggcuuccaguaaucaggauuu

SEQ ID NO: 58297 - RNA, 22 nt, Human
uggcuucccauagcuugcuagu

SEQ ID NO: 58298 - RNA, 22 nt, Human
uggcuuccuggacagaugcggu

SEQ ID NO: 58299 - RNA, 22 nt, Human
uggcuucuagagcccauccuuc

SEQ ID NO: 58300 - RNA, 22 nt, Human
uuaaugcagcucuaccacacag

SEQ ID NO: 58301 - RNA, 22 nt, Human
uuaauggaugcggcugcgugac

SEQ ID NO: 58302 - RNA, 22 nt, Human
uuaauggcagggcagaauauua

SEQ ID NO: 58303 - RNA, 22 nt, Human
uuaauguuuuaaguuauagaga

SEQ ID NO: 58304 - RNA, 22 nt, Human
uuaauuacaaaacacauagguu

SEQ ID NO: 58305 - RNA, 22 nt, Human
uuaauuagagcugauguucaua

SEQ ID NO: 58306 - RNA, 22 nt, Human
uuaauuaugagaaagggaaaag

SEQ ID NO: 58307 - RNA, 22 nt, Human
uuaauucagucaaagaaaccau

SEQ ID NO: 58308 - RNA, 22 nt, Human
uuaauucuuccggacugugaaa

SEQ ID NO: 58309 - RNA, 22 nt, Human
uuaauugagccagaaaguaucu

SEQ ID NO: 58310 - RNA, 22 nt, Human
uuaauuggccucuuagagguua

SEQ ID NO: 58311 - RNA, 22 nt, Human
uuaauugggugcaacagcugaa

SEQ ID NO: 58312 - RNA, 22 nt, Human
uuaauuuauguccaaaccagau

SEQ ID NO: 58313 - RNA, 22 nt, Human
uuaauuuuuauguauagugugu

SEQ ID NO: 58314 - RNA, 22 nt, Human
uuacaaagaaaauuaggcauuu

SEQ ID NO: 58315 - RNA, 22 nt, Human
uuacaaagagugccagagugug

SEQ ID NO: 58316 - RNA, 22 nt, Human
uuacaaagauuauauucaguua

SEQ ID NO: 58317 - RNA, 21 nt, Human
uuacaaagcuacagauguugc

SEQ ID NO: 58318 - RNA, 22 nt, Human
uuacaaaguuuaagguggcacu

SEQ ID NO: 58319 - RNA, 17 nt, Human
uuacaacaauucaugag

SEQ ID NO: 58320 - RNA, 22 nt, Human
uuacaacaccaggcaguauccu

SEQ ID NO: 58321 - RNA, 22 nt, Human
uuacaacagcgauuuaccuguc

SEQ ID NO: 58322 - RNA, 23 nt, Human
uuacaacaguguccauauuugua

SEQ ID NO: 58323 - RNA, 22 nt, Human
uuacaacauauuuagcuugauu

SEQ ID NO: 58324 - RNA, 21 nt, Human
uuacaacauuuguguucuaug

SEQ ID NO: 58325 - RNA, 17 nt, Human
uuacaacgucaucucug

SEQ ID NO: 58326 - RNA, 22 nt, Human
uuacaacugaagcuaaugugcu

SEQ ID NO: 58327 - RNA, 22 nt, Human
uuacaacuggugaauuuuaugg

SEQ ID NO: 58328 - RNA, 22 nt, Human
uuacaagauaugugagaacuag

SEQ ID NO: 58329 - RNA, 22 nt, Human
uuacaagaucuuugaaggcaag

SEQ ID NO: 58330 - RNA, 22 nt, Human
uuacaagaugggaaagggaagu

SEQ ID NO: 58331 - RNA, 22 nt, Human
uuacaagauuaauuauuggagu

SEQ ID NO: 58332 - RNA, 22 nt, Human
uuacaagcagcuacauaucaca

SEQ ID NO: 58333 - RNA, 20 nt, Human
uuacaagccuuguuaaaucu

SEQ ID NO: 58334 - RNA, 22 nt, Human
uuacaagcuaauuguuucagcu

SEQ ID NO: 58335 - RNA, 22 nt, Human
uuacaaguacugaauaugauuu

SEQ ID NO: 58336 - RNA, 22 nt, Human
uuacaaugacagguguaucauu

SEQ ID NO: 58337 - RNA, 22 nt, Human
uuacaaugagacguucuuaucu

SEQ ID NO: 58338 - RNA, 22 nt, Human
uuacaaugaugaauaaauggca

SEQ ID NO: 58339 - RNA, 22 nt, Human
uuacaaugaugggauucagcca

SEQ ID NO: 58340 - RNA, 22 nt, Human
uuacaauugagucuauuguaug

SEQ ID NO: 58341 - RNA, 22 nt, Human
uuacacaaaguuagcucuugca

SEQ ID NO: 58342 - RNA, 22 nt, Human
uuacacaacagugcaucagcag

SEQ ID NO: 58343 - RNA, 22 nt, Human
uuacacaacaucuguauuauua

SEQ ID NO: 58344 - RNA, 22 nt, Human
uuacacacucugcccugcuguu

SEQ ID NO: 58345 - RNA, 22 nt, Human
uuacacaugcucacuuauuugu

SEQ ID NO: 58346 - RNA, 22 nt, Human
uuacacauuaacaggcagcuaa

SEQ ID NO: 58347 - RNA, 19 nt, Human
uuacacuucugcuuuguga

SEQ ID NO: 58348 - RNA, 22 nt, Human
uuacacuuguaauuauauaacg

SEQ ID NO: 58349 - RNA, 22 nt, Human
uuacacuuuggcaagcuauuaa

SEQ ID NO: 58350 - RNA, 22 nt, Human
uuacagaacugcccuaguuggc

SEQ ID NO: 58351 - RNA, 22 nt, Human
uuacagaacugucuugaaauuu

SEQ ID NO: 58352 - RNA, 22 nt, Human
uuacagaaugugccauuugguc

SEQ ID NO: 58353 - RNA, 22 nt, Human
uuacagaauguucuuccaacag

SEQ ID NO: 58354 - RNA, 22 nt, Human
uuacagagauaaacuguaagug

SEQ ID NO: 58355 - RNA, 22 nt, Human
uuacagagggcuucucugaacu

SEQ ID NO: 58356 - RNA, 22 nt, Human
uuacagauacauuucuuuuguu

SEQ ID NO: 58357 - RNA, 22 nt, Human
uuacagauggcaguuucuugag

SEQ ID NO: 58358 - RNA, 22 nt, Human
uuacagcaaagugcgcagaccu

SEQ ID NO: 58359 - RNA, 22 nt, Human
uuacagcagugggaaggaguca

SEQ ID NO: 58360 - RNA, 22 nt, Human
uuacagcauuuaaugagaucug

SEQ ID NO: 58361 - RNA, 22 nt, Human
uuacagggguguggaggcaauc

SEQ ID NO: 58362 - RNA, 22 nt, Human
uuacaggguugcagcauugacg

SEQ ID NO: 58363 - RNA, 22 nt, Human
uuacagguauuuuauugagcag

SEQ ID NO: 58364 - RNA, 22 nt, Human
uuacagguggagaaguaaggcu

SEQ ID NO: 58365 - RNA, 22 nt, Human
uuacagguuaagugacacuuaa

SEQ ID NO: 58366 - RNA, 22 nt, Human
uuacagucuggauuaggaaaca

SEQ ID NO: 58367 - RNA, 22 nt, Human
uuacagugacaguugcuaugau

SEQ ID NO: 58368 - RNA, 22 nt, Human
uuacagugacucacauuaacaa

SEQ ID NO: 58369 - RNA, 22 nt, Human
uuacaguggucauuugggaaaa

SEQ ID NO: 58370 - RNA, 22 nt, Human
uuacagugugcaaucccagaau

SEQ ID NO: 58371 - RNA, 22 nt, Human
uuacaguugcuacaaaggauaa

SEQ ID NO: 58372 - RNA, 22 nt, Human
uuacaguuguucuaucagcaug

SEQ ID NO: 58373 - RNA, 22 nt, Human
uuacaguuuaguccaagccaga

SEQ ID NO: 58374 - RNA, 22 nt, Human
uuacauacaaaggcuggguuau

SEQ ID NO: 58375 - RNA, 22 nt, Human
uuacauagauucauuuaguuaa

SEQ ID NO: 58376 - RNA, 22 nt, Human
uuacaucaugcuuaucccuuuc

SEQ ID NO: 58377 - RNA, 22 nt, Human
uuacaucugcacuccaggacag

SEQ ID NO: 58378 - RNA, 22 nt, Human
uuacaugaauacauaaccauuc

SEQ ID NO: 58379 - RNA, 19 nt, Human
uuacaugacacuccagccu

SEQ ID NO: 58380 - RNA, 22 nt, Human
uuacaugaugauuucauaaaca

SEQ ID NO: 58381 - RNA, 22 nt, Human
uggucagcuucagaguguucca

SEQ ID NO: 58382 - RNA, 22 nt, Human
uggucaggcugcucugcggcgu

SEQ ID NO: 58383 - RNA, 22 nt, Human
uggucagugugacauuuuuuaa

SEQ ID NO: 58384 - RNA, 22 nt, Human
uggucauaacaugauuaguagg

SEQ ID NO: 58385 - RNA, 22 nt, Human
ugguccagaagauauucaacca

SEQ ID NO: 58386 - RNA, 22 nt, Human
ugguccaguagcagggauacca

SEQ ID NO: 58387 - RNA, 22 nt, Human
ugguccaguuuagcauugagug

SEQ ID NO: 58388 - RNA, 22 nt, Human
ugguccauguucccagaagaca

SEQ ID NO: 58389 - RNA, 19 nt, Human
uggucccauacugcuggcc

SEQ ID NO: 58390 - RNA, 22 nt, Human
uggucccuaaagaugucuacau

SEQ ID NO: 58391 - RNA, 22 nt, Human
uggucccugaagagagaccuug

SEQ ID NO: 58392 - RNA, 22 nt, Human
ugguccgcuccuauucgccgca

SEQ ID NO: 58393 - RNA, 20 nt, Human
ugguccucacaugccaucuu

SEQ ID NO: 58394 - RNA, 22 nt, Human
ugguccucacccuacccagcug

SEQ ID NO: 58395 - RNA, 22 nt, Human
ugguccugagaauccuguccuc

SEQ ID NO: 58396 - RNA, 22 nt, Human
ugguccugaggcuuguuuccac

SEQ ID NO: 58397 - RNA, 22 nt, Human
ugguccugcccacgcccaucug

SEQ ID NO: 58398 - RNA, 22 nt, Human
ugguccuggaagguccugaggg

SEQ ID NO: 58399 - RNA, 22 nt, Human
ugguccugguagcggugugcuu

SEQ ID NO: 58400 - RNA, 22 nt, Human
ugguccuguagcucucuaaguu

SEQ ID NO: 58401 - RNA, 22 nt, Human
ugguccugucucaaggagccuu

SEQ ID NO: 58402 - RNA, 21 nt, Human
ugguccuucuuuacugccucc

SEQ ID NO: 58403 - RNA, 22 nt, Human
ugguccuugcuauagagugaua

SEQ ID NO: 58404 - RNA, 22 nt, Human
uggucgaccaguuggaaaguaa

SEQ ID NO: 58405 - RNA, 23 nt, Human
uggucucacuugguaagaugaag

SEQ ID NO: 58406 - RNA, 22 nt, Human
uggucucugcaggccaggcuca

SEQ ID NO: 58407 - RNA, 22 nt, Human
uggucucugcugcagcuucuca

SEQ ID NO: 58408 - RNA, 19 nt, Human
uggucucugucucuuugca

SEQ ID NO: 58409 - RNA, 22 nt, Human
ugucacauucugaugugaggug

SEQ ID NO: 58410 - RNA, 22 nt, Human
ugucaccaaguugaugaaugca

SEQ ID NO: 58411 - RNA, 22 nt, Human
ugucaccacauuugucaauauc

SEQ ID NO: 58412 - RNA, 22 nt, Human
ugucacuucaggaaugcaggga

SEQ ID NO: 58413 - RNA, 22 nt, Human
ugucacuuggagaagcugaucc

SEQ ID NO: 58414 - RNA, 21 nt, Human
ugucacuuuaagcuagcucua

SEQ ID NO: 58415 - RNA, 22 nt, Human
ugucacuuuggccaagccauug

SEQ ID NO: 58416 - RNA, 22 nt, Human
ugucacuuuggggagaguuuug

SEQ ID NO: 58417 - RNA, 22 nt, Human
ugucacuuuuuauagguguuga

SEQ ID NO: 58418 - RNA, 21 nt, Human
ugucagaaauaagcaugugau

SEQ ID NO: 58419 - RNA, 22 nt, Human
ugucagaacucuauugaugucc

SEQ ID NO: 58420 - RNA, 22 nt, Human
ugucagacacagccagagacug

SEQ ID NO: 58421 - RNA, 22 nt, Human
ugucagagagcaggcaguagaa

SEQ ID NO: 58422 - RNA, 22 nt, Human
ugucagagcaaggccaggccag

SEQ ID NO: 58423 - RNA, 22 nt, Human
ugucagaugcgauaaacuagug

SEQ ID NO: 58424 - RNA, 21 nt, Human
ugucagcaacaauacuuucuc

SEQ ID NO: 58425 - RNA, 22 nt, Human
ugucagcaacccaucacuccca

SEQ ID NO: 58426 - RNA, 22 nt, Human
ugucagcaagacaucagaguga

SEQ ID NO: 58427 - RNA, 21 nt, Human
ugucagcacgcaugaggccag

SEQ ID NO: 58428 - RNA, 22 nt, Human
ugucagcagaaguggugcacuc

SEQ ID NO: 58429 - RNA, 22 nt, Human
ugucagcaugaacccugaauua

SEQ ID NO: 58430 - RNA, 22 nt, Human
ugucagcucauugaaggcacaa

SEQ ID NO: 58431 - RNA, 22 nt, Human
ugucagugauuuguagggaauu

SEQ ID NO: 58432 - RNA, 22 nt, Human
ugucagugcuauagugggaaua

SEQ ID NO: 58433 - RNA, 22 nt, Human
ugucaguuaccuagcacaagaa

SEQ ID NO: 58434 - RNA, 22 nt, Human
ugucaguucagugauuacaaaa

SEQ ID NO: 58435 - RNA, 22 nt, Human
ugucaguucaucaguuggcuaa

SEQ ID NO: 58436 - RNA, 22 nt, Human
ugucaguuuccugugcccugcu

SEQ ID NO: 58437 - RNA, 22 nt, Human
ugucaguuuggcucuaaaguuu

SEQ ID NO: 58438 - RNA, 22 nt, Human
ugucauaacuuagugacaaauc

SEQ ID NO: 58439 - RNA, 18 nt, Human
ugucauaauauaucaccu

SEQ ID NO: 58440 - RNA, 22 nt, Human
ugucauacaacaauaaguaccg

SEQ ID NO: 58441 - RNA, 22 nt, Human
ugucauauagaauguucuauga

SEQ ID NO: 58442 - RNA, 22 nt, Human
ugucauaucuauuaaaugucua

SEQ ID NO: 58443 - RNA, 22 nt, Human
ugucauauguaauauguucauu

SEQ ID NO: 58444 - RNA, 22 nt, Human
ugucaucagcauauaagacagu

SEQ ID NO: 58445 - RNA, 22 nt, Human
ugucaucuggccugauuggugu

SEQ ID NO: 58446 - RNA, 22 nt, Human
ugucaucuguguuuugcuggag

SEQ ID NO: 58447 - RNA, 20 nt, Human
ugucaugcauuagaugaaga

SEQ ID NO: 58448 - RNA, 22 nt, Human
ugucaugccaggaaauaguccc

SEQ ID NO: 58449 - RNA, 22 nt, Human
ugucauggggaaaauaacagac

SEQ ID NO: 58450 - RNA, 22 nt, Human
ugucaugguagcugaaggaugu

SEQ ID NO: 58451 - RNA, 22 nt, Human
ugucauguuucauguuuguagg

SEQ ID NO: 58452 - RNA, 22 nt, Human
ugucauguuuuccuacaaggua

SEQ ID NO: 58453 - RNA, 21 nt, Human
ugucauuaaucgcuauagaag

SEQ ID NO: 58454 - RNA, 22 nt, Human
ugucauugaggaaaacuaggug

SEQ ID NO: 58455 - RNA, 22 nt, Human
ugucauuggugaucugaugccu

SEQ ID NO: 58456 - RNA, 22 nt, Human
ugucauuuaucuuauaguaauc

SEQ ID NO: 58457 - RNA, 22 nt, Human
ugucauuuaugcuucuucagug

SEQ ID NO: 58458 - RNA, 22 nt, Human
ugucauuuggacuuugguauua

SEQ ID NO: 58459 - RNA, 22 nt, Human
ugucauuuucagcuuaugcuuc

SEQ ID NO: 58460 - RNA, 21 nt, Human
uguccaagguaugcacugggg

SEQ ID NO: 58461 - RNA, 22 nt, Human
uguccagcucgagacacuaucu

SEQ ID NO: 58462 - RNA, 22 nt, Human
uguccagcugacauucccuucc

SEQ ID NO: 58463 - RNA, 22 nt, Human
uguccaggugugucuaaagaga

SEQ ID NO: 58464 - RNA, 22 nt, Human
uguccaguccuuggggugcugu

SEQ ID NO: 58465 - RNA, 22 nt, Human
uguccauacaauguaacaucuu

SEQ ID NO: 58466 - RNA, 22 nt, Human
uguccaugcguauccagggagc

SEQ ID NO: 58467 - RNA, 22 nt, Human
uguccauggagaagcucagggc

SEQ ID NO: 58468 - RNA, 22 nt, Human
uguccaugggcgucaggcagga

SEQ ID NO: 58469 - RNA, 22 nt, Human
ugucccaacccugagaagauuc

SEQ ID NO: 58470 - RNA, 22 nt, Human
ugucccagacacaguaugcgcu

SEQ ID NO: 58471 - RNA, 22 nt, Human
ugucccagcugucucuguuuuu

SEQ ID NO: 58472 - RNA, 22 nt, Human
ugucccagggaaggcccagcac

SEQ ID NO: 58473 - RNA, 22 nt, Human
ugucccagucaaggcugucauc

SEQ ID NO: 58474 - RNA, 22 nt, Human
ugucccauggcuuuucuggugg

SEQ ID NO: 58475 - RNA, 20 nt, Human
uguccccaccaaaauuucau

SEQ ID NO: 58476 - RNA, 22 nt, Human
uguccccuuucuuuccuucgua

SEQ ID NO: 58477 - RNA, 22 nt, Human
ugucccucugaggcuucccugg

SEQ ID NO: 58478 - RNA, 22 nt, Human
ugucccugguggaggcuggcag

SEQ ID NO: 58479 - RNA, 22 nt, Human
ugucccuuuguguucugaaacu

SEQ ID NO: 58480 - RNA, 22 nt, Human
uguccuauuucucugugcauga

SEQ ID NO: 58481 - RNA, 22 nt, Human
uguccucacaggaaugaacuuu

SEQ ID NO: 58482 - RNA, 22 nt, Human
uguccugcaacugaaggagaag

SEQ ID NO: 58483 - RNA, 22 nt, Human
uguccuggacaacagccccuag

SEQ ID NO: 58484 - RNA, 22 nt, Human
uguccugggaaaucccuuaggc

SEQ ID NO: 58485 - RNA, 22 nt, Human
uguccugggaggcgggguccag

SEQ ID NO: 58486 - RNA, 22 nt, Human
uguccugggucaaccaggucga

SEQ ID NO: 58487 - RNA, 21 nt, Human
uguccuggucacugcucuccc

SEQ ID NO: 58488 - RNA, 22 nt, Human
uguccuguccuuccuggaaguc

SEQ ID NO: 58489 - RNA, 22 nt, Human
uguccugugccaccuuccugag

SEQ ID NO: 58490 - RNA, 22 nt, Human
uguccugugucuaggggucuuc

SEQ ID NO: 58491 - RNA, 21 nt, Human
uguccuuaaugcaauguccuu

SEQ ID NO: 58492 - RNA, 22 nt, Human
uguccuuacaaggucccuuucg

SEQ ID NO: 58493 - RNA, 22 nt, Human
uguccuugugacauucuggcuu

SEQ ID NO: 58494 - RNA, 22 nt, Human
uguccuuguuccuaauguaaaa

SEQ ID NO: 58495 - RNA, 23 nt, Human
uguccuuuuugaggccuccuccu

SEQ ID NO: 58496 - RNA, 22 nt, Human
ugucgcagcugaaaaucucaau

SEQ ID NO: 58497 - RNA, 22 nt, Human
ugucuaaaugaaaagagaugcc

SEQ ID NO: 58498 - RNA, 22 nt, Human
ugucuacagaauguuaauauuu

SEQ ID NO: 58499 - RNA, 17 nt, Human
ugucuacucugacuaaa

SEQ ID NO: 58500 - RNA, 22 nt, Human
ugucuacugagaagcuaugcaa

SEQ ID NO: 58501 - RNA, 22 nt, Human
ugucuacuugggcucuacagca

SEQ ID NO: 58502 - RNA, 22 nt, Human
uuaggaagaauauauuuagagc

SEQ ID NO: 58503 - RNA, 22 nt, Human
uuaggaagagcuuucaaucacu

SEQ ID NO: 58504 - RNA, 22 nt, Human
uuaggaagcaggccuaaaauuu

SEQ ID NO: 58505 - RNA, 22 nt, Human
uuaggaaggccuugaaugccag

SEQ ID NO: 58506 - RNA, 22 nt, Human
uuaggaauauguauuuuaaagu

SEQ ID NO: 58507 - RNA, 22 nt, Human
uuaggauaugaaacaguauaag

SEQ ID NO: 58508 - RNA, 22 nt, Human
uuaggauuugaaaaggggcaga

SEQ ID NO: 58509 - RNA, 22 nt, Human
uuaggcaaauaaaauguuucca

SEQ ID NO: 58510 - RNA, 22 nt, Human
uuaggcaauaucauuggaguug

SEQ ID NO: 58511 - RNA, 22 nt, Human
uuaggcaaugcucucaaauuug

SEQ ID NO: 58512 - RNA, 22 nt, Human
uuaggcaauuugauuuuucaag

SEQ ID NO: 58513 - RNA, 22 nt, Human
uuaggcaauuuugucauugugu

SEQ ID NO: 58514 - RNA, 22 nt, Human
uuaggcauauggcacaugauag

SEQ ID NO: 58515 - RNA, 20 nt, Human
uuaggcauuuggauuggcuu

SEQ ID NO: 58516 - RNA, 22 nt, Human
uuaggcugggcuacaacaacug

SEQ ID NO: 58517 - RNA, 22 nt, Human
uuaggcuguucuuguguuguua

SEQ ID NO: 58518 - RNA, 17 nt, Human
uuccaaggagcauuuga

SEQ ID NO: 58519 - RNA, 22 nt, Human
uuccaaggcugcuauuuguuuc

SEQ ID NO: 58520 - RNA, 20 nt, Human
uuccaaggucuaugcuucuu

SEQ ID NO: 58521 - RNA, 22 nt, Human
uuccaagucuaaguuauaaauc

SEQ ID NO: 58522 - RNA, 22 nt, Human
uuccaagugaaaguagcuuugu

SEQ ID NO: 58523 - RNA, 22 nt, Human
uuccaaguguugagauuagagg

SEQ ID NO: 58524 - RNA, 22 nt, Human
uuccaaguugagcgauuuuccu

SEQ ID NO: 58525 - RNA, 22 nt, Human
uuccaauccaaacuucaccuuu

SEQ ID NO: 58526 - RNA, 22 nt, Human
uuccaauuuguggugaguuaau

SEQ ID NO: 58527 - RNA, 22 nt, Human
uuccacaaacacauccugagca

SEQ ID NO: 58528 - RNA, 22 nt, Human
uuccacaaaucaauucugcuga

SEQ ID NO: 58529 - RNA, 22 nt, Human
uuccacaagugauaucuagcug

SEQ ID NO: 58530 - RNA, 22 nt, Human
uuccacaauguaugaauaagau

SEQ ID NO: 58531 - RNA, 22 nt, Human
uuccacagucauccugggaauu

SEQ ID NO: 58532 - RNA, 20 nt, Human
uuccacaucuuugcacaugc

SEQ ID NO: 58533 - RNA, 19 nt, Human
uuccaccaucacucuguuu

SEQ ID NO: 58534 - RNA, 22 nt, Human
uuccaccauucaugcuaauauu

SEQ ID NO: 58535 - RNA, 22 nt, Human
uuccacuccuccugguggggug

SEQ ID NO: 58536 - RNA, 22 nt, Human
uuccacucuacacacugcuggc

SEQ ID NO: 58537 - RNA, 22 nt, Human
uuccacucuccagucaauuuca

SEQ ID NO: 58538 - RNA, 22 nt, Human
uuccacucuguccccuguggga

SEQ ID NO: 58539 - RNA, 22 nt, Human
uuccacucuucucuggacuuau

SEQ ID NO: 58540 - RNA, 22 nt, Human
uuccacuuaguggaagggcaug

SEQ ID NO: 58541 - RNA, 22 nt, Human
uuccagaaaacucugccuggua

SEQ ID NO: 58542 - RNA, 22 nt, Human
uuccagaaccuuccugcuggaa

SEQ ID NO: 58543 - RNA, 22 nt, Human
uuccagaacuuuuguuaauuuc

SEQ ID NO: 58544 - RNA, 22 nt, Human
uuccagaauuuuguucugcuug

SEQ ID NO: 58545 - RNA, 22 nt, Human
uuccagagaguuauuccccugg

SEQ ID NO: 58546 - RNA, 21 nt, Human
uuccagagauuguuucaccug

SEQ ID NO: 58547 - RNA, 22 nt, Human
uuccagagcuuugcgcuuggaa

SEQ ID NO: 58548 - RNA, 22 nt, Human
uuccagaggagugauucagagg

SEQ ID NO: 58549 - RNA, 22 nt, Human
uuccagaggccugggcacacuc

SEQ ID NO: 58550 - RNA, 22 nt, Human
uuccagaguauugguagcuaua

SEQ ID NO: 58551 - RNA, 22 nt, Human
uuccagagucagccacugggag

SEQ ID NO: 58552 - RNA, 23 nt, Human
uuccagaguccacaucugccacc

SEQ ID NO: 58553 - RNA, 22 nt, Human
uuccagaguccauguuggcuca

SEQ ID NO: 58554 - RNA, 22 nt, Human
uuccagagucugguuccauggu

SEQ ID NO: 58555 - RNA, 22 nt, Human
uuccagauguuuaaguucugcu

SEQ ID NO: 58556 - RNA, 22 nt, Human
uuccagcacagaaguauacauu

SEQ ID NO: 58557 - RNA, 22 nt, Human
uuccagcagcgugggagaagua

SEQ ID NO: 58558 - RNA, 22 nt, Human
uuccagcaggguacuuguaauu

SEQ ID NO: 58559 - RNA, 17 nt, Human
uuccagcauguuacuaa

SEQ ID NO: 58560 - RNA, 22 nt, Human
uuccagccacuuuauacugcua

SEQ ID NO: 58561 - RNA, 22 nt, Human
uuccagcccgcgacuuguucag

SEQ ID NO: 58562 - RNA, 22 nt, Human
uuccaggaacagaugaagguug

SEQ ID NO: 58563 - RNA, 22 nt, Human
uguccuuuaugaaaugguguuu

SEQ ID NO: 58564 - RNA, 22 nt, Human
ugucuaaacuuguuuuaucuca

SEQ ID NO: 58565 - RNA, 22 nt, Human
ugucuaauggcaauuucaugug

SEQ ID NO: 58566 - RNA, 22 nt, Human
ugucuagaaaugcugagucuca

SEQ ID NO: 58567 - RNA, 22 nt, Human
ugucuagacaagaaguauugcc

SEQ ID NO: 58568 - RNA, 19 nt, Human
ugucuagcugcacagcuga

SEQ ID NO: 58569 - RNA, 22 nt, Human
ugucuagugguuuauaaaauca

SEQ ID NO: 58570 - RNA, 22 nt, Human
ugucuauagaaucaugcaguuu

SEQ ID NO: 58571 - RNA, 22 nt, Human
ugucuauuaacacaagaaagga

SEQ ID NO: 58572 - RNA, 22 nt, Human
ugucuauuugaauuauccuaau

SEQ ID NO: 58573 - RNA, 23 nt, Human
ugucucagacugagggguuuccc

SEQ ID NO: 58574 - RNA, 22 nt, Human
ugucucagaguguuguauuaga

SEQ ID NO: 58575 - RNA, 22 nt, Human
ugucucaguacacuccgauguu

SEQ ID NO: 58576 - RNA, 22 nt, Human
ugucuccauagaagagacugca

SEQ ID NO: 58577 - RNA, 22 nt, Human
ugucucccaggugugcccagug

SEQ ID NO: 58578 - RNA, 22 nt, Human
ugucuccuauuuccugcuaagg

SEQ ID NO: 58579 - RNA, 22 nt, Human
ugucuccucuguccugucagga

SEQ ID NO: 58580 - RNA, 22 nt, Human
ugucuccugggucccuuccacc

SEQ ID NO: 58581 - RNA, 18 nt, Human
ugucucuccuuucugugu

SEQ ID NO: 58582 - RNA, 22 nt, Human
ugucucugaagcccccuccuuu

SEQ ID NO: 58583 - RNA, 18 nt, Human
ugucucugaauuccagug

SEQ ID NO: 58584 - RNA, 22 nt, Human
ugucucugagaugacucccacc

SEQ ID NO: 58585 - RNA, 22 nt, Human
ugucucugauaaguaguucagu

SEQ ID NO: 58586 - RNA, 22 nt, Human
ugucucugcugcaccuucuggg

SEQ ID NO: 58587 - RNA, 22 nt, Human
ugucucuggcugcagccuguuc

SEQ ID NO: 58588 - RNA, 22 nt, Human
ugucucugucucccagguugug

SEQ ID NO: 58589 - RNA, 22 nt, Human
ugucucugugcauuugugcuuc

SEQ ID NO: 58590 - RNA, 22 nt, Human
ugucucuugagcugccugaugc

SEQ ID NO: 58591 - RNA, 22 nt, Human
ugucucuugaguuuguuuuaau

SEQ ID NO: 58592 - RNA, 22 nt, Human
ugucucuuggagggucuaguga

SEQ ID NO: 58593 - RNA, 22 nt, Human
ugucucuuggauugcuugcucu

SEQ ID NO: 58594 - RNA, 22 nt, Human
ugucucuuguuaaugauuacua

SEQ ID NO: 58595 - RNA, 22 nt, Human
ugucugaacaaacucugccucc

SEQ ID NO: 58596 - RNA, 22 nt, Human
ugucugaacccuggcccugccu

SEQ ID NO: 58597 - RNA, 22 nt, Human
ugucugaacugcacugaaagac

SEQ ID NO: 58598 - RNA, 22 nt, Human
ugucugaacugcauuugcuccu

SEQ ID NO: 58599 - RNA, 22 nt, Human
ugucugaagcacugggcguugc

SEQ ID NO: 58600 - RNA, 22 nt, Human
ugucugaaucgcuuccuagagg

SEQ ID NO: 58601 - RNA, 22 nt, Human
ugucugaauuccacaucguucu

SEQ ID NO: 58602 - RNA, 21 nt, Human
ugucugagugacugggucugc

SEQ ID NO: 58603 - RNA, 22 nt, Human
ugucugagugcauaugugcugg

SEQ ID NO: 58604 - RNA, 21 nt, Human
ugucugauguauuuuuugccu

SEQ ID NO: 58605 - RNA, 22 nt, Human
ugucugcccauucaugggcaca

SEQ ID NO: 58606 - RNA, 22 nt, Human
ugucugcuaaauuacuauuaca

SEQ ID NO: 58607 - RNA, 20 nt, Human
ugucugcucauaauaaaccc

SEQ ID NO: 58608 - RNA, 22 nt, Human
ugucuggaggucagguccuggg

SEQ ID NO: 58609 - RNA, 22 nt, Human
ugucuggauagagccuaggccc

SEQ ID NO: 58610 - RNA, 23 nt, Human
ugucuggauucgacugugguugg

SEQ ID NO: 58611 - RNA, 22 nt, Human
ugucugggagggacagggcuac

SEQ ID NO: 58612 - RNA, 23 nt, Human
ugucuggggcgccagaagagaga

SEQ ID NO: 58613 - RNA, 22 nt, Human
ugucuguaauagucacuaugug

SEQ ID NO: 58614 - RNA, 22 nt, Human
ugucuguacaaauuuucugugu

SEQ ID NO: 58615 - RNA, 22 nt, Human
ugucuguauuagucagcauucu

SEQ ID NO: 58616 - RNA, 22 nt, Human
ugucugucagcagugggucagg

SEQ ID NO: 58617 - RNA, 22 nt, Human
ugucugucugcaagccagaaag

SEQ ID NO: 58618 - RNA, 22 nt, Human
ugucugucuguccuucucauua

SEQ ID NO: 58619 - RNA, 22 nt, Human
ugucugugauuuaggccagggc

SEQ ID NO: 58620 - RNA, 22 nt, Human
ugucuuaaacuugugggacuuc

SEQ ID NO: 58621 - RNA, 22 nt, Human
ugucuuaagaaauugcauuugu

SEQ ID NO: 58622 - RNA, 22 nt, Human
ugucuuacaugagucaccccaa

SEQ ID NO: 58623 - RNA, 22 nt, Human
ugucuuaugcugcauagacuau

SEQ ID NO: 58624 - RNA, 22 nt, Human
ugucuuauggucuugggcuucc

SEQ ID NO: 58625 - RNA, 22 nt, Human
ugucuuauguagauacugagaa

SEQ ID NO: 58626 - RNA, 22 nt, Human
ugucuuauuccuucuguucagc

SEQ ID NO: 58627 - RNA, 22 nt, Human
uuaacugugacaguuucucaga

SEQ ID NO: 58628 - RNA, 22 nt, Human
uuaacuuuuauuucugcucgcc

SEQ ID NO: 58629 - RNA, 22 nt, Human
uuaagaagccacacaccucuuu

SEQ ID NO: 58630 - RNA, 21 nt, Human
uuaagacacacagauuaagga

SEQ ID NO: 58631 - RNA, 22 nt, Human
uuaagacauucagauauuucua

SEQ ID NO: 58632 - RNA, 22 nt, Human
uuaagacuuuucaaaggcaaac

SEQ ID NO: 58633 - RNA, 22 nt, Human
uuaagaggugaggccuuuaaga

SEQ ID NO: 58634 - RNA, 22 nt, Human
uuaagagguggucgugucugug

SEQ ID NO: 58635 - RNA, 19 nt, Human
uuaagaguaggcauugugc

SEQ ID NO: 58636 - RNA, 22 nt, Human
uuaagauagaacccaguagucu

SEQ ID NO: 58637 - RNA, 23 nt, Human
uuaagcacuguuaguagaaaagg

SEQ ID NO: 58638 - RNA, 22 nt, Human
uuaagcauaauuaaagugaaau

SEQ ID NO: 58639 - RNA, 22 nt, Human
uuaagcauggaagugaaauaau

SEQ ID NO: 58640 - RNA, 22 nt, Human
uuaaggaauuacgaaaauauuu

SEQ ID NO: 58641 - RNA, 22 nt, Human
uuaaggagcacaguguauuaau

SEQ ID NO: 58642 - RNA, 22 nt, Human
uuaaggcauagcuuguguugac

SEQ ID NO: 58643 - RNA, 22 nt, Human
uuaaggcauucuccuacuaaua

SEQ ID NO: 58644 - RNA, 22 nt, Human
uuaaggcugguccccucugcgu

SEQ ID NO: 58645 - RNA, 22 nt, Human
uuaagugccucuaaaacaagcc

SEQ ID NO: 58646 - RNA, 22 nt, Human
uuaagugcuucaagggaagcuc

SEQ ID NO: 58647 - RNA, 23 nt, Human
uuaaguggucaguuuuagacaac

SEQ ID NO: 58648 - RNA, 22 nt, Human
uuaauacagaagcaagacacug

SEQ ID NO: 58649 - RNA, 22 nt, Human
uuaauacauuucagacuguuau

SEQ ID NO: 58650 - RNA, 22 nt, Human
uuaauacuauaauuugaaguac

SEQ ID NO: 58651 - RNA, 22 nt, Human
uuaauaggcuucuaacauagcu

SEQ ID NO: 58652 - RNA, 22 nt, Human
uuaauauacaauuuuacgggcu

SEQ ID NO: 58653 - RNA, 22 nt, Human
uuaauccauggcaguuauuaaa

SEQ ID NO: 58654 - RNA, 22 nt, Human
uuaaucucuuagcaaauuaaug

SEQ ID NO: 58655 - RNA, 22 nt, Human
uuaaucuucagggacucuugcu

SEQ ID NO: 58656 - RNA, 22 nt, Human
uuaaugacaggauaggcucuga

SEQ ID NO: 58657 - RNA, 22 nt, Human
uuaaugaccuagagcaguaauu

SEQ ID NO: 58658 - RNA, 22 nt, Human
uuaaugccaacaaagugauuuu

SEQ ID NO: 58659 - RNA, 22 nt, Human
uuaaugcuugucuagaucuucu

SEQ ID NO: 58660 - RNA, 22 nt, Human
uuaauggauuggagguuucaau

SEQ ID NO: 58661 - RNA, 22 nt, Human
uuaauuaaauucaugagcauug

SEQ ID NO: 58662 - RNA, 22 nt, Human
uuaauuaagagauacugcagua

SEQ ID NO: 58663 - RNA, 22 nt, Human
uuaauuaauuaguuaagcaugu

SEQ ID NO: 58664 - RNA, 22 nt, Human
uuaauuacuggcauggugguug

SEQ ID NO: 58665 - RNA, 22 nt, Human
uuaauuguuggaaauagauuau

SEQ ID NO: 58666 - RNA, 22 nt, Human
uuaauuuaagaaacggcaggcc

SEQ ID NO: 58667 - RNA, 22 nt, Human
uuaauuuauacauaaucacagg

SEQ ID NO: 58668 - RNA, 22 nt, Human
uuacaaagcguugagacaagua

SEQ ID NO: 58669 - RNA, 22 nt, Human
uuacaacaaaggcacgugcaug

SEQ ID NO: 58670 - RNA, 23 nt, Human
uuacaacuauuugccauguuguu

SEQ ID NO: 58671 - RNA, 22 nt, Human
uuacaacugggcuugucagcuu

SEQ ID NO: 58672 - RNA, 22 nt, Human
uuacaacuuuccugugucaaau

SEQ ID NO: 58673 - RNA, 22 nt, Human
uuacaagacacagugcugaagg

SEQ ID NO: 58674 - RNA, 22 nt, Human
uuacaagacagugugguaaaua

SEQ ID NO: 58675 - RNA, 20 nt, Human
uuacaagguagaggagggaa

SEQ ID NO: 58676 - RNA, 20 nt, Human
uuacaaguuucuaauaacca

SEQ ID NO: 58677 - RNA, 22 nt, Human
uuacaauaccacaucaccucau

SEQ ID NO: 58678 - RNA, 22 nt, Human
uuacaauggguauacuuccauu

SEQ ID NO: 58679 - RNA, 19 nt, Human
uuacaauggugauuagguu

SEQ ID NO: 58680 - RNA, 22 nt, Human
ugugagcacugugaugcuguuc

SEQ ID NO: 58681 - RNA, 22 nt, Human
ugugagcagcucuguggacuca

SEQ ID NO: 58682 - RNA, 21 nt, Human
ugugagcuuugugaaagcagg

SEQ ID NO: 58683 - RNA, 22 nt, Human
ugugaggaacaggacuagagca

SEQ ID NO: 58684 - RNA, 22 nt, Human
ugugaggaacccggaauguggg

SEQ ID NO: 58685 - RNA, 22 nt, Human
ugugaggacauuggaggacuca

SEQ ID NO: 58686 - RNA, 21 nt, Human
ugugauaaacuccaaguggga

SEQ ID NO: 58687 - RNA, 19 nt, Human
ugugauaagcagaauucca

SEQ ID NO: 58688 - RNA, 19 nt, Human
ugugauaguugaaccugcc

SEQ ID NO: 58689 - RNA, 22 nt, Human
ugugaugcauaguuuuuauugc

SEQ ID NO: 58690 - RNA, 22 nt, Human
ugugaugguucacugggcauga

SEQ ID NO: 58691 - RNA, 22 nt, Human
ugugauuauauuguaguacauu

SEQ ID NO: 58692 - RNA, 22 nt, Human
ugugcaacaugagacagaacag

SEQ ID NO: 58693 - RNA, 22 nt, Human
ugugcaauagaaaguggcaugg

SEQ ID NO: 58694 - RNA, 22 nt, Human
ugugcaaucauauuuuaaaaug

SEQ ID NO: 58695 - RNA, 22 nt, Human
ugugcacaggaagcuauucucu

SEQ ID NO: 58696 - RNA, 22 nt, Human
ugugcacauaaaacaguacuag

SEQ ID NO: 58697 - RNA, 22 nt, Human
ugugcagagcggggaagagcac

SEQ ID NO: 58698 - RNA, 22 nt, Human
ugugcagaguaaggcagcuguu

SEQ ID NO: 58699 - RNA, 22 nt, Human
ugugcagauagugauuucagaa

SEQ ID NO: 58700 - RNA, 22 nt, Human
ugugcagcuaguccuggacuug

SEQ ID NO: 58701 - RNA, 22 nt, Human
ugugcagcucuagagccaagcc

SEQ ID NO: 58702 - RNA, 20 nt, Human
ugugcaggagagugaggcug

SEQ ID NO: 58703 - RNA, 22 nt, Human
ugugcagggaagggcaugcuau

SEQ ID NO: 58704 - RNA, 22 nt, Human
ugugcaguuuuaaguggucuaa

SEQ ID NO: 58705 - RNA, 17 nt, Human
ugugcauagaauaauga

SEQ ID NO: 58706 - RNA, 22 nt, Human
ugugcauagacuuucaccaccu

SEQ ID NO: 58707 - RNA, 22 nt, Human
ugugcaugacagcauacaaacg

SEQ ID NO: 58708 - RNA, 22 nt, Human
ugugcaugugucuuuauaguag

SEQ ID NO: 58709 - RNA, 16 nt, Human
ugugcauguucugugu

SEQ ID NO: 58710 - RNA, 22 nt, Human
ugugccaaucugcugacugucu

SEQ ID NO: 58711 - RNA, 22 nt, Human
ugugccagccucuggcuguguc

SEQ ID NO: 58712 - RNA, 22 nt, Human
ugugccaugaggcucugauaug

SEQ ID NO: 58713 - RNA, 23 nt, Human
ugugccauugaggcugaggcuca

SEQ ID NO: 58714 - RNA, 22 nt, Human
ugugcccaacgugcagguuugu

SEQ ID NO: 58715 - RNA, 22 nt, Human
ugugcccauuacacagaggcau

SEQ ID NO: 58716 - RNA, 22 nt, Human
ugugcccucagaagaguacauc

SEQ ID NO: 58717 - RNA, 20 nt, Human
ugugcccugcagacuucuuu

SEQ ID NO: 58718 - RNA, 22 nt, Human
ugugcccugccuacaucaccuu

SEQ ID NO: 58719 - RNA, 22 nt, Human
ugugcccuguuaaaugcacagu

SEQ ID NO: 58720 - RNA, 19 nt, Human
ugugccuccucgucuccua

SEQ ID NO: 58721 - RNA, 19 nt, Human
ugugccucuauagcaugug

SEQ ID NO: 58722 - RNA, 22 nt, Human
ugugccugacuaggugaaucaa

SEQ ID NO: 58723 - RNA, 22 nt, Human
ugugccugaguuggcugaguac

SEQ ID NO: 58724 - RNA, 22 nt, Human
ugugccuggagucccugaggag

SEQ ID NO: 58725 - RNA, 22 nt, Human
ugugccuggucccugagucgag

SEQ ID NO: 58726 - RNA, 22 nt, Human
ugugccugucacccucagagag

SEQ ID NO: 58727 - RNA, 22 nt, Human
ugugccuuuaaggggagcugag

SEQ ID NO: 58728 - RNA, 17 nt, Human
ugugcgcuugugugagg

SEQ ID NO: 58729 - RNA, 22 nt, Human
ugugcuauuacacauuuauuua

SEQ ID NO: 58730 - RNA, 22 nt, Human
ugugcuauuugacuguuugcua

SEQ ID NO: 58731 - RNA, 22 nt, Human
ugugcucagccaggggcaggcc

SEQ ID NO: 58732 - RNA, 22 nt, Human
ugugcucugaagagugcauguc

SEQ ID NO: 58733 - RNA, 22 nt, Human
ugugcucuucuguuacuuguag

SEQ ID NO: 58734 - RNA, 22 nt, Human
ugugcugggaaauggcaggaua

SEQ ID NO: 58735 - RNA, 22 nt, Human
ugugcuuacuuugaauuauaua

SEQ ID NO: 58736 - RNA, 22 nt, Human
uucugagcacguucauuuaaau

SEQ ID NO: 58737 - RNA, 21 nt, Human
uucugagcacucaucacuguc

SEQ ID NO: 58738 - RNA, 17 nt, Human
uucugagccacuuccuu

SEQ ID NO: 58739 - RNA, 22 nt, Human
uucugagccucauucaugaggc

SEQ ID NO: 58740 - RNA, 22 nt, Human
uucugauacagucccaacacaa

SEQ ID NO: 58741 - RNA, 22 nt, Human
uucugauaccuugcaggauccu

SEQ ID NO: 58742 - RNA, 22 nt, Human
uucugauauaacacucuagcua

SEQ ID NO: 58743 - RNA, 22 nt, Human
uucugaugaggaggucucuaag

SEQ ID NO: 58744 - RNA, 22 nt, Human
uucugaugcaugggucucuguu

SEQ ID NO: 58745 - RNA, 22 nt, Human
uucugaugguggaaugcuucag

SEQ ID NO: 58746 - RNA, 22 nt, Human
uucugauucaugauccaguucu

SEQ ID NO: 58747 - RNA, 22 nt, Human
uucugcaaucgcucugaccauu

SEQ ID NO: 58748 - RNA, 22 nt, Human
uucugcagcaugaggcuggagc

SEQ ID NO: 58749 - RNA, 22 nt, Human
uucugcaguguuaacaauguca

SEQ ID NO: 58750 - RNA, 22 nt, Human
uucugcaugaaaagaacugaac

SEQ ID NO: 58751 - RNA, 22 nt, Human
uucugcaugauauuaaauguaa

SEQ ID NO: 58752 - RNA, 22 nt, Human
uucugcauuauacacaaccuaa

SEQ ID NO: 58753 - RNA, 22 nt, Human
uucugcauucaaauuaugugag

SEQ ID NO: 58754 - RNA, 22 nt, Human
uucugcauugacuuuuauuucc

SEQ ID NO: 58755 - RNA, 22 nt, Human
uucugcauuucuaauaaguucc

SEQ ID NO: 58756 - RNA, 22 nt, Human
uucugccugauguagucauacc

SEQ ID NO: 58757 - RNA, 22 nt, Human
uucugccuggcaggaggacugu

SEQ ID NO: 58758 - RNA, 21 nt, Human
uucugcuaagaaaacauuauu

SEQ ID NO: 58759 - RNA, 22 nt, Human
uucugcucugacuugcaaggaa

SEQ ID NO: 58760 - RNA, 22 nt, Human
uucugcugaagccagggagcaa

SEQ ID NO: 58761 - RNA, 22 nt, Human
uucugcugguguuuugugaggc

SEQ ID NO: 58762 - RNA, 19 nt, Human
uucugcuguuccuaggcug

SEQ ID NO: 58763 - RNA, 22 nt, Human
uucugcuguuuguaguaaugua

SEQ ID NO: 58764 - RNA, 22 nt, Human
uucugcuugguucuugguauga

SEQ ID NO: 58765 - RNA, 22 nt, Human
uucugcuuugguuccauggaug

SEQ ID NO: 58766 - RNA, 22 nt, Human
uucugcuuuuagcuaaacuaua

SEQ ID NO: 58767 - RNA, 22 nt, Human
uucuggaaagcauuugaggccc

SEQ ID NO: 58768 - RNA, 22 nt, Human
uucuggaaauggguauagagca

SEQ ID NO: 58769 - RNA, 22 nt, Human
uucuggaaccagccugccuggg

SEQ ID NO: 58770 - RNA, 22 nt, Human
uucuggaagcugcagguggccg

SEQ ID NO: 58771 - RNA, 22 nt, Human
uucuggaagcugggcagcaccc

SEQ ID NO: 58772 - RNA, 22 nt, Human
uucuggaaguguuagaaucugg

SEQ ID NO: 58773 - RNA, 22 nt, Human
uucuggagaaucaccaccaggc

SEQ ID NO: 58774 - RNA, 22 nt, Human
uucuggagaugacuuuuagaaa

SEQ ID NO: 58775 - RNA, 22 nt, Human
uucuggagauugagaaggcauu

SEQ ID NO: 58776 - RNA, 22 nt, Human
uucuggagccccaagaucugua

SEQ ID NO: 58777 - RNA, 22 nt, Human
uucuggagcuaaaguccacucu

SEQ ID NO: 58778 - RNA, 22 nt, Human
uucuggaggccccuuccuucuc

SEQ ID NO: 58779 - RNA, 19 nt, Human
uucuggagguuacccugag

SEQ ID NO: 58780 - RNA, 22 nt, Human
uucuggaguucaggucccuaaa

SEQ ID NO: 58781 - RNA, 22 nt, Human
uucuggaucagcaucaugagau

SEQ ID NO: 58782 - RNA, 22 nt, Human
uucuggcaaggcaagccuggcu

SEQ ID NO: 58783 - RNA, 22 nt, Human
uucuggcaugagagaugggggu

SEQ ID NO: 58784 - RNA, 22 nt, Human
uucuggcuacccuccuaauguu

SEQ ID NO: 58785 - RNA, 18 nt, Human
uucuggcucacucaugcu

SEQ ID NO: 58786 - RNA, 22 nt, Human
uucuggcuguaugauauuuaau

SEQ ID NO: 58787 - RNA, 22 nt, Human
uucuggcuugaccccuacuucc

SEQ ID NO: 58788 - RNA, 22 nt, Human
uucugggacaucuggacaguuu

SEQ ID NO: 58789 - RNA, 22 nt, Human
uucugggagagaaagggccuug

SEQ ID NO: 58790 - RNA, 22 nt, Human
uucugggagauucauaugaaaa

SEQ ID NO: 58791 - RNA, 19 nt, Human
uucugggaggggcugacug

SEQ ID NO: 58792 - RNA, 22 nt, Human
uucugggaguuugggucggcug

SEQ ID NO: 58793 - RNA, 22 nt, Human
uucugggcauguuacauucugu

SEQ ID NO: 58794 - RNA, 22 nt, Human
uucugggcccaacccuagagug

SEQ ID NO: 58795 - RNA, 22 nt, Human
uucugggcucccacauauuuca

SEQ ID NO: 58796 - RNA, 22 nt, Human
uucugggcuuggcuguuuccau

SEQ ID NO: 58797 - RNA, 22 nt, Human
uucuggggacauaacaguaagc

SEQ ID NO: 58798 - RNA, 22 nt, Human
uucuggggccaauugccacugc

SEQ ID NO: 58799 - RNA, 19 nt, Human
uucuggggccuggccuugg

SEQ ID NO: 58800 - RNA, 22 nt, Human
uucugggggaauacagcuauga

SEQ ID NO: 58801 - RNA, 22 nt, Human
uuagaaacuuuggaggauagau

SEQ ID NO: 58802 - RNA, 22 nt, Human
uuagaaagaauagccuggcugc

SEQ ID NO: 58803 - RNA, 22 nt, Human
uuagaaaucugcugccaugcaa

SEQ ID NO: 58804 - RNA, 22 nt, Human
uuagaacaccauucuauauuac

SEQ ID NO: 58805 - RNA, 22 nt, Human
uuagaacaguagaagaaagggu

SEQ ID NO: 58806 - RNA, 21 nt, Human
uuagaacaucaacagcaccua

SEQ ID NO: 58807 - RNA, 19 nt, Human
uuagaacauccucuaggga

SEQ ID NO: 58808 - RNA, 22 nt, Human
uuagaacauuccaucacugggu

SEQ ID NO: 58809 - RNA, 22 nt, Human
uuagaacauuuuuagaccaaua

SEQ ID NO: 58810 - RNA, 22 nt, Human
uuagaaccaccuggagagcuuu

SEQ ID NO: 58811 - RNA, 22 nt, Human
uuagaaccacugaagacucaca

SEQ ID NO: 58812 - RNA, 22 nt, Human
uuagaagcacuaauuacucaca

SEQ ID NO: 58813 - RNA, 22 nt, Human
uuagaaguacauuuagaacaua

SEQ ID NO: 58814 - RNA, 22 nt, Human
uuagaaguucaggucuguaauc

SEQ ID NO: 58815 - RNA, 22 nt, Human
uuagaaucuuuagagucucacu

SEQ ID NO: 58816 - RNA, 22 nt, Human
uuagacagagcuccuugagggc

SEQ ID NO: 58817 - RNA, 22 nt, Human
uuagacaucaagaagccaaugu

SEQ ID NO: 58818 - RNA, 22 nt, Human
uuagacauguuugcuaaaauga

SEQ ID NO: 58819 - RNA, 22 nt, Human
uuagagaaaggguuugauuccg

SEQ ID NO: 58820 - RNA, 22 nt, Human
uuagagaaguuuuacuuaagaa

SEQ ID NO: 58821 - RNA, 22 nt, Human
uuagagacaggcuucccaagga

SEQ ID NO: 58822 - RNA, 22 nt, Human
uuagagagaaccaucaggaucu

SEQ ID NO: 58823 - RNA, 22 nt, Human
uuagagccccagaaaacagugg

SEQ ID NO: 58824 - RNA, 22 nt, Human
uuagagcuagaugaggucauga

SEQ ID NO: 58825 - RNA, 22 nt, Human
uuagagcugggauggauuuucc

SEQ ID NO: 58826 - RNA, 22 nt, Human
uuagaggacaagaggccuggcu

SEQ ID NO: 58827 - RNA, 22 nt, Human
uuagagguucuaugugucugga

SEQ ID NO: 58828 - RNA, 22 nt, Human
uuagagucaagcugcauguucu

SEQ ID NO: 58829 - RNA, 22 nt, Human
uuagaguuuuuguaaguacaau

SEQ ID NO: 58830 - RNA, 22 nt, Human
uuagauaaaaguguucaauaaa

SEQ ID NO: 58831 - RNA, 22 nt, Human
uuagauaauguagagauaugag

SEQ ID NO: 58832 - RNA, 22 nt, Human
uuagauaccuuuguguuguaga

SEQ ID NO: 58833 - RNA, 22 nt, Human
uuagauacgcaggcaguuuuaa

SEQ ID NO: 58834 - RNA, 22 nt, Human
uuagauauguuuuugcuaaugc

SEQ ID NO: 58835 - RNA, 22 nt, Human
uuagaucauuuuagcuaaaugg

SEQ ID NO: 58836 - RNA, 22 nt, Human
uuagaucuuaggcaaauguguu

SEQ ID NO: 58837 - RNA, 22 nt, Human
uuagcaaacccuugcuggugag

SEQ ID NO: 58838 - RNA, 21 nt, Human
uuagcaagucuacccauuucu

SEQ ID NO: 58839 - RNA, 22 nt, Human
uuagcaauguaugauuaaaaua

SEQ ID NO: 58840 - RNA, 22 nt, Human
uuagcacaggcaacuccacaua

SEQ ID NO: 58841 - RNA, 22 nt, Human
uuagcacuggauuaaucaaagu

SEQ ID NO: 58842 - RNA, 22 nt, Human
uuagcacugucugguuaucuug

SEQ ID NO: 58843 - RNA, 22 nt, Human
uuagcagcaauggcaucaacua

SEQ ID NO: 58844 - RNA, 22 nt, Human
uuagcagcggucaguuuugaag

SEQ ID NO: 58845 - RNA, 22 nt, Human
uucuuacaucuauaaaguuggg

SEQ ID NO: 58846 - RNA, 22 nt, Human
uucuuagaugauuaaugauggg

SEQ ID NO: 58847 - RNA, 20 nt, Human
uucuuaguagagcauguauu

SEQ ID NO: 58848 - RNA, 19 nt, Human
uucuuagucucaugcauga

SEQ ID NO: 58849 - RNA, 22 nt, Human
uucuuagugguagucaucuuug

SEQ ID NO: 58850 - RNA, 22 nt, Human
uucuuauaaguuaauauuucca

SEQ ID NO: 58851 - RNA, 22 nt, Human
uucuuauagaagcaaccauugu

SEQ ID NO: 58852 - RNA, 22 nt, Human
uucuuauuaugugcucugugaa

SEQ ID NO: 58853 - RNA, 22 nt, Human
uucuuauugggagaccuuuucu

SEQ ID NO: 58854 - RNA, 22 nt, Human
uucuucaaaacaacacuggccu

SEQ ID NO: 58855 - RNA, 22 nt, Human
uucuucaaaauccagcaugauu

SEQ ID NO: 58856 - RNA, 22 nt, Human
uucuucaaacaaaaguggcaug

SEQ ID NO: 58857 - RNA, 22 nt, Human
uucuucaaaguaauagagacua

SEQ ID NO: 58858 - RNA, 22 nt, Human
uucuucaacaaggacacuguua

SEQ ID NO: 58859 - RNA, 22 nt, Human
uucuucagacuacugaugauug

SEQ ID NO: 58860 - RNA, 22 nt, Human
uucuucagacucccucuuuaag

SEQ ID NO: 58861 - RNA, 23 nt, Human
uucuucagccuuauagcccuggg

SEQ ID NO: 58862 - RNA, 22 nt, Human
uucuucagcuucuaccugcguc

SEQ ID NO: 58863 - RNA, 22 nt, Human
uucuucaggauacgucauccag

SEQ ID NO: 58864 - RNA, 22 nt, Human
uucuucagggaagcuuguuaau

SEQ ID NO: 58865 - RNA, 22 nt, Human
uucuucagucuaggccuuucuu

SEQ ID NO: 58866 - RNA, 22 nt, Human
uucuucagugccccucuaguag

SEQ ID NO: 58867 - RNA, 22 nt, Human
uucuucaguguagcaacuguau

SEQ ID NO: 58868 - RNA, 22 nt, Human
uucuucaucuguaagauaagca

SEQ ID NO: 58869 - RNA, 23 nt, Human
uucuucauuuucagaguugagca

SEQ ID NO: 58870 - RNA, 22 nt, Human
uucuucccuucauuccaccacc

SEQ ID NO: 58871 - RNA, 22 nt, Human
uucuuccucuguaaaaggugac

SEQ ID NO: 58872 - RNA, 22 nt, Human
uucuucuacagugauuaauagu

SEQ ID NO: 58873 - RNA, 22 nt, Human
uucuucugccucccaccugaua

SEQ ID NO: 58874 - RNA, 22 nt, Human
uucuucugugaggugugugccu

SEQ ID NO: 58875 - RNA, 22 nt, Human
uucuucuuuaucucaguauccu

SEQ ID NO: 58876 - RNA, 22 nt, Human
uucuucuuuccaauuacauggu

SEQ ID NO: 58877 - RNA, 22 nt, Human
uucuucuuuccuauaauuaauu

SEQ ID NO: 58878 - RNA, 22 nt, Human
uucuugaaucacuuuagagaua

SEQ ID NO: 58879 - RNA, 20 nt, Human
uucuugagccaaaaggcaua

SEQ ID NO: 58880 - RNA, 22 nt, Human
uucuugaguaucugcacagugc

SEQ ID NO: 58881 - RNA, 22 nt, Human
uucuugauguaccaacuuggga

SEQ ID NO: 58882 - RNA, 22 nt, Human
uucuugauuucaugcaguuaag

SEQ ID NO: 58883 - RNA, 22 nt, Human
uucuuggagauaaauucuuaca

SEQ ID NO: 58884 - RNA, 22 nt, Human
uucuuggaugcccucaugccuu

SEQ ID NO: 58885 - RNA, 22 nt, Human
uucuuggcaucaugaaaaauua

SEQ ID NO: 58886 - RNA, 22 nt, Human
uucuuggcauuuucccauuugg

SEQ ID NO: 58887 - RNA, 21 nt, Human
uucuugguuacgcuguagugc

SEQ ID NO: 58888 - RNA, 22 nt, Human
uucuuguauguaugcaaaauca

SEQ ID NO: 58889 - RNA, 22 nt, Human
uucuuuaaaauagugagaaaga

SEQ ID NO: 58890 - RNA, 18 nt, Human
uucuuuaauucaguuuga

SEQ ID NO: 58891 - RNA, 22 nt, Human
uucuuuaccagugaaauguuau

SEQ ID NO: 58892 - RNA, 22 nt, Human
uucuuuauagcuauuggaugag

SEQ ID NO: 58893 - RNA, 22 nt, Human
uucuuuauaucugcuagugggu

SEQ ID NO: 58894 - RNA, 23 nt, Human
uucuuucaagaaguucacagugc

SEQ ID NO: 58895 - RNA, 22 nt, Human
uucuuucaauagcuggcauaug

SEQ ID NO: 58896 - RNA, 22 nt, Human
uucuuucacucaagaaggaucu

SEQ ID NO: 58897 - RNA, 22 nt, Human
uucuuuccacagaggggaugau

SEQ ID NO: 58898 - RNA, 22 nt, Human
uucuuucucagugggcagauac

SEQ ID NO: 58899 - RNA, 22 nt, Human
uucuuucucuacuagcagagcu

SEQ ID NO: 58900 - RNA, 22 nt, Human
uucuuucucuccacaaggcuug

SEQ ID NO: 58901 - RNA, 21 nt, Human
uucuuucugaaucugaaguau

SEQ ID NO: 58902 - RNA, 22 nt, Human
uucuuucuuagcaaucuauggu

SEQ ID NO: 58903 - RNA, 22 nt, Human
uucuuucuucucaggcugggua

SEQ ID NO: 58904 - RNA, 22 nt, Human
uucuuucuuuguaguccugaac

SEQ ID NO: 58905 - RNA, 22 nt, Human
uucuuugcccauguuuccuaag

SEQ ID NO: 58906 - RNA, 22 nt, Human
uucuuugcccuuaaugaaauaa

SEQ ID NO: 58907 - RNA, 22 nt, Human
uucuuuggcuuacgucuggccu

SEQ ID NO: 58908 - RNA, 23 nt, Human
uucuuuguggauaaucuccagug

SEQ ID NO: 58909 - RNA, 22 nt, Human
uucuuuguggcagugagcuggg

SEQ ID NO: 58910 - RNA, 22 nt, Human
uucuuuuaauuucugucugcag

SEQ ID NO: 58911 - RNA, 22 nt, Human
uucuuuucccaauauuuugcug

SEQ ID NO: 58912 - RNA, 22 nt, Human
uucuuuucugcagcugguauuu

SEQ ID NO: 58913 - RNA, 22 nt, Human
uucuuuucuuggcaggaguaga

SEQ ID NO: 58914 - RNA, 22 nt, Human
uucuuuuggacucaaagagaac

SEQ ID NO: 58915 - RNA, 22 nt, Human
uucuuuuuggauagcugaugaa

SEQ ID NO: 58916 - RNA, 22 nt, Human
uugaaaacagcguagauucaca

SEQ ID NO: 58917 - RNA, 22 nt, Human
uugaaaacuuucuagaccaaga

SEQ ID NO: 58918 - RNA, 22 nt, Human
uuaguugaucauucaacauggg

SEQ ID NO: 58919 - RNA, 22 nt, Human
uuaguugaugcuaagggauccc

SEQ ID NO: 58920 - RNA, 22 nt, Human
uuaguugcucacuacaagguua

SEQ ID NO: 58921 - RNA, 22 nt, Human
uuaguuuucucaucuaucucac

SEQ ID NO: 58922 - RNA, 22 nt, Human
uuauaaagauccuuccagaguu

SEQ ID NO: 58923 - RNA, 23 nt, Human
uuauaaauauuuucagguguguu

SEQ ID NO: 58924 - RNA, 22 nt, Human
uuauaacaacaguuuacuuuaa

SEQ ID NO: 58925 - RNA, 22 nt, Human
uuauaacaucaaucagaguuaa

SEQ ID NO: 58926 - RNA, 23 nt, Human
uuauaagaagcaucacaggaaga

SEQ ID NO: 58927 - RNA, 22 nt, Human
uuauaauucuggcauaggcugu

SEQ ID NO: 58928 - RNA, 22 nt, Human
uuauaauugcuuauuagaccca

SEQ ID NO: 58929 - RNA, 22 nt, Human
uuauacacaauucuuuuacuac

SEQ ID NO: 58930 - RNA, 22 nt, Human
uuauacacguuuauggagcuac

SEQ ID NO: 58931 - RNA, 22 nt, Human
uuauacaggagauuccuuacuu

SEQ ID NO: 58932 - RNA, 22 nt, Human
uuauagaucuaaaugugaaggg

SEQ ID NO: 58933 - RNA, 22 nt, Human
uuauagcagcaugauuuauaau

SEQ ID NO: 58934 - RNA, 22 nt, Human
uuauagcagcaugauuuauagu

SEQ ID NO: 58935 - RNA, 22 nt, Human
uuauaggaaucugcauguguga

SEQ ID NO: 58936 - RNA, 21 nt, Human
uuauaggcugggguuugcuuu

SEQ ID NO: 58937 - RNA, 22 nt, Human
uuauagugggcccaacauggcg

SEQ ID NO: 58938 - RNA, 22 nt, Human
uuauaguuaguaggucauuaaa

SEQ ID NO: 58939 - RNA, 22 nt, Human
uuauauaacucaggugggcuca

SEQ ID NO: 58940 - RNA, 22 nt, Human
uuauauacugugguaguacugu

SEQ ID NO: 58941 - RNA, 22 nt, Human
uuauauauauguagaggucacg

SEQ ID NO: 58942 - RNA, 22 nt, Human
uuauauccaaaggcaaggagga

SEQ ID NO: 58943 - RNA, 22 nt, Human
uuauaugauugagcaucuuggu

SEQ ID NO: 58944 - RNA, 22 nt, Human
uuauauguaugcuuauaaacca

SEQ ID NO: 58945 - RNA, 22 nt, Human
uuauauuaguuagacuugcugu

SEQ ID NO: 58946 - RNA, 22 nt, Human
uuaucaguuguguguauacacg

SEQ ID NO: 58947 - RNA, 22 nt, Human
uuaucauaaguaauugaaauaa

SEQ ID NO: 58948 - RNA, 22 nt, Human
uuaucaucuccugcugugguua

SEQ ID NO: 58949 - RNA, 22 nt, Human
uuaucaugggaccugaauuuua

SEQ ID NO: 58950 - RNA, 22 nt, Human
uuauccugcauccuggaacuca

SEQ ID NO: 58951 - RNA, 17 nt, Human
uuaucuacugcuacugu

SEQ ID NO: 58952 - RNA, 22 nt, Human
uuaucuagauguguuaucagac

SEQ ID NO: 58953 - RNA, 22 nt, Human
uuaucugaaaaccucaaaauau

SEQ ID NO: 58954 - RNA, 22 nt, Human
uucauuuggccucugcuuaaaa

SEQ ID NO: 58955 - RNA, 22 nt, Human
uucauuugggaugagucagaag

SEQ ID NO: 58956 - RNA, 19 nt, Human
uucauuuguaucugcucac

SEQ ID NO: 58957 - RNA, 22 nt, Human
uucauuuguccaaauacuaugu

SEQ ID NO: 58958 - RNA, 22 nt, Human
uucauuuguggugaaugaagug

SEQ ID NO: 58959 - RNA, 22 nt, Human
uucauuugugguuauuuacaau

SEQ ID NO: 58960 - RNA, 22 nt, Human
uucauuugugugccugaugcaa

SEQ ID NO: 58961 - RNA, 21 nt, Human
uucauuuguuauagacaaagu

SEQ ID NO: 58962 - RNA, 20 nt, Human
uucauuuguugagcaccuuc

SEQ ID NO: 58963 - RNA, 22 nt, Human
uucauuuuauaaacccugcuga

SEQ ID NO: 58964 - RNA, 22 nt, Human
uucauuuucuuucacgcugcug

SEQ ID NO: 58965 - RNA, 22 nt, Human
uuccaaaaugccuugauaugau

SEQ ID NO: 58966 - RNA, 22 nt, Human
uuccaaacucauaguauggugu

SEQ ID NO: 58967 - RNA, 22 nt, Human
uuccaaagaaguucacauuuac

SEQ ID NO: 58968 - RNA, 22 nt, Human
uuccaaaggaauggggagcuau

SEQ ID NO: 58969 - RNA, 22 nt, Human
uuccaaagucauguugcugaua

SEQ ID NO: 58970 - RNA, 22 nt, Human
uuccaaauuccaauccccugaa

SEQ ID NO: 58971 - RNA, 22 nt, Human
uuccaagaagucaacagguagu

SEQ ID NO: 58972 - RNA, 22 nt, Human
uuccaagacaccuuuagucacu

SEQ ID NO: 58973 - RNA, 22 nt, Human
uuccaagagccuuucuucuaga

SEQ ID NO: 58974 - RNA, 22 nt, Human
uuccaagagcuuuaauuguuga

SEQ ID NO: 58975 - RNA, 22 nt, Human
uuccaaggcccagcagagagga

SEQ ID NO: 58976 - RNA, 22 nt, Human
uuccaaggcuagguuguaaagg

SEQ ID NO: 58977 - RNA, 22 nt, Human
uuccaagucacccuuaggguca

SEQ ID NO: 58978 - RNA, 22 nt, Human
uuccaaguccagccaggccaaa

SEQ ID NO: 58979 - RNA, 22 nt, Human
uuccaagugcccauauuucauc

SEQ ID NO: 58980 - RNA, 22 nt, Human
uuccaagugcugaggacaguag

SEQ ID NO: 58981 - RNA, 22 nt, Human
uuccaaguuaggcgagcuggug

SEQ ID NO: 58982 - RNA, 22 nt, Human
uuccaaucaggauaauaauuag

SEQ ID NO: 58983 - RNA, 22 nt, Human
uuccaaugacuaguggcauccu

SEQ ID NO: 58984 - RNA, 22 nt, Human
uuccacaagauguuucuuagaa

SEQ ID NO: 58985 - RNA, 17 nt, Human
uuccacaauaguuuguc

SEQ ID NO: 58986 - RNA, 23 nt, Human
uuccacaaugaaaauaaagcagg

SEQ ID NO: 58987 - RNA, 22 nt, Human
uuccacagauguaugaaguggu

SEQ ID NO: 58988 - RNA, 22 nt, Human
uuccacagccaucacuguugcu

SEQ ID NO: 58989 - RNA, 21 nt, Human
uuccacaguccugaggauuca

SEQ ID NO: 58990 - RNA, 21 nt, Human
uuccacagugagaacugcaag

SEQ ID NO: 58991 - RNA, 22 nt, Human
uuccacaguggcuguaguucug

SEQ ID NO: 58992 - RNA, 22 nt, Human
uuccaccaauucuccuccaagg

SEQ ID NO: 58993 - RNA, 22 nt, Human
uuccaccaggagauauuucaaa

SEQ ID NO: 58994 - RNA, 22 nt, Human
uuccacuggcuuucagugaucu

SEQ ID NO: 58995 - RNA, 22 nt, Human
uuccagaaaaaaauguauaucu

SEQ ID NO: 58996 - RNA, 22 nt, Human
uuccagaaaacgcuuuauuuag

SEQ ID NO: 58997 - RNA, 22 nt, Human
uuccagaaaguucuggaacugg

SEQ ID NO: 58998 - RNA, 22 nt, Human
uuccagaaaucuuucagcucaa

SEQ ID NO: 58999 - RNA, 22 nt, Human
uuccagaagauggcagcaaagg

SEQ ID NO: 59000 - RNA, 22 nt, Human
uuccagaaggaagccggggagc

SEQ ID NO: 59001 - RNA, 22 nt, Human
uuccagaauagauggagcucua

SEQ ID NO: 59002 - RNA, 20 nt, Human
uuccagagaucugcauuuua

SEQ ID NO: 59003 - RNA, 22 nt, Human
uuccagagcaguuuucagauca

SEQ ID NO: 59004 - RNA, 23 nt, Human
uuccagagucuucgacgguaggc

SEQ ID NO: 59005 - RNA, 22 nt, Human
uuccagccagauuugcuggguu

SEQ ID NO: 59006 - RNA, 22 nt, Human
uuccagcuaacucacaucccuu

SEQ ID NO: 59007 - RNA, 22 nt, Human
uuccagcucuugaaggugggau

SEQ ID NO: 59008 - RNA, 22 nt, Human
uuccaggaagauucaacaaaag

SEQ ID NO: 59009 - RNA, 22 nt, Human
uuccaggaccaggaagagggga

SEQ ID NO: 59010 - RNA, 22 nt, Human
uuccaggacuggguguuugaag

SEQ ID NO: 59011 - RNA, 22 nt, Human
uuccaggacuucauggcucuga

SEQ ID NO: 59012 - RNA, 22 nt, Human
uuccaggagccacacaggggcg

SEQ ID NO: 59013 - RNA, 22 nt, Human
uuccaggaggcauucuuaguuu

SEQ ID NO: 59014 - RNA, 22 nt, Human
uuccaggauggagacacuagua

SEQ ID NO: 59015 - RNA, 22 nt, Human
uuccaggcucccuuggaggugu

SEQ ID NO: 59016 - RNA, 22 nt, Human
uuccaggcugaugggccacagg

SEQ ID NO: 59017 - RNA, 22 nt, Human
uuccaguuaaggaagcuauucu

SEQ ID NO: 59018 - RNA, 22 nt, Human
uuccaguuggcacugcaauuua

SEQ ID NO: 59019 - RNA, 22 nt, Human
uuccaguugucauaaagcuagg

SEQ ID NO: 59020 - RNA, 17 nt, Human
uuccaguuuaguauugu

SEQ ID NO: 59021 - RNA, 22 nt, Human
uuccauaauaggcuuaagugaa

SEQ ID NO: 59022 - RNA, 22 nt, Human
uuccauaaugagauucccagcc

SEQ ID NO: 59023 - RNA, 22 nt, Human
uuccauaauuaaguggagagaa

SEQ ID NO: 59024 - RNA, 22 nt, Human
uuccauauuagacuaugugggg

SEQ ID NO: 59025 - RNA, 22 nt, Human
uuccauauucccaauuuugcca

SEQ ID NO: 59026 - RNA, 22 nt, Human
uuccaugacugaagcaggggcg

SEQ ID NO: 59027 - RNA, 22 nt, Human
uuccaugagcucugaguucaca

SEQ ID NO: 59028 - RNA, 18 nt, Human
uuccaugauuccuuucac

SEQ ID NO: 59029 - RNA, 22 nt, Human
uuccaugggucugggggcucca

SEQ ID NO: 59030 - RNA, 22 nt, Human
uuccauuguuucugucuucacu

SEQ ID NO: 59031 - RNA, 22 nt, Human
uuccauuuggcacuucacugag

SEQ ID NO: 59032 - RNA, 22 nt, Human
uucccacaaucugcguguguau

SEQ ID NO: 59033 - RNA, 22 nt, Human
uucccacacaauuaagucauuu

SEQ ID NO: 59034 - RNA, 22 nt, Human
uucccacagugacuccagagaa

SEQ ID NO: 59035 - RNA, 22 nt, Human
uucccacaguguugaauccucu

SEQ ID NO: 59036 - RNA, 22 nt, Human
uucccagauuggagggcagggg

SEQ ID NO: 59037 - RNA, 21 nt, Human
uucccagcaccuagcacaggu

SEQ ID NO: 59038 - RNA, 19 nt, Human
uucccaggaaaggggugca

SEQ ID NO: 59039 - RNA, 22 nt, Human
uucccagguaauucugaggcag

SEQ ID NO: 59040 - RNA, 22 nt, Human
uucccagugauugaacaucccu

SEQ ID NO: 59041 - RNA, 22 nt, Human
uuccccagggaagcuccugcgc

SEQ ID NO: 59042 - RNA, 19 nt, Human
uuccccuccccagggauag

SEQ ID NO: 59043 - RNA, 22 nt, Human
uuccccuuauaagucuggcuuc

SEQ ID NO: 59044 - RNA, 22 nt, Human
uucccucucacuuaaagcuugg

SEQ ID NO: 59045 - RNA, 22 nt, Human
uucccucucuagcuuuccccaa

SEQ ID NO: 59046 - RNA, 22 nt, Human
uucccugagucucccugagucu

SEQ ID NO: 59047 - RNA, 22 nt, Human
uucccugcaaccuuucccuggg

SEQ ID NO: 59048 - RNA, 22 nt, Human
uucccuggcucuucuacaucgu

SEQ ID NO: 59049 - RNA, 22 nt, Human
uucccuggugggugagaaccug

SEQ ID NO: 59050 - RNA, 22 nt, Human
uucccuucuaguuuugagagac

SEQ ID NO: 59051 - RNA, 22 nt, Human
uuccgagggcucggcggccgcc

SEQ ID NO: 59052 - RNA, 22 nt, Human
uuccgcuguuuaguugaaguuu

SEQ ID NO: 59053 - RNA, 22 nt, Human
uuccuacaauuagagccucuuu

SEQ ID NO: 59054 - RNA, 22 nt, Human
uuccuacagcccugaaucucua

SEQ ID NO: 59055 - RNA, 22 nt, Human
uuccuacauuuguacaauaaga

SEQ ID NO: 59056 - RNA, 22 nt, Human
uuccuagcuauaaagcucuucc

SEQ ID NO: 59057 - RNA, 22 nt, Human
uuccuauccuuuuauguuuaug

SEQ ID NO: 59058 - RNA, 22 nt, Human
uuccucaacaacuucccuacag

SEQ ID NO: 59059 - RNA, 22 nt, Human
uuccucagaaaauacuguccaa

SEQ ID NO: 59060 - RNA, 22 nt, Human
uuccucagagagacagaaacua

SEQ ID NO: 59061 - RNA, 22 nt, Human
uuccucagagggcgcuggggaa

SEQ ID NO: 59062 - RNA, 22 nt, Human
uuccucagcacaaagccaagau

SEQ ID NO: 59063 - RNA, 22 nt, Human
uucuaggggagaggaagaagug

SEQ ID NO: 59064 - RNA, 22 nt, Human
uucuaguuaauguagcaucuug

SEQ ID NO: 59065 - RNA, 22 nt, Human
uucuaguucugaaagccugaca

SEQ ID NO: 59066 - RNA, 22 nt, Human
uucuaguuuccauuuuaagaca

SEQ ID NO: 59067 - RNA, 22 nt, Human
uucuaguuuugccuuaucaaca

SEQ ID NO: 59068 - RNA, 22 nt, Human
uucuauaaugcaagccacugca

SEQ ID NO: 59069 - RNA, 22 nt, Human
uucuaucauacuugaauacauu

SEQ ID NO: 59070 - RNA, 22 nt, Human
uucuaugaagguaagauguacg

SEQ ID NO: 59071 - RNA, 22 nt, Human
uucuaugucagugugcucugug

SEQ ID NO: 59072 - RNA, 22 nt, Human
uucuaugugcuggagaauauuu

SEQ ID NO: 59073 - RNA, 22 nt, Human
uucuauguuaguaugggucucc

SEQ ID NO: 59074 - RNA, 22 nt, Human
uucucaaaacucaggguaucug

SEQ ID NO: 59075 - RNA, 22 nt, Human
uucucaaagggugguuugcaaa

SEQ ID NO: 59076 - RNA, 22 nt, Human
uucucaaagugugcucccugga

SEQ ID NO: 59077 - RNA, 22 nt, Human
uucucaacucucaagagaagcu

SEQ ID NO: 59078 - RNA, 22 nt, Human
uucucaagaacauauguagggu

SEQ ID NO: 59079 - RNA, 22 nt, Human
uucucaaggacaaaaugacaug

SEQ ID NO: 59080 - RNA, 22 nt, Human
uucucagaauugacugggagca

SEQ ID NO: 59081 - RNA, 22 nt, Human
uucucagcuuuccuugcaguua

SEQ ID NO: 59082 - RNA, 22 nt, Human
uucucaggacuccugccugcuu

SEQ ID NO: 59083 - RNA, 22 nt, Human
uucucaggcuguggagccgucu

SEQ ID NO: 59084 - RNA, 22 nt, Human
uucucagggcaucucaugaccc

SEQ ID NO: 59085 - RNA, 22 nt, Human
uucucaggguuugugcaggcuu

SEQ ID NO: 59086 - RNA, 22 nt, Human
uucucaggugaggcugaggcug

SEQ ID NO: 59087 - RNA, 22 nt, Human
uucucaguaguuagcauuugug

SEQ ID NO: 59088 - RNA, 22 nt, Human
uucucagugaaguuuagaacau

SEQ ID NO: 59089 - RNA, 19 nt, Human
uucucaguucaggagaaga

SEQ ID NO: 59090 - RNA, 22 nt, Human
uucucaguuucacugauaacag

SEQ ID NO: 59091 - RNA, 22 nt, Human
uucucauaggagcgcaaacccu

SEQ ID NO: 59092 - RNA, 22 nt, Human
uucucaugaaacucgcuuccuc

SEQ ID NO: 59093 - RNA, 22 nt, Human
uucucaugaugcaauucauccc

SEQ ID NO: 59094 - RNA, 20 nt, Human
uucuccaaaggagacacuag

SEQ ID NO: 59095 - RNA, 22 nt, Human
uucuccaaguagaagcuaaguu

SEQ ID NO: 59096 - RNA, 22 nt, Human
uucuccagaccuugugacuaug

SEQ ID NO: 59097 - RNA, 22 nt, Human
uucuccagcacauuuucuuuga

SEQ ID NO: 59098 - RNA, 22 nt, Human
uucuccagccuauuggccuauc

SEQ ID NO: 59099 - RNA, 22 nt, Human
uucuccagcucaucagggaggg

SEQ ID NO: 59100 - RNA, 22 nt, Human
uucuccaggccgcgcagggggc

SEQ ID NO: 59101 - RNA, 22 nt, Human
uucucccaucucagucuuacau

SEQ ID NO: 59102 - RNA, 22 nt, Human
uucucccugccaaagcugccuc

SEQ ID NO: 59103 - RNA, 22 nt, Human
uucucccugguauuuacuuagu

SEQ ID NO: 59104 - RNA, 22 nt, Human
uucuccucuguuggccuucccu

SEQ ID NO: 59105 - RNA, 22 nt, Human
uucuccuuccugguuuucaggc

SEQ ID NO: 59106 - RNA, 22 nt, Human
uucuccuuguucccuucaauug

SEQ ID NO: 59107 - RNA, 22 nt, Human
uucucuaagaguuauaugaauu

SEQ ID NO: 59108 - RNA, 22 nt, Human
uucucuagcaaaaccagcuagu

SEQ ID NO: 59109 - RNA, 22 nt, Human
uucucuccuacccaguauccau

SEQ ID NO: 59110 - RNA, 22 nt, Human
uucucucuuccaguucccacuu

SEQ ID NO: 59111 - RNA, 22 nt, Human
uucucucuuuuggguaggaggu

SEQ ID NO: 59112 - RNA, 22 nt, Human
uucucugacccccuuaaauauu

SEQ ID NO: 59113 - RNA, 22 nt, Human
uucucugagauagacuaagugg

SEQ ID NO: 59114 - RNA, 22 nt, Human
uucucugaguacguuucagugu

SEQ ID NO: 59115 - RNA, 22 nt, Human
uucucugaucuugcuagacuga

SEQ ID NO: 59116 - RNA, 22 nt, Human
uucucugcagcuuaggcccagu

SEQ ID NO: 59117 - RNA, 21 nt, Human
uucucuggauaggccaguccu

SEQ ID NO: 59118 - RNA, 22 nt, Human
uucucugggaacauaaaugaag

SEQ ID NO: 59119 - RNA, 22 nt, Human
uucucugggaucuggcaaaagg

SEQ ID NO: 59120 - RNA, 22 nt, Human
uucucugggguucaguaucucu

SEQ ID NO: 59121 - RNA, 22 nt, Human
uucucugguaaacacaugcgua

SEQ ID NO: 59122 - RNA, 21 nt, Human
uucucuggucaagcacacaua

SEQ ID NO: 59123 - RNA, 16 nt, Human
uucucuguuccuugug

SEQ ID NO: 59124 - RNA, 17 nt, Human
uucucuuccuggauagu

SEQ ID NO: 59125 - RNA, 22 nt, Human
uucucuuuauguauuuaguggg

SEQ ID NO: 59126 - RNA, 22 nt, Human
uucucuuucuacagugugauug

SEQ ID NO: 59127 - RNA, 22 nt, Human
uucugaaaacacacuuugcagc

SEQ ID NO: 59128 - RNA, 22 nt, Human
uucugaaaauugggucauacuu

SEQ ID NO: 59129 - RNA, 20 nt, Human
uucugaaagcagcagaggga

SEQ ID NO: 59130 - RNA, 22 nt, Human
uucugaaagccaauucauugaa

SEQ ID NO: 59131 - RNA, 22 nt, Human
uucugaaauaggagauagcugu

SEQ ID NO: 59132 - RNA, 22 nt, Human
uucugaaauucgacuauccaau

SEQ ID NO: 59133 - RNA, 22 nt, Human
uucugaaauuucuguagaucuu

SEQ ID NO: 59134 - RNA, 22 nt, Human
uucugaaggcuccucaggaaag

SEQ ID NO: 59135 - RNA, 22 nt, Human
uucugaaggucagcagcuuggu

SEQ ID NO: 59136 - RNA, 22 nt, Human
uucugaauccucgaaacauagc

SEQ ID NO: 59137 - RNA, 22 nt, Human
uucugaaugauagucuugaacu

SEQ ID NO: 59138 - RNA, 22 nt, Human
uucugacauauccagucucagu

SEQ ID NO: 59139 - RNA, 22 nt, Human
uucugacaugugagauuuuguu

SEQ ID NO: 59140 - RNA, 22 nt, Human
uucugacauuugucaaaaugau

SEQ ID NO: 59141 - RNA, 22 nt, Human
uucugagaggcagagcuuguga

SEQ ID NO: 59142 - RNA, 22 nt, Human
uucugagaguaaacauagccug

SEQ ID NO: 59143 - RNA, 22 nt, Human
uucugagaguuguaguguaucc

SEQ ID NO: 59144 - RNA, 22 nt, Human
uucugagaugaggaggaaaaag

SEQ ID NO: 59145 - RNA, 22 nt, Human
uucugagaugcguuagaaauuu

SEQ ID NO: 59146 - RNA, 22 nt, Human
uucugagccuuucuaagaaaca

SEQ ID NO: 59147 - RNA, 22 nt, Human
uucugagcugcaacacuaacau

SEQ ID NO: 59148 - RNA, 22 nt, Human
uucugaggcuuucccguccccu

SEQ ID NO: 59149 - RNA, 22 nt, Human
uucugagggcuaauguacugua

SEQ ID NO: 59150 - RNA, 22 nt, Human
uucugagguccaugcaguacug

SEQ ID NO: 59151 - RNA, 22 nt, Human
uucugauugcugaugaggccca

SEQ ID NO: 59152 - RNA, 22 nt, Human
uucugcacuaaauaucaaauau

SEQ ID NO: 59153 - RNA, 22 nt, Human
uucugcagaucaacuugacugc

SEQ ID NO: 59154 - RNA, 22 nt, Human
uucugcagugaaugacucaaua

SEQ ID NO: 59155 - RNA, 22 nt, Human
uucugcagugugcagggccugu

SEQ ID NO: 59156 - RNA, 22 nt, Human
uucugcaucucacagccagugc

SEQ ID NO: 59157 - RNA, 22 nt, Human
uucugcaucugaauuuaaguac

SEQ ID NO: 59158 - RNA, 22 nt, Human
uucugcaugaacaguuuauucc

SEQ ID NO: 59159 - RNA, 22 nt, Human
uucugcaugguuggggagaagc

SEQ ID NO: 59160 - RNA, 21 nt, Human
uucugcauuaagguggagaua

SEQ ID NO: 59161 - RNA, 22 nt, Human
uucugccaaagaaguaaaugga

SEQ ID NO: 59162 - RNA, 22 nt, Human
uucugccacgagcaguuucuuc

SEQ ID NO: 59163 - RNA, 22 nt, Human
uucugcccaccacacuuuaucu

SEQ ID NO: 59164 - RNA, 19 nt, Human
uucugcccucucuucuagc

SEQ ID NO: 59165 - RNA, 20 nt, Human
uucugccuaggguuagccug

SEQ ID NO: 59166 - RNA, 22 nt, Human
uucagcaaccagaaaggcuggg

SEQ ID NO: 59167 - RNA, 22 nt, Human
uucagcaagaauuuacugagcu

SEQ ID NO: 59168 - RNA, 22 nt, Human
uucagcaagaccaccauguacc

SEQ ID NO: 59169 - RNA, 21 nt, Human
uucagcaagcacucuggacac

SEQ ID NO: 59170 - RNA, 22 nt, Human
uucagcaagugucucuacuguc

SEQ ID NO: 59171 - RNA, 22 nt, Human
uucagcacccucugaggcaucc

SEQ ID NO: 59172 - RNA, 22 nt, Human
uucugcuccaccacuuccagca

SEQ ID NO: 59173 - RNA, 21 nt, Human
uucugcuccagcuccucuggg

SEQ ID NO: 59174 - RNA, 22 nt, Human
uucugcugaaaacagccaugua

SEQ ID NO: 59175 - RNA, 22 nt, Human
uucugcugccuacuccugggga

SEQ ID NO: 59176 - RNA, 17 nt, Human
uucugcugucguccucu

SEQ ID NO: 59177 - RNA, 17 nt, Human
uucugcuguuuccccuu

SEQ ID NO: 59178 - RNA, 22 nt, Human
uucugcuuagagggcauuugca

SEQ ID NO: 59179 - RNA, 22 nt, Human
uucugcuuauucaaaugaucuu

SEQ ID NO: 59180 - RNA, 22 nt, Human
uucugcuuucaguucuucuggg

SEQ ID NO: 59181 - RNA, 22 nt, Human
uucugcuuuuauugccagaguu

SEQ ID NO: 59182 - RNA, 22 nt, Human
uucuggaaagauuugcguguaa

SEQ ID NO: 59183 - RNA, 22 nt, Human
uucuggaaauguugcugaggcc

SEQ ID NO: 59184 - RNA, 22 nt, Human
uucuggaacauagcaagaaguu

SEQ ID NO: 59185 - RNA, 22 nt, Human
uucuggaagaauaaugggcaaa

SEQ ID NO: 59186 - RNA, 22 nt, Human
uucuggaagauaccucuccuaa

SEQ ID NO: 59187 - RNA, 22 nt, Human
uucuggaagcuggaaaaggcaa

SEQ ID NO: 59188 - RNA, 22 nt, Human
uucuggaaggcagggagaaccc

SEQ ID NO: 59189 - RNA, 22 nt, Human
uucuggaaggguggaguagcuu

SEQ ID NO: 59190 - RNA, 22 nt, Human
uucuggaauauuugacacaauu

SEQ ID NO: 59191 - RNA, 22 nt, Human
uucuggaauccucaaaacauga

SEQ ID NO: 59192 - RNA, 19 nt, Human
uucuggacagcagaaacca

SEQ ID NO: 59193 - RNA, 22 nt, Human
uucuggacuugccuugcugaug

SEQ ID NO: 59194 - RNA, 22 nt, Human
uucuggagacccagcaacaggg

SEQ ID NO: 59195 - RNA, 22 nt, Human
uucuggagccgggccugggcag

SEQ ID NO: 59196 - RNA, 22 nt, Human
uucuggaggagaaagggugggc

SEQ ID NO: 59197 - RNA, 22 nt, Human
uucuggagggcaugcugcugcc

SEQ ID NO: 59198 - RNA, 22 nt, Human
uucuggagucauuggggcugau

SEQ ID NO: 59199 - RNA, 22 nt, Human
uucuggaguugugaccucaggg

SEQ ID NO: 59200 - RNA, 22 nt, Human
uucuggauaugggagagggagc

SEQ ID NO: 59201 - RNA, 22 nt, Human
uucuggaucugagggggaagau

SEQ ID NO: 59202 - RNA, 23 nt, Human
uucuggauguucuagucugagag

SEQ ID NO: 59203 - RNA, 22 nt, Human
uucuggcagauugcguaauaaa

SEQ ID NO: 59204 - RNA, 22 nt, Human
uucuggcaucugggggaggccu

SEQ ID NO: 59205 - RNA, 22 nt, Human
uucuggccaaggcugccagauu

SEQ ID NO: 59206 - RNA, 22 nt, Human
uucuggcuuaguuguuguauau

SEQ ID NO: 59207 - RNA, 22 nt, Human
uucuggcuuuacuucccaucca

SEQ ID NO: 59208 - RNA, 22 nt, Human
uucuggcuuuaggcuuuucaag

SEQ ID NO: 59209 - RNA, 20 nt, Human
uucugggaauuggguagcug

SEQ ID NO: 59210 - RNA, 22 nt, Human
uucugggacauugcagguauuc

SEQ ID NO: 59211 - RNA, 22 nt, Human
uucugggcacacaggcccuggu

SEQ ID NO: 59212 - RNA, 19 nt, Human
uucugggcagcacaugaau

SEQ ID NO: 59213 - RNA, 21 nt, Human
uucugggccaugcugcuucuc

SEQ ID NO: 59214 - RNA, 22 nt, Human
uucugggcuaccuucccggcag

SEQ ID NO: 59215 - RNA, 23 nt, Human
uucugggcuguggaagccucggg

SEQ ID NO: 59216 - RNA, 22 nt, Human
uucugggcuugaaaguuuaaua

SEQ ID NO: 59217 - RNA, 22 nt, Human
uucuggggcuaauacagagguc

SEQ ID NO: 59218 - RNA, 22 nt, Human
uucuggguaacaaggcaagaau

SEQ ID NO: 59219 - RNA, 17 nt, Human
uucugggucccagggcc

SEQ ID NO: 59220 - RNA, 22 nt, Human
uucuggguggccaguauuuaga

SEQ ID NO: 59221 - RNA, 21 nt, Human
uucuggguuguuaaucugaac

SEQ ID NO: 59222 - RNA, 22 nt, Human
uucugguaccgugucagaaacc

SEQ ID NO: 59223 - RNA, 22 nt, Human
uucugguggccagaagucugaa

SEQ ID NO: 59224 - RNA, 22 nt, Human
uucugguguguucucucuaggc

SEQ ID NO: 59225 - RNA, 22 nt, Human
uucuguaagcuaccaaguuugu

SEQ ID NO: 59226 - RNA, 19 nt, Human
uucuguaaggacauuaauc

SEQ ID NO: 59227 - RNA, 22 nt, Human
uucuguaagggauuuauucuga

SEQ ID NO: 59228 - RNA, 22 nt, Human
uucuguacaaguuguggcugcu

SEQ ID NO: 59229 - RNA, 22 nt, Human
uucuguaguauucuuuugguca

SEQ ID NO: 59230 - RNA, 22 nt, Human
uucuguaucuuucuucaagauu

SEQ ID NO: 59231 - RNA, 22 nt, Human
uucuguauuuaguuugaggaca

SEQ ID NO: 59232 - RNA, 22 nt, Human
uucugucaaacucacaggccga

SEQ ID NO: 59233 - RNA, 22 nt, Human
uucugucaaagacuuuuucagg

SEQ ID NO: 59234 - RNA, 16 nt, Human
uucugucacguacggc

SEQ ID NO: 59235 - RNA, 22 nt, Human
uucugucacuugcaaucaagag

SEQ ID NO: 59236 - RNA, 22 nt, Human
uucuguccaggcgcccagcuau

SEQ ID NO: 59237 - RNA, 22 nt, Human
uucuguccuguuggaugaauca

SEQ ID NO: 59238 - RNA, 22 nt, Human
uucugucuguaaacuucucaau

SEQ ID NO: 59239 - RNA, 22 nt, Human
uucugucuucucgguuguuuac

SEQ ID NO: 59240 - RNA, 23 nt, Human
uucugucuugcugucagcuuucu

SEQ ID NO: 59241 - RNA, 22 nt, Human
uucugugaaucuuuuuucccac

SEQ ID NO: 59242 - RNA, 22 nt, Human
uucugugaauggccaugacaag

SEQ ID NO: 59243 - RNA, 22 nt, Human
uucugugauugacauguggcuu

SEQ ID NO: 59244 - RNA, 18 nt, Human
uucugugcaucuuucuau

SEQ ID NO: 59245 - RNA, 22 nt, Human
uucugugcucaaaacuuuccaa

SEQ ID NO: 59246 - RNA, 22 nt, Human
uucuguggguaauaccucauac

SEQ ID NO: 59247 - RNA, 22 nt, Human
uucugugguugaaaggagagau

SEQ ID NO: 59248 - RNA, 22 nt, Human
uucugugugccagaguugugcu

SEQ ID NO: 59249 - RNA, 22 nt, Human
uucugugugcugucuuggcuuu

SEQ ID NO: 59250 - RNA, 22 nt, Human
uucuguguggguagcuccuguu

SEQ ID NO: 59251 - RNA, 22 nt, Human
uucuguuacuugcaaccacagg

SEQ ID NO: 59252 - RNA, 22 nt, Human
uucuguuucuggggucucugac

SEQ ID NO: 59253 - RNA, 22 nt, Human
uucuguuuugcacagacuugaa

SEQ ID NO: 59254 - RNA, 22 nt, Human
uucuuaaaacuuauggacaggu

SEQ ID NO: 59255 - RNA, 22 nt, Human
uucuuaaagaggcaaaacacag

SEQ ID NO: 59256 - RNA, 22 nt, Human
uucuuaagacugcaaaucaacc

SEQ ID NO: 59257 - RNA, 22 nt, Human
uucuuaagaggaacauuuuugu

SEQ ID NO: 59258 - RNA, 22 nt, Human
uucuuaaguuuagcaacuugug

SEQ ID NO: 59259 - RNA, 22 nt, Human
uucuuaauaccuauuuucuacc

SEQ ID NO: 59260 - RNA, 22 nt, Human
uucuuaaucuguguggguucga

SEQ ID NO: 59261 - RNA, 22 nt, Human
uucuuacagauuuggugaauga

SEQ ID NO: 59262 - RNA, 22 nt, Human
uucuuacagcccuauuacuaaa

SEQ ID NO: 59263 - RNA, 22 nt, Human
uucuuacaucaguuuauuuugu

SEQ ID NO: 59264 - RNA, 22 nt, Human
uucuuacauuacuuuacaugug

SEQ ID NO: 59265 - RNA, 22 nt, Human
uucuuacuacauuugcaggcua

SEQ ID NO: 59266 - RNA, 22 nt, Human
uucuuacuaugauuugagccuc

SEQ ID NO: 59267 - RNA, 22 nt, Human
uucuuagaagaaacaucuaaaa

SEQ ID NO: 59268 - RNA, 22 nt, Human
uucuuaggagcauuaguaauuu

SEQ ID NO: 59269 - RNA, 22 nt, Human
uucuuauucuugaaauguggga

SEQ ID NO: 59270 - RNA, 22 nt, Human
uucuuauuucccccuucaucau

SEQ ID NO: 59271 - RNA, 21 nt, Human
uucuucaaagaagaaggcaca

SEQ ID NO: 59272 - RNA, 22 nt, Human
uucuucaaauagcagggaguca

SEQ ID NO: 59273 - RNA, 22 nt, Human
uucuucaauuuuccauauacug

SEQ ID NO: 59274 - RNA, 22 nt, Human
uucuucaguuugguaaauguaa

SEQ ID NO: 59275 - RNA, 22 nt, Human
uucuucauucccuuacuuccga

SEQ ID NO: 59276 - RNA, 23 nt, Human
uucuuccaaggugcuuugugguu

SEQ ID NO: 59277 - RNA, 22 nt, Human
uucuucuccgaggagggcuggu

SEQ ID NO: 59278 - RNA, 22 nt, Human
uucuucugaaacagugacagac

SEQ ID NO: 59279 - RNA, 22 nt, Human
uucuucugagagaaaaagcuca

SEQ ID NO: 59280 - RNA, 22 nt, Human
uucuucugauugccuucugcaa

SEQ ID NO: 59281 - RNA, 22 nt, Human
uucuaaugaaaucuguacagua

SEQ ID NO: 59282 - RNA, 22 nt, Human
uucuaauugcaaguuuuaguau

SEQ ID NO: 59283 - RNA, 22 nt, Human
uucuacaaauauuuacuguucc

SEQ ID NO: 59284 - RNA, 22 nt, Human
uucuacacugaguuuuuucccu

SEQ ID NO: 59285 - RNA, 22 nt, Human
uucuacagaauaaauguuuaca

SEQ ID NO: 59286 - RNA, 23 nt, Human
uucuacagcuucuucaguuaagg

SEQ ID NO: 59287 - RNA, 22 nt, Human
uucuacaucacuuaacaugcua

SEQ ID NO: 59288 - RNA, 22 nt, Human
uuuacaguccccaggugaggau

SEQ ID NO: 59289 - RNA, 20 nt, Human
uuuacauccccaccagcaau

SEQ ID NO: 59290 - RNA, 22 nt, Human
uuuacauguaauguuauacaaa

SEQ ID NO: 59291 - RNA, 17 nt, Human
uuuacauugcucgcagu

SEQ ID NO: 59292 - RNA, 22 nt, Human
uuuacauuucccucugucaguu

SEQ ID NO: 59293 - RNA, 20 nt, Human
uuuaccaaaggaguuaugau

SEQ ID NO: 59294 - RNA, 22 nt, Human
uuuaccaaauagauuaugucag

SEQ ID NO: 59295 - RNA, 20 nt, Human
uuuaccaacucaccaguauc

SEQ ID NO: 59296 - RNA, 22 nt, Human
uuuaccaaggcauaguaaucuc

SEQ ID NO: 59297 - RNA, 23 nt, Human
uuuaccagaauagcaggggagag

SEQ ID NO: 59298 - RNA, 22 nt, Human
uuuaccaucugccacagauaug

SEQ ID NO: 59299 - RNA, 22 nt, Human
uuuacccaguaacugcuuggcu

SEQ ID NO: 59300 - RNA, 22 nt, Human
uuuaccuucuuuuaacuacagu

SEQ ID NO: 59301 - RNA, 22 nt, Human
uuuacgaaaagugacuaauagg

SEQ ID NO: 59302 - RNA, 22 nt, Human
uuuacuaaguacuuguaucccu

SEQ ID NO: 59303 - RNA, 22 nt, Human
uuuacuacuugugauaacugaa

SEQ ID NO: 59304 - RNA, 22 nt, Human
uuuacucuugcuacacaacugu

SEQ ID NO: 59305 - RNA, 22 nt, Human
uuuacugaccuccaaucccacu

SEQ ID NO: 59306 - RNA, 22 nt, Human
uuuacugagugaccuagaauaa

SEQ ID NO: 59307 - RNA, 22 nt, Human
uuuacuguuuacagcuaaugca

SEQ ID NO: 59308 - RNA, 22 nt, Human
uuuacuucugcauuuccccuag

SEQ ID NO: 59309 - RNA, 22 nt, Human
uuuacuuguucugcugaauucu

SEQ ID NO: 59310 - RNA, 22 nt, Human
uuuacuuuugguaaggucauuu

SEQ ID NO: 59311 - RNA, 22 nt, Human
uuuagaaauugcagagugggug

SEQ ID NO: 59312 - RNA, 22 nt, Human
uuuagaauguuagcguuaaagg

SEQ ID NO: 59313 - RNA, 22 nt, Human
uuuagaauuggcuagugggaau

SEQ ID NO: 59314 - RNA, 22 nt, Human
uuuagacaucuauaauugcuaa

SEQ ID NO: 59315 - RNA, 19 nt, Human
uuuagacauugucugguau

SEQ ID NO: 59316 - RNA, 21 nt, Human
uuuagagaauacucacuauuu

SEQ ID NO: 59317 - RNA, 22 nt, Human
uuuagagacccucugcuauuuu

SEQ ID NO: 59318 - RNA, 22 nt, Human
uuuagagagaaauaaaugagau

SEQ ID NO: 59319 - RNA, 22 nt, Human
uuuagagcaggguguggcacau

SEQ ID NO: 59320 - RNA, 22 nt, Human
uuuagaggcugccuaucacaac

SEQ ID NO: 59321 - RNA, 22 nt, Human
uuuagaggggaaaguggcuggu

SEQ ID NO: 59322 - RNA, 22 nt, Human
uuuagagguuagaggcugauag

SEQ ID NO: 59323 - RNA, 22 nt, Human
uuuagaguccaaguucuucacu

SEQ ID NO: 59324 - RNA, 22 nt, Human
uuuagcaaauuagcaccucuaa

SEQ ID NO: 59325 - RNA, 22 nt, Human
uuuagcaacgaagcacucgaca

SEQ ID NO: 59326 - RNA, 22 nt, Human
uuuagcaaguauuuacugacua

SEQ ID NO: 59327 - RNA, 22 nt, Human
uuuagcaaguucucugagagaa

SEQ ID NO: 59328 - RNA, 22 nt, Human
uuuagcaauuucuaaaaguguu

SEQ ID NO: 59329 - RNA, 21 nt, Human
uuuagcauuuacauauuucca

SEQ ID NO: 59330 - RNA, 19 nt, Human
uuuagcuuacguuucauug

SEQ ID NO: 59331 - RNA, 22 nt, Human
uuuagcuucauuuggcgugauu

SEQ ID NO: 59332 - RNA, 22 nt, Human
uuuagcuugaaaguuuuggagg

SEQ ID NO: 59333 - RNA, 22 nt, Human
uuuagcuuugaaggauaugguu

SEQ ID NO: 59334 - RNA, 22 nt, Human
uuuagcuuuugugucagauaag

SEQ ID NO: 59335 - RNA, 22 nt, Human
uuuaggaacuuagguuuaugga

SEQ ID NO: 59336 - RNA, 22 nt, Human
uuuaggcaagaacucacugaga

SEQ ID NO: 59337 - RNA, 22 nt, Human
uuuaggcagaacauggacuuug

SEQ ID NO: 59338 - RNA, 22 nt, Human
uuuagggaaauugaggguuaag

SEQ ID NO: 59339 - RNA, 22 nt, Human
uuuaguaccaucauuugccucu

SEQ ID NO: 59340 - RNA, 22 nt, Human
uuuaguagaauaguauaucaaa

SEQ ID NO: 59341 - RNA, 22 nt, Human
uuuaguagaaugauacagggca

SEQ ID NO: 59342 - RNA, 22 nt, Human
uuuaguagcuacaguuagaagg

SEQ ID NO: 59343 - RNA, 22 nt, Human
uuuaguauccuaucucauuuaa

SEQ ID NO: 59344 - RNA, 23 nt, Human
uuuagucaguugacagccauaua

SEQ ID NO: 59345 - RNA, 22 nt, Human
uuuagucauagauacccaaggu

SEQ ID NO: 59346 - RNA, 22 nt, Human
uuuagucauuuggauuugaucu

SEQ ID NO: 59347 - RNA, 22 nt, Human
uuuagucuaauaaaaguggagu

SEQ ID NO: 59348 - RNA, 22 nt, Human
uuuagucugacuauuaccucca

SEQ ID NO: 59349 - RNA, 22 nt, Human
uuuagugagugugaaucaaaug

SEQ ID NO: 59350 - RNA, 22 nt, Human
uuuaguguaagcauaaagaaca

SEQ ID NO: 59351 - RNA, 22 nt, Human
uuuaguguagcauucagaguca

SEQ ID NO: 59352 - RNA, 22 nt, Human
uuuaguguagccuaagcagaau

SEQ ID NO: 59353 - RNA, 22 nt, Human
uuuagugugacaguccccagua

SEQ ID NO: 59354 - RNA, 22 nt, Human
uuuaguucacaccaggguagca

SEQ ID NO: 59355 - RNA, 22 nt, Human
uuuaguucauaaaaccagggug

SEQ ID NO: 59356 - RNA, 22 nt, Human
uuuaguuuuaacugaaagcuau

SEQ ID NO: 59357 - RNA, 22 nt, Human
uuuauacauggagaauuuuugc

SEQ ID NO: 59358 - RNA, 23 nt, Human
uuuauagcagcaugauuuauaau

SEQ ID NO: 59359 - RNA, 23 nt, Human
uuuauagcagcaugauuuauagu

SEQ ID NO: 59360 - RNA, 22 nt, Human
uuuauagucgucucaguaauaa

SEQ ID NO: 59361 - RNA, 22 nt, Human
uuuauauaacagagacugcuau

SEQ ID NO: 59362 - RNA, 18 nt, Human
uuuauauggauagagacc

SEQ ID NO: 59363 - RNA, 22 nt, Human
uuuauauguauugacuuugaug

SEQ ID NO: 59364 - RNA, 23 nt, Human
uuuauauuccuaaugucuugagc

SEQ ID NO: 59365 - RNA, 22 nt, Human
uuuaucaguagcaaaguuuuaa

SEQ ID NO: 59366 - RNA, 22 nt, Human
uuuaucaucuuguuuuuaaagc

SEQ ID NO: 59367 - RNA, 22 nt, Human
uuuauccaagcacaauuucuaa

SEQ ID NO: 59368 - RNA, 22 nt, Human
uuuauccaaggguuuuaacugu

SEQ ID NO: 59369 - RNA, 22 nt, Human
uuuauccaccagggacuaggac

SEQ ID NO: 59370 - RNA, 22 nt, Human
uuuauccaguguuggaauuuuu

SEQ ID NO: 59371 - RNA, 22 nt, Human
uuuauccauucaccaguugaac

SEQ ID NO: 59372 - RNA, 22 nt, Human
uuuaucugagcugauagauagu

SEQ ID NO: 59373 - RNA, 22 nt, Human
uuuaucugcuaucugcugugcu

SEQ ID NO: 59374 - RNA, 22 nt, Human
uuuaucuggacugugauauaaa

SEQ ID NO: 59375 - RNA, 22 nt, Human
uuuaucuguuguacauuuaugc

SEQ ID NO: 59376 - RNA, 22 nt, Human
uuuaucuuuaggacuuugcaga

SEQ ID NO: 59377 - RNA, 22 nt, Human
uuuaugagcaccuuggcccaga

SEQ ID NO: 59378 - RNA, 22 nt, Human
uuuaugauuauuuuaaagcagc

SEQ ID NO: 59379 - RNA, 23 nt, Human
uuuaugcugugauucacccagcc

SEQ ID NO: 59380 - RNA, 22 nt, Human
uuuauggcacacaaauaucaaa

SEQ ID NO: 59381 - RNA, 21 nt, Human
uuuauguacuucauagaguag

SEQ ID NO: 59382 - RNA, 22 nt, Human
uuuauguaguuacggacuauca

SEQ ID NO: 59383 - RNA, 22 nt, Human
uuuaugucacuuugaaagagag

SEQ ID NO: 59384 - RNA, 22 nt, Human
uuuaugucccuucaaauguuua

SEQ ID NO: 59385 - RNA, 22 nt, Human
uuuauguuugacaaugaucugg

SEQ ID NO: 59386 - RNA, 22 nt, Human
uuuauguuugcauuuucaaaga

SEQ ID NO: 59387 - RNA, 22 nt, Human
uuuauuaagaugcgaaugcuga

SEQ ID NO: 59388 - RNA, 22 nt, Human
uuuauuaauguagcauccaugg

SEQ ID NO: 59389 - RNA, 22 nt, Human
uuuauuauccaguguugucaug

SEQ ID NO: 59390 - RNA, 16 nt, Human
uucucugggguugugc

SEQ ID NO: 59391 - RNA, 22 nt, Human
uucucuguaguugccuggugga

SEQ ID NO: 59392 - RNA, 22 nt, Human
uucucugugagggugcuggauu

SEQ ID NO: 59393 - RNA, 22 nt, Human
uucucuuacauuuucucagccu

SEQ ID NO: 59394 - RNA, 22 nt, Human
uucucuuaucuggcauuauugg

SEQ ID NO: 59395 - RNA, 22 nt, Human
uucucuuauucuggauaugcag

SEQ ID NO: 59396 - RNA, 22 nt, Human
uucucuucaucucaguaaaugu

SEQ ID NO: 59397 - RNA, 22 nt, Human
uucucuuccagccgggcuugca

SEQ ID NO: 59398 - RNA, 22 nt, Human
uucucuugagcuggucauguuu

SEQ ID NO: 59399 - RNA, 22 nt, Human
uucucuuugacauuauucaggu

SEQ ID NO: 59400 - RNA, 20 nt, Human
uucucuuuggguccagagaa

SEQ ID NO: 59401 - RNA, 22 nt, Human
uucucuuuuagaggcuccauga

SEQ ID NO: 59402 - RNA, 22 nt, Human
uucucuuuuugcaucucaaccu

SEQ ID NO: 59403 - RNA, 23 nt, Human
uucugaaaauagauaguggcucc

SEQ ID NO: 59404 - RNA, 22 nt, Human
uucugaaaggcagguuguuugc

SEQ ID NO: 59405 - RNA, 22 nt, Human
uugcaaggugauaaaagaauga

SEQ ID NO: 59406 - RNA, 20 nt, Human
uugcaauaaaugaaagacca

SEQ ID NO: 59407 - RNA, 22 nt, Human
uugcaauagccuuauuuccaaa

SEQ ID NO: 59408 - RNA, 21 nt, Human
uugcaaugggcauuuuggagg

SEQ ID NO: 59409 - RNA, 21 nt, Human
uugcacagaaaaccauagaga

SEQ ID NO: 59410 - RNA, 22 nt, Human
uugcacaucuaauaaugcuaga

SEQ ID NO: 59411 - RNA, 22 nt, Human
uugcacaugauagaugauuucu

SEQ ID NO: 59412 - RNA, 22 nt, Human
uugcacauuuccuagaauuuca

SEQ ID NO: 59413 - RNA, 22 nt, Human
uugcacgcuugcgguuccugcc

SEQ ID NO: 59414 - RNA, 22 nt, Human
uugcacuaggaaaaggcagcca

SEQ ID NO: 59415 - RNA, 22 nt, Human
uugcacuagucucagaggcaaa

SEQ ID NO: 59416 - RNA, 22 nt, Human
uugcacuauaggaaaauguguc

SEQ ID NO: 59417 - RNA, 23 nt, Human
uugcacugaucaauuugauaagc

SEQ ID NO: 59418 - RNA, 22 nt, Human
uugcacuguaagcaucuguguc

SEQ ID NO: 59419 - RNA, 17 nt, Human
uugcagacuuuuuauua

SEQ ID NO: 59420 - RNA, 22 nt, Human
uugcagauauuuccgaugcuau

SEQ ID NO: 59421 - RNA, 22 nt, Human
uugcagauuaaaacacugagcu

SEQ ID NO: 59422 - RNA, 20 nt, Human
uugcagcagugaggugaagg

SEQ ID NO: 59423 - RNA, 22 nt, Human
uugcagcauauugaucuccugu

SEQ ID NO: 59424 - RNA, 22 nt, Human
uugcagcaugcauagacacugc

SEQ ID NO: 59425 - RNA, 22 nt, Human
uugcagcugaggaaauugaagc

SEQ ID NO: 59426 - RNA, 22 nt, Human
uugcagcuucaagcagguugac

SEQ ID NO: 59427 - RNA, 22 nt, Human
uugcagggaaauagaaauaaac

SEQ ID NO: 59428 - RNA, 22 nt, Human
uugcagggaaaucagugaggau

SEQ ID NO: 59429 - RNA, 22 nt, Human
uugcagggcaucgcguacuucu

SEQ ID NO: 59430 - RNA, 22 nt, Human
uugcagggccuuggcuucuucc

SEQ ID NO: 59431 - RNA, 22 nt, Human
uugcagggucccagaggccugg

SEQ ID NO: 59432 - RNA, 22 nt, Human
uugcaggguuaaaguaagguag

SEQ ID NO: 59433 - RNA, 22 nt, Human
uugcaggguugacacugccugc

SEQ ID NO: 59434 - RNA, 19 nt, Human
uugcaguuggguggggagu

SEQ ID NO: 59435 - RNA, 22 nt, Human
uugcaguuuguggcaacuuuga

SEQ ID NO: 59436 - RNA, 22 nt, Human
uugcaguuuugacagaccaaau

SEQ ID NO: 59437 - RNA, 22 nt, Human
uugcauaauagcuacccacuca

SEQ ID NO: 59438 - RNA, 22 nt, Human
uugcauauauuucuaaggaggu

SEQ ID NO: 59439 - RNA, 22 nt, Human
uugcaucagguagacaacuaua

SEQ ID NO: 59440 - RNA, 22 nt, Human
uugcaugcaccuaacaaauuau

SEQ ID NO: 59441 - RNA, 22 nt, Human
uugcauguagaauacucaacuu

SEQ ID NO: 59442 - RNA, 22 nt, Human
uugcaugugugcauauauuugc

SEQ ID NO: 59443 - RNA, 22 nt, Human
uugcauguuauuuaaucuguau

SEQ ID NO: 59444 - RNA, 22 nt, Human
uugcauguuguuuaauuucgag

SEQ ID NO: 59445 - RNA, 23 nt, Human
uugcauuaauguggaggcacagg

SEQ ID NO: 59446 - RNA, 22 nt, Human
uugcauuccaguccccacugug

SEQ ID NO: 59447 - RNA, 22 nt, Human
uugcauuuacugcaccgugagu

SEQ ID NO: 59448 - RNA, 22 nt, Human
uugcauuuccuguacuguuuga

SEQ ID NO: 59449 - RNA, 22 nt, Human
uugcauuugacaaauuauuuaa

SEQ ID NO: 59450 - RNA, 22 nt, Human
uugccaggagcucaucugaggg

SEQ ID NO: 59451 - RNA, 22 nt, Human
uugccagggaacagggagaggc

SEQ ID NO: 59452 - RNA, 22 nt, Human
uugccagggccagugggggugu

SEQ ID NO: 59453 - RNA, 22 nt, Human
uugccagggcuuugguggcauc

SEQ ID NO: 59454 - RNA, 22 nt, Human
uugccagugccagcccaggcag

SEQ ID NO: 59455 - RNA, 22 nt, Human
uugccaugcagccaggaaggag

SEQ ID NO: 59456 - RNA, 22 nt, Human
uugccauguugccaaggcuggu

SEQ ID NO: 59457 - RNA, 22 nt, Human
uugccauuccaggguauuaggg

SEQ ID NO: 59458 - RNA, 22 nt, Human
uugcccaccuuagucuucagac

SEQ ID NO: 59459 - RNA, 22 nt, Human
uugcccacucuguuucccaaga

SEQ ID NO: 59460 - RNA, 16 nt, Human
uugcccacuuguucau

SEQ ID NO: 59461 - RNA, 18 nt, Human
uugccccugggugaggau

SEQ ID NO: 59462 - RNA, 17 nt, Human
uugcccugauuuuuaac

SEQ ID NO: 59463 - RNA, 22 nt, Human
uugcccuuguggaguuuacaug

SEQ ID NO: 59464 - RNA, 16 nt, Human
uugccgcacaggucgc

SEQ ID NO: 59465 - RNA, 22 nt, Human
uugccguccuuacuccagcgga

SEQ ID NO: 59466 - RNA, 22 nt, Human
uugccucccagcaugggcagcu

SEQ ID NO: 59467 - RNA, 22 nt, Human
uugccugcuacggucuucacug

SEQ ID NO: 59468 - RNA, 22 nt, Human
uugccuggagggacauggagac

SEQ ID NO: 59469 - RNA, 22 nt, Human
uugccuggauucuaccacagaa

SEQ ID NO: 59470 - RNA, 22 nt, Human
uugccuggcuuguagauggggg

SEQ ID NO: 59471 - RNA, 22 nt, Human
uugccugggcuaguaagccaga

SEQ ID NO: 59472 - RNA, 22 nt, Human
uugccugugaacgcugaguccu

SEQ ID NO: 59473 - RNA, 22 nt, Human
uugccuuacugcauucaguaaa

SEQ ID NO: 59474 - RNA, 22 nt, Human
uugccuugauucuucucaugug

SEQ ID NO: 59475 - RNA, 22 nt, Human
uugccuuuaaguauaacugcug

SEQ ID NO: 59476 - RNA, 22 nt, Human
uugcuaaauuuauuuucgaaca

SEQ ID NO: 59477 - RNA, 22 nt, Human
uugcuaaugcccuagaaguauu

SEQ ID NO: 59478 - RNA, 20 nt, Human
uugcuagcuuuugugucacu

SEQ ID NO: 59479 - RNA, 22 nt, Human
uugcuauuuccugaaauaagca

SEQ ID NO: 59480 - RNA, 22 nt, Human
uugcucaguggcagggcuggua

SEQ ID NO: 59481 - RNA, 22 nt, Human
uugcucuaguggccccugaaug

SEQ ID NO: 59482 - RNA, 22 nt, Human
uugcucuguaauaaucuggggu

SEQ ID NO: 59483 - RNA, 22 nt, Human
uugcucugucagggccucaguc

SEQ ID NO: 59484 - RNA, 22 nt, Human
uugcugaaaacaguggguauug

SEQ ID NO: 59485 - RNA, 22 nt, Human
uugcugaagaaaaaauauguua

SEQ ID NO: 59486 - RNA, 22 nt, Human
uugcugaaguugcucagcucca

SEQ ID NO: 59487 - RNA, 23 nt, Human
uugcugagauaaagaaugcaggg

SEQ ID NO: 59488 - RNA, 22 nt, Human
uugcugagcuuuggcaaggaag

SEQ ID NO: 59489 - RNA, 22 nt, Human
uugcugaucugaaacguuacug

SEQ ID NO: 59490 - RNA, 22 nt, Human
uugcugccuuccgaauccucuc

SEQ ID NO: 59491 - RNA, 22 nt, Human
uugcugccuuuguacucugaug

SEQ ID NO: 59492 - RNA, 22 nt, Human
uugcugcucccaagaggcagcu

SEQ ID NO: 59493 - RNA, 22 nt, Human
uugcugcuuucauuuauacagu

SEQ ID NO: 59494 - RNA, 22 nt, Human
uugcuggaguagaaaacuuaac

SEQ ID NO: 59495 - RNA, 22 nt, Human
uugcugggcaugucuuaauucu

SEQ ID NO: 59496 - RNA, 22 nt, Human
uugcuguaguguucugauguca

SEQ ID NO: 59497 - RNA, 22 nt, Human
uugcuguuucucugugucuggu

SEQ ID NO: 59498 - RNA, 22 nt, Human
uugcuguuuuacaucugguggg

SEQ ID NO: 59499 - RNA, 22 nt, Human
uuuaggcauugaauuagaauag

SEQ ID NO: 59500 - RNA, 22 nt, Human
uuuaggccagauuuauuugaca

SEQ ID NO: 59501 - RNA, 22 nt, Human
uuuaggcucaaaagaguuggug

SEQ ID NO: 59502 - RNA, 22 nt, Human
uuuagggaauagaagaucugaa

SEQ ID NO: 59503 - RNA, 22 nt, Human
uuuagucuagucuccucagaaa

SEQ ID NO: 59504 - RNA, 22 nt, Human
uuuagugauaagaauuaugaaa

SEQ ID NO: 59505 - RNA, 22 nt, Human
uuuagugccugggccaguucca

SEQ ID NO: 59506 - RNA, 22 nt, Human
uuuauaaacaguaccacggugc

SEQ ID NO: 59507 - RNA, 22 nt, Human
uuuauaaguacuuugucugcuu

SEQ ID NO: 59508 - RNA, 22 nt, Human
uuuauaauuaucucuacucuua

SEQ ID NO: 59509 - RNA, 17 nt, Human
uuuauaauuggccucuu

SEQ ID NO: 59510 - RNA, 22 nt, Human
uuuauacuccacucugcaagcg

SEQ ID NO: 59511 - RNA, 22 nt, Human
uuuauagggacaguucuuggag

SEQ ID NO: 59512 - RNA, 22 nt, Human
uuuauaguagcaugauuuauag

SEQ ID NO: 59513 - RNA, 22 nt, Human
uuuauaguuauauacagauguu

SEQ ID NO: 59514 - RNA, 22 nt, Human
uuuauauccaucuuugaaguaa

SEQ ID NO: 59515 - RNA, 22 nt, Human
uuuauaugugaagguuugcaga

SEQ ID NO: 59516 - RNA, 22 nt, Human
uuuauauguuuguacaauuaag

SEQ ID NO: 59517 - RNA, 22 nt, Human
uuuauauuguaaaaaugguucu

SEQ ID NO: 59518 - RNA, 22 nt, Human
uuuaucacagaauaagaaguca

SEQ ID NO: 59519 - RNA, 22 nt, Human
uuuaucagaaguuagagaaaga

SEQ ID NO: 59520 - RNA, 22 nt, Human
uuuaucagaggcuauguuucau

SEQ ID NO: 59521 - RNA, 21 nt, Human
uuuaucaucacgagcuugagc

SEQ ID NO: 59522 - RNA, 22 nt, Human
uuuauccaccuuacccuguucc

SEQ ID NO: 59523 - RNA, 22 nt, Human
uuuauccagcagcuauucaaaa

SEQ ID NO: 59524 - RNA, 22 nt, Human
uuuauccauugguuagaaaauc

SEQ ID NO: 59525 - RNA, 22 nt, Human
uuuaugacauuacaauaucaag

SEQ ID NO: 59526 - RNA, 22 nt, Human
uuuaugagcaaugcugagggga

SEQ ID NO: 59527 - RNA, 22 nt, Human
uuuaugagccucaaaucugagu

SEQ ID NO: 59528 - RNA, 22 nt, Human
uuuaugauuaauccaauucugu

SEQ ID NO: 59529 - RNA, 22 nt, Human
uuuaugcagauuuguacaguga

SEQ ID NO: 59530 - RNA, 22 nt, Human
uuuaugcagcacuuuacauuug

SEQ ID NO: 59531 - RNA, 22 nt, Human
uuuaugcagcguuucaccaccc

SEQ ID NO: 59532 - RNA, 22 nt, Human
uuuaugcaucucuaggaagggc

SEQ ID NO: 59533 - RNA, 22 nt, Human
uuuaugcuacucaauagucagu

SEQ ID NO: 59534 - RNA, 22 nt, Human
uuuaugcucauccaaggaaggu

SEQ ID NO: 59535 - RNA, 22 nt, Human
uuuaugucaaaacuacaguugg

SEQ ID NO: 59536 - RNA, 22 nt, Human
uuuauuagugcuuguaucacug

SEQ ID NO: 59537 - RNA, 20 nt, Human
uuuauucacagagaagaguu

SEQ ID NO: 59538 - RNA, 22 nt, Human
uuggaaaugcauuuguuauuau

SEQ ID NO: 59539 - RNA, 22 nt, Human
uuggaaauguagaaaagcagau

SEQ ID NO: 59540 - RNA, 22 nt, Human
uuggaaauugcaagugauuugc

SEQ ID NO: 59541 - RNA, 22 nt, Human
uuggaacaaucacauccuugcu

SEQ ID NO: 59542 - RNA, 22 nt, Human
uuggaacaggauucaauuaaag

SEQ ID NO: 59543 - RNA, 22 nt, Human
uuggaacauccaggacagauau

SEQ ID NO: 59544 - RNA, 22 nt, Human
uuggaacuggauuucauguagc

SEQ ID NO: 59545 - RNA, 22 nt, Human
uuggaagacagccgucuuuauu

SEQ ID NO: 59546 - RNA, 22 nt, Human
uuggaagacagugaaacagcac

SEQ ID NO: 59547 - RNA, 22 nt, Human
uuggaagagagccacaguuaau

SEQ ID NO: 59548 - RNA, 22 nt, Human
uuggaagaguagaguugaauaa

SEQ ID NO: 59549 - RNA, 22 nt, Human
uuggaagauuacuuaguuuucu

SEQ ID NO: 59550 - RNA, 22 nt, Human
uuggaagauucugugucuggug

SEQ ID NO: 59551 - RNA, 22 nt, Human
uuggaagcaguguacacuguac

SEQ ID NO: 59552 - RNA, 22 nt, Human
uuggaagcauucugaaugucca

SEQ ID NO: 59553 - RNA, 22 nt, Human
uuggaagcccugugauaggcca

SEQ ID NO: 59554 - RNA, 19 nt, Human
uuggaaggagccagagugg

SEQ ID NO: 59555 - RNA, 22 nt, Human
uuggaaggagucaaccagcuga

SEQ ID NO: 59556 - RNA, 22 nt, Human
uuggaaggcagcauuuguccau

SEQ ID NO: 59557 - RNA, 22 nt, Human
uuggaaguaaugaagagguggg

SEQ ID NO: 59558 - RNA, 22 nt, Human
uuggaaguucuuagccuuuuca

SEQ ID NO: 59559 - RNA, 22 nt, Human
uuggaauaucaugcagaauaaa

SEQ ID NO: 59560 - RNA, 22 nt, Human
uuggaauuccuguuguuucguc

SEQ ID NO: 59561 - RNA, 22 nt, Human
uuggaauugcuauugauaacaa

SEQ ID NO: 59562 - RNA, 22 nt, Human
uuggacagaauuuugugugugu

SEQ ID NO: 59563 - RNA, 22 nt, Human
uuggaccaguggauuauggugg

SEQ ID NO: 59564 - RNA, 22 nt, Human
uuggaccucaguuauucuauca

SEQ ID NO: 59565 - RNA, 22 nt, Human
uuggacuuaacaaagggugaug

SEQ ID NO: 59566 - RNA, 21 nt, Human
uuggacuuuugcgugauugag

SEQ ID NO: 59567 - RNA, 22 nt, Human
uuggagaggcagucuugcucug

SEQ ID NO: 59568 - RNA, 22 nt, Human
uuggagaguuaauugacaguua

SEQ ID NO: 59569 - RNA, 22 nt, Human
uuggagauaugugaaaaaaaca

SEQ ID NO: 59570 - RNA, 22 nt, Human
uuggaggaugcaaugagggagu

SEQ ID NO: 59571 - RNA, 22 nt, Human
uuggaggaugucggcauauuua

SEQ ID NO: 59572 - RNA, 22 nt, Human
uuggagggacugagcuucaguc

SEQ ID NO: 59573 - RNA, 20 nt, Human
uuggaggugcagugcaugca

SEQ ID NO: 59574 - RNA, 22 nt, Human
uuggagguuucccaacuguggg

SEQ ID NO: 59575 - RNA, 22 nt, Human
uuggagguuugaaaauaugugu

SEQ ID NO: 59576 - RNA, 22 nt, Human
uuggagucacaggagaagaaug

SEQ ID NO: 59577 - RNA, 22 nt, Human
uuggaucaaauuucaugcuguc

SEQ ID NO: 59578 - RNA, 22 nt, Human
uuggauguuugaaaucacguac

SEQ ID NO: 59579 - RNA, 22 nt, Human
uuggauucacuguugguagagu

SEQ ID NO: 59580 - RNA, 22 nt, Human
uuggauucuguuaggcaccuuc

SEQ ID NO: 59581 - RNA, 22 nt, Human
uuggcaaaauuuaaagaaguga

SEQ ID NO: 59582 - RNA, 22 nt, Human
uuggcaaaggacucaaagcagg

SEQ ID NO: 59583 - RNA, 22 nt, Human
uuggcaacacauggaaaaauuu

SEQ ID NO: 59584 - RNA, 22 nt, Human
uuggcaauauuuacugaaguug

SEQ ID NO: 59585 - RNA, 22 nt, Human
uuggcaaugaucucaaucuucu

SEQ ID NO: 59586 - RNA, 22 nt, Human
uuggcaauggaccagccacugg

SEQ ID NO: 59587 - RNA, 22 nt, Human
uuggcaaugucuaaacacauuu

SEQ ID NO: 59588 - RNA, 22 nt, Human
uuggcaauuaguuauaucugca

SEQ ID NO: 59589 - RNA, 22 nt, Human
uuggcacacaguaagcccuaag

SEQ ID NO: 59590 - RNA, 22 nt, Human
uuggcacagagcugcagccugg

SEQ ID NO: 59591 - RNA, 22 nt, Human
uuggcacugaccaaagaagucc

SEQ ID NO: 59592 - RNA, 22 nt, Human
uuggcagaaugggcagcuugag

SEQ ID NO: 59593 - RNA, 22 nt, Human
uuggcagaggccgaggugaaga

SEQ ID NO: 59594 - RNA, 22 nt, Human
uuggcagaugaacacaacugga

SEQ ID NO: 59595 - RNA, 22 nt, Human
uuggcagauuugucaguaagcu

SEQ ID NO: 59596 - RNA, 22 nt, Human
uuggcagcagggaguuggccgc

SEQ ID NO: 59597 - RNA, 23 nt, Human
uuggcagcgggucaggcuguggg

SEQ ID NO: 59598 - RNA, 22 nt, Human
uuggcagcuacuuccccagugc

SEQ ID NO: 59599 - RNA, 19 nt, Human
uuggcagcugagauccugc

SEQ ID NO: 59600 - RNA, 22 nt, Human
uuggcaggaauauugcagaggu

SEQ ID NO: 59601 - RNA, 22 nt, Human
uuggcagggcaucagacacgug

SEQ ID NO: 59602 - RNA, 22 nt, Human
uuggcaguccaggauuaauaua

SEQ ID NO: 59603 - RNA, 22 nt, Human
uuggcagucucagucagauggc

SEQ ID NO: 59604 - RNA, 22 nt, Human
uuggcagugucugcaaaaugga

SEQ ID NO: 59605 - RNA, 22 nt, Human
uuggcauaaaacucuucaaaau

SEQ ID NO: 59606 - RNA, 22 nt, Human
uuggcaucaguguaggaccugu

SEQ ID NO: 59607 - RNA, 22 nt, Human
uuggccaaacagaguucaacag

SEQ ID NO: 59608 - RNA, 22 nt, Human
uuguacacaauucuuaacauac

SEQ ID NO: 59609 - RNA, 22 nt, Human
uuguacagggaaguaauacaag

SEQ ID NO: 59610 - RNA, 22 nt, Human
uuguacaguuuaagugggugaa

SEQ ID NO: 59611 - RNA, 22 nt, Human
uuguacauucuauggguuugga

SEQ ID NO: 59612 - RNA, 22 nt, Human
uuguaccagcucauuucagaac

SEQ ID NO: 59613 - RNA, 22 nt, Human
uuguacuuacauuuuaaagcua

SEQ ID NO: 59614 - RNA, 22 nt, Human
uuguacuuuggggaaauguuga

SEQ ID NO: 59615 - RNA, 22 nt, Human
uuguagaaaauuagaugcaugg

SEQ ID NO: 59616 - RNA, 22 nt, Human
uuguagaaucauuauuucuagu

SEQ ID NO: 59617 - RNA, 22 nt, Human
uuguagcugaaaguaaagaagu

SEQ ID NO: 59618 - RNA, 22 nt, Human
uuguagcuuaucaaggcuguuu

SEQ ID NO: 59619 - RNA, 22 nt, Human
uuguagcuuuuuaaugugcugc

SEQ ID NO: 59620 - RNA, 22 nt, Human
uuguauauaaagcccccacugu

SEQ ID NO: 59621 - RNA, 22 nt, Human
uuguaugaggauagcaagaagc

SEQ ID NO: 59622 - RNA, 22 nt, Human
uuguaugaucccauuuagugaa

SEQ ID NO: 59623 - RNA, 22 nt, Human
uuguauggauuugugggugagu

SEQ ID NO: 59624 - RNA, 22 nt, Human
uuguauuaggcccuagggaguu

SEQ ID NO: 59625 - RNA, 22 nt, Human
uuguauuaguaagucagcugcu

SEQ ID NO: 59626 - RNA, 22 nt, Human
uuguauucauugcuuacccaau

SEQ ID NO: 59627 - RNA, 22 nt, Human
uuguauucuuuaugacuucccu

SEQ ID NO: 59628 - RNA, 22 nt, Human
uuguauuucuuccggucucauu

SEQ ID NO: 59629 - RNA, 22 nt, Human
uuguauuugauugucauaucgu

SEQ ID NO: 59630 - RNA, 22 nt, Human
uugucaaguaaggcugacauuu

SEQ ID NO: 59631 - RNA, 22 nt, Human
uugucagccagcucgcacucuu

SEQ ID NO: 59632 - RNA, 22 nt, Human
uugucaucaagaugcauugguc

SEQ ID NO: 59633 - RNA, 22 nt, Human
uugucaucauccucuuuggggu

SEQ ID NO: 59634 - RNA, 22 nt, Human
uugucaugauccuucuguuagg

SEQ ID NO: 59635 - RNA, 22 nt, Human
uuguccaaaguaacacaucuag

SEQ ID NO: 59636 - RNA, 19 nt, Human
uuguccagaaaggcauugc

SEQ ID NO: 59637 - RNA, 23 nt, Human
uuguccagcugguuugggccaca

SEQ ID NO: 59638 - RNA, 22 nt, Human
uuguccauugugacaagugugg

SEQ ID NO: 59639 - RNA, 22 nt, Human
uuguccauuuuauuggauggug

SEQ ID NO: 59640 - RNA, 22 nt, Human
uugucccugccccugcuugcuu

SEQ ID NO: 59641 - RNA, 23 nt, Human
uuguccugccgaucucugagaau

SEQ ID NO: 59642 - RNA, 22 nt, Human
uuguccuggcccaaaugucaac

SEQ ID NO: 59643 - RNA, 22 nt, Human
uuguccuuaccucaaucuggaa

SEQ ID NO: 59644 - RNA, 22 nt, Human
uuguccuuggcucuagagguga

SEQ ID NO: 59645 - RNA, 22 nt, Human
uugucuauuuguucagguaagg

SEQ ID NO: 59646 - RNA, 22 nt, Human
uugucucuacagagaguaguag

SEQ ID NO: 59647 - RNA, 22 nt, Human
uugucucuguguggcuucccua

SEQ ID NO: 59648 - RNA, 22 nt, Human
uugucugagagauggcagaggu

SEQ ID NO: 59649 - RNA, 22 nt, Human
uugucugaggguuugagagaau

SEQ ID NO: 59650 - RNA, 22 nt, Human
uugucugcaugauucuaggcag

SEQ ID NO: 59651 - RNA, 22 nt, Human
uugucugcuugaugccaagcau

SEQ ID NO: 59652 - RNA, 22 nt, Human
uugucugcuuguucagauggaa

SEQ ID NO: 59653 - RNA, 22 nt, Human
uuuauucacuucagugccaaag

SEQ ID NO: 59654 - RNA, 22 nt, Human
uuuauucagcagcagcaguggu

SEQ ID NO: 59655 - RNA, 20 nt, Human
uuuauucagccuacccucuu

SEQ ID NO: 59656 - RNA, 22 nt, Human
uuuauucauuguuucgucgcag

SEQ ID NO: 59657 - RNA, 22 nt, Human
uuuauucuagcucagaauaguu

SEQ ID NO: 59658 - RNA, 22 nt, Human
uuuauucugugcuacaugaaga

SEQ ID NO: 59659 - RNA, 22 nt, Human
uuuauugaacacuugcacuggc

SEQ ID NO: 59660 - RNA, 22 nt, Human
uuuauugagcacccguugugcg

SEQ ID NO: 59661 - RNA, 22 nt, Human
uuuauugaguaucuacuaugug

SEQ ID NO: 59662 - RNA, 22 nt, Human
uuuauugcccuguaguacagga

SEQ ID NO: 59663 - RNA, 22 nt, Human
uuuauugcuagcccuuggucca

SEQ ID NO: 59664 - RNA, 22 nt, Human
uuuauugcugagaaggauucca

SEQ ID NO: 59665 - RNA, 22 nt, Human
uuuauuggaacacagccaugac

SEQ ID NO: 59666 - RNA, 22 nt, Human
uuuauuggauauuuacaagaua

SEQ ID NO: 59667 - RNA, 22 nt, Human
uuuauugucuucguggugccua

SEQ ID NO: 59668 - RNA, 22 nt, Human
uuuauuuaccuuauguccucca

SEQ ID NO: 59669 - RNA, 16 nt, Human
uuuauuuacuaguguu

SEQ ID NO: 59670 - RNA, 22 nt, Human
uuuauuuauaagccacuugcug

SEQ ID NO: 59671 - RNA, 23 nt, Human
uuuauuuauuuaggcugagggau

SEQ ID NO: 59672 - RNA, 22 nt, Human
uuuauuugaaucaggggagaau

SEQ ID NO: 59673 - RNA, 22 nt, Human
uuucaaaccuacuuguauguuu

SEQ ID NO: 59674 - RNA, 20 nt, Human
uuucaaacugcaccuuugcu

SEQ ID NO: 59675 - RNA, 22 nt, Human
uuucaaacugcccagcacaccu

SEQ ID NO: 59676 - RNA, 22 nt, Human
uuucaaacuguacuuuccccua

SEQ ID NO: 59677 - RNA, 17 nt, Human
uuucaaagcagucagga

SEQ ID NO: 59678 - RNA, 22 nt, Human
uuucaaagggaaguuaugaagu

SEQ ID NO: 59679 - RNA, 19 nt, Human
uuucaaagggcauaagccu

SEQ ID NO: 59680 - RNA, 22 nt, Human
uuucaaagguggaagagugaau

SEQ ID NO: 59681 - RNA, 22 nt, Human
uuucaaauggaucccucagccu

SEQ ID NO: 59682 - RNA, 22 nt, Human
uuucaacagaauaugaucagag

SEQ ID NO: 59683 - RNA, 22 nt, Human
uuucaacagcucucaaaugauc

SEQ ID NO: 59684 - RNA, 22 nt, Human
uuucaacaggaugauaauaggc

SEQ ID NO: 59685 - RNA, 22 nt, Human
uuucaacauauaccauaaugcc

SEQ ID NO: 59686 - RNA, 21 nt, Human
uuucaagggacccuggggauc

SEQ ID NO: 59687 - RNA, 22 nt, Human
uuucaaguagagggaucgcuag

SEQ ID NO: 59688 - RNA, 20 nt, Human
uuucaagucagcaauucuca

SEQ ID NO: 59689 - RNA, 22 nt, Human
uuucaaguggggacauuugaga

SEQ ID NO: 59690 - RNA, 22 nt, Human
uuucaaguuaaauggggucuuu

SEQ ID NO: 59691 - RNA, 22 nt, Human
uuucaaguucccaguuuugugg

SEQ ID NO: 59692 - RNA, 22 nt, Human
uuucaaugacacaaaagagaaa

SEQ ID NO: 59693 - RNA, 22 nt, Human
uuucaauguaugucuuucugag

SEQ ID NO: 59694 - RNA, 22 nt, Human
uuucaauuaggauguuuccaug

SEQ ID NO: 59695 - RNA, 22 nt, Human
uuucaauugacuuuggaagaaa

SEQ ID NO: 59696 - RNA, 22 nt, Human
uuucaauuuccaggcuagaauu

SEQ ID NO: 59697 - RNA, 22 nt, Human
uuucacaaacucagggugugug

SEQ ID NO: 59698 - RNA, 22 nt, Human
uuucacaacacaaucucguuaa

SEQ ID NO: 59699 - RNA, 18 nt, Human
uuucacaaccuccagagg

SEQ ID NO: 59700 - RNA, 22 nt, Human
uuucacaaguuucaggauucug

SEQ ID NO: 59701 - RNA, 20 nt, Human
uuucacaaugaacaugucuc

SEQ ID NO: 59702 - RNA, 22 nt, Human
uuucacaaugcaauccuacuuc

SEQ ID NO: 59703 - RNA, 22 nt, Human
uuucacaauuuuaaggagcaaa

SEQ ID NO: 59704 - RNA, 22 nt, Human
uuucacacugcagcaucagaga

SEQ ID NO: 59705 - RNA, 22 nt, Human
uuucacagagaauauugccuug

SEQ ID NO: 59706 - RNA, 22 nt, Human
uuucacagcagaauuucugagg

SEQ ID NO: 59707 - RNA, 22 nt, Human
uuucacagcagugugcugcuuu

SEQ ID NO: 59708 - RNA, 22 nt, Human
uuucacagcugucuuccgucuc

SEQ ID NO: 59709 - RNA, 22 nt, Human
uuucacagcuuccacuuaagga

SEQ ID NO: 59710 - RNA, 22 nt, Human
uuucacaggaauacccggcuuu

SEQ ID NO: 59711 - RNA, 22 nt, Human
uuucacagguaagcaauacagg

SEQ ID NO: 59712 - RNA, 22 nt, Human
uuucacaguagaaaucauuaug

SEQ ID NO: 59713 - RNA, 20 nt, Human
uuucacagucccuguuuccu

SEQ ID NO: 59714 - RNA, 22 nt, Human
uuucacagugcucuguaaguau

SEQ ID NO: 59715 - RNA, 22 nt, Human
uuucacaguuagcaugaggacu

SEQ ID NO: 59716 - RNA, 22 nt, Human
uuucacauaaauggaguaaaga

SEQ ID NO: 59717 - RNA, 22 nt, Human
uuuagcuauggauaacaaccac

SEQ ID NO: 59718 - RNA, 22 nt, Human
uuuagcuuaaauggagaaagag

SEQ ID NO: 59719 - RNA, 22 nt, Human
uuuagcuugaaucuuguuuaaa

SEQ ID NO: 59720 - RNA, 22 nt, Human
uuuaggaagaguugaguaaauu

SEQ ID NO: 59721 - RNA, 22 nt, Human
uuuaggaaguuucagauaggaa

SEQ ID NO: 59722 - RNA, 18 nt, Human
uuuaggaauuccaagaga

SEQ ID NO: 59723 - RNA, 22 nt, Human
uuuaggauaacuccaguuuucc

SEQ ID NO: 59724 - RNA, 22 nt, Human
uuuaggaugcucuauucugacu

SEQ ID NO: 59725 - RNA, 22 nt, Human
uuuaggcaagggcaagauuauc

SEQ ID NO: 59726 - RNA, 22 nt, Human
uuuaggcacagaguugagggac

SEQ ID NO: 59727 - RNA, 22 nt, Human
uuuaggcagcagugaggaugaa

SEQ ID NO: 59728 - RNA, 22 nt, Human
uuuaggcagcuacauacuaacu

SEQ ID NO: 59729 - RNA, 22 nt, Human
uuuaggcagucauugaacaagu

SEQ ID NO: 59730 - RNA, 22 nt, Human
uuuaggcauugggugcucaagu

SEQ ID NO: 59731 - RNA, 22 nt, Human
uuuagggacaagggucuggggu

SEQ ID NO: 59732 - RNA, 21 nt, Human
uuuagggaccaggucauaggc

SEQ ID NO: 59733 - RNA, 22 nt, Human
uuuaggucuucuuaagagucaa

SEQ ID NO: 59734 - RNA, 22 nt, Human
uuuagguuaaucaacaaacauu

SEQ ID NO: 59735 - RNA, 22 nt, Human
uuuagguucuuggaaucagucu

SEQ ID NO: 59736 - RNA, 22 nt, Human
uuuagguuuuuucacguggcua

SEQ ID NO: 59737 - RNA, 22 nt, Human
uuuaguaaguucacugcaaagc

SEQ ID NO: 59738 - RNA, 22 nt, Human
uuuaguacucaggggagaaguu

SEQ ID NO: 59739 - RNA, 22 nt, Human
uuuaguagaugcagcauuauuu

SEQ ID NO: 59740 - RNA, 19 nt, Human
uuuaguaugagcuccaggg

SEQ ID NO: 59741 - RNA, 22 nt, Human
uuuaguauguauuuaauggacu

SEQ ID NO: 59742 - RNA, 22 nt, Human
uuuagugcuuugcuauucaugg

SEQ ID NO: 59743 - RNA, 22 nt, Human
uuuaguguuugcguguacuccu

SEQ ID NO: 59744 - RNA, 22 nt, Human
uuuaguuauugcacagaauuag

SEQ ID NO: 59745 - RNA, 21 nt, Human
uuuaguucaaguacagaacca

SEQ ID NO: 59746 - RNA, 22 nt, Human
uuuauaaaauagacugggucua

SEQ ID NO: 59747 - RNA, 22 nt, Human
uuuauaagaagcaaugucugag

SEQ ID NO: 59748 - RNA, 23 nt, Human
uuuauacaagaaaccgcuggccu

SEQ ID NO: 59749 - RNA, 22 nt, Human
uuuauacuucauaaugucuauu

SEQ ID NO: 59750 - RNA, 22 nt, Human
uuuauagaugucuguauuauaa

SEQ ID NO: 59751 - RNA, 22 nt, Human
uuuauaggguagcuaggauuga

SEQ ID NO: 59752 - RNA, 22 nt, Human
uuuauaguagcaugauuuauaa

SEQ ID NO: 59753 - RNA, 22 nt, Human
uuuauauagagauuugugcaug

SEQ ID NO: 59754 - RNA, 22 nt, Human
uuuauaugaaagugaccagugg

SEQ ID NO: 59755 - RNA, 22 nt, Human
uuuauaugguugacuaugaguu

SEQ ID NO: 59756 - RNA, 22 nt, Human
uuuauauugggagucguuuuga

SEQ ID NO: 59757 - RNA, 20 nt, Human
uuuaucaggcacuuacuauu

SEQ ID NO: 59758 - RNA, 23 nt, Human
uuuauccaacucuguaaucucuc

SEQ ID NO: 59759 - RNA, 22 nt, Human
uuuauccacaguauccaaaauc

SEQ ID NO: 59760 - RNA, 22 nt, Human
uuuauccacucauccaugccuc

SEQ ID NO: 59761 - RNA, 22 nt, Human
uuuauccauaucauuaaaaucu

SEQ ID NO: 59762 - RNA, 22 nt, Human
uuuauccaucaucugcugaagg

SEQ ID NO: 59763 - RNA, 22 nt, Human
uuuaucuauuguauuguugaug

SEQ ID NO: 59764 - RNA, 22 nt, Human
uuuaucugaccucacuucuuaa

SEQ ID NO: 59765 - RNA, 22 nt, Human
uuuaucugauauucagcgauuu

SEQ ID NO: 59766 - RNA, 22 nt, Human
uuuaucuguagagcuucaccua

SEQ ID NO: 59767 - RNA, 22 nt, Human
uuuaucuguauaucucaagugu

SEQ ID NO: 59768 - RNA, 22 nt, Human
uuuaucugugggaguuguuugg

SEQ ID NO: 59769 - RNA, 22 nt, Human
uuuaucuguuguaccugcauug

SEQ ID NO: 59770 - RNA, 22 nt, Human
uuuaugaaccacucuacaccuu

SEQ ID NO: 59771 - RNA, 22 nt, Human
uuucuccucuccagagugcagu

SEQ ID NO: 59772 - RNA, 22 nt, Human
uuucuccugcuagaacaaggag

SEQ ID NO: 59773 - RNA, 22 nt, Human
uuucuccuguguaagccgccca

SEQ ID NO: 59774 - RNA, 22 nt, Human
uuucucuaaauagggaggcuua

SEQ ID NO: 59775 - RNA, 22 nt, Human
uuucucuagcuauucauuaaau

SEQ ID NO: 59776 - RNA, 22 nt, Human
uuucucucagccuguagaaacu

SEQ ID NO: 59777 - RNA, 22 nt, Human
uuucucuccuccaaaccaaaga

SEQ ID NO: 59778 - RNA, 22 nt, Human
uuucucucugacugggagcuga

SEQ ID NO: 59779 - RNA, 16 nt, Human
uuucucucugcuauuu

SEQ ID NO: 59780 - RNA, 22 nt, Human
uuucucugaggcuggccucccu

SEQ ID NO: 59781 - RNA, 22 nt, Human
uuucucugcagagccccaagga

SEQ ID NO: 59782 - RNA, 22 nt, Human
uuucucugcuguguuggcagcu

SEQ ID NO: 59783 - RNA, 22 nt, Human
uuucucugggcuguuggcagcc

SEQ ID NO: 59784 - RNA, 18 nt, Human
uuucucugucgucuucug

SEQ ID NO: 59785 - RNA, 19 nt, Human
uuucucugugcaccuuuuc

SEQ ID NO: 59786 - RNA, 22 nt, Human
uuucucuugcgauaugcuacac

SEQ ID NO: 59787 - RNA, 22 nt, Human
uuucucuuuggaggggcugaau

SEQ ID NO: 59788 - RNA, 22 nt, Human
uuucugaaaacugaaguagugc

SEQ ID NO: 59789 - RNA, 22 nt, Human
uuucugaaacauggucuuugua

SEQ ID NO: 59790 - RNA, 22 nt, Human
uuucugaagggcagcagacucu

SEQ ID NO: 59791 - RNA, 22 nt, Human
uuucugaauuuacucaagguca

SEQ ID NO: 59792 - RNA, 22 nt, Human
uuucugacacaucaguuguaaa

SEQ ID NO: 59793 - RNA, 22 nt, Human
uuucugacagagugcucagagu

SEQ ID NO: 59794 - RNA, 22 nt, Human
uuucugaccugcaacaguuuac

SEQ ID NO: 59795 - RNA, 22 nt, Human
uuucugacuccagagaggaaua

SEQ ID NO: 59796 - RNA, 22 nt, Human
uuucugacugguguauaauagg

SEQ ID NO: 59797 - RNA, 22 nt, Human
uuucugaggaauuaauacagaa

SEQ ID NO: 59798 - RNA, 22 nt, Human
uuucugauauacuguagaaucc

SEQ ID NO: 59799 - RNA, 22 nt, Human
uuucugauauucauuuagaaga

SEQ ID NO: 59800 - RNA, 22 nt, Human
uuucugcaaaaucuaaguuaga

SEQ ID NO: 59801 - RNA, 22 nt, Human
uuucugcaaacuuccacgucuc

SEQ ID NO: 59802 - RNA, 22 nt, Human
uuucugcacauuucuaaaguug

SEQ ID NO: 59803 - RNA, 20 nt, Human
uuucugcagauguuuacaug

SEQ ID NO: 59804 - RNA, 22 nt, Human
uuucugcaugcauuuaauuaaa

SEQ ID NO: 59805 - RNA, 22 nt, Human
uuucugccagguuucuggauga

SEQ ID NO: 59806 - RNA, 22 nt, Human
uuucugcucauccuaguggagc

SEQ ID NO: 59807 - RNA, 22 nt, Human
uuucugcuucucagacccugaa

SEQ ID NO: 59808 - RNA, 22 nt, Human
uuucugcuugagagaauugcug

SEQ ID NO: 59809 - RNA, 22 nt, Human
uuucugcuuucagagugagaca

SEQ ID NO: 59810 - RNA, 22 nt, Human
uuucuggaaacggguucaagcu

SEQ ID NO: 59811 - RNA, 22 nt, Human
uuucuggacagcaagaucaguu

SEQ ID NO: 59812 - RNA, 20 nt, Human
uuucuguaaggcauuaaucu

SEQ ID NO: 59813 - RNA, 22 nt, Human
uuucuguaaguucaggcuuucc

SEQ ID NO: 59814 - RNA, 20 nt, Human
uuucuguagcucaguauuca

SEQ ID NO: 59815 - RNA, 22 nt, Human
uuucuguagggauuucacaguu

SEQ ID NO: 59816 - RNA, 22 nt, Human
uuucuguauuuaaaagaucugg

SEQ ID NO: 59817 - RNA, 22 nt, Human
uuucuguauuuaggacaggugg

SEQ ID NO: 59818 - RNA, 20 nt, Human
uuucugugcccaggucuguu

SEQ ID NO: 59819 - RNA, 22 nt, Human
uuucuguuuagcauaaaguggc

SEQ ID NO: 59820 - RNA, 22 nt, Human
uuucuuaauuugaguuccacua

SEQ ID NO: 59821 - RNA, 21 nt, Human
uuucuuaucuguaaaguggga

SEQ ID NO: 59822 - RNA, 22 nt, Human
uuucuucaauugcuaacaagga

SEQ ID NO: 59823 - RNA, 22 nt, Human
uuucuuccaaaggcacguucuc

SEQ ID NO: 59824 - RNA, 22 nt, Human
uuucuuccuaaauaugauuucc

SEQ ID NO: 59825 - RNA, 22 nt, Human
uuugaugaaccuauauaauuug

SEQ ID NO: 59826 - RNA, 22 nt, Human
uuugaugaguuuaauaacagcc

SEQ ID NO: 59827 - RNA, 22 nt, Human
uuugaugaugaugauaaaguuu

SEQ ID NO: 59828 - RNA, 22 nt, Human
uuugauucaaaaaccacuccac

SEQ ID NO: 59829 - RNA, 22 nt, Human
uuugauucaauguuuauauaaa

SEQ ID NO: 59830 - RNA, 22 nt, Human
uuugauucuggccucugagaag

SEQ ID NO: 59831 - RNA, 22 nt, Human
uuugauuuacuggauauucuca

SEQ ID NO: 59832 - RNA, 22 nt, Human
uuugcaaacggcccugaguccc

SEQ ID NO: 59833 - RNA, 22 nt, Human
uuugcaaagucccugggaugga

SEQ ID NO: 59834 - RNA, 22 nt, Human
uuugcaaagugacuauuauaug

SEQ ID NO: 59835 - RNA, 22 nt, Human
uuugcaaaguuauuuagacuca

SEQ ID NO: 59836 - RNA, 22 nt, Human
uuugcaaaugaagcucugagga

SEQ ID NO: 59837 - RNA, 22 nt, Human
uuugcaaauuucgucuccucag

SEQ ID NO: 59838 - RNA, 23 nt, Human
uuugcaaauuuuccugacuacuc

SEQ ID NO: 59839 - RNA, 22 nt, Human
uuugcaaggcagcaggugcagu

SEQ ID NO: 59840 - RNA, 22 nt, Human
uuugcaauuugugcugcaaaug

SEQ ID NO: 59841 - RNA, 22 nt, Human
uuugcacacauucuuagaaaug

SEQ ID NO: 59842 - RNA, 22 nt, Human
uuugcagaagaaaacaugaaca

SEQ ID NO: 59843 - RNA, 22 nt, Human
uuugcagcaauucguuauacag

SEQ ID NO: 59844 - RNA, 22 nt, Human
uuugcagccucccuggcagaag

SEQ ID NO: 59845 - RNA, 22 nt, Human
uuugcauaaaggagcauuucuc

SEQ ID NO: 59846 - RNA, 18 nt, Human
uuugcaugguaacauuga

SEQ ID NO: 59847 - RNA, 22 nt, Human
uuugcauugcauacaaggaacu

SEQ ID NO: 59848 - RNA, 22 nt, Human
uuugcauugcauuaaguauucu

SEQ ID NO: 59849 - RNA, 22 nt, Human
uuugcauuuccagaguagcaga

SEQ ID NO: 59850 - RNA, 22 nt, Human
uuugcauuuguucaaguauuga

SEQ ID NO: 59851 - RNA, 22 nt, Human
uuugccucucagagucuacaca

SEQ ID NO: 59852 - RNA, 22 nt, Human
uuugccugauucuaagagcuca

SEQ ID NO: 59853 - RNA, 22 nt, Human
uuugccugggaauucuagugua

SEQ ID NO: 59854 - RNA, 21 nt, Human
uuugccuucacgaagcauccu

SEQ ID NO: 59855 - RNA, 22 nt, Human
uuugccuucucugaaccuauuu

SEQ ID NO: 59856 - RNA, 20 nt, Human
uuugcgaggccaaggcgggc

SEQ ID NO: 59857 - RNA, 22 nt, Human
uuugcuaaaaggccauugauuu

SEQ ID NO: 59858 - RNA, 22 nt, Human
uuugcuaaaauguauugggauu

SEQ ID NO: 59859 - RNA, 22 nt, Human
uuugcuaaauaagugauuaagu

SEQ ID NO: 59860 - RNA, 22 nt, Human
uuugcucacuuguguauuuuca

SEQ ID NO: 59861 - RNA, 22 nt, Human
uuugcucugcuguugccaggug

SEQ ID NO: 59862 - RNA, 22 nt, Human
uuugcugacuggaugcaguugg

SEQ ID NO: 59863 - RNA, 22 nt, Human
uuugcugaguuuucuccuaaga

SEQ ID NO: 59864 - RNA, 22 nt, Human
uuugcugauauuuugcugauac

SEQ ID NO: 59865 - RNA, 22 nt, Human
uuugcugcuguauauggagccc

SEQ ID NO: 59866 - RNA, 22 nt, Human
uuugcuggagaugagcgugggu

SEQ ID NO: 59867 - RNA, 19 nt, Human
uuugcugguucaggaaaga

SEQ ID NO: 59868 - RNA, 22 nt, Human
uuugcugugggauauccaugug

SEQ ID NO: 59869 - RNA, 20 nt, Human
uuugcuguggguguaagaau

SEQ ID NO: 59870 - RNA, 22 nt, Human
uuugcuuaacugguagaaugcg

SEQ ID NO: 59871 - RNA, 22 nt, Human
uuugcuucacaaguaugguucu

SEQ ID NO: 59872 - RNA, 22 nt, Human
uuugcuugauuaggauauggaa

SEQ ID NO: 59873 - RNA, 22 nt, Human
uuugcuuguucaagauuucugu

SEQ ID NO: 59874 - RNA, 18 nt, Human
uuugcuuuccuucuucag

SEQ ID NO: 59875 - RNA, 22 nt, Human
uuugcuuucuugauucagauua

SEQ ID NO: 59876 - RNA, 22 nt, Human
uuugcuuugacugucagcaagu

SEQ ID NO: 59877 - RNA, 22 nt, Human
uuugcuuuugugcucuaguggu

SEQ ID NO: 59878 - RNA, 22 nt, Human
uuuggaaacaucucagaaaaua

SEQ ID NO: 59879 - RNA, 22 nt, Human
uuuggaaagacacacaguuuua

SEQ ID NO: 59880 - RNA, 22 nt, Human
uuuggaaaguguacaaauuuga

SEQ ID NO: 59881 - RNA, 22 nt, Human
uuuggaaauaauuccaucucau

SEQ ID NO: 59882 - RNA, 22 nt, Human
uuuggaaauacgcguaggcaga

SEQ ID NO: 59883 - RNA, 22 nt, Human
uuuggaaaugaccccgucuaag

SEQ ID NO: 59884 - RNA, 22 nt, Human
uuuggaaauuucaucaauagcc

SEQ ID NO: 59885 - RNA, 22 nt, Human
uuuggaaauuuucauccagaca

SEQ ID NO: 59886 - RNA, 19 nt, Human
uuuggaacuuuuugaugcc

SEQ ID NO: 59887 - RNA, 22 nt, Human
uuuggaagauaguucggcaguu

SEQ ID NO: 59888 - RNA, 22 nt, Human
uuuggaagggaaagaaaguacu

SEQ ID NO: 59889 - RNA, 22 nt, Human
uuuggaaguaaaugaguguuuu

SEQ ID NO: 59890 - RNA, 22 nt, Human
uuuggaaucauagauauauuca

SEQ ID NO: 59891 - RNA, 22 nt, Human
uuuggaaugaaacagcagagcc

SEQ ID NO: 59892 - RNA, 22 nt, Human
uuuggaaugcccauggacuggu

SEQ ID NO: 59893 - RNA, 22 nt, Human
uuuggaauguuaggugucucau

SEQ ID NO: 59894 - RNA, 22 nt, Human
uuuggaauucagauggcuuagg

SEQ ID NO: 59895 - RNA, 22 nt, Human
uuuggacaaacagaauagagcu

SEQ ID NO: 59896 - RNA, 19 nt, Human
uuuggacagaguguccagg

SEQ ID NO: 59897 - RNA, 22 nt, Human
uuuggacuuagccugcagaauu

SEQ ID NO: 59898 - RNA, 22 nt, Human
uuuggagaaguugcuaaagugu

SEQ ID NO: 59899 - RNA, 20 nt, Human
uuuggagagaaagaaguagu

SEQ ID NO: 59900 - RNA, 22 nt, Human
uuuucccaucuacaaagcaggg

SEQ ID NO: 59901 - RNA, 22 nt, Human
uuuuccuacugauaaacaguua

SEQ ID NO: 59902 - RNA, 22 nt, Human
uuuuccuaguaggccuauuaga

SEQ ID NO: 59903 - RNA, 20 nt, Human
uuuuccucguguuuguucua

SEQ ID NO: 59904 - RNA, 22 nt, Human
uuuuccucugagcuuugaauaa

SEQ ID NO: 59905 - RNA, 22 nt, Human
uuuuccucugcaauaaaagcag

SEQ ID NO: 59906 - RNA, 22 nt, Human
uuuuccuggagauggaguuguu

SEQ ID NO: 59907 - RNA, 22 nt, Human
uuuuccugggcuuucuguguaa

SEQ ID NO: 59908 - RNA, 22 nt, Human
uuuuccuguuaaaucugggcac

SEQ ID NO: 59909 - RNA, 22 nt, Human
uuuuccuuaacagagggagaaa

SEQ ID NO: 59910 - RNA, 22 nt, Human
uuuuccuucuagagcagauuuc

SEQ ID NO: 59911 - RNA, 22 nt, Human
uuuuccuuugauucccagaugu

SEQ ID NO: 59912 - RNA, 22 nt, Human
uuuucguuggucauuccccagc

SEQ ID NO: 59913 - RNA, 22 nt, Human
uuuucguuuauuugacauguaa

SEQ ID NO: 59914 - RNA, 22 nt, Human
uuuucuaaaagaagucacugau

SEQ ID NO: 59915 - RNA, 22 nt, Human
uuuucuaagggaaacguccucc

SEQ ID NO: 59916 - RNA, 22 nt, Human
uuuucuaauuuaguuacccucc

SEQ ID NO: 59917 - RNA, 22 nt, Human
uuuucuagggugcuaaaugaac

SEQ ID NO: 59918 - RNA, 22 nt, Human
uuuucuaucuccuagaacugcc

SEQ ID NO: 59919 - RNA, 22 nt, Human
uuuucucaagauccaaugcacu

SEQ ID NO: 59920 - RNA, 22 nt, Human
uuuucucagcugcacuguauua

SEQ ID NO: 59921 - RNA, 22 nt, Human
uuuucuccaacucaaaggaaag

SEQ ID NO: 59922 - RNA, 22 nt, Human
uuuucuccagggaacaagguga

SEQ ID NO: 59923 - RNA, 22 nt, Human
uuuucucccgcuggcugcucuu

SEQ ID NO: 59924 - RNA, 22 nt, Human
uuuucuccuaagacccuucacc

SEQ ID NO: 59925 - RNA, 17 nt, Human
uuuucuccugcccauuc

SEQ ID NO: 59926 - RNA, 19 nt, Human
uuuucucgugcuugucugc

SEQ ID NO: 59927 - RNA, 22 nt, Human
uuuucucuacaaaauaaccagc

SEQ ID NO: 59928 - RNA, 22 nt, Human
uuuucucuccagguggggugau

SEQ ID NO: 59929 - RNA, 22 nt, Human
uuuucugaaguuuaagacauuu

SEQ ID NO: 59930 - RNA, 22 nt, Human
uuuucugaccuaucuacauuua

SEQ ID NO: 59931 - RNA, 22 nt, Human
uuuucuguuacaaaguacagcg

SEQ ID NO: 59932 - RNA, 22 nt, Human
uuuucuguuugcuucaagacau

SEQ ID NO: 59933 - RNA, 22 nt, Human
uuuucuuaugugcagcuauaug

SEQ ID NO: 59934 - RNA, 22 nt, Human
uuuugacaaugcuaaucucaau

SEQ ID NO: 59935 - RNA, 22 nt, Human
uuuugagauggagucuugcucu

SEQ ID NO: 59936 - RNA, 22 nt, Human
uuuugagauggugucucgcucc

SEQ ID NO: 59937 - RNA, 22 nt, Human
uuuugauaucaugaugaacaga

SEQ ID NO: 59938 - RNA, 23 nt, Human
uuuugcaauaagucacuggaaua

SEQ ID NO: 59939 - RNA, 22 nt, Human
uuuugccugagauccgagucug

SEQ ID NO: 59940 - RNA, 22 nt, Human
uuuugcugcauugaagucagau

SEQ ID NO: 59941 - RNA, 22 nt, Human
uuuuggaaucugggaaaacagu

SEQ ID NO: 59942 - RNA, 22 nt, Human
uuuuggaaugaggaacauccag

SEQ ID NO: 59943 - RNA, 22 nt, Human
uuuuggcacugcgucuacaugg

SEQ ID NO: 59944 - RNA, 22 nt, Human
uuuuggcagauuacuuaauaug

SEQ ID NO: 59945 - RNA, 22 nt, Human
uuuuggcuguagcuggaaaucu

SEQ ID NO: 59946 - RNA, 22 nt, Human
uuuuggcuuaaagagaauguau

SEQ ID NO: 59947 - RNA, 22 nt, Human
uuuugguaauuaaguagauauu

SEQ ID NO: 59948 - RNA, 22 nt, Human
uuuuggucaacaguacaugcgg

SEQ ID NO: 59949 - RNA, 22 nt, Human
uuuugguucugggauacagaga

SEQ ID NO: 59950 - RNA, 22 nt, Human
uuuugguuucccuucuuauggu

SEQ ID NO: 59951 - RNA, 22 nt, Human
uuuuguaauuuccugacgacua

SEQ ID NO: 59952 - RNA, 22 nt, Human
uuuuguauccucccuuucacug

SEQ ID NO: 59953 - RNA, 22 nt, Human
uuuugucuaagaacuuugcaaa

SEQ ID NO: 59954 - RNA, 22 nt, Human
uuuugugacacuucuugagaca

SEQ ID NO: 59955 - RNA, 22 nt, Human
uuuugugagcugagaaauguau

SEQ ID NO: 59956 - RNA, 23 nt, Human
uuuugugugacuuaauaucucuu

SEQ ID NO: 59957 - RNA, 22 nt, Human
uuuuguuuguguccacugcagu

SEQ ID NO: 59958 - RNA, 22 nt, Human
uuuuguuuucuuagaaaccugg

SEQ ID NO: 59959 - RNA, 22 nt, Human
uuuuuaagagauucuccagucu

SEQ ID NO: 59960 - RNA, 22 nt, Human
uuuuuaaugcagucugagacau

SEQ ID NO: 59961 - RNA, 19 nt, Human
uuuuuaaugggcuggagca

SEQ ID NO: 59962 - RNA, 22 nt, Human
uuuuuagaauuggcugagaauu

SEQ ID NO: 59963 - RNA, 22 nt, Human
uuuuuagauuacucagccacca

SEQ ID NO: 59964 - RNA, 22 nt, Human
uuuuuauaggucagggcaaguc

SEQ ID NO: 59965 - RNA, 22 nt, Human
uuuuuauaugaaggauagugcg

SEQ ID NO: 59966 - RNA, 22 nt, Human
uuuuuaucuuguaugugucucu

SEQ ID NO: 59967 - RNA, 22 nt, Human
uuuuucacacauguggcuugau

SEQ ID NO: 59968 - RNA, 22 nt, Human
uuuuucauauuccccucucugg

SEQ ID NO: 59969 - RNA, 22 nt, Human
uuuuuccacauacccuaggcca

SEQ ID NO: 59970 - RNA, 22 nt, Human
uuuuuccaggguuagauguuua

SEQ ID NO: 59971 - RNA, 22 nt, Human
uuuuucuagcucaaagauucua

SEQ ID NO: 59972 - RNA, 22 nt, Human
uuuuucucuaaguagucccaaa

SEQ ID NO: 59973 - RNA, 18 nt, Human
uuuuucugauaaaacaag

SEQ ID NO: 59974 - RNA, 22 nt, Human
uuuuucugucucuuacauugca

SEQ ID NO: 59975 - RNA, 22 nt, Human
uuuuucuuaaauguggguuggc

SEQ ID NO: 59976 - RNA, 22 nt, Human
uuuuucuugugcuggaucuaau

SEQ ID NO: 59977 - RNA, 22 nt, Human
uuuuugauacucaagaggggua

SEQ ID NO: 59978 - RNA, 22 nt, Human
uuuuuggaaggagauccacacu

SEQ ID NO: 59979 - RNA, 22 nt, Human
uuuuuguggugugaguggacau

SEQ ID NO: 59980 - RNA, 22 nt, Human
uuuuugugugagcaggguguua

SEQ ID NO: 59981 - RNA, 22 nt, Human
aaaaacagaaugugucuaacuc

SEQ ID NO: 59982 - RNA, 20 nt, Human
aaaaacaguaaugcugaaga

SEQ ID NO: 59983 - RNA, 22 nt, Human
aaaaaccuuucccauacuaaga

SEQ ID NO: 59984 - RNA, 19 nt, Human
aaaaacuuaguccagaaag

SEQ ID NO: 59985 - RNA, 20 nt, Human
aaaaagacaaaacgaguugg

SEQ ID NO: 59986 - RNA, 22 nt, Human
aaaaagacuuccaacucaggag

SEQ ID NO: 59987 - RNA, 22 nt, Human
aaaaagauguccugaaguuuag

SEQ ID NO: 59988 - RNA, 22 nt, Human
aaaaagguugauccagauuagg

SEQ ID NO: 59989 - RNA, 22 nt, Human
aaaaagucauauucuuguuccu

SEQ ID NO: 59990 - RNA, 22 nt, Human
aaaaaucuaugacugcuucucc

SEQ ID NO: 59991 - RNA, 22 nt, Human
aaaaaugaauucuucaguggca

SEQ ID NO: 59992 - RNA, 22 nt, Human
aaaaaugucauuauggaacuga

SEQ ID NO: 59993 - RNA, 22 nt, Human
aaaacacugccugcuugacuga

SEQ ID NO: 59994 - RNA, 22 nt, Human
aaaacaguuuaggcaucacagu

SEQ ID NO: 59995 - RNA, 22 nt, Human
aaaacauguccauacagaaacu

SEQ ID NO: 59996 - RNA, 22 nt, Human
aaaacauucugugaacucucaa

SEQ ID NO: 59997 - RNA, 22 nt, Human
aaaacauuuuacugccaucuca

SEQ ID NO: 59998 - RNA, 22 nt, Human
aaaaccacaaugacuuuugcag

SEQ ID NO: 59999 - RNA, 22 nt, Human
aaaaccagguagcaaaggagac

SEQ ID NO: 60000 - RNA, 22 nt, Human
aaaaccuucuagacuuuauauu

SEQ ID NO: 60001 - RNA, 22 nt, Human
aaaacucaaacauuuuggcaua

SEQ ID NO: 60002 - RNA, 22 nt, Human
aaaacuccugaaauuguuuccc

SEQ ID NO: 60003 - RNA, 22 nt, Human
aaaacugaaauacgauccaaug

SEQ ID NO: 60004 - RNA, 22 nt, Human
aaaagaaccuagcuccucaguc

SEQ ID NO: 60005 - RNA, 22 nt, Human
aaaagacaggugucugcggccc

SEQ ID NO: 60006 - RNA, 22 nt, Human
aaaagaggaacucuuauauacu

SEQ ID NO: 60007 - RNA, 20 nt, Human
aaaagagugcuucaacugcu

SEQ ID NO: 60008 - RNA, 22 nt, Human
aaaagaguguuucaacuuuggc

SEQ ID NO: 60009 - RNA, 22 nt, Human
aaaagcaaggcagucugucuga

SEQ ID NO: 60010 - RNA, 22 nt, Human
aaaagcagaccacgcuuugugg

SEQ ID NO: 60011 - RNA, 22 nt, Human
aaaagcagaucuccaaagucua

SEQ ID NO: 60012 - RNA, 22 nt, Human
aaaagcagguacucagcuuggg

SEQ ID NO: 60013 - RNA, 22 nt, Human
aaaaggacaagcuuuggaguua

SEQ ID NO: 60014 - RNA, 19 nt, Human
aaaaggagagaucagaguu

SEQ ID NO: 60015 - RNA, 22 nt, Human
aaaaggauguuuucaugaaaca

SEQ ID NO: 60016 - RNA, 22 nt, Human
aaaaggcuaauccagagcaacu

SEQ ID NO: 60017 - RNA, 22 nt, Human
aaaaggcucuucaaaauggaag

SEQ ID NO: 60018 - RNA, 22 nt, Human
aaaagggcaaaaccaucaugga

SEQ ID NO: 60019 - RNA, 22 nt, Human
aaaagguagauucuccuucuau

SEQ ID NO: 60020 - RNA, 22 nt, Human
aaaaguaauugcaauuuuguag

SEQ ID NO: 60021 - RNA, 22 nt, Human
aaaaguaauugcaguuuucgcc

SEQ ID NO: 60022 - RNA, 22 nt, Human
aaaaguaauugcaguuuugcca

SEQ ID NO: 60023 - RNA, 22 nt, Human
aaaaguaauugugguuuuggcc

SEQ ID NO: 60024 - RNA, 22 nt, Human
aaaaguacuauuuuaacaaagu

SEQ ID NO: 60025 - RNA, 22 nt, Human
aaaagucugcucucauuucaga

SEQ ID NO: 60026 - RNA, 22 nt, Human
aaaagugaugggauggcacuuc

SEQ ID NO: 60027 - RNA, 22 nt, Human
aaaaguuagcuauuaguaggug

SEQ ID NO: 60028 - RNA, 22 nt, Human
aaaaguuuaagacucauucuag

SEQ ID NO: 60029 - RNA, 22 nt, Human
aaaauaacuucuacuauuugca

SEQ ID NO: 60030 - RNA, 22 nt, Human
aaaauacacauacuaggggaaa

SEQ ID NO: 60031 - RNA, 22 nt, Human
aaaauagcuauggaaugucacu

SEQ ID NO: 60032 - RNA, 22 nt, Human
aaaauagguacggauuagaaug

SEQ ID NO: 60033 - RNA, 22 nt, Human
aaaauauggggugagcccagag

SEQ ID NO: 60034 - RNA, 22 nt, Human
aaaauauguauaacucuucugc

SEQ ID NO: 60035 - RNA, 22 nt, Human
aaaaucacaagcuugggucacu

SEQ ID NO: 60036 - RNA, 22 nt, Human
aaaaucacacaaguagaugggg

SEQ ID NO: 60037 - RNA, 23 nt, Human
aaaaucauuaauuuacccugaaa

SEQ ID NO: 60038 - RNA, 22 nt, Human
aaaauccacaacgcucauuuca

SEQ ID NO: 60039 - RNA, 22 nt, Human
aaaauccucuaauucuagaaua

SEQ ID NO: 60040 - RNA, 22 nt, Human
aaaaucuugugacuuaggaagg

SEQ ID NO: 60041 - RNA, 22 nt, Human
aaaaugagacacaugugacucc

SEQ ID NO: 60042 - RNA, 22 nt, Human
aaaaugaggucaauauccuuuu

SEQ ID NO: 60043 - RNA, 22 nt, Human
aaagcagccgguucccuggucu

SEQ ID NO: 60044 - RNA, 22 nt, Human
aaagcagccugcucauccugga

SEQ ID NO: 60045 - RNA, 22 nt, Human
aaagcagcggugucuuuacugc

SEQ ID NO: 60046 - RNA, 22 nt, Human
aaagcagcugaucucagagccu

SEQ ID NO: 60047 - RNA, 22 nt, Human
aaagcagcuguuugacuuucca

SEQ ID NO: 60048 - RNA, 22 nt, Human
aaagcagggcgauguccuccuc

SEQ ID NO: 60049 - RNA, 22 nt, Human
aaagcagguuaugaccauggcc

SEQ ID NO: 60050 - RNA, 22 nt, Human
aaagcagucacuccagugugau

SEQ ID NO: 60051 - RNA, 22 nt, Human
aaagcagucuguuuuaaccuga

SEQ ID NO: 60052 - RNA, 19 nt, Human
aaagcagugcauccucuuu

SEQ ID NO: 60053 - RNA, 22 nt, Human
aaagcagugcugugagaacacu

SEQ ID NO: 60054 - RNA, 22 nt, Human
aaagcauguucugggaauagua

SEQ ID NO: 60055 - RNA, 22 nt, Human
aaagcauuguuucaagauuaac

SEQ ID NO: 60056 - RNA, 20 nt, Human
aaagcauuuacuugugauug

SEQ ID NO: 60057 - RNA, 20 nt, Human
aaagccacuggcaagagacu

SEQ ID NO: 60058 - RNA, 22 nt, Human
aaagccagaauucguccagccu

SEQ ID NO: 60059 - RNA, 22 nt, Human
aaagccagcaaggugaguuuca

SEQ ID NO: 60060 - RNA, 22 nt, Human
aaagccagggacagugugcaug

SEQ ID NO: 60061 - RNA, 22 nt, Human
aaagccauaagccuaauacuaa

SEQ ID NO: 60062 - RNA, 22 nt, Human
aaagccaucaguaaaaugauuu

SEQ ID NO: 60063 - RNA, 22 nt, Human
aaagccauuacaaaauuucaua

SEQ ID NO: 60064 - RNA, 22 nt, Human
aaagccauugcagagcaggauu

SEQ ID NO: 60065 - RNA, 22 nt, Human
aaagccuugagauccuauaguu

SEQ ID NO: 60066 - RNA, 22 nt, Human
aaagccuuggucaucugguucc

SEQ ID NO: 60067 - RNA, 22 nt, Human
aaagcuaagguagcauuggaga

SEQ ID NO: 60068 - RNA, 22 nt, Human
aaagcuaccuuuguguucauag

SEQ ID NO: 60069 - RNA, 22 nt, Human
aaagcuauagggucaagcauuu

SEQ ID NO: 60070 - RNA, 22 nt, Human
aaagcuaugaggcaugcauuuc

SEQ ID NO: 60071 - RNA, 22 nt, Human
aaagcucucccacuguaugaag

SEQ ID NO: 60072 - RNA, 22 nt, Human
aaagcucuuuuccaaguauuga

SEQ ID NO: 60073 - RNA, 22 nt, Human
aaagcugccaaggagaauacua

SEQ ID NO: 60074 - RNA, 22 nt, Human
aaagcugggcuggccaacccag

SEQ ID NO: 60075 - RNA, 22 nt, Human
aaagcugguuauucugaggcag

SEQ ID NO: 60076 - RNA, 22 nt, Human
aaagcuguaaugcaugcuuucu

SEQ ID NO: 60077 - RNA, 22 nt, Human
aaagcuguagaaucaucuuaau

SEQ ID NO: 60078 - RNA, 18 nt, Human
aaagcuguuauuccagaa

SEQ ID NO: 60079 - RNA, 22 nt, Human
aaagcuucuaggccuauugcuu

SEQ ID NO: 60080 - RNA, 22 nt, Human
aaagcuugugcuguaguauuua

SEQ ID NO: 60081 - RNA, 22 nt, Human
aaagcuuuuguuuucguaacug

SEQ ID NO: 60082 - RNA, 22 nt, Human
aaaggaaaauaaguaguuccau

SEQ ID NO: 60083 - RNA, 22 nt, Human
aaaggaagaugccaggacucug

SEQ ID NO: 60084 - RNA, 22 nt, Human
aaaggaauauucaaaacaguca

SEQ ID NO: 60085 - RNA, 22 nt, Human
aaaggacuagucuuucuaccau

SEQ ID NO: 60086 - RNA, 22 nt, Human
aaaggagacuucagaucuccuu

SEQ ID NO: 60087 - RNA, 22 nt, Human
aaaggagagugagucagaugcc

SEQ ID NO: 60088 - RNA, 22 nt, Human
aaaggauaagguuaucaauuuu

SEQ ID NO: 60089 - RNA, 22 nt, Human
aaaggauucucuugauuucagu

SEQ ID NO: 60090 - RNA, 23 nt, Human
aaaggcacagcauugucuagcag

SEQ ID NO: 60091 - RNA, 22 nt, Human
aaaggcagagugcucagcuggc

SEQ ID NO: 60092 - RNA, 22 nt, Human
aaaggcagugugauacuguggu

SEQ ID NO: 60093 - RNA, 22 nt, Human
aaaggcaugccuccauuucuau

SEQ ID NO: 60094 - RNA, 22 nt, Human
aaaggcaugcugcugaaugaug

SEQ ID NO: 60095 - RNA, 22 nt, Human
aaaggccaauaaagacaagcug

SEQ ID NO: 60096 - RNA, 22 nt, Human
aaaggccacacagagcagggag

SEQ ID NO: 60097 - RNA, 22 nt, Human
aaaggccacacugcucuuucuc

SEQ ID NO: 60098 - RNA, 22 nt, Human
aaaggccacugcaagggaaggu

SEQ ID NO: 60099 - RNA, 22 nt, Human
aaaggccacuugaaggauuuuu

SEQ ID NO: 60100 - RNA, 22 nt, Human
aaaggccucuguccuagugccu

SEQ ID NO: 60101 - RNA, 16 nt, Human
aaagaaacaggugucc

SEQ ID NO: 60102 - RNA, 22 nt, Human
aaagaacaucggagugggcggg

SEQ ID NO: 60103 - RNA, 22 nt, Human
aaagaacuauuaacgaggaagc

SEQ ID NO: 60104 - RNA, 22 nt, Human
aaagaagagcuggaaggagucu

SEQ ID NO: 60105 - RNA, 22 nt, Human
aaagaagauggagaccugacua

SEQ ID NO: 60106 - RNA, 22 nt, Human
aaagaagggacagacugccucu

SEQ ID NO: 60107 - RNA, 22 nt, Human
aaagaauagccuuuguccaaau

SEQ ID NO: 60108 - RNA, 22 nt, Human
aaagaauaguuaaguuuagggc

SEQ ID NO: 60109 - RNA, 22 nt, Human
aaagaaucuauauaucaccacc

SEQ ID NO: 60110 - RNA, 22 nt, Human
aaagaaugcagugccuuccagc

SEQ ID NO: 60111 - RNA, 22 nt, Human
aaagaaugucugaacagcuggc

SEQ ID NO: 60112 - RNA, 22 nt, Human
aaagacacacagccagcaagug

SEQ ID NO: 60113 - RNA, 22 nt, Human
aaagacagacggaaaccugagg

SEQ ID NO: 60114 - RNA, 22 nt, Human
aaagacaugacacauuggagag

SEQ ID NO: 60115 - RNA, 22 nt, Human
aaagacauggaacuagagaugg

SEQ ID NO: 60116 - RNA, 22 nt, Human
aaagaccugugguagcucuaaa

SEQ ID NO: 60117 - RNA, 22 nt, Human
aaagacuaaacaaccaauaucu

SEQ ID NO: 60118 - RNA, 22 nt, Human
aaagacucuuaacucccuagcg

SEQ ID NO: 60119 - RNA, 22 nt, Human
aaagacugggacugcagcaggc

SEQ ID NO: 60120 - RNA, 22 nt, Human
aaagacugguguguuacauaua

SEQ ID NO: 60121 - RNA, 22 nt, Human
aaagagaaaaugaucuguacau

SEQ ID NO: 60122 - RNA, 22 nt, Human
aaagagaacuuuuacccaagaa

SEQ ID NO: 60123 - RNA, 20 nt, Human
aaagagaagccucaccuugu

SEQ ID NO: 60124 - RNA, 22 nt, Human
aaagagacugguggcauuuugc

SEQ ID NO: 60125 - RNA, 22 nt, Human
aaagagcaagggcuuugaggcu

SEQ ID NO: 60126 - RNA, 22 nt, Human
aaagagcacccucaaugucuga

SEQ ID NO: 60127 - RNA, 22 nt, Human
aaagagcuugcuugcuuuauau

SEQ ID NO: 60128 - RNA, 21 nt, Human
aaagagcuuuugugcuaguua

SEQ ID NO: 60129 - RNA, 21 nt, Human
aaagagguuaauauuguaagu

SEQ ID NO: 60130 - RNA, 22 nt, Human
aaagagucuggcacuguaccag

SEQ ID NO: 60131 - RNA, 22 nt, Human
aaagaguugaaaacuaacagug

SEQ ID NO: 60132 - RNA, 22 nt, Human
aaagaguugaggcaguuaucca

SEQ ID NO: 60133 - RNA, 22 nt, Human
aaagaguuuccauugacauuuc

SEQ ID NO: 60134 - RNA, 22 nt, Human
aaagaguuuggagacaagauca

SEQ ID NO: 60135 - RNA, 22 nt, Human
aaagauaugucuccaaagagau

SEQ ID NO: 60136 - RNA, 23 nt, Human
aaagaucaaaguggcaggccugu

SEQ ID NO: 60137 - RNA, 22 nt, Human
aaagaucacacuguggggcagu

SEQ ID NO: 60138 - RNA, 22 nt, Human
aaagaucacgucccaggacucg

SEQ ID NO: 60139 - RNA, 22 nt, Human
aaagaucuccccuucaaagagu

SEQ ID NO: 60140 - RNA, 22 nt, Human
aaagaucugacuuagacacaga

SEQ ID NO: 60141 - RNA, 22 nt, Human
aaagaugccuaacucagaagau

SEQ ID NO: 60142 - RNA, 22 nt, Human
aaagaugucacaagaugugaug

SEQ ID NO: 60143 - RNA, 21 nt, Human
aaagauguuucaucugagaaa

SEQ ID NO: 60144 - RNA, 22 nt, Human
aaagauuaaaucaaauugguca

SEQ ID NO: 60145 - RNA, 22 nt, Human
aaagauuauggcauugaaauac

SEQ ID NO: 60146 - RNA, 22 nt, Human
aaagcaagacaggaguuucaga

SEQ ID NO: 60147 - RNA, 23 nt, Human
aaagcaaggaauuggcaacagag

SEQ ID NO: 60148 - RNA, 22 nt, Human
aaagcaauagaggguaagacug

SEQ ID NO: 60149 - RNA, 22 nt, Human
aaagcaaucuaguuccaauucu

SEQ ID NO: 60150 - RNA, 22 nt, Human
aaagcaaugcuuguggaaugua

SEQ ID NO: 60151 - RNA, 22 nt, Human
aaagcaauuacaaaagggauaa

SEQ ID NO: 60152 - RNA, 22 nt, Human
aaaugaugcucacagauuagug

SEQ ID NO: 60153 - RNA, 22 nt, Human
aaaugcacaauaaaguaaaggc

SEQ ID NO: 60154 - RNA, 22 nt, Human
aaaugcacagagccuuagagau

SEQ ID NO: 60155 - RNA, 22 nt, Human
aaaugcagaaucucagacccca

SEQ ID NO: 60156 - RNA, 22 nt, Human
aaaugcagaaugauuucaucua

SEQ ID NO: 60157 - RNA, 22 nt, Human
aaaugcagccuagcucaguuuu

SEQ ID NO: 60158 - RNA, 22 nt, Human
aaaugcaggauuaacagcuuug

SEQ ID NO: 60159 - RNA, 21 nt, Human
aaaugcaggcucuuuguuuuc

SEQ ID NO: 60160 - RNA, 22 nt, Human
aaaugcauuaagucagaacaau

SEQ ID NO: 60161 - RNA, 22 nt, Human
aaaugccaaggagagacuguua

SEQ ID NO: 60162 - RNA, 22 nt, Human
aaaugccaggauuauuagaggc

SEQ ID NO: 60163 - RNA, 22 nt, Human
aaaugccucccaaacagcacaa

SEQ ID NO: 60164 - RNA, 22 nt, Human
aaaugccucccauucuacugac

SEQ ID NO: 60165 - RNA, 22 nt, Human
aaaugccucugcuguacacaau

SEQ ID NO: 60166 - RNA, 22 nt, Human
aaaugccucuggguuauucuag

SEQ ID NO: 60167 - RNA, 22 nt, Human
aaaugcuaacaaggaaugcugc

SEQ ID NO: 60168 - RNA, 18 nt, Human
aaaugcuaggcuacauga

SEQ ID NO: 60169 - RNA, 22 nt, Human
aaaugcuauuugggaacaacau

SEQ ID NO: 60170 - RNA, 22 nt, Human
aaaugcucaccacagggaugug

SEQ ID NO: 60171 - RNA, 22 nt, Human
aaaugcucucuaauguaauaca

SEQ ID NO: 60172 - RNA, 22 nt, Human
aaaugcugcagcuaguguguuu

SEQ ID NO: 60173 - RNA, 20 nt, Human
aaaugcuguaauguuuggga

SEQ ID NO: 60174 - RNA, 20 nt, Human
aaaugcugugcuguugccau

SEQ ID NO: 60175 - RNA, 22 nt, Human
aaaugcuguucuuuuagguaga

SEQ ID NO: 60176 - RNA, 22 nt, Human
aaaugcuuagagguguucaaau

SEQ ID NO: 60177 - RNA, 21 nt, Human
aaaugcuuuguauauaucugu

SEQ ID NO: 60178 - RNA, 22 nt, Human
aaauggacauugggugagcucu

SEQ ID NO: 60179 - RNA, 22 nt, Human
aaauggaggcaaaauugguuuc

SEQ ID NO: 60180 - RNA, 22 nt, Human
aaauggaggcacgcagugguua

SEQ ID NO: 60181 - RNA, 22 nt, Human
aaauggaucuuuuuauaaugca

SEQ ID NO: 60182 - RNA, 22 nt, Human
aaauggauggaauugacauuua

SEQ ID NO: 60183 - RNA, 22 nt, Human
aaauggcacuuugacagccugc

SEQ ID NO: 60184 - RNA, 22 nt, Human
aaauggcaggcucuuugcuagu

SEQ ID NO: 60185 - RNA, 23 nt, Human
aaauggccaaaaccaggugguua

SEQ ID NO: 60186 - RNA, 23 nt, Human
aaauggccaagguuaaaaauaca

SEQ ID NO: 60187 - RNA, 22 nt, Human
aaauggcuccaguugacuuuuu

SEQ ID NO: 60188 - RNA, 19 nt, Human
aaauggcuuucuacuuaau

SEQ ID NO: 60189 - RNA, 23 nt, Human
aaauggguuucuguuuuguggac

SEQ ID NO: 60190 - RNA, 22 nt, Human
aaaugguagguuuucuuaagaa

SEQ ID NO: 60191 - RNA, 22 nt, Human
aaaugguauaaugucauguauu

SEQ ID NO: 60192 - RNA, 22 nt, Human
aaauggugaaguguaauuuagc

SEQ ID NO: 60193 - RNA, 20 nt, Human
aaauguauaggacccuucua

SEQ ID NO: 60194 - RNA, 22 nt, Human
aaaugucagaagcuuuacuucu

SEQ ID NO: 60195 - RNA, 22 nt, Human
aaaugucauauuuaaguaggaa

SEQ ID NO: 60196 - RNA, 22 nt, Human
aaauguccuuagagaaaaguca

SEQ ID NO: 60197 - RNA, 22 nt, Human
aaaugucuaucuggcauauucc

SEQ ID NO: 60198 - RNA, 22 nt, Human
aaaugucugucucaugaggaaa

SEQ ID NO: 60199 - RNA, 22 nt, Human
aaaugucuuucaauagagaaau

SEQ ID NO: 60200 - RNA, 22 nt, Human
aaaugugcuaaaguauuaacau

SEQ ID NO: 60201 - RNA, 22 nt, Human
aaauguggguaaugggacugga

SEQ ID NO: 60202 - RNA, 22 nt, Human
aaauguguuugauaggaauauu

SEQ ID NO: 60203 - RNA, 22 nt, Human
aaauguuccuuuggauuaaacu

SEQ ID NO: 60204 - RNA, 22 nt, Human
aaauguuuaaguguaggagcaa

SEQ ID NO: 60205 - RNA, 22 nt, Human
aaauuaagaguaacucuguaga

SEQ ID NO: 60206 - RNA, 22 nt, Human
aaauuaagggugagaagaguug

SEQ ID NO: 60207 - RNA, 20 nt, Human
aaauuacugccacacauuuc

SEQ ID NO: 60208 - RNA, 22 nt, Human
aaauuagaagugcucaggaaua

SEQ ID NO: 60209 - RNA, 22 nt, Human
aaauuauaggugccaccuugga

SEQ ID NO: 60210 - RNA, 22 nt, Human
aaauuaucaugauuauugugua

SEQ ID NO: 60211 - RNA, 22 nt, Human
aaauuauuacaagcuaguuggc

SEQ ID NO: 60212 - RNA, 22 nt, Human
aaauucaauuaacuuucaugcu

SEQ ID NO: 60213 - RNA, 22 nt, Human
aaauucagcauccugcacugga

SEQ ID NO: 60214 - RNA, 22 nt, Human
aaauaauuauagcgagucuauc

SEQ ID NO: 60215 - RNA, 22 nt, Human
aaauacagaguuauggaccuca

SEQ ID NO: 60216 - RNA, 22 nt, Human
aaauacaguggcagcagauaau

SEQ ID NO: 60217 - RNA, 22 nt, Human
aaauagaauuggaagcagaguu

SEQ ID NO: 60218 - RNA, 22 nt, Human
aaauagagcuggguuaaacuuu

SEQ ID NO: 60219 - RNA, 22 nt, Human
aaauagcacagcagcugaggcu

SEQ ID NO: 60220 - RNA, 22 nt, Human
aaauagcagcuuugacagcaca

SEQ ID NO: 60221 - RNA, 22 nt, Human
aaauagcauaaaauaggaagcu

SEQ ID NO: 60222 - RNA, 22 nt, Human
aaauaggaaugugguccuggga

SEQ ID NO: 60223 - RNA, 22 nt, Human
aaauaguuacuucugcugucuu

SEQ ID NO: 60224 - RNA, 22 nt, Human
aaauauagcaauuaugccuacu

SEQ ID NO: 60225 - RNA, 22 nt, Human
aaauauuagggagaacagggac

SEQ ID NO: 60226 - RNA, 22 nt, Human
aaaucaaaagacauguguuuua

SEQ ID NO: 60227 - RNA, 22 nt, Human
aaaucacagggucucuaaguau

SEQ ID NO: 60228 - RNA, 21 nt, Human
aaaucacuguccaaucuuggu

SEQ ID NO: 60229 - RNA, 22 nt, Human
aaaucacuuaaauggcuuauuu

SEQ ID NO: 60230 - RNA, 22 nt, Human
aaaucaguuggaacacaagcag

SEQ ID NO: 60231 - RNA, 22 nt, Human
aaaucaugguggaagaaacaga

SEQ ID NO: 60232 - RNA, 22 nt, Human
aaauccauucuguuuuaaaagu

SEQ ID NO: 60233 - RNA, 22 nt, Human
aaaucccugauaauguaggucu

SEQ ID NO: 60234 - RNA, 22 nt, Human
aaauccuuuggaggacaugaug

SEQ ID NO: 60235 - RNA, 22 nt, Human
aaaucgcuugaacccaggaagu

SEQ ID NO: 60236 - RNA, 22 nt, Human
aaaucguuauaauguuaagccu

SEQ ID NO: 60237 - RNA, 22 nt, Human
aaaucguuucguuccugguuuu

SEQ ID NO: 60238 - RNA, 22 nt, Human
aaaucuagaaguuuaaaaggau

SEQ ID NO: 60239 - RNA, 22 nt, Human
aaaucucagcccuuauuuuaga

SEQ ID NO: 60240 - RNA, 22 nt, Human
aaaucucaggccucuauuuacu

SEQ ID NO: 60241 - RNA, 22 nt, Human
aaaucugaaauagugugaagua

SEQ ID NO: 60242 - RNA, 22 nt, Human
aaaucugagaaauauuguccag

SEQ ID NO: 60243 - RNA, 22 nt, Human
aaaucugguucaguaaguccuc

SEQ ID NO: 60244 - RNA, 22 nt, Human
aaaucuguuucucauaggguag

SEQ ID NO: 60245 - RNA, 22 nt, Human
aaaugacagagcugggacuagu

SEQ ID NO: 60246 - RNA, 22 nt, Human
aaaugacaguucucucugagua

SEQ ID NO: 60247 - RNA, 22 nt, Human
aaaugacauuaggauccugcau

SEQ ID NO: 60248 - RNA, 22 nt, Human
aaaugaggccagaucaugcaga

SEQ ID NO: 60249 - RNA, 22 nt, Human
aaaugagguuaauacagugcuu

SEQ ID NO: 60250 - RNA, 22 nt, Human
aaaugaguagcgaugcacauua

SEQ ID NO: 60251 - RNA, 20 nt, Human
aaaugaugggaauaaucuau

SEQ ID NO: 60252 - RNA, 22 nt, Human
aaaugauguggagugaaauugu

SEQ ID NO: 60253 - RNA, 22 nt, Human
aaaugauugucaaaguucuguu

SEQ ID NO: 60254 - RNA, 22 nt, Human
aaaugcaaguucauauuuuguu

SEQ ID NO: 60255 - RNA, 22 nt, Human
aaaugcaauucaggaagacaag

SEQ ID NO: 60256 - RNA, 22 nt, Human
aaaugcacacaccaggaaacua

SEQ ID NO: 60257 - RNA, 22 nt, Human
aaaugcacagaaaggaugugga

SEQ ID NO: 60258 - RNA, 22 nt, Human
aaaugcagauucuuaggcccca

SEQ ID NO: 60259 - RNA, 22 nt, Human
aaaugcagcagcuaauugaaaa

SEQ ID NO: 60260 - RNA, 22 nt, Human
aaaugcaggaaauuaugcuuuu

SEQ ID NO: 60261 - RNA, 22 nt, Human
aaaguaaagauugggaaugugu

SEQ ID NO: 60262 - RNA, 22 nt, Human
aaaguaaccuaguaauaguguc

SEQ ID NO: 60263 - RNA, 22 nt, Human
aaaguaauugugguucuugcca

SEQ ID NO: 60264 - RNA, 22 nt, Human
aaaguacaaggaaaggaucuga

SEQ ID NO: 60265 - RNA, 22 nt, Human
aaaguacacacagagccaagaa

SEQ ID NO: 60266 - RNA, 22 nt, Human
aaaguacagccacauccaagua

SEQ ID NO: 60267 - RNA, 22 nt, Human
aaaguacauagcauauuccaac

SEQ ID NO: 60268 - RNA, 22 nt, Human
aaaguacaugagauucaagggg

SEQ ID NO: 60269 - RNA, 23 nt, Human
aaaguacuuaaucugcaaaccac

SEQ ID NO: 60270 - RNA, 23 nt, Human
aaaguacuuccacagcuaugauc

SEQ ID NO: 60271 - RNA, 22 nt, Human
aaaguacuugaugcuacagagu

SEQ ID NO: 60272 - RNA, 22 nt, Human
aaaguagaguuguggaauuacu

SEQ ID NO: 60273 - RNA, 22 nt, Human
aaaguagcuuuguagguacagu

SEQ ID NO: 60274 - RNA, 22 nt, Human
aaaguagucucuuucaucuuuu

SEQ ID NO: 60275 - RNA, 22 nt, Human
aaaguaucugaccgauuauaaa

SEQ ID NO: 60276 - RNA, 22 nt, Human
aaaguauuugugauuuuuacca

SEQ ID NO: 60277 - RNA, 22 nt, Human
aaagucaaugauuucuccugga

SEQ ID NO: 60278 - RNA, 22 nt, Human
aaagucacaauauuggaaggug

SEQ ID NO: 60279 - RNA, 22 nt, Human
aaagucacaguuuaggggauau

SEQ ID NO: 60280 - RNA, 22 nt, Human
aaagucacauauaacaagggca

SEQ ID NO: 60281 - RNA, 22 nt, Human
aaagucacgcugaugggaaaug

SEQ ID NO: 60282 - RNA, 22 nt, Human
aaagucaguuggccagaucacu

SEQ ID NO: 60283 - RNA, 22 nt, Human
aaagucaucagaaccuuccaga

SEQ ID NO: 60284 - RNA, 22 nt, Human
aaagucaugaugaaccaccgua

SEQ ID NO: 60285 - RNA, 22 nt, Human
aaagucauguaaugauaugauu

SEQ ID NO: 60286 - RNA, 22 nt, Human
aaagucauuggaauauuaauga

SEQ ID NO: 60287 - RNA, 22 nt, Human
aaagucauuguaauauaugcua

SEQ ID NO: 60288 - RNA, 22 nt, Human
aaagucauuuuccagaccagua

SEQ ID NO: 60289 - RNA, 22 nt, Human
aaaguccagagggcacacugaa

SEQ ID NO: 60290 - RNA, 22 nt, Human
aaaguccaggggcuggaggcgg

SEQ ID NO: 60291 - RNA, 22 nt, Human
aaaguccuguuaacuguuaaca

SEQ ID NO: 60292 - RNA, 22 nt, Human
aaaguccuguuugaaggaccug

SEQ ID NO: 60293 - RNA, 22 nt, Human
aaagucugaaagaugcuaacau

SEQ ID NO: 60294 - RNA, 22 nt, Human
aaagucuuguuacguuccauug

SEQ ID NO: 60295 - RNA, 22 nt, Human
aaagugacaaccagcaggacuu

SEQ ID NO: 60296 - RNA, 23 nt, Human
aaagugacuuuuauaccacuaac

SEQ ID NO: 60297 - RNA, 22 nt, Human
aaagugaggacuugaguacugu

SEQ ID NO: 60298 - RNA, 15 nt, Human
aaagugcacccaaua

SEQ ID NO: 60299 - RNA, 22 nt, Human
aaagugcagcugaaaacauccu

SEQ ID NO: 60300 - RNA, 22 nt, Human
aaagugcagcuugugaucccua

SEQ ID NO: 60301 - RNA, 23 nt, Human
aaagugcaguugaggaaucauag

SEQ ID NO: 60302 - RNA, 22 nt, Human
aaagugcauagaguagugccua

SEQ ID NO: 60303 - RNA, 22 nt, Human
aaagugcaucaaaugacuuccc

SEQ ID NO: 60304 - RNA, 22 nt, Human
aaagugccugacucauaguuag

SEQ ID NO: 60305 - RNA, 22 nt, Human
aaagugcuaggauuacaagcgu

SEQ ID NO: 60306 - RNA, 22 nt, Human
aaagugcugggauuacaagugu

SEQ ID NO: 60307 - RNA, 22 nt, Human
aaagugcugggauuaccggcau

SEQ ID NO: 60308 - RNA, 22 nt, Human
aaagugcugugauuacaggcau

SEQ ID NO: 60309 - RNA, 22 nt, Human
aaagugcuuuaggauauuugga

SEQ ID NO: 60310 - RNA, 22 nt, Human
aaagugggaacaauggagagug

SEQ ID NO: 60311 - RNA, 22 nt, Human
aaaguggugggcgaacucauca

SEQ ID NO: 60312 - RNA, 22 nt, Human
aaagugguugcugucagccucu

SEQ ID NO: 60313 - RNA, 22 nt, Human
aaagugguuucccaguucagua

SEQ ID NO: 60314 - RNA, 22 nt, Human
aaagugguuuuucagacuuuga

SEQ ID NO: 60315 - RNA, 22 nt, Human
aaaguguacuaugucaugaaca

SEQ ID NO: 60316 - RNA, 22 nt, Human
aaaguguagagacuuuggaacc

SEQ ID NO: 60317 - RNA, 22 nt, Human
aaaguguagagugccucaaaau

SEQ ID NO: 60318 - RNA, 23 nt, Human
aaaguguagccagguuaagaacc

SEQ ID NO: 60319 - RNA, 22 nt, Human
aaaguguggagauugaacuaaa

SEQ ID NO: 60320 - RNA, 22 nt, Human
aaaguguuaacacuggcuacuu

SEQ ID NO: 60321 - RNA, 22 nt, Human
aaaguguugauaugugacaucc

SEQ ID NO: 60322 - RNA, 22 nt, Human
aaaguguugggauuacaggugu

SEQ ID NO: 60323 - RNA, 22 nt, Human
aaaguguugggauuauaggcgu

SEQ ID NO: 60324 - RNA, 22 nt, Human
aaaguguuuuccaugcaaugaa

SEQ ID NO: 60325 - RNA, 19 nt, Human
aaaguguuuucuuuucugu

SEQ ID NO: 60326 - RNA, 22 nt, Human
aaaguguuuugauuuaguggua

SEQ ID NO: 60327 - RNA, 22 nt, Human
aaaguuacacgacuauuuaugu

SEQ ID NO: 60328 - RNA, 22 nt, Human
aaaguuacaguaauucagugua

SEQ ID NO: 60329 - RNA, 22 nt, Human
aaaguuacccaaucucuaugaa

SEQ ID NO: 60330 - RNA, 22 nt, Human
aaaguuagaaugauaucaacga

SEQ ID NO: 60331 - RNA, 22 nt, Human
aaauucagauggcuuucuuuuc

SEQ ID NO: 60332 - RNA, 22 nt, Human
aaauucaguuccucagccacau

SEQ ID NO: 60333 - RNA, 22 nt, Human
aaauucauuuuucuuagugugc

SEQ ID NO: 60334 - RNA, 22 nt, Human
aaauuccaguucuuuuaccugc

SEQ ID NO: 60335 - RNA, 22 nt, Human
aaauuccauuaugauaauuucg

SEQ ID NO: 60336 - RNA, 22 nt, Human
aaauucuaugucaauguuuauu

SEQ ID NO: 60337 - RNA, 22 nt, Human
aaauucucuaaagaaaacauga

SEQ ID NO: 60338 - RNA, 22 nt, Human
aaauucuucagguaauuuugau

SEQ ID NO: 60339 - RNA, 22 nt, Human
aaauucuuucauggcuaauaag

SEQ ID NO: 60340 - RNA, 22 nt, Human
aaauucuuuggccuacuuugaa

SEQ ID NO: 60341 - RNA, 22 nt, Human
aaauugcacaauauagacauga

SEQ ID NO: 60342 - RNA, 22 nt, Human
aaauugcuaaggaucucaugug

SEQ ID NO: 60343 - RNA, 22 nt, Human
aaauugcuaguugcuuuuuuca

SEQ ID NO: 60344 - RNA, 22 nt, Human
aaauugcuguugggugacucuu

SEQ ID NO: 60345 - RNA, 22 nt, Human
aaauugcuuauaaagaugaaug

SEQ ID NO: 60346 - RNA, 22 nt, Human
aaauuguagagaucgcuuugug

SEQ ID NO: 60347 - RNA, 22 nt, Human
aaauuguaggaucacaugaccu

SEQ ID NO: 60348 - RNA, 22 nt, Human
aaauugucagaauucagaaagu

SEQ ID NO: 60349 - RNA, 23 nt, Human
aaauugucguaagguggagaugu

SEQ ID NO: 60350 - RNA, 22 nt, Human
aaauuuaagaagugugugcgug

SEQ ID NO: 60351 - RNA, 22 nt, Human
aaauuucaagcaaaguagcuau

SEQ ID NO: 60352 - RNA, 21 nt, Human
aaauuucugcaagccucaacu

SEQ ID NO: 60353 - RNA, 22 nt, Human
aaauuuuagaccaggcaaaacu

SEQ ID NO: 60354 - RNA, 22 nt, Human
aaauuuuaguaaggaaguugag

SEQ ID NO: 60355 - RNA, 22 nt, Human
aaauuuucagagcacuagagaa

SEQ ID NO: 60356 - RNA, 22 nt, Human
aacaaaagccgaaguagguguc

SEQ ID NO: 60357 - RNA, 22 nt, Human
aacaaaccuggguggagaaagg

SEQ ID NO: 60358 - RNA, 22 nt, Human
aacaaaccuucccuauacgucu

SEQ ID NO: 60359 - RNA, 22 nt, Human
aacaaacucaaauggaagagug

SEQ ID NO: 60360 - RNA, 22 nt, Human
aacaaaggccguuaauaaccac

SEQ ID NO: 60361 - RNA, 21 nt, Human
aacaaagggaugcucaucuuu

SEQ ID NO: 60362 - RNA, 22 nt, Human
aacaaagucguugccuagaaga

SEQ ID NO: 60363 - RNA, 22 nt, Human
aacaaaguuucaggaagauaga

SEQ ID NO: 60364 - RNA, 22 nt, Human
aacaaaucuuaaaguaauucaa

SEQ ID NO: 60365 - RNA, 22 nt, Human
aacaaaugaccugauuucuucc

SEQ ID NO: 60366 - RNA, 22 nt, Human
aacaaauggaacacaaaucuuu

SEQ ID NO: 60367 - RNA, 22 nt, Human
aacaaauguguggcaguguggg

SEQ ID NO: 60368 - RNA, 22 nt, Human
aacaacagugagugcugggagg

SEQ ID NO: 60369 - RNA, 22 nt, Human
aacaagaacaccuacaguucua

SEQ ID NO: 60370 - RNA, 22 nt, Human
aaauccuuuucuauacagcaua

SEQ ID NO: 60371 - RNA, 22 nt, Human
aaaucuaggccgggugcggugg

SEQ ID NO: 60372 - RNA, 22 nt, Human
aaaucucacuggcaggcaggca

SEQ ID NO: 60373 - RNA, 22 nt, Human
aaaucucacuguagucaaagug

SEQ ID NO: 60374 - RNA, 22 nt, Human
aaaucucauuauuuauaccaua

SEQ ID NO: 60375 - RNA, 22 nt, Human
aaaucucugaacuuaauaaugc

SEQ ID NO: 60376 - RNA, 22 nt, Human
aaaucuggccccuugccuauuu

SEQ ID NO: 60377 - RNA, 22 nt, Human
aaaucuguuguaauguuuuuua

SEQ ID NO: 60378 - RNA, 22 nt, Human
aaaucuuccugaaauuuguuca

SEQ ID NO: 60379 - RNA, 22 nt, Human
aaaugaacucaaugaucuccca

SEQ ID NO: 60380 - RNA, 21 nt, Human
aaaugaaugugguagugcaag

SEQ ID NO: 60381 - RNA, 22 nt, Human
aaaugacacucauucaguguca

SEQ ID NO: 60382 - RNA, 23 nt, Human
aaaugacauaugguuucugaagg

SEQ ID NO: 60383 - RNA, 22 nt, Human
aaaugacuaaugauccugggca

SEQ ID NO: 60384 - RNA, 22 nt, Human
aaaugcaaggcacauuccuuuu

SEQ ID NO: 60385 - RNA, 22 nt, Human
aaaugcaaggccaugugaagga

SEQ ID NO: 60386 - RNA, 22 nt, Human
aaaugcacaaagauuuugcacu

SEQ ID NO: 60387 - RNA, 22 nt, Human
aaaugcacaaaguaaguguaau

SEQ ID NO: 60388 - RNA, 22 nt, Human
aaaugcacagguuuuaaauccu

SEQ ID NO: 60389 - RNA, 22 nt, Human
aaaugcacgcuacccagcuaga

SEQ ID NO: 60390 - RNA, 22 nt, Human
aaaugcacucugcuucugugac

SEQ ID NO: 60391 - RNA, 22 nt, Human
aaaugcacugaauauuccaaau

SEQ ID NO: 60392 - RNA, 22 nt, Human
aaaugcagacagcuucacacac

SEQ ID NO: 60393 - RNA, 22 nt, Human
aaaugcagaucccugaaucuca

SEQ ID NO: 60394 - RNA, 22 nt, Human
aaaugcagauuuugaugcagca

SEQ ID NO: 60395 - RNA, 20 nt, Human
aaaugcagggcugcugcgga

SEQ ID NO: 60396 - RNA, 23 nt, Human
aaaugcagggucgcagguuacag

SEQ ID NO: 60397 - RNA, 22 nt, Human
aaaugcagguaguauuuauuuu

SEQ ID NO: 60398 - RNA, 22 nt, Human
aaaugcagugguucuacuucuc

SEQ ID NO: 60399 - RNA, 22 nt, Human
aaaugcaguugguggggauaug

SEQ ID NO: 60400 - RNA, 22 nt, Human
aaaugcaguuuccugagaccca

SEQ ID NO: 60401 - RNA, 22 nt, Human
aaaugcaucagcucauaagaga

SEQ ID NO: 60402 - RNA, 22 nt, Human
aaaugcaugagaaaguauucug

SEQ ID NO: 60403 - RNA, 22 nt, Human
aaaugcaugguaaaugauugcc

SEQ ID NO: 60404 - RNA, 22 nt, Human
aaaugcaugugcuauagaugug

SEQ ID NO: 60405 - RNA, 22 nt, Human
aaaugcauuucacuaauguuuc

SEQ ID NO: 60406 - RNA, 22 nt, Human
aaaugcauuuuuaauuagaccc

SEQ ID NO: 60407 - RNA, 23 nt, Human
aaaugccagggagacaggaacca

SEQ ID NO: 60408 - RNA, 22 nt, Human
aaaugccuagaaaucacgcaga

SEQ ID NO: 60409 - RNA, 22 nt, Human
aaaugccuauuuguuccuucag

SEQ ID NO: 60410 - RNA, 22 nt, Human
aaaugccucauuuucucucacu

SEQ ID NO: 60411 - RNA, 22 nt, Human
aaaugcuagggagaaacucucc

SEQ ID NO: 60412 - RNA, 22 nt, Human
aaaugcucgccuuggccgagac

SEQ ID NO: 60413 - RNA, 22 nt, Human
aaaugcucuccaaaaugaaagu

SEQ ID NO: 60414 - RNA, 23 nt, Human
aaaugcugaaucuuuacuguuua

SEQ ID NO: 60415 - RNA, 20 nt, Human
aaaugcugagaaguccuuaa

SEQ ID NO: 60416 - RNA, 22 nt, Human
aaaugcugaguguuuagagauc

SEQ ID NO: 60417 - RNA, 22 nt, Human
aaaugcugucaguguuauugga

SEQ ID NO: 60418 - RNA, 22 nt, Human
aaaugcuuguaaauuuuccaug

SEQ ID NO: 60419 - RNA, 22 nt, Human
aaaugcuuuggugcugguacag

SEQ ID NO: 60420 - RNA, 20 nt, Human
aaaugcuuuugacacauauu

SEQ ID NO: 60421 - RNA, 22 nt, Human
aaauggaagaagugcaauacug

SEQ ID NO: 60422 - RNA, 22 nt, Human
aaauggaaguguauuuaguguu

SEQ ID NO: 60423 - RNA, 19 nt, Human
aaauggagcuaaucuuguc

SEQ ID NO: 60424 - RNA, 22 nt, Human
aaauggauggaaagcaauuuuu

SEQ ID NO: 60425 - RNA, 22 nt, Human
aaauggauguugaguuaaaugu

SEQ ID NO: 60426 - RNA, 22 nt, Human
aaauggcaacagaagggaguuc

SEQ ID NO: 60427 - RNA, 22 nt, Human
aaauggcauagaggugaaggua

SEQ ID NO: 60428 - RNA, 22 nt, Human
aaauggcugacuuuucauggga

SEQ ID NO: 60429 - RNA, 23 nt, Human
aaauggcuuuagacgugccuuau

SEQ ID NO: 60430 - RNA, 22 nt, Human
aaauggcuuugaggguaggaca

SEQ ID NO: 60431 - RNA, 22 nt, Human
aaaugguaaauuaguaguagcu

SEQ ID NO: 60432 - RNA, 22 nt, Human
aaaugguaagacaacacauuau

SEQ ID NO: 60433 - RNA, 17 nt, Human
aaaugguccuagggauu

SEQ ID NO: 60434 - RNA, 22 nt, Human
aaaugguggcucuuuuaaauug

SEQ ID NO: 60435 - RNA, 22 nt, Human
aaauguacaacauccauauaua

SEQ ID NO: 60436 - RNA, 22 nt, Human
aaauguacacuuugcaucuuga

SEQ ID NO: 60437 - RNA, 22 nt, Human
aaauguacgggaguagaauuag

SEQ ID NO: 60438 - RNA, 22 nt, Human
aaauguacugauacuuauuuua

SEQ ID NO: 60439 - RNA, 18 nt, Human
aaauguacuguccauggc

SEQ ID NO: 60440 - RNA, 22 nt, Human
aaauguaguugaaaaguuaagg

SEQ ID NO: 60441 - RNA, 22 nt, Human
aaaugucagaaaacauggagug

SEQ ID NO: 60442 - RNA, 22 nt, Human
aaaugucagagcuggaaggggc

SEQ ID NO: 60443 - RNA, 22 nt, Human
aaaugucagaggaacauauuga

SEQ ID NO: 60444 - RNA, 22 nt, Human
aaauguccauugaauggaugag

SEQ ID NO: 60445 - RNA, 22 nt, Human
aaaugucuacuccuguguuuau

SEQ ID NO: 60446 - RNA, 22 nt, Human
aacuacuaccaguaguaguagu

SEQ ID NO: 60447 - RNA, 22 nt, Human
aacuacucaacucugccauugu

SEQ ID NO: 60448 - RNA, 22 nt, Human
aacuagaaaaagacuuucugag

SEQ ID NO: 60449 - RNA, 22 nt, Human
aacuagaaaacaagaugcugau

SEQ ID NO: 60450 - RNA, 22 nt, Human
aacuagaaagaacauauuucca

SEQ ID NO: 60451 - RNA, 22 nt, Human
aacuagaaaucacuacagguau

SEQ ID NO: 60452 - RNA, 22 nt, Human
aacuagaacgagaaagcugaac

SEQ ID NO: 60453 - RNA, 22 nt, Human
aacuagaacgucuaguugcugg

SEQ ID NO: 60454 - RNA, 22 nt, Human
aacuagcuggauuaguguuuuc

SEQ ID NO: 60455 - RNA, 22 nt, Human
aacuagucagugauucucagaa

SEQ ID NO: 60456 - RNA, 22 nt, Human
aacucaaagaugcaugacgcuu

SEQ ID NO: 60457 - RNA, 22 nt, Human
aacucauucuaaguauaccaaa

SEQ ID NO: 60458 - RNA, 22 nt, Human
aacuccagggcauugucuccug

SEQ ID NO: 60459 - RNA, 22 nt, Human
aacuccagggucaccauucaca

SEQ ID NO: 60460 - RNA, 21 nt, Human
aacucccagugccuucccagc

SEQ ID NO: 60461 - RNA, 20 nt, Human
aacuccuagccucaagugau

SEQ ID NO: 60462 - RNA, 22 nt, Human
aacucucauuuuagguguaagg

SEQ ID NO: 60463 - RNA, 22 nt, Human
aacucucucuggcucccagcaa

SEQ ID NO: 60464 - RNA, 22 nt, Human
aacucucuuuagagagggacaa

SEQ ID NO: 60465 - RNA, 22 nt, Human
aacucuggagcacgcccuggcc

SEQ ID NO: 60466 - RNA, 22 nt, Human
aacucuuaauuuucaugaaaug

SEQ ID NO: 60467 - RNA, 22 nt, Human
aacucuugaauucccuugaaga

SEQ ID NO: 60468 - RNA, 22 nt, Human
aacugaaaucaaucagugauuc

SEQ ID NO: 60469 - RNA, 22 nt, Human
aacugaacagcaggcuucuacc

SEQ ID NO: 60470 - RNA, 22 nt, Human
aacugaacugauaacauacacg

SEQ ID NO: 60471 - RNA, 22 nt, Human
aacugaauuuuaaauacaggcc

SEQ ID NO: 60472 - RNA, 21 nt, Human
aacugagaccagcuaaagugg

SEQ ID NO: 60473 - RNA, 22 nt, Human
aacugaggucuccagugcagaa

SEQ ID NO: 60474 - RNA, 22 nt, Human
aacugauuguuggaugauagug

SEQ ID NO: 60475 - RNA, 22 nt, Human
aacugcaaagccaaucucagga

SEQ ID NO: 60476 - RNA, 21 nt, Human
aacugcaaaucuuagacugca

SEQ ID NO: 60477 - RNA, 22 nt, Human
aacugcaacuuguuugauucuu

SEQ ID NO: 60478 - RNA, 22 nt, Human
aacugcaagcucuuuacugcua

SEQ ID NO: 60479 - RNA, 22 nt, Human
aacaucugaaaaggcuucacuc

SEQ ID NO: 60480 - RNA, 22 nt, Human
aacaucugaucgaacagugcca

SEQ ID NO: 60481 - RNA, 22 nt, Human
aacaucugugaacuccgaaaau

SEQ ID NO: 60482 - RNA, 22 nt, Human
aacaucuguguuugaaucucaa

SEQ ID NO: 60483 - RNA, 22 nt, Human
aacaucuuugccaaauugcuau

SEQ ID NO: 60484 - RNA, 19 nt, Human
aacaugacagccacucugg

SEQ ID NO: 60485 - RNA, 22 nt, Human
aacaugaugacauuguaagcuu

SEQ ID NO: 60486 - RNA, 22 nt, Human
aacaugauguauuuucuugucu

SEQ ID NO: 60487 - RNA, 22 nt, Human
aacaugaugugaagcaugaacu

SEQ ID NO: 60488 - RNA, 22 nt, Human
aacaugauuucaugcauuuaga

SEQ ID NO: 60489 - RNA, 22 nt, Human
aacaugcagguuuuaggguugc

SEQ ID NO: 60490 - RNA, 22 nt, Human
aacaugcauauagguaaaugga

SEQ ID NO: 60491 - RNA, 22 nt, Human
aacaugcauguuauuuaucagu

SEQ ID NO: 60492 - RNA, 22 nt, Human
aacaugcucuggauugcuguga

SEQ ID NO: 60493 - RNA, 22 nt, Human
aacauggaggcagacagacgug

SEQ ID NO: 60494 - RNA, 22 nt, Human
aacaugucuuacuuugcuuucu

SEQ ID NO: 60495 - RNA, 22 nt, Human
aacaugugagcagguuuuuuau

SEQ ID NO: 60496 - RNA, 22 nt, Human
aacauguuuccaguguaaggcc

SEQ ID NO: 60497 - RNA, 22 nt, Human
aacauuaagauggcggaacagu

SEQ ID NO: 60498 - RNA, 22 nt, Human
aacauuagauuuguuuuucuag

SEQ ID NO: 60499 - RNA, 22 nt, Human
aacauucaauugaggaaguuaa

SEQ ID NO: 60500 - RNA, 22 nt, Human
aacauucaccucuaccuccuuc

SEQ ID NO: 60501 - RNA, 22 nt, Human
aacauucagcugaugggucaua

SEQ ID NO: 60502 - RNA, 22 nt, Human
aacauucuaugugcauucagaa

SEQ ID NO: 60503 - RNA, 20 nt, Human
aacauugaaagucuagaaga

SEQ ID NO: 60504 - RNA, 22 nt, Human
aacauugaacuuggcacaccca

SEQ ID NO: 60505 - RNA, 22 nt, Human
aacauugagaaacauugggaua

SEQ ID NO: 60506 - RNA, 21 nt, Human
aacauugauucauuuggcuau

SEQ ID NO: 60507 - RNA, 22 nt, Human
aacauugauugcaucuguucac

SEQ ID NO: 60508 - RNA, 20 nt, Human
aacauugcuucaauguaacc

SEQ ID NO: 60509 - RNA, 21 nt, Human
aacauugguucaaauaaaacu

SEQ ID NO: 60510 - RNA, 22 nt, Human
aacauuuacaaauccuucugca

SEQ ID NO: 60511 - RNA, 22 nt, Human
aacauuuaggaaggaccuccuc

SEQ ID NO: 60512 - RNA, 22 nt, Human
aacauuuaugauugagguaaau

SEQ ID NO: 60513 - RNA, 22 nt, Human
aacauuuaugguagucauugca

SEQ ID NO: 60514 - RNA, 22 nt, Human
aacauuuauugagcaccuacug

SEQ ID NO: 60515 - RNA, 22 nt, Human
aacauuucugagaauaucaguu

SEQ ID NO: 60516 - RNA, 22 nt, Human
aacauuugaaaaucaagaaucu

SEQ ID NO: 60517 - RNA, 20 nt, Human
aacauuuguagucaggcaca

SEQ ID NO: 60518 - RNA, 22 nt, Human
aacauuuguguuugcuaaaaau

SEQ ID NO: 60519 - RNA, 22 nt, Human
aacauuuuuaagaccaagugcu

SEQ ID NO: 60520 - RNA, 22 nt, Human
aaccaaagaaaacuguggugag

SEQ ID NO: 60521 - RNA, 22 nt, Human
aaccaaauggaugguaagaggg

SEQ ID NO: 60522 - RNA, 22 nt, Human
aaccaagaggguuuuccuugaa

SEQ ID NO: 60523 - RNA, 22 nt, Human
aaccaagcucaauggucugagu

SEQ ID NO: 60524 - RNA, 22 nt, Human
aaccaauuuaaauauaaagacu

SEQ ID NO: 60525 - RNA, 21 nt, Human
aaccacauggauuagucagag

SEQ ID NO: 60526 - RNA, 22 nt, Human
aaccacauggcucaguggacau

SEQ ID NO: 60527 - RNA, 22 nt, Human
aaccaccaccguaauuuaccca

SEQ ID NO: 60528 - RNA, 21 nt, Human
aaccagagccaggcucucagc

SEQ ID NO: 60529 - RNA, 22 nt, Human
aaccagaggcagcaguaccuga

SEQ ID NO: 60530 - RNA, 22 nt, Human
aaccagagugacacucuacaga

SEQ ID NO: 60531 - RNA, 22 nt, Human
aaccagcuaacauguggaauga

SEQ ID NO: 60532 - RNA, 17 nt, Human
aaccagcuguccccucc

SEQ ID NO: 60533 - RNA, 22 nt, Human
aaccagugaaacaccaggcaag

SEQ ID NO: 60534 - RNA, 22 nt, Human
aaccaguuucaaagaaaauugc

SEQ ID NO: 60535 - RNA, 22 nt, Human
aaccaugaauggguucuggugu

SEQ ID NO: 60536 - RNA, 22 nt, Human
aaccaugucuuguuuuccuagu

SEQ ID NO: 60537 - RNA, 22 nt, Human
aaccauuugcaguuacugagac

SEQ ID NO: 60538 - RNA, 22 nt, Human
aacccacaaaggauuucagcuc

SEQ ID NO: 60539 - RNA, 16 nt, Human
aacccacagcucccga

SEQ ID NO: 60540 - RNA, 22 nt, Human
aacccagaaacgcaggcgguca

SEQ ID NO: 60541 - RNA, 22 nt, Human
aacccaggucuuuggcuuccag

SEQ ID NO: 60542 - RNA, 22 nt, Human
aacccuggcccuggaauaggca

SEQ ID NO: 60543 - RNA, 22 nt, Human
aacccugggucggcaccauuuu

SEQ ID NO: 60544 - RNA, 22 nt, Human
aaccuagaaguuagaguaucau

SEQ ID NO: 60545 - RNA, 22 nt, Human
aaccuagacagggccucuguua

SEQ ID NO: 60546 - RNA, 22 nt, Human
aaccuagaguugccuuuuuuaa

SEQ ID NO: 60547 - RNA, 22 nt, Human
aaccucgaaugccuuccugagg

SEQ ID NO: 60548 - RNA, 16 nt, Human
aaccucucuacugugg

SEQ ID NO: 60549 - RNA, 22 nt, Human
aaccugaauuacuuuugcacca

SEQ ID NO: 60550 - RNA, 21 nt, Human
aaccugagacccacgggacua

SEQ ID NO: 60551 - RNA, 22 nt, Human
aaccuggaccuuuuggguauug

SEQ ID NO: 60552 - RNA, 22 nt, Human
aaccuggagugcugguuucacu

SEQ ID NO: 60553 - RNA, 22 nt, Human
aaccuggccccagauuccccau

SEQ ID NO: 60554 - RNA, 22 nt, Human
aaccuguuuugauuaacaagua

SEQ ID NO: 60555 - RNA, 19 nt, Human
aaccuuagcuucucaggcc

SEQ ID NO: 60556 - RNA, 22 nt, Human
aaccuucuugugcagaacugua

SEQ ID NO: 60557 - RNA, 22 nt, Human
aacguccucaccuguaacuugg

SEQ ID NO: 60558 - RNA, 22 nt, Human
aacgucuucucuccaaguaaau

SEQ ID NO: 60559 - RNA, 22 nt, Human
aacuacaauauguauguaugua

SEQ ID NO: 60560 - RNA, 22 nt, Human
aacuacagaaaagguaagcucu

SEQ ID NO: 60561 - RNA, 22 nt, Human
aacuacagaaucauagaaaaua

SEQ ID NO: 60562 - RNA, 22 nt, Human
aacuacagcaucuauacaaaua

SEQ ID NO: 60563 - RNA, 19 nt, Human
aacuacagcgcacuguccu

SEQ ID NO: 60564 - RNA, 22 nt, Human
aacuacauagaaauuaguauuu

SEQ ID NO: 60565 - RNA, 22 nt, Human
aacuacuaccacagucaagaca

SEQ ID NO: 60566 - RNA, 22 nt, Human
aacuagaaccugcauuuuaaca

SEQ ID NO: 60567 - RNA, 22 nt, Human
aacucagcauccugcacagaga

SEQ ID NO: 60568 - RNA, 22 nt, Human
aacucauuugcauuuuuccugu

SEQ ID NO: 60569 - RNA, 22 nt, Human
aacuccagacuacuaauuuagu

SEQ ID NO: 60570 - RNA, 22 nt, Human
aacuccagcaggaaggugagaa

SEQ ID NO: 60571 - RNA, 22 nt, Human
aacuccaggcagggaggccacu

SEQ ID NO: 60572 - RNA, 22 nt, Human
aacuccagggggucaauauuua

SEQ ID NO: 60573 - RNA, 22 nt, Human
aacuccagguccuuugaaucug

SEQ ID NO: 60574 - RNA, 22 nt, Human
aacuccaugguucucagauucu

SEQ ID NO: 60575 - RNA, 22 nt, Human
aacuccucucuggugguucguc

SEQ ID NO: 60576 - RNA, 22 nt, Human
aacuccugaggaaauggucuca

SEQ ID NO: 60577 - RNA, 22 nt, Human
aacucuacuugggacuccucug

SEQ ID NO: 60578 - RNA, 22 nt, Human
aacucuauuuacccuacuaaac

SEQ ID NO: 60579 - RNA, 22 nt, Human
aacucucuugggaguaccugga

SEQ ID NO: 60580 - RNA, 22 nt, Human
aacucugauuagcucaaguuaa

SEQ ID NO: 60581 - RNA, 22 nt, Human
aacucugguucagugauuucag

SEQ ID NO: 60582 - RNA, 22 nt, Human
aacucuguguaggaaccagguc

SEQ ID NO: 60583 - RNA, 22 nt, Human
aacucuuaaaauuuuggcuugc

SEQ ID NO: 60584 - RNA, 22 nt, Human
aacugaaaccaaacacuuuagg

SEQ ID NO: 60585 - RNA, 22 nt, Human
aacugaaacggugaucuuuuaa

SEQ ID NO: 60586 - RNA, 22 nt, Human
aacugacagcaggaaccauucc

SEQ ID NO: 60587 - RNA, 22 nt, Human
aacugagggcccugcugaagca

SEQ ID NO: 60588 - RNA, 20 nt, Human
aacuuuagacauaaucucuu

SEQ ID NO: 60589 - RNA, 22 nt, Human
aacuuucagaauccuaugcauu

SEQ ID NO: 60590 - RNA, 22 nt, Human
aacuuucuaauuuuggcugagc

SEQ ID NO: 60591 - RNA, 22 nt, Human
aacuuucuggcuuuggggagag

SEQ ID NO: 60592 - RNA, 23 nt, Human
aacuuugccaggagacagcacag

SEQ ID NO: 60593 - RNA, 22 nt, Human
aacuuugcuugggucaaacuca

SEQ ID NO: 60594 - RNA, 22 nt, Human
aacuuuggccacaaguacccug

SEQ ID NO: 60595 - RNA, 22 nt, Human
aacuuuuaaaauacacagacaa

SEQ ID NO: 60596 - RNA, 22 nt, Human
aacuuuucacaggcuagcucuu

SEQ ID NO: 60597 - RNA, 22 nt, Human
aagaaaacguuuugaggaguuu

SEQ ID NO: 60598 - RNA, 22 nt, Human
aagaaaagaaaccugaggcuuu

SEQ ID NO: 60599 - RNA, 22 nt, Human
aagaaacaaccacugcucuccu

SEQ ID NO: 60600 - RNA, 22 nt, Human
aagaaacucacuuugggaggca

SEQ ID NO: 60601 - RNA, 22 nt, Human
aagaaacuggaauauagagagc

SEQ ID NO: 60602 - RNA, 22 nt, Human
aagaaagauaagguuugcuugg

SEQ ID NO: 60603 - RNA, 22 nt, Human
aagaaagcauuagacaggcauu

SEQ ID NO: 60604 - RNA, 22 nt, Human
aagaaagcugaauauucugugu

SEQ ID NO: 60605 - RNA, 22 nt, Human
aagaaaggauauaugggaggua

SEQ ID NO: 60606 - RNA, 22 nt, Human
aagaaagugcuuuguaaauuau

SEQ ID NO: 60607 - RNA, 22 nt, Human
aagaaauaagacuucucugucc

SEQ ID NO: 60608 - RNA, 22 nt, Human
aagaaaucagaaaagcauucgu

SEQ ID NO: 60609 - RNA, 22 nt, Human
aagaaauguagagccuaguaaa

SEQ ID NO: 60610 - RNA, 22 nt, Human
aagaaaugugaauauugaauag

SEQ ID NO: 60611 - RNA, 22 nt, Human
aagaacagguucuagaaccauu

SEQ ID NO: 60612 - RNA, 22 nt, Human
aagaacauaaacagaaggacag

SEQ ID NO: 60613 - RNA, 22 nt, Human
aagaacaugaacacaauguuua

SEQ ID NO: 60614 - RNA, 22 nt, Human
aagaacaugguaggauaacaaa

SEQ ID NO: 60615 - RNA, 22 nt, Human
aagaacauuuaugauggcauuu

SEQ ID NO: 60616 - RNA, 22 nt, Human
aagaacuaucucuggcuguagg

SEQ ID NO: 60617 - RNA, 19 nt, Human
aagaacuaugugauuacag

SEQ ID NO: 60618 - RNA, 22 nt, Human
aagaacugguuauguuaucuug

SEQ ID NO: 60619 - RNA, 22 nt, Human
aagaacuguuuacaauuuucac

SEQ ID NO: 60620 - RNA, 22 nt, Human
aagaacuuuuggcaaguguuau

SEQ ID NO: 60621 - RNA, 22 nt, Human
aagaagaaguguuauuuuuaga

SEQ ID NO: 60622 - RNA, 22 nt, Human
aagaagagaacuggcauccuaa

SEQ ID NO: 60623 - RNA, 22 nt, Human
aagaagaugguuaacuuucagu

SEQ ID NO: 60624 - RNA, 22 nt, Human
aagaagcacuuuccuacauguu

SEQ ID NO: 60625 - RNA, 22 nt, Human
aagaagcaugagaagauuuuau

SEQ ID NO: 60626 - RNA, 22 nt, Human
aagaagcauggcuguagauucc

SEQ ID NO: 60627 - RNA, 22 nt, Human
aagaaggcuucagagcccagga

SEQ ID NO: 60628 - RNA, 22 nt, Human
aagaagucuggagcaaugcaau

SEQ ID NO: 60629 - RNA, 22 nt, Human
aagaagugguccuuuucuuucu

SEQ ID NO: 60630 - RNA, 22 nt, Human
aagaagugguuggaagaagcau

SEQ ID NO: 60631 - RNA, 23 nt, Human
aagaaguuaccuaaaguuguacu

SEQ ID NO: 60632 - RNA, 22 nt, Human
aagaaguuagguguaacaauau

SEQ ID NO: 60633 - RNA, 23 nt, Human
aagaauaaaugacauuaaaggug

SEQ ID NO: 60634 - RNA, 22 nt, Human
aagaauaaauuaagauacuuag

SEQ ID NO: 60635 - RNA, 22 nt, Human
aagaauaagaggauuuagaaca

SEQ ID NO: 60636 - RNA, 22 nt, Human
aagaaucauagagccacugaua

SEQ ID NO: 60637 - RNA, 22 nt, Human
aagaaucauccugcaagagucu

SEQ ID NO: 60638 - RNA, 22 nt, Human
aagaaucauuguaaaguucugu

SEQ ID NO: 60639 - RNA, 22 nt, Human
aagaaucuaugguacauccaag

SEQ ID NO: 60640 - RNA, 15 nt, Human
aagaaucugaagcuu

SEQ ID NO: 60641 - RNA, 22 nt, Human
aagaaucuuaauccagaaaccu

SEQ ID NO: 60642 - RNA, 22 nt, Human
aagaaugaaggauuuagcuguu

SEQ ID NO: 60643 - RNA, 23 nt, Human
aagaaugcuucugaagagcugcc

SEQ ID NO: 60644 - RNA, 22 nt, Human
aagaaugucaagcagaaggucu

SEQ ID NO: 60645 - RNA, 22 nt, Human
aagaauguucaacgcuuuuuug

SEQ ID NO: 60646 - RNA, 22 nt, Human
aagaauugaugugaauugcagc

SEQ ID NO: 60647 - RNA, 22 nt, Human
aagaauugguuuccucugucau

SEQ ID NO: 60648 - RNA, 22 nt, Human
aagaauuuuccagcaugucagu

SEQ ID NO: 60649 - RNA, 22 nt, Human
aagacaagccuuguuuuucugc

SEQ ID NO: 60650 - RNA, 22 nt, Human
aagacaauauugcugugaacgu

SEQ ID NO: 60651 - RNA, 22 nt, Human
aagacaaugaguccugauggga

SEQ ID NO: 60652 - RNA, 22 nt, Human
aagacaauguuucugauagaua

SEQ ID NO: 60653 - RNA, 22 nt, Human
aagacaauuuauguuaggguca

SEQ ID NO: 60654 - RNA, 22 nt, Human
aagacaauuuugaguaugcaca

SEQ ID NO: 60655 - RNA, 22 nt, Human
aagacagaccacgugacagggc

SEQ ID NO: 60656 - RNA, 22 nt, Human
aagacagcacuggcauuuucaa

SEQ ID NO: 60657 - RNA, 22 nt, Human
aagacagcagcaccucucguuu

SEQ ID NO: 60658 - RNA, 22 nt, Human
aagacagccuuucccuggugcc

SEQ ID NO: 60659 - RNA, 22 nt, Human
aagacagcucaggacagauuca

SEQ ID NO: 60660 - RNA, 22 nt, Human
aagacagugacagucacaauug

SEQ ID NO: 60661 - RNA, 22 nt, Human
aagacaugcaguuuguuccauu

SEQ ID NO: 60662 - RNA, 22 nt, Human
aagacauguuuuaagaauauuu

SEQ ID NO: 60663 - RNA, 22 nt, Human
aagacauucacaaauguucacu

SEQ ID NO: 60664 - RNA, 22 nt, Human
aagacauuccaaaguggcuaau

SEQ ID NO: 60665 - RNA, 22 nt, Human
aagaccauuuaauggagaaaga

SEQ ID NO: 60666 - RNA, 17 nt, Human
aagacccuagucuaccc

SEQ ID NO: 60667 - RNA, 22 nt, Human
aagacgcacccuuugagggcac

SEQ ID NO: 60668 - RNA, 22 nt, Human
aagacuaaauguguucuaaagu

SEQ ID NO: 60669 - RNA, 22 nt, Human
aagacucuguaucaugagggag

SEQ ID NO: 60670 - RNA, 22 nt, Human
aagacuuucucccaaauccuca

SEQ ID NO: 60671 - RNA, 22 nt, Human
aagacuuucugggguguaaagg

SEQ ID NO: 60672 - RNA, 22 nt, Human
aagagaaagcagacuuugucau

SEQ ID NO: 60673 - RNA, 22 nt, Human
aagagaagaaagugucuacaca

SEQ ID NO: 60674 - RNA, 22 nt, Human
aagagaauacaagcaggcagga

SEQ ID NO: 60675 - RNA, 22 nt, Human
aagagacuucuagauuuguuga

SEQ ID NO: 60676 - RNA, 22 nt, Human
aagagagaccaugggggacagg

SEQ ID NO: 60677 - RNA, 22 nt, Human
aagagagggacuuauuaaaguc

SEQ ID NO: 60678 - RNA, 22 nt, Human
aagagaugauggcagccagagg

SEQ ID NO: 60679 - RNA, 22 nt, Human
aagagauguggaaucauuuaca

SEQ ID NO: 60680 - RNA, 22 nt, Human
aagagauuaaaguaacuugccu

SEQ ID NO: 60681 - RNA, 22 nt, Human
aagagcaacuuggaaacacuca

SEQ ID NO: 60682 - RNA, 22 nt, Human
aagagcacuaacagagcugaua

SEQ ID NO: 60683 - RNA, 22 nt, Human
aagagcagccuccaggggugga

SEQ ID NO: 60684 - RNA, 22 nt, Human
aagagcaggcugucaauggggc

SEQ ID NO: 60685 - RNA, 22 nt, Human
aagagcauauuaauaguggaga

SEQ ID NO: 60686 - RNA, 22 nt, Human
aagagcaucuauuucacagugg

SEQ ID NO: 60687 - RNA, 22 nt, Human
aagagcauggaauggagaucca

SEQ ID NO: 60688 - RNA, 22 nt, Human
aagagccaagcagucaucaaua

SEQ ID NO: 60689 - RNA, 22 nt, Human
aagagcccuuguucauaauuau

SEQ ID NO: 60690 - RNA, 22 nt, Human
aagagccucuguguuucagccu

SEQ ID NO: 60691 - RNA, 23 nt, Human
aagagcuauacauucaccuggua

SEQ ID NO: 60692 - RNA, 22 nt, Human
aagagcuggaguuugcagcccu

SEQ ID NO: 60693 - RNA, 22 nt, Human
aagaggacaguauucaauauga

SEQ ID NO: 60694 - RNA, 23 nt, Human
aagaggaggcccugcucccgucc

SEQ ID NO: 60695 - RNA, 19 nt, Human
aagaggcaacccucgagcc

SEQ ID NO: 60696 - RNA, 21 nt, Human
aagaggcaucacuauuugugu

SEQ ID NO: 60697 - RNA, 22 nt, Human
aagcuuugcaccgguggcugga

SEQ ID NO: 60698 - RNA, 22 nt, Human
aagcuuugggcagaagaggauu

SEQ ID NO: 60699 - RNA, 22 nt, Human
aagcuuuguccaaggccaugca

SEQ ID NO: 60700 - RNA, 22 nt, Human
aagcuuuuauuaaaaucuugcc

SEQ ID NO: 60701 - RNA, 22 nt, Human
aagcuuuucucaguguccuugg

SEQ ID NO: 60702 - RNA, 22 nt, Human
aagcuuuuuggauuugcuucag

SEQ ID NO: 60703 - RNA, 22 nt, Human
aaggaaauagaugcagauggua

SEQ ID NO: 60704 - RNA, 22 nt, Human
aaggaaaugagguugauggaug

SEQ ID NO: 60705 - RNA, 19 nt, Human
aaggaacccuggguugcuc

SEQ ID NO: 60706 - RNA, 22 nt, Human
aaggaacucacagucuguuggg

SEQ ID NO: 60707 - RNA, 22 nt, Human
aaggaacugaugcucaaagaau

SEQ ID NO: 60708 - RNA, 22 nt, Human
aaggaacuuggugcccgugccc

SEQ ID NO: 60709 - RNA, 22 nt, Human
aaggaacuuugcagaggugauu

SEQ ID NO: 60710 - RNA, 22 nt, Human
aaggaagacacagaugaaguga

SEQ ID NO: 60711 - RNA, 22 nt, Human
aaggaagagaauccuucucaga

SEQ ID NO: 60712 - RNA, 22 nt, Human
aaggaagagucuagaacaggca

SEQ ID NO: 60713 - RNA, 22 nt, Human
aaggaagcagcaaugcaugauu

SEQ ID NO: 60714 - RNA, 22 nt, Human
aaggaagggaaauagugauguc

SEQ ID NO: 60715 - RNA, 22 nt, Human
aaggaagguacucagugauucu

SEQ ID NO: 60716 - RNA, 22 nt, Human
aaggaagugauuuucaugucaa

SEQ ID NO: 60717 - RNA, 22 nt, Human
aaggaaguuaagucuuagaaug

SEQ ID NO: 60718 - RNA, 20 nt, Human
aaggaauauuuguaucuggg

SEQ ID NO: 60719 - RNA, 17 nt, Human
aaggaaugucagaaguu

SEQ ID NO: 60720 - RNA, 22 nt, Human
aaggaauucaaauuuucucugg

SEQ ID NO: 60721 - RNA, 22 nt, Human
aaggacaaguaguauuugcauc

SEQ ID NO: 60722 - RNA, 19 nt, Human
aaggacacaacagagauag

SEQ ID NO: 60723 - RNA, 22 nt, Human
aaggacagaaacagauugcugg

SEQ ID NO: 60724 - RNA, 22 nt, Human
aaggacaggcacagugguggag

SEQ ID NO: 60725 - RNA, 22 nt, Human
aaggacaggcuaaccugacauu

SEQ ID NO: 60726 - RNA, 22 nt, Human
aaggaccuauauugucagagga

SEQ ID NO: 60727 - RNA, 22 nt, Human
aaggaccugauuuugagcaucu

SEQ ID NO: 60728 - RNA, 21 nt, Human
aaggacgagguuuugauuaca

SEQ ID NO: 60729 - RNA, 22 nt, Human
aaggacucuccagcuagcaaau

SEQ ID NO: 60730 - RNA, 22 nt, Human
aaggacugacaaaugucuuccu

SEQ ID NO: 60731 - RNA, 22 nt, Human
aaggacuggcauuaucuuaugu

SEQ ID NO: 60732 - RNA, 22 nt, Human
aaggacugucuaaggccuccaa

SEQ ID NO: 60733 - RNA, 22 nt, Human
aaggagaaaugguagaugugca

SEQ ID NO: 60734 - RNA, 22 nt, Human
aaggagaaggguaaucaacaca

SEQ ID NO: 60735 - RNA, 22 nt, Human
aaggagaauuuggcuugugaug

SEQ ID NO: 60736 - RNA, 22 nt, Human
aaggagcuuguucgccuuccuc

SEQ ID NO: 60737 - RNA, 22 nt, Human
aaggaggagugggguccuggaa

SEQ ID NO: 60738 - RNA, 22 nt, Human
aaggaggcagaacucacaugga

SEQ ID NO: 60739 - RNA, 22 nt, Human
aaggaggcccucuccuucugga

SEQ ID NO: 60740 - RNA, 22 nt, Human
aaggaggccuggcagaugaaga

SEQ ID NO: 60741 - RNA, 16 nt, Human
aaggagggaagagaau

SEQ ID NO: 60742 - RNA, 22 nt, Human
aaggaggguucccagguccugg

SEQ ID NO: 60743 - RNA, 22 nt, Human
aaggagugauauaugggugcua

SEQ ID NO: 60744 - RNA, 22 nt, Human
aaggagugcaugacucagagua

SEQ ID NO: 60745 - RNA, 22 nt, Human
aaggaguuuggguagucauaca

SEQ ID NO: 60746 - RNA, 22 nt, Human
aaggaucaaguggauuuucuua

SEQ ID NO: 60747 - RNA, 22 nt, Human
aaggaucuuucuuuuuaccauu

SEQ ID NO: 60748 - RNA, 22 nt, Human
aaggaugaacauuaauacauca

SEQ ID NO: 60749 - RNA, 22 nt, Human
aaggauugucuggcuauuuaug

SEQ ID NO: 60750 - RNA, 22 nt, Human
aaggcaaugaauacuguuuuug

SEQ ID NO: 60751 - RNA, 22 nt, Human
aaggcaaugggauggaucaugu

SEQ ID NO: 60752 - RNA, 22 nt, Human
aaggcaauugauuauuuuuccu

SEQ ID NO: 60753 - RNA, 22 nt, Human
aaggcaauuucagggcucucua

SEQ ID NO: 60754 - RNA, 22 nt, Human
aaggcacagaggcagggcacuu

SEQ ID NO: 60755 - RNA, 17 nt, Human
aaggcacagggcacugg

SEQ ID NO: 60756 - RNA, 22 nt, Human
aaggcacaugaccuaggccugg

SEQ ID NO: 60757 - RNA, 22 nt, Human
aaggcaccauugucaacgguaa

SEQ ID NO: 60758 - RNA, 22 nt, Human
aaggcacuacgcugcuggggcg

SEQ ID NO: 60759 - RNA, 22 nt, Human
aaggcacuagcaagcugccugg

SEQ ID NO: 60760 - RNA, 22 nt, Human
aaggcacuuaacgugggaggau

SEQ ID NO: 60761 - RNA, 22 nt, Human
aaggcacuugcccagagcugca

SEQ ID NO: 60762 - RNA, 22 nt, Human
aaggcacuuuuccugagaugau

SEQ ID NO: 60763 - RNA, 22 nt, Human
aaggcacuuuucuaaagaccuu

SEQ ID NO: 60764 - RNA, 22 nt, Human
aaggcagaaauucaacuacugg

SEQ ID NO: 60765 - RNA, 22 nt, Human
aaggcagagggcuggaucagag

SEQ ID NO: 60766 - RNA, 22 nt, Human
aaggcagagucuaucuuggaag

SEQ ID NO: 60767 - RNA, 20 nt, Human
aaggcagaguggguuggagc

SEQ ID NO: 60768 - RNA, 22 nt, Human
aaggcagcaggauuuggugacu

SEQ ID NO: 60769 - RNA, 19 nt, Human
aaggcagcaguagcaucca

SEQ ID NO: 60770 - RNA, 22 nt, Human
aaggcagcagugcacgacugau

SEQ ID NO: 60771 - RNA, 22 nt, Human
aaggcagcuuuaaaaaagaugc

SEQ ID NO: 60772 - RNA, 22 nt, Human
aaggcaguaaaaucuaccuugc

SEQ ID NO: 60773 - RNA, 22 nt, Human
aaggcaguagguguuucaaacu

SEQ ID NO: 60774 - RNA, 22 nt, Human
aaggcagucugguuucaaagca

SEQ ID NO: 60775 - RNA, 22 nt, Human
aaggcaguggcuggaaaaccug

SEQ ID NO: 60776 - RNA, 22 nt, Human
aaggcagugguugugauacugu

SEQ ID NO: 60777 - RNA, 22 nt, Human
aaggcauacauauuguuauagg

SEQ ID NO: 60778 - RNA, 22 nt, Human
aaggcauaccugaauguuugug

SEQ ID NO: 60779 - RNA, 22 nt, Human
aaggcauauauucuaaacagga

SEQ ID NO: 60780 - RNA, 22 nt, Human
aaggcauaugcauagaagacag

SEQ ID NO: 60781 - RNA, 22 nt, Human
aaggcauaugcuguguacaguu

SEQ ID NO: 60782 - RNA, 22 nt, Human
aaggcaucuggauggaggagga

SEQ ID NO: 60783 - RNA, 22 nt, Human
aaggcaugaaagcgaaaugaga

SEQ ID NO: 60784 - RNA, 22 nt, Human
aaggcauguguccucagagaga

SEQ ID NO: 60785 - RNA, 22 nt, Human
aaggcauucaagauggaaguug

SEQ ID NO: 60786 - RNA, 23 nt, Human
aaggcauuggcuucucucauuuc

SEQ ID NO: 60787 - RNA, 22 nt, Human
aaggccaaagacaccuacacag

SEQ ID NO: 60788 - RNA, 22 nt, Human
aaggccacuuuaccuuaaaucc

SEQ ID NO: 60789 - RNA, 23 nt, Human
aaggccagaauuucaauggugcc

SEQ ID NO: 60790 - RNA, 23 nt, Human
aaggccagagagaggcuaguguc

SEQ ID NO: 60791 - RNA, 22 nt, Human
aaggccagaguacuagaggcug

SEQ ID NO: 60792 - RNA, 22 nt, Human
aaggccagcgcagaccauuguc

SEQ ID NO: 60793 - RNA, 22 nt, Human
aaggccaggagacuuggaguca

SEQ ID NO: 60794 - RNA, 22 nt, Human
aaggccaggucccugcagugca

SEQ ID NO: 60795 - RNA, 22 nt, Human
aaggccauuauucugauauauu

SEQ ID NO: 60796 - RNA, 17 nt, Human
aaggccauuuccaccca

SEQ ID NO: 60797 - RNA, 22 nt, Human
aaggcccacagaacugucucca

SEQ ID NO: 60798 - RNA, 22 nt, Human
aaggcccagcgugaccucagug

SEQ ID NO: 60799 - RNA, 22 nt, Human
aaggcccaggcugcccugggca

SEQ ID NO: 60800 - RNA, 22 nt, Human
aaggcccuagaaucuauauugc

SEQ ID NO: 60801 - RNA, 22 nt, Human
aaggcccuucggcuuccucagc

SEQ ID NO: 60802 - RNA, 22 nt, Human
aaggcccuuggaaaaugcagua

SEQ ID NO: 60803 - RNA, 22 nt, Human
aaggccucaggugaggcugccc

SEQ ID NO: 60804 - RNA, 22 nt, Human
aaggccuccgccaauggcagag

SEQ ID NO: 60805 - RNA, 22 nt, Human
aaggccugcucagcugucugug

SEQ ID NO: 60806 - RNA, 22 nt, Human
auaauucaugggccuuucaccu

SEQ ID NO: 60807 - RNA, 22 nt, Human
auaauucuccaauuuuuguugu

SEQ ID NO: 60808 - RNA, 23 nt, Human
auacaaaccuugcaggacauguu

SEQ ID NO: 60809 - RNA, 22 nt, Human
auacaaagcuuucugucuggua

SEQ ID NO: 60810 - RNA, 22 nt, Human
auacaaaggaacacaggcaugu

SEQ ID NO: 60811 - RNA, 22 nt, Human
auacaaauuauaggccccaucc

SEQ ID NO: 60812 - RNA, 22 nt, Human
auacaaauuuauagaugcauuu

SEQ ID NO: 60813 - RNA, 22 nt, Human
auacaacagaaaaugauuauuc

SEQ ID NO: 60814 - RNA, 22 nt, Human
auacaacugccuuagaaggaaa

SEQ ID NO: 60815 - RNA, 21 nt, Human
auacaagaagauggcagucug

SEQ ID NO: 60816 - RNA, 22 nt, Human
auacaagacaguaggaaacuga

SEQ ID NO: 60817 - RNA, 19 nt, Human
auacaagacuagcauuuac

SEQ ID NO: 60818 - RNA, 19 nt, Human
auacaagagagcaguugag

SEQ ID NO: 60819 - RNA, 22 nt, Human
auacaagaucacuccagaaaau

SEQ ID NO: 60820 - RNA, 18 nt, Human
auacaagcagcagagauu

SEQ ID NO: 60821 - RNA, 22 nt, Human
auacaaggucaugaagguuuac

SEQ ID NO: 60822 - RNA, 22 nt, Human
auacaagugauauaauuguuuc

SEQ ID NO: 60823 - RNA, 22 nt, Human
auacaaguuaaugagaaugaca

SEQ ID NO: 60824 - RNA, 22 nt, Human
auacaaucaucauuauauuccc

SEQ ID NO: 60825 - RNA, 22 nt, Human
auacaaugagugagugaauggg

SEQ ID NO: 60826 - RNA, 22 nt, Human
auacaaugauaauaguacuuua

SEQ ID NO: 60827 - RNA, 22 nt, Human
auacacacauaugugaguuuug

SEQ ID NO: 60828 - RNA, 22 nt, Human
auacacacgugcacgugggaaa

SEQ ID NO: 60829 - RNA, 22 nt, Human
auacacagccauuaugaauuag

SEQ ID NO: 60830 - RNA, 22 nt, Human
auacacaggcaugcuucugauu

SEQ ID NO: 60831 - RNA, 22 nt, Human
auacacaggugcuaggucaaua

SEQ ID NO: 60832 - RNA, 21 nt, Human
auacacauacacauaaaugug

SEQ ID NO: 60833 - RNA, 22 nt, Human
auacacauauauacacguuuaa

SEQ ID NO: 60834 - RNA, 22 nt, Human
auacacauaucagguguauaca

SEQ ID NO: 60835 - RNA, 20 nt, Human
auacacauauucuugcaacu

SEQ ID NO: 60836 - RNA, 22 nt, Human
auacacaucuauuuaagagaca

SEQ ID NO: 60837 - RNA, 22 nt, Human
auacacaugcacacaugugugu

SEQ ID NO: 60838 - RNA, 20 nt, Human
auacacaugcagacagaugc

SEQ ID NO: 60839 - RNA, 22 nt, Human
auacacauuacuuucugucuga

SEQ ID NO: 60840 - RNA, 22 nt, Human
auacacauuugcuagagauggg

SEQ ID NO: 60841 - RNA, 19 nt, Human
auacacguguauacauaca

SEQ ID NO: 60842 - RNA, 22 nt, Human
auacacuacuaagcacagauug

SEQ ID NO: 60843 - RNA, 22 nt, Human
auacacuuguacauuuuuuaau

SEQ ID NO: 60844 - RNA, 22 nt, Human
auacacuuuagaaaaacgcugc

SEQ ID NO: 60845 - RNA, 22 nt, Human
auacagaaaaugaugcagaguu

SEQ ID NO: 60846 - RNA, 22 nt, Human
auacagaacucucaguuguaua

SEQ ID NO: 60847 - RNA, 22 nt, Human
auacagaagaccccuccgucau

SEQ ID NO: 60848 - RNA, 22 nt, Human
auacagaagccuguauuucugg

SEQ ID NO: 60849 - RNA, 22 nt, Human
auacagaauacuaauuccugag

SEQ ID NO: 60850 - RNA, 22 nt, Human
auacagagacacuugagacugg

SEQ ID NO: 60851 - RNA, 20 nt, Human
auacagaugguuccagcugg

SEQ ID NO: 60852 - RNA, 22 nt, Human
auacagauguuaaagcaauuuc

SEQ ID NO: 60853 - RNA, 22 nt, Human
auacagcagcccuugcuuugca

SEQ ID NO: 60854 - RNA, 22 nt, Human
auacagcuuacaguucuaaugc

SEQ ID NO: 60855 - RNA, 22 nt, Human
auacagguaauuugaauaauag

SEQ ID NO: 60856 - RNA, 22 nt, Human
auacagguggaacuaaauaaau

SEQ ID NO: 60857 - RNA, 22 nt, Human
auacagguucucuagggaacag

SEQ ID NO: 60858 - RNA, 22 nt, Human
auacaguaauuuguaacucauc

SEQ ID NO: 60859 - RNA, 22 nt, Human
auacaguagggaccaugucuga

SEQ ID NO: 60860 - RNA, 22 nt, Human
auacaguauguaggcuuuucag

SEQ ID NO: 60861 - RNA, 21 nt, Human
auacagugguaugaauguagg

SEQ ID NO: 60862 - RNA, 22 nt, Human
auacaguuagaaaaaaagccuu

SEQ ID NO: 60863 - RNA, 22 nt, Human
auacauaugaaugauuuggcuc

SEQ ID NO: 60864 - RNA, 22 nt, Human
auacaucaccuauauauucaca

SEQ ID NO: 60865 - RNA, 22 nt, Human
auacaucaugcuccauauauuu

SEQ ID NO: 60866 - RNA, 22 nt, Human
auacaugacacugggcuacagg

SEQ ID NO: 60867 - RNA, 22 nt, Human
auacaugaggcucauuuauguc

SEQ ID NO: 60868 - RNA, 22 nt, Human
auacaugcgccauguuggugug

SEQ ID NO: 60869 - RNA, 22 nt, Human
auacaugucaucauauguuugu

SEQ ID NO: 60870 - RNA, 22 nt, Human
auacaugugccgcguuggugug

SEQ ID NO: 60871 - RNA, 22 nt, Human
auacaugugcuauguuggugua

SEQ ID NO: 60872 - RNA, 22 nt, Human
auacaugugucccugauuuauu

SEQ ID NO: 60873 - RNA, 22 nt, Human
auacauguucguguacauguuc

SEQ ID NO: 60874 - RNA, 22 nt, Human
auacauguugagaaaauaucug

SEQ ID NO: 60875 - RNA, 22 nt, Human
auacauguuguaccauauguuu

SEQ ID NO: 60876 - RNA, 22 nt, Human
auacauguuugcuggauaaaca

SEQ ID NO: 60877 - RNA, 22 nt, Human
auacauucaucacuuuuggucc

SEQ ID NO: 60878 - RNA, 17 nt, Human
auacauuguuaaaguau

SEQ ID NO: 60879 - RNA, 22 nt, Human
auaccaauuagaguuuguugca

SEQ ID NO: 60880 - RNA, 22 nt, Human
auaccaccaucuaugaaaggua

SEQ ID NO: 60881 - RNA, 21 nt, Human
auaccauuugccaaaaggauc

SEQ ID NO: 60882 - RNA, 22 nt, Human
auacccagccccagcugcagga

SEQ ID NO: 60883 - RNA, 22 nt, Human
auacccaggcuuauguugguca

SEQ ID NO: 60884 - RNA, 22 nt, Human
auaccuaugugacaguauuauu

SEQ ID NO: 60885 - RNA, 22 nt, Human
auaccugaucaaggcaaaaaug

SEQ ID NO: 60886 - RNA, 22 nt, Human
auaccugcaguauuuuauuguu

SEQ ID NO: 60887 - RNA, 22 nt, Human
auaccuuuaggcauuuugcauc

SEQ ID NO: 60888 - RNA, 22 nt, Human
auacggguuguuaaaaaaucau

SEQ ID NO: 60889 - RNA, 22 nt, Human
auacuacacauugacuauauuu

SEQ ID NO: 60890 - RNA, 22 nt, Human
auacuacaucacagccaagaag

SEQ ID NO: 60891 - RNA, 22 nt, Human
auacuauauuaccuucucaacu

SEQ ID NO: 60892 - RNA, 22 nt, Human
auacucaagguuaaugauugaa

SEQ ID NO: 60893 - RNA, 22 nt, Human
auacugaaaaaugauuugcugu

SEQ ID NO: 60894 - RNA, 21 nt, Human
auacugaaccucauaagccca

SEQ ID NO: 60895 - RNA, 22 nt, Human
auacugaaggcauucagauaac

SEQ ID NO: 60896 - RNA, 22 nt, Human
auacugauacggaagaaaaaag

SEQ ID NO: 60897 - RNA, 22 nt, Human
auacugaugaugugaagaaaca

SEQ ID NO: 60898 - RNA, 22 nt, Human
auacugugugugcucaaggaau

SEQ ID NO: 60899 - RNA, 22 nt, Human
auacuguuggcagcagaccaga

SEQ ID NO: 60900 - RNA, 22 nt, Human
auacuguuuugugacuuaucuu

SEQ ID NO: 60901 - RNA, 22 nt, Human
auacuucccuguuuuuuccuga

SEQ ID NO: 60902 - RNA, 22 nt, Human
auacuuucugaccaauuaauug

SEQ ID NO: 60903 - RNA, 22 nt, Human
auacuuugcuaguaucagugug

SEQ ID NO: 60904 - RNA, 22 nt, Human
auacuuuuaauuccuucugagu

SEQ ID NO: 60905 - RNA, 22 nt, Human
auagaaacagaugcacuucucu

SEQ ID NO: 60906 - RNA, 19 nt, Human
auagaaaggguuaaagaca

SEQ ID NO: 60907 - RNA, 22 nt, Human
auagaacagggcacugucauga

SEQ ID NO: 60908 - RNA, 22 nt, Human
auagaagaggaaacugagguug

SEQ ID NO: 60909 - RNA, 20 nt, Human
auagaaguauuauguaaugu

SEQ ID NO: 60910 - RNA, 20 nt, Human
auagaaucacaaguccugaa

SEQ ID NO: 60911 - RNA, 22 nt, Human
auagaauguauuauaguacaga

SEQ ID NO: 60912 - RNA, 22 nt, Human
auagaauuacaguguguuugga

SEQ ID NO: 60913 - RNA, 22 nt, Human
auagacaaucccccauccuacc

SEQ ID NO: 60914 - RNA, 22 nt, Human
auagacaaugguuugccaagaa

SEQ ID NO: 60915 - RNA, 22 nt, Human
auauguuuugugcuucauuggu

SEQ ID NO: 60916 - RNA, 22 nt, Human
auauguuuuucacagguuuaag

SEQ ID NO: 60917 - RNA, 22 nt, Human
auauuaaaacuaugguuuucag

SEQ ID NO: 60918 - RNA, 22 nt, Human
auauuaaauggauuuugggagc

SEQ ID NO: 60919 - RNA, 22 nt, Human
auauuaaugggauuuagucagg

SEQ ID NO: 60920 - RNA, 22 nt, Human
auauuacucugauuuaguaaau

SEQ ID NO: 60921 - RNA, 22 nt, Human
auauuacuuccugguauaaaau

SEQ ID NO: 60922 - RNA, 22 nt, Human
auauuaggcaaggagauuauuu

SEQ ID NO: 60923 - RNA, 21 nt, Human
aggacaggaacuggcugaaua

SEQ ID NO: 60924 - RNA, 22 nt, Human
aggacaggauugagcugaacug

SEQ ID NO: 60925 - RNA, 22 nt, Human
aggacagggauucaaacuccca

SEQ ID NO: 60926 - RNA, 22 nt, Human
aggacaguggcaaggcaggaca

SEQ ID NO: 60927 - RNA, 22 nt, Human
aggacaguuaguuaggaaguuu

SEQ ID NO: 60928 - RNA, 22 nt, Human
aggaccaggucuaaugaagaca

SEQ ID NO: 60929 - RNA, 19 nt, Human
aggacccuuauccuggcuu

SEQ ID NO: 60930 - RNA, 22 nt, Human
aggaccuggaucacagagaucu

SEQ ID NO: 60931 - RNA, 22 nt, Human
aggaccuguaccucagcaucua

SEQ ID NO: 60932 - RNA, 22 nt, Human
aggacgcucucgcugaacuucu

SEQ ID NO: 60933 - RNA, 22 nt, Human
aggacuaaggaacagcugauuc

SEQ ID NO: 60934 - RNA, 22 nt, Human
aggacuaauuucaggggauaua

SEQ ID NO: 60935 - RNA, 22 nt, Human
aggacugaaaaugaguucuucu

SEQ ID NO: 60936 - RNA, 22 nt, Human
aggacuggcagugugagggguc

SEQ ID NO: 60937 - RNA, 22 nt, Human
aggacuggcccugaggggaggc

SEQ ID NO: 60938 - RNA, 22 nt, Human
aggacuuagaacauuauguacu

SEQ ID NO: 60939 - RNA, 22 nt, Human
aggacuuccaaaccucccaaau

SEQ ID NO: 60940 - RNA, 22 nt, Human
aggacuucugaggucaagucgc

SEQ ID NO: 60941 - RNA, 18 nt, Human
aggacuugccucaguugc

SEQ ID NO: 60942 - RNA, 22 nt, Human
aggacuuguuuaaaguuugugc

SEQ ID NO: 60943 - RNA, 21 nt, Human
aggagaaacacaggucagccc

SEQ ID NO: 60944 - RNA, 22 nt, Human
aggagaaagacuggacagccaa

SEQ ID NO: 60945 - RNA, 22 nt, Human
aggagaaggaggccccucacac

SEQ ID NO: 60946 - RNA, 22 nt, Human
aggagacagaauuuaaauuugg

SEQ ID NO: 60947 - RNA, 22 nt, Human
aggagacagccaggggccugag

SEQ ID NO: 60948 - RNA, 22 nt, Human
aggagacauacuauaggaauau

SEQ ID NO: 60949 - RNA, 22 nt, Human
aggagacccaaugccagaaaga

SEQ ID NO: 60950 - RNA, 22 nt, Human
aggagacccagaauguugcugu

SEQ ID NO: 60951 - RNA, 22 nt, Human
aggagaccuucaccacuuccac

SEQ ID NO: 60952 - RNA, 22 nt, Human
aggagaccuuuugagugugaga

SEQ ID NO: 60953 - RNA, 22 nt, Human
aggagacugugaauugacuguc

SEQ ID NO: 60954 - RNA, 22 nt, Human
aggagagaauuacuggguguca

SEQ ID NO: 60955 - RNA, 22 nt, Human
aggagagagaacacuugggucc

SEQ ID NO: 60956 - RNA, 22 nt, Human
aggagagcuggugucuggaauc

SEQ ID NO: 60957 - RNA, 22 nt, Human
aggagaggguggcauuaaguuu

SEQ ID NO: 60958 - RNA, 22 nt, Human
aggagaggucucccuuccccag

SEQ ID NO: 60959 - RNA, 22 nt, Human
aggagagucuugagucacuggu

SEQ ID NO: 60960 - RNA, 22 nt, Human
aggagaguucacacuggucaga

SEQ ID NO: 60961 - RNA, 22 nt, Human
aggagcaaaugaugagacagca

SEQ ID NO: 60962 - RNA, 22 nt, Human
aggagcacuaauuccugcagag

SEQ ID NO: 60963 - RNA, 22 nt, Human
aggagcagcccacuccuguccu

SEQ ID NO: 60964 - RNA, 22 nt, Human
aggagcagcuucugaaccaugu

SEQ ID NO: 60965 - RNA, 22 nt, Human
aggagccaagcagaacuaagga

SEQ ID NO: 60966 - RNA, 22 nt, Human
aggagccaaggaaaacaguauu

SEQ ID NO: 60967 - RNA, 22 nt, Human
aggagccaccuaggagcuguuu

SEQ ID NO: 60968 - RNA, 22 nt, Human
aggagccagcguuccucaggau

SEQ ID NO: 60969 - RNA, 22 nt, Human
aggagccaggaaaccugcucug

SEQ ID NO: 60970 - RNA, 21 nt, Human
aggagccauguggucugaugg

SEQ ID NO: 60971 - RNA, 20 nt, Human
aggagccauugacugcagca

SEQ ID NO: 60972 - RNA, 22 nt, Human
aggagccauugcaggauggcag

SEQ ID NO: 60973 - RNA, 22 nt, Human
aggagccauuuuccaagggcga

SEQ ID NO: 60974 - RNA, 23 nt, Human
aggagccccuaauucugggcagc

SEQ ID NO: 60975 - RNA, 22 nt, Human
aggagccccucuucaguccugg

SEQ ID NO: 60976 - RNA, 22 nt, Human
aggagcccuccguugcuucauc

SEQ ID NO: 60977 - RNA, 22 nt, Human
aggagccuggcuggcccacagg

SEQ ID NO: 60978 - RNA, 22 nt, Human
aggagccugugccuggcacucc

SEQ ID NO: 60979 - RNA, 19 nt, Human
aggagccuugagcagugag

SEQ ID NO: 60980 - RNA, 22 nt, Human
aggagcuagccaggcauaugca

SEQ ID NO: 60981 - RNA, 22 nt, Human
aggagcucagccugcagggagc

SEQ ID NO: 60982 - RNA, 22 nt, Human
aggagcucagcuaaguuggaga

SEQ ID NO: 60983 - RNA, 22 nt, Human
aggagcuccagcccagggaagu

SEQ ID NO: 60984 - RNA, 21 nt, Human
aggagcucuccaaggacaaag

SEQ ID NO: 60985 - RNA, 22 nt, Human
aggagcucucccaugcugcaga

SEQ ID NO: 60986 - RNA, 22 nt, Human
aggagcucuugaugcuugaggg

SEQ ID NO: 60987 - RNA, 22 nt, Human
aggagcugaagucucugcacuc

SEQ ID NO: 60988 - RNA, 22 nt, Human
aggagcugagucagcccgacag

SEQ ID NO: 60989 - RNA, 22 nt, Human
aggagcugauaaaaggggguca

SEQ ID NO: 60990 - RNA, 22 nt, Human
aggagcugcuuuggugcgguuu

SEQ ID NO: 60991 - RNA, 21 nt, Human
aggagcuggagaaaacuuucc

SEQ ID NO: 60992 - RNA, 22 nt, Human
aggagcuggccuagaaaggaga

SEQ ID NO: 60993 - RNA, 22 nt, Human
aggagcuggguuccuuuggugg

SEQ ID NO: 60994 - RNA, 22 nt, Human
aggagcugucagagugccagag

SEQ ID NO: 60995 - RNA, 22 nt, Human
aggagcuguuuuguucagcaaa

SEQ ID NO: 60996 - RNA, 22 nt, Human
aggagcuucagagagaaccugg

SEQ ID NO: 60997 - RNA, 22 nt, Human
aggaggaaaaaggccacagcaa

SEQ ID NO: 60998 - RNA, 20 nt, Human
aggaggaagaaagcacacug

SEQ ID NO: 60999 - RNA, 21 nt, Human
aggaggagagcuuggccuacc

SEQ ID NO: 61000 - RNA, 22 nt, Human
aggaggagcagcuuuuugucuc

SEQ ID NO: 61001 - RNA, 17 nt, Human
aggaggaucagagagua

SEQ ID NO: 61002 - RNA, 22 nt, Human
aggaggcacucacucucagggu

SEQ ID NO: 61003 - RNA, 22 nt, Human
aggaggcagaugcuuggcugua

SEQ ID NO: 61004 - RNA, 22 nt, Human
aggaggcaggaagucuauggga

SEQ ID NO: 61005 - RNA, 20 nt, Human
aggaggcauagucuggaaag

SEQ ID NO: 61006 - RNA, 22 nt, Human
aggaggccccuccuggguugcu

SEQ ID NO: 61007 - RNA, 22 nt, Human
aggaggcccuagagcucuagag

SEQ ID NO: 61008 - RNA, 22 nt, Human
aggaggccgauuucagaggucg

SEQ ID NO: 61009 - RNA, 22 nt, Human
aggaggccuacgcacaugucua

SEQ ID NO: 61010 - RNA, 23 nt, Human
aggaggccugaaacugaggcuga

SEQ ID NO: 61011 - RNA, 20 nt, Human
aggaggccugcagauaguuc

SEQ ID NO: 61012 - RNA, 22 nt, Human
aggaggccugcagcugccauuc

SEQ ID NO: 61013 - RNA, 22 nt, Human
aggaggccuguguuugucugua

SEQ ID NO: 61014 - RNA, 22 nt, Human
aggaggcugaacuagggucugg

SEQ ID NO: 61015 - RNA, 22 nt, Human
aggaggcugguucaggccauau

SEQ ID NO: 61016 - RNA, 17 nt, Human
aggagggaaauagcuug

SEQ ID NO: 61017 - RNA, 20 nt, Human
aggagggaccuggauuggcg

SEQ ID NO: 61018 - RNA, 22 nt, Human
aggagggcaggcuggcugccua

SEQ ID NO: 61019 - RNA, 22 nt, Human
aggaggguggggucugccuguc

SEQ ID NO: 61020 - RNA, 22 nt, Human
aggaggguucucuggacagagg

SEQ ID NO: 61021 - RNA, 22 nt, Human
aggaggucagagccccaugcug

SEQ ID NO: 61022 - RNA, 22 nt, Human
aggaggugacagccugcaucug

SEQ ID NO: 61023 - RNA, 22 nt, Human
aggagguggcugaacuugaggg

SEQ ID NO: 61024 - RNA, 22 nt, Human
auguauaaguacacagucggaa

SEQ ID NO: 61025 - RNA, 22 nt, Human
auguauacgugcaggucacagg

SEQ ID NO: 61026 - RNA, 17 nt, Human
auguauauuaacucuga

SEQ ID NO: 61027 - RNA, 22 nt, Human
auguaucaacugcaggcaaguu

SEQ ID NO: 61028 - RNA, 22 nt, Human
auguaugagagauucuuuuauu

SEQ ID NO: 61029 - RNA, 22 nt, Human
auguaugaugcuaggcucucag

SEQ ID NO: 61030 - RNA, 22 nt, Human
auguaugcauguauguaucgcu

SEQ ID NO: 61031 - RNA, 22 nt, Human
auguauguaugcugugcuugca

SEQ ID NO: 61032 - RNA, 22 nt, Human
auguauguuagacaagccuaca

SEQ ID NO: 61033 - RNA, 23 nt, Human
auguauguuucugcaucuucaac

SEQ ID NO: 61034 - RNA, 22 nt, Human
auguauuaugguuuuccuuaag

SEQ ID NO: 61035 - RNA, 23 nt, Human
auguauuuaaauuucagugauga

SEQ ID NO: 61036 - RNA, 22 nt, Human
auguauuugaaauuugagacau

SEQ ID NO: 61037 - RNA, 22 nt, Human
auguauuugcuuguuauggauu

SEQ ID NO: 61038 - RNA, 22 nt, Human
augucaaaucaguuuuaucaga

SEQ ID NO: 61039 - RNA, 22 nt, Human
augucacaugguucuggggccu

SEQ ID NO: 61040 - RNA, 22 nt, Human
augucaccuucgguggcacggu

SEQ ID NO: 61041 - RNA, 19 nt, Human
augucacucauguucccug

SEQ ID NO: 61042 - RNA, 22 nt, Human
augucacuccagggacacaggu

SEQ ID NO: 61043 - RNA, 22 nt, Human
augucacuguuguuauuguuau

SEQ ID NO: 61044 - RNA, 22 nt, Human
augucagaagcuggaugacagc

SEQ ID NO: 61045 - RNA, 22 nt, Human
augucaguugcugcuugaggua

SEQ ID NO: 61046 - RNA, 22 nt, Human
augucaguuucauuuuaaguca

SEQ ID NO: 61047 - RNA, 22 nt, Human
augucauuuaaauguuuguaua

SEQ ID NO: 61048 - RNA, 22 nt, Human
auguccaauuucagagucucau

SEQ ID NO: 61049 - RNA, 22 nt, Human
auguccagagccggccugcuga

SEQ ID NO: 61050 - RNA, 22 nt, Human
auguccagggcuuuagcggggc

SEQ ID NO: 61051 - RNA, 22 nt, Human
auguccaguacuucuaaauggu

SEQ ID NO: 61052 - RNA, 20 nt, Human
auguccagugacuggaccau

SEQ ID NO: 61053 - RNA, 22 nt, Human
auguccaugcuuugcuccagaa

SEQ ID NO: 61054 - RNA, 19 nt, Human
augucccaccgccccugag

SEQ ID NO: 61055 - RNA, 22 nt, Human
augucccugagggucucucuga

SEQ ID NO: 61056 - RNA, 22 nt, Human
auguccucggcucugugcugcu

SEQ ID NO: 61057 - RNA, 22 nt, Human
auguccucuucugccucaggcc

SEQ ID NO: 61058 - RNA, 22 nt, Human
auguccuggggucuucucuuca

SEQ ID NO: 61059 - RNA, 22 nt, Human
auguccuuaaucugaauguuag

SEQ ID NO: 61060 - RNA, 22 nt, Human
augucuaaaagauaaaguuuaa

SEQ ID NO: 61061 - RNA, 22 nt, Human
augucuagagcaagagaugcug

SEQ ID NO: 61062 - RNA, 21 nt, Human
augucuaugacauauuuccuu

SEQ ID NO: 61063 - RNA, 22 nt, Human
augucucucucugagugccaga

SEQ ID NO: 61064 - RNA, 22 nt, Human
augucugagucugcuccaguug

SEQ ID NO: 61065 - RNA, 22 nt, Human
augucugcggcccaggccaggg

SEQ ID NO: 61066 - RNA, 22 nt, Human
augucugcuauucauagggaaa

SEQ ID NO: 61067 - RNA, 19 nt, Human
augucuggguaacagcugc

SEQ ID NO: 61068 - RNA, 22 nt, Human
augucuguacgaguuacaaugg

SEQ ID NO: 61069 - RNA, 22 nt, Human
augucuguggcaauuguugaug

SEQ ID NO: 61070 - RNA, 22 nt, Human
augucugugugaucuuggauaa

SEQ ID NO: 61071 - RNA, 22 nt, Human
augucuguguuaucuguagaau

SEQ ID NO: 61072 - RNA, 22 nt, Human
augucuguuuucauaucagaua

SEQ ID NO: 61073 - RNA, 22 nt, Human
augucuuggguuucaguuuacu

SEQ ID NO: 61074 - RNA, 22 nt, Human
augucuuguuaaucugaagcaa

SEQ ID NO: 61075 - RNA, 22 nt, Human
agggcgggcucaucacaugcuc

SEQ ID NO: 61076 - RNA, 22 nt, Human
agggcgugguggugcuggagca

SEQ ID NO: 61077 - RNA, 21 nt, Human
agggcucaaaugugcuugcug

SEQ ID NO: 61078 - RNA, 22 nt, Human
agggcucacuacaacccuggga

SEQ ID NO: 61079 - RNA, 22 nt, Human
agggcucagaaagcagguuuuc

SEQ ID NO: 61080 - RNA, 22 nt, Human
agggcucagggucaccaucugu

SEQ ID NO: 61081 - RNA, 22 nt, Human
agggcucaguugccuggagccc

SEQ ID NO: 61082 - RNA, 22 nt, Human
agggcuccaggggaccaucagu

SEQ ID NO: 61083 - RNA, 22 nt, Human
agggcucccgugaggugacugc

SEQ ID NO: 61084 - RNA, 23 nt, Human
agggcuccuuguugauuagcauu

SEQ ID NO: 61085 - RNA, 22 nt, Human
agggcucugagugggaaagagg

SEQ ID NO: 61086 - RNA, 22 nt, Human
agggcucuuccuuugccucuca

SEQ ID NO: 61087 - RNA, 22 nt, Human
agggcugaccuaagcuccacuu

SEQ ID NO: 61088 - RNA, 22 nt, Human
agggcugaggcgagggagaugc

SEQ ID NO: 61089 - RNA, 22 nt, Human
agggcugcaguccuaaggugcu

SEQ ID NO: 61090 - RNA, 22 nt, Human
agggcugcaucugccuggugaa

SEQ ID NO: 61091 - RNA, 22 nt, Human
agggcugccauuucuggcccaa

SEQ ID NO: 61092 - RNA, 22 nt, Human
agggcugccccaguccagccgg

SEQ ID NO: 61093 - RNA, 22 nt, Human
agggcugccugacuccagagcc

SEQ ID NO: 61094 - RNA, 19 nt, Human
agggcugcucuggccuggg

SEQ ID NO: 61095 - RNA, 22 nt, Human
agggcugcugcuccgggcccag

SEQ ID NO: 61096 - RNA, 22 nt, Human
agggcuggccacaugauuuggu

SEQ ID NO: 61097 - RNA, 22 nt, Human
agggcugggcugcuuguuguca

SEQ ID NO: 61098 - RNA, 22 nt, Human
agggcugugucccuaggggagc

SEQ ID NO: 61099 - RNA, 22 nt, Human
agggcuguguuugcacccucug

SEQ ID NO: 61100 - RNA, 22 nt, Human
agggcuugccauugccuguuag

SEQ ID NO: 61101 - RNA, 22 nt, Human
agggcuugcugauuuaaagagc

SEQ ID NO: 61102 - RNA, 22 nt, Human
agggcuuucggcacucugaggg

SEQ ID NO: 61103 - RNA, 22 nt, Human
agggcuuugagaauaguggaac

SEQ ID NO: 61104 - RNA, 22 nt, Human
agggcuuugauggcauucucau

SEQ ID NO: 61105 - RNA, 22 nt, Human
agggcuuugauguccaugagga

SEQ ID NO: 61106 - RNA, 22 nt, Human
agggcuuugcaaugcacagugg

SEQ ID NO: 61107 - RNA, 22 nt, Human
agggcuuuguggcagucacuau

SEQ ID NO: 61108 - RNA, 22 nt, Human
aggggacacggcuucuccaggg

SEQ ID NO: 61109 - RNA, 22 nt, Human
aggggagaaaaaugccuucugu

SEQ ID NO: 61110 - RNA, 22 nt, Human
aggggagagaacauaaggaagu

SEQ ID NO: 61111 - RNA, 22 nt, Human
aggggagaggugagcaacuucu

SEQ ID NO: 61112 - RNA, 17 nt, Human
aggggagagugggaaga

SEQ ID NO: 61113 - RNA, 22 nt, Human
aggggaggagcuuuucuugccu

SEQ ID NO: 61114 - RNA, 22 nt, Human
aggggagguguccccaaaucuc

SEQ ID NO: 61115 - RNA, 22 nt, Human
aggggaugauccucccgcagcg

SEQ ID NO: 61116 - RNA, 22 nt, Human
aggggccauuguucugcccgcu

SEQ ID NO: 61117 - RNA, 22 nt, Human
aggggccucagccuccugguca

SEQ ID NO: 61118 - RNA, 22 nt, Human
aggggccucgcaggaccgcucc

SEQ ID NO: 61119 - RNA, 22 nt, Human
aggggccuggacauggacgcgc

SEQ ID NO: 61120 - RNA, 22 nt, Human
aggggcucaaagugugcaggga

SEQ ID NO: 61121 - RNA, 22 nt, Human
aggggcuccaaggaaguuuggg

SEQ ID NO: 61122 - RNA, 22 nt, Human
aggggcugcuggguccgccccu

SEQ ID NO: 61123 - RNA, 22 nt, Human
aggggcuggcuuaucugagagu

SEQ ID NO: 61124 - RNA, 22 nt, Human
aggggcugggacagagccaagc

SEQ ID NO: 61125 - RNA, 22 nt, Human
agggggcauuaugaggcuuuuc

SEQ ID NO: 61126 - RNA, 22 nt, Human
agggggucuccuaucauggaag

SEQ ID NO: 61127 - RNA, 22 nt, Human
agggguagagauugcuggugua

SEQ ID NO: 61128 - RNA, 22 nt, Human
aggggucuuuaggaacgucggg

SEQ ID NO: 61129 - RNA, 22 nt, Human
aggggugaaggcccgauaggag

SEQ ID NO: 61130 - RNA, 22 nt, Human
aggggugacacauaucagugca

SEQ ID NO: 61131 - RNA, 22 nt, Human
agggguggagaguguugccagu

SEQ ID NO: 61132 - RNA, 22 nt, Human
agggguggccugccuuacuccc

SEQ ID NO: 61133 - RNA, 22 nt, Human
auguguccaaggccacaauagc

SEQ ID NO: 61134 - RNA, 22 nt, Human
augugucucuaccaaugcaauu

SEQ ID NO: 61135 - RNA, 22 nt, Human
augugucuuauuugauuccaca

SEQ ID NO: 61136 - RNA, 22 nt, Human
augugucuugagggggauggag

SEQ ID NO: 61137 - RNA, 22 nt, Human
augugugcaucaaugauagauc

SEQ ID NO: 61138 - RNA, 22 nt, Human
augugugccccuuuuacucuuu

SEQ ID NO: 61139 - RNA, 22 nt, Human
augugugcgggaaggaaaguga

SEQ ID NO: 61140 - RNA, 21 nt, Human
augugugcuagaggacuacug

SEQ ID NO: 61141 - RNA, 22 nt, Human
augugugcucuugagccuucac

SEQ ID NO: 61142 - RNA, 22 nt, Human
augugugguacagucccguuua

SEQ ID NO: 61143 - RNA, 22 nt, Human
augugugguuuguaaaugauuu

SEQ ID NO: 61144 - RNA, 22 nt, Human
auguguguaaacaaguauaauu

SEQ ID NO: 61145 - RNA, 22 nt, Human
auguguuaaugucaaccagaaa

SEQ ID NO: 61146 - RNA, 22 nt, Human
auguguuuaccaggggaacaug

SEQ ID NO: 61147 - RNA, 22 nt, Human
auguguuuauaauuacucaauc

SEQ ID NO: 61148 - RNA, 22 nt, Human
auguguuuguccugcagaaaua

SEQ ID NO: 61149 - RNA, 22 nt, Human
auguguuuugguaauuucugcu

SEQ ID NO: 61150 - RNA, 22 nt, Human
auguuaaauaaucccuuaaagc

SEQ ID NO: 61151 - RNA, 20 nt, Human
auguuaaauagcauuuagag

SEQ ID NO: 61152 - RNA, 22 nt, Human
auguuacaauccaacaaaauua

SEQ ID NO: 61153 - RNA, 22 nt, Human
auguuacaauucaaaaugcugc

SEQ ID NO: 61154 - RNA, 22 nt, Human
auguuacacuguuucacguucc

SEQ ID NO: 61155 - RNA, 22 nt, Human
auguuacagggagagaaggcca

SEQ ID NO: 61156 - RNA, 22 nt, Human
auguuacaguugaguaaauuaa

SEQ ID NO: 61157 - RNA, 22 nt, Human
auguuacauaguccuuauuugu

SEQ ID NO: 61158 - RNA, 22 nt, Human
auguuacuuagaauaauucugg

SEQ ID NO: 61159 - RNA, 22 nt, Human
auguuagaaggaauguuaaaag

SEQ ID NO: 61160 - RNA, 22 nt, Human
auguuagaaucucugaaugugg

SEQ ID NO: 61161 - RNA, 22 nt, Human
auguuaugucugggaaggggua

SEQ ID NO: 61162 - RNA, 22 nt, Human
auguucaaguaccuuugugucu

SEQ ID NO: 61163 - RNA, 22 nt, Human
auguucauccaugucguagcag

SEQ ID NO: 61164 - RNA, 22 nt, Human
auguucaugauugguuuuggcg

SEQ ID NO: 61165 - RNA, 22 nt, Human
auguucauuugacaaguaguga

SEQ ID NO: 61166 - RNA, 19 nt, Human
auguucuauccuccaaguu

SEQ ID NO: 61167 - RNA, 19 nt, Human
auguucugaauuacuguaa

SEQ ID NO: 61168 - RNA, 22 nt, Human
auguucuuaucauucuuucgga

SEQ ID NO: 61169 - RNA, 22 nt, Human
auguucuuccaaaucuguaaca

SEQ ID NO: 61170 - RNA, 22 nt, Human
auguucuuccuucaauuuggaa

SEQ ID NO: 61171 - RNA, 22 nt, Human
auguugaacuaggaucucuuga

SEQ ID NO: 61172 - RNA, 22 nt, Human
auguuguuuuuucauaaaguau

SEQ ID NO: 61173 - RNA, 22 nt, Human
auguuuaaauuuauagacagug

SEQ ID NO: 61174 - RNA, 20 nt, Human
auguuuaauguuguccaccc

SEQ ID NO: 61175 - RNA, 21 nt, Human
auguuuacacugacuacugug

SEQ ID NO: 61176 - RNA, 22 nt, Human
auguuuacugguuuauagaaua

SEQ ID NO: 61177 - RNA, 22 nt, Human
auguuuauguugggcuauauuu

SEQ ID NO: 61178 - RNA, 22 nt, Human
auguuuauuuugcagaguaggg

SEQ ID NO: 61179 - RNA, 22 nt, Human
auguuucaagagaaaaagagac

SEQ ID NO: 61180 - RNA, 22 nt, Human
auguuucaccaguuuuauaaga

SEQ ID NO: 61181 - RNA, 22 nt, Human
auguuucaggaaaucagcuaga

SEQ ID NO: 61182 - RNA, 22 nt, Human
auguuucaguucuaaaguuaga

SEQ ID NO: 61183 - RNA, 22 nt, Human
auguuuccauagaagucacagu

SEQ ID NO: 61184 - RNA, 22 nt, Human
auguuuccauguucaauuuacu

SEQ ID NO: 61185 - RNA, 22 nt, Human
auguuuccgugagcauccuuga

SEQ ID NO: 61186 - RNA, 20 nt, Human
auguuucucugucgugauuu

SEQ ID NO: 61187 - RNA, 18 nt, Human
auguuucucuuggcucug

SEQ ID NO: 61188 - RNA, 22 nt, Human
auguuugaaauuguaaguauau

SEQ ID NO: 61189 - RNA, 22 nt, Human
auguuugacugaguuuggcaga

SEQ ID NO: 61190 - RNA, 22 nt, Human
auguuugcuauuguucuagugg

SEQ ID NO: 61191 - RNA, 22 nt, Human
auguuugcuuaauuggagaaau

SEQ ID NO: 61192 - RNA, 23 nt, Human
agggcugaugccauugcagcucu

SEQ ID NO: 61193 - RNA, 22 nt, Human
agggcugcuccuccuucaggcc

SEQ ID NO: 61194 - RNA, 22 nt, Human
agggcuggaggguacuaguuua

SEQ ID NO: 61195 - RNA, 22 nt, Human
agggcuggcuaggugcguuccc

SEQ ID NO: 61196 - RNA, 22 nt, Human
agggcuggcuccguuaccuuga

SEQ ID NO: 61197 - RNA, 22 nt, Human
agggcugguauguccaugaaag

SEQ ID NO: 61198 - RNA, 22 nt, Human
agggcugucagacugaggaggc

SEQ ID NO: 61199 - RNA, 22 nt, Human
agggcuuguuaacauagagauu

SEQ ID NO: 61200 - RNA, 22 nt, Human
agggcuuuguuuaggugaccac

SEQ ID NO: 61201 - RNA, 22 nt, Human
agggcuuuugcaauccaagucu

SEQ ID NO: 61202 - RNA, 22 nt, Human
aggggaagagcccuuuacaugg

SEQ ID NO: 61203 - RNA, 22 nt, Human
aggggagaguuaaugugaaugu

SEQ ID NO: 61204 - RNA, 22 nt, Human
aggggagcaacauagucacucu

SEQ ID NO: 61205 - RNA, 22 nt, Human
aggggagcaucugugaugguua

SEQ ID NO: 61206 - RNA, 22 nt, Human
aggggagccccugguccuggug

SEQ ID NO: 61207 - RNA, 22 nt, Human
aggggagccgaggggcaucugu

SEQ ID NO: 61208 - RNA, 22 nt, Human
aggggcaaaugugagccuggaa

SEQ ID NO: 61209 - RNA, 22 nt, Human
aggggcacuagaaugggagacu

SEQ ID NO: 61210 - RNA, 19 nt, Human
aggggcacugucucuagag

SEQ ID NO: 61211 - RNA, 22 nt, Human
aggggcagccucacaauccucu

SEQ ID NO: 61212 - RNA, 18 nt, Human
aggggcagcuugugugga

SEQ ID NO: 61213 - RNA, 22 nt, Human
aggggcaucaguugcacauuuu

SEQ ID NO: 61214 - RNA, 22 nt, Human
aggggccaccaccaaggaaggu

SEQ ID NO: 61215 - RNA, 22 nt, Human
aggggccauguaaguguaucac

SEQ ID NO: 61216 - RNA, 22 nt, Human
aggggccuccucauuggagugu

SEQ ID NO: 61217 - RNA, 20 nt, Human
aggggccuggaacaggccuu

SEQ ID NO: 61218 - RNA, 22 nt, Human
aggggcucaagcaguguggucu

SEQ ID NO: 61219 - RNA, 22 nt, Human
aggggcuguggaaaccaacucu

SEQ ID NO: 61220 - RNA, 22 nt, Human
agggggaguuucaguuagaaag

SEQ ID NO: 61221 - RNA, 22 nt, Human
agggggcaucagguccuggcuc

SEQ ID NO: 61222 - RNA, 22 nt, Human
agggggcccuugcaggugagcg

SEQ ID NO: 61223 - RNA, 22 nt, Human
agggggcuccuuggugugcaga

SEQ ID NO: 61224 - RNA, 22 nt, Human
agggggcugccaaggaauguaa

SEQ ID NO: 61225 - RNA, 22 nt, Human
agggggguggaucaccugaggu

SEQ ID NO: 61226 - RNA, 22 nt, Human
agggggugcauuugugaaugaa

SEQ ID NO: 61227 - RNA, 22 nt, Human
agggggugcuacuuccagaguu

SEQ ID NO: 61228 - RNA, 22 nt, Human
agggggugucucugauuggguu

SEQ ID NO: 61229 - RNA, 22 nt, Human
agggguaguaggauaacaaauu

SEQ ID NO: 61230 - RNA, 22 nt, Human
aggggucagugaccauugagga

SEQ ID NO: 61231 - RNA, 22 nt, Human
aggggucuugaggacuccagca

SEQ ID NO: 61232 - RNA, 20 nt, Human
aggggugaucgggugacacu

SEQ ID NO: 61233 - RNA, 22 nt, Human
aggguagcuacccaacuccaga

SEQ ID NO: 61234 - RNA, 22 nt, Human
aggguagguguaagauagcccu

SEQ ID NO: 61235 - RNA, 22 nt, Human
agggucaacacuuuaaacauau

SEQ ID NO: 61236 - RNA, 22 nt, Human
agggucagcuggcugucagggg

SEQ ID NO: 61237 - RNA, 19 nt, Human
agggucaggacaaggacuu

SEQ ID NO: 61238 - RNA, 22 nt, Human
agggucaggagacacuggcaac

SEQ ID NO: 61239 - RNA, 20 nt, Human
agggucaguagcacagagcu

SEQ ID NO: 61240 - RNA, 18 nt, Human
agggucagugucacuggc

SEQ ID NO: 61241 - RNA, 19 nt, Human
aggguccagggagcggcuc

SEQ ID NO: 61242 - RNA, 19 nt, Human
aguuaaugagcuuuugauc

SEQ ID NO: 61243 - RNA, 22 nt, Human
aguuacaaguacaggcuuugga

SEQ ID NO: 61244 - RNA, 22 nt, Human
aguuacagaauguacagagguu

SEQ ID NO: 61245 - RNA, 22 nt, Human
aguuacagcacucaaaguuuuc

SEQ ID NO: 61246 - RNA, 22 nt, Human
aguuacagugaccauuuauuua

SEQ ID NO: 61247 - RNA, 22 nt, Human
aguuacaucuguuauguguguu

SEQ ID NO: 61248 - RNA, 21 nt, Human
aguuacauguauagauaaagu

SEQ ID NO: 61249 - RNA, 22 nt, Human
aguuaccuuucugaaacuucgu

SEQ ID NO: 61250 - RNA, 22 nt, Human
aguuacuugagacguuuaugaa

SEQ ID NO: 61251 - RNA, 22 nt, Human
aguuagaaaguaaaucauuuga

SEQ ID NO: 61252 - RNA, 22 nt, Human
aguuagagcgcauauuuuauua

SEQ ID NO: 61253 - RNA, 22 nt, Human
aguuagcaucuccuccagucua

SEQ ID NO: 61254 - RNA, 22 nt, Human
aguuaguagacuuuuccauuua

SEQ ID NO: 61255 - RNA, 22 nt, Human
aguuaguauacaaaguaacagc

SEQ ID NO: 61256 - RNA, 22 nt, Human
aguuagugaagcucaucacagc

SEQ ID NO: 61257 - RNA, 22 nt, Human
aguuagugagcucuugggaccu

SEQ ID NO: 61258 - RNA, 20 nt, Human
aguuagugaguaauugagcu

SEQ ID NO: 61259 - RNA, 17 nt, Human
aguuaguguagcagugc

SEQ ID NO: 61260 - RNA, 22 nt, Human
aguuauaccuuauacacauaug

SEQ ID NO: 61261 - RNA, 22 nt, Human
aguuauagccauauucuaagau

SEQ ID NO: 61262 - RNA, 22 nt, Human
aguuauaugugaaaacacguau

SEQ ID NO: 61263 - RNA, 22 nt, Human
aguuauauuccauagauucaga

SEQ ID NO: 61264 - RNA, 22 nt, Human
aguuaucaucccuuacacuuug

SEQ ID NO: 61265 - RNA, 22 nt, Human
aguuauccgaaggcacugagau

SEQ ID NO: 61266 - RNA, 22 nt, Human
aguuauuuaaaaugauuguccu

SEQ ID NO: 61267 - RNA, 23 nt, Human
aguucaaaaucaaccaggacacu

SEQ ID NO: 61268 - RNA, 22 nt, Human
aguucaagcaaugcuggaagaa

SEQ ID NO: 61269 - RNA, 22 nt, Human
aguucaauuguuuuguaaaagu

SEQ ID NO: 61270 - RNA, 22 nt, Human
aguucacaagcguaggugcuga

SEQ ID NO: 61271 - RNA, 22 nt, Human
aguucacaauagaagagguggc

SEQ ID NO: 61272 - RNA, 22 nt, Human
aguucacagaauggccagaacu

SEQ ID NO: 61273 - RNA, 22 nt, Human
aguucacagccauguucaugug

SEQ ID NO: 61274 - RNA, 21 nt, Human
aguucacaggaacaagcaggg

SEQ ID NO: 61275 - RNA, 23 nt, Human
aguucacugagguugaccacugg

SEQ ID NO: 61276 - RNA, 22 nt, Human
aguucacuuucuguaguggaag

SEQ ID NO: 61277 - RNA, 22 nt, Human
aguucagcuucaagcuaugagg

SEQ ID NO: 61278 - RNA, 23 nt, Human
aguucauaauuucuuauuugugu

SEQ ID NO: 61279 - RNA, 21 nt, Human
aguucauacugaguaacaaaa

SEQ ID NO: 61280 - RNA, 22 nt, Human
aguuccagugugagagaacaug

SEQ ID NO: 61281 - RNA, 22 nt, Human
aguucgagaucugcugaugaga

SEQ ID NO: 61282 - RNA, 22 nt, Human
aguucuaaacacuugaggaacc

SEQ ID NO: 61283 - RNA, 22 nt, Human
aguucuaagaugcuccacagag

SEQ ID NO: 61284 - RNA, 22 nt, Human
aguucuaaggugaguagagagg

SEQ ID NO: 61285 - RNA, 22 nt, Human
aguucuaauugcguuuucuugc

SEQ ID NO: 61286 - RNA, 23 nt, Human
aguucucaaaaccagcuugacaa

SEQ ID NO: 61287 - RNA, 22 nt, Human
aguucucaagacaauuaccugu

SEQ ID NO: 61288 - RNA, 22 nt, Human
aguucucaucaugaagcauaag

SEQ ID NO: 61289 - RNA, 22 nt, Human
aguucucauugcaugagacaga

SEQ ID NO: 61290 - RNA, 22 nt, Human
aguucucuggcuccuuuccaga

SEQ ID NO: 61291 - RNA, 22 nt, Human
aguucucuuccacagccuccuc

SEQ ID NO: 61292 - RNA, 22 nt, Human
aguucugacucugaaucuggga

SEQ ID NO: 61293 - RNA, 22 nt, Human
aguucugcugcugccuagggug

SEQ ID NO: 61294 - RNA, 22 nt, Human
aguucugugacaauaucauuac

SEQ ID NO: 61295 - RNA, 22 nt, Human
aguucuuauuuuggaacugagg

SEQ ID NO: 61296 - RNA, 22 nt, Human
aguucuuuguaaaaggucucua

SEQ ID NO: 61297 - RNA, 22 nt, Human
aguucuuugucaucucuggagu

SEQ ID NO: 61298 - RNA, 22 nt, Human
aguucuuuuaccaaggcaaaug

SEQ ID NO: 61299 - RNA, 22 nt, Human
aguugaaaauuaagugaauuuc

SEQ ID NO: 61300 - RNA, 22 nt, Human
aguugaauauacuugcuguugc

SEQ ID NO: 61301 - RNA, 22 nt, Human
aguugacaauaaauuuaauugg

SEQ ID NO: 61302 - RNA, 22 nt, Human
aguugcugauucugucugugau

SEQ ID NO: 61303 - RNA, 22 nt, Human
aguugcuggcaccugugaguau

SEQ ID NO: 61304 - RNA, 22 nt, Human
aguugcugguaaauguuaucaa

SEQ ID NO: 61305 - RNA, 22 nt, Human
aguuggcagucugcaaccugga

SEQ ID NO: 61306 - RNA, 22 nt, Human
aguuggcgggacauguggaaag

SEQ ID NO: 61307 - RNA, 22 nt, Human
aguuggcuucaaaggcagagag

SEQ ID NO: 61308 - RNA, 22 nt, Human
aguuguaauaacaauaccaaaa

SEQ ID NO: 61309 - RNA, 22 nt, Human
aguugugaauagaucugauugg

SEQ ID NO: 61310 - RNA, 22 nt, Human
aguuuacaacaguagcuaugga

SEQ ID NO: 61311 - RNA, 22 nt, Human
aguuuacacuaugaaaagacua

SEQ ID NO: 61312 - RNA, 22 nt, Human
aguuuacaguucucaucgcaac

SEQ ID NO: 61313 - RNA, 22 nt, Human
aguuuagaaaaucuguuucuuc

SEQ ID NO: 61314 - RNA, 22 nt, Human
aguuuagaagaggaacuuguua

SEQ ID NO: 61315 - RNA, 19 nt, Human
aguuuagagagacucuaaa

SEQ ID NO: 61316 - RNA, 20 nt, Human
aguuuagaggccaacaagcc

SEQ ID NO: 61317 - RNA, 22 nt, Human
aguuuauagcccagauucaugg

SEQ ID NO: 61318 - RNA, 22 nt, Human
aguuuaugucuuuacuucagcu

SEQ ID NO: 61319 - RNA, 22 nt, Human
aguuuauguguaagacagcugu

SEQ ID NO: 61320 - RNA, 20 nt, Human
aguuuauuccaggagaacug

SEQ ID NO: 61321 - RNA, 17 nt, Human
aguuuauuuagccuucu

SEQ ID NO: 61322 - RNA, 22 nt, Human
aguuucacacaacauuugcaug

SEQ ID NO: 61323 - RNA, 22 nt, Human
aguuucacagaauaugaagguu

SEQ ID NO: 61324 - RNA, 21 nt, Human
aguuucacagaggggccgucc

SEQ ID NO: 61325 - RNA, 22 nt, Human
aguuucacaugcauggaugugu

SEQ ID NO: 61326 - RNA, 22 nt, Human
aguuucaugagacagauuuuca

SEQ ID NO: 61327 - RNA, 22 nt, Human
aguuuccaaagcauguucacac

SEQ ID NO: 61328 - RNA, 22 nt, Human
aguuuccaaauauuguuuuagc

SEQ ID NO: 61329 - RNA, 22 nt, Human
aguuuccagcacagggcaagcu

SEQ ID NO: 61330 - RNA, 19 nt, Human
aguuucccuggagacauca

SEQ ID NO: 61331 - RNA, 21 nt, Human
aguuuccucaucugcauagga

SEQ ID NO: 61332 - RNA, 22 nt, Human
aguuuccucauguuaauaugga

SEQ ID NO: 61333 - RNA, 22 nt, Human
aguuuccugggagauucuuaca

SEQ ID NO: 61334 - RNA, 22 nt, Human
aguuucuaacauauagcauugg

SEQ ID NO: 61335 - RNA, 22 nt, Human
aguuucuagcaaggauuguuga

SEQ ID NO: 61336 - RNA, 22 nt, Human
aguuucuagccucacuguuuag

SEQ ID NO: 61337 - RNA, 22 nt, Human
aguuucuugaagacugauguuu

SEQ ID NO: 61338 - RNA, 22 nt, Human
aguuucuuuagauagaaaguuc

SEQ ID NO: 61339 - RNA, 22 nt, Human
aguuugaaaguauugacagaag

SEQ ID NO: 61340 - RNA, 22 nt, Human
aguuugaagaaggugagaugca

SEQ ID NO: 61341 - RNA, 22 nt, Human
aguuugacaaaguaaaaugaca

SEQ ID NO: 61342 - RNA, 21 nt, Human
aguuugaugcaauuucugaga

SEQ ID NO: 61343 - RNA, 22 nt, Human
aguuugauggcuuaauaguaga

SEQ ID NO: 61344 - RNA, 22 nt, Human
aguuugauuugucuaucuucau

SEQ ID NO: 61345 - RNA, 22 nt, Human
aguggaaggcugggaaaugcgg

SEQ ID NO: 61346 - RNA, 22 nt, Human
aguggaauguagaaaaaagaug

SEQ ID NO: 61347 - RNA, 22 nt, Human
aguggaauugcugauugaaaua

SEQ ID NO: 61348 - RNA, 22 nt, Human
aguggagaauaugcagaaagcc

SEQ ID NO: 61349 - RNA, 22 nt, Human
aguggaggcacuaauuggauuu

SEQ ID NO: 61350 - RNA, 22 nt, Human
aguggaugguauugggaccagg

SEQ ID NO: 61351 - RNA, 22 nt, Human
aguguguuuaggcugcggguug

SEQ ID NO: 61352 - RNA, 22 nt, Human
aguguuaacaugaaugguuucc

SEQ ID NO: 61353 - RNA, 18 nt, Human
aguguuaaguaaguagca

SEQ ID NO: 61354 - RNA, 22 nt, Human
aguguuaaugguguauauuagg

SEQ ID NO: 61355 - RNA, 22 nt, Human
aguguuagugaaagguguuuau

SEQ ID NO: 61356 - RNA, 22 nt, Human
aguguuauuuuucaaaggcccu

SEQ ID NO: 61357 - RNA, 22 nt, Human
aguguucauuuauucauucacu

SEQ ID NO: 61358 - RNA, 17 nt, Human
aguguucuggguugccc

SEQ ID NO: 61359 - RNA, 22 nt, Human
aguguucuucugggguaugcuc

SEQ ID NO: 61360 - RNA, 22 nt, Human
aguguucuucuucaaagcucug

SEQ ID NO: 61361 - RNA, 23 nt, Human
aguguugagcagaugcaaagguu

SEQ ID NO: 61362 - RNA, 22 nt, Human
aguguuggaccgagguggagcc

SEQ ID NO: 61363 - RNA, 22 nt, Human
aguguugggucuuuagaauuua

SEQ ID NO: 61364 - RNA, 23 nt, Human
aguguugguugggaagccaagca

SEQ ID NO: 61365 - RNA, 22 nt, Human
aguguuuaaugccuuuuccagc

SEQ ID NO: 61366 - RNA, 22 nt, Human
aguguuuacauauaaggcccuu

SEQ ID NO: 61367 - RNA, 22 nt, Human
aguguuuacauugaagcuugua

SEQ ID NO: 61368 - RNA, 22 nt, Human
aguguuuacucaaaggguucca

SEQ ID NO: 61369 - RNA, 20 nt, Human
aguguuuagaauacuauuau

SEQ ID NO: 61370 - RNA, 22 nt, Human
aguguuuagucaaguaagacgc

SEQ ID NO: 61371 - RNA, 22 nt, Human
aguguuuauuagauuucccuuu

SEQ ID NO: 61372 - RNA, 22 nt, Human
aguguuuauugugugccacaca

SEQ ID NO: 61373 - RNA, 22 nt, Human
aguguuuauuuacagaugguuu

SEQ ID NO: 61374 - RNA, 22 nt, Human
aguguuucaagaagcaggaagu

SEQ ID NO: 61375 - RNA, 22 nt, Human
aguguuucaauccuagggguug

SEQ ID NO: 61376 - RNA, 22 nt, Human
aguguuucuggcaaaugaaagu

SEQ ID NO: 61377 - RNA, 22 nt, Human
aguguuucugugccccaguguu

SEQ ID NO: 61378 - RNA, 22 nt, Human
aguguuugaguuugcggcauug

SEQ ID NO: 61379 - RNA, 22 nt, Human
aguguuugcaucucauugauuu

SEQ ID NO: 61380 - RNA, 22 nt, Human
aguguuugucccguuagaaaug

SEQ ID NO: 61381 - RNA, 21 nt, Human
aguuaaaccuuuagagaacua

SEQ ID NO: 61382 - RNA, 22 nt, Human
aguuaaacuuugccagauggga

SEQ ID NO: 61383 - RNA, 22 nt, Human
aguuaaagaaagauaauucgcc

SEQ ID NO: 61384 - RNA, 22 nt, Human
aguuaacacaaguaagauucca

SEQ ID NO: 61385 - RNA, 22 nt, Human
aguuaacuaaauuaagagacaa

SEQ ID NO: 61386 - RNA, 22 nt, Human
aguuaacucugaaaagacauuu

SEQ ID NO: 61387 - RNA, 22 nt, Human
aguuaagagugugaaaauguua

SEQ ID NO: 61388 - RNA, 22 nt, Human
aguuaaugagcauuuuggaaug

SEQ ID NO: 61389 - RNA, 22 nt, Human
aguuacaagcuauuuuacuuaa

SEQ ID NO: 61390 - RNA, 21 nt, Human
aguuacaaguuuauucagagg

SEQ ID NO: 61391 - RNA, 22 nt, Human
aguuacaugugaauagaaagua

SEQ ID NO: 61392 - RNA, 22 nt, Human
aguuacauucugagcugaguag

SEQ ID NO: 61393 - RNA, 22 nt, Human
aguuacuuucugaucagugugu

SEQ ID NO: 61394 - RNA, 22 nt, Human
aguuagaauagucagauuguag

SEQ ID NO: 61395 - RNA, 22 nt, Human
aguuagaauauaauuauguuaa

SEQ ID NO: 61396 - RNA, 21 nt, Human
aguuagcagauuucugucucc

SEQ ID NO: 61397 - RNA, 22 nt, Human
aguuagcagcuuauuagaaaca

SEQ ID NO: 61398 - RNA, 22 nt, Human
aguuaguggcaaagugguuuga

SEQ ID NO: 61399 - RNA, 22 nt, Human
aguuauaaucugcuacugauau

SEQ ID NO: 61400 - RNA, 20 nt, Human
aguuauaguaucuagccaug

SEQ ID NO: 61401 - RNA, 22 nt, Human
aguuauauaacuaucuagaugc

SEQ ID NO: 61402 - RNA, 22 nt, Human
aguuaucagguguuuucaugga

SEQ ID NO: 61403 - RNA, 22 nt, Human
aguuaucccaaaugcaaaaugg

SEQ ID NO: 61404 - RNA, 22 nt, Human
aguucaaacucuauaagaacuu

SEQ ID NO: 61405 - RNA, 22 nt, Human
aguucaauagaaaaauauauua

SEQ ID NO: 61406 - RNA, 22 nt, Human
aguucacaagugcauuucagga

SEQ ID NO: 61407 - RNA, 20 nt, Human
aguucacaggccaaauuucu

SEQ ID NO: 61408 - RNA, 22 nt, Human
aguucacagggaagguuauugu

SEQ ID NO: 61409 - RNA, 22 nt, Human
aguucacauuccgagguacugg

SEQ ID NO: 61410 - RNA, 22 nt, Human
aguucacuauagaagacagugu

SEQ ID NO: 61411 - RNA, 22 nt, Human
aguucagaaaugucuuugcaaa

SEQ ID NO: 61412 - RNA, 22 nt, Human
aguucagccauuuguuaacuau

SEQ ID NO: 61413 - RNA, 22 nt, Human
aguucaucuuacuuagaguaca

SEQ ID NO: 61414 - RNA, 19 nt, Human
aguuccacacuuuaucugg

SEQ ID NO: 61415 - RNA, 22 nt, Human
aguuccagaacuggaaaaggac

SEQ ID NO: 61416 - RNA, 22 nt, Human
aguuccaugucuggguuuguga

SEQ ID NO: 61417 - RNA, 22 nt, Human
aguucccuccacaacuucucac

SEQ ID NO: 61418 - RNA, 22 nt, Human
aguuccuauacugggucagucc

SEQ ID NO: 61419 - RNA, 22 nt, Human
aguucuaaguaaauauuuuaua

SEQ ID NO: 61420 - RNA, 21 nt, Human
aguucuauagucuucacagcc

SEQ ID NO: 61421 - RNA, 22 nt, Human
aguucuauuucuaacauguuau

SEQ ID NO: 61422 - RNA, 22 nt, Human
aguucucagcuuaguaugcugu

SEQ ID NO: 61423 - RNA, 22 nt, Human
aguucucaggucagcugagucu

SEQ ID NO: 61424 - RNA, 23 nt, Human
aguucucauucaucacggccuau

SEQ ID NO: 61425 - RNA, 22 nt, Human
aguucucgagcgucccuguuuc

SEQ ID NO: 61426 - RNA, 22 nt, Human
aguucugauaaaggaggaagau

SEQ ID NO: 61427 - RNA, 22 nt, Human
aguucugccuauauagaaacuc

SEQ ID NO: 61428 - RNA, 22 nt, Human
aguucuggcgcccaugagcaga

SEQ ID NO: 61429 - RNA, 22 nt, Human
aguucuggcggcugucggcacu

SEQ ID NO: 61430 - RNA, 22 nt, Human
aguucugggaggugcacgucca

SEQ ID NO: 61431 - RNA, 22 nt, Human
aguucuguggcugugcccugua

SEQ ID NO: 61432 - RNA, 22 nt, Human
aguucuuauugaauagaaauca

SEQ ID NO: 61433 - RNA, 22 nt, Human
aguucuucauaaccuuacugug

SEQ ID NO: 61434 - RNA, 22 nt, Human
aguucuuucuagacacguagac

SEQ ID NO: 61435 - RNA, 22 nt, Human
aguucuuugugaguaauacaga

SEQ ID NO: 61436 - RNA, 22 nt, Human
aguugaaauuagaguccuggcu

SEQ ID NO: 61437 - RNA, 22 nt, Human
aguugaagguuggcugauccau

SEQ ID NO: 61438 - RNA, 22 nt, Human
aguugauuuuucuggcucagcc

SEQ ID NO: 61439 - RNA, 22 nt, Human
aguugcacuuucuagauacugu

SEQ ID NO: 61440 - RNA, 22 nt, Human
aguugcauguccaaggggguag

SEQ ID NO: 61441 - RNA, 22 nt, Human
aguugcugcuucucucuagaga

SEQ ID NO: 61442 - RNA, 22 nt, Human
aguugcugggaaagauuucagu

SEQ ID NO: 61443 - RNA, 22 nt, Human
aguugcuucccuauucuuagca

SEQ ID NO: 61444 - RNA, 22 nt, Human
aguuggaagacacccugaaauc

SEQ ID NO: 61445 - RNA, 22 nt, Human
aguuggagugaacaugagauug

SEQ ID NO: 61446 - RNA, 22 nt, Human
aguuggcaaggucuggccagcg

SEQ ID NO: 61447 - RNA, 17 nt, Human
aguuggcagccguugcu

SEQ ID NO: 61448 - RNA, 22 nt, Human
aguuggcauuuuauuuaaguau

SEQ ID NO: 61449 - RNA, 22 nt, Human
aguuggguuugugucaguugca

SEQ ID NO: 61450 - RNA, 22 nt, Human
aguuggugggugugagcuggac

SEQ ID NO: 61451 - RNA, 22 nt, Human
aguugguucacuccuucaugcc

SEQ ID NO: 61452 - RNA, 22 nt, Human
aguuguaacagauucuaacaua

SEQ ID NO: 61453 - RNA, 22 nt, Human
aguuguacauugugaacauuca

SEQ ID NO: 61454 - RNA, 22 nt, Human
aguuguauacacuuaggcagau

SEQ ID NO: 61455 - RNA, 22 nt, Human
aguuguaucugaaugcauguag

SEQ ID NO: 61456 - RNA, 22 nt, Human
aguugugagaaacagaaugagc

SEQ ID NO: 61457 - RNA, 22 nt, Human
aguuuaauccuccagcccaacu

SEQ ID NO: 61458 - RNA, 21 nt, Human
aguuuacaacuguccagcccc

SEQ ID NO: 61459 - RNA, 22 nt, Human
aguuuacagauguaguaggggu

SEQ ID NO: 61460 - RNA, 22 nt, Human
augcacaggcugugggcugguu

SEQ ID NO: 61461 - RNA, 19 nt, Human
augcacagucauuuguaag

SEQ ID NO: 61462 - RNA, 22 nt, Human
augcacaucacucugaagaaaa

SEQ ID NO: 61463 - RNA, 17 nt, Human
augcacauguaagagga

SEQ ID NO: 61464 - RNA, 22 nt, Human
augcacauguaugucaauauuu

SEQ ID NO: 61465 - RNA, 20 nt, Human
augcacccucagggucccug

SEQ ID NO: 61466 - RNA, 22 nt, Human
augcacugccccucugcaccuc

SEQ ID NO: 61467 - RNA, 22 nt, Human
augcacugggugaggaaggaga

SEQ ID NO: 61468 - RNA, 22 nt, Human
augcagaacguuugugaaacuu

SEQ ID NO: 61469 - RNA, 22 nt, Human
augcagaaugaguucacgaucu

SEQ ID NO: 61470 - RNA, 22 nt, Human
augcagacaugggagaguugag

SEQ ID NO: 61471 - RNA, 21 nt, Human
augcagagaacuccagggaag

SEQ ID NO: 61472 - RNA, 18 nt, Human
augcagcaaucagaaaua

SEQ ID NO: 61473 - RNA, 20 nt, Human
augcagcauuguuguggcaa

SEQ ID NO: 61474 - RNA, 22 nt, Human
augcagcuauuugagcauguca

SEQ ID NO: 61475 - RNA, 22 nt, Human
augcagcucauuuguuuaaaag

SEQ ID NO: 61476 - RNA, 22 nt, Human
augcagcuucaggauuaugaug

SEQ ID NO: 61477 - RNA, 22 nt, Human
augcaggaagucggggagcggg

SEQ ID NO: 61478 - RNA, 22 nt, Human
augcaggaugcagaggggcccg

SEQ ID NO: 61479 - RNA, 22 nt, Human
augcaggauuagaaaguugccu

SEQ ID NO: 61480 - RNA, 22 nt, Human
augcagggaaaagagauauuau

SEQ ID NO: 61481 - RNA, 22 nt, Human
augcaggggccgccuggccagg

SEQ ID NO: 61482 - RNA, 22 nt, Human
augcaggggcuguguuuugggu

SEQ ID NO: 61483 - RNA, 22 nt, Human
augcaggguuauuucaaaaaua

SEQ ID NO: 61484 - RNA, 17 nt, Human
augcaggugugaggggc

SEQ ID NO: 61485 - RNA, 22 nt, Human
augcagguugggcaaguguggg

SEQ ID NO: 61486 - RNA, 22 nt, Human
augcaguaaauguucuaguuug

SEQ ID NO: 61487 - RNA, 22 nt, Human
augcagucauggaaugcucuca

SEQ ID NO: 61488 - RNA, 22 nt, Human
augcagucuaagcauguaaggg

SEQ ID NO: 61489 - RNA, 20 nt, Human
augcagucuuguggcaacua

SEQ ID NO: 61490 - RNA, 22 nt, Human
augcaguggcagcuccuggugu

SEQ ID NO: 61491 - RNA, 22 nt, Human
augcaguuugcuucgcagcagu

SEQ ID NO: 61492 - RNA, 22 nt, Human
augcauaagugcagcagauuug

SEQ ID NO: 61493 - RNA, 22 nt, Human
augcauauaauggccagaacaa

SEQ ID NO: 61494 - RNA, 22 nt, Human
augcauauagaacauuugacau

SEQ ID NO: 61495 - RNA, 22 nt, Human
augcauauauacauacacaguc

SEQ ID NO: 61496 - RNA, 22 nt, Human
augcauaucagugauuguuugc

SEQ ID NO: 61497 - RNA, 22 nt, Human
augcauaugcauggacacucag

SEQ ID NO: 61498 - RNA, 22 nt, Human
augcauauggcuugagggaaua

SEQ ID NO: 61499 - RNA, 22 nt, Human
augcauauugucauuuaguccu

SEQ ID NO: 61500 - RNA, 22 nt, Human
aucauuauaaugguauaguugu

SEQ ID NO: 61501 - RNA, 22 nt, Human
aucauucagucucugggacagu

SEQ ID NO: 61502 - RNA, 22 nt, Human
aucauucaucuuauugccaguc

SEQ ID NO: 61503 - RNA, 22 nt, Human
aucauuccacauguaccacuag

SEQ ID NO: 61504 - RNA, 22 nt, Human
aucauucucugcuugagcacuc

SEQ ID NO: 61505 - RNA, 22 nt, Human
aucauugaaauguaguuucauc

SEQ ID NO: 61506 - RNA, 22 nt, Human
aucauugaauugcuuuguucuu

SEQ ID NO: 61507 - RNA, 22 nt, Human
aucauuuaaaacaagucucuau

SEQ ID NO: 61508 - RNA, 22 nt, Human
aucauuuacaaacucagcauug

SEQ ID NO: 61509 - RNA, 22 nt, Human
aucauuucccuuuagaucacaa

SEQ ID NO: 61510 - RNA, 22 nt, Human
aucauuugaacagaauuuguuu

SEQ ID NO: 61511 - RNA, 22 nt, Human
aucauuugccucaagugaaagu

SEQ ID NO: 61512 - RNA, 22 nt, Human
aucauuugugcauaguaacaga

SEQ ID NO: 61513 - RNA, 22 nt, Human
aucauuuuauggcugagaggac

SEQ ID NO: 61514 - RNA, 22 nt, Human
auccaaaaccagugcauuuucc

SEQ ID NO: 61515 - RNA, 22 nt, Human
auccaaacuaugacuaguguuc

SEQ ID NO: 61516 - RNA, 22 nt, Human
auccaagagacauuugugaaug

SEQ ID NO: 61517 - RNA, 22 nt, Human
auccaauggggagugaguucuu

SEQ ID NO: 61518 - RNA, 22 nt, Human
auccacagagaggaagaauagu

SEQ ID NO: 61519 - RNA, 22 nt, Human
auccacagucagaacgggccua

SEQ ID NO: 61520 - RNA, 22 nt, Human
auccacagucuuagccaucaaa

SEQ ID NO: 61521 - RNA, 22 nt, Human
auccagaacaccuguaucacca

SEQ ID NO: 61522 - RNA, 22 nt, Human
auccagaagcauguguaauuug

SEQ ID NO: 61523 - RNA, 23 nt, Human
auccagccuggggguuuaaccac

SEQ ID NO: 61524 - RNA, 20 nt, Human
auccaggauguugauuugaa

SEQ ID NO: 61525 - RNA, 22 nt, Human
auccaggcauucugacuucaag

SEQ ID NO: 61526 - RNA, 22 nt, Human
auccaggccugagucugguccu

SEQ ID NO: 61527 - RNA, 22 nt, Human
auccaggcugcgggucucaagu

SEQ ID NO: 61528 - RNA, 22 nt, Human
auccaggcuggguguggcuacu

SEQ ID NO: 61529 - RNA, 22 nt, Human
auccaggcugucuaaugggaga

SEQ ID NO: 61530 - RNA, 22 nt, Human
auccaggcuuaaugggagccac

SEQ ID NO: 61531 - RNA, 19 nt, Human
auccaggucauguaguucu

SEQ ID NO: 61532 - RNA, 22 nt, Human
auccaguagugacuuuuacauu

SEQ ID NO: 61533 - RNA, 22 nt, Human
auccaguaugagguagggcuug

SEQ ID NO: 61534 - RNA, 22 nt, Human
auccaguuccaaagaucauuua

SEQ ID NO: 61535 - RNA, 22 nt, Human
auccaguucucagugcuuacag

SEQ ID NO: 61536 - RNA, 22 nt, Human
auccaguuuaugucauauucuu

SEQ ID NO: 61537 - RNA, 22 nt, Human
auccauauaggcagauggcaca

SEQ ID NO: 61538 - RNA, 20 nt, Human
auccaucagagaaaauaaag

SEQ ID NO: 61539 - RNA, 20 nt, Human
auccaugagagucuggauuc

SEQ ID NO: 61540 - RNA, 22 nt, Human
auccaugauuaguaggauaaag

SEQ ID NO: 61541 - RNA, 21 nt, Human
auccauucuccgguuaaugag

SEQ ID NO: 61542 - RNA, 18 nt, Human
auccauuuaaugccugga

SEQ ID NO: 61543 - RNA, 22 nt, Human
auccauuucaguguuccacuug

SEQ ID NO: 61544 - RNA, 22 nt, Human
auccauuucuaucuugcugagg

SEQ ID NO: 61545 - RNA, 22 nt, Human
auccauuugaaagaacagucca

SEQ ID NO: 61546 - RNA, 22 nt, Human
auccauuuguaaauguuagagu

SEQ ID NO: 61547 - RNA, 22 nt, Human
auccauuuguuuacugauggac

SEQ ID NO: 61548 - RNA, 22 nt, Human
auccauuuuccuuggcagcagg

SEQ ID NO: 61549 - RNA, 22 nt, Human
aucccaugagaccacguuggcu

SEQ ID NO: 61550 - RNA, 22 nt, Human
aucccauuuccuaguacaucau

SEQ ID NO: 61551 - RNA, 22 nt, Human
aucccauuuccuguuuugucaa

SEQ ID NO: 61552 - RNA, 22 nt, Human
auccccacgauauagccaaagc

SEQ ID NO: 61553 - RNA, 22 nt, Human
auccccagacuuuagauuucuc

SEQ ID NO: 61554 - RNA, 17 nt, Human
auccccagcaucuagaa

SEQ ID NO: 61555 - RNA, 22 nt, Human
aucccccucuuggauggcggca

SEQ ID NO: 61556 - RNA, 22 nt, Human
auccccuucacacccucugcau

SEQ ID NO: 61557 - RNA, 22 nt, Human
aucccugaaugcuccugacugg

SEQ ID NO: 61558 - RNA, 22 nt, Human
aucccugagguuccuccugagc

SEQ ID NO: 61559 - RNA, 22 nt, Human
aucccuggacggcgccucccca

SEQ ID NO: 61560 - RNA, 20 nt, Human
aucccuggccuuaaggagug

SEQ ID NO: 61561 - RNA, 23 nt, Human
aucccuucuccaguguggugagg

SEQ ID NO: 61562 - RNA, 21 nt, Human
auccguuuaauaauacugaau

SEQ ID NO: 61563 - RNA, 22 nt, Human
auccuaaaauuguucaauuucu

SEQ ID NO: 61564 - RNA, 22 nt, Human
auccucagagaacgaacacaau

SEQ ID NO: 61565 - RNA, 22 nt, Human
auccucaguguuucugacaucu

SEQ ID NO: 61566 - RNA, 23 nt, Human
auccucucuccaucccacugugc

SEQ ID NO: 61567 - RNA, 22 nt, Human
auccucugaccgcugcagggag

SEQ ID NO: 61568 - RNA, 22 nt, Human
auccucuguggauuacaccuag

SEQ ID NO: 61569 - RNA, 22 nt, Human
aagcagaaaaacugagcuccaa

SEQ ID NO: 61570 - RNA, 22 nt, Human
aagcagaauuuaauagaaaggu

SEQ ID NO: 61571 - RNA, 22 nt, Human
aagcagagaaaagcuuagguuc

SEQ ID NO: 61572 - RNA, 22 nt, Human
aagcagagaaucugggagcgag

SEQ ID NO: 61573 - RNA, 22 nt, Human
aagcagagccaccagcuuugga

SEQ ID NO: 61574 - RNA, 22 nt, Human
aagcagagguagggugugcagu

SEQ ID NO: 61575 - RNA, 22 nt, Human
aagcagaguuagcuugucaccu

SEQ ID NO: 61576 - RNA, 22 nt, Human
aagcagaucugauagggcccug

SEQ ID NO: 61577 - RNA, 22 nt, Human
aagcagcaugauuguaauacua

SEQ ID NO: 61578 - RNA, 22 nt, Human
aagcaggaaggagcccagggca

SEQ ID NO: 61579 - RNA, 22 nt, Human
aagcaaagagauaaccuuuugg

SEQ ID NO: 61580 - RNA, 22 nt, Human
aagcaaaggcaggagcuuguga

SEQ ID NO: 61581 - RNA, 22 nt, Human
aagcaaauauuucuagagacug

SEQ ID NO: 61582 - RNA, 22 nt, Human
aagcaaaugugggugcagaauu

SEQ ID NO: 61583 - RNA, 22 nt, Human
aagcaacagaaacauucuaaua

SEQ ID NO: 61584 - RNA, 22 nt, Human
aagcaacuaaggcaaggaaaug

SEQ ID NO: 61585 - RNA, 22 nt, Human
aagcaacuguugaauuggacua

SEQ ID NO: 61586 - RNA, 22 nt, Human
aagcaauagcaacaacuuuaca

SEQ ID NO: 61587 - RNA, 22 nt, Human
aagcaauguguuugaaaggcca

SEQ ID NO: 61588 - RNA, 22 nt, Human
aagcaauguuagaggccuuagg

SEQ ID NO: 61589 - RNA, 19 nt, Human
aagcaauguugugaaucua

SEQ ID NO: 61590 - RNA, 22 nt, Human
aagcacaauuucaccuucuugu

SEQ ID NO: 61591 - RNA, 22 nt, Human
aagcacagcagagccuugcuug

SEQ ID NO: 61592 - RNA, 22 nt, Human
aagcacaggagacgcacagcca

SEQ ID NO: 61593 - RNA, 22 nt, Human
aagcacagggacuuuaggaaua

SEQ ID NO: 61594 - RNA, 18 nt, Human
aagcacagguguuucagg

SEQ ID NO: 61595 - RNA, 22 nt, Human
aagcacauugccuggcacauag

SEQ ID NO: 61596 - RNA, 22 nt, Human
aagcaccuggguuauaucuuag

SEQ ID NO: 61597 - RNA, 22 nt, Human
aagcacuaauauuuuggcaccu

SEQ ID NO: 61598 - RNA, 22 nt, Human
aagcacuggagaugccagagug

SEQ ID NO: 61599 - RNA, 22 nt, Human
aagcacugugccucauaucuga

SEQ ID NO: 61600 - RNA, 22 nt, Human
aagcacuuagaagagugccugc

SEQ ID NO: 61601 - RNA, 22 nt, Human
aagcagaaggggaauaauauuu

SEQ ID NO: 61602 - RNA, 22 nt, Human
aagcagaaguugaucuaccaua

SEQ ID NO: 61603 - RNA, 22 nt, Human
aagcagagaccggcuaauggag

SEQ ID NO: 61604 - RNA, 22 nt, Human
aagcagagcaagcguauuuauu

SEQ ID NO: 61605 - RNA, 22 nt, Human
aagcagaggaccgacggaggga

SEQ ID NO: 61606 - RNA, 22 nt, Human
aagcagaugccaagauuuacca

SEQ ID NO: 61607 - RNA, 22 nt, Human
aagcagaugcguuggagcaguu

SEQ ID NO: 61608 - RNA, 22 nt, Human
aagcagaugggacuccaaggca

SEQ ID NO: 61609 - RNA, 22 nt, Human
aagcagauuggggauuuccaug

SEQ ID NO: 61610 - RNA, 22 nt, Human
aagcagcaacaaacuggauaaa

SEQ ID NO: 61611 - RNA, 22 nt, Human
aagcagcacgcuuugccaacaa

SEQ ID NO: 61612 - RNA, 22 nt, Human
aagcagcagccaucccccaagg

SEQ ID NO: 61613 - RNA, 22 nt, Human
aagcagcagccugaaguacguc

SEQ ID NO: 61614 - RNA, 22 nt, Human
aagcagcauaauugcuauuuua

SEQ ID NO: 61615 - RNA, 22 nt, Human
aagcagcauguggguuaucggg

SEQ ID NO: 61616 - RNA, 22 nt, Human
aagcagcauuguaaccaaugcc

SEQ ID NO: 61617 - RNA, 22 nt, Human
aagcagccacuggccaguuaua

SEQ ID NO: 61618 - RNA, 22 nt, Human
aagcagccagccaucaugcccg

SEQ ID NO: 61619 - RNA, 22 nt, Human
aagcagccuggacuugggcugg

SEQ ID NO: 61620 - RNA, 22 nt, Human
aagcagcugaaggauucagggu

SEQ ID NO: 61621 - RNA, 22 nt, Human
aagcagcugauuucacagcuca

SEQ ID NO: 61622 - RNA, 22 nt, Human
aagcagcugcagguucaaagga

SEQ ID NO: 61623 - RNA, 22 nt, Human
aagcagcuggaagaguaagaug

SEQ ID NO: 61624 - RNA, 22 nt, Human
aagcagcugugugacauaaucu

SEQ ID NO: 61625 - RNA, 22 nt, Human
aagcagcuuaaauuagagccug

SEQ ID NO: 61626 - RNA, 22 nt, Human
aagcagcuuucuuuccugugaa

SEQ ID NO: 61627 - RNA, 22 nt, Human
aagcaggacguauuucuauccu

SEQ ID NO: 61628 - RNA, 22 nt, Human
aagcaggagagccugggcgagc

SEQ ID NO: 61629 - RNA, 22 nt, Human
aagcaggagaugcaggaaugua

SEQ ID NO: 61630 - RNA, 22 nt, Human
aagcaggauggaucuaguguuc

SEQ ID NO: 61631 - RNA, 22 nt, Human
aagcaggcauuccagagacaau

SEQ ID NO: 61632 - RNA, 22 nt, Human
aagcaggcgagggccuggagca

SEQ ID NO: 61633 - RNA, 21 nt, Human
aagcaggcuguaaucaugugg

SEQ ID NO: 61634 - RNA, 22 nt, Human
aagcaggcuugguguggccgcu

SEQ ID NO: 61635 - RNA, 21 nt, Human
aagcagggacugcccaggucc

SEQ ID NO: 61636 - RNA, 22 nt, Human
aagcagggagaaauuuuucuuc

SEQ ID NO: 61637 - RNA, 22 nt, Human
aagcagggcuagaccaagaaga

SEQ ID NO: 61638 - RNA, 22 nt, Human
aagcagggcuuuaagcgguuuu

SEQ ID NO: 61639 - RNA, 22 nt, Human
aagcagggugucuugacccaug

SEQ ID NO: 61640 - RNA, 22 nt, Human
aagcaggugugagccagugggc

SEQ ID NO: 61641 - RNA, 22 nt, Human
aagcagugcgcucaucuaaggg

SEQ ID NO: 61642 - RNA, 22 nt, Human
aagcaguuaauguuuugucaau

SEQ ID NO: 61643 - RNA, 22 nt, Human
aagcauauuuuaauuagccaca

SEQ ID NO: 61644 - RNA, 20 nt, Human
aagcaucuggauguagcaau

SEQ ID NO: 61645 - RNA, 22 nt, Human
aagcaucuuaaaaaguaucaga

SEQ ID NO: 61646 - RNA, 22 nt, Human
aagcaucuuagaccugaguucc

SEQ ID NO: 61647 - RNA, 22 nt, Human
aagcaucuucuaucaguuagac

SEQ ID NO: 61648 - RNA, 22 nt, Human
aagcaugcaaucugugauaagg

SEQ ID NO: 61649 - RNA, 22 nt, Human
aagcauggccucuccgcucccc

SEQ ID NO: 61650 - RNA, 20 nt, Human
aagcauggucaaaacuuaug

SEQ ID NO: 61651 - RNA, 23 nt, Human
aagcaugguucacaguuaguacu

SEQ ID NO: 61652 - RNA, 22 nt, Human
aagcauguacucaagcaaaugu

SEQ ID NO: 61653 - RNA, 22 nt, Human
aagcauguguauaagcugggca

SEQ ID NO: 61654 - RNA, 19 nt, Human
aagcauuagccaaagcauu

SEQ ID NO: 61655 - RNA, 17 nt, Human
aagcauuuaauuugcua

SEQ ID NO: 61656 - RNA, 22 nt, Human
aagcauuucuguuuaucuaucg

SEQ ID NO: 61657 - RNA, 22 nt, Human
aagcauuuuaguaaugaacuug

SEQ ID NO: 61658 - RNA, 22 nt, Human
aagcauuuugccacuugaaguu

SEQ ID NO: 61659 - RNA, 22 nt, Human
aagcauuuuugaaaugguagga

SEQ ID NO: 61660 - RNA, 22 nt, Human
aagccaagguuuuggucacagc

SEQ ID NO: 61661 - RNA, 22 nt, Human
aagccaaugauacgggugaucu

SEQ ID NO: 61662 - RNA, 22 nt, Human
aagccaauguugccuggguuuc

SEQ ID NO: 61663 - RNA, 22 nt, Human
aagccacagaucguucugucac

SEQ ID NO: 61664 - RNA, 22 nt, Human
aagccacugcagcaggagcugc

SEQ ID NO: 61665 - RNA, 22 nt, Human
aagccacuuggggaaagaugga

SEQ ID NO: 61666 - RNA, 22 nt, Human
aagccagauagaagaacucauu

SEQ ID NO: 61667 - RNA, 22 nt, Human
aagccagccagugccagucuua

SEQ ID NO: 61668 - RNA, 22 nt, Human
aagccaggagcgaggccucggc

SEQ ID NO: 61669 - RNA, 22 nt, Human
aagccagggucaggggccuccu

SEQ ID NO: 61670 - RNA, 22 nt, Human
aagccaggguuuguggaucuau

SEQ ID NO: 61671 - RNA, 22 nt, Human
aagccaggugugcccaggaucc

SEQ ID NO: 61672 - RNA, 22 nt, Human
aagccaguauucaauggggcua

SEQ ID NO: 61673 - RNA, 22 nt, Human
aagccaguccucuacugggcac

SEQ ID NO: 61674 - RNA, 22 nt, Human
aagccaguuagcacaucauugc

SEQ ID NO: 61675 - RNA, 22 nt, Human
aagccaugcaagccacaaggug

SEQ ID NO: 61676 - RNA, 19 nt, Human
aagcccaguguaugcucuu

SEQ ID NO: 61677 - RNA, 22 nt, Human
aagcccaguuucacacugagac

SEQ ID NO: 61678 - RNA, 22 nt, Human
aaggcuguuguuucacaacaaa

SEQ ID NO: 61679 - RNA, 22 nt, Human
aaggcuguuuauuagaaaaagu

SEQ ID NO: 61680 - RNA, 22 nt, Human
aaggcuuggaguaagcuuggcu

SEQ ID NO: 61681 - RNA, 22 nt, Human
aaggcuuguagauuugggcuuu

SEQ ID NO: 61682 - RNA, 22 nt, Human
aaggcuuuugggaauuuucaac

SEQ ID NO: 61683 - RNA, 22 nt, Human
aagggaaauggccaggcagaga

SEQ ID NO: 61684 - RNA, 22 nt, Human
aagggacauagacuguacaucu

SEQ ID NO: 61685 - RNA, 22 nt, Human
aagggagaaaacuuguggcuua

SEQ ID NO: 61686 - RNA, 20 nt, Human
aagggagaauaaugauugua

SEQ ID NO: 61687 - RNA, 22 nt, Human
aagggagacccaccguccugga

SEQ ID NO: 61688 - RNA, 22 nt, Human
aagggagaggagggucuuguug

SEQ ID NO: 61689 - RNA, 22 nt, Human
aagggaugcaggaaagaagguu

SEQ ID NO: 61690 - RNA, 22 nt, Human
aagggcacagggaaagagugca

SEQ ID NO: 61691 - RNA, 20 nt, Human
aagggcagagggaacagacu

SEQ ID NO: 61692 - RNA, 22 nt, Human
aagggcagagggaaucccacau

SEQ ID NO: 61693 - RNA, 22 nt, Human
aagggcaggcagagaucauaua

SEQ ID NO: 61694 - RNA, 22 nt, Human
aagggcaugggaugaaaaguag

SEQ ID NO: 61695 - RNA, 22 nt, Human
aagggcccauucucucagaaaa

SEQ ID NO: 61696 - RNA, 22 nt, Human
aagcuaaguggaagucuuauca

SEQ ID NO: 61697 - RNA, 22 nt, Human
aagcuagauaacuuuuauauuu

SEQ ID NO: 61698 - RNA, 22 nt, Human
aagcucagagguagauaauguu

SEQ ID NO: 61699 - RNA, 22 nt, Human
aagcucagcagccaggcccugu

SEQ ID NO: 61700 - RNA, 22 nt, Human
aagcucagcaugucuccuagaa

SEQ ID NO: 61701 - RNA, 22 nt, Human
aagcuccccgaaacccaccucu

SEQ ID NO: 61702 - RNA, 22 nt, Human
aagcucuucuguggauuugagu

SEQ ID NO: 61703 - RNA, 22 nt, Human
aagcucuugaguaaacuaguuu

SEQ ID NO: 61704 - RNA, 22 nt, Human
aagcucuuugaccugggccugg

SEQ ID NO: 61705 - RNA, 22 nt, Human
aagcucuuuucauaagagcaaa

SEQ ID NO: 61706 - RNA, 22 nt, Human
aagcugaaauuccuccugaaau

SEQ ID NO: 61707 - RNA, 22 nt, Human
aagcugaaucugaaauagaauu

SEQ ID NO: 61708 - RNA, 22 nt, Human
aagcugaauuuucuaaaagaau

SEQ ID NO: 61709 - RNA, 22 nt, Human
aagcugaggauacaugaagccu

SEQ ID NO: 61710 - RNA, 19 nt, Human
aagcugagggcuguccacc

SEQ ID NO: 61711 - RNA, 22 nt, Human
aagcugaggucaaguagcuagu

SEQ ID NO: 61712 - RNA, 22 nt, Human
aagcugcagcacagagaggugg

SEQ ID NO: 61713 - RNA, 22 nt, Human
aagcugccacacggugaguacu

SEQ ID NO: 61714 - RNA, 22 nt, Human
aagcugccaccagcccagggca

SEQ ID NO: 61715 - RNA, 23 nt, Human
aagcugccagucugaagccuggg

SEQ ID NO: 61716 - RNA, 18 nt, Human
aagcugcccucaggcagg

SEQ ID NO: 61717 - RNA, 22 nt, Human
aagcugccugggaggaagggcu

SEQ ID NO: 61718 - RNA, 22 nt, Human
aagcuggaacaucuugaggaag

SEQ ID NO: 61719 - RNA, 22 nt, Human
aagcuggagaguuaggugaaua

SEQ ID NO: 61720 - RNA, 22 nt, Human
aagcuggcuaaauaaaaggucc

SEQ ID NO: 61721 - RNA, 22 nt, Human
aagcuggcucugaugucagaau

SEQ ID NO: 61722 - RNA, 22 nt, Human
aagcugggacuuagcgcagaua

SEQ ID NO: 61723 - RNA, 22 nt, Human
aagcuguaugaccuaaaucuug

SEQ ID NO: 61724 - RNA, 22 nt, Human
aagcugucaauguaucuagucu

SEQ ID NO: 61725 - RNA, 22 nt, Human
aagcugugaaauagauuacaca

SEQ ID NO: 61726 - RNA, 22 nt, Human
aagcugugaagagcaagugagg

SEQ ID NO: 61727 - RNA, 22 nt, Human
aagcugugguaaaggguagagg

SEQ ID NO: 61728 - RNA, 22 nt, Human
aagcuguguccuagagguguaa

SEQ ID NO: 61729 - RNA, 22 nt, Human
aagcuguucuccagugacucag

SEQ ID NO: 61730 - RNA, 22 nt, Human
aagcuguugaaguaauucagcc

SEQ ID NO: 61731 - RNA, 22 nt, Human
aagcuguugcccugcucuuucu

SEQ ID NO: 61732 - RNA, 22 nt, Human
aagcuguuggcagauagcucug

SEQ ID NO: 61733 - RNA, 22 nt, Human
aagcuguuuuggccuuaguuga

SEQ ID NO: 61734 - RNA, 22 nt, Human
aagcuguuuuuagguggaggua

SEQ ID NO: 61735 - RNA, 22 nt, Human
aagcuuaaucagucugguugca

SEQ ID NO: 61736 - RNA, 22 nt, Human
aagcuuacaguuccacguagca

SEQ ID NO: 61737 - RNA, 22 nt, Human
aagcuuagguacagaaguuaag

SEQ ID NO: 61738 - RNA, 22 nt, Human
aagcuuauaucagaacaaugcu

SEQ ID NO: 61739 - RNA, 20 nt, Human
aagcuucacuucauuugauc

SEQ ID NO: 61740 - RNA, 22 nt, Human
aagcuucaguucuggggcaaug

SEQ ID NO: 61741 - RNA, 22 nt, Human
aagcuucaucugaugccgaacu

SEQ ID NO: 61742 - RNA, 22 nt, Human
aagcuucauuucaacucagggg

SEQ ID NO: 61743 - RNA, 20 nt, Human
aagcuuccaggaucuggugu

SEQ ID NO: 61744 - RNA, 22 nt, Human
aagcuuccugaaugcucauuua

SEQ ID NO: 61745 - RNA, 20 nt, Human
aagcuuccuugggcgcccgg

SEQ ID NO: 61746 - RNA, 22 nt, Human
aagcuucuuagaaugcaugugc

SEQ ID NO: 61747 - RNA, 22 nt, Human
aagcuucuuuacaggagagauu

SEQ ID NO: 61748 - RNA, 22 nt, Human
aagcuugggaaccacgguaauc

SEQ ID NO: 61749 - RNA, 23 nt, Human
aagcuugucaccauuucuuucag

SEQ ID NO: 61750 - RNA, 22 nt, Human
aagcuuuagagaugaguuccuu

SEQ ID NO: 61751 - RNA, 22 nt, Human
aagcuuuaugaucucucagcua

SEQ ID NO: 61752 - RNA, 22 nt, Human
aagcuuugauaauuggauuacu

SEQ ID NO: 61753 - RNA, 22 nt, Human
aagcuuuggaagggcaggguug

SEQ ID NO: 61754 - RNA, 22 nt, Human
aagcuuuggagaggcgggcagg

SEQ ID NO: 61755 - RNA, 21 nt, Human
aagcuuuuccugagaguuguc

SEQ ID NO: 61756 - RNA, 22 nt, Human
aagcuuuucucuguauuaccug

SEQ ID NO: 61757 - RNA, 22 nt, Human
aaggaaagacaggacggaauuc

SEQ ID NO: 61758 - RNA, 22 nt, Human
aaggaaaucuuuguaacaucuu

SEQ ID NO: 61759 - RNA, 22 nt, Human
aaggaacacuacaaggcuggga

SEQ ID NO: 61760 - RNA, 22 nt, Human
aaggaaccauuugugugcaugg

SEQ ID NO: 61761 - RNA, 22 nt, Human
aaggaaccugagggaccccaaa

SEQ ID NO: 61762 - RNA, 22 nt, Human
aaggaagaaaugaauaggugga

SEQ ID NO: 61763 - RNA, 22 nt, Human
aaggaagaagggaaguuacuua

SEQ ID NO: 61764 - RNA, 22 nt, Human
aaggaagaugaggugcugcuua

SEQ ID NO: 61765 - RNA, 22 nt, Human
aaggaagcagccagagacccuc

SEQ ID NO: 61766 - RNA, 22 nt, Human
aaggaagcuguuagacaugcau

SEQ ID NO: 61767 - RNA, 22 nt, Human
aaggaaggaauugaucaugcgc

SEQ ID NO: 61768 - RNA, 22 nt, Human
aaggaagguucauagucaaaga

SEQ ID NO: 61769 - RNA, 22 nt, Human
aaggaaguuuucuugguuccua

SEQ ID NO: 61770 - RNA, 22 nt, Human
aaggaaucacuucuuuaaauga

SEQ ID NO: 61771 - RNA, 19 nt, Human
aaggaauggcuuuaaguag

SEQ ID NO: 61772 - RNA, 22 nt, Human
aaggacaaagcagagcuggaug

SEQ ID NO: 61773 - RNA, 22 nt, Human
aaggacaccugcagagggacca

SEQ ID NO: 61774 - RNA, 22 nt, Human
aaggacauuucugacuaaugca

SEQ ID NO: 61775 - RNA, 22 nt, Human
aaggacuccaauucuuucaucu

SEQ ID NO: 61776 - RNA, 22 nt, Human
aaggacugaauaauucucuuuc

SEQ ID NO: 61777 - RNA, 22 nt, Human
aaggacugcuaggaagccgugu

SEQ ID NO: 61778 - RNA, 20 nt, Human
aaggagaaugacacggcugc

SEQ ID NO: 61779 - RNA, 22 nt, Human
aaggagagagcuuugcuggaac

SEQ ID NO: 61780 - RNA, 22 nt, Human
aaggagaguacaggaguuggua

SEQ ID NO: 61781 - RNA, 21 nt, Human
aaggagccuaggaggcucagg

SEQ ID NO: 61782 - RNA, 22 nt, Human
aaggaggaauaaagagguggug

SEQ ID NO: 61783 - RNA, 22 nt, Human
aaggaggaauguagccagcucc

SEQ ID NO: 61784 - RNA, 22 nt, Human
aaggaggaauuucagggugaau

SEQ ID NO: 61785 - RNA, 22 nt, Human
aaggaggagcggaggcuuguug

SEQ ID NO: 61786 - RNA, 22 nt, Human
aaggagucucagcugggccuga

SEQ ID NO: 61787 - RNA, 22 nt, Human
aauaacuucaucuucaggauag

SEQ ID NO: 61788 - RNA, 22 nt, Human
aauaacuucauguaacauuuaa

SEQ ID NO: 61789 - RNA, 22 nt, Human
aauaacuuuuaaaagacccugg

SEQ ID NO: 61790 - RNA, 22 nt, Human
aauaagaacaacuaagguuuau

SEQ ID NO: 61791 - RNA, 22 nt, Human
aauaagaauugccagauuugaa

SEQ ID NO: 61792 - RNA, 22 nt, Human
aauaagaauuuacuugucaaga

SEQ ID NO: 61793 - RNA, 22 nt, Human
aauaagauuacugguugucuga

SEQ ID NO: 61794 - RNA, 22 nt, Human
aauaaggugugggugcuaauau

SEQ ID NO: 61795 - RNA, 22 nt, Human
aauaaguugcuucagcuuggug

SEQ ID NO: 61796 - RNA, 22 nt, Human
aauaauacugcauguaaggugc

SEQ ID NO: 61797 - RNA, 22 nt, Human
aauaauagcagaguuuacaauc

SEQ ID NO: 61798 - RNA, 22 nt, Human
aauaauaguugcaaaguguuua

SEQ ID NO: 61799 - RNA, 22 nt, Human
aauaauauuccucugugugcgu

SEQ ID NO: 61800 - RNA, 22 nt, Human
aauaauauuugaagcuucaaag

SEQ ID NO: 61801 - RNA, 22 nt, Human
aauaauccugcccgucucuccg

SEQ ID NO: 61802 - RNA, 22 nt, Human
aauaaucuugacuacugaauca

SEQ ID NO: 61803 - RNA, 22 nt, Human
aauaaugagcuugucuaauugu

SEQ ID NO: 61804 - RNA, 22 nt, Human
aauaaugauaaugguuauagcu

SEQ ID NO: 61805 - RNA, 22 nt, Human
aauaaugucuaugguuccaaaa

SEQ ID NO: 61806 - RNA, 22 nt, Human
aauaauguuuauuuguauucuc

SEQ ID NO: 61807 - RNA, 22 nt, Human
aauaauuacccaucuuuuugua

SEQ ID NO: 61808 - RNA, 22 nt, Human
aauacagagaauguuauuugga

SEQ ID NO: 61809 - RNA, 22 nt, Human
aauacagauauucagugguacu

SEQ ID NO: 61810 - RNA, 22 nt, Human
aauacagcagauggagacaaau

SEQ ID NO: 61811 - RNA, 22 nt, Human
aauacaguagguaauaguucau

SEQ ID NO: 61812 - RNA, 22 nt, Human
aauacagugaaagugagcaagg

SEQ ID NO: 61813 - RNA, 22 nt, Human
aauaccagagacaguguuuacc

SEQ ID NO: 61814 - RNA, 22 nt, Human
aauaccuuccacagugaccuug

SEQ ID NO: 61815 - RNA, 22 nt, Human
aauaccuugcucauagggcuga

SEQ ID NO: 61816 - RNA, 20 nt, Human
aauacuaaacacaaagcagu

SEQ ID NO: 61817 - RNA, 22 nt, Human
aauacuaguuauuaaagcuuuu

SEQ ID NO: 61818 - RNA, 22 nt, Human
aauacuauguagccaaaauaau

SEQ ID NO: 61819 - RNA, 22 nt, Human
aauacugaaaguauuuucaaau

SEQ ID NO: 61820 - RNA, 22 nt, Human
aauacugcccccacucugccca

SEQ ID NO: 61821 - RNA, 22 nt, Human
aauacugcugccugcaaauuau

SEQ ID NO: 61822 - RNA, 22 nt, Human
aauacuggcugucaaagaugga

SEQ ID NO: 61823 - RNA, 22 nt, Human
aauacuguaugagcuaugguag

SEQ ID NO: 61824 - RNA, 22 nt, Human
aauacuugugaauucaaagucu

SEQ ID NO: 61825 - RNA, 22 nt, Human
aauagacuuuguauaauuuccc

SEQ ID NO: 61826 - RNA, 22 nt, Human
aauagauggguuaaacagcaaa

SEQ ID NO: 61827 - RNA, 22 nt, Human
aauagcaauuacccuucaacuc

SEQ ID NO: 61828 - RNA, 22 nt, Human
aauagcacuuccugaacacauu

SEQ ID NO: 61829 - RNA, 22 nt, Human
aauagcagaagacuaguagaca

SEQ ID NO: 61830 - RNA, 22 nt, Human
aauccuuauauaaugccuucca

SEQ ID NO: 61831 - RNA, 22 nt, Human
aaucuaaggacuuagcauugcu

SEQ ID NO: 61832 - RNA, 22 nt, Human
aaucuacaugcaauauuuuuag

SEQ ID NO: 61833 - RNA, 22 nt, Human
aaucucacucaaagaauucucu

SEQ ID NO: 61834 - RNA, 17 nt, Human
aaucucaguggcuuaag

SEQ ID NO: 61835 - RNA, 22 nt, Human
aaucuccauuuacccugcaucu

SEQ ID NO: 61836 - RNA, 22 nt, Human
aaucugcacaauucaguuucag

SEQ ID NO: 61837 - RNA, 22 nt, Human
aaucuggacacaguucucaugc

SEQ ID NO: 61838 - RNA, 23 nt, Human
aaucuggcugauguuuuuucucu

SEQ ID NO: 61839 - RNA, 22 nt, Human
aaucuggucuaagugaggauag

SEQ ID NO: 61840 - RNA, 22 nt, Human
aaucuguaacauucaauaaaga

SEQ ID NO: 61841 - RNA, 22 nt, Human
aaucuguauugcucauacuuga

SEQ ID NO: 61842 - RNA, 22 nt, Human
aaucugucuucuuuugugguuu

SEQ ID NO: 61843 - RNA, 17 nt, Human
aaucuguuuacagucag

SEQ ID NO: 61844 - RNA, 22 nt, Human
aaucuguuuaguucugcguaug

SEQ ID NO: 61845 - RNA, 22 nt, Human
aaucuguuuccaauacuugcua

SEQ ID NO: 61846 - RNA, 22 nt, Human
aaucuguuuccauguuuuauug

SEQ ID NO: 61847 - RNA, 22 nt, Human
aaucuguuugaugcuugugaua

SEQ ID NO: 61848 - RNA, 22 nt, Human
aaucuuaaagaauauucuacca

SEQ ID NO: 61849 - RNA, 22 nt, Human
aaucuuacuuaugauuuuucgg

SEQ ID NO: 61850 - RNA, 22 nt, Human
aaucuuagaguguuuuugaagc

SEQ ID NO: 61851 - RNA, 22 nt, Human
aaucuucaaaaacaauugaggg

SEQ ID NO: 61852 - RNA, 22 nt, Human
aaucuucaacagaaugguagga

SEQ ID NO: 61853 - RNA, 22 nt, Human
aaucuucacagaaaaaugucug

SEQ ID NO: 61854 - RNA, 22 nt, Human
aaucuucacucauucagaguug

SEQ ID NO: 61855 - RNA, 22 nt, Human
aaucuucaggguccuggggcuc

SEQ ID NO: 61856 - RNA, 22 nt, Human
aaucuugaguguuacucucauu

SEQ ID NO: 61857 - RNA, 22 nt, Human
aaucuugguugcaguauauccg

SEQ ID NO: 61858 - RNA, 22 nt, Human
aaucuuucauucauucauacau

SEQ ID NO: 61859 - RNA, 22 nt, Human
aaucuuuuaggggauccugagg

SEQ ID NO: 61860 - RNA, 22 nt, Human
aaugaaacuauauuuagagagg

SEQ ID NO: 61861 - RNA, 22 nt, Human
aaugaaauaguuggcuguagag

SEQ ID NO: 61862 - RNA, 22 nt, Human
aaugaaauguagcuuauccaua

SEQ ID NO: 61863 - RNA, 22 nt, Human
aaugaacacagcccucuacuuu

SEQ ID NO: 61864 - RNA, 22 nt, Human
aaugaacaucaaaugccuacca

SEQ ID NO: 61865 - RNA, 22 nt, Human
aaugaagauuauggugauuaag

SEQ ID NO: 61866 - RNA, 22 nt, Human
aaugaagcaguuuucaucaagu

SEQ ID NO: 61867 - RNA, 22 nt, Human
aaugaagccacugaagacaauc

SEQ ID NO: 61868 - RNA, 22 nt, Human
aaugaagccagguagaagagaa

SEQ ID NO: 61869 - RNA, 22 nt, Human
aaugaaguguuauuuaguuuca

SEQ ID NO: 61870 - RNA, 20 nt, Human
aaugaaugaacgaauggaug

SEQ ID NO: 61871 - RNA, 17 nt, Human
aaugaaugaauucuuug

SEQ ID NO: 61872 - RNA, 22 nt, Human
aaugaauguuuguugagugaag

SEQ ID NO: 61873 - RNA, 22 nt, Human
aaugaauucgagugaaggaaag

SEQ ID NO: 61874 - RNA, 22 nt, Human
aaugaauucugaagucuuccaa

SEQ ID NO: 61875 - RNA, 22 nt, Human
aaugacaauggcagagguagaa

SEQ ID NO: 61876 - RNA, 23 nt, Human
aaugacaccucauagguaacuuc

SEQ ID NO: 61877 - RNA, 22 nt, Human
aaugacagagauagaagggaug

SEQ ID NO: 61878 - RNA, 22 nt, Human
aaugacagagcacugaacuugg

SEQ ID NO: 61879 - RNA, 22 nt, Human
aaugacagcccucuagucuggg

SEQ ID NO: 61880 - RNA, 23 nt, Human
aaugacaggcaauguaauugugu

SEQ ID NO: 61881 - RNA, 22 nt, Human
aaugacaguggcacagucacuu

SEQ ID NO: 61882 - RNA, 22 nt, Human
aaugacaugcuuuuuaauuaua

SEQ ID NO: 61883 - RNA, 22 nt, Human
aaugaccagcgccugcagaggg

SEQ ID NO: 61884 - RNA, 22 nt, Human
aaugaccucagagcacccagaa

SEQ ID NO: 61885 - RNA, 22 nt, Human
aaugaccugggugucauuucau

SEQ ID NO: 61886 - RNA, 22 nt, Human
aaugacuaaaucugaagauagg

SEQ ID NO: 61887 - RNA, 22 nt, Human
aaugagaacugggaguuggugg

SEQ ID NO: 61888 - RNA, 22 nt, Human
aaugagauggcaaugacuuaaa

SEQ ID NO: 61889 - RNA, 20 nt, Human
aaugagauuccuuaugauag

SEQ ID NO: 61890 - RNA, 22 nt, Human
aaugagcuucuauaaucuuguc

SEQ ID NO: 61891 - RNA, 22 nt, Human
aaugaggccaguagaaggaagu

SEQ ID NO: 61892 - RNA, 22 nt, Human
aaugaggucauuaaugguggga

SEQ ID NO: 61893 - RNA, 22 nt, Human
aaugagguuuuuuaaagccaga

SEQ ID NO: 61894 - RNA, 22 nt, Human
aaugagucaaaacagcauauag

SEQ ID NO: 61895 - RNA, 22 nt, Human
aaugagucaugaagauuagcaa

SEQ ID NO: 61896 - RNA, 22 nt, Human
aaucuucuuucuuaacaguaca

SEQ ID NO: 61897 - RNA, 22 nt, Human
aaucuugagggacucaugaggu

SEQ ID NO: 61898 - RNA, 22 nt, Human
aaucuuuaaggacucagucucu

SEQ ID NO: 61899 - RNA, 22 nt, Human
aaugaaacaauuagcuguaaua

SEQ ID NO: 61900 - RNA, 22 nt, Human
aaugaaaucugcuggguaaaga

SEQ ID NO: 61901 - RNA, 22 nt, Human
aaugaacaaaauaugcuuugca

SEQ ID NO: 61902 - RNA, 22 nt, Human
aaugaacaaauggugcugcuug

SEQ ID NO: 61903 - RNA, 22 nt, Human
aaugaacaugggaguacuaaua

SEQ ID NO: 61904 - RNA, 22 nt, Human
aaugaacuccgaacauuuacau

SEQ ID NO: 61905 - RNA, 22 nt, Human
aaugaacuggagaacaaugacc

SEQ ID NO: 61906 - RNA, 22 nt, Human
aaugaacuucagugauuucugg

SEQ ID NO: 61907 - RNA, 22 nt, Human
aaugaagcaguccaucugcucu

SEQ ID NO: 61908 - RNA, 22 nt, Human
aaugaaguucuauucauuuucu

SEQ ID NO: 61909 - RNA, 22 nt, Human
aaugaauggguuuaauauuuua

SEQ ID NO: 61910 - RNA, 22 nt, Human
aaugaaugugauuaacuucaag

SEQ ID NO: 61911 - RNA, 22 nt, Human
aaugacaaauauggaagccuga

SEQ ID NO: 61912 - RNA, 22 nt, Human
aaugacaaccacaauggugcug

SEQ ID NO: 61913 - RNA, 22 nt, Human
aaugacaagacauagucucuga

SEQ ID NO: 61914 - RNA, 22 nt, Human
aaugacaauauuaauuuggagg

SEQ ID NO: 61915 - RNA, 23 nt, Human
aaugacagugugugauugaagaa

SEQ ID NO: 61916 - RNA, 22 nt, Human
aaugacuguagucauauuaagg

SEQ ID NO: 61917 - RNA, 22 nt, Human
aaugacuuugaaauauuugagu

SEQ ID NO: 61918 - RNA, 22 nt, Human
aaugagaaaacacagaggaggu

SEQ ID NO: 61919 - RNA, 22 nt, Human
aaugagaauguaagugaagaga

SEQ ID NO: 61920 - RNA, 22 nt, Human
aaugagauggaauucccgccua

SEQ ID NO: 61921 - RNA, 20 nt, Human
aaugaggucccacugaggag

SEQ ID NO: 61922 - RNA, 22 nt, Human
aaugagguuggcauaauuaaau

SEQ ID NO: 61923 - RNA, 20 nt, Human
aaugaguccugcuggaucac

SEQ ID NO: 61924 - RNA, 22 nt, Human
aaugaguuagaugagaaaauaa

SEQ ID NO: 61925 - RNA, 22 nt, Human
aaugaguucugacacuucacga

SEQ ID NO: 61926 - RNA, 22 nt, Human
aaugaucccauuuagaaacaga

SEQ ID NO: 61927 - RNA, 22 nt, Human
aaugaucuacucucauuaucuc

SEQ ID NO: 61928 - RNA, 22 nt, Human
aaugauggucauggcaacuuuu

SEQ ID NO: 61929 - RNA, 22 nt, Human
aaugauguauguauaaggcagg

SEQ ID NO: 61930 - RNA, 22 nt, Human
aaugauuacugaucgcauagga

SEQ ID NO: 61931 - RNA, 22 nt, Human
aaugauuuggcaaaggaaucca

SEQ ID NO: 61932 - RNA, 22 nt, Human
aaugcaaacagcccagaaucca

SEQ ID NO: 61933 - RNA, 22 nt, Human
aaugcaaacuccacuggagcag

SEQ ID NO: 61934 - RNA, 22 nt, Human
aaugcaaagaguugcuuaucaa

SEQ ID NO: 61935 - RNA, 22 nt, Human
aaugcaaauguaagggugggau

SEQ ID NO: 61936 - RNA, 22 nt, Human
aaugcaaauucuagggcccuau

SEQ ID NO: 61937 - RNA, 22 nt, Human
aaugcaagucaaugcuauaccc

SEQ ID NO: 61938 - RNA, 22 nt, Human
aaugcaauaccuuuuuaugcug

SEQ ID NO: 61939 - RNA, 18 nt, Human
aaugcaauguauuugcag

SEQ ID NO: 61940 - RNA, 22 nt, Human
aaugcacaaaggugucuauugc

SEQ ID NO: 61941 - RNA, 22 nt, Human
aaugcacagcguuccaugcuug

SEQ ID NO: 61942 - RNA, 22 nt, Human
aaugcacauaaauauggucuua

SEQ ID NO: 61943 - RNA, 22 nt, Human
aaugcacaugccacauguggua

SEQ ID NO: 61944 - RNA, 22 nt, Human
aaugcagauucuuauucuguag

SEQ ID NO: 61945 - RNA, 22 nt, Human
aaugcaguugaauuuggguaug

SEQ ID NO: 61946 - RNA, 22 nt, Human
aaugcauauguaggcaagcagu

SEQ ID NO: 61947 - RNA, 19 nt, Human
aauggcagaugccauaucu

SEQ ID NO: 61948 - RNA, 22 nt, Human
aauggcaugacuugcccaaggc

SEQ ID NO: 61949 - RNA, 22 nt, Human
aauggccuggagggaauacaga

SEQ ID NO: 61950 - RNA, 22 nt, Human
aauggccuguauggaaagugaa

SEQ ID NO: 61951 - RNA, 22 nt, Human
aauggcuauacaacaugaguau

SEQ ID NO: 61952 - RNA, 22 nt, Human
aauggcucugauguuguuguga

SEQ ID NO: 61953 - RNA, 22 nt, Human
aauggcugggaguguauuuugg

SEQ ID NO: 61954 - RNA, 22 nt, Human
aauggcuuaaugauaccuuauc

SEQ ID NO: 61955 - RNA, 22 nt, Human
aauggcuuacccuggauugugu

SEQ ID NO: 61956 - RNA, 22 nt, Human
aauggcuuagcagaguuagaag

SEQ ID NO: 61957 - RNA, 22 nt, Human
aauggcuuauguaaugcuguuu

SEQ ID NO: 61958 - RNA, 22 nt, Human
aauggcuuugacauuuucaaau

SEQ ID NO: 61959 - RNA, 22 nt, Human
aauggcuuuggcaggaauuuca

SEQ ID NO: 61960 - RNA, 22 nt, Human
aaugggcucacaagaccugaau

SEQ ID NO: 61961 - RNA, 20 nt, Human
aaugggcuuugaugagugug

SEQ ID NO: 61962 - RNA, 22 nt, Human
aauggguugcuuuccacagccu

SEQ ID NO: 61963 - RNA, 22 nt, Human
aauggguuguagggaaagucaa

SEQ ID NO: 61964 - RNA, 22 nt, Human
aaugguaauauuggcacagaaa

SEQ ID NO: 61965 - RNA, 22 nt, Human
aaugguacccuggugacuuaga

SEQ ID NO: 61966 - RNA, 22 nt, Human
aaugguauuugucaagcauagu

SEQ ID NO: 61967 - RNA, 22 nt, Human
aaugguuuaguuaagacugagu

SEQ ID NO: 61968 - RNA, 22 nt, Human
aaugguuucaaacacacuaagu

SEQ ID NO: 61969 - RNA, 22 nt, Human
aaugguuuggacuauucaauag

SEQ ID NO: 61970 - RNA, 22 nt, Human
aaugguuuuugcauauucaggu

SEQ ID NO: 61971 - RNA, 22 nt, Human
aauguaaaguugggcacaaaug

SEQ ID NO: 61972 - RNA, 22 nt, Human
aauguacaauaagacaaagagg

SEQ ID NO: 61973 - RNA, 22 nt, Human
aauguacaccguggguuuuuua

SEQ ID NO: 61974 - RNA, 22 nt, Human
aauguacagcugcugcugaagg

SEQ ID NO: 61975 - RNA, 22 nt, Human
aauguagaaugauccuuaggau

SEQ ID NO: 61976 - RNA, 22 nt, Human
aauguaguucacaauugguacu

SEQ ID NO: 61977 - RNA, 20 nt, Human
aauguauaugugaccccaaa

SEQ ID NO: 61978 - RNA, 22 nt, Human
aauguaugagcgugaaagcacu

SEQ ID NO: 61979 - RNA, 22 nt, Human
aauguaugggugagaaaguuga

SEQ ID NO: 61980 - RNA, 22 nt, Human
aauguauuauacauaauuugug

SEQ ID NO: 61981 - RNA, 20 nt, Human
aauguauuguuuuguuucag

SEQ ID NO: 61982 - RNA, 22 nt, Human
aaugucaaaauaauugauuugu

SEQ ID NO: 61983 - RNA, 22 nt, Human
aaugucaaaauggaaugagacu

SEQ ID NO: 61984 - RNA, 22 nt, Human
aaugucaaaggcuauacauuca

SEQ ID NO: 61985 - RNA, 22 nt, Human
aaugucaaagugcuuugcaaac

SEQ ID NO: 61986 - RNA, 22 nt, Human
aaugucaaaugagaggggagaa

SEQ ID NO: 61987 - RNA, 22 nt, Human
aaugucacauacaauggcaagu

SEQ ID NO: 61988 - RNA, 22 nt, Human
aaugucagccugaaagcuauuc

SEQ ID NO: 61989 - RNA, 22 nt, Human
aaugucauagcaaagagaguga

SEQ ID NO: 61990 - RNA, 22 nt, Human
aaugucaugagccugcucuugu

SEQ ID NO: 61991 - RNA, 22 nt, Human
aaugucauugguaaagauuagg

SEQ ID NO: 61992 - RNA, 22 nt, Human
aaugucauuuaaagacaaagaa

SEQ ID NO: 61993 - RNA, 22 nt, Human
aaugucauuuuuaaaugugaga

SEQ ID NO: 61994 - RNA, 18 nt, Human
aauguccaguguucauau

SEQ ID NO: 61995 - RNA, 22 nt, Human
aaugucuacaccguauguuguu

SEQ ID NO: 61996 - RNA, 22 nt, Human
aaugucuaugaaaugaaaggga

SEQ ID NO: 61997 - RNA, 22 nt, Human
aaugucucuauaucucauaaga

SEQ ID NO: 61998 - RNA, 22 nt, Human
aaugucugccagaacugaucau

SEQ ID NO: 61999 - RNA, 22 nt, Human
aaugucuuacauuuacugagca

SEQ ID NO: 62000 - RNA, 22 nt, Human
aaugucuucccuggcaggccaa

SEQ ID NO: 62001 - RNA, 22 nt, Human
aaugucuucuucagcugaauaa

SEQ ID NO: 62002 - RNA, 22 nt, Human
aaugucuuucuugguucugguu

SEQ ID NO: 62003 - RNA, 21 nt, Human
aaugucuuuguccaugcucug

SEQ ID NO: 62004 - RNA, 22 nt, Human
aaugucuuuugcaguucaagau

SEQ ID NO: 62005 - RNA, 22 nt, Human
aauugucaaaaauugcaauugu

SEQ ID NO: 62006 - RNA, 22 nt, Human
aauugucuucuccuuccuggca

SEQ ID NO: 62007 - RNA, 22 nt, Human
aauugucuuggugcaaucauga

SEQ ID NO: 62008 - RNA, 22 nt, Human
aauugugcuaugauuaugaaag

SEQ ID NO: 62009 - RNA, 22 nt, Human
aauuguuguacagaauaaauga

SEQ ID NO: 62010 - RNA, 22 nt, Human
aauuuacacuucauuuggaggg

SEQ ID NO: 62011 - RNA, 22 nt, Human
aauuuacaguugcugaugguac

SEQ ID NO: 62012 - RNA, 22 nt, Human
aauuuauggccuucgucuugau

SEQ ID NO: 62013 - RNA, 22 nt, Human
aauuucaauuacuuuugcacca

SEQ ID NO: 62014 - RNA, 21 nt, Human
aauuucagacccauuuugccu

SEQ ID NO: 62015 - RNA, 22 nt, Human
aauuucaguugcuaauaaguuc

SEQ ID NO: 62016 - RNA, 22 nt, Human
aauuuccaaauuucugucacac

SEQ ID NO: 62017 - RNA, 22 nt, Human
aauuuccugggauaaaaagcca

SEQ ID NO: 62018 - RNA, 22 nt, Human
aauuucuccaagaaugcuuaga

SEQ ID NO: 62019 - RNA, 22 nt, Human
aauuucuucagcucuaaaaugg

SEQ ID NO: 62020 - RNA, 22 nt, Human
aauuucuugggagcucagagaa

SEQ ID NO: 62021 - RNA, 18 nt, Human
aauuucuuugacaacuua

SEQ ID NO: 62022 - RNA, 22 nt, Human
aauuugaaacauagucaccacu

SEQ ID NO: 62023 - RNA, 22 nt, Human
aauuugauucccugcaccuguu

SEQ ID NO: 62024 - RNA, 22 nt, Human
aauuugauuuucuuaaaccaua

SEQ ID NO: 62025 - RNA, 22 nt, Human
aauuugcaugaugagaacaaua

SEQ ID NO: 62026 - RNA, 22 nt, Human
aauuuggcagugucuugaagua

SEQ ID NO: 62027 - RNA, 23 nt, Human
aauuugguugaugaaagcauugu

SEQ ID NO: 62028 - RNA, 22 nt, Human
aauuuguuacacagcaauauaa

SEQ ID NO: 62029 - RNA, 22 nt, Human
aauuuuacaaaauaccuccgau

SEQ ID NO: 62030 - RNA, 20 nt, Human
aauuuuaucuccauccuuug

SEQ ID NO: 62031 - RNA, 22 nt, Human
aauuuucacagugcugugagau

SEQ ID NO: 62032 - RNA, 22 nt, Human
aauuuucugguguguaaugaag

SEQ ID NO: 62033 - RNA, 22 nt, Human
aauuuuguucuuggaaaucagg

SEQ ID NO: 62034 - RNA, 22 nt, Human
acaaaacaguguuccugccccu

SEQ ID NO: 62035 - RNA, 22 nt, Human
acaaaaguaguugcgguuuuug

SEQ ID NO: 62036 - RNA, 22 nt, Human
acaaaagugagugugucucaga

SEQ ID NO: 62037 - RNA, 20 nt, Human
acaaaauagguacuggguag

SEQ ID NO: 62038 - RNA, 22 nt, Human
acaaaauuaugaagaggccuug

SEQ ID NO: 62039 - RNA, 22 nt, Human
acaaacaucuugaccucagauu

SEQ ID NO: 62040 - RNA, 19 nt, Human
acaaacugaguacacuugu

SEQ ID NO: 62041 - RNA, 22 nt, Human
acaaacugggauaggauccugu

SEQ ID NO: 62042 - RNA, 22 nt, Human
acaaacuuauguuucauaugua

SEQ ID NO: 62043 - RNA, 22 nt, Human
acaaagagaccaugagccaaac

SEQ ID NO: 62044 - RNA, 22 nt, Human
acaaagauucauuugcauuauu

SEQ ID NO: 62045 - RNA, 22 nt, Human
acaaagcacgagugccauggac

SEQ ID NO: 62046 - RNA, 22 nt, Human
acaaagcuagagaagagaauug

SEQ ID NO: 62047 - RNA, 19 nt, Human
acaaagcugugagcagcuu

SEQ ID NO: 62048 - RNA, 22 nt, Human
acaaagcuuagaccuaagagau

SEQ ID NO: 62049 - RNA, 22 nt, Human
acaaaggacugaaacuggcugu

SEQ ID NO: 62050 - RNA, 22 nt, Human
acaaaggcauagugaauguuuu

SEQ ID NO: 62051 - RNA, 22 nt, Human
acaaaggugcgucccuucagcu

SEQ ID NO: 62052 - RNA, 20 nt, Human
acaaaguauugaggacaagu

SEQ ID NO: 62053 - RNA, 22 nt, Human
acaaaguauuuuuagguuugua

SEQ ID NO: 62054 - RNA, 22 nt, Human
acaaaguccugguguauggcca

SEQ ID NO: 62055 - RNA, 22 nt, Human
acaaagugcacaagaugagaac

SEQ ID NO: 62056 - RNA, 22 nt, Human
acaaaguuucuucuaacaucug

SEQ ID NO: 62057 - RNA, 22 nt, Human
acaaauagagauucaaauaaag

SEQ ID NO: 62058 - RNA, 22 nt, Human
acaaauagguagauuugcaaca

SEQ ID NO: 62059 - RNA, 22 nt, Human
acaaauaugguacucggagaaa

SEQ ID NO: 62060 - RNA, 22 nt, Human
acaaauauuuacugaauccacu

SEQ ID NO: 62061 - RNA, 22 nt, Human
acaaauccagugaacuccagug

SEQ ID NO: 62062 - RNA, 22 nt, Human
acaaaugaacauauaagcuuga

SEQ ID NO: 62063 - RNA, 22 nt, Human
acaaaugcaaguuuuaugucaa

SEQ ID NO: 62064 - RNA, 22 nt, Human
aauaaauguuaagauugucuca

SEQ ID NO: 62065 - RNA, 22 nt, Human
aauaaauguuuguuggauguuu

SEQ ID NO: 62066 - RNA, 22 nt, Human
aauaacagauuuucaagcugug

SEQ ID NO: 62067 - RNA, 22 nt, Human
aauaaccuuuauuucaaagugu

SEQ ID NO: 62068 - RNA, 22 nt, Human
aauaacugcacuuguugaaugc

SEQ ID NO: 62069 - RNA, 22 nt, Human
aauaacuuguaugguuauucca

SEQ ID NO: 62070 - RNA, 22 nt, Human
aauaagaacuugucucuggcag

SEQ ID NO: 62071 - RNA, 22 nt, Human
aauaagaucuuaaagguuauau

SEQ ID NO: 62072 - RNA, 22 nt, Human
aauaagcaagccugugugcaag

SEQ ID NO: 62073 - RNA, 22 nt, Human
aauaagccagcccaugugaccc

SEQ ID NO: 62074 - RNA, 22 nt, Human
aauaagcugcuaggaacuuagu

SEQ ID NO: 62075 - RNA, 22 nt, Human
aauaaguacuuggggauaacuu

SEQ ID NO: 62076 - RNA, 22 nt, Human
aauaaguugccuguugaaucau

SEQ ID NO: 62077 - RNA, 22 nt, Human
aauaauacaugagauuaauguu

SEQ ID NO: 62078 - RNA, 22 nt, Human
aauaauacuucguaaaguuguu

SEQ ID NO: 62079 - RNA, 22 nt, Human
aauaauguaggaugauaaauga

SEQ ID NO: 62080 - RNA, 22 nt, Human
aauaaugugugcugcagucuua

SEQ ID NO: 62081 - RNA, 22 nt, Human
aauaauuagugggacagagaac

SEQ ID NO: 62082 - RNA, 22 nt, Human
aauaauuuuagcucagaguugu

SEQ ID NO: 62083 - RNA, 22 nt, Human
aauaauuuugagagccuggaaa

SEQ ID NO: 62084 - RNA, 22 nt, Human
aauacagaggaaacauuuaaua

SEQ ID NO: 62085 - RNA, 22 nt, Human
aauacagaugagcuucugccuc

SEQ ID NO: 62086 - RNA, 19 nt, Human
aauacaguguuauagaauu

SEQ ID NO: 62087 - RNA, 22 nt, Human
aauaccaugcagaaauaacaua

SEQ ID NO: 62088 - RNA, 22 nt, Human
aauaccuuccaacaucaagaca

SEQ ID NO: 62089 - RNA, 22 nt, Human
aauaccuugcuguagccacgca

SEQ ID NO: 62090 - RNA, 22 nt, Human
aauacgucccaucaucuuuuuc

SEQ ID NO: 62091 - RNA, 22 nt, Human
aauacgucugaaugcauucuca

SEQ ID NO: 62092 - RNA, 22 nt, Human
aauacugccugugagguaacuc

SEQ ID NO: 62093 - RNA, 17 nt, Human
aauacugcuuauccagg

SEQ ID NO: 62094 - RNA, 22 nt, Human
aauacuguaaauggagcagcca

SEQ ID NO: 62095 - RNA, 22 nt, Human
aauacuugaauuucaugucagg

SEQ ID NO: 62096 - RNA, 22 nt, Human
aauacuugggcugagauuuuug

SEQ ID NO: 62097 - RNA, 22 nt, Human
aauagaaaggaggggcucuugu

SEQ ID NO: 62098 - RNA, 22 nt, Human
aauagaauuuguacuguguuuu

SEQ ID NO: 62099 - RNA, 22 nt, Human
aauagacauuauuucucuauga

SEQ ID NO: 62100 - RNA, 22 nt, Human
aauagagagcagcuuugcgguu

SEQ ID NO: 62101 - RNA, 22 nt, Human
aauagaggaagaaaccugauug

SEQ ID NO: 62102 - RNA, 22 nt, Human
aauagaggagcuuuggacuccc

SEQ ID NO: 62103 - RNA, 22 nt, Human
aauagaucugugugcacauuug

SEQ ID NO: 62104 - RNA, 22 nt, Human
aauagcaaacagacaugcacaa

SEQ ID NO: 62105 - RNA, 22 nt, Human
aauagcaaaguuaucaaauuaa

SEQ ID NO: 62106 - RNA, 22 nt, Human
aauagcaaaugcucauuugaaa

SEQ ID NO: 62107 - RNA, 22 nt, Human
aauagcaauuacauuugcacca

SEQ ID NO: 62108 - RNA, 22 nt, Human
aauagcaucuucugagacaaag

SEQ ID NO: 62109 - RNA, 22 nt, Human
aauagcauguuaauaaccagag

SEQ ID NO: 62110 - RNA, 22 nt, Human
aauagcucacugauuucucuuu

SEQ ID NO: 62111 - RNA, 22 nt, Human
aauagcugauuagccuacaaua

SEQ ID NO: 62112 - RNA, 23 nt, Human
aauagcugguaaugauagcacaa

SEQ ID NO: 62113 - RNA, 22 nt, Human
aauagcuugccuaauccucaug

SEQ ID NO: 62114 - RNA, 22 nt, Human
acaaggccaagcauucuagcaa

SEQ ID NO: 62115 - RNA, 22 nt, Human
acaaggcucuaauuucauugaa

SEQ ID NO: 62116 - RNA, 22 nt, Human
acaaggcucuggagaagcagaa

SEQ ID NO: 62117 - RNA, 19 nt, Human
acaaggcugggagagcgcc

SEQ ID NO: 62118 - RNA, 22 nt, Human
acaaggcuguggggagaacuga

SEQ ID NO: 62119 - RNA, 22 nt, Human
acaaggcuucacacaguaugaa

SEQ ID NO: 62120 - RNA, 22 nt, Human
acaagguucuuguggaggaauu

SEQ ID NO: 62121 - RNA, 22 nt, Human
acaaguauuggugaggauguag

SEQ ID NO: 62122 - RNA, 19 nt, Human
acaagucacuuacuuagua

SEQ ID NO: 62123 - RNA, 22 nt, Human
acaagucuguuaugcaccugga

SEQ ID NO: 62124 - RNA, 22 nt, Human
acaagugcauggaaucagcugu

SEQ ID NO: 62125 - RNA, 22 nt, Human
acaaguuccacuacagaguugu

SEQ ID NO: 62126 - RNA, 22 nt, Human
acaaguuuuugauagacuagaa

SEQ ID NO: 62127 - RNA, 19 nt, Human
acaauaacucauugauugc

SEQ ID NO: 62128 - RNA, 22 nt, Human
acaauaaguauugggcuuuuga

SEQ ID NO: 62129 - RNA, 22 nt, Human
acaauacaggcuucuggacuua

SEQ ID NO: 62130 - RNA, 22 nt, Human
acaauacucaugcucuuuuucu

SEQ ID NO: 62131 - RNA, 21 nt, Human
acaauagacauaagcagagca

SEQ ID NO: 62132 - RNA, 22 nt, Human
acaauagacccaugacacauac

SEQ ID NO: 62133 - RNA, 22 nt, Human
acaauagguguccaauuaacaa

SEQ ID NO: 62134 - RNA, 22 nt, Human
acaauaguaagguauauuguca

SEQ ID NO: 62135 - RNA, 22 nt, Human
acaauaugggauauacauuuua

SEQ ID NO: 62136 - RNA, 20 nt, Human
acaauauguagaugaauagc

SEQ ID NO: 62137 - RNA, 22 nt, Human
acaaucccacaagaaacacugg

SEQ ID NO: 62138 - RNA, 22 nt, Human
acaaugaaagcaagaagacggc

SEQ ID NO: 62139 - RNA, 22 nt, Human
acaaugaauaucaugaaguacu

SEQ ID NO: 62140 - RNA, 22 nt, Human
acaaugcagccuauggauccag

SEQ ID NO: 62141 - RNA, 22 nt, Human
acaauggcaugcuagcaaaugg

SEQ ID NO: 62142 - RNA, 22 nt, Human
acaauguagaggcugaaagcaa

SEQ ID NO: 62143 - RNA, 22 nt, Human
acaauguagaguaaaauauguu

SEQ ID NO: 62144 - RNA, 22 nt, Human
acaaugucucauauucguguuc

SEQ ID NO: 62145 - RNA, 23 nt, Human
acaaugucuguucauaaaauacc

SEQ ID NO: 62146 - RNA, 22 nt, Human
acaaugugauaauuuaaagaua

SEQ ID NO: 62147 - RNA, 22 nt, Human
acaauguucucugaguugugug

SEQ ID NO: 62148 - RNA, 19 nt, Human
acaauguuguuggacacuc

SEQ ID NO: 62149 - RNA, 22 nt, Human
acaauuacccuggcuugauaaa

SEQ ID NO: 62150 - RNA, 22 nt, Human
acaauuagcugugugucuaucu

SEQ ID NO: 62151 - RNA, 22 nt, Human
acaauucaagcaagagagacaa

SEQ ID NO: 62152 - RNA, 22 nt, Human
acaauucacuccagugacccca

SEQ ID NO: 62153 - RNA, 22 nt, Human
acaauucucucauaucuuauua

SEQ ID NO: 62154 - RNA, 22 nt, Human
acaauuuauccauuguauaguu

SEQ ID NO: 62155 - RNA, 22 nt, Human
acaauuucugaucagugaauuu

SEQ ID NO: 62156 - RNA, 22 nt, Human
acaauuugaggcuacucaauug

SEQ ID NO: 62157 - RNA, 22 nt, Human
acaauuugugucuuuugcuuau

SEQ ID NO: 62158 - RNA, 22 nt, Human
acaauuuuucaaagaagcuuau

SEQ ID NO: 62159 - RNA, 21 nt, Human
acacaaaccuccucagccugg

SEQ ID NO: 62160 - RNA, 20 nt, Human
acacaaagcaauggaguaca

SEQ ID NO: 62161 - RNA, 21 nt, Human
acacaacaggcagucauuuuc

SEQ ID NO: 62162 - RNA, 22 nt, Human
acacaauacagggcucaaaaua

SEQ ID NO: 62163 - RNA, 22 nt, Human
acacaauuuccuguccauaugu

SEQ ID NO: 62164 - RNA, 22 nt, Human
acacacguauauauacguaugu

SEQ ID NO: 62165 - RNA, 22 nt, Human
acacacugaauuuuguggaaac

SEQ ID NO: 62166 - RNA, 22 nt, Human
acacacugagugccauaggacc

SEQ ID NO: 62167 - RNA, 22 nt, Human
acacacuggcaggagcuauaaa

SEQ ID NO: 62168 - RNA, 22 nt, Human
acacacuggcccccaguacuga

SEQ ID NO: 62169 - RNA, 22 nt, Human
acacacugggcaugguuuaugc

SEQ ID NO: 62170 - RNA, 22 nt, Human
acacacuguugcucauccaggc

SEQ ID NO: 62171 - RNA, 23 nt, Human
acacagaagaagacccaaggaag

SEQ ID NO: 62172 - RNA, 22 nt, Human
acacagaggcaugacaguggcu

SEQ ID NO: 62173 - RNA, 22 nt, Human
acacagagugguuuguagaaua

SEQ ID NO: 62174 - RNA, 22 nt, Human
acacagaugcuauuuagucucu

SEQ ID NO: 62175 - RNA, 22 nt, Human
acacagauggguagaaaacaga

SEQ ID NO: 62176 - RNA, 22 nt, Human
acacagauuuuacauguuaugc

SEQ ID NO: 62177 - RNA, 22 nt, Human
acacagcagaaggcccgugucu

SEQ ID NO: 62178 - RNA, 17 nt, Human
acacagccagguucucc

SEQ ID NO: 62179 - RNA, 22 nt, Human
acacagcucacaacgugugcau

SEQ ID NO: 62180 - RNA, 22 nt, Human
acacagcuuuguguugcuccac

SEQ ID NO: 62181 - RNA, 22 nt, Human
acacaggaagagagauaauaau

SEQ ID NO: 62182 - RNA, 22 nt, Human
acacaggaagcaauuucagagc

SEQ ID NO: 62183 - RNA, 22 nt, Human
acacaggagaaaagaucuccca

SEQ ID NO: 62184 - RNA, 22 nt, Human
acacaggcaagagugcaggucu

SEQ ID NO: 62185 - RNA, 21 nt, Human
acacaggcagugucccgaggu

SEQ ID NO: 62186 - RNA, 19 nt, Human
acacagggaucagaggguu

SEQ ID NO: 62187 - RNA, 22 nt, Human
acacagggcggaaagcaugaga

SEQ ID NO: 62188 - RNA, 22 nt, Human
acacaggggaaaguggagcuga

SEQ ID NO: 62189 - RNA, 22 nt, Human
acacaguaggccaccaugucau

SEQ ID NO: 62190 - RNA, 22 nt, Human
acacaguaguguggaaaaacau

SEQ ID NO: 62191 - RNA, 22 nt, Human
acacaguauugugacuauaacu

SEQ ID NO: 62192 - RNA, 20 nt, Human
acacagugacaggaaagaga

SEQ ID NO: 62193 - RNA, 22 nt, Human
acacagugccaaauugcaguua

SEQ ID NO: 62194 - RNA, 22 nt, Human
acacagugucagggcaggggcc

SEQ ID NO: 62195 - RNA, 22 nt, Human
acacagugugugcagucggacg

SEQ ID NO: 62196 - RNA, 22 nt, Human
acacaguucaggaucaaauagc

SEQ ID NO: 62197 - RNA, 22 nt, Human
acacaguucguuguuuucuacu

SEQ ID NO: 62198 - RNA, 22 nt, Human
acacaguugauugucacucagg

SEQ ID NO: 62199 - RNA, 22 nt, Human
acacaguuuaaacgauuaguac

SEQ ID NO: 62200 - RNA, 16 nt, Human
acacaguuuuaaggca

SEQ ID NO: 62201 - RNA, 22 nt, Human
acacauagaaaauaaauaguua

SEQ ID NO: 62202 - RNA, 22 nt, Human
acacauauaugugcguguauau

SEQ ID NO: 62203 - RNA, 22 nt, Human
acacauauauuauuuguggcuc

SEQ ID NO: 62204 - RNA, 23 nt, Human
acacauauauucagauacagaug

SEQ ID NO: 62205 - RNA, 22 nt, Human
acacauauauuugcauauacac

SEQ ID NO: 62206 - RNA, 22 nt, Human
acacauaugguugcugcaguga

SEQ ID NO: 62207 - RNA, 22 nt, Human
acacauccugaccaaguucagg

SEQ ID NO: 62208 - RNA, 22 nt, Human
acacaucuauauugcaucugca

SEQ ID NO: 62209 - RNA, 22 nt, Human
acacaucuccagaagugggcug

SEQ ID NO: 62210 - RNA, 22 nt, Human
acacaucucucuuugaggagug

SEQ ID NO: 62211 - RNA, 22 nt, Human
acacaucugcaagagccagacc

SEQ ID NO: 62212 - RNA, 22 nt, Human
acacaugaaauaauauuaugca

SEQ ID NO: 62213 - RNA, 22 nt, Human
acacaugaccuccgcagcagca

SEQ ID NO: 62214 - RNA, 22 nt, Human
acacaugagaaacaucaguugu

SEQ ID NO: 62215 - RNA, 22 nt, Human
acacaugaggaugaggggauca

SEQ ID NO: 62216 - RNA, 22 nt, Human
acacaugcagguauacauguuc

SEQ ID NO: 62217 - RNA, 22 nt, Human
acacaugcucauaaauaaauag

SEQ ID NO: 62218 - RNA, 19 nt, Human
acacaugcuccuggagccu

SEQ ID NO: 62219 - RNA, 22 nt, Human
acacaugcugauaagaauauaa

SEQ ID NO: 62220 - RNA, 22 nt, Human
acacauggguggggagcuaagu

SEQ ID NO: 62221 - RNA, 22 nt, Human
acacauggucuacuucuucuca

SEQ ID NO: 62222 - RNA, 22 nt, Human
acacauguacagauuaguauuu

SEQ ID NO: 62223 - RNA, 22 nt, Human
acagaguggaguucaguaaaua

SEQ ID NO: 62224 - RNA, 22 nt, Human
acagaguucccacuccagaagc

SEQ ID NO: 62225 - RNA, 22 nt, Human
acagaguuguguuuguacaacg

SEQ ID NO: 62226 - RNA, 22 nt, Human
acagauaauaggauguacccug

SEQ ID NO: 62227 - RNA, 22 nt, Human
acagauacuauaauguaaagug

SEQ ID NO: 62228 - RNA, 22 nt, Human
acagauauccucagucuccaac

SEQ ID NO: 62229 - RNA, 20 nt, Human
acagauauuugauuuucagu

SEQ ID NO: 62230 - RNA, 22 nt, Human
acagaucacuugacuaaaauga

SEQ ID NO: 62231 - RNA, 22 nt, Human
acagaucuacauugucugaccc

SEQ ID NO: 62232 - RNA, 22 nt, Human
acagaugaaaaagcuuguggau

SEQ ID NO: 62233 - RNA, 23 nt, Human
acagaugaaaguguggcucagag

SEQ ID NO: 62234 - RNA, 22 nt, Human
acagaugaauuuuaauuguguu

SEQ ID NO: 62235 - RNA, 22 nt, Human
acagaugacuugucugcuguaa

SEQ ID NO: 62236 - RNA, 22 nt, Human
acagaugagaaggcugaccagu

SEQ ID NO: 62237 - RNA, 22 nt, Human
acagaugagagacaaugugcua

SEQ ID NO: 62238 - RNA, 22 nt, Human
acagaugagauucauugaccac

SEQ ID NO: 62239 - RNA, 22 nt, Human
acagaugaggaagagucagcca

SEQ ID NO: 62240 - RNA, 20 nt, Human
acagaugaggaugcggaggc

SEQ ID NO: 62241 - RNA, 22 nt, Human
acagaugcucugaugucugggu

SEQ ID NO: 62242 - RNA, 22 nt, Human
acagauggccauauuacuauau

SEQ ID NO: 62243 - RNA, 21 nt, Human
acagaugggaugagcacacug

SEQ ID NO: 62244 - RNA, 22 nt, Human
acagaugguagcauuauguugg

SEQ ID NO: 62245 - RNA, 22 nt, Human
acagauguuacaguaugaucuc

SEQ ID NO: 62246 - RNA, 22 nt, Human
acagauugggaacugucuccuu

SEQ ID NO: 62247 - RNA, 22 nt, Human
acagauuuggaggccucacccc

SEQ ID NO: 62248 - RNA, 22 nt, Human
acagauuuuaaaugacacuccc

SEQ ID NO: 62249 - RNA, 21 nt, Human
acagauuuuauaucucugcug

SEQ ID NO: 62250 - RNA, 22 nt, Human
acagauuuuauuauucagguau

SEQ ID NO: 62251 - RNA, 22 nt, Human
acagauuuuugguaaauaauuu

SEQ ID NO: 62252 - RNA, 22 nt, Human
acagcaaaagacaagaacuuaa

SEQ ID NO: 62253 - RNA, 23 nt, Human
acagcaagaggaccagaugugag

SEQ ID NO: 62254 - RNA, 21 nt, Human
acagcaagccuuccuuucagg

SEQ ID NO: 62255 - RNA, 22 nt, Human
acagcaaugaguaacuccuugg

SEQ ID NO: 62256 - RNA, 22 nt, Human
acagcacagagugguauggcug

SEQ ID NO: 62257 - RNA, 23 nt, Human
acagcacccaugucaucuggcuc

SEQ ID NO: 62258 - RNA, 22 nt, Human
acagcagaucuggcuacagguu

SEQ ID NO: 62259 - RNA, 21 nt, Human
acagcagcaaucugucuuucc

SEQ ID NO: 62260 - RNA, 22 nt, Human
acagcagcagaccagcauaugu

SEQ ID NO: 62261 - RNA, 22 nt, Human
acagcagcauccuauuucacuc

SEQ ID NO: 62262 - RNA, 22 nt, Human
acagcagcuaaccccugggcca

SEQ ID NO: 62263 - RNA, 22 nt, Human
acagcagcugccuucaggcucu

SEQ ID NO: 62264 - RNA, 22 nt, Human
acagcagcuuccugacuguacu

SEQ ID NO: 62265 - RNA, 22 nt, Human
acagcaggcaugaaugacacug

SEQ ID NO: 62266 - RNA, 19 nt, Human
acagcagggauuuuuggag

SEQ ID NO: 62267 - RNA, 22 nt, Human
acagcagguagcuuugugccuc

SEQ ID NO: 62268 - RNA, 22 nt, Human
acagcaguuaacgaucagacuc

SEQ ID NO: 62269 - RNA, 22 nt, Human
acagcaguuacugaaauaaagu

SEQ ID NO: 62270 - RNA, 22 nt, Human
acagcaucuaguacagucuagu

SEQ ID NO: 62271 - RNA, 22 nt, Human
acagcaugucuaguuaaauacu

SEQ ID NO: 62272 - RNA, 22 nt, Human
acagcauucccuuuggcugcuu

SEQ ID NO: 62273 - RNA, 22 nt, Human
acagccaggacuuggcccucuu

SEQ ID NO: 62274 - RNA, 22 nt, Human
acagccagggcauugucgccga

SEQ ID NO: 62275 - RNA, 22 nt, Human
acagccaguaaggaaagaccca

SEQ ID NO: 62276 - RNA, 22 nt, Human
acagccaguaaucuaccccugu

SEQ ID NO: 62277 - RNA, 22 nt, Human
acagccagugcuccgugaggac

SEQ ID NO: 62278 - RNA, 22 nt, Human
acagcccaagucaccugcagga

SEQ ID NO: 62279 - RNA, 22 nt, Human
acagcccagaaagccuaagggg

SEQ ID NO: 62280 - RNA, 22 nt, Human
acagccccagcgcggcgggguc

SEQ ID NO: 62281 - RNA, 19 nt, Human
acagccuguugguggggcu

SEQ ID NO: 62282 - RNA, 22 nt, Human
acagccuuuaaccauuucuucc

SEQ ID NO: 62283 - RNA, 22 nt, Human
acagcuacucugcagauaaauc

SEQ ID NO: 62284 - RNA, 22 nt, Human
acagcuaugacagauggauaau

SEQ ID NO: 62285 - RNA, 22 nt, Human
acagcuccuaacaaaggcucuc

SEQ ID NO: 62286 - RNA, 22 nt, Human
acagcuccuggggcuuuaaugg

SEQ ID NO: 62287 - RNA, 22 nt, Human
acagcucucccucagagaaaug

SEQ ID NO: 62288 - RNA, 22 nt, Human
acagcucuuaggcagaaccaac

SEQ ID NO: 62289 - RNA, 22 nt, Human
acagcucuucuucaagccuggc

SEQ ID NO: 62290 - RNA, 22 nt, Human
acagcugaacaagauaguguca

SEQ ID NO: 62291 - RNA, 22 nt, Human
acagcugauuggaucaaggaca

SEQ ID NO: 62292 - RNA, 22 nt, Human
acagcugcuguggagguuuuca

SEQ ID NO: 62293 - RNA, 22 nt, Human
acagcuggaggccccauugucc

SEQ ID NO: 62294 - RNA, 22 nt, Human
acagcuggaggggcugcagagg

SEQ ID NO: 62295 - RNA, 22 nt, Human
acagcuggcaggggggcaugaa

SEQ ID NO: 62296 - RNA, 22 nt, Human
acagcugggugcugcucagagc

SEQ ID NO: 62297 - RNA, 22 nt, Human
acagcugggugucccacuucug

SEQ ID NO: 62298 - RNA, 22 nt, Human
acagcugugacuuagagaaguu

SEQ ID NO: 62299 - RNA, 22 nt, Human
acagcuguguuuuauaaucagc

SEQ ID NO: 62300 - RNA, 22 nt, Human
acagcuucacccauuaucccug

SEQ ID NO: 62301 - RNA, 22 nt, Human
acagcuucucugaaauucaugu

SEQ ID NO: 62302 - RNA, 22 nt, Human
acagcuugaaucuuaagcucuu

SEQ ID NO: 62303 - RNA, 22 nt, Human
acagcuugcaauggcuuucaac

SEQ ID NO: 62304 - RNA, 22 nt, Human
acagcuuuguguuaaugggaag

SEQ ID NO: 62305 - RNA, 22 nt, Human
acagcuuuucugauagauccug

SEQ ID NO: 62306 - RNA, 22 nt, Human
acaggaaagagcuaggcauagg

SEQ ID NO: 62307 - RNA, 22 nt, Human
acaggaaaugaaaugguaucua

SEQ ID NO: 62308 - RNA, 22 nt, Human
acaggaacagcuugauggcauc

SEQ ID NO: 62309 - RNA, 22 nt, Human
acaggaacgaauguacauuguu

SEQ ID NO: 62310 - RNA, 22 nt, Human
acaggaagugcuggcacuuaca

SEQ ID NO: 62311 - RNA, 22 nt, Human
acaggacaacucagcagccagc

SEQ ID NO: 62312 - RNA, 22 nt, Human
acaggacucucugaaaauguac

SEQ ID NO: 62313 - RNA, 22 nt, Human
acaggagacccugcugguucug

SEQ ID NO: 62314 - RNA, 22 nt, Human
acaggagcucuagggacagcac

SEQ ID NO: 62315 - RNA, 22 nt, Human
acagggcagguggcuacugguc

SEQ ID NO: 62316 - RNA, 23 nt, Human
acagggcauugcuggccucgagg

SEQ ID NO: 62317 - RNA, 22 nt, Human
acagggccaggugagaggugcu

SEQ ID NO: 62318 - RNA, 22 nt, Human
acagggcccugugggccccacu

SEQ ID NO: 62319 - RNA, 22 nt, Human
acagggccucagcugauucugg

SEQ ID NO: 62320 - RNA, 22 nt, Human
acagggccuggcuccaaaagau

SEQ ID NO: 62321 - RNA, 23 nt, Human
acagggcuagcugacagugguau

SEQ ID NO: 62322 - RNA, 22 nt, Human
acagggcuccuagguggugugc

SEQ ID NO: 62323 - RNA, 22 nt, Human
acagggcuggggaaagaggcua

SEQ ID NO: 62324 - RNA, 22 nt, Human
acagggcuggggcacuuggcug

SEQ ID NO: 62325 - RNA, 23 nt, Human
acagggcuuaucugucacucauc

SEQ ID NO: 62326 - RNA, 22 nt, Human
acagggucauuuuaugaucugu

SEQ ID NO: 62327 - RNA, 22 nt, Human
acagggugaaugugacauuauc

SEQ ID NO: 62328 - RNA, 22 nt, Human
acagguacuuuguaaugaagga

SEQ ID NO: 62329 - RNA, 22 nt, Human
acagguagauacauacuucuaa

SEQ ID NO: 62330 - RNA, 22 nt, Human
acaggucaacgagagcaggcaa

SEQ ID NO: 62331 - RNA, 22 nt, Human
acaggucagauaaaggcuggug

SEQ ID NO: 62332 - RNA, 22 nt, Human
acacagaguuauuaugugaacu

SEQ ID NO: 62333 - RNA, 22 nt, Human
acacagaguuugacacauggga

SEQ ID NO: 62334 - RNA, 22 nt, Human
acacagaugauguuccaggaac

SEQ ID NO: 62335 - RNA, 22 nt, Human
acacagccaggguaguaaggcu

SEQ ID NO: 62336 - RNA, 22 nt, Human
acacagccccacggugagcaaa

SEQ ID NO: 62337 - RNA, 22 nt, Human
acacagcucagugccuccaaga

SEQ ID NO: 62338 - RNA, 22 nt, Human
acacagcuucaaagucuaauuc

SEQ ID NO: 62339 - RNA, 22 nt, Human
acacaggaagucagcacugaug

SEQ ID NO: 62340 - RNA, 22 nt, Human
acacaggaggaggauggugguc

SEQ ID NO: 62341 - RNA, 21 nt, Human
acacaggaguuucuucuuucu

SEQ ID NO: 62342 - RNA, 22 nt, Human
acacaggcaaugugagugggag

SEQ ID NO: 62343 - RNA, 22 nt, Human
acacaggcauagccauacaugu

SEQ ID NO: 62344 - RNA, 22 nt, Human
acacagggaggaggugcugugc

SEQ ID NO: 62345 - RNA, 22 nt, Human
acacagggcagagagcuggcuc

SEQ ID NO: 62346 - RNA, 22 nt, Human
acacaggggcucggcugggugc

SEQ ID NO: 62347 - RNA, 22 nt, Human
acacagggggcauucuaggagu

SEQ ID NO: 62348 - RNA, 22 nt, Human
acacagguaaugguuuuggaag

SEQ ID NO: 62349 - RNA, 18 nt, Human
acacagguuauucucucc

SEQ ID NO: 62350 - RNA, 22 nt, Human
acacaguaaauauguauugaau

SEQ ID NO: 62351 - RNA, 22 nt, Human
acacaguaccccaaggcugggc

SEQ ID NO: 62352 - RNA, 20 nt, Human
acacaguagcaauuagugca

SEQ ID NO: 62353 - RNA, 22 nt, Human
acacaguaggauaguuugagga

SEQ ID NO: 62354 - RNA, 22 nt, Human
acacaguaguuugucauugcua

SEQ ID NO: 62355 - RNA, 22 nt, Human
acacaguaugaaaagucuaguu

SEQ ID NO: 62356 - RNA, 18 nt, Human
acacaguggaugccuggu

SEQ ID NO: 62357 - RNA, 22 nt, Human
acacaguguccuucuacuugcc

SEQ ID NO: 62358 - RNA, 22 nt, Human
acacaguucgugcuuuucuauu

SEQ ID NO: 62359 - RNA, 22 nt, Human
acacaguugguggcucagucug

SEQ ID NO: 62360 - RNA, 22 nt, Human
acacaguuuuucagacagagau

SEQ ID NO: 62361 - RNA, 22 nt, Human
acacauauaccacuguaaauga

SEQ ID NO: 62362 - RNA, 22 nt, Human
acacauauucauauguacuuac

SEQ ID NO: 62363 - RNA, 17 nt, Human
acacaucuuggcuuugc

SEQ ID NO: 62364 - RNA, 22 nt, Human
acacaugaaagacauuaaggug

SEQ ID NO: 62365 - RNA, 22 nt, Human
acacaugaggaaggccucaccc

SEQ ID NO: 62366 - RNA, 22 nt, Human
acacaugauaagaaaguuuaaa

SEQ ID NO: 62367 - RNA, 22 nt, Human
acacaugcuccagucuccagga

SEQ ID NO: 62368 - RNA, 19 nt, Human
acacauguaacaguuuuuc

SEQ ID NO: 62369 - RNA, 22 nt, Human
acacauguauggcacuuacauu

SEQ ID NO: 62370 - RNA, 20 nt, Human
acacaugucaagcuaaaggc

SEQ ID NO: 62371 - RNA, 23 nt, Human
acacauguuuaugcuugggggca

SEQ ID NO: 62372 - RNA, 22 nt, Human
acacauuagugcucugucucau

SEQ ID NO: 62373 - RNA, 22 nt, Human
acacauuauagagaguauaaua

SEQ ID NO: 62374 - RNA, 22 nt, Human
acacauuaucucauuaaauacu

SEQ ID NO: 62375 - RNA, 22 nt, Human
acaccaccgucccagccuccug

SEQ ID NO: 62376 - RNA, 22 nt, Human
acaccagccucgcccguguguu

SEQ ID NO: 62377 - RNA, 22 nt, Human
acacccaggaauaaggacuggg

SEQ ID NO: 62378 - RNA, 22 nt, Human
acacccaggcuggcgugcagug

SEQ ID NO: 62379 - RNA, 22 nt, Human
acaccuuucagguccagacagu

SEQ ID NO: 62380 - RNA, 22 nt, Human
acacgcauaaauacacagucua

SEQ ID NO: 62381 - RNA, 21 nt, Human
acacguguguguaaacacaca

SEQ ID NO: 62382 - RNA, 22 nt, Human
acacuacaaucucagaacuaua

SEQ ID NO: 62383 - RNA, 22 nt, Human
acacuacagggccgggauggaa

SEQ ID NO: 62384 - RNA, 22 nt, Human
acacuacuuuucauaaaaguaa

SEQ ID NO: 62385 - RNA, 22 nt, Human
acacuagagagcaggcauuccc

SEQ ID NO: 62386 - RNA, 22 nt, Human
acacuagaugccaauagcaccc

SEQ ID NO: 62387 - RNA, 22 nt, Human
acacuagcuaaaugcugauuaa

SEQ ID NO: 62388 - RNA, 22 nt, Human
acacuauaagacagauacagca

SEQ ID NO: 62389 - RNA, 22 nt, Human
acacucaugcucagcuggugcu

SEQ ID NO: 62390 - RNA, 22 nt, Human
acacucuguaaugucacacucc

SEQ ID NO: 62391 - RNA, 23 nt, Human
acacucuucccagaagguucuga

SEQ ID NO: 62392 - RNA, 22 nt, Human
acacugaaagaagccagcuugu

SEQ ID NO: 62393 - RNA, 22 nt, Human
acacugaauauacaaugaauau

SEQ ID NO: 62394 - RNA, 22 nt, Human
acacugaauguuuaagaacuug

SEQ ID NO: 62395 - RNA, 22 nt, Human
acacugagcuuccaagaugggg

SEQ ID NO: 62396 - RNA, 21 nt, Human
acacugagugaauuagcacau

SEQ ID NO: 62397 - RNA, 22 nt, Human
acacugcagaugaaagcauaag

SEQ ID NO: 62398 - RNA, 22 nt, Human
acacugcagcaucagcuacgga

SEQ ID NO: 62399 - RNA, 21 nt, Human
acacugcaggugaagugcacu

SEQ ID NO: 62400 - RNA, 22 nt, Human
acacugcucacuucuucccuug

SEQ ID NO: 62401 - RNA, 19 nt, Human
acacugggagaagacugcu

SEQ ID NO: 62402 - RNA, 22 nt, Human
acacuggguaacauaucuguua

SEQ ID NO: 62403 - RNA, 22 nt, Human
acacugguguaguuuucugcag

SEQ ID NO: 62404 - RNA, 19 nt, Human
acacugguuguucaagggc

SEQ ID NO: 62405 - RNA, 22 nt, Human
acacuguagacuguugaaguac

SEQ ID NO: 62406 - RNA, 22 nt, Human
acacuguagauauagaguuagu

SEQ ID NO: 62407 - RNA, 22 nt, Human
acacuguaugaaaacaggaaau

SEQ ID NO: 62408 - RNA, 22 nt, Human
acacugugaucuugagaaaggu

SEQ ID NO: 62409 - RNA, 22 nt, Human
acacugugauuucuggguucca

SEQ ID NO: 62410 - RNA, 22 nt, Human
acacugugcagauucccuguga

SEQ ID NO: 62411 - RNA, 22 nt, Human
acacugugcaugcauauacaca

SEQ ID NO: 62412 - RNA, 20 nt, Human
acacugugcuaaggauuuuc

SEQ ID NO: 62413 - RNA, 22 nt, Human
acacugugugacuucugagacu

SEQ ID NO: 62414 - RNA, 22 nt, Human
acacuguguuuacauagagaau

SEQ ID NO: 62415 - RNA, 22 nt, Human
acacuguugcuggcacagacag

SEQ ID NO: 62416 - RNA, 22 nt, Human
acacuguuuuagggaagaaaau

SEQ ID NO: 62417 - RNA, 22 nt, Human
acacuuaagcaugaaguauaaa

SEQ ID NO: 62418 - RNA, 22 nt, Human
acacuuaaucuuacugaggauc

SEQ ID NO: 62419 - RNA, 22 nt, Human
acacuucaccccugcucccagu

SEQ ID NO: 62420 - RNA, 22 nt, Human
acacuucagcuccacaaacauu

SEQ ID NO: 62421 - RNA, 21 nt, Human
acacuucaguuuuuaaaggga

SEQ ID NO: 62422 - RNA, 22 nt, Human
acacuucaugcauucuucacuc

SEQ ID NO: 62423 - RNA, 20 nt, Human
acacuugacaccagaaaugg

SEQ ID NO: 62424 - RNA, 22 nt, Human
acacuuuagauauucccuucug

SEQ ID NO: 62425 - RNA, 22 nt, Human
acacuuugaagauggaaacuug

SEQ ID NO: 62426 - RNA, 22 nt, Human
acagaaagauaggcacaagguc

SEQ ID NO: 62427 - RNA, 20 nt, Human
acagaaagcugccuuguccc

SEQ ID NO: 62428 - RNA, 22 nt, Human
acagaaauaacuuuuuauguuu

SEQ ID NO: 62429 - RNA, 22 nt, Human
acagaaauuagcagugaguuua

SEQ ID NO: 62430 - RNA, 22 nt, Human
acagaacaacaagguggaccag

SEQ ID NO: 62431 - RNA, 22 nt, Human
acagaacaagaccugcuuauug

SEQ ID NO: 62432 - RNA, 22 nt, Human
acagaacaggcugagaaaaaca

SEQ ID NO: 62433 - RNA, 18 nt, Human
acagaacucaggggcacc

SEQ ID NO: 62434 - RNA, 22 nt, Human
acagaacuucaguaguauuccc

SEQ ID NO: 62435 - RNA, 22 nt, Human
acagaacuuggaacuuuucaca

SEQ ID NO: 62436 - RNA, 22 nt, Human
acagaacuuucugauccugagc

SEQ ID NO: 62437 - RNA, 22 nt, Human
acagucuuaauggauaggagcu

SEQ ID NO: 62438 - RNA, 22 nt, Human
acagucuucaugcuagaauggc

SEQ ID NO: 62439 - RNA, 22 nt, Human
acagucuugagcaucagccaga

SEQ ID NO: 62440 - RNA, 22 nt, Human
acagucuugcacuucuaucagc

SEQ ID NO: 62441 - RNA, 22 nt, Human
caggaaguuguguguucgaggc

SEQ ID NO: 62442 - RNA, 22 nt, Human
caggaaugauauucgaggagau

SEQ ID NO: 62443 - RNA, 22 nt, Human
caggaaugcauucuagaauggc

SEQ ID NO: 62444 - RNA, 18 nt, Human
caggaauggaugggauuu

SEQ ID NO: 62445 - RNA, 22 nt, Human
caggaauguuugugcuccuuua

SEQ ID NO: 62446 - RNA, 22 nt, Human
caggaauucauagcauuguucu

SEQ ID NO: 62447 - RNA, 22 nt, Human
caggacaaucucgucggguccu

SEQ ID NO: 62448 - RNA, 22 nt, Human
caggacacuaaaaagccaagcu

SEQ ID NO: 62449 - RNA, 22 nt, Human
caggacacuacagaugggaggg

SEQ ID NO: 62450 - RNA, 22 nt, Human
caggacagaaauaaggaauaua

SEQ ID NO: 62451 - RNA, 22 nt, Human
caggacagaccaagaucgugcu

SEQ ID NO: 62452 - RNA, 22 nt, Human
caggacagugcagguccauccu

SEQ ID NO: 62453 - RNA, 22 nt, Human
caggacauugauccauuggcac

SEQ ID NO: 62454 - RNA, 22 nt, Human
caggaccaggcguucugggcug

SEQ ID NO: 62455 - RNA, 22 nt, Human
caggacucuugucaucaucagu

SEQ ID NO: 62456 - RNA, 22 nt, Human
caggacugauguuccuccagcc

SEQ ID NO: 62457 - RNA, 22 nt, Human
caggacuggaagucucaagaga

SEQ ID NO: 62458 - RNA, 22 nt, Human
caggagaagguuuggagugcag

SEQ ID NO: 62459 - RNA, 22 nt, Human
caggagacaguguuauuuuauu

SEQ ID NO: 62460 - RNA, 19 nt, Human
caggagagcaugcacuuug

SEQ ID NO: 62461 - RNA, 22 nt, Human
caggagauaaaagagaugcuuu

SEQ ID NO: 62462 - RNA, 22 nt, Human
caggagaugacagggaagaacc

SEQ ID NO: 62463 - RNA, 23 nt, Human
caggagauggcugcugugucagc

SEQ ID NO: 62464 - RNA, 22 nt, Human
caggagauguaagacuucuguu

SEQ ID NO: 62465 - RNA, 22 nt, Human
caggagcaaggagcagugggau

SEQ ID NO: 62466 - RNA, 22 nt, Human
caggagcagaggguggucagca

SEQ ID NO: 62467 - RNA, 22 nt, Human
caggagccagaggcggauggag

SEQ ID NO: 62468 - RNA, 22 nt, Human
caggagccgccaggcacguugg

SEQ ID NO: 62469 - RNA, 22 nt, Human
caggagcucucaucgucagggc

SEQ ID NO: 62470 - RNA, 22 nt, Human
caggagcuggaucuccuugcgg

SEQ ID NO: 62471 - RNA, 22 nt, Human
caggagcugggucuggaagcag

SEQ ID NO: 62472 - RNA, 22 nt, Human
caggaggaaaugugacccugcu

SEQ ID NO: 62473 - RNA, 22 nt, Human
caggaggacauacuggcucaca

SEQ ID NO: 62474 - RNA, 22 nt, Human
caggaggcagagguugcagcga

SEQ ID NO: 62475 - RNA, 22 nt, Human
caggaggcaguuucagaaguca

SEQ ID NO: 62476 - RNA, 22 nt, Human
caggaggcauauuuaaauccaa

SEQ ID NO: 62477 - RNA, 22 nt, Human
caggaggcuccuagggcucugu

SEQ ID NO: 62478 - RNA, 22 nt, Human
caggaggggguggaguuucgcc

SEQ ID NO: 62479 - RNA, 22 nt, Human
caggaggugacuuccagggguu

SEQ ID NO: 62480 - RNA, 22 nt, Human
caggagucuguuccucauuugu

SEQ ID NO: 62481 - RNA, 22 nt, Human
caggagugaaaugaggcccagg

SEQ ID NO: 62482 - RNA, 22 nt, Human
caggagugaguuggggucuaca

SEQ ID NO: 62483 - RNA, 22 nt, Human
caggagugucgggucacuaggu

SEQ ID NO: 62484 - RNA, 22 nt, Human
caggaguugguaauauugugga

SEQ ID NO: 62485 - RNA, 22 nt, Human
caggaguuucuauuguuccaaa

SEQ ID NO: 62486 - RNA, 22 nt, Human
caggauaacagaaaauagcuga

SEQ ID NO: 62487 - RNA, 22 nt, Human
caggauagaaaggccauggagu

SEQ ID NO: 62488 - RNA, 22 nt, Human
caggaucugccaauauucaacc

SEQ ID NO: 62489 - RNA, 22 nt, Human
caggaucugcccaggccuuugg

SEQ ID NO: 62490 - RNA, 22 nt, Human
caggaugcacuaggaaccaggg

SEQ ID NO: 62491 - RNA, 22 nt, Human
caggaugccaucugcugcugcu

SEQ ID NO: 62492 - RNA, 22 nt, Human
caggauggagagugagggguca

SEQ ID NO: 62493 - RNA, 22 nt, Human
caggaugggauguagugggccc

SEQ ID NO: 62494 - RNA, 22 nt, Human
caggauggucagaugcauuguc

SEQ ID NO: 62495 - RNA, 22 nt, Human
caggauggugugagugugagga

SEQ ID NO: 62496 - RNA, 22 nt, Human
caggauguaugucuuauucuuc

SEQ ID NO: 62497 - RNA, 22 nt, Human
caggaugugaggaggccauuug

SEQ ID NO: 62498 - RNA, 22 nt, Human
caggauguugcucccauguccc

SEQ ID NO: 62499 - RNA, 22 nt, Human
caggauugagcaaauggauuau

SEQ ID NO: 62500 - RNA, 19 nt, Human
caggauuguuuaaagcuuu

SEQ ID NO: 62501 - RNA, 22 nt, Human
caggcaagauuagagaugagca

SEQ ID NO: 62502 - RNA, 22 nt, Human
caggcaaggagcuggcucaagu

SEQ ID NO: 62503 - RNA, 22 nt, Human
caggcacaaaaggaccccagca

SEQ ID NO: 62504 - RNA, 22 nt, Human
caggcacaagaucggcuagaua

SEQ ID NO: 62505 - RNA, 22 nt, Human
caggcacaauuauuucccuuuc

SEQ ID NO: 62506 - RNA, 20 nt, Human
caggcacacucauuccugcu

SEQ ID NO: 62507 - RNA, 22 nt, Human
caggcacagcugggcaauugcg

SEQ ID NO: 62508 - RNA, 22 nt, Human
caggcaccccaggugagcacug

SEQ ID NO: 62509 - RNA, 22 nt, Human
caggcaccugugugucucaggg

SEQ ID NO: 62510 - RNA, 22 nt, Human
caggcacucagucuggaucccu

SEQ ID NO: 62511 - RNA, 22 nt, Human
caggcacugugcaagggucucg

SEQ ID NO: 62512 - RNA, 22 nt, Human
caggcacugugcugagcucugc

SEQ ID NO: 62513 - RNA, 22 nt, Human
caggcacuuugcugggggcgca

SEQ ID NO: 62514 - RNA, 22 nt, Human
caggcagaaaguauucugugua

SEQ ID NO: 62515 - RNA, 22 nt, Human
caggcagaaauuuuguuucauu

SEQ ID NO: 62516 - RNA, 22 nt, Human
caggcagacuuugagaaugaug

SEQ ID NO: 62517 - RNA, 22 nt, Human
caggcagagcaacugguccaga

SEQ ID NO: 62518 - RNA, 22 nt, Human
caggcagaggaagucugggucu

SEQ ID NO: 62519 - RNA, 22 nt, Human
caggcagagucagauuagacuu

SEQ ID NO: 62520 - RNA, 22 nt, Human
caggcagaguuagagcaacugg

SEQ ID NO: 62521 - RNA, 22 nt, Human
caggcagcaggagcccugcucg

SEQ ID NO: 62522 - RNA, 22 nt, Human
caggcagcguccugcuuccugu

SEQ ID NO: 62523 - RNA, 22 nt, Human
caggcagcugggucaccguccc

SEQ ID NO: 62524 - RNA, 22 nt, Human
auggcuccagcugguagagauu

SEQ ID NO: 62525 - RNA, 18 nt, Human
auggcuccagugucuucc

SEQ ID NO: 62526 - RNA, 22 nt, Human
auggcucuagaauaccccucag

SEQ ID NO: 62527 - RNA, 22 nt, Human
auggcucuugaauugauacucu

SEQ ID NO: 62528 - RNA, 22 nt, Human
auggcugagaugggcuccaggc

SEQ ID NO: 62529 - RNA, 22 nt, Human
auggcugcaucauccugguuga

SEQ ID NO: 62530 - RNA, 19 nt, Human
auggcugcugauuggggau

SEQ ID NO: 62531 - RNA, 22 nt, Human
auggcugggaggagaguaugau

SEQ ID NO: 62532 - RNA, 22 nt, Human
auggcuguaaauucagagaugg

SEQ ID NO: 62533 - RNA, 22 nt, Human
auggcugugcagagauugggaa

SEQ ID NO: 62534 - RNA, 22 nt, Human
auggcugugguaucagacgcag

SEQ ID NO: 62535 - RNA, 22 nt, Human
auggcugugugacugaguucua

SEQ ID NO: 62536 - RNA, 22 nt, Human
auggcugugugcuucuccccau

SEQ ID NO: 62537 - RNA, 22 nt, Human
auggcuguguuagaugcuaagu

SEQ ID NO: 62538 - RNA, 22 nt, Human
auggcuguugugaggaucaaau

SEQ ID NO: 62539 - RNA, 22 nt, Human
auggcuguuuagcuucucugcu

SEQ ID NO: 62540 - RNA, 22 nt, Human
auggcuuccucuggauuggauu

SEQ ID NO: 62541 - RNA, 21 nt, Human
auggcuucucaggugcacuga

SEQ ID NO: 62542 - RNA, 22 nt, Human
auggcuucugucuuggaaauuu

SEQ ID NO: 62543 - RNA, 22 nt, Human
auggcuugcuuuuagagagauc

SEQ ID NO: 62544 - RNA, 22 nt, Human
auggcuugguugguuaaagcac

SEQ ID NO: 62545 - RNA, 22 nt, Human
auggcuugucuaugagugcucu

SEQ ID NO: 62546 - RNA, 22 nt, Human
auggcuuucagauggugaaaga

SEQ ID NO: 62547 - RNA, 22 nt, Human
auggcuuuccggacuuuggcca

SEQ ID NO: 62548 - RNA, 22 nt, Human
auggcuuuccugggacaugggc

SEQ ID NO: 62549 - RNA, 22 nt, Human
auggcuuugaaguaauguaauu

SEQ ID NO: 62550 - RNA, 22 nt, Human
caggccagugggaaauagggau

SEQ ID NO: 62551 - RNA, 22 nt, Human
caggcccaaaugcaaccuucuu

SEQ ID NO: 62552 - RNA, 22 nt, Human
caggcccaagacugaugagucu

SEQ ID NO: 62553 - RNA, 22 nt, Human
caggcccaggugucgauguucc

SEQ ID NO: 62554 - RNA, 22 nt, Human
caggcccagugaucagggcucu

SEQ ID NO: 62555 - RNA, 22 nt, Human
caggcccaucugcucccaggcu

SEQ ID NO: 62556 - RNA, 22 nt, Human
caggccccauuccucuugggac

SEQ ID NO: 62557 - RNA, 22 nt, Human
caggcccuccugugaucugccu

SEQ ID NO: 62558 - RNA, 22 nt, Human
caggcccugcacuaggcccugg

SEQ ID NO: 62559 - RNA, 19 nt, Human
caggcccuggacccaucug

SEQ ID NO: 62560 - RNA, 22 nt, Human
caggcccuggcagggcugaguc

SEQ ID NO: 62561 - RNA, 18 nt, Human
caggcccugucuggccuc

SEQ ID NO: 62562 - RNA, 22 nt, Human
caggcccugugcugggugaugu

SEQ ID NO: 62563 - RNA, 22 nt, Human
caggcccuuuccugggcauagg

SEQ ID NO: 62564 - RNA, 22 nt, Human
caggccucagagaguggcgggg

SEQ ID NO: 62565 - RNA, 22 nt, Human
caggccucgaggagacagcuac

SEQ ID NO: 62566 - RNA, 19 nt, Human
caggccucuggucugcugu

SEQ ID NO: 62567 - RNA, 18 nt, Human
caggccucuugaucuucc

SEQ ID NO: 62568 - RNA, 22 nt, Human
caggccugauacacugaacucu

SEQ ID NO: 62569 - RNA, 22 nt, Human
caggccuggagugcaauggcac

SEQ ID NO: 62570 - RNA, 22 nt, Human
caggccuuaaggacucggagaa

SEQ ID NO: 62571 - RNA, 22 nt, Human
caggccuuaguaggugcucccu

SEQ ID NO: 62572 - RNA, 22 nt, Human
caggccuuaucuccacccugca

SEQ ID NO: 62573 - RNA, 22 nt, Human
caggccuucucccucccucaac

SEQ ID NO: 62574 - RNA, 22 nt, Human
caggccuugaaggccugcggga

SEQ ID NO: 62575 - RNA, 22 nt, Human
caggccuuucuggggaagugag

SEQ ID NO: 62576 - RNA, 22 nt, Human
caggcgggcaggugcggccccu

SEQ ID NO: 62577 - RNA, 22 nt, Human
caggcuacuggggcuuggaugg

SEQ ID NO: 62578 - RNA, 22 nt, Human
caggcucaauggccacuugggc

SEQ ID NO: 62579 - RNA, 22 nt, Human
caggcucagcaggagccugacc

SEQ ID NO: 62580 - RNA, 22 nt, Human
caggcucagucagaaaauguau

SEQ ID NO: 62581 - RNA, 22 nt, Human
caggcuccacaggggaauccgg

SEQ ID NO: 62582 - RNA, 22 nt, Human
caggcuccauuaaucauccugc

SEQ ID NO: 62583 - RNA, 22 nt, Human
caggcucccacaagcucccagc

SEQ ID NO: 62584 - RNA, 22 nt, Human
caggcucccacccuccugcagc

SEQ ID NO: 62585 - RNA, 22 nt, Human
caggcucccugggcaguggcag

SEQ ID NO: 62586 - RNA, 22 nt, Human
caggcucuagguuaguaggaga

SEQ ID NO: 62587 - RNA, 22 nt, Human
caggcucugcugcuacagcugu

SEQ ID NO: 62588 - RNA, 21 nt, Human
caggcucugcugggugcuggg

SEQ ID NO: 62589 - RNA, 22 nt, Human
caggcugauuaggccucgucca

SEQ ID NO: 62590 - RNA, 22 nt, Human
caggcugccgaggcugcagaau

SEQ ID NO: 62591 - RNA, 22 nt, Human
caggcugcggucggcucugguc

SEQ ID NO: 62592 - RNA, 22 nt, Human
caggcugcguuugugaaaggua

SEQ ID NO: 62593 - RNA, 22 nt, Human
caggcuggagugcaauggcaca

SEQ ID NO: 62594 - RNA, 22 nt, Human
caggcuggagugcaauggugcu

SEQ ID NO: 62595 - RNA, 22 nt, Human
caggcuggcaaugcgucaagca

SEQ ID NO: 62596 - RNA, 22 nt, Human
caggcugggcuccggagauaaa

SEQ ID NO: 62597 - RNA, 22 nt, Human
caggcuguggaucaggagccuu

SEQ ID NO: 62598 - RNA, 21 nt, Human
caggcuugaggaaugugccug

SEQ ID NO: 62599 - RNA, 22 nt, Human
caggcuugcuagaggagccaaa

SEQ ID NO: 62600 - RNA, 22 nt, Human
caggcuugcugcuagagcacuu

SEQ ID NO: 62601 - RNA, 22 nt, Human
caggcuuuacuuucucucugaa

SEQ ID NO: 62602 - RNA, 22 nt, Human
cagggacaaggaauaagauuag

SEQ ID NO: 62603 - RNA, 22 nt, Human
cagggacaauggcagagccuga

SEQ ID NO: 62604 - RNA, 22 nt, Human
cagggacagcacuaaacucuug

SEQ ID NO: 62605 - RNA, 22 nt, Human
cagggacaggggagaaaagaug

SEQ ID NO: 62606 - RNA, 22 nt, Human
cagggacauaagaggaacaugg

SEQ ID NO: 62607 - RNA, 22 nt, Human
cagggacccuacuagcucacac

SEQ ID NO: 62608 - RNA, 22 nt, Human
cagggacucccaggguagcucc

SEQ ID NO: 62609 - RNA, 22 nt, Human
cagggagaucuuggcuccuggu

SEQ ID NO: 62610 - RNA, 22 nt, Human
cagggagcaggcucuguccauc

SEQ ID NO: 62611 - RNA, 22 nt, Human
cagggagcuggcuggcgugagu

SEQ ID NO: 62612 - RNA, 22 nt, Human
cagggagcuggugccagccgac

SEQ ID NO: 62613 - RNA, 22 nt, Human
cagggaggaugggcuguuuugc

SEQ ID NO: 62614 - RNA, 22 nt, Human
cagggagggaggaaaauuugcu

SEQ ID NO: 62615 - RNA, 22 nt, Human
cagggaguguacaccaugugua

SEQ ID NO: 62616 - RNA, 22 nt, Human
cagggaugagagauggcacaga

SEQ ID NO: 62617 - RNA, 22 nt, Human
cagggaugagcagauggagcaa

SEQ ID NO: 62618 - RNA, 22 nt, Human
cagggaugcugcuuaggcaguu

SEQ ID NO: 62619 - RNA, 22 nt, Human
cagggauggagagacuacuggc

SEQ ID NO: 62620 - RNA, 22 nt, Human
cagggauggccuggcgggccac

SEQ ID NO: 62621 - RNA, 22 nt, Human
cagggaugucucuggaagggag

SEQ ID NO: 62622 - RNA, 22 nt, Human
cagggaugugaugagcugagcc

SEQ ID NO: 62623 - RNA, 22 nt, Human
cagggauucagcugaaggaggc

SEQ ID NO: 62624 - RNA, 21 nt, Human
cagggcaaccaaguccagaga

SEQ ID NO: 62625 - RNA, 21 nt, Human
cagggcacacagaggauggua

SEQ ID NO: 62626 - RNA, 22 nt, Human
cagggcacuuaaauugccucgu

SEQ ID NO: 62627 - RNA, 22 nt, Human
cagggcagagggaaacuccuuu

SEQ ID NO: 62628 - RNA, 22 nt, Human
cagggcagccaggccccguggg

SEQ ID NO: 62629 - RNA, 22 nt, Human
cagggcaggacagauacauuac

SEQ ID NO: 62630 - RNA, 22 nt, Human
cagggcaguuuuacuucucucu

SEQ ID NO: 62631 - RNA, 22 nt, Human
cagggcauuacuucagguccuu

SEQ ID NO: 62632 - RNA, 22 nt, Human
cagggccaagcugcagcaucug

SEQ ID NO: 62633 - RNA, 21 nt, Human
cagggccaauccugaccucua

SEQ ID NO: 62634 - RNA, 20 nt, Human
cagggccacgcuccaaggca

SEQ ID NO: 62635 - RNA, 22 nt, Human
cagggccagcccacuagcgagg

SEQ ID NO: 62636 - RNA, 22 nt, Human
cagggccagccgcagcauccac

SEQ ID NO: 62637 - RNA, 22 nt, Human
cagggccaggcugauggccugg

SEQ ID NO: 62638 - RNA, 22 nt, Human
cagggccagggcuauggugaag

SEQ ID NO: 62639 - RNA, 22 nt, Human
cagggccaguucucgcagcagu

SEQ ID NO: 62640 - RNA, 22 nt, Human
cagggccaugaggcacaggguc

SEQ ID NO: 62641 - RNA, 22 nt, Human
auguuuccagguucuuccuaug

SEQ ID NO: 62642 - RNA, 22 nt, Human
auguuuccauuuucuuguauca

SEQ ID NO: 62643 - RNA, 22 nt, Human
auguuucccagagcaaaucugg

SEQ ID NO: 62644 - RNA, 22 nt, Human
auguuucccauaagauuuucug

SEQ ID NO: 62645 - RNA, 22 nt, Human
auguuucccuucugauuuggga

SEQ ID NO: 62646 - RNA, 22 nt, Human
auguuuccuguuggauuggccc

SEQ ID NO: 62647 - RNA, 22 nt, Human
auguuugaggacucagaagacg

SEQ ID NO: 62648 - RNA, 23 nt, Human
auguuugcaguaacccauccugg

SEQ ID NO: 62649 - RNA, 22 nt, Human
auguuugucaggauuguaauua

SEQ ID NO: 62650 - RNA, 22 nt, Human
auguuugugggauaaacaaaug

SEQ ID NO: 62651 - RNA, 22 nt, Human
auguuuucaaaguaaacuugua

SEQ ID NO: 62652 - RNA, 22 nt, Human
auguuuuccugggagagcacuc

SEQ ID NO: 62653 - RNA, 22 nt, Human
auguuuucuagaguuuaaaauc

SEQ ID NO: 62654 - RNA, 22 nt, Human
auguuuuuaaauagacuuacag

SEQ ID NO: 62655 - RNA, 22 nt, Human
auguuuuuggaaaugggaacau

SEQ ID NO: 62656 - RNA, 22 nt, Human
auuaaaagcuucccaagaguua

SEQ ID NO: 62657 - RNA, 22 nt, Human
auuaaagcuauccagucaugaa

SEQ ID NO: 62658 - RNA, 22 nt, Human
auuaaagugaaguucucagaug

SEQ ID NO: 62659 - RNA, 22 nt, Human
auuuguacaaauuuauguuagu

SEQ ID NO: 62660 - RNA, 22 nt, Human
auuuguagugaagugaaaauaa

SEQ ID NO: 62661 - RNA, 22 nt, Human
auuuguaucaaucucaauauau

SEQ ID NO: 62662 - RNA, 22 nt, Human
auuugucaauaagaugaacaua

SEQ ID NO: 62663 - RNA, 22 nt, Human
auuugucauguauguaaaguug

SEQ ID NO: 62664 - RNA, 22 nt, Human
auuugugggacuauaaugcagg

SEQ ID NO: 62665 - RNA, 22 nt, Human
auuuguuaauuaugaggcauac

SEQ ID NO: 62666 - RNA, 22 nt, Human
auuuguucagcauugaauuugg

SEQ ID NO: 62667 - RNA, 22 nt, Human
auuuguuccaugaguaaggcua

SEQ ID NO: 62668 - RNA, 23 nt, Human
auuuuaaccuugacuaacaugca

SEQ ID NO: 62669 - RNA, 23 nt, Human
auuuuacaggucaguuccuugaa

SEQ ID NO: 62670 - RNA, 22 nt, Human
auuuuaccuuaaagucuauauu

SEQ ID NO: 62671 - RNA, 22 nt, Human
auuuuacuaaguggauaucugu

SEQ ID NO: 62672 - RNA, 22 nt, Human
auuuuacuacuccaauuaauga

SEQ ID NO: 62673 - RNA, 22 nt, Human
auuuuacuuugugaauauugac

SEQ ID NO: 62674 - RNA, 22 nt, Human
auuuuagagcuccaaguacagc

SEQ ID NO: 62675 - RNA, 22 nt, Human
auuuuagauuuaagaauaaggu

SEQ ID NO: 62676 - RNA, 22 nt, Human
auuuuagcuguccaguggauug

SEQ ID NO: 62677 - RNA, 22 nt, Human
auuuuaugacacgauucuucca

SEQ ID NO: 62678 - RNA, 22 nt, Human
auuuucagguuuugccauugua

SEQ ID NO: 62679 - RNA, 22 nt, Human
auuuucaugacuaccuuaaaua

SEQ ID NO: 62680 - RNA, 22 nt, Human
auuuucauggcuucugcucagu

SEQ ID NO: 62681 - RNA, 21 nt, Human
auuucauggugcuuuuaagaa

SEQ ID NO: 62682 - RNA, 19 nt, Human
auuuccaagaauuggagag

SEQ ID NO: 62683 - RNA, 22 nt, Human
auuuccaccggcucaggaaguu

SEQ ID NO: 62684 - RNA, 22 nt, Human
auuuccagcagcauauuugucu

SEQ ID NO: 62685 - RNA, 22 nt, Human
auuuccaggagaaaggauuuua

SEQ ID NO: 62686 - RNA, 22 nt, Human
auuuccaguacuauuuucugcu

SEQ ID NO: 62687 - RNA, 22 nt, Human
auuuccaugaaggcagauuuua

SEQ ID NO: 62688 - RNA, 22 nt, Human
auuuccaugccuuagcuuaagg

SEQ ID NO: 62689 - RNA, 22 nt, Human
auuuccaugucgguauuuuaua

SEQ ID NO: 62690 - RNA, 22 nt, Human
auuuccauuuucagccauuacu

SEQ ID NO: 62691 - RNA, 22 nt, Human
auuucccaauacgcuaagugga

SEQ ID NO: 62692 - RNA, 22 nt, Human
auuucccagauaaacagcugga

SEQ ID NO: 62693 - RNA, 22 nt, Human
auuucccaggacuagaaauaua

SEQ ID NO: 62694 - RNA, 22 nt, Human
auuuccuaauuuagggauagac

SEQ ID NO: 62695 - RNA, 22 nt, Human
auuuccuaauuuaugcaggagu

SEQ ID NO: 62696 - RNA, 22 nt, Human
auuuccuaggguagaugucaca

SEQ ID NO: 62697 - RNA, 22 nt, Human
auuuccuauggauacaggcaga

SEQ ID NO: 62698 - RNA, 22 nt, Human
auuuccugaucuguaaaauagc

SEQ ID NO: 62699 - RNA, 22 nt, Human
auuuccuggaaugacuaguggg

SEQ ID NO: 62700 - RNA, 22 nt, Human
auuuccugggucucacuccaga

SEQ ID NO: 62701 - RNA, 22 nt, Human
auuuccuguugcuuuugccacu

SEQ ID NO: 62702 - RNA, 22 nt, Human
auuuccuucaucagccuauccu

SEQ ID NO: 62703 - RNA, 22 nt, Human
auuuccuucggacaguuugggu

SEQ ID NO: 62704 - RNA, 22 nt, Human
auuucgauagaccuaacaauug

SEQ ID NO: 62705 - RNA, 22 nt, Human
auuucuagguagagaagcuuag

SEQ ID NO: 62706 - RNA, 22 nt, Human
auuucuagguucacauguguuu

SEQ ID NO: 62707 - RNA, 22 nt, Human
auuucucaaaggaauagaguga

SEQ ID NO: 62708 - RNA, 22 nt, Human
auuucucacucacaguccaugu

SEQ ID NO: 62709 - RNA, 22 nt, Human
auuucucaggguccagguccca

SEQ ID NO: 62710 - RNA, 22 nt, Human
auuucucaguaaucucagcaau

SEQ ID NO: 62711 - RNA, 22 nt, Human
auuucucaguaggugcacagug

SEQ ID NO: 62712 - RNA, 22 nt, Human
auuucucaguuccuacuguuua

SEQ ID NO: 62713 - RNA, 22 nt, Human
auuucucauuuugcuucaaagg

SEQ ID NO: 62714 - RNA, 22 nt, Human
auuucucuaagcauccguuugc

SEQ ID NO: 62715 - RNA, 22 nt, Human
auuucugauaguaaaggucuuu

SEQ ID NO: 62716 - RNA, 22 nt, Human
auuucuggacugaaaaggaagu

SEQ ID NO: 62717 - RNA, 22 nt, Human
auuucuuccucugucaguaacu

SEQ ID NO: 62718 - RNA, 22 nt, Human
auuucuugauuccaccagugaa

SEQ ID NO: 62719 - RNA, 22 nt, Human
auuugaaaaccugagccucccg

SEQ ID NO: 62720 - RNA, 23 nt, Human
auuugaaacuuucuuguuuccag

SEQ ID NO: 62721 - RNA, 22 nt, Human
auuugaaaucccuucuacugua

SEQ ID NO: 62722 - RNA, 22 nt, Human
auuugaaguaaguaaugaguau

SEQ ID NO: 62723 - RNA, 22 nt, Human
auuugacagugaguuguggaug

SEQ ID NO: 62724 - RNA, 22 nt, Human
auuugagaugguaaauaacuuu

SEQ ID NO: 62725 - RNA, 22 nt, Human
auuugauaguaugacagggcag

SEQ ID NO: 62726 - RNA, 22 nt, Human
auuugauuagcuguguaauuuu

SEQ ID NO: 62727 - RNA, 22 nt, Human
auuugauuuguagauaguguag

SEQ ID NO: 62728 - RNA, 22 nt, Human
auuugcacacagucuccugugg

SEQ ID NO: 62729 - RNA, 22 nt, Human
auuugcaggugucgauuagucu

SEQ ID NO: 62730 - RNA, 22 nt, Human
auuugcauaaggaugcuacugu

SEQ ID NO: 62731 - RNA, 22 nt, Human
auuugcauaauagugauuugua

SEQ ID NO: 62732 - RNA, 20 nt, Human
auuugcaucugaauaacuua

SEQ ID NO: 62733 - RNA, 22 nt, Human
auuugccuguaagacaaggccu

SEQ ID NO: 62734 - RNA, 22 nt, Human
auuugccuugugauuuguaagu

SEQ ID NO: 62735 - RNA, 22 nt, Human
auuugcugaaucaaugaauuuu

SEQ ID NO: 62736 - RNA, 22 nt, Human
auuugcugagcucaaagaaaag

SEQ ID NO: 62737 - RNA, 22 nt, Human
auuugcugauggcauuugagcu

SEQ ID NO: 62738 - RNA, 22 nt, Human
auuugcuggugaaauagugaca

SEQ ID NO: 62739 - RNA, 22 nt, Human
auuugcuggugaauguauagcu

SEQ ID NO: 62740 - RNA, 22 nt, Human
auuugcuucauagaucugugga

SEQ ID NO: 62741 - RNA, 22 nt, Human
auuugcuucuugcuuccagcac

SEQ ID NO: 62742 - RNA, 22 nt, Human
auuugcuuguccuggugacugu

SEQ ID NO: 62743 - RNA, 22 nt, Human
auuugcuugugcuaugaaaguu

SEQ ID NO: 62744 - RNA, 22 nt, Human
auuugcuuguucaccaguacuu

SEQ ID NO: 62745 - RNA, 22 nt, Human
auuugcuuugggacagcuuaaa

SEQ ID NO: 62746 - RNA, 19 nt, Human
auuuggaaauaaggucuuc

SEQ ID NO: 62747 - RNA, 22 nt, Human
auuuggaaauguaagaaugcaa

SEQ ID NO: 62748 - RNA, 22 nt, Human
auuuggaacugggcaugcaaac

SEQ ID NO: 62749 - RNA, 22 nt, Human
auuuggaagaaaucugucacag

SEQ ID NO: 62750 - RNA, 22 nt, Human
auuuggaaggagcugcacagca

SEQ ID NO: 62751 - RNA, 22 nt, Human
auuuggaauucgaguaauucca

SEQ ID NO: 62752 - RNA, 22 nt, Human
auuuggaggccucuccugcuug

SEQ ID NO: 62753 - RNA, 22 nt, Human
auuuggauaucacugaauacau

SEQ ID NO: 62754 - RNA, 20 nt, Human
auuugggacgauuggccacc

SEQ ID NO: 62755 - RNA, 22 nt, Human
auuugguaguccugauaagauu

SEQ ID NO: 62756 - RNA, 22 nt, Human
auuugguagugauugaaauuau

SEQ ID NO: 62757 - RNA, 22 nt, Human
auuuggucagaacucucuuuag

SEQ ID NO: 62758 - RNA, 22 nt, Human
auuuggucuacauuuuccaaau

SEQ ID NO: 62759 - RNA, 22 nt, Human
auuuggucuguaauuacaugga

SEQ ID NO: 62760 - RNA, 23 nt, Human
auuugguguugguucugccaccc

SEQ ID NO: 62761 - RNA, 22 nt, Human
auuuguaaagugcuuaaaagua

SEQ ID NO: 62762 - RNA, 22 nt, Human
auuuguauauuuaagaggguag

SEQ ID NO: 62763 - RNA, 22 nt, Human
auuuguaucuucuaauauuauc

SEQ ID NO: 62764 - RNA, 22 nt, Human
auuugucuaaugaguguguacu

SEQ ID NO: 62765 - RNA, 22 nt, Human
auuugucuucaguagguucuuc

SEQ ID NO: 62766 - RNA, 22 nt, Human
auuuguuguugcuccccuaaga

SEQ ID NO: 62767 - RNA, 22 nt, Human
auuuuaacccucuuauauauac

SEQ ID NO: 62768 - RNA, 20 nt, Human
ccagaagguuugccacuuuc

SEQ ID NO: 62769 - RNA, 22 nt, Human
ccagaagugucuaucaagaugu

SEQ ID NO: 62770 - RNA, 22 nt, Human
ccagaaguuccuaagcaucauu

SEQ ID NO: 62771 - RNA, 23 nt, Human
ccagaaucuacucauuggaauga

SEQ ID NO: 62772 - RNA, 22 nt, Human
ccagaauuugaacucaggcaau

SEQ ID NO: 62773 - RNA, 22 nt, Human
ccagacaguuccuugagguuca

SEQ ID NO: 62774 - RNA, 22 nt, Human
ccagacucaucugccauugcug

SEQ ID NO: 62775 - RNA, 22 nt, Human
ccagagaaagcucacaggcagu

SEQ ID NO: 62776 - RNA, 22 nt, Human
ccagagaaccuugagcugugag

SEQ ID NO: 62777 - RNA, 22 nt, Human
ccagagacaaggagcuggaguc

SEQ ID NO: 62778 - RNA, 22 nt, Human
ccagagaccagaacauggggau

SEQ ID NO: 62779 - RNA, 22 nt, Human
ccagagacuggcugagagaucu

SEQ ID NO: 62780 - RNA, 22 nt, Human
ccagagagagaggucaauggca

SEQ ID NO: 62781 - RNA, 22 nt, Human
ccagagaggccaaggucguggu

SEQ ID NO: 62782 - RNA, 22 nt, Human
ccagagagggcgccaccuggag

SEQ ID NO: 62783 - RNA, 22 nt, Human
ccagagagguagcuuacccucu

SEQ ID NO: 62784 - RNA, 22 nt, Human
ccagagagucgaugggggacac

SEQ ID NO: 62785 - RNA, 22 nt, Human
ccagagcagauguggccuuggu

SEQ ID NO: 62786 - RNA, 20 nt, Human
ccagagcagccacugaaguu

SEQ ID NO: 62787 - RNA, 22 nt, Human
ccagagcaugaagggcaaugac

SEQ ID NO: 62788 - RNA, 22 nt, Human
ccagagcccagggucaugcagg

SEQ ID NO: 62789 - RNA, 22 nt, Human
ccagagccggauugugaagugc

SEQ ID NO: 62790 - RNA, 21 nt, Human
ccagagccugagaggauuaug

SEQ ID NO: 62791 - RNA, 22 nt, Human
ccagagcugaugggcccagggu

SEQ ID NO: 62792 - RNA, 22 nt, Human
ccagagcuucggggcggcugua

SEQ ID NO: 62793 - RNA, 22 nt, Human
ccagaggaaaaauaucucccua

SEQ ID NO: 62794 - RNA, 19 nt, Human
ccagaggacuguuaaugaa

SEQ ID NO: 62795 - RNA, 22 nt, Human
ccagaggacuugggggcugaau

SEQ ID NO: 62796 - RNA, 18 nt, Human
ccagaggcccgggcaggc

SEQ ID NO: 62797 - RNA, 22 nt, Human
ccagaggcuggggaaggauaca

SEQ ID NO: 62798 - RNA, 22 nt, Human
ccagaggcuggguucaccucag

SEQ ID NO: 62799 - RNA, 22 nt, Human
ccagagggaacugggccucauu

SEQ ID NO: 62800 - RNA, 22 nt, Human
caaaucauggcucuagcuuaca

SEQ ID NO: 62801 - RNA, 22 nt, Human
caaaucuauauguugauauucu

SEQ ID NO: 62802 - RNA, 22 nt, Human
caaaucuuuaauugaggaauca

SEQ ID NO: 62803 - RNA, 20 nt, Human
caaaugaagcuguuggccuc

SEQ ID NO: 62804 - RNA, 22 nt, Human
caaaugaaguccaaagggcuua

SEQ ID NO: 62805 - RNA, 22 nt, Human
caaaugcaggucauaaccugag

SEQ ID NO: 62806 - RNA, 22 nt, Human
caaaugcaugagaaauaagagg

SEQ ID NO: 62807 - RNA, 22 nt, Human
caaauguaauugcgguuuuugc

SEQ ID NO: 62808 - RNA, 22 nt, Human
caaauguaucagcccagggauu

SEQ ID NO: 62809 - RNA, 22 nt, Human
caaaugugacuuuugggcuucu

SEQ ID NO: 62810 - RNA, 22 nt, Human
caaauguuaagacaggaucaag

SEQ ID NO: 62811 - RNA, 22 nt, Human
caaauguuagugcccaucccuc

SEQ ID NO: 62812 - RNA, 22 nt, Human
caaauguuucuuaucuauuguu

SEQ ID NO: 62813 - RNA, 22 nt, Human
caaauucacaugauugcuucug

SEQ ID NO: 62814 - RNA, 18 nt, Human
caaauucucauugauuuc

SEQ ID NO: 62815 - RNA, 22 nt, Human
caaauucucuuacuguuugaca

SEQ ID NO: 62816 - RNA, 22 nt, Human
caaauuguguuugcuuuucucu

SEQ ID NO: 62817 - RNA, 22 nt, Human
caaauuuaagugaggucuuugu

SEQ ID NO: 62818 - RNA, 22 nt, Human
caaauuuagguaacagucugua

SEQ ID NO: 62819 - RNA, 22 nt, Human
caacaauuucccaguuucccau

SEQ ID NO: 62820 - RNA, 22 nt, Human
caacacagccauuccccuagaa

SEQ ID NO: 62821 - RNA, 22 nt, Human
caacacagggguuaugccaugg

SEQ ID NO: 62822 - RNA, 22 nt, Human
caacacugacaauggacugauu

SEQ ID NO: 62823 - RNA, 22 nt, Human
caacacuucuuauacuuacuga

SEQ ID NO: 62824 - RNA, 22 nt, Human
caacagagggaauggaucucau

SEQ ID NO: 62825 - RNA, 22 nt, Human
caacagcugaucuuugaugaag

SEQ ID NO: 62826 - RNA, 22 nt, Human
caacaguauugugggccaggua

SEQ ID NO: 62827 - RNA, 22 nt, Human
caacagucugguuuauauaaua

SEQ ID NO: 62828 - RNA, 19 nt, Human
caacaguugcaacacuguc

SEQ ID NO: 62829 - RNA, 22 nt, Human
caacauauugugggaugagaga

SEQ ID NO: 62830 - RNA, 22 nt, Human
caacaucaguccucaugagaca

SEQ ID NO: 62831 - RNA, 22 nt, Human
caacaugccagacauuaguuug

SEQ ID NO: 62832 - RNA, 22 nt, Human
caaccucuaucggucaggaagc

SEQ ID NO: 62833 - RNA, 22 nt, Human
caaccucuggaaaguauggaca

SEQ ID NO: 62834 - RNA, 22 nt, Human
caaccugacaagacuaugagua

SEQ ID NO: 62835 - RNA, 22 nt, Human
caacuauagggagagugguuaa

SEQ ID NO: 62836 - RNA, 22 nt, Human
caacuauuaccauguuauuguc

SEQ ID NO: 62837 - RNA, 22 nt, Human
caacuccuggcuguuaggcaca

SEQ ID NO: 62838 - RNA, 22 nt, Human
caacugaggucucagccaauua

SEQ ID NO: 62839 - RNA, 22 nt, Human
caacugccauacagcuccaugg

SEQ ID NO: 62840 - RNA, 19 nt, Human
caacugcccccucaaacau

SEQ ID NO: 62841 - RNA, 22 nt, Human
caacugguaaucuccacgguca

SEQ ID NO: 62842 - RNA, 22 nt, Human
caacuguuauaaaucaacagag

SEQ ID NO: 62843 - RNA, 22 nt, Human
caacuuuagcaauguuaguaua

SEQ ID NO: 62844 - RNA, 22 nt, Human
caacuuuaugauugguuuguca

SEQ ID NO: 62845 - RNA, 22 nt, Human
caacuuugugugaccuagauag

SEQ ID NO: 62846 - RNA, 22 nt, Human
caacuuuucugugaauuuaagu

SEQ ID NO: 62847 - RNA, 22 nt, Human
caagaaacaccaaugacugcug

SEQ ID NO: 62848 - RNA, 22 nt, Human
caagaaauguuuacugagcauc

SEQ ID NO: 62849 - RNA, 22 nt, Human
caagaagaggugauugguaagu

SEQ ID NO: 62850 - RNA, 22 nt, Human
caagaagcaaggucagggccca

SEQ ID NO: 62851 - RNA, 22 nt, Human
caagaagcuuucccugcuugca

SEQ ID NO: 62852 - RNA, 22 nt, Human
caagaagugucagcuuuuuaaa

SEQ ID NO: 62853 - RNA, 22 nt, Human
caagaauccuguucuugaagau

SEQ ID NO: 62854 - RNA, 22 nt, Human
caagaauuaagaauuuugaugu

SEQ ID NO: 62855 - RNA, 21 nt, Human
caagacauaugaguacucugg

SEQ ID NO: 62856 - RNA, 22 nt, Human
caagacaugcaauugccacuuu

SEQ ID NO: 62857 - RNA, 22 nt, Human
caagacuucaccgcucugugcu

SEQ ID NO: 62858 - RNA, 22 nt, Human
caagacuuuggaggaauuugga

SEQ ID NO: 62859 - RNA, 17 nt, Human
caagagagaugacugga

SEQ ID NO: 62860 - RNA, 22 nt, Human
caagagagaugcagcucacuca

SEQ ID NO: 62861 - RNA, 22 nt, Human
caagagccuuugggcagaagga

SEQ ID NO: 62862 - RNA, 22 nt, Human
caagagcucccagaccugggca

SEQ ID NO: 62863 - RNA, 22 nt, Human
caagagcugaggcuggagaggu

SEQ ID NO: 62864 - RNA, 18 nt, Human
caagagcugcuccuggcc

SEQ ID NO: 62865 - RNA, 22 nt, Human
caagagcuuuagaaaugcucau

SEQ ID NO: 62866 - RNA, 22 nt, Human
caagauaaagccaccagaagcu

SEQ ID NO: 62867 - RNA, 22 nt, Human
caagauauauguaugauuccau

SEQ ID NO: 62868 - RNA, 22 nt, Human
caagauauguccuguuacuaag

SEQ ID NO: 62869 - RNA, 22 nt, Human
caagaugaaauugugauauuuu

SEQ ID NO: 62870 - RNA, 22 nt, Human
caagaugaucccugaaggcagc

SEQ ID NO: 62871 - RNA, 22 nt, Human
caagauggaguccgggaaugug

SEQ ID NO: 62872 - RNA, 22 nt, Human
caagauucagagucuucuaacc

SEQ ID NO: 62873 - RNA, 22 nt, Human
caagauucuaguugagguucaa

SEQ ID NO: 62874 - RNA, 22 nt, Human
caagauuuagccugcugccugu

SEQ ID NO: 62875 - RNA, 22 nt, Human
caagauuuauauuuucacacaa

SEQ ID NO: 62876 - RNA, 22 nt, Human
caagauuuggcauucugaggag

SEQ ID NO: 62877 - RNA, 22 nt, Human
cccagagucucugcucuugccu

SEQ ID NO: 62878 - RNA, 22 nt, Human
cccagcacucagcaggcucaua

SEQ ID NO: 62879 - RNA, 22 nt, Human
cccagcagaaucugaugagggc

SEQ ID NO: 62880 - RNA, 22 nt, Human
cccagcagccagaaugaggagc

SEQ ID NO: 62881 - RNA, 22 nt, Human
cccagcagccuggauguucuuu

SEQ ID NO: 62882 - RNA, 22 nt, Human
cccagcaguaaccaguggaaau

SEQ ID NO: 62883 - RNA, 22 nt, Human
cccagcagugacccagugauac

SEQ ID NO: 62884 - RNA, 22 nt, Human
cccagcagugguucucaaacuu

SEQ ID NO: 62885 - RNA, 22 nt, Human
cccagcaguuguuggugcacau

SEQ ID NO: 62886 - RNA, 22 nt, Human
cccagccaagugaucugaccgc

SEQ ID NO: 62887 - RNA, 19 nt, Human
cccagccaggucuugcauc

SEQ ID NO: 62888 - RNA, 22 nt, Human
cccagccugaucucggccagcu

SEQ ID NO: 62889 - RNA, 23 nt, Human
cccagcgcugagcccugcaggca

SEQ ID NO: 62890 - RNA, 22 nt, Human
cccagcuaccucugcuaggaga

SEQ ID NO: 62891 - RNA, 22 nt, Human
cccagcuccaagggacagcgaa

SEQ ID NO: 62892 - RNA, 22 nt, Human
cccagcucccaaguugcuaugg

SEQ ID NO: 62893 - RNA, 22 nt, Human
cccagcucgccgccgaugugcg

SEQ ID NO: 62894 - RNA, 22 nt, Human
cccagcucuaggagugguggca

SEQ ID NO: 62895 - RNA, 23 nt, Human
cccagcugagacuuccugaacuc

SEQ ID NO: 62896 - RNA, 22 nt, Human
cccagcuguaacgggucugcac

SEQ ID NO: 62897 - RNA, 22 nt, Human
cccagcuugcaaauggguugcu

SEQ ID NO: 62898 - RNA, 22 nt, Human
cccaggaaagaaaguauauggu

SEQ ID NO: 62899 - RNA, 22 nt, Human
cccaggaaagugaaucuaauug

SEQ ID NO: 62900 - RNA, 22 nt, Human
cccaggaaaucaggcuuucuag

SEQ ID NO: 62901 - RNA, 22 nt, Human
cccaggaaaugaacuucugauu

SEQ ID NO: 62902 - RNA, 23 nt, Human
cccaggaagccaaagaaauauag

SEQ ID NO: 62903 - RNA, 22 nt, Human
cccaggaagcccagaauucugg

SEQ ID NO: 62904 - RNA, 19 nt, Human
cccaggaagcggagguugc

SEQ ID NO: 62905 - RNA, 22 nt, Human
cccaggaaugagcaggcagggg

SEQ ID NO: 62906 - RNA, 22 nt, Human
cccaggaaugggaaggaggaau

SEQ ID NO: 62907 - RNA, 22 nt, Human
cccaggaauucagggcucaagg

SEQ ID NO: 62908 - RNA, 22 nt, Human
cccaggacccuucaauggcucc

SEQ ID NO: 62909 - RNA, 22 nt, Human
cccaggacuaaugagcucuacg

SEQ ID NO: 62910 - RNA, 22 nt, Human
cccaggacucugacacccccaa

SEQ ID NO: 62911 - RNA, 22 nt, Human
cccaggacucuucacugcagcc

SEQ ID NO: 62912 - RNA, 22 nt, Human
cccaggagacauauagaaggac

SEQ ID NO: 62913 - RNA, 22 nt, Human
cccaggaggacauuccauaccc

SEQ ID NO: 62914 - RNA, 21 nt, Human
cccaggaggagcuccggcucc

SEQ ID NO: 62915 - RNA, 22 nt, Human
cccaggaggcagaaguugcagu

SEQ ID NO: 62916 - RNA, 22 nt, Human
cccaggaggccaagguugcagu

SEQ ID NO: 62917 - RNA, 22 nt, Human
cccaggaggcggagguuguggu

SEQ ID NO: 62918 - RNA, 21 nt, Human
cccaggaggcugagaagagca

SEQ ID NO: 62919 - RNA, 22 nt, Human
cccaggagguggagguugcagu

SEQ ID NO: 62920 - RNA, 22 nt, Human
cccaggagguggagguugcggu

SEQ ID NO: 62921 - RNA, 22 nt, Human
cccaggaggugugcccaacucg

SEQ ID NO: 62922 - RNA, 20 nt, Human
cccaggagugagcagcuuua

SEQ ID NO: 62923 - RNA, 22 nt, Human
cccaggaguuggaggcuacggu

SEQ ID NO: 62924 - RNA, 22 nt, Human
cccaggaugaucgagaguggga

SEQ ID NO: 62925 - RNA, 22 nt, Human
cccaggauggggcugcaguuau

SEQ ID NO: 62926 - RNA, 22 nt, Human
cccaggcacucuuggucauuuu

SEQ ID NO: 62927 - RNA, 20 nt, Human
cccaggcagagcuagcggca

SEQ ID NO: 62928 - RNA, 22 nt, Human
cccaggcagccugcagggaagg

SEQ ID NO: 62929 - RNA, 22 nt, Human
cccaggcagcggggucuccuug

SEQ ID NO: 62930 - RNA, 22 nt, Human
cccaggcauuuucaacuuuagu

SEQ ID NO: 62931 - RNA, 22 nt, Human
cccaggcucagacuggcuuguu

SEQ ID NO: 62932 - RNA, 22 nt, Human
cccaggcuccugcuguguugac

SEQ ID NO: 62933 - RNA, 22 nt, Human
cccaggcuggagggcaguguca

SEQ ID NO: 62934 - RNA, 22 nt, Human
cccaggcuggauuucgguggca

SEQ ID NO: 62935 - RNA, 22 nt, Human
cccaggcuggccuccgcagugc

SEQ ID NO: 62936 - RNA, 22 nt, Human
cccaggcugggaacgauucuag

SEQ ID NO: 62937 - RNA, 22 nt, Human
cccaggcuggggcuccuccagc

SEQ ID NO: 62938 - RNA, 18 nt, Human
cccaggcuuugugggucu

SEQ ID NO: 62939 - RNA, 22 nt, Human
cccagggaaggcagauggagga

SEQ ID NO: 62940 - RNA, 22 nt, Human
cccagggagcuuggagaacggg

SEQ ID NO: 62941 - RNA, 22 nt, Human
cccagggauguggcagauguua

SEQ ID NO: 62942 - RNA, 22 nt, Human
cccagggauuauaaaggugaaa

SEQ ID NO: 62943 - RNA, 22 nt, Human
cccagggcccuggacagcuaca

SEQ ID NO: 62944 - RNA, 22 nt, Human
cccagggcuguagaauguccaa

SEQ ID NO: 62945 - RNA, 19 nt, Human
cccaggggacccagcccua

SEQ ID NO: 62946 - RNA, 22 nt, Human
cccagggguauccauggagaag

SEQ ID NO: 62947 - RNA, 22 nt, Human
cccagggguucugagcagcagc

SEQ ID NO: 62948 - RNA, 22 nt, Human
cccaggguagcugagcuggcag

SEQ ID NO: 62949 - RNA, 22 nt, Human
cccagggugcggcccuggcugg

SEQ ID NO: 62950 - RNA, 22 nt, Human
cccagggugcuaauuaaauaug

SEQ ID NO: 62951 - RNA, 20 nt, Human
cacugcaaguauuuaaccca

SEQ ID NO: 62952 - RNA, 22 nt, Human
cacugcacaauguagcaaagaa

SEQ ID NO: 62953 - RNA, 22 nt, Human
cacugcagcaccaugcagggcu

SEQ ID NO: 62954 - RNA, 22 nt, Human
cacugccauguugauagaugug

SEQ ID NO: 62955 - RNA, 22 nt, Human
cacugcccacuccuucguccaa

SEQ ID NO: 62956 - RNA, 22 nt, Human
cacugcccucacugugguucuc

SEQ ID NO: 62957 - RNA, 20 nt, Human
cacugcccuccagccugagc

SEQ ID NO: 62958 - RNA, 22 nt, Human
cacugcccuuacaugcccugca

SEQ ID NO: 62959 - RNA, 22 nt, Human
cacugccugcuggcugucacuu

SEQ ID NO: 62960 - RNA, 22 nt, Human
cacugccugugagcugugugcc

SEQ ID NO: 62961 - RNA, 23 nt, Human
cacugccuucaguugcuucaccu

SEQ ID NO: 62962 - RNA, 22 nt, Human
cacugcuauuauuagacaaugu

SEQ ID NO: 62963 - RNA, 22 nt, Human
cacugcucgcugcagcauggcc

SEQ ID NO: 62964 - RNA, 22 nt, Human
cacugcuugguugcaacauugc

SEQ ID NO: 62965 - RNA, 22 nt, Human
cacugcuuuuuuggcuauguac

SEQ ID NO: 62966 - RNA, 22 nt, Human
cacuggaaccauccacauagug

SEQ ID NO: 62967 - RNA, 22 nt, Human
cacuggaagagcaucugagcca

SEQ ID NO: 62968 - RNA, 22 nt, Human
cacuggaccaaggaaacucuuc

SEQ ID NO: 62969 - RNA, 18 nt, Human
cacuggaccucaugagag

SEQ ID NO: 62970 - RNA, 22 nt, Human
cacuggauaaaaauuuggaagu

SEQ ID NO: 62971 - RNA, 22 nt, Human
cacuggcccauaaaggccuggg

SEQ ID NO: 62972 - RNA, 22 nt, Human
cacuggcugggccagcacuccu

SEQ ID NO: 62973 - RNA, 22 nt, Human
cacugggaaucugggaaagaga

SEQ ID NO: 62974 - RNA, 22 nt, Human
cacugggaguacaaagaauggg

SEQ ID NO: 62975 - RNA, 23 nt, Human
cacugggcccaggguguggaggc

SEQ ID NO: 62976 - RNA, 22 nt, Human
cacugggcguguccugggugag

SEQ ID NO: 62977 - RNA, 22 nt, Human
cacuggguaaauuugaggcuga

SEQ ID NO: 62978 - RNA, 22 nt, Human
cacugggucaggauagagccca

SEQ ID NO: 62979 - RNA, 22 nt, Human
cacugguagagagaagacaagg

SEQ ID NO: 62980 - RNA, 22 nt, Human
cacugguauuugaaaauagaug

SEQ ID NO: 62981 - RNA, 22 nt, Human
cacuggucagucggucagucuc

SEQ ID NO: 62982 - RNA, 22 nt, Human
cacuggugaguccagaagucau

SEQ ID NO: 62983 - RNA, 22 nt, Human
cacugguugccucuuucuguuc

SEQ ID NO: 62984 - RNA, 22 nt, Human
cacugguuuugcugauaaggca

SEQ ID NO: 62985 - RNA, 22 nt, Human
cacuguacagcauuaacaaggc

SEQ ID NO: 62986 - RNA, 22 nt, Human
cagaaguggccucagagggagu

SEQ ID NO: 62987 - RNA, 22 nt, Human
cagaaguuugaccuuggugggu

SEQ ID NO: 62988 - RNA, 22 nt, Human
cagaaguuugcaauuguuuauu

SEQ ID NO: 62989 - RNA, 22 nt, Human
cagaaucagugacacauguaua

SEQ ID NO: 62990 - RNA, 22 nt, Human
cagaauccacaacagaaguuga

SEQ ID NO: 62991 - RNA, 21 nt, Human
cagaauccagucucuuauuac

SEQ ID NO: 62992 - RNA, 22 nt, Human
cagaaucucgacuucuggcccc

SEQ ID NO: 62993 - RNA, 22 nt, Human
cagaaugagauaacccagauug

SEQ ID NO: 62994 - RNA, 22 nt, Human
cagaaugcaaauuuuauaauau

SEQ ID NO: 62995 - RNA, 22 nt, Human
cagaaugggaaggacugcaguu

SEQ ID NO: 62996 - RNA, 22 nt, Human
cagaauguuaccaguuagucug

SEQ ID NO: 62997 - RNA, 22 nt, Human
cagaauugagagaggcuguucu

SEQ ID NO: 62998 - RNA, 22 nt, Human
cagaauuuagaaaacaacauaa

SEQ ID NO: 62999 - RNA, 22 nt, Human
cagaauuuagcacaauguaugg

SEQ ID NO: 63000 - RNA, 22 nt, Human
cagaauuuuucgaauguacugu

SEQ ID NO: 63001 - RNA, 22 nt, Human
cagacaaagcggaaacuguuua

SEQ ID NO: 63002 - RNA, 22 nt, Human
cagacaaccaggucuuucaguu

SEQ ID NO: 63003 - RNA, 22 nt, Human
cagacacuauuguguauaaauc

SEQ ID NO: 63004 - RNA, 16 nt, Human
cagacagagaacaggg

SEQ ID NO: 63005 - RNA, 22 nt, Human
cagacagagcucacaagucuuu

SEQ ID NO: 63006 - RNA, 17 nt, Human
cagacagauauccuggg

SEQ ID NO: 63007 - RNA, 22 nt, Human
cagacagcaaaucugcuugcau

SEQ ID NO: 63008 - RNA, 22 nt, Human
cagacaggaaguucagaagaaa

SEQ ID NO: 63009 - RNA, 22 nt, Human
cagacaggaauucuggcguggu

SEQ ID NO: 63010 - RNA, 22 nt, Human
cagacaggcaggugcugcuuug

SEQ ID NO: 63011 - RNA, 22 nt, Human
cagacagggaccucgcuccaga

SEQ ID NO: 63012 - RNA, 22 nt, Human
cagacaggguggguuucugggc

SEQ ID NO: 63013 - RNA, 22 nt, Human
cagacagguagggacagaacau

SEQ ID NO: 63014 - RNA, 22 nt, Human
cagacagguugcaaaacuucaa

SEQ ID NO: 63015 - RNA, 22 nt, Human
cagacaguggacuugauaaagg

SEQ ID NO: 63016 - RNA, 22 nt, Human
cagacauauguuuuaacagauu

SEQ ID NO: 63017 - RNA, 22 nt, Human
cagacaugagauacagcugcua

SEQ ID NO: 63018 - RNA, 22 nt, Human
cagaccaguagggcucauccca

SEQ ID NO: 63019 - RNA, 22 nt, Human
cagaccaucuugaagcaaacug

SEQ ID NO: 63020 - RNA, 22 nt, Human
cagaccccgaguuugcagaguu

SEQ ID NO: 63021 - RNA, 22 nt, Human
cagacccucuucuauugguggg

SEQ ID NO: 63022 - RNA, 23 nt, Human
cagaccuggcagucauccucaac

SEQ ID NO: 63023 - RNA, 19 nt, Human
cagaccuguccagccugug

SEQ ID NO: 63024 - RNA, 22 nt, Human
cagacggguggucugcgaggcc

SEQ ID NO: 63025 - RNA, 22 nt, Human
cagacucuugagcugauuguau

SEQ ID NO: 63026 - RNA, 22 nt, Human
cagacugaguggauuaaacaau

SEQ ID NO: 63027 - RNA, 22 nt, Human
cagacuggcugaaggccgagug

SEQ ID NO: 63028 - RNA, 22 nt, Human
cagacugugagcuccuugaggg

SEQ ID NO: 63029 - RNA, 22 nt, Human
cagacuugaaagagacucaguu

SEQ ID NO: 63030 - RNA, 22 nt, Human
cagacuuucugacucccuugcc

SEQ ID NO: 63031 - RNA, 22 nt, Human
cagacuuucuggaagcuaaaaa

SEQ ID NO: 63032 - RNA, 22 nt, Human
cagacuuuugggaggucugugg

SEQ ID NO: 63033 - RNA, 22 nt, Human
cagagaaaaaauccugcucuca

SEQ ID NO: 63034 - RNA, 22 nt, Human
cagagaaagacuugcccuuagu

SEQ ID NO: 63035 - RNA, 22 nt, Human
cagagaaagggugaauuccuuc

SEQ ID NO: 63036 - RNA, 22 nt, Human
cagagacaccccagaaaauaag

SEQ ID NO: 63037 - RNA, 22 nt, Human
cagagacaggaucucgaagacu

SEQ ID NO: 63038 - RNA, 22 nt, Human
cagagacaguuucacagggucu

SEQ ID NO: 63039 - RNA, 22 nt, Human
cagagacauccauguuaguugg

SEQ ID NO: 63040 - RNA, 22 nt, Human
cagagaccccgcugcccuucug

SEQ ID NO: 63041 - RNA, 22 nt, Human
cagagacccuucucaguggcca

SEQ ID NO: 63042 - RNA, 20 nt, Human
cagagaccugucuucacaga

SEQ ID NO: 63043 - RNA, 19 nt, Human
cagagagaccaaggcgcca

SEQ ID NO: 63044 - RNA, 22 nt, Human
cagagagagcaggaaaccuccg

SEQ ID NO: 63045 - RNA, 22 nt, Human
cagagagagucaaaucuuugcu

SEQ ID NO: 63046 - RNA, 22 nt, Human
cagagagagucugucccugaag

SEQ ID NO: 63047 - RNA, 16 nt, Human
cagagaggacagaggc

SEQ ID NO: 63048 - RNA, 22 nt, Human
cagagauaccauugcuaaaauu

SEQ ID NO: 63049 - RNA, 22 nt, Human
cagagcaccugcucauugccag

SEQ ID NO: 63050 - RNA, 22 nt, Human
cagagcagaagcgguccucaca

SEQ ID NO: 63051 - RNA, 22 nt, Human
cagagcaguagaaaacagccuu

SEQ ID NO: 63052 - RNA, 22 nt, Human
cagagcagugaggaguugugua

SEQ ID NO: 63053 - RNA, 20 nt, Human
cagagcagugcccaggcggc

SEQ ID NO: 63054 - RNA, 22 nt, Human
cagagcaugucaacuagcuuua

SEQ ID NO: 63055 - RNA, 22 nt, Human
cagagcauugagggucugccaa

SEQ ID NO: 63056 - RNA, 22 nt, Human
cagagccacagccuccagauuu

SEQ ID NO: 63057 - RNA, 22 nt, Human
cagagccacugucugccaggca

SEQ ID NO: 63058 - RNA, 22 nt, Human
cagagccagggcuaggaacugg

SEQ ID NO: 63059 - RNA, 22 nt, Human
cagagccaggucuaggagucuc

SEQ ID NO: 63060 - RNA, 22 nt, Human
cagagccaugguaugggcuugu

SEQ ID NO: 63061 - RNA, 22 nt, Human
cagagcccauggcacaugugga

SEQ ID NO: 63062 - RNA, 22 nt, Human
cagagccucaucauccacucca

SEQ ID NO: 63063 - RNA, 22 nt, Human
cagagccugcugccuucugaag

SEQ ID NO: 63064 - RNA, 22 nt, Human
cagagccuuuguguccacauuu

SEQ ID NO: 63065 - RNA, 22 nt, Human
cagagcucagagcugccaggca

SEQ ID NO: 63066 - RNA, 18 nt, Human
cagagcuccuggaugcag

SEQ ID NO: 63067 - RNA, 22 nt, Human
cagagcucugacagcuacagcc

SEQ ID NO: 63068 - RNA, 22 nt, Human
cagagacacuuaacaggaaugg

SEQ ID NO: 63069 - RNA, 22 nt, Human
cagagacaggaaucagcugcag

SEQ ID NO: 63070 - RNA, 22 nt, Human
cagagacaggagugcucccagu

SEQ ID NO: 63071 - RNA, 22 nt, Human
cagagacagggcagggagugug

SEQ ID NO: 63072 - RNA, 20 nt, Human
cagagaccaggccagguguc

SEQ ID NO: 63073 - RNA, 22 nt, Human
cagagacccuaggcaggugaca

SEQ ID NO: 63074 - RNA, 22 nt, Human
cagagagcuuagugugcugcau

SEQ ID NO: 63075 - RNA, 22 nt, Human
cagagagggagcaguagucucu

SEQ ID NO: 63076 - RNA, 22 nt, Human
cagagauggggccagcugcucc

SEQ ID NO: 63077 - RNA, 22 nt, Human
cagagaugggucgcagagaugg

SEQ ID NO: 63078 - RNA, 22 nt, Human
cagagcagcagagcuuccaugg

SEQ ID NO: 63079 - RNA, 22 nt, Human
cagagcaggcccacugcccucc

SEQ ID NO: 63080 - RNA, 22 nt, Human
cagagcagggugcaccuugggc

SEQ ID NO: 63081 - RNA, 22 nt, Human
cagagcagucuggagauccagc

SEQ ID NO: 63082 - RNA, 19 nt, Human
cagagcagugguuccugaa

SEQ ID NO: 63083 - RNA, 22 nt, Human
cagagcaugaauaaaaguuaca

SEQ ID NO: 63084 - RNA, 22 nt, Human
cagagccaaaaccguaacagcc

SEQ ID NO: 63085 - RNA, 20 nt, Human
cagagccaagagcagcaucu

SEQ ID NO: 63086 - RNA, 22 nt, Human
cagagccacugcauuuuacagc

SEQ ID NO: 63087 - RNA, 22 nt, Human
cagagccagagaccugcugugc

SEQ ID NO: 63088 - RNA, 19 nt, Human
cagagccaggccuuuggcc

SEQ ID NO: 63089 - RNA, 22 nt, Human
cagagccaggguugcaccccug

SEQ ID NO: 63090 - RNA, 22 nt, Human
cagagccaggucuugaacucag

SEQ ID NO: 63091 - RNA, 22 nt, Human
cagagccaggugguguuggggc

SEQ ID NO: 63092 - RNA, 22 nt, Human
cagagccaucccagccuguggu

SEQ ID NO: 63093 - RNA, 22 nt, Human
cagagccauuauggagacuugc

SEQ ID NO: 63094 - RNA, 20 nt, Human
cagagcccacuuucuuauca

SEQ ID NO: 63095 - RNA, 22 nt, Human
cagcuguuccugguugguggga

SEQ ID NO: 63096 - RNA, 22 nt, Human
cagcuguuucaguagcguuacu

SEQ ID NO: 63097 - RNA, 22 nt, Human
cagcuuagauggauacaaaggu

SEQ ID NO: 63098 - RNA, 22 nt, Human
cagcuucaacugcacagucaac

SEQ ID NO: 63099 - RNA, 22 nt, Human
cagcuucagacccugggcugca

SEQ ID NO: 63100 - RNA, 22 nt, Human
cagcuucaugacaaacaguuuu

SEQ ID NO: 63101 - RNA, 22 nt, Human
cagcuucccagcucacucauaa

SEQ ID NO: 63102 - RNA, 22 nt, Human
cagcuucuauuuaucuuugugu

SEQ ID NO: 63103 - RNA, 22 nt, Human
cagcuucuggcguggagccuga

SEQ ID NO: 63104 - RNA, 22 nt, Human
cagcuucuguuuauugugugcc

SEQ ID NO: 63105 - RNA, 22 nt, Human
cagcuucuuagucuuuccuugu

SEQ ID NO: 63106 - RNA, 22 nt, Human
cggggccuagcugcacacccuc

SEQ ID NO: 63107 - RNA, 22 nt, Human
cggggcuuggaccagccacccc

SEQ ID NO: 63108 - RNA, 22 nt, Human
cgggggcacccacaaaugagga

SEQ ID NO: 63109 - RNA, 21 nt, Human
cgggugaguugagcaggacac

SEQ ID NO: 63110 - RNA, 22 nt, Human
cgggugguuuucaucaagaugg

SEQ ID NO: 63111 - RNA, 22 nt, Human
cgguccaggauggcuggcaagc

SEQ ID NO: 63112 - RNA, 22 nt, Human
cggucguaguucuucagcaggu

SEQ ID NO: 63113 - RNA, 19 nt, Human
cgguggcuugcagggaggu

SEQ ID NO: 63114 - RNA, 22 nt, Human
cguaggauacucagugcucauu

SEQ ID NO: 63115 - RNA, 22 nt, Human
cguagguggcucagcaccuggg

SEQ ID NO: 63116 - RNA, 22 nt, Human
cguauuucaucuccuuucugcu

SEQ ID NO: 63117 - RNA, 22 nt, Human
cgucaggguugagcagguagau

SEQ ID NO: 63118 - RNA, 22 nt, Human
cgucauuuguaaaugaucaaga

SEQ ID NO: 63119 - RNA, 22 nt, Human
cguccagggcgggcuccccuca

SEQ ID NO: 63120 - RNA, 22 nt, Human
cguccauauucaugagcugagu

SEQ ID NO: 63121 - RNA, 22 nt, Human
cgucccagcagauaaaugagga

SEQ ID NO: 63122 - RNA, 20 nt, Human
cguccccuugagcagguccc

SEQ ID NO: 63123 - RNA, 22 nt, Human
cguccucagaggccauccgaaa

SEQ ID NO: 63124 - RNA, 22 nt, Human
cguccuuacagagggucacagc

SEQ ID NO: 63125 - RNA, 22 nt, Human
cguccuuugaauugaggucuuu

SEQ ID NO: 63126 - RNA, 22 nt, Human
cgucuaggccgugcccugaggu

SEQ ID NO: 63127 - RNA, 22 nt, Human
cgucuucacauccuucccaugg

SEQ ID NO: 63128 - RNA, 22 nt, Human
cgugagcaaaauggacacuccc

SEQ ID NO: 63129 - RNA, 17 nt, Human
cgugagcagcaggugcc

SEQ ID NO: 63130 - RNA, 22 nt, Human
cgugauuggcuucugcauugga

SEQ ID NO: 63131 - RNA, 22 nt, Human
cgugcaaauauaugugugauga

SEQ ID NO: 63132 - RNA, 22 nt, Human
cgugcaugauauaugaguuguu

SEQ ID NO: 63133 - RNA, 22 nt, Human
cgugcccugcgcaagugcugcu

SEQ ID NO: 63134 - RNA, 22 nt, Human
cgugcggccucggggcccggcu

SEQ ID NO: 63135 - RNA, 22 nt, Human
cgugcgguuagacagguaccgg

SEQ ID NO: 63136 - RNA, 23 nt, Human
cgugcuuccaggcccagcugagc

SEQ ID NO: 63137 - RNA, 22 nt, Human
cguggcucugggcuccuuugcc

SEQ ID NO: 63138 - RNA, 22 nt, Human
cguggcuggggcgacuccacgg

SEQ ID NO: 63139 - RNA, 22 nt, Human
cgugggaguggugggugcucag

SEQ ID NO: 63140 - RNA, 22 nt, Human
cgugggcugcgcccaguucuuc

SEQ ID NO: 63141 - RNA, 22 nt, Human
cguggggcggguggacacuugc

SEQ ID NO: 63142 - RNA, 22 nt, Human
cgugggucgggacuccgccucg

SEQ ID NO: 63143 - RNA, 22 nt, Human
cguggucucccacagaaagaag

SEQ ID NO: 63144 - RNA, 22 nt, Human
cguguacacgcacacguguccu

SEQ ID NO: 63145 - RNA, 20 nt, Human
cguguccuuggcgggagagc

SEQ ID NO: 63146 - RNA, 22 nt, Human
cgugugcgcacaccuguuucca

SEQ ID NO: 63147 - RNA, 17 nt, Human
cgugugcuugugugcac

SEQ ID NO: 63148 - RNA, 22 nt, Human
cguguguguaccugcgcauuua

SEQ ID NO: 63149 - RNA, 22 nt, Human
cguucuuuucauauuuacaugg

SEQ ID NO: 63150 - RNA, 22 nt, Human
cguuguuugagauuuucagaau

SEQ ID NO: 63151 - RNA, 22 nt, Human
cguuugaaagccuuuguacacu

SEQ ID NO: 63152 - RNA, 22 nt, Human
cguuuucuucacuuugcaaguu

SEQ ID NO: 63153 - RNA, 22 nt, Human
cuaaaauguuuggggcagaacc

SEQ ID NO: 63154 - RNA, 22 nt, Human
cuaaacacuauguaagcaagaa

SEQ ID NO: 63155 - RNA, 22 nt, Human
cuaaacaucuugcaaugcacag

SEQ ID NO: 63156 - RNA, 22 nt, Human
cuaaacauggcuuagaacacuc

SEQ ID NO: 63157 - RNA, 22 nt, Human
cuaaaccuuugugcuugcaauu

SEQ ID NO: 63158 - RNA, 18 nt, Human
cuaaacugcaccuaauga

SEQ ID NO: 63159 - RNA, 22 nt, Human
cuaaagagaguucaagacuccu

SEQ ID NO: 63160 - RNA, 22 nt, Human
cuaaagauaaggaaaguauccu

SEQ ID NO: 63161 - RNA, 22 nt, Human
cuaaagcucaacaggcacuauu

SEQ ID NO: 63162 - RNA, 22 nt, Human
cuaaauaaucccucuggucuua

SEQ ID NO: 63163 - RNA, 22 nt, Human
cuaaaucaggccuuacagcuuc

SEQ ID NO: 63164 - RNA, 22 nt, Human
cuaaaugcccuacaaugacugg

SEQ ID NO: 63165 - RNA, 22 nt, Human
cuaaaugucucagagggagaca

SEQ ID NO: 63166 - RNA, 22 nt, Human
cuaacauuuauugagcacuuag

SEQ ID NO: 63167 - RNA, 22 nt, Human
cuaaccuguugaaggaauugcu

SEQ ID NO: 63168 - RNA, 22 nt, Human
cuaacgaaauaccucagacuuu

SEQ ID NO: 63169 - RNA, 22 nt, Human
cuaacugucaugcacauguguu

SEQ ID NO: 63170 - RNA, 22 nt, Human
cuaacuuuauuugcuaaguaga

SEQ ID NO: 63171 - RNA, 22 nt, Human
cuaacuuuuacagucauguugc

SEQ ID NO: 63172 - RNA, 22 nt, Human
cuaagaaaauagaagcaugcua

SEQ ID NO: 63173 - RNA, 22 nt, Human
cuaagaagucaggggacagagg

SEQ ID NO: 63174 - RNA, 22 nt, Human
cuaagacucugcaaaucagcuu

SEQ ID NO: 63175 - RNA, 20 nt, Human
cuaagagguccuuccacauc

SEQ ID NO: 63176 - RNA, 22 nt, Human
cuaagcacaaugcuuugaguau

SEQ ID NO: 63177 - RNA, 22 nt, Human
cuaaggaaaaggauauauaugu

SEQ ID NO: 63178 - RNA, 22 nt, Human
cuaaggaagugacagugggauu

SEQ ID NO: 63179 - RNA, 22 nt, Human
cuaaggaauuggagcauguguu

SEQ ID NO: 63180 - RNA, 17 nt, Human
cuaagggcccacucuuc

SEQ ID NO: 63181 - RNA, 22 nt, Human
cuaagguuggcaguggaauugg

SEQ ID NO: 63182 - RNA, 22 nt, Human
cuaagucauggaaagugugugu

SEQ ID NO: 63183 - RNA, 22 nt, Human
cuaauagagcuucggaacucug

SEQ ID NO: 63184 - RNA, 22 nt, Human
cuaaucugugaaauagguauga

SEQ ID NO: 63185 - RNA, 22 nt, Human
cuaauguggacucuaucaaagu

SEQ ID NO: 63186 - RNA, 20 nt, Human
cuaauuacagauuuuggaca

SEQ ID NO: 63187 - RNA, 22 nt, Human
cuaauuguaagcuccuugaggg

SEQ ID NO: 63188 - RNA, 22 nt, Human
cuaauuuaaugaaugagucuua

SEQ ID NO: 63189 - RNA, 22 nt, Human
cuaauuuucccaaggccuucua

SEQ ID NO: 63190 - RNA, 22 nt, Human
cuacaaauauaaaacacagaua

SEQ ID NO: 63191 - RNA, 22 nt, Human
cuacaaauauguuaagguguuu

SEQ ID NO: 63192 - RNA, 22 nt, Human
cuacaacaccaggcacggagug

SEQ ID NO: 63193 - RNA, 22 nt, Human
cuacaccuugaucuaacauuuu

SEQ ID NO: 63194 - RNA, 22 nt, Human
cuacacuugcaugagucuugaa

SEQ ID NO: 63195 - RNA, 20 nt, Human
cuacacuuggcaccuggcau

SEQ ID NO: 63196 - RNA, 22 nt, Human
cuacacuuguucgacugcagga

SEQ ID NO: 63197 - RNA, 22 nt, Human
cuacacuuugguugacuuugug

SEQ ID NO: 63198 - RNA, 22 nt, Human
cuacagaaaccuuuuucauaca

SEQ ID NO: 63199 - RNA, 21 nt, Human
cuacagaagcucuccuaucca

SEQ ID NO: 63200 - RNA, 22 nt, Human
cuacaggaguaaaauaauuuca

SEQ ID NO: 63201 - RNA, 22 nt, Human
cuacaguacuggaugcucagcc

SEQ ID NO: 63202 - RNA, 22 nt, Human
cuacaguagagaggauguagaa

SEQ ID NO: 63203 - RNA, 22 nt, Human
cuacaguagaguaggccucuga

SEQ ID NO: 63204 - RNA, 22 nt, Human
cuauggcuguguucaugcuaca

SEQ ID NO: 63205 - RNA, 22 nt, Human
cuauuacaaucugcuacuauga

SEQ ID NO: 63206 - RNA, 22 nt, Human
cuauuacaauucugcaaggagu

SEQ ID NO: 63207 - RNA, 22 nt, Human
cuauuagacacaauuagugauu

SEQ ID NO: 63208 - RNA, 22 nt, Human
cuauuagguaugugguugcuau

SEQ ID NO: 63209 - RNA, 22 nt, Human
cuauuauuaauguggggcuuug

SEQ ID NO: 63210 - RNA, 22 nt, Human
cuauuauuauguuaacuggacu

SEQ ID NO: 63211 - RNA, 22 nt, Human
cuauucaacuugacuguuucac

SEQ ID NO: 63212 - RNA, 22 nt, Human
cuauucuagauuacaguauaaa

SEQ ID NO: 63213 - RNA, 22 nt, Human
cuauucuagucugucaugucca

SEQ ID NO: 63214 - RNA, 22 nt, Human
cuauugaggacauaaggacucu

SEQ ID NO: 63215 - RNA, 22 nt, Human
cuauugcuuuugugugcuccca

SEQ ID NO: 63216 - RNA, 22 nt, Human
cuauuguaguaagggaaagcca

SEQ ID NO: 63217 - RNA, 22 nt, Human
cuauuucagcagaagccggaga

SEQ ID NO: 63218 - RNA, 22 nt, Human
cuauuucauugugcugagucug

SEQ ID NO: 63219 - RNA, 22 nt, Human
cuauuugaaaccaagaaugccg

SEQ ID NO: 63220 - RNA, 22 nt, Human
cuauuuguaaagugccuggugu

SEQ ID NO: 63221 - RNA, 22 nt, Human
cuauuuguaagagccccacacc

SEQ ID NO: 63222 - RNA, 22 nt, Human
cuauuuuccgcagcaggaagua

SEQ ID NO: 63223 - RNA, 22 nt, Human
caggcggccaugaucuggcagg

SEQ ID NO: 63224 - RNA, 22 nt, Human
caggcgggacgugggaggauca

SEQ ID NO: 63225 - RNA, 22 nt, Human
caggcucaagcccugcuuauau

SEQ ID NO: 63226 - RNA, 22 nt, Human
caggcucacuguaaggucagcu

SEQ ID NO: 63227 - RNA, 22 nt, Human
caggcucacuuucucagucaca

SEQ ID NO: 63228 - RNA, 22 nt, Human
caggcucagccacaggggaagg

SEQ ID NO: 63229 - RNA, 22 nt, Human
caggcucagcucuggccagugc

SEQ ID NO: 63230 - RNA, 22 nt, Human
caggcuccaagcccucugaugu

SEQ ID NO: 63231 - RNA, 22 nt, Human
caggcuccacuguaggcagcuc

SEQ ID NO: 63232 - RNA, 22 nt, Human
caggcucccgaaaucacccaug

SEQ ID NO: 63233 - RNA, 23 nt, Human
caggcucccggaccaggauccgc

SEQ ID NO: 63234 - RNA, 22 nt, Human
caggcucccuaagucagcagcc

SEQ ID NO: 63235 - RNA, 20 nt, Human
caggcuccgcaggacuaggg

SEQ ID NO: 63236 - RNA, 17 nt, Human
caggcuccuuccagauu

SEQ ID NO: 63237 - RNA, 22 nt, Human
caggcuccuucccagggauggu

SEQ ID NO: 63238 - RNA, 22 nt, Human
caggcucggaagugcuggcuuu

SEQ ID NO: 63239 - RNA, 22 nt, Human
caggcucgguccaguggcaccc

SEQ ID NO: 63240 - RNA, 22 nt, Human
caggcugacaacugagcauuuu

SEQ ID NO: 63241 - RNA, 22 nt, Human
caggcugauaggguccaaaguu

SEQ ID NO: 63242 - RNA, 22 nt, Human
caggcugaucagggcugggaug

SEQ ID NO: 63243 - RNA, 22 nt, Human
caggcugcagaggccuuucaug

SEQ ID NO: 63244 - RNA, 22 nt, Human
caggcugcauggagggguacag

SEQ ID NO: 63245 - RNA, 22 nt, Human
caggcugccaaggcuggggagg

SEQ ID NO: 63246 - RNA, 22 nt, Human
caggcugccgugggguccaggc

SEQ ID NO: 63247 - RNA, 22 nt, Human
caggcugccuggaagaggacug

SEQ ID NO: 63248 - RNA, 22 nt, Human
caggcugcugacaggcuuggag

SEQ ID NO: 63249 - RNA, 22 nt, Human
caggcugcugccuagaaugaca

SEQ ID NO: 63250 - RNA, 22 nt, Human
caggcuggagugaguguagugg

SEQ ID NO: 63251 - RNA, 22 nt, Human
caggcuggagugcaguugugca

SEQ ID NO: 63252 - RNA, 22 nt, Human
caggcugggaacgccacccgcu

SEQ ID NO: 63253 - RNA, 22 nt, Human
caggcugggcagccuccccggc

SEQ ID NO: 63254 - RNA, 22 nt, Human
caggcuggucccagagcauugc

SEQ ID NO: 63255 - RNA, 22 nt, Human
caggcuguguuccuggaacccc

SEQ ID NO: 63256 - RNA, 22 nt, Human
caggcuuaggagucagccugcu

SEQ ID NO: 63257 - RNA, 22 nt, Human
caggcuucgcucugugggcagg

SEQ ID NO: 63258 - RNA, 22 nt, Human
caggcuugauuauucagacaau

SEQ ID NO: 63259 - RNA, 22 nt, Human
caggcuuggagggcaguggcau

SEQ ID NO: 63260 - RNA, 22 nt, Human
caggcuugguuggggcgaggga

SEQ ID NO: 63261 - RNA, 22 nt, Human
caggcuuucaggacagcgagcc

SEQ ID NO: 63262 - RNA, 22 nt, Human
cagggaacaagaugagaaugga

SEQ ID NO: 63263 - RNA, 22 nt, Human
cagggaauccauggucauaagg

SEQ ID NO: 63264 - RNA, 22 nt, Human
cagggacagacagauauauuug

SEQ ID NO: 63265 - RNA, 22 nt, Human
cagggacagagacugcaccuug

SEQ ID NO: 63266 - RNA, 22 nt, Human
cagggacagcgggacucugaca

SEQ ID NO: 63267 - RNA, 22 nt, Human
cagggacauugguggccagguu

SEQ ID NO: 63268 - RNA, 22 nt, Human
cagggacauuuccaagagaauu

SEQ ID NO: 63269 - RNA, 22 nt, Human
cagggacugagauccagacugu

SEQ ID NO: 63270 - RNA, 22 nt, Human
cagggagaaaucuccaggaggu

SEQ ID NO: 63271 - RNA, 22 nt, Human
cagggagaggccucuguugccc

SEQ ID NO: 63272 - RNA, 22 nt, Human
cagggagaggcugguggaguaa

SEQ ID NO: 63273 - RNA, 22 nt, Human
cagggagcagcgcuggggccuc

SEQ ID NO: 63274 - RNA, 22 nt, Human
cagggagccccaauuccaugcc

SEQ ID NO: 63275 - RNA, 22 nt, Human
cagggagccugaauguuccagg

SEQ ID NO: 63276 - RNA, 22 nt, Human
cagggagcuggaguuggaguac

SEQ ID NO: 63277 - RNA, 22 nt, Human
cagggagcuggcuggcugugcc

SEQ ID NO: 63278 - RNA, 23 nt, Human
cagggaggagauacuguguaucu

SEQ ID NO: 63279 - RNA, 22 nt, Human
cagggaggcugucuuaugccug

SEQ ID NO: 63280 - RNA, 22 nt, Human
cagggaugaccagagggaugug

SEQ ID NO: 63281 - RNA, 22 nt, Human
cagggcaaguuugagauuauuu

SEQ ID NO: 63282 - RNA, 22 nt, Human
cagggcacaguuauggaggugg

SEQ ID NO: 63283 - RNA, 22 nt, Human
cagggcacggagaagucacccc

SEQ ID NO: 63284 - RNA, 22 nt, Human
cagggcagagccaggauuucaa

SEQ ID NO: 63285 - RNA, 22 nt, Human
cagggcagcuuccuuuguuagg

SEQ ID NO: 63286 - RNA, 22 nt, Human
cagggcagggccacacccccug

SEQ ID NO: 63287 - RNA, 22 nt, Human
cagggcaguaccgcccucuggc

SEQ ID NO: 63288 - RNA, 22 nt, Human
cagggcaguuugugccuaugag

SEQ ID NO: 63289 - RNA, 22 nt, Human
cagggccacccucugcugggug

SEQ ID NO: 63290 - RNA, 22 nt, Human
cagggccaccguguuugcugcu

SEQ ID NO: 63291 - RNA, 22 nt, Human
cagggccagcgucucgggcuau

SEQ ID NO: 63292 - RNA, 23 nt, Human
cagggccaggcagcagcugucac

SEQ ID NO: 63293 - RNA, 22 nt, Human
cagggccauuggaacaaagagg

SEQ ID NO: 63294 - RNA, 22 nt, Human
cagggccauuggcguggcuguc

SEQ ID NO: 63295 - RNA, 22 nt, Human
cagggcccaagacacaaugagg

SEQ ID NO: 63296 - RNA, 22 nt, Human
cagggcccauggcucagguagg

SEQ ID NO: 63297 - RNA, 22 nt, Human
cagggcccugcucaauuucucc

SEQ ID NO: 63298 - RNA, 22 nt, Human
cagggccucgaagccucugggc

SEQ ID NO: 63299 - RNA, 22 nt, Human
cagggccucugugggcucucuc

SEQ ID NO: 63300 - RNA, 22 nt, Human
cagggccugagggcugcucugc

SEQ ID NO: 63301 - RNA, 22 nt, Human
cagggccuguacaagucccacc

SEQ ID NO: 63302 - RNA, 22 nt, Human
cagggccuucguaaguguccgg

SEQ ID NO: 63303 - RNA, 22 nt, Human
cagggcucaggcucugggauuc

SEQ ID NO: 63304 - RNA, 22 nt, Human
cagggcuccaugcagggacucc

SEQ ID NO: 63305 - RNA, 22 nt, Human
cagggcucccaaauaucucuuc

SEQ ID NO: 63306 - RNA, 22 nt, Human
cagggcuccccgcaccgcagcc

SEQ ID NO: 63307 - RNA, 22 nt, Human
cagggcucccucuggcucccag

SEQ ID NO: 63308 - RNA, 22 nt, Human
cagggcucccuugcaaggaggg

SEQ ID NO: 63309 - RNA, 22 nt, Human
cagggcucuucaucacacagua

SEQ ID NO: 63310 - RNA, 22 nt, Human
cagggcucuuccggagcaggga

SEQ ID NO: 63311 - RNA, 22 nt, Human
cagggcugagucauauagccuu

SEQ ID NO: 63312 - RNA, 22 nt, Human
cagggcuggauccuccagacuc

SEQ ID NO: 63313 - RNA, 22 nt, Human
accagagagccuaggcugggca

SEQ ID NO: 63314 - RNA, 22 nt, Human
acagaugaaacccagcuaguug

SEQ ID NO: 63315 - RNA, 22 nt, Human
acagaugaaucugugauugcug

SEQ ID NO: 63316 - RNA, 20 nt, Human
acagaugaggaaaaugaagu

SEQ ID NO: 63317 - RNA, 22 nt, Human
acagaugaggcuggcgagggca

SEQ ID NO: 63318 - RNA, 22 nt, Human
acagaugaguuaaagcagagug

SEQ ID NO: 63319 - RNA, 22 nt, Human
acagaugaguuagaauaggcag

SEQ ID NO: 63320 - RNA, 22 nt, Human
acagauggaauguguuauggga

SEQ ID NO: 63321 - RNA, 19 nt, Human
acagauggaggaaucuggg

SEQ ID NO: 63322 - RNA, 22 nt, Human
acagauggagguuauuaugaac

SEQ ID NO: 63323 - RNA, 22 nt, Human
acagauggcaccuuuuugcugu

SEQ ID NO: 63324 - RNA, 22 nt, Human
acagauggcacuuuuuaggacu

SEQ ID NO: 63325 - RNA, 20 nt, Human
acagauggcaguuauuacau

SEQ ID NO: 63326 - RNA, 22 nt, Human
acagaugguacuaaacccauau

SEQ ID NO: 63327 - RNA, 22 nt, Human
acagaugguuauugucauuucu

SEQ ID NO: 63328 - RNA, 22 nt, Human
acagauguugcuugucauucuc

SEQ ID NO: 63329 - RNA, 22 nt, Human
acagauugaucuugagaauuau

SEQ ID NO: 63330 - RNA, 22 nt, Human
acagauuuaggacuguagcgau

SEQ ID NO: 63331 - RNA, 22 nt, Human
acagcaaaggacgaacacucug

SEQ ID NO: 63332 - RNA, 22 nt, Human
acagcaaaugguuuucugucug

SEQ ID NO: 63333 - RNA, 22 nt, Human
acagcaacuccugcuucugagu

SEQ ID NO: 63334 - RNA, 21 nt, Human
acagcaagccuucacaugagu

SEQ ID NO: 63335 - RNA, 22 nt, Human
acagcaauaggaaauacuugca

SEQ ID NO: 63336 - RNA, 19 nt, Human
acagcacagaaauauuuca

SEQ ID NO: 63337 - RNA, 22 nt, Human
acagcacuggucccgcaagccu

SEQ ID NO: 63338 - RNA, 22 nt, Human
acagcacuuuacuucucaguga

SEQ ID NO: 63339 - RNA, 22 nt, Human
acagcagacacaggcacgcugu

SEQ ID NO: 63340 - RNA, 22 nt, Human
acagcagagcaccagggccacu

SEQ ID NO: 63341 - RNA, 22 nt, Human
acagcagagccaguggcucuag

SEQ ID NO: 63342 - RNA, 22 nt, Human
acagcagaguugaguaguugca

SEQ ID NO: 63343 - RNA, 20 nt, Human
acagcagauaccacaacuau

SEQ ID NO: 63344 - RNA, 22 nt, Human
acagcagaucuguggagcuuau

SEQ ID NO: 63345 - RNA, 22 nt, Human
acagcagauuucccugggcucc

SEQ ID NO: 63346 - RNA, 22 nt, Human
acagcagcacuauugacauuuu

SEQ ID NO: 63347 - RNA, 22 nt, Human
acagcagcauaaacugacuaag

SEQ ID NO: 63348 - RNA, 22 nt, Human
acagcagcuaaaggugucuccu

SEQ ID NO: 63349 - RNA, 22 nt, Human
acagcagcuggguucccaccau

SEQ ID NO: 63350 - RNA, 22 nt, Human
acagcaggaagcuggagggaaa

SEQ ID NO: 63351 - RNA, 22 nt, Human
acagcaggaauuaacauauaag

SEQ ID NO: 63352 - RNA, 22 nt, Human
acagcagggucacauucccucu

SEQ ID NO: 63353 - RNA, 22 nt, Human
acagcagguuacaguggcacag

SEQ ID NO: 63354 - RNA, 22 nt, Human
acagcagguuuuaacuuugaag

SEQ ID NO: 63355 - RNA, 22 nt, Human
acagcagucagugaauauuuaa

SEQ ID NO: 63356 - RNA, 22 nt, Human
acagcagucuuaacacauugca

SEQ ID NO: 63357 - RNA, 22 nt, Human
acagcagugucugguacugagu

SEQ ID NO: 63358 - RNA, 22 nt, Human
acagcaguucaggccgcagagg

SEQ ID NO: 63359 - RNA, 21 nt, Human
acagcauguuuguguguuugc

SEQ ID NO: 63360 - RNA, 22 nt, Human
acagccaacgucuuucuuacuu

SEQ ID NO: 63361 - RNA, 20 nt, Human
acagccagaggaggcagaca

SEQ ID NO: 63362 - RNA, 22 nt, Human
acagccagcagagcuguuuccu

SEQ ID NO: 63363 - RNA, 22 nt, Human
acagccaggaauucuggagaag

SEQ ID NO: 63364 - RNA, 22 nt, Human
acagccaggagccaugggcagg

SEQ ID NO: 63365 - RNA, 22 nt, Human
acagccagggacauacaauggu

SEQ ID NO: 63366 - RNA, 23 nt, Human
acagccaguucaccucuccuugg

SEQ ID NO: 63367 - RNA, 23 nt, Human
acagccccaugcagguguguuug

SEQ ID NO: 63368 - RNA, 22 nt, Human
acagcccguucucuggcacaca

SEQ ID NO: 63369 - RNA, 22 nt, Human
acagccugagaguggagcuggc

SEQ ID NO: 63370 - RNA, 22 nt, Human
acagccuggccugaguuaaggc

SEQ ID NO: 63371 - RNA, 22 nt, Human
acagccuuauucuuuaguuuac

SEQ ID NO: 63372 - RNA, 22 nt, Human
acagccuugcuuauuugucucu

SEQ ID NO: 63373 - RNA, 21 nt, Human
acagccuugugauggagacag

SEQ ID NO: 63374 - RNA, 22 nt, Human
acagcuaacuuaaacuaaccua

SEQ ID NO: 63375 - RNA, 22 nt, Human
acagcuaagggcacaggucacc

SEQ ID NO: 63376 - RNA, 22 nt, Human
acagcuaggaaauggaagaacu

SEQ ID NO: 63377 - RNA, 22 nt, Human
acagcuaggucuucagcacuuu

SEQ ID NO: 63378 - RNA, 22 nt, Human
acagcuccuacugaagccaugu

SEQ ID NO: 63379 - RNA, 22 nt, Human
acagcucugagauauuacuauu

SEQ ID NO: 63380 - RNA, 22 nt, Human
acagcugcacuugaagcagguu

SEQ ID NO: 63381 - RNA, 22 nt, Human
acagcugcauucuuaacaggaa

SEQ ID NO: 63382 - RNA, 22 nt, Human
acagcugcucuauaucucagcc

SEQ ID NO: 63383 - RNA, 22 nt, Human
acagcugcuguuuuugaaggac

SEQ ID NO: 63384 - RNA, 22 nt, Human
acagcugcuuucucuuacuaug

SEQ ID NO: 63385 - RNA, 22 nt, Human
acagcuggaggucugugagcac

SEQ ID NO: 63386 - RNA, 22 nt, Human
acagcuggaguguuggugaggu

SEQ ID NO: 63387 - RNA, 22 nt, Human
acagcuggccgaggcucaggga

SEQ ID NO: 63388 - RNA, 22 nt, Human
acagcugggaacucacacagca

SEQ ID NO: 63389 - RNA, 22 nt, Human
acagcugggaaucagcugggga

SEQ ID NO: 63390 - RNA, 22 nt, Human
acagcuguggccacuugcaucc

SEQ ID NO: 63391 - RNA, 22 nt, Human
acagcuguggggacucuugccc

SEQ ID NO: 63392 - RNA, 22 nt, Human
acagcuguggucuccuuagugu

SEQ ID NO: 63393 - RNA, 23 nt, Human
acagcuuccuggcauggagaacc

SEQ ID NO: 63394 - RNA, 23 nt, Human
acagcuugccaauuagccuuccg

SEQ ID NO: 63395 - RNA, 22 nt, Human
acagcuuguaucccaauggagc

SEQ ID NO: 63396 - RNA, 22 nt, Human
acagcuuuuaugggaccagcca

SEQ ID NO: 63397 - RNA, 22 nt, Human
acagcuuuugaaaaauuacugg

SEQ ID NO: 63398 - RNA, 22 nt, Human
acagcuuuuuacuaauagauug

SEQ ID NO: 63399 - RNA, 22 nt, Human
acaggaaauuggcauaucaguu

SEQ ID NO: 63400 - RNA, 22 nt, Human
acaggaaccaggcaggucgauu

SEQ ID NO: 63401 - RNA, 22 nt, Human
acaggaacccagaaacauuucu

SEQ ID NO: 63402 - RNA, 22 nt, Human
acaggaauuuccuaauauucga

SEQ ID NO: 63403 - RNA, 22 nt, Human
acaggacaaggggaagaagaua

SEQ ID NO: 63404 - RNA, 22 nt, Human
acaggacaggcugggcuagacu

SEQ ID NO: 63405 - RNA, 22 nt, Human
acaggacagggaauucgaaauu

SEQ ID NO: 63406 - RNA, 22 nt, Human
acaggacagucuaguaacagua

SEQ ID NO: 63407 - RNA, 22 nt, Human
acaggaguagggcugguggaga

SEQ ID NO: 63408 - RNA, 22 nt, Human
acaggagugaaucuggcacuua

SEQ ID NO: 63409 - RNA, 22 nt, Human
acaggaguggcucuaccagacc

SEQ ID NO: 63410 - RNA, 22 nt, Human
acaggaguuaaggcugaguuga

SEQ ID NO: 63411 - RNA, 22 nt, Human
acaggauggagauaauagaaaa

SEQ ID NO: 63412 - RNA, 22 nt, Human
acaggauuaguggauuugucuu

SEQ ID NO: 63413 - RNA, 22 nt, Human
acaggcaaagggucaguagcag

SEQ ID NO: 63414 - RNA, 22 nt, Human
acaggcaacuucaaaucucacu

SEQ ID NO: 63415 - RNA, 22 nt, Human
acaggcacaacugaguagacuc

SEQ ID NO: 63416 - RNA, 22 nt, Human
acaggcacucucauuaaaauag

SEQ ID NO: 63417 - RNA, 22 nt, Human
acaggcagauuaaggguaggca

SEQ ID NO: 63418 - RNA, 22 nt, Human
acaggcagcacuaaucucuggu

SEQ ID NO: 63419 - RNA, 22 nt, Human
acaggcagggaccuuggcuaag

SEQ ID NO: 63420 - RNA, 22 nt, Human
acaggcagguugagaaacauuu

SEQ ID NO: 63421 - RNA, 22 nt, Human
acaggcauccaggacuaggccu

SEQ ID NO: 63422 - RNA, 17 nt, Human
acagcaggcccggaggg

SEQ ID NO: 63423 - RNA, 22 nt, Human
acagcagggaauaugggaauug

SEQ ID NO: 63424 - RNA, 21 nt, Human
acagcagggcuggcaugacag

SEQ ID NO: 63425 - RNA, 22 nt, Human
acagcagguuauuguuauggca

SEQ ID NO: 63426 - RNA, 18 nt, Human
acagcagguuucauucuu

SEQ ID NO: 63427 - RNA, 22 nt, Human
acagcaguggauuagaggaugg

SEQ ID NO: 63428 - RNA, 22 nt, Human
acagcaguggguugccaguggg

SEQ ID NO: 63429 - RNA, 22 nt, Human
acagcaguuuagaggacagcca

SEQ ID NO: 63430 - RNA, 22 nt, Human
acagcaucauauaguggaagaa

SEQ ID NO: 63431 - RNA, 22 nt, Human
acagcauccuucuaaaguagcu

SEQ ID NO: 63432 - RNA, 22 nt, Human
acagcaugagaguagcaaaagg

SEQ ID NO: 63433 - RNA, 22 nt, Human
acagcauggauaacaaggcacu

SEQ ID NO: 63434 - RNA, 22 nt, Human
acagcauucaauaaauaauaac

SEQ ID NO: 63435 - RNA, 22 nt, Human
acagcauugagagcuaaauuua

SEQ ID NO: 63436 - RNA, 22 nt, Human
acagccaaggaauuaggaaggg

SEQ ID NO: 63437 - RNA, 22 nt, Human
acagccacucaaagggccgaag

SEQ ID NO: 63438 - RNA, 22 nt, Human
acagccagaagucaggguggga

SEQ ID NO: 63439 - RNA, 22 nt, Human
acagccagaggagccaggcugg

SEQ ID NO: 63440 - RNA, 23 nt, Human
acagccaggaugggagcagaagc

SEQ ID NO: 63441 - RNA, 22 nt, Human
acagccagggucucaggaggcg

SEQ ID NO: 63442 - RNA, 22 nt, Human
acagccagucaucucagcaggg

SEQ ID NO: 63443 - RNA, 22 nt, Human
acagccagugacugcagacccu

SEQ ID NO: 63444 - RNA, 22 nt, Human
acagccauagaugcuuauguaa

SEQ ID NO: 63445 - RNA, 22 nt, Human
acagcccaggacuccagugggc

SEQ ID NO: 63446 - RNA, 22 nt, Human
acagcccgugucaucagcugcu

SEQ ID NO: 63447 - RNA, 22 nt, Human
acagccugcagccccaggucgc

SEQ ID NO: 63448 - RNA, 22 nt, Human
acagccugcugccugcuucuug

SEQ ID NO: 63449 - RNA, 22 nt, Human
acagccuguguaccagcuggga

SEQ ID NO: 63450 - RNA, 22 nt, Human
acagccuuauugcgagcaaggc

SEQ ID NO: 63451 - RNA, 22 nt, Human
acagcuauagacgauguauaga

SEQ ID NO: 63452 - RNA, 22 nt, Human
acagcucacucacagggcuagu

SEQ ID NO: 63453 - RNA, 22 nt, Human
acagcucagacaucacugcucu

SEQ ID NO: 63454 - RNA, 22 nt, Human
acagcucugcauggcaguuauu

SEQ ID NO: 63455 - RNA, 22 nt, Human
acagcucugguccuuuagagag

SEQ ID NO: 63456 - RNA, 22 nt, Human
acagcucuguugccagaucugc

SEQ ID NO: 63457 - RNA, 22 nt, Human
acagcugaucauuuugaagaau

SEQ ID NO: 63458 - RNA, 22 nt, Human
acagcugcaaauuguuagagga

SEQ ID NO: 63459 - RNA, 22 nt, Human
acagcugcacacugaacuuggu

SEQ ID NO: 63460 - RNA, 23 nt, Human
acagcugcaccuggccgccuggc

SEQ ID NO: 63461 - RNA, 22 nt, Human
acagcugcaugaugguccagau

SEQ ID NO: 63462 - RNA, 22 nt, Human
acagcugcugcuucucacuggg

SEQ ID NO: 63463 - RNA, 22 nt, Human
acagcuggagcccuauggcugg

SEQ ID NO: 63464 - RNA, 21 nt, Human
acagcuggccgcgcgggucgg

SEQ ID NO: 63465 - RNA, 22 nt, Human
acagcuggugaauguucucugu

SEQ ID NO: 63466 - RNA, 21 nt, Human
acagcuggugcagggcgggga

SEQ ID NO: 63467 - RNA, 22 nt, Human
acagcugugaaaauccacagga

SEQ ID NO: 63468 - RNA, 22 nt, Human
acagcugugagggucacuugua

SEQ ID NO: 63469 - RNA, 22 nt, Human
acagcugugauuucuaucauga

SEQ ID NO: 63470 - RNA, 22 nt, Human
acagcugugggcucugcauaua

SEQ ID NO: 63471 - RNA, 22 nt, Human
acagcuuagccagucaagcucu

SEQ ID NO: 63472 - RNA, 23 nt, Human
acagcuuccuacuuugcugcugc

SEQ ID NO: 63473 - RNA, 22 nt, Human
acagcuucuauuucucuguacu

SEQ ID NO: 63474 - RNA, 22 nt, Human
acagcuucuccucgaugucaug

SEQ ID NO: 63475 - RNA, 22 nt, Human
acagcuugcaugcagaggcacu

SEQ ID NO: 63476 - RNA, 22 nt, Human
acagcuugggaugcuuuauuuc

SEQ ID NO: 63477 - RNA, 22 nt, Human
acagcuuuaucucagggaucag

SEQ ID NO: 63478 - RNA, 22 nt, Human
acagcuuugggcaaugcuauga

SEQ ID NO: 63479 - RNA, 22 nt, Human
acaggaagaaagugcaguagau

SEQ ID NO: 63480 - RNA, 22 nt, Human
acaggaagcuggagacccuuga

SEQ ID NO: 63481 - RNA, 22 nt, Human
acaggacaaaaaucuggauggc

SEQ ID NO: 63482 - RNA, 22 nt, Human
acaggacaauuuauaaugggca

SEQ ID NO: 63483 - RNA, 22 nt, Human
acaggacagguaggauucgcag

SEQ ID NO: 63484 - RNA, 22 nt, Human
acaggacauggcuucugugacg

SEQ ID NO: 63485 - RNA, 22 nt, Human
acaggacauguaccaggugguc

SEQ ID NO: 63486 - RNA, 22 nt, Human
acaggacuagaugauaaaaugu

SEQ ID NO: 63487 - RNA, 22 nt, Human
acaggacuguggaaggaucucu

SEQ ID NO: 63488 - RNA, 22 nt, Human
acaggagaaaucuggucaaaag

SEQ ID NO: 63489 - RNA, 22 nt, Human
acaggagaauuaucuggaacaa

SEQ ID NO: 63490 - RNA, 21 nt, Human
acaggagaccgccuggcaguc

SEQ ID NO: 63491 - RNA, 20 nt, Human
acaggagaucugaggaaagg

SEQ ID NO: 63492 - RNA, 22 nt, Human
acaggaggagcagcugugugcc

SEQ ID NO: 63493 - RNA, 23 nt, Human
acaggaggggacagguggccgug

SEQ ID NO: 63494 - RNA, 22 nt, Human
acaggaggggcaugaaagacgg

SEQ ID NO: 63495 - RNA, 22 nt, Human
acaggaguuuaagaaauauuuc

SEQ ID NO: 63496 - RNA, 21 nt, Human
acaggauaggacaguguuccu

SEQ ID NO: 63497 - RNA, 20 nt, Human
acaggaugccugccauuuca

SEQ ID NO: 63498 - RNA, 22 nt, Human
acaggcaaacacagaaaguagg

SEQ ID NO: 63499 - RNA, 22 nt, Human
acaggcaaguacacaggcucau

SEQ ID NO: 63500 - RNA, 22 nt, Human
acaggcagagaguggcggacuc

SEQ ID NO: 63501 - RNA, 22 nt, Human
acaggcagagucagguuggguu

SEQ ID NO: 63502 - RNA, 22 nt, Human
acaggcagauguuuuaguugua

SEQ ID NO: 63503 - RNA, 22 nt, Human
acaggcagcaaaaucagccuca

SEQ ID NO: 63504 - RNA, 22 nt, Human
acaggcaggcuucggccagagc

SEQ ID NO: 63505 - RNA, 22 nt, Human
acaggcauauuucuagauuaca

SEQ ID NO: 63506 - RNA, 22 nt, Human
acaggccacaguggagucucug

SEQ ID NO: 63507 - RNA, 22 nt, Human
acaggccagagguggggcagcc

SEQ ID NO: 63508 - RNA, 22 nt, Human
acaggccauaaaggcaggcccu

SEQ ID NO: 63509 - RNA, 22 nt, Human
acaggccuauguuccauugcag

SEQ ID NO: 63510 - RNA, 22 nt, Human
acaggccucaaauagggugccu

SEQ ID NO: 63511 - RNA, 22 nt, Human
acaggccucaagacacccaggu

SEQ ID NO: 63512 - RNA, 22 nt, Human
acaggccugaugccuuggcugg

SEQ ID NO: 63513 - RNA, 22 nt, Human
acaggccuggaaaggaaggagu

SEQ ID NO: 63514 - RNA, 22 nt, Human
acaggccugggguacaaguucu

SEQ ID NO: 63515 - RNA, 22 nt, Human
acaggccuggugcugcugacag

SEQ ID NO: 63516 - RNA, 22 nt, Human
acaggcgcuggcagagagaaaa

SEQ ID NO: 63517 - RNA, 22 nt, Human
acaggcucaguucacuggauuu

SEQ ID NO: 63518 - RNA, 22 nt, Human
acaggcugagcguccaucuuca

SEQ ID NO: 63519 - RNA, 22 nt, Human
acaggcugaggaugauugcauc

SEQ ID NO: 63520 - RNA, 22 nt, Human
acaggcugauagaccauaaaua

SEQ ID NO: 63521 - RNA, 22 nt, Human
acaggcugccuaccaaguauca

SEQ ID NO: 63522 - RNA, 22 nt, Human
acaggcugggcgcuuccugcgg

SEQ ID NO: 63523 - RNA, 22 nt, Human
acaggcuguacuucuaaucauc

SEQ ID NO: 63524 - RNA, 22 nt, Human
acaggcuucuuuugaaaucaga

SEQ ID NO: 63525 - RNA, 20 nt, Human
acaggcuuucugaggcuggc

SEQ ID NO: 63526 - RNA, 22 nt, Human
acaggcuuuuuuagaaugacau

SEQ ID NO: 63527 - RNA, 22 nt, Human
acagggaaagggacagcagcag

SEQ ID NO: 63528 - RNA, 22 nt, Human
acagggaaggagcauagaaaaa

SEQ ID NO: 63529 - RNA, 22 nt, Human
acagggauuaugacugacagcc

SEQ ID NO: 63530 - RNA, 22 nt, Human
acagggauuuuccaggcuaccc

SEQ ID NO: 63531 - RNA, 22 nt, Human
acuguagaggccuggauugagg

SEQ ID NO: 63532 - RNA, 22 nt, Human
acuguauaguauuuauucuuag

SEQ ID NO: 63533 - RNA, 22 nt, Human
acuguauauacagcucaaggaa

SEQ ID NO: 63534 - RNA, 22 nt, Human
acuguauuggaaauauagcaaa

SEQ ID NO: 63535 - RNA, 22 nt, Human
acuguauuuuggguguauuuuc

SEQ ID NO: 63536 - RNA, 22 nt, Human
acugucacuaacuaagucuagu

SEQ ID NO: 63537 - RNA, 22 nt, Human
acugucacuacuauguguuugu

SEQ ID NO: 63538 - RNA, 22 nt, Human
acugucacugacagaaucaaca

SEQ ID NO: 63539 - RNA, 22 nt, Human
acugucaggauggcagcuuguu

SEQ ID NO: 63540 - RNA, 22 nt, Human
acugucaugacguuugucaccc

SEQ ID NO: 63541 - RNA, 22 nt, Human
acugucaugaucgaagauguca

SEQ ID NO: 63542 - RNA, 22 nt, Human
acugucaugugcuaacugucca

SEQ ID NO: 63543 - RNA, 21 nt, Human
acugucauuugcuuagggagg

SEQ ID NO: 63544 - RNA, 22 nt, Human
acuguccaagcaugccuggcuu

SEQ ID NO: 63545 - RNA, 22 nt, Human
acuguccuagaaccugcagcuc

SEQ ID NO: 63546 - RNA, 22 nt, Human
acuguccugaauacugcaugac

SEQ ID NO: 63547 - RNA, 22 nt, Human
acugucucucuagcaguucagg

SEQ ID NO: 63548 - RNA, 22 nt, Human
acugucuguccugcucuccgug

SEQ ID NO: 63549 - RNA, 22 nt, Human
acugucuucauaucugugucuc

SEQ ID NO: 63550 - RNA, 22 nt, Human
acugugaaagcuaacaucuuag

SEQ ID NO: 63551 - RNA, 22 nt, Human
acugugaacggacugaagccca

SEQ ID NO: 63552 - RNA, 20 nt, Human
acugugaaugcugaauuagc

SEQ ID NO: 63553 - RNA, 22 nt, Human
acugugacugugucuucugggc

SEQ ID NO: 63554 - RNA, 22 nt, Human
acugugagcagcgaccugagga

SEQ ID NO: 63555 - RNA, 22 nt, Human
acugugagugauuuccuucugg

SEQ ID NO: 63556 - RNA, 21 nt, Human
acugugcagccugaggaugug

SEQ ID NO: 63557 - RNA, 22 nt, Human
acugugcagcugagugcuaauu

SEQ ID NO: 63558 - RNA, 22 nt, Human
acugugcaguguuguaacccga

SEQ ID NO: 63559 - RNA, 22 nt, Human
acugugcauuccccaaccugug

SEQ ID NO: 63560 - RNA, 22 nt, Human
acugugcauuucaugucuuuuc

SEQ ID NO: 63561 - RNA, 22 nt, Human
acugugcauuugaagggaucau

SEQ ID NO: 63562 - RNA, 22 nt, Human
acugugccuucuuauugggucc

SEQ ID NO: 63563 - RNA, 22 nt, Human
acugugccuuucacuugcacuu

SEQ ID NO: 63564 - RNA, 19 nt, Human
acugugcucgggaaccacu

SEQ ID NO: 63565 - RNA, 22 nt, Human
acugugcuugccaaaccauuga

SEQ ID NO: 63566 - RNA, 22 nt, Human
acucugaaccagagaucauacc

SEQ ID NO: 63567 - RNA, 22 nt, Human
acucugaaugugcauguaaauc

SEQ ID NO: 63568 - RNA, 22 nt, Human
acucugagaaucccuggacuuu

SEQ ID NO: 63569 - RNA, 19 nt, Human
acucugagcuugcucuauc

SEQ ID NO: 63570 - RNA, 22 nt, Human
acucugaggcaggucagggcag

SEQ ID NO: 63571 - RNA, 22 nt, Human
acucugagucaugcacuccuug

SEQ ID NO: 63572 - RNA, 22 nt, Human
acucugcccuaggccucugggg

SEQ ID NO: 63573 - RNA, 22 nt, Human
acucugccuuggugucacaaga

SEQ ID NO: 63574 - RNA, 18 nt, Human
acucugcggaggccccag

SEQ ID NO: 63575 - RNA, 22 nt, Human
acucugcuaaauguaaguuggu

SEQ ID NO: 63576 - RNA, 22 nt, Human
acucugcuugcccaauggaaac

SEQ ID NO: 63577 - RNA, 22 nt, Human
acucuggcccuccugcugccag

SEQ ID NO: 63578 - RNA, 22 nt, Human
acucuggcgggcgggcgagcca

SEQ ID NO: 63579 - RNA, 18 nt, Human
acucugggaccuguuauu

SEQ ID NO: 63580 - RNA, 22 nt, Human
acucugggagaggacaaacaaa

SEQ ID NO: 63581 - RNA, 22 nt, Human
acucugggaucuugaaaagagu

SEQ ID NO: 63582 - RNA, 22 nt, Human
acucugggcuguuaggagcugu

SEQ ID NO: 63583 - RNA, 22 nt, Human
acucugggcuuugauuuguuac

SEQ ID NO: 63584 - RNA, 22 nt, Human
acucuggguccugccauucacu

SEQ ID NO: 63585 - RNA, 22 nt, Human
acucuguaauucuauaugcagu

SEQ ID NO: 63586 - RNA, 22 nt, Human
acucuguacgcaagagauggag

SEQ ID NO: 63587 - RNA, 22 nt, Human
acucuguacucuagaggaagug

SEQ ID NO: 63588 - RNA, 22 nt, Human
acucuguaucccucucaaauug

SEQ ID NO: 63589 - RNA, 22 nt, Human
acucugugccaggcacuuuggg

SEQ ID NO: 63590 - RNA, 22 nt, Human
acucuuauaguauugguuauua

SEQ ID NO: 63591 - RNA, 22 nt, Human
acucuuaugggaacaaggauua

SEQ ID NO: 63592 - RNA, 22 nt, Human
acucuucaagggccuagaggug

SEQ ID NO: 63593 - RNA, 22 nt, Human
acucuucacacaugcugcccuc

SEQ ID NO: 63594 - RNA, 22 nt, Human
acucuucaccgcuacugaaaua

SEQ ID NO: 63595 - RNA, 22 nt, Human
acucuucaguacaauaauaucu

SEQ ID NO: 63596 - RNA, 20 nt, Human
acucuugagaaauucucugu

SEQ ID NO: 63597 - RNA, 22 nt, Human
acucuugucucaacuuuuguau

SEQ ID NO: 63598 - RNA, 22 nt, Human
acucuuguuuguagagcccacc

SEQ ID NO: 63599 - RNA, 19 nt, Human
acucuuuuccuuuugaauc

SEQ ID NO: 63600 - RNA, 22 nt, Human
acugaaaaagacaucuugguaa

SEQ ID NO: 63601 - RNA, 22 nt, Human
acugaaaaaguaugauucacug

SEQ ID NO: 63602 - RNA, 22 nt, Human
acugaaaaugaauuagaaacag

SEQ ID NO: 63603 - RNA, 22 nt, Human
acugaaacacugagugaauugu

SEQ ID NO: 63604 - RNA, 22 nt, Human
acugaaagaaccuuccuguugc

SEQ ID NO: 63605 - RNA, 22 nt, Human
acugaaagauaaaucaguuagc

SEQ ID NO: 63606 - RNA, 23 nt, Human
acugaaaggauccuagcagagac

SEQ ID NO: 63607 - RNA, 22 nt, Human
acugaaauggggacaguccuua

SEQ ID NO: 63608 - RNA, 22 nt, Human
acugaacacaccugcagcacgu

SEQ ID NO: 63609 - RNA, 22 nt, Human
acugaacagccugaggagucac

SEQ ID NO: 63610 - RNA, 22 nt, Human
acugaacagccuuucaaacuua

SEQ ID NO: 63611 - RNA, 22 nt, Human
acugaacauccauaagauuuuu

SEQ ID NO: 63612 - RNA, 22 nt, Human
acugaagaacgcaucagugguu

SEQ ID NO: 63613 - RNA, 22 nt, Human
acugaagcugggcgaugccucc

SEQ ID NO: 63614 - RNA, 22 nt, Human
acugaaggaagcgggcaggggu

SEQ ID NO: 63615 - RNA, 22 nt, Human
acugaaggguaaugugggagcc

SEQ ID NO: 63616 - RNA, 22 nt, Human
acugaaggucucagcaaggaug

SEQ ID NO: 63617 - RNA, 22 nt, Human
acugaagucucuuuuguucucu

SEQ ID NO: 63618 - RNA, 22 nt, Human
acugaaguguagguguuuuccu

SEQ ID NO: 63619 - RNA, 19 nt, Human
acugaaguuacccaaaugg

SEQ ID NO: 63620 - RNA, 22 nt, Human
acugaauaauggucugugaucu

SEQ ID NO: 63621 - RNA, 22 nt, Human
acugaauagaaaugcucauagg

SEQ ID NO: 63622 - RNA, 22 nt, Human
acugaauagcccuucugucucc

SEQ ID NO: 63623 - RNA, 22 nt, Human
acugacaccaccaauauguuca

SEQ ID NO: 63624 - RNA, 22 nt, Human
acugaccagauaugucauaccu

SEQ ID NO: 63625 - RNA, 22 nt, Human
acugagaacuugccaaggacug

SEQ ID NO: 63626 - RNA, 22 nt, Human
acugagaagcucgcagugaugc

SEQ ID NO: 63627 - RNA, 19 nt, Human
acugagaccacagacaagu

SEQ ID NO: 63628 - RNA, 22 nt, Human
acugagagggaggcuguccggu

SEQ ID NO: 63629 - RNA, 22 nt, Human
acugagcagaacaaugggagcc

SEQ ID NO: 63630 - RNA, 22 nt, Human
acugagcagaagagaucuguga

SEQ ID NO: 63631 - RNA, 22 nt, Human
acugagcaguagauuuucuguu

SEQ ID NO: 63632 - RNA, 22 nt, Human
acugagcaucagggcugggaac

SEQ ID NO: 63633 - RNA, 22 nt, Human
acugagccugugcccucaucag

SEQ ID NO: 63634 - RNA, 22 nt, Human
acugagcucugaugagauuugg

SEQ ID NO: 63635 - RNA, 22 nt, Human
acugaggacagugaggagggcu

SEQ ID NO: 63636 - RNA, 22 nt, Human
acugaggauggauaggucauau

SEQ ID NO: 63637 - RNA, 22 nt, Human
acugaggcagaaggguaagugg

SEQ ID NO: 63638 - RNA, 22 nt, Human
acugaggcgcaguccggcuguc

SEQ ID NO: 63639 - RNA, 22 nt, Human
acugaggcuagauugcuguucu

SEQ ID NO: 63640 - RNA, 22 nt, Human
acuucugauaaagagcaugugc

SEQ ID NO: 63641 - RNA, 22 nt, Human
acuucuuuucaaaucaugcaaa

SEQ ID NO: 63642 - RNA, 22 nt, Human
acuugaauuuaguuuuuccuaa

SEQ ID NO: 63643 - RNA, 22 nt, Human
acuugagagaaucggaggaguc

SEQ ID NO: 63644 - RNA, 22 nt, Human
acuugcagcagcagcuauuggc

SEQ ID NO: 63645 - RNA, 22 nt, Human
acuugcaucuuagagacucacc

SEQ ID NO: 63646 - RNA, 22 nt, Human
acuugcucaaugcuugaagcca

SEQ ID NO: 63647 - RNA, 20 nt, Human
acuugcuuuugucaggaaaa

SEQ ID NO: 63648 - RNA, 22 nt, Human
acuuggagagcauugcugggga

SEQ ID NO: 63649 - RNA, 22 nt, Human
acuuggcaaguaucuauaaagu

SEQ ID NO: 63650 - RNA, 22 nt, Human
acuuggcugggagaguugaaga

SEQ ID NO: 63651 - RNA, 22 nt, Human
acuuggcuuaaaguagugaucg

SEQ ID NO: 63652 - RNA, 22 nt, Human
acuuggcuuuaguaguaacuga

SEQ ID NO: 63653 - RNA, 18 nt, Human
acuugggacuuuugcauu

SEQ ID NO: 63654 - RNA, 22 nt, Human
acuugggauuucagaugcugug

SEQ ID NO: 63655 - RNA, 22 nt, Human
acuugguggcgaacgaggguca

SEQ ID NO: 63656 - RNA, 22 nt, Human
acuugguuguuuuaacuuggca

SEQ ID NO: 63657 - RNA, 22 nt, Human
acuugucuaugguuacauccua

SEQ ID NO: 63658 - RNA, 22 nt, Human
acuugucuuuaauccgaaugua

SEQ ID NO: 63659 - RNA, 22 nt, Human
acuuguuuuaucugucaauaga

SEQ ID NO: 63660 - RNA, 19 nt, Human
acuuguuuuggaggugaug

SEQ ID NO: 63661 - RNA, 22 nt, Human
acuuuaauuaaugaacuguggc

SEQ ID NO: 63662 - RNA, 22 nt, Human
acuuuacaagcuuauagccuag

SEQ ID NO: 63663 - RNA, 22 nt, Human
acuuuacacaucuuuucucauu

SEQ ID NO: 63664 - RNA, 22 nt, Human
acuuuacaggcacuucaaguau

SEQ ID NO: 63665 - RNA, 22 nt, Human
acuuuacucuucauaugugaca

SEQ ID NO: 63666 - RNA, 22 nt, Human
acuuuaguaaacuuauguuacu

SEQ ID NO: 63667 - RNA, 22 nt, Human
acuuuaucaggaaucacacagc

SEQ ID NO: 63668 - RNA, 22 nt, Human
acuuuaugacacccuuuaguga

SEQ ID NO: 63669 - RNA, 21 nt, Human
acuuuaugaccuacccuuuuu

SEQ ID NO: 63670 - RNA, 22 nt, Human
acuuuauguuugauaucuaugg

SEQ ID NO: 63671 - RNA, 22 nt, Human
acuuucaagcccucuagagaca

SEQ ID NO: 63672 - RNA, 22 nt, Human
acuuucaauucacugagauaua

SEQ ID NO: 63673 - RNA, 22 nt, Human
acuuucaugguaguuguauucu

SEQ ID NO: 63674 - RNA, 23 nt, Human
acuuucccauagcauggcuuccu

SEQ ID NO: 63675 - RNA, 22 nt, Human
acuuuccuagacuucagugaca

SEQ ID NO: 63676 - RNA, 22 nt, Human
acuuuccugccaaggccagagu

SEQ ID NO: 63677 - RNA, 22 nt, Human
acuuucuaggugcuauugugau

SEQ ID NO: 63678 - RNA, 22 nt, Human
acuuucugucaucuagacaagu

SEQ ID NO: 63679 - RNA, 22 nt, Human
acuuucuuauccaugaucucac

SEQ ID NO: 63680 - RNA, 22 nt, Human
acuuucuuggucccauguuuga

SEQ ID NO: 63681 - RNA, 22 nt, Human
acaugcuuugauguauuuugca

SEQ ID NO: 63682 - RNA, 22 nt, Human
acaugcuuugcacuuacaucau

SEQ ID NO: 63683 - RNA, 22 nt, Human
acaugcuuuucccacaauuaua

SEQ ID NO: 63684 - RNA, 21 nt, Human
acauggaagagaaauuaacca

SEQ ID NO: 63685 - RNA, 21 nt, Human
acauggacugugaauggggac

SEQ ID NO: 63686 - RNA, 22 nt, Human
acauggagaccagauggaagua

SEQ ID NO: 63687 - RNA, 22 nt, Human
acauggcaaaagggacuuuaca

SEQ ID NO: 63688 - RNA, 19 nt, Human
acauggcaucccaggaggu

SEQ ID NO: 63689 - RNA, 20 nt, Human
acauggcauucccacguggu

SEQ ID NO: 63690 - RNA, 22 nt, Human
acaugggacagagaaagaggcc

SEQ ID NO: 63691 - RNA, 22 nt, Human
acaugguauuucuauuauaauu

SEQ ID NO: 63692 - RNA, 22 nt, Human
acaugguugaaugcuuuauuug

SEQ ID NO: 63693 - RNA, 22 nt, Human
acauguaagacuagcuuaaagu

SEQ ID NO: 63694 - RNA, 21 nt, Human
acauguaagagaguuucaaga

SEQ ID NO: 63695 - RNA, 22 nt, Human
acauguauacaauguguaauga

SEQ ID NO: 63696 - RNA, 22 nt, Human
acauguaucugaucugcaauug

SEQ ID NO: 63697 - RNA, 22 nt, Human
acaugucaauuuaguacucuua

SEQ ID NO: 63698 - RNA, 21 nt, Human
acauguccccuaugcuuaagg

SEQ ID NO: 63699 - RNA, 22 nt, Human
acaugucuccacccaucuuaaa

SEQ ID NO: 63700 - RNA, 22 nt, Human
acaugucuguaauuauuuuagg

SEQ ID NO: 63701 - RNA, 22 nt, Human
acaugucuuguggcuuugaucu

SEQ ID NO: 63702 - RNA, 22 nt, Human
acaugugaggugugagugauac

SEQ ID NO: 63703 - RNA, 22 nt, Human
acaugugcagacagcaagcagg

SEQ ID NO: 63704 - RNA, 23 nt, Human
acauguggagagaacagauaucu

SEQ ID NO: 63705 - RNA, 22 nt, Human
acauguguaagaugugauauau

SEQ ID NO: 63706 - RNA, 22 nt, Human
acauguguauagccuguauaga

SEQ ID NO: 63707 - RNA, 22 nt, Human
acaugugugacaacagagguga

SEQ ID NO: 63708 - RNA, 22 nt, Human
acauguguguauacguauuuau

SEQ ID NO: 63709 - RNA, 22 nt, Human
acauguguuaaaauucucacca

SEQ ID NO: 63710 - RNA, 22 nt, Human
acauguguuuuccuacuuauga

SEQ ID NO: 63711 - RNA, 22 nt, Human
acauguuaaacaucauggaaug

SEQ ID NO: 63712 - RNA, 22 nt, Human
acauguuagaaaugcagaaucu

SEQ ID NO: 63713 - RNA, 22 nt, Human
acauguucaugcaugcacaggu

SEQ ID NO: 63714 - RNA, 22 nt, Human
acauguuuaaguuuaaugaaaa

SEQ ID NO: 63715 - RNA, 22 nt, Human
acauguuuaaguuuguuauaug

SEQ ID NO: 63716 - RNA, 22 nt, Human
acauguuuugugccuugacuag

SEQ ID NO: 63717 - RNA, 22 nt, Human
acauuaaauuucauagugauua

SEQ ID NO: 63718 - RNA, 23 nt, Human
acauuacacgcaguaauugcccc

SEQ ID NO: 63719 - RNA, 22 nt, Human
acauuaccuggcauuugaucuu

SEQ ID NO: 63720 - RNA, 22 nt, Human
acauucaaggcagcacugagug

SEQ ID NO: 63721 - RNA, 21 nt, Human
acauucacaggauauuaucau

SEQ ID NO: 63722 - RNA, 22 nt, Human
acauucauuccaggucagucag

SEQ ID NO: 63723 - RNA, 22 nt, Human
acauucauugagcaacaacaau

SEQ ID NO: 63724 - RNA, 22 nt, Human
acauuccaaaaacuagcagaua

SEQ ID NO: 63725 - RNA, 22 nt, Human
acauucccaccaacaguguaaa

SEQ ID NO: 63726 - RNA, 22 nt, Human
acauuccucagugccaguugag

SEQ ID NO: 63727 - RNA, 22 nt, Human
acauuccugaaugggcacauuu

SEQ ID NO: 63728 - RNA, 22 nt, Human
acauuccugccauaaauuuuuu

SEQ ID NO: 63729 - RNA, 22 nt, Human
acauuccuuucuugagcacagu

SEQ ID NO: 63730 - RNA, 22 nt, Human
acauucuauucugcaggacaag

SEQ ID NO: 63731 - RNA, 22 nt, Human
acauucucauuuggugaucauu

SEQ ID NO: 63732 - RNA, 22 nt, Human
acauucucuuuuagaaagcugu

SEQ ID NO: 63733 - RNA, 22 nt, Human
acauucugaaugccugacagua

SEQ ID NO: 63734 - RNA, 22 nt, Human
acauucuggaugucugaugaga

SEQ ID NO: 63735 - RNA, 22 nt, Human
acauucuuccagcuggcuguug

SEQ ID NO: 63736 - RNA, 22 nt, Human
acauucuuggacuccacucuag

SEQ ID NO: 63737 - RNA, 22 nt, Human
acauucuuucaccuugugucca

SEQ ID NO: 63738 - RNA, 22 nt, Human
acauucuuucucuucaggaaac

SEQ ID NO: 63739 - RNA, 22 nt, Human
acauucuuugaguuuuguuaaa

SEQ ID NO: 63740 - RNA, 22 nt, Human
acauugaacauggcaggacauu

SEQ ID NO: 63741 - RNA, 22 nt, Human
acauugaacuacuuguaaugag

SEQ ID NO: 63742 - RNA, 22 nt, Human
acauugaagugucuggccuccu

SEQ ID NO: 63743 - RNA, 22 nt, Human
acauugaauguaugugaugaaa

SEQ ID NO: 63744 - RNA, 22 nt, Human
acauugaauucaaaauuacuga

SEQ ID NO: 63745 - RNA, 22 nt, Human
acauugaccugauuuugaagac

SEQ ID NO: 63746 - RNA, 22 nt, Human
acauugauacugagauacaaag

SEQ ID NO: 63747 - RNA, 22 nt, Human
acauugauauuucaaauacagg

SEQ ID NO: 63748 - RNA, 22 nt, Human
acauugaugaucccacuuacag

SEQ ID NO: 63749 - RNA, 19 nt, Human
accaggccucagaggcccu

SEQ ID NO: 63750 - RNA, 22 nt, Human
accaggccuggcugggcagcca

SEQ ID NO: 63751 - RNA, 22 nt, Human
accaggcuccccuuggauccug

SEQ ID NO: 63752 - RNA, 22 nt, Human
accaggcuggagugcaguggcg

SEQ ID NO: 63753 - RNA, 19 nt, Human
accaggcuuauggucagug

SEQ ID NO: 63754 - RNA, 22 nt, Human
accaggcuugauaccaagaaau

SEQ ID NO: 63755 - RNA, 22 nt, Human
accagggaccgccacacugcaa

SEQ ID NO: 63756 - RNA, 22 nt, Human
accagggcggcuugaggaggca

SEQ ID NO: 63757 - RNA, 22 nt, Human
accagggcugggauaggucagg

SEQ ID NO: 63758 - RNA, 22 nt, Human
accagucauagaaagcaguggu

SEQ ID NO: 63759 - RNA, 22 nt, Human
accagucuguuguugcagagug

SEQ ID NO: 63760 - RNA, 22 nt, Human
accaguuuaauaacugcucaag

SEQ ID NO: 63761 - RNA, 22 nt, Human
accauacauuaaaugacuuuca

SEQ ID NO: 63762 - RNA, 22 nt, Human
accauaguuauaacaaaguguu

SEQ ID NO: 63763 - RNA, 22 nt, Human
accauccaaacugcuuucugug

SEQ ID NO: 63764 - RNA, 22 nt, Human
accaugaugggaagcucagggc

SEQ ID NO: 63765 - RNA, 22 nt, Human
accaugcaucaaagcuaauaua

SEQ ID NO: 63766 - RNA, 22 nt, Human
accauggaccauaguuccuauu

SEQ ID NO: 63767 - RNA, 22 nt, Human
accaugugaucaaaacaaaucc

SEQ ID NO: 63768 - RNA, 22 nt, Human
accauguuaguuacugggaaug

SEQ ID NO: 63769 - RNA, 22 nt, Human
accauuaacaugauuuugggga

SEQ ID NO: 63770 - RNA, 22 nt, Human
accauuaagaaucugguuuccu

SEQ ID NO: 63771 - RNA, 22 nt, Human
accauuacaugauccuuaccca

SEQ ID NO: 63772 - RNA, 22 nt, Human
accauucugguccauacuguuc

SEQ ID NO: 63773 - RNA, 22 nt, Human
accauuugaaggaaucauugac

SEQ ID NO: 63774 - RNA, 22 nt, Human
acccacagaaccugugacaaca

SEQ ID NO: 63775 - RNA, 22 nt, Human
acccacccuacuagcagugucc

SEQ ID NO: 63776 - RNA, 22 nt, Human
acccagagaacugaggcaugaa

SEQ ID NO: 63777 - RNA, 22 nt, Human
acccagagauggaccuggcugc

SEQ ID NO: 63778 - RNA, 22 nt, Human
acccagagcacagaugcaacgu

SEQ ID NO: 63779 - RNA, 22 nt, Human
acccagagcacugggugugggc

SEQ ID NO: 63780 - RNA, 22 nt, Human
acccagagcagagcuuggcuuc

SEQ ID NO: 63781 - RNA, 22 nt, Human
acccagagccagggucaggagc

SEQ ID NO: 63782 - RNA, 22 nt, Human
acccagagcccuuagcacagac

SEQ ID NO: 63783 - RNA, 22 nt, Human
acccagagucauggcacuuagc

SEQ ID NO: 63784 - RNA, 22 nt, Human
acccagagucauguuuauuccc

SEQ ID NO: 63785 - RNA, 22 nt, Human
acccagauaaaugacagggcuu

SEQ ID NO: 63786 - RNA, 22 nt, Human
acccagccuacaaagcucaccu

SEQ ID NO: 63787 - RNA, 22 nt, Human
acccagcuguuucccgugucau

SEQ ID NO: 63788 - RNA, 22 nt, Human
acccaggacuuggcaaccucau

SEQ ID NO: 63789 - RNA, 22 nt, Human
acccaggagacggaggugcagu

SEQ ID NO: 63790 - RNA, 22 nt, Human
acccaggagccgugagagguua

SEQ ID NO: 63791 - RNA, 22 nt, Human
acccaggaggcagagguugcag

SEQ ID NO: 63792 - RNA, 22 nt, Human
acccaggcuagggugcaguggc

SEQ ID NO: 63793 - RNA, 22 nt, Human
acccaggcugcuucucaguggc

SEQ ID NO: 63794 - RNA, 22 nt, Human
acccaggcuggaaugcaguggc

SEQ ID NO: 63795 - RNA, 22 nt, Human
acccaggcuggaaugcaguggu

SEQ ID NO: 63796 - RNA, 22 nt, Human
acccaggcuggagugcagugac

SEQ ID NO: 63797 - RNA, 22 nt, Human
acccaggcuggagugcaguggu

SEQ ID NO: 63798 - RNA, 22 nt, Human
acuguauuccuacuagaaucua

SEQ ID NO: 63799 - RNA, 22 nt, Human
acuguauucuagucauguuugu

SEQ ID NO: 63800 - RNA, 21 nt, Human
acuguauuguuuucaaggauc

SEQ ID NO: 63801 - RNA, 22 nt, Human
acuguauuuggauauaagaucu

SEQ ID NO: 63802 - RNA, 22 nt, Human
acugucaaaugcaaugaacuca

SEQ ID NO: 63803 - RNA, 22 nt, Human
acugucaagagauucaaauuca

SEQ ID NO: 63804 - RNA, 19 nt, Human
acugucacauaaaggaagg

SEQ ID NO: 63805 - RNA, 22 nt, Human
acugucaccaucagagcgggaa

SEQ ID NO: 63806 - RNA, 22 nt, Human
acugucaccuaaauuuucauug

SEQ ID NO: 63807 - RNA, 22 nt, Human
acugucacuugcaacugugagg

SEQ ID NO: 63808 - RNA, 22 nt, Human
acugucagggaucaugaaagcu

SEQ ID NO: 63809 - RNA, 22 nt, Human
acuguccuuuuaaugcagccgu

SEQ ID NO: 63810 - RNA, 22 nt, Human
acugucugcaaaacucauacuc

SEQ ID NO: 63811 - RNA, 22 nt, Human
acugucugcccugagaugccag

SEQ ID NO: 63812 - RNA, 22 nt, Human
acugucugcuggccccugguua

SEQ ID NO: 63813 - RNA, 22 nt, Human
acugucuuccaggucuggaggu

SEQ ID NO: 63814 - RNA, 22 nt, Human
acugucuuugagcuggaggagg

SEQ ID NO: 63815 - RNA, 22 nt, Human
acugugaugaugaagcaugguu

SEQ ID NO: 63816 - RNA, 22 nt, Human
acugugaugcaguugccaucca

SEQ ID NO: 63817 - RNA, 22 nt, Human
acugugauguucucuaucuugg

SEQ ID NO: 63818 - RNA, 22 nt, Human
acugugcaaaugacaggcacac

SEQ ID NO: 63819 - RNA, 22 nt, Human
acugugcaagucaaagaugggc

SEQ ID NO: 63820 - RNA, 22 nt, Human
acugugcaaugaguaauaaacu

SEQ ID NO: 63821 - RNA, 22 nt, Human
acugugcaggggaagagagaaa

SEQ ID NO: 63822 - RNA, 22 nt, Human
acugugcaggugaacuguuugc

SEQ ID NO: 63823 - RNA, 22 nt, Human
acugugcaugaaccgaaacaaa

SEQ ID NO: 63824 - RNA, 22 nt, Human
acugugcauuugucaugggguu

SEQ ID NO: 63825 - RNA, 22 nt, Human
acugugccacaauucaccaggg

SEQ ID NO: 63826 - RNA, 22 nt, Human
acugugcuaucuacugaauuau

SEQ ID NO: 63827 - RNA, 22 nt, Human
acugugcuggcaaugacucagg

SEQ ID NO: 63828 - RNA, 22 nt, Human
acuguggagcaguggcuaggga

SEQ ID NO: 63829 - RNA, 22 nt, Human
acuguggcaaagaagcaggcuc

SEQ ID NO: 63830 - RNA, 22 nt, Human
acuguggccggaacagugggac

SEQ ID NO: 63831 - RNA, 22 nt, Human
acuguggcucaucaggcuggug

SEQ ID NO: 63832 - RNA, 22 nt, Human
acugugggccuuuccuuugacc

SEQ ID NO: 63833 - RNA, 22 nt, Human
acuguggggggcuuugcucagu

SEQ ID NO: 63834 - RNA, 22 nt, Human
acuguggggugcgaggcaguga

SEQ ID NO: 63835 - RNA, 22 nt, Human
acuguguauuccuauauaguaa

SEQ ID NO: 63836 - RNA, 22 nt, Human
acuguguauucuaaugacuaaa

SEQ ID NO: 63837 - RNA, 18 nt, Human
acugugugaauuagcucc

SEQ ID NO: 63838 - RNA, 22 nt, Human
acugugugaggcugggugaguc

SEQ ID NO: 63839 - RNA, 22 nt, Human
acugugugccaggcgcuggucu

SEQ ID NO: 63840 - RNA, 22 nt, Human
acuguguggaccacucugaggc

SEQ ID NO: 63841 - RNA, 22 nt, Human
acugugugggccgcucacuggg

SEQ ID NO: 63842 - RNA, 22 nt, Human
acuguguugccuucccccagcc

SEQ ID NO: 63843 - RNA, 22 nt, Human
acuguuaacgguaugaugcucg

SEQ ID NO: 63844 - RNA, 22 nt, Human
acuguuaaguaugaaguaaggc

SEQ ID NO: 63845 - RNA, 20 nt, Human
acuguuaguauacuugugcc

SEQ ID NO: 63846 - RNA, 22 nt, Human
acuguucacagauuagucgaug

SEQ ID NO: 63847 - RNA, 22 nt, Human
acuguucacccagcacuagcag

SEQ ID NO: 63848 - RNA, 22 nt, Human
acuguucacuagugaggguuga

SEQ ID NO: 63849 - RNA, 21 nt, Human
acuguucaucuguucagaagc

SEQ ID NO: 63850 - RNA, 18 nt, Human
acuguucucuccugcccu

SEQ ID NO: 63851 - RNA, 22 nt, Human
acuguucugcaugcugugaggg

SEQ ID NO: 63852 - RNA, 19 nt, Human
acuguucuguauguugauu

SEQ ID NO: 63853 - RNA, 20 nt, Human
acuguuggaaguggagaaug

SEQ ID NO: 63854 - RNA, 22 nt, Human
acuguugucaggcugcuuugga

SEQ ID NO: 63855 - RNA, 22 nt, Human
acuguuuaguaaauugaaaugg

SEQ ID NO: 63856 - RNA, 22 nt, Human
acuguuuucuaaagaacagaug

SEQ ID NO: 63857 - RNA, 22 nt, Human
acuguuuucuguaaagggccag

SEQ ID NO: 63858 - RNA, 23 nt, Human
accaggagaaaagcuuugcggga

SEQ ID NO: 63859 - RNA, 20 nt, Human
accaggagauggaggcaggg

SEQ ID NO: 63860 - RNA, 22 nt, Human
accaggagccauagagucaggc

SEQ ID NO: 63861 - RNA, 22 nt, Human
accaggaggccuugguucugag

SEQ ID NO: 63862 - RNA, 19 nt, Human
accaggaguaucagagcug

SEQ ID NO: 63863 - RNA, 22 nt, Human
accaggagucuagccuagucaa

SEQ ID NO: 63864 - RNA, 17 nt, Human
accaggcaacacgccca

SEQ ID NO: 63865 - RNA, 22 nt, Human
accaggcacuccugaggucuga

SEQ ID NO: 63866 - RNA, 22 nt, Human
accaggcagucaccguccagga

SEQ ID NO: 63867 - RNA, 22 nt, Human
accaggcccgcugcuauggugg

SEQ ID NO: 63868 - RNA, 22 nt, Human
accaggcuugaugauuugcuua

SEQ ID NO: 63869 - RNA, 22 nt, Human
accagggcagccgagguguguc

SEQ ID NO: 63870 - RNA, 22 nt, Human
accagggcccgggagagcucuc

SEQ ID NO: 63871 - RNA, 22 nt, Human
accagggccgcgggcgacuagc

SEQ ID NO: 63872 - RNA, 22 nt, Human
accaggguugagucagcugcgu

SEQ ID NO: 63873 - RNA, 22 nt, Human
accagguaauguaaagcagggu

SEQ ID NO: 63874 - RNA, 22 nt, Human
accaguaagauccuguacauac

SEQ ID NO: 63875 - RNA, 23 nt, Human
accaguccauuccccucaugauu

SEQ ID NO: 63876 - RNA, 22 nt, Human
accagugcuuccugcuggagcu

SEQ ID NO: 63877 - RNA, 22 nt, Human
accaguggaauuauucuguggu

SEQ ID NO: 63878 - RNA, 22 nt, Human
accaguggaugaaugcuggacc

SEQ ID NO: 63879 - RNA, 22 nt, Human
accaguuucugggggagguugg

SEQ ID NO: 63880 - RNA, 22 nt, Human
accauacuugaaauggauagga

SEQ ID NO: 63881 - RNA, 22 nt, Human
accaucaagaccuuaucuaguu

SEQ ID NO: 63882 - RNA, 22 nt, Human
accaucaguacuggaugcugac

SEQ ID NO: 63883 - RNA, 22 nt, Human
accaucagucauugucaguggg

SEQ ID NO: 63884 - RNA, 22 nt, Human
accaucugaguagagagaagua

SEQ ID NO: 63885 - RNA, 22 nt, Human
accaucuuaguggccagcucuc

SEQ ID NO: 63886 - RNA, 22 nt, Human
accaugacgucacagaggcuuc

SEQ ID NO: 63887 - RNA, 22 nt, Human
accaugaugcauccuuaaggaa

SEQ ID NO: 63888 - RNA, 23 nt, Human
accaugaugggagugcaaauaag

SEQ ID NO: 63889 - RNA, 22 nt, Human
accaugcacagcuguucuauua

SEQ ID NO: 63890 - RNA, 22 nt, Human
accauuaaagagauccugggga

SEQ ID NO: 63891 - RNA, 22 nt, Human
accauuaaucucacaaggauaa

SEQ ID NO: 63892 - RNA, 20 nt, Human
accauuaauguaagcuuugu

SEQ ID NO: 63893 - RNA, 22 nt, Human
accauucuuuacacuuauuucu

SEQ ID NO: 63894 - RNA, 22 nt, Human
acccaaagcaauauucaucagu

SEQ ID NO: 63895 - RNA, 22 nt, Human
acccacacaucucuaauucagu

SEQ ID NO: 63896 - RNA, 22 nt, Human
acccaccacaguggcuggcaca

SEQ ID NO: 63897 - RNA, 22 nt, Human
acccagagaacugugccuugag

SEQ ID NO: 63898 - RNA, 19 nt, Human
acccagagcccuuugcagg

SEQ ID NO: 63899 - RNA, 22 nt, Human
acccagagcugggcuuggcaaa

SEQ ID NO: 63900 - RNA, 22 nt, Human
acccagaguaacagauggauuc

SEQ ID NO: 63901 - RNA, 22 nt, Human
acccagagucagacagccaugg

SEQ ID NO: 63902 - RNA, 22 nt, Human
acccagagugucugucucaguc

SEQ ID NO: 63903 - RNA, 22 nt, Human
acccagcaugacaccugcacau

SEQ ID NO: 63904 - RNA, 22 nt, Human
acccagcccagaaucuggggcc

SEQ ID NO: 63905 - RNA, 19 nt, Human
acccagcccaggaguggca

SEQ ID NO: 63906 - RNA, 22 nt, Human
acccagcuaacccuacccugga

SEQ ID NO: 63907 - RNA, 20 nt, Human
acccagcucugugcccuggg

SEQ ID NO: 63908 - RNA, 22 nt, Human
acccagcucuuugauggucuug

SEQ ID NO: 63909 - RNA, 22 nt, Human
acccaggaaaacauggugcaga

SEQ ID NO: 63910 - RNA, 22 nt, Human
acccaggacacagagaugaccc

SEQ ID NO: 63911 - RNA, 22 nt, Human
acccaggagcaggcugggcagu

SEQ ID NO: 63912 - RNA, 22 nt, Human
acccaggaugauaauguucaca

SEQ ID NO: 63913 - RNA, 22 nt, Human
acccaggcagcaggagcuaaag

SEQ ID NO: 63914 - RNA, 22 nt, Human
acccaggcgggagugcaguguc

SEQ ID NO: 63915 - RNA, 22 nt, Human
acccaggcuagaagugaauuau

SEQ ID NO: 63916 - RNA, 21 nt, Human
accuuagagagaaagccauca

SEQ ID NO: 63917 - RNA, 22 nt, Human
accuucaaguaugugggcugaa

SEQ ID NO: 63918 - RNA, 22 nt, Human
accuucagacaucaacuaucuc

SEQ ID NO: 63919 - RNA, 19 nt, Human
accuucagaguggcacaaa

SEQ ID NO: 63920 - RNA, 22 nt, Human
accuucauauucucugauaccu

SEQ ID NO: 63921 - RNA, 18 nt, Human
accuucauuccuuugccu

SEQ ID NO: 63922 - RNA, 22 nt, Human
accuuccucuaagacauuuagc

SEQ ID NO: 63923 - RNA, 21 nt, Human
accuucugaauuaccuaccaa

SEQ ID NO: 63924 - RNA, 22 nt, Human
accuucuuccaccaaaaacguc

SEQ ID NO: 63925 - RNA, 22 nt, Human
accuugaaagcugguuguuagg

SEQ ID NO: 63926 - RNA, 22 nt, Human
accuugauggggcuguuggagu

SEQ ID NO: 63927 - RNA, 22 nt, Human
accuuggaaaugcccauugccu

SEQ ID NO: 63928 - RNA, 22 nt, Human
accuuggcaguuucuaccuuuu

SEQ ID NO: 63929 - RNA, 22 nt, Human
accuugggcaaguuggaaacug

SEQ ID NO: 63930 - RNA, 22 nt, Human
accuugucuuuuauagaacaag

SEQ ID NO: 63931 - RNA, 22 nt, Human
accuuuauauaucaacuucucc

SEQ ID NO: 63932 - RNA, 22 nt, Human
accuuuaucgccaucauugugc

SEQ ID NO: 63933 - RNA, 22 nt, Human
accuuuaugaaacagcugucgu

SEQ ID NO: 63934 - RNA, 22 nt, Human
accuuucauuaaagucuguagu

SEQ ID NO: 63935 - RNA, 22 nt, Human
accuuuccaaguaucagguggu

SEQ ID NO: 63936 - RNA, 22 nt, Human
accuuuccuggcugaccgagga

SEQ ID NO: 63937 - RNA, 22 nt, Human
accuuugacgcuauuuaauuug

SEQ ID NO: 63938 - RNA, 22 nt, Human
accuuuggagcaugcauuuucu

SEQ ID NO: 63939 - RNA, 22 nt, Human
accuuuggucauuuacuuuuca

SEQ ID NO: 63940 - RNA, 22 nt, Human
accuuuuacggugugacuagca

SEQ ID NO: 63941 - RNA, 22 nt, Human
accuuuucaucugaaacuuuua

SEQ ID NO: 63942 - RNA, 22 nt, Human
acgaauaaaucuauuucacaca

SEQ ID NO: 63943 - RNA, 22 nt, Human
acgagagguccuuagaaucugu

SEQ ID NO: 63944 - RNA, 22 nt, Human
acgaugcuggauuaucucaagg

SEQ ID NO: 63945 - RNA, 22 nt, Human
acgauguggccugaaucaggca

SEQ ID NO: 63946 - RNA, 22 nt, Human
acgauugaagaauagucuuaac

SEQ ID NO: 63947 - RNA, 20 nt, Human
acgcacacgcgggggcgugc

SEQ ID NO: 63948 - RNA, 22 nt, Human
acgcagcacaaaggaaaggauc

SEQ ID NO: 63949 - RNA, 22 nt, Human
acgcccggucuccauaguuuuu

SEQ ID NO: 63950 - RNA, 23 nt, Human
acgcccucgcauccugagagccc

SEQ ID NO: 63951 - RNA, 22 nt, Human
acgccucugcagcugccgggcc

SEQ ID NO: 63952 - RNA, 22 nt, Human
acgcggugcggcaaguucaugg

SEQ ID NO: 63953 - RNA, 22 nt, Human
acgcuggugaaagggugguuuu

SEQ ID NO: 63954 - RNA, 22 nt, Human
acggaaugagucuugaaaagug

SEQ ID NO: 63955 - RNA, 22 nt, Human
acggagcccgugucagguggga

SEQ ID NO: 63956 - RNA, 22 nt, Human
acggcaggcucagagcuggaau

SEQ ID NO: 63957 - RNA, 22 nt, Human
acggcuucuugacuguggguug

SEQ ID NO: 63958 - RNA, 22 nt, Human
acgggcugggacggggaagcuc

SEQ ID NO: 63959 - RNA, 22 nt, Human
acggugaccaagcaucaccgag

SEQ ID NO: 63960 - RNA, 22 nt, Human
acggugcuggguauugggguuc

SEQ ID NO: 63961 - RNA, 22 nt, Human
acguaauauaagaaaguguggu

SEQ ID NO: 63962 - RNA, 22 nt, Human
acguggcggccgccgugagcgg

SEQ ID NO: 63963 - RNA, 22 nt, Human
acguguaaugaucaccacaauc

SEQ ID NO: 63964 - RNA, 22 nt, Human
acguguguaugaguguacauau

SEQ ID NO: 63965 - RNA, 22 nt, Human
acguguguuggucagggggccc

SEQ ID NO: 63966 - RNA, 22 nt, Human
acguguguuuaacaaaccugca

SEQ ID NO: 63967 - RNA, 22 nt, Human
agaggccucccucccagcuggu

SEQ ID NO: 63968 - RNA, 22 nt, Human
agaggccucuagggccccucag

SEQ ID NO: 63969 - RNA, 22 nt, Human
agaggccucuguuguucagacg

SEQ ID NO: 63970 - RNA, 22 nt, Human
agaggcucuggugcagcaugca

SEQ ID NO: 63971 - RNA, 22 nt, Human
agaggcucuggugggaguuggu

SEQ ID NO: 63972 - RNA, 22 nt, Human
agaggcucuuugagcugggaga

SEQ ID NO: 63973 - RNA, 22 nt, Human
agaggcugcaggcuggaaauca

SEQ ID NO: 63974 - RNA, 22 nt, Human
agaggcugggcaggacccacag

SEQ ID NO: 63975 - RNA, 22 nt, Human
agaggcugugcccaccaggcaa

SEQ ID NO: 63976 - RNA, 22 nt, Human
agaggcuguuacacucccagau

SEQ ID NO: 63977 - RNA, 20 nt, Human
agaggcuuccuugggaggag

SEQ ID NO: 63978 - RNA, 22 nt, Human
agaggcuugacaauaugauugg

SEQ ID NO: 63979 - RNA, 22 nt, Human
agaggcuuggccucaguucugu

SEQ ID NO: 63980 - RNA, 20 nt, Human
agaggcuuucuuguagucag

SEQ ID NO: 63981 - RNA, 17 nt, Human
agagggaaaaugcgguu

SEQ ID NO: 63982 - RNA, 22 nt, Human
agagggaagaugguccaaucuu

SEQ ID NO: 63983 - RNA, 22 nt, Human
agagggcauaaaauagagcacg

SEQ ID NO: 63984 - RNA, 22 nt, Human
agagggcuaacugggaagcagg

SEQ ID NO: 63985 - RNA, 17 nt, Human
agagggcucaaggcauc

SEQ ID NO: 63986 - RNA, 22 nt, Human
agaggggacagccaccugcccg

SEQ ID NO: 63987 - RNA, 22 nt, Human
agaggggcaaguaaagagucuu

SEQ ID NO: 63988 - RNA, 22 nt, Human
agaggggcccgguucuccgucu

SEQ ID NO: 63989 - RNA, 22 nt, Human
agaggggguguuccagaagcau

SEQ ID NO: 63990 - RNA, 22 nt, Human
agaggggugggcacagcgccca

SEQ ID NO: 63991 - RNA, 22 nt, Human
agaggguaacaagaggccugga

SEQ ID NO: 63992 - RNA, 22 nt, Human
agaggguaugaguggggcuaaa

SEQ ID NO: 63993 - RNA, 22 nt, Human
agagguauuagguaauucagua

SEQ ID NO: 63994 - RNA, 22 nt, Human
agaggucagagcaggaaaggca

SEQ ID NO: 63995 - RNA, 22 nt, Human
agaggucagauuucuccuggug

SEQ ID NO: 63996 - RNA, 22 nt, Human
agaggucauaucucagaagaga

SEQ ID NO: 63997 - RNA, 21 nt, Human
agaggucauugggcugguucu

SEQ ID NO: 63998 - RNA, 22 nt, Human
agaggucuuaagaucuagacug

SEQ ID NO: 63999 - RNA, 22 nt, Human
agaggugggagccuggucacau

SEQ ID NO: 64000 - RNA, 22 nt, Human
agaguaaaguacuuggaauacc

SEQ ID NO: 64001 - RNA, 22 nt, Human
agaguaauuucugcugaaaagg

SEQ ID NO: 64002 - RNA, 22 nt, Human
agaguacugcugcuggguacug

SEQ ID NO: 64003 - RNA, 22 nt, Human
agaguaguucuuugcagagugg

SEQ ID NO: 64004 - RNA, 22 nt, Human
agaguauaauuagugucuucua

SEQ ID NO: 64005 - RNA, 19 nt, Human
agaguauugaauuugcccu

SEQ ID NO: 64006 - RNA, 22 nt, Human
agaguauugugaccauuuguca

SEQ ID NO: 64007 - RNA, 22 nt, Human
agaguauuuugauuauccugga

SEQ ID NO: 64008 - RNA, 22 nt, Human
agagucaaaauuuaccagaaug

SEQ ID NO: 64009 - RNA, 22 nt, Human
agagucaaguagggcaugggcu

SEQ ID NO: 64010 - RNA, 22 nt, Human
agagucagacuaagccauggug

SEQ ID NO: 64011 - RNA, 22 nt, Human
agaguccaaaugugcaguuaug

SEQ ID NO: 64012 - RNA, 22 nt, Human
agaguccaggggccuggugugu

SEQ ID NO: 64013 - RNA, 22 nt, Human
agaguccauaugugggaggagu

SEQ ID NO: 64014 - RNA, 22 nt, Human
agaguccaugaagacagcugag

SEQ ID NO: 64015 - RNA, 22 nt, Human
agagucugaugucaacaguucu

SEQ ID NO: 64016 - RNA, 22 nt, Human
agagucugcauuguaacaagau

SEQ ID NO: 64017 - RNA, 19 nt, Human
agagucugugcucuuccua

SEQ ID NO: 64018 - RNA, 22 nt, Human
agagucugugcuggggccagcu

SEQ ID NO: 64019 - RNA, 22 nt, Human
agagucuuguuaacuugcuaag

SEQ ID NO: 64020 - RNA, 22 nt, Human
agagucuuuugucaguaauguu

SEQ ID NO: 64021 - RNA, 22 nt, Human
agagugaaguaauuguuaggau

SEQ ID NO: 64022 - RNA, 22 nt, Human
agagugacagccacugcaguaa

SEQ ID NO: 64023 - RNA, 20 nt, Human
agagugagacuccaucucag

SEQ ID NO: 64024 - RNA, 22 nt, Human
agagugagggggcacugagacg

SEQ ID NO: 64025 - RNA, 22 nt, Human
agagugaucagauaucaggugu

SEQ ID NO: 64026 - RNA, 22 nt, Human
agagugauggguugugcugacc

SEQ ID NO: 64027 - RNA, 22 nt, Human
agagugauucuaguuagggaau

SEQ ID NO: 64028 - RNA, 22 nt, Human
agagugcaugacaugaucuugg

SEQ ID NO: 64029 - RNA, 22 nt, Human
agagugccacugacaggucccu

SEQ ID NO: 64030 - RNA, 22 nt, Human
agagugcccugcucugagcucu

SEQ ID NO: 64031 - RNA, 22 nt, Human
agagugcuaaaaucuuaucuuu

SEQ ID NO: 64032 - RNA, 22 nt, Human
agagugcuagccugagggaggu

SEQ ID NO: 64033 - RNA, 21 nt, Human
agaguggcaaaguguccaaga

SEQ ID NO: 64034 - RNA, 22 nt, Human
agaguggcaccuuaccugagac

SEQ ID NO: 64035 - RNA, 22 nt, Human
agaguggcagcaaaaagugugc

SEQ ID NO: 64036 - RNA, 22 nt, Human
agaguggcccguuggccugaac

SEQ ID NO: 64037 - RNA, 22 nt, Human
agagugggcaggagccucgacu

SEQ ID NO: 64038 - RNA, 22 nt, Human
agagugggccuagcuguaaaag

SEQ ID NO: 64039 - RNA, 22 nt, Human
agaguguguggggcugagguca

SEQ ID NO: 64040 - RNA, 18 nt, Human
agaguguucucagugaaa

SEQ ID NO: 64041 - RNA, 22 nt, Human
agaguguuucagucuuccuaga

SEQ ID NO: 64042 - RNA, 22 nt, Human
agaguuauauugguugagaauu

SEQ ID NO: 64043 - RNA, 22 nt, Human
agaguuauggacuuaaugcagg

SEQ ID NO: 64044 - RNA, 22 nt, Human
agaguucuugcccuagaaaaug

SEQ ID NO: 64045 - RNA, 22 nt, Human
agaguuggccaaaaggggcauu

SEQ ID NO: 64046 - RNA, 22 nt, Human
agaguuuaccacuauuuuuggu

SEQ ID NO: 64047 - RNA, 22 nt, Human
agaguuucuugugagcacugac

SEQ ID NO: 64048 - RNA, 22 nt, Human
acucucugagcuaccaggugag

SEQ ID NO: 64049 - RNA, 22 nt, Human
acucucugguauuggcaaguuu

SEQ ID NO: 64050 - RNA, 22 nt, Human
acucugagaacugagauucccu

SEQ ID NO: 64051 - RNA, 22 nt, Human
acucugagcaucccaagucuua

SEQ ID NO: 64052 - RNA, 22 nt, Human
acucugaggagugacuagaggu

SEQ ID NO: 64053 - RNA, 22 nt, Human
acucugcaauguggcaagaaca

SEQ ID NO: 64054 - RNA, 21 nt, Human
acucugccagucuccugcacu

SEQ ID NO: 64055 - RNA, 22 nt, Human
acucugccaucccaggugcugu

SEQ ID NO: 64056 - RNA, 22 nt, Human
acucugccccgaguucugggaa

SEQ ID NO: 64057 - RNA, 22 nt, Human
acucugccugaaccuccugcaa

SEQ ID NO: 64058 - RNA, 22 nt, Human
acucugcuaucuuagcaaaagg

SEQ ID NO: 64059 - RNA, 22 nt, Human
acucugcucccuaagccaugau

SEQ ID NO: 64060 - RNA, 22 nt, Human
acucugcucuuuggacaaugcc

SEQ ID NO: 64061 - RNA, 22 nt, Human
acucugcuguuuacucucuaua

SEQ ID NO: 64062 - RNA, 22 nt, Human
acucugcuuaauuaaaaccagg

SEQ ID NO: 64063 - RNA, 22 nt, Human
acucugcuuccacuuuugcuaa

SEQ ID NO: 64064 - RNA, 22 nt, Human
acucugcuugggccauaucugg

SEQ ID NO: 64065 - RNA, 22 nt, Human
acucuggagauggaugucagga

SEQ ID NO: 64066 - RNA, 22 nt, Human
acucuggcacuggguaccucag

SEQ ID NO: 64067 - RNA, 22 nt, Human
acucuggcagcagaaccagugu

SEQ ID NO: 64068 - RNA, 22 nt, Human
acucuggggcgcuacuccaacu

SEQ ID NO: 64069 - RNA, 20 nt, Human
acucuguacugucaauguug

SEQ ID NO: 64070 - RNA, 22 nt, Human
acucuguagaucucccgggagc

SEQ ID NO: 64071 - RNA, 22 nt, Human
acucuguagauguggaaaugcg

SEQ ID NO: 64072 - RNA, 23 nt, Human
acucuguaggcuguccaugugca

SEQ ID NO: 64073 - RNA, 20 nt, Human
acucuguagguaaugagacu

SEQ ID NO: 64074 - RNA, 22 nt, Human
acucugugaagaugcaggcuug

SEQ ID NO: 64075 - RNA, 22 nt, Human
acucugugugaguagagccugu

SEQ ID NO: 64076 - RNA, 22 nt, Human
acuuguuuggucucauguuuaa

SEQ ID NO: 64077 - RNA, 22 nt, Human
acuuuacauuugaucucucuaa

SEQ ID NO: 64078 - RNA, 22 nt, Human
acuuuacuccccaacauaaaug

SEQ ID NO: 64079 - RNA, 22 nt, Human
acuuuagaaguaaggaugaguu

SEQ ID NO: 64080 - RNA, 22 nt, Human
acuuuagagaaauguagaagua

SEQ ID NO: 64081 - RNA, 22 nt, Human
acuuuagucuguuucauuaucu

SEQ ID NO: 64082 - RNA, 23 nt, Human
acuuuauccuauaucuuuguucu

SEQ ID NO: 64083 - RNA, 20 nt, Human
acuuuaugaguucaauuuug

SEQ ID NO: 64084 - RNA, 22 nt, Human
acuuuaugugcuugcucuuucc

SEQ ID NO: 64085 - RNA, 22 nt, Human
acuuucaaaagagaagucauga

SEQ ID NO: 64086 - RNA, 22 nt, Human
acuuucaacuuggugggagagc

SEQ ID NO: 64087 - RNA, 22 nt, Human
acuuucaagcaagaacacuuug

SEQ ID NO: 64088 - RNA, 22 nt, Human
acuuucaauuugcacuaaccua

SEQ ID NO: 64089 - RNA, 22 nt, Human
acuuucauguucauuuggaacc

SEQ ID NO: 64090 - RNA, 22 nt, Human
acuuucauuuguaauaaacuuc

SEQ ID NO: 64091 - RNA, 22 nt, Human
acuuucauuugugaagacugua

SEQ ID NO: 64092 - RNA, 22 nt, Human
acuuuccuggcccuguccucug

SEQ ID NO: 64093 - RNA, 22 nt, Human
acuuucuaggucucaguccuuu

SEQ ID NO: 64094 - RNA, 22 nt, Human
acuuucucaggaauucacagac

SEQ ID NO: 64095 - RNA, 19 nt, Human
acuuucuccaggaccuguu

SEQ ID NO: 64096 - RNA, 22 nt, Human
acuuucugccuuacaggagucc

SEQ ID NO: 64097 - RNA, 22 nt, Human
acuuucuguuagaugaauggau

SEQ ID NO: 64098 - RNA, 22 nt, Human
acuuucuucuacuacuuggaga

SEQ ID NO: 64099 - RNA, 22 nt, Human
acuuugaaaagacaguagcucu

SEQ ID NO: 64100 - RNA, 22 nt, Human
acuuugaaggggaacauuuuaa

SEQ ID NO: 64101 - RNA, 22 nt, Human
acuuugacagcauuuuaauuau

SEQ ID NO: 64102 - RNA, 22 nt, Human
acuuugcaaaauaaugcugauu

SEQ ID NO: 64103 - RNA, 22 nt, Human
acuuugcacuaaguuacucauu

SEQ ID NO: 64104 - RNA, 18 nt, Human
acuuugcaggcucccauu

SEQ ID NO: 64105 - RNA, 22 nt, Human
acuuugcugcagguuuaaagag

SEQ ID NO: 64106 - RNA, 22 nt, Human
acuuuggggaacuuuucuccuc

SEQ ID NO: 64107 - RNA, 22 nt, Human
acuuuggguaagccaggugcua

SEQ ID NO: 64108 - RNA, 22 nt, Human
acuuuggugcgaagucacuuua

SEQ ID NO: 64109 - RNA, 22 nt, Human
acuuugugcccaacagaaagaa

SEQ ID NO: 64110 - RNA, 22 nt, Human
acuuuguuuucaugaaacagcu

SEQ ID NO: 64111 - RNA, 22 nt, Human
acuuuuaaaugaguuucaguug

SEQ ID NO: 64112 - RNA, 22 nt, Human
acuuuuaaggggccuugauuua

SEQ ID NO: 64113 - RNA, 22 nt, Human
acuuuuaucaaggaagugaucu

SEQ ID NO: 64114 - RNA, 16 nt, Human
acuuuuccaccuuuuu

SEQ ID NO: 64115 - RNA, 22 nt, Human
acuuuuuaguuuccucaaacau

SEQ ID NO: 64116 - RNA, 22 nt, Human
acuuuuugcuggucucuuccau

SEQ ID NO: 64117 - RNA, 21 nt, Human
agaaaaacacgauauaagccc

SEQ ID NO: 64118 - RNA, 23 nt, Human
agaaaaacaggauuguguuccua

SEQ ID NO: 64119 - RNA, 19 nt, Human
agaaaaacugguacugcug

SEQ ID NO: 64120 - RNA, 22 nt, Human
agaaaaagucaaggaauuggac

SEQ ID NO: 64121 - RNA, 22 nt, Human
agaaaacucuacaucuguaugu

SEQ ID NO: 64122 - RNA, 22 nt, Human
agaaaacugcagaguagccuca

SEQ ID NO: 64123 - RNA, 22 nt, Human
agaaaacuggagccugggguug

SEQ ID NO: 64124 - RNA, 22 nt, Human
agaaaagcggucaggacccuca

SEQ ID NO: 64125 - RNA, 21 nt, Human
agaaaaguagaguuuucagag

SEQ ID NO: 64126 - RNA, 21 nt, Human
agaaaaguauuugaaucaaga

SEQ ID NO: 64127 - RNA, 22 nt, Human
agaaaauauucauugagaggcu

SEQ ID NO: 64128 - RNA, 22 nt, Human
agaaaauuagauuuuacugugu

SEQ ID NO: 64129 - RNA, 22 nt, Human
agaaaauuuaaagagacacaca

SEQ ID NO: 64130 - RNA, 22 nt, Human
agaaacaagguguagguugacc

SEQ ID NO: 64131 - RNA, 22 nt, Human
agaaacagaagggaaagcuuuu

SEQ ID NO: 64132 - RNA, 22 nt, Human
agaaacagcauuagcaucaauu

SEQ ID NO: 64133 - RNA, 22 nt, Human
agaaacauauucagugaguaau

SEQ ID NO: 64134 - RNA, 22 nt, Human
agaaacaucauuggaacacaag

SEQ ID NO: 64135 - RNA, 20 nt, Human
agaaacauuucuugagaacu

SEQ ID NO: 64136 - RNA, 22 nt, Human
agaaaccagggcuuaccagugc

SEQ ID NO: 64137 - RNA, 22 nt, Human
agaaacuaagucauaacucuuu

SEQ ID NO: 64138 - RNA, 22 nt, Human
agaaacuauccugaguagcaaa

SEQ ID NO: 64139 - RNA, 22 nt, Human
agaaacuauuaugguaaacaaa

SEQ ID NO: 64140 - RNA, 22 nt, Human
agaaacugcagcucagagaagu

SEQ ID NO: 64141 - RNA, 22 nt, Human
agaaacuucagcuauucuuuug

SEQ ID NO: 64142 - RNA, 22 nt, Human
agaaagagcucgggauuaacag

SEQ ID NO: 64143 - RNA, 22 nt, Human
agaaagaggaugcagaucucau

SEQ ID NO: 64144 - RNA, 22 nt, Human
agaaagcuggagucaagcagag

SEQ ID NO: 64145 - RNA, 22 nt, Human
agaaagggaacuggcaaagcca

SEQ ID NO: 64146 - RNA, 22 nt, Human
agaaagggagcguggaucaauu

SEQ ID NO: 64147 - RNA, 22 nt, Human
agaaagggcuauuuugagguag

SEQ ID NO: 64148 - RNA, 22 nt, Human
agaaaggucaaaaucgugacau

SEQ ID NO: 64149 - RNA, 22 nt, Human
agaaaguuagcagacucuuggc

SEQ ID NO: 64150 - RNA, 22 nt, Human
agaaaguucugugaguuguuca

SEQ ID NO: 64151 - RNA, 22 nt, Human
agaaaguuuauuccuaucuagc

SEQ ID NO: 64152 - RNA, 22 nt, Human
agaaauaaucagcuuaggggca

SEQ ID NO: 64153 - RNA, 22 nt, Human
agaaauacaaaguacuaagaua

SEQ ID NO: 64154 - RNA, 20 nt, Human
agaaauaccacauuuggcaa

SEQ ID NO: 64155 - RNA, 22 nt, Human
agaaauacugccuaagacugua

SEQ ID NO: 64156 - RNA, 22 nt, Human
agaaauagucacauuggaggaa

SEQ ID NO: 64157 - RNA, 22 nt, Human
agaaauaugcugauuagaugaa

SEQ ID NO: 64158 - RNA, 20 nt, Human
agaaauauugaguucagagg

SEQ ID NO: 64159 - RNA, 22 nt, Human
agaaaucaaugaagucugcuaa

SEQ ID NO: 64160 - RNA, 20 nt, Human
agaaaucagaccacacacua

SEQ ID NO: 64161 - RNA, 23 nt, Human
agaaaucaucuccaccccauguc

SEQ ID NO: 64162 - RNA, 22 nt, Human
agaaaucauucccaaacccaua

SEQ ID NO: 64163 - RNA, 22 nt, Human
agaaaucccaaggcaucaacca

SEQ ID NO: 64164 - RNA, 22 nt, Human
agaaauccugauggagucugaa

SEQ ID NO: 64165 - RNA, 22 nt, Human
agauuggguuugcuucugugcc

SEQ ID NO: 64166 - RNA, 22 nt, Human
agauuguagaaacuguagcauu

SEQ ID NO: 64167 - RNA, 22 nt, Human
agauugugucaauuucucuuua

SEQ ID NO: 64168 - RNA, 18 nt, Human
agauugugucuacaaauc

SEQ ID NO: 64169 - RNA, 22 nt, Human
agauuuaaauuugcuacaauuc

SEQ ID NO: 64170 - RNA, 22 nt, Human
agauuuagacugccuuaaucau

SEQ ID NO: 64171 - RNA, 22 nt, Human
agauuuauguggucacacucag

SEQ ID NO: 64172 - RNA, 22 nt, Human
agauuucaauggauauugcaag

SEQ ID NO: 64173 - RNA, 22 nt, Human
agauuucaaugugagcauuagu

SEQ ID NO: 64174 - RNA, 22 nt, Human
agauuucacaugcugcucuauu

SEQ ID NO: 64175 - RNA, 22 nt, Human
agauuucagaugcucggcaguu

SEQ ID NO: 64176 - RNA, 22 nt, Human
agauuucccucuuguauuugca

SEQ ID NO: 64177 - RNA, 22 nt, Human
agauuucucuuucccuggcuga

SEQ ID NO: 64178 - RNA, 22 nt, Human
agauuucuguggucauguaaug

SEQ ID NO: 64179 - RNA, 22 nt, Human
agauuugggggcuagggcuggu

SEQ ID NO: 64180 - RNA, 22 nt, Human
agauuuguaugucuaaauguaa

SEQ ID NO: 64181 - RNA, 22 nt, Human
agauuugucuuggucucaucug

SEQ ID NO: 64182 - RNA, 22 nt, Human
agauuuuaguuuggggaggugc

SEQ ID NO: 64183 - RNA, 22 nt, Human
agauuuuggcuggcuggagaga

SEQ ID NO: 64184 - RNA, 22 nt, Human
agcaaaauaagguaauuuauug

SEQ ID NO: 64185 - RNA, 22 nt, Human
agacuacauaugccacaugaag

SEQ ID NO: 64186 - RNA, 22 nt, Human
agacuacauuaugacagcauuu

SEQ ID NO: 64187 - RNA, 22 nt, Human
agacuauuaccuaaaagauaca

SEQ ID NO: 64188 - RNA, 22 nt, Human
agacuauuuugugauaacuaau

SEQ ID NO: 64189 - RNA, 22 nt, Human
agacucaagacugcagaagacg

SEQ ID NO: 64190 - RNA, 22 nt, Human
agacucaagcagauaggaauua

SEQ ID NO: 64191 - RNA, 22 nt, Human
agacuccaaaaguuugguggaa

SEQ ID NO: 64192 - RNA, 22 nt, Human
agacuccaggagggaggcugcu

SEQ ID NO: 64193 - RNA, 22 nt, Human
agacuccuucucacugccugua

SEQ ID NO: 64194 - RNA, 22 nt, Human
agacucugcauuucuaauaagc

SEQ ID NO: 64195 - RNA, 22 nt, Human
agacucugcuaagaauauaauu

SEQ ID NO: 64196 - RNA, 22 nt, Human
agacucuuggucauuggcauua

SEQ ID NO: 64197 - RNA, 22 nt, Human
agacugaaauagugcacaccaa

SEQ ID NO: 64198 - RNA, 23 nt, Human
agacugaggcugccagggucaga

SEQ ID NO: 64199 - RNA, 22 nt, Human
agacugggauucucccugauca

SEQ ID NO: 64200 - RNA, 22 nt, Human
agacugggccauuuccccagcu

SEQ ID NO: 64201 - RNA, 22 nt, Human
agacugguuuuuaacuucaccu

SEQ ID NO: 64202 - RNA, 17 nt, Human
agacuguacuguaaagc

SEQ ID NO: 64203 - RNA, 22 nt, Human
agacugugagaagauggcugcg

SEQ ID NO: 64204 - RNA, 21 nt, Human
agacuguggauuuugacaugu

SEQ ID NO: 64205 - RNA, 22 nt, Human
agacuguugccugaacuuagcc

SEQ ID NO: 64206 - RNA, 22 nt, Human
agacuuaggagcugacaucucu

SEQ ID NO: 64207 - RNA, 20 nt, Human
agacuuaggcaauuuaggcu

SEQ ID NO: 64208 - RNA, 22 nt, Human
agacuuaggugagauguuugua

SEQ ID NO: 64209 - RNA, 22 nt, Human
agacuucuaaauagcagcuucu

SEQ ID NO: 64210 - RNA, 22 nt, Human
agacuucucaguuuuauuagua

SEQ ID NO: 64211 - RNA, 23 nt, Human
agacuucuccaacaagcuuggcu

SEQ ID NO: 64212 - RNA, 22 nt, Human
agacuuuaucccuguuuuucuc

SEQ ID NO: 64213 - RNA, 21 nt, Human
agacuuugcuugcagagaguc

SEQ ID NO: 64214 - RNA, 19 nt, Human
agacuuuuguaaguugaga

SEQ ID NO: 64215 - RNA, 22 nt, Human
agagaaacaggucagcugggag

SEQ ID NO: 64216 - RNA, 22 nt, Human
agagaaacccuucaguguuuug

SEQ ID NO: 64217 - RNA, 18 nt, Human
agagaaagaccaaagcau

SEQ ID NO: 64218 - RNA, 23 nt, Human
agagaaagggauaacacguugaa

SEQ ID NO: 64219 - RNA, 21 nt, Human
agagaaagucauggcuguggc

SEQ ID NO: 64220 - RNA, 22 nt, Human
agagaaaguccugaucucucua

SEQ ID NO: 64221 - RNA, 22 nt, Human
agagaacagcauugcagcuuug

SEQ ID NO: 64222 - RNA, 22 nt, Human
agagaacauauuuuguaugauu

SEQ ID NO: 64223 - RNA, 22 nt, Human
agagaacaugacguaauagugg

SEQ ID NO: 64224 - RNA, 22 nt, Human
agagaacuacuuuuuauaugug

SEQ ID NO: 64225 - RNA, 22 nt, Human
agagaagacuuacagccacagu

SEQ ID NO: 64226 - RNA, 18 nt, Human
agagaagagguguuaguc

SEQ ID NO: 64227 - RNA, 22 nt, Human
agagaagcugacaggggcgugc

SEQ ID NO: 64228 - RNA, 22 nt, Human
agagaaggcauagaacuugagu

SEQ ID NO: 64229 - RNA, 22 nt, Human
agagaagggaagggauucaccc

SEQ ID NO: 64230 - RNA, 22 nt, Human
agagaaggucacuaaggaccca

SEQ ID NO: 64231 - RNA, 22 nt, Human
agagaauacaaagaagauaugu

SEQ ID NO: 64232 - RNA, 22 nt, Human
agagaaugcagggcuucggaca

SEQ ID NO: 64233 - RNA, 22 nt, Human
agagaauuaacauuccauggcu

SEQ ID NO: 64234 - RNA, 22 nt, Human
agagaauuaauuaggagcacug

SEQ ID NO: 64235 - RNA, 22 nt, Human
agagaauucuggugcuaacaag

SEQ ID NO: 64236 - RNA, 22 nt, Human
agagacaaugccaaugcacacg

SEQ ID NO: 64237 - RNA, 22 nt, Human
agagacacaucauauaaguaua

SEQ ID NO: 64238 - RNA, 22 nt, Human
agagacaccgcgcaucauggcu

SEQ ID NO: 64239 - RNA, 22 nt, Human
agagacaggguuuugccauguu

SEQ ID NO: 64240 - RNA, 22 nt, Human
agagacauggagaggcaaaguu

SEQ ID NO: 64241 - RNA, 22 nt, Human
agagaccaagggaauagucuca

SEQ ID NO: 64242 - RNA, 19 nt, Human
agagaccacagagcugccu

SEQ ID NO: 64243 - RNA, 21 nt, Human
agagaccagcuguuacuccca

SEQ ID NO: 64244 - RNA, 22 nt, Human
agagacccgcagccucggagcu

SEQ ID NO: 64245 - RNA, 22 nt, Human
agagacccuggaguucuucacu

SEQ ID NO: 64246 - RNA, 22 nt, Human
agagacuaagccagcauagugc

SEQ ID NO: 64247 - RNA, 22 nt, Human
agagacugauggaucaccaaau

SEQ ID NO: 64248 - RNA, 22 nt, Human
agagacugcaaugagugguagg

SEQ ID NO: 64249 - RNA, 22 nt, Human
agagacugcuuuauauuguacu

SEQ ID NO: 64250 - RNA, 22 nt, Human
agagacuguaaugagagguaca

SEQ ID NO: 64251 - RNA, 22 nt, Human
agagacuguguccaucgugccu

SEQ ID NO: 64252 - RNA, 17 nt, Human
agagagaaaagggccau

SEQ ID NO: 64253 - RNA, 22 nt, Human
agagagaacacccucggcaugg

SEQ ID NO: 64254 - RNA, 22 nt, Human
agagagcaguggaucaccuagc

SEQ ID NO: 64255 - RNA, 22 nt, Human
agagagcucugaugggagguga

SEQ ID NO: 64256 - RNA, 22 nt, Human
agagagcuuccauucuagugau

SEQ ID NO: 64257 - RNA, 22 nt, Human
agagaggauuuguuuuucuccu

SEQ ID NO: 64258 - RNA, 22 nt, Human
agagaggcugcuggacuauaug

SEQ ID NO: 64259 - RNA, 22 nt, Human
agagaggcugggcguagggcuu

SEQ ID NO: 64260 - RNA, 21 nt, Human
agagagggagaugaaacaucc

SEQ ID NO: 64261 - RNA, 22 nt, Human
agagagguuugcuggaagauuc

SEQ ID NO: 64262 - RNA, 22 nt, Human
agagagucuuucucuuccuguu

SEQ ID NO: 64263 - RNA, 22 nt, Human
agagaguucuuucuaguugaag

SEQ ID NO: 64264 - RNA, 22 nt, Human
agagaguugaggaagcaacacu

SEQ ID NO: 64265 - RNA, 22 nt, Human
agagauaugcugccuaaauuua

SEQ ID NO: 64266 - RNA, 22 nt, Human
agagaucaaagcuugccaagua

SEQ ID NO: 64267 - RNA, 22 nt, Human
agagaucugugcuuacuacaag

SEQ ID NO: 64268 - RNA, 22 nt, Human
agagaucuguggauucauuguc

SEQ ID NO: 64269 - RNA, 22 nt, Human
agagaugaagggcauuccccag

SEQ ID NO: 64270 - RNA, 22 nt, Human
agagaugcauucagcauggaug

SEQ ID NO: 64271 - RNA, 22 nt, Human
agagaugcgguuccaugguuau

SEQ ID NO: 64272 - RNA, 22 nt, Human
agagaugcugcccgcagacgug

SEQ ID NO: 64273 - RNA, 22 nt, Human
agagauggauguuauuaugggu

SEQ ID NO: 64274 - RNA, 22 nt, Human
agagauuacagcaggguccagc

SEQ ID NO: 64275 - RNA, 22 nt, Human
agagauuagccuggauuaugca

SEQ ID NO: 64276 - RNA, 22 nt, Human
agagauuccuuuggggaaagca

SEQ ID NO: 64277 - RNA, 22 nt, Human
agagauucugugucaaaacgaa

SEQ ID NO: 64278 - RNA, 21 nt, Human
acugugggucugaccaccugg

SEQ ID NO: 64279 - RNA, 22 nt, Human
acugugguuaccucuugucuua

SEQ ID NO: 64280 - RNA, 18 nt, Human
acugugguuuauguguag

SEQ ID NO: 64281 - RNA, 22 nt, Human
acugugugacuguuauuacugu

SEQ ID NO: 64282 - RNA, 20 nt, Human
acugugugaucuggaaagcu

SEQ ID NO: 64283 - RNA, 19 nt, Human
acuguguggaagugugauu

SEQ ID NO: 64284 - RNA, 21 nt, Human
acuguuaagacguagcugggg

SEQ ID NO: 64285 - RNA, 22 nt, Human
acuguuaugggugucagcuuaa

SEQ ID NO: 64286 - RNA, 22 nt, Human
acuguuauguuauuacccaugu

SEQ ID NO: 64287 - RNA, 22 nt, Human
acuguucauauucuuagaaauu

SEQ ID NO: 64288 - RNA, 22 nt, Human
acuguucauccuuuuugaacaa

SEQ ID NO: 64289 - RNA, 21 nt, Human
acuguucauuugaugaacugg

SEQ ID NO: 64290 - RNA, 22 nt, Human
acuguucauuuguccuguaucu

SEQ ID NO: 64291 - RNA, 22 nt, Human
acuguucuccuuuggcuauauc

SEQ ID NO: 64292 - RNA, 22 nt, Human
acuguugaagugccagcuugau

SEQ ID NO: 64293 - RNA, 23 nt, Human
acuguuggugcagaagugccuug

SEQ ID NO: 64294 - RNA, 22 nt, Human
caugggggcugaggcugcugua

SEQ ID NO: 64295 - RNA, 21 nt, Human
caugggguugcuauagcaaaa

SEQ ID NO: 64296 - RNA, 22 nt, Human
cauggugaggggugaagggcag

SEQ ID NO: 64297 - RNA, 22 nt, Human
caugguuuauuagagcuuauuu

SEQ ID NO: 64298 - RNA, 22 nt, Human
caugguuucaugagaauuaccc

SEQ ID NO: 64299 - RNA, 22 nt, Human
caugguuugaugacuggaagga

SEQ ID NO: 64300 - RNA, 22 nt, Human
cauguauacaguagaauacuau

SEQ ID NO: 64301 - RNA, 22 nt, Human
cauguauagguccauagugaau

SEQ ID NO: 64302 - RNA, 22 nt, Human
cauguaucccuaauuguguuaa

SEQ ID NO: 64303 - RNA, 22 nt, Human
caugucaaccaguuguuugaau

SEQ ID NO: 64304 - RNA, 22 nt, Human
cauguccuucucauugccucau

SEQ ID NO: 64305 - RNA, 18 nt, Human
caugucugcgccacaagg

SEQ ID NO: 64306 - RNA, 23 nt, Human
caugucugcuuucaugcuacaac

SEQ ID NO: 64307 - RNA, 22 nt, Human
caugucuuuguuaugcucacca

SEQ ID NO: 64308 - RNA, 22 nt, Human
caugugacaggagcagcucuaa

SEQ ID NO: 64309 - RNA, 22 nt, Human
caugugcauuggggccagggag

SEQ ID NO: 64310 - RNA, 22 nt, Human
caugugcuguagcagagaggaa

SEQ ID NO: 64311 - RNA, 22 nt, Human
cauguggauaugaauuguagaa

SEQ ID NO: 64312 - RNA, 22 nt, Human
cauguguaugcauucauacaua

SEQ ID NO: 64313 - RNA, 19 nt, Human
caugugucaauacuguacc

SEQ ID NO: 64314 - RNA, 21 nt, Human
caugugucauuggagagcaau

SEQ ID NO: 64315 - RNA, 22 nt, Human
cauguguccacccuugaacaca

SEQ ID NO: 64316 - RNA, 22 nt, Human
caugugugaguauaucuuaucc

SEQ ID NO: 64317 - RNA, 22 nt, Human
caugugugugagggaaacaugu

SEQ ID NO: 64318 - RNA, 22 nt, Human
cauguguguggacgagcguggc

SEQ ID NO: 64319 - RNA, 22 nt, Human
cauguuaaauugaguuugcaau

SEQ ID NO: 64320 - RNA, 22 nt, Human
cauguuaaugaauuuuugcagu

SEQ ID NO: 64321 - RNA, 22 nt, Human
cauguugaauggccuugauuuu

SEQ ID NO: 64322 - RNA, 22 nt, Human
cauguuuuguguacagaauauu

SEQ ID NO: 64323 - RNA, 23 nt, Human
cauguuuuucuaucucagcgugu

SEQ ID NO: 64324 - RNA, 22 nt, Human
cauuaaaauaucucaugguguu

SEQ ID NO: 64325 - RNA, 22 nt, Human
cauuacaaaguuauaaacaguu

SEQ ID NO: 64326 - RNA, 22 nt, Human
cauuacuucucaugcuucaugc

SEQ ID NO: 64327 - RNA, 23 nt, Human
cauuagaagguagaguggaauga

SEQ ID NO: 64328 - RNA, 22 nt, Human
cauuagauuggugcaaaaauaa

SEQ ID NO: 64329 - RNA, 22 nt, Human
cauuagcaaucauaaaccuuua

SEQ ID NO: 64330 - RNA, 22 nt, Human
cauuagcacucuaaggaagaga

SEQ ID NO: 64331 - RNA, 22 nt, Human
cauuagcaggcacuaagaaggu

SEQ ID NO: 64332 - RNA, 22 nt, Human
cauuagcuaucuguuuacauua

SEQ ID NO: 64333 - RNA, 19 nt, Human
cauuaggauuagagacaag

SEQ ID NO: 64334 - RNA, 22 nt, Human
cauuagggacugaggaauaagg

SEQ ID NO: 64335 - RNA, 22 nt, Human
cauuagguauuuaagcacacag

SEQ ID NO: 64336 - RNA, 22 nt, Human
cauuaucucuucuauaugcuag

SEQ ID NO: 64337 - RNA, 22 nt, Human
cauuaugugcguacauguaucu

SEQ ID NO: 64338 - RNA, 22 nt, Human
cauuaugugggaaaauguucuu

SEQ ID NO: 64339 - RNA, 22 nt, Human
cauuauguucaguagcuuaaaa

SEQ ID NO: 64340 - RNA, 22 nt, Human
cauuauuaauucagcacaugcu

SEQ ID NO: 64341 - RNA, 22 nt, Human
cauucaaaggcauguccuauuu

SEQ ID NO: 64342 - RNA, 22 nt, Human
cauucaaauuaagauuuuguua

SEQ ID NO: 64343 - RNA, 22 nt, Human
cauucacaaagcugauugaugg

SEQ ID NO: 64344 - RNA, 22 nt, Human
cauucacaacugagcauuguug

SEQ ID NO: 64345 - RNA, 22 nt, Human
cauucacaauggauugcuucaa

SEQ ID NO: 64346 - RNA, 22 nt, Human
cauucagagcuuucuuaucaua

SEQ ID NO: 64347 - RNA, 22 nt, Human
cauucauuagaauagauaugua

SEQ ID NO: 64348 - RNA, 22 nt, Human
cauuccaaggccaagucuaaga

SEQ ID NO: 64349 - RNA, 22 nt, Human
cauuccaaguauauacaugaua

SEQ ID NO: 64350 - RNA, 22 nt, Human
cauucccuuggggaguucaugc

SEQ ID NO: 64351 - RNA, 22 nt, Human
cauuccgcuccccuuccuugcg

SEQ ID NO: 64352 - RNA, 22 nt, Human
cauuccuacaugauaagaauua

SEQ ID NO: 64353 - RNA, 19 nt, Human
cauuccuuugucugccaaa

SEQ ID NO: 64354 - RNA, 22 nt, Human
cauucggagguaguugagguua

SEQ ID NO: 64355 - RNA, 22 nt, Human
cauucguggcccucuggauaag

SEQ ID NO: 64356 - RNA, 22 nt, Human
cauucucugaucuucacauacc

SEQ ID NO: 64357 - RNA, 22 nt, Human
cauucugagucacucuuuagca

SEQ ID NO: 64358 - RNA, 22 nt, Human
cauggcuucuaagugauaacgu

SEQ ID NO: 64359 - RNA, 22 nt, Human
cauggcuugcuaguggcccaag

SEQ ID NO: 64360 - RNA, 22 nt, Human
cauggcuuuccaguccuccacu

SEQ ID NO: 64361 - RNA, 22 nt, Human
cauggcuuucccucaagagcaa

SEQ ID NO: 64362 - RNA, 22 nt, Human
cauggcuuuguucauauaauuu

SEQ ID NO: 64363 - RNA, 22 nt, Human
caugggagcuaucuccaucacu

SEQ ID NO: 64364 - RNA, 22 nt, Human
caugggaggccugcugcuggug

SEQ ID NO: 64365 - RNA, 22 nt, Human
caugggccauggugaagccagg

SEQ ID NO: 64366 - RNA, 22 nt, Human
caugggcuacagaagcaugcug

SEQ ID NO: 64367 - RNA, 22 nt, Human
cauggguaagacucuuuugccc

SEQ ID NO: 64368 - RNA, 18 nt, Human
caugggugacagguggau

SEQ ID NO: 64369 - RNA, 22 nt, Human
cauggucuacaauuucauuuua

SEQ ID NO: 64370 - RNA, 22 nt, Human
caugguuuugagccuauuaugc

SEQ ID NO: 64371 - RNA, 22 nt, Human
caugguuuuuacccuacaccau

SEQ ID NO: 64372 - RNA, 22 nt, Human
cauguaaaaaauuaggucaucu

SEQ ID NO: 64373 - RNA, 22 nt, Human
cauguaaaaagaagaaucugga

SEQ ID NO: 64374 - RNA, 22 nt, Human
cauguaaaacacucagaacagu

SEQ ID NO: 64375 - RNA, 22 nt, Human
cauguaaagcacuucauaacag

SEQ ID NO: 64376 - RNA, 22 nt, Human
cauguaaagcauccuucuaggg

SEQ ID NO: 64377 - RNA, 22 nt, Human
cauguaaauccuucuuuaggcc

SEQ ID NO: 64378 - RNA, 22 nt, Human
cauguacaaaaggcaaaugccu

SEQ ID NO: 64379 - RNA, 22 nt, Human
cauguacacucauguaacuaua

SEQ ID NO: 64380 - RNA, 22 nt, Human
cauguacaguuuuucuguccug

SEQ ID NO: 64381 - RNA, 22 nt, Human
cauguacaugcaugggcacugu

SEQ ID NO: 64382 - RNA, 22 nt, Human
cauguauauuucuguaugugca

SEQ ID NO: 64383 - RNA, 22 nt, Human
cauguauauuuuauguggagag

SEQ ID NO: 64384 - RNA, 22 nt, Human
cauguauugaagugugcaucug

SEQ ID NO: 64385 - RNA, 22 nt, Human
caugucacuuuaacaaauuagu

SEQ ID NO: 64386 - RNA, 22 nt, Human
caugucagggaagagagucagu

SEQ ID NO: 64387 - RNA, 22 nt, Human
caugucccaaaugcaggcaaag

SEQ ID NO: 64388 - RNA, 22 nt, Human
caugucuuaggaaagcagagga

SEQ ID NO: 64389 - RNA, 22 nt, Human
caugucuuccuugcacacacac

SEQ ID NO: 64390 - RNA, 22 nt, Human
caugucuuggcuuaggcacaga

SEQ ID NO: 64391 - RNA, 22 nt, Human
caugugaauuccaaagcuaggu

SEQ ID NO: 64392 - RNA, 22 nt, Human
caugugcagacucugacaggcu

SEQ ID NO: 64393 - RNA, 22 nt, Human
caugugcauccuuaaucucccu

SEQ ID NO: 64394 - RNA, 22 nt, Human
caugugggacaaucucagguau

SEQ ID NO: 64395 - RNA, 22 nt, Human
cauguguagguauacaaaauuc

SEQ ID NO: 64396 - RNA, 22 nt, Human
cauguguagugaaauaagcagu

SEQ ID NO: 64397 - RNA, 17 nt, Human
cauguguaugugggagu

SEQ ID NO: 64398 - RNA, 22 nt, Human
caugugucaaaugauguagcug

SEQ ID NO: 64399 - RNA, 22 nt, Human
caugugucacagccuuuuauug

SEQ ID NO: 64400 - RNA, 20 nt, Human
caugugucaguucucaccca

SEQ ID NO: 64401 - RNA, 22 nt, Human
caugugugacaaacugccugca

SEQ ID NO: 64402 - RNA, 23 nt, Human
caugugugacaguaucacuguuu

SEQ ID NO: 64403 - RNA, 22 nt, Human
cauuucaaaagaauugccagaa

SEQ ID NO: 64404 - RNA, 22 nt, Human
cauuucaauacaguuuguaaau

SEQ ID NO: 64405 - RNA, 22 nt, Human
cauuucaauacuaucugagaau

SEQ ID NO: 64406 - RNA, 22 nt, Human
cauuucacaaauggccacauca

SEQ ID NO: 64407 - RNA, 22 nt, Human
cauuucacacauaaacuugggu

SEQ ID NO: 64408 - RNA, 22 nt, Human
cauuucacgcacacucauuacu

SEQ ID NO: 64409 - RNA, 22 nt, Human
cauuucauaguugucacaauaa

SEQ ID NO: 64410 - RNA, 22 nt, Human
cauuucauuccuuugaaagugg

SEQ ID NO: 64411 - RNA, 20 nt, Human
cauuucauugugucuucacu

SEQ ID NO: 64412 - RNA, 22 nt, Human
cauuuccuuccugcugcuccuc

SEQ ID NO: 64413 - RNA, 22 nt, Human
cauuucuacagcuucuucagaa

SEQ ID NO: 64414 - RNA, 22 nt, Human
cauuucuagggaucauaaagua

SEQ ID NO: 64415 - RNA, 23 nt, Human
cauuucuagguguguuuggccau

SEQ ID NO: 64416 - RNA, 22 nt, Human
cauuucucacuccagcaacuuu

SEQ ID NO: 64417 - RNA, 22 nt, Human
cauuucugauuacagaauacua

SEQ ID NO: 64418 - RNA, 23 nt, Human
cauuucugggagauuuauaaaau

SEQ ID NO: 64419 - RNA, 22 nt, Human
cauuucugucacguucuuuuau

SEQ ID NO: 64420 - RNA, 22 nt, Human
cauuugaaaccuggaaucuacc

SEQ ID NO: 64421 - RNA, 22 nt, Human
cauuugaagaagaaacguacua

SEQ ID NO: 64422 - RNA, 22 nt, Human
cauuugaagacuuagaagagga

SEQ ID NO: 64423 - RNA, 22 nt, Human
cauuugaauuguucugugggaa

SEQ ID NO: 64424 - RNA, 22 nt, Human
cauuugaucuccugaauaaaca

SEQ ID NO: 64425 - RNA, 22 nt, Human
cauuugaugacucaacucauaa

SEQ ID NO: 64426 - RNA, 22 nt, Human
cauuugcagagggugacacucu

SEQ ID NO: 64427 - RNA, 22 nt, Human
cauuugcuagcaggccuuuuau

SEQ ID NO: 64428 - RNA, 22 nt, Human
cauuugcucugugucaguggca

SEQ ID NO: 64429 - RNA, 17 nt, Human
cauuugcugguuggcuc

SEQ ID NO: 64430 - RNA, 22 nt, Human
cauuugcuuccugggucuugaa

SEQ ID NO: 64431 - RNA, 22 nt, Human
cauuuggccauuccagucacau

SEQ ID NO: 64432 - RNA, 22 nt, Human
cauuuguaagcauggcguugga

SEQ ID NO: 64433 - RNA, 22 nt, Human
cauuuguaauacugacuugcag

SEQ ID NO: 64434 - RNA, 22 nt, Human
cauuuguaggaugcuucuuguu

SEQ ID NO: 64435 - RNA, 22 nt, Human
cauuuguaguaucuguuuauau

SEQ ID NO: 64436 - RNA, 22 nt, Human
cauuuguaucauauguaucuua

SEQ ID NO: 64437 - RNA, 22 nt, Human
cauuuguaucugggcugcugug

SEQ ID NO: 64438 - RNA, 22 nt, Human
cauuugugcuuuuauaaaauag

SEQ ID NO: 64439 - RNA, 22 nt, Human
cauuugugugggaacccaucag

SEQ ID NO: 64440 - RNA, 20 nt, Human
cauuuguuagcuuucuacug

SEQ ID NO: 64441 - RNA, 22 nt, Human
cauuuguucugauuucaaaagg

SEQ ID NO: 64442 - RNA, 22 nt, Human
cauuuuaaaugauuuaagccaa

SEQ ID NO: 64443 - RNA, 22 nt, Human
cauuuuacgacauagggcaggc

SEQ ID NO: 64444 - RNA, 22 nt, Human
cauuuuauguuuauggagugcu

SEQ ID NO: 64445 - RNA, 22 nt, Human
cauuuucaugaguuucuguuca

SEQ ID NO: 64446 - RNA, 23 nt, Human
ccaaaagcgagucuguuguuccc

SEQ ID NO: 64447 - RNA, 22 nt, Human
ccaaacuguuucguauuuaugc

SEQ ID NO: 64448 - RNA, 22 nt, Human
ccaaagaaacccaagcucaggg

SEQ ID NO: 64449 - RNA, 22 nt, Human
ccaaagagcuagaauuauaggc

SEQ ID NO: 64450 - RNA, 19 nt, Human
ccaaaggaaguuucccucc

SEQ ID NO: 64451 - RNA, 22 nt, Human
ccaaaggaugucccuguguuuu

SEQ ID NO: 64452 - RNA, 22 nt, Human
ccaaaggccaagcucagguaaa

SEQ ID NO: 64453 - RNA, 22 nt, Human
ccaaaguaaggcaauuccuaaa

SEQ ID NO: 64454 - RNA, 22 nt, Human
ccaaaguauuaaaucuuagcaa

SEQ ID NO: 64455 - RNA, 22 nt, Human
ccaaaguccauaguuuacuuua

SEQ ID NO: 64456 - RNA, 22 nt, Human
ccaaagugauaugugcuguaag

SEQ ID NO: 64457 - RNA, 22 nt, Human
ccaaagugugggagaagaggua

SEQ ID NO: 64458 - RNA, 22 nt, Human
ccaaauagucuuucauugaauu

SEQ ID NO: 64459 - RNA, 22 nt, Human
ccaaaucaccagcacgaucauu

SEQ ID NO: 64460 - RNA, 22 nt, Human
ccaaaugcuccacugacuuugg

SEQ ID NO: 64461 - RNA, 22 nt, Human
ccaaauucuguguucaaacuca

SEQ ID NO: 64462 - RNA, 19 nt, Human
ccaacaguacugaagcacu

SEQ ID NO: 64463 - RNA, 22 nt, Human
ccaacucugaaaauccagauau

SEQ ID NO: 64464 - RNA, 20 nt, Human
ccaagagcaugcaugaggaa

SEQ ID NO: 64465 - RNA, 22 nt, Human
ccaagagguugaggcugcagug

SEQ ID NO: 64466 - RNA, 22 nt, Human
ccaagauaagagacaagauuua

SEQ ID NO: 64467 - RNA, 22 nt, Human
ccaagaugagcuggcuccaugg

SEQ ID NO: 64468 - RNA, 22 nt, Human
ccaagcagucugcuaggaguuu

SEQ ID NO: 64469 - RNA, 22 nt, Human
ccaagcuggauuuagcugcaca

SEQ ID NO: 64470 - RNA, 22 nt, Human
ccaagcuucuuuccuacuacag

SEQ ID NO: 64471 - RNA, 22 nt, Human
ccaaggacuggacacacagguu

SEQ ID NO: 64472 - RNA, 22 nt, Human
ccaaggagaaaugcugugcuuu

SEQ ID NO: 64473 - RNA, 22 nt, Human
ccaaggagaaugacaccaugga

SEQ ID NO: 64474 - RNA, 22 nt, Human
ccaaggagcaaguuuacaccug

SEQ ID NO: 64475 - RNA, 20 nt, Human
cauuggcauucacagaagcu

SEQ ID NO: 64476 - RNA, 22 nt, Human
cauugguugucauggcaggagg

SEQ ID NO: 64477 - RNA, 22 nt, Human
cauuguauugaggauacuuaag

SEQ ID NO: 64478 - RNA, 22 nt, Human
cauugucacccaaagcucauag

SEQ ID NO: 64479 - RNA, 22 nt, Human
cauuguguauuucuguaguacu

SEQ ID NO: 64480 - RNA, 22 nt, Human
cauuguuaccaucuuuuaccua

SEQ ID NO: 64481 - RNA, 22 nt, Human
cauuguucaacacugacuugca

SEQ ID NO: 64482 - RNA, 22 nt, Human
cauuguuuguaaaauuccagua

SEQ ID NO: 64483 - RNA, 22 nt, Human
cauuuaaagguuguggguaaaa

SEQ ID NO: 64484 - RNA, 22 nt, Human
cauuuaagagaaauauuuaguu

SEQ ID NO: 64485 - RNA, 22 nt, Human
cauuuacauaacaguaacgcug

SEQ ID NO: 64486 - RNA, 22 nt, Human
cauuuacuuaaaucuuuacaag

SEQ ID NO: 64487 - RNA, 20 nt, Human
cauuuagaaauuggcaugga

SEQ ID NO: 64488 - RNA, 19 nt, Human
cauuuagaaguacauauua

SEQ ID NO: 64489 - RNA, 22 nt, Human
cauuuagagaagauuacaagga

SEQ ID NO: 64490 - RNA, 22 nt, Human
cauuuagagucuugcaauuuua

SEQ ID NO: 64491 - RNA, 22 nt, Human
cauuuaguccuugacuucucuc

SEQ ID NO: 64492 - RNA, 22 nt, Human
cauuuauuggcauguaguaggu

SEQ ID NO: 64493 - RNA, 22 nt, Human
cauuuauugguuaggccagcag

SEQ ID NO: 64494 - RNA, 23 nt, Human
cauuucaacgaauuuuccuucug

SEQ ID NO: 64495 - RNA, 22 nt, Human
cauuucaaguaacagauugcuu

SEQ ID NO: 64496 - RNA, 22 nt, Human
cauuucacaguaaagugauuuc

SEQ ID NO: 64497 - RNA, 22 nt, Human
cauuucacaguauauucaaaau

SEQ ID NO: 64498 - RNA, 22 nt, Human
cauuucacuauucacuaaaagg

SEQ ID NO: 64499 - RNA, 22 nt, Human
cauuucaguguuauucuaauuu

SEQ ID NO: 64500 - RNA, 22 nt, Human
cauuuccacucugggagucaga

SEQ ID NO: 64501 - RNA, 22 nt, Human
cauuucuaagaagaucugggua

SEQ ID NO: 64502 - RNA, 22 nt, Human
cauuucuaagaaggcugcacau

SEQ ID NO: 64503 - RNA, 22 nt, Human
cauuucuaccaaaugugacugg

SEQ ID NO: 64504 - RNA, 22 nt, Human
cauuucuagagucccaagaggu

SEQ ID NO: 64505 - RNA, 22 nt, Human
cauuucuauggcaaugggaaaa

SEQ ID NO: 64506 - RNA, 21 nt, Human
cauuucuauugaugagaaaag

SEQ ID NO: 64507 - RNA, 22 nt, Human
cauuucugggagacaugcuaga

SEQ ID NO: 64508 - RNA, 22 nt, Human
cauuucuguacauguuuuggug

SEQ ID NO: 64509 - RNA, 22 nt, Human
cauuucugugacacuuccaucu

SEQ ID NO: 64510 - RNA, 22 nt, Human
cauuugaaauaguucauucuug

SEQ ID NO: 64511 - RNA, 22 nt, Human
cauuugaaauucuuagaacaaa

SEQ ID NO: 64512 - RNA, 20 nt, Human
cuuagaagggacauccuggg

SEQ ID NO: 64513 - RNA, 22 nt, Human
cuuagaauaaaagggggcuaua

SEQ ID NO: 64514 - RNA, 22 nt, Human
cuuagaauuuuaauccagaaag

SEQ ID NO: 64515 - RNA, 22 nt, Human
cuuagacauggcagcuccaagu

SEQ ID NO: 64516 - RNA, 22 nt, Human
cuuagaguuauggaaauguuga

SEQ ID NO: 64517 - RNA, 22 nt, Human
cuuagcaagaaucagcugcugg

SEQ ID NO: 64518 - RNA, 22 nt, Human
cuuagcaagcauucaagugccu

SEQ ID NO: 64519 - RNA, 22 nt, Human
cuuagcaaggcugccuggagaa

SEQ ID NO: 64520 - RNA, 22 nt, Human
cuuagcuucauuauugguggcc

SEQ ID NO: 64521 - RNA, 20 nt, Human
cuuagcuucuaagguucugg

SEQ ID NO: 64522 - RNA, 22 nt, Human
cuuaggaagcgggaccugugca

SEQ ID NO: 64523 - RNA, 22 nt, Human
cuuaggaauauccacagcaggu

SEQ ID NO: 64524 - RNA, 22 nt, Human
cuuaggcauccaggguucuucc

SEQ ID NO: 64525 - RNA, 22 nt, Human
cuuaguuugcaugauuauggag

SEQ ID NO: 64526 - RNA, 22 nt, Human
cuuaguuuuugcccuggaguuu

SEQ ID NO: 64527 - RNA, 22 nt, Human
cuuauacauaaaauggguguag

SEQ ID NO: 64528 - RNA, 22 nt, Human
cuuauagaauuagagagauuuu

SEQ ID NO: 64529 - RNA, 22 nt, Human
cuuauagauggcgaucuucuug

SEQ ID NO: 64530 - RNA, 22 nt, Human
cuuaucugagaaagaugcuaca

SEQ ID NO: 64531 - RNA, 22 nt, Human
cuuaucuguaaaauggauacaa

SEQ ID NO: 64532 - RNA, 22 nt, Human
cuuaugauucaaauaggaucuu

SEQ ID NO: 64533 - RNA, 22 nt, Human
cuuaugcugagaaugaaagaau

SEQ ID NO: 64534 - RNA, 22 nt, Human
cuuauggaagaaaccucagaga

SEQ ID NO: 64535 - RNA, 22 nt, Human
cuuauguacacacauauauugu

SEQ ID NO: 64536 - RNA, 22 nt, Human
cuuauguaugcuacuuuguggu

SEQ ID NO: 64537 - RNA, 22 nt, Human
cuuauuaauggaauccuaauga

SEQ ID NO: 64538 - RNA, 22 nt, Human
cuuauuauaaaauccuguuuga

SEQ ID NO: 64539 - RNA, 21 nt, Human
cuuauucacuguuauuuauca

SEQ ID NO: 64540 - RNA, 22 nt, Human
cuuauucagcaaguuuggguac

SEQ ID NO: 64541 - RNA, 22 nt, Human
cuuauuguccugacucauggcc

SEQ ID NO: 64542 - RNA, 22 nt, Human
cuuauugugucuuugaauaagu

SEQ ID NO: 64543 - RNA, 22 nt, Human
cuuauuuacugauccacagaug

SEQ ID NO: 64544 - RNA, 22 nt, Human
cuuauuugaauguaugaguuuu

SEQ ID NO: 64545 - RNA, 22 nt, Human
cuuauuugagagaaaagaaacu

SEQ ID NO: 64546 - RNA, 22 nt, Human
cuucaaacacuagaaacacagg

SEQ ID NO: 64547 - RNA, 22 nt, Human
cuucaaagggucacuauuuauc

SEQ ID NO: 64548 - RNA, 22 nt, Human
cuucaaauccuguguagggcua

SEQ ID NO: 64549 - RNA, 22 nt, Human
cuucaacauacacagagagagg

SEQ ID NO: 64550 - RNA, 22 nt, Human
cuucaaggccuuccagguugaa

SEQ ID NO: 64551 - RNA, 22 nt, Human
cuucaaguccagcucaugcucu

SEQ ID NO: 64552 - RNA, 22 nt, Human
cuucaagucgccaaaugcugaa

SEQ ID NO: 64553 - RNA, 22 nt, Human
cuucaaguugucugaggguggg

SEQ ID NO: 64554 - RNA, 21 nt, Human
cuucaauucaacacugccaug

SEQ ID NO: 64555 - RNA, 22 nt, Human
cuucaauuuuugguaugaugga

SEQ ID NO: 64556 - RNA, 22 nt, Human
cuucacaaagcucucuuuaugu

SEQ ID NO: 64557 - RNA, 22 nt, Human
cuucacaacgacaucugguuag

SEQ ID NO: 64558 - RNA, 22 nt, Human
cuucacaauucuaacagggcaa

SEQ ID NO: 64559 - RNA, 22 nt, Human
cuucacacccacuaaaaugaug

SEQ ID NO: 64560 - RNA, 22 nt, Human
cuucacaguauaggucccugag

SEQ ID NO: 64561 - RNA, 22 nt, Human
cuucacauaaacaaagggccau

SEQ ID NO: 64562 - RNA, 22 nt, Human
cuucacaugauguccgugcugu

SEQ ID NO: 64563 - RNA, 22 nt, Human
cuucacauuaguuuggaucaaa

SEQ ID NO: 64564 - RNA, 22 nt, Human
cuucacauugggcuugauauga

SEQ ID NO: 64565 - RNA, 22 nt, Human
cuucacugaugggacagcucaa

SEQ ID NO: 64566 - RNA, 22 nt, Human
cuucacugcagucauggcucug

SEQ ID NO: 64567 - RNA, 22 nt, Human
cuucacuguuugguucacagca

SEQ ID NO: 64568 - RNA, 22 nt, Human
cuucagaacuauaaaaaguacu

SEQ ID NO: 64569 - RNA, 22 nt, Human
cuucagagcaucacuucagcug

SEQ ID NO: 64570 - RNA, 22 nt, Human
cuucagagcuuguuaaaacugu

SEQ ID NO: 64571 - RNA, 22 nt, Human
cuucagcaccauagcuccuucu

SEQ ID NO: 64572 - RNA, 22 nt, Human
cuucagcagccucuugcauaaa

SEQ ID NO: 64573 - RNA, 22 nt, Human
cuucagccagcuggggaugcgg

SEQ ID NO: 64574 - RNA, 22 nt, Human
cuucagccucaucucagcccgu

SEQ ID NO: 64575 - RNA, 22 nt, Human
cuucagccucguuacuccugcg

SEQ ID NO: 64576 - RNA, 22 nt, Human
cuucagcugcaguuauguuuag

SEQ ID NO: 64577 - RNA, 22 nt, Human
cuucagcuguggucuccaaggc

SEQ ID NO: 64578 - RNA, 22 nt, Human
cuucagcuuucagcuucccuga

SEQ ID NO: 64579 - RNA, 22 nt, Human
cuucagggaggagcauggguuc

SEQ ID NO: 64580 - RNA, 22 nt, Human
cuucagugaauguugaguaagg

SEQ ID NO: 64581 - RNA, 22 nt, Human
cuucagugacagccacccaggc

SEQ ID NO: 64582 - RNA, 22 nt, Human
cuucagugauauaggcuucucc

SEQ ID NO: 64583 - RNA, 22 nt, Human
cuucaguggucauuugugauaa

SEQ ID NO: 64584 - RNA, 22 nt, Human
cuucaguguccucucuaguaga

SEQ ID NO: 64585 - RNA, 22 nt, Human
cuucaguguugguucauuacga

SEQ ID NO: 64586 - RNA, 22 nt, Human
cuucauacaauuuuuugacaua

SEQ ID NO: 64587 - RNA, 22 nt, Human
cuucaugagacuccacugccau

SEQ ID NO: 64588 - RNA, 23 nt, Human
cuucaugagagcccugaggaaaa

SEQ ID NO: 64589 - RNA, 22 nt, Human
cuucaugaggguaaucuacaaa

SEQ ID NO: 64590 - RNA, 22 nt, Human
cuucaugauccuaccacauuga

SEQ ID NO: 64591 - RNA, 22 nt, Human
cuucaugcucccauuuccuaca

SEQ ID NO: 64592 - RNA, 22 nt, Human
cuucaugcugauauccucgaug

SEQ ID NO: 64593 - RNA, 22 nt, Human
cuucauguucugccuguggaag

SEQ ID NO: 64594 - RNA, 22 nt, Human
cuucauuaacuauuggaaugca

SEQ ID NO: 64595 - RNA, 22 nt, Human
cuuccaaacccaggguaugggc

SEQ ID NO: 64596 - RNA, 22 nt, Human
cuuccaaagcacuuuauggacc

SEQ ID NO: 64597 - RNA, 22 nt, Human
cuuccaaauguaaauaaguuuc

SEQ ID NO: 64598 - RNA, 22 nt, Human
cuuccaagaugaacagcaagcg

SEQ ID NO: 64599 - RNA, 20 nt, Human
cuuccacacaagaagcacag

SEQ ID NO: 64600 - RNA, 20 nt, Human
cuuccaccagggccgcugau

SEQ ID NO: 64601 - RNA, 22 nt, Human
cuuccagagauagggccucaag

SEQ ID NO: 64602 - RNA, 22 nt, Human
cuuccagguaggccuaaggcag

SEQ ID NO: 64603 - RNA, 22 nt, Human
cuuccagguccuucuugagaag

SEQ ID NO: 64604 - RNA, 22 nt, Human
cuuccagguucugguugggaag

SEQ ID NO: 64605 - RNA, 22 nt, Human
cuuccagucuuuucaguggagu

SEQ ID NO: 64606 - RNA, 22 nt, Human
cuuccagugcauagguagauca

SEQ ID NO: 64607 - RNA, 22 nt, Human
cuuccaguggcaccaacaugca

SEQ ID NO: 64608 - RNA, 22 nt, Human
cuucccaagacuguauugcaag

SEQ ID NO: 64609 - RNA, 22 nt, Human
cuucccacuaguaucacagagc

SEQ ID NO: 64610 - RNA, 22 nt, Human
cuucccagaacaauguaggcuu

SEQ ID NO: 64611 - RNA, 22 nt, Human
cuucccagaccuuagagugcag

SEQ ID NO: 64612 - RNA, 22 nt, Human
cuucccagacgggguggcagcc

SEQ ID NO: 64613 - RNA, 22 nt, Human
cuucccagcaccucagucuggc

SEQ ID NO: 64614 - RNA, 22 nt, Human
cuuccccaaguagagaggggag

SEQ ID NO: 64615 - RNA, 19 nt, Human
cuuccccuguuaccucacu

SEQ ID NO: 64616 - RNA, 22 nt, Human
cuucccugguguuagcccaaug

SEQ ID NO: 64617 - RNA, 22 nt, Human
cuucccuuccccucacggagac

SEQ ID NO: 64618 - RNA, 22 nt, Human
cuucccuucugcagaucuuugg

SEQ ID NO: 64619 - RNA, 22 nt, Human
cuucccuuuuuaugucuucagc

SEQ ID NO: 64620 - RNA, 22 nt, Human
cuuccucaugugcaaugcaagc

SEQ ID NO: 64621 - RNA, 22 nt, Human
ccauuuguaccauuucuuugua

SEQ ID NO: 64622 - RNA, 22 nt, Human
ccauuuguauuacugccccagg

SEQ ID NO: 64623 - RNA, 22 nt, Human
ccauuugugguuuauuugcucu

SEQ ID NO: 64624 - RNA, 22 nt, Human
ccauuuuucacaagacucacuu

SEQ ID NO: 64625 - RNA, 22 nt, Human
ccauuuuugacagaaggccuaa

SEQ ID NO: 64626 - RNA, 22 nt, Human
cccaaagcagggucauugggcc

SEQ ID NO: 64627 - RNA, 22 nt, Human
ccagccaguauauuccaaagcc

SEQ ID NO: 64628 - RNA, 22 nt, Human
ccagccagucccgcaugaccgc

SEQ ID NO: 64629 - RNA, 22 nt, Human
ccagccaugcacaaaccaugag

SEQ ID NO: 64630 - RNA, 22 nt, Human
ccagcccaaagucaccccggga

SEQ ID NO: 64631 - RNA, 21 nt, Human
ccagcccagccuccuucucuu

SEQ ID NO: 64632 - RNA, 21 nt, Human
ccagcccagcugugucccagc

SEQ ID NO: 64633 - RNA, 22 nt, Human
ccagccccuauccucgcuccac

SEQ ID NO: 64634 - RNA, 22 nt, Human
ccagcccgaaucccuaaagcaa

SEQ ID NO: 64635 - RNA, 17 nt, Human
ccagcccucgcgcuuuu

SEQ ID NO: 64636 - RNA, 22 nt, Human
ccagcccucgguagucccauag

SEQ ID NO: 64637 - RNA, 22 nt, Human
ccagcccugaacccugcugcau

SEQ ID NO: 64638 - RNA, 22 nt, Human
ccagcccugccucucagggccc

SEQ ID NO: 64639 - RNA, 22 nt, Human
ccagcccuugaggucuguccau

SEQ ID NO: 64640 - RNA, 22 nt, Human
ccagccucacuggcaucaccua

SEQ ID NO: 64641 - RNA, 22 nt, Human
ccagccuccauguagauagcug

SEQ ID NO: 64642 - RNA, 23 nt, Human
ccagccucugggucuucauccag

SEQ ID NO: 64643 - RNA, 22 nt, Human
ccagccugguucagaauuggcu

SEQ ID NO: 64644 - RNA, 22 nt, Human
ccagccuucugggacucucauc

SEQ ID NO: 64645 - RNA, 19 nt, Human
ccagccuuuccagugauug

SEQ ID NO: 64646 - RNA, 22 nt, Human
ccagccuuugcaucccccaucu

SEQ ID NO: 64647 - RNA, 23 nt, Human
ccagcgcucacucagagcauguu

SEQ ID NO: 64648 - RNA, 22 nt, Human
ccagcucaagcacugugugaag

SEQ ID NO: 64649 - RNA, 22 nt, Human
ccagcucauauuuuaugugcag

SEQ ID NO: 64650 - RNA, 23 nt, Human
ccagcucauccauuaccucucuu

SEQ ID NO: 64651 - RNA, 22 nt, Human
ccagcucaucucagugaaaugc

SEQ ID NO: 64652 - RNA, 22 nt, Human
ccagcuccacugucagaugaga

SEQ ID NO: 64653 - RNA, 22 nt, Human
ccagcucuagccccauguggcu

SEQ ID NO: 64654 - RNA, 22 nt, Human
ccagcucucagcgggagacuca

SEQ ID NO: 64655 - RNA, 22 nt, Human
ccagcucugauuuugaccucca

SEQ ID NO: 64656 - RNA, 22 nt, Human
ccagcucugcagggccuggggu

SEQ ID NO: 64657 - RNA, 22 nt, Human
ccagcucuuggugcacuuacau

SEQ ID NO: 64658 - RNA, 20 nt, Human
ccagcugagccaaggggaga

SEQ ID NO: 64659 - RNA, 22 nt, Human
ccagcugcaggggagcagugga

SEQ ID NO: 64660 - RNA, 22 nt, Human
ccagcugcagguguuccagaug

SEQ ID NO: 64661 - RNA, 22 nt, Human
ccagcugccuaagcaauccaua

SEQ ID NO: 64662 - RNA, 22 nt, Human
ccagcugcucucuucuccgcca

SEQ ID NO: 64663 - RNA, 22 nt, Human
ccagcugcuuuuugucacaugg

SEQ ID NO: 64664 - RNA, 22 nt, Human
ccagcuggaacggcagcccagc

SEQ ID NO: 64665 - RNA, 22 nt, Human
ccagcuggggaaguggggcaua

SEQ ID NO: 64666 - RNA, 22 nt, Human
ccagcuggugggucuuucucug

SEQ ID NO: 64667 - RNA, 22 nt, Human
ccagcugguuaaaauagagaaa

SEQ ID NO: 64668 - RNA, 22 nt, Human
ccagcugguuuauauuccccac

SEQ ID NO: 64669 - RNA, 22 nt, Human
ccagcuguaggcaggggguuua

SEQ ID NO: 64670 - RNA, 21 nt, Human
ccagcugucuguccuuaggca

SEQ ID NO: 64671 - RNA, 23 nt, Human
ccagcugugccuggcccaggagc

SEQ ID NO: 64672 - RNA, 21 nt, Human
ccagcuguuccucguccgaug

SEQ ID NO: 64673 - RNA, 22 nt, Human
ccagcuguuucugaugcuaggc

SEQ ID NO: 64674 - RNA, 22 nt, Human
ccagcuucggcaagcagacuuu

SEQ ID NO: 64675 - RNA, 22 nt, Human
ccagcuuuauagcuucaaagga

SEQ ID NO: 64676 - RNA, 22 nt, Human
ccagcuuucauaucaugaggua

SEQ ID NO: 64677 - RNA, 22 nt, Human
ccagcuuuccaggguugacugg

SEQ ID NO: 64678 - RNA, 22 nt, Human
ccagcuuucucagaggcuucua

SEQ ID NO: 64679 - RNA, 22 nt, Human
ccagcuuuucuuaucauuauaa

SEQ ID NO: 64680 - RNA, 22 nt, Human
ccaggaaaccugcgccauccag

SEQ ID NO: 64681 - RNA, 22 nt, Human
ccaggaaauagugcugugaucu

SEQ ID NO: 64682 - RNA, 22 nt, Human
ccaggaacaaagccccauccac

SEQ ID NO: 64683 - RNA, 22 nt, Human
ccaggaaccgaugaucagaggg

SEQ ID NO: 64684 - RNA, 22 nt, Human
ccaggaacuaagaauccuuuag

SEQ ID NO: 64685 - RNA, 22 nt, Human
ccaggaagaaacagucuuuaua

SEQ ID NO: 64686 - RNA, 23 nt, Human
ccaggaagaggccauccacaguc

SEQ ID NO: 64687 - RNA, 22 nt, Human
ccaggaagauuuauuuuggcuu

SEQ ID NO: 64688 - RNA, 22 nt, Human
ccaggaagccugugucucugga

SEQ ID NO: 64689 - RNA, 21 nt, Human
ccaggaaggacugagcucccu

SEQ ID NO: 64690 - RNA, 22 nt, Human
ccaggaaggccuggaugccccc

SEQ ID NO: 64691 - RNA, 22 nt, Human
ccaggaagguaugggaagaaaa

SEQ ID NO: 64692 - RNA, 22 nt, Human
ccaggacacugcuucacagcag

SEQ ID NO: 64693 - RNA, 22 nt, Human
ccaggacucaauuaaccucacu

SEQ ID NO: 64694 - RNA, 21 nt, Human
ccaggacuccauggggucucu

SEQ ID NO: 64695 - RNA, 20 nt, Human
ccaggacugcuggggacucu

SEQ ID NO: 64696 - RNA, 22 nt, Human
ccaggacuucgaggcuacagug

SEQ ID NO: 64697 - RNA, 22 nt, Human
ccaggacuuuaaguccagcacu

SEQ ID NO: 64698 - RNA, 22 nt, Human
ccaggagaauaauggcagauua

SEQ ID NO: 64699 - RNA, 22 nt, Human
ccaggagacaaagaugacugcu

SEQ ID NO: 64700 - RNA, 22 nt, Human
ccaggagacuguacugauauuu

SEQ ID NO: 64701 - RNA, 17 nt, Human
ccaggagagaugcuugu

SEQ ID NO: 64702 - RNA, 22 nt, Human
ccaggagagcgcccucccggcc

SEQ ID NO: 64703 - RNA, 19 nt, Human
ccaggagagcuuggagaag

SEQ ID NO: 64704 - RNA, 22 nt, Human
ccaggagcuauguacacacuau

SEQ ID NO: 64705 - RNA, 22 nt, Human
ccaggaggaaagaccagcccau

SEQ ID NO: 64706 - RNA, 22 nt, Human
ccaggaggaugguuguuaggug

SEQ ID NO: 64707 - RNA, 22 nt, Human
ccaggaggcagagguuguagug

SEQ ID NO: 64708 - RNA, 22 nt, Human
ccaggaggcucugacuggaccc

SEQ ID NO: 64709 - RNA, 22 nt, Human
ccaggaggcucuugucccuggu

SEQ ID NO: 64710 - RNA, 22 nt, Human
ccaggagggugguuacucaauc

SEQ ID NO: 64711 - RNA, 22 nt, Human
ccaggaguuugaggcugcagug

SEQ ID NO: 64712 - RNA, 22 nt, Human
ccaggauacugcucucugcugc

SEQ ID NO: 64713 - RNA, 22 nt, Human
ccaggaucugauauugggcucc

SEQ ID NO: 64714 - RNA, 22 nt, Human
ccaggcaaagcccaugcaagag

SEQ ID NO: 64715 - RNA, 22 nt, Human
ccaggcaaaucccucuggcaga

SEQ ID NO: 64716 - RNA, 22 nt, Human
ccaggcaaggucuccuagagag

SEQ ID NO: 64717 - RNA, 22 nt, Human
ccaggcaaguagaagcuguggu

SEQ ID NO: 64718 - RNA, 22 nt, Human
ccaggcacucacggggcacugg

SEQ ID NO: 64719 - RNA, 22 nt, Human
ccaggcacuggcuggguucuuu

SEQ ID NO: 64720 - RNA, 22 nt, Human
ccaggcacuucaucauuagggu

SEQ ID NO: 64721 - RNA, 22 nt, Human
ccaggcagagggauccccaucc

SEQ ID NO: 64722 - RNA, 22 nt, Human
ccaggcagcaaauuuucugaau

SEQ ID NO: 64723 - RNA, 22 nt, Human
ccaggcagccaagugugugugu

SEQ ID NO: 64724 - RNA, 22 nt, Human
ccaggcaggcuagaauguaaau

SEQ ID NO: 64725 - RNA, 22 nt, Human
ccaggcagggcucaaggaaccu

SEQ ID NO: 64726 - RNA, 22 nt, Human
ccaggccaaauucagucagcag

SEQ ID NO: 64727 - RNA, 22 nt, Human
ccaggccagcaggcacaccugc

SEQ ID NO: 64728 - RNA, 22 nt, Human
ccaggccagcgcuggcuggagg

SEQ ID NO: 64729 - RNA, 22 nt, Human
ccaggccagggcugcagcgagc

SEQ ID NO: 64730 - RNA, 20 nt, Human
cccuggagagaagcuccacg

SEQ ID NO: 64731 - RNA, 22 nt, Human
cccuggagaucgggagaggaag

SEQ ID NO: 64732 - RNA, 22 nt, Human
cccuggagcugcuugcauguug

SEQ ID NO: 64733 - RNA, 22 nt, Human
cccuggaggaccccaauguggc

SEQ ID NO: 64734 - RNA, 22 nt, Human
cccuggaggagcuuagagcuug

SEQ ID NO: 64735 - RNA, 19 nt, Human
cccuggaggaguguuggcu

SEQ ID NO: 64736 - RNA, 22 nt, Human
cccuggaggcaaagguugcagu

SEQ ID NO: 64737 - RNA, 22 nt, Human
cccuggaggcuggaggcaguag

SEQ ID NO: 64738 - RNA, 22 nt, Human
cccuggagggacagcugcucua

SEQ ID NO: 64739 - RNA, 22 nt, Human
cccuggagggauuucucaauca

SEQ ID NO: 64740 - RNA, 23 nt, Human
cccuggaguaaauucuuggaagg

SEQ ID NO: 64741 - RNA, 22 nt, Human
cccuggaguagcacugggucgc

SEQ ID NO: 64742 - RNA, 22 nt, Human
cccuggaguccggagcucaccu

SEQ ID NO: 64743 - RNA, 22 nt, Human
cccuggagugugacgaggcauu

SEQ ID NO: 64744 - RNA, 22 nt, Human
cccuggcaaaaucccugguaca

SEQ ID NO: 64745 - RNA, 19 nt, Human
cccuggcaggcaagccugg

SEQ ID NO: 64746 - RNA, 22 nt, Human
cccuggcagugcuccuuuagac

SEQ ID NO: 64747 - RNA, 22 nt, Human
cccuggcauaaaacuucuccag

SEQ ID NO: 64748 - RNA, 22 nt, Human
cccuggccagggcacagggagg

SEQ ID NO: 64749 - RNA, 22 nt, Human
cccuggccuacaggcccagaga

SEQ ID NO: 64750 - RNA, 20 nt, Human
cccuggccuguuucaugccc

SEQ ID NO: 64751 - RNA, 22 nt, Human
cccuggcucaggcagcuuuguu

SEQ ID NO: 64752 - RNA, 17 nt, Human
cccuggcucuaggugga

SEQ ID NO: 64753 - RNA, 22 nt, Human
cccuggcugccagucaccagac

SEQ ID NO: 64754 - RNA, 22 nt, Human
cccuggcuggaaauuaaguagu

SEQ ID NO: 64755 - RNA, 22 nt, Human
cccugggaggcuuccaggcaga

SEQ ID NO: 64756 - RNA, 21 nt, Human
cccugggaugggcuuggacuu

SEQ ID NO: 64757 - RNA, 22 nt, Human
cccugggauugccuuggccuug

SEQ ID NO: 64758 - RNA, 22 nt, Human
cccugggcaagcccuauuuucc

SEQ ID NO: 64759 - RNA, 22 nt, Human
cccuggggcugagggauggccg

SEQ ID NO: 64760 - RNA, 19 nt, Human
cccuggggguuucugguac

SEQ ID NO: 64761 - RNA, 23 nt, Human
cccuguagcccaggacaggcuuu

SEQ ID NO: 64762 - RNA, 22 nt, Human
cccugucacaauggaugacauu

SEQ ID NO: 64763 - RNA, 22 nt, Human
cccuguccuggaugggagcacu

SEQ ID NO: 64764 - RNA, 22 nt, Human
cccuguccuuggcugugaggcu

SEQ ID NO: 64765 - RNA, 22 nt, Human
cccugucuguaccgugaugagc

SEQ ID NO: 64766 - RNA, 22 nt, Human
cccugugauguagcuagaguag

SEQ ID NO: 64767 - RNA, 22 nt, Human
cccuguggaggaggagagcagu

SEQ ID NO: 64768 - RNA, 22 nt, Human
cccuguggauuucaguuugugu

SEQ ID NO: 64769 - RNA, 22 nt, Human
cccugugggguccgccuguccg

SEQ ID NO: 64770 - RNA, 22 nt, Human
cccuguggugacaggccugucu

SEQ ID NO: 64771 - RNA, 22 nt, Human
cccuguguaguuaacuuuccac

SEQ ID NO: 64772 - RNA, 22 nt, Human
cccugugucuucuugccuuugu

SEQ ID NO: 64773 - RNA, 22 nt, Human
cccuguuaaugucaaccugccu

SEQ ID NO: 64774 - RNA, 22 nt, Human
cccuguugggaagagagauggc

SEQ ID NO: 64775 - RNA, 22 nt, Human
cccuguuuggauggggacccag

SEQ ID NO: 64776 - RNA, 22 nt, Human
cccuuagaauuuuguaguuauu

SEQ ID NO: 64777 - RNA, 17 nt, Human
cccuuagagcaaaagau

SEQ ID NO: 64778 - RNA, 22 nt, Human
cccuuagagggcucuccuuacu

SEQ ID NO: 64779 - RNA, 22 nt, Human
cccuuccugggugucccggagu

SEQ ID NO: 64780 - RNA, 22 nt, Human
cccuucucuuucacucacuauu

SEQ ID NO: 64781 - RNA, 21 nt, Human
cccuucuuacucaagcucauu

SEQ ID NO: 64782 - RNA, 22 nt, Human
cccuucuuuguaauaaagauua

SEQ ID NO: 64783 - RNA, 22 nt, Human
cccuugaagacuagaaugagga

SEQ ID NO: 64784 - RNA, 22 nt, Human
cccuugaaggcagggaguccug

SEQ ID NO: 64785 - RNA, 22 nt, Human
cccuugcaucccauguguggcc

SEQ ID NO: 64786 - RNA, 22 nt, Human
cccuugcuugcccagucacagg

SEQ ID NO: 64787 - RNA, 22 nt, Human
cccuuggaagguagcuggcagu

SEQ ID NO: 64788 - RNA, 22 nt, Human
cccuuggccacugcgccaguga

SEQ ID NO: 64789 - RNA, 22 nt, Human
cccuugggcuuccacccagccc

SEQ ID NO: 64790 - RNA, 22 nt, Human
cccuuggggcucuuugccaggc

SEQ ID NO: 64791 - RNA, 22 nt, Human
cccuuguuuuugaguacaauag

SEQ ID NO: 64792 - RNA, 23 nt, Human
cccuuuaagauuugaauagucag

SEQ ID NO: 64793 - RNA, 22 nt, Human
cccuuuaaguagaauauauuau

SEQ ID NO: 64794 - RNA, 22 nt, Human
cccuuuaauuccaacacaggaa

SEQ ID NO: 64795 - RNA, 22 nt, Human
cccuuuccugaagaauauuuuu

SEQ ID NO: 64796 - RNA, 22 nt, Human
cccuuuggaagaggcucacuga

SEQ ID NO: 64797 - RNA, 22 nt, Human
ccgaggcuccuccccgagucug

SEQ ID NO: 64798 - RNA, 22 nt, Human
ccgcaaggcagagguugcagug

SEQ ID NO: 64799 - RNA, 22 nt, Human
ccggaaacuccuuugagagccu

SEQ ID NO: 64800 - RNA, 22 nt, Human
ccggagagucagagcgcggccc

SEQ ID NO: 64801 - RNA, 22 nt, Human
ccggcaggcggaguugcaguga

SEQ ID NO: 64802 - RNA, 22 nt, Human
ccggcgaccgcugucggaggcg

SEQ ID NO: 64803 - RNA, 22 nt, Human
ccgggagcaggcgccaccgcca

SEQ ID NO: 64804 - RNA, 22 nt, Human
ccgggccucgggacaccgggua

SEQ ID NO: 64805 - RNA, 22 nt, Human
ccggucccaggugccccgguga

SEQ ID NO: 64806 - RNA, 22 nt, Human
ccguagcacaugcuccuggggc

SEQ ID NO: 64807 - RNA, 22 nt, Human
ccguaugucuggguuucuuaau

SEQ ID NO: 64808 - RNA, 22 nt, Human
ccguauuauaaguuuuuccuuc

SEQ ID NO: 64809 - RNA, 19 nt, Human
ccgucauggagaguggggu

SEQ ID NO: 64810 - RNA, 22 nt, Human
ccgugcuucuucagaugugaau

SEQ ID NO: 64811 - RNA, 22 nt, Human
ccguggaguugugcugaguaug

SEQ ID NO: 64812 - RNA, 22 nt, Human
ccguguacauaaagcccuggua

SEQ ID NO: 64813 - RNA, 22 nt, Human
ccuaaauagagucagauguaau

SEQ ID NO: 64814 - RNA, 22 nt, Human
ccuaacuuuaaugggaccagga

SEQ ID NO: 64815 - RNA, 22 nt, Human
ccuaagaucugguaugugacag

SEQ ID NO: 64816 - RNA, 22 nt, Human
ccuaagauugcaaacucucucc

SEQ ID NO: 64817 - RNA, 22 nt, Human
ccuaaggaaagccaaagaggcc

SEQ ID NO: 64818 - RNA, 19 nt, Human
ccuaaguaacaacaguugu

SEQ ID NO: 64819 - RNA, 22 nt, Human
ccuaaguaaguugacuuucaga

SEQ ID NO: 64820 - RNA, 22 nt, Human
ccuacaggaaauuguaucaaaa

SEQ ID NO: 64821 - RNA, 22 nt, Human
ccuacaguuauauucuugauug

SEQ ID NO: 64822 - RNA, 22 nt, Human
ccuacauaacacugccaaacug

SEQ ID NO: 64823 - RNA, 18 nt, Human
ccuacaucauugugagag

SEQ ID NO: 64824 - RNA, 22 nt, Human
ccuacauucucugaguuuuccu

SEQ ID NO: 64825 - RNA, 22 nt, Human
ccuagaacacaaccuauauuag

SEQ ID NO: 64826 - RNA, 22 nt, Human
ccuagaaugugcagacuuaggg

SEQ ID NO: 64827 - RNA, 22 nt, Human
ccuagacuagaggcagggagcc

SEQ ID NO: 64828 - RNA, 22 nt, Human
ccuagagcucugcuuuaucuaa

SEQ ID NO: 64829 - RNA, 22 nt, Human
ccuaggaacccccaggcuucug

SEQ ID NO: 64830 - RNA, 22 nt, Human
ccuaggagagguaaugaaguuc

SEQ ID NO: 64831 - RNA, 22 nt, Human
ccuaggaguucgaagcugcagu

SEQ ID NO: 64832 - RNA, 22 nt, Human
ccuaggcccauuaauuccccuu

SEQ ID NO: 64833 - RNA, 22 nt, Human
ccuaggcccucaaagagcauaa

SEQ ID NO: 64834 - RNA, 22 nt, Human
ccuaggccgcccggugcguggg

SEQ ID NO: 64835 - RNA, 22 nt, Human
ccuaggccuuacuuuccugugc

SEQ ID NO: 64836 - RNA, 22 nt, Human
ccuaggcuaauucaguccagua

SEQ ID NO: 64837 - RNA, 22 nt, Human
ccuagggauacagcagaguaca

SEQ ID NO: 64838 - RNA, 20 nt, Human
ccuagggcaagugggugggc

SEQ ID NO: 64839 - RNA, 22 nt, Human
ccuggcucugaaguccacauca

SEQ ID NO: 64840 - RNA, 19 nt, Human
ccuggcucugagcccagcc

SEQ ID NO: 64841 - RNA, 22 nt, Human
ccuggcucugccguaaccacca

SEQ ID NO: 64842 - RNA, 22 nt, Human
ccuggcugaaccaaugaagugg

SEQ ID NO: 64843 - RNA, 22 nt, Human
ccuggcugagccuccaggaaga

SEQ ID NO: 64844 - RNA, 22 nt, Human
ccuggcugagggaccucgggua

SEQ ID NO: 64845 - RNA, 21 nt, Human
ccuggcugcacaguugcuggu

SEQ ID NO: 64846 - RNA, 20 nt, Human
ccuggcugcauucaggacgg

SEQ ID NO: 64847 - RNA, 22 nt, Human
ccuggcugcauuuugcuggaug

SEQ ID NO: 64848 - RNA, 23 nt, Human
ccuggcuggauucucugcauuca

SEQ ID NO: 64849 - RNA, 20 nt, Human
ccuggcugguggaggaaagg

SEQ ID NO: 64850 - RNA, 22 nt, Human
ccuggcugucguuuugugaaau

SEQ ID NO: 64851 - RNA, 22 nt, Human
ccuggcugugcauugccggccc

SEQ ID NO: 64852 - RNA, 22 nt, Human
ccuggcuguggcggugcucuca

SEQ ID NO: 64853 - RNA, 22 nt, Human
ccuggcuuugaccuugcuguuu

SEQ ID NO: 64854 - RNA, 20 nt, Human
ccuggcuuugcaucugugau

SEQ ID NO: 64855 - RNA, 18 nt, Human
ccuggcuuuucuacuugc

SEQ ID NO: 64856 - RNA, 22 nt, Human
ccugggaagucagccaaggacg

SEQ ID NO: 64857 - RNA, 22 nt, Human
ccugggaaucggugcguugagg

SEQ ID NO: 64858 - RNA, 22 nt, Human
ccugggacgacucuguacccuu

SEQ ID NO: 64859 - RNA, 22 nt, Human
ccugggacucggccaggacaga

SEQ ID NO: 64860 - RNA, 19 nt, Human
ccugggacuuaggcugggu

SEQ ID NO: 64861 - RNA, 22 nt, Human
ccugggagaacugcuggguugg

SEQ ID NO: 64862 - RNA, 22 nt, Human
ccugggagagcugcccggguga

SEQ ID NO: 64863 - RNA, 22 nt, Human
ccugggagcuguggaaaggcug

SEQ ID NO: 64864 - RNA, 22 nt, Human
ccugggaguggcacucacagca

SEQ ID NO: 64865 - RNA, 22 nt, Human
ccugggaugcuguccucaucua

SEQ ID NO: 64866 - RNA, 22 nt, Human
ccugggauuugcgccagaccuu

SEQ ID NO: 64867 - RNA, 22 nt, Human
ccugggcaacauagggagaccc

SEQ ID NO: 64868 - RNA, 22 nt, Human
ccugggcagccugcucaaggac

SEQ ID NO: 64869 - RNA, 22 nt, Human
ccugggcaggaugggcccggug

SEQ ID NO: 64870 - RNA, 22 nt, Human
ccugggcagugcuggaguugaa

SEQ ID NO: 64871 - RNA, 22 nt, Human
ccugggcauucuuugaguucuc

SEQ ID NO: 64872 - RNA, 22 nt, Human
ccugggccaggcuugggaaugc

SEQ ID NO: 64873 - RNA, 22 nt, Human
ccugggccuauccuagaaccaa

SEQ ID NO: 64874 - RNA, 22 nt, Human
ccugggccucacccagcucuug

SEQ ID NO: 64875 - RNA, 22 nt, Human
ccugggcucaagcgaucuuguc

SEQ ID NO: 64876 - RNA, 22 nt, Human
ccugggcuccacuccaagagca

SEQ ID NO: 64877 - RNA, 22 nt, Human
ccugggcuggaguacagcagug

SEQ ID NO: 64878 - RNA, 22 nt, Human
ccugggcuguugcaucauccuu

SEQ ID NO: 64879 - RNA, 22 nt, Human
ccugggcuugguuguugagaac

SEQ ID NO: 64880 - RNA, 22 nt, Human
ccugggcuuugagggcaggaug

SEQ ID NO: 64881 - RNA, 22 nt, Human
ccuggggaaaagcaggcauuua

SEQ ID NO: 64882 - RNA, 23 nt, Human
ccuggggagcuguauccagagug

SEQ ID NO: 64883 - RNA, 23 nt, Human
ccuggggcacuugaguccucauc

SEQ ID NO: 64884 - RNA, 22 nt, Human
ccuggggccccgagccagaagc

SEQ ID NO: 64885 - RNA, 22 nt, Human
ccuggggcucaagauggcgccg

SEQ ID NO: 64886 - RNA, 22 nt, Human
ccuggggcucugcacagagcag

SEQ ID NO: 64887 - RNA, 22 nt, Human
ccugggggccaggaagguguga

SEQ ID NO: 64888 - RNA, 22 nt, Human
ccuggguagacuuugaagcauu

SEQ ID NO: 64889 - RNA, 22 nt, Human
ccugggucacucaggcaggcgg

SEQ ID NO: 64890 - RNA, 22 nt, Human
ccugggucccugagagaugauu

SEQ ID NO: 64891 - RNA, 22 nt, Human
ccugggucuguauugguaggua

SEQ ID NO: 64892 - RNA, 22 nt, Human
ccuggguggcagagguugcagu

SEQ ID NO: 64893 - RNA, 23 nt, Human
ccuggguuucagagcugcuuuuc

SEQ ID NO: 64894 - RNA, 22 nt, Human
ccugguccccaucggcccagcg

SEQ ID NO: 64895 - RNA, 17 nt, Human
gagagcugcugcuuccg

SEQ ID NO: 64896 - RNA, 20 nt, Human
gagagcuggaaauaaagucc

SEQ ID NO: 64897 - RNA, 22 nt, Human
gagagcugucagcguagcaccg

SEQ ID NO: 64898 - RNA, 22 nt, Human
gagagcuguguucauucuacca

SEQ ID NO: 64899 - RNA, 22 nt, Human
gagagcuguuuaucuucuucaa

SEQ ID NO: 64900 - RNA, 22 nt, Human
gagaggaaagauauauacuucu

SEQ ID NO: 64901 - RNA, 22 nt, Human
gagaggaaugagguuaaggacu

SEQ ID NO: 64902 - RNA, 22 nt, Human
gagaggaguuacuauuuccgag

SEQ ID NO: 64903 - RNA, 22 nt, Human
gagaggcagaggccugaaaccg

SEQ ID NO: 64904 - RNA, 22 nt, Human
gagaggcaggaauccuggguga

SEQ ID NO: 64905 - RNA, 22 nt, Human
gagaggcccugaagcccacaga

SEQ ID NO: 64906 - RNA, 21 nt, Human
gagaggccugggcccgugagc

SEQ ID NO: 64907 - RNA, 19 nt, Human
gagaggccugugcuugaag

SEQ ID NO: 64908 - RNA, 22 nt, Human
gagaggcucugaggacuggggu

SEQ ID NO: 64909 - RNA, 22 nt, Human
gagaggcugacuggcuguccug

SEQ ID NO: 64910 - RNA, 22 nt, Human
gagaggcugauccugcagagaa

SEQ ID NO: 64911 - RNA, 18 nt, Human
gagagggaucccucagga

SEQ ID NO: 64912 - RNA, 22 nt, Human
gagagggcaagguagaugcuac

SEQ ID NO: 64913 - RNA, 22 nt, Human
gagagggccagggugagaacua

SEQ ID NO: 64914 - RNA, 22 nt, Human
gagagggcugccuggugugagg

SEQ ID NO: 64915 - RNA, 22 nt, Human
gagagggcuggaaacuuccugg

SEQ ID NO: 64916 - RNA, 22 nt, Human
gagagggguuugccauccuaug

SEQ ID NO: 64917 - RNA, 22 nt, Human
gagagguacggaaagagcgugg

SEQ ID NO: 64918 - RNA, 22 nt, Human
gagagguagaggcucugcuuaa

SEQ ID NO: 64919 - RNA, 22 nt, Human
gagagguccauuccccugucag

SEQ ID NO: 64920 - RNA, 17 nt, Human
gagagucuaaugggaga

SEQ ID NO: 64921 - RNA, 22 nt, Human
gagagucuaggaaccucauaua

SEQ ID NO: 64922 - RNA, 22 nt, Human
gagagugagauaauuucacaua

SEQ ID NO: 64923 - RNA, 22 nt, Human
gagagugaggcaucaggggcag

SEQ ID NO: 64924 - RNA, 22 nt, Human
gagagugaggccugggaaucua

SEQ ID NO: 64925 - RNA, 22 nt, Human
gagagugcugaacggcaagggu

SEQ ID NO: 64926 - RNA, 22 nt, Human
gagauaaauuuuugauaaauau

SEQ ID NO: 64927 - RNA, 19 nt, Human
gagauauagaaguagaugu

SEQ ID NO: 64928 - RNA, 22 nt, Human
gagauauguuagaaagcuauug

SEQ ID NO: 64929 - RNA, 22 nt, Human
gagauauguuggcagcugguau

SEQ ID NO: 64930 - RNA, 22 nt, Human
gagaucauggcuucugcugaua

SEQ ID NO: 64931 - RNA, 22 nt, Human
gagauccagauuuccauuccuu

SEQ ID NO: 64932 - RNA, 22 nt, Human
gagaucuucaagguuuuagaua

SEQ ID NO: 64933 - RNA, 22 nt, Human
gagaugaaucauuccaugguca

SEQ ID NO: 64934 - RNA, 22 nt, Human
gagaugaauguaaacaaaggca

SEQ ID NO: 64935 - RNA, 22 nt, Human
gagaugaugagauuuggaacuu

SEQ ID NO: 64936 - RNA, 22 nt, Human
gagaugcugaaaucugagugua

SEQ ID NO: 64937 - RNA, 22 nt, Human
gagaugcugccugauuuauuca

SEQ ID NO: 64938 - RNA, 22 nt, Human
gagaugcuugucugucuuauca

SEQ ID NO: 64939 - RNA, 22 nt, Human
gagaugcuuuguguauagacaa

SEQ ID NO: 64940 - RNA, 22 nt, Human
gagauggagucuuuuucuguca

SEQ ID NO: 64941 - RNA, 17 nt, Human
gagauggcauuggcagc

SEQ ID NO: 64942 - RNA, 22 nt, Human
gagauggccagugccaggacaa

SEQ ID NO: 64943 - RNA, 22 nt, Human
gagauggcccuggcauguagcu

SEQ ID NO: 64944 - RNA, 22 nt, Human
gagauggcuugcucucacgugg

SEQ ID NO: 64945 - RNA, 22 nt, Human
gagauggggucagcugggacau

SEQ ID NO: 64946 - RNA, 22 nt, Human
gagauggggucuugcuauguug

SEQ ID NO: 64947 - RNA, 22 nt, Human
gagaugguuggguuaacaacua

SEQ ID NO: 64948 - RNA, 22 nt, Human
ccucugcaccauagccuucagc

SEQ ID NO: 64949 - RNA, 22 nt, Human
ccucugcaucuggcugcugcag

SEQ ID NO: 64950 - RNA, 20 nt, Human
ccucugccccggggcugcua

SEQ ID NO: 64951 - RNA, 20 nt, Human
ccucugccuuucuagucuga

SEQ ID NO: 64952 - RNA, 22 nt, Human
ccucugcucccuggugucugag

SEQ ID NO: 64953 - RNA, 21 nt, Human
ccucugcucgggcaugcguuu

SEQ ID NO: 64954 - RNA, 22 nt, Human
ccucugcucugguccaugugcu

SEQ ID NO: 64955 - RNA, 22 nt, Human
ccucuggaucuuucuccacacu

SEQ ID NO: 64956 - RNA, 16 nt, Human
ccucugggauguuugc

SEQ ID NO: 64957 - RNA, 22 nt, Human
ccucugggcagguagcagcagc

SEQ ID NO: 64958 - RNA, 22 nt, Human
ccucuggggcaucagacaaagg

SEQ ID NO: 64959 - RNA, 22 nt, Human
ccucugggggcuuccuuacccu

SEQ ID NO: 64960 - RNA, 22 nt, Human
ccucuggggucuagcaauagca

SEQ ID NO: 64961 - RNA, 22 nt, Human
ccucuggguuaguuuagggagc

SEQ ID NO: 64962 - RNA, 22 nt, Human
ccucuggucccagcucugcugc

SEQ ID NO: 64963 - RNA, 21 nt, Human
ccucuguaguuaaguuuccua

SEQ ID NO: 64964 - RNA, 22 nt, Human
ccucugugccucaguuucaugu

SEQ ID NO: 64965 - RNA, 21 nt, Human
ccucugugcuaaagggcuccc

SEQ ID NO: 64966 - RNA, 22 nt, Human
ccucuguggcccugacucucuu

SEQ ID NO: 64967 - RNA, 22 nt, Human
ccucuguggccuuggaccagcu

SEQ ID NO: 64968 - RNA, 19 nt, Human
ccucugugggagucaguga

SEQ ID NO: 64969 - RNA, 22 nt, Human
ccucuguguccuggucauugaa

SEQ ID NO: 64970 - RNA, 22 nt, Human
ccucugugucuugguuucaaga

SEQ ID NO: 64971 - RNA, 22 nt, Human
ccucuucauccuggaagcugcu

SEQ ID NO: 64972 - RNA, 19 nt, Human
ccucuuccucugacacuau

SEQ ID NO: 64973 - RNA, 22 nt, Human
ccucuucuaccauuuacauuuu

SEQ ID NO: 64974 - RNA, 22 nt, Human
ccucuucuagguuucagccugc

SEQ ID NO: 64975 - RNA, 22 nt, Human
ccucuuugacuauaguaguuaa

SEQ ID NO: 64976 - RNA, 22 nt, Human
ccucuuuguucaggcugcuggc

SEQ ID NO: 64977 - RNA, 22 nt, Human
ccugaacaaauggcauagccaa

SEQ ID NO: 64978 - RNA, 22 nt, Human
ccugaagaugagggacagcuaa

SEQ ID NO: 64979 - RNA, 18 nt, Human
ccugaagccugugucuuu

SEQ ID NO: 64980 - RNA, 22 nt, Human
ccugaagcucuuaagaccuuua

SEQ ID NO: 64981 - RNA, 22 nt, Human
ccugacaggcggaggcugcagu

SEQ ID NO: 64982 - RNA, 22 nt, Human
ccugacaguuaauuguccugua

SEQ ID NO: 64983 - RNA, 22 nt, Human
ccugaccagagugagggcuuag

SEQ ID NO: 64984 - RNA, 22 nt, Human
ccugaccuaccugaagucuaca

SEQ ID NO: 64985 - RNA, 22 nt, Human
ccugaccuccaaguggcucugg

SEQ ID NO: 64986 - RNA, 22 nt, Human
ccugagaaauagcaucauuuuu

SEQ ID NO: 64987 - RNA, 22 nt, Human
ccugagaagagcuuaugaguga

SEQ ID NO: 64988 - RNA, 22 nt, Human
ccugagaccaaguugcagccau

SEQ ID NO: 64989 - RNA, 22 nt, Human
ccugagagcgaguggccucaug

SEQ ID NO: 64990 - RNA, 22 nt, Human
ccugagagggggcccuagaaau

SEQ ID NO: 64991 - RNA, 22 nt, Human
ccugagagugagggccuccuua

SEQ ID NO: 64992 - RNA, 22 nt, Human
ccugagagugagugccuccuua

SEQ ID NO: 64993 - RNA, 22 nt, Human
ccugagagugguguacaggaga

SEQ ID NO: 64994 - RNA, 23 nt, Human
ccugagaucuguaagggaccuug

SEQ ID NO: 64995 - RNA, 22 nt, Human
ccugagauuggcuaguaugagu

SEQ ID NO: 64996 - RNA, 22 nt, Human
ccugagcaacuucaagggccug

SEQ ID NO: 64997 - RNA, 22 nt, Human
ccugagcacacaucagaaucac

SEQ ID NO: 64998 - RNA, 22 nt, Human
ccugagcucaaagggugccugg

SEQ ID NO: 64999 - RNA, 22 nt, Human
ccugagcucaagaaggugacca

SEQ ID NO: 65000 - RNA, 22 nt, Human
ccugagcucugcacuuuuuaga

SEQ ID NO: 65001 - RNA, 22 nt, Human
ccugagcugcggggcagugcuc

SEQ ID NO: 65002 - RNA, 22 nt, Human
ccugagcuuacaauuuaagaac

SEQ ID NO: 65003 - RNA, 22 nt, Human
ccugaggaccagcacccaucug

SEQ ID NO: 65004 - RNA, 22 nt, Human
ccugaggauuguuggugcuucc

SEQ ID NO: 65005 - RNA, 22 nt, Human
ccugaggccccugaggauagca

SEQ ID NO: 65006 - RNA, 22 nt, Human
ccugaggcccuggcugugcuga

SEQ ID NO: 65007 - RNA, 22 nt, Human
ccugaggcucgcgcgccccugg

SEQ ID NO: 65008 - RNA, 22 nt, Human
ccugaggcucuccugaauaaug

SEQ ID NO: 65009 - RNA, 22 nt, Human
ccugagggaggguauaggcugu

SEQ ID NO: 65010 - RNA, 21 nt, Human
ccucuggcuugugcugugccc

SEQ ID NO: 65011 - RNA, 22 nt, Human
ccucugggaagccaguccugcu

SEQ ID NO: 65012 - RNA, 22 nt, Human
ccucugggccagccuggacccu

SEQ ID NO: 65013 - RNA, 16 nt, Human
ccucugggccugcaag

SEQ ID NO: 65014 - RNA, 22 nt, Human
ccucugggccuggaagggcagu

SEQ ID NO: 65015 - RNA, 22 nt, Human
ccucugggcggagaucugcugc

SEQ ID NO: 65016 - RNA, 22 nt, Human
ccucugggcuggaaaauuaaug

SEQ ID NO: 65017 - RNA, 22 nt, Human
ccucugggugacagacucuugg

SEQ ID NO: 65018 - RNA, 22 nt, Human
ccucuguaagccucaguuucuu

SEQ ID NO: 65019 - RNA, 22 nt, Human
ccucuguaaugauucacugaau

SEQ ID NO: 65020 - RNA, 22 nt, Human
ccucuguacaggucagcaucua

SEQ ID NO: 65021 - RNA, 22 nt, Human
ccucuguccccagugcaggccu

SEQ ID NO: 65022 - RNA, 22 nt, Human
ccucugugacaaacaguccugg

SEQ ID NO: 65023 - RNA, 22 nt, Human
ccucugugauuucugagccaau

SEQ ID NO: 65024 - RNA, 22 nt, Human
ccucugugggccgggccugcug

SEQ ID NO: 65025 - RNA, 20 nt, Human
ccucuguguccugugucaua

SEQ ID NO: 65026 - RNA, 22 nt, Human
ccucugugugaugcgcaaagua

SEQ ID NO: 65027 - RNA, 22 nt, Human
ccucugugugugcaugcaugcg

SEQ ID NO: 65028 - RNA, 22 nt, Human
ccucuuaauuguacuccuucag

SEQ ID NO: 65029 - RNA, 22 nt, Human
ccucuucagcaaaguucggccc

SEQ ID NO: 65030 - RNA, 22 nt, Human
ccucuuccagcuguugcuucca

SEQ ID NO: 65031 - RNA, 22 nt, Human
ccucuucucaacuccagccaga

SEQ ID NO: 65032 - RNA, 22 nt, Human
ccucuucugagugagacucccu

SEQ ID NO: 65033 - RNA, 22 nt, Human
ccucuugaaccuaggcaagacu

SEQ ID NO: 65034 - RNA, 22 nt, Human
ccucuugauugguuggaagcgg

SEQ ID NO: 65035 - RNA, 22 nt, Human
ccucuugccaaucagcuacaga

SEQ ID NO: 65036 - RNA, 22 nt, Human
ccugaaaugacuccagcugagu

SEQ ID NO: 65037 - RNA, 22 nt, Human
ccugaaauuugaagaccugaau

SEQ ID NO: 65038 - RNA, 22 nt, Human
ccugaagaaaauuccacgagaa

SEQ ID NO: 65039 - RNA, 22 nt, Human
ccugaagaauucaaauccagau

SEQ ID NO: 65040 - RNA, 22 nt, Human
ccugaagagcacucuagaguug

SEQ ID NO: 65041 - RNA, 20 nt, Human
ccugaagaguuucucuuucu

SEQ ID NO: 65042 - RNA, 22 nt, Human
ccugaagcaaggguaggcaggu

SEQ ID NO: 65043 - RNA, 22 nt, Human
ccugaagcacaaaagcacagcu

SEQ ID NO: 65044 - RNA, 22 nt, Human
ccugaagcacccggagcuggca

SEQ ID NO: 65045 - RNA, 22 nt, Human
ccugaauaauuugugaaaagau

SEQ ID NO: 65046 - RNA, 22 nt, Human
ccugaauaggcucugcucaaaa

SEQ ID NO: 65047 - RNA, 23 nt, Human
ccugacacaaaaggauucuugcu

SEQ ID NO: 65048 - RNA, 22 nt, Human
ccugacaggagaagcgcagcau

SEQ ID NO: 65049 - RNA, 22 nt, Human
ccugacaguccuuuucuagugu

SEQ ID NO: 65050 - RNA, 21 nt, Human
ccugaccuaauuugccaucag

SEQ ID NO: 65051 - RNA, 22 nt, Human
ccugaccuauuuuucucagcug

SEQ ID NO: 65052 - RNA, 22 nt, Human
ccugacgaaaggcgugcuggag

SEQ ID NO: 65053 - RNA, 22 nt, Human
ccugagaaaccuggugcaauua

SEQ ID NO: 65054 - RNA, 22 nt, Human
ccugagaggcccucucacuguc

SEQ ID NO: 65055 - RNA, 22 nt, Human
ccugagaguaggugucucuuua

SEQ ID NO: 65056 - RNA, 22 nt, Human
ccugagaucagugcauuuggug

SEQ ID NO: 65057 - RNA, 22 nt, Human
cuaaagucauacaaggugggag

SEQ ID NO: 65058 - RNA, 22 nt, Human
cuaaaguccuuaucaaguguaa

SEQ ID NO: 65059 - RNA, 22 nt, Human
cuaaaugacuuccagugguuau

SEQ ID NO: 65060 - RNA, 22 nt, Human
cuaaaugccuuuccuaccuaac

SEQ ID NO: 65061 - RNA, 22 nt, Human
cuaaaugugcuaauagcaugaa

SEQ ID NO: 65062 - RNA, 22 nt, Human
cuaaauguucacaugcaauuuu

SEQ ID NO: 65063 - RNA, 22 nt, Human
cuaaauguuuuaucuuccuggc

SEQ ID NO: 65064 - RNA, 22 nt, Human
cuaacauuuggaaggcuuauga

SEQ ID NO: 65065 - RNA, 20 nt, Human
cuaaccuuaaccaucaccag

SEQ ID NO: 65066 - RNA, 21 nt, Human
cuaacuuugaguccuggcccc

SEQ ID NO: 65067 - RNA, 22 nt, Human
cuaacuuugucaucuucccuuu

SEQ ID NO: 65068 - RNA, 22 nt, Human
cuaacuuuuugauucuugggga

SEQ ID NO: 65069 - RNA, 22 nt, Human
cuaagacaugcccugcaugaua

SEQ ID NO: 65070 - RNA, 22 nt, Human
cuaagaggaaguacucuguuau

SEQ ID NO: 65071 - RNA, 20 nt, Human
cuaagaggaggacuagguuu

SEQ ID NO: 65072 - RNA, 22 nt, Human
cuaagccacucaaaucuugugg

SEQ ID NO: 65073 - RNA, 22 nt, Human
cuaaggaaauaugucacuugcu

SEQ ID NO: 65074 - RNA, 22 nt, Human
cuaaggcaccgaggcaggagcg

SEQ ID NO: 65075 - RNA, 22 nt, Human
cuaauaacaugaacuacuuucu

SEQ ID NO: 65076 - RNA, 22 nt, Human
cuaauacacccuauugcuuguu

SEQ ID NO: 65077 - RNA, 22 nt, Human
cuaaugaagcugcuuucuauga

SEQ ID NO: 65078 - RNA, 22 nt, Human
cuaauguaaugauauguugaau

SEQ ID NO: 65079 - RNA, 22 nt, Human
cuaauucuuuggagacaaucug

SEQ ID NO: 65080 - RNA, 22 nt, Human
cuaauuuuuguucugcauugaa

SEQ ID NO: 65081 - RNA, 22 nt, Human
cuacaaaaguaauugugguuuu

SEQ ID NO: 65082 - RNA, 23 nt, Human
cuacaaaguaugagaagaccccu

SEQ ID NO: 65083 - RNA, 23 nt, Human
cuacaagagcaagcauggacaag

SEQ ID NO: 65084 - RNA, 22 nt, Human
cuacaagaggaauggaggucug

SEQ ID NO: 65085 - RNA, 22 nt, Human
cuacaagauuuuuaaaacugua

SEQ ID NO: 65086 - RNA, 22 nt, Human
cuacacagagccuacuucugca

SEQ ID NO: 65087 - RNA, 20 nt, Human
cuacacaggguucgcugggc

SEQ ID NO: 65088 - RNA, 22 nt, Human
cuacagaaaaucagccacaggc

SEQ ID NO: 65089 - RNA, 22 nt, Human
cuacagaaacacuggacaugug

SEQ ID NO: 65090 - RNA, 21 nt, Human
cuacagaaucgagcauucugg

SEQ ID NO: 65091 - RNA, 22 nt, Human
cuacagaauggagggucagaga

SEQ ID NO: 65092 - RNA, 22 nt, Human
cuacagagugaaugcagaaaau

SEQ ID NO: 65093 - RNA, 22 nt, Human
cuacaggaaggaucuugcucaa

SEQ ID NO: 65094 - RNA, 22 nt, Human
cuacaggcucagggagcccucu

SEQ ID NO: 65095 - RNA, 22 nt, Human
cuacaguagagguugucaggga

SEQ ID NO: 65096 - RNA, 22 nt, Human
cuacaguaugaaaccuuuacuc

SEQ ID NO: 65097 - RNA, 22 nt, Human
cuacauaaucuggauuugucug

SEQ ID NO: 65098 - RNA, 22 nt, Human
cuacauagauggaugauuguaa

SEQ ID NO: 65099 - RNA, 22 nt, Human
cuacaugaaaauaaguuugaaa

SEQ ID NO: 65100 - RNA, 20 nt, Human
cuacauguucugcuucucuc

SEQ ID NO: 65101 - RNA, 22 nt, Human
cuacauucaacagcagaguuuu

SEQ ID NO: 65102 - RNA, 22 nt, Human
cuacauuucauccagggagagc

SEQ ID NO: 65103 - RNA, 22 nt, Human
cuacccaggcuuagagggcugg

SEQ ID NO: 65104 - RNA, 22 nt, Human
cuacccuugccugccaggugac

SEQ ID NO: 65105 - RNA, 22 nt, Human
cuaccggguucucagccaggca

SEQ ID NO: 65106 - RNA, 22 nt, Human
cuaccuuacuuuaacccugcaa

SEQ ID NO: 65107 - RNA, 22 nt, Human
cuacucucccaugauucucugu

SEQ ID NO: 65108 - RNA, 22 nt, Human
cuacucugugguguauuugcau

SEQ ID NO: 65109 - RNA, 22 nt, Human
cuacugaagauaacuggcucuu

SEQ ID NO: 65110 - RNA, 22 nt, Human
cuacugaguccuucagcugcca

SEQ ID NO: 65111 - RNA, 22 nt, Human
cuacugccauugucucugccau

SEQ ID NO: 65112 - RNA, 22 nt, Human
cuacuguaauagaugaauuuga

SEQ ID NO: 65113 - RNA, 22 nt, Human
cuacuguaguggccuauuuacc

SEQ ID NO: 65114 - RNA, 21 nt, Human
cuacuuaaguaggggauuagg

SEQ ID NO: 65115 - RNA, 22 nt, Human
cuacuuccagggguggggcuca

SEQ ID NO: 65116 - RNA, 22 nt, Human
cuacuucuaaguacauggugau

SEQ ID NO: 65117 - RNA, 22 nt, Human
cuacuucugugaugaaacuaca

SEQ ID NO: 65118 - RNA, 22 nt, Human
cuacuugguaccugaagaucgg

SEQ ID NO: 65119 - RNA, 21 nt, Human
cuagaaagaauguugucgucu

SEQ ID NO: 65120 - RNA, 22 nt, Human
cuagaaauauuuuacagucaag

SEQ ID NO: 65121 - RNA, 22 nt, Human
cuagaaaucucuguuuacauca

SEQ ID NO: 65122 - RNA, 22 nt, Human
cuagaaauguagauucuuagug

SEQ ID NO: 65123 - RNA, 22 nt, Human
cuagaacagaaaguacaggaaa

SEQ ID NO: 65124 - RNA, 22 nt, Human
cuagaaccuaggaguacuaaag

SEQ ID NO: 65125 - RNA, 22 nt, Human
cuagaagcaacuagaucuguuu

SEQ ID NO: 65126 - RNA, 20 nt, Human
cuagaagcagaauugcugau

SEQ ID NO: 65127 - RNA, 22 nt, Human
cuagaaucuaugucaggaacuc

SEQ ID NO: 65128 - RNA, 22 nt, Human
cuagaaucugggauuucugacu

SEQ ID NO: 65129 - RNA, 22 nt, Human
cuagaauuuuaauuggguauau

SEQ ID NO: 65130 - RNA, 22 nt, Human
cuagagaaaacuguguaucuug

SEQ ID NO: 65131 - RNA, 22 nt, Human
cuagagaaaaugauagcaggaa

SEQ ID NO: 65132 - RNA, 22 nt, Human
cuagagaaacagugcucugaac

SEQ ID NO: 65133 - RNA, 22 nt, Human
cuagagaaaccccaugagcuuu

SEQ ID NO: 65134 - RNA, 22 nt, Human
cuagagaaaggcaguggagcaa

SEQ ID NO: 65135 - RNA, 22 nt, Human
cuagagaacaacauucauaugg

SEQ ID NO: 65136 - RNA, 22 nt, Human
cuagagcagauugcagaguagg

SEQ ID NO: 65137 - RNA, 22 nt, Human
cuagagcuuucugcugguguug

SEQ ID NO: 65138 - RNA, 19 nt, Human
cuagaguaauaaguacuuu

SEQ ID NO: 65139 - RNA, 22 nt, Human
cuagagugaagggucuugaggc

SEQ ID NO: 65140 - RNA, 22 nt, Human
cuagauaaggauuucucaacuu

SEQ ID NO: 65141 - RNA, 22 nt, Human
cuagaucagauugcuguuucua

SEQ ID NO: 65142 - RNA, 18 nt, Human
cuagaugagcuuggcaag

SEQ ID NO: 65143 - RNA, 22 nt, Human
cuagcaagccuaccacgaaacu

SEQ ID NO: 65144 - RNA, 21 nt, Human
cuagcacgauuccaaguaaua

SEQ ID NO: 65145 - RNA, 22 nt, Human
cuagcagcucugauauuuacaa

SEQ ID NO: 65146 - RNA, 22 nt, Human
cuagcaggcuaauguaagcuug

SEQ ID NO: 65147 - RNA, 22 nt, Human
cuagcaucagaugagaagcugu

SEQ ID NO: 65148 - RNA, 22 nt, Human
cuagccaugggcauuaaaggua

SEQ ID NO: 65149 - RNA, 22 nt, Human
cuagcccaggaaugccguggcc

SEQ ID NO: 65150 - RNA, 22 nt, Human
cuagcuguguaaaccgagcugc

SEQ ID NO: 65151 - RNA, 22 nt, Human
cuagcuuagggaaacugacaga

SEQ ID NO: 65152 - RNA, 22 nt, Human
cuaggaaaugaauacaguacac

SEQ ID NO: 65153 - RNA, 20 nt, Human
cuaggaacuauggucuggcu

SEQ ID NO: 65154 - RNA, 22 nt, Human
cuaggaaucaccaagauucuag

SEQ ID NO: 65155 - RNA, 22 nt, Human
cuaggcagacugagcucuaggg

SEQ ID NO: 65156 - RNA, 23 nt, Human
cuaggcaggauuguaggcgggua

SEQ ID NO: 65157 - RNA, 22 nt, Human
cuaggcaguccugacgguacua

SEQ ID NO: 65158 - RNA, 22 nt, Human
cuaggccauauuuugagaacug

SEQ ID NO: 65159 - RNA, 22 nt, Human
cuaggcuagauaguauauuggu

SEQ ID NO: 65160 - RNA, 22 nt, Human
cuaggcucagucucuggucugu

SEQ ID NO: 65161 - RNA, 22 nt, Human
cucaaggccaguucuucugacu

SEQ ID NO: 65162 - RNA, 22 nt, Human
cucaaguaagaaacagaauugg

SEQ ID NO: 65163 - RNA, 22 nt, Human
cucaaguaauuagcaacaaaua

SEQ ID NO: 65164 - RNA, 22 nt, Human
cucaaguccauagaaucaggaa

SEQ ID NO: 65165 - RNA, 22 nt, Human
cucacaauuuuucagugacuau

SEQ ID NO: 65166 - RNA, 22 nt, Human
gcacuugggcagagacgcacag

SEQ ID NO: 65167 - RNA, 22 nt, Human
gcacuuuagcauugguuuacac

SEQ ID NO: 65168 - RNA, 22 nt, Human
gcacuuuauaguagaaagagca

SEQ ID NO: 65169 - RNA, 22 nt, Human
cuaggcugagcugggcugagcu

SEQ ID NO: 65170 - RNA, 22 nt, Human
cuaggcugcaccuaggauggcu

SEQ ID NO: 65171 - RNA, 22 nt, Human
cuaggcuguaaccccugccagg

SEQ ID NO: 65172 - RNA, 22 nt, Human
cuaggcugugcauugcaugaca

SEQ ID NO: 65173 - RNA, 22 nt, Human
cuaggcuguucaugcucagacc

SEQ ID NO: 65174 - RNA, 22 nt, Human
cuagggaaauaaacugaguggu

SEQ ID NO: 65175 - RNA, 22 nt, Human
cuagggaaugagagacuggauc

SEQ ID NO: 65176 - RNA, 22 nt, Human
cuagggacagaaagaggguaga

SEQ ID NO: 65177 - RNA, 22 nt, Human
cuagggacugggaccuuaguua

SEQ ID NO: 65178 - RNA, 22 nt, Human
cuagggagggauguuggcauga

SEQ ID NO: 65179 - RNA, 22 nt, Human
cuagggucuguuuuccaggugu

SEQ ID NO: 65180 - RNA, 22 nt, Human
cuagguuuaacuuucacagaaa

SEQ ID NO: 65181 - RNA, 22 nt, Human
cuaguaaagcuaugauucugcc

SEQ ID NO: 65182 - RNA, 22 nt, Human
cuaguaaaucagaagcuguggg

SEQ ID NO: 65183 - RNA, 23 nt, Human
cuaguaaauccugaauagcaggc

SEQ ID NO: 65184 - RNA, 22 nt, Human
cuaguauuacauuuuugugugu

SEQ ID NO: 65185 - RNA, 22 nt, Human
cuaguauuuaaaggcuaugauu

SEQ ID NO: 65186 - RNA, 22 nt, Human
cuagugaacgugguacuaugga

SEQ ID NO: 65187 - RNA, 22 nt, Human
cuagugcucuaggggcugaagg

SEQ ID NO: 65188 - RNA, 22 nt, Human
cuaguggaaacuaacuggaauu

SEQ ID NO: 65189 - RNA, 22 nt, Human
cuagugugucuaugucuguucc

SEQ ID NO: 65190 - RNA, 22 nt, Human
cuaguucuuaacuguuaugauu

SEQ ID NO: 65191 - RNA, 22 nt, Human
cuaguuuaaagcagcugaaagg

SEQ ID NO: 65192 - RNA, 22 nt, Human
cuaguuugguuagauaagucuc

SEQ ID NO: 65193 - RNA, 22 nt, Human
cuauaagacagauacugacuuu

SEQ ID NO: 65194 - RNA, 22 nt, Human
cuauaauuaugcucaaaaugua

SEQ ID NO: 65195 - RNA, 19 nt, Human
cuauacagccucugaggaa

SEQ ID NO: 65196 - RNA, 22 nt, Human
cuauacagugacuagaaguaau

SEQ ID NO: 65197 - RNA, 22 nt, Human
cuauauugguaauauuugcuca

SEQ ID NO: 65198 - RNA, 22 nt, Human
cuauccaaggaguuuuugaaau

SEQ ID NO: 65199 - RNA, 22 nt, Human
cuaucucagauaaccugcacca

SEQ ID NO: 65200 - RNA, 22 nt, Human
cuaucucaugcaucaacucuuc

SEQ ID NO: 65201 - RNA, 22 nt, Human
cuaugaaaugucagauucugca

SEQ ID NO: 65202 - RNA, 22 nt, Human
cuaugacacaggccauuauaua

SEQ ID NO: 65203 - RNA, 22 nt, Human
cuauggaaaccuaaucaggaga

SEQ ID NO: 65204 - RNA, 22 nt, Human
cuauguucucggcacuauggau

SEQ ID NO: 65205 - RNA, 22 nt, Human
cuauuacauuucuggacauuca

SEQ ID NO: 65206 - RNA, 22 nt, Human
cuauuagcugaauaaugcauug

SEQ ID NO: 65207 - RNA, 22 nt, Human
cuauuagguaugcagccuauuu

SEQ ID NO: 65208 - RNA, 22 nt, Human
cuauuuaucuauuucugaauga

SEQ ID NO: 65209 - RNA, 22 nt, Human
cuauuucagcugccuuugacug

SEQ ID NO: 65210 - RNA, 22 nt, Human
cuauuucauguuccuauggccg

SEQ ID NO: 65211 - RNA, 22 nt, Human
cuauuuggccauagugcaguua

SEQ ID NO: 65212 - RNA, 22 nt, Human
cuauuugggguagaagauggau

SEQ ID NO: 65213 - RNA, 22 nt, Human
cuauuuuaagaggccauuaggu

SEQ ID NO: 65214 - RNA, 22 nt, Human
cuauuuucugucucuauagagu

SEQ ID NO: 65215 - RNA, 22 nt, Human
cuauuuuucuguacccuaauuu

SEQ ID NO: 65216 - RNA, 22 nt, Human
cucaaaauccauaaaaucaggu

SEQ ID NO: 65217 - RNA, 21 nt, Human
cucaaaauucuuucuguugga

SEQ ID NO: 65218 - RNA, 22 nt, Human
cucaaauagaacugaucuauaa

SEQ ID NO: 65219 - RNA, 22 nt, Human
cucaaauauguggucagaaagc

SEQ ID NO: 65220 - RNA, 22 nt, Human
cucaacacguccucgagaagcg

SEQ ID NO: 65221 - RNA, 22 nt, Human
cucaacauuuaacagugaaaaa

SEQ ID NO: 65222 - RNA, 23 nt, Human
cucaacccuaguaagggaguagg

SEQ ID NO: 65223 - RNA, 22 nt, Human
cucaagaaucuagggaggauuc

SEQ ID NO: 65224 - RNA, 22 nt, Human
cucaagacugaucgcaguggaa

SEQ ID NO: 65225 - RNA, 22 nt, Human
cucaaguuggcaugaacaaauu

SEQ ID NO: 65226 - RNA, 22 nt, Human
cucaaguuucauauuugucuag

SEQ ID NO: 65227 - RNA, 22 nt, Human
cucaauaugccagaggggaaag

SEQ ID NO: 65228 - RNA, 22 nt, Human
cucacagauacggcuauuccug

SEQ ID NO: 65229 - RNA, 22 nt, Human
cucacagcauggaauuuucugg

SEQ ID NO: 65230 - RNA, 22 nt, Human
cucacagguaccagcacccucc

SEQ ID NO: 65231 - RNA, 22 nt, Human
cucacagguuaguuguguggau

SEQ ID NO: 65232 - RNA, 22 nt, Human
cucacagguucugcagcucaca

SEQ ID NO: 65233 - RNA, 22 nt, Human
cucacagugaugucuuaugaca

SEQ ID NO: 65234 - RNA, 22 nt, Human
cucacaguguaauauugaaccc

SEQ ID NO: 65235 - RNA, 22 nt, Human
cucacauaugcugggauuuccg

SEQ ID NO: 65236 - RNA, 22 nt, Human
cucaccaggaacagcugcggag

SEQ ID NO: 65237 - RNA, 20 nt, Human
cucaccagguguaggcugag

SEQ ID NO: 65238 - RNA, 22 nt, Human
cucaccauggaucuuccauuuc

SEQ ID NO: 65239 - RNA, 22 nt, Human
cucacccauaucuccaugacuc

SEQ ID NO: 65240 - RNA, 17 nt, Human
cucacggaggaugaauc

SEQ ID NO: 65241 - RNA, 22 nt, Human
cucacugacgaggaagcugaga

SEQ ID NO: 65242 - RNA, 22 nt, Human
cucacuguccaacaggcuuuac

SEQ ID NO: 65243 - RNA, 22 nt, Human
cucacugugaccucagcagaca

SEQ ID NO: 65244 - RNA, 20 nt, Human
cucagaaaagcuaaggagaa

SEQ ID NO: 65245 - RNA, 22 nt, Human
cucagacccccagagcugcuaa

SEQ ID NO: 65246 - RNA, 22 nt, Human
cucagacugguggguaaaaccu

SEQ ID NO: 65247 - RNA, 22 nt, Human
cucagacuugcuuuuuauggaa

SEQ ID NO: 65248 - RNA, 22 nt, Human
cucagagaaccuaagcggagga

SEQ ID NO: 65249 - RNA, 19 nt, Human
cucagagaggggcagugcc

SEQ ID NO: 65250 - RNA, 22 nt, Human
cucagagagguugaacaacuug

SEQ ID NO: 65251 - RNA, 22 nt, Human
cucagagagugaauuccugccu

SEQ ID NO: 65252 - RNA, 22 nt, Human
cucagagaguuaagugaauuac

SEQ ID NO: 65253 - RNA, 22 nt, Human
cucagagauauagucccugcuu

SEQ ID NO: 65254 - RNA, 18 nt, Human
cucagagaugcccuuauu

SEQ ID NO: 65255 - RNA, 22 nt, Human
cucagagccaguuagcaggugc

SEQ ID NO: 65256 - RNA, 22 nt, Human
cucagaggggaugcuuggagaa

SEQ ID NO: 65257 - RNA, 22 nt, Human
cucagaggucaagagcagagcu

SEQ ID NO: 65258 - RNA, 22 nt, Human
cucagaguccauaguuuacagu

SEQ ID NO: 65259 - RNA, 17 nt, Human
cucagaguugcuuuguc

SEQ ID NO: 65260 - RNA, 22 nt, Human
cucagauaaucuuugagucuuc

SEQ ID NO: 65261 - RNA, 22 nt, Human
cucagauguguuggauggaaaa

SEQ ID NO: 65262 - RNA, 22 nt, Human
cucagcaacagcgacuuaaggg

SEQ ID NO: 65263 - RNA, 22 nt, Human
cucagcaagauuaagcagcuug

SEQ ID NO: 65264 - RNA, 22 nt, Human
cucagcacugacccaggagaug

SEQ ID NO: 65265 - RNA, 22 nt, Human
cucagcagagaccagggaggaa

SEQ ID NO: 65266 - RNA, 22 nt, Human
cucagcaggcacugugccuuac

SEQ ID NO: 65267 - RNA, 22 nt, Human
cucagcagugacaagagaguau

SEQ ID NO: 65268 - RNA, 22 nt, Human
cucagcauucaauguccagucc

SEQ ID NO: 65269 - RNA, 22 nt, Human
cucagccaggagaguguucaca

SEQ ID NO: 65270 - RNA, 22 nt, Human
cucagccaugcaacaugcuggg

SEQ ID NO: 65271 - RNA, 22 nt, Human
cucagcccagcucaggucuuuc

SEQ ID NO: 65272 - RNA, 22 nt, Human
cucagccccaauucuccccauu

SEQ ID NO: 65273 - RNA, 22 nt, Human
cucagcuacuugggaagcuuag

SEQ ID NO: 65274 - RNA, 22 nt, Human
cucagcucugucacuuacuagc

SEQ ID NO: 65275 - RNA, 23 nt, Human
agcaguaacuucagaaacaucag

SEQ ID NO: 65276 - RNA, 22 nt, Human
agcaguaagacuuuuuucugug

SEQ ID NO: 65277 - RNA, 20 nt, Human
agcaguaggaccucugggcc

SEQ ID NO: 65278 - RNA, 20 nt, Human
agcaguccaaaagggcagac

SEQ ID NO: 65279 - RNA, 22 nt, Human
agcagugagugggaggaccaug

SEQ ID NO: 65280 - RNA, 22 nt, Human
agcagugccgcaucuugugacc

SEQ ID NO: 65281 - RNA, 22 nt, Human
agcagugcuauggccaggcuaa

SEQ ID NO: 65282 - RNA, 22 nt, Human
agcaguggagcgagauguuuaa

SEQ ID NO: 65283 - RNA, 22 nt, Human
agcaguggccuggggcucugug

SEQ ID NO: 65284 - RNA, 22 nt, Human
agcaguggcuggauggugugcu

SEQ ID NO: 65285 - RNA, 22 nt, Human
agcagugugcuucguuucauga

SEQ ID NO: 65286 - RNA, 18 nt, Human
agcaguguggcaagcaga

SEQ ID NO: 65287 - RNA, 22 nt, Human
agcagugugggcugcacgcugg

SEQ ID NO: 65288 - RNA, 20 nt, Human
agcaguguggggagacugug

SEQ ID NO: 65289 - RNA, 22 nt, Human
agcaguuauguucuauaaaguc

SEQ ID NO: 65290 - RNA, 22 nt, Human
agcaguuugaaucaauggccag

SEQ ID NO: 65291 - RNA, 22 nt, Human
agcaguuuuccugagcuccuca

SEQ ID NO: 65292 - RNA, 22 nt, Human
agcauaaaauaaauaguuugca

SEQ ID NO: 65293 - RNA, 22 nt, Human
agcauaaacucagggacacaca

SEQ ID NO: 65294 - RNA, 22 nt, Human
agcauaaaggucaacguuuuag

SEQ ID NO: 65295 - RNA, 22 nt, Human
agcauaauuccugacacacaag

SEQ ID NO: 65296 - RNA, 22 nt, Human
agcauacacccuaaacugcuua

SEQ ID NO: 65297 - RNA, 22 nt, Human
agcauauacaaacucauauaca

SEQ ID NO: 65298 - RNA, 22 nt, Human
agcauauucaugccagacuacu

SEQ ID NO: 65299 - RNA, 22 nt, Human
agcaucaacaaugaacauaaau

SEQ ID NO: 65300 - RNA, 22 nt, Human
agcaucagagagaaguuaacua

SEQ ID NO: 65301 - RNA, 22 nt, Human
agcauccacucacugggagagg

SEQ ID NO: 65302 - RNA, 19 nt, Human
agcaucucccugaucauuc

SEQ ID NO: 65303 - RNA, 22 nt, Human
agcaucuggugagggccuaguu

SEQ ID NO: 65304 - RNA, 22 nt, Human
agcaucuguugaauauaauauu

SEQ ID NO: 65305 - RNA, 22 nt, Human
agcaucuuuaggaagagaaaga

SEQ ID NO: 65306 - RNA, 22 nt, Human
agcaugaaaacaugaaacagca

SEQ ID NO: 65307 - RNA, 20 nt, Human
agcaugcagccagagccaac

SEQ ID NO: 65308 - RNA, 22 nt, Human
agcaugcuauauugauuguagu

SEQ ID NO: 65309 - RNA, 22 nt, Human
agcaugcugggucauuuuugcc

SEQ ID NO: 65310 - RNA, 22 nt, Human
agcaugcugguguucauggcag

SEQ ID NO: 65311 - RNA, 22 nt, Human
agcaugcuuggcauuugucaga

SEQ ID NO: 65312 - RNA, 19 nt, Human
agcauggccuacagugugc

SEQ ID NO: 65313 - RNA, 22 nt, Human
agcauguaaagcucuuagcacc

SEQ ID NO: 65314 - RNA, 22 nt, Human
agcauguguaaucucaauaccu

SEQ ID NO: 65315 - RNA, 23 nt, Human
agcauguugugauguuaccacug

SEQ ID NO: 65316 - RNA, 22 nt, Human
agcauuaauaagaaauggcucc

SEQ ID NO: 65317 - RNA, 22 nt, Human
agcauuagaagaaaugauuaua

SEQ ID NO: 65318 - RNA, 23 nt, Human
agcauuagagaugccagcccugu

SEQ ID NO: 65319 - RNA, 22 nt, Human
agcauuagauuaaaaauuuaga

SEQ ID NO: 65320 - RNA, 18 nt, Human
agcauuaggagguuauca

SEQ ID NO: 65321 - RNA, 21 nt, Human
agcauucaaaagaugccauaa

SEQ ID NO: 65322 - RNA, 22 nt, Human
agcauucaaugauuggacuugc

SEQ ID NO: 65323 - RNA, 22 nt, Human
agcauuccagugcacaguagaa

SEQ ID NO: 65324 - RNA, 20 nt, Human
agcauucuacuagacuuuuc

SEQ ID NO: 65325 - RNA, 22 nt, Human
agcauucuguggucuucuaugg

SEQ ID NO: 65326 - RNA, 21 nt, Human
agcauucuuggccaguccacc

SEQ ID NO: 65327 - RNA, 22 nt, Human
agcauugagguggguuucucuu

SEQ ID NO: 65328 - RNA, 22 nt, Human
agcauuuaauccuacauagauc

SEQ ID NO: 65329 - RNA, 22 nt, Human
agcauuuaauuacaguuuaauu

SEQ ID NO: 65330 - RNA, 22 nt, Human
agcauuuaccucaaugcaucug

SEQ ID NO: 65331 - RNA, 20 nt, Human
agcauuuagccuuuauccac

SEQ ID NO: 65332 - RNA, 22 nt, Human
agcauuuaucuuuuguuugagu

SEQ ID NO: 65333 - RNA, 22 nt, Human
agcauuuauuucuuagaaauug

SEQ ID NO: 65334 - RNA, 20 nt, Human
agcauuugaaauaugacuau

SEQ ID NO: 65335 - RNA, 17 nt, Human
agcauuuguguuaacag

SEQ ID NO: 65336 - RNA, 22 nt, Human
agccaaagagaccccauaucca

SEQ ID NO: 65337 - RNA, 22 nt, Human
agccaaaguccaaaugcagugu

SEQ ID NO: 65338 - RNA, 22 nt, Human
agccaacucccucucauugagc

SEQ ID NO: 65339 - RNA, 20 nt, Human
agccaagaacaggcagaacc

SEQ ID NO: 65340 - RNA, 22 nt, Human
agccaagagacagaugcccacc

SEQ ID NO: 65341 - RNA, 22 nt, Human
agccaagagcucaccucgugug

SEQ ID NO: 65342 - RNA, 22 nt, Human
agccaaggacucagugguaggc

SEQ ID NO: 65343 - RNA, 22 nt, Human
agccaaucauccucagacucuc

SEQ ID NO: 65344 - RNA, 22 nt, Human
agccacaaugccaaccucuacu

SEQ ID NO: 65345 - RNA, 22 nt, Human
agccacagcaacaagugcaauu

SEQ ID NO: 65346 - RNA, 23 nt, Human
agccacagccagagcuaucucca

SEQ ID NO: 65347 - RNA, 22 nt, Human
agccacagccugacuuaacugu

SEQ ID NO: 65348 - RNA, 22 nt, Human
agccacauggaccugaugcuag

SEQ ID NO: 65349 - RNA, 22 nt, Human
agccacauuuuucugcuccuga

SEQ ID NO: 65350 - RNA, 22 nt, Human
agccacccuaccagcccugaaa

SEQ ID NO: 65351 - RNA, 22 nt, Human
agccaccuccugcucugcucac

SEQ ID NO: 65352 - RNA, 22 nt, Human
agccacugucugaacuucugug

SEQ ID NO: 65353 - RNA, 22 nt, Human
agccacugugagaggaccaggg

SEQ ID NO: 65354 - RNA, 22 nt, Human
agccacugugugaccagcuguc

SEQ ID NO: 65355 - RNA, 22 nt, Human
agccagacauggcuccugcucc

SEQ ID NO: 65356 - RNA, 22 nt, Human
agccagacucauuuggaaguau

SEQ ID NO: 65357 - RNA, 22 nt, Human
agccagagauugagaugcaggc

SEQ ID NO: 65358 - RNA, 22 nt, Human
agccagagggaaucuuugggga

SEQ ID NO: 65359 - RNA, 21 nt, Human
agccagauccauuuugcaugg

SEQ ID NO: 65360 - RNA, 22 nt, Human
agccagcacggauuucccagga

SEQ ID NO: 65361 - RNA, 19 nt, Human
agccagcagcguagcaucu

SEQ ID NO: 65362 - RNA, 22 nt, Human
agccagcaggugcagaauucca

SEQ ID NO: 65363 - RNA, 17 nt, Human
agccagcaguagcuggu

SEQ ID NO: 65364 - RNA, 22 nt, Human
agccagcuaagggaagcaugau

SEQ ID NO: 65365 - RNA, 21 nt, Human
agccagcuaucacacagcauu

SEQ ID NO: 65366 - RNA, 22 nt, Human
agccagcucugaguugaaguac

SEQ ID NO: 65367 - RNA, 22 nt, Human
agccagcuggagaccacuguuu

SEQ ID NO: 65368 - RNA, 22 nt, Human
agccagcuguggcuauggcucc

SEQ ID NO: 65369 - RNA, 22 nt, Human
agccagcuuucacaaaugaaga

SEQ ID NO: 65370 - RNA, 22 nt, Human
agccaggaagagaggccucacc

SEQ ID NO: 65371 - RNA, 22 nt, Human
agccaggacguugcucagcucc

SEQ ID NO: 65372 - RNA, 22 nt, Human
agccaggaucacccggggcugu

SEQ ID NO: 65373 - RNA, 22 nt, Human
agccaggauggucucgaucggc

SEQ ID NO: 65374 - RNA, 22 nt, Human
agccaggauuggcugagccuua

SEQ ID NO: 65375 - RNA, 22 nt, Human
agccaggcagacucucuuucuu

SEQ ID NO: 65376 - RNA, 20 nt, Human
agccaggccucaaguuaagu

SEQ ID NO: 65377 - RNA, 22 nt, Human
acuuucuauggcuuauuaugag

SEQ ID NO: 65378 - RNA, 22 nt, Human
acuuucucccacccacccgucu

SEQ ID NO: 65379 - RNA, 22 nt, Human
acuuucugcaguguuggaaaug

SEQ ID NO: 65380 - RNA, 22 nt, Human
acuuucuuaggcuguauaaaug

SEQ ID NO: 65381 - RNA, 22 nt, Human
acuuugaaagccuuggccccgg

SEQ ID NO: 65382 - RNA, 22 nt, Human
acuuugcaaauaaacucucuaa

SEQ ID NO: 65383 - RNA, 22 nt, Human
acuuugcaagguacuaacugua

SEQ ID NO: 65384 - RNA, 22 nt, Human
agagcacagaaguuauauguua

SEQ ID NO: 65385 - RNA, 22 nt, Human
agagcacagcagaucucugaug

SEQ ID NO: 65386 - RNA, 22 nt, Human
agagcacagccaccauuuacaa

SEQ ID NO: 65387 - RNA, 22 nt, Human
agagcacaggcucaccauuguu

SEQ ID NO: 65388 - RNA, 22 nt, Human
agagcacaggcucuggagucua

SEQ ID NO: 65389 - RNA, 22 nt, Human
agagcacaggguuuugugccgg

SEQ ID NO: 65390 - RNA, 21 nt, Human
agagcacagguggacaaugcu

SEQ ID NO: 65391 - RNA, 22 nt, Human
agagcacagugcaggauccccg

SEQ ID NO: 65392 - RNA, 22 nt, Human
agagcacaugguuccugugucc

SEQ ID NO: 65393 - RNA, 22 nt, Human
agagcagaggcauggccguggg

SEQ ID NO: 65394 - RNA, 22 nt, Human
agagcagaguggcuguagcuug

SEQ ID NO: 65395 - RNA, 22 nt, Human
agagcagauggagcuggaagag

SEQ ID NO: 65396 - RNA, 22 nt, Human
agagcagauuucaaauauuggc

SEQ ID NO: 65397 - RNA, 22 nt, Human
agagcagcucgcuaccucucua

SEQ ID NO: 65398 - RNA, 22 nt, Human
agagcagcugacagccugccau

SEQ ID NO: 65399 - RNA, 22 nt, Human
agagcagcugcauucagcaccu

SEQ ID NO: 65400 - RNA, 22 nt, Human
agagcaggggcaauguguugca

SEQ ID NO: 65401 - RNA, 22 nt, Human
agagcagugcugaagaguaggg

SEQ ID NO: 65402 - RNA, 23 nt, Human
agagcaucaugaugcuaagucug

SEQ ID NO: 65403 - RNA, 23 nt, Human
agagccaagcuucuuucucacau

SEQ ID NO: 65404 - RNA, 22 nt, Human
agagccaaggccucagucucaa

SEQ ID NO: 65405 - RNA, 22 nt, Human
agagccacugggagacagagca

SEQ ID NO: 65406 - RNA, 22 nt, Human
agagccagcaagugaauaguga

SEQ ID NO: 65407 - RNA, 22 nt, Human
agagccaggcucccauggggca

SEQ ID NO: 65408 - RNA, 22 nt, Human
agagccaggcucuaccuggguu

SEQ ID NO: 65409 - RNA, 22 nt, Human
agagccaggugcugcuguuuga

SEQ ID NO: 65410 - RNA, 22 nt, Human
agagccagguguagucucggag

SEQ ID NO: 65411 - RNA, 22 nt, Human
agagcccagugacaucagcaca

SEQ ID NO: 65412 - RNA, 22 nt, Human
agagcccaucaguggcagugga

SEQ ID NO: 65413 - RNA, 22 nt, Human
agagccccucgguggagggguc

SEQ ID NO: 65414 - RNA, 22 nt, Human
agagccccugggucacacagcc

SEQ ID NO: 65415 - RNA, 22 nt, Human
agagcccuaaacccugccuugg

SEQ ID NO: 65416 - RNA, 22 nt, Human
agagcccucugcaaugccucag

SEQ ID NO: 65417 - RNA, 22 nt, Human
agagcccugaagcagagcuaaa

SEQ ID NO: 65418 - RNA, 22 nt, Human
agagcccugugguucugguaag

SEQ ID NO: 65419 - RNA, 21 nt, Human
agagccugagaucuuccagca

SEQ ID NO: 65420 - RNA, 22 nt, Human
agagccugagccugaaagcccu

SEQ ID NO: 65421 - RNA, 22 nt, Human
agagccugcagcugugaagaaa

SEQ ID NO: 65422 - RNA, 22 nt, Human
agagccugcaucuagccucaga

SEQ ID NO: 65423 - RNA, 22 nt, Human
agagccuggaccugagcuacaa

SEQ ID NO: 65424 - RNA, 22 nt, Human
agagccuggcucccagcuaccg

SEQ ID NO: 65425 - RNA, 22 nt, Human
agagccuggggauuggcaaggg

SEQ ID NO: 65426 - RNA, 22 nt, Human
agagccuggucugagauaggac

SEQ ID NO: 65427 - RNA, 22 nt, Human
agagccugguucaaauuuuacc

SEQ ID NO: 65428 - RNA, 22 nt, Human
agagccuucagagauuauuuua

SEQ ID NO: 65429 - RNA, 22 nt, Human
agagcgcacugucugcaggcaa

SEQ ID NO: 65430 - RNA, 22 nt, Human
agagcggggauaguuaauauuc

SEQ ID NO: 65431 - RNA, 22 nt, Human
agagcuccgugccuggcugcca

SEQ ID NO: 65432 - RNA, 22 nt, Human
agagcuccucacuucggguuca

SEQ ID NO: 65433 - RNA, 22 nt, Human
agagcucuuugauuugcuucuc

SEQ ID NO: 65434 - RNA, 22 nt, Human
agagcugaggauccagcugagc

SEQ ID NO: 65435 - RNA, 22 nt, Human
agagcugcgucuauucacaauc

SEQ ID NO: 65436 - RNA, 22 nt, Human
agagcuggagaugcagguuucg

SEQ ID NO: 65437 - RNA, 22 nt, Human
agagcuggcugugggugacuuu

SEQ ID NO: 65438 - RNA, 22 nt, Human
agagcugggacuuggacucaau

SEQ ID NO: 65439 - RNA, 22 nt, Human
agagcuggggccagagucaagg

SEQ ID NO: 65440 - RNA, 22 nt, Human
agagcugggugguggugacuca

SEQ ID NO: 65441 - RNA, 22 nt, Human
agagcuguguuuaguaguuacg

SEQ ID NO: 65442 - RNA, 22 nt, Human
agagcuucacuggagagcacau

SEQ ID NO: 65443 - RNA, 22 nt, Human
agagcuuguaauugagucaggu

SEQ ID NO: 65444 - RNA, 23 nt, Human
agagcuuuccaguuucuugguga

SEQ ID NO: 65445 - RNA, 22 nt, Human
agagcuuuguuugauugucaga

SEQ ID NO: 65446 - RNA, 22 nt, Human
agagcuuuucuguaauaacauc

SEQ ID NO: 65447 - RNA, 22 nt, Human
agagcuuuuugacaucucucua

SEQ ID NO: 65448 - RNA, 22 nt, Human
agaggaaauggauaaaggguga

SEQ ID NO: 65449 - RNA, 22 nt, Human
agaggaacccagacagggcuuu

SEQ ID NO: 65450 - RNA, 22 nt, Human
agaggaagcugagaugccucuu

SEQ ID NO: 65451 - RNA, 22 nt, Human
agaggaaggaugcauauccaaa

SEQ ID NO: 65452 - RNA, 21 nt, Human
agaggaagugauuggucuggc

SEQ ID NO: 65453 - RNA, 22 nt, Human
agaggaauguauuucccugcaa

SEQ ID NO: 65454 - RNA, 22 nt, Human
agaggagaauccguuuccuugc

SEQ ID NO: 65455 - RNA, 22 nt, Human
agaggagcugggaggcccucgu

SEQ ID NO: 65456 - RNA, 22 nt, Human
agaggaggcagcuuaacucagu

SEQ ID NO: 65457 - RNA, 22 nt, Human
agaggagugggaagcagugcaa

SEQ ID NO: 65458 - RNA, 22 nt, Human
agaggaguuugcuggugugugc

SEQ ID NO: 65459 - RNA, 22 nt, Human
agaggaugguugaggaagaccu

SEQ ID NO: 65460 - RNA, 22 nt, Human
agaggcaaaaaucuauggcaac

SEQ ID NO: 65461 - RNA, 19 nt, Human
agaggcaaggguggaagua

SEQ ID NO: 65462 - RNA, 23 nt, Human
agaggcacagcacuuggcuggcc

SEQ ID NO: 65463 - RNA, 22 nt, Human
agaggcaccaucuggaacagcc

SEQ ID NO: 65464 - RNA, 22 nt, Human
agaggcaccgucugcagcgugc

SEQ ID NO: 65465 - RNA, 22 nt, Human
agaggcacuguucuuagcgacu

SEQ ID NO: 65466 - RNA, 22 nt, Human
agaggcaggaagagcugauuuu

SEQ ID NO: 65467 - RNA, 22 nt, Human
agaggcaggagguugacuugag

SEQ ID NO: 65468 - RNA, 16 nt, Human
agaggccacagacaga

SEQ ID NO: 65469 - RNA, 22 nt, Human
agaggccagcccaggccaccga

SEQ ID NO: 65470 - RNA, 23 nt, Human
agaggccagccuuuggagacacc

SEQ ID NO: 65471 - RNA, 22 nt, Human
agaggccaguggcugugcuguc

SEQ ID NO: 65472 - RNA, 22 nt, Human
agaggccccaugggauggcggu

SEQ ID NO: 65473 - RNA, 21 nt, Human
agaggcccucggacugggcgu

SEQ ID NO: 65474 - RNA, 22 nt, Human
agaggccggccgagcccauggg

SEQ ID NO: 65475 - RNA, 22 nt, Human
agaggccgggugccugcucaga

SEQ ID NO: 65476 - RNA, 19 nt, Human
agaggccucagcagcuggc

SEQ ID NO: 65477 - RNA, 22 nt, Human
agaggccuccgaaaggugggcu

SEQ ID NO: 65478 - RNA, 22 nt, Human
agaggccucuuugcaaguaggu

SEQ ID NO: 65479 - RNA, 22 nt, Human
agaggcuccaccuucucugucc

SEQ ID NO: 65480 - RNA, 22 nt, Human
agaggcuccuagccacuggcuu

SEQ ID NO: 65481 - RNA, 22 nt, Human
agaggcucuaauccccuccaca

SEQ ID NO: 65482 - RNA, 22 nt, Human
agaggcucuugcccuucccaca

SEQ ID NO: 65483 - RNA, 22 nt, Human
agaggcugauggaguagugucu

SEQ ID NO: 65484 - RNA, 22 nt, Human
agaggcugcacuugcucaugau

SEQ ID NO: 65485 - RNA, 22 nt, Human
agaggcuggauugagcauagac

SEQ ID NO: 65486 - RNA, 19 nt, Human
agaggcugucaccuguagc

SEQ ID NO: 65487 - RNA, 22 nt, Human
agaggcugugcagagggagugc

SEQ ID NO: 65488 - RNA, 22 nt, Human
agaggcuucucggauggggcag

SEQ ID NO: 65489 - RNA, 22 nt, Human
agaggcuucuuucugauuugcg

SEQ ID NO: 65490 - RNA, 22 nt, Human
agaauuccuccucugggacacu

SEQ ID NO: 65491 - RNA, 22 nt, Human
agaauuccucuaggaucugccc

SEQ ID NO: 65492 - RNA, 22 nt, Human
agaauucuccacgcucaggguc

SEQ ID NO: 65493 - RNA, 22 nt, Human
agcagagcuuuuuggacucaga

SEQ ID NO: 65494 - RNA, 21 nt, Human
agcagaggcugccuggugacu

SEQ ID NO: 65495 - RNA, 22 nt, Human
agcagagugugaaggcagggcu

SEQ ID NO: 65496 - RNA, 22 nt, Human
agcagaugagccucaugacugg

SEQ ID NO: 65497 - RNA, 22 nt, Human
agcagauguuucagagcaggcu

SEQ ID NO: 65498 - RNA, 22 nt, Human
agcagcaaggaagcgaggaugg

SEQ ID NO: 65499 - RNA, 22 nt, Human
agcagcaauaauaaaguaauac

SEQ ID NO: 65500 - RNA, 22 nt, Human
agcagcacccagagccaugucu

SEQ ID NO: 65501 - RNA, 19 nt, Human
agcagcagaagugugccuu

SEQ ID NO: 65502 - RNA, 23 nt, Human
agcagcagcaauuaaguggauau

SEQ ID NO: 65503 - RNA, 22 nt, Human
agcagcagccguagccuuauua

SEQ ID NO: 65504 - RNA, 22 nt, Human
agcagcaggcugggaugagucu

SEQ ID NO: 65505 - RNA, 22 nt, Human
agcagcaggcuguguggacuga

SEQ ID NO: 65506 - RNA, 21 nt, Human
agcagcagggaagccucaucc

SEQ ID NO: 65507 - RNA, 22 nt, Human
agcagcagggcaugucuuacuc

SEQ ID NO: 65508 - RNA, 22 nt, Human
agcagcagucaugccuaugcuc

SEQ ID NO: 65509 - RNA, 22 nt, Human
agcagcaguccuuuguguaauu

SEQ ID NO: 65510 - RNA, 22 nt, Human
agcagcagugugguuuggggaa

SEQ ID NO: 65511 - RNA, 22 nt, Human
agcagcaguguguggucauguu

SEQ ID NO: 65512 - RNA, 22 nt, Human
agcagcauacacaucauguuga

SEQ ID NO: 65513 - RNA, 22 nt, Human
agcagcauagaugcuauccgag

SEQ ID NO: 65514 - RNA, 22 nt, Human
agcagcauaucagagaaaguca

SEQ ID NO: 65515 - RNA, 22 nt, Human
agcagcaucuucuguucuccgc

SEQ ID NO: 65516 - RNA, 22 nt, Human
agcuguggggaggaggcuagca

SEQ ID NO: 65517 - RNA, 22 nt, Human
agcuguggggcaggcagcgagg

SEQ ID NO: 65518 - RNA, 22 nt, Human
agcugugguguuuucaagcccu

SEQ ID NO: 65519 - RNA, 22 nt, Human
agcugugguucugggcagcgac

SEQ ID NO: 65520 - RNA, 22 nt, Human
agcugugugaccuagggcaagc

SEQ ID NO: 65521 - RNA, 23 nt, Human
agcugugugcgcguccggguucu

SEQ ID NO: 65522 - RNA, 22 nt, Human
agcuguguggugucugacagcu

SEQ ID NO: 65523 - RNA, 22 nt, Human
agcuguuccaggccucauugcu

SEQ ID NO: 65524 - RNA, 22 nt, Human
agcuguugaaaaugguguccua

SEQ ID NO: 65525 - RNA, 18 nt, Human
agcuguuguugacucugu

SEQ ID NO: 65526 - RNA, 20 nt, Human
agcuguuuacauggauuucu

SEQ ID NO: 65527 - RNA, 23 nt, Human
agcuguuucuugugaguugagug

SEQ ID NO: 65528 - RNA, 22 nt, Human
agcuguuuucuugccguccuag

SEQ ID NO: 65529 - RNA, 22 nt, Human
agcuguuuuuccagucucugga

SEQ ID NO: 65530 - RNA, 22 nt, Human
agcuguuuuugugggcauguga

SEQ ID NO: 65531 - RNA, 22 nt, Human
agcuuaaaguauuuaaauuuca

SEQ ID NO: 65532 - RNA, 22 nt, Human
agcuuacucuucaagaacaagc

SEQ ID NO: 65533 - RNA, 22 nt, Human
agcuuacuguaauuaaaagacu

SEQ ID NO: 65534 - RNA, 18 nt, Human
agcuuagcauacuuuucc

SEQ ID NO: 65535 - RNA, 22 nt, Human
agcuucaaagcuaggaagaucu

SEQ ID NO: 65536 - RNA, 22 nt, Human
agcuucaacuuacuaaaagaua

SEQ ID NO: 65537 - RNA, 22 nt, Human
agcuucaguuuucuauuguuaa

SEQ ID NO: 65538 - RNA, 23 nt, Human
agcuucaucuugcugugucucag

SEQ ID NO: 65539 - RNA, 23 nt, Human
agcuucauugaccuccgcagggg

SEQ ID NO: 65540 - RNA, 23 nt, Human
agcuuccuagugaccuggagucu

SEQ ID NO: 65541 - RNA, 22 nt, Human
agcuuccugacuggugcucuua

SEQ ID NO: 65542 - RNA, 22 nt, Human
agcuuccuguugagagagggag

SEQ ID NO: 65543 - RNA, 22 nt, Human
agcuuccuugaauucuguagaa

SEQ ID NO: 65544 - RNA, 22 nt, Human
agcuuccuuggcgcugaggccu

SEQ ID NO: 65545 - RNA, 22 nt, Human
agcuucucagauggacuguuag

SEQ ID NO: 65546 - RNA, 22 nt, Human
agcuucucggcugggaguauuu

SEQ ID NO: 65547 - RNA, 22 nt, Human
agcuucucuggucuucugccaa

SEQ ID NO: 65548 - RNA, 22 nt, Human
agcuucugaaagucuguuuucc

SEQ ID NO: 65549 - RNA, 22 nt, Human
agcuucugagaauaguaaaugc

SEQ ID NO: 65550 - RNA, 17 nt, Human
agcuucugcccuuucuu

SEQ ID NO: 65551 - RNA, 23 nt, Human
agcuucugguucaggucaagcag

SEQ ID NO: 65552 - RNA, 22 nt, Human
agcuucuugaccaagccuguaa

SEQ ID NO: 65553 - RNA, 22 nt, Human
agcuugacagacagaugguagc

SEQ ID NO: 65554 - RNA, 22 nt, Human
agcuugaguuuuggaugaagug

SEQ ID NO: 65555 - RNA, 20 nt, Human
agcuugccccugucuuugcc

SEQ ID NO: 65556 - RNA, 18 nt, Human
agcuugccucaagcuuuu

SEQ ID NO: 65557 - RNA, 22 nt, Human
agcuugccucuuaaucaccuca

SEQ ID NO: 65558 - RNA, 22 nt, Human
agcuugggcaacacagcaagac

SEQ ID NO: 65559 - RNA, 22 nt, Human
agcuugguggcccuccuggcug

SEQ ID NO: 65560 - RNA, 21 nt, Human
agcuuguguguaucacagugu

SEQ ID NO: 65561 - RNA, 22 nt, Human
agcuuguguuuuucuaaguauc

SEQ ID NO: 65562 - RNA, 22 nt, Human
agcuuguuaaggaugcauauua

SEQ ID NO: 65563 - RNA, 22 nt, Human
agcuuguuauaaaugcagaaug

SEQ ID NO: 65564 - RNA, 22 nt, Human
agcuuguucaaaugcagaauac

SEQ ID NO: 65565 - RNA, 22 nt, Human
agcuuguuggggaaggagaaag

SEQ ID NO: 65566 - RNA, 22 nt, Human
agcuuuauagaaaggaucagug

SEQ ID NO: 65567 - RNA, 22 nt, Human
agcuuuauauuuaaugaauucu

SEQ ID NO: 65568 - RNA, 22 nt, Human
agcuuuaucagaggagucucua

SEQ ID NO: 65569 - RNA, 22 nt, Human
agcuuuauucaugauuucaggg

SEQ ID NO: 65570 - RNA, 22 nt, Human
agcuuucagucucugaaggaac

SEQ ID NO: 65571 - RNA, 22 nt, Human
agcuuuccacuaucuuaggggu

SEQ ID NO: 65572 - RNA, 20 nt, Human
agcuuucuccuuggagcucc

SEQ ID NO: 65573 - RNA, 22 nt, Human
agcuuucucuucuuuagaaagu

SEQ ID NO: 65574 - RNA, 22 nt, Human
agcuuucugguuacagucuuca

SEQ ID NO: 65575 - RNA, 22 nt, Human
agcuuugaauccuggcucuguc

SEQ ID NO: 65576 - RNA, 23 nt, Human
agcuuugaggacuuuaaaagaua

SEQ ID NO: 65577 - RNA, 22 nt, Human
agcuuugauaguacaggggcuu

SEQ ID NO: 65578 - RNA, 22 nt, Human
agcuuugcagcugugggaggag

SEQ ID NO: 65579 - RNA, 22 nt, Human
agcuuuggagcugggugaaaga

SEQ ID NO: 65580 - RNA, 23 nt, Human
agcuuuggugaugugacagauaa

SEQ ID NO: 65581 - RNA, 22 nt, Human
agcuuugugacuuugagcuagu

SEQ ID NO: 65582 - RNA, 22 nt, Human
agcuuuguuucacauacaccuu

SEQ ID NO: 65583 - RNA, 22 nt, Human
agcuuuuacauaaugaucuuga

SEQ ID NO: 65584 - RNA, 22 nt, Human
agcuuuuauuggcugucauuug

SEQ ID NO: 65585 - RNA, 22 nt, Human
aggaaaaauaaggcagcagggc

SEQ ID NO: 65586 - RNA, 22 nt, Human
aggaaaacacaguauugaugga

SEQ ID NO: 65587 - RNA, 22 nt, Human
aggaaaacagaccaaggagcuc

SEQ ID NO: 65588 - RNA, 22 nt, Human
aggaaaaugaaacagcaacugu

SEQ ID NO: 65589 - RNA, 22 nt, Human
aggaaacagugaacuuggcagg

SEQ ID NO: 65590 - RNA, 22 nt, Human
aggaaacaugaaucugccuuga

SEQ ID NO: 65591 - RNA, 22 nt, Human
aggaaacauugauauugggaaa

SEQ ID NO: 65592 - RNA, 22 nt, Human
aggaaacugaagcccagagagg

SEQ ID NO: 65593 - RNA, 22 nt, Human
aggaaacuguccccucauccua

SEQ ID NO: 65594 - RNA, 22 nt, Human
aggaaagaaaggaggugcauuu

SEQ ID NO: 65595 - RNA, 18 nt, Human
aggaaagaaaggcaggug

SEQ ID NO: 65596 - RNA, 20 nt, Human
aggaaagccugugugagucu

SEQ ID NO: 65597 - RNA, 19 nt, Human
aggaaaggaucaaaauagc

SEQ ID NO: 65598 - RNA, 22 nt, Human
aggaaaggccucagcagaaacc

SEQ ID NO: 65599 - RNA, 17 nt, Human
aggaaagucugcugucc

SEQ ID NO: 65600 - RNA, 22 nt, Human
aggaaagugaauguuauuuugc

SEQ ID NO: 65601 - RNA, 22 nt, Human
aggaaauugggacacagagaaa

SEQ ID NO: 65602 - RNA, 22 nt, Human
aggagcagaccguaguccugca

SEQ ID NO: 65603 - RNA, 21 nt, Human
aggagcauuguugugguggag

SEQ ID NO: 65604 - RNA, 22 nt, Human
aggagccaaacauauugagaga

SEQ ID NO: 65605 - RNA, 22 nt, Human
aggagccaaauuacuagcucug

SEQ ID NO: 65606 - RNA, 22 nt, Human
aggagccaagaugcugucuggc

SEQ ID NO: 65607 - RNA, 22 nt, Human
aggagccacuuaggugagauaa

SEQ ID NO: 65608 - RNA, 22 nt, Human
aggagccagauucucucacuuu

SEQ ID NO: 65609 - RNA, 21 nt, Human
aggagccagccugucagucua

SEQ ID NO: 65610 - RNA, 23 nt, Human
aggagccaggaaccagcuucccc

SEQ ID NO: 65611 - RNA, 22 nt, Human
aggagcccugcgggaggcagag

SEQ ID NO: 65612 - RNA, 22 nt, Human
aggagccgggccugggcccugc

SEQ ID NO: 65613 - RNA, 18 nt, Human
aggagccuuugcacugga

SEQ ID NO: 65614 - RNA, 22 nt, Human
aggagcggauguguccugccag

SEQ ID NO: 65615 - RNA, 22 nt, Human
aggagcugagggagcgcccuug

SEQ ID NO: 65616 - RNA, 22 nt, Human
aggagcugcaaaaccggccgcu

SEQ ID NO: 65617 - RNA, 22 nt, Human
aggagcugcacugggaguuuuu

SEQ ID NO: 65618 - RNA, 22 nt, Human
aggagcugcuuaaaugguuggu

SEQ ID NO: 65619 - RNA, 22 nt, Human
aggagcuggaaugguccuuuug

SEQ ID NO: 65620 - RNA, 22 nt, Human
aggagcuggccacuaggaugca

SEQ ID NO: 65621 - RNA, 22 nt, Human
aggagcugggcccaaggaugcu

SEQ ID NO: 65622 - RNA, 22 nt, Human
aggagcugggcugcugcuggga

SEQ ID NO: 65623 - RNA, 21 nt, Human
aggagcuguguuagcuggucg

SEQ ID NO: 65624 - RNA, 20 nt, Human
aggaggaaaaaaugacgagc

SEQ ID NO: 65625 - RNA, 22 nt, Human
aggaggaagggaagacaaguaa

SEQ ID NO: 65626 - RNA, 22 nt, Human
aggaggaauugacacagaagcc

SEQ ID NO: 65627 - RNA, 22 nt, Human
aggaggacucucugagccagcc

SEQ ID NO: 65628 - RNA, 22 nt, Human
aggaggaggcuggaguacaccc

SEQ ID NO: 65629 - RNA, 20 nt, Human
aggaggcaauguagauaagc

SEQ ID NO: 65630 - RNA, 20 nt, Human
aggaggcaugaggggauuua

SEQ ID NO: 65631 - RNA, 22 nt, Human
aggaggccaggcccucaagccu

SEQ ID NO: 65632 - RNA, 21 nt, Human
aggaggccaguacugcugaac

SEQ ID NO: 65633 - RNA, 22 nt, Human
agaugguagguggcaggacuga

SEQ ID NO: 65634 - RNA, 22 nt, Human
agaugguccaugcacagauaug

SEQ ID NO: 65635 - RNA, 22 nt, Human
agauggucuaguugaaccauau

SEQ ID NO: 65636 - RNA, 22 nt, Human
agauggucuucauaaguuuuaa

SEQ ID NO: 65637 - RNA, 22 nt, Human
agauggucuuuugaguaaugaa

SEQ ID NO: 65638 - RNA, 20 nt, Human
agauggugggcuggaacacc

SEQ ID NO: 65639 - RNA, 22 nt, Human
agaugguuaucuuuucuuugua

SEQ ID NO: 65640 - RNA, 22 nt, Human
agaugguugucgcaaaugaaug

SEQ ID NO: 65641 - RNA, 22 nt, Human
agauguaagaccuucaugaggg

SEQ ID NO: 65642 - RNA, 22 nt, Human
agaugugauguuaggcccuugg

SEQ ID NO: 65643 - RNA, 22 nt, Human
agauguggaacacuagacugcu

SEQ ID NO: 65644 - RNA, 22 nt, Human
agauguggauccuaggguagaa

SEQ ID NO: 65645 - RNA, 22 nt, Human
agauguggccuuugggagauua

SEQ ID NO: 65646 - RNA, 22 nt, Human
agauguggcugcacccaccgcu

SEQ ID NO: 65647 - RNA, 22 nt, Human
agauguuaucauucagaguagc

SEQ ID NO: 65648 - RNA, 22 nt, Human
agauguuccagccaaugggaau

SEQ ID NO: 65649 - RNA, 22 nt, Human
agauguuuucuaauucuauauu

SEQ ID NO: 65650 - RNA, 22 nt, Human
agauuaacucucagaaaagagg

SEQ ID NO: 65651 - RNA, 22 nt, Human
agauuacagaagaauaaguaga

SEQ ID NO: 65652 - RNA, 20 nt, Human
agauuauuccuaagauuucu

SEQ ID NO: 65653 - RNA, 22 nt, Human
agauuauuuccagacuaaugaa

SEQ ID NO: 65654 - RNA, 21 nt, Human
agauucaggacagcagucacu

SEQ ID NO: 65655 - RNA, 22 nt, Human
agauucaugggaaagcuuuagg

SEQ ID NO: 65656 - RNA, 22 nt, Human
agauucauuguggauauuuucu

SEQ ID NO: 65657 - RNA, 22 nt, Human
agauuccagaucccaaaaauga

SEQ ID NO: 65658 - RNA, 22 nt, Human
agauuccuaaaguaagauauca

SEQ ID NO: 65659 - RNA, 22 nt, Human
agauuccuaguguuauuucugu

SEQ ID NO: 65660 - RNA, 22 nt, Human
agauucuaaacuugauucugcu

SEQ ID NO: 65661 - RNA, 22 nt, Human
agauucuaccagagcuaguuug

SEQ ID NO: 65662 - RNA, 22 nt, Human
agauucuacucuagauccaugg

SEQ ID NO: 65663 - RNA, 22 nt, Human
agauugaagacugguggagcug

SEQ ID NO: 65664 - RNA, 22 nt, Human
agauugggguccagacuccuga

SEQ ID NO: 65665 - RNA, 21 nt, Human
agauuguauggaggugagagg

SEQ ID NO: 65666 - RNA, 22 nt, Human
agauuuacucccugcuuccgcc

SEQ ID NO: 65667 - RNA, 22 nt, Human
agauuuagcugugaacagcuug

SEQ ID NO: 65668 - RNA, 22 nt, Human
agauuucagguuggggcagaag

SEQ ID NO: 65669 - RNA, 22 nt, Human
agauuuccagaccaauuucuca

SEQ ID NO: 65670 - RNA, 22 nt, Human
agauuucccaaauacuuguuau

SEQ ID NO: 65671 - RNA, 22 nt, Human
agauuuccguucucucuucagu

SEQ ID NO: 65672 - RNA, 22 nt, Human
agauuugaaacuugcuucauaa

SEQ ID NO: 65673 - RNA, 23 nt, Human
agauuuggaaagcugaguggcgu

SEQ ID NO: 65674 - RNA, 21 nt, Human
agauuugucccuucccauuua

SEQ ID NO: 65675 - RNA, 22 nt, Human
agauuuguccugcuuucuaccu

SEQ ID NO: 65676 - RNA, 22 nt, Human
agauuuguugugagcaggaaua

SEQ ID NO: 65677 - RNA, 18 nt, Human
agauuuugagaaauacaa

SEQ ID NO: 65678 - RNA, 22 nt, Human
agauuuugucucaauacuucug

SEQ ID NO: 65679 - RNA, 17 nt, Human
agcaaaaguaucaaagc

SEQ ID NO: 65680 - RNA, 22 nt, Human
agcaaacacaagagguaauuuc

SEQ ID NO: 65681 - RNA, 22 nt, Human
agcaaacagaugucuccuuuag

SEQ ID NO: 65682 - RNA, 20 nt, Human
agcaaacaggcuccaccaga

SEQ ID NO: 65683 - RNA, 22 nt, Human
agcaaacauucagcagauuggc

SEQ ID NO: 65684 - RNA, 22 nt, Human
agcaaagaaauggaggcucaga

SEQ ID NO: 65685 - RNA, 22 nt, Human
agcaaagaagacacaggcuuca

SEQ ID NO: 65686 - RNA, 22 nt, Human
agcaaagacagggacgaccaag

SEQ ID NO: 65687 - RNA, 22 nt, Human
agcaaagaguaauuuuguuuug

SEQ ID NO: 65688 - RNA, 22 nt, Human
agcaaagauguccggggcaagc

SEQ ID NO: 65689 - RNA, 22 nt, Human
agcaaagcacuuugcauacaua

SEQ ID NO: 65690 - RNA, 22 nt, Human
agcaaagcaguggcuaagcuga

SEQ ID NO: 65691 - RNA, 22 nt, Human
agcaaagccgagacagccagug

SEQ ID NO: 65692 - RNA, 21 nt, Human
agcaaaggcaggagagguuuc

SEQ ID NO: 65693 - RNA, 22 nt, Human
agcaaagucaguggaaccaucc

SEQ ID NO: 65694 - RNA, 22 nt, Human
agcaaaguccagucuguguaca

SEQ ID NO: 65695 - RNA, 23 nt, Human
agcaaauaaucugcuugcuuuuu

SEQ ID NO: 65696 - RNA, 22 nt, Human
agcaaauaauugucuuugaggg

SEQ ID NO: 65697 - RNA, 19 nt, Human
agcaaauacaucaaaauug

SEQ ID NO: 65698 - RNA, 22 nt, Human
agcaaauacauuuuuagcauaa

SEQ ID NO: 65699 - RNA, 22 nt, Human
agcaaauaccaaaggcugaugu

SEQ ID NO: 65700 - RNA, 22 nt, Human
agcaaauacuugaauaaaaaga

SEQ ID NO: 65701 - RNA, 19 nt, Human
agcaaauauaauaguguuc

SEQ ID NO: 65702 - RNA, 22 nt, Human
agcaaaucuaugaauguauauu

SEQ ID NO: 65703 - RNA, 22 nt, Human
agcaaauuaggucaaggagaug

SEQ ID NO: 65704 - RNA, 22 nt, Human
agcaacagaagauagagugaau

SEQ ID NO: 65705 - RNA, 22 nt, Human
agcaacagcccuguuucauuag

SEQ ID NO: 65706 - RNA, 22 nt, Human
agcaacagggggauggccacug

SEQ ID NO: 65707 - RNA, 22 nt, Human
agcaacaggguggucuucagaa

SEQ ID NO: 65708 - RNA, 22 nt, Human
agcaacauauaucaaugccuga

SEQ ID NO: 65709 - RNA, 22 nt, Human
agcaacccguccuugggggacu

SEQ ID NO: 65710 - RNA, 22 nt, Human
agcaacgagaagcacaaaauaa

SEQ ID NO: 65711 - RNA, 22 nt, Human
agauugguguugcagaaccaug

SEQ ID NO: 65712 - RNA, 22 nt, Human
agauugguuccuugcuuugaaa

SEQ ID NO: 65713 - RNA, 22 nt, Human
agauuuacucagcuccuggaaa

SEQ ID NO: 65714 - RNA, 22 nt, Human
agauuuccaucuuuuucaugug

SEQ ID NO: 65715 - RNA, 22 nt, Human
agauuucugggcuucaccaccu

SEQ ID NO: 65716 - RNA, 22 nt, Human
agcaaacuaauugcaguucugg

SEQ ID NO: 65717 - RNA, 22 nt, Human
agcaaagcaccauauggcaguu

SEQ ID NO: 65718 - RNA, 22 nt, Human
agcaaagcuaucucuauggaga

SEQ ID NO: 65719 - RNA, 22 nt, Human
agcaaagcucaugacauuacag

SEQ ID NO: 65720 - RNA, 22 nt, Human
agcaaagcuuccauaaagcagc

SEQ ID NO: 65721 - RNA, 22 nt, Human
agcaaaguagcugcuguucuua

SEQ ID NO: 65722 - RNA, 23 nt, Human
agcaaaguuguugcuaaccucau

SEQ ID NO: 65723 - RNA, 22 nt, Human
agcaaauaaagacaauuauguc

SEQ ID NO: 65724 - RNA, 22 nt, Human
agcaaauacuuuucacugagcc

SEQ ID NO: 65725 - RNA, 18 nt, Human
agcaaauauuaagugcau

SEQ ID NO: 65726 - RNA, 22 nt, Human
agcaaauucagaagcagaaugg

SEQ ID NO: 65727 - RNA, 20 nt, Human
agcaacaauaaaauguccug

SEQ ID NO: 65728 - RNA, 22 nt, Human
agcaacagcaacgacauuucuc

SEQ ID NO: 65729 - RNA, 22 nt, Human
agcaacaggaaauagcugauua

SEQ ID NO: 65730 - RNA, 22 nt, Human
agcaacaggaauauuauggcaa

SEQ ID NO: 65731 - RNA, 23 nt, Human
agcaacagugggugaguguugcu

SEQ ID NO: 65732 - RNA, 22 nt, Human
agcaacauuuuucaauuaacau

SEQ ID NO: 65733 - RNA, 22 nt, Human
agcaacuagccaggaugcagag

SEQ ID NO: 65734 - RNA, 22 nt, Human
agcaacuguuacaagaacaaca

SEQ ID NO: 65735 - RNA, 22 nt, Human
agcaacuucuacagauauagca

SEQ ID NO: 65736 - RNA, 17 nt, Human
agcaacuucucccacag

SEQ ID NO: 65737 - RNA, 20 nt, Human
agcaagaacguucugaggga

SEQ ID NO: 65738 - RNA, 20 nt, Human
agcaagaagguugugggagc

SEQ ID NO: 65739 - RNA, 22 nt, Human
agcaagcauugcugguuagguc

SEQ ID NO: 65740 - RNA, 22 nt, Human
agcaagcuguucuuggagagua

SEQ ID NO: 65741 - RNA, 22 nt, Human
agcaaggauuauccugggaagg

SEQ ID NO: 65742 - RNA, 22 nt, Human
agcaaggcucuuaaugcccaaa

SEQ ID NO: 65743 - RNA, 20 nt, Human
agcaaggcuggagcuuaugg

SEQ ID NO: 65744 - RNA, 22 nt, Human
agcaaggcugggucuaaugggg

SEQ ID NO: 65745 - RNA, 22 nt, Human
agcaaguaguaccaaguagcuc

SEQ ID NO: 65746 - RNA, 22 nt, Human
agcaauagauaaaacauuuacc

SEQ ID NO: 65747 - RNA, 22 nt, Human
agcaauauuucagcuagcaggu

SEQ ID NO: 65748 - RNA, 22 nt, Human
agcaaucagcuucuuuguguuu

SEQ ID NO: 65749 - RNA, 22 nt, Human
agcaaugugaccccugacagca

SEQ ID NO: 65750 - RNA, 22 nt, Human
aggaggccgcugaugggcuccc

SEQ ID NO: 65751 - RNA, 22 nt, Human
aggaggccgggauucuggagau

SEQ ID NO: 65752 - RNA, 22 nt, Human
aggaggccucuauccagagaga

SEQ ID NO: 65753 - RNA, 22 nt, Human
aggaggccuguuuucuccugga

SEQ ID NO: 65754 - RNA, 22 nt, Human
aggaggcuguggagcacuccau

SEQ ID NO: 65755 - RNA, 22 nt, Human
aggaggcuuuugcaggugccac

SEQ ID NO: 65756 - RNA, 22 nt, Human
aggagggacaccaauauauguu

SEQ ID NO: 65757 - RNA, 22 nt, Human
aggagggaccuaggaauauugc

SEQ ID NO: 65758 - RNA, 22 nt, Human
aggagggagaugcccauccugg

SEQ ID NO: 65759 - RNA, 22 nt, Human
aggagggagcuuaagccaggca

SEQ ID NO: 65760 - RNA, 21 nt, Human
aggagggcacaaggccaggaa

SEQ ID NO: 65761 - RNA, 22 nt, Human
aggagggcuaggaaaaccagga

SEQ ID NO: 65762 - RNA, 22 nt, Human
aggaggggcauagaaauguaau

SEQ ID NO: 65763 - RNA, 22 nt, Human
aggaggguacaauggguggaaa

SEQ ID NO: 65764 - RNA, 22 nt, Human
aggaggguggccucaugugagu

SEQ ID NO: 65765 - RNA, 22 nt, Human
aggaggguugaggaggauacuu

SEQ ID NO: 65766 - RNA, 20 nt, Human
aggaggucaaauggaaucug

SEQ ID NO: 65767 - RNA, 22 nt, Human
aggaggugcguggugauccccu

SEQ ID NO: 65768 - RNA, 22 nt, Human
aggaggugcuguuuguccugga

SEQ ID NO: 65769 - RNA, 22 nt, Human
aggagguugccagucugggggu

SEQ ID NO: 65770 - RNA, 22 nt, Human
aggaguaucuaauaaucugaga

SEQ ID NO: 65771 - RNA, 22 nt, Human
aggagucaccugcccaaaguca

SEQ ID NO: 65772 - RNA, 22 nt, Human
aggagucauaaaugugaacaaa

SEQ ID NO: 65773 - RNA, 20 nt, Human
aggagucccugugcucucuc

SEQ ID NO: 65774 - RNA, 17 nt, Human
aggagucucagaugagc

SEQ ID NO: 65775 - RNA, 22 nt, Human
aggagugaguguccucagcaga

SEQ ID NO: 65776 - RNA, 22 nt, Human
aggaguggaauuacuggguucu

SEQ ID NO: 65777 - RNA, 22 nt, Human
aggaguggugcaggaccugcca

SEQ ID NO: 65778 - RNA, 22 nt, Human
aggaguguggccagggcucugg

SEQ ID NO: 65779 - RNA, 22 nt, Human
aggaguguugaguuggguuuug

SEQ ID NO: 65780 - RNA, 22 nt, Human
aggaguguugcuucagggaagc

SEQ ID NO: 65781 - RNA, 22 nt, Human
aggaguuuauccgagggcauaa

SEQ ID NO: 65782 - RNA, 22 nt, Human
aggaguuucaaagcuuccaugu

SEQ ID NO: 65783 - RNA, 22 nt, Human
aggauaacuauaggauaaugcu

SEQ ID NO: 65784 - RNA, 22 nt, Human
aggauaauaauagugcucacuc

SEQ ID NO: 65785 - RNA, 18 nt, Human
aggauauuaagaguacag

SEQ ID NO: 65786 - RNA, 22 nt, Human
aggaucaaguugguugagcuuu

SEQ ID NO: 65787 - RNA, 22 nt, Human
aggauccuccuuagaaaagacc

SEQ ID NO: 65788 - RNA, 22 nt, Human
aggauccugcgcuuugggggag

SEQ ID NO: 65789 - RNA, 22 nt, Human
aggaucuucauugugcugcaaa

SEQ ID NO: 65790 - RNA, 22 nt, Human
aggaucuugcuguagaggauag

SEQ ID NO: 65791 - RNA, 22 nt, Human
aggaugaauaacugaaauggug

SEQ ID NO: 65792 - RNA, 22 nt, Human
aggaugagauuccagggucaau

SEQ ID NO: 65793 - RNA, 22 nt, Human
aggaugagccgcgcaagcugac

SEQ ID NO: 65794 - RNA, 23 nt, Human
aggauguaggauguauggcagag

SEQ ID NO: 65795 - RNA, 22 nt, Human
aggauguggcugagacuucugg

SEQ ID NO: 65796 - RNA, 22 nt, Human
aggauguggguuuucacauugu

SEQ ID NO: 65797 - RNA, 22 nt, Human
aggauguguucauagcugacgc

SEQ ID NO: 65798 - RNA, 22 nt, Human
aggauguuaucugugcaggugg

SEQ ID NO: 65799 - RNA, 23 nt, Human
aggauuuaaaggcaaugcauuuu

SEQ ID NO: 65800 - RNA, 22 nt, Human
aggauuuaaauccuuaaccacu

SEQ ID NO: 65801 - RNA, 22 nt, Human
aggauuuagauuuggaggaacu

SEQ ID NO: 65802 - RNA, 19 nt, Human
aggauuuauuaugugcuca

SEQ ID NO: 65803 - RNA, 22 nt, Human
aggauuuauuccagaaaugcaa

SEQ ID NO: 65804 - RNA, 20 nt, Human
aggauuugagaaggcgucuu

SEQ ID NO: 65805 - RNA, 22 nt, Human
aggauuuggccauggcuucggg

SEQ ID NO: 65806 - RNA, 22 nt, Human
aggauuuggggaagaaaacacu

SEQ ID NO: 65807 - RNA, 22 nt, Human
aggcaaaauuacaaaguuauua

SEQ ID NO: 65808 - RNA, 23 nt, Human
aggcaaaccuauaaaauaggaau

SEQ ID NO: 65809 - RNA, 22 nt, Human
aggcaaagaaguuggucaggag

SEQ ID NO: 65810 - RNA, 22 nt, Human
aggcaaagagccagcaaaucug

SEQ ID NO: 65811 - RNA, 22 nt, Human
aggcaaagaggauauuuugggg

SEQ ID NO: 65812 - RNA, 22 nt, Human
aggcaaagcgauaccagagcua

SEQ ID NO: 65813 - RNA, 22 nt, Human
aggcaaaucucaguuggccucu

SEQ ID NO: 65814 - RNA, 22 nt, Human
aggcaaaugauccugcuccuug

SEQ ID NO: 65815 - RNA, 22 nt, Human
aggcaacaaggguagucaguga

SEQ ID NO: 65816 - RNA, 22 nt, Human
aggcaacacuugcauuuuuuag

SEQ ID NO: 65817 - RNA, 22 nt, Human
aggcaacaggaaaccacaugau

SEQ ID NO: 65818 - RNA, 22 nt, Human
aggcaacauaacacgaaagucu

SEQ ID NO: 65819 - RNA, 19 nt, Human
aggcaaccaaugaggcaaa

SEQ ID NO: 65820 - RNA, 22 nt, Human
aggccagcucacccuggcuccu

SEQ ID NO: 65821 - RNA, 22 nt, Human
aggccagcucuacccuuggacu

SEQ ID NO: 65822 - RNA, 22 nt, Human
aggccagcuuccagaggggcag

SEQ ID NO: 65823 - RNA, 22 nt, Human
aggccagcuucuacccucuguu

SEQ ID NO: 65824 - RNA, 20 nt, Human
aggccaggaaauguaguucu

SEQ ID NO: 65825 - RNA, 22 nt, Human
aggccaggcaacauucugaagu

SEQ ID NO: 65826 - RNA, 22 nt, Human
aggccagguuccucaaucuuga

SEQ ID NO: 65827 - RNA, 22 nt, Human
aggcccaaaagaaaccacuggg

SEQ ID NO: 65828 - RNA, 23 nt, Human
aggcccaacucugugagggcugc

SEQ ID NO: 65829 - RNA, 22 nt, Human
aggcccagagcaggaaaggguu

SEQ ID NO: 65830 - RNA, 22 nt, Human
aggcccaguccucugccgucug

SEQ ID NO: 65831 - RNA, 20 nt, Human
aggcccagugaauauauugc

SEQ ID NO: 65832 - RNA, 22 nt, Human
aggcccagugccauuaguuuug

SEQ ID NO: 65833 - RNA, 22 nt, Human
aggcccaguguggcuuccugga

SEQ ID NO: 65834 - RNA, 22 nt, Human
aggcccaguuauccuacuuguu

SEQ ID NO: 65835 - RNA, 20 nt, Human
aggccccagguggacacuag

SEQ ID NO: 65836 - RNA, 20 nt, Human
aggcccuccccacuguugcu

SEQ ID NO: 65837 - RNA, 22 nt, Human
aggcccugagcauccgagggca

SEQ ID NO: 65838 - RNA, 22 nt, Human
aggcccugauccgaauccagau

SEQ ID NO: 65839 - RNA, 22 nt, Human
aggcccugcccagagcuccucg

SEQ ID NO: 65840 - RNA, 22 nt, Human
aggcccugcugaggccucccuc

SEQ ID NO: 65841 - RNA, 21 nt, Human
aggcccuggaggucagagaaa

SEQ ID NO: 65842 - RNA, 22 nt, Human
aggcccuggccugacucaaugu

SEQ ID NO: 65843 - RNA, 22 nt, Human
aggcccuggcuggguuucuuua

SEQ ID NO: 65844 - RNA, 22 nt, Human
aggcccugggcaguucuguagc

SEQ ID NO: 65845 - RNA, 22 nt, Human
aggcccuguccauggugcugaa

SEQ ID NO: 65846 - RNA, 22 nt, Human
aggcccuguuaugagccacugu

SEQ ID NO: 65847 - RNA, 22 nt, Human
aggcccuguuguagcauuuugg

SEQ ID NO: 65848 - RNA, 22 nt, Human
aggcccuucuugguggcucagg

SEQ ID NO: 65849 - RNA, 22 nt, Human
aggcccuuggacucaugcucga

SEQ ID NO: 65850 - RNA, 22 nt, Human
aggcccuuggguccucuccaca

SEQ ID NO: 65851 - RNA, 22 nt, Human
aggccggcgcuucccaggaggc

SEQ ID NO: 65852 - RNA, 22 nt, Human
aggccucagccugccaggccug

SEQ ID NO: 65853 - RNA, 22 nt, Human
aggccucaggaagguaaagaag

SEQ ID NO: 65854 - RNA, 22 nt, Human
aggccucaguuugucaucugua

SEQ ID NO: 65855 - RNA, 22 nt, Human
aggccucauaguagaccugccc

SEQ ID NO: 65856 - RNA, 22 nt, Human
aggccuccugcagggaugagug

SEQ ID NO: 65857 - RNA, 21 nt, Human
aggccucuucauggccaugau

SEQ ID NO: 65858 - RNA, 22 nt, Human
aggccugcagcaggagcaaacc

SEQ ID NO: 65859 - RNA, 22 nt, Human
aggccugcugucuugaggccaa

SEQ ID NO: 65860 - RNA, 22 nt, Human
aggccuggcuuugguuugcuga

SEQ ID NO: 65861 - RNA, 22 nt, Human
aggccuggugaaugaaguaucu

SEQ ID NO: 65862 - RNA, 22 nt, Human
aggccuguuccaggccccuuuu

SEQ ID NO: 65863 - RNA, 22 nt, Human
aggccuguuccuuccugggcac

SEQ ID NO: 65864 - RNA, 22 nt, Human
aggccuguuucuuguccagcuc

SEQ ID NO: 65865 - RNA, 22 nt, Human
aggccuuaagaacaaaacuauu

SEQ ID NO: 65866 - RNA, 22 nt, Human
aggccuuaccauagcuguagca

SEQ ID NO: 65867 - RNA, 22 nt, Human
aggccuugccaaugagagaacu

SEQ ID NO: 65868 - RNA, 22 nt, Human
aggccuuggaagccagggagcc

SEQ ID NO: 65869 - RNA, 22 nt, Human
aggccuugugagaagcagagaa

SEQ ID NO: 65870 - RNA, 19 nt, Human
agcagcuggagguggagug

SEQ ID NO: 65871 - RNA, 17 nt, Human
agcagcuggcacaggag

SEQ ID NO: 65872 - RNA, 22 nt, Human
agcagcugggcucagagcuggg

SEQ ID NO: 65873 - RNA, 17 nt, Human
agcagcuggguugaucu

SEQ ID NO: 65874 - RNA, 22 nt, Human
agcagcugguaggaguggccac

SEQ ID NO: 65875 - RNA, 22 nt, Human
agcagcuggugcaacucuaaga

SEQ ID NO: 65876 - RNA, 22 nt, Human
agcagcugguucccgagggcgu

SEQ ID NO: 65877 - RNA, 18 nt, Human
agcagcugugccacacug

SEQ ID NO: 65878 - RNA, 22 nt, Human
agcagcuuacauguggccuauc

SEQ ID NO: 65879 - RNA, 22 nt, Human
agcagcuuagggaauucucccu

SEQ ID NO: 65880 - RNA, 22 nt, Human
agcagcuuccuguuugcaggca

SEQ ID NO: 65881 - RNA, 21 nt, Human
agcagcuugagucuggagcuc

SEQ ID NO: 65882 - RNA, 21 nt, Human
agcagcuuugguugaagcaga

SEQ ID NO: 65883 - RNA, 23 nt, Human
agcaggaaaccgagggugauguu

SEQ ID NO: 65884 - RNA, 22 nt, Human
agcaggaaagaaaaaucugugu

SEQ ID NO: 65885 - RNA, 22 nt, Human
agcaggaacugacaccaagcca

SEQ ID NO: 65886 - RNA, 17 nt, Human
agcaggaccccagagca

SEQ ID NO: 65887 - RNA, 22 nt, Human
agcaggagacauggggguggug

SEQ ID NO: 65888 - RNA, 22 nt, Human
agcaggagagcagugcgugguc

SEQ ID NO: 65889 - RNA, 22 nt, Human
agcaggagcccuuaucaccagg

SEQ ID NO: 65890 - RNA, 22 nt, Human
agcaggaggagagccuggcggu

SEQ ID NO: 65891 - RNA, 22 nt, Human
agcaggauuuugaagugcaagu

SEQ ID NO: 65892 - RNA, 22 nt, Human
agcaggcacgcucccugcgcga

SEQ ID NO: 65893 - RNA, 17 nt, Human
agcaggcacgucagcac

SEQ ID NO: 65894 - RNA, 22 nt, Human
agcaggcagccuaggaagugaa

SEQ ID NO: 65895 - RNA, 22 nt, Human
agcaggcaggcccagcggcugg

SEQ ID NO: 65896 - RNA, 22 nt, Human
agcaggcauagaguagcacuca

SEQ ID NO: 65897 - RNA, 19 nt, Human
agcaggccacagggccagc

SEQ ID NO: 65898 - RNA, 22 nt, Human
agcaggcuaaauaauaauacau

SEQ ID NO: 65899 - RNA, 19 nt, Human
agcaggcuaggcugccucu

SEQ ID NO: 65900 - RNA, 22 nt, Human
agcaggcugagcacccaggggg

SEQ ID NO: 65901 - RNA, 22 nt, Human
agcaggcuuuccacagaaggag

SEQ ID NO: 65902 - RNA, 22 nt, Human
agcagggacuacgugaaaguga

SEQ ID NO: 65903 - RNA, 22 nt, Human
agcagggacugagccaguggga

SEQ ID NO: 65904 - RNA, 22 nt, Human
agcagggcccacuaggggagau

SEQ ID NO: 65905 - RNA, 22 nt, Human
agcagggcucuguggagggugg

SEQ ID NO: 65906 - RNA, 22 nt, Human
agcagggcugcagugugucuuu

SEQ ID NO: 65907 - RNA, 22 nt, Human
agcagggcuuugucucugugaa

SEQ ID NO: 65908 - RNA, 22 nt, Human
agcaggggcaggguuuugugcu

SEQ ID NO: 65909 - RNA, 22 nt, Human
agcaggggcuccuccacagcca

SEQ ID NO: 65910 - RNA, 22 nt, Human
agcagggggaguuagacuagau

SEQ ID NO: 65911 - RNA, 22 nt, Human
agcaggguauguuagagcugua

SEQ ID NO: 65912 - RNA, 22 nt, Human
agcaggguuccuuaaggccaua

SEQ ID NO: 65913 - RNA, 22 nt, Human
agcagguaugacauagauaugu

SEQ ID NO: 65914 - RNA, 22 nt, Human
agcaggugccagguguacccgc

SEQ ID NO: 65915 - RNA, 18 nt, Human
agcaggugcuguuucuuu

SEQ ID NO: 65916 - RNA, 22 nt, Human
agcagguggucuguugcugcug

SEQ ID NO: 65917 - RNA, 16 nt, Human
agcagguguauagugu

SEQ ID NO: 65918 - RNA, 22 nt, Human
agcagguguaucggucaccuac

SEQ ID NO: 65919 - RNA, 22 nt, Human
agcagguguuggcugggccauc

SEQ ID NO: 65920 - RNA, 22 nt, Human
agcagguuaccauugauuuccu

SEQ ID NO: 65921 - RNA, 22 nt, Human
agcagguugugauacacucaga

SEQ ID NO: 65922 - RNA, 22 nt, Human
agcagguuguuuuguggccagg

SEQ ID NO: 65923 - RNA, 22 nt, Human
agcagguuuguuuucuucugag

SEQ ID NO: 65924 - RNA, 22 nt, Human
agcaguagugauggccccugag

SEQ ID NO: 65925 - RNA, 22 nt, Human
agcaguauucuccuguggugga

SEQ ID NO: 65926 - RNA, 22 nt, Human
agcagucaggccucagagccgu

SEQ ID NO: 65927 - RNA, 23 nt, Human
agcagucagggugguaagccauc

SEQ ID NO: 65928 - RNA, 22 nt, Human
agcaguccuccaguguguuuua

SEQ ID NO: 65929 - RNA, 22 nt, Human
agcagugaugaaaugagcaucc

SEQ ID NO: 65930 - RNA, 17 nt, Human
agcugaaauugcugaag

SEQ ID NO: 65931 - RNA, 22 nt, Human
agcugaagauccaggguugggg

SEQ ID NO: 65932 - RNA, 20 nt, Human
agcugaagaucuggaugggg

SEQ ID NO: 65933 - RNA, 22 nt, Human
agcugaagcaacaacaggaugg

SEQ ID NO: 65934 - RNA, 22 nt, Human
agcugaaguuuagaauugugaa

SEQ ID NO: 65935 - RNA, 22 nt, Human
agcugaaucucaggcauccuuu

SEQ ID NO: 65936 - RNA, 22 nt, Human
agcugaauguucucagaccaga

SEQ ID NO: 65937 - RNA, 22 nt, Human
agcugacaggauggcauuauua

SEQ ID NO: 65938 - RNA, 22 nt, Human
agcugacugaugaagaggccuu

SEQ ID NO: 65939 - RNA, 22 nt, Human
agcugacuucuugauccaauga

SEQ ID NO: 65940 - RNA, 22 nt, Human
agcugagaaucuuccccagugu

SEQ ID NO: 65941 - RNA, 22 nt, Human
agcugagagcugugucaagaua

SEQ ID NO: 65942 - RNA, 21 nt, Human
agcugagcccagaagacuggu

SEQ ID NO: 65943 - RNA, 22 nt, Human
agcugaggaauaauaacaaggu

SEQ ID NO: 65944 - RNA, 20 nt, Human
agcugaggcaccugagguua

SEQ ID NO: 65945 - RNA, 22 nt, Human
agcugaggccacgagugaaggg

SEQ ID NO: 65946 - RNA, 22 nt, Human
agcugagggcaggaugggguga

SEQ ID NO: 65947 - RNA, 22 nt, Human
agcugauacauuucuuguagcc

SEQ ID NO: 65948 - RNA, 22 nt, Human
agcugaugccauguggaacagu

SEQ ID NO: 65949 - RNA, 22 nt, Human
agcugauuuuuaggagacagga

SEQ ID NO: 65950 - RNA, 22 nt, Human
agcugcaaagaugauuuguugu

SEQ ID NO: 65951 - RNA, 22 nt, Human
agcugcaaaggcacacuugggc

SEQ ID NO: 65952 - RNA, 22 nt, Human
agcugcaagaagaggucccuga

SEQ ID NO: 65953 - RNA, 22 nt, Human
agcugcaagauuucuuuuguau

SEQ ID NO: 65954 - RNA, 22 nt, Human
agcugcaaguguugccuccuac

SEQ ID NO: 65955 - RNA, 22 nt, Human
agcugcaauuaaagacugugaa

SEQ ID NO: 65956 - RNA, 22 nt, Human
agcugcaauucuggacauaguc

SEQ ID NO: 65957 - RNA, 22 nt, Human
agcugcagaucaauaggcucac

SEQ ID NO: 65958 - RNA, 22 nt, Human
agcugcagauucuaucuagaag

SEQ ID NO: 65959 - RNA, 22 nt, Human
agcugcagcuguuuucugagug

SEQ ID NO: 65960 - RNA, 22 nt, Human
agcugcagcuuccuaguccagc

SEQ ID NO: 65961 - RNA, 21 nt, Human
agcugcaggccucccagggau

SEQ ID NO: 65962 - RNA, 22 nt, Human
agcugcagguggacccguaccg

SEQ ID NO: 65963 - RNA, 22 nt, Human
agcugcagugaacuguuuuguc

SEQ ID NO: 65964 - RNA, 22 nt, Human
agcugcaguucguuccagcucu

SEQ ID NO: 65965 - RNA, 22 nt, Human
agcugccacaugcccaagggca

SEQ ID NO: 65966 - RNA, 22 nt, Human
agcugccaccucugccuuuggg

SEQ ID NO: 65967 - RNA, 22 nt, Human
agcugccagcaucccggaaggg

SEQ ID NO: 65968 - RNA, 22 nt, Human
agcugccaucagccuuuggaug

SEQ ID NO: 65969 - RNA, 22 nt, Human
agcugccauccuguucagcacc

SEQ ID NO: 65970 - RNA, 22 nt, Human
agcugcccaaggucacagagcu

SEQ ID NO: 65971 - RNA, 22 nt, Human
agcugcccugggcuggagaugg

SEQ ID NO: 65972 - RNA, 22 nt, Human
agcugcccugggucuugcugcu

SEQ ID NO: 65973 - RNA, 22 nt, Human
agcugcccuuaauaggcauuca

SEQ ID NO: 65974 - RNA, 20 nt, Human
agcugcccuuuucacauguu

SEQ ID NO: 65975 - RNA, 17 nt, Human
agcugccucucccacca

SEQ ID NO: 65976 - RNA, 22 nt, Human
agcugccucucuugagguuacg

SEQ ID NO: 65977 - RNA, 22 nt, Human
agcugccucugcugguuuagaa

SEQ ID NO: 65978 - RNA, 22 nt, Human
agcugccuggccggagccacug

SEQ ID NO: 65979 - RNA, 22 nt, Human
agcugccuguccuaggccauca

SEQ ID NO: 65980 - RNA, 22 nt, Human
agcugccuuaaauuacuuugug

SEQ ID NO: 65981 - RNA, 22 nt, Human
agcugccuuauggaguaugaaa

SEQ ID NO: 65982 - RNA, 22 nt, Human
agcugccuuugcaucacuuuaa

SEQ ID NO: 65983 - RNA, 22 nt, Human
agcugccuuuugagaaagcuca

SEQ ID NO: 65984 - RNA, 22 nt, Human
agcugcuacugcucugccagag

SEQ ID NO: 65985 - RNA, 22 nt, Human
agcugcucuucauuucccccca

SEQ ID NO: 65986 - RNA, 22 nt, Human
agcugcugagccaggcugaugu

SEQ ID NO: 65987 - RNA, 22 nt, Human
agcugcugagccauguccugcu

SEQ ID NO: 65988 - RNA, 22 nt, Human
agcugcugcccauaggugacau

SEQ ID NO: 65989 - RNA, 22 nt, Human
agcugcugccgguggccacccu

SEQ ID NO: 65990 - RNA, 22 nt, Human
agcugcugggagaagugagcca

SEQ ID NO: 65991 - RNA, 23 nt, Human
agcugcugggccugccguggccu

SEQ ID NO: 65992 - RNA, 22 nt, Human
agcugcuuccucuuugauguca

SEQ ID NO: 65993 - RNA, 22 nt, Human
agcugcuuguacaugaccacau

SEQ ID NO: 65994 - RNA, 22 nt, Human
agcugcuuguugaaauccaaac

SEQ ID NO: 65995 - RNA, 23 nt, Human
agcuggaaauggccgagcucugc

SEQ ID NO: 65996 - RNA, 22 nt, Human
agcuggaagauccugguuuugu

SEQ ID NO: 65997 - RNA, 22 nt, Human
agcuggaagcugaugagcacag

SEQ ID NO: 65998 - RNA, 22 nt, Human
agcuggaauccuacuucuaaca

SEQ ID NO: 65999 - RNA, 22 nt, Human
agcuggaauuacaggcacgcac

SEQ ID NO: 66000 - RNA, 20 nt, Human
agcuggagaagggcccuucc

SEQ ID NO: 66001 - RNA, 22 nt, Human
agcuggagaauaggaauuagug

SEQ ID NO: 66002 - RNA, 22 nt, Human
agcuggagaguuuccaggaagg

SEQ ID NO: 66003 - RNA, 22 nt, Human
agcuggagaucaugcugauacu

SEQ ID NO: 66004 - RNA, 22 nt, Human
agcuggagauucuggggacagu

SEQ ID NO: 66005 - RNA, 22 nt, Human
agcuggagcuucaagcagguaa

SEQ ID NO: 66006 - RNA, 22 nt, Human
agcuggaggaguuucuccuagc

SEQ ID NO: 66007 - RNA, 22 nt, Human
agcuugguguugccugcuugag

SEQ ID NO: 66008 - RNA, 22 nt, Human
agcuugucuuucaaaggaguuu

SEQ ID NO: 66009 - RNA, 22 nt, Human
agcuuguuagggcaguggucgc

SEQ ID NO: 66010 - RNA, 22 nt, Human
agcuuguucucauccauucuuc

SEQ ID NO: 66011 - RNA, 22 nt, Human
agcuuguuguuacugaugcauu

SEQ ID NO: 66012 - RNA, 22 nt, Human
agcuuuaccugaaauuugaucc

SEQ ID NO: 66013 - RNA, 22 nt, Human
agcuuuagaauuguucagcaag

SEQ ID NO: 66014 - RNA, 22 nt, Human
agcuuuauauguuguuucucca

SEQ ID NO: 66015 - RNA, 22 nt, Human
agcuuuauggugccucacuuga

SEQ ID NO: 66016 - RNA, 22 nt, Human
agcuuucaguuacuaaugaagg

SEQ ID NO: 66017 - RNA, 22 nt, Human
agcuuucuauauaugaguugcu

SEQ ID NO: 66018 - RNA, 22 nt, Human
agcuuucucucagccaggcugc

SEQ ID NO: 66019 - RNA, 22 nt, Human
agcuuugcaaccugaggccagu

SEQ ID NO: 66020 - RNA, 22 nt, Human
agcuuugcacaacagagaggug

SEQ ID NO: 66021 - RNA, 22 nt, Human
agcuuugcugcuggagaagggu

SEQ ID NO: 66022 - RNA, 22 nt, Human
agcuuuggagacugacuccauc

SEQ ID NO: 66023 - RNA, 22 nt, Human
agcuuuggauuucuuauagccc

SEQ ID NO: 66024 - RNA, 22 nt, Human
agcuuuggggacagccaagguu

SEQ ID NO: 66025 - RNA, 22 nt, Human
agcuuugggggagguagucugu

SEQ ID NO: 66026 - RNA, 22 nt, Human
agcuuuggggguagguauagag

SEQ ID NO: 66027 - RNA, 22 nt, Human
agcuuuguauuugagcauacga

SEQ ID NO: 66028 - RNA, 22 nt, Human
agcuuuguggcuuugcaagacu

SEQ ID NO: 66029 - RNA, 19 nt, Human
agcuuuuacuaacagcaga

SEQ ID NO: 66030 - RNA, 22 nt, Human
agcuuuuucacuuuggauggga

SEQ ID NO: 66031 - RNA, 22 nt, Human
aggaaaaaagucugugauuaua

SEQ ID NO: 66032 - RNA, 22 nt, Human
aggaaaaaccuguuaaugguag

SEQ ID NO: 66033 - RNA, 22 nt, Human
aggaaaaagaguugcugccuuc

SEQ ID NO: 66034 - RNA, 22 nt, Human
aggaaaagugugaaguauggag

SEQ ID NO: 66035 - RNA, 21 nt, Human
aggaaaauugaggguuguugu

SEQ ID NO: 66036 - RNA, 22 nt, Human
aggaaacaacuuggcaugagcc

SEQ ID NO: 66037 - RNA, 22 nt, Human
aggaaacauccuuaucuauucu

SEQ ID NO: 66038 - RNA, 22 nt, Human
aggaaacuaacuuaucuuuaua

SEQ ID NO: 66039 - RNA, 18 nt, Human
agucauuuacuuuuguga

SEQ ID NO: 66040 - RNA, 22 nt, Human
agucauuucuguagucauguuu

SEQ ID NO: 66041 - RNA, 22 nt, Human
agucauuuucugccuguaaucu

SEQ ID NO: 66042 - RNA, 22 nt, Human
aguccaaacaaacuucccgagg

SEQ ID NO: 66043 - RNA, 20 nt, Human
aguccaaagccuguuuacuu

SEQ ID NO: 66044 - RNA, 22 nt, Human
aguccaaaucuuguuucauauc

SEQ ID NO: 66045 - RNA, 22 nt, Human
aguccaagauuagggugacagc

SEQ ID NO: 66046 - RNA, 22 nt, Human
aguccacagagucucuccugaa

SEQ ID NO: 66047 - RNA, 22 nt, Human
aguccacugccccagcuccucg

SEQ ID NO: 66048 - RNA, 22 nt, Human
aguccaggaguugggugacauu

SEQ ID NO: 66049 - RNA, 22 nt, Human
aguccaggcaaguuguugugua

SEQ ID NO: 66050 - RNA, 22 nt, Human
aguccaggcauuccagccauuc

SEQ ID NO: 66051 - RNA, 22 nt, Human
aguccaggccucccucuccugc

SEQ ID NO: 66052 - RNA, 22 nt, Human
aguccaggcucuuccugaagaa

SEQ ID NO: 66053 - RNA, 22 nt, Human
aguccagggcucucugugggau

SEQ ID NO: 66054 - RNA, 22 nt, Human
aguccauaacuucagaguguca

SEQ ID NO: 66055 - RNA, 22 nt, Human
aguccauaggcaguucauaaca

SEQ ID NO: 66056 - RNA, 22 nt, Human
agucccagaucuacaggaggga

SEQ ID NO: 66057 - RNA, 22 nt, Human
agucccagaugacccagcuacu

SEQ ID NO: 66058 - RNA, 22 nt, Human
agucccagcccaguccuguaag

SEQ ID NO: 66059 - RNA, 22 nt, Human
agucccagcucagaaccacuag

SEQ ID NO: 66060 - RNA, 21 nt, Human
agucccaggggugagugaugu

SEQ ID NO: 66061 - RNA, 22 nt, Human
agucccagugagaugaaccagg

SEQ ID NO: 66062 - RNA, 21 nt, Human
agucccauccgguaagcaagc

SEQ ID NO: 66063 - RNA, 22 nt, Human
aguccccuggcaggagggacgu

SEQ ID NO: 66064 - RNA, 22 nt, Human
agucccuugagggaguacuguu

SEQ ID NO: 66065 - RNA, 22 nt, Human
aguccgcgcuccaugggagucc

SEQ ID NO: 66066 - RNA, 22 nt, Human
aguccguggccagacucaagag

SEQ ID NO: 66067 - RNA, 22 nt, Human
aguccuagcccuggauccauca

SEQ ID NO: 66068 - RNA, 22 nt, Human
aguccuaggcccugcuccagau

SEQ ID NO: 66069 - RNA, 22 nt, Human
aguccuggacuuggagucaggg

SEQ ID NO: 66070 - RNA, 22 nt, Human
aguccugugcaaaugcaucuga

SEQ ID NO: 66071 - RNA, 22 nt, Human
aguccuucacguccugcuuauu

SEQ ID NO: 66072 - RNA, 22 nt, Human
aguccuugaauguuuugaaauc

SEQ ID NO: 66073 - RNA, 23 nt, Human
aguccuuuuuauaaaauugagga

SEQ ID NO: 66074 - RNA, 22 nt, Human
agucgcagacaugguccccuuu

SEQ ID NO: 66075 - RNA, 22 nt, Human
agucuacaaagaaaaguuauug

SEQ ID NO: 66076 - RNA, 22 nt, Human
agucuacaaucuuaaaugaacu

SEQ ID NO: 66077 - RNA, 22 nt, Human
agucuagaaacaagguagagcu

SEQ ID NO: 66078 - RNA, 22 nt, Human
agucuagaggauggguccagau

SEQ ID NO: 66079 - RNA, 22 nt, Human
agucuagauccccagugcuguc

SEQ ID NO: 66080 - RNA, 22 nt, Human
agucuaguaggaucucugggcu

SEQ ID NO: 66081 - RNA, 22 nt, Human
agucuauuucagucuuacuagu

SEQ ID NO: 66082 - RNA, 22 nt, Human
agucuauuuuagcugcauaugu

SEQ ID NO: 66083 - RNA, 22 nt, Human
agucucaaagucagugucaugg

SEQ ID NO: 66084 - RNA, 22 nt, Human
agucucaagggaugucucuaua

SEQ ID NO: 66085 - RNA, 22 nt, Human
agucucagaguaccugagggac

SEQ ID NO: 66086 - RNA, 22 nt, Human
agucucagcaagcauggcuagu

SEQ ID NO: 66087 - RNA, 22 nt, Human
agucuccacaacagcccugaua

SEQ ID NO: 66088 - RNA, 22 nt, Human
agucucuaggaucagacaccca

SEQ ID NO: 66089 - RNA, 21 nt, Human
agucucucuaauaaaugcuug

SEQ ID NO: 66090 - RNA, 22 nt, Human
agucucugcugguugugccuau

SEQ ID NO: 66091 - RNA, 22 nt, Human
agucucugucguagaucagcgu

SEQ ID NO: 66092 - RNA, 22 nt, Human
agucucugugagcucccaaugg

SEQ ID NO: 66093 - RNA, 19 nt, Human
agucucuucggaggagguu

SEQ ID NO: 66094 - RNA, 22 nt, Human
agucucuugcuagaaucagcca

SEQ ID NO: 66095 - RNA, 22 nt, Human
agucugaaaguauguuguaaug

SEQ ID NO: 66096 - RNA, 22 nt, Human
agucugaagacucaugucugaa

SEQ ID NO: 66097 - RNA, 22 nt, Human
agucugaagauauucuugcagg

SEQ ID NO: 66098 - RNA, 22 nt, Human
agucugaaggauggaagguacc

SEQ ID NO: 66099 - RNA, 20 nt, Human
agucugacauuuuucucuca

SEQ ID NO: 66100 - RNA, 22 nt, Human
agucugacuagacucugcucac

SEQ ID NO: 66101 - RNA, 22 nt, Human
agucugagguaauauuuuucuc

SEQ ID NO: 66102 - RNA, 19 nt, Human
agucugcauuucuagcaag

SEQ ID NO: 66103 - RNA, 22 nt, Human
agucugcuuuugugaagagcug

SEQ ID NO: 66104 - RNA, 22 nt, Human
agucuggaauuuggccugagca

SEQ ID NO: 66105 - RNA, 22 nt, Human
agucuggagugauuauguggga

SEQ ID NO: 66106 - RNA, 22 nt, Human
agucugggaacugggaacguuu

SEQ ID NO: 66107 - RNA, 22 nt, Human
agucuggguggcugagcuacag

SEQ ID NO: 66108 - RNA, 22 nt, Human
agucuggucaucugauucuuuu

SEQ ID NO: 66109 - RNA, 22 nt, Human
agucugguguaugaaagugaau

SEQ ID NO: 66110 - RNA, 20 nt, Human
agucugucaauuuacagugg

SEQ ID NO: 66111 - RNA, 22 nt, Human
agucugucuaauauuauucagg

SEQ ID NO: 66112 - RNA, 22 nt, Human
agucugucucugcuaaucacua

SEQ ID NO: 66113 - RNA, 22 nt, Human
agucugucuuuggcuucaccac

SEQ ID NO: 66114 - RNA, 22 nt, Human
agucuguggauggacuggcaga

SEQ ID NO: 66115 - RNA, 22 nt, Human
agucuguggggucccuggggca

SEQ ID NO: 66116 - RNA, 22 nt, Human
agucuguguaccuuuggccuuc

SEQ ID NO: 66117 - RNA, 23 nt, Human
agucuuaauacagcucuuuucua

SEQ ID NO: 66118 - RNA, 21 nt, Human
agucuuaggcacagcuguguc

SEQ ID NO: 66119 - RNA, 22 nt, Human
agucuuauaucacuaugcucug

SEQ ID NO: 66120 - RNA, 22 nt, Human
agucuuauguuugugaagaacu

SEQ ID NO: 66121 - RNA, 22 nt, Human
agucuucacaucagucuaaaga

SEQ ID NO: 66122 - RNA, 22 nt, Human
agucuucacucuucacuacuau

SEQ ID NO: 66123 - RNA, 22 nt, Human
agucuucagcaggguuaaaccc

SEQ ID NO: 66124 - RNA, 23 nt, Human
agcuggaggcugucuacucccaa

SEQ ID NO: 66125 - RNA, 22 nt, Human
agcuggaggggccagcaggugu

SEQ ID NO: 66126 - RNA, 22 nt, Human
agcuggcaaggcuuuagauuca

SEQ ID NO: 66127 - RNA, 22 nt, Human
agcuggcaaguugaagguggcu

SEQ ID NO: 66128 - RNA, 22 nt, Human
agcuggcaauguaagucccugg

SEQ ID NO: 66129 - RNA, 21 nt, Human
agcuggcaauguuguccucuu

SEQ ID NO: 66130 - RNA, 21 nt, Human
agcuggcagauauggugucug

SEQ ID NO: 66131 - RNA, 19 nt, Human
agcuggcagcuuccacuuc

SEQ ID NO: 66132 - RNA, 22 nt, Human
agcuggcaguugcgauaaugca

SEQ ID NO: 66133 - RNA, 22 nt, Human
agcuggcauugcagggagcugc

SEQ ID NO: 66134 - RNA, 22 nt, Human
agcuggccagaugucccaaaga

SEQ ID NO: 66135 - RNA, 22 nt, Human
agcuggccagcaccuccagguc

SEQ ID NO: 66136 - RNA, 20 nt, Human
agcuggcccacagguguggg

SEQ ID NO: 66137 - RNA, 22 nt, Human
agcuggcccacuguguggucca

SEQ ID NO: 66138 - RNA, 22 nt, Human
agcuggccuccgggugccuggg

SEQ ID NO: 66139 - RNA, 22 nt, Human
agcuggccuuagugagcaccug

SEQ ID NO: 66140 - RNA, 21 nt, Human
agcuggcuauaguuagugaug

SEQ ID NO: 66141 - RNA, 22 nt, Human
agcuggcuggccccuuccugcc

SEQ ID NO: 66142 - RNA, 22 nt, Human
agcuggcuucacaggcagugug

SEQ ID NO: 66143 - RNA, 22 nt, Human
agcugggaagacuggaagacag

SEQ ID NO: 66144 - RNA, 22 nt, Human
agcugggagcagagccacagcc

SEQ ID NO: 66145 - RNA, 22 nt, Human
agcugggagcugaaggcugauu

SEQ ID NO: 66146 - RNA, 22 nt, Human
agcugggaggugggcagugaga

SEQ ID NO: 66147 - RNA, 22 nt, Human
agcugggaugaggagcauccuu

SEQ ID NO: 66148 - RNA, 22 nt, Human
gcccagaacagugucacauguc

SEQ ID NO: 66149 - RNA, 22 nt, Human
gcccagaaguugaggcugcagu

SEQ ID NO: 66150 - RNA, 21 nt, Human
gcccagagggagccaagccca

SEQ ID NO: 66151 - RNA, 22 nt, Human
gcccagcacaucuggccuugaa

SEQ ID NO: 66152 - RNA, 22 nt, Human
gcccagcacauugcugaggacc

SEQ ID NO: 66153 - RNA, 22 nt, Human
gcccagcccagaaagguucgga

SEQ ID NO: 66154 - RNA, 22 nt, Human
gcccagccccuggguggacgug

SEQ ID NO: 66155 - RNA, 22 nt, Human
gcccagccuccaagcuccaagg

SEQ ID NO: 66156 - RNA, 22 nt, Human
gcccagcgagcagagguggacg

SEQ ID NO: 66157 - RNA, 22 nt, Human
gcccagcuccauucuuggugag

SEQ ID NO: 66158 - RNA, 22 nt, Human
gcccagcugcacccuggugggu

SEQ ID NO: 66159 - RNA, 22 nt, Human
gcccagcuggcuuccagcacau

SEQ ID NO: 66160 - RNA, 22 nt, Human
gcccagcuuuucacuuccacac

SEQ ID NO: 66161 - RNA, 16 nt, Human
gcccaggacgggaggc

SEQ ID NO: 66162 - RNA, 22 nt, Human
gcccaggagccuggagaugugu

SEQ ID NO: 66163 - RNA, 22 nt, Human
gcccaggaguugaaugcagcag

SEQ ID NO: 66164 - RNA, 22 nt, Human
gcccaggauucuuucuuccuua

SEQ ID NO: 66165 - RNA, 22 nt, Human
gcccagggcgauggucggggcc

SEQ ID NO: 66166 - RNA, 22 nt, Human
gcccagugcugagggugcugcu

SEQ ID NO: 66167 - RNA, 22 nt, Human
gcccaguggcaucuucacugcu

SEQ ID NO: 66168 - RNA, 22 nt, Human
gcccauccauggggucauggcc

SEQ ID NO: 66169 - RNA, 22 nt, Human
gcccaucccugaaccaacuggg

SEQ ID NO: 66170 - RNA, 23 nt, Human
gcccauggagucuggaucuggcc

SEQ ID NO: 66171 - RNA, 18 nt, Human
gcccaugguaaaugcugu

SEQ ID NO: 66172 - RNA, 22 nt, Human
gcccaugguccaggaagacaga

SEQ ID NO: 66173 - RNA, 22 nt, Human
gcccauuuguuuauauacuguc

SEQ ID NO: 66174 - RNA, 22 nt, Human
gccccagaaaguucaaggcaca

SEQ ID NO: 66175 - RNA, 22 nt, Human
gccccagccaaggugacacgaa

SEQ ID NO: 66176 - RNA, 22 nt, Human
gccccagcccuguggaccaugg

SEQ ID NO: 66177 - RNA, 22 nt, Human
gccccagcucugccacaacuag

SEQ ID NO: 66178 - RNA, 22 nt, Human
gccccaggggaggugcccugca

SEQ ID NO: 66179 - RNA, 22 nt, Human
gcccccagaccucagugggcug

SEQ ID NO: 66180 - RNA, 22 nt, Human
gcccccagagaaugagguacga

SEQ ID NO: 66181 - RNA, 22 nt, Human
gccccuggcuggccagcuccuc

SEQ ID NO: 66182 - RNA, 22 nt, Human
gccccugggagcagagccacca

SEQ ID NO: 66183 - RNA, 22 nt, Human
gcccggcagucacacacccagg

SEQ ID NO: 66184 - RNA, 22 nt, Human
gcccgugugcagagugggagcu

SEQ ID NO: 66185 - RNA, 22 nt, Human
gcccuaccucaguccagaucug

SEQ ID NO: 66186 - RNA, 22 nt, Human
gcccucagaguuccccacagug

SEQ ID NO: 66187 - RNA, 22 nt, Human
gcccucaggacaagguuacgcu

SEQ ID NO: 66188 - RNA, 19 nt, Human
gcccucaggcagcuccauc

SEQ ID NO: 66189 - RNA, 21 nt, Human
gcccucaggggaggauggccu

SEQ ID NO: 66190 - RNA, 23 nt, Human
gcccucaguagaaaauguuagaa

SEQ ID NO: 66191 - RNA, 22 nt, Human
gcccuccagcuguugcgcgucg

SEQ ID NO: 66192 - RNA, 22 nt, Human
gcccuccauggugauccaggcc

SEQ ID NO: 66193 - RNA, 19 nt, Human
gcccuccucacugagcucu

SEQ ID NO: 66194 - RNA, 22 nt, Human
gcccucuaccuuggcuauagaa

SEQ ID NO: 66195 - RNA, 22 nt, Human
cugcauuacaauucugcucuau

SEQ ID NO: 66196 - RNA, 22 nt, Human
cugcauuagucaugcuuugcag

SEQ ID NO: 66197 - RNA, 22 nt, Human
cugcauuauucuaguccaagcc

SEQ ID NO: 66198 - RNA, 22 nt, Human
cugccaaucugaagagcuucuu

SEQ ID NO: 66199 - RNA, 21 nt, Human
cugccaccugcuccaucagca

SEQ ID NO: 66200 - RNA, 22 nt, Human
cugccacucugggugggccugg

SEQ ID NO: 66201 - RNA, 18 nt, Human
cugccacuuaauguggug

SEQ ID NO: 66202 - RNA, 22 nt, Human
cugccacuuucacccagugcuc

SEQ ID NO: 66203 - RNA, 22 nt, Human
cugccagaucauuggauucaca

SEQ ID NO: 66204 - RNA, 22 nt, Human
cugccaggcacugggcucugca

SEQ ID NO: 66205 - RNA, 22 nt, Human
cugccaggcagcagagggagaa

SEQ ID NO: 66206 - RNA, 22 nt, Human
cugccaggccucaucccagcca

SEQ ID NO: 66207 - RNA, 22 nt, Human
cugccaggcgauggauuggcug

SEQ ID NO: 66208 - RNA, 22 nt, Human
cugccagggaggcugggaaguu

SEQ ID NO: 66209 - RNA, 22 nt, Human
cugccaggggccucacaggcca

SEQ ID NO: 66210 - RNA, 22 nt, Human
cugccaggugccuuugugcagu

SEQ ID NO: 66211 - RNA, 22 nt, Human
cugccagguuggcgcucgcucu

SEQ ID NO: 66212 - RNA, 22 nt, Human
cugccagucuaugcugcucggc

SEQ ID NO: 66213 - RNA, 18 nt, Human
cugccagugugcucuccg

SEQ ID NO: 66214 - RNA, 22 nt, Human
cugccauguuaccugcacaggu

SEQ ID NO: 66215 - RNA, 22 nt, Human
cugcccaccacaccugcuccug

SEQ ID NO: 66216 - RNA, 22 nt, Human
cugcccaccgugugcacgugcg

SEQ ID NO: 66217 - RNA, 22 nt, Human
cugcccacuuggccaccuucua

SEQ ID NO: 66218 - RNA, 22 nt, Human
cugcccagaagccagaugggca

SEQ ID NO: 66219 - RNA, 20 nt, Human
cugcccagccacugagggau

SEQ ID NO: 66220 - RNA, 22 nt, Human
cugcccaggaaggagaggaugg

SEQ ID NO: 66221 - RNA, 22 nt, Human
cugcccaggcugaaggaacauc

SEQ ID NO: 66222 - RNA, 22 nt, Human
cugcccaggggagugcugucgg

SEQ ID NO: 66223 - RNA, 22 nt, Human
cugcccaucgucauuuaauaaa

SEQ ID NO: 66224 - RNA, 21 nt, Human
cugcccauuugugaugucccc

SEQ ID NO: 66225 - RNA, 22 nt, Human
cugccccaccccaaccugaggu

SEQ ID NO: 66226 - RNA, 22 nt, Human
cugcccgcugcuagagaggccg

SEQ ID NO: 66227 - RNA, 22 nt, Human
cugcccggagcuggcaaaggcu

SEQ ID NO: 66228 - RNA, 22 nt, Human
cugcccguaaguuagaaaagca

SEQ ID NO: 66229 - RNA, 22 nt, Human
cugcccucuagaggaggacuga

SEQ ID NO: 66230 - RNA, 22 nt, Human
cugcccugcagcuccacggacu

SEQ ID NO: 66231 - RNA, 22 nt, Human
cugcccugcccaggccuugggc

SEQ ID NO: 66232 - RNA, 20 nt, Human
cugcccugcccuggguccug

SEQ ID NO: 66233 - RNA, 22 nt, Human
cugcccugcuaaugaguuccaa

SEQ ID NO: 66234 - RNA, 22 nt, Human
cugcccugcuggagaucacagu

SEQ ID NO: 66235 - RNA, 22 nt, Human
cugcccuggcagccuaccaugg

SEQ ID NO: 66236 - RNA, 22 nt, Human
cugcccugggauggucugugcg

SEQ ID NO: 66237 - RNA, 22 nt, Human
cugcccuggguuuuaugggagu

SEQ ID NO: 66238 - RNA, 22 nt, Human
cugcccuguagcuguucuagca

SEQ ID NO: 66239 - RNA, 22 nt, Human
cugcccuguccuucccgccggc

SEQ ID NO: 66240 - RNA, 22 nt, Human
cugcccugugaggguccuuggg

SEQ ID NO: 66241 - RNA, 22 nt, Human
cugcccuguggcucugagucau

SEQ ID NO: 66242 - RNA, 22 nt, Human
cugccgaguacagccauagaaa

SEQ ID NO: 66243 - RNA, 22 nt, Human
cugccgugagcuuucgcgagcc

SEQ ID NO: 66244 - RNA, 22 nt, Human
cugccuagauuugaauccuggc

SEQ ID NO: 66245 - RNA, 22 nt, Human
cugccuagcgccaucugccucu

SEQ ID NO: 66246 - RNA, 22 nt, Human
cugccucuauucacugaggcag

SEQ ID NO: 66247 - RNA, 22 nt, Human
cugccucugcgucccacagagu

SEQ ID NO: 66248 - RNA, 22 nt, Human
cugccucuggccucaggcccag

SEQ ID NO: 66249 - RNA, 22 nt, Human
cugccucuuaaguggauggagu

SEQ ID NO: 66250 - RNA, 22 nt, Human
cugccugaguacaagucccaga

SEQ ID NO: 66251 - RNA, 22 nt, Human
cugccugcaugcugccauagcu

SEQ ID NO: 66252 - RNA, 22 nt, Human
cugccugccacguucagcugua

SEQ ID NO: 66253 - RNA, 22 nt, Human
cugccugcuaccugaaaugcca

SEQ ID NO: 66254 - RNA, 22 nt, Human
cugccuggaugaauggcgccuu

SEQ ID NO: 66255 - RNA, 22 nt, Human
cugccuggcauggagaagagaa

SEQ ID NO: 66256 - RNA, 22 nt, Human
cugccuggcuaaacucaagucg

SEQ ID NO: 66257 - RNA, 22 nt, Human
gcugcagcccggcgcgccugag

SEQ ID NO: 66258 - RNA, 22 nt, Human
gcugcagccuucuugccauuaa

SEQ ID NO: 66259 - RNA, 22 nt, Human
gcugcaggagcuggagcugugg

SEQ ID NO: 66260 - RNA, 22 nt, Human
gcugcaggcagaaucucccaau

SEQ ID NO: 66261 - RNA, 18 nt, Human
gcugcaggcgccugcggu

SEQ ID NO: 66262 - RNA, 22 nt, Human
gcugcaggcggccgugguggcg

SEQ ID NO: 66263 - RNA, 22 nt, Human
gcugcaggcucugcaggaauug

SEQ ID NO: 66264 - RNA, 22 nt, Human
gcugcagguugggcaacagagu

SEQ ID NO: 66265 - RNA, 21 nt, Human
gcugcaucaaucuacccaggg

SEQ ID NO: 66266 - RNA, 22 nt, Human
gcugcauugcuauaaaauacaa

SEQ ID NO: 66267 - RNA, 23 nt, Human
gcugccaaggaggcaggggugcc

SEQ ID NO: 66268 - RNA, 22 nt, Human
gcugccacucugagcuugcuuc

SEQ ID NO: 66269 - RNA, 22 nt, Human
gcugccacuuggucaugucaug

SEQ ID NO: 66270 - RNA, 22 nt, Human
gcugccagccaacuugcugugc

SEQ ID NO: 66271 - RNA, 22 nt, Human
gcugccagcccagcaaggugug

SEQ ID NO: 66272 - RNA, 22 nt, Human
gcugccagcgucagaccugggg

SEQ ID NO: 66273 - RNA, 21 nt, Human
gcugccaggauuuugcaggaa

SEQ ID NO: 66274 - RNA, 22 nt, Human
gcugccagucuaaugggaaaca

SEQ ID NO: 66275 - RNA, 22 nt, Human
gcugccauccccugcugggcug

SEQ ID NO: 66276 - RNA, 22 nt, Human
gcugccaucuccugaggacagg

SEQ ID NO: 66277 - RNA, 22 nt, Human
gcugccaugccacagcacucac

SEQ ID NO: 66278 - RNA, 22 nt, Human
gcugccauggcugggggccgug

SEQ ID NO: 66279 - RNA, 22 nt, Human
gcugcccagacauugaaucagg

SEQ ID NO: 66280 - RNA, 22 nt, Human
gcugcccaggagagguggggcu

SEQ ID NO: 66281 - RNA, 22 nt, Human
gcugcccagggcugaguguccu

SEQ ID NO: 66282 - RNA, 22 nt, Human
gcugcccuacccgaggcacucu

SEQ ID NO: 66283 - RNA, 22 nt, Human
gcugcccucccagggcaagcuu

SEQ ID NO: 66284 - RNA, 22 nt, Human
gcugcccucugugacccggccc

SEQ ID NO: 66285 - RNA, 22 nt, Human
gcugcccugugguagagggugg

SEQ ID NO: 66286 - RNA, 22 nt, Human
gcugccuagucugcugagcaga

SEQ ID NO: 66287 - RNA, 22 nt, Human
gcugccucaggcaccuccuggc

SEQ ID NO: 66288 - RNA, 22 nt, Human
gcugccuccaaucugugccccg

SEQ ID NO: 66289 - RNA, 22 nt, Human
gcugccuccacuggcucccagu

SEQ ID NO: 66290 - RNA, 22 nt, Human
gcugccucccagagcccugcag

SEQ ID NO: 66291 - RNA, 23 nt, Human
gcugccuccuacaaaagcccagc

SEQ ID NO: 66292 - RNA, 22 nt, Human
gcugccucuccugaguugacag

SEQ ID NO: 66293 - RNA, 22 nt, Human
gcugccucugcacagcucacuc

SEQ ID NO: 66294 - RNA, 22 nt, Human
gcugccucugcgacucugggcg

SEQ ID NO: 66295 - RNA, 22 nt, Human
gcugccucuguagcuuuggacc

SEQ ID NO: 66296 - RNA, 22 nt, Human
gcugccugaaauguugccuagc

SEQ ID NO: 66297 - RNA, 22 nt, Human
gcugccugaagugucuacacug

SEQ ID NO: 66298 - RNA, 22 nt, Human
gcugccugauuuacauagugaa

SEQ ID NO: 66299 - RNA, 17 nt, Human
gcugccugcaacugacu

SEQ ID NO: 66300 - RNA, 22 nt, Human
gcugccugccugcauuuaaucc

SEQ ID NO: 66301 - RNA, 22 nt, Human
gcugccugccuugccuggagga

SEQ ID NO: 66302 - RNA, 22 nt, Human
gcugccuggaauaacggcuggc

SEQ ID NO: 66303 - RNA, 22 nt, Human
gcugccugugcacuuucucgua

SEQ ID NO: 66304 - RNA, 22 nt, Human
gcugccugugcgggucgcuagg

SEQ ID NO: 66305 - RNA, 22 nt, Human
gcugccuguggcccuucugggu

SEQ ID NO: 66306 - RNA, 22 nt, Human
gcugccuguguggccacucacu

SEQ ID NO: 66307 - RNA, 22 nt, Human
gcugccuguugaagggucugug

SEQ ID NO: 66308 - RNA, 22 nt, Human
gcugccuucaguucugauucau

SEQ ID NO: 66309 - RNA, 22 nt, Human
gcugccuuccaaagaguuuuau

SEQ ID NO: 66310 - RNA, 22 nt, Human
gcugccuucugagaaguuaaau

SEQ ID NO: 66311 - RNA, 22 nt, Human
gcugccuugccaggggcagaaa

SEQ ID NO: 66312 - RNA, 22 nt, Human
gcugccuugcuuacuccacugc

SEQ ID NO: 66313 - RNA, 22 nt, Human
gcugcgagcucuuguucugaga

SEQ ID NO: 66314 - RNA, 22 nt, Human
gcugcggugaacuuggauggug

SEQ ID NO: 66315 - RNA, 22 nt, Human
gcugcgucgagacagccuggca

SEQ ID NO: 66316 - RNA, 22 nt, Human
gcugcucagugggccugagccu

SEQ ID NO: 66317 - RNA, 22 nt, Human
gcugcuccgucugagcucuggu

SEQ ID NO: 66318 - RNA, 22 nt, Human
gcugcucuacccaugcaucugu

SEQ ID NO: 66319 - RNA, 22 nt, Human
gcugcucucucccuaaguuggg

SEQ ID NO: 66320 - RNA, 22 nt, Human
gcugcucuguuaauugcuguaa

SEQ ID NO: 66321 - RNA, 22 nt, Human
gcugcugcuggucuggggccac

SEQ ID NO: 66322 - RNA, 16 nt, Human
gcugcugcuuccugcu

SEQ ID NO: 66323 - RNA, 22 nt, Human
gcugcuggcaucuagggggugg

SEQ ID NO: 66324 - RNA, 19 nt, Human
gcugcuggcucuggcugga

SEQ ID NO: 66325 - RNA, 22 nt, Human
gcugcugggaaugaacaguguu

SEQ ID NO: 66326 - RNA, 22 nt, Human
gcugcugggauccugggucuca

SEQ ID NO: 66327 - RNA, 22 nt, Human
gcugcuggggucacaugguaag

SEQ ID NO: 66328 - RNA, 18 nt, Human
gcugcugguggagggagc

SEQ ID NO: 66329 - RNA, 22 nt, Human
gcugcugucacggugcuaaggg

SEQ ID NO: 66330 - RNA, 22 nt, Human
gcugcuguccuucaagucugcg

SEQ ID NO: 66331 - RNA, 22 nt, Human
gcugcuguggcagauuggauuc

SEQ ID NO: 66332 - RNA, 22 nt, Human
gcugcuguguuggccacugcuu

SEQ ID NO: 66333 - RNA, 22 nt, Human
gcugcuguuaugauguuacuuu

SEQ ID NO: 66334 - RNA, 22 nt, Human
gcugcuguuccggcuacagccc

SEQ ID NO: 66335 - RNA, 22 nt, Human
gcugcuucuccucccuggggau

SEQ ID NO: 66336 - RNA, 22 nt, Human
gcugcuuuagguugagcucagc

SEQ ID NO: 66337 - RNA, 22 nt, Human
gcuggaaaaggaggcaaaauau

SEQ ID NO: 66338 - RNA, 22 nt, Human
gcuggaaaugauuaaaugguga

SEQ ID NO: 66339 - RNA, 22 nt, Human
gcuggaacagucuuuaagcagg

SEQ ID NO: 66340 - RNA, 22 nt, Human
gcuggaagaaugagugccucgu

SEQ ID NO: 66341 - RNA, 20 nt, Human
gcuggaagggcuagagggcu

SEQ ID NO: 66342 - RNA, 22 nt, Human
gcuggaauuggacccagggcuc

SEQ ID NO: 66343 - RNA, 22 nt, Human
gcuggagagauaggcauggggu

SEQ ID NO: 66344 - RNA, 21 nt, Human
gcuggagagccaggcaggggc

SEQ ID NO: 66345 - RNA, 22 nt, Human
gcuggagauagaauggccacug

SEQ ID NO: 66346 - RNA, 22 nt, Human
gcuggagcugaguucccugggc

SEQ ID NO: 66347 - RNA, 22 nt, Human
cuguccauggugcuggacgguc

SEQ ID NO: 66348 - RNA, 22 nt, Human
cuguccauugguauauuagggu

SEQ ID NO: 66349 - RNA, 22 nt, Human
cuguccauuuugaauuuucagu

SEQ ID NO: 66350 - RNA, 22 nt, Human
cugucccagauguucucagcac

SEQ ID NO: 66351 - RNA, 22 nt, Human
cugucccaggauccugacucca

SEQ ID NO: 66352 - RNA, 22 nt, Human
cugucccagugauccugagugc

SEQ ID NO: 66353 - RNA, 18 nt, Human
cugucccauccucagguu

SEQ ID NO: 66354 - RNA, 22 nt, Human
cuguccccugugcuuucacuug

SEQ ID NO: 66355 - RNA, 21 nt, Human
cugucccucuuugcuucccuc

SEQ ID NO: 66356 - RNA, 22 nt, Human
cugucccuucccaagcccagcc

SEQ ID NO: 66357 - RNA, 22 nt, Human
cuguccucaccuuggcaggggg

SEQ ID NO: 66358 - RNA, 22 nt, Human
cuguccucaucugccccaaggg

SEQ ID NO: 66359 - RNA, 22 nt, Human
cuguccugaaguuuucaugaga

SEQ ID NO: 66360 - RNA, 22 nt, Human
cuguccuggagggcauaggacg

SEQ ID NO: 66361 - RNA, 19 nt, Human
cuguccugguuuggucccu

SEQ ID NO: 66362 - RNA, 22 nt, Human
cuguccugugucagccugaaau

SEQ ID NO: 66363 - RNA, 22 nt, Human
cuguccuuacugcuucuggcuu

SEQ ID NO: 66364 - RNA, 22 nt, Human
cuguccuugcuggccagguaug

SEQ ID NO: 66365 - RNA, 19 nt, Human
cuguccuuggcugcacugu

SEQ ID NO: 66366 - RNA, 22 nt, Human
gcuggccaguguggugaccacc

SEQ ID NO: 66367 - RNA, 22 nt, Human
gcuggcccagcgcccagggcag

SEQ ID NO: 66368 - RNA, 22 nt, Human
gcuggccgaacggugcccuggc

SEQ ID NO: 66369 - RNA, 22 nt, Human
gcuggccucgcaggcaggaugu

SEQ ID NO: 66370 - RNA, 22 nt, Human
gcuggccugagggccgaggcuc

SEQ ID NO: 66371 - RNA, 22 nt, Human
gcuggcucaagagguccagagg

SEQ ID NO: 66372 - RNA, 22 nt, Human
gcuggcucaagugugcuuccca

SEQ ID NO: 66373 - RNA, 22 nt, Human
gcuggcuccaaaagcaggggcu

SEQ ID NO: 66374 - RNA, 22 nt, Human
gcuggcucccauugguccuucc

SEQ ID NO: 66375 - RNA, 21 nt, Human
gcuggcucucugacgugcuuu

SEQ ID NO: 66376 - RNA, 22 nt, Human
gcuggcucugaugggcuccagg

SEQ ID NO: 66377 - RNA, 20 nt, Human
gcuggcugaacugaaagcaa

SEQ ID NO: 66378 - RNA, 22 nt, Human
gcuggcugagaucuguuuuccu

SEQ ID NO: 66379 - RNA, 22 nt, Human
gcuggcugaggucuagcucuuu

SEQ ID NO: 66380 - RNA, 22 nt, Human
gcuggcugccugguuaugccuu

SEQ ID NO: 66381 - RNA, 22 nt, Human
gcuggcuggaacuagcaguugg

SEQ ID NO: 66382 - RNA, 21 nt, Human
gcuggcuggcugaccggccuu

SEQ ID NO: 66383 - RNA, 22 nt, Human
gcuggcugggacagauuccauu

SEQ ID NO: 66384 - RNA, 22 nt, Human
gcuggcugguccagcaggggcu

SEQ ID NO: 66385 - RNA, 21 nt, Human
gcuggcugucccagggaagca

SEQ ID NO: 66386 - RNA, 22 nt, Human
gcuggcuuaauagggaugggcu

SEQ ID NO: 66387 - RNA, 22 nt, Human
gcuggcuuaauguagcuaaaaa

SEQ ID NO: 66388 - RNA, 22 nt, Human
gcuggcuuugaucuucccaucu

SEQ ID NO: 66389 - RNA, 20 nt, Human
gcugggaacaggauugaauc

SEQ ID NO: 66390 - RNA, 22 nt, Human
gcugggaagaacaggagagaau

SEQ ID NO: 66391 - RNA, 22 nt, Human
gcugggacggcucaguaagaag

SEQ ID NO: 66392 - RNA, 22 nt, Human
gcugggagaggcagcuuucgga

SEQ ID NO: 66393 - RNA, 22 nt, Human
gcugggagaggcccugaaguga

SEQ ID NO: 66394 - RNA, 22 nt, Human
gcugggagccccgagccagcgc

SEQ ID NO: 66395 - RNA, 22 nt, Human
gcugggagcccuggucugcucc

SEQ ID NO: 66396 - RNA, 22 nt, Human
gcugggaguuacugucuccuuu

SEQ ID NO: 66397 - RNA, 22 nt, Human
gcugggaugcgucuucccaggc

SEQ ID NO: 66398 - RNA, 22 nt, Human
gcugggauggagacugcaguga

SEQ ID NO: 66399 - RNA, 22 nt, Human
gcugggcaacggaagagagaaa

SEQ ID NO: 66400 - RNA, 22 nt, Human
gcugggcaaggcugaagcuacc

SEQ ID NO: 66401 - RNA, 22 nt, Human
gcugggcaccggagagacccca

SEQ ID NO: 66402 - RNA, 22 nt, Human
gcugggcaccucucccagauug

SEQ ID NO: 66403 - RNA, 22 nt, Human
gcugggcagccuggccgcugcc

SEQ ID NO: 66404 - RNA, 22 nt, Human
gcugggccagacuuucaauguc

SEQ ID NO: 66405 - RNA, 22 nt, Human
gcugggcccagaucccaggauc

SEQ ID NO: 66406 - RNA, 20 nt, Human
gcugggcuaccacuggcccu

SEQ ID NO: 66407 - RNA, 22 nt, Human
gcugggcucagaccuagugaac

SEQ ID NO: 66408 - RNA, 22 nt, Human
gcugggcuccaggccaggguga

SEQ ID NO: 66409 - RNA, 22 nt, Human
gcugggcucguucccacacgcg

SEQ ID NO: 66410 - RNA, 22 nt, Human
gcugggcugagaaguuaagcaa

SEQ ID NO: 66411 - RNA, 22 nt, Human
gcugggcugcgucggggaagcc

SEQ ID NO: 66412 - RNA, 19 nt, Human
gcugggcuuggguuuguag

SEQ ID NO: 66413 - RNA, 20 nt, Human
gcugggcuuugacugacaca

SEQ ID NO: 66414 - RNA, 22 nt, Human
gcuggggagcuagaccucagca

SEQ ID NO: 66415 - RNA, 22 nt, Human
gcuggggugugguggauaagcu

SEQ ID NO: 66416 - RNA, 22 nt, Human
gcugggugucacggggcucgug

SEQ ID NO: 66417 - RNA, 22 nt, Human
gcuggguuuccagcaggcagga

SEQ ID NO: 66418 - RNA, 22 nt, Human
gcugguagaccucacugcacuc

SEQ ID NO: 66419 - RNA, 22 nt, Human
gcugguauuugcagccugucau

SEQ ID NO: 66420 - RNA, 22 nt, Human
gcuggucagagagaaaggaggc

SEQ ID NO: 66421 - RNA, 22 nt, Human
gcugguccacucccuggaggcu

SEQ ID NO: 66422 - RNA, 22 nt, Human
gcuggucccaauguguuuccuu

SEQ ID NO: 66423 - RNA, 22 nt, Human
gcugguccugggguugcagcau

SEQ ID NO: 66424 - RNA, 22 nt, Human
gcuggugauugccucaggaggc

SEQ ID NO: 66425 - RNA, 16 nt, Human
gcuguaaaaggauuca

SEQ ID NO: 66426 - RNA, 22 nt, Human
gcuguaaagaacauuaggaauc

SEQ ID NO: 66427 - RNA, 22 nt, Human
gcuguacaaggccucugccauc

SEQ ID NO: 66428 - RNA, 22 nt, Human
gcuguacaucacaauuugcugu

SEQ ID NO: 66429 - RNA, 22 nt, Human
gcuguagggcugagcuggaccg

SEQ ID NO: 66430 - RNA, 17 nt, Human
gcuguaguuugauaaga

SEQ ID NO: 66431 - RNA, 22 nt, Human
gcuguaugugaggccacaguga

SEQ ID NO: 66432 - RNA, 22 nt, Human
gcuguauuccugcacuguauag

SEQ ID NO: 66433 - RNA, 22 nt, Human
gcuguauuuaacaacuggcuca

SEQ ID NO: 66434 - RNA, 22 nt, Human
gcugucacauuuggagcacugg

SEQ ID NO: 66435 - RNA, 22 nt, Human
gcugucaccaaagcaggcacug

SEQ ID NO: 66436 - RNA, 22 nt, Human
gcugucacucuccggccuuccc

SEQ ID NO: 66437 - RNA, 22 nt, Human
gcugucaggaacaugccuuggu

SEQ ID NO: 66438 - RNA, 22 nt, Human
gcugucaggccaugugggccuu

SEQ ID NO: 66439 - RNA, 22 nt, Human
gcuguccacgggguugguagag

SEQ ID NO: 66440 - RNA, 22 nt, Human
gcuguccaggagugcagagauu

SEQ ID NO: 66441 - RNA, 22 nt, Human
gcugucccuugucccaccuugc

SEQ ID NO: 66442 - RNA, 23 nt, Human
gcuguccuccugggcccagcagc

SEQ ID NO: 66443 - RNA, 22 nt, Human
gcuguccucuuggacucagggc

SEQ ID NO: 66444 - RNA, 22 nt, Human
gcugucucggggcuuucuccug

SEQ ID NO: 66445 - RNA, 22 nt, Human
gcugucugagaacaugguggaa

SEQ ID NO: 66446 - RNA, 22 nt, Human
gcugucugcugugcacugagca

SEQ ID NO: 66447 - RNA, 22 nt, Human
gcugucuggauaucuuggaauu

SEQ ID NO: 66448 - RNA, 22 nt, Human
gcugucuguggugucagcugac

SEQ ID NO: 66449 - RNA, 22 nt, Human
gcugugcaaaucgauuuguugg

SEQ ID NO: 66450 - RNA, 22 nt, Human
gcugugcacuaccuauacaucc

SEQ ID NO: 66451 - RNA, 22 nt, Human
gcugugcagagcacaggguccc

SEQ ID NO: 66452 - RNA, 22 nt, Human
gcugugcagauguagggagugg

SEQ ID NO: 66453 - RNA, 22 nt, Human
gcugugcauaaguauaauaaac

SEQ ID NO: 66454 - RNA, 22 nt, Human
gcugugcaucuucauucuggac

SEQ ID NO: 66455 - RNA, 20 nt, Human
gcugugccaugacccucgag

SEQ ID NO: 66456 - RNA, 22 nt, Human
gcugugcucaacgugccuuccu

SEQ ID NO: 66457 - RNA, 22 nt, Human
gcuguggaaaugccuaacauga

SEQ ID NO: 66458 - RNA, 22 nt, Human
gcuguggcccuuggcaucugcg

SEQ ID NO: 66459 - RNA, 22 nt, Human
gcuguggcggcagcagcuggug

SEQ ID NO: 66460 - RNA, 22 nt, Human
gcuguggcuguacagagaccau

SEQ ID NO: 66461 - RNA, 22 nt, Human
gcuguggguaaacgcugagggu

SEQ ID NO: 66462 - RNA, 22 nt, Human
gcuguggguccggaccccacgg

SEQ ID NO: 66463 - RNA, 20 nt, Human
gcuguguagcagugugcagu

SEQ ID NO: 66464 - RNA, 22 nt, Human
cuucuuauuaauccuucucugu

SEQ ID NO: 66465 - RNA, 22 nt, Human
cuucuucaguugcauguauugg

SEQ ID NO: 66466 - RNA, 20 nt, Human
cuucuucauuaacccuacug

SEQ ID NO: 66467 - RNA, 22 nt, Human
cuucuuccugaaagcuggcucu

SEQ ID NO: 66468 - RNA, 22 nt, Human
cuucuuccugcugcagccucca

SEQ ID NO: 66469 - RNA, 22 nt, Human
cuucuucucuacauccuuugau

SEQ ID NO: 66470 - RNA, 22 nt, Human
cuucuucuuuugugggugguaa

SEQ ID NO: 66471 - RNA, 22 nt, Human
cuucuugaaaccugcucccuca

SEQ ID NO: 66472 - RNA, 22 nt, Human
cuucuugaaguccuccagaagu

SEQ ID NO: 66473 - RNA, 22 nt, Human
cuucuugacuucugggugcccu

SEQ ID NO: 66474 - RNA, 22 nt, Human
cuucuugagcauggguaguacu

SEQ ID NO: 66475 - RNA, 22 nt, Human
gaaagcauaacuaauauuuauu

SEQ ID NO: 66476 - RNA, 22 nt, Human
gaaagcauguagccuguaucca

SEQ ID NO: 66477 - RNA, 22 nt, Human
gaaagccaucuggcugcuggga

SEQ ID NO: 66478 - RNA, 18 nt, Human
gaaagccaugcagcagug

SEQ ID NO: 66479 - RNA, 22 nt, Human
gaaagcugugaaauagugcucu

SEQ ID NO: 66480 - RNA, 22 nt, Human
gaaagcuuccauuuuguacauu

SEQ ID NO: 66481 - RNA, 18 nt, Human
gaaaggagagacaguagg

SEQ ID NO: 66482 - RNA, 17 nt, Human
gaaaggaggcaacacug

SEQ ID NO: 66483 - RNA, 22 nt, Human
gaaaggcaguacagcugagccu

SEQ ID NO: 66484 - RNA, 22 nt, Human
gaaaggcaucuucagucucuga

SEQ ID NO: 66485 - RNA, 22 nt, Human
gaaaggccagcucacagaugag

SEQ ID NO: 66486 - RNA, 22 nt, Human
gaaaggccauuucugaggguuu

SEQ ID NO: 66487 - RNA, 22 nt, Human
gaaaggcugcaucucgccucag

SEQ ID NO: 66488 - RNA, 22 nt, Human
gaaaggcuugguuuugaauaua

SEQ ID NO: 66489 - RNA, 22 nt, Human
gaaaggggcauguagggaucac

SEQ ID NO: 66490 - RNA, 22 nt, Human
gaaagggucuuugauuucccuc

SEQ ID NO: 66491 - RNA, 21 nt, Human
gaaaggucuuaacuuacagag

SEQ ID NO: 66492 - RNA, 22 nt, Human
gaaagguuuaaguaggauuugu

SEQ ID NO: 66493 - RNA, 22 nt, Human
gaaagguuuggcuuuucaguag

SEQ ID NO: 66494 - RNA, 22 nt, Human
gaaaguaacauuucuugaauua

SEQ ID NO: 66495 - RNA, 22 nt, Human
gaaagugccagaauaggaggcc

SEQ ID NO: 66496 - RNA, 18 nt, Human
gaaagugcggggcagggg

SEQ ID NO: 66497 - RNA, 22 nt, Human
gaaagugcuuagagugugguau

SEQ ID NO: 66498 - RNA, 22 nt, Human
gaaaguuacagaaaccauuagu

SEQ ID NO: 66499 - RNA, 22 nt, Human
gaaaguuauucagccucucuga

SEQ ID NO: 66500 - RNA, 22 nt, Human
gaaaguuucuucauuaagaugu

SEQ ID NO: 66501 - RNA, 22 nt, Human
gaaauacaaagccagccauuuu

SEQ ID NO: 66502 - RNA, 22 nt, Human
gaaauacaaaugccuagauccu

SEQ ID NO: 66503 - RNA, 22 nt, Human
gaaugcuggcuuacaggcaguu

SEQ ID NO: 66504 - RNA, 22 nt, Human
gaaugcuguagacagacucuau

SEQ ID NO: 66505 - RNA, 23 nt, Human
gaauggcuaagcacauagacuug

SEQ ID NO: 66506 - RNA, 22 nt, Human
gaauggcuaucggauuauuagg

SEQ ID NO: 66507 - RNA, 22 nt, Human
gaauggcugaaugucuuaaauu

SEQ ID NO: 66508 - RNA, 22 nt, Human
gaauguaaaauugccuacaaga

SEQ ID NO: 66509 - RNA, 22 nt, Human
gaaugucccugcaguugcugcc

SEQ ID NO: 66510 - RNA, 22 nt, Human
gaaugucuucuguucccagcug

SEQ ID NO: 66511 - RNA, 22 nt, Human
gaaugugggcugugaagaggag

SEQ ID NO: 66512 - RNA, 22 nt, Human
gaauguuagagauucuuagguu

SEQ ID NO: 66513 - RNA, 22 nt, Human
gaauguuuaaaaggugcaguuu

SEQ ID NO: 66514 - RNA, 22 nt, Human
gaauguuugacuaaagguagcu

SEQ ID NO: 66515 - RNA, 19 nt, Human
gaauguuuguauucagcgc

SEQ ID NO: 66516 - RNA, 22 nt, Human
gaauguuuuucaaaccuguggc

SEQ ID NO: 66517 - RNA, 22 nt, Human
gaauuaaaauaguuuuggucga

SEQ ID NO: 66518 - RNA, 22 nt, Human
gaauuaauugugugguuugaau

SEQ ID NO: 66519 - RNA, 22 nt, Human
gaauuacagccagaagaaugaa

SEQ ID NO: 66520 - RNA, 22 nt, Human
gaauuauaggcaaagcagucau

SEQ ID NO: 66521 - RNA, 22 nt, Human
gaauuauagguuugcaugcuaa

SEQ ID NO: 66522 - RNA, 22 nt, Human
gaauucacuugucuuccauuuu

SEQ ID NO: 66523 - RNA, 22 nt, Human
gaauuccucugagcuaggagau

SEQ ID NO: 66524 - RNA, 22 nt, Human
gaauuccuuaggcucuugacug

SEQ ID NO: 66525 - RNA, 22 nt, Human
gaauucggguacucuaggccag

SEQ ID NO: 66526 - RNA, 22 nt, Human
gaauucugggagagaucugaca

SEQ ID NO: 66527 - RNA, 22 nt, Human
gaauucugguccuguccaaggu

SEQ ID NO: 66528 - RNA, 22 nt, Human
gaauucuuuaggugaauuucua

SEQ ID NO: 66529 - RNA, 22 nt, Human
gaauugcuaaccaauucaaaau

SEQ ID NO: 66530 - RNA, 22 nt, Human
gaauugcuucugguauguuacu

SEQ ID NO: 66531 - RNA, 22 nt, Human
gaauugcuugugaagugugucu

SEQ ID NO: 66532 - RNA, 22 nt, Human
gaauuguagagggaacagaagc

SEQ ID NO: 66533 - RNA, 22 nt, Human
gaauuuaaauuuaaaucuacca

SEQ ID NO: 66534 - RNA, 22 nt, Human
gaauuuaucuacguuaaguaug

SEQ ID NO: 66535 - RNA, 22 nt, Human
gaauuucaaagagguuaagagg

SEQ ID NO: 66536 - RNA, 22 nt, Human
gaauuucaagcagugcaauguu

SEQ ID NO: 66537 - RNA, 22 nt, Human
gaauuucauuuguuuccuacca

SEQ ID NO: 66538 - RNA, 22 nt, Human
gaauuucuggacccuuugagaa

SEQ ID NO: 66539 - RNA, 17 nt, Human
gaauuucuuggucaaaa

SEQ ID NO: 66540 - RNA, 22 nt, Human
gaauuuggaucuuugauagagu

SEQ ID NO: 66541 - RNA, 22 nt, Human
gaauuuuaaguguucgccucuu

SEQ ID NO: 66542 - RNA, 22 nt, Human
gaauuuuaucuuauuacuugca

SEQ ID NO: 66543 - RNA, 20 nt, Human
gaauuuuaugaacacuacca

SEQ ID NO: 66544 - RNA, 22 nt, Human
gaauuuuucuggaagcaauuau

SEQ ID NO: 66545 - RNA, 22 nt, Human
gacaaaacugagaucacacugu

SEQ ID NO: 66546 - RNA, 23 nt, Human
gacaaagcacuugaaauguguac

SEQ ID NO: 66547 - RNA, 22 nt, Human
gacaaagugcuaaaccacagag

SEQ ID NO: 66548 - RNA, 22 nt, Human
gacaaaugaaugaugaacacca

SEQ ID NO: 66549 - RNA, 20 nt, Human
gacaacagaguaccaggaag

SEQ ID NO: 66550 - RNA, 22 nt, Human
gacaacagcauauggacuguca

SEQ ID NO: 66551 - RNA, 22 nt, Human
gacaacugccccauuuuaaaug

SEQ ID NO: 66552 - RNA, 22 nt, Human
gacaagacugguuuauuuaagg

SEQ ID NO: 66553 - RNA, 22 nt, Human
gacaagaugacaucauggcuuc

SEQ ID NO: 66554 - RNA, 22 nt, Human
gacaagaugagcagcucagugu

SEQ ID NO: 66555 - RNA, 22 nt, Human
gacaaggcgcccagccugccaa

SEQ ID NO: 66556 - RNA, 22 nt, Human
gacaauaaaaugaucuuacagu

SEQ ID NO: 66557 - RNA, 22 nt, Human
gacaauaagaacagauacugug

SEQ ID NO: 66558 - RNA, 22 nt, Human
gacaaucagccauauccagggu

SEQ ID NO: 66559 - RNA, 22 nt, Human
gacaaugcagaaguacuuguuc

SEQ ID NO: 66560 - RNA, 22 nt, Human
gacaaugguggauacaugucau

SEQ ID NO: 66561 - RNA, 22 nt, Human
gacaaugugacagaccaaugau

SEQ ID NO: 66562 - RNA, 22 nt, Human
gacaaugugaggcgaguuuguu

SEQ ID NO: 66563 - RNA, 22 nt, Human
gacaaugugcaauugcagcuag

SEQ ID NO: 66564 - RNA, 22 nt, Human
gacaauugcuuuugccgaauaa

SEQ ID NO: 66565 - RNA, 22 nt, Human
gacacagagcucacagucuccu

SEQ ID NO: 66566 - RNA, 22 nt, Human
gacacagauaauuuaguuaaaa

SEQ ID NO: 66567 - RNA, 22 nt, Human
gacacagcuugaugagggcuuu

SEQ ID NO: 66568 - RNA, 22 nt, Human
gacacagguagaauaaaguacu

SEQ ID NO: 66569 - RNA, 22 nt, Human
gacacaguucuguucuaguagg

SEQ ID NO: 66570 - RNA, 22 nt, Human
gacacaugaccauaaaugcuaa

SEQ ID NO: 66571 - RNA, 22 nt, Human
gacaccagaagacauaagcaga

SEQ ID NO: 66572 - RNA, 22 nt, Human
gacaccauuaccuuucuauauu

SEQ ID NO: 66573 - RNA, 22 nt, Human
gacacucuccuccaguggauag

SEQ ID NO: 66574 - RNA, 22 nt, Human
gacacugaagucacuaagcagg

SEQ ID NO: 66575 - RNA, 22 nt, Human
gacacugcacuuggggcccaca

SEQ ID NO: 66576 - RNA, 22 nt, Human
gacacuggaaauauugaauugg

SEQ ID NO: 66577 - RNA, 22 nt, Human
gacacuucaccuuucccagccu

SEQ ID NO: 66578 - RNA, 22 nt, Human
gacacuugugcuguuucugagc

SEQ ID NO: 66579 - RNA, 22 nt, Human
gacacuuuaggauuuaaaaguc

SEQ ID NO: 66580 - RNA, 22 nt, Human
gacagacaaauguuuuuaacuu

SEQ ID NO: 66581 - RNA, 22 nt, Human
gacagacaggaggcauucaggg

SEQ ID NO: 66582 - RNA, 22 nt, Human
gacagacaggugugguaggcac

SEQ ID NO: 66583 - RNA, 22 nt, Human
gacagacugcguaguccccaaa

SEQ ID NO: 66584 - RNA, 22 nt, Human
gaacuugagauaugaguaggua

SEQ ID NO: 66585 - RNA, 22 nt, Human
gaacuugagcaacacugaguga

SEQ ID NO: 66586 - RNA, 19 nt, Human
gaacuuggccaggcacagu

SEQ ID NO: 66587 - RNA, 22 nt, Human
gaacuuuaauuagcuuuugucu

SEQ ID NO: 66588 - RNA, 22 nt, Human
gaacuuuauaacuguaaauguc

SEQ ID NO: 66589 - RNA, 22 nt, Human
gaacuuugcgcaguucccgggg

SEQ ID NO: 66590 - RNA, 22 nt, Human
gaacuuuugggaagccguguga

SEQ ID NO: 66591 - RNA, 22 nt, Human
gaagaaacaggggcuuggggag

SEQ ID NO: 66592 - RNA, 22 nt, Human
gaagaaacugaaagggguuggu

SEQ ID NO: 66593 - RNA, 22 nt, Human
gaagaaagauuggcaugcuuca

SEQ ID NO: 66594 - RNA, 22 nt, Human
gaagaaauguguucaagguagg

SEQ ID NO: 66595 - RNA, 22 nt, Human
gaagaacaccugcugcccagug

SEQ ID NO: 66596 - RNA, 22 nt, Human
gaagaacuuaacauaauaagga

SEQ ID NO: 66597 - RNA, 22 nt, Human
gaagaagagauaauggggagca

SEQ ID NO: 66598 - RNA, 16 nt, Human
gaagaaggaaaacuac

SEQ ID NO: 66599 - RNA, 22 nt, Human
gaagaaggugccagaggcuuac

SEQ ID NO: 66600 - RNA, 22 nt, Human
gaagaaggugcuacacagggca

SEQ ID NO: 66601 - RNA, 22 nt, Human
gaagaauauggcucucagcaau

SEQ ID NO: 66602 - RNA, 22 nt, Human
gaagaaucugaggacagucauu

SEQ ID NO: 66603 - RNA, 20 nt, Human
gaagacacagaguucaucuc

SEQ ID NO: 66604 - RNA, 22 nt, Human
gaagacacuaaacuggggcuuc

SEQ ID NO: 66605 - RNA, 22 nt, Human
gaagacaucauggagaggauag

SEQ ID NO: 66606 - RNA, 22 nt, Human
gaagagagagcccugggguccg

SEQ ID NO: 66607 - RNA, 22 nt, Human
gaagagcauuugcccaggcugu

SEQ ID NO: 66608 - RNA, 22 nt, Human
gaagagccaggugucgcugugg

SEQ ID NO: 66609 - RNA, 22 nt, Human
gaagagcuggaauccagucugg

SEQ ID NO: 66610 - RNA, 22 nt, Human
gaagagcuuaguuguccuagaa

SEQ ID NO: 66611 - RNA, 22 nt, Human
gaagaggaugacaggagccggu

SEQ ID NO: 66612 - RNA, 22 nt, Human
gaagaggcaauugaauaagcua

SEQ ID NO: 66613 - RNA, 22 nt, Human
gaagagguagcauuggcaggug

SEQ ID NO: 66614 - RNA, 22 nt, Human
gaagauacaaaugugggcuuuc

SEQ ID NO: 66615 - RNA, 22 nt, Human
gaagauacacagagcugucuuu

SEQ ID NO: 66616 - RNA, 22 nt, Human
gaagaucaagugucauucugug

SEQ ID NO: 66617 - RNA, 22 nt, Human
gaagaugggaaugaugaguggg

SEQ ID NO: 66618 - RNA, 22 nt, Human
gaagaugugggcccacuccaga

SEQ ID NO: 66619 - RNA, 22 nt, Human
gaagauuaaacauauuuagugu

SEQ ID NO: 66620 - RNA, 21 nt, Human
cuuugcauacagaugccaauu

SEQ ID NO: 66621 - RNA, 22 nt, Human
cuuugcuagugauuuguuuagg

SEQ ID NO: 66622 - RNA, 22 nt, Human
cuuugcugagcugguuguucaa

SEQ ID NO: 66623 - RNA, 22 nt, Human
cuuuggaaaagcauaccaagga

SEQ ID NO: 66624 - RNA, 22 nt, Human
cuuuggaacacaugggcauggu

SEQ ID NO: 66625 - RNA, 22 nt, Human
cuuuggaacuguaaggagaugg

SEQ ID NO: 66626 - RNA, 22 nt, Human
cuuuggaaggaacaggauucuc

SEQ ID NO: 66627 - RNA, 22 nt, Human
cuuuggaaguaaagucagcagg

SEQ ID NO: 66628 - RNA, 22 nt, Human
cuuuggaauaauuuccuggagu

SEQ ID NO: 66629 - RNA, 22 nt, Human
cuuuggaaugcacagaggugua

SEQ ID NO: 66630 - RNA, 20 nt, Human
cuuuggagaaagcuaacaga

SEQ ID NO: 66631 - RNA, 22 nt, Human
cuuuggauggcuguguguuuau

SEQ ID NO: 66632 - RNA, 22 nt, Human
cuuuggauuuuuaucaggcaau

SEQ ID NO: 66633 - RNA, 22 nt, Human
cuuuggcaacacaugugggaca

SEQ ID NO: 66634 - RNA, 21 nt, Human
cuuuggcaagggagaagucac

SEQ ID NO: 66635 - RNA, 22 nt, Human
cuuuggcaaggguuuuaauugu

SEQ ID NO: 66636 - RNA, 22 nt, Human
cuuuggcaaugaaacacaagaa

SEQ ID NO: 66637 - RNA, 22 nt, Human
cuuuggcacagucucauuugau

SEQ ID NO: 66638 - RNA, 17 nt, Human
cuuuggcaggagggagg

SEQ ID NO: 66639 - RNA, 22 nt, Human
cuuuggcugacgaggaggaggc

SEQ ID NO: 66640 - RNA, 22 nt, Human
cuuuggcugggcaaagggaggu

SEQ ID NO: 66641 - RNA, 22 nt, Human
cuuugggcacugaaguaugggu

SEQ ID NO: 66642 - RNA, 22 nt, Human
cuuuggucagagggauggaguu

SEQ ID NO: 66643 - RNA, 22 nt, Human
cuuuggucuguggcuugggucu

SEQ ID NO: 66644 - RNA, 20 nt, Human
cuuugguggggguagcccag

SEQ ID NO: 66645 - RNA, 21 nt, Human
cuuugguuucugacuugcaua

SEQ ID NO: 66646 - RNA, 17 nt, Human
cuuugucaccaaugcca

SEQ ID NO: 66647 - RNA, 22 nt, Human
cuuugugauaguguuaagacca

SEQ ID NO: 66648 - RNA, 22 nt, Human
cuuugugcuugacccauggguc

SEQ ID NO: 66649 - RNA, 22 nt, Human
cuuuguuacugauuucaguggg

SEQ ID NO: 66650 - RNA, 23 nt, Human
cuuuuaacuagaguaucagcugc

SEQ ID NO: 66651 - RNA, 19 nt, Human
cuuuucaagccaucaguuu

SEQ ID NO: 66652 - RNA, 22 nt, Human
cuuuuccacugagccucacaaa

SEQ ID NO: 66653 - RNA, 22 nt, Human
cuuuucucugcgggucuuucau

SEQ ID NO: 66654 - RNA, 22 nt, Human
cuuuucuggaaucaucucuaac

SEQ ID NO: 66655 - RNA, 22 nt, Human
cuuuugcacccagaguuauuug

SEQ ID NO: 66656 - RNA, 22 nt, Human
cuuuuguuaggagaaaacauca

SEQ ID NO: 66657 - RNA, 22 nt, Human
cuuuuguucuacagcuggggaa

SEQ ID NO: 66658 - RNA, 22 nt, Human
cuuuuuauagcuauguccuaug

SEQ ID NO: 66659 - RNA, 22 nt, Human
cuuuuucacuguguccucacac

SEQ ID NO: 66660 - RNA, 22 nt, Human
cuuuuucauuggcuuuaggaca

SEQ ID NO: 66661 - RNA, 22 nt, Human
cuuuuucccagguggagagagg

SEQ ID NO: 66662 - RNA, 22 nt, Human
cuuuuucuaaucauaauugucu

SEQ ID NO: 66663 - RNA, 22 nt, Human
cuuuuugucucuguccugauga

SEQ ID NO: 66664 - RNA, 22 nt, Human
cuuuuuguuguauaagcccuuu

SEQ ID NO: 66665 - RNA, 22 nt, Human
gaaaaaggauaaauacaguguu

SEQ ID NO: 66666 - RNA, 22 nt, Human
gaaaaagugaccuugguagcua

SEQ ID NO: 66667 - RNA, 22 nt, Human
gaaaaaugcuccaaaucugugg

SEQ ID NO: 66668 - RNA, 21 nt, Human
gaaaagcaagggaguagaaca

SEQ ID NO: 66669 - RNA, 22 nt, Human
gaaaaggaaauuuauagagauc

SEQ ID NO: 66670 - RNA, 22 nt, Human
gaaaaggcagaguuccggggaa

SEQ ID NO: 66671 - RNA, 22 nt, Human
gaaaauacuucaguguucuggc

SEQ ID NO: 66672 - RNA, 22 nt, Human
gaaaauaggcagaugcauugua

SEQ ID NO: 66673 - RNA, 22 nt, Human
gaaaaugagccucagcuacauu

SEQ ID NO: 66674 - RNA, 22 nt, Human
gaaaaugugucaucccuacugu

SEQ ID NO: 66675 - RNA, 22 nt, Human
gaaaauuauugaaaauggcucu

SEQ ID NO: 66676 - RNA, 22 nt, Human
gaaaauuuaauucucuucugug

SEQ ID NO: 66677 - RNA, 22 nt, Human
gaaaauuuagaacugaacuucu

SEQ ID NO: 66678 - RNA, 22 nt, Human
gaaacaauuuuuguugucuaag

SEQ ID NO: 66679 - RNA, 22 nt, Human
gaaacaugucugacaauuuacc

SEQ ID NO: 66680 - RNA, 22 nt, Human
gaaaccacaguacccaggaaaa

SEQ ID NO: 66681 - RNA, 22 nt, Human
gaaaccugagccagagugggga

SEQ ID NO: 66682 - RNA, 22 nt, Human
gaaaccuguccccucuuccuca

SEQ ID NO: 66683 - RNA, 22 nt, Human
gaaacucucgcauccugggaac

SEQ ID NO: 66684 - RNA, 22 nt, Human
gaaacugaauauaagaaaggua

SEQ ID NO: 66685 - RNA, 22 nt, Human
gaaacuuacuuacucacauuuc

SEQ ID NO: 66686 - RNA, 22 nt, Human
gaaacuugauaauugaaacaga

SEQ ID NO: 66687 - RNA, 22 nt, Human
gaaacuuuggcuaaaagccaga

SEQ ID NO: 66688 - RNA, 22 nt, Human
gaaagaaucaacuaugucucug

SEQ ID NO: 66689 - RNA, 22 nt, Human
gaaagaaugagcaucaugacuu

SEQ ID NO: 66690 - RNA, 22 nt, Human
gaaagaaugcugggagccaucu

SEQ ID NO: 66691 - RNA, 22 nt, Human
gaaagacauaguugcaagaugg

SEQ ID NO: 66692 - RNA, 22 nt, Human
gaaagagaggggcugagaugca

SEQ ID NO: 66693 - RNA, 22 nt, Human
gaggccucaugaggugagcauu

SEQ ID NO: 66694 - RNA, 22 nt, Human
gaggccuccucugagacaucug

SEQ ID NO: 66695 - RNA, 18 nt, Human
gaggccugagaaccaggu

SEQ ID NO: 66696 - RNA, 22 nt, Human
gaggccugcuuuggcacucugg

SEQ ID NO: 66697 - RNA, 22 nt, Human
gaggccuggaccagccacagag

SEQ ID NO: 66698 - RNA, 22 nt, Human
gaggccuggcucugcccuccug

SEQ ID NO: 66699 - RNA, 22 nt, Human
gaggccugggagaacuguuuuu

SEQ ID NO: 66700 - RNA, 22 nt, Human
gaggccuggguuaccuacucgu

SEQ ID NO: 66701 - RNA, 22 nt, Human
gaggccuggguuggaggugcau

SEQ ID NO: 66702 - RNA, 22 nt, Human
gaggcuagagcaggggcucaau

SEQ ID NO: 66703 - RNA, 22 nt, Human
gaggcucagagugguuaaauaa

SEQ ID NO: 66704 - RNA, 22 nt, Human
gaggcucagggaguauaugaau

SEQ ID NO: 66705 - RNA, 22 nt, Human
gaggcuccgugcugcugcccug

SEQ ID NO: 66706 - RNA, 22 nt, Human
gaggcucuggaguagguacaca

SEQ ID NO: 66707 - RNA, 22 nt, Human
gaggcucuuuucugcugugucu

SEQ ID NO: 66708 - RNA, 20 nt, Human
gaggcugaaguguuuuugcu

SEQ ID NO: 66709 - RNA, 22 nt, Human
gaggcugcagcuaucagacauu

SEQ ID NO: 66710 - RNA, 22 nt, Human
gaggcugcccaacuggagugga

SEQ ID NO: 66711 - RNA, 22 nt, Human
gaggcugcuuugaugacaggag

SEQ ID NO: 66712 - RNA, 16 nt, Human
gaggcuggcagauguc

SEQ ID NO: 66713 - RNA, 22 nt, Human
gaggcugggaaguccaagacca

SEQ ID NO: 66714 - RNA, 22 nt, Human
gaggcugggaaguccaauauca

SEQ ID NO: 66715 - RNA, 22 nt, Human
gaggcugggggcugccuuccuc

SEQ ID NO: 66716 - RNA, 22 nt, Human
gaggcuggggucugccuuucug

SEQ ID NO: 66717 - RNA, 22 nt, Human
gaggcuggucagcccuaagauc

SEQ ID NO: 66718 - RNA, 22 nt, Human
gaggcugguucugaaguacugu

SEQ ID NO: 66719 - RNA, 21 nt, Human
gaggcugucugcugcuggccu

SEQ ID NO: 66720 - RNA, 22 nt, Human
gaggcugucuguuagccuggga

SEQ ID NO: 66721 - RNA, 22 nt, Human
gaggcuguguuucagugaggcc

SEQ ID NO: 66722 - RNA, 22 nt, Human
gaggcuguucaguguccagcuu

SEQ ID NO: 66723 - RNA, 22 nt, Human
gaggcuucccgcccaugcugga

SEQ ID NO: 66724 - RNA, 22 nt, Human
gaggcuucuguucacucacgcu

SEQ ID NO: 66725 - RNA, 22 nt, Human
gagggaaaauaaaauugcagua

SEQ ID NO: 66726 - RNA, 22 nt, Human
gagggaaagguuaauacaugau

SEQ ID NO: 66727 - RNA, 22 nt, Human
gagggaagaggccugacauuuu

SEQ ID NO: 66728 - RNA, 22 nt, Human
gagggagaauugcagccagcgu

SEQ ID NO: 66729 - RNA, 22 nt, Human
gagggaggggagcuccacccuc

SEQ ID NO: 66730 - RNA, 22 nt, Human
gagggagugcuuucugauaguu

SEQ ID NO: 66731 - RNA, 22 nt, Human
gagggaugguaguugacacuga

SEQ ID NO: 66732 - RNA, 22 nt, Human
gagggcacaaaggcaacauuca

SEQ ID NO: 66733 - RNA, 22 nt, Human
gagggcacucgagacuacggca

SEQ ID NO: 66734 - RNA, 22 nt, Human
gagggcagaaaauuaugcggug

SEQ ID NO: 66735 - RNA, 22 nt, Human
gagggcaggggucuugcacggu

SEQ ID NO: 66736 - RNA, 22 nt, Human
gagggcagugaauuuugaagcu

SEQ ID NO: 66737 - RNA, 22 nt, Human
gagggccaacuagcaccacuuu

SEQ ID NO: 66738 - RNA, 22 nt, Human
gagggccaauggauuucaacug

SEQ ID NO: 66739 - RNA, 22 nt, Human
gagggccaggcagcaagaaggc

SEQ ID NO: 66740 - RNA, 22 nt, Human
gagggccauucugaggggguga

SEQ ID NO: 66741 - RNA, 22 nt, Human
gagggcccuggcuucuugcugg

SEQ ID NO: 66742 - RNA, 22 nt, Human
gagggccuacuggacaugucag

SEQ ID NO: 66743 - RNA, 22 nt, Human
gagggccucugugggugcucac

SEQ ID NO: 66744 - RNA, 22 nt, Human
gagggcucacugagaaagcagu

SEQ ID NO: 66745 - RNA, 19 nt, Human
gagggcucauuugaacaau

SEQ ID NO: 66746 - RNA, 22 nt, Human
gagggcuccacacgggcccagc

SEQ ID NO: 66747 - RNA, 22 nt, Human
gagggcuccucacauucucuau

SEQ ID NO: 66748 - RNA, 20 nt, Human
gagggcucguggauggauaa

SEQ ID NO: 66749 - RNA, 22 nt, Human
gagggcucuaccaaguaacucu

SEQ ID NO: 66750 - RNA, 22 nt, Human
gagggcucuacucaccacccug

SEQ ID NO: 66751 - RNA, 22 nt, Human
gagggcugaagauuguggcccc

SEQ ID NO: 66752 - RNA, 22 nt, Human
gagggcugauaacaggaauaca

SEQ ID NO: 66753 - RNA, 22 nt, Human
gagggcugcugccagauaugcc

SEQ ID NO: 66754 - RNA, 22 nt, Human
gagggcugugaaggagcggguu

SEQ ID NO: 66755 - RNA, 22 nt, Human
gagggcuuguaaguggguggag

SEQ ID NO: 66756 - RNA, 22 nt, Human
gaggggagaaggcacuaaccag

SEQ ID NO: 66757 - RNA, 22 nt, Human
gaggggagacagggaaaucagu

SEQ ID NO: 66758 - RNA, 22 nt, Human
gaggggagcaugaucuagauug

SEQ ID NO: 66759 - RNA, 22 nt, Human
gaggggcaaugagggaaagagu

SEQ ID NO: 66760 - RNA, 22 nt, Human
gaggggcagagguagagaacaa

SEQ ID NO: 66761 - RNA, 22 nt, Human
gaggggccuggcacugagcugg

SEQ ID NO: 66762 - RNA, 22 nt, Human
gaggggcgcugucgggucaccu

SEQ ID NO: 66763 - RNA, 22 nt, Human
gaggggcucuugggcaugaagg

SEQ ID NO: 66764 - RNA, 22 nt, Human
gaggggcugcccuggugucagg

SEQ ID NO: 66765 - RNA, 22 nt, Human
gagggggaaagucccuggaguc

SEQ ID NO: 66766 - RNA, 22 nt, Human
gagggggcgaacagaagcaagg

SEQ ID NO: 66767 - RNA, 22 nt, Human
gaggggggcgcccugcagugca

SEQ ID NO: 66768 - RNA, 22 nt, Human
gaggggucuuuuguugucaggg

SEQ ID NO: 66769 - RNA, 22 nt, Human
gagggguggcguuggcauuuag

SEQ ID NO: 66770 - RNA, 22 nt, Human
gaggggugggcuggaaguuaua

SEQ ID NO: 66771 - RNA, 22 nt, Human
gaggguccccaugcagagcuca

SEQ ID NO: 66772 - RNA, 22 nt, Human
ggcugccagcacugguguagag

SEQ ID NO: 66773 - RNA, 22 nt, Human
ggcugccaggagaagcucagug

SEQ ID NO: 66774 - RNA, 22 nt, Human
ggcugcccucggggucgcaggc

SEQ ID NO: 66775 - RNA, 22 nt, Human
ggcugccuagacuuggaauuuc

SEQ ID NO: 66776 - RNA, 22 nt, Human
ggcugccuauagaauuauuagu

SEQ ID NO: 66777 - RNA, 19 nt, Human
ggcugccuccugggagauu

SEQ ID NO: 66778 - RNA, 20 nt, Human
ggcugccuccuuccuuuccu

SEQ ID NO: 66779 - RNA, 22 nt, Human
ggcugccugaggcugaggcccg

SEQ ID NO: 66780 - RNA, 22 nt, Human
ggcugccugccgcccacuuggc

SEQ ID NO: 66781 - RNA, 22 nt, Human
ggcugccugcuccuccugcacg

SEQ ID NO: 66782 - RNA, 22 nt, Human
ggcugccugguuuagugcugac

SEQ ID NO: 66783 - RNA, 22 nt, Human
ggcugccugugcccaggcacac

SEQ ID NO: 66784 - RNA, 22 nt, Human
ggcugcggaucuaaggcuggga

SEQ ID NO: 66785 - RNA, 22 nt, Human
ggcugcucaaggacucugaucg

SEQ ID NO: 66786 - RNA, 22 nt, Human
ggcugcucacgcagcccucccu

SEQ ID NO: 66787 - RNA, 22 nt, Human
ggcugcuccuuuacccuggcag

SEQ ID NO: 66788 - RNA, 23 nt, Human
ggcugcucuuuucaugcuguuuc

SEQ ID NO: 66789 - RNA, 22 nt, Human
ggcugcugacaaacaugaucau

SEQ ID NO: 66790 - RNA, 22 nt, Human
ggcugcugagucacgacaguga

SEQ ID NO: 66791 - RNA, 22 nt, Human
ggcugcuggaagacugaacaag

SEQ ID NO: 66792 - RNA, 21 nt, Human
ggcugcugggagagcugcgug

SEQ ID NO: 66793 - RNA, 22 nt, Human
ggcugcuggggacgugggagag

SEQ ID NO: 66794 - RNA, 21 nt, Human
ggcugcuggggguuggcacag

SEQ ID NO: 66795 - RNA, 22 nt, Human
ggcugcugguagggguaggaag

SEQ ID NO: 66796 - RNA, 22 nt, Human
ggcugcugguggaaugguaggc

SEQ ID NO: 66797 - RNA, 19 nt, Human
ggcugcugguuacagaggc

SEQ ID NO: 66798 - RNA, 21 nt, Human
ggcugcugucaccgcugucac

SEQ ID NO: 66799 - RNA, 18 nt, Human
ggcugcuuaaggagaucc

SEQ ID NO: 66800 - RNA, 22 nt, Human
ggcugcuucucacucauuugca

SEQ ID NO: 66801 - RNA, 22 nt, Human
ggcugcuuuugcuguaagccag

SEQ ID NO: 66802 - RNA, 21 nt, Human
gggaagacugucaggauuccu

SEQ ID NO: 66803 - RNA, 22 nt, Human
gggaagagaccguacccuggcc

SEQ ID NO: 66804 - RNA, 22 nt, Human
gggaagagugucgguugaagug

SEQ ID NO: 66805 - RNA, 22 nt, Human
gggaagccaugcucagagguac

SEQ ID NO: 66806 - RNA, 22 nt, Human
gggaagcccugugcuugccugg

SEQ ID NO: 66807 - RNA, 22 nt, Human
gggaagcugcguggucuagggc

SEQ ID NO: 66808 - RNA, 22 nt, Human
gggaaggaaaucuugcuuguga

SEQ ID NO: 66809 - RNA, 22 nt, Human
gggaaggacacagccaugacug

SEQ ID NO: 66810 - RNA, 22 nt, Human
gggaaggagguggaccugcccc

SEQ ID NO: 66811 - RNA, 22 nt, Human
gggaaggcaggauucucuggug

SEQ ID NO: 66812 - RNA, 22 nt, Human
gggaaggcaggccucuguugga

SEQ ID NO: 66813 - RNA, 22 nt, Human
gggaaggcauaccugagggaga

SEQ ID NO: 66814 - RNA, 22 nt, Human
gggaagggacuuguuuaagguc

SEQ ID NO: 66815 - RNA, 22 nt, Human
gggaagggagcuggguauuuag

SEQ ID NO: 66816 - RNA, 22 nt, Human
gggaagggcuccuuuuauugca

SEQ ID NO: 66817 - RNA, 22 nt, Human
gggaagugaggagccccucugc

SEQ ID NO: 66818 - RNA, 23 nt, Human
gggaagugaggagccccucugcc

SEQ ID NO: 66819 - RNA, 22 nt, Human
gggaagugcccucuucaggaga

SEQ ID NO: 66820 - RNA, 22 nt, Human
gggaagugugcagaguucucuu

SEQ ID NO: 66821 - RNA, 19 nt, Human
gggaaugauggaagacuuc

SEQ ID NO: 66822 - RNA, 22 nt, Human
gggaaugugcagccacagugag

SEQ ID NO: 66823 - RNA, 22 nt, Human
gggaauguugacugagagcagg

SEQ ID NO: 66824 - RNA, 22 nt, Human
gggaauugagguaugcugggcu

SEQ ID NO: 66825 - RNA, 22 nt, Human
gggacacagagaaacuggagaa

SEQ ID NO: 66826 - RNA, 22 nt, Human
gggacacagguaucucaaauga

SEQ ID NO: 66827 - RNA, 22 nt, Human
gggacagaaggaagugagcaca

SEQ ID NO: 66828 - RNA, 22 nt, Human
gggacagacccaugggccaggu

SEQ ID NO: 66829 - RNA, 22 nt, Human
gggacagcagaaagaaggcaag

SEQ ID NO: 66830 - RNA, 22 nt, Human
gggacagcuguagugcuuggcu

SEQ ID NO: 66831 - RNA, 22 nt, Human
gggacaggcaaagguaugcuuc

SEQ ID NO: 66832 - RNA, 22 nt, Human
gggacaugccccucagugggug

SEQ ID NO: 66833 - RNA, 22 nt, Human
gggacauggaggcgcgcaggca

SEQ ID NO: 66834 - RNA, 22 nt, Human
gggaccagaggcugugcacaau

SEQ ID NO: 66835 - RNA, 23 nt, Human
gggaccaggcccuuccugguuug

SEQ ID NO: 66836 - RNA, 22 nt, Human
gggaccugaggagggguuucag

SEQ ID NO: 66837 - RNA, 22 nt, Human
gggaccugccauugcucacagg

SEQ ID NO: 66838 - RNA, 22 nt, Human
gggaccugcgccacucacuguc

SEQ ID NO: 66839 - RNA, 22 nt, Human
gggaccuggcgagggucacaca

SEQ ID NO: 66840 - RNA, 22 nt, Human
gggaccugggccagaggacagu

SEQ ID NO: 66841 - RNA, 22 nt, Human
gggacuggauagauguggguga

SEQ ID NO: 66842 - RNA, 22 nt, Human
gggacuggccaggguuuggaau

SEQ ID NO: 66843 - RNA, 22 nt, Human
gggagaaggaggacugugcugu

SEQ ID NO: 66844 - RNA, 22 nt, Human
gggagaaguggaaaucucauua

SEQ ID NO: 66845 - RNA, 23 nt, Human
gggagaauaugaggaugauggug

SEQ ID NO: 66846 - RNA, 22 nt, Human
gggagacaagaaguagccugcu

SEQ ID NO: 66847 - RNA, 20 nt, Human
gggagacagggccagugucc

SEQ ID NO: 66848 - RNA, 22 nt, Human
gggagagaagggcauguacacu

SEQ ID NO: 66849 - RNA, 22 nt, Human
gggagagagaaaacguggcgca

SEQ ID NO: 66850 - RNA, 22 nt, Human
gggagagcgcgcuagggccgag

SEQ ID NO: 66851 - RNA, 17 nt, Human
gggagaugaagggauau

SEQ ID NO: 66852 - RNA, 22 nt, Human
gggagcagccugccucccaccu

SEQ ID NO: 66853 - RNA, 22 nt, Human
gggagcauuucccuguguugaa

SEQ ID NO: 66854 - RNA, 22 nt, Human
gggagccacaguagcagcuacu

SEQ ID NO: 66855 - RNA, 22 nt, Human
gggagccacagugaggugcaug

SEQ ID NO: 66856 - RNA, 22 nt, Human
gggagccacaguuuauagugau

SEQ ID NO: 66857 - RNA, 22 nt, Human
gggagccagcagggcauggagc

SEQ ID NO: 66858 - RNA, 23 nt, Human
gggagccauggguggucauggag

SEQ ID NO: 66859 - RNA, 22 nt, Human
gggagcuccacugccucucauu

SEQ ID NO: 66860 - RNA, 22 nt, Human
gggagcugaaggagccggcggg

SEQ ID NO: 66861 - RNA, 22 nt, Human
gggagcugaauggcaauggaga

SEQ ID NO: 66862 - RNA, 22 nt, Human
gggagcugagaaacaacauucu

SEQ ID NO: 66863 - RNA, 22 nt, Human
gggagcugagcucugagccacg

SEQ ID NO: 66864 - RNA, 22 nt, Human
gggagcugcacacgccccggaa

SEQ ID NO: 66865 - RNA, 22 nt, Human
gggagcugcggucuugcgaaga

SEQ ID NO: 66866 - RNA, 22 nt, Human
gggagcugggcugguuuugcug

SEQ ID NO: 66867 - RNA, 19 nt, Human
gggagcugucugcccgugg

SEQ ID NO: 66868 - RNA, 22 nt, Human
gggagcuuaagacaguuccaau

SEQ ID NO: 66869 - RNA, 22 nt, Human
gggaggaaggcuugggugagua

SEQ ID NO: 66870 - RNA, 22 nt, Human
gggaggagugaagauucaccug

SEQ ID NO: 66871 - RNA, 22 nt, Human
gggaggcauguguuauccacuu

SEQ ID NO: 66872 - RNA, 20 nt, Human
gggaggcauuggucccucac

SEQ ID NO: 66873 - RNA, 20 nt, Human
gggaggccagccucagagaa

SEQ ID NO: 66874 - RNA, 18 nt, Human
gggaggccccagcaggag

SEQ ID NO: 66875 - RNA, 22 nt, Human
gggaggcgccgaggguagcuaa

SEQ ID NO: 66876 - RNA, 22 nt, Human
gggaggcucagugguguccucu

SEQ ID NO: 66877 - RNA, 22 nt, Human
gggaggcuggcucuggccacag

SEQ ID NO: 66878 - RNA, 22 nt, Human
gggaggguguucucccaagaac

SEQ ID NO: 66879 - RNA, 22 nt, Human
gggagguagcaagccugcagcu

SEQ ID NO: 66880 - RNA, 22 nt, Human
gggaggugaaaggucaugugug

SEQ ID NO: 66881 - RNA, 22 nt, Human
gggaggugauggcaagcagcgg

SEQ ID NO: 66882 - RNA, 22 nt, Human
gggagucagagagguaauggga

SEQ ID NO: 66883 - RNA, 22 nt, Human
gggagucaggcucccucagaga

SEQ ID NO: 66884 - RNA, 22 nt, Human
gggagucagugaaggagucaga

SEQ ID NO: 66885 - RNA, 22 nt, Human
gggaguccaaauugguacaaua

SEQ ID NO: 66886 - RNA, 16 nt, Human
gggagugaaggagggu

SEQ ID NO: 66887 - RNA, 22 nt, Human
gggaguggggcuuaccuugaag

SEQ ID NO: 66888 - RNA, 22 nt, Human
gggaguggguuuggccuaggcc

SEQ ID NO: 66889 - RNA, 20 nt, Human
gggaguggugguagccugug

SEQ ID NO: 66890 - RNA, 22 nt, Human
gggauaagagaguauuuaugca

SEQ ID NO: 66891 - RNA, 22 nt, Human
gggauaggaaacuuagguacac

SEQ ID NO: 66892 - RNA, 22 nt, Human
gagugucuguauuuugggcaag

SEQ ID NO: 66893 - RNA, 22 nt, Human
gagugucugugacagcucauga

SEQ ID NO: 66894 - RNA, 22 nt, Human
gaguguggaucccagaagcaga

SEQ ID NO: 66895 - RNA, 22 nt, Human
gagugugggcacgggggccuug

SEQ ID NO: 66896 - RNA, 22 nt, Human
gagugugggggugcugaggaca

SEQ ID NO: 66897 - RNA, 22 nt, Human
gaguguggugaacaggagcacc

SEQ ID NO: 66898 - RNA, 22 nt, Human
gagugugucggucagcguggcg

SEQ ID NO: 66899 - RNA, 22 nt, Human
gaguuaaauauuuucugaaguu

SEQ ID NO: 66900 - RNA, 22 nt, Human
gaguuaauacugaguuuauuaa

SEQ ID NO: 66901 - RNA, 22 nt, Human
gaguuaauucgaauauucuagc

SEQ ID NO: 66902 - RNA, 21 nt, Human
gaguuaauuugaccccugccu

SEQ ID NO: 66903 - RNA, 22 nt, Human
gaguuacacaaaauuucuauuu

SEQ ID NO: 66904 - RNA, 22 nt, Human
gaguuaguauguucuguaagua

SEQ ID NO: 66905 - RNA, 22 nt, Human
gaguuauagauggacuauuauu

SEQ ID NO: 66906 - RNA, 22 nt, Human
gaguuauauuugcgauauugga

SEQ ID NO: 66907 - RNA, 22 nt, Human
gaguuauuagucaaauagggaa

SEQ ID NO: 66908 - RNA, 22 nt, Human
gaguuauucuagguccuuugua

SEQ ID NO: 66909 - RNA, 22 nt, Human
gaguucaauuuccagcuguucu

SEQ ID NO: 66910 - RNA, 22 nt, Human
gaguucuguagggugaaauagu

SEQ ID NO: 66911 - RNA, 22 nt, Human
agcucagggcuccaggaccgcu

SEQ ID NO: 66912 - RNA, 22 nt, Human
agcucagguagacucagcaucu

SEQ ID NO: 66913 - RNA, 22 nt, Human
agcuccagcccaucugcucgug

SEQ ID NO: 66914 - RNA, 23 nt, Human
agcuccagggaacaggcaguagg

SEQ ID NO: 66915 - RNA, 23 nt, Human
agcuccaggugauuguaaugugu

SEQ ID NO: 66916 - RNA, 22 nt, Human
agcuccaguuacuuaccuagag

SEQ ID NO: 66917 - RNA, 22 nt, Human
agcuccaguuuccugacugagc

SEQ ID NO: 66918 - RNA, 22 nt, Human
agcucccaauugacuugaacua

SEQ ID NO: 66919 - RNA, 22 nt, Human
agcucccagagcucgagaguaa

SEQ ID NO: 66920 - RNA, 22 nt, Human
agcucccagucuccucuccaug

SEQ ID NO: 66921 - RNA, 22 nt, Human
agcuccuccugugccaggccag

SEQ ID NO: 66922 - RNA, 22 nt, Human
agcuccugaaaagcgcuugcuu

SEQ ID NO: 66923 - RNA, 23 nt, Human
agcuccugaggccagccucuccu

SEQ ID NO: 66924 - RNA, 22 nt, Human
agcuccugaguagcuuuacuca

SEQ ID NO: 66925 - RNA, 17 nt, Human
agcuccugcccauggcu

SEQ ID NO: 66926 - RNA, 22 nt, Human
agcuccugcucuuugucccuaa

SEQ ID NO: 66927 - RNA, 22 nt, Human
agcuccugcuugacagaagagg

SEQ ID NO: 66928 - RNA, 22 nt, Human
agcuccuggacgaacagggagu

SEQ ID NO: 66929 - RNA, 22 nt, Human
agcuccuggcaaggucauggug

SEQ ID NO: 66930 - RNA, 22 nt, Human
agcuccugggcaccucuuucac

SEQ ID NO: 66931 - RNA, 22 nt, Human
agcuccugggccaagcccaugc

SEQ ID NO: 66932 - RNA, 17 nt, Human
agcuccuggggucuuua

SEQ ID NO: 66933 - RNA, 18 nt, Human
agcuccuggucucaggga

SEQ ID NO: 66934 - RNA, 22 nt, Human
agcuccuggucuuuguccagag

SEQ ID NO: 66935 - RNA, 22 nt, Human
agcuccuguaguacauauuauu

SEQ ID NO: 66936 - RNA, 22 nt, Human
agcuccugucucaagggagccu

SEQ ID NO: 66937 - RNA, 22 nt, Human
agcuccuguucugagagcagga

SEQ ID NO: 66938 - RNA, 23 nt, Human
agcuccuuugaaaguauguuuuu

SEQ ID NO: 66939 - RNA, 22 nt, Human
agcucugauccauaauuuauac

SEQ ID NO: 66940 - RNA, 22 nt, Human
agcucugaugacuuuacaacuu

SEQ ID NO: 66941 - RNA, 22 nt, Human
agcucugccgccuuucaggcug

SEQ ID NO: 66942 - RNA, 22 nt, Human
agcucugccuugacaccuucuc

SEQ ID NO: 66943 - RNA, 22 nt, Human
agcucuggaagcccugguaguu

SEQ ID NO: 66944 - RNA, 22 nt, Human
agcucuggcacuggcgcgggau

SEQ ID NO: 66945 - RNA, 18 nt, Human
agcucuggggagaugggc

SEQ ID NO: 66946 - RNA, 22 nt, Human
agcucuggggccugucccacau

SEQ ID NO: 66947 - RNA, 22 nt, Human
agcucugggguggagcccagga

SEQ ID NO: 66948 - RNA, 22 nt, Human
agcucugguuauugaagcaggg

SEQ ID NO: 66949 - RNA, 22 nt, Human
agcucuguuacugauuuuccug

SEQ ID NO: 66950 - RNA, 22 nt, Human
agcucuuacauuuaggucuaug

SEQ ID NO: 66951 - RNA, 22 nt, Human
agcucuuuauggguaaaugcca

SEQ ID NO: 66952 - RNA, 22 nt, Human
agcucuuucuacaagcaggcag

SEQ ID NO: 66953 - RNA, 22 nt, Human
agcucuuugagaaggcagugug

SEQ ID NO: 66954 - RNA, 22 nt, Human
agcucuuugcuggcaguaggcu

SEQ ID NO: 66955 - RNA, 21 nt, Human
agcugaaaaguuguuuacaag

SEQ ID NO: 66956 - RNA, 22 nt, Human
agcugaaacccaggccucagcu

SEQ ID NO: 66957 - RNA, 22 nt, Human
agcugaaacuucccauuaauug

SEQ ID NO: 66958 - RNA, 22 nt, Human
agcugaagaaaugggaagcauu

SEQ ID NO: 66959 - RNA, 22 nt, Human
agcugaagcacugggauggaag

SEQ ID NO: 66960 - RNA, 22 nt, Human
agcugaaggcuagaacagcugg

SEQ ID NO: 66961 - RNA, 22 nt, Human
agcugaaguccucgcggugcua

SEQ ID NO: 66962 - RNA, 22 nt, Human
agcugaaguguuggugguuuca

SEQ ID NO: 66963 - RNA, 22 nt, Human
agcugacagugcauggagggac

SEQ ID NO: 66964 - RNA, 22 nt, Human
agcugacauaagcacuuucuaa

SEQ ID NO: 66965 - RNA, 22 nt, Human
agcugagacacuugagagacua

SEQ ID NO: 66966 - RNA, 22 nt, Human
agcugagagccccugcccugug

SEQ ID NO: 66967 - RNA, 22 nt, Human
agcugagcugcagaugacugua

SEQ ID NO: 66968 - RNA, 22 nt, Human
agcugaggacgugaagggcggc

SEQ ID NO: 66969 - RNA, 23 nt, Human
agcugaggcagaggggcauucuc

SEQ ID NO: 66970 - RNA, 22 nt, Human
agcugaggcauggacaggcugc

SEQ ID NO: 66971 - RNA, 23 nt, Human
agcugaggcugugggugucagag

SEQ ID NO: 66972 - RNA, 23 nt, Human
agcugaggugcagauccaaagaa

SEQ ID NO: 66973 - RNA, 22 nt, Human
agcugagguuaguauaaaugug

SEQ ID NO: 66974 - RNA, 22 nt, Human
agcugagguugaagagugaacg

SEQ ID NO: 66975 - RNA, 22 nt, Human
agcugaguuaauucaucacuua

SEQ ID NO: 66976 - RNA, 22 nt, Human
agcugauuccacuuuuucccca

SEQ ID NO: 66977 - RNA, 22 nt, Human
agcugcaacaucugcuuguccc

SEQ ID NO: 66978 - RNA, 22 nt, Human
agcugcaacuguccuugccuug

SEQ ID NO: 66979 - RNA, 14 nt, Human
agcugcaagcaucc

SEQ ID NO: 66980 - RNA, 22 nt, Human
agcugcaaguaagcuugcuccu

SEQ ID NO: 66981 - RNA, 22 nt, Human
agcugcaauacccuucuuccuu

SEQ ID NO: 66982 - RNA, 22 nt, Human
agcugcagagguuugugcaaca

SEQ ID NO: 66983 - RNA, 22 nt, Human
agcugcagcacuccaguagccg

SEQ ID NO: 66984 - RNA, 21 nt, Human
agcugcagccauguacauggc

SEQ ID NO: 66985 - RNA, 22 nt, Human
agcugcagccgcagcuguggcc

SEQ ID NO: 66986 - RNA, 22 nt, Human
agcugcagccucaugauucggu

SEQ ID NO: 66987 - RNA, 22 nt, Human
agcugcaggcccaugcucaguc

SEQ ID NO: 66988 - RNA, 22 nt, Human
agcugcaggccucuccugggga

SEQ ID NO: 66989 - RNA, 22 nt, Human
agcugcagggcuuggguuuccc

SEQ ID NO: 66990 - RNA, 22 nt, Human
agcugcaguaaagcucuccagg

SEQ ID NO: 66991 - RNA, 21 nt, Human
agcugcagucaagccagaggu

SEQ ID NO: 66992 - RNA, 22 nt, Human
agcugccacauggugucacugu

SEQ ID NO: 66993 - RNA, 22 nt, Human
agcugccaggccccugagaacc

SEQ ID NO: 66994 - RNA, 17 nt, Human
agcugccagggagugug

SEQ ID NO: 66995 - RNA, 22 nt, Human
agcugccauccgaggugucaga

SEQ ID NO: 66996 - RNA, 22 nt, Human
agcugccauggccugaauuuac

SEQ ID NO: 66997 - RNA, 22 nt, Human
agcugcccaauccugcagggcg

SEQ ID NO: 66998 - RNA, 22 nt, Human
agcugccccgaggcggcgggaa

SEQ ID NO: 66999 - RNA, 22 nt, Human
agcugcccuggcggagcugcuc

SEQ ID NO: 67000 - RNA, 22 nt, Human
agcugcccugguaagauugaug

SEQ ID NO: 67001 - RNA, 22 nt, Human
agcugcccuucucuugcccuug

SEQ ID NO: 67002 - RNA, 22 nt, Human
agcugcccuuuaugaugcugaa

SEQ ID NO: 67003 - RNA, 22 nt, Human
agcugccgaugcccagcugcau

SEQ ID NO: 67004 - RNA, 22 nt, Human
agugcuuugugcucucacugca

SEQ ID NO: 67005 - RNA, 22 nt, Human
agugcuuuguggagaauuugua

SEQ ID NO: 67006 - RNA, 22 nt, Human
agugcuuuuauaucauuaaucc

SEQ ID NO: 67007 - RNA, 22 nt, Human
aguggaagagccauguuccaac

SEQ ID NO: 67008 - RNA, 22 nt, Human
aguggaaggucaggggacagug

SEQ ID NO: 67009 - RNA, 20 nt, Human
aguggaauuucagauacccc

SEQ ID NO: 67010 - RNA, 22 nt, Human
aguggaccagaagacugaagcu

SEQ ID NO: 67011 - RNA, 22 nt, Human
aguggacccggaacagaggccc

SEQ ID NO: 67012 - RNA, 22 nt, Human
aguggagacaggacagucgaua

SEQ ID NO: 67013 - RNA, 22 nt, Human
aguggcaaagucuucagaaguu

SEQ ID NO: 67014 - RNA, 22 nt, Human
aguggcaagagggucuauuguu

SEQ ID NO: 67015 - RNA, 22 nt, Human
aguggcagagccaggguuggga

SEQ ID NO: 67016 - RNA, 22 nt, Human
aguggcagagugcacucaggca

SEQ ID NO: 67017 - RNA, 22 nt, Human
aguggcagccgagcaggagaug

SEQ ID NO: 67018 - RNA, 22 nt, Human
aguggcagccuuguucauuaug

SEQ ID NO: 67019 - RNA, 22 nt, Human
aguggcagcugucaugcccuag

SEQ ID NO: 67020 - RNA, 22 nt, Human
aggcaacuguuugauaauguug

SEQ ID NO: 67021 - RNA, 22 nt, Human
aggcaagaacagacaugggagu

SEQ ID NO: 67022 - RNA, 22 nt, Human
aggcaagcauugggaacagggc

SEQ ID NO: 67023 - RNA, 22 nt, Human
aggcaagcccaggcacuuggag

SEQ ID NO: 67024 - RNA, 22 nt, Human
aggcaagcuugaaauuggcucu

SEQ ID NO: 67025 - RNA, 22 nt, Human
aggcaagugcauuagaagagca

SEQ ID NO: 67026 - RNA, 22 nt, Human
aggcaauccccugaggauacuu

SEQ ID NO: 67027 - RNA, 22 nt, Human
aggcaauccucuuacagauggg

SEQ ID NO: 67028 - RNA, 22 nt, Human
aggcaaugcagauagaugaaug

SEQ ID NO: 67029 - RNA, 23 nt, Human
aggcaaugcccugcugagaacuc

SEQ ID NO: 67030 - RNA, 22 nt, Human
aggcacaagaaacugcucccca

SEQ ID NO: 67031 - RNA, 22 nt, Human
aggcacacagcuugcauaaauc

SEQ ID NO: 67032 - RNA, 22 nt, Human
aggcacagagaaugcccuccau

SEQ ID NO: 67033 - RNA, 22 nt, Human
aggcacagagagguuaaaugca

SEQ ID NO: 67034 - RNA, 22 nt, Human
aggcacagcacaccuggccccc

SEQ ID NO: 67035 - RNA, 22 nt, Human
aggcacagccucccuucacaug

SEQ ID NO: 67036 - RNA, 22 nt, Human
aggcacagggaugcggagccag

SEQ ID NO: 67037 - RNA, 19 nt, Human
aggcacagguugucuggac

SEQ ID NO: 67038 - RNA, 22 nt, Human
aggcaccaguaagaguagaacu

SEQ ID NO: 67039 - RNA, 22 nt, Human
aggcaccucagcugagccuggg

SEQ ID NO: 67040 - RNA, 22 nt, Human
aggcaccugagguggccagccu

SEQ ID NO: 67041 - RNA, 22 nt, Human
aggcaccuggccaguugucuug

SEQ ID NO: 67042 - RNA, 19 nt, Human
aggcaccuugauggcuucc

SEQ ID NO: 67043 - RNA, 22 nt, Human
aggcacgagcaauggccgagga

SEQ ID NO: 67044 - RNA, 22 nt, Human
aggcacugaaagguggccagag

SEQ ID NO: 67045 - RNA, 22 nt, Human
aggcacugaaggaagcuugcgc

SEQ ID NO: 67046 - RNA, 22 nt, Human
aggcacugacucaagggagcca

SEQ ID NO: 67047 - RNA, 22 nt, Human
aggcacugauucuguuuuccau

SEQ ID NO: 67048 - RNA, 18 nt, Human
aggcacuggaauuaaggg

SEQ ID NO: 67049 - RNA, 20 nt, Human
aggcacuggauuucuuauau

SEQ ID NO: 67050 - RNA, 22 nt, Human
aggcacugggaauaugcugagg

SEQ ID NO: 67051 - RNA, 22 nt, Human
aggcacugguccauuuucugca

SEQ ID NO: 67052 - RNA, 22 nt, Human
aggcacuguucccaguuauccu

SEQ ID NO: 67053 - RNA, 22 nt, Human
aggcacuucucaaauucaugcc

SEQ ID NO: 67054 - RNA, 22 nt, Human
aggcacuuuaggaucagguuga

SEQ ID NO: 67055 - RNA, 21 nt, Human
aggcagaaagagcccaggcug

SEQ ID NO: 67056 - RNA, 22 nt, Human
aggcagacaaggacacaguggg

SEQ ID NO: 67057 - RNA, 20 nt, Human
aggcagacaaggagucuguu

SEQ ID NO: 67058 - RNA, 22 nt, Human
aggcagacucaauggcuagaua

SEQ ID NO: 67059 - RNA, 22 nt, Human
aggcagacugugcgggaagagu

SEQ ID NO: 67060 - RNA, 22 nt, Human
aggcagacuuaccuucugggga

SEQ ID NO: 67061 - RNA, 22 nt, Human
aggcagaggagaaugaucuucc

SEQ ID NO: 67062 - RNA, 22 nt, Human
aggcagcaaaugucuggaacag

SEQ ID NO: 67063 - RNA, 22 nt, Human
aggcagcaaugaaugaaaugga

SEQ ID NO: 67064 - RNA, 22 nt, Human
aggcagcagccacaaggccuga

SEQ ID NO: 67065 - RNA, 22 nt, Human
aggcagcagggccacuggcuga

SEQ ID NO: 67066 - RNA, 22 nt, Human
aggcagcaugggcccagagucc

SEQ ID NO: 67067 - RNA, 22 nt, Human
aggcagccaaucagaggcugac

SEQ ID NO: 67068 - RNA, 21 nt, Human
aggcagccagucaugcucccu

SEQ ID NO: 67069 - RNA, 22 nt, Human
aggcagcccacaggacacagga

SEQ ID NO: 67070 - RNA, 22 nt, Human
aggcagcuaagauggauaauga

SEQ ID NO: 67071 - RNA, 22 nt, Human
aggcagcuggaggcagagacua

SEQ ID NO: 67072 - RNA, 22 nt, Human
aggcagcuggcaaauucuagag

SEQ ID NO: 67073 - RNA, 22 nt, Human
aggcagcugugaggacuggauu

SEQ ID NO: 67074 - RNA, 22 nt, Human
aggcaggaaaaucgcuugaacc

SEQ ID NO: 67075 - RNA, 22 nt, Human
aggcaggcaaccaccugggaag

SEQ ID NO: 67076 - RNA, 22 nt, Human
aggcaggcacacuuccuccagg

SEQ ID NO: 67077 - RNA, 22 nt, Human
aggcaggcagcugucaccacuc

SEQ ID NO: 67078 - RNA, 22 nt, Human
aggcaggcccucuggaaaggua

SEQ ID NO: 67079 - RNA, 22 nt, Human
aggcaggccgugucccuccuca

SEQ ID NO: 67080 - RNA, 22 nt, Human
aggcaggcucaggcccaugcuu

SEQ ID NO: 67081 - RNA, 22 nt, Human
aggcaggcuggucugaagagug

SEQ ID NO: 67082 - RNA, 22 nt, Human
aggcagggaccaguuguuuucu

SEQ ID NO: 67083 - RNA, 22 nt, Human
aggcagggugaugauaaugauu

SEQ ID NO: 67084 - RNA, 22 nt, Human
aggcaggugagucaaaacagac

SEQ ID NO: 67085 - RNA, 18 nt, Human
aggcaggugcuggaaguc

SEQ ID NO: 67086 - RNA, 22 nt, Human
aggcaggugggagugauuccuu

SEQ ID NO: 67087 - RNA, 22 nt, Human
aggcagguuacaaaaacuuuau

SEQ ID NO: 67088 - RNA, 22 nt, Human
aggcagguuggggaaaagcacu

SEQ ID NO: 67089 - RNA, 22 nt, Human
aggcagguuuacucuuauuugg

SEQ ID NO: 67090 - RNA, 19 nt, Human
aggcagucauuggaauaua

SEQ ID NO: 67091 - RNA, 22 nt, Human
aggcagucuaguccccaggcaa

SEQ ID NO: 67092 - RNA, 22 nt, Human
aggcagugagcagggugucaug

SEQ ID NO: 67093 - RNA, 22 nt, Human
aggcagugagugugacuucaca

SEQ ID NO: 67094 - RNA, 22 nt, Human
aggcaguggaaggagaaagcaa

SEQ ID NO: 67095 - RNA, 22 nt, Human
aggcaguggagaagguuuguga

SEQ ID NO: 67096 - RNA, 22 nt, Human
aggcaguggagcuggaauaggc

SEQ ID NO: 67097 - RNA, 22 nt, Human
aggcaguggcugagaccagggg

SEQ ID NO: 67098 - RNA, 22 nt, Human
aggcaguggcuuuuguuguguu

SEQ ID NO: 67099 - RNA, 22 nt, Human
aggcagugguguuugcuggugg

SEQ ID NO: 67100 - RNA, 23 nt, Human
aggcagugucucuuauccugucc

SEQ ID NO: 67101 - RNA, 22 nt, Human
aggcaguguguagcuggaagag

SEQ ID NO: 67102 - RNA, 22 nt, Human
aggcaguuguagagagggcucu

SEQ ID NO: 67103 - RNA, 20 nt, Human
aggcaguuucaauuuuguua

SEQ ID NO: 67104 - RNA, 22 nt, Human
aggcauaaccuuuuaucuggau

SEQ ID NO: 67105 - RNA, 22 nt, Human
aggcaucaggaguauagccaga

SEQ ID NO: 67106 - RNA, 21 nt, Human
aggcaucuaaagagaguagac

SEQ ID NO: 67107 - RNA, 22 nt, Human
aggcaucuauacauuauguuca

SEQ ID NO: 67108 - RNA, 22 nt, Human
aggcaucucucugcuucugagc

SEQ ID NO: 67109 - RNA, 22 nt, Human
aggcaucugcagagcuugguga

SEQ ID NO: 67110 - RNA, 22 nt, Human
aggcaucugccuccucuacccc

SEQ ID NO: 67111 - RNA, 22 nt, Human
aggcaugacuuuggcugaagaa

SEQ ID NO: 67112 - RNA, 21 nt, Human
aggcauggaaauggcacacug

SEQ ID NO: 67113 - RNA, 22 nt, Human
aggcauggacauuucggcagcu

SEQ ID NO: 67114 - RNA, 22 nt, Human
aggcauggggcugcagucaggu

SEQ ID NO: 67115 - RNA, 22 nt, Human
aggcauggguagaagagaagcc

SEQ ID NO: 67116 - RNA, 22 nt, Human
aggcaugugacccuggacucag

SEQ ID NO: 67117 - RNA, 22 nt, Human
aggcauuuaaagauguaagacu

SEQ ID NO: 67118 - RNA, 22 nt, Human
aggcauuuucacugaugucauc

SEQ ID NO: 67119 - RNA, 22 nt, Human
aggcauuuuguucaagaugaca

SEQ ID NO: 67120 - RNA, 18 nt, Human
aggccaaacuuguaagca

SEQ ID NO: 67121 - RNA, 22 nt, Human
aggccaaagugcuccuuuuaga

SEQ ID NO: 67122 - RNA, 22 nt, Human
aggccaagauuuuggaucagcu

SEQ ID NO: 67123 - RNA, 20 nt, Human
agcuucugcugccuuucggc

SEQ ID NO: 67124 - RNA, 22 nt, Human
agcuucuggaaggcaaggcuug

SEQ ID NO: 67125 - RNA, 22 nt, Human
agcuucuguucaucuuccaggc

SEQ ID NO: 67126 - RNA, 22 nt, Human
agcuucuuaguucacuuuuaau

SEQ ID NO: 67127 - RNA, 22 nt, Human
agcuucuuggcucagcacuugg

SEQ ID NO: 67128 - RNA, 22 nt, Human
agcuugaaccuaaaacaauaau

SEQ ID NO: 67129 - RNA, 22 nt, Human
agggaagaaaauccaucgcugc

SEQ ID NO: 67130 - RNA, 22 nt, Human
agggaagaaucacugggauguu

SEQ ID NO: 67131 - RNA, 22 nt, Human
agggaagaggaccagagucucu

SEQ ID NO: 67132 - RNA, 22 nt, Human
agggaagaggcaagguuuaugg

SEQ ID NO: 67133 - RNA, 22 nt, Human
agggaagcagcagccgccuguc

SEQ ID NO: 67134 - RNA, 22 nt, Human
agggaagccccgaggaggcacc

SEQ ID NO: 67135 - RNA, 22 nt, Human
agggaaggagguuagaacccac

SEQ ID NO: 67136 - RNA, 22 nt, Human
agggaaguccaugggggcggug

SEQ ID NO: 67137 - RNA, 22 nt, Human
agggaagugaaugacagauauc

SEQ ID NO: 67138 - RNA, 19 nt, Human
agggaauccggcugaggga

SEQ ID NO: 67139 - RNA, 22 nt, Human
agggaaucuaggcucagagugc

SEQ ID NO: 67140 - RNA, 22 nt, Human
agggaaugcuccguauaaaucu

SEQ ID NO: 67141 - RNA, 22 nt, Human
agggaauguagcaagaugccaa

SEQ ID NO: 67142 - RNA, 22 nt, Human
agggaauucacuggaacgcccu

SEQ ID NO: 67143 - RNA, 20 nt, Human
agggacacaauauuucugug

SEQ ID NO: 67144 - RNA, 21 nt, Human
agggacacacaggauggggcu

SEQ ID NO: 67145 - RNA, 22 nt, Human
aucaguuuuuauuaauguagcu

SEQ ID NO: 67146 - RNA, 22 nt, Human
aucauaagacccagccaguauu

SEQ ID NO: 67147 - RNA, 22 nt, Human
aucauagguguguuaccaguua

SEQ ID NO: 67148 - RNA, 22 nt, Human
aucauccauggcugaucauaaa

SEQ ID NO: 67149 - RNA, 22 nt, Human
aucauccuagaaggaagcuagg

SEQ ID NO: 67150 - RNA, 19 nt, Human
aucauccugggucaugcac

SEQ ID NO: 67151 - RNA, 22 nt, Human
aucaucuaaauugaguccagcu

SEQ ID NO: 67152 - RNA, 22 nt, Human
aucaucuaguuuaacuuucuuu

SEQ ID NO: 67153 - RNA, 20 nt, Human
aucaucucaaagcugagguu

SEQ ID NO: 67154 - RNA, 22 nt, Human
aucaucugcacagauccuauuu

SEQ ID NO: 67155 - RNA, 22 nt, Human
aucaucuuaaaucuagaaugug

SEQ ID NO: 67156 - RNA, 22 nt, Human
aucaugcaauaaggugaggccu

SEQ ID NO: 67157 - RNA, 22 nt, Human
aucaugcagcaacaagcaaggc

SEQ ID NO: 67158 - RNA, 22 nt, Human
aucaugcagcuaauccaauuca

SEQ ID NO: 67159 - RNA, 22 nt, Human
aucaugcagguuucuccuuucu

SEQ ID NO: 67160 - RNA, 22 nt, Human
aucaugcaugguacucuugugc

SEQ ID NO: 67161 - RNA, 22 nt, Human
aucaugcauuguauugaguuga

SEQ ID NO: 67162 - RNA, 22 nt, Human
aucaugcuuggauuauguuugg

SEQ ID NO: 67163 - RNA, 22 nt, Human
aucauggaaagguucagcaagc

SEQ ID NO: 67164 - RNA, 22 nt, Human
aucauggaagccuaucuugaga

SEQ ID NO: 67165 - RNA, 22 nt, Human
aucaugugacuagguuuggcca

SEQ ID NO: 67166 - RNA, 22 nt, Human
aucauguguaauuucaagcuac

SEQ ID NO: 67167 - RNA, 22 nt, Human
aucauguuaaauauuucaaucu

SEQ ID NO: 67168 - RNA, 22 nt, Human
aucauucagccuaagcaaguac

SEQ ID NO: 67169 - RNA, 22 nt, Human
aucauucagugaccacuuccca

SEQ ID NO: 67170 - RNA, 22 nt, Human
aucauucugauggucaaugcua

SEQ ID NO: 67171 - RNA, 21 nt, Human
aucauucuggaaaauucaagc

SEQ ID NO: 67172 - RNA, 22 nt, Human
aucauuggaggcacugugcagu

SEQ ID NO: 67173 - RNA, 22 nt, Human
aucauuguaaauaaugcugcca

SEQ ID NO: 67174 - RNA, 22 nt, Human
aucauuuaugccccaauuagau

SEQ ID NO: 67175 - RNA, 22 nt, Human
auccaaacauguaccacacuaa

SEQ ID NO: 67176 - RNA, 22 nt, Human
auccaaagcccuaaguuaacug

SEQ ID NO: 67177 - RNA, 22 nt, Human
auccaaggcgcaagauggcgcu

SEQ ID NO: 67178 - RNA, 22 nt, Human
auccaauuacguuuuuugucau

SEQ ID NO: 67179 - RNA, 22 nt, Human
auccacagaaggaacuugaaag

SEQ ID NO: 67180 - RNA, 22 nt, Human
auccacuucacuggaauguagg

SEQ ID NO: 67181 - RNA, 22 nt, Human
auccacuuggcugguuguucua

SEQ ID NO: 67182 - RNA, 22 nt, Human
auccagcuuugucuggucuucg

SEQ ID NO: 67183 - RNA, 22 nt, Human
auccaggagggcugacuccuua

SEQ ID NO: 67184 - RNA, 22 nt, Human
auccaggcgaaugcagaaggcc

SEQ ID NO: 67185 - RNA, 22 nt, Human
auccaggcugcuuucuaugccc

SEQ ID NO: 67186 - RNA, 22 nt, Human
auccaguuaagaugaggucaua

SEQ ID NO: 67187 - RNA, 22 nt, Human
auccaugaagguacuucucagg

SEQ ID NO: 67188 - RNA, 22 nt, Human
auccaugacccucucaacaacc

SEQ ID NO: 67189 - RNA, 22 nt, Human
auccaugaucaauuuauuacua

SEQ ID NO: 67190 - RNA, 22 nt, Human
auccaugauugcccagaggugu

SEQ ID NO: 67191 - RNA, 22 nt, Human
auccauggaggacaagagcaau

SEQ ID NO: 67192 - RNA, 22 nt, Human
auccauuugccgugcuaugugc

SEQ ID NO: 67193 - RNA, 22 nt, Human
auccauuuuuucagaaugcucu

SEQ ID NO: 67194 - RNA, 19 nt, Human
aucccaaggagcugggacu

SEQ ID NO: 67195 - RNA, 22 nt, Human
aucccaccucaaucugaagcuc

SEQ ID NO: 67196 - RNA, 22 nt, Human
aucccagagaauaaugaucagg

SEQ ID NO: 67197 - RNA, 22 nt, Human
aucccauaggguuaucauaggg

SEQ ID NO: 67198 - RNA, 19 nt, Human
aucccaucugguuuuuccc

SEQ ID NO: 67199 - RNA, 22 nt, Human
aucccauuuuauaccauaagag

SEQ ID NO: 67200 - RNA, 22 nt, Human
auccccacugcugcugguguag

SEQ ID NO: 67201 - RNA, 22 nt, Human
auccccagaaaauaggugccua

SEQ ID NO: 67202 - RNA, 22 nt, Human
auccccaggggcauucaagcuu

SEQ ID NO: 67203 - RNA, 22 nt, Human
auccccuuaucccaggcugagc

SEQ ID NO: 67204 - RNA, 22 nt, Human
auccccuugugggcuggcagca

SEQ ID NO: 67205 - RNA, 22 nt, Human
aucccucagcagacagcaaaau

SEQ ID NO: 67206 - RNA, 22 nt, Human
aucccucagccaccuuugagga

SEQ ID NO: 67207 - RNA, 22 nt, Human
aucccucugcagcugguuccug

SEQ ID NO: 67208 - RNA, 22 nt, Human
aucccugcccucauggagcuua

SEQ ID NO: 67209 - RNA, 22 nt, Human
aucccuggccacgaagcugccc

SEQ ID NO: 67210 - RNA, 22 nt, Human
auccuaaagcagacagcagguu

SEQ ID NO: 67211 - RNA, 22 nt, Human
auccuacaaagcagggcuaugg

SEQ ID NO: 67212 - RNA, 18 nt, Human
auccuagaccauacacag

SEQ ID NO: 67213 - RNA, 21 nt, Human
auccuauuucugaaaaccugc

SEQ ID NO: 67214 - RNA, 22 nt, Human
auccucacaauaaaaucagccu

SEQ ID NO: 67215 - RNA, 22 nt, Human
auccucgucugcacaucaaagg

SEQ ID NO: 67216 - RNA, 18 nt, Human
auccucuagcuucucaga

SEQ ID NO: 67217 - RNA, 22 nt, Human
auccucucucccauaccagucu

SEQ ID NO: 67218 - RNA, 22 nt, Human
auccucucugugacagggaacg

SEQ ID NO: 67219 - RNA, 22 nt, Human
auccugaaaauugaauggaagg

SEQ ID NO: 67220 - RNA, 22 nt, Human
auccugaagcaugaaugucaaa

SEQ ID NO: 67221 - RNA, 22 nt, Human
auccugagcuacaccugcuccu

SEQ ID NO: 67222 - RNA, 22 nt, Human
auccuggcaagcagaggagaac

SEQ ID NO: 67223 - RNA, 22 nt, Human
auccuggcuuuaggucagaggc

SEQ ID NO: 67224 - RNA, 22 nt, Human
auccugggaaugggagggucau

SEQ ID NO: 67225 - RNA, 18 nt, Human
auccugggccagucuuuc

SEQ ID NO: 67226 - RNA, 22 nt, Human
auccugggccucagaggugugu

SEQ ID NO: 67227 - RNA, 22 nt, Human
auccugggcugcacccucagcc

SEQ ID NO: 67228 - RNA, 22 nt, Human
auccuggguaaguuccuuuuaa

SEQ ID NO: 67229 - RNA, 22 nt, Human
auccuguagucucacagcccca

SEQ ID NO: 67230 - RNA, 22 nt, Human
auccuguggggcggcugcaggg

SEQ ID NO: 67231 - RNA, 22 nt, Human
auccuguuagcaccuucaaacu

SEQ ID NO: 67232 - RNA, 22 nt, Human
auccuguuuuagauaagcuuau

SEQ ID NO: 67233 - RNA, 22 nt, Human
auccuucuaagagggacguaug

SEQ ID NO: 67234 - RNA, 22 nt, Human
auccuucuccaaaacuggcucc

SEQ ID NO: 67235 - RNA, 22 nt, Human
auccuucuucaaagagggaaaa

SEQ ID NO: 67236 - RNA, 22 nt, Human
auccuugacacacuccaguacu

SEQ ID NO: 67237 - RNA, 22 nt, Human
auccuuuauaagacuuguauuc

SEQ ID NO: 67238 - RNA, 22 nt, Human
aggcuuagacuaccuggucugu

SEQ ID NO: 67239 - RNA, 22 nt, Human
aggcuucaccagacucuuaauc

SEQ ID NO: 67240 - RNA, 22 nt, Human
aggcuucacucgacaugccaau

SEQ ID NO: 67241 - RNA, 22 nt, Human
aggcuucagcagcccucucuug

SEQ ID NO: 67242 - RNA, 22 nt, Human
aggcuucagccuagagcuggag

SEQ ID NO: 67243 - RNA, 22 nt, Human
aggcuucaggaagucuccuggg

SEQ ID NO: 67244 - RNA, 22 nt, Human
aggcuucagguuugcuuugcag

SEQ ID NO: 67245 - RNA, 22 nt, Human
aggcuucaguagggagcauguc

SEQ ID NO: 67246 - RNA, 18 nt, Human
aggcuucccaggcaggcc

SEQ ID NO: 67247 - RNA, 22 nt, Human
aggcuucccuuccucugggggu

SEQ ID NO: 67248 - RNA, 22 nt, Human
aggcuuccgaguagcugggacu

SEQ ID NO: 67249 - RNA, 23 nt, Human
aggcuuccuaucuuagagcuggg

SEQ ID NO: 67250 - RNA, 22 nt, Human
aggcuuccucgugccuuagaua

SEQ ID NO: 67251 - RNA, 22 nt, Human
aggcuucgcaagguuagagcug

SEQ ID NO: 67252 - RNA, 22 nt, Human
aggcuucucaauagguuugaag

SEQ ID NO: 67253 - RNA, 22 nt, Human
aggcuucuccuuccuaccuucc

SEQ ID NO: 67254 - RNA, 22 nt, Human
aggcuucuucucuauguacaag

SEQ ID NO: 67255 - RNA, 22 nt, Human
aggcuucuucugccugucuuug

SEQ ID NO: 67256 - RNA, 22 nt, Human
aggcuucuugagccccacaggc

SEQ ID NO: 67257 - RNA, 22 nt, Human
aggcuucuuuuagaggggaugg

SEQ ID NO: 67258 - RNA, 22 nt, Human
aggcuugacugcugauuuugcc

SEQ ID NO: 67259 - RNA, 22 nt, Human
aggcuugcacaugcacgcacgu

SEQ ID NO: 67260 - RNA, 22 nt, Human
aggcuugccacuuguuagucua

SEQ ID NO: 67261 - RNA, 19 nt, Human
aggcuuggaacagccuuau

SEQ ID NO: 67262 - RNA, 22 nt, Human
aggcuuggaaguggcagaacug

SEQ ID NO: 67263 - RNA, 22 nt, Human
aggcuuggcugcacgccucgcu

SEQ ID NO: 67264 - RNA, 22 nt, Human
agggacacgagguccugcuggg

SEQ ID NO: 67265 - RNA, 22 nt, Human
agggacacuugcuuucaggccc

SEQ ID NO: 67266 - RNA, 22 nt, Human
agggacagaugaaugacugagu

SEQ ID NO: 67267 - RNA, 17 nt, Human
agggacagcaguuuagg

SEQ ID NO: 67268 - RNA, 22 nt, Human
agggacaguuacaucaucagac

SEQ ID NO: 67269 - RNA, 22 nt, Human
agggacaucucacaaacaacuu

SEQ ID NO: 67270 - RNA, 22 nt, Human
agggaccagggguagcugagau

SEQ ID NO: 67271 - RNA, 22 nt, Human
agggaccugcucacugccuggc

SEQ ID NO: 67272 - RNA, 22 nt, Human
agggagacaaaagcagcugcca

SEQ ID NO: 67273 - RNA, 22 nt, Human
agggagacacaugaggaaguca

SEQ ID NO: 67274 - RNA, 22 nt, Human
agggagagaaguuauacaagau

SEQ ID NO: 67275 - RNA, 18 nt, Human
agggagagaccgcggguc

SEQ ID NO: 67276 - RNA, 22 nt, Human
agggagccaggaacgcaggucg

SEQ ID NO: 67277 - RNA, 22 nt, Human
agggagccuuccuggcuguggu

SEQ ID NO: 67278 - RNA, 23 nt, Human
agggagcuaaaaggcuggagcag

SEQ ID NO: 67279 - RNA, 22 nt, Human
agggagcuaggauccugaaggu

SEQ ID NO: 67280 - RNA, 22 nt, Human
agggagcucaguuggaagcggu

SEQ ID NO: 67281 - RNA, 22 nt, Human
agggagcucuaaguagagggac

SEQ ID NO: 67282 - RNA, 21 nt, Human
agggagcugcgucuugaaaga

SEQ ID NO: 67283 - RNA, 22 nt, Human
agggagcugcucugcuuccgug

SEQ ID NO: 67284 - RNA, 22 nt, Human
agggagcuuuuucaugugucua

SEQ ID NO: 67285 - RNA, 22 nt, Human
agggaggaaggauguuccaaag

SEQ ID NO: 67286 - RNA, 22 nt, Human
agggaggagaauggacuccuuc

SEQ ID NO: 67287 - RNA, 22 nt, Human
agggaggcauuagcuacugcga

SEQ ID NO: 67288 - RNA, 22 nt, Human
agggaguuagaaauccaggaua

SEQ ID NO: 67289 - RNA, 22 nt, Human
agggaucacgguggacuuggau

SEQ ID NO: 67290 - RNA, 18 nt, Human
agggaucaucacugcagc

SEQ ID NO: 67291 - RNA, 22 nt, Human
agggaugcugcuaaguggucua

SEQ ID NO: 67292 - RNA, 22 nt, Human
agggauggaucuuggcccugga

SEQ ID NO: 67293 - RNA, 22 nt, Human
agggaugguggaggaauuucaa

SEQ ID NO: 67294 - RNA, 22 nt, Human
agggauguaaauucuucuucuu

SEQ ID NO: 67295 - RNA, 22 nt, Human
agggaugugacauuacagaagc

SEQ ID NO: 67296 - RNA, 22 nt, Human
agggaugugcagcauccagaca

SEQ ID NO: 67297 - RNA, 22 nt, Human
agggauguggugggagagaaag

SEQ ID NO: 67298 - RNA, 22 nt, Human
agggauguugucaaggaugugg

SEQ ID NO: 67299 - RNA, 19 nt, Human
agggcacagggacagaagg

SEQ ID NO: 67300 - RNA, 22 nt, Human
agggcacaucugcugggaaugg

SEQ ID NO: 67301 - RNA, 22 nt, Human
agggcacuggcuugcaaacuca

SEQ ID NO: 67302 - RNA, 22 nt, Human
agggcacuucagucagacugag

SEQ ID NO: 67303 - RNA, 22 nt, Human
agggcagaaauauugauacugu

SEQ ID NO: 67304 - RNA, 22 nt, Human
agggcagaaaucgauuacaccu

SEQ ID NO: 67305 - RNA, 22 nt, Human
agggcagagacaugcuuccuga

SEQ ID NO: 67306 - RNA, 20 nt, Human
agggcagagggauuacaggc

SEQ ID NO: 67307 - RNA, 22 nt, Human
agggcagauggaacuuccccga

SEQ ID NO: 67308 - RNA, 21 nt, Human
agggcagauuagcuguaagag

SEQ ID NO: 67309 - RNA, 22 nt, Human
agggcagcaaugcagcugcugc

SEQ ID NO: 67310 - RNA, 22 nt, Human
agggcagcagcccauggcucug

SEQ ID NO: 67311 - RNA, 22 nt, Human
agggcagcagcggcccaggccu

SEQ ID NO: 67312 - RNA, 22 nt, Human
agggcagccucucagccuaggu

SEQ ID NO: 67313 - RNA, 22 nt, Human
agggcagcucucaccucuggcc

SEQ ID NO: 67314 - RNA, 22 nt, Human
agggccacaguggggccugaga

SEQ ID NO: 67315 - RNA, 22 nt, Human
agggccaccagggagucucagg

SEQ ID NO: 67316 - RNA, 16 nt, Human
agggccagaagcauca

SEQ ID NO: 67317 - RNA, 22 nt, Human
agggccagaaucccucagucua

SEQ ID NO: 67318 - RNA, 21 nt, Human
agggccagaucaccaaggagc

SEQ ID NO: 67319 - RNA, 22 nt, Human
agggccagcccauaaugccaaa

SEQ ID NO: 67320 - RNA, 22 nt, Human
agggccagcuagagcccucgcc

SEQ ID NO: 67321 - RNA, 22 nt, Human
agggccaguauuaagguaauua

SEQ ID NO: 67322 - RNA, 22 nt, Human
agggccaguggguugaaaggca

SEQ ID NO: 67323 - RNA, 22 nt, Human
agggcccacaguuccuauggcc

SEQ ID NO: 67324 - RNA, 22 nt, Human
agggcccauagaucgucagcuu

SEQ ID NO: 67325 - RNA, 22 nt, Human
agggcccaugugggagcacuug

SEQ ID NO: 67326 - RNA, 22 nt, Human
agggcccuccccgcucagggca

SEQ ID NO: 67327 - RNA, 22 nt, Human
agggccucgggcucaguggguc

SEQ ID NO: 67328 - RNA, 21 nt, Human
agggccucucauuugugccag

SEQ ID NO: 67329 - RNA, 22 nt, Human
agggccugagcucuccuccagu

SEQ ID NO: 67330 - RNA, 22 nt, Human
agggccugagcuggcugaccuc

SEQ ID NO: 67331 - RNA, 23 nt, Human
agggccugauggcucccgcuggc

SEQ ID NO: 67332 - RNA, 19 nt, Human
agggccugcagcucaagcu

SEQ ID NO: 67333 - RNA, 22 nt, Human
agggccugggucuguacuccuc

SEQ ID NO: 67334 - RNA, 22 nt, Human
agggccugucagcgguguccug

SEQ ID NO: 67335 - RNA, 22 nt, Human
agggccuguccgcucccgcccg

SEQ ID NO: 67336 - RNA, 22 nt, Human
agggccugugcugaguagacga

SEQ ID NO: 67337 - RNA, 22 nt, Human
agggcgacaauggagagcguuu

SEQ ID NO: 67338 - RNA, 19 nt, Human
agggcgugguggcacaugu

SEQ ID NO: 67339 - RNA, 22 nt, Human
agggcucaagaaaguguaccuc

SEQ ID NO: 67340 - RNA, 22 nt, Human
agggcucacugggaggcuauaa

SEQ ID NO: 67341 - RNA, 22 nt, Human
agggcucagagcaaaagggcac

SEQ ID NO: 67342 - RNA, 22 nt, Human
agggcucagcaucucauucugu

SEQ ID NO: 67343 - RNA, 22 nt, Human
agggcucagccagccugugugc

SEQ ID NO: 67344 - RNA, 22 nt, Human
agggcucaucugagacugacau

SEQ ID NO: 67345 - RNA, 22 nt, Human
agggcucauugacauggaaaag

SEQ ID NO: 67346 - RNA, 22 nt, Human
agggcuccuaugaugcucugcc

SEQ ID NO: 67347 - RNA, 22 nt, Human
augacauaagugaaaaacauca

SEQ ID NO: 67348 - RNA, 22 nt, Human
augaccaagaguccaggucaag

SEQ ID NO: 67349 - RNA, 19 nt, Human
augacucuuauugucugaa

SEQ ID NO: 67350 - RNA, 22 nt, Human
augacugcucugggcucccaug

SEQ ID NO: 67351 - RNA, 22 nt, Human
augacuuaaucauacuugcauu

SEQ ID NO: 67352 - RNA, 22 nt, Human
augacuuauuacaagucauauu

SEQ ID NO: 67353 - RNA, 22 nt, Human
augacuucaccucugugaagca

SEQ ID NO: 67354 - RNA, 22 nt, Human
augacuuuccuggcaaaaguug

SEQ ID NO: 67355 - RNA, 22 nt, Human
augacuuuguuguuuuccagcg

SEQ ID NO: 67356 - RNA, 22 nt, Human
augagaaaauucauuccaucca

SEQ ID NO: 67357 - RNA, 22 nt, Human
augagaaggacauaaauuauag

SEQ ID NO: 67358 - RNA, 22 nt, Human
augagacaagagucuaaauuca

SEQ ID NO: 67359 - RNA, 22 nt, Human
augagacaggacuguaugcagg

SEQ ID NO: 67360 - RNA, 22 nt, Human
augagagcucuaugaucuguuu

SEQ ID NO: 67361 - RNA, 22 nt, Human
augagagcugaugacuuuacaa

SEQ ID NO: 67362 - RNA, 22 nt, Human
augagagguuucgucagaggaa

SEQ ID NO: 67363 - RNA, 22 nt, Human
augagauaggaacaaacuuaca

SEQ ID NO: 67364 - RNA, 22 nt, Human
augagaugugucuaauggaacc

SEQ ID NO: 67365 - RNA, 22 nt, Human
augagauuuuaaaacuucacuu

SEQ ID NO: 67366 - RNA, 22 nt, Human
augagcaaggcuuugugauagu

SEQ ID NO: 67367 - RNA, 22 nt, Human
augagcaauuaggaagaaaaca

SEQ ID NO: 67368 - RNA, 22 nt, Human
augagcagcauugcuccucuua

SEQ ID NO: 67369 - RNA, 22 nt, Human
augagcaguuuuuaaguagcaa

SEQ ID NO: 67370 - RNA, 22 nt, Human
augagcuagaaaaccaugugga

SEQ ID NO: 67371 - RNA, 22 nt, Human
augaggcaaggaucagguaagg

SEQ ID NO: 67372 - RNA, 22 nt, Human
augaggcaauagaauauugaau

SEQ ID NO: 67373 - RNA, 22 nt, Human
augaggcacagagauguuaaug

SEQ ID NO: 67374 - RNA, 22 nt, Human
augaggcacaucacagccaaug

SEQ ID NO: 67375 - RNA, 22 nt, Human
augaggcagcccuucccuucuc

SEQ ID NO: 67376 - RNA, 22 nt, Human
augaggcaggauuaagcuauca

SEQ ID NO: 67377 - RNA, 22 nt, Human
augaggcagguggaggcugcca

SEQ ID NO: 67378 - RNA, 21 nt, Human
augaggcaugagaggguuucu

SEQ ID NO: 67379 - RNA, 23 nt, Human
augaggcauuaaacaggcuuuuu

SEQ ID NO: 67380 - RNA, 22 nt, Human
augaggccaccuucuacauuuc

SEQ ID NO: 67381 - RNA, 22 nt, Human
augaggcuaugaauggggagau

SEQ ID NO: 67382 - RNA, 22 nt, Human
augagggcagcuauguaagugu

SEQ ID NO: 67383 - RNA, 22 nt, Human
augagguagcuguggcuggcug

SEQ ID NO: 67384 - RNA, 22 nt, Human
augagguaguauuagaaggaga

SEQ ID NO: 67385 - RNA, 22 nt, Human
augagguauuagcaguaacuga

SEQ ID NO: 67386 - RNA, 23 nt, Human
augaggucagccauaagacggaa

SEQ ID NO: 67387 - RNA, 22 nt, Human
augaggugauggacauauuaac

SEQ ID NO: 67388 - RNA, 22 nt, Human
augagguggucuucaguagguc

SEQ ID NO: 67389 - RNA, 22 nt, Human
augagguuuagguuccuccucu

SEQ ID NO: 67390 - RNA, 19 nt, Human
augaguacacuuguacauu

SEQ ID NO: 67391 - RNA, 22 nt, Human
augagugcaacagaucagcaug

SEQ ID NO: 67392 - RNA, 22 nt, Human
augagugcuuagagaguaaucc

SEQ ID NO: 67393 - RNA, 22 nt, Human
augaguguuuagaaaacacugg

SEQ ID NO: 67394 - RNA, 22 nt, Human
augaguuaggggccugagugga

SEQ ID NO: 67395 - RNA, 22 nt, Human
augaguucaauuguuucaguca

SEQ ID NO: 67396 - RNA, 22 nt, Human
augauaagaacacaguaugggg

SEQ ID NO: 67397 - RNA, 22 nt, Human
augauacaucuuguuuauuuca

SEQ ID NO: 67398 - RNA, 22 nt, Human
augauauagagaguagauuaaa

SEQ ID NO: 67399 - RNA, 22 nt, Human
augauauauguguugagcuugc

SEQ ID NO: 67400 - RNA, 22 nt, Human
augaucaagaauuuuguauucc

SEQ ID NO: 67401 - RNA, 22 nt, Human
augaugaaaugauagguuuguu

SEQ ID NO: 67402 - RNA, 22 nt, Human
augaugcaccauuauaagaguu

SEQ ID NO: 67403 - RNA, 22 nt, Human
augaugcuguuuaucauauacu

SEQ ID NO: 67404 - RNA, 22 nt, Human
augaugguggguaauguguaaa

SEQ ID NO: 67405 - RNA, 22 nt, Human
augaugguuguccuaggugcau

SEQ ID NO: 67406 - RNA, 22 nt, Human
augauguaccacuuucucaguu

SEQ ID NO: 67407 - RNA, 22 nt, Human
augauguacuaguuaaauauua

SEQ ID NO: 67408 - RNA, 22 nt, Human
augauguagacaaaaauaugcu

SEQ ID NO: 67409 - RNA, 22 nt, Human
augaugugugcugaucaagcuu

SEQ ID NO: 67410 - RNA, 22 nt, Human
augauguuaccaguacuuagag

SEQ ID NO: 67411 - RNA, 22 nt, Human
augauguuauuuucagaaacau

SEQ ID NO: 67412 - RNA, 22 nt, Human
augauucaagaaaauaggaugg

SEQ ID NO: 67413 - RNA, 22 nt, Human
augauucaggauugaaccauuu

SEQ ID NO: 67414 - RNA, 22 nt, Human
augauucucugcuacucuaaau

SEQ ID NO: 67415 - RNA, 22 nt, Human
augauucuggcaaauuuauuau

SEQ ID NO: 67416 - RNA, 22 nt, Human
augauugguggucagcaguaug

SEQ ID NO: 67417 - RNA, 22 nt, Human
augauuuucugauaaagaacug

SEQ ID NO: 67418 - RNA, 22 nt, Human
augauuuuuucuaacacagucg

SEQ ID NO: 67419 - RNA, 22 nt, Human
augcaaaaguaacugugauuuu

SEQ ID NO: 67420 - RNA, 22 nt, Human
augcaaacauguuuccucuaag

SEQ ID NO: 67421 - RNA, 20 nt, Human
augcaaacccugcuuugugg

SEQ ID NO: 67422 - RNA, 22 nt, Human
augcaaauaagugcaggcgugg

SEQ ID NO: 67423 - RNA, 19 nt, Human
augcaaauagauuuggaau

SEQ ID NO: 67424 - RNA, 22 nt, Human
augcaaauguuuaaguuacuau

SEQ ID NO: 67425 - RNA, 22 nt, Human
augcaaauuaacauauaguaga

SEQ ID NO: 67426 - RNA, 22 nt, Human
augcaacacauuugaugagcga

SEQ ID NO: 67427 - RNA, 22 nt, Human
augcaacaccccuauggaugga

SEQ ID NO: 67428 - RNA, 22 nt, Human
augcaacaggucagccaggaag

SEQ ID NO: 67429 - RNA, 22 nt, Human
augcaagaaacagagacgcuga

SEQ ID NO: 67430 - RNA, 22 nt, Human
augcaagagcaauaugguaugc

SEQ ID NO: 67431 - RNA, 22 nt, Human
augcaagauguauagaagacuu

SEQ ID NO: 67432 - RNA, 22 nt, Human
augcaagauucagcaggaagau

SEQ ID NO: 67433 - RNA, 22 nt, Human
augcaagcaacauuuugcacau

SEQ ID NO: 67434 - RNA, 18 nt, Human
augcaagcuauggauuug

SEQ ID NO: 67435 - RNA, 22 nt, Human
augcaauguuacagaauguacu

SEQ ID NO: 67436 - RNA, 22 nt, Human
augcacaacaguggcugccuug

SEQ ID NO: 67437 - RNA, 22 nt, Human
augcacaauguuuugauuugag

SEQ ID NO: 67438 - RNA, 22 nt, Human
augcacacacauuaugucugug

SEQ ID NO: 67439 - RNA, 22 nt, Human
augcacagauccccaggacccu

SEQ ID NO: 67440 - RNA, 22 nt, Human
augcacagauccuggcacuuag

SEQ ID NO: 67441 - RNA, 22 nt, Human
augcacaggacagccucuacuc

SEQ ID NO: 67442 - RNA, 22 nt, Human
augcacaggaccacacauaaug

SEQ ID NO: 67443 - RNA, 22 nt, Human
augcacaguaaugagcugguug

SEQ ID NO: 67444 - RNA, 22 nt, Human
augcacaguacaaacuggaaac

SEQ ID NO: 67445 - RNA, 22 nt, Human
augcacaguauguagggucuau

SEQ ID NO: 67446 - RNA, 22 nt, Human
augcacauguaucuauauacaa

SEQ ID NO: 67447 - RNA, 22 nt, Human
augcacauguggcuuuauguau

SEQ ID NO: 67448 - RNA, 22 nt, Human
augcaccacaucacuucugcuc

SEQ ID NO: 67449 - RNA, 22 nt, Human
augcacccauguacauacacau

SEQ ID NO: 67450 - RNA, 22 nt, Human
augcaccccagaagcugcagug

SEQ ID NO: 67451 - RNA, 22 nt, Human
augcaccugaacuccaucagcu

SEQ ID NO: 67452 - RNA, 22 nt, Human
augcacgccccacacuggugug

SEQ ID NO: 67453 - RNA, 22 nt, Human
augcacuuaaauaacauaacuu

SEQ ID NO: 67454 - RNA, 22 nt, Human
augcagaaagcggcaaacaggu

SEQ ID NO: 67455 - RNA, 22 nt, Human
augcagaagacugaaaagcuga

SEQ ID NO: 67456 - RNA, 22 nt, Human
augcugggaaguccuaaccaca

SEQ ID NO: 67457 - RNA, 22 nt, Human
augcugggacguacuuguucau

SEQ ID NO: 67458 - RNA, 22 nt, Human
augcuggucugcagaguuggga

SEQ ID NO: 67459 - RNA, 22 nt, Human
augcugguugcuaagcagcgau

SEQ ID NO: 67460 - RNA, 22 nt, Human
augcugucaguauuaugugcag

SEQ ID NO: 67461 - RNA, 22 nt, Human
augcuguccacucuugguguuu

SEQ ID NO: 67462 - RNA, 22 nt, Human
augcugugguagacagcauucc

SEQ ID NO: 67463 - RNA, 22 nt, Human
augcuguguggucaaguuaauu

SEQ ID NO: 67464 - RNA, 22 nt, Human
augcuguguuugagaaccuagg

SEQ ID NO: 67465 - RNA, 22 nt, Human
augcuuaaccuugguguacaau

SEQ ID NO: 67466 - RNA, 22 nt, Human
augcuuaagcucaguuauauau

SEQ ID NO: 67467 - RNA, 20 nt, Human
augcuuaaguguucauuauu

SEQ ID NO: 67468 - RNA, 22 nt, Human
augcuuccaauauucucccuuu

SEQ ID NO: 67469 - RNA, 22 nt, Human
augcuuccuuaccagaagauga

SEQ ID NO: 67470 - RNA, 18 nt, Human
augcuucugauagaagca

SEQ ID NO: 67471 - RNA, 22 nt, Human
augcuucugguauaagaaaaau

SEQ ID NO: 67472 - RNA, 22 nt, Human
augcuucuguugcuuaggaggu

SEQ ID NO: 67473 - RNA, 22 nt, Human
augcuucuugagauagaaacac

SEQ ID NO: 67474 - RNA, 22 nt, Human
augcuugaaaaccccaugaaua

SEQ ID NO: 67475 - RNA, 22 nt, Human
augcuugguuccuacuucuggc

SEQ ID NO: 67476 - RNA, 22 nt, Human
augcuuguacuaaaaaaauauu

SEQ ID NO: 67477 - RNA, 22 nt, Human
augcuuuacccacaccaggaug

SEQ ID NO: 67478 - RNA, 22 nt, Human
augcuuuauuauuuugcaggga

SEQ ID NO: 67479 - RNA, 22 nt, Human
augcuuuauuggagacagucau

SEQ ID NO: 67480 - RNA, 22 nt, Human
augcuuugauuugguuucucua

SEQ ID NO: 67481 - RNA, 22 nt, Human
augcuuuguuuaaagauuuuca

SEQ ID NO: 67482 - RNA, 22 nt, Human
augcuuuuccaggagaaauaua

SEQ ID NO: 67483 - RNA, 22 nt, Human
augcuuuuccuaaaaugaugcc

SEQ ID NO: 67484 - RNA, 22 nt, Human
augcuuuuuaaacuuaauugga

SEQ ID NO: 67485 - RNA, 21 nt, Human
auggaaaaacagguagagcau

SEQ ID NO: 67486 - RNA, 22 nt, Human
auggaaaagggucuuucauuuc

SEQ ID NO: 67487 - RNA, 22 nt, Human
auggaaagugcauggaagucau

SEQ ID NO: 67488 - RNA, 22 nt, Human
auggaaauacacaagagguuuc

SEQ ID NO: 67489 - RNA, 22 nt, Human
auggaaauaucuuuagagcuua

SEQ ID NO: 67490 - RNA, 22 nt, Human
auggaaauguuaagucaguccg

SEQ ID NO: 67491 - RNA, 22 nt, Human
auggaacagacagcugagacaa

SEQ ID NO: 67492 - RNA, 22 nt, Human
auggaagcagaccggaggaaua

SEQ ID NO: 67493 - RNA, 20 nt, Human
auggaagcugcucuucuccu

SEQ ID NO: 67494 - RNA, 19 nt, Human
auggaagcugggaucaaug

SEQ ID NO: 67495 - RNA, 22 nt, Human
auggaauauagucuuauaucuc

SEQ ID NO: 67496 - RNA, 22 nt, Human
auggaauggcucccugccccag

SEQ ID NO: 67497 - RNA, 22 nt, Human
aggcuccaccagucaggugcau

SEQ ID NO: 67498 - RNA, 22 nt, Human
aggcuccacccuacagagcucc

SEQ ID NO: 67499 - RNA, 22 nt, Human
aggcuccaggcaauguuucuga

SEQ ID NO: 67500 - RNA, 22 nt, Human
aggcuccaggcccuucaccagc

SEQ ID NO: 67501 - RNA, 22 nt, Human
aggcuccagggcugugugggag

SEQ ID NO: 67502 - RNA, 22 nt, Human
aggcuccugagaggcagaggcu

SEQ ID NO: 67503 - RNA, 22 nt, Human
aggcuccugauccuggggucug

SEQ ID NO: 67504 - RNA, 22 nt, Human
aggcucuccagagagcugcuuu

SEQ ID NO: 67505 - RNA, 22 nt, Human
aggcucugaagcaacccuuuga

SEQ ID NO: 67506 - RNA, 22 nt, Human
aggcucugacccaugggaccca

SEQ ID NO: 67507 - RNA, 19 nt, Human
aggcucugagcuccuggag

SEQ ID NO: 67508 - RNA, 22 nt, Human
aggcucugaugcaagcccaggg

SEQ ID NO: 67509 - RNA, 22 nt, Human
aggcucugucaggcggagcagc

SEQ ID NO: 67510 - RNA, 22 nt, Human
aggcucuucuuuuauuaacuga

SEQ ID NO: 67511 - RNA, 22 nt, Human
aggcugagacugugcauuagug

SEQ ID NO: 67512 - RNA, 22 nt, Human
aggcugagauagguggaucauu

SEQ ID NO: 67513 - RNA, 22 nt, Human
aggcugagcggggucccagagc

SEQ ID NO: 67514 - RNA, 22 nt, Human
aggcugagcugaccugguuugg

SEQ ID NO: 67515 - RNA, 22 nt, Human
aggcugaggcagguggaucacu

SEQ ID NO: 67516 - RNA, 22 nt, Human
aggcugaggcggguagaucacc

SEQ ID NO: 67517 - RNA, 20 nt, Human
aggcugccaggucucacauc

SEQ ID NO: 67518 - RNA, 19 nt, Human
aggcugcccagucucugcc

SEQ ID NO: 67519 - RNA, 20 nt, Human
aggcugccuaaggcucugca

SEQ ID NO: 67520 - RNA, 19 nt, Human
aggcugccucacccucccu

SEQ ID NO: 67521 - RNA, 22 nt, Human
aggcugccucuuuugagagggu

SEQ ID NO: 67522 - RNA, 22 nt, Human
aggcugccuguuccaaucuccu

SEQ ID NO: 67523 - RNA, 22 nt, Human
aggcugcucugcgaagucagcu

SEQ ID NO: 67524 - RNA, 17 nt, Human
aggcugcugggccaggg

SEQ ID NO: 67525 - RNA, 23 nt, Human
aggcugcuuacugguaucagagc

SEQ ID NO: 67526 - RNA, 22 nt, Human
aggcugcuucagcugcagggag

SEQ ID NO: 67527 - RNA, 22 nt, Human
aggcuggcaaggcagaugugug

SEQ ID NO: 67528 - RNA, 17 nt, Human
aggcuggccuucacagu

SEQ ID NO: 67529 - RNA, 22 nt, Human
aggcuggcgacaucuggcgggc

SEQ ID NO: 67530 - RNA, 22 nt, Human
aggcuggcuuggcucuccugug

SEQ ID NO: 67531 - RNA, 22 nt, Human
aggcugggaaaccugaaguugu

SEQ ID NO: 67532 - RNA, 22 nt, Human
aggcugggcaccguuuugaucc

SEQ ID NO: 67533 - RNA, 22 nt, Human
aggcuggggaauugaauuugcu

SEQ ID NO: 67534 - RNA, 22 nt, Human
aggcugguaguauuuagucaca

SEQ ID NO: 67535 - RNA, 22 nt, Human
aggcuggucuguuggcauuuuu

SEQ ID NO: 67536 - RNA, 22 nt, Human
aggcuggugauuagaagcagcc

SEQ ID NO: 67537 - RNA, 22 nt, Human
aggcuggugccugcagugaauc

SEQ ID NO: 67538 - RNA, 22 nt, Human
aggcuguagaucuagacaugua

SEQ ID NO: 67539 - RNA, 22 nt, Human
aggcuguauguuuccauuugaa

SEQ ID NO: 67540 - RNA, 22 nt, Human
aggcuguccaagguggcgaagu

SEQ ID NO: 67541 - RNA, 22 nt, Human
aggcugucugaccccagagccc

SEQ ID NO: 67542 - RNA, 22 nt, Human
aggcugugaaauguggcaagga

SEQ ID NO: 67543 - RNA, 22 nt, Human
aggcugugacuacgcagggaag

SEQ ID NO: 67544 - RNA, 22 nt, Human
aggcugugagagguggcuccca

SEQ ID NO: 67545 - RNA, 22 nt, Human
aggcugugagcaagaacaccua

SEQ ID NO: 67546 - RNA, 22 nt, Human
aggcugugaugagccucaugga

SEQ ID NO: 67547 - RNA, 22 nt, Human
aggcugugcacagggcaccugc

SEQ ID NO: 67548 - RNA, 22 nt, Human
aggcugugcauuuuggagggcc

SEQ ID NO: 67549 - RNA, 22 nt, Human
aggcugugcucagccaauggga

SEQ ID NO: 67550 - RNA, 22 nt, Human
aggcugugggugauuuacugug

SEQ ID NO: 67551 - RNA, 22 nt, Human
aggcuguggugaugauuggguc

SEQ ID NO: 67552 - RNA, 22 nt, Human
aggcugugugcuccuuaugaga

SEQ ID NO: 67553 - RNA, 22 nt, Human
aggcuguguggucaugguggcu

SEQ ID NO: 67554 - RNA, 22 nt, Human
aggcuguguuuaagugguaaug

SEQ ID NO: 67555 - RNA, 22 nt, Human
aggcuguguuuccccuggagcu

SEQ ID NO: 67556 - RNA, 20 nt, Human
aggcuguugacggcugccuc

SEQ ID NO: 67557 - RNA, 22 nt, Human
aggcuguugcaugccacagaua

SEQ ID NO: 67558 - RNA, 22 nt, Human
aggcuuaaaugcucauaucagu

SEQ ID NO: 67559 - RNA, 22 nt, Human
aggcuuaacuuaacuuuagagc

SEQ ID NO: 67560 - RNA, 22 nt, Human
aggcuucaaggacagcagccac

SEQ ID NO: 67561 - RNA, 22 nt, Human
aggcuucaauuccuuacccagu

SEQ ID NO: 67562 - RNA, 22 nt, Human
aggcuucagaggaagugcggcc

SEQ ID NO: 67563 - RNA, 22 nt, Human
aggcuucaggaaauauacauuu

SEQ ID NO: 67564 - RNA, 22 nt, Human
aggcuucaguuguaccuucuug

SEQ ID NO: 67565 - RNA, 22 nt, Human
aggguccaguaacagaugccag

SEQ ID NO: 67566 - RNA, 22 nt, Human
agggucccgaaggagacagcaa

SEQ ID NO: 67567 - RNA, 22 nt, Human
aggguccuaagccucagauaag

SEQ ID NO: 67568 - RNA, 22 nt, Human
aggguccugagccuggggcgca

SEQ ID NO: 67569 - RNA, 22 nt, Human
aggguccugggugcaguugcuu

SEQ ID NO: 67570 - RNA, 22 nt, Human
agggucucuugccaugccucag

SEQ ID NO: 67571 - RNA, 22 nt, Human
agggucugaccaccaguaggga

SEQ ID NO: 67572 - RNA, 22 nt, Human
agggucuucccaccauuccugc

SEQ ID NO: 67573 - RNA, 22 nt, Human
agggugagggucuggccuugag

SEQ ID NO: 67574 - RNA, 22 nt, Human
agggugcagaaggagccuagga

SEQ ID NO: 67575 - RNA, 22 nt, Human
agggugcagggacaggugugca

SEQ ID NO: 67576 - RNA, 22 nt, Human
agggugcagguguggagucuag

SEQ ID NO: 67577 - RNA, 22 nt, Human
agggugcccaccgcuucugccc

SEQ ID NO: 67578 - RNA, 22 nt, Human
agggugcugccggacagguggg

SEQ ID NO: 67579 - RNA, 19 nt, Human
aggguggcaaaggagggug

SEQ ID NO: 67580 - RNA, 22 nt, Human
aggguggcaccuggaagggaug

SEQ ID NO: 67581 - RNA, 21 nt, Human
aggguggcucugggucagaac

SEQ ID NO: 67582 - RNA, 22 nt, Human
aggguggcuuaauuccaaaggg

SEQ ID NO: 67583 - RNA, 22 nt, Human
agggugggcuagacucuucccc

SEQ ID NO: 67584 - RNA, 22 nt, Human
agggugguauuuaacaacugga

SEQ ID NO: 67585 - RNA, 22 nt, Human
aggguugaagucugguccucau

SEQ ID NO: 67586 - RNA, 22 nt, Human
aggguugcauuuuuagaggcuc

SEQ ID NO: 67587 - RNA, 23 nt, Human
aggguugugugcuucaugaucau

SEQ ID NO: 67588 - RNA, 19 nt, Human
aggguuucuugacuuugcu

SEQ ID NO: 67589 - RNA, 22 nt, Human
agguaaaauagauaguauuucu

SEQ ID NO: 67590 - RNA, 22 nt, Human
agguaaauauaaaucuuacucu

SEQ ID NO: 67591 - RNA, 22 nt, Human
agguaacagcuucagcuucaga

SEQ ID NO: 67592 - RNA, 22 nt, Human
agguaacuguggcuagguaacu

SEQ ID NO: 67593 - RNA, 22 nt, Human
agguaagaauagaggauugggg

SEQ ID NO: 67594 - RNA, 20 nt, Human
agguaaugggagaaaauguu

SEQ ID NO: 67595 - RNA, 22 nt, Human
agguacaggagguuggggcuac

SEQ ID NO: 67596 - RNA, 22 nt, Human
agguacauuugauaaaaauagc

SEQ ID NO: 67597 - RNA, 21 nt, Human
agguacuaaugaaaagugauu

SEQ ID NO: 67598 - RNA, 22 nt, Human
agguagaggccuccaggcagca

SEQ ID NO: 67599 - RNA, 22 nt, Human
agguagcgcaauuuccugggac

SEQ ID NO: 67600 - RNA, 22 nt, Human
agguagcuauccagacgcugaa

SEQ ID NO: 67601 - RNA, 19 nt, Human
agguagcucagacucaaag

SEQ ID NO: 67602 - RNA, 22 nt, Human
agguaggaaagucuccuuguau

SEQ ID NO: 67603 - RNA, 22 nt, Human
agguaggaguugauggauguuc

SEQ ID NO: 67604 - RNA, 22 nt, Human
agguaggauagauaggaagacc

SEQ ID NO: 67605 - RNA, 22 nt, Human
agguagggaagaaggcaugaaa

SEQ ID NO: 67606 - RNA, 22 nt, Human
agguagggcuaggcugcgucug

SEQ ID NO: 67607 - RNA, 23 nt, Human
agguagguuauugcugcuaccug

SEQ ID NO: 67608 - RNA, 22 nt, Human
agguaguguagcugagugggau

SEQ ID NO: 67609 - RNA, 17 nt, Human
agguauaaaaugguagc

SEQ ID NO: 67610 - RNA, 22 nt, Human
agguauaacuuuaugcauggaa

SEQ ID NO: 67611 - RNA, 20 nt, Human
agguauaagaaaugugauuu

SEQ ID NO: 67612 - RNA, 18 nt, Human
agguauaugaaucucuuu

SEQ ID NO: 67613 - RNA, 22 nt, Human
agguauaugcuauuacuucugc

SEQ ID NO: 67614 - RNA, 22 nt, Human
agguauauguucauguaugugu

SEQ ID NO: 67615 - RNA, 22 nt, Human
agguauauuuuguauauacucu

SEQ ID NO: 67616 - RNA, 22 nt, Human
agguaucaacagcagagucuga

SEQ ID NO: 67617 - RNA, 22 nt, Human
agguaugagauaaaucaaugaa

SEQ ID NO: 67618 - RNA, 22 nt, Human
agguauuaugcugcugaaugcu

SEQ ID NO: 67619 - RNA, 22 nt, Human
agguauuauuagcaucucuauu

SEQ ID NO: 67620 - RNA, 22 nt, Human
agguauucagaugaagugcuga

SEQ ID NO: 67621 - RNA, 22 nt, Human
agguauuucaaagcccacuucc

SEQ ID NO: 67622 - RNA, 22 nt, Human
aggucaaaagcaaggccagguu

SEQ ID NO: 67623 - RNA, 22 nt, Human
aggucaaaaucaggcagggaag

SEQ ID NO: 67624 - RNA, 22 nt, Human
aggucaaaaugcuuuucagguc

SEQ ID NO: 67625 - RNA, 22 nt, Human
aggucaaagaaccuagcuauag

SEQ ID NO: 67626 - RNA, 21 nt, Human
aggucaaaggcauccaugagg

SEQ ID NO: 67627 - RNA, 22 nt, Human
aggucagcaugcuccucucugu

SEQ ID NO: 67628 - RNA, 22 nt, Human
aggucagcccucucugggcagg

SEQ ID NO: 67629 - RNA, 22 nt, Human
aggucaggguauucacgucugu

SEQ ID NO: 67630 - RNA, 22 nt, Human
aggucauugaaguuauuuucuu

SEQ ID NO: 67631 - RNA, 22 nt, Human
agguccaaauguugagacugau

SEQ ID NO: 67632 - RNA, 21 nt, Human
aggucccagguuugggcagca

SEQ ID NO: 67633 - RNA, 22 nt, Human
aggucccagucugugaugacuc

SEQ ID NO: 67634 - RNA, 22 nt, Human
agguccugaugaucucugagag

SEQ ID NO: 67635 - RNA, 22 nt, Human
agguccuggucuugagucuuaa

SEQ ID NO: 67636 - RNA, 22 nt, Human
agguccugugguuuggguaaaa

SEQ ID NO: 67637 - RNA, 22 nt, Human
agguccuguuucuucccugggg

SEQ ID NO: 67638 - RNA, 19 nt, Human
agguccuuggcuggaaguu

SEQ ID NO: 67639 - RNA, 22 nt, Human
aggucgaguuucggggcuacuu

SEQ ID NO: 67640 - RNA, 22 nt, Human
aggucuaacugauagaauucau

SEQ ID NO: 67641 - RNA, 22 nt, Human
aggucuaggagucugaaaguau

SEQ ID NO: 67642 - RNA, 22 nt, Human
aggucucaaacuggcacccugu

SEQ ID NO: 67643 - RNA, 22 nt, Human
aggucucaaucucaggugguca

SEQ ID NO: 67644 - RNA, 22 nt, Human
aggucucacuuuguggaaguga

SEQ ID NO: 67645 - RNA, 22 nt, Human
aggucucccaagggccagggag

SEQ ID NO: 67646 - RNA, 22 nt, Human
aggucugagcucagggccuggc

SEQ ID NO: 67647 - RNA, 22 nt, Human
aggucugagcuccuuccucuga

SEQ ID NO: 67648 - RNA, 22 nt, Human
aggucugauauuuguuguauga

SEQ ID NO: 67649 - RNA, 20 nt, Human
aggucugauuccagaaucag

SEQ ID NO: 67650 - RNA, 22 nt, Human
aggucuggagugggaucugaga

SEQ ID NO: 67651 - RNA, 22 nt, Human
aggucugggaguucauucccug

SEQ ID NO: 67652 - RNA, 22 nt, Human
aggucugggcaccacuggcugc

SEQ ID NO: 67653 - RNA, 22 nt, Human
aggucuuaggagcauggugcug

SEQ ID NO: 67654 - RNA, 22 nt, Human
aggugagaaaacgaggguugca

SEQ ID NO: 67655 - RNA, 22 nt, Human
aggugaggauagguggccaagg

SEQ ID NO: 67656 - RNA, 22 nt, Human
aggugagugugacugcaagaga

SEQ ID NO: 67657 - RNA, 22 nt, Human
aggugaguugguaggaaguuug

SEQ ID NO: 67658 - RNA, 22 nt, Human
aggugauuuucuccuuacgauu

SEQ ID NO: 67659 - RNA, 20 nt, Human
aggugcaagcaguaaauugc

SEQ ID NO: 67660 - RNA, 22 nt, Human
aggugcagcugacaccaugugg

SEQ ID NO: 67661 - RNA, 22 nt, Human
aggugcaguggcucaugccugu

SEQ ID NO: 67662 - RNA, 22 nt, Human
aggugccaccucuggugcuguc

SEQ ID NO: 67663 - RNA, 17 nt, Human
aggugccagugauauac

SEQ ID NO: 67664 - RNA, 22 nt, Human
aggugcccaugagcuccauggc

SEQ ID NO: 67665 - RNA, 22 nt, Human
aggugccugucgucucugguua

SEQ ID NO: 67666 - RNA, 22 nt, Human
aggugcuggaguagaagaaaaa

SEQ ID NO: 67667 - RNA, 22 nt, Human
aggugcugggcagcagucauug

SEQ ID NO: 67668 - RNA, 22 nt, Human
aggugcuguuggcagcgggcag

SEQ ID NO: 67669 - RNA, 22 nt, Human
aggugcuugguaaauauuuuag

SEQ ID NO: 67670 - RNA, 22 nt, Human
agguggaacguucaggugcuag

SEQ ID NO: 67671 - RNA, 22 nt, Human
agguggagaagagaugggcagu

SEQ ID NO: 67672 - RNA, 16 nt, Human
agguggagaaguucac

SEQ ID NO: 67673 - RNA, 22 nt, Human
agguggagaucagggacuaagg

SEQ ID NO: 67674 - RNA, 22 nt, Human
aguauacaaauaaauguguaau

SEQ ID NO: 67675 - RNA, 22 nt, Human
aguauacuccccauccuagaaa

SEQ ID NO: 67676 - RNA, 22 nt, Human
aguauaugccagagagauagcu

SEQ ID NO: 67677 - RNA, 22 nt, Human
aguauauggggaauugcauaau

SEQ ID NO: 67678 - RNA, 22 nt, Human
aguaucaaucacccuuugaagu

SEQ ID NO: 67679 - RNA, 22 nt, Human
aguaucagaugugauuaaaggg

SEQ ID NO: 67680 - RNA, 22 nt, Human
aguaucauuuuggcauuaguau

SEQ ID NO: 67681 - RNA, 22 nt, Human
aguaucuucaaguuucuucuag

SEQ ID NO: 67682 - RNA, 22 nt, Human
aguaugaacggaaggccuggga

SEQ ID NO: 67683 - RNA, 22 nt, Human
aguaugcauauuucaaaguaag

SEQ ID NO: 67684 - RNA, 22 nt, Human
aguaugucagagugaaaauggu

SEQ ID NO: 67685 - RNA, 22 nt, Human
aguauucuggaauucuauguga

SEQ ID NO: 67686 - RNA, 22 nt, Human
aguauuuagcugacucgcuaca

SEQ ID NO: 67687 - RNA, 22 nt, Human
aguauuucaguuacuuuaaaau

SEQ ID NO: 67688 - RNA, 22 nt, Human
aguauuugagagguccaggugu

SEQ ID NO: 67689 - RNA, 22 nt, Human
aguauuuggugugguauugacc

SEQ ID NO: 67690 - RNA, 22 nt, Human
agucaaauaagagagagauguu

SEQ ID NO: 67691 - RNA, 15 nt, Human
agucaaaucuguuuu

SEQ ID NO: 67692 - RNA, 22 nt, Human
agucaacaaaaauguggagccu

SEQ ID NO: 67693 - RNA, 22 nt, Human
agucaagauucuggcacuagca

SEQ ID NO: 67694 - RNA, 22 nt, Human
agucaauuaucucuaggucauc

SEQ ID NO: 67695 - RNA, 22 nt, Human
agucacaauaccgugugucagu

SEQ ID NO: 67696 - RNA, 22 nt, Human
agucacacugguuguuuacagu

SEQ ID NO: 67697 - RNA, 22 nt, Human
agucacagaaacccaggugugg

SEQ ID NO: 67698 - RNA, 22 nt, Human
agucacagaaugauggcuccag

SEQ ID NO: 67699 - RNA, 22 nt, Human
agucacaggcaagagggcucca

SEQ ID NO: 67700 - RNA, 22 nt, Human
agucacagggggccccugcaac

SEQ ID NO: 67701 - RNA, 22 nt, Human
agucacaguucugcugucugag

SEQ ID NO: 67702 - RNA, 22 nt, Human
agucacaugaucccugggccug

SEQ ID NO: 67703 - RNA, 22 nt, Human
agucacauggcagagagaaguu

SEQ ID NO: 67704 - RNA, 22 nt, Human
agucacccuccaacucuccacu

SEQ ID NO: 67705 - RNA, 22 nt, Human
agucacuaggcugaaaguggag

SEQ ID NO: 67706 - RNA, 22 nt, Human
agucacugaauaccuuaauguu

SEQ ID NO: 67707 - RNA, 22 nt, Human
agucacugcuuugucccugugu

SEQ ID NO: 67708 - RNA, 22 nt, Human
agucacuguucugucaugucaa

SEQ ID NO: 67709 - RNA, 22 nt, Human
agucacuuugcuacucugccuu

SEQ ID NO: 67710 - RNA, 22 nt, Human
agucagaaucugcauuuuaacc

SEQ ID NO: 67711 - RNA, 22 nt, Human
agucagacacguuuuccauuag

SEQ ID NO: 67712 - RNA, 22 nt, Human
agucagagaaaacagcccugug

SEQ ID NO: 67713 - RNA, 22 nt, Human
agucagagaauguuuucaugga

SEQ ID NO: 67714 - RNA, 22 nt, Human
agucagagacccuagaucuaau

SEQ ID NO: 67715 - RNA, 23 nt, Human
agucagagagugugagacaacug

SEQ ID NO: 67716 - RNA, 22 nt, Human
agucagagcaaacuggacagac

SEQ ID NO: 67717 - RNA, 22 nt, Human
agucagagucgccgacagucaa

SEQ ID NO: 67718 - RNA, 22 nt, Human
agucagagugugcaggccggcu

SEQ ID NO: 67719 - RNA, 22 nt, Human
agucagauuuaaagcuguuuga

SEQ ID NO: 67720 - RNA, 22 nt, Human
agucagcacuccugaggaucac

SEQ ID NO: 67721 - RNA, 19 nt, Human
agucagcaugcaugugacu

SEQ ID NO: 67722 - RNA, 22 nt, Human
agucagcugcagcagcuuuggu

SEQ ID NO: 67723 - RNA, 22 nt, Human
agucagcuugucucuaggguug

SEQ ID NO: 67724 - RNA, 22 nt, Human
agucaggauaugccuugugggc

SEQ ID NO: 67725 - RNA, 22 nt, Human
agucaggggaucuagacuugaa

SEQ ID NO: 67726 - RNA, 22 nt, Human
agucagucugcuagccugugga

SEQ ID NO: 67727 - RNA, 22 nt, Human
agucagugaaaacuagaauguu

SEQ ID NO: 67728 - RNA, 22 nt, Human
agucagugacuuuugcugagag

SEQ ID NO: 67729 - RNA, 22 nt, Human
agucaguggauuuaccaugcgu

SEQ ID NO: 67730 - RNA, 22 nt, Human
agucagugggagaagugugaag

SEQ ID NO: 67731 - RNA, 22 nt, Human
agucagugucaacaggaaguag

SEQ ID NO: 67732 - RNA, 22 nt, Human
agucaguuaaacuuuguaaagu

SEQ ID NO: 67733 - RNA, 22 nt, Human
agucauaucugaggaggaaucc

SEQ ID NO: 67734 - RNA, 19 nt, Human
agucauauuguucaucuug

SEQ ID NO: 67735 - RNA, 22 nt, Human
agucauauuuauauaauuuccc

SEQ ID NO: 67736 - RNA, 22 nt, Human
agucauuacggacuaguacuac

SEQ ID NO: 67737 - RNA, 22 nt, Human
agucauuuugccagucuucagg

SEQ ID NO: 67738 - RNA, 22 nt, Human
aguccaaggccauacaguugug

SEQ ID NO: 67739 - RNA, 22 nt, Human
aguccaagguucauggcacaga

SEQ ID NO: 67740 - RNA, 22 nt, Human
aguccagagaggaggcugugug

SEQ ID NO: 67741 - RNA, 22 nt, Human
aguccagccuucaaucuuagug

SEQ ID NO: 67742 - RNA, 22 nt, Human
aguccaggaaaauaagcuaggu

SEQ ID NO: 67743 - RNA, 22 nt, Human
aguccaggacuguuucagcuga

SEQ ID NO: 67744 - RNA, 22 nt, Human
auucacaaagaagggaaguaca

SEQ ID NO: 67745 - RNA, 22 nt, Human
auucacaaauaacaggugcaga

SEQ ID NO: 67746 - RNA, 22 nt, Human
auucacaaugauacauaagcga

SEQ ID NO: 67747 - RNA, 22 nt, Human
auucacaugauguauguagggc

SEQ ID NO: 67748 - RNA, 22 nt, Human
auucacaugugcuucuuaucac

SEQ ID NO: 67749 - RNA, 22 nt, Human
auucacauguugaagcccuaac

SEQ ID NO: 67750 - RNA, 22 nt, Human
auucacauuuagacaucaggua

SEQ ID NO: 67751 - RNA, 22 nt, Human
auucacauuuagccucugacau

SEQ ID NO: 67752 - RNA, 22 nt, Human
auucacuggcagacagaacuca

SEQ ID NO: 67753 - RNA, 22 nt, Human
auucagaaaggguugccugguu

SEQ ID NO: 67754 - RNA, 22 nt, Human
auucagaaauagaaaauuugau

SEQ ID NO: 67755 - RNA, 22 nt, Human
auucagaagcuauucuuaguuc

SEQ ID NO: 67756 - RNA, 22 nt, Human
auucagaauggcaaacuucuag

SEQ ID NO: 67757 - RNA, 23 nt, Human
auucagaauuguguguuuguaua

SEQ ID NO: 67758 - RNA, 22 nt, Human
auucagacuaugaacacgucag

SEQ ID NO: 67759 - RNA, 22 nt, Human
auucagacucuugagcaguccc

SEQ ID NO: 67760 - RNA, 22 nt, Human
auucagagauuguuauucagac

SEQ ID NO: 67761 - RNA, 22 nt, Human
auucagagucugcacaacagca

SEQ ID NO: 67762 - RNA, 22 nt, Human
auucagauugguuuaagcuagu

SEQ ID NO: 67763 - RNA, 22 nt, Human
auucagcaaacauuuauuaucu

SEQ ID NO: 67764 - RNA, 22 nt, Human
auucagcaaugagcuuggauuu

SEQ ID NO: 67765 - RNA, 22 nt, Human
auucagcacaauuuggccaaua

SEQ ID NO: 67766 - RNA, 22 nt, Human
auucagcagccauggcuucuga

SEQ ID NO: 67767 - RNA, 22 nt, Human
auucagcugacuuugauucauu

SEQ ID NO: 67768 - RNA, 22 nt, Human
auucagggaggaaaggggccuc

SEQ ID NO: 67769 - RNA, 22 nt, Human
auucaguaggugugaacuuauu

SEQ ID NO: 67770 - RNA, 22 nt, Human
auucagugaccuaauuacuuac

SEQ ID NO: 67771 - RNA, 22 nt, Human
auucaguggauaucuucacuuu

SEQ ID NO: 67772 - RNA, 22 nt, Human
auucagugugagguuuucaagu

SEQ ID NO: 67773 - RNA, 22 nt, Human
auucaguguuugcagcaacuuu

SEQ ID NO: 67774 - RNA, 22 nt, Human
auucaguuaagggucuugagau

SEQ ID NO: 67775 - RNA, 22 nt, Human
auucaguucuggcugccuuccu

SEQ ID NO: 67776 - RNA, 23 nt, Human
auucaguugugagagaagacaca

SEQ ID NO: 67777 - RNA, 22 nt, Human
auucaucagcuaauggacauuu

SEQ ID NO: 67778 - RNA, 22 nt, Human
auucaucuaugacucuaaugug

SEQ ID NO: 67779 - RNA, 22 nt, Human
auucaugaccccaugguugauu

SEQ ID NO: 67780 - RNA, 22 nt, Human
auucauguuagcccacauguag

SEQ ID NO: 67781 - RNA, 22 nt, Human
auucauguuuucuugcuucaag

SEQ ID NO: 67782 - RNA, 22 nt, Human
auucauuugcuauuguguaugg

SEQ ID NO: 67783 - RNA, 22 nt, Human
gauggcaaacugggaccagagg

SEQ ID NO: 67784 - RNA, 22 nt, Human
gauggcaccuugaacgcugcgu

SEQ ID NO: 67785 - RNA, 22 nt, Human
gauggcagcagcagccagggau

SEQ ID NO: 67786 - RNA, 22 nt, Human
gauggcaggcaggugaguagag

SEQ ID NO: 67787 - RNA, 22 nt, Human
gauggcagguaguggucucauc

SEQ ID NO: 67788 - RNA, 22 nt, Human
gauggcaggugauagccgaguc

SEQ ID NO: 67789 - RNA, 22 nt, Human
gauggcagugggccucgagucc

SEQ ID NO: 67790 - RNA, 22 nt, Human
gauggcuggcuauaucagggga

SEQ ID NO: 67791 - RNA, 22 nt, Human
gauggcuuacagacaguuagga

SEQ ID NO: 67792 - RNA, 22 nt, Human
gaugggaggaaccugggucccu

SEQ ID NO: 67793 - RNA, 22 nt, Human
gaugggauuuuuuauguguuca

SEQ ID NO: 67794 - RNA, 22 nt, Human
gaugggcugucugagcgcugug

SEQ ID NO: 67795 - RNA, 17 nt, Human
gauggggcugacaucag

SEQ ID NO: 67796 - RNA, 18 nt, Human
gauggguaaaggcauaaa

SEQ ID NO: 67797 - RNA, 22 nt, Human
gauggguacucguuggacugag

SEQ ID NO: 67798 - RNA, 22 nt, Human
gauggguagaaguggaagaggu

SEQ ID NO: 67799 - RNA, 20 nt, Human
gauggguauugaagucaccu

SEQ ID NO: 67800 - RNA, 22 nt, Human
gaugguccuccugcugccucuc

SEQ ID NO: 67801 - RNA, 22 nt, Human
gauggugucccaggcucaggcu

SEQ ID NO: 67802 - RNA, 19 nt, Human
gcaccagauugagugacac

SEQ ID NO: 67803 - RNA, 22 nt, Human
gcaccagccugagccucuugca

SEQ ID NO: 67804 - RNA, 22 nt, Human
gcaccagcugcaggguggcuga

SEQ ID NO: 67805 - RNA, 22 nt, Human
gcaccaggagaaucacguuaga

SEQ ID NO: 67806 - RNA, 22 nt, Human
gcaccaugacagugaggagaac

SEQ ID NO: 67807 - RNA, 22 nt, Human
gcacccagauauugccuugacc

SEQ ID NO: 67808 - RNA, 22 nt, Human
gcaccccucagcuuguuuacua

SEQ ID NO: 67809 - RNA, 19 nt, Human
gcacccugaggucauggcc

SEQ ID NO: 67810 - RNA, 22 nt, Human
gcacccugaguguucagcucca

SEQ ID NO: 67811 - RNA, 22 nt, Human
gcaccgagaaggaagcaugccu

SEQ ID NO: 67812 - RNA, 20 nt, Human
gcaccugaaugcaucuugga

SEQ ID NO: 67813 - RNA, 22 nt, Human
gcaccugcaggaugagccaggg

SEQ ID NO: 67814 - RNA, 22 nt, Human
gcaccuggacagugacccuagc

SEQ ID NO: 67815 - RNA, 22 nt, Human
gcaccuuagccugaauuugugu

SEQ ID NO: 67816 - RNA, 22 nt, Human
gcaccuuauuuaaaugauguuu

SEQ ID NO: 67817 - RNA, 22 nt, Human
gcaccuuggcuuucuugguggc

SEQ ID NO: 67818 - RNA, 22 nt, Human
gcacguggaaugcucaugagcc

SEQ ID NO: 67819 - RNA, 22 nt, Human
gcacuagaaucccuucaagaag

SEQ ID NO: 67820 - RNA, 22 nt, Human
gcacuagagcagcucucagaga

SEQ ID NO: 67821 - RNA, 22 nt, Human
gcacuagucaagugaacaauuu

SEQ ID NO: 67822 - RNA, 22 nt, Human
gcacucaggacucucaucagua

SEQ ID NO: 67823 - RNA, 22 nt, Human
gcacucuguuucuccugucagc

SEQ ID NO: 67824 - RNA, 20 nt, Human
gcacugaagguuccagggga

SEQ ID NO: 67825 - RNA, 22 nt, Human
gcacugaaugcuuuuacuguaa

SEQ ID NO: 67826 - RNA, 17 nt, Human
gcacugagccacaguuu

SEQ ID NO: 67827 - RNA, 22 nt, Human
gcacugagcuuuggaggagcag

SEQ ID NO: 67828 - RNA, 22 nt, Human
gcacugauuacccauugcugcu

SEQ ID NO: 67829 - RNA, 22 nt, Human
gcacugcagguggguggagagg

SEQ ID NO: 67830 - RNA, 23 nt, Human
gcacugccaugugcucugcaggc

SEQ ID NO: 67831 - RNA, 22 nt, Human
gcacugcuccagguguggcuug

SEQ ID NO: 67832 - RNA, 22 nt, Human
gcacugcuuuuaccuaggugag

SEQ ID NO: 67833 - RNA, 22 nt, Human
gcacuggaaauaccuagaugaa

SEQ ID NO: 67834 - RNA, 22 nt, Human
gcacuggagaauggcuguauuc

SEQ ID NO: 67835 - RNA, 22 nt, Human
gcacugggaagaaugagccugu

SEQ ID NO: 67836 - RNA, 22 nt, Human
gcacugggaaugcugaugggcu

SEQ ID NO: 67837 - RNA, 22 nt, Human
gcacugggagcugccugccggu

SEQ ID NO: 67838 - RNA, 22 nt, Human
gcacugggggcagcagugaggg

SEQ ID NO: 67839 - RNA, 22 nt, Human
gcacugguguguuaguaaggga

SEQ ID NO: 67840 - RNA, 22 nt, Human
gcacugguuacccugaguggcu

SEQ ID NO: 67841 - RNA, 22 nt, Human
gcacugugaauauacuagcaaa

SEQ ID NO: 67842 - RNA, 22 nt, Human
gcacugugacccagagcaggug

SEQ ID NO: 67843 - RNA, 22 nt, Human
gcacuguucuaggugcagagcu

SEQ ID NO: 67844 - RNA, 18 nt, Human
gcacuucacagggauagu

SEQ ID NO: 67845 - RNA, 18 nt, Human
gcacuucacccagcuagu

SEQ ID NO: 67846 - RNA, 22 nt, Human
gcacuucaugacuuugucaaau

SEQ ID NO: 67847 - RNA, 22 nt, Human
gcacuugauuacauuagugccu

SEQ ID NO: 67848 - RNA, 22 nt, Human
gcacuugucaaauauuauagua

SEQ ID NO: 67849 - RNA, 22 nt, Human
gcacuuuggaaaauuuugaguu

SEQ ID NO: 67850 - RNA, 17 nt, Human
gcagaaaagucaaggga

SEQ ID NO: 67851 - RNA, 22 nt, Human
gcagaaagcuuagaggguuugc

SEQ ID NO: 67852 - RNA, 22 nt, Human
gcagaacauuucacaguaucuu

SEQ ID NO: 67853 - RNA, 22 nt, Human
gcagaagcagggcaggggcaaa

SEQ ID NO: 67854 - RNA, 22 nt, Human
gcagaagcugggagaagggauu

SEQ ID NO: 67855 - RNA, 22 nt, Human
gcagaagcuguucgaaggccgc

SEQ ID NO: 67856 - RNA, 22 nt, Human
gcagaaguggauucuacaauuu

SEQ ID NO: 67857 - RNA, 21 nt, Human
gcagaauagucucugucuuca

SEQ ID NO: 67858 - RNA, 22 nt, Human
gcagaauuggauaguugugaua

SEQ ID NO: 67859 - RNA, 22 nt, Human
gcagaauuuaggaauuaggaaa

SEQ ID NO: 67860 - RNA, 22 nt, Human
gcagacaaagcagcaugccuau

SEQ ID NO: 67861 - RNA, 22 nt, Human
gcagacacauccacuccuacag

SEQ ID NO: 67862 - RNA, 22 nt, Human
gcagacagaagcuaaguagaca

SEQ ID NO: 67863 - RNA, 22 nt, Human
gcagacagaugagggugcuggg

SEQ ID NO: 67864 - RNA, 22 nt, Human
gcagacagcauguugggcuauu

SEQ ID NO: 67865 - RNA, 22 nt, Human
gcagacauuuugaaucuaggcu

SEQ ID NO: 67866 - RNA, 22 nt, Human
gcagacggaguaucuuguacau

SEQ ID NO: 67867 - RNA, 22 nt, Human
gcagacucugagagugagugcc

SEQ ID NO: 67868 - RNA, 21 nt, Human
gcagacugcccugcugucccc

SEQ ID NO: 67869 - RNA, 22 nt, Human
gcagacuguaucaaugucagua

SEQ ID NO: 67870 - RNA, 22 nt, Human
gcagagaagaugcccaggcuuc

SEQ ID NO: 67871 - RNA, 22 nt, Human
gcagagaccccgcagugaggcc

SEQ ID NO: 67872 - RNA, 22 nt, Human
gcagagauccaggguauagguu

SEQ ID NO: 67873 - RNA, 22 nt, Human
gcagagcaccaaagugaaagau

SEQ ID NO: 67874 - RNA, 22 nt, Human
gcagagcaggaaggaagucagg

SEQ ID NO: 67875 - RNA, 22 nt, Human
gcagagcaggggcugaaccugg

SEQ ID NO: 67876 - RNA, 22 nt, Human
gcagagccagaauggccaggac

SEQ ID NO: 67877 - RNA, 22 nt, Human
gcagagccaggcuggggcaggu

SEQ ID NO: 67878 - RNA, 22 nt, Human
gcagagccaugggagguuuuug

SEQ ID NO: 67879 - RNA, 22 nt, Human
gcagagccccucaagccagccu

SEQ ID NO: 67880 - RNA, 22 nt, Human
gcagagcccuggggguauggug

SEQ ID NO: 67881 - RNA, 21 nt, Human
gcagagccggggcgagaaggc

SEQ ID NO: 67882 - RNA, 22 nt, Human
gcagagccugacgggauuuuuc

SEQ ID NO: 67883 - RNA, 22 nt, Human
gcagagcuaucuucuggauuug

SEQ ID NO: 67884 - RNA, 22 nt, Human
gcagagcucaagguguucagcu

SEQ ID NO: 67885 - RNA, 22 nt, Human
gcagagcugguacuugagccug

SEQ ID NO: 67886 - RNA, 22 nt, Human
gcagagcuucuguccuucagga

SEQ ID NO: 67887 - RNA, 21 nt, Human
gcagaggaaugguauacauaa

SEQ ID NO: 67888 - RNA, 22 nt, Human
gcagaggagcaaguugcuacag

SEQ ID NO: 67889 - RNA, 22 nt, Human
gcagaggaggacccaggaauua

SEQ ID NO: 67890 - RNA, 22 nt, Human
gcagaggaucaggcucuggaaa

SEQ ID NO: 67891 - RNA, 22 nt, Human
gcagaggcacagccccagauga

SEQ ID NO: 67892 - RNA, 22 nt, Human
guaaacaaacucucaggccagu

SEQ ID NO: 67893 - RNA, 22 nt, Human
guaaacaagucuaccauuagaa

SEQ ID NO: 67894 - RNA, 22 nt, Human
guaaacaccuguuaaauucaga

SEQ ID NO: 67895 - RNA, 22 nt, Human
guaaacaucagccacucuauuu

SEQ ID NO: 67896 - RNA, 22 nt, Human
guaaagaaguuuuugaaugcau

SEQ ID NO: 67897 - RNA, 22 nt, Human
guaaagcaaaauguagagauug

SEQ ID NO: 67898 - RNA, 22 nt, Human
guaaagcucucauuuaauauca

SEQ ID NO: 67899 - RNA, 22 nt, Human
guaaagcuggagaggucuuuua

SEQ ID NO: 67900 - RNA, 22 nt, Human
guaaaguacaagccucauuaca

SEQ ID NO: 67901 - RNA, 22 nt, Human
guaaaguacauacaugaacuca

SEQ ID NO: 67902 - RNA, 22 nt, Human
guaaauauaaaugcuagcugcc

SEQ ID NO: 67903 - RNA, 22 nt, Human
guaaaucagugucauuuuagaa

SEQ ID NO: 67904 - RNA, 22 nt, Human
guaaaucauggucagaauaaau

SEQ ID NO: 67905 - RNA, 22 nt, Human
guaaaugccacuuaauguaaag

SEQ ID NO: 67906 - RNA, 22 nt, Human
guaacacuagcucugucacuuu

SEQ ID NO: 67907 - RNA, 22 nt, Human
guaacauuuacaguuccuagag

SEQ ID NO: 67908 - RNA, 22 nt, Human
guaaggcaauaguaaggagucc

SEQ ID NO: 67909 - RNA, 22 nt, Human
guaaguuaguuccuguguuagu

SEQ ID NO: 67910 - RNA, 22 nt, Human
guaauaagaaacagcaauuauu

SEQ ID NO: 67911 - RNA, 22 nt, Human
guaauagguuuucuugcuccag

SEQ ID NO: 67912 - RNA, 22 nt, Human
guaauauucagcuauugaguug

SEQ ID NO: 67913 - RNA, 22 nt, Human
guaaugaauagaugguggcagg

SEQ ID NO: 67914 - RNA, 22 nt, Human
guaaugaugucugagaaguaug

SEQ ID NO: 67915 - RNA, 22 nt, Human
guaauuaggaauaaaaugggaa

SEQ ID NO: 67916 - RNA, 22 nt, Human
guaauugaaauugccuuggguu

SEQ ID NO: 67917 - RNA, 22 nt, Human
guaauugacucagcucuguuca

SEQ ID NO: 67918 - RNA, 22 nt, Human
guacaaaaguuauugcgguuuu

SEQ ID NO: 67919 - RNA, 22 nt, Human
guacaaauacauucugaaggua

SEQ ID NO: 67920 - RNA, 22 nt, Human
gcaacuuucaagcaccaugggg

SEQ ID NO: 67921 - RNA, 22 nt, Human
gcaagaaaaaggcuucaugaac

SEQ ID NO: 67922 - RNA, 22 nt, Human
gcaagaguggaacaaaggcagc

SEQ ID NO: 67923 - RNA, 22 nt, Human
gcaagauuccgcucuagagccu

SEQ ID NO: 67924 - RNA, 22 nt, Human
gcaagauuccuugagccuaguu

SEQ ID NO: 67925 - RNA, 22 nt, Human
gcaagcagacauucagguaggu

SEQ ID NO: 67926 - RNA, 22 nt, Human
gcaagcagacugggccccugug

SEQ ID NO: 67927 - RNA, 22 nt, Human
gcaagcaggguuccuuagggca

SEQ ID NO: 67928 - RNA, 22 nt, Human
gcaagcaguuguggcuucugag

SEQ ID NO: 67929 - RNA, 22 nt, Human
gcaagcuauagaauauaagggg

SEQ ID NO: 67930 - RNA, 22 nt, Human
gcaagcucucugcaggcagagc

SEQ ID NO: 67931 - RNA, 22 nt, Human
gcaagcugcucuuauguggagg

SEQ ID NO: 67932 - RNA, 22 nt, Human
gcaagcuguccuuuugcauggc

SEQ ID NO: 67933 - RNA, 22 nt, Human
gcaagcugugauuuaugugaau

SEQ ID NO: 67934 - RNA, 22 nt, Human
gcaaggaacaaaugcucugcuu

SEQ ID NO: 67935 - RNA, 17 nt, Human
gcaaggaaguucuuugc

SEQ ID NO: 67936 - RNA, 22 nt, Human
gcaaggagccuggaggugagug

SEQ ID NO: 67937 - RNA, 22 nt, Human
gcaaggauguacugcaauagga

SEQ ID NO: 67938 - RNA, 21 nt, Human
gcaaggcaaugccaugauuuc

SEQ ID NO: 67939 - RNA, 20 nt, Human
gcaaggcagguugaccaaga

SEQ ID NO: 67940 - RNA, 21 nt, Human
gcaaggccuaucauggcagcu

SEQ ID NO: 67941 - RNA, 22 nt, Human
gcaaggcugagcacauuugcau

SEQ ID NO: 67942 - RNA, 22 nt, Human
gcaaggcugugcacuuugcauu

SEQ ID NO: 67943 - RNA, 22 nt, Human
gcaagggugugaaccaaugaga

SEQ ID NO: 67944 - RNA, 22 nt, Human
gcaagguguuuuaacaggaaaa

SEQ ID NO: 67945 - RNA, 19 nt, Human
gcaagguucacucccagag

SEQ ID NO: 67946 - RNA, 22 nt, Human
gcaagugucugagguuuuguau

SEQ ID NO: 67947 - RNA, 22 nt, Human
gcaaguuuagcuaacuggccca

SEQ ID NO: 67948 - RNA, 22 nt, Human
gcaauaaacucucucaagccac

SEQ ID NO: 67949 - RNA, 22 nt, Human
gcaauaaauaacauggaagaca

SEQ ID NO: 67950 - RNA, 22 nt, Human
gcaauacaguugaagagauuga

SEQ ID NO: 67951 - RNA, 22 nt, Human
gcaauacuaagugacuuuuggg

SEQ ID NO: 67952 - RNA, 22 nt, Human
gcaaucaaugauuuauauuugu

SEQ ID NO: 67953 - RNA, 17 nt, Human
gcaaucucagucuccuu

SEQ ID NO: 67954 - RNA, 22 nt, Human
gcaaugauugcauuagaagaug

SEQ ID NO: 67955 - RNA, 22 nt, Human
gcaaugucuagucugagggcuu

SEQ ID NO: 67956 - RNA, 22 nt, Human
gcaauguuguguuggcauucua

SEQ ID NO: 67957 - RNA, 20 nt, Human
gcaauuaauuuuugguuaca

SEQ ID NO: 67958 - RNA, 22 nt, Human
gcaauuauuaugugacuuuuac

SEQ ID NO: 67959 - RNA, 17 nt, Human
gcaauuauugggcauuu

SEQ ID NO: 67960 - RNA, 21 nt, Human
gcaauucgcuaugaugguggc

SEQ ID NO: 67961 - RNA, 22 nt, Human
gcacaaagguggaaggaggaag

SEQ ID NO: 67962 - RNA, 22 nt, Human
gcacaagaaaucauggacugaa

SEQ ID NO: 67963 - RNA, 22 nt, Human
gcacaauggaccgugugcucug

SEQ ID NO: 67964 - RNA, 22 nt, Human
gcacacagagaggugguauguc

SEQ ID NO: 67965 - RNA, 22 nt, Human
gcacacagcuagauuaccauuc

SEQ ID NO: 67966 - RNA, 22 nt, Human
gcacacaggcaguuuccagcca

SEQ ID NO: 67967 - RNA, 22 nt, Human
gcacacaguagggauucaauga

SEQ ID NO: 67968 - RNA, 22 nt, Human
gcacacauucuagccuuuugug

SEQ ID NO: 67969 - RNA, 22 nt, Human
gcacacuggagccuggaagauu

SEQ ID NO: 67970 - RNA, 22 nt, Human
gcacagaacacuggugaguccc

SEQ ID NO: 67971 - RNA, 22 nt, Human
gcacagagacaguccugagauc

SEQ ID NO: 67972 - RNA, 23 nt, Human
gcacagagcaguuaggggaagau

SEQ ID NO: 67973 - RNA, 22 nt, Human
gcacagaggaugaggcagcucu

SEQ ID NO: 67974 - RNA, 22 nt, Human
gcacagagggcagugagccucu

SEQ ID NO: 67975 - RNA, 22 nt, Human
gcacagcagccgaaaugcccuu

SEQ ID NO: 67976 - RNA, 22 nt, Human
gcacagcaguggcauaaacaau

SEQ ID NO: 67977 - RNA, 22 nt, Human
gcacagcccuggucggggcccc

SEQ ID NO: 67978 - RNA, 22 nt, Human
gcacagccuugcccugugcccu

SEQ ID NO: 67979 - RNA, 22 nt, Human
gcacagcuccugguaagcuggg

SEQ ID NO: 67980 - RNA, 22 nt, Human
gcacagcucuccccaagacgaa

SEQ ID NO: 67981 - RNA, 20 nt, Human
gcacagcugaguucaggguc

SEQ ID NO: 67982 - RNA, 22 nt, Human
gcacaggaaaugacucauguua

SEQ ID NO: 67983 - RNA, 22 nt, Human
gcacaggaaucuucauuuuuua

SEQ ID NO: 67984 - RNA, 22 nt, Human
gcacaggaggccgaugcucaug

SEQ ID NO: 67985 - RNA, 22 nt, Human
gcacaggcacagagggccacug

SEQ ID NO: 67986 - RNA, 22 nt, Human
gcacaggcaucaggcuuuuucu

SEQ ID NO: 67987 - RNA, 22 nt, Human
gcacaggcuccggaggagagcu

SEQ ID NO: 67988 - RNA, 22 nt, Human
gcacaggcucucuuggggacac

SEQ ID NO: 67989 - RNA, 22 nt, Human
gcacagggcccugugcguaggu

SEQ ID NO: 67990 - RNA, 22 nt, Human
gcacaguaggcucagcucuauc

SEQ ID NO: 67991 - RNA, 21 nt, Human
gcacagugccaggcacacagu

SEQ ID NO: 67992 - RNA, 22 nt, Human
gcacaguggguggucauguaca

SEQ ID NO: 67993 - RNA, 22 nt, Human
gcacaguguaccacagucccua

SEQ ID NO: 67994 - RNA, 22 nt, Human
gcacauaaagggcaugggaggu

SEQ ID NO: 67995 - RNA, 23 nt, Human
gcacauacuacacagaaaauggc

SEQ ID NO: 67996 - RNA, 22 nt, Human
gcacauaugcuguaagcacaug

SEQ ID NO: 67997 - RNA, 20 nt, Human
gcacaucugcuuuggauuuc

SEQ ID NO: 67998 - RNA, 22 nt, Human
gcacaugacaguaaguagagca

SEQ ID NO: 67999 - RNA, 22 nt, Human
gcacaugagcugcugggauggg

SEQ ID NO: 68000 - RNA, 22 nt, Human
gcacauggacaauggaggugca

SEQ ID NO: 68001 - RNA, 22 nt, Human
gcauggugacaucaugugaaug

SEQ ID NO: 68002 - RNA, 22 nt, Human
gcauguaaucacucuaggaagg

SEQ ID NO: 68003 - RNA, 22 nt, Human
gcaugucuguaauuacagagcc

SEQ ID NO: 68004 - RNA, 22 nt, Human
gcauguggaaucucuccauggu

SEQ ID NO: 68005 - RNA, 22 nt, Human
gcaugugggagggucuucccac

SEQ ID NO: 68006 - RNA, 22 nt, Human
gcauguguaugguaggaauauu

SEQ ID NO: 68007 - RNA, 22 nt, Human
gcaugugucccucagucugugc

SEQ ID NO: 68008 - RNA, 22 nt, Human
gcaugugucuccccaguggagg

SEQ ID NO: 68009 - RNA, 22 nt, Human
gcauguguggaggagaugugcu

SEQ ID NO: 68010 - RNA, 21 nt, Human
gcaugugugggacuggauccu

SEQ ID NO: 68011 - RNA, 22 nt, Human
gcauuaauguaagacccacucc

SEQ ID NO: 68012 - RNA, 22 nt, Human
gcauuagagcccaucaccugua

SEQ ID NO: 68013 - RNA, 22 nt, Human
gcauuagauauccuugaaguua

SEQ ID NO: 68014 - RNA, 22 nt, Human
gcauucauauggaaggaaacua

SEQ ID NO: 68015 - RNA, 22 nt, Human
gcauucaucuaguaucacucug

SEQ ID NO: 68016 - RNA, 18 nt, Human
gcauucuguuaaugugga

SEQ ID NO: 68017 - RNA, 22 nt, Human
gcauucuucacuaggugagagc

SEQ ID NO: 68018 - RNA, 22 nt, Human
gcauucuucgaaguaaguagug

SEQ ID NO: 68019 - RNA, 22 nt, Human
gcauucuugguaugaaggacag

SEQ ID NO: 68020 - RNA, 22 nt, Human
gcauucuuuccacgaggaggua

SEQ ID NO: 68021 - RNA, 22 nt, Human
gcauucuuuuugacuccugguu

SEQ ID NO: 68022 - RNA, 22 nt, Human
gcauugaauccuaucaggcaaa

SEQ ID NO: 68023 - RNA, 22 nt, Human
gcauugauucugaagugaaaug

SEQ ID NO: 68024 - RNA, 22 nt, Human
gcauuggcauuucuccagcgga

SEQ ID NO: 68025 - RNA, 22 nt, Human
gcauugguuaagagcuuugggg

SEQ ID NO: 68026 - RNA, 23 nt, Human
gcauugucuccccacuucugggc

SEQ ID NO: 68027 - RNA, 22 nt, Human
gcauuuagcuuuaaaauauuuc

SEQ ID NO: 68028 - RNA, 22 nt, Human
gcauuuauauucuguucggaua

SEQ ID NO: 68029 - RNA, 22 nt, Human
gcauuucagaaagguuaccaac

SEQ ID NO: 68030 - RNA, 22 nt, Human
gcauuucagaagcaugcccucu

SEQ ID NO: 68031 - RNA, 19 nt, Human
gcauuucaggcauguuugc

SEQ ID NO: 68032 - RNA, 22 nt, Human
gcauuucauguagauugagaac

SEQ ID NO: 68033 - RNA, 19 nt, Human
gcauuucauuuaaccauca

SEQ ID NO: 68034 - RNA, 19 nt, Human
gcauuucucuuuacagcca

SEQ ID NO: 68035 - RNA, 22 nt, Human
gcauuucuuccuggugugagcc

SEQ ID NO: 68036 - RNA, 22 nt, Human
gcauuugaaaugcaagaaagug

SEQ ID NO: 68037 - RNA, 22 nt, Human
gcauuugagcacauuuuaaaga

SEQ ID NO: 68038 - RNA, 22 nt, Human
gcauuuguguggcggaaggauu

SEQ ID NO: 68039 - RNA, 22 nt, Human
gcauuuguguucuuccuagagc

SEQ ID NO: 68040 - RNA, 22 nt, Human
gcauuuuaauaagauucauagg

SEQ ID NO: 68041 - RNA, 22 nt, Human
gccaaagcccaggagacagcca

SEQ ID NO: 68042 - RNA, 22 nt, Human
gccaaagugcugcucuuuacca

SEQ ID NO: 68043 - RNA, 22 nt, Human
gccaaaucacagggccaaaagc

SEQ ID NO: 68044 - RNA, 22 nt, Human
gccaaaucuugcacacucuugu

SEQ ID NO: 68045 - RNA, 22 nt, Human
gccaacagcugggugcaugucc

SEQ ID NO: 68046 - RNA, 22 nt, Human
gccaacaggccuugcucugcuc

SEQ ID NO: 68047 - RNA, 20 nt, Human
gccaacgcgcuggggcugcc

SEQ ID NO: 68048 - RNA, 22 nt, Human
gccaagaaagaacagcagggaa

SEQ ID NO: 68049 - RNA, 22 nt, Human
gccaagaaaugccccucacaga

SEQ ID NO: 68050 - RNA, 22 nt, Human
gccaagaagguggggacaugca

SEQ ID NO: 68051 - RNA, 22 nt, Human
gccaagagaaugugagagaaau

SEQ ID NO: 68052 - RNA, 22 nt, Human
gccaagcuuauaugaugcuuga

SEQ ID NO: 68053 - RNA, 22 nt, Human
gccaagcuuggaaggaucaugg

SEQ ID NO: 68054 - RNA, 22 nt, Human
gccaaggagacacgguguugua

SEQ ID NO: 68055 - RNA, 20 nt, Human
gccaaggaggagaaacaggc

SEQ ID NO: 68056 - RNA, 22 nt, Human
gccaaggccugcagcaccucau

SEQ ID NO: 68057 - RNA, 22 nt, Human
gccaagggaacugagccggagg

SEQ ID NO: 68058 - RNA, 23 nt, Human
gccaauuuaguaaaggcaguggg

SEQ ID NO: 68059 - RNA, 22 nt, Human
gccacacugcuucuuugagccu

SEQ ID NO: 68060 - RNA, 22 nt, Human
gccacagcaacaauaaugcagc

SEQ ID NO: 68061 - RNA, 22 nt, Human
gccacagccucugggaaaacuc

SEQ ID NO: 68062 - RNA, 22 nt, Human
gccacagcucacguuccccauu

SEQ ID NO: 68063 - RNA, 22 nt, Human
gccacagcuuuuaaccucgggg

SEQ ID NO: 68064 - RNA, 22 nt, Human
gccacaggaaagcacccuggag

SEQ ID NO: 68065 - RNA, 22 nt, Human
gccacaggcacuuaagggcugg

SEQ ID NO: 68066 - RNA, 22 nt, Human
gccacaggcuuaggagggaggu

SEQ ID NO: 68067 - RNA, 22 nt, Human
gccacagguggaauuaagaaau

SEQ ID NO: 68068 - RNA, 22 nt, Human
gccacagucaggacggggagag

SEQ ID NO: 68069 - RNA, 22 nt, Human
gccacagugggcuggggccaga

SEQ ID NO: 68070 - RNA, 22 nt, Human
gccacaugucaugugcucagua

SEQ ID NO: 68071 - RNA, 22 nt, Human
gccaccauguagcccauuagag

SEQ ID NO: 68072 - RNA, 22 nt, Human
gccacccugacgccgcagaccc

SEQ ID NO: 68073 - RNA, 22 nt, Human
gccacccugcaaaugcccagga

SEQ ID NO: 68074 - RNA, 21 nt, Human
gccauguuuccuuacuaagag

SEQ ID NO: 68075 - RNA, 22 nt, Human
gccauugaugugaaaguaagac

SEQ ID NO: 68076 - RNA, 22 nt, Human
gccauugggcuguaguuuuuug

SEQ ID NO: 68077 - RNA, 22 nt, Human
gccauuuggcaaaacugacuuc

SEQ ID NO: 68078 - RNA, 22 nt, Human
gcccaaagagcuuugaucucag

SEQ ID NO: 68079 - RNA, 22 nt, Human
gcccaaagccagugugcucucc

SEQ ID NO: 68080 - RNA, 22 nt, Human
gcccaaagucacucagcuagga

SEQ ID NO: 68081 - RNA, 22 nt, Human
gcccaagaucaguggggcagau

SEQ ID NO: 68082 - RNA, 22 nt, Human
gcccaagcagcuucccgagcuu

SEQ ID NO: 68083 - RNA, 22 nt, Human
gcccaagccggagcugggagag

SEQ ID NO: 68084 - RNA, 22 nt, Human
gcccaagcuggacugcaguggc

SEQ ID NO: 68085 - RNA, 22 nt, Human
gcccaagguauaucagagacag

SEQ ID NO: 68086 - RNA, 22 nt, Human
gcccaaggucccauggcagcac

SEQ ID NO: 68087 - RNA, 22 nt, Human
gcccacacaccagcucaggagg

SEQ ID NO: 68088 - RNA, 22 nt, Human
gcccacacagcagauccuuugg

SEQ ID NO: 68089 - RNA, 22 nt, Human
gcccacaccauuuauucuuugu

SEQ ID NO: 68090 - RNA, 22 nt, Human
gcccacaggggaccugguggcu

SEQ ID NO: 68091 - RNA, 22 nt, Human
gcccacagucuaucaguuugcg

SEQ ID NO: 68092 - RNA, 21 nt, Human
gcccacagugaggaggauccc

SEQ ID NO: 68093 - RNA, 22 nt, Human
gcccacaguguagcagguacuc

SEQ ID NO: 68094 - RNA, 22 nt, Human
gcccacaguuaguuugcauggc

SEQ ID NO: 68095 - RNA, 22 nt, Human
gcccacucuggagccuguuccc

SEQ ID NO: 68096 - RNA, 22 nt, Human
gcccacugagugacucccucag

SEQ ID NO: 68097 - RNA, 22 nt, Human
gcccagaaagacugccuaacag

SEQ ID NO: 68098 - RNA, 22 nt, Human
gcccagaaagcaucauugugga

SEQ ID NO: 68099 - RNA, 21 nt, Human
gcccagaagacuggcucugcc

SEQ ID NO: 68100 - RNA, 18 nt, Human
gcccagagcccucuuauu

SEQ ID NO: 68101 - RNA, 22 nt, Human
gcccagagugaguccugggccc

SEQ ID NO: 68102 - RNA, 22 nt, Human
gcccagcaccucucucaggguu

SEQ ID NO: 68103 - RNA, 22 nt, Human
gcccagcacuaaaagcuuugcu

SEQ ID NO: 68104 - RNA, 22 nt, Human
gcccagcuccucugcagacccu

SEQ ID NO: 68105 - RNA, 22 nt, Human
gcccagcugucuggcagggaug

SEQ ID NO: 68106 - RNA, 22 nt, Human
gcccaggaaaugccccguggug

SEQ ID NO: 68107 - RNA, 22 nt, Human
gcccaggaagccaccgggaagu

SEQ ID NO: 68108 - RNA, 22 nt, Human
gcccaggaagugacucagaugu

SEQ ID NO: 68109 - RNA, 22 nt, Human
gcccaggaggcagagguugugg

SEQ ID NO: 68110 - RNA, 20 nt, Human
gccagcacagggagcaguuc

SEQ ID NO: 68111 - RNA, 22 nt, Human
gccagcagcgagaguuuaaccu

SEQ ID NO: 68112 - RNA, 22 nt, Human
gccagcagggcccaaaugcugg

SEQ ID NO: 68113 - RNA, 22 nt, Human
gccagcaguauguccuggcagu

SEQ ID NO: 68114 - RNA, 22 nt, Human
gccagccaagauugagaaggua

SEQ ID NO: 68115 - RNA, 23 nt, Human
gccagccagaauuucuccacugu

SEQ ID NO: 68116 - RNA, 22 nt, Human
gccagccagaguccaucugaga

SEQ ID NO: 68117 - RNA, 22 nt, Human
gccagccaguuugcugauggcu

SEQ ID NO: 68118 - RNA, 20 nt, Human
gccagcccugacacaggagc

SEQ ID NO: 68119 - RNA, 23 nt, Human
gccagccuugcucuccugcagcc

SEQ ID NO: 68120 - RNA, 22 nt, Human
gccagcugaagcccugguggaa

SEQ ID NO: 68121 - RNA, 22 nt, Human
gccagcugaagggaagcuccug

SEQ ID NO: 68122 - RNA, 22 nt, Human
gccagcugaauuuccaacuguu

SEQ ID NO: 68123 - RNA, 22 nt, Human
gccagcugccaaguugugagau

SEQ ID NO: 68124 - RNA, 22 nt, Human
gccagcugcuggaacagcgcga

SEQ ID NO: 68125 - RNA, 22 nt, Human
gccagcugggccuuagggcugg

SEQ ID NO: 68126 - RNA, 22 nt, Human
gccagcugguaggcaccuagcc

SEQ ID NO: 68127 - RNA, 22 nt, Human
gccagcuguaagcuggggugau

SEQ ID NO: 68128 - RNA, 22 nt, Human
gccagcuguaggugguggguug

SEQ ID NO: 68129 - RNA, 22 nt, Human
gccagcuuuggcacaggguggu

SEQ ID NO: 68130 - RNA, 22 nt, Human
gccaggaaaaacguggugggag

SEQ ID NO: 68131 - RNA, 22 nt, Human
gccaggaaaagaagcuggugcu

SEQ ID NO: 68132 - RNA, 22 nt, Human
gccaggaaagcaaaaucaccca

SEQ ID NO: 68133 - RNA, 22 nt, Human
gccaggaaagccacuggcauac

SEQ ID NO: 68134 - RNA, 18 nt, Human
gccaggaagaggaaugug

SEQ ID NO: 68135 - RNA, 22 nt, Human
gccaggaagugcagcccugcca

SEQ ID NO: 68136 - RNA, 22 nt, Human
gccaggaauggagagguggccu

SEQ ID NO: 68137 - RNA, 22 nt, Human
gccaggaggcuuaacuggacag

SEQ ID NO: 68138 - RNA, 19 nt, Human
gccaggagggcucuggcug

SEQ ID NO: 68139 - RNA, 22 nt, Human
gccaggcaaauuaaggaaugca

SEQ ID NO: 68140 - RNA, 22 nt, Human
gccaggcaauguguuagaagcg

SEQ ID NO: 68141 - RNA, 22 nt, Human
gccaggcagcaggaagccagug

SEQ ID NO: 68142 - RNA, 22 nt, Human
gccaggcagccacccucugcga

SEQ ID NO: 68143 - RNA, 22 nt, Human
gccaggcaggccacgcuguguu

SEQ ID NO: 68144 - RNA, 22 nt, Human
gccaggcaggugucggagcccu

SEQ ID NO: 68145 - RNA, 22 nt, Human
gccaggcaugggcuucugggcg

SEQ ID NO: 68146 - RNA, 22 nt, Human
gccaggcauuuauugauugaau

SEQ ID NO: 68147 - RNA, 22 nt, Human
gccaggcuccaggcccuccuga

SEQ ID NO: 68148 - RNA, 19 nt, Human
gccaggcuccauagccggc

SEQ ID NO: 68149 - RNA, 23 nt, Human
gccaggcuccggucuguggccac

SEQ ID NO: 68150 - RNA, 22 nt, Human
gccaggcucucagugacugccc

SEQ ID NO: 68151 - RNA, 22 nt, Human
gccaggcucuugguuauguuuu

SEQ ID NO: 68152 - RNA, 22 nt, Human
gccaggcuggcaaaaggaaacc

SEQ ID NO: 68153 - RNA, 22 nt, Human
gccaggcuggccagcaccuucu

SEQ ID NO: 68154 - RNA, 22 nt, Human
gccaggcuggugcaaggauauu

SEQ ID NO: 68155 - RNA, 22 nt, Human
gccagggaggcuguaggguccu

SEQ ID NO: 68156 - RNA, 22 nt, Human
gccagggcaggggagcaucugc

SEQ ID NO: 68157 - RNA, 22 nt, Human
gccagggcucgcggucccucgu

SEQ ID NO: 68158 - RNA, 22 nt, Human
gccagggcugugcagguuuguu

SEQ ID NO: 68159 - RNA, 22 nt, Human
gccagggggucagcaggcacuu

SEQ ID NO: 68160 - RNA, 22 nt, Human
gccaggguccugaagaccaagu

SEQ ID NO: 68161 - RNA, 22 nt, Human
gccaggguugccaaugggggca

SEQ ID NO: 68162 - RNA, 22 nt, Human
gccagguccccucauggcuccu

SEQ ID NO: 68163 - RNA, 20 nt, Human
gccaguaccauucugccacu

SEQ ID NO: 68164 - RNA, 22 nt, Human
gccaguggcccucuggagaagg

SEQ ID NO: 68165 - RNA, 22 nt, Human
gccaguggugagauucccuggg

SEQ ID NO: 68166 - RNA, 22 nt, Human
gccagugugcaagaaaacagaa

SEQ ID NO: 68167 - RNA, 22 nt, Human
gccaguuccuguggagucagag

SEQ ID NO: 68168 - RNA, 22 nt, Human
gccauaaauugcuggucaaaau

SEQ ID NO: 68169 - RNA, 22 nt, Human
gccaucaucaagaauguacagc

SEQ ID NO: 68170 - RNA, 22 nt, Human
gccauccucugagcacuaggca

SEQ ID NO: 68171 - RNA, 22 nt, Human
gccaugcauccuuggacuuggc

SEQ ID NO: 68172 - RNA, 22 nt, Human
gccaugcuugguaugcugugag

SEQ ID NO: 68173 - RNA, 22 nt, Human
gccauggggacuucauggauuu

SEQ ID NO: 68174 - RNA, 22 nt, Human
gccauggggcucagcugcacua

SEQ ID NO: 68175 - RNA, 22 nt, Human
gccaugggucugcuggcucagc

SEQ ID NO: 68176 - RNA, 22 nt, Human
gccauuaaugugaaggaaggaa

SEQ ID NO: 68177 - RNA, 22 nt, Human
gccauuuugaaaaccguugcua

SEQ ID NO: 68178 - RNA, 22 nt, Human
gcccaagaucuggagcugcagg

SEQ ID NO: 68179 - RNA, 20 nt, Human
gcccaagcgccggccgcaga

SEQ ID NO: 68180 - RNA, 22 nt, Human
gcccaagcuccgccuccugucg

SEQ ID NO: 68181 - RNA, 22 nt, Human
gcccacagaggcaccaccaggc

SEQ ID NO: 68182 - RNA, 22 nt, Human
gcccacagguccuaccucuuuc

SEQ ID NO: 68183 - RNA, 22 nt, Human
gcccacaguacgaggcucaggc

SEQ ID NO: 68184 - RNA, 22 nt, Human
gcccacaguuaaugggggcucu

SEQ ID NO: 68185 - RNA, 17 nt, Human
gcccacccuuaggagcu

SEQ ID NO: 68186 - RNA, 22 nt, Human
gcccacuccagcuucucccaca

SEQ ID NO: 68187 - RNA, 22 nt, Human
gcccacuggcuggagugcuggu

SEQ ID NO: 68188 - RNA, 22 nt, Human
gcccagaaaugaacuugcugug

SEQ ID NO: 68189 - RNA, 22 nt, Human
gcccagagagaugaagugaugg

SEQ ID NO: 68190 - RNA, 22 nt, Human
gcccagagggaagaggugucau

SEQ ID NO: 68191 - RNA, 22 nt, Human
gcccugucggaacugcgaccuc

SEQ ID NO: 68192 - RNA, 20 nt, Human
gcccugugaugucuugaccu

SEQ ID NO: 68193 - RNA, 22 nt, Human
gcccugugcgcugaguucaggg

SEQ ID NO: 68194 - RNA, 22 nt, Human
gcccuguggacccaggaacucu

SEQ ID NO: 68195 - RNA, 22 nt, Human
gcccuguggauuaaugagcagg

SEQ ID NO: 68196 - RNA, 22 nt, Human
gcccuguuuucuggguuccuug

SEQ ID NO: 68197 - RNA, 22 nt, Human
gcccuuagccuuauagccucua

SEQ ID NO: 68198 - RNA, 22 nt, Human
gcccuucaguuacuccuugaug

SEQ ID NO: 68199 - RNA, 22 nt, Human
gcccuuccaacccagagggcaa

SEQ ID NO: 68200 - RNA, 22 nt, Human
gcccuugacaguggcagaagca

SEQ ID NO: 68201 - RNA, 22 nt, Human
gcccuuggaacagccuccugcu

SEQ ID NO: 68202 - RNA, 22 nt, Human
gcccuuggaagcggcagguagc

SEQ ID NO: 68203 - RNA, 22 nt, Human
gccgaagacgcugggcgugggc

SEQ ID NO: 68204 - RNA, 22 nt, Human
gccgcggcauggcgagcaggac

SEQ ID NO: 68205 - RNA, 22 nt, Human
gccgggcccugaccucagaguu

SEQ ID NO: 68206 - RNA, 22 nt, Human
gccgugcgugcgcaggugcugu

SEQ ID NO: 68207 - RNA, 22 nt, Human
gccguuauucugcuggccccgg

SEQ ID NO: 68208 - RNA, 22 nt, Human
gccuaagauuguguuuuccuga

SEQ ID NO: 68209 - RNA, 22 nt, Human
gccuaauaugcaaaauugauac

SEQ ID NO: 68210 - RNA, 22 nt, Human
gccuagagaagcuuacugaagc

SEQ ID NO: 68211 - RNA, 22 nt, Human
gccuaggaguacagaaugguuu

SEQ ID NO: 68212 - RNA, 20 nt, Human
gccuagggguugggaaagca

SEQ ID NO: 68213 - RNA, 22 nt, Human
gccuaggguuggccugagaauc

SEQ ID NO: 68214 - RNA, 22 nt, Human
gccuagugcacuggcagggcuc

SEQ ID NO: 68215 - RNA, 22 nt, Human
gccucacagacugacugaaagc

SEQ ID NO: 68216 - RNA, 21 nt, Human
gccucaccaugucaagccagg

SEQ ID NO: 68217 - RNA, 22 nt, Human
gccucacugcagccccaggaag

SEQ ID NO: 68218 - RNA, 22 nt, Human
gccucagaaagcuuuuauucau

SEQ ID NO: 68219 - RNA, 19 nt, Human
uacauacuuauucuaaaag

SEQ ID NO: 68220 - RNA, 22 nt, Human
uacauagaacauguuuaauguc

SEQ ID NO: 68221 - RNA, 22 nt, Human
uacauagaauauuucacuuaaa

SEQ ID NO: 68222 - RNA, 22 nt, Human
uacauaguuccauuuacaggaa

SEQ ID NO: 68223 - RNA, 20 nt, Human
uacauauuauaucagcugca

SEQ ID NO: 68224 - RNA, 22 nt, Human
uacauauuguccauaguugcuu

SEQ ID NO: 68225 - RNA, 22 nt, Human
uacaucaaaucaauguuccagu

SEQ ID NO: 68226 - RNA, 21 nt, Human
uacaucaguuuucuuggcuca

SEQ ID NO: 68227 - RNA, 22 nt, Human
uacaucauaauaauacuuagaa

SEQ ID NO: 68228 - RNA, 22 nt, Human
uacaucaugaaagcauacauca

SEQ ID NO: 68229 - RNA, 22 nt, Human
uacaucccagccagcagaauca

SEQ ID NO: 68230 - RNA, 18 nt, Human
uacaucuauauaguguuu

SEQ ID NO: 68231 - RNA, 22 nt, Human
uacaucugauuuaccuacugaa

SEQ ID NO: 68232 - RNA, 22 nt, Human
uacaugaaguugucuaaacugg

SEQ ID NO: 68233 - RNA, 22 nt, Human
uacaugcaugucacagaaugaa

SEQ ID NO: 68234 - RNA, 22 nt, Human
gcucaggcaggagugcaguggc

SEQ ID NO: 68235 - RNA, 23 nt, Human
gcucaggcaucauucuuccuggc

SEQ ID NO: 68236 - RNA, 18 nt, Human
gcucaggcccuagucagu

SEQ ID NO: 68237 - RNA, 22 nt, Human
gcucaggccucggacacacaau

SEQ ID NO: 68238 - RNA, 20 nt, Human
gcucagggaauucaggaagc

SEQ ID NO: 68239 - RNA, 22 nt, Human
gcucagggccauggaccagcag

SEQ ID NO: 68240 - RNA, 20 nt, Human
gcucagggccugggucugga

SEQ ID NO: 68241 - RNA, 22 nt, Human
gcucaggggaaugggcugccgu

SEQ ID NO: 68242 - RNA, 18 nt, Human
gcucagguauagacaggg

SEQ ID NO: 68243 - RNA, 20 nt, Human
gcucaggugacagucaggag

SEQ ID NO: 68244 - RNA, 23 nt, Human
gcucagguggcucagggacugau

SEQ ID NO: 68245 - RNA, 20 nt, Human
gcucaguggagaaaugcacc

SEQ ID NO: 68246 - RNA, 22 nt, Human
gcucagugguauucggaaacug

SEQ ID NO: 68247 - RNA, 21 nt, Human
gcucaugguggagaaaagcag

SEQ ID NO: 68248 - RNA, 22 nt, Human
gcuccaaaguacagugacuuac

SEQ ID NO: 68249 - RNA, 22 nt, Human
gcuccaaaguccagcuguuucc

SEQ ID NO: 68250 - RNA, 22 nt, Human
gcuccacuugcagcuaggcuug

SEQ ID NO: 68251 - RNA, 21 nt, Human
gcuccagaacucuaugcuaac

SEQ ID NO: 68252 - RNA, 22 nt, Human
gcuccagaugaaaggccagagg

SEQ ID NO: 68253 - RNA, 22 nt, Human
gcuccagcuccggcuccgaagc

SEQ ID NO: 68254 - RNA, 22 nt, Human
gcuccaggagcucacagcucgc

SEQ ID NO: 68255 - RNA, 22 nt, Human
gcuccaggccccagcguuccgc

SEQ ID NO: 68256 - RNA, 22 nt, Human
gcuccagggaguacauuuauca

SEQ ID NO: 68257 - RNA, 22 nt, Human
gcuccaggguggaugacaauuc

SEQ ID NO: 68258 - RNA, 22 nt, Human
gcucccaccuuugcuaucagua

SEQ ID NO: 68259 - RNA, 22 nt, Human
gcucccagacugaccagaggug

SEQ ID NO: 68260 - RNA, 20 nt, Human
gcucccagccugcagucccc

SEQ ID NO: 68261 - RNA, 22 nt, Human
gcucccagcuggagccucaaca

SEQ ID NO: 68262 - RNA, 22 nt, Human
gcucccagggacacuggccacu

SEQ ID NO: 68263 - RNA, 22 nt, Human
gcucccagguucuugggccuug

SEQ ID NO: 68264 - RNA, 22 nt, Human
gcuccccagcuuagcccuggcu

SEQ ID NO: 68265 - RNA, 20 nt, Human
gcuccccuucucugggccuc

SEQ ID NO: 68266 - RNA, 22 nt, Human
gcucccuccaugaggcagaccg

SEQ ID NO: 68267 - RNA, 22 nt, Human
gcucccucugcucaggcacuug

SEQ ID NO: 68268 - RNA, 22 nt, Human
gcucccugcacucugcagcccu

SEQ ID NO: 68269 - RNA, 22 nt, Human
gcucccugcagcugagaguucc

SEQ ID NO: 68270 - RNA, 22 nt, Human
gcucccuggaauguuggcugcc

SEQ ID NO: 68271 - RNA, 20 nt, Human
gcucccugguagaaauguuu

SEQ ID NO: 68272 - RNA, 22 nt, Human
gcucccugguauugcugccacu

SEQ ID NO: 68273 - RNA, 22 nt, Human
gcucccugugcucugagugaua

SEQ ID NO: 68274 - RNA, 22 nt, Human
gcucccuguucucagccaugau

SEQ ID NO: 68275 - RNA, 22 nt, Human
gcuccgugggcauugcuaggug

SEQ ID NO: 68276 - RNA, 22 nt, Human
gcuccucugucaaaugagagug

SEQ ID NO: 68277 - RNA, 22 nt, Human
gcuccucuucucccacugaaug

SEQ ID NO: 68278 - RNA, 22 nt, Human
gcuccugcagagauguuccaug

SEQ ID NO: 68279 - RNA, 17 nt, Human
gcuccugcaggucagga

SEQ ID NO: 68280 - RNA, 22 nt, Human
gcuccuggagagauugagaaag

SEQ ID NO: 68281 - RNA, 22 nt, Human
gcuccuggcauccugcuuuuaa

SEQ ID NO: 68282 - RNA, 22 nt, Human
gcuccugucaucaaacaauccu

SEQ ID NO: 68283 - RNA, 22 nt, Human
gcuccugucuuggggcacuggc

SEQ ID NO: 68284 - RNA, 22 nt, Human
gcucggccccgacggccggcgg

SEQ ID NO: 68285 - RNA, 21 nt, Human
gcucuaagcuuugggaagaau

SEQ ID NO: 68286 - RNA, 22 nt, Human
gcucuagcaaggcuggccuggg

SEQ ID NO: 68287 - RNA, 22 nt, Human
gcucuaugucgaaagccaguua

SEQ ID NO: 68288 - RNA, 22 nt, Human
gcucuauuacuuucaauaaaaa

SEQ ID NO: 68289 - RNA, 22 nt, Human
gcucucaaguccuuuugcucag

SEQ ID NO: 68290 - RNA, 22 nt, Human
gcucucagaugcuccagcagcc

SEQ ID NO: 68291 - RNA, 22 nt, Human
gcucuccacugaccacggggca

SEQ ID NO: 68292 - RNA, 21 nt, Human
gcucuccagggccagcccagg

SEQ ID NO: 68293 - RNA, 22 nt, Human
gcucuccaggucucaugcacug

SEQ ID NO: 68294 - RNA, 22 nt, Human
gcucucccgcagccuggugggc

SEQ ID NO: 68295 - RNA, 22 nt, Human
gcucucucgugaacaggugguu

SEQ ID NO: 68296 - RNA, 22 nt, Human
gcucucucuuggggauucagca

SEQ ID NO: 68297 - RNA, 22 nt, Human
gcucucugaggugcuggcagag

SEQ ID NO: 68298 - RNA, 22 nt, Human
gcucucugcagccuccuuggag

SEQ ID NO: 68299 - RNA, 22 nt, Human
gcucucugccuuucucaaugac

SEQ ID NO: 68300 - RNA, 22 nt, Human
gcucucuggaggccauggacag

SEQ ID NO: 68301 - RNA, 22 nt, Human
gcucucuguuauuaagaucuuu

SEQ ID NO: 68302 - RNA, 22 nt, Human
gcucucuuugugccacuuaagg

SEQ ID NO: 68303 - RNA, 22 nt, Human
gcucugaacuuccaccuuuuca

SEQ ID NO: 68304 - RNA, 22 nt, Human
gcucugaaucaaucagauaagg

SEQ ID NO: 68305 - RNA, 22 nt, Human
gcucugagagagcaaagucacc

SEQ ID NO: 68306 - RNA, 22 nt, Human
gcucugagaucauucacuguaa

SEQ ID NO: 68307 - RNA, 22 nt, Human
gcucugagcugucuugcagguc

SEQ ID NO: 68308 - RNA, 22 nt, Human
gcucugaggcugugaggugcug

SEQ ID NO: 68309 - RNA, 22 nt, Human
gcucugccaaggacccauucuc

SEQ ID NO: 68310 - RNA, 22 nt, Human
gcucugcccaggaccguccuug

SEQ ID NO: 68311 - RNA, 17 nt, Human
gcucugccccagccucu

SEQ ID NO: 68312 - RNA, 22 nt, Human
gcucugccuccccuaguguuac

SEQ ID NO: 68313 - RNA, 22 nt, Human
gcucugccucuuugcugcguca

SEQ ID NO: 68314 - RNA, 22 nt, Human
gcucugccuggucgcgugcugg

SEQ ID NO: 68315 - RNA, 22 nt, Human
gcucugcugacagcugggacag

SEQ ID NO: 68316 - RNA, 22 nt, Human
gcucugcuggagggaaagagaa

SEQ ID NO: 68317 - RNA, 22 nt, Human
gcucuggacccuggaguggcug

SEQ ID NO: 68318 - RNA, 22 nt, Human
gcucuggagagccauaggcccu

SEQ ID NO: 68319 - RNA, 22 nt, Human
gcucuggccagacccucagugg

SEQ ID NO: 68320 - RNA, 22 nt, Human
gcucuggcccaaacccuuucua

SEQ ID NO: 68321 - RNA, 22 nt, Human
gcucuggcuacuguggcuaccg

SEQ ID NO: 68322 - RNA, 22 nt, Human
gcucuggcucaaaccaccggcu

SEQ ID NO: 68323 - RNA, 18 nt, Human
gcucuggcucaccuccag

SEQ ID NO: 68324 - RNA, 20 nt, Human
gcucugggagggaugugaug

SEQ ID NO: 68325 - RNA, 22 nt, Human
gcucugggguuggaaagugauc

SEQ ID NO: 68326 - RNA, 22 nt, Human
gcucuggguucugauuuaugag

SEQ ID NO: 68327 - RNA, 22 nt, Human
gcucugguaccagcuacuccua

SEQ ID NO: 68328 - RNA, 22 nt, Human
gcucugguggugaucagacgcu

SEQ ID NO: 68329 - RNA, 17 nt, Human
gcugccaccuuuggagc

SEQ ID NO: 68330 - RNA, 22 nt, Human
gcugccagaagaggagggguua

SEQ ID NO: 68331 - RNA, 22 nt, Human
gcugccagcacaguucagcugu

SEQ ID NO: 68332 - RNA, 22 nt, Human
gcugccagcucacucuccugag

SEQ ID NO: 68333 - RNA, 22 nt, Human
gcugccaguaguuggagcucca

SEQ ID NO: 68334 - RNA, 22 nt, Human
gcugccaguuccuucuuacucc

SEQ ID NO: 68335 - RNA, 22 nt, Human
gcugccaugguccaggcuccag

SEQ ID NO: 68336 - RNA, 22 nt, Human
gcugccauguugugaggacacu

SEQ ID NO: 68337 - RNA, 22 nt, Human
gcugccauuaugggaacgagaa

SEQ ID NO: 68338 - RNA, 22 nt, Human
gcugcccaauuacagggccgug

SEQ ID NO: 68339 - RNA, 22 nt, Human
gcugcccacaaccccgugucua

SEQ ID NO: 68340 - RNA, 22 nt, Human
gcugcccacaaugauuacaugg

SEQ ID NO: 68341 - RNA, 22 nt, Human
gcugcccaggguggagccggcu

SEQ ID NO: 68342 - RNA, 22 nt, Human
gcugcccaguucugcugcugcc

SEQ ID NO: 68343 - RNA, 22 nt, Human
gcugcccauugcacguuguggc

SEQ ID NO: 68344 - RNA, 18 nt, Human
gcugcccuagcuccccuc

SEQ ID NO: 68345 - RNA, 22 nt, Human
gcugcccucuguguuuguccuu

SEQ ID NO: 68346 - RNA, 22 nt, Human
gcugcccugacaagcuacuccc

SEQ ID NO: 68347 - RNA, 22 nt, Human
gcugcccugacuccagcagccu

SEQ ID NO: 68348 - RNA, 22 nt, Human
gcugcccuguccggcucuccug

SEQ ID NO: 68349 - RNA, 22 nt, Human
gcugcccuguuuagccaggguu

SEQ ID NO: 68350 - RNA, 22 nt, Human
gcugcccuucgucaucuauaaa

SEQ ID NO: 68351 - RNA, 22 nt, Human
gcugccguuggcucuucaggcc

SEQ ID NO: 68352 - RNA, 22 nt, Human
gcugccugcucacccggccugg

SEQ ID NO: 68353 - RNA, 22 nt, Human
gcugccuggagcucagccugcc

SEQ ID NO: 68354 - RNA, 22 nt, Human
gcugccugggcaggaggcgcug

SEQ ID NO: 68355 - RNA, 16 nt, Human
gcuggagggagggguu

SEQ ID NO: 68356 - RNA, 22 nt, Human
gcuggagguagggagguccugu

SEQ ID NO: 68357 - RNA, 22 nt, Human
gcuggaguaggaccaugcuuga

SEQ ID NO: 68358 - RNA, 22 nt, Human
gcuggaguccagugguaugauc

SEQ ID NO: 68359 - RNA, 22 nt, Human
gcuggagucccugccuuuccuu

SEQ ID NO: 68360 - RNA, 16 nt, Human
gcuggaguccuggagc

SEQ ID NO: 68361 - RNA, 22 nt, Human
gcuggagugcugaggugcagug

SEQ ID NO: 68362 - RNA, 22 nt, Human
gcuggaguuguggguuuacuaa

SEQ ID NO: 68363 - RNA, 22 nt, Human
gcuggaucaaguccuucaccca

SEQ ID NO: 68364 - RNA, 19 nt, Human
gcuggauggauccuggagu

SEQ ID NO: 68365 - RNA, 22 nt, Human
gcuggauuggagcaauagaguc

SEQ ID NO: 68366 - RNA, 22 nt, Human
gcuggcaccugcaccaagcagg

SEQ ID NO: 68367 - RNA, 22 nt, Human
gcuggcagaauuucuucuugcu

SEQ ID NO: 68368 - RNA, 19 nt, Human
gcuggcagauguggccgug

SEQ ID NO: 68369 - RNA, 22 nt, Human
gcuggcagccaagugaagaggg

SEQ ID NO: 68370 - RNA, 22 nt, Human
gcuggcagcuggaaguugggcu

SEQ ID NO: 68371 - RNA, 22 nt, Human
gcuggcaguaaaggguuuggca

SEQ ID NO: 68372 - RNA, 22 nt, Human
gcuggccagcccucuuccucca

SEQ ID NO: 68373 - RNA, 22 nt, Human
gcuggcccagcguggggccgug

SEQ ID NO: 68374 - RNA, 22 nt, Human
gcuggcccagggucaccuagga

SEQ ID NO: 68375 - RNA, 22 nt, Human
gcuggcccagugacccacagug

SEQ ID NO: 68376 - RNA, 22 nt, Human
gcuggccccgagugcuacgcuc

SEQ ID NO: 68377 - RNA, 22 nt, Human
gcuggccucaucacugacuucu

SEQ ID NO: 68378 - RNA, 22 nt, Human
gcuggccuccugcuagauggaa

SEQ ID NO: 68379 - RNA, 22 nt, Human
gcuggccucuacaggccggcca

SEQ ID NO: 68380 - RNA, 22 nt, Human
gcuggccugaccagccacaggc

SEQ ID NO: 68381 - RNA, 22 nt, Human
gcuggccugaccugaggcuggg

SEQ ID NO: 68382 - RNA, 22 nt, Human
gcuggccugucuagagccuuac

SEQ ID NO: 68383 - RNA, 22 nt, Human
gcuggccuugaggugucuuuau

SEQ ID NO: 68384 - RNA, 21 nt, Human
gcuggcucaaaugcuuguguc

SEQ ID NO: 68385 - RNA, 22 nt, Human
gcuggcucagggacuagaguuu

SEQ ID NO: 68386 - RNA, 22 nt, Human
gcuggcucagggggauuagcaa

SEQ ID NO: 68387 - RNA, 22 nt, Human
gcuggcucugccccaccuguuc

SEQ ID NO: 68388 - RNA, 22 nt, Human
gcuggcucuucaguggagauag

SEQ ID NO: 68389 - RNA, 22 nt, Human
gcuggcucuuuuugccgggcuc

SEQ ID NO: 68390 - RNA, 17 nt, Human
gcuggcugacccaugcc

SEQ ID NO: 68391 - RNA, 18 nt, Human
gcuggcugcacuucugcu

SEQ ID NO: 68392 - RNA, 22 nt, Human
gcuggcugcgucaucacagggc

SEQ ID NO: 68393 - RNA, 22 nt, Human
gcuggcuggaugguugguucgc

SEQ ID NO: 68394 - RNA, 22 nt, Human
gcuggcugugggcuccacgcuc

SEQ ID NO: 68395 - RNA, 22 nt, Human
gcuggcuucccuaccugcaccu

SEQ ID NO: 68396 - RNA, 21 nt, Human
gcuggcuuccugagggcugag

SEQ ID NO: 68397 - RNA, 18 nt, Human
gcuggcuugcuggguuug

SEQ ID NO: 68398 - RNA, 22 nt, Human
gcuggcuugucccaggacaaag

SEQ ID NO: 68399 - RNA, 21 nt, Human
gcuggcuuuccuggaugugca

SEQ ID NO: 68400 - RNA, 22 nt, Human
gcuggcuuugcacugggugcau

SEQ ID NO: 68401 - RNA, 22 nt, Human
gcugggaaccaugggaaggcag

SEQ ID NO: 68402 - RNA, 22 nt, Human
gcugggaagagaugcacaugau

SEQ ID NO: 68403 - RNA, 22 nt, Human
gcugggaaugauuuuggagagg

SEQ ID NO: 68404 - RNA, 22 nt, Human
gcugggacaacaggugagcacc

SEQ ID NO: 68405 - RNA, 22 nt, Human
gcugggacugagacagugaccu

SEQ ID NO: 68406 - RNA, 22 nt, Human
gcugggagcaaguacucaucuu

SEQ ID NO: 68407 - RNA, 19 nt, Human
gcugggagcagacccuccc

SEQ ID NO: 68408 - RNA, 22 nt, Human
gcugggaggaucucucccuguc

SEQ ID NO: 68409 - RNA, 16 nt, Human
gcugggagggagaggu

SEQ ID NO: 68410 - RNA, 22 nt, Human
gcugggagggaggcuauacccu

SEQ ID NO: 68411 - RNA, 22 nt, Human
gcugggcaacgggcagaaagau

SEQ ID NO: 68412 - RNA, 22 nt, Human
gcugggcacugucccauaggcu

SEQ ID NO: 68413 - RNA, 22 nt, Human
gcugggcagccccuacagagag

SEQ ID NO: 68414 - RNA, 22 nt, Human
gcugggcaggccucgugagggc

SEQ ID NO: 68415 - RNA, 22 nt, Human
gcugggcaugugaccaacagaa

SEQ ID NO: 68416 - RNA, 22 nt, Human
gcugggccagagcagcagcacu

SEQ ID NO: 68417 - RNA, 22 nt, Human
gcugggcucaccaggccacuag

SEQ ID NO: 68418 - RNA, 22 nt, Human
gcugggcucuuuaccccuguac

SEQ ID NO: 68419 - RNA, 22 nt, Human
gcugggcugcccaaccucugac

SEQ ID NO: 68420 - RNA, 22 nt, Human
gcugggcuucacagagccuuua

SEQ ID NO: 68421 - RNA, 22 nt, Human
gcugggcuugguuucccugcuu

SEQ ID NO: 68422 - RNA, 22 nt, Human
gcuggggagaauuggguuaucu

SEQ ID NO: 68423 - RNA, 22 nt, Human
gcuggggcugggcugaggaaga

SEQ ID NO: 68424 - RNA, 20 nt, Human
gcugggggugugcugaguga

SEQ ID NO: 68425 - RNA, 21 nt, Human
gcugggucagcagguccucug

SEQ ID NO: 68426 - RNA, 22 nt, Human
gcugggucccaagccuggggag

SEQ ID NO: 68427 - RNA, 22 nt, Human
gcugggucucucccugguccug

SEQ ID NO: 68428 - RNA, 22 nt, Human
gcugggucuggaugcucaggug

SEQ ID NO: 68429 - RNA, 22 nt, Human
gcugggugauucauuuccauaa

SEQ ID NO: 68430 - RNA, 22 nt, Human
gcuggguuuucuuccgggccua

SEQ ID NO: 68431 - RNA, 16 nt, Human
gcuggucaagcagcag

SEQ ID NO: 68432 - RNA, 22 nt, Human
gcugguccagggccucuguggg

SEQ ID NO: 68433 - RNA, 22 nt, Human
gcuggucuccgccgcucccuga

SEQ ID NO: 68434 - RNA, 20 nt, Human
gcuggugggggcuugacaug

SEQ ID NO: 68435 - RNA, 22 nt, Human
gcuggugugugaaccuagggac

SEQ ID NO: 68436 - RNA, 22 nt, Human
gcugguuucacccaaccgaugu

SEQ ID NO: 68437 - RNA, 22 nt, Human
gcugguuuccuuaucuauaaag

SEQ ID NO: 68438 - RNA, 22 nt, Human
gcuguacaaauuccacaagaga

SEQ ID NO: 68439 - RNA, 22 nt, Human
ggcacacagauggagcacuagc

SEQ ID NO: 68440 - RNA, 22 nt, Human
ggcacacagcuuggcaggagau

SEQ ID NO: 68441 - RNA, 22 nt, Human
ggcacagcaggagcuaugugaa

SEQ ID NO: 68442 - RNA, 21 nt, Human
ggcacagccugaaaugccuca

SEQ ID NO: 68443 - RNA, 22 nt, Human
ggcacagcucaggucccagcuc

SEQ ID NO: 68444 - RNA, 22 nt, Human
ggcacagucccuggcacagagu

SEQ ID NO: 68445 - RNA, 22 nt, Human
ggcaccagcaggcaccgaugcc

SEQ ID NO: 68446 - RNA, 22 nt, Human
ggcaccagccaccuauuucuag

SEQ ID NO: 68447 - RNA, 22 nt, Human
ggcaccaggaucagucugucau

SEQ ID NO: 68448 - RNA, 22 nt, Human
ggcaccaggcugggcauaggcc

SEQ ID NO: 68449 - RNA, 22 nt, Human
ggcaccugcucaucuggacuca

SEQ ID NO: 68450 - RNA, 22 nt, Human
ggcaccugguaagugcucagua

SEQ ID NO: 68451 - RNA, 19 nt, Human
ggcaccuuggucuuggacu

SEQ ID NO: 68452 - RNA, 22 nt, Human
ggcaccuuucaucccaucuaga

SEQ ID NO: 68453 - RNA, 19 nt, Human
ggcaccuuucugcuguguc

SEQ ID NO: 68454 - RNA, 22 nt, Human
ggcacucaauaaauguugccaa

SEQ ID NO: 68455 - RNA, 22 nt, Human
ggcacucagagauucaggcugu

SEQ ID NO: 68456 - RNA, 23 nt, Human
ggcacucggccgugaacucgugc

SEQ ID NO: 68457 - RNA, 22 nt, Human
ggcacugaaccaggacacaagc

SEQ ID NO: 68458 - RNA, 22 nt, Human
ggcacugaauuucuuggcaucu

SEQ ID NO: 68459 - RNA, 21 nt, Human
ggcacugagccagauggacuc

SEQ ID NO: 68460 - RNA, 22 nt, Human
ggcacugaucugauuucccucc

SEQ ID NO: 68461 - RNA, 22 nt, Human
ggcacugauuccauucaugaag

SEQ ID NO: 68462 - RNA, 22 nt, Human
ggcacugcagguaagugcuguc

SEQ ID NO: 68463 - RNA, 22 nt, Human
ggcacugcccacccucacaggg

SEQ ID NO: 68464 - RNA, 21 nt, Human
ggcacugcugggccaucugcu

SEQ ID NO: 68465 - RNA, 22 nt, Human
ggcacugcuguaggcagugagg

SEQ ID NO: 68466 - RNA, 18 nt, Human
ggcacugcuguuccccuu

SEQ ID NO: 68467 - RNA, 22 nt, Human
ggcacugcuuccugagccugag

SEQ ID NO: 68468 - RNA, 22 nt, Human
ggcacuggagacuguuaugaga

SEQ ID NO: 68469 - RNA, 22 nt, Human
ggcacugggaaugcagugauga

SEQ ID NO: 68470 - RNA, 22 nt, Human
ggcacuguuuuuguauucaguu

SEQ ID NO: 68471 - RNA, 22 nt, Human
ggcagaaggcaauuagagacug

SEQ ID NO: 68472 - RNA, 22 nt, Human
ggcagaagguugaaguaauuug

SEQ ID NO: 68473 - RNA, 22 nt, Human
ggcagacuguaauaggagaauu

SEQ ID NO: 68474 - RNA, 22 nt, Human
ggcagagaaucuggcuguuuac

SEQ ID NO: 68475 - RNA, 22 nt, Human
ggcagagccucagcccuccacc

SEQ ID NO: 68476 - RNA, 22 nt, Human
ggcagagcugcaugagcacuca

SEQ ID NO: 68477 - RNA, 20 nt, Human
ggcagagggccugggagaag

SEQ ID NO: 68478 - RNA, 22 nt, Human
ggcagagugcucugggcagggg

SEQ ID NO: 68479 - RNA, 18 nt, Human
ggcagaugacaggagaga

SEQ ID NO: 68480 - RNA, 22 nt, Human
ggcagauggaaggacagacgga

SEQ ID NO: 68481 - RNA, 22 nt, Human
ggcagauguuauaugaucugag

SEQ ID NO: 68482 - RNA, 22 nt, Human
ggcagauguugcagugagcaga

SEQ ID NO: 68483 - RNA, 22 nt, Human
ggcagcaacagguguguuguga

SEQ ID NO: 68484 - RNA, 20 nt, Human
ggcagcaaccauaugcuaca

SEQ ID NO: 68485 - RNA, 22 nt, Human
ggcagcaagcagaaguucuaug

SEQ ID NO: 68486 - RNA, 19 nt, Human
ggcagcaagcucugaaggc

SEQ ID NO: 68487 - RNA, 22 nt, Human
ggcagcaaugcugugcaggcau

SEQ ID NO: 68488 - RNA, 22 nt, Human
ggcagcaauucuucagaaucau

SEQ ID NO: 68489 - RNA, 22 nt, Human
ggcagcagaacuggcccuguau

SEQ ID NO: 68490 - RNA, 22 nt, Human
ggcagcaggcgacuucccuauu

SEQ ID NO: 68491 - RNA, 22 nt, Human
ggcagcagggucuagauugaug

SEQ ID NO: 68492 - RNA, 22 nt, Human
ggcagcaguaggagcuaaucuu

SEQ ID NO: 68493 - RNA, 22 nt, Human
ggcagcaguccauggcccaagg

SEQ ID NO: 68494 - RNA, 22 nt, Human
ggcagcauauauucagugggca

SEQ ID NO: 68495 - RNA, 22 nt, Human
ggcagcaucccauggaccgcau

SEQ ID NO: 68496 - RNA, 22 nt, Human
ggcagcauccgcccggcacccu

SEQ ID NO: 68497 - RNA, 22 nt, Human
ggcagcauugccaauccagaca

SEQ ID NO: 68498 - RNA, 22 nt, Human
ggcagcauugccuuugcaguga

SEQ ID NO: 68499 - RNA, 22 nt, Human
ggcagcauuuagagcacagugu

SEQ ID NO: 68500 - RNA, 22 nt, Human
ggcagccagcggguggacgcgc

SEQ ID NO: 68501 - RNA, 22 nt, Human
ggcagccaggaggguguaguuu

SEQ ID NO: 68502 - RNA, 22 nt, Human
ggcagccaguagggccagccug

SEQ ID NO: 68503 - RNA, 22 nt, Human
ggcagccccaucagagacgcug

SEQ ID NO: 68504 - RNA, 21 nt, Human
ggcagcccgcccucuccuggc

SEQ ID NO: 68505 - RNA, 18 nt, Human
ggcagccuacccacuugu

SEQ ID NO: 68506 - RNA, 22 nt, Human
ggcagccuugagggaggccugg

SEQ ID NO: 68507 - RNA, 22 nt, Human
ggcagcgcccgaguccgcagcu

SEQ ID NO: 68508 - RNA, 22 nt, Human
ggaggccuccugggggagguuc

SEQ ID NO: 68509 - RNA, 19 nt, Human
ggaggccuggguauuugcc

SEQ ID NO: 68510 - RNA, 22 nt, Human
ggaggcggggaaggcaucccau

SEQ ID NO: 68511 - RNA, 22 nt, Human
ggaggcuccacugcucuuccug

SEQ ID NO: 68512 - RNA, 22 nt, Human
ggaggcucccacgcagcucaca

SEQ ID NO: 68513 - RNA, 22 nt, Human
ggaggcucuaaacuuuccuugg

SEQ ID NO: 68514 - RNA, 18 nt, Human
ggaggcucugugguuucc

SEQ ID NO: 68515 - RNA, 22 nt, Human
ggaggcugcugccucacguggg

SEQ ID NO: 68516 - RNA, 19 nt, Human
ggaggcuucuuggggucgg

SEQ ID NO: 68517 - RNA, 22 nt, Human
ggagggagcauccccuugcuga

SEQ ID NO: 68518 - RNA, 22 nt, Human
ggagggcaacuuuucaguaggu

SEQ ID NO: 68519 - RNA, 22 nt, Human
ggagggcagaguccccugcuga

SEQ ID NO: 68520 - RNA, 20 nt, Human
ggagggcagcugagaguugg

SEQ ID NO: 68521 - RNA, 22 nt, Human
ggagggcgacagggcgaccgcg

SEQ ID NO: 68522 - RNA, 22 nt, Human
ggagggcucaauugacuccuga

SEQ ID NO: 68523 - RNA, 22 nt, Human
ggagggcugagacuggggucug

SEQ ID NO: 68524 - RNA, 22 nt, Human
ggagggcugccagguggagcgg

SEQ ID NO: 68525 - RNA, 22 nt, Human
ggaggggauuuaguagaugcua

SEQ ID NO: 68526 - RNA, 22 nt, Human
ggaggggcaggucccaaguugu

SEQ ID NO: 68527 - RNA, 22 nt, Human
ggaggggccggcugccugccac

SEQ ID NO: 68528 - RNA, 22 nt, Human
ggagggggaauucagccccagc

SEQ ID NO: 68529 - RNA, 22 nt, Human
ggagggguggucgcgaagagca

SEQ ID NO: 68530 - RNA, 22 nt, Human
ggaggguccccagcagcaugaa

SEQ ID NO: 68531 - RNA, 22 nt, Human
ggaggucacgacugggaugccu

SEQ ID NO: 68532 - RNA, 22 nt, Human
ggagguccaugugaauguggcc

SEQ ID NO: 68533 - RNA, 22 nt, Human
ggagguggagcuggaaguucca

SEQ ID NO: 68534 - RNA, 16 nt, Human
ggagguggguaaggug

SEQ ID NO: 68535 - RNA, 22 nt, Human
ggagguucucucuuugcagagc

SEQ ID NO: 68536 - RNA, 22 nt, Human
ggaguauuguagcuuccaguuc

SEQ ID NO: 68537 - RNA, 20 nt, Human
ggagucacauucuuuacugc

SEQ ID NO: 68538 - RNA, 22 nt, Human
ggagucaggagcaggcugggcu

SEQ ID NO: 68539 - RNA, 22 nt, Human
ggagucaggauccuggggaugg

SEQ ID NO: 68540 - RNA, 21 nt, Human
ggagucagggucuggcugggg

SEQ ID NO: 68541 - RNA, 21 nt, Human
ggagucauuagucauuuccuu

SEQ ID NO: 68542 - RNA, 22 nt, Human
ggagucccuguccccauacgag

SEQ ID NO: 68543 - RNA, 22 nt, Human
ggagucugacucugacccugga

SEQ ID NO: 68544 - RNA, 19 nt, Human
ggagucugagcccagguau

SEQ ID NO: 68545 - RNA, 21 nt, Human
ggagucugaggaagaaaacug

SEQ ID NO: 68546 - RNA, 22 nt, Human
ggagucugggaauuggagagaa

SEQ ID NO: 68547 - RNA, 22 nt, Human
ggagucugugucuugaagcagu

SEQ ID NO: 68548 - RNA, 22 nt, Human
ggagugaagcaaauaaugcugg

SEQ ID NO: 68549 - RNA, 22 nt, Human
uauuaggguaaauuugacaugc

SEQ ID NO: 68550 - RNA, 22 nt, Human
uauuaggguuuugaagguuugu

SEQ ID NO: 68551 - RNA, 22 nt, Human
uauuagguaugaacuggcaacc

SEQ ID NO: 68552 - RNA, 22 nt, Human
uauuagguuagugcaaaaguuu

SEQ ID NO: 68553 - RNA, 22 nt, Human
uauuagguuggugcaaaaguaa

SEQ ID NO: 68554 - RNA, 20 nt, Human
uauuaugaccuguguucugg

SEQ ID NO: 68555 - RNA, 22 nt, Human
uauuaugagguauuuggacuuu

SEQ ID NO: 68556 - RNA, 22 nt, Human
uauuauggggggaacaucacuc

SEQ ID NO: 68557 - RNA, 22 nt, Human
uauuauuaaauggcagaauuuu

SEQ ID NO: 68558 - RNA, 22 nt, Human
uauuauugacuauucagaaugu

SEQ ID NO: 68559 - RNA, 22 nt, Human
uauuauuuuagcacugaggauu

SEQ ID NO: 68560 - RNA, 22 nt, Human
uauucagaauaaagacuacauu

SEQ ID NO: 68561 - RNA, 22 nt, Human
uauucagaggugaaguagggag

SEQ ID NO: 68562 - RNA, 19 nt, Human
uauucaggaugauggcaca

SEQ ID NO: 68563 - RNA, 22 nt, Human
uauucauauuguaaaagaagug

SEQ ID NO: 68564 - RNA, 22 nt, Human
uauucaucuucauagucacagu

SEQ ID NO: 68565 - RNA, 22 nt, Human
uauucauuaugaccaaaucuag

SEQ ID NO: 68566 - RNA, 22 nt, Human
uauuccaaaauaguuaagcacu

SEQ ID NO: 68567 - RNA, 22 nt, Human
uauuccaacugucauagucaua

SEQ ID NO: 68568 - RNA, 22 nt, Human
uauuccaaugucaguuauauca

SEQ ID NO: 68569 - RNA, 22 nt, Human
uauuccaccagagaugugaauu

SEQ ID NO: 68570 - RNA, 22 nt, Human
uauuccaguccuauccucuuuu

SEQ ID NO: 68571 - RNA, 22 nt, Human
uauuccaguucaccuuuucauc

SEQ ID NO: 68572 - RNA, 22 nt, Human
uauuccuaauacuuguuuuggg

SEQ ID NO: 68573 - RNA, 22 nt, Human
uauuccuaauuugcagggcaug

SEQ ID NO: 68574 - RNA, 22 nt, Human
uauuccuauggccacugcuacu

SEQ ID NO: 68575 - RNA, 22 nt, Human
uauuccuguuccccaucaccac

SEQ ID NO: 68576 - RNA, 22 nt, Human
uauucuacaguguuaguguuag

SEQ ID NO: 68577 - RNA, 22 nt, Human
uauucucagugcuauaaguaga

SEQ ID NO: 68578 - RNA, 22 nt, Human
uauucuggguaccaaacuucaa

SEQ ID NO: 68579 - RNA, 22 nt, Human
uauucugugugauauguaaaug

SEQ ID NO: 68580 - RNA, 22 nt, Human
uauucuuacucucgacugcauu

SEQ ID NO: 68581 - RNA, 22 nt, Human
uauugaagauuuugugguugcu

SEQ ID NO: 68582 - RNA, 22 nt, Human
uauugacaauuugugaaacuau

SEQ ID NO: 68583 - RNA, 22 nt, Human
uauugaccagacugacacacau

SEQ ID NO: 68584 - RNA, 17 nt, Human
uauugaccuuuguaugu

SEQ ID NO: 68585 - RNA, 22 nt, Human
uauugacuuuuaaagugauaua

SEQ ID NO: 68586 - RNA, 22 nt, Human
uauugaggaucuccugcuaauu

SEQ ID NO: 68587 - RNA, 22 nt, Human
uauugaggauugaggaaagcac

SEQ ID NO: 68588 - RNA, 22 nt, Human
uauugaggugcuuagcuggggg

SEQ ID NO: 68589 - RNA, 20 nt, Human
uauugaguaccuacuguaua

SEQ ID NO: 68590 - RNA, 22 nt, Human
uauugauaaggauggcugcaau

SEQ ID NO: 68591 - RNA, 22 nt, Human
uauugauaugcagaacugacuu

SEQ ID NO: 68592 - RNA, 21 nt, Human
uauugauucaauuucuugagu

SEQ ID NO: 68593 - RNA, 22 nt, Human
uauugcaagcaauuccaaaagg

SEQ ID NO: 68594 - RNA, 23 nt, Human
uauugcaagcucugccucccggg

SEQ ID NO: 68595 - RNA, 22 nt, Human
uauugcagaauucgcuggaaca

SEQ ID NO: 68596 - RNA, 22 nt, Human
uauugcauauuauucuaguggc

SEQ ID NO: 68597 - RNA, 22 nt, Human
uauugcauauuguacuugaaug

SEQ ID NO: 68598 - RNA, 22 nt, Human
uauugcauccccauugugcccc

SEQ ID NO: 68599 - RNA, 22 nt, Human
uauugcugacuuguucaguguu

SEQ ID NO: 68600 - RNA, 22 nt, Human
uauugcugccauuuuccaaugu

SEQ ID NO: 68601 - RNA, 22 nt, Human
uauugcuggaaaauggugugau

SEQ ID NO: 68602 - RNA, 22 nt, Human
uauugcuucagcuuccugggcu

SEQ ID NO: 68603 - RNA, 21 nt, Human
uauugcuuguaggucauccug

SEQ ID NO: 68604 - RNA, 22 nt, Human
uauuggaauuuaguuagagaau

SEQ ID NO: 68605 - RNA, 22 nt, Human
uauugguagauggagagagaca

SEQ ID NO: 68606 - RNA, 22 nt, Human
uauugguauaggcauugaaacu

SEQ ID NO: 68607 - RNA, 22 nt, Human
uauugguaugguaagaauugaa

SEQ ID NO: 68608 - RNA, 19 nt, Human
uauugguaugugugaggca

SEQ ID NO: 68609 - RNA, 22 nt, Human
uauugguguacuuauagcagag

SEQ ID NO: 68610 - RNA, 22 nt, Human
uauuguacauuucaaaauugcu

SEQ ID NO: 68611 - RNA, 22 nt, Human
uauuguccaauaggauguuccu

SEQ ID NO: 68612 - RNA, 22 nt, Human
uauugucuaggaauuguuuaaa

SEQ ID NO: 68613 - RNA, 22 nt, Human
uauugucuaucgcugcuuucau

SEQ ID NO: 68614 - RNA, 22 nt, Human
uauugucucacaguuuuggagg

SEQ ID NO: 68615 - RNA, 22 nt, Human
uauugugaguauaacugcauuu

SEQ ID NO: 68616 - RNA, 22 nt, Human
uauugugccccucccaggaaca

SEQ ID NO: 68617 - RNA, 22 nt, Human
uauuguuucuggcuguggcagc

SEQ ID NO: 68618 - RNA, 22 nt, Human
uauuuaaaaagaggccagcugg

SEQ ID NO: 68619 - RNA, 22 nt, Human
uauuuaagaugugucauaaaga

SEQ ID NO: 68620 - RNA, 22 nt, Human
uauuuaauuagugauuguagag

SEQ ID NO: 68621 - RNA, 22 nt, Human
uauuuacuguauuugaaguuga

SEQ ID NO: 68622 - RNA, 22 nt, Human
uauuuagaggagaaaaguggcu

SEQ ID NO: 68623 - RNA, 20 nt, Human
uauuuagauucaaguaugga

SEQ ID NO: 68624 - RNA, 22 nt, Human
uauuuagugauagaagcaagga

SEQ ID NO: 68625 - RNA, 22 nt, Human
uauuuauaacagugagaacggg

SEQ ID NO: 68626 - RNA, 22 nt, Human
ggcagcuaggggcagggaauuc

SEQ ID NO: 68627 - RNA, 22 nt, Human
ggcagcuccucaaaaaauuaaa

SEQ ID NO: 68628 - RNA, 22 nt, Human
ggcagcucugaugaugcucugg

SEQ ID NO: 68629 - RNA, 22 nt, Human
ggcagcucugcuccuuggcucc

SEQ ID NO: 68630 - RNA, 22 nt, Human
ggcagcugaccuagcaccaucc

SEQ ID NO: 68631 - RNA, 22 nt, Human
ggcagcugcacguugucccguc

SEQ ID NO: 68632 - RNA, 17 nt, Human
ggcagcugccacuuuuu

SEQ ID NO: 68633 - RNA, 22 nt, Human
ggcagcugggugccuaauaaug

SEQ ID NO: 68634 - RNA, 22 nt, Human
ggcagcugguucuuuccauuaa

SEQ ID NO: 68635 - RNA, 22 nt, Human
ggcagcuguggacgucgucauu

SEQ ID NO: 68636 - RNA, 17 nt, Human
ggcagcugugugcaugc

SEQ ID NO: 68637 - RNA, 23 nt, Human
ggcagcuuauacuuucauagaca

SEQ ID NO: 68638 - RNA, 22 nt, Human
ggcagcuuccuaggagagggca

SEQ ID NO: 68639 - RNA, 22 nt, Human
ggcagcuuccugagccagcagc

SEQ ID NO: 68640 - RNA, 18 nt, Human
ggcagcuugacuagcaac

SEQ ID NO: 68641 - RNA, 22 nt, Human
ggcagcuuucaauaggguuaug

SEQ ID NO: 68642 - RNA, 22 nt, Human
ggcagcuuuuaucccugacaga

SEQ ID NO: 68643 - RNA, 22 nt, Human
ggcaggaagaggagggugaacu

SEQ ID NO: 68644 - RNA, 22 nt, Human
ggcaggaaguagcagucugagc

SEQ ID NO: 68645 - RNA, 22 nt, Human
ggcaggacucuucugugggccg

SEQ ID NO: 68646 - RNA, 22 nt, Human
ggcaggagaaaggucucuucuu

SEQ ID NO: 68647 - RNA, 22 nt, Human
ggcaggagcucuccaguuugcc

SEQ ID NO: 68648 - RNA, 21 nt, Human
ggcaggauggcaguggacccc

SEQ ID NO: 68649 - RNA, 22 nt, Human
ggcaggcaccagcucagcaaua

SEQ ID NO: 68650 - RNA, 22 nt, Human
ggcaggcgugguggccucagaa

SEQ ID NO: 68651 - RNA, 22 nt, Human
ggcaggcuccagagcccucucc

SEQ ID NO: 68652 - RNA, 22 nt, Human
ggcaggcugcuugggucauguc

SEQ ID NO: 68653 - RNA, 22 nt, Human
ggcaggcugggugucauggagu

SEQ ID NO: 68654 - RNA, 22 nt, Human
ggcaggcuugguggcaccgguu

SEQ ID NO: 68655 - RNA, 22 nt, Human
ggcagggaaacagcugauccca

SEQ ID NO: 68656 - RNA, 22 nt, Human
ggcagggaagcuggcaucacgg

SEQ ID NO: 68657 - RNA, 22 nt, Human
ggcagggacuuugcaaaucuuu

SEQ ID NO: 68658 - RNA, 22 nt, Human
agugugugcuguuccccggagg

SEQ ID NO: 68659 - RNA, 21 nt, Human
aguguguguggaaugagaaua

SEQ ID NO: 68660 - RNA, 22 nt, Human
aguguguguuugggcgguuuau

SEQ ID NO: 68661 - RNA, 22 nt, Human
aguguguucucaaugaaaagaa

SEQ ID NO: 68662 - RNA, 23 nt, Human
aguguuaaauuucgcaccuaaau

SEQ ID NO: 68663 - RNA, 22 nt, Human
aguguuaagagaaaauucugcu

SEQ ID NO: 68664 - RNA, 22 nt, Human
aguguuaauaucuggcccuagg

SEQ ID NO: 68665 - RNA, 22 nt, Human
aguguuacuacagacugguuaa

SEQ ID NO: 68666 - RNA, 22 nt, Human
aguguuagauucuuacucaguu

SEQ ID NO: 68667 - RNA, 22 nt, Human
aguguuauaaaggccaaguuuu

SEQ ID NO: 68668 - RNA, 22 nt, Human
aguguuauuuauuguuucauaa

SEQ ID NO: 68669 - RNA, 22 nt, Human
aguguucacucuguggagccca

SEQ ID NO: 68670 - RNA, 22 nt, Human
aguguuccacacaucuggggaa

SEQ ID NO: 68671 - RNA, 22 nt, Human
aguguuccuugcuuucccagag

SEQ ID NO: 68672 - RNA, 22 nt, Human
aguguucuagcgcugugcuugu

SEQ ID NO: 68673 - RNA, 22 nt, Human
aguguuguaugggaugacugcu

SEQ ID NO: 68674 - RNA, 22 nt, Human
aguguuuaaaaauggaaaugca

SEQ ID NO: 68675 - RNA, 22 nt, Human
aguguuuaaacugaagugauga

SEQ ID NO: 68676 - RNA, 22 nt, Human
aguguuuaacuucguccugaag

SEQ ID NO: 68677 - RNA, 22 nt, Human
aguguuuacucccugcccucca

SEQ ID NO: 68678 - RNA, 22 nt, Human
aguguuucaagugaugcuuugg

SEQ ID NO: 68679 - RNA, 22 nt, Human
aguguuucacagcacuuuuucu

SEQ ID NO: 68680 - RNA, 20 nt, Human
aguguuucucaacauggggc

SEQ ID NO: 68681 - RNA, 22 nt, Human
aguguuucucagaagggccuau

SEQ ID NO: 68682 - RNA, 22 nt, Human
aguguuucuggaaucaguguuu

SEQ ID NO: 68683 - RNA, 22 nt, Human
aguguuugagacacauuucacu

SEQ ID NO: 68684 - RNA, 22 nt, Human
aguguuuggggugauuguaacc

SEQ ID NO: 68685 - RNA, 22 nt, Human
aguguuuuauuagaacacagcc

SEQ ID NO: 68686 - RNA, 22 nt, Human
aguguuuuuacaagcacucugg

SEQ ID NO: 68687 - RNA, 22 nt, Human
aguuaaacucuaguagauacaa

SEQ ID NO: 68688 - RNA, 22 nt, Human
aguuaaagucugaaauagagaa

SEQ ID NO: 68689 - RNA, 22 nt, Human
aguuaaaucauuacugacagag

SEQ ID NO: 68690 - RNA, 22 nt, Human
aguuaacacauccagaauagag

SEQ ID NO: 68691 - RNA, 22 nt, Human
aguuaacucauuuuauaaugcc

SEQ ID NO: 68692 - RNA, 22 nt, Human
aguuaaguaaacauuucccaga

SEQ ID NO: 68693 - RNA, 22 nt, Human
aguuaauaauggaaagacacau

SEQ ID NO: 68694 - RNA, 22 nt, Human
aguuacaaacacuaucaguucu

SEQ ID NO: 68695 - RNA, 22 nt, Human
aguuacaacuguuugaauguca

SEQ ID NO: 68696 - RNA, 22 nt, Human
aguuacacaacuuaucacaucu

SEQ ID NO: 68697 - RNA, 22 nt, Human
aguuacacagugucacuucuac

SEQ ID NO: 68698 - RNA, 22 nt, Human
aguuacagcuggcguggggaaa

SEQ ID NO: 68699 - RNA, 22 nt, Human
aguuacaguguucuauuacucu

SEQ ID NO: 68700 - RNA, 22 nt, Human
aguuacauaaucugugaauuuu

SEQ ID NO: 68701 - RNA, 20 nt, Human
aguuacgcuauuacucuccu

SEQ ID NO: 68702 - RNA, 20 nt, Human
aguuacuaagugcuggaacc

SEQ ID NO: 68703 - RNA, 22 nt, Human
aguuacucaaggcugauauaag

SEQ ID NO: 68704 - RNA, 22 nt, Human
aguuacucacugaggguuuauu

SEQ ID NO: 68705 - RNA, 22 nt, Human
aguuagaagugugucaucugug

SEQ ID NO: 68706 - RNA, 22 nt, Human
aguuagugugauggagguacga

SEQ ID NO: 68707 - RNA, 22 nt, Human
aguuauaaaaggagcacugauu

SEQ ID NO: 68708 - RNA, 22 nt, Human
aguuauagaaccagguccucac

SEQ ID NO: 68709 - RNA, 22 nt, Human
aguuauguccucagcaaaucaa

SEQ ID NO: 68710 - RNA, 22 nt, Human
aguuauuacucuuuaacauauu

SEQ ID NO: 68711 - RNA, 19 nt, Human
aguuauugaucuauucagg

SEQ ID NO: 68712 - RNA, 22 nt, Human
aguuauuuggcuauagauggua

SEQ ID NO: 68713 - RNA, 22 nt, Human
aguucagaggcaggagaaggcu

SEQ ID NO: 68714 - RNA, 22 nt, Human
aguucagcaaauaaaacauagu

SEQ ID NO: 68715 - RNA, 22 nt, Human
aguucauauugaaagcagguga

SEQ ID NO: 68716 - RNA, 20 nt, Human
aguuccacauggcuggggag

SEQ ID NO: 68717 - RNA, 23 nt, Human
aguuccagaaaaaugcucaagca

SEQ ID NO: 68718 - RNA, 22 nt, Human
aguuccagcugugaccagaaaa

SEQ ID NO: 68719 - RNA, 22 nt, Human
aguucccaaauuacaggccaca

SEQ ID NO: 68720 - RNA, 22 nt, Human
aguuccugaacuucuuaaugac

SEQ ID NO: 68721 - RNA, 22 nt, Human
aguucuagaagacuuuuccauu

SEQ ID NO: 68722 - RNA, 22 nt, Human
aguucucuccccugcuguucag

SEQ ID NO: 68723 - RNA, 22 nt, Human
aguucucuuggaaguuauguga

SEQ ID NO: 68724 - RNA, 22 nt, Human
aguucugaaugaggaaucuggg

SEQ ID NO: 68725 - RNA, 22 nt, Human
aguucuggaacucuacagcaac

SEQ ID NO: 68726 - RNA, 22 nt, Human
aguucuggugguuuggagaucu

SEQ ID NO: 68727 - RNA, 22 nt, Human
aguucugguuaaccugcaaccu

SEQ ID NO: 68728 - RNA, 22 nt, Human
aguucugguugcccaugacauc

SEQ ID NO: 68729 - RNA, 21 nt, Human
aguucuguuaugcuggacuca

SEQ ID NO: 68730 - RNA, 22 nt, Human
aguucuucccuuuucuauggag

SEQ ID NO: 68731 - RNA, 22 nt, Human
aguucuuuucuagauucuggau

SEQ ID NO: 68732 - RNA, 22 nt, Human
aguugaaagccuuauuucucug

SEQ ID NO: 68733 - RNA, 22 nt, Human
aguugaacaguauuugcuucug

SEQ ID NO: 68734 - RNA, 22 nt, Human
aguugaauaauuagacauaucu

SEQ ID NO: 68735 - RNA, 22 nt, Human
aguugacauccagagacauucu

SEQ ID NO: 68736 - RNA, 22 nt, Human
aguugacucucaagauccuguu

SEQ ID NO: 68737 - RNA, 22 nt, Human
aguugcagacgcagagauguug

SEQ ID NO: 68738 - RNA, 22 nt, Human
aguugcucuaggugaggucuuu

SEQ ID NO: 68739 - RNA, 23 nt, Human
aguuggaccuggguaagaaaaug

SEQ ID NO: 68740 - RNA, 21 nt, Human
aguuggaggcaguuuggcaau

SEQ ID NO: 68741 - RNA, 23 nt, Human
aguuggcauauucaagcacaguc

SEQ ID NO: 68742 - RNA, 22 nt, Human
aguugggaguuauagacucuau

SEQ ID NO: 68743 - RNA, 22 nt, Human
agucacugguucuguaauuaau

SEQ ID NO: 68744 - RNA, 22 nt, Human
agucacugucuugcaaagguca

SEQ ID NO: 68745 - RNA, 22 nt, Human
agucacuugauucuccugagcu

SEQ ID NO: 68746 - RNA, 22 nt, Human
agucacuuuaugagagaaccau

SEQ ID NO: 68747 - RNA, 22 nt, Human
agucagagagcucucagcauag

SEQ ID NO: 68748 - RNA, 22 nt, Human
agucagagucuauugcuguggu

SEQ ID NO: 68749 - RNA, 22 nt, Human
agucagauuuagauguagcaag

SEQ ID NO: 68750 - RNA, 22 nt, Human
agucagcagccuggccaggaga

SEQ ID NO: 68751 - RNA, 22 nt, Human
agucaggaaaagcuuuccugga

SEQ ID NO: 68752 - RNA, 22 nt, Human
agucaggaaccucagcaagucu

SEQ ID NO: 68753 - RNA, 22 nt, Human
agucaggcugacaggcuaggag

SEQ ID NO: 68754 - RNA, 22 nt, Human
agucagggccuggccugcugaa

SEQ ID NO: 68755 - RNA, 19 nt, Human
agucagguggcuggugcca

SEQ ID NO: 68756 - RNA, 22 nt, Human
agucaguaugacuuauaguucu

SEQ ID NO: 68757 - RNA, 22 nt, Human
agucagucaccauuuaagaaca

SEQ ID NO: 68758 - RNA, 22 nt, Human
agucaguggcuccgagccuggu

SEQ ID NO: 68759 - RNA, 22 nt, Human
agucagugggcuuggcacagaa

SEQ ID NO: 68760 - RNA, 22 nt, Human
agucaguguucuggguuguaau

SEQ ID NO: 68761 - RNA, 22 nt, Human
agucaguugcaguuuauggaug

SEQ ID NO: 68762 - RNA, 22 nt, Human
agucaguuucccuggaaagcag

SEQ ID NO: 68763 - RNA, 22 nt, Human
agucaguuuucuccagggggcu

SEQ ID NO: 68764 - RNA, 22 nt, Human
agucaguuuucuuaaagggaag

SEQ ID NO: 68765 - RNA, 22 nt, Human
agucauaauuauaaacaucagu

SEQ ID NO: 68766 - RNA, 22 nt, Human
agucauaugacccuucacaaac

SEQ ID NO: 68767 - RNA, 22 nt, Human
aguuucauuucuuaguaccagu

SEQ ID NO: 68768 - RNA, 22 nt, Human
aguuucuaccgguacauucagg

SEQ ID NO: 68769 - RNA, 22 nt, Human
aguuucucuuugacaccaaaau

SEQ ID NO: 68770 - RNA, 22 nt, Human
aguuucugcaaaucauuuuuau

SEQ ID NO: 68771 - RNA, 22 nt, Human
aguuucuguuaccauauuugac

SEQ ID NO: 68772 - RNA, 22 nt, Human
aguuucuuggucacaguuuuca

SEQ ID NO: 68773 - RNA, 23 nt, Human
aguuucuuugagacuugcccugu

SEQ ID NO: 68774 - RNA, 22 nt, Human
aguuugaaauguuggcaauauu

SEQ ID NO: 68775 - RNA, 22 nt, Human
aguuugaagaaggaucuaugaa

SEQ ID NO: 68776 - RNA, 22 nt, Human
aguuugauaaacaccagcuagu

SEQ ID NO: 68777 - RNA, 22 nt, Human
aguuugccccgucacccuggug

SEQ ID NO: 68778 - RNA, 22 nt, Human
aguuuggaagaauuuggucugu

SEQ ID NO: 68779 - RNA, 22 nt, Human
aguuuguaaacuugagcuagcc

SEQ ID NO: 68780 - RNA, 22 nt, Human
aguuuguaaccuaagauucagg

SEQ ID NO: 68781 - RNA, 22 nt, Human
aguuuguacugaauucaauuua

SEQ ID NO: 68782 - RNA, 22 nt, Human
aguuuguaucaauuugcuuuau

SEQ ID NO: 68783 - RNA, 22 nt, Human
aguuuuauaucuuccauugguu

SEQ ID NO: 68784 - RNA, 22 nt, Human
aguuuuauggcucaaccuaaua

SEQ ID NO: 68785 - RNA, 22 nt, Human
aguuuucaauauaugauaguga

SEQ ID NO: 68786 - RNA, 22 nt, Human
aguuuucaguaaauauuaguga

SEQ ID NO: 68787 - RNA, 21 nt, Human
aguuuuccauuagggagggag

SEQ ID NO: 68788 - RNA, 22 nt, Human
aguuuucucacaucaaaaauga

SEQ ID NO: 68789 - RNA, 22 nt, Human
aguuuucugcuaaaccagcuaa

SEQ ID NO: 68790 - RNA, 22 nt, Human
aguuuucuuucaucuaucagca

SEQ ID NO: 68791 - RNA, 21 nt, Human
aguuuugagaguggguagugu

SEQ ID NO: 68792 - RNA, 23 nt, Human
aguuuuuaauggucauagcugag

SEQ ID NO: 68793 - RNA, 22 nt, Human
aguuuuuccguggcuacgauaa

SEQ ID NO: 68794 - RNA, 17 nt, Human
aguuuuuggaccugugu

SEQ ID NO: 68795 - RNA, 22 nt, Human
auaaaaaggacagauguggucu

SEQ ID NO: 68796 - RNA, 20 nt, Human
auaaaauaacugccacaaga

SEQ ID NO: 68797 - RNA, 22 nt, Human
auaaaaucuuuaugugcucugc

SEQ ID NO: 68798 - RNA, 22 nt, Human
auaaaauuugcuacuguuaaau

SEQ ID NO: 68799 - RNA, 22 nt, Human
auaaacacuucuagggcacaca

SEQ ID NO: 68800 - RNA, 21 nt, Human
auaaacagcaugugauccaug

SEQ ID NO: 68801 - RNA, 22 nt, Human
auaaacuauguaauuugcucua

SEQ ID NO: 68802 - RNA, 22 nt, Human
auaaacucaugcugaaaaccca

SEQ ID NO: 68803 - RNA, 21 nt, Human
auaaacugcaucaaguuggug

SEQ ID NO: 68804 - RNA, 22 nt, Human
auaaacugguaggaaaacagua

SEQ ID NO: 68805 - RNA, 22 nt, Human
auaaagauuuuuaggcauuucu

SEQ ID NO: 68806 - RNA, 22 nt, Human
auaaagcaauagauuguguaau

SEQ ID NO: 68807 - RNA, 22 nt, Human
auaaagcagguccccagacacu

SEQ ID NO: 68808 - RNA, 22 nt, Human
auaaagcaucuagucugucacu

SEQ ID NO: 68809 - RNA, 22 nt, Human
auaaagcauuuccccugugugg

SEQ ID NO: 68810 - RNA, 22 nt, Human
auaaagcuaagacuuacaugaa

SEQ ID NO: 68811 - RNA, 22 nt, Human
auaaagcucuuaguagcagccu

SEQ ID NO: 68812 - RNA, 22 nt, Human
auaaagcuuugaaauggagaua

SEQ ID NO: 68813 - RNA, 22 nt, Human
auaaaggcagauuuuggaccuc

SEQ ID NO: 68814 - RNA, 22 nt, Human
auaaaggccaaaauuugcauuu

SEQ ID NO: 68815 - RNA, 22 nt, Human
auaaagucauggcagcuagaau

SEQ ID NO: 68816 - RNA, 22 nt, Human
auaaagucugggccaggcaugg

SEQ ID NO: 68817 - RNA, 22 nt, Human
auaaaguggagguaguauucau

SEQ ID NO: 68818 - RNA, 22 nt, Human
auaaaguucugcuggcauauau

SEQ ID NO: 68819 - RNA, 22 nt, Human
auaaauagugaagggagccggu

SEQ ID NO: 68820 - RNA, 22 nt, Human
auaaaugugaaaugagcaguua

SEQ ID NO: 68821 - RNA, 22 nt, Human
auaaauucucugauguauagua

SEQ ID NO: 68822 - RNA, 21 nt, Human
auaaauucugagaggcucugc

SEQ ID NO: 68823 - RNA, 22 nt, Human
auaacaauagugguagugcugg

SEQ ID NO: 68824 - RNA, 22 nt, Human
auaacacuaaauguauguaaca

SEQ ID NO: 68825 - RNA, 22 nt, Human
auaacagaauaagucauuaccg

SEQ ID NO: 68826 - RNA, 22 nt, Human
auaacagagagcuacugaacug

SEQ ID NO: 68827 - RNA, 22 nt, Human
auaacagugaccucucagcacc

SEQ ID NO: 68828 - RNA, 22 nt, Human
auaacauuuugacaacugguga

SEQ ID NO: 68829 - RNA, 22 nt, Human
auaaccuggauauaaacagaug

SEQ ID NO: 68830 - RNA, 22 nt, Human
auaaccuguuucagacauuugu

SEQ ID NO: 68831 - RNA, 22 nt, Human
auaacugagugagcagcgacuc

SEQ ID NO: 68832 - RNA, 22 nt, Human
auaacuuucuucacccuugcug

SEQ ID NO: 68833 - RNA, 17 nt, Human
auaagacagaagacaau

SEQ ID NO: 68834 - RNA, 22 nt, Human
auaagagcuacagccaguucug

SEQ ID NO: 68835 - RNA, 22 nt, Human
auaagagcuagucuuuuccuug

SEQ ID NO: 68836 - RNA, 22 nt, Human
auaagauauaaauccacagagu

SEQ ID NO: 68837 - RNA, 22 nt, Human
auaagcagggucaaaugccuac

SEQ ID NO: 68838 - RNA, 22 nt, Human
auaagcaugauuaccgggagca

SEQ ID NO: 68839 - RNA, 21 nt, Human
auaagcaugcugauuacauuu

SEQ ID NO: 68840 - RNA, 22 nt, Human
auaagcauuucacagguguguu

SEQ ID NO: 68841 - RNA, 22 nt, Human
auaagccugauucacuugucau

SEQ ID NO: 68842 - RNA, 22 nt, Human
auaagcugaauagucaacacaa

SEQ ID NO: 68843 - RNA, 22 nt, Human
auaaggaaaugaaacucuaaua

SEQ ID NO: 68844 - RNA, 22 nt, Human
auaaggaaccugggcuuaagag

SEQ ID NO: 68845 - RNA, 19 nt, Human
auaaggcaauuggauuugg

SEQ ID NO: 68846 - RNA, 22 nt, Human
auaaggcagucacuggaauguu

SEQ ID NO: 68847 - RNA, 22 nt, Human
auaaggcaucucucaguuagca

SEQ ID NO: 68848 - RNA, 22 nt, Human
auaagguaaggguauugucaga

SEQ ID NO: 68849 - RNA, 22 nt, Human
auaagguuaacaucaucaguga

SEQ ID NO: 68850 - RNA, 22 nt, Human
auaagugacugcagggaauuca

SEQ ID NO: 68851 - RNA, 22 nt, Human
auaaguguuagguaaacaucuu

SEQ ID NO: 68852 - RNA, 22 nt, Human
auaauaaaccaggaugggucug

SEQ ID NO: 68853 - RNA, 22 nt, Human
auaauacaugguugaucuuuuc

SEQ ID NO: 68854 - RNA, 22 nt, Human
auaauauugagucaggaccuga

SEQ ID NO: 68855 - RNA, 22 nt, Human
auaauauuuggauaggacagua

SEQ ID NO: 68856 - RNA, 22 nt, Human
auaauccaugucuagaguaaag

SEQ ID NO: 68857 - RNA, 22 nt, Human
auaaucugacaaagacuuaagc

SEQ ID NO: 68858 - RNA, 22 nt, Human
auaaucuggcuuguuugcuuaa

SEQ ID NO: 68859 - RNA, 22 nt, Human
auaaucuggucuuuguaugagu

SEQ ID NO: 68860 - RNA, 22 nt, Human
auaaugaggauuugcauauuag

SEQ ID NO: 68861 - RNA, 22 nt, Human
agucugguugauuccuuugcac

SEQ ID NO: 68862 - RNA, 17 nt, Human
agucugucuuuccuugu

SEQ ID NO: 68863 - RNA, 22 nt, Human
agucuguguacuggguuucugu

SEQ ID NO: 68864 - RNA, 22 nt, Human
agucuguguauauucacugccc

SEQ ID NO: 68865 - RNA, 22 nt, Human
agucuuagagucugugucauga

SEQ ID NO: 68866 - RNA, 22 nt, Human
agucuuauggccaucucugauu

SEQ ID NO: 68867 - RNA, 19 nt, Human
agucuucaucugccaggcc

SEQ ID NO: 68868 - RNA, 21 nt, Human
agucuucuccagaggcugggg

SEQ ID NO: 68869 - RNA, 22 nt, Human
agucuucugaauaagaaucacu

SEQ ID NO: 68870 - RNA, 22 nt, Human
agucuucuguuuuucagcagcu

SEQ ID NO: 68871 - RNA, 22 nt, Human
agucuucuuuguguucucucau

SEQ ID NO: 68872 - RNA, 22 nt, Human
agucuugaaagcacauuagagu

SEQ ID NO: 68873 - RNA, 22 nt, Human
agucuugguccaggcucauuuc

SEQ ID NO: 68874 - RNA, 22 nt, Human
agucuugucuugcaagggcuga

SEQ ID NO: 68875 - RNA, 18 nt, Human
agucuuuaaagauguuac

SEQ ID NO: 68876 - RNA, 22 nt, Human
caauauauaaugaguacuuucc

SEQ ID NO: 68877 - RNA, 22 nt, Human
caauauauaggaacaacuuagg

SEQ ID NO: 68878 - RNA, 22 nt, Human
caaucaaugcugcuaguuccuu

SEQ ID NO: 68879 - RNA, 22 nt, Human
caaucacugggauauuggugug

SEQ ID NO: 68880 - RNA, 22 nt, Human
caaucagauaugugacauauuu

SEQ ID NO: 68881 - RNA, 21 nt, Human
caaucaguuggcauuugagca

SEQ ID NO: 68882 - RNA, 22 nt, Human
aguuuagaguucaaauuaguuc

SEQ ID NO: 68883 - RNA, 22 nt, Human
aguuuaguauaccaguacaucu

SEQ ID NO: 68884 - RNA, 22 nt, Human
aguuuauguaaaauuaguaaug

SEQ ID NO: 68885 - RNA, 22 nt, Human
aguuuauucugcuuggcccucc

SEQ ID NO: 68886 - RNA, 22 nt, Human
aguuucacaaauugucaauagc

SEQ ID NO: 68887 - RNA, 22 nt, Human
aguuucacagucugucauuguu

SEQ ID NO: 68888 - RNA, 23 nt, Human
aguuucacauuuuacauguggcu

SEQ ID NO: 68889 - RNA, 22 nt, Human
aguuucagaauuuaugcagaca

SEQ ID NO: 68890 - RNA, 21 nt, Human
aguuucaggaaguucagcugc

SEQ ID NO: 68891 - RNA, 18 nt, Human
aguuucagggcaggaaac

SEQ ID NO: 68892 - RNA, 22 nt, Human
aguuucaguguugacagauggu

SEQ ID NO: 68893 - RNA, 22 nt, Human
aguuucauccgaucuggucuca

SEQ ID NO: 68894 - RNA, 22 nt, Human
aguuuccaaaaggagacaggga

SEQ ID NO: 68895 - RNA, 23 nt, Human
aguuuccacccaggguagaaggg

SEQ ID NO: 68896 - RNA, 22 nt, Human
aguuuccacuggagacacugug

SEQ ID NO: 68897 - RNA, 22 nt, Human
aguuuccaggcaggagcuaauu

SEQ ID NO: 68898 - RNA, 22 nt, Human
aguuucccccuucacagcuuaa

SEQ ID NO: 68899 - RNA, 22 nt, Human
aguuuccuugggcauuuguuua

SEQ ID NO: 68900 - RNA, 22 nt, Human
aguuucuauguaagcuacguga

SEQ ID NO: 68901 - RNA, 22 nt, Human
aguuucuaugugaaaugcacau

SEQ ID NO: 68902 - RNA, 22 nt, Human
aguuucuauuuucaugucuguu

SEQ ID NO: 68903 - RNA, 22 nt, Human
aguuucucuuaaucuaguaucu

SEQ ID NO: 68904 - RNA, 22 nt, Human
aguuucuucauccaaaaaaugg

SEQ ID NO: 68905 - RNA, 22 nt, Human
aguuucuugccgugcuuuccau

SEQ ID NO: 68906 - RNA, 22 nt, Human
aguuugaaagcuuaacaguaca

SEQ ID NO: 68907 - RNA, 18 nt, Human
aguuugaacaaggaagaa

SEQ ID NO: 68908 - RNA, 22 nt, Human
aguuugaagauuaugccagagu

SEQ ID NO: 68909 - RNA, 22 nt, Human
aguuugaagcacaugaauggca

SEQ ID NO: 68910 - RNA, 22 nt, Human
aguuugaauugaaaugcagaug

SEQ ID NO: 68911 - RNA, 22 nt, Human
aguuugaucugacagauuuuaa

SEQ ID NO: 68912 - RNA, 22 nt, Human
aguuugauuguauggguuuuaa

SEQ ID NO: 68913 - RNA, 22 nt, Human
aguuuggacaaaagacuccuua

SEQ ID NO: 68914 - RNA, 22 nt, Human
aguuuggaguguggucuuugag

SEQ ID NO: 68915 - RNA, 22 nt, Human
aguuuggggcaagaggacagau

SEQ ID NO: 68916 - RNA, 22 nt, Human
aguuuguaaaauguggccugga

SEQ ID NO: 68917 - RNA, 22 nt, Human
aguuugucugucuucaaagccu

SEQ ID NO: 68918 - RNA, 20 nt, Human
aguuugugugucuaugcgcu

SEQ ID NO: 68919 - RNA, 22 nt, Human
aguuuuauguagacaauucauu

SEQ ID NO: 68920 - RNA, 22 nt, Human
aguuuuauuccaaugugcagca

SEQ ID NO: 68921 - RNA, 21 nt, Human
aguuuucugaguuauaaaaua

SEQ ID NO: 68922 - RNA, 22 nt, Human
aguuuucuucauuuuguggcca

SEQ ID NO: 68923 - RNA, 22 nt, Human
aguuuucuuucgcaaagguaca

SEQ ID NO: 68924 - RNA, 22 nt, Human
aguuuugacuaagauggcuugg

SEQ ID NO: 68925 - RNA, 18 nt, Human
aguuuuuaggaagaaaug

SEQ ID NO: 68926 - RNA, 22 nt, Human
aguuuuucugcuggucucacua

SEQ ID NO: 68927 - RNA, 22 nt, Human
aguuuuucugggaggcacugcu

SEQ ID NO: 68928 - RNA, 22 nt, Human
auaaaacuuauuagaauugugu

SEQ ID NO: 68929 - RNA, 22 nt, Human
auaaaacuuggguaugaucccu

SEQ ID NO: 68930 - RNA, 22 nt, Human
auaaaagaaguuuugguacuug

SEQ ID NO: 68931 - RNA, 22 nt, Human
auaaaaggaaagccuguuguga

SEQ ID NO: 68932 - RNA, 22 nt, Human
auaaaaucagaguuggauugga

SEQ ID NO: 68933 - RNA, 22 nt, Human
auaaacaucuguuucucuucug

SEQ ID NO: 68934 - RNA, 22 nt, Human
auaaacuggguaucaagaggcc

SEQ ID NO: 68935 - RNA, 22 nt, Human
auaaacuuuagcggaaggagga

SEQ ID NO: 68936 - RNA, 21 nt, Human
auaaagacaaacacuauuugg

SEQ ID NO: 68937 - RNA, 22 nt, Human
auaaagaccaguaucuuauguu

SEQ ID NO: 68938 - RNA, 22 nt, Human
auaaagcaaauaggacuauugc

SEQ ID NO: 68939 - RNA, 22 nt, Human
auaaagcuauuuuuaauucugu

SEQ ID NO: 68940 - RNA, 22 nt, Human
auaaaggauaauccauuagacu

SEQ ID NO: 68941 - RNA, 22 nt, Human
auaaaggcagaguagggaggaa

SEQ ID NO: 68942 - RNA, 22 nt, Human
auaaaggcuggcugcugugagc

SEQ ID NO: 68943 - RNA, 22 nt, Human
auaaagucuaccguauuaaaga

SEQ ID NO: 68944 - RNA, 21 nt, Human
auaaaguuuuacaggaaugca

SEQ ID NO: 68945 - RNA, 22 nt, Human
auaaauagugcugccaugagua

SEQ ID NO: 68946 - RNA, 22 nt, Human
auaaaucucuuaagacucaaca

SEQ ID NO: 68947 - RNA, 22 nt, Human
auaaauuaggaucugggguucc

SEQ ID NO: 68948 - RNA, 22 nt, Human
auaaauuuauaauuguuuccug

SEQ ID NO: 68949 - RNA, 22 nt, Human
auaacaaguauuuauugagcau

SEQ ID NO: 68950 - RNA, 22 nt, Human
auaacagacugauuuuuaaaug

SEQ ID NO: 68951 - RNA, 22 nt, Human
auaacagacuuagaguuacaag

SEQ ID NO: 68952 - RNA, 22 nt, Human
auaacagaguugggaagugaaa

SEQ ID NO: 68953 - RNA, 22 nt, Human
auaacagaugcuucagcauaaa

SEQ ID NO: 68954 - RNA, 22 nt, Human
auaacaugaccugugcuucaca

SEQ ID NO: 68955 - RNA, 22 nt, Human
auaaccugagauugagcugccu

SEQ ID NO: 68956 - RNA, 22 nt, Human
auaaccugguaguauuaaaugu

SEQ ID NO: 68957 - RNA, 19 nt, Human
auaacuacauuggcucagu

SEQ ID NO: 68958 - RNA, 22 nt, Human
auaacucuguuuuuuucaugca

SEQ ID NO: 68959 - RNA, 22 nt, Human
auaacugagagcaaucuuucuu

SEQ ID NO: 68960 - RNA, 22 nt, Human
auaacugccugaugacucucaa

SEQ ID NO: 68961 - RNA, 22 nt, Human
auaacuucagggcugugacaga

SEQ ID NO: 68962 - RNA, 22 nt, Human
auaagaaacauuauucuuucca

SEQ ID NO: 68963 - RNA, 22 nt, Human
auaagauugucauaguauggac

SEQ ID NO: 68964 - RNA, 22 nt, Human
auaagcauguuagaauauuuga

SEQ ID NO: 68965 - RNA, 22 nt, Human
auaaggcagaaauagggaaagu

SEQ ID NO: 68966 - RNA, 23 nt, Human
auaaggcauaaagguacauugga

SEQ ID NO: 68967 - RNA, 22 nt, Human
auaaggcuuaaaccuuguugcc

SEQ ID NO: 68968 - RNA, 22 nt, Human
auaagguaugaaaaguaaaugg

SEQ ID NO: 68969 - RNA, 22 nt, Human
auaagguuggucuuaacuaccu

SEQ ID NO: 68970 - RNA, 22 nt, Human
auaaguaggaaaauuugaauau

SEQ ID NO: 68971 - RNA, 22 nt, Human
auaagugagaacaaaaauuaga

SEQ ID NO: 68972 - RNA, 22 nt, Human
auaagugauauuuagcuauaga

SEQ ID NO: 68973 - RNA, 22 nt, Human
auaaguguguaaggcauucugu

SEQ ID NO: 68974 - RNA, 22 nt, Human
auaauaacuccuguugaagaac

SEQ ID NO: 68975 - RNA, 22 nt, Human
auaauacaugguuaaccucuuu

SEQ ID NO: 68976 - RNA, 18 nt, Human
auaauaggagauaaaaau

SEQ ID NO: 68977 - RNA, 22 nt, Human
auaauauaauccuacuucccau

SEQ ID NO: 68978 - RNA, 22 nt, Human
auaauauugaagagccuuggcc

SEQ ID NO: 68979 - RNA, 22 nt, Human
auaaucauucacauaaggugcu

SEQ ID NO: 68980 - RNA, 22 nt, Human
auaaucuuguauuuccuaaagu

SEQ ID NO: 68981 - RNA, 22 nt, Human
auaaugagaauacaguaacuau

SEQ ID NO: 68982 - RNA, 22 nt, Human
auaaugcagcuuuucaauggcc

SEQ ID NO: 68983 - RNA, 22 nt, Human
auaaugcauuuagaauaauuca

SEQ ID NO: 68984 - RNA, 22 nt, Human
auaaugcgaggagaaaaugaag

SEQ ID NO: 68985 - RNA, 22 nt, Human
aucauaaaccacuuuguaaucu

SEQ ID NO: 68986 - RNA, 22 nt, Human
aucauaauugcuccagugauau

SEQ ID NO: 68987 - RNA, 22 nt, Human
aucauacacucacauaaacaga

SEQ ID NO: 68988 - RNA, 22 nt, Human
aucauacagccuuuguuagugu

SEQ ID NO: 68989 - RNA, 22 nt, Human
aucauacauguaacuaaguaaa

SEQ ID NO: 68990 - RNA, 22 nt, Human
aucauagaacaccuaccuaccu

SEQ ID NO: 68991 - RNA, 22 nt, Human
aucauagguauaaguaaauuag

SEQ ID NO: 68992 - RNA, 22 nt, Human
aucaucaugcacucucagguuu

SEQ ID NO: 68993 - RNA, 22 nt, Human
aucauccacuggagccggcagg

SEQ ID NO: 68994 - RNA, 22 nt, Human
aucaucugccucaucacugcau

SEQ ID NO: 68995 - RNA, 22 nt, Human
aucaucuggguuaaugugcuca

SEQ ID NO: 68996 - RNA, 22 nt, Human
aucaucuugaaagucuauguuu

SEQ ID NO: 68997 - RNA, 22 nt, Human
caaucaugguauaauuccuuuu

SEQ ID NO: 68998 - RNA, 22 nt, Human
caaucuauaaauaucaguuucc

SEQ ID NO: 68999 - RNA, 22 nt, Human
caaucuauccucugauuuugua

SEQ ID NO: 69000 - RNA, 22 nt, Human
caaucuguacuugaaaaauuau

SEQ ID NO: 69001 - RNA, 22 nt, Human
caaucuuacuuuugaaaaguga

SEQ ID NO: 69002 - RNA, 22 nt, Human
caaugauaauggcuguauuuau

SEQ ID NO: 69003 - RNA, 22 nt, Human
caaugauguuuagauaaaaucc

SEQ ID NO: 69004 - RNA, 22 nt, Human
caaugcaagcaagauggucaca

SEQ ID NO: 69005 - RNA, 22 nt, Human
caaugcaaugcaaugcaaugca

SEQ ID NO: 69006 - RNA, 22 nt, Human
caaugcacgcucagauuugacc

SEQ ID NO: 69007 - RNA, 22 nt, Human
caaugcagauaccuuccagaga

SEQ ID NO: 69008 - RNA, 22 nt, Human
caaugcaugauggaauugccuu

SEQ ID NO: 69009 - RNA, 22 nt, Human
caaugcuaucaugucagagaua

SEQ ID NO: 69010 - RNA, 22 nt, Human
caaugcuucucauuagccaaug

SEQ ID NO: 69011 - RNA, 22 nt, Human
caaugcuugcugacucccuguc

SEQ ID NO: 69012 - RNA, 22 nt, Human
caaugcuuuuagcuucagcuug

SEQ ID NO: 69013 - RNA, 22 nt, Human
caaugcuuuuguucuuuacuca

SEQ ID NO: 69014 - RNA, 22 nt, Human
caaugggagcagaaauuguuug

SEQ ID NO: 69015 - RNA, 22 nt, Human
caaugguugaacccugucauga

SEQ ID NO: 69016 - RNA, 22 nt, Human
caauguacaaaauaauuacaca

SEQ ID NO: 69017 - RNA, 22 nt, Human
caauguacuacaaagauuguca

SEQ ID NO: 69018 - RNA, 22 nt, Human
caaugucagaauuacaguugau

SEQ ID NO: 69019 - RNA, 22 nt, Human
caaugucagucaagcagcaaau

SEQ ID NO: 69020 - RNA, 22 nt, Human
caaugucuucuauaguuacuca

SEQ ID NO: 69021 - RNA, 22 nt, Human
caaugugguggcagaugucagu

SEQ ID NO: 69022 - RNA, 22 nt, Human
caaugugugcuuacaggccagu

SEQ ID NO: 69023 - RNA, 22 nt, Human
caauguuugaguaggagcauaa

SEQ ID NO: 69024 - RNA, 22 nt, Human
caauguuuuguugaaugaauag

SEQ ID NO: 69025 - RNA, 22 nt, Human
caauuaaagaagaccugccuca

SEQ ID NO: 69026 - RNA, 21 nt, Human
caauuacuaugaaccaguuga

SEQ ID NO: 69027 - RNA, 22 nt, Human
caauuauauuuagaaugauaca

SEQ ID NO: 69028 - RNA, 22 nt, Human
caauucaaccuaagugcaucca

SEQ ID NO: 69029 - RNA, 22 nt, Human
caauucaacuugccuuuguagc

SEQ ID NO: 69030 - RNA, 22 nt, Human
caauucauguuaaacagaagca

SEQ ID NO: 69031 - RNA, 22 nt, Human
caauucauuacauugcaaagac

SEQ ID NO: 69032 - RNA, 22 nt, Human
caauucuuucagcugcauuugu

SEQ ID NO: 69033 - RNA, 22 nt, Human
caauucuuuguagaagcucucc

SEQ ID NO: 69034 - RNA, 22 nt, Human
caauugcuuuuccaagggcaga

SEQ ID NO: 69035 - RNA, 22 nt, Human
caauugucguugacauccuuca

SEQ ID NO: 69036 - RNA, 22 nt, Human
caauuucaauacaaaauacauu

SEQ ID NO: 69037 - RNA, 22 nt, Human
caauuucagaccuuuccuugga

SEQ ID NO: 69038 - RNA, 17 nt, Human
caauuucauagguuuug

SEQ ID NO: 69039 - RNA, 18 nt, Human
caauuucauccuuaagcc

SEQ ID NO: 69040 - RNA, 22 nt, Human
caauuucauggauaaaagaugu

SEQ ID NO: 69041 - RNA, 22 nt, Human
caauuucuuguuaauucucagg

SEQ ID NO: 69042 - RNA, 22 nt, Human
caauuugacaaguugcauguuu

SEQ ID NO: 69043 - RNA, 22 nt, Human
caauuugauuaauaccauacuu

SEQ ID NO: 69044 - RNA, 22 nt, Human
caauuugguuacuuccuuagaa

SEQ ID NO: 69045 - RNA, 22 nt, Human
caauuuuuaaacuaugaaguug

SEQ ID NO: 69046 - RNA, 22 nt, Human
cacaaaaguaggaggcaggcgg

SEQ ID NO: 69047 - RNA, 22 nt, Human
cacaaaccugccagcccugccc

SEQ ID NO: 69048 - RNA, 22 nt, Human
cacaaaccuucugcagccugua

SEQ ID NO: 69049 - RNA, 22 nt, Human
cacaaaggagaaugucagcaua

SEQ ID NO: 69050 - RNA, 22 nt, Human
cacaaagucugcagcugcugua

SEQ ID NO: 69051 - RNA, 22 nt, Human
cacaaaguguuagaugccacuc

SEQ ID NO: 69052 - RNA, 22 nt, Human
cacaaaguuggacaacgcaccc

SEQ ID NO: 69053 - RNA, 22 nt, Human
cacaaauggccguguucaaaga

SEQ ID NO: 69054 - RNA, 20 nt, Human
cacaacuguccacaugcucc

SEQ ID NO: 69055 - RNA, 22 nt, Human
cacaagaaauaagcugccuuuc

SEQ ID NO: 69056 - RNA, 21 nt, Human
cacaagacacauaggguguuu

SEQ ID NO: 69057 - RNA, 20 nt, Human
cacaagagaauacacacugg

SEQ ID NO: 69058 - RNA, 22 nt, Human
cacaagcuccuuauguggagaa

SEQ ID NO: 69059 - RNA, 22 nt, Human
cacaaggaccucagauggauga

SEQ ID NO: 69060 - RNA, 22 nt, Human
cacaaggagguccugaggaagc

SEQ ID NO: 69061 - RNA, 22 nt, Human
cacaaggcacauuccuugucca

SEQ ID NO: 69062 - RNA, 22 nt, Human
cacaaggcccugggucaccaca

SEQ ID NO: 69063 - RNA, 22 nt, Human
cacaaggcuuucaucuggcaua

SEQ ID NO: 69064 - RNA, 22 nt, Human
cacaagggagcuuagaaaacau

SEQ ID NO: 69065 - RNA, 22 nt, Human
cacaagucauuuucagcaggcu

SEQ ID NO: 69066 - RNA, 22 nt, Human
cacaaguuugggucacucagcu

SEQ ID NO: 69067 - RNA, 22 nt, Human
cacaauauuggccgggcugguc

SEQ ID NO: 69068 - RNA, 22 nt, Human
cacaaucauaauguauguacau

SEQ ID NO: 69069 - RNA, 22 nt, Human
cacaaucucaacugccuuuuag

SEQ ID NO: 69070 - RNA, 22 nt, Human
cacaaugcagcauguaaaugca

SEQ ID NO: 69071 - RNA, 22 nt, Human
cacaauguauauguauaucaaa

SEQ ID NO: 69072 - RNA, 22 nt, Human
cacaauuuguuuuaucaguauu

SEQ ID NO: 69073 - RNA, 22 nt, Human
cacacaaauauucuggaggcaa

SEQ ID NO: 69074 - RNA, 22 nt, Human
cacacaauuaugugugcacaau

SEQ ID NO: 69075 - RNA, 22 nt, Human
cacacacugacaccuuaucuug

SEQ ID NO: 69076 - RNA, 21 nt, Human
cacacagcugcccuuagguag

SEQ ID NO: 69077 - RNA, 22 nt, Human
cacacaggcaggaucccuuccc

SEQ ID NO: 69078 - RNA, 22 nt, Human
cacacagguaagccucuuucaa

SEQ ID NO: 69079 - RNA, 21 nt, Human
cacacagugaucuauccacau

SEQ ID NO: 69080 - RNA, 22 nt, Human
cacacagugggaaaaccugaag

SEQ ID NO: 69081 - RNA, 22 nt, Human
cacacauauugucccuagugug

SEQ ID NO: 69082 - RNA, 22 nt, Human
cacacaugaaguugcugagcua

SEQ ID NO: 69083 - RNA, 22 nt, Human
cacacaugugagcagagaggcg

SEQ ID NO: 69084 - RNA, 22 nt, Human
cacacaugugugcagcuuagaa

SEQ ID NO: 69085 - RNA, 21 nt, Human
cacaccaggcaugucuugagc

SEQ ID NO: 69086 - RNA, 22 nt, Human
cacacccaaauuucucucucag

SEQ ID NO: 69087 - RNA, 23 nt, Human
cacacccaucacuaagagcuccu

SEQ ID NO: 69088 - RNA, 22 nt, Human
cacacccuugcuaacacuuguu

SEQ ID NO: 69089 - RNA, 22 nt, Human
cacacugauagcacuaagucag

SEQ ID NO: 69090 - RNA, 22 nt, Human
cacacugucagguaaauaacac

SEQ ID NO: 69091 - RNA, 22 nt, Human
cacacugucuuucagaaugguu

SEQ ID NO: 69092 - RNA, 22 nt, Human
cacacuuucagguccucuuugc

SEQ ID NO: 69093 - RNA, 20 nt, Human
cacagaacaaauugcaggac

SEQ ID NO: 69094 - RNA, 22 nt, Human
auccuuggcacaguggaauuca

SEQ ID NO: 69095 - RNA, 22 nt, Human
auccuuggcagcucagaccuac

SEQ ID NO: 69096 - RNA, 22 nt, Human
auccuuuaguccuacaacucga

SEQ ID NO: 69097 - RNA, 22 nt, Human
aucgaauaauugcauucuauaa

SEQ ID NO: 69098 - RNA, 22 nt, Human
aucgcaauguuuagaauuuugu

SEQ ID NO: 69099 - RNA, 22 nt, Human
aucggggaaaagggaggcugug

SEQ ID NO: 69100 - RNA, 22 nt, Human
aucuaaaaggagcucuuuaucu

SEQ ID NO: 69101 - RNA, 22 nt, Human
aucuaaacuguuuacucucugc

SEQ ID NO: 69102 - RNA, 22 nt, Human
aucuaaagugucauaaguagcu

SEQ ID NO: 69103 - RNA, 22 nt, Human
aucuaacagcaacaccagaaua

SEQ ID NO: 69104 - RNA, 16 nt, Human
aucuaagaauguagag

SEQ ID NO: 69105 - RNA, 22 nt, Human
aucuaagaggaugguuggaaau

SEQ ID NO: 69106 - RNA, 22 nt, Human
aucuaagauguauugagcacuu

SEQ ID NO: 69107 - RNA, 23 nt, Human
aucuaauuucuccaaaucucuac

SEQ ID NO: 69108 - RNA, 22 nt, Human
aucuacaacggguggaguaggg

SEQ ID NO: 69109 - RNA, 22 nt, Human
aucuacaaugucuggcugcacu

SEQ ID NO: 69110 - RNA, 22 nt, Human
aucuacagccagucugguuugu

SEQ ID NO: 69111 - RNA, 22 nt, Human
aucuacaggauaguuuaauauu

SEQ ID NO: 69112 - RNA, 22 nt, Human
aucuacaggauuuuacagaguu

SEQ ID NO: 69113 - RNA, 22 nt, Human
aucuagaaguggcaugaauuac

SEQ ID NO: 69114 - RNA, 22 nt, Human
cacagcauucacagaaagacau

SEQ ID NO: 69115 - RNA, 22 nt, Human
cacagcccugcgccccaguuug

SEQ ID NO: 69116 - RNA, 22 nt, Human
cacagccuugagcgaggacaag

SEQ ID NO: 69117 - RNA, 22 nt, Human
cacagcuaccugcaugccugcu

SEQ ID NO: 69118 - RNA, 22 nt, Human
cacagcuagauggauagauaga

SEQ ID NO: 69119 - RNA, 22 nt, Human
cacagcuaggaggaaagcagag

SEQ ID NO: 69120 - RNA, 22 nt, Human
cacagcugcacagaggaggugc

SEQ ID NO: 69121 - RNA, 22 nt, Human
cacagcugccaugcagucagug

SEQ ID NO: 69122 - RNA, 22 nt, Human
cacagcugcccuacuccaugug

SEQ ID NO: 69123 - RNA, 19 nt, Human
cacagcuggcgcugaccgc

SEQ ID NO: 69124 - RNA, 22 nt, Human
cacagcugggaaaauuuguaca

SEQ ID NO: 69125 - RNA, 22 nt, Human
cacagcugucagcugaccuagg

SEQ ID NO: 69126 - RNA, 22 nt, Human
cacagcuguuuucuccaggcag

SEQ ID NO: 69127 - RNA, 22 nt, Human
cacagcuucuccuugauaucgc

SEQ ID NO: 69128 - RNA, 22 nt, Human
cacagcuucuuccauuccacuc

SEQ ID NO: 69129 - RNA, 22 nt, Human
cacaggaaaaauggguccuuua

SEQ ID NO: 69130 - RNA, 20 nt, Human
cacaggaaagcuacucaguu

SEQ ID NO: 69131 - RNA, 22 nt, Human
cacaggaaagucagccagaaga

SEQ ID NO: 69132 - RNA, 22 nt, Human
cacaggaaaugauucugcagca

SEQ ID NO: 69133 - RNA, 22 nt, Human
cacaggaagaucucccagaggu

SEQ ID NO: 69134 - RNA, 22 nt, Human
cacaggaauauaaguuugaguu

SEQ ID NO: 69135 - RNA, 22 nt, Human
cacaggagauugaucuauuggu

SEQ ID NO: 69136 - RNA, 22 nt, Human
cacaggaggaggugcccgggcc

SEQ ID NO: 69137 - RNA, 22 nt, Human
cacaggccaguaagacuguguu

SEQ ID NO: 69138 - RNA, 22 nt, Human
cacaggcugcccgcagcuggga

SEQ ID NO: 69139 - RNA, 22 nt, Human
cacaggcuugucagcaugaggc

SEQ ID NO: 69140 - RNA, 22 nt, Human
cacagggaggcggucacuggcu

SEQ ID NO: 69141 - RNA, 23 nt, Human
cacagggagggaaacucuuucag

SEQ ID NO: 69142 - RNA, 22 nt, Human
cacagggccacuuucccaguaa

SEQ ID NO: 69143 - RNA, 22 nt, Human
cacagguagaugccaugcagca

SEQ ID NO: 69144 - RNA, 22 nt, Human
cacaggugcaagaaguugcagu

SEQ ID NO: 69145 - RNA, 21 nt, Human
cacaggugggucagugaggcc

SEQ ID NO: 69146 - RNA, 22 nt, Human
cacaggugucucuaguagcguu

SEQ ID NO: 69147 - RNA, 22 nt, Human
cacagguguuuguuauacucag

SEQ ID NO: 69148 - RNA, 22 nt, Human
cacaguacccagcacuacugag

SEQ ID NO: 69149 - RNA, 22 nt, Human
cacaguaugaucuaaaguaagu

SEQ ID NO: 69150 - RNA, 22 nt, Human
cacagucacauaucuaugugug

SEQ ID NO: 69151 - RNA, 22 nt, Human
cacagucaccuuaucaggaugu

SEQ ID NO: 69152 - RNA, 19 nt, Human
cacaguccuauguuuauca

SEQ ID NO: 69153 - RNA, 22 nt, Human
cacagugaauuacauagacgug

SEQ ID NO: 69154 - RNA, 22 nt, Human
cacagugacauuagugagaaaa

SEQ ID NO: 69155 - RNA, 22 nt, Human
cacagugaccucuuuaaaaggg

SEQ ID NO: 69156 - RNA, 19 nt, Human
cacagugcagccauuucuc

SEQ ID NO: 69157 - RNA, 22 nt, Human
cacagugcucaaacacaagugc

SEQ ID NO: 69158 - RNA, 16 nt, Human
cacagugcugcugcuc

SEQ ID NO: 69159 - RNA, 22 nt, Human
cacagugcuguuuguaaagaga

SEQ ID NO: 69160 - RNA, 22 nt, Human
cacagugcuuuaugagagaucu

SEQ ID NO: 69161 - RNA, 22 nt, Human
cacaguggaaguccaggauccc

SEQ ID NO: 69162 - RNA, 22 nt, Human
cacaguggauugggugaugccc

SEQ ID NO: 69163 - RNA, 22 nt, Human
cacagugucugugcuucagugu

SEQ ID NO: 69164 - RNA, 22 nt, Human
cacagugugacugaccuucagc

SEQ ID NO: 69165 - RNA, 22 nt, Human
cacagugugggcauggugccug

SEQ ID NO: 69166 - RNA, 22 nt, Human
cacaguguuccagagcaguggu

SEQ ID NO: 69167 - RNA, 22 nt, Human
cacaguuaagggaugucauguu

SEQ ID NO: 69168 - RNA, 22 nt, Human
cacaguuagagguagaguccag

SEQ ID NO: 69169 - RNA, 22 nt, Human
cacaguuaugggaaacguaguu

SEQ ID NO: 69170 - RNA, 22 nt, Human
cacauaagaaaugaauaugaga

SEQ ID NO: 69171 - RNA, 22 nt, Human
cacauaaguggguuccauugca

SEQ ID NO: 69172 - RNA, 22 nt, Human
cacauaauugaacgugaugagu

SEQ ID NO: 69173 - RNA, 22 nt, Human
cacauacaagccauggggggau

SEQ ID NO: 69174 - RNA, 22 nt, Human
cacauacuuguguguacauaug

SEQ ID NO: 69175 - RNA, 22 nt, Human
cacauauaccucuucuugaguu

SEQ ID NO: 69176 - RNA, 19 nt, Human
cacaucagcagggcugugg

SEQ ID NO: 69177 - RNA, 22 nt, Human
cacaucagggcugcuugggggu

SEQ ID NO: 69178 - RNA, 23 nt, Human
cacaucaguuuaggucagauuuu

SEQ ID NO: 69179 - RNA, 22 nt, Human
cacaucauguuaauucauuaca

SEQ ID NO: 69180 - RNA, 22 nt, Human
cacaucuauagggacagcaaca

SEQ ID NO: 69181 - RNA, 22 nt, Human
cacaucucagggcuacaggcag

SEQ ID NO: 69182 - RNA, 22 nt, Human
cacaucugaaaagaugcacaag

SEQ ID NO: 69183 - RNA, 22 nt, Human
cacaucugacuuccagugcagg

SEQ ID NO: 69184 - RNA, 22 nt, Human
cacaucuucuuaacuccaaagu

SEQ ID NO: 69185 - RNA, 22 nt, Human
cacaugaauaaggcuuuauugu

SEQ ID NO: 69186 - RNA, 22 nt, Human
cacaugacucuggcuacccaga

SEQ ID NO: 69187 - RNA, 22 nt, Human
cacaugagagcccccaagagca

SEQ ID NO: 69188 - RNA, 22 nt, Human
cacaugaguccugccagguaug

SEQ ID NO: 69189 - RNA, 22 nt, Human
cacaugaguguaggaagaggga

SEQ ID NO: 69190 - RNA, 22 nt, Human
cacaugaugguggaagccauag

SEQ ID NO: 69191 - RNA, 22 nt, Human
cacaugcaccagaaaucaacau

SEQ ID NO: 69192 - RNA, 22 nt, Human
cacaugcaucugucauguuugg

SEQ ID NO: 69193 - RNA, 22 nt, Human
cacaugccuauuaaccaaacga

SEQ ID NO: 69194 - RNA, 22 nt, Human
cacaugggcguaauguccaugg

SEQ ID NO: 69195 - RNA, 22 nt, Human
cacaugggcuuagcaggcaggg

SEQ ID NO: 69196 - RNA, 22 nt, Human
cacauggggcgcugcauuggcc

SEQ ID NO: 69197 - RNA, 21 nt, Human
cacaugugaauuacugaacug

SEQ ID NO: 69198 - RNA, 22 nt, Human
cacauguucuugaagccaacuc

SEQ ID NO: 69199 - RNA, 22 nt, Human
cacauguuuggcaugucaccaa

SEQ ID NO: 69200 - RNA, 22 nt, Human
cacauucacuucucuguccacc

SEQ ID NO: 69201 - RNA, 21 nt, Human
cacauuccaugggucuauuua

SEQ ID NO: 69202 - RNA, 22 nt, Human
cacauucuguccuugaacugca

SEQ ID NO: 69203 - RNA, 20 nt, Human
auaugggugaugaugucugu

SEQ ID NO: 69204 - RNA, 22 nt, Human
auauguauugagugccaacugu

SEQ ID NO: 69205 - RNA, 22 nt, Human
auaugucucuguacaacagucu

SEQ ID NO: 69206 - RNA, 22 nt, Human
auauguggcauuauuucugagg

SEQ ID NO: 69207 - RNA, 22 nt, Human
auauguguaaaugcauuuguuu

SEQ ID NO: 69208 - RNA, 22 nt, Human
auaugugugaugcauggacuaa

SEQ ID NO: 69209 - RNA, 22 nt, Human
auaugugugcacauauguauuu

SEQ ID NO: 69210 - RNA, 22 nt, Human
auauguguguauuucuuacuag

SEQ ID NO: 69211 - RNA, 22 nt, Human
auauguuacucuuucaagcaga

SEQ ID NO: 69212 - RNA, 22 nt, Human
auauguuucaguauucaaguca

SEQ ID NO: 69213 - RNA, 22 nt, Human
auauuacacacgguaucacggg

SEQ ID NO: 69214 - RNA, 22 nt, Human
auauuaggaguuaaauguauua

SEQ ID NO: 69215 - RNA, 22 nt, Human
auauuagggucucuaaauucua

SEQ ID NO: 69216 - RNA, 22 nt, Human
auauuauucuagcucuugugug

SEQ ID NO: 69217 - RNA, 22 nt, Human
auauucaaauuacauuuacuaa

SEQ ID NO: 69218 - RNA, 22 nt, Human
auauucacaguaaguguagcag

SEQ ID NO: 69219 - RNA, 23 nt, Human
auauucacgccgccagagguccc

SEQ ID NO: 69220 - RNA, 22 nt, Human
auauucauugaacaccuacuac

SEQ ID NO: 69221 - RNA, 22 nt, Human
auauuccugacuuaauuuuuga

SEQ ID NO: 69222 - RNA, 22 nt, Human
auauucguggucaaguaaggcc

SEQ ID NO: 69223 - RNA, 22 nt, Human
auauucuauaagcaguuggaag

SEQ ID NO: 69224 - RNA, 22 nt, Human
auauucuuccaaaacaucauuu

SEQ ID NO: 69225 - RNA, 22 nt, Human
auauucuugaaagauccuggua

SEQ ID NO: 69226 - RNA, 22 nt, Human
auauugagauaagaacugacau

SEQ ID NO: 69227 - RNA, 22 nt, Human
auauugcaguguguuuauguga

SEQ ID NO: 69228 - RNA, 22 nt, Human
auauugcauuggcuggucuuga

SEQ ID NO: 69229 - RNA, 22 nt, Human
auauuguguguacaaguaguua

SEQ ID NO: 69230 - RNA, 22 nt, Human
auauuuaaacaggguaccaaua

SEQ ID NO: 69231 - RNA, 22 nt, Human
aucuauacucagaguuaauauc

SEQ ID NO: 69232 - RNA, 22 nt, Human
aucuaugugggaaucauaauag

SEQ ID NO: 69233 - RNA, 22 nt, Human
aucuauucucuacaguagacag

SEQ ID NO: 69234 - RNA, 22 nt, Human
aucuauuuuaaauggcaguaaa

SEQ ID NO: 69235 - RNA, 22 nt, Human
aucucaacuaagccuaacuuuu

SEQ ID NO: 69236 - RNA, 22 nt, Human
aucucacagaggcccaccagga

SEQ ID NO: 69237 - RNA, 22 nt, Human
aucucacaggacugaaacguaa

SEQ ID NO: 69238 - RNA, 22 nt, Human
aucucagaaacauaucuaaucc

SEQ ID NO: 69239 - RNA, 22 nt, Human
aucucagacauguuguccauga

SEQ ID NO: 69240 - RNA, 22 nt, Human
aucucagaucuacagaucuaca

SEQ ID NO: 69241 - RNA, 22 nt, Human
aucucagggguuccuucuagag

SEQ ID NO: 69242 - RNA, 22 nt, Human
aucucagucagguugaauuugg

SEQ ID NO: 69243 - RNA, 22 nt, Human
aucucauaacucauuugaagac

SEQ ID NO: 69244 - RNA, 22 nt, Human
aucuccagaggagucauggucu

SEQ ID NO: 69245 - RNA, 22 nt, Human
aucuccagcucgcagagcuccu

SEQ ID NO: 69246 - RNA, 22 nt, Human
aucuccagcuggcugugauaaa

SEQ ID NO: 69247 - RNA, 22 nt, Human
aucuccaggauuuucacacuca

SEQ ID NO: 69248 - RNA, 22 nt, Human
aucuccaggcauuucaagagac

SEQ ID NO: 69249 - RNA, 22 nt, Human
aucuccaguauccuaguauugu

SEQ ID NO: 69250 - RNA, 22 nt, Human
aucuccagugaggcagauucug

SEQ ID NO: 69251 - RNA, 22 nt, Human
aucuccgccaucgcgaacgccu

SEQ ID NO: 69252 - RNA, 22 nt, Human
aucuccuaaaguuuccagaaga

SEQ ID NO: 69253 - RNA, 20 nt, Human
aucuccugcuaccacccauu

SEQ ID NO: 69254 - RNA, 22 nt, Human
aucuccuuggucucguuccagg

SEQ ID NO: 69255 - RNA, 19 nt, Human
aucuccuuucuucaagcuu

SEQ ID NO: 69256 - RNA, 22 nt, Human
aucucguuuugagaacuguguu

SEQ ID NO: 69257 - RNA, 22 nt, Human
aucucuaaucaccagcucuagc

SEQ ID NO: 69258 - RNA, 17 nt, Human
aucucucuaaggcaggc

SEQ ID NO: 69259 - RNA, 23 nt, Human
aucucucugguggucacagucag

SEQ ID NO: 69260 - RNA, 22 nt, Human
aucucugcaucccucaagguug

SEQ ID NO: 69261 - RNA, 22 nt, Human
aucucuggcaaugcagcaucgu

SEQ ID NO: 69262 - RNA, 22 nt, Human
aucucuggccuuccuuuuccaa

SEQ ID NO: 69263 - RNA, 22 nt, Human
aucucugugccaucauugcccc

SEQ ID NO: 69264 - RNA, 22 nt, Human
aucucuuugauggcuccuguga

SEQ ID NO: 69265 - RNA, 23 nt, Human
aucugaaaagcauuugcaguuug

SEQ ID NO: 69266 - RNA, 22 nt, Human
aucugaaauagucuuaucugag

SEQ ID NO: 69267 - RNA, 22 nt, Human
aucugacaaccuauugacuuga

SEQ ID NO: 69268 - RNA, 22 nt, Human
aucugacaaguuguguguauag

SEQ ID NO: 69269 - RNA, 22 nt, Human
aucugacaucucccucugacau

SEQ ID NO: 69270 - RNA, 19 nt, Human
aucugaggccucaucuggg

SEQ ID NO: 69271 - RNA, 22 nt, Human
aucugaggguuugggcaucagc

SEQ ID NO: 69272 - RNA, 22 nt, Human
aucugagguauaugacuggcua

SEQ ID NO: 69273 - RNA, 22 nt, Human
aucugaguguuggauuuauugu

SEQ ID NO: 69274 - RNA, 22 nt, Human
aucugcaucagacuuugcauga

SEQ ID NO: 69275 - RNA, 17 nt, Human
aucugcauuucuaauga

SEQ ID NO: 69276 - RNA, 22 nt, Human
aucugccaaugccaugagaaga

SEQ ID NO: 69277 - RNA, 22 nt, Human
aucugcccaucuguccugcuuc

SEQ ID NO: 69278 - RNA, 22 nt, Human
aucugccucuucuucauugcga

SEQ ID NO: 69279 - RNA, 22 nt, Human
aucugccugcuuaugaugccug

SEQ ID NO: 69280 - RNA, 22 nt, Human
aucugccuguauuuaccaucau

SEQ ID NO: 69281 - RNA, 19 nt, Human
aucugccuguuaucacaua

SEQ ID NO: 69282 - RNA, 22 nt, Human
aucugcugucacauguuugaag

SEQ ID NO: 69283 - RNA, 22 nt, Human
aucugcuguguguaauggaaug

SEQ ID NO: 69284 - RNA, 22 nt, Human
aucugcuucagugauaugugaa

SEQ ID NO: 69285 - RNA, 22 nt, Human
aucugcuuccuccuuagggaaa

SEQ ID NO: 69286 - RNA, 22 nt, Human
aucugcuugaaugagcaacagg

SEQ ID NO: 69287 - RNA, 22 nt, Human
aucugcuugcaggcuggcccuu

SEQ ID NO: 69288 - RNA, 22 nt, Human
aucuggaauccuuguggacaau

SEQ ID NO: 69289 - RNA, 22 nt, Human
aucuggagagaucuucacaaaa

SEQ ID NO: 69290 - RNA, 22 nt, Human
aucuggagcaagauuaagagau

SEQ ID NO: 69291 - RNA, 22 nt, Human
aucuggaggauucugggacuug

SEQ ID NO: 69292 - RNA, 22 nt, Human
aucuggaggcauuacucugucu

SEQ ID NO: 69293 - RNA, 22 nt, Human
aucuggaggccugucuuauccc

SEQ ID NO: 69294 - RNA, 22 nt, Human
aucuggcucauucagggaacgg

SEQ ID NO: 69295 - RNA, 22 nt, Human
aucuggcucgcuaggcucuggg

SEQ ID NO: 69296 - RNA, 22 nt, Human
aucuggcugagcgaggcccaca

SEQ ID NO: 69297 - RNA, 22 nt, Human
aucuggcuugacuuugcgacuu

SEQ ID NO: 69298 - RNA, 23 nt, Human
aucugggcaucuggagugguccu

SEQ ID NO: 69299 - RNA, 22 nt, Human
aucugggccaauccuaguacca

SEQ ID NO: 69300 - RNA, 22 nt, Human
aucuggguucaccaugcuccug

SEQ ID NO: 69301 - RNA, 22 nt, Human
aucugguaugagguuuugcuuu

SEQ ID NO: 69302 - RNA, 22 nt, Human
aucugguauuuccuuugauagc

SEQ ID NO: 69303 - RNA, 22 nt, Human
aucugguucuucuuaggcauca

SEQ ID NO: 69304 - RNA, 22 nt, Human
aucugguuuggggauccuugug

SEQ ID NO: 69305 - RNA, 22 nt, Human
aucuguagucacugcacagcuc

SEQ ID NO: 69306 - RNA, 22 nt, Human
aucugucagccugggauuaggg

SEQ ID NO: 69307 - RNA, 22 nt, Human
aucugucaucagcaccacaggu

SEQ ID NO: 69308 - RNA, 22 nt, Human
aucuguccuggagcuaggcuuc

SEQ ID NO: 69309 - RNA, 18 nt, Human
aucuguccuuucucugcc

SEQ ID NO: 69310 - RNA, 22 nt, Human
aucugucugggugcagcagucc

SEQ ID NO: 69311 - RNA, 22 nt, Human
aucugucuugccuugcauauuu

SEQ ID NO: 69312 - RNA, 22 nt, Human
cagaaguucuagauuugagucc

SEQ ID NO: 69313 - RNA, 22 nt, Human
cagaaguuggagcuuuccauca

SEQ ID NO: 69314 - RNA, 22 nt, Human
cagaauaaacagaaacguagcu

SEQ ID NO: 69315 - RNA, 22 nt, Human
cagaauaaagguacaauugagu

SEQ ID NO: 69316 - RNA, 22 nt, Human
cagaauaagcuguguugucaag

SEQ ID NO: 69317 - RNA, 22 nt, Human
cagaauacccuauagacagaau

SEQ ID NO: 69318 - RNA, 22 nt, Human
cagaauaugacucgggcacuac

SEQ ID NO: 69319 - RNA, 22 nt, Human
cagaaucagcccuugcuauuaa

SEQ ID NO: 69320 - RNA, 22 nt, Human
cagaauccagaauugcugaggu

SEQ ID NO: 69321 - RNA, 22 nt, Human
cagaauccaugacagacguuga

SEQ ID NO: 69322 - RNA, 22 nt, Human
cagaaucuacacccucagaaau

SEQ ID NO: 69323 - RNA, 22 nt, Human
cagaaucugagucgugauugua

SEQ ID NO: 69324 - RNA, 22 nt, Human
cagaaucuguugggguugcaga

SEQ ID NO: 69325 - RNA, 22 nt, Human
cagaaugcagaauguucauuuu

SEQ ID NO: 69326 - RNA, 22 nt, Human
cagaaugcauugcuucugaugg

SEQ ID NO: 69327 - RNA, 22 nt, Human
cagaauggcuuuuauggcucag

SEQ ID NO: 69328 - RNA, 22 nt, Human
cagaauguauucucauaaagcc

SEQ ID NO: 69329 - RNA, 22 nt, Human
cagaauuucagugauguuuucu

SEQ ID NO: 69330 - RNA, 22 nt, Human
cagaauuucccacacugggacu

SEQ ID NO: 69331 - RNA, 22 nt, Human
cagaauuugaaguaauauucca

SEQ ID NO: 69332 - RNA, 22 nt, Human
cagacaacuggacuaagaucac

SEQ ID NO: 69333 - RNA, 22 nt, Human
cagacacacaagcaaucuaagu

SEQ ID NO: 69334 - RNA, 22 nt, Human
cagacacagcaauucuguguug

SEQ ID NO: 69335 - RNA, 22 nt, Human
cagacacuaggugacagagugc

SEQ ID NO: 69336 - RNA, 22 nt, Human
cagacacuaugcuaagguacua

SEQ ID NO: 69337 - RNA, 22 nt, Human
cagacagagucuucccaucagu

SEQ ID NO: 69338 - RNA, 22 nt, Human
cagacaggagacuggaucaugg

SEQ ID NO: 69339 - RNA, 22 nt, Human
cagacaggcaggugagagcucc

SEQ ID NO: 69340 - RNA, 17 nt, Human
cagacaggcugucaccc

SEQ ID NO: 69341 - RNA, 22 nt, Human
cagacagggcccugugauggua

SEQ ID NO: 69342 - RNA, 22 nt, Human
cagacaggguuuuggucuuugg

SEQ ID NO: 69343 - RNA, 22 nt, Human
cagacauaucccugcucccuua

SEQ ID NO: 69344 - RNA, 22 nt, Human
aucuuucuauuucuaaaaacua

SEQ ID NO: 69345 - RNA, 22 nt, Human
aucuuucuccauauacaucuuu

SEQ ID NO: 69346 - RNA, 22 nt, Human
aucuuugaagaggacuugaagu

SEQ ID NO: 69347 - RNA, 22 nt, Human
aucuuugaaucaaugaaucagu

SEQ ID NO: 69348 - RNA, 22 nt, Human
aucuuuggccacuugugcugca

SEQ ID NO: 69349 - RNA, 22 nt, Human
aucuuugggauccugauuuacu

SEQ ID NO: 69350 - RNA, 19 nt, Human
aucuuuggguccugaaggg

SEQ ID NO: 69351 - RNA, 22 nt, Human
aucuuuggugcuuggugcuccc

SEQ ID NO: 69352 - RNA, 22 nt, Human
aucuuugucacucuacugucua

SEQ ID NO: 69353 - RNA, 22 nt, Human
aucuuugugcuaauguaguucu

SEQ ID NO: 69354 - RNA, 22 nt, Human
aucuuuuacuacaaaucaggug

SEQ ID NO: 69355 - RNA, 22 nt, Human
aucuuuuuacuaacacugcuua

SEQ ID NO: 69356 - RNA, 22 nt, Human
augaaaagggagugauauuugu

SEQ ID NO: 69357 - RNA, 22 nt, Human
augaaacaacagacuuggucaa

SEQ ID NO: 69358 - RNA, 22 nt, Human
augaaacaaggguauuuucucu

SEQ ID NO: 69359 - RNA, 22 nt, Human
augaaacaugcuuuguggauga

SEQ ID NO: 69360 - RNA, 23 nt, Human
augaaacucaagccagauccaag

SEQ ID NO: 69361 - RNA, 22 nt, Human
augaaacugggauaacuauagc

SEQ ID NO: 69362 - RNA, 22 nt, Human
augaaagaugauuuaaaguacu

SEQ ID NO: 69363 - RNA, 22 nt, Human
augaaagcaaauuauaggccau

SEQ ID NO: 69364 - RNA, 22 nt, Human
augaaagcaacuuauuugagau

SEQ ID NO: 69365 - RNA, 22 nt, Human
augaaaguaggguaaaaucaca

SEQ ID NO: 69366 - RNA, 22 nt, Human
augaaaguggcuugauuaaaug

SEQ ID NO: 69367 - RNA, 22 nt, Human
augaaaguguuuaaguuuaugu

SEQ ID NO: 69368 - RNA, 22 nt, Human
augaaaguuugcauuccucagu

SEQ ID NO: 69369 - RNA, 23 nt, Human
augaaaugcuggcucagggaggu

SEQ ID NO: 69370 - RNA, 22 nt, Human
augaaauguaaguagagaguuu

SEQ ID NO: 69371 - RNA, 22 nt, Human
augaaauucaucugagaaugcu

SEQ ID NO: 69372 - RNA, 22 nt, Human
augaaauugaucuugaacuuuu

SEQ ID NO: 69373 - RNA, 22 nt, Human
augaaauuugcugcuaaguucc

SEQ ID NO: 69374 - RNA, 22 nt, Human
augaacaaucuggcaagaacuu

SEQ ID NO: 69375 - RNA, 22 nt, Human
augaacagcauugaaauccagc

SEQ ID NO: 69376 - RNA, 22 nt, Human
augaacaguaugcaacaugauu

SEQ ID NO: 69377 - RNA, 22 nt, Human
augaacuaagagucauuagugu

SEQ ID NO: 69378 - RNA, 22 nt, Human
augaacucauuuauuuuccucu

SEQ ID NO: 69379 - RNA, 22 nt, Human
augaacucuucugguuauuuuu

SEQ ID NO: 69380 - RNA, 22 nt, Human
augaagacaaacgacguugcaa

SEQ ID NO: 69381 - RNA, 22 nt, Human
augaagacaaacuggguagaaa

SEQ ID NO: 69382 - RNA, 22 nt, Human
augaagacaggucucaucacca

SEQ ID NO: 69383 - RNA, 22 nt, Human
augaagacuaaugugaauggga

SEQ ID NO: 69384 - RNA, 22 nt, Human
augaagauaauagcauugguug

SEQ ID NO: 69385 - RNA, 22 nt, Human
augaagauucuauuuaucacuu

SEQ ID NO: 69386 - RNA, 22 nt, Human
augaagauuuauaauugccuuu

SEQ ID NO: 69387 - RNA, 22 nt, Human
augaagcagacucagguggugc

SEQ ID NO: 69388 - RNA, 22 nt, Human
augaagcaggcacagcuucagg

SEQ ID NO: 69389 - RNA, 19 nt, Human
augaagcauuguuuuugua

SEQ ID NO: 69390 - RNA, 22 nt, Human
augaagcguucgagauagguag

SEQ ID NO: 69391 - RNA, 22 nt, Human
augaagcuguuuauuuuagcag

SEQ ID NO: 69392 - RNA, 22 nt, Human
augaaggcuguguagauggaug

SEQ ID NO: 69393 - RNA, 22 nt, Human
augaagggugucccugugagca

SEQ ID NO: 69394 - RNA, 22 nt, Human
augaagucugcacaugcaugug

SEQ ID NO: 69395 - RNA, 22 nt, Human
augaagucugccaaggaaaggc

SEQ ID NO: 69396 - RNA, 22 nt, Human
augaaguuccaguauaugcagu

SEQ ID NO: 69397 - RNA, 22 nt, Human
augaaguucucaauaaucaugu

SEQ ID NO: 69398 - RNA, 22 nt, Human
augaauacgcggucauacacau

SEQ ID NO: 69399 - RNA, 22 nt, Human
augaauauugaaugucuuauga

SEQ ID NO: 69400 - RNA, 22 nt, Human
augaaucagaaucugcauuuua

SEQ ID NO: 69401 - RNA, 23 nt, Human
augaaugaauaaggcaggaaagc

SEQ ID NO: 69402 - RNA, 19 nt, Human
augaaugagcugugagguu

SEQ ID NO: 69403 - RNA, 22 nt, Human
augaaugaugccaguugaaaug

SEQ ID NO: 69404 - RNA, 22 nt, Human
augaaugauuaaagaguacagu

SEQ ID NO: 69405 - RNA, 22 nt, Human
augaaugcugaauuaugaacug

SEQ ID NO: 69406 - RNA, 22 nt, Human
augaauuguaaauuccuugaaa

SEQ ID NO: 69407 - RNA, 22 nt, Human
augaauuuuucuaagcuuuugu

SEQ ID NO: 69408 - RNA, 22 nt, Human
augacaaauucagaccauagca

SEQ ID NO: 69409 - RNA, 22 nt, Human
augacaagaguguucagggaga

SEQ ID NO: 69410 - RNA, 22 nt, Human
augacaauauagcuuugauuuu

SEQ ID NO: 69411 - RNA, 22 nt, Human
augacaauggacauaguuaaaa

SEQ ID NO: 69412 - RNA, 22 nt, Human
augacaccauauuagccuagag

SEQ ID NO: 69413 - RNA, 22 nt, Human
augacacugagaauaacaggua

SEQ ID NO: 69414 - RNA, 22 nt, Human
augacacuuggugauacuuugu

SEQ ID NO: 69415 - RNA, 22 nt, Human
augacagaaggccucccugaca

SEQ ID NO: 69416 - RNA, 22 nt, Human
augacagacccucuaaagacaa

SEQ ID NO: 69417 - RNA, 22 nt, Human
augacagcauucaagacauaga

SEQ ID NO: 69418 - RNA, 22 nt, Human
augacagcauuuucuucuaagg

SEQ ID NO: 69419 - RNA, 22 nt, Human
augacagcucuagcacacagua

SEQ ID NO: 69420 - RNA, 22 nt, Human
augacaguagguaaaugauagc

SEQ ID NO: 69421 - RNA, 22 nt, Human
augacccagucaaagggaaugg

SEQ ID NO: 69422 - RNA, 22 nt, Human
augacuaagugcauuuuaauug

SEQ ID NO: 69423 - RNA, 22 nt, Human
augacuaauggaaaauacaaug

SEQ ID NO: 69424 - RNA, 22 nt, Human
augacucuaagaauucuagaug

SEQ ID NO: 69425 - RNA, 22 nt, Human
augacucuuagcuaaagguaag

SEQ ID NO: 69426 - RNA, 22 nt, Human
augacuucugcaaggucauuug

SEQ ID NO: 69427 - RNA, 22 nt, Human
augacuucugcuuuacagaguu

SEQ ID NO: 69428 - RNA, 22 nt, Human
augacuuuuaggagcagugcuc

SEQ ID NO: 69429 - RNA, 22 nt, Human
augagaaagaguuguaucuaga

SEQ ID NO: 69430 - RNA, 22 nt, Human
augagaaaguuaaucaucauga

SEQ ID NO: 69431 - RNA, 22 nt, Human
augagagacaggaacgagcugg

SEQ ID NO: 69432 - RNA, 22 nt, Human
augagagacuguguguugggag

SEQ ID NO: 69433 - RNA, 18 nt, Human
augagaggugucagaaga

SEQ ID NO: 69434 - RNA, 22 nt, Human
augagagucucagagucucuuc

SEQ ID NO: 69435 - RNA, 22 nt, Human
augagauaauucauguggaaug

SEQ ID NO: 69436 - RNA, 22 nt, Human
augagcagaugcuccugccucu

SEQ ID NO: 69437 - RNA, 22 nt, Human
augagcaggaagagcacaaaga

SEQ ID NO: 69438 - RNA, 19 nt, Human
augagcaggcaagacaagc

SEQ ID NO: 69439 - RNA, 23 nt, Human
augagcauuuuuaauuucugugg

SEQ ID NO: 69440 - RNA, 22 nt, Human
augagcccagggaauuccuuuc

SEQ ID NO: 69441 - RNA, 22 nt, Human
augagcucauccgagucacacu

SEQ ID NO: 69442 - RNA, 22 nt, Human
augagcuucccagacaggaugg

SEQ ID NO: 69443 - RNA, 22 nt, Human
augaggagaccaaggccugaug

SEQ ID NO: 69444 - RNA, 22 nt, Human
augaggagcuguuuuaacugcu

SEQ ID NO: 69445 - RNA, 22 nt, Human
augaggauuaacuguugucaua

SEQ ID NO: 69446 - RNA, 22 nt, Human
augaggcaaagguggagguggg

SEQ ID NO: 69447 - RNA, 22 nt, Human
augaggcagagggcugugccag

SEQ ID NO: 69448 - RNA, 22 nt, Human
augaggcagcugacagcuguuc

SEQ ID NO: 69449 - RNA, 22 nt, Human
augaggcagcuggcuuucuccc

SEQ ID NO: 69450 - RNA, 22 nt, Human
augaggcaggagugcaguggca

SEQ ID NO: 69451 - RNA, 22 nt, Human
augaggcaggauauuaacuuuu

SEQ ID NO: 69452 - RNA, 22 nt, Human
augaggcagucuggccugaggg

SEQ ID NO: 69453 - RNA, 22 nt, Human
augaggcauauccuccuauggu

SEQ ID NO: 69454 - RNA, 22 nt, Human
augaggcaugggaucaaaauga

SEQ ID NO: 69455 - RNA, 22 nt, Human
augaggcaugugaggagaaggg

SEQ ID NO: 69456 - RNA, 22 nt, Human
augaggcauucacagaaggcac

SEQ ID NO: 69457 - RNA, 20 nt, Human
augaggccagcagggcucag

SEQ ID NO: 69458 - RNA, 22 nt, Human
augaggccauggcugucacuaa

SEQ ID NO: 69459 - RNA, 22 nt, Human
augaggcuauuucauagauuuu

SEQ ID NO: 69460 - RNA, 22 nt, Human
augagguaguuuggagaagagc

SEQ ID NO: 69461 - RNA, 22 nt, Human
augagguccagggaaguuaaau

SEQ ID NO: 69462 - RNA, 22 nt, Human
augagguuuuacugccauuuuc

SEQ ID NO: 69463 - RNA, 22 nt, Human
augagguuuugauuggcacagg

SEQ ID NO: 69464 - RNA, 22 nt, Human
augaguaagauaggcaaugugu

SEQ ID NO: 69465 - RNA, 22 nt, Human
augagucacucagcagaaaagg

SEQ ID NO: 69466 - RNA, 20 nt, Human
augagucuacacacuggcuu

SEQ ID NO: 69467 - RNA, 22 nt, Human
augaguuaguuucuugucuaga

SEQ ID NO: 69468 - RNA, 22 nt, Human
augaguucauugcauuugacag

SEQ ID NO: 69469 - RNA, 20 nt, Human
augaguuuaaacauucagag

SEQ ID NO: 69470 - RNA, 22 nt, Human
augauaacaacagcagugcugg

SEQ ID NO: 69471 - RNA, 22 nt, Human
augauaagccaugucgugguca

SEQ ID NO: 69472 - RNA, 22 nt, Human
augauacaccuaggagugggag

SEQ ID NO: 69473 - RNA, 22 nt, Human
augauacaucuucaugucagug

SEQ ID NO: 69474 - RNA, 22 nt, Human
augauacauuuaccuauggucu

SEQ ID NO: 69475 - RNA, 22 nt, Human
augauacucuaggugauuuaca

SEQ ID NO: 69476 - RNA, 21 nt, Human
augauacugaagcacaacuau

SEQ ID NO: 69477 - RNA, 22 nt, Human
aucuuucacuuuuuguggauga

SEQ ID NO: 69478 - RNA, 22 nt, Human
aucuuucaggccuaguguuuaa

SEQ ID NO: 69479 - RNA, 18 nt, Human
aucuuuccauagcauguu

SEQ ID NO: 69480 - RNA, 22 nt, Human
aucuuucucugcacuauacaau

SEQ ID NO: 69481 - RNA, 22 nt, Human
aucuuugacugccauucuugac

SEQ ID NO: 69482 - RNA, 22 nt, Human
aucuuuggaaagccaagcacag

SEQ ID NO: 69483 - RNA, 22 nt, Human
aucuuuggacggucccaacuga

SEQ ID NO: 69484 - RNA, 20 nt, Human
aucuuuggcucagaagccuu

SEQ ID NO: 69485 - RNA, 22 nt, Human
aucuuugggauauuugugauua

SEQ ID NO: 69486 - RNA, 22 nt, Human
aucuuuggucuugagugcaucu

SEQ ID NO: 69487 - RNA, 22 nt, Human
aucuuuucuguuugcuaugucu

SEQ ID NO: 69488 - RNA, 22 nt, Human
aucuuuuugacauggugauggu

SEQ ID NO: 69489 - RNA, 22 nt, Human
aucuuuuuugucuuggucacug

SEQ ID NO: 69490 - RNA, 22 nt, Human
augaaaacagccuccugugaua

SEQ ID NO: 69491 - RNA, 22 nt, Human
augaaaagcauaaacgcugaag

SEQ ID NO: 69492 - RNA, 22 nt, Human
augaaaauacugugguugauag

SEQ ID NO: 69493 - RNA, 22 nt, Human
augaaacuaaacuacauaaguu

SEQ ID NO: 69494 - RNA, 22 nt, Human
augaaacugaaggacaaccaga

SEQ ID NO: 69495 - RNA, 22 nt, Human
augaaagcaagaagugaguuga

SEQ ID NO: 69496 - RNA, 22 nt, Human
augaaagcaggaauuguucugu

SEQ ID NO: 69497 - RNA, 22 nt, Human
augaaauauuucagagcagagu

SEQ ID NO: 69498 - RNA, 22 nt, Human
augaaaugcuauuuuggcuaga

SEQ ID NO: 69499 - RNA, 22 nt, Human
augaaaugcugagaggugcuuc

SEQ ID NO: 69500 - RNA, 22 nt, Human
augaaauguaugagucuggguu

SEQ ID NO: 69501 - RNA, 22 nt, Human
augaaauuaaucaacacauaca

SEQ ID NO: 69502 - RNA, 20 nt, Human
augaaauuccuguuuucuga

SEQ ID NO: 69503 - RNA, 22 nt, Human
augaaauuuuaauuauaccucu

SEQ ID NO: 69504 - RNA, 22 nt, Human
augaacaacuugaagcuccaug

SEQ ID NO: 69505 - RNA, 22 nt, Human
augaacagaggaauagaauucu

SEQ ID NO: 69506 - RNA, 22 nt, Human
augaacaguacaaagcacagac

SEQ ID NO: 69507 - RNA, 22 nt, Human
augaacaugugacucagaccug

SEQ ID NO: 69508 - RNA, 23 nt, Human
augaacauuaguuucagauauug

SEQ ID NO: 69509 - RNA, 22 nt, Human
augaaccauaggcaagacaaua

SEQ ID NO: 69510 - RNA, 22 nt, Human
augaagaaaaauccagcugucc

SEQ ID NO: 69511 - RNA, 19 nt, Human
augaagauugguaaauuca

SEQ ID NO: 69512 - RNA, 22 nt, Human
augaagcaucucacaaucuagu

SEQ ID NO: 69513 - RNA, 22 nt, Human
augaagcugaaaaaggcauaua

SEQ ID NO: 69514 - RNA, 22 nt, Human
augaagcugaccuugucuugcu

SEQ ID NO: 69515 - RNA, 22 nt, Human
augaagcugguuuuggcuuggg

SEQ ID NO: 69516 - RNA, 22 nt, Human
augaaggauggcuggcugcccu

SEQ ID NO: 69517 - RNA, 22 nt, Human
augaaggcaagacugaggugug

SEQ ID NO: 69518 - RNA, 21 nt, Human
augaaggcagugccaagggcu

SEQ ID NO: 69519 - RNA, 22 nt, Human
augaaggcaguuaaacgucauc

SEQ ID NO: 69520 - RNA, 22 nt, Human
augaaggcuguguggagccccc

SEQ ID NO: 69521 - RNA, 22 nt, Human
augaagucuagcaagcauugaa

SEQ ID NO: 69522 - RNA, 21 nt, Human
augaagucuaugcuucugugu

SEQ ID NO: 69523 - RNA, 22 nt, Human
augaagucuauuuaccuaagcu

SEQ ID NO: 69524 - RNA, 22 nt, Human
augaaguucuagugagaaaugc

SEQ ID NO: 69525 - RNA, 22 nt, Human
augaauauguacacaucuguca

SEQ ID NO: 69526 - RNA, 22 nt, Human
augaaucaaacuguacacugag

SEQ ID NO: 69527 - RNA, 22 nt, Human
augaaucaaaguucauuugauc

SEQ ID NO: 69528 - RNA, 22 nt, Human
augaaugagaaagcugaaaucu

SEQ ID NO: 69529 - RNA, 22 nt, Human
augaaugagugcuagguuuguc

SEQ ID NO: 69530 - RNA, 22 nt, Human
augcacuugcguguuugcaaau

SEQ ID NO: 69531 - RNA, 22 nt, Human
augcagaagcagaacuuacaca

SEQ ID NO: 69532 - RNA, 22 nt, Human
augcagaaggagccaugcuugc

SEQ ID NO: 69533 - RNA, 22 nt, Human
augcagaauugcuaaguaucug

SEQ ID NO: 69534 - RNA, 22 nt, Human
augcagaugguggauggagaaa

SEQ ID NO: 69535 - RNA, 22 nt, Human
augcagauuuaauuaguauagg

SEQ ID NO: 69536 - RNA, 22 nt, Human
augcagcuagauuuuccagugu

SEQ ID NO: 69537 - RNA, 22 nt, Human
augcagcugacauuuucauguu

SEQ ID NO: 69538 - RNA, 22 nt, Human
augcagcuuccauauuuugcug

SEQ ID NO: 69539 - RNA, 23 nt, Human
augcaggacuuauaagguaaggu

SEQ ID NO: 69540 - RNA, 22 nt, Human
augcaggggcagcagagccugg

SEQ ID NO: 69541 - RNA, 23 nt, Human
augcaggguuacagggcugacuu

SEQ ID NO: 69542 - RNA, 22 nt, Human
augcagguccaaacgcuagugu

SEQ ID NO: 69543 - RNA, 22 nt, Human
augcaguaaaauaggagguaau

SEQ ID NO: 69544 - RNA, 22 nt, Human
augcaguaaauguuaagaaaaa

SEQ ID NO: 69545 - RNA, 22 nt, Human
augcaguacauacaaacacuga

SEQ ID NO: 69546 - RNA, 22 nt, Human
augcaguagauaggcacuuuua

SEQ ID NO: 69547 - RNA, 23 nt, Human
augcaguauaugucaguaguuua

SEQ ID NO: 69548 - RNA, 22 nt, Human
augcaguccaagcucuagaguu

SEQ ID NO: 69549 - RNA, 22 nt, Human
augcaguuaguauacuuccagu

SEQ ID NO: 69550 - RNA, 22 nt, Human
augcaguuccacaggcgcaugg

SEQ ID NO: 69551 - RNA, 22 nt, Human
augcaguuuaaggcacaauuag

SEQ ID NO: 69552 - RNA, 22 nt, Human
augcaguuuucaaagacuauuc

SEQ ID NO: 69553 - RNA, 22 nt, Human
augcauaucacagucuccaugu

SEQ ID NO: 69554 - RNA, 22 nt, Human
augcauaucuccuaucuccuca

SEQ ID NO: 69555 - RNA, 22 nt, Human
augcauaugcaucuguguacau

SEQ ID NO: 69556 - RNA, 18 nt, Human
augcauauuuuaaguugu

SEQ ID NO: 69557 - RNA, 22 nt, Human
augcaucaauuaggggcagaca

SEQ ID NO: 69558 - RNA, 22 nt, Human
augcaucaggcacuaggaauag

SEQ ID NO: 69559 - RNA, 22 nt, Human
augcaucuaugacuuagacauu

SEQ ID NO: 69560 - RNA, 22 nt, Human
augcaucuauucccaagggcag

SEQ ID NO: 69561 - RNA, 22 nt, Human
augcaucuguaguguuauauga

SEQ ID NO: 69562 - RNA, 22 nt, Human
augcaugagaauaucccaugcu

SEQ ID NO: 69563 - RNA, 22 nt, Human
augcaugagucacucagugcag

SEQ ID NO: 69564 - RNA, 22 nt, Human
augcaugcagggaagacaguag

SEQ ID NO: 69565 - RNA, 20 nt, Human
augcaugcaugcacaugcac

SEQ ID NO: 69566 - RNA, 22 nt, Human
augcaugcauuguuuaucaugg

SEQ ID NO: 69567 - RNA, 22 nt, Human
augcauguaacaguguuaugaa

SEQ ID NO: 69568 - RNA, 22 nt, Human
augcaugucugccaguugcuua

SEQ ID NO: 69569 - RNA, 22 nt, Human
augcauucuagccuggacaaca

SEQ ID NO: 69570 - RNA, 22 nt, Human
augcauucuguagagcauuuau

SEQ ID NO: 69571 - RNA, 22 nt, Human
augcauugaggaugacaugagu

SEQ ID NO: 69572 - RNA, 22 nt, Human
augcauuggauaagaaccccau

SEQ ID NO: 69573 - RNA, 20 nt, Human
augcauugugauucuguuuu

SEQ ID NO: 69574 - RNA, 22 nt, Human
augcauuuauguguguacauug

SEQ ID NO: 69575 - RNA, 22 nt, Human
augcauuuguaaaauauaaucg

SEQ ID NO: 69576 - RNA, 22 nt, Human
augcauuuuugaguaugaauga

SEQ ID NO: 69577 - RNA, 22 nt, Human
augccaaaauguuacauuucuu

SEQ ID NO: 69578 - RNA, 22 nt, Human
augccaaauucuacuuucagca

SEQ ID NO: 69579 - RNA, 22 nt, Human
augccacauaauuacaaauaga

SEQ ID NO: 69580 - RNA, 22 nt, Human
augccacuguacucaacaauag

SEQ ID NO: 69581 - RNA, 22 nt, Human
augccagccucuaagcacuuua

SEQ ID NO: 69582 - RNA, 22 nt, Human
augccagggucacagucauauu

SEQ ID NO: 69583 - RNA, 22 nt, Human
augccaguaagucucagcuagg

SEQ ID NO: 69584 - RNA, 22 nt, Human
augccccagugugugcuuccuu

SEQ ID NO: 69585 - RNA, 22 nt, Human
augcccugaggaaugucacgcu

SEQ ID NO: 69586 - RNA, 22 nt, Human
augcccuggacuucuaguauuc

SEQ ID NO: 69587 - RNA, 23 nt, Human
augcccuguagaggcugcugacc

SEQ ID NO: 69588 - RNA, 22 nt, Human
augcccuguggcaguacauauu

SEQ ID NO: 69589 - RNA, 22 nt, Human
augccuccaagauucuuacguu

SEQ ID NO: 69590 - RNA, 22 nt, Human
augccuccccugugucuuuuau

SEQ ID NO: 69591 - RNA, 22 nt, Human
augccuccgcaugugccuuuga

SEQ ID NO: 69592 - RNA, 22 nt, Human
augccucugcucuugguccuca

SEQ ID NO: 69593 - RNA, 22 nt, Human
augccugagacuguuaauuggc

SEQ ID NO: 69594 - RNA, 22 nt, Human
augccugccauuuagaagucuu

SEQ ID NO: 69595 - RNA, 22 nt, Human
augaggauaccgcagggggcag

SEQ ID NO: 69596 - RNA, 22 nt, Human
augaggauguuaguggacugga

SEQ ID NO: 69597 - RNA, 22 nt, Human
augaggcacuuaaaagugaaga

SEQ ID NO: 69598 - RNA, 22 nt, Human
augaggcagaaaaaagucggag

SEQ ID NO: 69599 - RNA, 22 nt, Human
augaggcagauguugcaugagg

SEQ ID NO: 69600 - RNA, 22 nt, Human
augaggcagcugcuggagaacg

SEQ ID NO: 69601 - RNA, 22 nt, Human
augaggcaggagcggggacccu

SEQ ID NO: 69602 - RNA, 22 nt, Human
augaggcaguacacacaaagcc

SEQ ID NO: 69603 - RNA, 22 nt, Human
augaggcauagcagggaucgga

SEQ ID NO: 69604 - RNA, 16 nt, Human
augaggcauaggcugc

SEQ ID NO: 69605 - RNA, 22 nt, Human
augaggcaucuaacauugcaaa

SEQ ID NO: 69606 - RNA, 22 nt, Human
augaggcaucugcagucacuag

SEQ ID NO: 69607 - RNA, 22 nt, Human
augaggcauuccacucaaacuc

SEQ ID NO: 69608 - RNA, 15 nt, Human
augaggcauuugggg

SEQ ID NO: 69609 - RNA, 22 nt, Human
augaggccagaccacucugcau

SEQ ID NO: 69610 - RNA, 22 nt, Human
augaggcccaaacauuacaaau

SEQ ID NO: 69611 - RNA, 22 nt, Human
augaggcccaggaaucuguauu

SEQ ID NO: 69612 - RNA, 22 nt, Human
augaggccuuucuucacccuuu

SEQ ID NO: 69613 - RNA, 22 nt, Human
augaggcucucaacaccuugag

SEQ ID NO: 69614 - RNA, 22 nt, Human
augaggcuuaaacugcugcaac

SEQ ID NO: 69615 - RNA, 22 nt, Human
augagguaaaguuuaagcuaag

SEQ ID NO: 69616 - RNA, 22 nt, Human
augagguaagguauucagggaa

SEQ ID NO: 69617 - RNA, 22 nt, Human
augagguaauacuuucaguccu

SEQ ID NO: 69618 - RNA, 22 nt, Human
augagguacuaguauauacgua

SEQ ID NO: 69619 - RNA, 22 nt, Human
augagguagcuuggcccagggg

SEQ ID NO: 69620 - RNA, 22 nt, Human
augagguaggacaucaggaaau

SEQ ID NO: 69621 - RNA, 22 nt, Human
augaggucacaguguuuggcau

SEQ ID NO: 69622 - RNA, 22 nt, Human
augaggucaucuugaaguaggg

SEQ ID NO: 69623 - RNA, 22 nt, Human
augaggucuggcaaucagaaac

SEQ ID NO: 69624 - RNA, 22 nt, Human
augagguuauauuuaauucacu

SEQ ID NO: 69625 - RNA, 22 nt, Human
augagguuugagccucuugacc

SEQ ID NO: 69626 - RNA, 22 nt, Human
augaguaaaaccacuauuuaca

SEQ ID NO: 69627 - RNA, 22 nt, Human
augaguguacgugaaaguagau

SEQ ID NO: 69628 - RNA, 22 nt, Human
augagugucauguaugagauau

SEQ ID NO: 69629 - RNA, 22 nt, Human
augaguucccaggugauuugug

SEQ ID NO: 69630 - RNA, 22 nt, Human
augaguugaagcuacaagaggc

SEQ ID NO: 69631 - RNA, 22 nt, Human
augaguuuugggggauguuaga

SEQ ID NO: 69632 - RNA, 19 nt, Human
augauacaggugaaaauug

SEQ ID NO: 69633 - RNA, 20 nt, Human
augauagucagaaaacuagc

SEQ ID NO: 69634 - RNA, 22 nt, Human
augauauacuuccuagaacagu

SEQ ID NO: 69635 - RNA, 21 nt, Human
augauaugcuuguauuuccaa

SEQ ID NO: 69636 - RNA, 22 nt, Human
augauauuauucuagcccagag

SEQ ID NO: 69637 - RNA, 22 nt, Human
augauauuuuaguaaagugaua

SEQ ID NO: 69638 - RNA, 22 nt, Human
augaugaaaacugaagguuagg

SEQ ID NO: 69639 - RNA, 22 nt, Human
ucaucagaggcaucuggcaagg

SEQ ID NO: 69640 - RNA, 22 nt, Human
ucaucaguccuuuucauuauga

SEQ ID NO: 69641 - RNA, 22 nt, Human
ucaucaguuuagaaaaaauaug

SEQ ID NO: 69642 - RNA, 22 nt, Human
ucaucauaauauggaaucuugu

SEQ ID NO: 69643 - RNA, 22 nt, Human
ucaucauccuuuuuugaagagu

SEQ ID NO: 69644 - RNA, 22 nt, Human
ucaucaucugcaagcucauguc

SEQ ID NO: 69645 - RNA, 22 nt, Human
ucauccaaggagaccuugcaga

SEQ ID NO: 69646 - RNA, 22 nt, Human
ucauccaggaaaagauuuggaa

SEQ ID NO: 69647 - RNA, 20 nt, Human
ucauccaggacaggaguggc

SEQ ID NO: 69648 - RNA, 22 nt, Human
ucauccaguaccauggaaggca

SEQ ID NO: 69649 - RNA, 20 nt, Human
ucauccaguugguuuauggu

SEQ ID NO: 69650 - RNA, 22 nt, Human
ucauccauccucgccuuugcuu

SEQ ID NO: 69651 - RNA, 22 nt, Human
ucauccaucuuugauuucauag

SEQ ID NO: 69652 - RNA, 22 nt, Human
ucauccaugugcaaacuuuggu

SEQ ID NO: 69653 - RNA, 22 nt, Human
ucauccgugaagccaaagaaau

SEQ ID NO: 69654 - RNA, 22 nt, Human
ggcuggcgggugggugaaagac

SEQ ID NO: 69655 - RNA, 22 nt, Human
ggcuggcuaucugugguugccu

SEQ ID NO: 69656 - RNA, 22 nt, Human
ggcuggcucaugcaaaggguga

SEQ ID NO: 69657 - RNA, 22 nt, Human
ggcuggcuccaccuagguagcu

SEQ ID NO: 69658 - RNA, 22 nt, Human
ggcuggcuggaugaauggauua

SEQ ID NO: 69659 - RNA, 22 nt, Human
ggcuggcuugcggagucacaga

SEQ ID NO: 69660 - RNA, 22 nt, Human
ggcugggaggaugacuugcuac

SEQ ID NO: 69661 - RNA, 22 nt, Human
ggcugggcaggucugcacaggg

SEQ ID NO: 69662 - RNA, 19 nt, Human
ggcugggcccuguuucucc

SEQ ID NO: 69663 - RNA, 22 nt, Human
ggcuggguuugacuccuggcuu

SEQ ID NO: 69664 - RNA, 22 nt, Human
ggcuggucacaccacugcaggg

SEQ ID NO: 69665 - RNA, 22 nt, Human
ggcuggucccggguccuccggc

SEQ ID NO: 69666 - RNA, 21 nt, Human
ggcuggucgcgugcaugucuc

SEQ ID NO: 69667 - RNA, 23 nt, Human
ggcuggugcccuuggccagucgg

SEQ ID NO: 69668 - RNA, 22 nt, Human
ggcuguaguuaccugaugaaau

SEQ ID NO: 69669 - RNA, 19 nt, Human
ggcugucuacgaaccaguc

SEQ ID NO: 69670 - RNA, 22 nt, Human
ggcugugaacacucuuagcauc

SEQ ID NO: 69671 - RNA, 22 nt, Human
ggcugugacccccacaggggug

SEQ ID NO: 69672 - RNA, 22 nt, Human
ggcugugagcaggcagaaugcu

SEQ ID NO: 69673 - RNA, 22 nt, Human
ggcugugccucaaggcuacuca

SEQ ID NO: 69674 - RNA, 22 nt, Human
ggcugugccucuggcagcacau

SEQ ID NO: 69675 - RNA, 22 nt, Human
ggcugugcgggcagccguggga

SEQ ID NO: 69676 - RNA, 22 nt, Human
ggcuguggacacugagcucaga

SEQ ID NO: 69677 - RNA, 22 nt, Human
ggcugugggugugacaggccuc

SEQ ID NO: 69678 - RNA, 22 nt, Human
ggcuguggucauuaggagguug

SEQ ID NO: 69679 - RNA, 22 nt, Human
ggcuuaaaucacagugacuuuu

SEQ ID NO: 69680 - RNA, 22 nt, Human
ggcuuagcaacuccugaggcuc

SEQ ID NO: 69681 - RNA, 22 nt, Human
ggcuucaaaaccuaucuuugau

SEQ ID NO: 69682 - RNA, 22 nt, Human
ggcuucaagucguauauuuggg

SEQ ID NO: 69683 - RNA, 22 nt, Human
ggcuucaauguauucacauuca

SEQ ID NO: 69684 - RNA, 22 nt, Human
ggcuucaccugugcacucuacc

SEQ ID NO: 69685 - RNA, 20 nt, Human
ggcuucacucugcaccacca

SEQ ID NO: 69686 - RNA, 22 nt, Human
ggcuucacugacugguucuagg

SEQ ID NO: 69687 - RNA, 22 nt, Human
ggcuucagaagacuggacaggu

SEQ ID NO: 69688 - RNA, 22 nt, Human
ggcuucagaggggagguagugc

SEQ ID NO: 69689 - RNA, 22 nt, Human
ggcuucagauuucucaguuguu

SEQ ID NO: 69690 - RNA, 19 nt, Human
ggcuucagggaguuagcau

SEQ ID NO: 69691 - RNA, 22 nt, Human
ggcuucaggggucugucugcac

SEQ ID NO: 69692 - RNA, 22 nt, Human
ggcuucaguggccagagaugau

SEQ ID NO: 69693 - RNA, 22 nt, Human
ggcuucaucucguugacaccuc

SEQ ID NO: 69694 - RNA, 22 nt, Human
ggcuucauuucuguccuugauu

SEQ ID NO: 69695 - RNA, 22 nt, Human
ggcuucccaaggagccaggaug

SEQ ID NO: 69696 - RNA, 22 nt, Human
ggcuucccagcagagggcgcac

SEQ ID NO: 69697 - RNA, 22 nt, Human
ggcuuccuaucccaucugagug

SEQ ID NO: 69698 - RNA, 22 nt, Human
ggcuuccuggagaaggucugag

SEQ ID NO: 69699 - RNA, 22 nt, Human
ggcuuccugggcauguguucua

SEQ ID NO: 69700 - RNA, 22 nt, Human
ggcuuccuggggccuccugcaa

SEQ ID NO: 69701 - RNA, 22 nt, Human
ggcuuccuuucacuacccucag

SEQ ID NO: 69702 - RNA, 22 nt, Human
ggcuucuaaggaguauccuuug

SEQ ID NO: 69703 - RNA, 18 nt, Human
ggcuucucacugaccuca

SEQ ID NO: 69704 - RNA, 22 nt, Human
ggcuucucccauucuucagggg

SEQ ID NO: 69705 - RNA, 22 nt, Human
ggcuucucucccccagcuccac

SEQ ID NO: 69706 - RNA, 22 nt, Human
ggcuucucugucuaguuucuac

SEQ ID NO: 69707 - RNA, 18 nt, Human
ggcuucucuguuuauuuc

SEQ ID NO: 69708 - RNA, 22 nt, Human
ggcuucugccacgagagggaag

SEQ ID NO: 69709 - RNA, 22 nt, Human
ggcuucugguaaagaccacacc

SEQ ID NO: 69710 - RNA, 22 nt, Human
ggcuucuggugggagcaugacu

SEQ ID NO: 69711 - RNA, 22 nt, Human
ggcuugaagacuaugacauuuc

SEQ ID NO: 69712 - RNA, 23 nt, Human
ggcuugagcuggaacagcuuggu

SEQ ID NO: 69713 - RNA, 22 nt, Human
ggcuugcacacagccucaguuu

SEQ ID NO: 69714 - RNA, 22 nt, Human
ggcuugcuucuuguccaggaau

SEQ ID NO: 69715 - RNA, 22 nt, Human
ggcuuggaaacuagagugugca

SEQ ID NO: 69716 - RNA, 22 nt, Human
ggcuuggaaauugcaggacaca

SEQ ID NO: 69717 - RNA, 22 nt, Human
ggcuuggaccagucacaguggu

SEQ ID NO: 69718 - RNA, 22 nt, Human
ggcuuggagucauacugagaau

SEQ ID NO: 69719 - RNA, 22 nt, Human
ggcuugggagcaggcaugugac

SEQ ID NO: 69720 - RNA, 21 nt, Human
ggcuugucaccauagcuacug

SEQ ID NO: 69721 - RNA, 22 nt, Human
ggcuuuaauagauaagguuucu

SEQ ID NO: 69722 - RNA, 16 nt, Human
ggcuuuaauuuauccc

SEQ ID NO: 69723 - RNA, 22 nt, Human
ggcuuuagggcaggcaguguua

SEQ ID NO: 69724 - RNA, 22 nt, Human
ggcuuuaguguagguuucuguu

SEQ ID NO: 69725 - RNA, 22 nt, Human
ggcuuuaucaaaugagacccug

SEQ ID NO: 69726 - RNA, 22 nt, Human
ggcuuuauguuuuucauguggu

SEQ ID NO: 69727 - RNA, 22 nt, Human
ggcuuuauuucacuguaccaua

SEQ ID NO: 69728 - RNA, 22 nt, Human
ggcuuuauuugcagccauuguu

SEQ ID NO: 69729 - RNA, 22 nt, Human
ggcuuucaaggaaaggccucau

SEQ ID NO: 69730 - RNA, 22 nt, Human
ggcuuucuagaucuagcucugu

SEQ ID NO: 69731 - RNA, 22 nt, Human
ggcuuucuuguuaaauguccau

SEQ ID NO: 69732 - RNA, 22 nt, Human
ggcuuugacaugcugaauuaaa

SEQ ID NO: 69733 - RNA, 22 nt, Human
ggcuuugcaaaaucggcuucug

SEQ ID NO: 69734 - RNA, 22 nt, Human
ggcuuugcccuggacugaggca

SEQ ID NO: 69735 - RNA, 22 nt, Human
ggcuuugggauucagcaugaga

SEQ ID NO: 69736 - RNA, 22 nt, Human
ggcuuuggggugugcagagaug

SEQ ID NO: 69737 - RNA, 22 nt, Human
gggaaaauauuaagcaggacuu

SEQ ID NO: 69738 - RNA, 22 nt, Human
gggaaacuagaagcaggguuau

SEQ ID NO: 69739 - RNA, 22 nt, Human
gggaaacucacaggugcagggg

SEQ ID NO: 69740 - RNA, 22 nt, Human
gggaaacuucugcuaaaaccag

SEQ ID NO: 69741 - RNA, 22 nt, Human
gggaaacuuucacaauguccag

SEQ ID NO: 69742 - RNA, 22 nt, Human
gggaaagagagguggacgcagg

SEQ ID NO: 69743 - RNA, 22 nt, Human
gggaaaggauuuacaguuugau

SEQ ID NO: 69744 - RNA, 22 nt, Human
gggaaauuaaugacugguugga

SEQ ID NO: 69745 - RNA, 19 nt, Human
gggaaauucacuugcuucc

SEQ ID NO: 69746 - RNA, 22 nt, Human
gggaaauugucaacacucucaa

SEQ ID NO: 69747 - RNA, 22 nt, Human
gggaaauugugugagaucuuug

SEQ ID NO: 69748 - RNA, 22 nt, Human
gggcuggaccgcgaccccugag

SEQ ID NO: 69749 - RNA, 22 nt, Human
gggcuggaccgcucgccucccu

SEQ ID NO: 69750 - RNA, 22 nt, Human
gggcuggacugcauugccucgc

SEQ ID NO: 69751 - RNA, 22 nt, Human
gggcuggagacaagugagccgc

SEQ ID NO: 69752 - RNA, 22 nt, Human
gggcuggagagucccacguggg

SEQ ID NO: 69753 - RNA, 22 nt, Human
gggcuggaggccugccugguua

SEQ ID NO: 69754 - RNA, 21 nt, Human
gggcuggauauuggaaagagg

SEQ ID NO: 69755 - RNA, 20 nt, Human
gggcuggcucaacuggaucc

SEQ ID NO: 69756 - RNA, 22 nt, Human
gggcugggcaugguguucccuc

SEQ ID NO: 69757 - RNA, 22 nt, Human
gggcuggggcucaauaauuugu

SEQ ID NO: 69758 - RNA, 22 nt, Human
gggcugucaugugucagugacc

SEQ ID NO: 69759 - RNA, 18 nt, Human
gggcugugagaugggaag

SEQ ID NO: 69760 - RNA, 20 nt, Human
gggcugugccuccucguggu

SEQ ID NO: 69761 - RNA, 22 nt, Human
gggcugugggacccggcacuuu

SEQ ID NO: 69762 - RNA, 22 nt, Human
gggcuguguacuaugaggaggg

SEQ ID NO: 69763 - RNA, 22 nt, Human
gggcugugugcccacuucccau

SEQ ID NO: 69764 - RNA, 22 nt, Human
gggcuguguuaggugcgguuac

SEQ ID NO: 69765 - RNA, 22 nt, Human
gggcuucaggguacuuccuccu

SEQ ID NO: 69766 - RNA, 22 nt, Human
gggcuucauucaggcagaauuu

SEQ ID NO: 69767 - RNA, 23 nt, Human
ggcuucagugagagucccugcug

SEQ ID NO: 69768 - RNA, 17 nt, Human
ggcuuccagguggcucu

SEQ ID NO: 69769 - RNA, 22 nt, Human
ggcuuccaugugaaauucuuug

SEQ ID NO: 69770 - RNA, 22 nt, Human
ggcuucccagucccugcucuca

SEQ ID NO: 69771 - RNA, 22 nt, Human
ggcuucccuaaaccuuuccacu

SEQ ID NO: 69772 - RNA, 22 nt, Human
ggcuucccuguuugcugugccu

SEQ ID NO: 69773 - RNA, 22 nt, Human
ggcuucuccagguacugagcau

SEQ ID NO: 69774 - RNA, 22 nt, Human
ggcuucuccccuuugagucuuc

SEQ ID NO: 69775 - RNA, 22 nt, Human
ggcuucucccuucuucugauug

SEQ ID NO: 69776 - RNA, 22 nt, Human
ggcuucuccuggaaguacagag

SEQ ID NO: 69777 - RNA, 22 nt, Human
ggcuucucgugccgaagcaaga

SEQ ID NO: 69778 - RNA, 22 nt, Human
ggcuucucuaaagaucaugcgu

SEQ ID NO: 69779 - RNA, 22 nt, Human
ggcuucucuccaguaugcauuc

SEQ ID NO: 69780 - RNA, 22 nt, Human
ggcuucugagugcucugcuguu

SEQ ID NO: 69781 - RNA, 22 nt, Human
ggcuucuuagaauuugacuuac

SEQ ID NO: 69782 - RNA, 22 nt, Human
ggcuucuuccuggcuccuauua

SEQ ID NO: 69783 - RNA, 20 nt, Human
ggcuucuuuacaucuguguu

SEQ ID NO: 69784 - RNA, 22 nt, Human
ggcuucuuuguaacgugccagc

SEQ ID NO: 69785 - RNA, 22 nt, Human
ggcuucuuuuuaguaaauguca

SEQ ID NO: 69786 - RNA, 22 nt, Human
ggcuugcuucaccuacccccag

SEQ ID NO: 69787 - RNA, 22 nt, Human
ggcuuggaaaugguaaugagcu

SEQ ID NO: 69788 - RNA, 22 nt, Human
ggcuuggcaggugcccugcgca

SEQ ID NO: 69789 - RNA, 22 nt, Human
ggcuuggcccaggccucacucc

SEQ ID NO: 69790 - RNA, 20 nt, Human
ggcuuggcugccuggggagg

SEQ ID NO: 69791 - RNA, 22 nt, Human
ggcuugucauguugauguucuu

SEQ ID NO: 69792 - RNA, 22 nt, Human
ggcuuguccuugggcugugcau

SEQ ID NO: 69793 - RNA, 22 nt, Human
ggcuuguggcaaguguuuuaag

SEQ ID NO: 69794 - RNA, 19 nt, Human
ggcuuuaacucuuguagcu

SEQ ID NO: 69795 - RNA, 17 nt, Human
ggcuuuagggacaccac

SEQ ID NO: 69796 - RNA, 22 nt, Human
ggcuuuauuaagcaggguaagu

SEQ ID NO: 69797 - RNA, 22 nt, Human
ggcuuuauuuugcaugaaugcu

SEQ ID NO: 69798 - RNA, 22 nt, Human
ggcuuucugucugcgucugugu

SEQ ID NO: 69799 - RNA, 20 nt, Human
ggcuuucugugauccucagu

SEQ ID NO: 69800 - RNA, 22 nt, Human
ggcuuugcaaacucauuccaca

SEQ ID NO: 69801 - RNA, 22 nt, Human
ggcuuugcaggcagcaucaagg

SEQ ID NO: 69802 - RNA, 22 nt, Human
ggcuuugcauuuugauggaggu

SEQ ID NO: 69803 - RNA, 21 nt, Human
ggcuuugcucagcuuaccaaa

SEQ ID NO: 69804 - RNA, 18 nt, Human
ggcuuugcugggguuucu

SEQ ID NO: 69805 - RNA, 22 nt, Human
ggcuuugcuucuccagaugcuu

SEQ ID NO: 69806 - RNA, 22 nt, Human
ggcuuuugaauuccaaggcauu

SEQ ID NO: 69807 - RNA, 22 nt, Human
gggaaaaauaaugcacagauau

SEQ ID NO: 69808 - RNA, 22 nt, Human
gggaaacugaauucaggacucu

SEQ ID NO: 69809 - RNA, 22 nt, Human
gggaaacuguccaguucucccc

SEQ ID NO: 69810 - RNA, 22 nt, Human
gggaaagaagaagagccauuuu

SEQ ID NO: 69811 - RNA, 22 nt, Human
gggaaagagugcuuguccagag

SEQ ID NO: 69812 - RNA, 22 nt, Human
gggaaaggaucagugggaggcu

SEQ ID NO: 69813 - RNA, 21 nt, Human
gggaaauuaggauugcucauc

SEQ ID NO: 69814 - RNA, 22 nt, Human
gggaacacagacuugaugauga

SEQ ID NO: 69815 - RNA, 22 nt, Human
gggaacagaggaggguguugcu

SEQ ID NO: 69816 - RNA, 22 nt, Human
gggaacagagugccagacugac

SEQ ID NO: 69817 - RNA, 22 nt, Human
gggaacagcauaucugaagggu

SEQ ID NO: 69818 - RNA, 22 nt, Human
gggaacagccucaccagcccug

SEQ ID NO: 69819 - RNA, 22 nt, Human
gggaacuugcuaaaauacagac

SEQ ID NO: 69820 - RNA, 22 nt, Human
gggaagagaggaggugguuucg

SEQ ID NO: 69821 - RNA, 22 nt, Human
gggaagagggagcuggaaugau

SEQ ID NO: 69822 - RNA, 22 nt, Human
gggaagauaguguugagggccc

SEQ ID NO: 69823 - RNA, 22 nt, Human
gggaagcagacggcggggaaau

SEQ ID NO: 69824 - RNA, 18 nt, Human
gggaagccgggaagccgg

SEQ ID NO: 69825 - RNA, 23 nt, Human
gggaagcuccauggaggugcugg

SEQ ID NO: 69826 - RNA, 22 nt, Human
gggaaggcagugggaggaacug

SEQ ID NO: 69827 - RNA, 22 nt, Human
gggaaggcugccugagggaugg

SEQ ID NO: 69828 - RNA, 22 nt, Human
gggaagggagggaccucagucu

SEQ ID NO: 69829 - RNA, 22 nt, Human
gggaagggagggccuccaguca

SEQ ID NO: 69830 - RNA, 22 nt, Human
gggaaggguguugucuuaucuu

SEQ ID NO: 69831 - RNA, 22 nt, Human
gggaagucggguugagcacuua

SEQ ID NO: 69832 - RNA, 22 nt, Human
gggaagugaaguguagcugucu

SEQ ID NO: 69833 - RNA, 22 nt, Human
gggaagugagcuggaaucaagg

SEQ ID NO: 69834 - RNA, 23 nt, Human
gggaaguggggauuugaagucau

SEQ ID NO: 69835 - RNA, 22 nt, Human
gggaagugugguuucuuuacag

SEQ ID NO: 69836 - RNA, 22 nt, Human
gggaaguuugugggaggaauau

SEQ ID NO: 69837 - RNA, 22 nt, Human
gggaauaggacaaaugaaggag

SEQ ID NO: 69838 - RNA, 22 nt, Human
gggaaugagagucagcccagga

SEQ ID NO: 69839 - RNA, 21 nt, Human
gggaaugagauucuuggagau

SEQ ID NO: 69840 - RNA, 22 nt, Human
gggaaugaggcagauagauaaa

SEQ ID NO: 69841 - RNA, 22 nt, Human
gggacaggccccucgcuagcuu

SEQ ID NO: 69842 - RNA, 22 nt, Human
gggacaugaagcaucggaggca

SEQ ID NO: 69843 - RNA, 22 nt, Human
gggaccaggugggugcauuccg

SEQ ID NO: 69844 - RNA, 22 nt, Human
gggaccuggacaugugugugcu

SEQ ID NO: 69845 - RNA, 22 nt, Human
gggaccuggucuagcacugagc

SEQ ID NO: 69846 - RNA, 22 nt, Human
gggacuggcacagggcugggag

SEQ ID NO: 69847 - RNA, 22 nt, Human
gggacuguccuacauggagagg

SEQ ID NO: 69848 - RNA, 22 nt, Human
gggacuuaaugcagagagggac

SEQ ID NO: 69849 - RNA, 22 nt, Human
gggacuucauagcuaggcacuu

SEQ ID NO: 69850 - RNA, 22 nt, Human
gggagaaaugucuggccugcug

SEQ ID NO: 69851 - RNA, 22 nt, Human
gggagacaaaggugagguucuu

SEQ ID NO: 69852 - RNA, 22 nt, Human
gggagagagagcucauguugaa

SEQ ID NO: 69853 - RNA, 22 nt, Human
gggagagaugcugauugccaau

SEQ ID NO: 69854 - RNA, 22 nt, Human
gggagaugaaucagaagugauc

SEQ ID NO: 69855 - RNA, 22 nt, Human
gggagaugacucagugaccucg

SEQ ID NO: 69856 - RNA, 23 nt, Human
gggagaugggaaaugaaggcucu

SEQ ID NO: 69857 - RNA, 22 nt, Human
gguauucacaauauuuaaagag

SEQ ID NO: 69858 - RNA, 23 nt, Human
gguauucauucauuuaugcuaag

SEQ ID NO: 69859 - RNA, 22 nt, Human
gguauuuauaguggugcuuagu

SEQ ID NO: 69860 - RNA, 22 nt, Human
ggucaacagagguaaugguaac

SEQ ID NO: 69861 - RNA, 22 nt, Human
ggucaaguaacaaaucaggagc

SEQ ID NO: 69862 - RNA, 19 nt, Human
ggucacaaggaguugugaa

SEQ ID NO: 69863 - RNA, 21 nt, Human
ggucacacagcugguaaauag

SEQ ID NO: 69864 - RNA, 22 nt, Human
ggucacagcuuuuucagcagca

SEQ ID NO: 69865 - RNA, 23 nt, Human
ggucacaugugagauuaaacuug

SEQ ID NO: 69866 - RNA, 22 nt, Human
ggucacugcccucccuuuugca

SEQ ID NO: 69867 - RNA, 22 nt, Human
ggucacugucugagguacugga

SEQ ID NO: 69868 - RNA, 22 nt, Human
ggucagaacaaggguaaauaaa

SEQ ID NO: 69869 - RNA, 22 nt, Human
ggucagaaggcaguuaaacaaa

SEQ ID NO: 69870 - RNA, 22 nt, Human
ggucagaauuaggucuagagua

SEQ ID NO: 69871 - RNA, 19 nt, Human
ggucagagagauccaggcu

SEQ ID NO: 69872 - RNA, 22 nt, Human
ggucagagccauggagcaacug

SEQ ID NO: 69873 - RNA, 22 nt, Human
ggucagaggucacaagcuggca

SEQ ID NO: 69874 - RNA, 22 nt, Human
ggucagaggucccagaagaagc

SEQ ID NO: 69875 - RNA, 20 nt, Human
ggucagccccaccuggcagc

SEQ ID NO: 69876 - RNA, 21 nt, Human
ggucagcucuauccacgccuu

SEQ ID NO: 69877 - RNA, 22 nt, Human
ggucagggcuggguaugaagag

SEQ ID NO: 69878 - RNA, 22 nt, Human
ggucaggguuccagguaucuuc

SEQ ID NO: 69879 - RNA, 22 nt, Human
ggucagguagcucugacaggcc

SEQ ID NO: 69880 - RNA, 22 nt, Human
ggucagugacuuuuuucugugg

SEQ ID NO: 69881 - RNA, 23 nt, Human
ggucagugaguucguuucucugg

SEQ ID NO: 69882 - RNA, 22 nt, Human
ggucaucuguaauucuguuccu

SEQ ID NO: 69883 - RNA, 22 nt, Human
ggucaucuugaauuuccauucu

SEQ ID NO: 69884 - RNA, 22 nt, Human
ggucauguguccaggagguagc

SEQ ID NO: 69885 - RNA, 22 nt, Human
gguccagaguccuugcuagaga

SEQ ID NO: 69886 - RNA, 22 nt, Human
gguccaggaucaaggcaucacc

SEQ ID NO: 69887 - RNA, 22 nt, Human
ggucccaagcaaugcccuuggc

SEQ ID NO: 69888 - RNA, 22 nt, Human
ggucccaaggaggaugaggcua

SEQ ID NO: 69889 - RNA, 22 nt, Human
ggucccaaucuaaucacaugag

SEQ ID NO: 69890 - RNA, 22 nt, Human
ggucccagcuggucacugucag

SEQ ID NO: 69891 - RNA, 22 nt, Human
ggucccaggagaauaggugcaa

SEQ ID NO: 69892 - RNA, 22 nt, Human
ggucccaggcugcgggcuggug

SEQ ID NO: 69893 - RNA, 22 nt, Human
ggucccagucccuuuccaccgu

SEQ ID NO: 69894 - RNA, 22 nt, Human
ggucccaugacugacacagcag

SEQ ID NO: 69895 - RNA, 21 nt, Human
ggucccauugugaggcuugaa

SEQ ID NO: 69896 - RNA, 22 nt, Human
gguccccguggaggcuggagcg

SEQ ID NO: 69897 - RNA, 20 nt, Human
ggucccugcccucugucauc

SEQ ID NO: 69898 - RNA, 22 nt, Human
ggucccuggaaggcacuaguga

SEQ ID NO: 69899 - RNA, 22 nt, Human
ggucccuggaagucccucuucu

SEQ ID NO: 69900 - RNA, 22 nt, Human
gguccguuuuugaagacagugg

SEQ ID NO: 69901 - RNA, 19 nt, Human
gguccucagcagagcaugc

SEQ ID NO: 69902 - RNA, 22 nt, Human
gguccucucccaagagcgcauc

SEQ ID NO: 69903 - RNA, 22 nt, Human
gguccugcgucuggcucgcccg

SEQ ID NO: 69904 - RNA, 22 nt, Human
gguccuugggucuccuguguuu

SEQ ID NO: 69905 - RNA, 22 nt, Human
ggucucaaggaauauaaugagu

SEQ ID NO: 69906 - RNA, 22 nt, Human
ggucucagagguuucugcucag

SEQ ID NO: 69907 - RNA, 22 nt, Human
ggucucaggagacuggagagca

SEQ ID NO: 69908 - RNA, 22 nt, Human
ggucuccaaagcuuaggacuac

SEQ ID NO: 69909 - RNA, 22 nt, Human
ggucucccuugcugguuggcug

SEQ ID NO: 69910 - RNA, 22 nt, Human
ggucuccuugggaaagcaggaa

SEQ ID NO: 69911 - RNA, 22 nt, Human
ggucucuucaggagcuugagcg

SEQ ID NO: 69912 - RNA, 22 nt, Human
ggucucuuugcuucagcuacag

SEQ ID NO: 69913 - RNA, 22 nt, Human
ggucugaaaauggugaccacca

SEQ ID NO: 69914 - RNA, 22 nt, Human
ggucugaagcccacgugguacc

SEQ ID NO: 69915 - RNA, 22 nt, Human
ggucugaauauagaacuuaagu

SEQ ID NO: 69916 - RNA, 22 nt, Human
ggucugaauuccagccccucug

SEQ ID NO: 69917 - RNA, 18 nt, Human
ggucugagaucguuuuuc

SEQ ID NO: 69918 - RNA, 22 nt, Human
ggucugagcucuaaaacuaacu

SEQ ID NO: 69919 - RNA, 22 nt, Human
ggucugaggugggacccaggaa

SEQ ID NO: 69920 - RNA, 19 nt, Human
gucuggauuuuucgguaac

SEQ ID NO: 69921 - RNA, 22 nt, Human
gucuggcuuuauauuugcuauu

SEQ ID NO: 69922 - RNA, 22 nt, Human
gucugggcaagggagauggcgc

SEQ ID NO: 69923 - RNA, 22 nt, Human
gucugggcagcagcauuucuua

SEQ ID NO: 69924 - RNA, 22 nt, Human
gucugggcaucagacugcgggc

SEQ ID NO: 69925 - RNA, 22 nt, Human
gucugggcucccagggucggcg

SEQ ID NO: 69926 - RNA, 22 nt, Human
gucugggcuccuggcaggcagc

SEQ ID NO: 69927 - RNA, 22 nt, Human
gucugggcuucagaguuagaga

SEQ ID NO: 69928 - RNA, 22 nt, Human
gucugggguacuuucaucugau

SEQ ID NO: 69929 - RNA, 22 nt, Human
gucuggggugaggcccgggauu

SEQ ID NO: 69930 - RNA, 22 nt, Human
gucuguccagcaacacaggagu

SEQ ID NO: 69931 - RNA, 22 nt, Human
gucuguccuguacccagcaucu

SEQ ID NO: 69932 - RNA, 22 nt, Human
gucuguccuuuucaucucccaa

SEQ ID NO: 69933 - RNA, 21 nt, Human
gucugugaucuuacugcugug

SEQ ID NO: 69934 - RNA, 22 nt, Human
gucugugcaguuacuagcuggu

SEQ ID NO: 69935 - RNA, 22 nt, Human
gucuguggaguugcuugcugga

SEQ ID NO: 69936 - RNA, 22 nt, Human
gucugugugcacagcgagugcc

SEQ ID NO: 69937 - RNA, 22 nt, Human
gucuuacccacagcaucuagaa

SEQ ID NO: 69938 - RNA, 22 nt, Human
gucuuauuaugagguuagacuu

SEQ ID NO: 69939 - RNA, 20 nt, Human
gucuuauuuaacacaugacu

SEQ ID NO: 69940 - RNA, 21 nt, Human
gucuucaaaggcagugggcag

SEQ ID NO: 69941 - RNA, 22 nt, Human
gucuucaguggcaaauggaucu

SEQ ID NO: 69942 - RNA, 22 nt, Human
gucuuccuaauuugcuauuagg

SEQ ID NO: 69943 - RNA, 22 nt, Human
gucuucugcccaggcagacgga

SEQ ID NO: 69944 - RNA, 22 nt, Human
gucuucuggggccaggcccgcu

SEQ ID NO: 69945 - RNA, 22 nt, Human
gucuucuguucugugaggcuuc

SEQ ID NO: 69946 - RNA, 22 nt, Human
gucuucuuuaaccuacuaaagc

SEQ ID NO: 69947 - RNA, 22 nt, Human
gucuugaaaaguggccaguuug

SEQ ID NO: 69948 - RNA, 22 nt, Human
gucuugaucuccugaccuugug

SEQ ID NO: 69949 - RNA, 21 nt, Human
gucuuggcaccaggagagaga

SEQ ID NO: 69950 - RNA, 22 nt, Human
gucuuguuugggauguggaugg

SEQ ID NO: 69951 - RNA, 21 nt, Human
gucuuuaaaaaaggcugauac

SEQ ID NO: 69952 - RNA, 23 nt, Human
gucuuuauaguggggcacuuugu

SEQ ID NO: 69953 - RNA, 22 nt, Human
gucuuuaugguaugaaaacuga

SEQ ID NO: 69954 - RNA, 22 nt, Human
gucuuucucuggaacaguaaaa

SEQ ID NO: 69955 - RNA, 22 nt, Human
gucuuucuuaaacaacagaaca

SEQ ID NO: 69956 - RNA, 22 nt, Human
gucuuuggaaagacaaaguuca

SEQ ID NO: 69957 - RNA, 22 nt, Human
gucuuuggagaggugccauuuc

SEQ ID NO: 69958 - RNA, 18 nt, Human
gucuuuucucccuuccuc

SEQ ID NO: 69959 - RNA, 22 nt, Human
gucuuuuugucuggcagagguc

SEQ ID NO: 69960 - RNA, 22 nt, Human
gugaaaaaucaucaugacuuga

SEQ ID NO: 69961 - RNA, 22 nt, Human
gugaaacagaagcuccuggaau

SEQ ID NO: 69962 - RNA, 22 nt, Human
gugaaacugcuuuguaaacugu

SEQ ID NO: 69963 - RNA, 22 nt, Human
gugaaacuucacauuuugauag

SEQ ID NO: 69964 - RNA, 22 nt, Human
gugaaauauuuuguuuauguca

SEQ ID NO: 69965 - RNA, 22 nt, Human
gugaaaugaaucuggaaauauu

SEQ ID NO: 69966 - RNA, 22 nt, Human
uccugcagaccucagucagguc

SEQ ID NO: 69967 - RNA, 22 nt, Human
uccugcagagacagaggccuca

SEQ ID NO: 69968 - RNA, 22 nt, Human
uccugcagaucaaagccuuuga

SEQ ID NO: 69969 - RNA, 22 nt, Human
uccugcagccaagggucaucga

SEQ ID NO: 69970 - RNA, 22 nt, Human
uccugcagccacugcaggcaga

SEQ ID NO: 69971 - RNA, 22 nt, Human
uccugcagcugaagcucaugug

SEQ ID NO: 69972 - RNA, 22 nt, Human
uccugcagcugcagaccugggg

SEQ ID NO: 69973 - RNA, 20 nt, Human
uccugcagucgcuagcgccc

SEQ ID NO: 69974 - RNA, 20 nt, Human
uccugccacaccucaguugc

SEQ ID NO: 69975 - RNA, 17 nt, Human
uccugccaccugucagg

SEQ ID NO: 69976 - RNA, 22 nt, Human
uccugccagcccacagacucau

SEQ ID NO: 69977 - RNA, 22 nt, Human
uccugccauuugcuuuuucucc

SEQ ID NO: 69978 - RNA, 19 nt, Human
uccugcccaccagccaggg

SEQ ID NO: 69979 - RNA, 22 nt, Human
uccugccuagcaggugaccuau

SEQ ID NO: 69980 - RNA, 22 nt, Human
uccugccucacaguugaaguuu

SEQ ID NO: 69981 - RNA, 22 nt, Human
uccugccugagcguggaggagg

SEQ ID NO: 69982 - RNA, 22 nt, Human
uccugccugcaaucccagcacu

SEQ ID NO: 69983 - RNA, 22 nt, Human
uccugccuuagagcaaggaaaa

SEQ ID NO: 69984 - RNA, 22 nt, Human
uccugccuucauacugcuguau

SEQ ID NO: 69985 - RNA, 22 nt, Human
uccugcucugauggguucuccu

SEQ ID NO: 69986 - RNA, 20 nt, Human
uccugcugaccuucacaagc

SEQ ID NO: 69987 - RNA, 22 nt, Human
uccugcugagcgucugucauuu

SEQ ID NO: 69988 - RNA, 22 nt, Human
uccugcugcucuugggaaaccu

SEQ ID NO: 69989 - RNA, 22 nt, Human
uccugcuggacucugaguacaa

SEQ ID NO: 69990 - RNA, 22 nt, Human
uccugcuggcaaggaagggacu

SEQ ID NO: 69991 - RNA, 22 nt, Human
uccugcuguuuaccuacaaugg

SEQ ID NO: 69992 - RNA, 22 nt, Human
uccugcuucagguagagggggu

SEQ ID NO: 69993 - RNA, 22 nt, Human
uccugcuucuucgagcuucugg

SEQ ID NO: 69994 - RNA, 22 nt, Human
uccugcuuugugccucacacuu

SEQ ID NO: 69995 - RNA, 22 nt, Human
uccuggaagaucucugugagau

SEQ ID NO: 69996 - RNA, 22 nt, Human
uccuggaagccagaguugagga

SEQ ID NO: 69997 - RNA, 22 nt, Human
uccuggacagauccccaucauc

SEQ ID NO: 69998 - RNA, 22 nt, Human
uccuggacucaggaccacagga

SEQ ID NO: 69999 - RNA, 23 nt, Human
uccuggagaaaagaaacauuucu

SEQ ID NO: 70000 - RNA, 22 nt, Human
uccuggagccaaugugcugcug

SEQ ID NO: 70001 - RNA, 22 nt, Human
uccuggagccaggacccuuccc

SEQ ID NO: 70002 - RNA, 22 nt, Human
uccuggagccaugauuccccuc

SEQ ID NO: 70003 - RNA, 22 nt, Human
uccuggagcuuccuucauggua

SEQ ID NO: 70004 - RNA, 22 nt, Human
uccuggagggcucacaggcggc

SEQ ID NO: 70005 - RNA, 22 nt, Human
uccuggaguggagucuguuguu

SEQ ID NO: 70006 - RNA, 22 nt, Human
uccuggaguugugcagugcaca

SEQ ID NO: 70007 - RNA, 22 nt, Human
uccuggaguuuguaaggugagc

SEQ ID NO: 70008 - RNA, 22 nt, Human
uccuggaucuacucucaauugg

SEQ ID NO: 70009 - RNA, 22 nt, Human
uccuggauggagcugcccucgc

SEQ ID NO: 70010 - RNA, 22 nt, Human
uccuggcaaagcaaguuaugaa

SEQ ID NO: 70011 - RNA, 19 nt, Human
uccuggcacaguggaacca

SEQ ID NO: 70012 - RNA, 22 nt, Human
uccuggcacauugcaggggcuc

SEQ ID NO: 70013 - RNA, 22 nt, Human
uccuggcagagggcggccucga

SEQ ID NO: 70014 - RNA, 21 nt, Human
uccuggcaggcccaggacccu

SEQ ID NO: 70015 - RNA, 22 nt, Human
uccuggcaggucugagaggucu

SEQ ID NO: 70016 - RNA, 22 nt, Human
uccuggcaguaauuugauguug

SEQ ID NO: 70017 - RNA, 22 nt, Human
uccuggcauuuacaaacccacc

SEQ ID NO: 70018 - RNA, 22 nt, Human
uccuggccacccgacagaaguc

SEQ ID NO: 70019 - RNA, 22 nt, Human
uccuggccaggaugaccuaaca

SEQ ID NO: 70020 - RNA, 22 nt, Human
uccuggccaugcaagaugagga

SEQ ID NO: 70021 - RNA, 22 nt, Human
uccuggcccacuaugccagcau

SEQ ID NO: 70022 - RNA, 21 nt, Human
uccuggcccacucuaucccca

SEQ ID NO: 70023 - RNA, 22 nt, Human
uccuggcccuguggccugcagu

SEQ ID NO: 70024 - RNA, 22 nt, Human
uccuggcuaaugcugcugaugg

SEQ ID NO: 70025 - RNA, 22 nt, Human
uccuggcuccacugagcaggcc

SEQ ID NO: 70026 - RNA, 22 nt, Human
uccuggcucggcuuggggacuu

SEQ ID NO: 70027 - RNA, 22 nt, Human
uccuggcucucuacaaaccaga

SEQ ID NO: 70028 - RNA, 23 nt, Human
uccuggcucugcacuugcuaaug

SEQ ID NO: 70029 - RNA, 22 nt, Human
uccuggcuggaauuucucacuc

SEQ ID NO: 70030 - RNA, 22 nt, Human
uccuggcuuccacaccugucau

SEQ ID NO: 70031 - RNA, 22 nt, Human
uccuggcuuccacuccucuguu

SEQ ID NO: 70032 - RNA, 18 nt, Human
uccugggaacuugcuagc

SEQ ID NO: 70033 - RNA, 22 nt, Human
uccugggaagcgccggccugcg

SEQ ID NO: 70034 - RNA, 22 nt, Human
uccugggacaagccguggaagu

SEQ ID NO: 70035 - RNA, 22 nt, Human
uccugggaccgagggaagagcu

SEQ ID NO: 70036 - RNA, 22 nt, Human
uccugggacucaacuuagaagg

SEQ ID NO: 70037 - RNA, 19 nt, Human
ggugagcccucgccugccu

SEQ ID NO: 70038 - RNA, 22 nt, Human
ggugaggaauuggggacugacc

SEQ ID NO: 70039 - RNA, 22 nt, Human
ggugaggcagagggaguaaccu

SEQ ID NO: 70040 - RNA, 22 nt, Human
ggugaggcccagugaucugugu

SEQ ID NO: 70041 - RNA, 22 nt, Human
ggugagggacaucacucagcca

SEQ ID NO: 70042 - RNA, 22 nt, Human
ggugagucauuuggcucaagag

SEQ ID NO: 70043 - RNA, 22 nt, Human
ggugaguugggguucacagguc

SEQ ID NO: 70044 - RNA, 22 nt, Human
ggugcaaaaguaauuugguuuu

SEQ ID NO: 70045 - RNA, 22 nt, Human
ggugcaggacgaaguggggguu

SEQ ID NO: 70046 - RNA, 22 nt, Human
ggugcaggagcggggugcucgg

SEQ ID NO: 70047 - RNA, 22 nt, Human
ggugcauguagccaucaagaua

SEQ ID NO: 70048 - RNA, 22 nt, Human
ggugccaggcuguagucagggu

SEQ ID NO: 70049 - RNA, 22 nt, Human
ggugccagugggucucaggaua

SEQ ID NO: 70050 - RNA, 22 nt, Human
ggugccauauuauauacaguuu

SEQ ID NO: 70051 - RNA, 22 nt, Human
ggugcccuguaaaagccaugca

SEQ ID NO: 70052 - RNA, 22 nt, Human
ggugccuaauaauucuauugca

SEQ ID NO: 70053 - RNA, 22 nt, Human
ggugccugauggugaugagguc

SEQ ID NO: 70054 - RNA, 20 nt, Human
ggugcgaggccagagcagac

SEQ ID NO: 70055 - RNA, 22 nt, Human
ggugcggagacuccaugaggcc

SEQ ID NO: 70056 - RNA, 21 nt, Human
ggugcuccuccaugcugcucu

SEQ ID NO: 70057 - RNA, 21 nt, Human
ggugcucgcugaugaggagug

SEQ ID NO: 70058 - RNA, 22 nt, Human
ggugcugacucugucgugagca

SEQ ID NO: 70059 - RNA, 22 nt, Human
ggugcugacugaggauggcuug

SEQ ID NO: 70060 - RNA, 22 nt, Human
ggugcugaucuaaauuuaggac

SEQ ID NO: 70061 - RNA, 22 nt, Human
ggugcugauuuguugcugagau

SEQ ID NO: 70062 - RNA, 22 nt, Human
gguggaaggccuggaaggaggc

SEQ ID NO: 70063 - RNA, 22 nt, Human
gguggacuguguuggaguugac

SEQ ID NO: 70064 - RNA, 22 nt, Human
gguggagcgcagggugcuggcg

SEQ ID NO: 70065 - RNA, 22 nt, Human
gguggagcuggaccaggagagg

SEQ ID NO: 70066 - RNA, 22 nt, Human
gguggcaagggcagccaguaac

SEQ ID NO: 70067 - RNA, 22 nt, Human
gguggcacacuggggagcucgg

SEQ ID NO: 70068 - RNA, 22 nt, Human
gguggcacucaaccuuuuauua

SEQ ID NO: 70069 - RNA, 22 nt, Human
gguggcacucauuaucaggugc

SEQ ID NO: 70070 - RNA, 22 nt, Human
gguggcaggcccugagcauccc

SEQ ID NO: 70071 - RNA, 22 nt, Human
gguggcauucagaagagcuggc

SEQ ID NO: 70072 - RNA, 22 nt, Human
gguggccaggccagcucuggcc

SEQ ID NO: 70073 - RNA, 22 nt, Human
gguggccugaauuagcucaggg

SEQ ID NO: 70074 - RNA, 22 nt, Human
gguggccuuuuaugagcagggu

SEQ ID NO: 70075 - RNA, 22 nt, Human
gugagagccugucuggaugucg

SEQ ID NO: 70076 - RNA, 22 nt, Human
ucuccugccacugcuucccauu

SEQ ID NO: 70077 - RNA, 22 nt, Human
ucuccugcucagaacagccuca

SEQ ID NO: 70078 - RNA, 22 nt, Human
ucuccuggaagugauuccccug

SEQ ID NO: 70079 - RNA, 22 nt, Human
ucuccuggcccugucgccaucu

SEQ ID NO: 70080 - RNA, 22 nt, Human
ucuccuggcucaccaggcugga

SEQ ID NO: 70081 - RNA, 21 nt, Human
ucuccuggguccaacccaugc

SEQ ID NO: 70082 - RNA, 22 nt, Human
ucuccuugugcuggguccuucc

SEQ ID NO: 70083 - RNA, 20 nt, Human
ucucgcacucggagcagccg

SEQ ID NO: 70084 - RNA, 22 nt, Human
ucucuaaacuuauaugaacuau

SEQ ID NO: 70085 - RNA, 22 nt, Human
ucucuaacaguggcugcugccu

SEQ ID NO: 70086 - RNA, 20 nt, Human
ucucuaacaugaaugcuauc

SEQ ID NO: 70087 - RNA, 22 nt, Human
ucucuaagauaggaauacaguu

SEQ ID NO: 70088 - RNA, 22 nt, Human
ucucuaauucaaccagacacuu

SEQ ID NO: 70089 - RNA, 22 nt, Human
ucucuagagcaugugcugggca

SEQ ID NO: 70090 - RNA, 22 nt, Human
ucucuaggggagccccguuugu

SEQ ID NO: 70091 - RNA, 19 nt, Human
ucucuauauuuguuucuga

SEQ ID NO: 70092 - RNA, 22 nt, Human
ucucucagaaagcccaugucug

SEQ ID NO: 70093 - RNA, 22 nt, Human
ucucucagacuccccaugguuu

SEQ ID NO: 70094 - RNA, 22 nt, Human
ucucucagaggaagaggcagug

SEQ ID NO: 70095 - RNA, 22 nt, Human
ucucucaggaggcagguuccua

SEQ ID NO: 70096 - RNA, 18 nt, Human
ucucucagggaaacagaa

SEQ ID NO: 70097 - RNA, 22 nt, Human
ucucuccuguguucugauguuu

SEQ ID NO: 70098 - RNA, 22 nt, Human
ucucucuauuuauuugucuugu

SEQ ID NO: 70099 - RNA, 22 nt, Human
ucucucucagccauuacagaac

SEQ ID NO: 70100 - RNA, 22 nt, Human
ucucucugaguugagcaggagu

SEQ ID NO: 70101 - RNA, 22 nt, Human
ucucucugcagcccgggacacu

SEQ ID NO: 70102 - RNA, 22 nt, Human
ucucucuggagcuggggcauga

SEQ ID NO: 70103 - RNA, 19 nt, Human
ucucucuguacauuagaua

SEQ ID NO: 70104 - RNA, 23 nt, Human
ucucucuuagcuaugcuuauggc

SEQ ID NO: 70105 - RNA, 22 nt, Human
ucucucuucaugcuuuuagaau

SEQ ID NO: 70106 - RNA, 22 nt, Human
ucucucuugaaguauuagcuag

SEQ ID NO: 70107 - RNA, 22 nt, Human
ucucugaagaaucgaugauucu

SEQ ID NO: 70108 - RNA, 22 nt, Human
ucucugaagauauuuauuauua

SEQ ID NO: 70109 - RNA, 22 nt, Human
ucucugaaggcuguguugaugg

SEQ ID NO: 70110 - RNA, 22 nt, Human
ucucugaaggggagcuguuuaa

SEQ ID NO: 70111 - RNA, 22 nt, Human
ucucugaauaaugcuauucuuu

SEQ ID NO: 70112 - RNA, 22 nt, Human
ucucugaaugagauuacugccu

SEQ ID NO: 70113 - RNA, 22 nt, Human
ucucugaauucugaugcaagug

SEQ ID NO: 70114 - RNA, 22 nt, Human
ucucugagaucagccacugacu

SEQ ID NO: 70115 - RNA, 22 nt, Human
ucucugagcuuaagguguuuca

SEQ ID NO: 70116 - RNA, 22 nt, Human
ucucugaguaagugacaguuca

SEQ ID NO: 70117 - RNA, 22 nt, Human
ucucugaguauccugaacugcc

SEQ ID NO: 70118 - RNA, 22 nt, Human
ucucugaguuguaaaaaauagu

SEQ ID NO: 70119 - RNA, 22 nt, Human
ucucugcaacuacaucuuaggg

SEQ ID NO: 70120 - RNA, 22 nt, Human
ucucugcagcuaagaaauuaau

SEQ ID NO: 70121 - RNA, 22 nt, Human
ucucugcaugacccaaggcuga

SEQ ID NO: 70122 - RNA, 22 nt, Human
ucucugcccaaguuucucaagu

SEQ ID NO: 70123 - RNA, 22 nt, Human
ucucuggcacauaauaaggucu

SEQ ID NO: 70124 - RNA, 22 nt, Human
ucucuggcagacuggcugggcu

SEQ ID NO: 70125 - RNA, 22 nt, Human
ucucuggcagaggcccuauccc

SEQ ID NO: 70126 - RNA, 19 nt, Human
ucucuggcaguucagagca

SEQ ID NO: 70127 - RNA, 19 nt, Human
ucucuggcauagacucaau

SEQ ID NO: 70128 - RNA, 22 nt, Human
ucucuggcccuguuuucuaucu

SEQ ID NO: 70129 - RNA, 22 nt, Human
ucucuggccgagagucccuggg

SEQ ID NO: 70130 - RNA, 21 nt, Human
ucucuggcgguguuuggcucc

SEQ ID NO: 70131 - RNA, 22 nt, Human
ucucuggcuccugccgggucca

SEQ ID NO: 70132 - RNA, 22 nt, Human
ucucuggcugauauuccucugc

SEQ ID NO: 70133 - RNA, 22 nt, Human
ucucuggcuggcaccccaggga

SEQ ID NO: 70134 - RNA, 22 nt, Human
ucucugggauaaacugggccag

SEQ ID NO: 70135 - RNA, 22 nt, Human
ucucugggccucccuuuccaag

SEQ ID NO: 70136 - RNA, 22 nt, Human
ucucugggcuaaaaucaaggug

SEQ ID NO: 70137 - RNA, 22 nt, Human
ucucugggcucaggagcccggc

SEQ ID NO: 70138 - RNA, 22 nt, Human
ucucuggguauucacugccuuc

SEQ ID NO: 70139 - RNA, 22 nt, Human
ucucugggucucaguuuguaca

SEQ ID NO: 70140 - RNA, 22 nt, Human
ucucugguuaugucauuaagca

SEQ ID NO: 70141 - RNA, 21 nt, Human
ucucugguuggaguugugcca

SEQ ID NO: 70142 - RNA, 22 nt, Human
ucucuguaauaucuuuuacaac

SEQ ID NO: 70143 - RNA, 22 nt, Human
ucucuguagggcugcuugagua

SEQ ID NO: 70144 - RNA, 22 nt, Human
ucucuguaucagcaccugcugg

SEQ ID NO: 70145 - RNA, 21 nt, Human
ucucuguauccauggguucca

SEQ ID NO: 70146 - RNA, 22 nt, Human
ucucuguauucuucguaaugcc

SEQ ID NO: 70147 - RNA, 22 nt, Human
ucucugugagaugccuuccuga

SEQ ID NO: 70148 - RNA, 22 nt, Human
ucucugugcccaguaguucucu

SEQ ID NO: 70149 - RNA, 22 nt, Human
ucucugugggcuuuggacuuga

SEQ ID NO: 70150 - RNA, 22 nt, Human
ucucuguggugggaggcugagu

SEQ ID NO: 70151 - RNA, 22 nt, Human
ucucugugucuuagugaaggga

SEQ ID NO: 70152 - RNA, 21 nt, Human
ucucugugucuuuaagcugga

SEQ ID NO: 70153 - RNA, 22 nt, Human
ucucugugugccuucaucugcc

SEQ ID NO: 70154 - RNA, 22 nt, Human
ucucugugugugugacagcauu

SEQ ID NO: 70155 - RNA, 22 nt, Human
ucucuguguguuggcuguauau

SEQ ID NO: 70156 - RNA, 22 nt, Human
ucucuuaauaaguaaauacuga

SEQ ID NO: 70157 - RNA, 22 nt, Human
ucucuuaauuuuggaauagugu

SEQ ID NO: 70158 - RNA, 22 nt, Human
ucucuucacacuaccccugugu

SEQ ID NO: 70159 - RNA, 22 nt, Human
ucucuucacaugcuugcuccaa

SEQ ID NO: 70160 - RNA, 20 nt, Human
ucucuucaggagguccaugu

SEQ ID NO: 70161 - RNA, 22 nt, Human
ucucuucauagugacacccauc

SEQ ID NO: 70162 - RNA, 22 nt, Human
ucucuucauuugcuauggguca

SEQ ID NO: 70163 - RNA, 22 nt, Human
ucucuuccauguuucagcccca

SEQ ID NO: 70164 - RNA, 22 nt, Human
ucucuuccccuuuccuuuaaca

SEQ ID NO: 70165 - RNA, 22 nt, Human
ucucuuccucagccuggggccu

SEQ ID NO: 70166 - RNA, 22 nt, Human
ucucuucuagcuucuugugguu

SEQ ID NO: 70167 - RNA, 22 nt, Human
ucucuucuauuugagacuauuu

SEQ ID NO: 70168 - RNA, 22 nt, Human
ucucuucuuguguuuuccugcc

SEQ ID NO: 70169 - RNA, 22 nt, Human
ucucuugacugcuaaaauuaga

SEQ ID NO: 70170 - RNA, 22 nt, Human
ucucuuggggaaagagaagaau

SEQ ID NO: 70171 - RNA, 22 nt, Human
ucucuuggugauagucuuucuu

SEQ ID NO: 70172 - RNA, 22 nt, Human
ucucuuuaaaaauagugaaaua

SEQ ID NO: 70173 - RNA, 20 nt, Human
ucucuuuuagcuuacagcug

SEQ ID NO: 70174 - RNA, 22 nt, Human
ucucuuuuauguacacccugac

SEQ ID NO: 70175 - RNA, 22 nt, Human
ucugaaagaaagauuuuguuuc

SEQ ID NO: 70176 - RNA, 22 nt, Human
ucugaaagaagggcagucuuuu

SEQ ID NO: 70177 - RNA, 22 nt, Human
ucugaaagaugagugguccauu

SEQ ID NO: 70178 - RNA, 22 nt, Human
ucugaaagcauuacaguuuauu

SEQ ID NO: 70179 - RNA, 22 nt, Human
ucugaaagucugaaacaguguc

SEQ ID NO: 70180 - RNA, 22 nt, Human
ucugaaauaggagccauguaga

SEQ ID NO: 70181 - RNA, 22 nt, Human
ucugaaaugaccuuuccccacu

SEQ ID NO: 70182 - RNA, 22 nt, Human
ucugaaauuccuuccagacuuu

SEQ ID NO: 70183 - RNA, 20 nt, Human
ucugaacaaaauguaauguc

SEQ ID NO: 70184 - RNA, 17 nt, Human
ucugcagggggccgugu

SEQ ID NO: 70185 - RNA, 22 nt, Human
ucugcaggugggccccuagaau

SEQ ID NO: 70186 - RNA, 22 nt, Human
ucugcauauuuaucaugagucu

SEQ ID NO: 70187 - RNA, 22 nt, Human
ucugcaugaugaacaaaugagc

SEQ ID NO: 70188 - RNA, 22 nt, Human
ucugcauuuggaucuugagcug

SEQ ID NO: 70189 - RNA, 21 nt, Human
ucugcauuuuagcaagaucuc

SEQ ID NO: 70190 - RNA, 22 nt, Human
ucugccaccaacugucacuaca

SEQ ID NO: 70191 - RNA, 22 nt, Human
ucugccacuuuugcuuacuggg

SEQ ID NO: 70192 - RNA, 22 nt, Human
ucugccagaagccagggucugg

SEQ ID NO: 70193 - RNA, 22 nt, Human
gugcacugucuggucaagagca

SEQ ID NO: 70194 - RNA, 22 nt, Human
gugcagagaaggagcaguaguu

SEQ ID NO: 70195 - RNA, 22 nt, Human
gugcagagaggaccuuggggag

SEQ ID NO: 70196 - RNA, 22 nt, Human
gugcagagagguggagggacuu

SEQ ID NO: 70197 - RNA, 22 nt, Human
gugcagaggucacaaaagugaa

SEQ ID NO: 70198 - RNA, 22 nt, Human
gugcagagugucuguggacuga

SEQ ID NO: 70199 - RNA, 22 nt, Human
gugcagauucccgggccucucc

SEQ ID NO: 70200 - RNA, 20 nt, Human
gugcagcacuuggggguagg

SEQ ID NO: 70201 - RNA, 22 nt, Human
gugcagcuacuccuugguccua

SEQ ID NO: 70202 - RNA, 22 nt, Human
gugcagcucaguugaaaugcag

SEQ ID NO: 70203 - RNA, 16 nt, Human
gugcagcugccuggua

SEQ ID NO: 70204 - RNA, 22 nt, Human
gugcagcugguggagucugggg

SEQ ID NO: 70205 - RNA, 22 nt, Human
gugcaggagcaggagccauguc

SEQ ID NO: 70206 - RNA, 22 nt, Human
gugcaggagcuucuggccugac

SEQ ID NO: 70207 - RNA, 22 nt, Human
gugcaggaucucagaacaagug

SEQ ID NO: 70208 - RNA, 22 nt, Human
gugcaggauuuauagcccagcu

SEQ ID NO: 70209 - RNA, 22 nt, Human
gugcaggcuagauccuuccuac

SEQ ID NO: 70210 - RNA, 22 nt, Human
gugcagggagcccagaaggucc

SEQ ID NO: 70211 - RNA, 22 nt, Human
gugcagggcccuccuaacaucu

SEQ ID NO: 70212 - RNA, 22 nt, Human
gugcaggugguuggcccagccg

SEQ ID NO: 70213 - RNA, 22 nt, Human
gugcaguaucucugggaguggg

SEQ ID NO: 70214 - RNA, 22 nt, Human
gugcagugagcagugcagcacc

SEQ ID NO: 70215 - RNA, 19 nt, Human
gugcaguucagaguucaau

SEQ ID NO: 70216 - RNA, 22 nt, Human
gugcauacuuuauuuuaauacu

SEQ ID NO: 70217 - RNA, 22 nt, Human
gugcauauguguguauacaaac

SEQ ID NO: 70218 - RNA, 22 nt, Human
gugcauauuuugcacacagaug

SEQ ID NO: 70219 - RNA, 22 nt, Human
gugcaucagaguguccuagaca

SEQ ID NO: 70220 - RNA, 22 nt, Human
gugcaugaagcaggcagcuccu

SEQ ID NO: 70221 - RNA, 22 nt, Human
gugcaugcacacaugugugagg

SEQ ID NO: 70222 - RNA, 22 nt, Human
gugcaugcaguaaguguuuuaa

SEQ ID NO: 70223 - RNA, 22 nt, Human
gugcaugguaagaugcuucaca

SEQ ID NO: 70224 - RNA, 22 nt, Human
gugcaugugguaaagaggagag

SEQ ID NO: 70225 - RNA, 22 nt, Human
gugcauuauucuuaccuuucuu

SEQ ID NO: 70226 - RNA, 22 nt, Human
gugcauuggugcgccacuucac

SEQ ID NO: 70227 - RNA, 22 nt, Human
gugcauuuauauuugccuuugg

SEQ ID NO: 70228 - RNA, 22 nt, Human
gugcauuuggugacucucaccc

SEQ ID NO: 70229 - RNA, 22 nt, Human
gugcauuugugcaugcacaugu

SEQ ID NO: 70230 - RNA, 22 nt, Human
gugccacaugguccauguauca

SEQ ID NO: 70231 - RNA, 22 nt, Human
gugccaccuucaaaucacauug

SEQ ID NO: 70232 - RNA, 22 nt, Human
gugccacuuaccugggaggagu

SEQ ID NO: 70233 - RNA, 22 nt, Human
gugccagaagguucccgcugca

SEQ ID NO: 70234 - RNA, 22 nt, Human
gugccagagauuccuaaacuuu

SEQ ID NO: 70235 - RNA, 22 nt, Human
gugccagcuguccauguuccuc

SEQ ID NO: 70236 - RNA, 22 nt, Human
gugccagggggcacugaacaga

SEQ ID NO: 70237 - RNA, 22 nt, Human
gugccaucauucaauaaauuca

SEQ ID NO: 70238 - RNA, 22 nt, Human
gugcccaguccugccuugacag

SEQ ID NO: 70239 - RNA, 22 nt, Human
gugcccagugcaggcccgcagg

SEQ ID NO: 70240 - RNA, 22 nt, Human
gugccccagacacgcauguggg

SEQ ID NO: 70241 - RNA, 22 nt, Human
gugcccugagcuuaugcauucu

SEQ ID NO: 70242 - RNA, 22 nt, Human
gugcccuggagggguugaaggg

SEQ ID NO: 70243 - RNA, 22 nt, Human
gugcccuggaugacuuuggucu

SEQ ID NO: 70244 - RNA, 20 nt, Human
gugcccugugggcuauuuuc

SEQ ID NO: 70245 - RNA, 22 nt, Human
gugcccuguucauuucucuccc

SEQ ID NO: 70246 - RNA, 21 nt, Human
gugcccuguucccacaugccc

SEQ ID NO: 70247 - RNA, 22 nt, Human
gugccgcuggagcuggaauuga

SEQ ID NO: 70248 - RNA, 22 nt, Human
gugccucagcaccgccugcagc

SEQ ID NO: 70249 - RNA, 22 nt, Human
gugccugcuaccugacuuguuu

SEQ ID NO: 70250 - RNA, 22 nt, Human
gugccuggagcuaauguguaua

SEQ ID NO: 70251 - RNA, 22 nt, Human
gugccuggcagggucagcugcu

SEQ ID NO: 70252 - RNA, 22 nt, Human
gugccugggacacgagauuuuc

SEQ ID NO: 70253 - RNA, 22 nt, Human
gugccugguauguagguagcgg

SEQ ID NO: 70254 - RNA, 22 nt, Human
gugccuuccccgguggucuguu

SEQ ID NO: 70255 - RNA, 22 nt, Human
gugccuuuucuucauaguuacu

SEQ ID NO: 70256 - RNA, 22 nt, Human
gugcgccagcucaaggggaggc

SEQ ID NO: 70257 - RNA, 23 nt, Human
gugcgccaggacaaccugacgga

SEQ ID NO: 70258 - RNA, 22 nt, Human
gugcgggccuggggguuucucu

SEQ ID NO: 70259 - RNA, 22 nt, Human
gugcuaaaggguuaugaacaag

SEQ ID NO: 70260 - RNA, 22 nt, Human
gugcuacuaguuucauuuuuca

SEQ ID NO: 70261 - RNA, 22 nt, Human
gugcuaugauuggacagaauag

SEQ ID NO: 70262 - RNA, 22 nt, Human
gugcucagguucccaugagugc

SEQ ID NO: 70263 - RNA, 22 nt, Human
gugcuccauggccuguguccau

SEQ ID NO: 70264 - RNA, 22 nt, Human
gugcuccucacaguguggcccu

SEQ ID NO: 70265 - RNA, 22 nt, Human
gugcucuacaugcuccauguuu

SEQ ID NO: 70266 - RNA, 22 nt, Human
gugcucuagaaauugucagugg

SEQ ID NO: 70267 - RNA, 22 nt, Human
gugcucuccuggcugcccugac

SEQ ID NO: 70268 - RNA, 22 nt, Human
gugcucugccuggggucauggc

SEQ ID NO: 70269 - RNA, 22 nt, Human
gugcucuggccaagcgcgugcg

SEQ ID NO: 70270 - RNA, 22 nt, Human
gugcucugggcugccugacaug

SEQ ID NO: 70271 - RNA, 23 nt, Human
gugcucuucaguuuuagggucau

SEQ ID NO: 70272 - RNA, 22 nt, Human
gugcugaaauggaccucaggaa

SEQ ID NO: 70273 - RNA, 22 nt, Human
gugcugaacuauaaaaagcuuu

SEQ ID NO: 70274 - RNA, 22 nt, Human
gugcugaagaagucuguucgcc

SEQ ID NO: 70275 - RNA, 22 nt, Human
gugcugaauccacucuuaggaa

SEQ ID NO: 70276 - RNA, 22 nt, Human
gugcugaauugugcucuuuaca

SEQ ID NO: 70277 - RNA, 22 nt, Human
gugcugacaggagccuggcggu

SEQ ID NO: 70278 - RNA, 22 nt, Human
gugcugagauuggagugagcag

SEQ ID NO: 70279 - RNA, 22 nt, Human
gugcugagcacagcugcccagg

SEQ ID NO: 70280 - RNA, 22 nt, Human
gugcugagcaucaugaggcacu

SEQ ID NO: 70281 - RNA, 22 nt, Human
gugcugaggauacagcugugaa

SEQ ID NO: 70282 - RNA, 22 nt, Human
gugcugccuccauauccgucag

SEQ ID NO: 70283 - RNA, 22 nt, Human
gugcugcgaugauuuuacagag

SEQ ID NO: 70284 - RNA, 22 nt, Human
gugcugcuugggggcagagcag

SEQ ID NO: 70285 - RNA, 22 nt, Human
gugcuggcccuguccucgagcu

SEQ ID NO: 70286 - RNA, 22 nt, Human
gugcuggccucagagggucaug

SEQ ID NO: 70287 - RNA, 21 nt, Human
gugcugggacacagccaggcu

SEQ ID NO: 70288 - RNA, 22 nt, Human
gugcugggcccugagaccaggg

SEQ ID NO: 70289 - RNA, 22 nt, Human
gugcugggcuccaccccagagg

SEQ ID NO: 70290 - RNA, 22 nt, Human
gugcuguauugagacaaggucg

SEQ ID NO: 70291 - RNA, 22 nt, Human
gugcugucaauugcuuucagua

SEQ ID NO: 70292 - RNA, 22 nt, Human
gugcuguucuggcugccaccac

SEQ ID NO: 70293 - RNA, 22 nt, Human
gugcuuauccccauucuggagg

SEQ ID NO: 70294 - RNA, 22 nt, Human
gugcuucccauuagaacuguga

SEQ ID NO: 70295 - RNA, 22 nt, Human
gugcuuccuagguaaguaggua

SEQ ID NO: 70296 - RNA, 22 nt, Human
gugcuuccuccuuaaacuguca

SEQ ID NO: 70297 - RNA, 22 nt, Human
gugcuuccugccuggugccuuu

SEQ ID NO: 70298 - RNA, 22 nt, Human
gugcuucuccguucugcagcac

SEQ ID NO: 70299 - RNA, 22 nt, Human
gugcuucuuucuccucaagccu

SEQ ID NO: 70300 - RNA, 22 nt, Human
gugcuuggaccaggucaucuuc

SEQ ID NO: 70301 - RNA, 22 nt, Human
gugcuuuaaaccacugugcugu

SEQ ID NO: 70302 - RNA, 22 nt, Human
gugcuuuaccuuauuggucucg

SEQ ID NO: 70303 - RNA, 22 nt, Human
gugcuuuacuguguugccuuua

SEQ ID NO: 70304 - RNA, 22 nt, Human
uaaaaaacauuacucuguccug

SEQ ID NO: 70305 - RNA, 22 nt, Human
uaaaaaguagugagaauggcgc

SEQ ID NO: 70306 - RNA, 22 nt, Human
uaaaaaguugaaaggacuuauc

SEQ ID NO: 70307 - RNA, 22 nt, Human
uaaaaccaggucuugggauuua

SEQ ID NO: 70308 - RNA, 19 nt, Human
uaaaacgugcauggcagca

SEQ ID NO: 70309 - RNA, 22 nt, Human
uaaaacugaauacauacugagg

SEQ ID NO: 70310 - RNA, 22 nt, Human
uaaaaggagguugaagcuguca

SEQ ID NO: 70311 - RNA, 19 nt, Human
uaaaaggauguggaaggau

SEQ ID NO: 70312 - RNA, 22 nt, Human
uaaaaggcaauacuagaugagu

SEQ ID NO: 70313 - RNA, 22 nt, Human
uaaaaguauacuuucaaaggag

SEQ ID NO: 70314 - RNA, 22 nt, Human
uaaaauagcuuaugucuuuuga

SEQ ID NO: 70315 - RNA, 22 nt, Human
uaaaaugacuuccuccaacauc

SEQ ID NO: 70316 - RNA, 22 nt, Human
uaaaaugaucucucauguucuu

SEQ ID NO: 70317 - RNA, 22 nt, Human
uaaaaugguaacuuucauuugc

SEQ ID NO: 70318 - RNA, 22 nt, Human
uaaaauguagcuucuaggcugg

SEQ ID NO: 70319 - RNA, 18 nt, Human
uaaaauucaaggcagggu

SEQ ID NO: 70320 - RNA, 22 nt, Human
uaaacagaauucaggcaagaua

SEQ ID NO: 70321 - RNA, 22 nt, Human
uaaacagagagugcaguuauag

SEQ ID NO: 70322 - RNA, 22 nt, Human
uaaacagagugcuaguucacgg

SEQ ID NO: 70323 - RNA, 22 nt, Human
uaaacaguuaacaugccagaau

SEQ ID NO: 70324 - RNA, 22 nt, Human
uaaacaucugaauccugcuucc

SEQ ID NO: 70325 - RNA, 18 nt, Human
uaaaccugagaagcgugu

SEQ ID NO: 70326 - RNA, 22 nt, Human
uaaaccuuauuugaauaccaac

SEQ ID NO: 70327 - RNA, 22 nt, Human
uaaacgugcuucauauuuuuag

SEQ ID NO: 70328 - RNA, 22 nt, Human
uaaacuacuaggaugaauuuuu

SEQ ID NO: 70329 - RNA, 22 nt, Human
uaaacucuucuguagaaucaga

SEQ ID NO: 70330 - RNA, 22 nt, Human
uaaacugaagcucaacucaaau

SEQ ID NO: 70331 - RNA, 22 nt, Human
uaaacugcuucucucagucugu

SEQ ID NO: 70332 - RNA, 22 nt, Human
uaaagaacacagggaauagcac

SEQ ID NO: 70333 - RNA, 21 nt, Human
uaaagaagaugaaugugauca

SEQ ID NO: 70334 - RNA, 22 nt, Human
uaaagacaaacccacuaggguu

SEQ ID NO: 70335 - RNA, 22 nt, Human
uaaagacaaaugacauuacggc

SEQ ID NO: 70336 - RNA, 22 nt, Human
uaaagacaauuucgagcuguag

SEQ ID NO: 70337 - RNA, 22 nt, Human
uaaagacacugguuuuaaucau

SEQ ID NO: 70338 - RNA, 20 nt, Human
uaaagacauaagcuacuauc

SEQ ID NO: 70339 - RNA, 22 nt, Human
uaaagagccauuguaugguuuu

SEQ ID NO: 70340 - RNA, 22 nt, Human
uaaagcaaaaaugaacugccau

SEQ ID NO: 70341 - RNA, 22 nt, Human
uaaagcacauaucuuacaauaa

SEQ ID NO: 70342 - RNA, 20 nt, Human
uaaagcagccguggagggua

SEQ ID NO: 70343 - RNA, 22 nt, Human
uaaagcagcguggguggggcag

SEQ ID NO: 70344 - RNA, 22 nt, Human
uaaagcagucuguguaugugaa

SEQ ID NO: 70345 - RNA, 22 nt, Human
uaaagcagugguucucaaacuu

SEQ ID NO: 70346 - RNA, 17 nt, Human
uaaagccagucaaguca

SEQ ID NO: 70347 - RNA, 22 nt, Human
uaaagcuagccaaccacugucu

SEQ ID NO: 70348 - RNA, 22 nt, Human
uaaagcuaugcuuaauuuauca

SEQ ID NO: 70349 - RNA, 21 nt, Human
uaaagcucguucaggaaaguc

SEQ ID NO: 70350 - RNA, 22 nt, Human
uaaagcugaaaugauuaugaca

SEQ ID NO: 70351 - RNA, 22 nt, Human
uaaagcuuguauugcaauauuu

SEQ ID NO: 70352 - RNA, 19 nt, Human
uaaaggaagaagggaggau

SEQ ID NO: 70353 - RNA, 19 nt, Human
uaaaggaagaggaagggaa

SEQ ID NO: 70354 - RNA, 18 nt, Human
uaaaggaagugggagagg

SEQ ID NO: 70355 - RNA, 22 nt, Human
uaaaggaaucaguuuuagagau

SEQ ID NO: 70356 - RNA, 22 nt, Human
uaaaggaggaguuaaugagacu

SEQ ID NO: 70357 - RNA, 22 nt, Human
uaaaggcacugcgucccucaaa

SEQ ID NO: 70358 - RNA, 22 nt, Human
uaaaggcagccacugagcucaa

SEQ ID NO: 70359 - RNA, 22 nt, Human
uaaaggcaguaauuccugaguu

SEQ ID NO: 70360 - RNA, 22 nt, Human
uaaaggccagggccugagugcu

SEQ ID NO: 70361 - RNA, 22 nt, Human
uaaaggccuaguaaguugagac

SEQ ID NO: 70362 - RNA, 20 nt, Human
uaaaggcugugagguggccc

SEQ ID NO: 70363 - RNA, 22 nt, Human
uaaagguacgaagugagggauu

SEQ ID NO: 70364 - RNA, 22 nt, Human
uaaagguagugugacauauugu

SEQ ID NO: 70365 - RNA, 22 nt, Human
uaaagguuaguagcagggaaac

SEQ ID NO: 70366 - RNA, 22 nt, Human
uaaagguuauugcacuggaguu

SEQ ID NO: 70367 - RNA, 22 nt, Human
uaaagguugaaaacugacugcc

SEQ ID NO: 70368 - RNA, 22 nt, Human
uaaaguagcaaguuuagacuga

SEQ ID NO: 70369 - RNA, 22 nt, Human
uaaaguagcgccuaacuaaugu

SEQ ID NO: 70370 - RNA, 22 nt, Human
uaaaguauaagcauuggaguau

SEQ ID NO: 70371 - RNA, 22 nt, Human
uaaagucacagagcaggugcaa

SEQ ID NO: 70372 - RNA, 22 nt, Human
uaaagucaucuuuaaacaugcc

SEQ ID NO: 70373 - RNA, 22 nt, Human
uaaagugaaggucauaaugauu

SEQ ID NO: 70374 - RNA, 22 nt, Human
uaaagugccucagguccugggu

SEQ ID NO: 70375 - RNA, 22 nt, Human
uaaagugcgacccaguccccag

SEQ ID NO: 70376 - RNA, 23 nt, Human
uaaaguggcgcuguuacugccag

SEQ ID NO: 70377 - RNA, 22 nt, Human
uaaagugggcaaacucucaugg

SEQ ID NO: 70378 - RNA, 22 nt, Human
uaaaguguccuagcuaggaggc

SEQ ID NO: 70379 - RNA, 22 nt, Human
uaaagugugcauggucaaauau

SEQ ID NO: 70380 - RNA, 22 nt, Human
uaaaguuauaaauuaccuguca

SEQ ID NO: 70381 - RNA, 22 nt, Human
uaaaguucagugcaugaaugug

SEQ ID NO: 70382 - RNA, 22 nt, Human
uaaaguuuggcagacaauaaca

SEQ ID NO: 70383 - RNA, 17 nt, Human
uaaauacacaaggguau

SEQ ID NO: 70384 - RNA, 22 nt, Human
uaaauacuuuacaggaugucuc

SEQ ID NO: 70385 - RNA, 22 nt, Human
uaaauaugcauguauccuuauc

SEQ ID NO: 70386 - RNA, 22 nt, Human
uaaaucaagaauaucagcuugu

SEQ ID NO: 70387 - RNA, 22 nt, Human
uaaaucagggagucaucugcga

SEQ ID NO: 70388 - RNA, 22 nt, Human
uaaaucucagccuuucugcuua

SEQ ID NO: 70389 - RNA, 22 nt, Human
uaaaucucagggaauauauuga

SEQ ID NO: 70390 - RNA, 22 nt, Human
uaaaucucugcuccucuugggu

SEQ ID NO: 70391 - RNA, 22 nt, Human
uaaaugaagaaauggagauugu

SEQ ID NO: 70392 - RNA, 22 nt, Human
uaaaugaagcucaugggccaca

SEQ ID NO: 70393 - RNA, 22 nt, Human
uaaaugacauucuuaagucuug

SEQ ID NO: 70394 - RNA, 22 nt, Human
uaaaugagauguacauaacuca

SEQ ID NO: 70395 - RNA, 22 nt, Human
uaaaugaguaauauagcuguuu

SEQ ID NO: 70396 - RNA, 22 nt, Human
uaaaugauuuauguaugugaaa

SEQ ID NO: 70397 - RNA, 22 nt, Human
uaaaugcaaagcuuggcgcuua

SEQ ID NO: 70398 - RNA, 22 nt, Human
uaaaugcaagugcuccugggag

SEQ ID NO: 70399 - RNA, 22 nt, Human
uaaaugcaguacaaauuguucu

SEQ ID NO: 70400 - RNA, 22 nt, Human
uaaaugcaguuaguacuugcca

SEQ ID NO: 70401 - RNA, 20 nt, Human
uaaaugcaucuguucaacug

SEQ ID NO: 70402 - RNA, 22 nt, Human
ucuuuuuauauugacaaaaggu

SEQ ID NO: 70403 - RNA, 22 nt, Human
ugaaaacacuuuaguuuagguc

SEQ ID NO: 70404 - RNA, 22 nt, Human
ugaaaacuccaaguuucaucag

SEQ ID NO: 70405 - RNA, 22 nt, Human
ugaaaagucuuauauugucuga

SEQ ID NO: 70406 - RNA, 22 nt, Human
ugaaaagugaucauggauuagg

SEQ ID NO: 70407 - RNA, 22 nt, Human
ugaaaauauaguuuuccagacu

SEQ ID NO: 70408 - RNA, 22 nt, Human
ugaaaaugcacgcuggaaagca

SEQ ID NO: 70409 - RNA, 22 nt, Human
ugaaacaaaccaguaauuuugu

SEQ ID NO: 70410 - RNA, 22 nt, Human
ugaaacaaauuuggaaaaucua

SEQ ID NO: 70411 - RNA, 18 nt, Human
ugaaacaagaauggugca

SEQ ID NO: 70412 - RNA, 22 nt, Human
ugaaacaagauccacagacuug

SEQ ID NO: 70413 - RNA, 17 nt, Human
ugaaacaccaagacugu

SEQ ID NO: 70414 - RNA, 22 nt, Human
ugaaacacugcgauaaaauccu

SEQ ID NO: 70415 - RNA, 22 nt, Human
ugaaacagaguggauacaguga

SEQ ID NO: 70416 - RNA, 23 nt, Human
ugaaacagaugccaaugaucaag

SEQ ID NO: 70417 - RNA, 22 nt, Human
ugaaacagcuaucaguagacug

SEQ ID NO: 70418 - RNA, 22 nt, Human
ugaaacauaaaguuaucuucag

SEQ ID NO: 70419 - RNA, 22 nt, Human
ugaaaccacugaugguaccaag

SEQ ID NO: 70420 - RNA, 21 nt, Human
ugaaacuaccuacaagcuacc

SEQ ID NO: 70421 - RNA, 22 nt, Human
ugaaacuaggccaaucaaauua

SEQ ID NO: 70422 - RNA, 22 nt, Human
ugaaacuugaguauauauggau

SEQ ID NO: 70423 - RNA, 22 nt, Human
ugaaagaagccuucgaggcucg

SEQ ID NO: 70424 - RNA, 22 nt, Human
ugaaagagugcaagucaaggag

SEQ ID NO: 70425 - RNA, 22 nt, Human
ugaaagauugugauucaauaug

SEQ ID NO: 70426 - RNA, 22 nt, Human
ugaaagcagcaccaauaccauu

SEQ ID NO: 70427 - RNA, 22 nt, Human
ugaaagcauaugcuaaagacca

SEQ ID NO: 70428 - RNA, 20 nt, Human
ugaaagcaugugguauuugg

SEQ ID NO: 70429 - RNA, 22 nt, Human
ugaaagcugcccaguggaauua

SEQ ID NO: 70430 - RNA, 22 nt, Human
ugaaagguuauuuaggucugcu

SEQ ID NO: 70431 - RNA, 22 nt, Human
ugaaagugaaugucacuguuga

SEQ ID NO: 70432 - RNA, 22 nt, Human
ugaaaguuacaggaaaacagau

SEQ ID NO: 70433 - RNA, 22 nt, Human
ugaaaguucaauaccaauuugg

SEQ ID NO: 70434 - RNA, 23 nt, Human
ugaaaguucugaagagaucaugc

SEQ ID NO: 70435 - RNA, 21 nt, Human
ugaaaguuggagucaaaugua

SEQ ID NO: 70436 - RNA, 22 nt, Human
ugaaauacacaaauuuaguaag

SEQ ID NO: 70437 - RNA, 22 nt, Human
ugaaauacugagugaaagaauu

SEQ ID NO: 70438 - RNA, 22 nt, Human
ugaaauauuuagagaguaaguu

SEQ ID NO: 70439 - RNA, 23 nt, Human
ugaaaucagaacccuuaccucuc

SEQ ID NO: 70440 - RNA, 17 nt, Human
ugaaaucagcacccagg

SEQ ID NO: 70441 - RNA, 22 nt, Human
ugaaaucauaacaguuuggcuu

SEQ ID NO: 70442 - RNA, 22 nt, Human
ugaaaucaucaaaagagccauu

SEQ ID NO: 70443 - RNA, 22 nt, Human
ugaaaucaugaacaagguaggu

SEQ ID NO: 70444 - RNA, 22 nt, Human
ugaaaucauugccaaguauuga

SEQ ID NO: 70445 - RNA, 22 nt, Human
ugaaaucauugggguugaauaa

SEQ ID NO: 70446 - RNA, 21 nt, Human
ugaaaucugaugggacaaaug

SEQ ID NO: 70447 - RNA, 22 nt, Human
ugaaaugaagggcuuguucugg

SEQ ID NO: 70448 - RNA, 22 nt, Human
ugaaaugaaugugauucgauag

SEQ ID NO: 70449 - RNA, 22 nt, Human
ugaaaugacaaagguuuuucuu

SEQ ID NO: 70450 - RNA, 22 nt, Human
ugaaaugacagucuuaagcucu

SEQ ID NO: 70451 - RNA, 21 nt, Human
ugaaaugagaaugcugagcac

SEQ ID NO: 70452 - RNA, 22 nt, Human
ugaaaugauguacaagaaggca

SEQ ID NO: 70453 - RNA, 22 nt, Human
ugaaaugcaacaguuauuuuug

SEQ ID NO: 70454 - RNA, 22 nt, Human
ugaaaugccuaugaagucagga

SEQ ID NO: 70455 - RNA, 22 nt, Human
ugaaaugcuguagagacuguau

SEQ ID NO: 70456 - RNA, 22 nt, Human
guuuccugucugcuuuacuaua

SEQ ID NO: 70457 - RNA, 18 nt, Human
guuuccugucuuacgggg

SEQ ID NO: 70458 - RNA, 22 nt, Human
guuuccuguuucucagcagccc

SEQ ID NO: 70459 - RNA, 22 nt, Human
guuuccuuucuauugccuugau

SEQ ID NO: 70460 - RNA, 22 nt, Human
guuucuaaauguucugaguuuu

SEQ ID NO: 70461 - RNA, 23 nt, Human
guuucuaugucuugugccuucau

SEQ ID NO: 70462 - RNA, 22 nt, Human
guuucucacuuaccaacacaug

SEQ ID NO: 70463 - RNA, 22 nt, Human
guuucucaucaguuucugauau

SEQ ID NO: 70464 - RNA, 22 nt, Human
guuucuccucugugucuuguuu

SEQ ID NO: 70465 - RNA, 22 nt, Human
guuucucugucuguuacauugg

SEQ ID NO: 70466 - RNA, 22 nt, Human
guuucugaagggauuacuuggu

SEQ ID NO: 70467 - RNA, 22 nt, Human
guuugaaaaaagcaguauguaa

SEQ ID NO: 70468 - RNA, 22 nt, Human
guuugaaaguucaacaggaaaa

SEQ ID NO: 70469 - RNA, 22 nt, Human
guuugagauggguuauugcucu

SEQ ID NO: 70470 - RNA, 22 nt, Human
guuugcaaauuguguuaaagcu

SEQ ID NO: 70471 - RNA, 22 nt, Human
guuugcauaaaguggaugcagg

SEQ ID NO: 70472 - RNA, 22 nt, Human
guuugcauaucugugaaaugga

SEQ ID NO: 70473 - RNA, 22 nt, Human
guuugcauggaagacagugagu

SEQ ID NO: 70474 - RNA, 17 nt, Human
guuugcaugguguuaac

SEQ ID NO: 70475 - RNA, 22 nt, Human
guuugcauguauuaagucaaua

SEQ ID NO: 70476 - RNA, 22 nt, Human
guuugccugugauguacauuuc

SEQ ID NO: 70477 - RNA, 22 nt, Human
guuugccuuuuagauaggaaug

SEQ ID NO: 70478 - RNA, 22 nt, Human
guuuggauguguagugagggga

SEQ ID NO: 70479 - RNA, 22 nt, Human
guuuggcaauauuuguggaaca

SEQ ID NO: 70480 - RNA, 18 nt, Human
guuuggcauaacugaugc

SEQ ID NO: 70481 - RNA, 22 nt, Human
guuuggggaguuccuuuaggcc

SEQ ID NO: 70482 - RNA, 22 nt, Human
guuuggugguagcauuggcuau

SEQ ID NO: 70483 - RNA, 22 nt, Human
guuuguaaccagaacagagagu

SEQ ID NO: 70484 - RNA, 22 nt, Human
guuugucuuaauuaggcaucga

SEQ ID NO: 70485 - RNA, 22 nt, Human
guuuguuuuaagauaggaugga

SEQ ID NO: 70486 - RNA, 22 nt, Human
guuuuauaggugaaauauuacu

SEQ ID NO: 70487 - RNA, 22 nt, Human
guuuuauaguucgggaccuguu

SEQ ID NO: 70488 - RNA, 22 nt, Human
guuuuauaugucucugcugaca

SEQ ID NO: 70489 - RNA, 22 nt, Human
guuuucaugucuauugggcaua

SEQ ID NO: 70490 - RNA, 22 nt, Human
guuuuccagguaccuugguauu

SEQ ID NO: 70491 - RNA, 22 nt, Human
guuuucuaggauccccuccaag

SEQ ID NO: 70492 - RNA, 22 nt, Human
guuuugaaucacugcgcuucac

SEQ ID NO: 70493 - RNA, 22 nt, Human
guuuugauauaugcauacauua

SEQ ID NO: 70494 - RNA, 22 nt, Human
guuuuguuuugagucaacucca

SEQ ID NO: 70495 - RNA, 22 nt, Human
guuuuuacagcagcaaaauacu

SEQ ID NO: 70496 - RNA, 22 nt, Human
guuuuuacuaagguugcuaagu

SEQ ID NO: 70497 - RNA, 19 nt, Human
guuuuuaguuucugaacug

SEQ ID NO: 70498 - RNA, 22 nt, Human
guuuuuauuguguaaauguggg

SEQ ID NO: 70499 - RNA, 19 nt, Human
guuuuucccagacgaggca

SEQ ID NO: 70500 - RNA, 22 nt, Human
guuuuucuaaguagcgauauuu

SEQ ID NO: 70501 - RNA, 22 nt, Human
guuuuucugugagcgguaaagg

SEQ ID NO: 70502 - RNA, 22 nt, Human
guuuuuguccauggaggcaaac

SEQ ID NO: 70503 - RNA, 22 nt, Human
guuuuuuggguguauaucuucu

SEQ ID NO: 70504 - RNA, 22 nt, Human
uaaaacacauaaacucucuauu

SEQ ID NO: 70505 - RNA, 22 nt, Human
uaaaaccauaaggcuggaagga

SEQ ID NO: 70506 - RNA, 22 nt, Human
uaaaacugcuugguauggucua

SEQ ID NO: 70507 - RNA, 22 nt, Human
uaaaacuuaacuauccagauua

SEQ ID NO: 70508 - RNA, 22 nt, Human
uaaaacuucucauuuuuauggu

SEQ ID NO: 70509 - RNA, 22 nt, Human
uaaaagacauauaacuguagga

SEQ ID NO: 70510 - RNA, 22 nt, Human
uaaaagagaauggauaacagag

SEQ ID NO: 70511 - RNA, 22 nt, Human
uagaggcagaagaaauugacaa

SEQ ID NO: 70512 - RNA, 22 nt, Human
uagaggccugaaagaaugauca

SEQ ID NO: 70513 - RNA, 22 nt, Human
uagaggcuacuagaggcaccug

SEQ ID NO: 70514 - RNA, 22 nt, Human
uagagguacuccccucaaaguu

SEQ ID NO: 70515 - RNA, 22 nt, Human
uagagguagcaacaggacuaga

SEQ ID NO: 70516 - RNA, 22 nt, Human
uagaggugacacugagaccaua

SEQ ID NO: 70517 - RNA, 22 nt, Human
uagaggugagacuucagugaca

SEQ ID NO: 70518 - RNA, 22 nt, Human
uagaggugagaggaacuuugga

SEQ ID NO: 70519 - RNA, 20 nt, Human
uagaggugggauuuggguuu

SEQ ID NO: 70520 - RNA, 22 nt, Human
uagagguguugacgccaaggua

SEQ ID NO: 70521 - RNA, 22 nt, Human
uagagucuaguguauacaaagu

SEQ ID NO: 70522 - RNA, 22 nt, Human
uagagugguuaacaguuuagaa

SEQ ID NO: 70523 - RNA, 22 nt, Human
uagauaaauuagaaaguuuacu

SEQ ID NO: 70524 - RNA, 20 nt, Human
uagauacccaaugcucauca

SEQ ID NO: 70525 - RNA, 22 nt, Human
uagauauaagguccuuagaaca

SEQ ID NO: 70526 - RNA, 22 nt, Human
uagauaucagaaauagaauuua

SEQ ID NO: 70527 - RNA, 22 nt, Human
uagaucaagaauguccacuugu

SEQ ID NO: 70528 - RNA, 22 nt, Human
uagaucaucagugggcucuuau

SEQ ID NO: 70529 - RNA, 22 nt, Human
uagaucauggaguaaaauggaa

SEQ ID NO: 70530 - RNA, 22 nt, Human
uagauccagcuguuauguuaug

SEQ ID NO: 70531 - RNA, 23 nt, Human
uagauccuauggcugugugcaga

SEQ ID NO: 70532 - RNA, 22 nt, Human
uagauccugagcccuaucuacu

SEQ ID NO: 70533 - RNA, 20 nt, Human
uagauccuggggauuuauug

SEQ ID NO: 70534 - RNA, 22 nt, Human
uagaugaagcaacauguguaau

SEQ ID NO: 70535 - RNA, 22 nt, Human
uagaugaagggguucagcaugg

SEQ ID NO: 70536 - RNA, 22 nt, Human
uagaugauagggccagaauuug

SEQ ID NO: 70537 - RNA, 22 nt, Human
uagaugcugaaacauggaggcg

SEQ ID NO: 70538 - RNA, 22 nt, Human
uagauggcuuucugagguauuu

SEQ ID NO: 70539 - RNA, 22 nt, Human
uagauguaucuucucuuaucgu

SEQ ID NO: 70540 - RNA, 22 nt, Human
uagaugugagcccaggcugcuu

SEQ ID NO: 70541 - RNA, 22 nt, Human
uagauguguugccuggaguugu

SEQ ID NO: 70542 - RNA, 20 nt, Human
uagauguuuccugucauaaa

SEQ ID NO: 70543 - RNA, 18 nt, Human
uagauuaaaauugaauuc

SEQ ID NO: 70544 - RNA, 22 nt, Human
uagauucaaguauucaguuugg

SEQ ID NO: 70545 - RNA, 22 nt, Human
uagauucagauauuuaggacaa

SEQ ID NO: 70546 - RNA, 22 nt, Human
uagauuccucuacaauaaauga

SEQ ID NO: 70547 - RNA, 22 nt, Human
uagauucucccaucaugagaug

SEQ ID NO: 70548 - RNA, 22 nt, Human
uagauucuguaaauaaucaagg

SEQ ID NO: 70549 - RNA, 22 nt, Human
uagauucuucuaggucuuuagc

SEQ ID NO: 70550 - RNA, 22 nt, Human
uagauucuugaaccagugccuc

SEQ ID NO: 70551 - RNA, 22 nt, Human
uagauuuguguuugggaugaga

SEQ ID NO: 70552 - RNA, 22 nt, Human
uagauuuuacuucugucauuac

SEQ ID NO: 70553 - RNA, 22 nt, Human
uagcaaaaaaacuggcaucucc

SEQ ID NO: 70554 - RNA, 22 nt, Human
uagcaaaagcucaacaggaagg

SEQ ID NO: 70555 - RNA, 22 nt, Human
uagcaaagaaccugauacccca

SEQ ID NO: 70556 - RNA, 22 nt, Human
uagcaaagaggagaccuaggca

SEQ ID NO: 70557 - RNA, 21 nt, Human
uagcaaagccagauguauauu

SEQ ID NO: 70558 - RNA, 22 nt, Human
uagcaaagcccuugcuguguaa

SEQ ID NO: 70559 - RNA, 21 nt, Human
uagcaaauggagaguaagaga

SEQ ID NO: 70560 - RNA, 22 nt, Human
uagcaacaagugacuaucuaua

SEQ ID NO: 70561 - RNA, 22 nt, Human
uagcaacagcaauagugguauu

SEQ ID NO: 70562 - RNA, 22 nt, Human
uagcaacugcucuauucuagga

SEQ ID NO: 70563 - RNA, 22 nt, Human
uagcaagaaaacacaagaauua

SEQ ID NO: 70564 - RNA, 22 nt, Human
uagcaagaagcugucacaggug

SEQ ID NO: 70565 - RNA, 22 nt, Human
uagcaagaagggagaugggguu

SEQ ID NO: 70566 - RNA, 22 nt, Human
uagcaagaaguagcucuggauu

SEQ ID NO: 70567 - RNA, 22 nt, Human
uagcaagagugggcuuuguggg

SEQ ID NO: 70568 - RNA, 22 nt, Human
uagcaagaugaugaauuauuca

SEQ ID NO: 70569 - RNA, 22 nt, Human
uagcaagaugucacuccaaguu

SEQ ID NO: 70570 - RNA, 22 nt, Human
uagcaaguaugauacuccauga

SEQ ID NO: 70571 - RNA, 22 nt, Human
uagcaaguguuggugaagaugu

SEQ ID NO: 70572 - RNA, 22 nt, Human
uagcaauguaagauguuaacac

SEQ ID NO: 70573 - RNA, 18 nt, Human
ugaauguuuucuggaccc

SEQ ID NO: 70574 - RNA, 19 nt, Human
ugaauuaaagauuaaaguc

SEQ ID NO: 70575 - RNA, 22 nt, Human
ugaauuaucuuguaauuuugaa

SEQ ID NO: 70576 - RNA, 22 nt, Human
ugaauucauccauuuaugcaag

SEQ ID NO: 70577 - RNA, 22 nt, Human
ugaauucccugcaggcauccuc

SEQ ID NO: 70578 - RNA, 22 nt, Human
ugaauucuggcccucucacuua

SEQ ID NO: 70579 - RNA, 22 nt, Human
ugaauucuuuuagaauucagug

SEQ ID NO: 70580 - RNA, 22 nt, Human
ugaauugagauaggaucagucu

SEQ ID NO: 70581 - RNA, 22 nt, Human
ugaauuuaagcacugauguuaa

SEQ ID NO: 70582 - RNA, 23 nt, Human
ugaauuuuggcauauucugaaau

SEQ ID NO: 70583 - RNA, 22 nt, Human
ugacaaacagggaguuugcuca

SEQ ID NO: 70584 - RNA, 22 nt, Human
ugacaaagaccuucaacaagau

SEQ ID NO: 70585 - RNA, 22 nt, Human
ugacaaauacaauaagaucugu

SEQ ID NO: 70586 - RNA, 22 nt, Human
ugacaaauauuugaagaggcug

SEQ ID NO: 70587 - RNA, 22 nt, Human
ugacaaauguuaauucagugga

SEQ ID NO: 70588 - RNA, 20 nt, Human
ugacaacaaaaugguaauuu

SEQ ID NO: 70589 - RNA, 21 nt, Human
ugacaacagaacugggcaagc

SEQ ID NO: 70590 - RNA, 20 nt, Human
ugacaacaugccuuuugcuu

SEQ ID NO: 70591 - RNA, 22 nt, Human
ugacaagagaccccuccgcagg

SEQ ID NO: 70592 - RNA, 22 nt, Human
ugacaagaggcagaaucagcug

SEQ ID NO: 70593 - RNA, 19 nt, Human
ugacaagauaauagccuug

SEQ ID NO: 70594 - RNA, 22 nt, Human
ugacaagaucacagucaagugu

SEQ ID NO: 70595 - RNA, 22 nt, Human
ugacaaguacauaauuucaugu

SEQ ID NO: 70596 - RNA, 23 nt, Human
ugacaagucucagccaaugcaga

SEQ ID NO: 70597 - RNA, 22 nt, Human
ugacaaugauuagguagcuucu

SEQ ID NO: 70598 - RNA, 22 nt, Human
ugacacaaaggaaagcauaauc

SEQ ID NO: 70599 - RNA, 22 nt, Human
ugacacacagggggauggaguu

SEQ ID NO: 70600 - RNA, 22 nt, Human
ugacacacugccaggcgcucgg

SEQ ID NO: 70601 - RNA, 22 nt, Human
ugacacagaaauuaagcuguca

SEQ ID NO: 70602 - RNA, 22 nt, Human
ugacacagggaaagcggaucca

SEQ ID NO: 70603 - RNA, 22 nt, Human
ugacacagggcaugcagcagaa

SEQ ID NO: 70604 - RNA, 22 nt, Human
ugacacaggggaaggagucugg

SEQ ID NO: 70605 - RNA, 22 nt, Human
ugacacaguagaaagaugauga

SEQ ID NO: 70606 - RNA, 22 nt, Human
ugacacauaccgaaaauauuug

SEQ ID NO: 70607 - RNA, 22 nt, Human
ugacacauuaaaugcucacaaa

SEQ ID NO: 70608 - RNA, 23 nt, Human
ugacacccucauugugugucgca

SEQ ID NO: 70609 - RNA, 22 nt, Human
ugacaccuugcuaaauggcacc

SEQ ID NO: 70610 - RNA, 22 nt, Human
ugacacuucugaaacggaaguu

SEQ ID NO: 70611 - RNA, 22 nt, Human
ugacacuugggcuuugagaggu

SEQ ID NO: 70612 - RNA, 22 nt, Human
ugacagacacaccuuaggaaag

SEQ ID NO: 70613 - RNA, 17 nt, Human
ugacagacaucaugagc

SEQ ID NO: 70614 - RNA, 22 nt, Human
ugacagagacagauugaagcuu

SEQ ID NO: 70615 - RNA, 22 nt, Human
ugacagagagaugggaaagggc

SEQ ID NO: 70616 - RNA, 22 nt, Human
ugacagagagguaaguuaugaa

SEQ ID NO: 70617 - RNA, 23 nt, Human
ugacagagcaagacuuggucuca

SEQ ID NO: 70618 - RNA, 22 nt, Human
ugacagagcaagaucuagauaa

SEQ ID NO: 70619 - RNA, 22 nt, Human
ugacagagcuggagaauaauuu

SEQ ID NO: 70620 - RNA, 22 nt, Human
augaugaaauuuucuaucaugu

SEQ ID NO: 70621 - RNA, 22 nt, Human
augauggaggccgugauggacg

SEQ ID NO: 70622 - RNA, 22 nt, Human
augaugguaaauucaguauccg

SEQ ID NO: 70623 - RNA, 22 nt, Human
augauggugagguugagcacag

SEQ ID NO: 70624 - RNA, 22 nt, Human
augauguaaggguaauugucua

SEQ ID NO: 70625 - RNA, 22 nt, Human
augauguacagaaaguuggcgg

SEQ ID NO: 70626 - RNA, 22 nt, Human
augauguaugacuguguucaaa

SEQ ID NO: 70627 - RNA, 22 nt, Human
augaugucaugaauauauuagu

SEQ ID NO: 70628 - RNA, 22 nt, Human
augaugucuaucuuuguaguau

SEQ ID NO: 70629 - RNA, 22 nt, Human
augauguugguuuaauuugagu

SEQ ID NO: 70630 - RNA, 17 nt, Human
augauuacaucuuuccu

SEQ ID NO: 70631 - RNA, 22 nt, Human
augauucagcaauuuuauaucu

SEQ ID NO: 70632 - RNA, 22 nt, Human
augauucagggaguuuucagga

SEQ ID NO: 70633 - RNA, 20 nt, Human
augauucaugaugaugucuc

SEQ ID NO: 70634 - RNA, 22 nt, Human
augauucuaaacuuaaggggga

SEQ ID NO: 70635 - RNA, 22 nt, Human
augauucuaggcauugaagaua

SEQ ID NO: 70636 - RNA, 22 nt, Human
augauucucauuuuauaaacuu

SEQ ID NO: 70637 - RNA, 21 nt, Human
augauucugcaaaugaguagu

SEQ ID NO: 70638 - RNA, 22 nt, Human
augauucuggggcaaaagcugg

SEQ ID NO: 70639 - RNA, 22 nt, Human
augauucuggugagaaugagga

SEQ ID NO: 70640 - RNA, 22 nt, Human
augauucuuuuggauagaugau

SEQ ID NO: 70641 - RNA, 22 nt, Human
augauugaccaucugcugggcu

SEQ ID NO: 70642 - RNA, 22 nt, Human
augauuuccaguuguugcuaag

SEQ ID NO: 70643 - RNA, 20 nt, Human
augauuuugcacuaacuuca

SEQ ID NO: 70644 - RNA, 22 nt, Human
augauuuuucagcagaggaucu

SEQ ID NO: 70645 - RNA, 22 nt, Human
augcaaaaacugcacuuacgcu

SEQ ID NO: 70646 - RNA, 22 nt, Human
augcaaaaguaauugcaauuuu

SEQ ID NO: 70647 - RNA, 22 nt, Human
augcaaacaugaagagaaagag

SEQ ID NO: 70648 - RNA, 22 nt, Human
augcaaagcacacacagaaucc

SEQ ID NO: 70649 - RNA, 23 nt, Human
augcaaagugcugucauguagac

SEQ ID NO: 70650 - RNA, 22 nt, Human
augcaaauauuaaugguaugac

SEQ ID NO: 70651 - RNA, 22 nt, Human
augcaaaucuuaaguaugugug

SEQ ID NO: 70652 - RNA, 22 nt, Human
augcaaaugaacauguugcuag

SEQ ID NO: 70653 - RNA, 22 nt, Human
augcaaauggcaaugagugacc

SEQ ID NO: 70654 - RNA, 19 nt, Human
augcaacaaaaguguaaga

SEQ ID NO: 70655 - RNA, 22 nt, Human
augcaacaaaugcuacgaaucg

SEQ ID NO: 70656 - RNA, 22 nt, Human
augcaacaauguauuuauguau

SEQ ID NO: 70657 - RNA, 22 nt, Human
augcaacagcugggaauaugua

SEQ ID NO: 70658 - RNA, 22 nt, Human
augcaacaggguugggaggcgg

SEQ ID NO: 70659 - RNA, 22 nt, Human
augcaacagucaguacauccgg

SEQ ID NO: 70660 - RNA, 22 nt, Human
augcaacaguucauaguuuuau

SEQ ID NO: 70661 - RNA, 23 nt, Human
augcaacauugccaguaugggca

SEQ ID NO: 70662 - RNA, 22 nt, Human
augcaacuacccccaggauuuu

SEQ ID NO: 70663 - RNA, 22 nt, Human
augcaagacauaaauaaucuuu

SEQ ID NO: 70664 - RNA, 22 nt, Human
augcaagacccagaaaucauua

SEQ ID NO: 70665 - RNA, 22 nt, Human
augcaagcaaucugagcuuugg

SEQ ID NO: 70666 - RNA, 22 nt, Human
augcaaggacauguaaugaugu

SEQ ID NO: 70667 - RNA, 22 nt, Human
augcaaggguugccuuuccagc

SEQ ID NO: 70668 - RNA, 22 nt, Human
augcaagucuuaauaguuuagg

SEQ ID NO: 70669 - RNA, 22 nt, Human
augcaauauagggaagauagau

SEQ ID NO: 70670 - RNA, 22 nt, Human
augcaaucauauggcauacagc

SEQ ID NO: 70671 - RNA, 22 nt, Human
augcaauguuccuuucuucacc

SEQ ID NO: 70672 - RNA, 22 nt, Human
augcacaagaggcuagaaaaga

SEQ ID NO: 70673 - RNA, 22 nt, Human
augcacaauuaggauauagcuu

SEQ ID NO: 70674 - RNA, 22 nt, Human
augcacacugaaugcuuacuuu

SEQ ID NO: 70675 - RNA, 22 nt, Human
augcacacugggauucaacugg

SEQ ID NO: 70676 - RNA, 22 nt, Human
augcacagaacaauuuuaagag

SEQ ID NO: 70677 - RNA, 22 nt, Human
augcacagacccaaaggccauc

SEQ ID NO: 70678 - RNA, 22 nt, Human
augcacaggaaguguccccauu

SEQ ID NO: 70679 - RNA, 22 nt, Human
augcacaggugcugaugcacgc

SEQ ID NO: 70680 - RNA, 22 nt, Human
augcacauacauaugcucuaua

SEQ ID NO: 70681 - RNA, 22 nt, Human
augcacauaggccaaaucauuu

SEQ ID NO: 70682 - RNA, 22 nt, Human
augcacaugaggcaagcaaaau

SEQ ID NO: 70683 - RNA, 22 nt, Human
augcaccacagauaucugcgua

SEQ ID NO: 70684 - RNA, 22 nt, Human
augcacuaugaugagcuagucu

SEQ ID NO: 70685 - RNA, 22 nt, Human
augcacuuucuagagauucuga

SEQ ID NO: 70686 - RNA, 22 nt, Human
augcacuuuguaaucuguucaa

SEQ ID NO: 70687 - RNA, 22 nt, Human
augggcugaggugggauagaag

SEQ ID NO: 70688 - RNA, 22 nt, Human
augggcugggaauacacagggg

SEQ ID NO: 70689 - RNA, 22 nt, Human
augggcugggaucugaguguca

SEQ ID NO: 70690 - RNA, 23 nt, Human
auggggcucaacacuuaguagcu

SEQ ID NO: 70691 - RNA, 22 nt, Human
auggggcucugcggcugcuccc

SEQ ID NO: 70692 - RNA, 22 nt, Human
augggggaaaguacgagcaugg

SEQ ID NO: 70693 - RNA, 22 nt, Human
auggggggaugaaggaguccaa

SEQ ID NO: 70694 - RNA, 22 nt, Human
auggggugcaugcagauuggga

SEQ ID NO: 70695 - RNA, 22 nt, Human
auggguaaagcaggaagagagu

SEQ ID NO: 70696 - RNA, 22 nt, Human
auggguaggauuuacucagaug

SEQ ID NO: 70697 - RNA, 22 nt, Human
augggucaguucaguggccaac

SEQ ID NO: 70698 - RNA, 22 nt, Human
auggguggagggugacacggau

SEQ ID NO: 70699 - RNA, 22 nt, Human
auggguuuauagguggacuuuu

SEQ ID NO: 70700 - RNA, 22 nt, Human
auggguuucccucugaaauuau

SEQ ID NO: 70701 - RNA, 22 nt, Human
augguaaacauuuaacaacuag

SEQ ID NO: 70702 - RNA, 22 nt, Human
augguacaaaauguauaaaguc

SEQ ID NO: 70703 - RNA, 22 nt, Human
augguacuggggucccggaguu

SEQ ID NO: 70704 - RNA, 21 nt, Human
augguagguggagcaggugau

SEQ ID NO: 70705 - RNA, 22 nt, Human
augguauuggaguaggacuugc

SEQ ID NO: 70706 - RNA, 22 nt, Human
auggucaagauccucuaguuua

SEQ ID NO: 70707 - RNA, 22 nt, Human
auggucaggcaaggagggcugg

SEQ ID NO: 70708 - RNA, 22 nt, Human
auggucugaaugugugcuccaa

SEQ ID NO: 70709 - RNA, 22 nt, Human
auggugaagcuucauggguguu

SEQ ID NO: 70710 - RNA, 22 nt, Human
augguguuuauaggcaaagauc

SEQ ID NO: 70711 - RNA, 20 nt, Human
augguucaggccagcugucu

SEQ ID NO: 70712 - RNA, 22 nt, Human
augguuuaaagaguaugacuuu

SEQ ID NO: 70713 - RNA, 22 nt, Human
augguuuacaauguuuucaguu

SEQ ID NO: 70714 - RNA, 22 nt, Human
augguuuauugcuuuaaugaaa

SEQ ID NO: 70715 - RNA, 22 nt, Human
augguuuguaacccaauacucc

SEQ ID NO: 70716 - RNA, 22 nt, Human
augguuuguguggcccagauga

SEQ ID NO: 70717 - RNA, 22 nt, Human
augguuuugaagggaggucaaa

SEQ ID NO: 70718 - RNA, 22 nt, Human
augguuuuguccucuuugguuc

SEQ ID NO: 70719 - RNA, 22 nt, Human
augguuuuucaaguauucagaa

SEQ ID NO: 70720 - RNA, 20 nt, Human
auguaaaauuauaaggcuga

SEQ ID NO: 70721 - RNA, 22 nt, Human
auguaaacaagguuauugucca

SEQ ID NO: 70722 - RNA, 22 nt, Human
auguaaacuacugacuacacua

SEQ ID NO: 70723 - RNA, 23 nt, Human
auguaaacuucagagucauugcc

SEQ ID NO: 70724 - RNA, 22 nt, Human
auguaaagggcaugguauuggg

SEQ ID NO: 70725 - RNA, 22 nt, Human
auguaaaguaucugaaaugcug

SEQ ID NO: 70726 - RNA, 22 nt, Human
auguaacugaaggaaaugcaug

SEQ ID NO: 70727 - RNA, 22 nt, Human
auguaacuguuauauuuuguug

SEQ ID NO: 70728 - RNA, 22 nt, Human
auguaacuucugugaaucugac

SEQ ID NO: 70729 - RNA, 17 nt, Human
cagcucuuccucccucu

SEQ ID NO: 70730 - RNA, 22 nt, Human
cagcucuuggagaaaccagagc

SEQ ID NO: 70731 - RNA, 22 nt, Human
cagcucuuuacucugcaaugau

SEQ ID NO: 70732 - RNA, 22 nt, Human
cagcucuuuauugccaauauuc

SEQ ID NO: 70733 - RNA, 22 nt, Human
cagcugaaccuuucccuggagc

SEQ ID NO: 70734 - RNA, 23 nt, Human
cagcugaagcagccugggcugga

SEQ ID NO: 70735 - RNA, 22 nt, Human
cagcugaagcccaggcagaacc

SEQ ID NO: 70736 - RNA, 22 nt, Human
cagcugaaucagugaguggaaa

SEQ ID NO: 70737 - RNA, 22 nt, Human
cagcugacccgugggaggcggg

SEQ ID NO: 70738 - RNA, 22 nt, Human
cagcugagaaauggggaaaggg

SEQ ID NO: 70739 - RNA, 22 nt, Human
cagcugagagacaaugagucau

SEQ ID NO: 70740 - RNA, 22 nt, Human
cagcugaguuuccaagucugcc

SEQ ID NO: 70741 - RNA, 22 nt, Human
cagcugcaggaacaaaaaugug

SEQ ID NO: 70742 - RNA, 22 nt, Human
cagcugcaggagaaacagaggc

SEQ ID NO: 70743 - RNA, 22 nt, Human
cagcugcaggagcugagcacuu

SEQ ID NO: 70744 - RNA, 22 nt, Human
cagcugcaggcugugcaggaag

SEQ ID NO: 70745 - RNA, 22 nt, Human
cagcugcagugggggaccacaa

SEQ ID NO: 70746 - RNA, 22 nt, Human
cagcugcauuaauuuuagugaa

SEQ ID NO: 70747 - RNA, 22 nt, Human
cagcugccaugacauguccugc

SEQ ID NO: 70748 - RNA, 22 nt, Human
cagcugccccuccagggcuggg

SEQ ID NO: 70749 - RNA, 19 nt, Human
cagcugccuuuucuuugca

SEQ ID NO: 70750 - RNA, 22 nt, Human
cagcugcucuucuggccuguca

SEQ ID NO: 70751 - RNA, 22 nt, Human
cagcugcuuucagcaggaggga

SEQ ID NO: 70752 - RNA, 22 nt, Human
cagcuggacugggauguagcga

SEQ ID NO: 70753 - RNA, 22 nt, Human
cagcuggaucugccucgagcca

SEQ ID NO: 70754 - RNA, 22 nt, Human
cagcuggcagaaccugcaucca

SEQ ID NO: 70755 - RNA, 22 nt, Human
cagcuggccugagcgguggcgg

SEQ ID NO: 70756 - RNA, 22 nt, Human
cagcuggcgacucuccucgaug

SEQ ID NO: 70757 - RNA, 22 nt, Human
cagcuggcugcaugaugccaaa

SEQ ID NO: 70758 - RNA, 22 nt, Human
cagcugguagguagcagauuug

SEQ ID NO: 70759 - RNA, 22 nt, Human
cagcuggucaacugaaugaaca

SEQ ID NO: 70760 - RNA, 22 nt, Human
cagcuggugaacuaguuuuuca

SEQ ID NO: 70761 - RNA, 22 nt, Human
cagcugguuuuagcacaguuag

SEQ ID NO: 70762 - RNA, 22 nt, Human
cagcugucacuucuaaguuuug

SEQ ID NO: 70763 - RNA, 22 nt, Human
cagcugucagccggugcaggcu

SEQ ID NO: 70764 - RNA, 22 nt, Human
cagcuguccuuccuggugggcg

SEQ ID NO: 70765 - RNA, 22 nt, Human
cagcugugagagugcauugaag

SEQ ID NO: 70766 - RNA, 22 nt, Human
cagcugugagcagccaguugcc

SEQ ID NO: 70767 - RNA, 22 nt, Human
cagcugugauuccugcugucca

SEQ ID NO: 70768 - RNA, 22 nt, Human
cagcugugcugauugcucagua

SEQ ID NO: 70769 - RNA, 22 nt, Human
cagcugugcuguauuaagcucu

SEQ ID NO: 70770 - RNA, 22 nt, Human
cagcuguggagauggggugcau

SEQ ID NO: 70771 - RNA, 22 nt, Human
cagcuguggcugccacugcucc

SEQ ID NO: 70772 - RNA, 22 nt, Human
cagcugugucuaauuauggcug

SEQ ID NO: 70773 - RNA, 22 nt, Human
cagcuguuacucugaguaaaug

SEQ ID NO: 70774 - RNA, 22 nt, Human
cagcuguuaugagguguacaug

SEQ ID NO: 70775 - RNA, 22 nt, Human
cagcuguuccuggaaggagacc

SEQ ID NO: 70776 - RNA, 22 nt, Human
cagcuguucuugggacagacag

SEQ ID NO: 70777 - RNA, 22 nt, Human
cagcuguugucucucacauauu

SEQ ID NO: 70778 - RNA, 22 nt, Human
cagcuguugugauuuccaggag

SEQ ID NO: 70779 - RNA, 20 nt, Human
cagcuucaaugucagcuuga

SEQ ID NO: 70780 - RNA, 22 nt, Human
cagcuucagggacagcuucuuu

SEQ ID NO: 70781 - RNA, 22 nt, Human
cagcuuccauaagagauggaga

SEQ ID NO: 70782 - RNA, 22 nt, Human
cagcuuccaucuccacugcccu

SEQ ID NO: 70783 - RNA, 22 nt, Human
cagcuuccccccgggcuugaga

SEQ ID NO: 70784 - RNA, 22 nt, Human
cagcuucuaccaucaggaaauu

SEQ ID NO: 70785 - RNA, 22 nt, Human
cagcuucuccagaugacccuca

SEQ ID NO: 70786 - RNA, 21 nt, Human
cagcuucugaagguguaggaa

SEQ ID NO: 70787 - RNA, 22 nt, Human
cagcuucugcucauggaggggu

SEQ ID NO: 70788 - RNA, 22 nt, Human
cagcuuguuaccgagggagggu

SEQ ID NO: 70789 - RNA, 20 nt, Human
cagcuuuagaucuuugauua

SEQ ID NO: 70790 - RNA, 22 nt, Human
cagcuuucuaccuuaggcagug

SEQ ID NO: 70791 - RNA, 22 nt, Human
cagcuuucugucucaugacuga

SEQ ID NO: 70792 - RNA, 22 nt, Human
cagcuuugagaguugcauuuua

SEQ ID NO: 70793 - RNA, 22 nt, Human
cagcuuugccaaguaaggucuu

SEQ ID NO: 70794 - RNA, 16 nt, Human
cagcuuugucuccucg

SEQ ID NO: 70795 - RNA, 22 nt, Human
cagcuuuguggccuugaccucg

SEQ ID NO: 70796 - RNA, 22 nt, Human
caggaaaaaugccaggagucag

SEQ ID NO: 70797 - RNA, 21 nt, Human
caggaaaagcggaagucuagc

SEQ ID NO: 70798 - RNA, 17 nt, Human
caggaaaauaugaguga

SEQ ID NO: 70799 - RNA, 22 nt, Human
caggaaaaucugcccacacaag

SEQ ID NO: 70800 - RNA, 22 nt, Human
caggaaaauggaaucaccugua

SEQ ID NO: 70801 - RNA, 22 nt, Human
caggaaacauaugugcuugagg

SEQ ID NO: 70802 - RNA, 22 nt, Human
caggaaacauucuugguaagga

SEQ ID NO: 70803 - RNA, 22 nt, Human
caggaaaccgcaucccaguggg

SEQ ID NO: 70804 - RNA, 20 nt, Human
augucugaaguaauccauuu

SEQ ID NO: 70805 - RNA, 22 nt, Human
augucugcguuauaucaauauc

SEQ ID NO: 70806 - RNA, 22 nt, Human
augucugguggucgaugcuaca

SEQ ID NO: 70807 - RNA, 22 nt, Human
augucuguccccuagcccugau

SEQ ID NO: 70808 - RNA, 22 nt, Human
augucugucuauagccaugaga

SEQ ID NO: 70809 - RNA, 18 nt, Human
augucugugcacuggaua

SEQ ID NO: 70810 - RNA, 22 nt, Human
augucuguggcauuauauguuu

SEQ ID NO: 70811 - RNA, 21 nt, Human
augucuguucugauuggugcg

SEQ ID NO: 70812 - RNA, 22 nt, Human
augucuguuuauccuucaagau

SEQ ID NO: 70813 - RNA, 22 nt, Human
augucuucauagcuuauaucca

SEQ ID NO: 70814 - RNA, 22 nt, Human
augucuucuaagcucuaagcug

SEQ ID NO: 70815 - RNA, 22 nt, Human
augucuucuguggagacaggua

SEQ ID NO: 70816 - RNA, 22 nt, Human
augucuugauauuuuacuguuu

SEQ ID NO: 70817 - RNA, 21 nt, Human
augugaaaccuuccacgcuga

SEQ ID NO: 70818 - RNA, 20 nt, Human
augugaaagaucaguugucu

SEQ ID NO: 70819 - RNA, 20 nt, Human
augugaaguaggaagggugu

SEQ ID NO: 70820 - RNA, 22 nt, Human
augugacuccaggcaguuuugu

SEQ ID NO: 70821 - RNA, 18 nt, Human
augugagagaaucuucuu

SEQ ID NO: 70822 - RNA, 22 nt, Human
augugagcagggagaugcugcc

SEQ ID NO: 70823 - RNA, 22 nt, Human
augugagcaggugcuggcugcu

SEQ ID NO: 70824 - RNA, 22 nt, Human
augugaggcagcacggagauua

SEQ ID NO: 70825 - RNA, 22 nt, Human
augugcaaagggacuugcacau

SEQ ID NO: 70826 - RNA, 22 nt, Human
augugcaauggugucaccacau

SEQ ID NO: 70827 - RNA, 23 nt, Human
augugcacaucuccuuguccacc

SEQ ID NO: 70828 - RNA, 22 nt, Human
augugcagaggcuuccuugacu

SEQ ID NO: 70829 - RNA, 21 nt, Human
augugcagcaagcagcaugcu

SEQ ID NO: 70830 - RNA, 22 nt, Human
augugcaguugguggccaggag

SEQ ID NO: 70831 - RNA, 22 nt, Human
augugcauaaacauauuguugg

SEQ ID NO: 70832 - RNA, 22 nt, Human
augugcaugugcacacaugcgu

SEQ ID NO: 70833 - RNA, 22 nt, Human
augugcucuuauuacccugucg

SEQ ID NO: 70834 - RNA, 22 nt, Human
augugcuugagggaaaucaguu

SEQ ID NO: 70835 - RNA, 22 nt, Human
augugcuuggacauucuaggaa

SEQ ID NO: 70836 - RNA, 22 nt, Human
augugcuuuccaaugcuguagg

SEQ ID NO: 70837 - RNA, 22 nt, Human
auguggaaugaacaaaggaggc

SEQ ID NO: 70838 - RNA, 21 nt, Human
cagggcuagagagaaugacaa

SEQ ID NO: 70839 - RNA, 22 nt, Human
cagggcuagggagcccuccugg

SEQ ID NO: 70840 - RNA, 22 nt, Human
cagggcucagaagacagaccuc

SEQ ID NO: 70841 - RNA, 22 nt, Human
cagggcucaggaaaucagacgu

SEQ ID NO: 70842 - RNA, 22 nt, Human
cagggcucccugcagccucugu

SEQ ID NO: 70843 - RNA, 22 nt, Human
cagggcucugccuugagggaug

SEQ ID NO: 70844 - RNA, 20 nt, Human
cagggcucugggccuggccu

SEQ ID NO: 70845 - RNA, 22 nt, Human
cagggcugagaauuuagagaca

SEQ ID NO: 70846 - RNA, 22 nt, Human
cagggcuggcucaugaaaaguu

SEQ ID NO: 70847 - RNA, 22 nt, Human
cagggcuggcuguggcaaucuc

SEQ ID NO: 70848 - RNA, 22 nt, Human
cagggcuggguuaaaagcaggg

SEQ ID NO: 70849 - RNA, 23 nt, Human
cagggcugguagggaagagcgug

SEQ ID NO: 70850 - RNA, 22 nt, Human
cagggcuguggaaaacuggugc

SEQ ID NO: 70851 - RNA, 22 nt, Human
cagggcuguggcuuugugcugu

SEQ ID NO: 70852 - RNA, 22 nt, Human
cagggcuucgcuccuggugcac

SEQ ID NO: 70853 - RNA, 22 nt, Human
cagggcuucuuggcauuugcug

SEQ ID NO: 70854 - RNA, 22 nt, Human
cagggcuugccuugccccggcg

SEQ ID NO: 70855 - RNA, 22 nt, Human
cagggcuuuguaauaugagcac

SEQ ID NO: 70856 - RNA, 22 nt, Human
cagggcuuuuuauuagcugccu

SEQ ID NO: 70857 - RNA, 22 nt, Human
caggggacacuccugcuugggc

SEQ ID NO: 70858 - RNA, 22 nt, Human
caggggcgguggcucacgccug

SEQ ID NO: 70859 - RNA, 22 nt, Human
caggggcuagcacuuaauguuu

SEQ ID NO: 70860 - RNA, 22 nt, Human
cagggggcagcguagaaaauga

SEQ ID NO: 70861 - RNA, 22 nt, Human
caggggggcaggagucauugau

SEQ ID NO: 70862 - RNA, 22 nt, Human
caggguacagaguuuucuaaac

SEQ ID NO: 70863 - RNA, 22 nt, Human
cagggucaccagagaucugcau

SEQ ID NO: 70864 - RNA, 22 nt, Human
cagggucaggaggaucuggcuu

SEQ ID NO: 70865 - RNA, 22 nt, Human
cagggucaggcugcuagaagcu

SEQ ID NO: 70866 - RNA, 22 nt, Human
caggguccaucuuucaucacug

SEQ ID NO: 70867 - RNA, 22 nt, Human
cagggugacaaguggcaaggag

SEQ ID NO: 70868 - RNA, 22 nt, Human
cagggugagccucuggagcccu

SEQ ID NO: 70869 - RNA, 22 nt, Human
cagggugcauacccaugcauac

SEQ ID NO: 70870 - RNA, 22 nt, Human
cagggugccucccgcucgccgg

SEQ ID NO: 70871 - RNA, 22 nt, Human
caggguggaagcuguagagugg

SEQ ID NO: 70872 - RNA, 22 nt, Human
caggguggaauggaaugcuggc

SEQ ID NO: 70873 - RNA, 22 nt, Human
caggguggcaggcaccauggcc

SEQ ID NO: 70874 - RNA, 22 nt, Human
caggguggccagguagauaaua

SEQ ID NO: 70875 - RNA, 22 nt, Human
cagggugguaccagcaucuagu

SEQ ID NO: 70876 - RNA, 22 nt, Human
caggguggugaauagcuauagu

SEQ ID NO: 70877 - RNA, 22 nt, Human
cagggugugaacaguguaaaac

SEQ ID NO: 70878 - RNA, 22 nt, Human
caggguucuggaauauaaugug

SEQ ID NO: 70879 - RNA, 22 nt, Human
caggguuucuguugagaagucc

SEQ ID NO: 70880 - RNA, 22 nt, Human
cagguaaaaauaaauuugugag

SEQ ID NO: 70881 - RNA, 19 nt, Human
cagguaacauaugcacaaa

SEQ ID NO: 70882 - RNA, 22 nt, Human
cagguaacaugauaaaacuuac

SEQ ID NO: 70883 - RNA, 22 nt, Human
cagguaagaccguuuaggcagu

SEQ ID NO: 70884 - RNA, 22 nt, Human
cagguacacucccuugugcuga

SEQ ID NO: 70885 - RNA, 22 nt, Human
cagguacauucguagacccauu

SEQ ID NO: 70886 - RNA, 22 nt, Human
cagguaggaaaagggugucagg

SEQ ID NO: 70887 - RNA, 22 nt, Human
cagguaggaggcucccuagucc

SEQ ID NO: 70888 - RNA, 22 nt, Human
cagguaggcagccggucucugg

SEQ ID NO: 70889 - RNA, 22 nt, Human
cagguaggggagagcuccaaca

SEQ ID NO: 70890 - RNA, 22 nt, Human
cagguaugaggacacugacagc

SEQ ID NO: 70891 - RNA, 22 nt, Human
cagguauucauagaauucagag

SEQ ID NO: 70892 - RNA, 17 nt, Human
cagguauuuaggcauug

SEQ ID NO: 70893 - RNA, 22 nt, Human
caggucagaggcgcagccccca

SEQ ID NO: 70894 - RNA, 22 nt, Human
caggucagagucccccuguccu

SEQ ID NO: 70895 - RNA, 22 nt, Human
caggucagcacuuggaggugca

SEQ ID NO: 70896 - RNA, 22 nt, Human
cagguccaccaugccucaagcc

SEQ ID NO: 70897 - RNA, 22 nt, Human
cagguccagaaaccaaaggauu

SEQ ID NO: 70898 - RNA, 22 nt, Human
cagguccccuccccuaccaggc

SEQ ID NO: 70899 - RNA, 22 nt, Human
cagguccuuuaguguccagaac

SEQ ID NO: 70900 - RNA, 22 nt, Human
caggucgccagcaggaacguca

SEQ ID NO: 70901 - RNA, 22 nt, Human
caggucucucccaagcuacaau

SEQ ID NO: 70902 - RNA, 22 nt, Human
caggucuggcaucagcugugug

SEQ ID NO: 70903 - RNA, 20 nt, Human
caggucuucauguggcuguc

SEQ ID NO: 70904 - RNA, 22 nt, Human
caggucuucuucagcacuugga

SEQ ID NO: 70905 - RNA, 19 nt, Human
caggucuucuuggaggacu

SEQ ID NO: 70906 - RNA, 22 nt, Human
caggucuuuguugcagcaugga

SEQ ID NO: 70907 - RNA, 22 nt, Human
caggugaacccagucuaaucau

SEQ ID NO: 70908 - RNA, 22 nt, Human
caggugaccuauggucacuaca

SEQ ID NO: 70909 - RNA, 20 nt, Human
caggugagcagaucugggug

SEQ ID NO: 70910 - RNA, 22 nt, Human
caggugagcucuaucuagggag

SEQ ID NO: 70911 - RNA, 22 nt, Human
caggugaggcugaacagaugaa

SEQ ID NO: 70912 - RNA, 22 nt, Human
caggugaguaacaaugggugau

SEQ ID NO: 70913 - RNA, 22 nt, Human
caggugcagcuggauggaagcc

SEQ ID NO: 70914 - RNA, 22 nt, Human
caggugcccagcuccugcugug

SEQ ID NO: 70915 - RNA, 22 nt, Human
caggugcuguccugcacauguc

SEQ ID NO: 70916 - RNA, 22 nt, Human
caggugcugugaaucuucauaa

SEQ ID NO: 70917 - RNA, 22 nt, Human
cagguggagcugacugagggca

SEQ ID NO: 70918 - RNA, 22 nt, Human
cagguggaucucuaaggacuga

SEQ ID NO: 70919 - RNA, 22 nt, Human
cagguggcauugucccgccagc

SEQ ID NO: 70920 - RNA, 22 nt, Human
cagguggccaguacucaaggau

SEQ ID NO: 70921 - RNA, 22 nt, Human
cagguggcuaacggccucauag

SEQ ID NO: 70922 - RNA, 23 nt, Human
cagguggcuccacgagggguggg

SEQ ID NO: 70923 - RNA, 22 nt, Human
cagguggcuucucccuaggcca

SEQ ID NO: 70924 - RNA, 22 nt, Human
caggugggagcggagacugauu

SEQ ID NO: 70925 - RNA, 22 nt, Human
caggugggauuuugcugcuuga

SEQ ID NO: 70926 - RNA, 22 nt, Human
caggugggccgggguuuguucu

SEQ ID NO: 70927 - RNA, 22 nt, Human
caggugggcguggcgagaaggc

SEQ ID NO: 70928 - RNA, 22 nt, Human
cagguggggcagcugugggagc

SEQ ID NO: 70929 - RNA, 22 nt, Human
cagguggguacaucacagagac

SEQ ID NO: 70930 - RNA, 19 nt, Human
caggugguaaucugagccu

SEQ ID NO: 70931 - RNA, 22 nt, Human
cagguggugccuccucccuucc

SEQ ID NO: 70932 - RNA, 22 nt, Human
caggugguuaugaggaagguga

SEQ ID NO: 70933 - RNA, 20 nt, Human
cagguguacagugagcugag

SEQ ID NO: 70934 - RNA, 22 nt, Human
caggugucaaaauacuaagugg

SEQ ID NO: 70935 - RNA, 16 nt, Human
caggugucagucaccu

SEQ ID NO: 70936 - RNA, 22 nt, Human
caggugugccgggagcaguuug

SEQ ID NO: 70937 - RNA, 22 nt, Human
cagguguugauacuaaucgugg

SEQ ID NO: 70938 - RNA, 22 nt, Human
cagguguuggaagggcaguggg

SEQ ID NO: 70939 - RNA, 22 nt, Human
auuacuccuuuucuagcaggug

SEQ ID NO: 70940 - RNA, 22 nt, Human
auuacuuucagaugugcuguaa

SEQ ID NO: 70941 - RNA, 22 nt, Human
auuagaaaaucuggaggugggg

SEQ ID NO: 70942 - RNA, 22 nt, Human
auuagaacuaggcuaaguaaaa

SEQ ID NO: 70943 - RNA, 22 nt, Human
auuagaagaggcugacgaaugu

SEQ ID NO: 70944 - RNA, 22 nt, Human
auuagaagcgugaauccuuuca

SEQ ID NO: 70945 - RNA, 22 nt, Human
auuagagauuaugaauuccuag

SEQ ID NO: 70946 - RNA, 20 nt, Human
auuagagcuacauggcuaca

SEQ ID NO: 70947 - RNA, 22 nt, Human
cagugcugagagccuggccagg

SEQ ID NO: 70948 - RNA, 17 nt, Human
cagugcuucugcuucuu

SEQ ID NO: 70949 - RNA, 22 nt, Human
cagugcuuggggagcggagaga

SEQ ID NO: 70950 - RNA, 22 nt, Human
cagugcuuugggaggcugagga

SEQ ID NO: 70951 - RNA, 22 nt, Human
cagugcuuuucaaaguucuaug

SEQ ID NO: 70952 - RNA, 22 nt, Human
caguggagagacuuuuacucuu

SEQ ID NO: 70953 - RNA, 22 nt, Human
caguggaggcucaagugugcuu

SEQ ID NO: 70954 - RNA, 22 nt, Human
caguggcaagaacaguaauaau

SEQ ID NO: 70955 - RNA, 22 nt, Human
caguggcaaguccgguauugaa

SEQ ID NO: 70956 - RNA, 22 nt, Human
caguggcagagccguugccauc

SEQ ID NO: 70957 - RNA, 22 nt, Human
caguggccaacuuccugccucu

SEQ ID NO: 70958 - RNA, 22 nt, Human
caguggccaugguggcaggggu

SEQ ID NO: 70959 - RNA, 22 nt, Human
caguggccuugaugccucauuc

SEQ ID NO: 70960 - RNA, 22 nt, Human
caguggcucaugccuauaaucc

SEQ ID NO: 70961 - RNA, 22 nt, Human
caguggcuuaaauaagauuagg

SEQ ID NO: 70962 - RNA, 22 nt, Human
cagugggaaagugaagagcauu

SEQ ID NO: 70963 - RNA, 22 nt, Human
cagugggaagaaugcagccucc

SEQ ID NO: 70964 - RNA, 22 nt, Human
cagugggaagggcagaggcuuu

SEQ ID NO: 70965 - RNA, 22 nt, Human
cagugggaaugaaguggaggcc

SEQ ID NO: 70966 - RNA, 22 nt, Human
cagugggagcaaauacacucau

SEQ ID NO: 70967 - RNA, 22 nt, Human
cagugggcugugauggauucac

SEQ ID NO: 70968 - RNA, 22 nt, Human
caguggggggacugaggccuga

SEQ ID NO: 70969 - RNA, 22 nt, Human
cagugggggggccaugcugcag

SEQ ID NO: 70970 - RNA, 22 nt, Human
cagugggggugaggccgaggua

SEQ ID NO: 70971 - RNA, 22 nt, Human
caguggguaguggggauuagca

SEQ ID NO: 70972 - RNA, 22 nt, Human
caguggguccugcgucugccag

SEQ ID NO: 70973 - RNA, 22 nt, Human
cagugggugaaagauggcuaag

SEQ ID NO: 70974 - RNA, 22 nt, Human
cagugguauuugagagaaugga

SEQ ID NO: 70975 - RNA, 23 nt, Human
caguggucagaacgugggagggu

SEQ ID NO: 70976 - RNA, 22 nt, Human
caguggucccugagguugcugg

SEQ ID NO: 70977 - RNA, 22 nt, Human
cagugguuccuguucuucuggg

SEQ ID NO: 70978 - RNA, 22 nt, Human
cagugguugguagauacuugag

SEQ ID NO: 70979 - RNA, 21 nt, Human
cagugguuuauaaacaacaga

SEQ ID NO: 70980 - RNA, 22 nt, Human
cagugguuucugaacagugugc

SEQ ID NO: 70981 - RNA, 22 nt, Human
cagugguuuuauaucuaagcuu

SEQ ID NO: 70982 - RNA, 22 nt, Human
caguguaucauuagugugauga

SEQ ID NO: 70983 - RNA, 22 nt, Human
cagugucaggaucaguauauuu

SEQ ID NO: 70984 - RNA, 22 nt, Human
cagugucugaaauaacaccgga

SEQ ID NO: 70985 - RNA, 22 nt, Human
cagugucugguuggcucuacgu

SEQ ID NO: 70986 - RNA, 18 nt, Human
cagugucuugguaaaaua

SEQ ID NO: 70987 - RNA, 23 nt, Human
cagugugacgaggugaggcaggc

SEQ ID NO: 70988 - RNA, 22 nt, Human
caguguggagggagagagccug

SEQ ID NO: 70989 - RNA, 22 nt, Human
cagugugggugaaauacaaagu

SEQ ID NO: 70990 - RNA, 22 nt, Human
cagugugucucuuguccuggcu

SEQ ID NO: 70991 - RNA, 22 nt, Human
caguguuccaggcggcagugaa

SEQ ID NO: 70992 - RNA, 22 nt, Human
caguguuuccgucaguauguga

SEQ ID NO: 70993 - RNA, 22 nt, Human
caguguuuguauagaauaugca

SEQ ID NO: 70994 - RNA, 22 nt, Human
caguuaaaagguaugcuaccaa

SEQ ID NO: 70995 - RNA, 22 nt, Human
caguuaaacagauugaguguua

SEQ ID NO: 70996 - RNA, 22 nt, Human
caguuaaagugcuuaucacaga

SEQ ID NO: 70997 - RNA, 22 nt, Human
caguuaaaugaugugcccuaga

SEQ ID NO: 70998 - RNA, 22 nt, Human
caguuaaauuuggcuguuuucu

SEQ ID NO: 70999 - RNA, 22 nt, Human
caguuaauguccuauacaauag

SEQ ID NO: 71000 - RNA, 22 nt, Human
caguuaaugugggccaaguucu

SEQ ID NO: 71001 - RNA, 22 nt, Human
caguuacauauuuaguagguua

SEQ ID NO: 71002 - RNA, 22 nt, Human
caguuacaugcucaugucauca

SEQ ID NO: 71003 - RNA, 22 nt, Human
caguuacuguaugucaaagacu

SEQ ID NO: 71004 - RNA, 22 nt, Human
caguuauaggagccauuguaua

SEQ ID NO: 71005 - RNA, 22 nt, Human
caguucacacugugcuaucugc

SEQ ID NO: 71006 - RNA, 22 nt, Human
caguucauccccauguuuucaa

SEQ ID NO: 71007 - RNA, 22 nt, Human
caguuccaucuucaucuuuccc

SEQ ID NO: 71008 - RNA, 23 nt, Human
caguucccacugucugucacaag

SEQ ID NO: 71009 - RNA, 22 nt, Human
caguucccuaauguguagaaga

SEQ ID NO: 71010 - RNA, 22 nt, Human
caguuccucaaagguuaaaugu

SEQ ID NO: 71011 - RNA, 22 nt, Human
caguucuacuuggaugucugca

SEQ ID NO: 71012 - RNA, 21 nt, Human
caguucucuuagauuuccagu

SEQ ID NO: 71013 - RNA, 22 nt, Human
caguucucuuuccacuggaggc

SEQ ID NO: 71014 - RNA, 22 nt, Human
caguucuggaggauagaagucu

SEQ ID NO: 71015 - RNA, 22 nt, Human
caguugaauggucagacaaggc

SEQ ID NO: 71016 - RNA, 22 nt, Human
caguugaugggacucauguggg

SEQ ID NO: 71017 - RNA, 22 nt, Human
caguugauguuuagacucugca

SEQ ID NO: 71018 - RNA, 22 nt, Human
caguugcacuagccacauuuca

SEQ ID NO: 71019 - RNA, 22 nt, Human
caguugcagaggcagagugcua

SEQ ID NO: 71020 - RNA, 22 nt, Human
caguugcuacaguucaagugug

SEQ ID NO: 71021 - RNA, 22 nt, Human
caguuggaggaaugaggcugua

SEQ ID NO: 71022 - RNA, 23 nt, Human
caguuggagguacagagacacug

SEQ ID NO: 71023 - RNA, 22 nt, Human
caguuguccccaaaauauacgg

SEQ ID NO: 71024 - RNA, 22 nt, Human
caguuuaaagaaggaugggagu

SEQ ID NO: 71025 - RNA, 21 nt, Human
caguuuaauaacaaagaagga

SEQ ID NO: 71026 - RNA, 20 nt, Human
caguuuacaacauaaauugu

SEQ ID NO: 71027 - RNA, 22 nt, Human
caguuuagaagaaucaugaaca

SEQ ID NO: 71028 - RNA, 22 nt, Human
caguuuagcauuuaccgugaug

SEQ ID NO: 71029 - RNA, 22 nt, Human
caguuuaggagagacgcguucu

SEQ ID NO: 71030 - RNA, 22 nt, Human
caguuuaguaggugauaucaau

SEQ ID NO: 71031 - RNA, 22 nt, Human
caguuuaguguugcauuuggag

SEQ ID NO: 71032 - RNA, 22 nt, Human
caguuuauauauaagcacauug

SEQ ID NO: 71033 - RNA, 22 nt, Human
caguuuauuuccaagaugacaa

SEQ ID NO: 71034 - RNA, 22 nt, Human
caguuucccugcuugaaaacgu

SEQ ID NO: 71035 - RNA, 22 nt, Human
caguuucuacgacuuaagcaca

SEQ ID NO: 71036 - RNA, 22 nt, Human
caguuucuauggcugggcucug

SEQ ID NO: 71037 - RNA, 22 nt, Human
caguuucucagacuucccuugu

SEQ ID NO: 71038 - RNA, 22 nt, Human
caguuucugagguuccagguuu

SEQ ID NO: 71039 - RNA, 22 nt, Human
caguuucugccaggauguguua

SEQ ID NO: 71040 - RNA, 22 nt, Human
caguuucugucuguucuuaucc

SEQ ID NO: 71041 - RNA, 22 nt, Human
caguuucuuaucuucaaaauug

SEQ ID NO: 71042 - RNA, 22 nt, Human
caguuucuucaauucagacacu

SEQ ID NO: 71043 - RNA, 22 nt, Human
caguuucuucaucaguuaagca

SEQ ID NO: 71044 - RNA, 17 nt, Human
caguuucuucccccucu

SEQ ID NO: 71045 - RNA, 22 nt, Human
caguuugcauaacaagagauuc

SEQ ID NO: 71046 - RNA, 16 nt, Human
caguuuuaaggcccaa

SEQ ID NO: 71047 - RNA, 22 nt, Human
caguuuucuaugguagaagcau

SEQ ID NO: 71048 - RNA, 22 nt, Human
caguuuuuagauuaguuggugg

SEQ ID NO: 71049 - RNA, 18 nt, Human
caguuuuuauaucuggca

SEQ ID NO: 71050 - RNA, 17 nt, Human
cauaaaacaguucuauu

SEQ ID NO: 71051 - RNA, 22 nt, Human
cauaaacucucuguaccaauau

SEQ ID NO: 71052 - RNA, 22 nt, Human
cauaaacucuugagauucuugu

SEQ ID NO: 71053 - RNA, 22 nt, Human
cauaaaguagcagagcaugacu

SEQ ID NO: 71054 - RNA, 22 nt, Human
cauaaaguauagaucugugggu

SEQ ID NO: 71055 - RNA, 22 nt, Human
cauaacauccuugcuacuuuga

SEQ ID NO: 71056 - RNA, 22 nt, Human
auugauucucauaggaccaucu

SEQ ID NO: 71057 - RNA, 22 nt, Human
auugauuugaacaaagauauua

SEQ ID NO: 71058 - RNA, 22 nt, Human
auugcaaagcauugugagcgca

SEQ ID NO: 71059 - RNA, 22 nt, Human
auugcaaaugagucuuaauaua

SEQ ID NO: 71060 - RNA, 22 nt, Human
auugcacaaagagggaaacuga

SEQ ID NO: 71061 - RNA, 18 nt, Human
auugcacaccagccuggg

SEQ ID NO: 71062 - RNA, 22 nt, Human
auugagaauaugauuuaguaua

SEQ ID NO: 71063 - RNA, 22 nt, Human
auugagaauauugugacagugu

SEQ ID NO: 71064 - RNA, 23 nt, Human
auugagcuaguaauauagaccag

SEQ ID NO: 71065 - RNA, 22 nt, Human
auugagcuguuuuguaggauaa

SEQ ID NO: 71066 - RNA, 22 nt, Human
auugaguacuuagugucauaua

SEQ ID NO: 71067 - RNA, 22 nt, Human
auugauuucugcuuacucacug

SEQ ID NO: 71068 - RNA, 22 nt, Human
auugcaaaauuguccuguggaa

SEQ ID NO: 71069 - RNA, 22 nt, Human
auugcaaagaaauacaugcuua

SEQ ID NO: 71070 - RNA, 22 nt, Human
auugcaaaggucccauucaaga

SEQ ID NO: 71071 - RNA, 22 nt, Human
auugcacuuuccccugugagaa

SEQ ID NO: 71072 - RNA, 22 nt, Human
auugcagaacaugaggucuucu

SEQ ID NO: 71073 - RNA, 22 nt, Human
auugcaggccaguguccugggc

SEQ ID NO: 71074 - RNA, 22 nt, Human
auugcagggaggcagguagaug

SEQ ID NO: 71075 - RNA, 22 nt, Human
auugcaguguugccuggggccu

SEQ ID NO: 71076 - RNA, 22 nt, Human
auugcauaugcagcacaucagg

SEQ ID NO: 71077 - RNA, 22 nt, Human
auugcauuugucauuguugagg

SEQ ID NO: 71078 - RNA, 22 nt, Human
auugcccuagggcuaagcagga

SEQ ID NO: 71079 - RNA, 22 nt, Human
auugcuaaugugcgaaugugua

SEQ ID NO: 71080 - RNA, 22 nt, Human
auugcugggaauauuuagccca

SEQ ID NO: 71081 - RNA, 22 nt, Human
auugcuguaaauuaucuuauua

SEQ ID NO: 71082 - RNA, 22 nt, Human
auugcuuacuaaucaucuucag

SEQ ID NO: 71083 - RNA, 22 nt, Human
auugcuucauguccuuugccgg

SEQ ID NO: 71084 - RNA, 22 nt, Human
auugcuucccacaaagauguau

SEQ ID NO: 71085 - RNA, 22 nt, Human
auuggaaguauuucaucaaaag

SEQ ID NO: 71086 - RNA, 22 nt, Human
auuggagacagaugggcuccag

SEQ ID NO: 71087 - RNA, 22 nt, Human
auuggagccccagaagcaaggu

SEQ ID NO: 71088 - RNA, 22 nt, Human
auuggauagacauaagaaaaau

SEQ ID NO: 71089 - RNA, 22 nt, Human
auuggcaaggcugcggugucug

SEQ ID NO: 71090 - RNA, 22 nt, Human
auuggcagaaacagcagggcca

SEQ ID NO: 71091 - RNA, 22 nt, Human
auuggcaguuggcugugguuca

SEQ ID NO: 71092 - RNA, 22 nt, Human
auuggccagacuuauccuucag

SEQ ID NO: 71093 - RNA, 22 nt, Human
auuggcuccuucuaacaugucu

SEQ ID NO: 71094 - RNA, 22 nt, Human
auuggcuuccuucuuauuguca

SEQ ID NO: 71095 - RNA, 22 nt, Human
auuggggagagcuaauauuuua

SEQ ID NO: 71096 - RNA, 22 nt, Human
auuggucaccucccucagcucu

SEQ ID NO: 71097 - RNA, 22 nt, Human
auuggucuggggaaaugaagag

SEQ ID NO: 71098 - RNA, 22 nt, Human
auuggucugugagcuguugaca

SEQ ID NO: 71099 - RNA, 22 nt, Human
auuggugcaauagucaggagcu

SEQ ID NO: 71100 - RNA, 22 nt, Human
auuguaaaaguauucuaagauu

SEQ ID NO: 71101 - RNA, 22 nt, Human
auuguaaauagugccacaauaa

SEQ ID NO: 71102 - RNA, 22 nt, Human
auuguaacaacaauaguuuagg

SEQ ID NO: 71103 - RNA, 22 nt, Human
auuguaaguagaaauguuaugg

SEQ ID NO: 71104 - RNA, 22 nt, Human
auuguaauuuuagagaaagugg

SEQ ID NO: 71105 - RNA, 22 nt, Human
auuguacaacugaggguggaau

SEQ ID NO: 71106 - RNA, 22 nt, Human
auuguacaaugccuggaacauu

SEQ ID NO: 71107 - RNA, 22 nt, Human
auuguacacuaguggcagcagu

SEQ ID NO: 71108 - RNA, 22 nt, Human
auuguacaugcagugagucauc

SEQ ID NO: 71109 - RNA, 19 nt, Human
auuguacauugaguuuggc

SEQ ID NO: 71110 - RNA, 22 nt, Human
auuguacuagaaauuguauuca

SEQ ID NO: 71111 - RNA, 20 nt, Human
auuguacuucuguugauggu

SEQ ID NO: 71112 - RNA, 22 nt, Human
auuguacuuuuauuacauguag

SEQ ID NO: 71113 - RNA, 22 nt, Human
auuguagcaauuucucuuaauu

SEQ ID NO: 71114 - RNA, 22 nt, Human
auuguagcccaugcauaaaccg

SEQ ID NO: 71115 - RNA, 22 nt, Human
auuguauuagcacaauacaauu

SEQ ID NO: 71116 - RNA, 22 nt, Human
auuguauuuguacaagacaugu

SEQ ID NO: 71117 - RNA, 22 nt, Human
auugucacuuaaaagugcaugu

SEQ ID NO: 71118 - RNA, 22 nt, Human
auugucagaguuugagaaagua

SEQ ID NO: 71119 - RNA, 22 nt, Human
auugucaucgauguuagccagu

SEQ ID NO: 71120 - RNA, 22 nt, Human
auugucgcuuauuuaggugcuu

SEQ ID NO: 71121 - RNA, 22 nt, Human
auugucgucaauggacacauag

SEQ ID NO: 71122 - RNA, 17 nt, Human
auugucucuucacuuau

SEQ ID NO: 71123 - RNA, 22 nt, Human
auugucugaauccaaagcucug

SEQ ID NO: 71124 - RNA, 22 nt, Human
auugucuguacuuuaaaaaugu

SEQ ID NO: 71125 - RNA, 22 nt, Human
auugucuucugucuuaggugau

SEQ ID NO: 71126 - RNA, 22 nt, Human
auugucuuguacguuugccugu

SEQ ID NO: 71127 - RNA, 22 nt, Human
auugugaauugagaguacuucu

SEQ ID NO: 71128 - RNA, 21 nt, Human
auugugaccaucauuuuggaa

SEQ ID NO: 71129 - RNA, 22 nt, Human
auugugcaaaaccucaggccuc

SEQ ID NO: 71130 - RNA, 22 nt, Human
auugugcagcacagaucaugac

SEQ ID NO: 71131 - RNA, 22 nt, Human
auugugcagcagugguaccugg

SEQ ID NO: 71132 - RNA, 20 nt, Human
auugugcagcccuuggcaga

SEQ ID NO: 71133 - RNA, 22 nt, Human
auugugcaguaaaguccuuuuc

SEQ ID NO: 71134 - RNA, 22 nt, Human
auuguggcuagacagucacaau

SEQ ID NO: 71135 - RNA, 22 nt, Human
auuguuaaaguaauaaccaugg

SEQ ID NO: 71136 - RNA, 22 nt, Human
auuguuacuggguuaauuugga

SEQ ID NO: 71137 - RNA, 22 nt, Human
auuguucacugugaaucuugau

SEQ ID NO: 71138 - RNA, 18 nt, Human
auuguucugugacauguc

SEQ ID NO: 71139 - RNA, 22 nt, Human
auuguugaucuucugguaagcc

SEQ ID NO: 71140 - RNA, 22 nt, Human
auuguugggucucacuccuaga

SEQ ID NO: 71141 - RNA, 22 nt, Human
auuguugucuuuaccuguauuu

SEQ ID NO: 71142 - RNA, 22 nt, Human
auuuaaagugguagauuggcag

SEQ ID NO: 71143 - RNA, 22 nt, Human
auuuaacaagacagagaacugg

SEQ ID NO: 71144 - RNA, 18 nt, Human
auuuaaugaacugaaagc

SEQ ID NO: 71145 - RNA, 22 nt, Human
auuuaauuguucuucuggcuau

SEQ ID NO: 71146 - RNA, 22 nt, Human
auuuaauuugugucuuuagcug

SEQ ID NO: 71147 - RNA, 22 nt, Human
auuuacacuaaaggaaggagga

SEQ ID NO: 71148 - RNA, 22 nt, Human
auuuacacugguucucagagcu

SEQ ID NO: 71149 - RNA, 22 nt, Human
auuuacagaugaugcuauuuga

SEQ ID NO: 71150 - RNA, 22 nt, Human
auuuacagccuugaaaacagca

SEQ ID NO: 71151 - RNA, 22 nt, Human
auuuacaggacagcuuggcauu

SEQ ID NO: 71152 - RNA, 23 nt, Human
auuuacagguuaaaugaaaucag

SEQ ID NO: 71153 - RNA, 22 nt, Human
auuuacagugugccuacuauau

SEQ ID NO: 71154 - RNA, 22 nt, Human
auuuacauaauagacuuuaggu

SEQ ID NO: 71155 - RNA, 18 nt, Human
auuuacccagcaacgugg

SEQ ID NO: 71156 - RNA, 22 nt, Human
auuuacuaaugucauaucgcgu

SEQ ID NO: 71157 - RNA, 22 nt, Human
auuuacuacugcuaucuagaag

SEQ ID NO: 71158 - RNA, 22 nt, Human
auuuacuagggcuguuuaagua

SEQ ID NO: 71159 - RNA, 22 nt, Human
auuuacucgugcuucauugaau

SEQ ID NO: 71160 - RNA, 22 nt, Human
auuuacucgugucuccagugcu

SEQ ID NO: 71161 - RNA, 22 nt, Human
auuuacugagcagcuaccaugu

SEQ ID NO: 71162 - RNA, 22 nt, Human
auuuagaacuuuguuugccaau

SEQ ID NO: 71163 - RNA, 22 nt, Human
auuuagaagcuaauuuuucaga

SEQ ID NO: 71164 - RNA, 22 nt, Human
auuuagaaguuggagggcaaga

SEQ ID NO: 71165 - RNA, 22 nt, Human
cauggcagcaauuuuccugacu

SEQ ID NO: 71166 - RNA, 22 nt, Human
cauggcaggaaggacaugcacu

SEQ ID NO: 71167 - RNA, 22 nt, Human
cauggcaggcuucuucagccuu

SEQ ID NO: 71168 - RNA, 22 nt, Human
cauggcagggcugugggcaggu

SEQ ID NO: 71169 - RNA, 22 nt, Human
cauggcaggugcagauucugug

SEQ ID NO: 71170 - RNA, 22 nt, Human
cauggccacaucuagcugcaag

SEQ ID NO: 71171 - RNA, 22 nt, Human
cauggccagauucuuucuucuc

SEQ ID NO: 71172 - RNA, 22 nt, Human
cauggccagggagagagaaugu

SEQ ID NO: 71173 - RNA, 22 nt, Human
cauggcccucuucuggagcaau

SEQ ID NO: 71174 - RNA, 22 nt, Human
cauggccuugagugacugcacu

SEQ ID NO: 71175 - RNA, 23 nt, Human
cauggcugauuucaagcuaccac

SEQ ID NO: 71176 - RNA, 22 nt, Human
cauggcugcuggcucggucccu

SEQ ID NO: 71177 - RNA, 22 nt, Human
cauggcuggcacacagcaacca

SEQ ID NO: 71178 - RNA, 20 nt, Human
cauggcugugagcccacagg

SEQ ID NO: 71179 - RNA, 22 nt, Human
auuuagucaucacucauguguu

SEQ ID NO: 71180 - RNA, 22 nt, Human
auuuaucaccaguuagcugacu

SEQ ID NO: 71181 - RNA, 22 nt, Human
auuuaucucuggaaacuaagca

SEQ ID NO: 71182 - RNA, 20 nt, Human
auuuauguauagcuuguugu

SEQ ID NO: 71183 - RNA, 21 nt, Human
auuuauguuugggguggaaug

SEQ ID NO: 71184 - RNA, 22 nt, Human
auuuauuaagcaucugcuaugu

SEQ ID NO: 71185 - RNA, 22 nt, Human
auuuauuaccucggaguuucug

SEQ ID NO: 71186 - RNA, 22 nt, Human
auuuauucuccagauggcgaga

SEQ ID NO: 71187 - RNA, 22 nt, Human
auuuauugaagcuuauuacguu

SEQ ID NO: 71188 - RNA, 22 nt, Human
auuuauuggaugcuuacuuggg

SEQ ID NO: 71189 - RNA, 22 nt, Human
auuucaacguuagauguaauag

SEQ ID NO: 71190 - RNA, 22 nt, Human
auuucaaggcuacagaaaccuu

SEQ ID NO: 71191 - RNA, 22 nt, Human
auuucaaggcuauuaauauaaa

SEQ ID NO: 71192 - RNA, 22 nt, Human
auuucacaaaccauccugauuu

SEQ ID NO: 71193 - RNA, 21 nt, Human
auuucacacccuccuuuuucu

SEQ ID NO: 71194 - RNA, 22 nt, Human
auuucacaggccaguggugggg

SEQ ID NO: 71195 - RNA, 22 nt, Human
auuucacauuaauuugaugcuc

SEQ ID NO: 71196 - RNA, 17 nt, Human
auuucacuuagcaugag

SEQ ID NO: 71197 - RNA, 22 nt, Human
auuucacuuaguguaaugucuu

SEQ ID NO: 71198 - RNA, 21 nt, Human
auuucagaaauauugguggga

SEQ ID NO: 71199 - RNA, 22 nt, Human
auuucagacuguguuggaaaau

SEQ ID NO: 71200 - RNA, 21 nt, Human
auuucagagcacacaaguaaa

SEQ ID NO: 71201 - RNA, 22 nt, Human
auuucagagcuuugcagcuaau

SEQ ID NO: 71202 - RNA, 22 nt, Human
auuucagauucgagaggaagug

SEQ ID NO: 71203 - RNA, 22 nt, Human
auuucagggagucauuuacaca

SEQ ID NO: 71204 - RNA, 22 nt, Human
auuucaguguugguuagcaagc

SEQ ID NO: 71205 - RNA, 22 nt, Human
auuucauccagaguccuauuag

SEQ ID NO: 71206 - RNA, 22 nt, Human
auuucauccauuaagaguacuc

SEQ ID NO: 71207 - RNA, 22 nt, Human
auuucaugaaacauuccccuug

SEQ ID NO: 71208 - RNA, 22 nt, Human
auuucaugcagaaggaaguugg

SEQ ID NO: 71209 - RNA, 22 nt, Human
auuucaugugaagaagagauaa

SEQ ID NO: 71210 - RNA, 21 nt, Human
auuuccaaauaaggucacauu

SEQ ID NO: 71211 - RNA, 22 nt, Human
auuuccaaucucugcauauggg

SEQ ID NO: 71212 - RNA, 22 nt, Human
auuuccaauuucauccaugucc

SEQ ID NO: 71213 - RNA, 22 nt, Human
auuuccacauaagggaaauaag

SEQ ID NO: 71214 - RNA, 22 nt, Human
auuuccagacuuuuuccaggaa

SEQ ID NO: 71215 - RNA, 22 nt, Human
auuuccaggcuguuuugugaau

SEQ ID NO: 71216 - RNA, 22 nt, Human
auuuccaguacccagaacagag

SEQ ID NO: 71217 - RNA, 22 nt, Human
auuuccaguccuaaugaucugg

SEQ ID NO: 71218 - RNA, 22 nt, Human
auuuccauagagcgucucacag

SEQ ID NO: 71219 - RNA, 22 nt, Human
auuuccaucaucauuaggccua

SEQ ID NO: 71220 - RNA, 22 nt, Human
auuuccauuaucaugacaaauu

SEQ ID NO: 71221 - RNA, 22 nt, Human
auuucccaacacauuagaaaau

SEQ ID NO: 71222 - RNA, 22 nt, Human
auuucccacucuacuacaugcu

SEQ ID NO: 71223 - RNA, 17 nt, Human
auuucccagcagugcua

SEQ ID NO: 71224 - RNA, 23 nt, Human
auuuccuacuauaaaagagguaa

SEQ ID NO: 71225 - RNA, 22 nt, Human
auuuccuauagauauggugagu

SEQ ID NO: 71226 - RNA, 22 nt, Human
auuuccuauccuggucuuaaaa

SEQ ID NO: 71227 - RNA, 22 nt, Human
auuuccuauuucuuguccccua

SEQ ID NO: 71228 - RNA, 17 nt, Human
auuuccucagggcugag

SEQ ID NO: 71229 - RNA, 22 nt, Human
auuuccuguaggggcuugcgaa

SEQ ID NO: 71230 - RNA, 22 nt, Human
auuuccugugucucuauuuaug

SEQ ID NO: 71231 - RNA, 22 nt, Human
auuuccuucccagauuugguuc

SEQ ID NO: 71232 - RNA, 22 nt, Human
auuuccuugcaacuuaggcaug

SEQ ID NO: 71233 - RNA, 22 nt, Human
auuuccuugcaaguuucuguaa

SEQ ID NO: 71234 - RNA, 22 nt, Human
auuuccuuugcaaagacugugc

SEQ ID NO: 71235 - RNA, 22 nt, Human
auuucuacauugaguuuuagca

SEQ ID NO: 71236 - RNA, 18 nt, Human
auuucuacuacuauaaag

SEQ ID NO: 71237 - RNA, 22 nt, Human
auuucuacugugagaaacauga

SEQ ID NO: 71238 - RNA, 22 nt, Human
auuucuagcagggcaggaaaga

SEQ ID NO: 71239 - RNA, 22 nt, Human
auuucuauaggaggacaguauu

SEQ ID NO: 71240 - RNA, 22 nt, Human
auuucucacaaaguugcuuauc

SEQ ID NO: 71241 - RNA, 22 nt, Human
auuucucagugaaaugacaggc

SEQ ID NO: 71242 - RNA, 22 nt, Human
auuucucaguguacauuauguu

SEQ ID NO: 71243 - RNA, 22 nt, Human
auuucucauguacaaaaacacu

SEQ ID NO: 71244 - RNA, 22 nt, Human
auuucuccuuguugcaaugcag

SEQ ID NO: 71245 - RNA, 22 nt, Human
auuucucucauuguuagcuagg

SEQ ID NO: 71246 - RNA, 22 nt, Human
auuucugcuacugcacccuagu

SEQ ID NO: 71247 - RNA, 22 nt, Human
auuucuguauccugcugucaga

SEQ ID NO: 71248 - RNA, 22 nt, Human
auuucuguuauaccuuucucag

SEQ ID NO: 71249 - RNA, 22 nt, Human
auuucuguugcuuauaaauuac

SEQ ID NO: 71250 - RNA, 22 nt, Human
auuucuguuugcuacuauaagu

SEQ ID NO: 71251 - RNA, 22 nt, Human
auuucuuaucugaggucuacau

SEQ ID NO: 71252 - RNA, 22 nt, Human
auuucuuccauugccucuucaa

SEQ ID NO: 71253 - RNA, 22 nt, Human
auuucuugccccugcucccuga

SEQ ID NO: 71254 - RNA, 22 nt, Human
auuugaaccacucagaacucau

SEQ ID NO: 71255 - RNA, 22 nt, Human
auuugaagaaaguuuucuagau

SEQ ID NO: 71256 - RNA, 22 nt, Human
auuugaagucuucaugauuucu

SEQ ID NO: 71257 - RNA, 23 nt, Human
auuugacagagcauagcauuucu

SEQ ID NO: 71258 - RNA, 22 nt, Human
auuugacauugacacaccuaug

SEQ ID NO: 71259 - RNA, 23 nt, Human
auuugagaaaguauuuuuaagac

SEQ ID NO: 71260 - RNA, 22 nt, Human
auuugcaagaguaagaauuucu

SEQ ID NO: 71261 - RNA, 22 nt, Human
auuugcaaugauuucagugcuu

SEQ ID NO: 71262 - RNA, 18 nt, Human
auuugcaggcaugcaggc

SEQ ID NO: 71263 - RNA, 22 nt, Human
auuugccucugcuuucaaggau

SEQ ID NO: 71264 - RNA, 22 nt, Human
auuugccuugugaauuggauau

SEQ ID NO: 71265 - RNA, 20 nt, Human
auuugcugagcuuuuucucc

SEQ ID NO: 71266 - RNA, 20 nt, Human
auuugcuuaccuuguuucua

SEQ ID NO: 71267 - RNA, 22 nt, Human
auuugcuuccuaauacucauau

SEQ ID NO: 71268 - RNA, 22 nt, Human
auuugcuuguaaauguaugccu

SEQ ID NO: 71269 - RNA, 22 nt, Human
auuugcuuucagccuuaaggau

SEQ ID NO: 71270 - RNA, 22 nt, Human
auuugcuuucccuucccugaca

SEQ ID NO: 71271 - RNA, 22 nt, Human
auuuggaaacaauuauauucuu

SEQ ID NO: 71272 - RNA, 22 nt, Human
auuuggaaacaugcugaccaug

SEQ ID NO: 71273 - RNA, 22 nt, Human
auuuggaacaaauauuaguaaa

SEQ ID NO: 71274 - RNA, 22 nt, Human
caagccaggaaggauccagcac

SEQ ID NO: 71275 - RNA, 22 nt, Human
caagccaggugaacauaacaag

SEQ ID NO: 71276 - RNA, 22 nt, Human
caagccagucagcucaguagau

SEQ ID NO: 71277 - RNA, 22 nt, Human
caagccagugacagccagggaa

SEQ ID NO: 71278 - RNA, 22 nt, Human
caagcccuguuaggggucucua

SEQ ID NO: 71279 - RNA, 22 nt, Human
caagccuuggaaauccauucug

SEQ ID NO: 71280 - RNA, 22 nt, Human
caagcguggcugcucugaugga

SEQ ID NO: 71281 - RNA, 22 nt, Human
caagcuacucaggcaagaugug

SEQ ID NO: 71282 - RNA, 22 nt, Human
caagcucugcgggcuccaagau

SEQ ID NO: 71283 - RNA, 22 nt, Human
caagcugaacacugucuucaag

SEQ ID NO: 71284 - RNA, 22 nt, Human
caagcuggagguuggagcuacu

SEQ ID NO: 71285 - RNA, 22 nt, Human
caagcuggcugggagaggcacg

SEQ ID NO: 71286 - RNA, 22 nt, Human
caagcugguaucagcuagagcg

SEQ ID NO: 71287 - RNA, 22 nt, Human
caagcuuguuucuccugggggu

SEQ ID NO: 71288 - RNA, 22 nt, Human
caagcuuuccauuacacacauu

SEQ ID NO: 71289 - RNA, 22 nt, Human
caaggaaaaagcgagcucgggg

SEQ ID NO: 71290 - RNA, 22 nt, Human
caaggaaguuuuaggagaggaa

SEQ ID NO: 71291 - RNA, 22 nt, Human
caaggacacugauguucauccu

SEQ ID NO: 71292 - RNA, 22 nt, Human
caaggauagguacuauguaaua

SEQ ID NO: 71293 - RNA, 22 nt, Human
caaggauucucacuagacuaga

SEQ ID NO: 71294 - RNA, 22 nt, Human
caaggcagcccgcugaaccaca

SEQ ID NO: 71295 - RNA, 22 nt, Human
caaggcagcuauugucuccaua

SEQ ID NO: 71296 - RNA, 22 nt, Human
caaggcagcuguagggauuugg

SEQ ID NO: 71297 - RNA, 22 nt, Human
caaggcaggcaguucacuugag

SEQ ID NO: 71298 - RNA, 22 nt, Human
caaggcaggucugaggagguug

SEQ ID NO: 71299 - RNA, 22 nt, Human
caaggcagugggcuaggaaccu

SEQ ID NO: 71300 - RNA, 22 nt, Human
caaggcaguuccccagagggcu

SEQ ID NO: 71301 - RNA, 22 nt, Human
caaggcauuucgcuuagagaga

SEQ ID NO: 71302 - RNA, 22 nt, Human
caaggccaaagggccacuguca

SEQ ID NO: 71303 - RNA, 22 nt, Human
caaggccaagucucugugaaga

SEQ ID NO: 71304 - RNA, 22 nt, Human
caaggccacuccagagacuggu

SEQ ID NO: 71305 - RNA, 22 nt, Human
caaggccagagccagcgauaag

SEQ ID NO: 71306 - RNA, 17 nt, Human
caaggccagcaucuuca

SEQ ID NO: 71307 - RNA, 22 nt, Human
caaggccaguuucuccuaguca

SEQ ID NO: 71308 - RNA, 22 nt, Human
caaggccaugagcagcgagugu

SEQ ID NO: 71309 - RNA, 22 nt, Human
caaggccuaugcacaccuagga

SEQ ID NO: 71310 - RNA, 22 nt, Human
caaggccugacugcuugucuaa

SEQ ID NO: 71311 - RNA, 20 nt, Human
caaggccuggaucuaguugc

SEQ ID NO: 71312 - RNA, 22 nt, Human
caaccugacaagguuaaugaau

SEQ ID NO: 71313 - RNA, 21 nt, Human
caaccugagcugaacccgugc

SEQ ID NO: 71314 - RNA, 22 nt, Human
caaccugaugaauugaauuuaa

SEQ ID NO: 71315 - RNA, 22 nt, Human
caaccugaugugcaugccacgg

SEQ ID NO: 71316 - RNA, 22 nt, Human
caaccuggcccuagcccuggga

SEQ ID NO: 71317 - RNA, 22 nt, Human
caacuaauauagggcaugagaa

SEQ ID NO: 71318 - RNA, 22 nt, Human
caacuacaggaaaagucauuca

SEQ ID NO: 71319 - RNA, 22 nt, Human
caacuauagaucaaaugaguuu

SEQ ID NO: 71320 - RNA, 22 nt, Human
caacucaggcaccucauauaag

SEQ ID NO: 71321 - RNA, 22 nt, Human
caacugaaaagauucuacgcag

SEQ ID NO: 71322 - RNA, 22 nt, Human
caacugggauaaagagcuaaag

SEQ ID NO: 71323 - RNA, 22 nt, Human
caacuguaauauuggaagauca

SEQ ID NO: 71324 - RNA, 22 nt, Human
caacuucaccaggguuccuaga

SEQ ID NO: 71325 - RNA, 22 nt, Human
caacuucagggaaacaugaagc

SEQ ID NO: 71326 - RNA, 22 nt, Human
caacuuguucuugguagaucua

SEQ ID NO: 71327 - RNA, 22 nt, Human
caacuuuaaauggcuaugucug

SEQ ID NO: 71328 - RNA, 22 nt, Human
caacuuucuguuaaauguuagu

SEQ ID NO: 71329 - RNA, 23 nt, Human
caacuuuuggcuacaugcuuagc

SEQ ID NO: 71330 - RNA, 22 nt, Human
caagaaacuuuauucugccaua

SEQ ID NO: 71331 - RNA, 22 nt, Human
caagaaaucuagaagucagugg

SEQ ID NO: 71332 - RNA, 22 nt, Human
caagaaauucuguucagauagc

SEQ ID NO: 71333 - RNA, 22 nt, Human
caagaacauugugaucacuuca

SEQ ID NO: 71334 - RNA, 22 nt, Human
caagaauaaccagacaauagca

SEQ ID NO: 71335 - RNA, 18 nt, Human
caagaaucucuaaagaag

SEQ ID NO: 71336 - RNA, 22 nt, Human
caagaaucuugcagcuuagacu

SEQ ID NO: 71337 - RNA, 19 nt, Human
caagacaaagcccaucuuc

SEQ ID NO: 71338 - RNA, 22 nt, Human
caagacaagaucuaagcaugcu

SEQ ID NO: 71339 - RNA, 22 nt, Human
caagacaauggguaaguguaac

SEQ ID NO: 71340 - RNA, 22 nt, Human
caagacuuuggaaggcugaggc

SEQ ID NO: 71341 - RNA, 22 nt, Human
caagagcacgugcccuccauaa

SEQ ID NO: 71342 - RNA, 22 nt, Human
caagagcaggugcugcuuccau

SEQ ID NO: 71343 - RNA, 22 nt, Human
caagagcaucccugcauccagc

SEQ ID NO: 71344 - RNA, 22 nt, Human
caagagcauuuaguuagcuggu

SEQ ID NO: 71345 - RNA, 22 nt, Human
caagagcuacccugugccauau

SEQ ID NO: 71346 - RNA, 22 nt, Human
caagagcuagaaauugguuaga

SEQ ID NO: 71347 - RNA, 22 nt, Human
caagagcucaccggagagcauu

SEQ ID NO: 71348 - RNA, 22 nt, Human
caagagcucagaaacccuugcu

SEQ ID NO: 71349 - RNA, 22 nt, Human
caagagcugugaccucauucac

SEQ ID NO: 71350 - RNA, 22 nt, Human
caagagcuucugcucuucaugg

SEQ ID NO: 71351 - RNA, 22 nt, Human
caagagggaaccuaagauguau

SEQ ID NO: 71352 - RNA, 22 nt, Human
caagagugaaacucugucucaa

SEQ ID NO: 71353 - RNA, 22 nt, Human
caagauauugauuuccagcuga

SEQ ID NO: 71354 - RNA, 22 nt, Human
caagaucaagguaucagcagau

SEQ ID NO: 71355 - RNA, 22 nt, Human
caagaucaaggugucagcaggu

SEQ ID NO: 71356 - RNA, 22 nt, Human
caagaucacacagguaacaagu

SEQ ID NO: 71357 - RNA, 22 nt, Human
caagaugaaacuacagggagga

SEQ ID NO: 71358 - RNA, 22 nt, Human
caagaugaaugaugaagugugu

SEQ ID NO: 71359 - RNA, 22 nt, Human
caagauggguguugugaugguu

SEQ ID NO: 71360 - RNA, 22 nt, Human
caagaugugccuaaucagaccu

SEQ ID NO: 71361 - RNA, 22 nt, Human
caagauguggugggcugaguuu

SEQ ID NO: 71362 - RNA, 22 nt, Human
caagauuacuauccacugcugg

SEQ ID NO: 71363 - RNA, 22 nt, Human
caagauuugacuucgugguuug

SEQ ID NO: 71364 - RNA, 19 nt, Human
caagauuuguucacacaug

SEQ ID NO: 71365 - RNA, 22 nt, Human
caagcaaugcccugguauauua

SEQ ID NO: 71366 - RNA, 22 nt, Human
caagcagaaaucuagaacucca

SEQ ID NO: 71367 - RNA, 22 nt, Human
caagcagacaguaggccuagaa

SEQ ID NO: 71368 - RNA, 22 nt, Human
caagcagagguuuauguauuag

SEQ ID NO: 71369 - RNA, 22 nt, Human
caagcagauauuuuagucaaga

SEQ ID NO: 71370 - RNA, 22 nt, Human
caagcagccccaacaugaggau

SEQ ID NO: 71371 - RNA, 22 nt, Human
caagcagggauacugcagggag

SEQ ID NO: 71372 - RNA, 22 nt, Human
caagcauacugugagaguuuua

SEQ ID NO: 71373 - RNA, 20 nt, Human
caagccaggcccugcugcug

SEQ ID NO: 71374 - RNA, 22 nt, Human
caagccauacugggugaaauca

SEQ ID NO: 71375 - RNA, 22 nt, Human
caagcccacugcucagagccaa

SEQ ID NO: 71376 - RNA, 20 nt, Human
caagcccucuuuagccugcc

SEQ ID NO: 71377 - RNA, 22 nt, Human
caagcccuuccgggaacaguug

SEQ ID NO: 71378 - RNA, 22 nt, Human
caagcuacuuagaaagcacagu

SEQ ID NO: 71379 - RNA, 21 nt, Human
caagcugccugagggugguug

SEQ ID NO: 71380 - RNA, 22 nt, Human
caagcugcuuauucucugcucu

SEQ ID NO: 71381 - RNA, 22 nt, Human
caagcuggcucuuaugcaaaaa

SEQ ID NO: 71382 - RNA, 22 nt, Human
caagcugggucccaacaauuac

SEQ ID NO: 71383 - RNA, 20 nt, Human
ccagcucugugguuagauac

SEQ ID NO: 71384 - RNA, 22 nt, Human
ccagcugagaaguguaaaguga

SEQ ID NO: 71385 - RNA, 22 nt, Human
ccagcugaggcagccacacagg

SEQ ID NO: 71386 - RNA, 22 nt, Human
ccagcugagguugaagaaagag

SEQ ID NO: 71387 - RNA, 22 nt, Human
ccagcugauucgguggugguug

SEQ ID NO: 71388 - RNA, 22 nt, Human
ccagcugcccacuauguguucu

SEQ ID NO: 71389 - RNA, 22 nt, Human
ccagcugcugacaugggcaggu

SEQ ID NO: 71390 - RNA, 22 nt, Human
ccagcugcugcaccgugcaugg

SEQ ID NO: 71391 - RNA, 22 nt, Human
ccagcuggagccaagguggacu

SEQ ID NO: 71392 - RNA, 19 nt, Human
ccagcuggccugggaccuc

SEQ ID NO: 71393 - RNA, 22 nt, Human
ccagcugggucccugcuggggc

SEQ ID NO: 71394 - RNA, 22 nt, Human
ccagcugucagugugaaaauaa

SEQ ID NO: 71395 - RNA, 22 nt, Human
ccagcugucuugagaggaggca

SEQ ID NO: 71396 - RNA, 18 nt, Human
ccagcugugcagcaucug

SEQ ID NO: 71397 - RNA, 22 nt, Human
ccagcugugccuaggagcaggg

SEQ ID NO: 71398 - RNA, 22 nt, Human
ccagcugugcuguuggcuuguc

SEQ ID NO: 71399 - RNA, 22 nt, Human
ccagcuguuggaguuucacugc

SEQ ID NO: 71400 - RNA, 22 nt, Human
ccagcuugaagaugugcugguu

SEQ ID NO: 71401 - RNA, 22 nt, Human
ccagcuuguuugaagcucguca

SEQ ID NO: 71402 - RNA, 20 nt, Human
ccagcuuucccugcagcauc

SEQ ID NO: 71403 - RNA, 22 nt, Human
ccagcuuuccugcgaguugauu

SEQ ID NO: 71404 - RNA, 22 nt, Human
ccagcuuucugggugguuucug

SEQ ID NO: 71405 - RNA, 22 nt, Human
ccagcuuuuagugggcuuauua

SEQ ID NO: 71406 - RNA, 22 nt, Human
ccagcuuuuccucucauugcuu

SEQ ID NO: 71407 - RNA, 22 nt, Human
ccagcuuuuggggugacaauuu

SEQ ID NO: 71408 - RNA, 22 nt, Human
ccaggaaaauaccaagcuuuaa

SEQ ID NO: 71409 - RNA, 22 nt, Human
ccaggaaagaggaagaacgcau

SEQ ID NO: 71410 - RNA, 22 nt, Human
ccaggaagccuuuuucuuugac

SEQ ID NO: 71411 - RNA, 22 nt, Human
ccaggaagcugucugauaugaa

SEQ ID NO: 71412 - RNA, 22 nt, Human
ccaggaagcugugagauuccaa

SEQ ID NO: 71413 - RNA, 22 nt, Human
ccaggaaggaagcagggguuuc

SEQ ID NO: 71414 - RNA, 22 nt, Human
ccaggaaugaaauguagauaaa

SEQ ID NO: 71415 - RNA, 22 nt, Human
ccaggacaaguguggccauggc

SEQ ID NO: 71416 - RNA, 18 nt, Human
ccaggacaggcaaaaggu

SEQ ID NO: 71417 - RNA, 22 nt, Human
ccaggacccugcaaacccuguu

SEQ ID NO: 71418 - RNA, 19 nt, Human
ccaggaccuuuccaggguc

SEQ ID NO: 71419 - RNA, 22 nt, Human
ccaggacucaguggggaaaggg

SEQ ID NO: 71420 - RNA, 22 nt, Human
ccaggacugcagggggcgagga

SEQ ID NO: 71421 - RNA, 22 nt, Human
ccaggacuuauuacaguauaac

SEQ ID NO: 71422 - RNA, 22 nt, Human
ccaggagagcaggcgugcagcu

SEQ ID NO: 71423 - RNA, 22 nt, Human
ccaggagagcucuaaauggcug

SEQ ID NO: 71424 - RNA, 22 nt, Human
ccaggagagcucucguucagug

SEQ ID NO: 71425 - RNA, 22 nt, Human
ccaggagaugggaaaguagcag

SEQ ID NO: 71426 - RNA, 22 nt, Human
ccaggagauuuuuccauagcac

SEQ ID NO: 71427 - RNA, 22 nt, Human
ccaggagcaggagcuggacaga

SEQ ID NO: 71428 - RNA, 19 nt, Human
ccaggagcaguggugagcu

SEQ ID NO: 71429 - RNA, 22 nt, Human
cacaagaugguuuccagaugcu

SEQ ID NO: 71430 - RNA, 22 nt, Human
cacaagcugggcaaguguauau

SEQ ID NO: 71431 - RNA, 22 nt, Human
cacaaggccuuguagaccacgg

SEQ ID NO: 71432 - RNA, 18 nt, Human
cacaauagacaccgauaa

SEQ ID NO: 71433 - RNA, 22 nt, Human
cacaaugugguuugucaucuuu

SEQ ID NO: 71434 - RNA, 21 nt, Human
cacaauguuggccagguuggu

SEQ ID NO: 71435 - RNA, 22 nt, Human
cacaauuguaucagaaaauagu

SEQ ID NO: 71436 - RNA, 18 nt, Human
cacaauuuacagaugaca

SEQ ID NO: 71437 - RNA, 22 nt, Human
cacacagaaccgcucgccacuu

SEQ ID NO: 71438 - RNA, 22 nt, Human
cacacagaugguaagggaggga

SEQ ID NO: 71439 - RNA, 22 nt, Human
cacacaggaugaagcagcagaa

SEQ ID NO: 71440 - RNA, 22 nt, Human
cacacaguaguaugaggcaaaa

SEQ ID NO: 71441 - RNA, 22 nt, Human
cacacaguggaguauuacucag

SEQ ID NO: 71442 - RNA, 22 nt, Human
cacacaucuuaucccaguuauu

SEQ ID NO: 71443 - RNA, 22 nt, Human
cacacaugagucuccccauugg

SEQ ID NO: 71444 - RNA, 22 nt, Human
cacacaugguuccgcaggaugc

SEQ ID NO: 71445 - RNA, 22 nt, Human
cacacaugugggauccgcaggg

SEQ ID NO: 71446 - RNA, 22 nt, Human
cacacauuagagccaaugucag

SEQ ID NO: 71447 - RNA, 22 nt, Human
cacacauuccaaaaucaagggu

SEQ ID NO: 71448 - RNA, 22 nt, Human
cacacauugaauucauucuugu

SEQ ID NO: 71449 - RNA, 22 nt, Human
cacacauugguuuuacuccuuu

SEQ ID NO: 71450 - RNA, 22 nt, Human
cacaccagauggcagcguggga

SEQ ID NO: 71451 - RNA, 22 nt, Human
cacacccucgugcucccucccg

SEQ ID NO: 71452 - RNA, 22 nt, Human
cacaccucacaccucgcaugcu

SEQ ID NO: 71453 - RNA, 22 nt, Human
cacaccuguaauccuagcacuu

SEQ ID NO: 71454 - RNA, 22 nt, Human
cacaccugugagucucggcuug

SEQ ID NO: 71455 - RNA, 22 nt, Human
cacacgugugagagcuguggca

SEQ ID NO: 71456 - RNA, 22 nt, Human
cacacuaauuuuucaagaguuu

SEQ ID NO: 71457 - RNA, 22 nt, Human
cacacucauuagucauuucucu

SEQ ID NO: 71458 - RNA, 22 nt, Human
cacacugacuggaaucaaggau

SEQ ID NO: 71459 - RNA, 22 nt, Human
cacacugccacauucacucuuc

SEQ ID NO: 71460 - RNA, 22 nt, Human
cacacugucuuuaugagcugua

SEQ ID NO: 71461 - RNA, 22 nt, Human
cacacuguugaggacgagaugu

SEQ ID NO: 71462 - RNA, 22 nt, Human
cacacuugcuucagagucaagu

SEQ ID NO: 71463 - RNA, 22 nt, Human
cacacuuugugcuaaucuauuu

SEQ ID NO: 71464 - RNA, 22 nt, Human
cacacuuuuggcauguuugguu

SEQ ID NO: 71465 - RNA, 22 nt, Human
cacagaaaaaggcuugaaaauc

SEQ ID NO: 71466 - RNA, 22 nt, Human
cacagaaauauugugucccuug

SEQ ID NO: 71467 - RNA, 22 nt, Human
cacagaacaccaaagaaccuuc

SEQ ID NO: 71468 - RNA, 22 nt, Human
cacagaacauccuuagcucaug

SEQ ID NO: 71469 - RNA, 22 nt, Human
cacagaauaauucacauggcuc

SEQ ID NO: 71470 - RNA, 21 nt, Human
cacagaauauacauuuuaguu

SEQ ID NO: 71471 - RNA, 22 nt, Human
cacagaaucggccgauggugcu

SEQ ID NO: 71472 - RNA, 22 nt, Human
cacagaaucugugacuccaaga

SEQ ID NO: 71473 - RNA, 22 nt, Human
cacagacagugucccuuuguug

SEQ ID NO: 71474 - RNA, 22 nt, Human
cacagacuccccgccauagugg

SEQ ID NO: 71475 - RNA, 20 nt, Human
cacagacuguaugggcacca

SEQ ID NO: 71476 - RNA, 22 nt, Human
cacagacuugagaagcaccuua

SEQ ID NO: 71477 - RNA, 22 nt, Human
cacagagaaaauguuggugcuu

SEQ ID NO: 71478 - RNA, 22 nt, Human
cacagagaauacugcucuugcu

SEQ ID NO: 71479 - RNA, 22 nt, Human
cacagagaauucccauauguga

SEQ ID NO: 71480 - RNA, 22 nt, Human
cacagagacagaagcacuuaug

SEQ ID NO: 71481 - RNA, 22 nt, Human
cacagagacaugaugucauugc

SEQ ID NO: 71482 - RNA, 22 nt, Human
cacagagaccccuucuggggcc

SEQ ID NO: 71483 - RNA, 21 nt, Human
cacagagauauuggugagccu

SEQ ID NO: 71484 - RNA, 22 nt, Human
cacagagaucggaacagaagua

SEQ ID NO: 71485 - RNA, 22 nt, Human
cacagagauuagaauuagacua

SEQ ID NO: 71486 - RNA, 22 nt, Human
cacagagcaacucaaaucagcu

SEQ ID NO: 71487 - RNA, 22 nt, Human
cacagaggaaaugacuuucuua

SEQ ID NO: 71488 - RNA, 22 nt, Human
cacagaggaaugcaucagcaga

SEQ ID NO: 71489 - RNA, 22 nt, Human
cacagaggcaugacccugcccu

SEQ ID NO: 71490 - RNA, 21 nt, Human
cacagaggcgcuguauggcug

SEQ ID NO: 71491 - RNA, 22 nt, Human
cacagaugaaguaaacaacucu

SEQ ID NO: 71492 - RNA, 22 nt, Human
uacaagugugcaccaccauguc

SEQ ID NO: 71493 - RNA, 22 nt, Human
uacaaguuucaaagagaucaug

SEQ ID NO: 71494 - RNA, 20 nt, Human
uacaauacacaugcauauga

SEQ ID NO: 71495 - RNA, 20 nt, Human
uacaauauucccacuuugcu

SEQ ID NO: 71496 - RNA, 22 nt, Human
uacaaucacccaaaaguggcuc

SEQ ID NO: 71497 - RNA, 22 nt, Human
uacaaugagcugagccagaggc

SEQ ID NO: 71498 - RNA, 22 nt, Human
uacaaugagcuguacaucucca

SEQ ID NO: 71499 - RNA, 22 nt, Human
uacaaugaugauacuuuacugg

SEQ ID NO: 71500 - RNA, 23 nt, Human
uacaaugcaaacuuggcccaugg

SEQ ID NO: 71501 - RNA, 22 nt, Human
uacaaugcauucauuuuugagg

SEQ ID NO: 71502 - RNA, 22 nt, Human
uacaauguacuuccuugcacag

SEQ ID NO: 71503 - RNA, 16 nt, Human
uacaauguagaaaaca

SEQ ID NO: 71504 - RNA, 22 nt, Human
uacaaugucucucaccugacuu

SEQ ID NO: 71505 - RNA, 22 nt, Human
uacaauguugguaaaguaucau

SEQ ID NO: 71506 - RNA, 22 nt, Human
uacaauuacucagcucugcugu

SEQ ID NO: 71507 - RNA, 21 nt, Human
uacacaaagcgugguccagag

SEQ ID NO: 71508 - RNA, 22 nt, Human
uacacaauuaguugcaaaguga

SEQ ID NO: 71509 - RNA, 22 nt, Human
uacacagaaauuguguagggau

SEQ ID NO: 71510 - RNA, 22 nt, Human
uacacaggguauggcuugagga

SEQ ID NO: 71511 - RNA, 22 nt, Human
uacacauacauugcuuacaagg

SEQ ID NO: 71512 - RNA, 22 nt, Human
uacacauauguguguauaugug

SEQ ID NO: 71513 - RNA, 22 nt, Human
uacacaucaaccuggcuuuggc

SEQ ID NO: 71514 - RNA, 22 nt, Human
uacacaucauacacugggauua

SEQ ID NO: 71515 - RNA, 22 nt, Human
uacacauguccaaggugucacc

SEQ ID NO: 71516 - RNA, 22 nt, Human
uacacaugugcacgcguguccu

SEQ ID NO: 71517 - RNA, 22 nt, Human
uacacauuagugagguauuuug

SEQ ID NO: 71518 - RNA, 22 nt, Human
uacacauuucucuuagagacac

SEQ ID NO: 71519 - RNA, 22 nt, Human
uacaccagcuugccugggcucu

SEQ ID NO: 71520 - RNA, 22 nt, Human
uacaccauucccagguggauuu

SEQ ID NO: 71521 - RNA, 22 nt, Human
uacaccauuuucugcaguguuu

SEQ ID NO: 71522 - RNA, 22 nt, Human
uacacccacaugccuaggaggg

SEQ ID NO: 71523 - RNA, 22 nt, Human
uacaccuuaaucauaugugucu

SEQ ID NO: 71524 - RNA, 22 nt, Human
uacacgugcaaauucaauguau

SEQ ID NO: 71525 - RNA, 22 nt, Human
uacacuaagaacaaagaucugu

SEQ ID NO: 71526 - RNA, 22 nt, Human
uacacuaauagccacacuaaug

SEQ ID NO: 71527 - RNA, 22 nt, Human
uacacuacacgaaggcauugca

SEQ ID NO: 71528 - RNA, 22 nt, Human
uacacuauuuuacugauacaaa

SEQ ID NO: 71529 - RNA, 22 nt, Human
uacacugaauacuaguuuuccu

SEQ ID NO: 71530 - RNA, 22 nt, Human
uacacuggagcccuuggggucu

SEQ ID NO: 71531 - RNA, 22 nt, Human
uacacuggccaaaugccuuugg

SEQ ID NO: 71532 - RNA, 22 nt, Human
uacacuguagguggcaggcagc

SEQ ID NO: 71533 - RNA, 22 nt, Human
uacacugugguaaacucaaagu

SEQ ID NO: 71534 - RNA, 22 nt, Human
uacacuuuauggauccuacuuu

SEQ ID NO: 71535 - RNA, 22 nt, Human
uacacuuucguuuguggauuag

SEQ ID NO: 71536 - RNA, 22 nt, Human
uacacuuuuuacuacagauucu

SEQ ID NO: 71537 - RNA, 20 nt, Human
uacagaaacaggacuuuugg

SEQ ID NO: 71538 - RNA, 22 nt, Human
uacagaaauugccaccagcucu

SEQ ID NO: 71539 - RNA, 22 nt, Human
uacagaacugaaguagugaaaa

SEQ ID NO: 71540 - RNA, 22 nt, Human
uacagaaggaaguuuagcuaaa

SEQ ID NO: 71541 - RNA, 17 nt, Human
uacagaaggcaccacaa

SEQ ID NO: 71542 - RNA, 22 nt, Human
uacagaauagaauagggacagg

SEQ ID NO: 71543 - RNA, 22 nt, Human
uacagaaugauguguuuaaaua

SEQ ID NO: 71544 - RNA, 22 nt, Human
uacagaauguguaucauuacca

SEQ ID NO: 71545 - RNA, 22 nt, Human
uacagaauuagauuauuagaga

SEQ ID NO: 71546 - RNA, 22 nt, Human
uacagacagacuucccacccuc

SEQ ID NO: 71547 - RNA, 22 nt, Human
uacagacauucaauuuugaccc

SEQ ID NO: 71548 - RNA, 22 nt, Human
uacagacauuuacuccacuccu

SEQ ID NO: 71549 - RNA, 22 nt, Human
uacagaccaguaguucucagcg

SEQ ID NO: 71550 - RNA, 22 nt, Human
uacagagaggugacccuugggc

SEQ ID NO: 71551 - RNA, 22 nt, Human
uacagagaugugaaaagcucua

SEQ ID NO: 71552 - RNA, 22 nt, Human
uacagaggaggggauuuuaaua

SEQ ID NO: 71553 - RNA, 22 nt, Human
uacagaggcacaugcaauuuuc

SEQ ID NO: 71554 - RNA, 22 nt, Human
uacagagggauuaucuaagggu

SEQ ID NO: 71555 - RNA, 22 nt, Human
uacagaguuuuccugccaagaa

SEQ ID NO: 71556 - RNA, 22 nt, Human
uacagauaaauuuuaaguagaa

SEQ ID NO: 71557 - RNA, 22 nt, Human
uacagauacagaucuagauaca

SEQ ID NO: 71558 - RNA, 22 nt, Human
uacagauauagagauuuauaga

SEQ ID NO: 71559 - RNA, 22 nt, Human
uacagauauuucucuucaacaa

SEQ ID NO: 71560 - RNA, 18 nt, Human
uacagauuauagauacau

SEQ ID NO: 71561 - RNA, 22 nt, Human
uacagauuuggggaguaaaguu

SEQ ID NO: 71562 - RNA, 22 nt, Human
uacagcaagacagaccgcucaa

SEQ ID NO: 71563 - RNA, 22 nt, Human
uacagcaauaaugacaccgcuc

SEQ ID NO: 71564 - RNA, 22 nt, Human
uacagcacaaagggccuuuacc

SEQ ID NO: 71565 - RNA, 22 nt, Human
uacagcagcccaccuucuucug

SEQ ID NO: 71566 - RNA, 22 nt, Human
uacagcaugaucacaauggaaa

SEQ ID NO: 71567 - RNA, 22 nt, Human
uacagcauuuuguagaguacua

SEQ ID NO: 71568 - RNA, 22 nt, Human
uacagccucaucacgggagcug

SEQ ID NO: 71569 - RNA, 22 nt, Human
uacagccucuucccuggagugg

SEQ ID NO: 71570 - RNA, 22 nt, Human
uacagccuggcacuacccuggg

SEQ ID NO: 71571 - RNA, 22 nt, Human
uacagcuagagggcacgugaac

SEQ ID NO: 71572 - RNA, 22 nt, Human
uacagcuaggcaaaaaugacau

SEQ ID NO: 71573 - RNA, 22 nt, Human
uacagcuaugucuugguguucu

SEQ ID NO: 71574 - RNA, 22 nt, Human
uacagcugcaaggguuucuggg

SEQ ID NO: 71575 - RNA, 22 nt, Human
uacagcugcuggugcuccaugc

SEQ ID NO: 71576 - RNA, 22 nt, Human
uacagcuugauguuuguguguu

SEQ ID NO: 71577 - RNA, 18 nt, Human
uacaggaaaaguguuaca

SEQ ID NO: 71578 - RNA, 22 nt, Human
uacaggaaagaaauuugaacuc

SEQ ID NO: 71579 - RNA, 22 nt, Human
uacaggaaccagauuguucagc

SEQ ID NO: 71580 - RNA, 22 nt, Human
uacaggaagcacucaagaaaug

SEQ ID NO: 71581 - RNA, 22 nt, Human
uacaggaagucucaguacagua

SEQ ID NO: 71582 - RNA, 20 nt, Human
uacaggaccuucuuuguauc

SEQ ID NO: 71583 - RNA, 22 nt, Human
uacaggcugaacucaaugauga

SEQ ID NO: 71584 - RNA, 22 nt, Human
uacagggacauggaacaggcuc

SEQ ID NO: 71585 - RNA, 22 nt, Human
uacagggauuguuuuaaucacc

SEQ ID NO: 71586 - RNA, 22 nt, Human
uacagggcugagugagacaugg

SEQ ID NO: 71587 - RNA, 22 nt, Human
uacagguaaaauuaucagaaac

SEQ ID NO: 71588 - RNA, 22 nt, Human
uacagguagcaaaaccuuuccu

SEQ ID NO: 71589 - RNA, 22 nt, Human
uacagguuacacuuuuaaaagu

SEQ ID NO: 71590 - RNA, 22 nt, Human
uacaguaaccagucuacuuaga

SEQ ID NO: 71591 - RNA, 22 nt, Human
uacaguaaccuuauuugucauu

SEQ ID NO: 71592 - RNA, 21 nt, Human
uacaguaaguugggugguccu

SEQ ID NO: 71593 - RNA, 22 nt, Human
uaccauuucauucuuuccucau

SEQ ID NO: 71594 - RNA, 22 nt, Human
uaccauuuugaggauggagaga

SEQ ID NO: 71595 - RNA, 22 nt, Human
uacccaaggcccuuucaauuuc

SEQ ID NO: 71596 - RNA, 22 nt, Human
uacccacagccucucuucaaaa

SEQ ID NO: 71597 - RNA, 22 nt, Human
uacccacugucauauucagggu

SEQ ID NO: 71598 - RNA, 22 nt, Human
uacccagagggagagcaacuau

SEQ ID NO: 71599 - RNA, 22 nt, Human
uacccagauucacaagccaagg

SEQ ID NO: 71600 - RNA, 22 nt, Human
uacccagcccaugccuaccuca

SEQ ID NO: 71601 - RNA, 22 nt, Human
uauuaacauuuuaugaaaauaa

SEQ ID NO: 71602 - RNA, 22 nt, Human
uauuaagagauguaugaagaga

SEQ ID NO: 71603 - RNA, 22 nt, Human
uauuaagauacguaguuguaaa

SEQ ID NO: 71604 - RNA, 22 nt, Human
uauuaaguaucuugaugacaaa

SEQ ID NO: 71605 - RNA, 22 nt, Human
uauuaauaaauauguaggggcc

SEQ ID NO: 71606 - RNA, 20 nt, Human
uauuacacacaaugagcagu

SEQ ID NO: 71607 - RNA, 22 nt, Human
uauuacacuuucuucuucaagc

SEQ ID NO: 71608 - RNA, 22 nt, Human
uauuacagaaucaggcauaacu

SEQ ID NO: 71609 - RNA, 22 nt, Human
uauuacagcuuugauuaucugg

SEQ ID NO: 71610 - RNA, 22 nt, Human
uauuacuaccaucugcuacuau

SEQ ID NO: 71611 - RNA, 22 nt, Human
uauuacugagguuuuauggagu

SEQ ID NO: 71612 - RNA, 22 nt, Human
uauuagaaaggcuauugcauag

SEQ ID NO: 71613 - RNA, 22 nt, Human
uauuagauuaacuuuaaugucu

SEQ ID NO: 71614 - RNA, 22 nt, Human
uauuagauuuguuucuguagau

SEQ ID NO: 71615 - RNA, 22 nt, Human
uauuagcaaccaagagccucua

SEQ ID NO: 71616 - RNA, 22 nt, Human
uauuagcaacguaaccucugaa

SEQ ID NO: 71617 - RNA, 22 nt, Human
uauuagcacaaagcaagguauu

SEQ ID NO: 71618 - RNA, 22 nt, Human
uauuagcaguuguaugugucug

SEQ ID NO: 71619 - RNA, 21 nt, Human
uauuagcuucuggugcuguuu

SEQ ID NO: 71620 - RNA, 22 nt, Human
uauuagcuuuagccuuuggaug

SEQ ID NO: 71621 - RNA, 20 nt, Human
uauuaggaaggaggaaggaa

SEQ ID NO: 71622 - RNA, 22 nt, Human
uauuagguagauuuuacugauu

SEQ ID NO: 71623 - RNA, 22 nt, Human
uauuagguuggugcaaaaagua

SEQ ID NO: 71624 - RNA, 22 nt, Human
uauuagguuggugcaaaaguca

SEQ ID NO: 71625 - RNA, 22 nt, Human
uauuagugaaagaauuaguuug

SEQ ID NO: 71626 - RNA, 22 nt, Human
uauuaucagagcuauuuggaau

SEQ ID NO: 71627 - RNA, 22 nt, Human
uauuaucauguuaauuaguggg

SEQ ID NO: 71628 - RNA, 22 nt, Human
uauuaucauuaacuguugaauu

SEQ ID NO: 71629 - RNA, 22 nt, Human
uauuaucuaguaacugauagug

SEQ ID NO: 71630 - RNA, 22 nt, Human
uauuaugaggacugguguaagg

SEQ ID NO: 71631 - RNA, 22 nt, Human
uauuaugauucggacguggcag

SEQ ID NO: 71632 - RNA, 22 nt, Human
uauuauggcagcauucaguaug

SEQ ID NO: 71633 - RNA, 22 nt, Human
uauuauguaaagguuauugcag

SEQ ID NO: 71634 - RNA, 22 nt, Human
uauuauuaucuuugaaugggac

SEQ ID NO: 71635 - RNA, 22 nt, Human
uauuauugacauuuacuuggug

SEQ ID NO: 71636 - RNA, 19 nt, Human
uauuauuuguagcaaggcc

SEQ ID NO: 71637 - RNA, 22 nt, Human
uauucaaaguaccuucauugcc

SEQ ID NO: 71638 - RNA, 20 nt, Human
uauucaacuuuaaaaacuua

SEQ ID NO: 71639 - RNA, 22 nt, Human
uauucaagauugaacuggcaga

SEQ ID NO: 71640 - RNA, 22 nt, Human
uauucacaggcacgaaauauug

SEQ ID NO: 71641 - RNA, 22 nt, Human
uauucacaguugauuuacaguu

SEQ ID NO: 71642 - RNA, 22 nt, Human
uauucacauuaauaagucuuca

SEQ ID NO: 71643 - RNA, 22 nt, Human
uauucagaguauuccaugaggu

SEQ ID NO: 71644 - RNA, 22 nt, Human
uauucagauuacuugugccugc

SEQ ID NO: 71645 - RNA, 22 nt, Human
uauucaguggaaaauguguuga

SEQ ID NO: 71646 - RNA, 22 nt, Human
uauucaugacauugcauaugca

SEQ ID NO: 71647 - RNA, 22 nt, Human
uauucaugagauaggcaguuuu

SEQ ID NO: 71648 - RNA, 22 nt, Human
uauucaugggaggucacaacuu

SEQ ID NO: 71649 - RNA, 22 nt, Human
uauucauggggguccagguacc

SEQ ID NO: 71650 - RNA, 22 nt, Human
uauuccaaaaucccaaacugcc

SEQ ID NO: 71651 - RNA, 22 nt, Human
uauuccaagcacagcaacccag

SEQ ID NO: 71652 - RNA, 22 nt, Human
uauuccagguauucuucaagag

SEQ ID NO: 71653 - RNA, 22 nt, Human
uauuccuauuucuaaacauaug

SEQ ID NO: 71654 - RNA, 22 nt, Human
uauuccucccaguaaguacaac

SEQ ID NO: 71655 - RNA, 23 nt, Human
uauuccugguaagccugucacug

SEQ ID NO: 71656 - RNA, 22 nt, Human
uauuccugucaagaucuuacaa

SEQ ID NO: 71657 - RNA, 22 nt, Human
uauuccuuggcaaaaaauauau

SEQ ID NO: 71658 - RNA, 22 nt, Human
uauucucugcagcugaauguuu

SEQ ID NO: 71659 - RNA, 22 nt, Human
uauucugcuaagugauuucuac

SEQ ID NO: 71660 - RNA, 22 nt, Human
uauucuugacugcuuacuaugu

SEQ ID NO: 71661 - RNA, 22 nt, Human
uauucuuguauacuacaaucuu

SEQ ID NO: 71662 - RNA, 22 nt, Human
uauugacacuuuuuguguagcc

SEQ ID NO: 71663 - RNA, 22 nt, Human
uauugacagagggucagaagag

SEQ ID NO: 71664 - RNA, 22 nt, Human
uauugacagaugcauuauguug

SEQ ID NO: 71665 - RNA, 22 nt, Human
uauugagaacccucaggaggca

SEQ ID NO: 71666 - RNA, 23 nt, Human
uauugcacaaagagaugcacagg

SEQ ID NO: 71667 - RNA, 22 nt, Human
uauugcacaugcgcuagaacca

SEQ ID NO: 71668 - RNA, 21 nt, Human
uauugcauaacaaauuacccu

SEQ ID NO: 71669 - RNA, 22 nt, Human
uauugcaucuuaguguaaguca

SEQ ID NO: 71670 - RNA, 20 nt, Human
uauugccuaaauaccagaau

SEQ ID NO: 71671 - RNA, 22 nt, Human
uauugcuaugagcauuguucuu

SEQ ID NO: 71672 - RNA, 22 nt, Human
uauugcugaggauugaggcuug

SEQ ID NO: 71673 - RNA, 22 nt, Human
uauugcugccaggacccuaucc

SEQ ID NO: 71674 - RNA, 22 nt, Human
uauugcuuaaaaaauaugugag

SEQ ID NO: 71675 - RNA, 22 nt, Human
uauugcuuauaauuuguugcaa

SEQ ID NO: 71676 - RNA, 22 nt, Human
uauugcuuauucuugagaguca

SEQ ID NO: 71677 - RNA, 22 nt, Human
uauugcuucauaauuguugcca

SEQ ID NO: 71678 - RNA, 22 nt, Human
uauugcuuucucagacguuuag

SEQ ID NO: 71679 - RNA, 22 nt, Human
uauugcuuugugucauaagcaa

SEQ ID NO: 71680 - RNA, 22 nt, Human
uauuggaaugcacugggagaga

SEQ ID NO: 71681 - RNA, 22 nt, Human
uauuggaguauggggcuggagu

SEQ ID NO: 71682 - RNA, 20 nt, Human
uauuggaucuaagaaauggg

SEQ ID NO: 71683 - RNA, 22 nt, Human
uauuggaugaagaaaggaagga

SEQ ID NO: 71684 - RNA, 22 nt, Human
uauuggauugagacauuuuaga

SEQ ID NO: 71685 - RNA, 22 nt, Human
uauugguaggacucagcugaga

SEQ ID NO: 71686 - RNA, 22 nt, Human
uauugguaucugagacagaguu

SEQ ID NO: 71687 - RNA, 22 nt, Human
uauuguaucuucuguuuagaag

SEQ ID NO: 71688 - RNA, 22 nt, Human
uauugucugcaaagguuuauaa

SEQ ID NO: 71689 - RNA, 22 nt, Human
uauugugcucaccauuacaucc

SEQ ID NO: 71690 - RNA, 22 nt, Human
uauuuaaaauaagccccagugg

SEQ ID NO: 71691 - RNA, 22 nt, Human
uauuuaaccaguuaaauuucca

SEQ ID NO: 71692 - RNA, 22 nt, Human
uauuuaacuggaaacacaauga

SEQ ID NO: 71693 - RNA, 20 nt, Human
uauuuacaacuuagagccuc

SEQ ID NO: 71694 - RNA, 22 nt, Human
uauuuacccuggcagcuguagc

SEQ ID NO: 71695 - RNA, 19 nt, Human
uauuuacuucuugauugca

SEQ ID NO: 71696 - RNA, 22 nt, Human
uauuuagcuggagucagugcuu

SEQ ID NO: 71697 - RNA, 22 nt, Human
uauuuaucgagugucuacuaug

SEQ ID NO: 71698 - RNA, 22 nt, Human
uauuuauucauucagcaagcau

SEQ ID NO: 71699 - RNA, 22 nt, Human
uauuucaagaacuucuauccau

SEQ ID NO: 71700 - RNA, 22 nt, Human
uauuucaccucacccaggagaa

SEQ ID NO: 71701 - RNA, 22 nt, Human
uauuucaccuuacuaagcugug

SEQ ID NO: 71702 - RNA, 22 nt, Human
uauuucacuauucucuguaacu

SEQ ID NO: 71703 - RNA, 20 nt, Human
uauuucacucuccagauggc

SEQ ID NO: 71704 - RNA, 22 nt, Human
uauuucagacacugaucuugca

SEQ ID NO: 71705 - RNA, 22 nt, Human
uauuucagcacaugggauaggu

SEQ ID NO: 71706 - RNA, 22 nt, Human
uauuucagcccuacuacuuggc

SEQ ID NO: 71707 - RNA, 22 nt, Human
uauuucagcucuuuggauuauc

SEQ ID NO: 71708 - RNA, 22 nt, Human
uauuucaucuggaacaagguaa

SEQ ID NO: 71709 - RNA, 22 nt, Human
uauuuccauguuagaacuaagu

SEQ ID NO: 71710 - RNA, 22 nt, Human
ucaggagcagcaugggugagag

SEQ ID NO: 71711 - RNA, 20 nt, Human
ucaggagccuaggacaugau

SEQ ID NO: 71712 - RNA, 22 nt, Human
ucaggagcuauggacugucaaa

SEQ ID NO: 71713 - RNA, 22 nt, Human
ucaggaggagcucauaaguuug

SEQ ID NO: 71714 - RNA, 22 nt, Human
ucaggaggaugucggcaaauuu

SEQ ID NO: 71715 - RNA, 22 nt, Human
ucaggaggccggcaggauuuga

SEQ ID NO: 71716 - RNA, 22 nt, Human
ucaggaggcggugcugccuuug

SEQ ID NO: 71717 - RNA, 22 nt, Human
ucaggagggcuaagacuguagc

SEQ ID NO: 71718 - RNA, 22 nt, Human
ucaggagguaggacauacuggu

SEQ ID NO: 71719 - RNA, 22 nt, Human
ucaggagguccgcccgggaggg

SEQ ID NO: 71720 - RNA, 19 nt, Human
ucaggaggucgaccuggca

SEQ ID NO: 71721 - RNA, 22 nt, Human
ucaggaguaaggguaacccaga

SEQ ID NO: 71722 - RNA, 22 nt, Human
ucaggaguaaguuauaaguauu

SEQ ID NO: 71723 - RNA, 19 nt, Human
ucaggaguuaguugugcuc

SEQ ID NO: 71724 - RNA, 22 nt, Human
ucaggaguuucagguguaagug

SEQ ID NO: 71725 - RNA, 23 nt, Human
ucaggauauugugugccaaggug

SEQ ID NO: 71726 - RNA, 17 nt, Human
ucaggauccaggguucu

SEQ ID NO: 71727 - RNA, 22 nt, Human
ucaggaugaagucagagggguc

SEQ ID NO: 71728 - RNA, 22 nt, Human
ucaggaugagcucauaacuaug

SEQ ID NO: 71729 - RNA, 22 nt, Human
ucaggauggagggaagcacaga

SEQ ID NO: 71730 - RNA, 22 nt, Human
ucaggaugguccuuuaugagaa

SEQ ID NO: 71731 - RNA, 20 nt, Human
ucaggaugugcugagugaag

SEQ ID NO: 71732 - RNA, 22 nt, Human
ucaggcacccucuauuuucauc

SEQ ID NO: 71733 - RNA, 22 nt, Human
ucaggcacugcuuucugauaug

SEQ ID NO: 71734 - RNA, 23 nt, Human
ucaggcagcugggguaguuggag

SEQ ID NO: 71735 - RNA, 22 nt, Human
ucaggcaggaucccagggaagg

SEQ ID NO: 71736 - RNA, 22 nt, Human
ucaggcagguuggcugcagguc

SEQ ID NO: 71737 - RNA, 22 nt, Human
ucaggcagucugacuccggagg

SEQ ID NO: 71738 - RNA, 20 nt, Human
ucaggcaguggggaaaggca

SEQ ID NO: 71739 - RNA, 22 nt, Human
ucaggccacggcucacugagac

SEQ ID NO: 71740 - RNA, 22 nt, Human
ucaggcccagagucacggaucc

SEQ ID NO: 71741 - RNA, 22 nt, Human
ucaggccccaucccagacuuau

SEQ ID NO: 71742 - RNA, 22 nt, Human
ucaggccucaagcugcuuuaag

SEQ ID NO: 71743 - RNA, 22 nt, Human
ucaggccuggagaaaggaauga

SEQ ID NO: 71744 - RNA, 22 nt, Human
ucaggcuaagggagaggcgcuc

SEQ ID NO: 71745 - RNA, 22 nt, Human
ucaggcuagcccagugcuuggg

SEQ ID NO: 71746 - RNA, 22 nt, Human
ucaggcucccugcugggcucug

SEQ ID NO: 71747 - RNA, 22 nt, Human
ucaggcucucagaccaacagca

SEQ ID NO: 71748 - RNA, 22 nt, Human
ucaggcucugagcugaugcuaa

SEQ ID NO: 71749 - RNA, 22 nt, Human
uauauuuuagacacccucacgc

SEQ ID NO: 71750 - RNA, 22 nt, Human
uaucaaaguuguccugugaagu

SEQ ID NO: 71751 - RNA, 21 nt, Human
uaucaagauguuaugguugaa

SEQ ID NO: 71752 - RNA, 22 nt, Human
uaucaauaucucagugugcuuc

SEQ ID NO: 71753 - RNA, 22 nt, Human
uaucacacauaacuaagcugca

SEQ ID NO: 71754 - RNA, 22 nt, Human
uaucacacuagccuauagugga

SEQ ID NO: 71755 - RNA, 22 nt, Human
uaucacacucggaaaucuagga

SEQ ID NO: 71756 - RNA, 21 nt, Human
uaucacaguagaauaggaucu

SEQ ID NO: 71757 - RNA, 22 nt, Human
uaucaccagagggauagucucu

SEQ ID NO: 71758 - RNA, 22 nt, Human
uaucacugaccuguaucaguug

SEQ ID NO: 71759 - RNA, 18 nt, Human
uaucacugcugaacaaga

SEQ ID NO: 71760 - RNA, 22 nt, Human
uaucagaaacucuggggcaggg

SEQ ID NO: 71761 - RNA, 22 nt, Human
uaucagaacacagccacagcca

SEQ ID NO: 71762 - RNA, 22 nt, Human
uaucagaaggaagugccuuuaa

SEQ ID NO: 71763 - RNA, 22 nt, Human
uaucagcaggccaaagcugcaa

SEQ ID NO: 71764 - RNA, 22 nt, Human
uaucaggaggaaauuuccauug

SEQ ID NO: 71765 - RNA, 22 nt, Human
uaucaguaggguugaacuuugg

SEQ ID NO: 71766 - RNA, 22 nt, Human
uaucaguggucacaagauacau

SEQ ID NO: 71767 - RNA, 22 nt, Human
uaucagugugcaucucugaaug

SEQ ID NO: 71768 - RNA, 22 nt, Human
uaucauaaguuaauuaaacagu

SEQ ID NO: 71769 - RNA, 22 nt, Human
uaucaucacuguaauccguuga

SEQ ID NO: 71770 - RNA, 22 nt, Human
uaucaucugcaaagcacaucua

SEQ ID NO: 71771 - RNA, 22 nt, Human
uaucauguugaauuucugagaa

SEQ ID NO: 71772 - RNA, 22 nt, Human
uaucauuguguuugccagucac

SEQ ID NO: 71773 - RNA, 22 nt, Human
uaucauuuuacugugacauuuu

SEQ ID NO: 71774 - RNA, 22 nt, Human
uauccaaaguuucucagaaacu

SEQ ID NO: 71775 - RNA, 22 nt, Human
uauccacacucaaggggagggg

SEQ ID NO: 71776 - RNA, 22 nt, Human
uauccacguaugauaaaacucu

SEQ ID NO: 71777 - RNA, 22 nt, Human
uauccaggaggaacucauuuug

SEQ ID NO: 71778 - RNA, 22 nt, Human
uauccauaccacuacuucccuu

SEQ ID NO: 71779 - RNA, 22 nt, Human
uauccauaguuuauagaucaag

SEQ ID NO: 71780 - RNA, 22 nt, Human
uauccauggccaaucaaauaca

SEQ ID NO: 71781 - RNA, 22 nt, Human
uauccguuguuaccagauaaga

SEQ ID NO: 71782 - RNA, 21 nt, Human
uaucuacuggugucuuucaga

SEQ ID NO: 71783 - RNA, 22 nt, Human
uaucuagaaauuucuuuuguug

SEQ ID NO: 71784 - RNA, 22 nt, Human
uaucuagagcagugguucucaa

SEQ ID NO: 71785 - RNA, 22 nt, Human
uaucuagagccuggaagucuug

SEQ ID NO: 71786 - RNA, 22 nt, Human
uaucuagaguccugcugagaac

SEQ ID NO: 71787 - RNA, 22 nt, Human
uaucuagauggauuuuagugaa

SEQ ID NO: 71788 - RNA, 22 nt, Human
uaucuagcaaguaacaugcuga

SEQ ID NO: 71789 - RNA, 22 nt, Human
uaucuauguggugaucuuauuu

SEQ ID NO: 71790 - RNA, 22 nt, Human
uaucuauuccaaauaucagcgu

SEQ ID NO: 71791 - RNA, 22 nt, Human
uaucucuagcgcacagaagaaa

SEQ ID NO: 71792 - RNA, 22 nt, Human
uaucucuaggcugccacuuaaa

SEQ ID NO: 71793 - RNA, 22 nt, Human
uaucucuguuccaagccuuauc

SEQ ID NO: 71794 - RNA, 22 nt, Human
uaucucuugcaugcuuuuuaga

SEQ ID NO: 71795 - RNA, 22 nt, Human
uaucucuugucuguuuugcaaa

SEQ ID NO: 71796 - RNA, 22 nt, Human
uaucugaacaaccuuuauuacu

SEQ ID NO: 71797 - RNA, 22 nt, Human
uaucugcaucugcauguguauu

SEQ ID NO: 71798 - RNA, 22 nt, Human
uaucugggaaggggagaauaga

SEQ ID NO: 71799 - RNA, 17 nt, Human
uaucuguguuccuggcu

SEQ ID NO: 71800 - RNA, 22 nt, Human
uaucuguucauguuuauauguc

SEQ ID NO: 71801 - RNA, 22 nt, Human
uaucuguucuuagcuauagaug

SEQ ID NO: 71802 - RNA, 22 nt, Human
uaucuguuggcuuuggaaauaa

SEQ ID NO: 71803 - RNA, 22 nt, Human
uaucuguuguaguacagaugau

SEQ ID NO: 71804 - RNA, 22 nt, Human
uaucuguuguccaugcagaaag

SEQ ID NO: 71805 - RNA, 22 nt, Human
uaucuuacagacugaauguugg

SEQ ID NO: 71806 - RNA, 20 nt, Human
uaucuuacuuuagucauuug

SEQ ID NO: 71807 - RNA, 22 nt, Human
uaucuuagggaauuaacuaaaa

SEQ ID NO: 71808 - RNA, 22 nt, Human
uaucuucaauuuauucaaggag

SEQ ID NO: 71809 - RNA, 22 nt, Human
uaucuucucaguauaugggaug

SEQ ID NO: 71810 - RNA, 22 nt, Human
uaucuugagagacaacacagca

SEQ ID NO: 71811 - RNA, 22 nt, Human
uaucuuuagaggaagagaaucu

SEQ ID NO: 71812 - RNA, 22 nt, Human
uaucuuuauuaugucuaucugc

SEQ ID NO: 71813 - RNA, 22 nt, Human
uaucuuugaugccagauguuac

SEQ ID NO: 71814 - RNA, 22 nt, Human
uaucuuugguagcuuuccuaag

SEQ ID NO: 71815 - RNA, 22 nt, Human
uaugaaaagguggccaauguag

SEQ ID NO: 71816 - RNA, 22 nt, Human
uaugaacuguaacccucaccgc

SEQ ID NO: 71817 - RNA, 22 nt, Human
uaugaacuguacuguacuaagc

SEQ ID NO: 71818 - RNA, 22 nt, Human
uaugaacugugagugugauggg

SEQ ID NO: 71819 - RNA, 22 nt, Human
uauacacaccuccaaagcagga

SEQ ID NO: 71820 - RNA, 22 nt, Human
uauacacauauacguuugugug

SEQ ID NO: 71821 - RNA, 22 nt, Human
uauacacauccuccaaagauag

SEQ ID NO: 71822 - RNA, 23 nt, Human
uauacacauguggcaguauagug

SEQ ID NO: 71823 - RNA, 22 nt, Human
uauacacauguguguauucaua

SEQ ID NO: 71824 - RNA, 22 nt, Human
uauacagaaagaauucaagucu

SEQ ID NO: 71825 - RNA, 22 nt, Human
uauacagauaaugaagaccaag

SEQ ID NO: 71826 - RNA, 22 nt, Human
uauacagauaucuaagauguaa

SEQ ID NO: 71827 - RNA, 22 nt, Human
uauacagauuucugggcaaucu

SEQ ID NO: 71828 - RNA, 21 nt, Human
uauacaguaauuaagugguau

SEQ ID NO: 71829 - RNA, 21 nt, Human
uauacaugugcacacacaugc

SEQ ID NO: 71830 - RNA, 22 nt, Human
uauacauguuuuacauaaguga

SEQ ID NO: 71831 - RNA, 22 nt, Human
uauaccuuuaccuugaccaaau

SEQ ID NO: 71832 - RNA, 20 nt, Human
uauacuaacauauaucuguu

SEQ ID NO: 71833 - RNA, 22 nt, Human
uauacugucgcauuacacucac

SEQ ID NO: 71834 - RNA, 22 nt, Human
uauacuguguuuucaccacugu

SEQ ID NO: 71835 - RNA, 22 nt, Human
uauagacuuggcaugcauguuc

SEQ ID NO: 71836 - RNA, 22 nt, Human
uauagcaaaguacuaccaacuc

SEQ ID NO: 71837 - RNA, 22 nt, Human
uauagcaagcucuuuguaacca

SEQ ID NO: 71838 - RNA, 22 nt, Human
uauagcaagcuuugagcuuuca

SEQ ID NO: 71839 - RNA, 22 nt, Human
uauagcagcaugauuuauaguc

SEQ ID NO: 71840 - RNA, 22 nt, Human
uauagcauggcuauauuguugc

SEQ ID NO: 71841 - RNA, 22 nt, Human
uauaggaaacauacgugacuag

SEQ ID NO: 71842 - RNA, 22 nt, Human
uauaggaaauuuaucuccuggg

SEQ ID NO: 71843 - RNA, 22 nt, Human
uauaggaaggcagauuuuagcu

SEQ ID NO: 71844 - RNA, 22 nt, Human
uauaggacugaucacauuuuca

SEQ ID NO: 71845 - RNA, 22 nt, Human
uauagguacuuggaaaauaagg

SEQ ID NO: 71846 - RNA, 22 nt, Human
uauagguagccauauuugauag

SEQ ID NO: 71847 - RNA, 22 nt, Human
uauagugcauuauuuacaguaa

SEQ ID NO: 71848 - RNA, 22 nt, Human
uauaguuaguuucauaaucaug

SEQ ID NO: 71849 - RNA, 22 nt, Human
uauaguuucaugagcuuuuuaa

SEQ ID NO: 71850 - RNA, 18 nt, Human
uauauagagaaacccauu

SEQ ID NO: 71851 - RNA, 22 nt, Human
uauauauaugcacacacaccua

SEQ ID NO: 71852 - RNA, 22 nt, Human
uauauaugggggaagcuggaug

SEQ ID NO: 71853 - RNA, 22 nt, Human
uauaucaccaaaaacaguucug

SEQ ID NO: 71854 - RNA, 22 nt, Human
uauaucagcaaagcauuuaaaa

SEQ ID NO: 71855 - RNA, 22 nt, Human
uauauccauuugucugcuaauu

SEQ ID NO: 71856 - RNA, 22 nt, Human
uauaucuaggaacccugagauu

SEQ ID NO: 71857 - RNA, 22 nt, Human
uauaucuuauaugugcagguac

SEQ ID NO: 71858 - RNA, 22 nt, Human
uauaugcuaauggugccauucc

SEQ ID NO: 71859 - RNA, 22 nt, Human
uauauguaaauaagucuaaugu

SEQ ID NO: 71860 - RNA, 22 nt, Human
uauauguagucagucagaguaa

SEQ ID NO: 71861 - RNA, 20 nt, Human
uauauguguacauacacaca

SEQ ID NO: 71862 - RNA, 22 nt, Human
uauauguuucuuacaaaauauu

SEQ ID NO: 71863 - RNA, 22 nt, Human
uauauuaacacccacuugccuc

SEQ ID NO: 71864 - RNA, 22 nt, Human
ucaggcucuggguacaccugac

SEQ ID NO: 71865 - RNA, 22 nt, Human
ucaggcugaaucauccuagcuu

SEQ ID NO: 71866 - RNA, 22 nt, Human
ucaggcugauaggaggaacuga

SEQ ID NO: 71867 - RNA, 18 nt, Human
ucaggcugcccugugucu

SEQ ID NO: 71868 - RNA, 22 nt, Human
ucaggcuggaaugcaguggggc

SEQ ID NO: 71869 - RNA, 18 nt, Human
ucaggcugggccuccuuc

SEQ ID NO: 71870 - RNA, 22 nt, Human
ucaggcuguauaucuugcacuc

SEQ ID NO: 71871 - RNA, 22 nt, Human
ucaggcuuccaggcucugcuga

SEQ ID NO: 71872 - RNA, 22 nt, Human
ucaggcuugucucuagagcaau

SEQ ID NO: 71873 - RNA, 22 nt, Human
ucaggcuuugggaaugccacuu

SEQ ID NO: 71874 - RNA, 22 nt, Human
ucaggcuuuuccugccuccuac

SEQ ID NO: 71875 - RNA, 22 nt, Human
ucagggaaaacaucccgccuaa

SEQ ID NO: 71876 - RNA, 22 nt, Human
ucagggaaacagguuuucccuu

SEQ ID NO: 71877 - RNA, 22 nt, Human
ucagggaaauagcagggcugaa

SEQ ID NO: 71878 - RNA, 22 nt, Human
ucagggaaauuuccauguguuu

SEQ ID NO: 71879 - RNA, 21 nt, Human
ucagggaagugugcagaaggg

SEQ ID NO: 71880 - RNA, 19 nt, Human
ucagggaaguucaaagcuc

SEQ ID NO: 71881 - RNA, 22 nt, Human
ucagggaaucagacucugcagc

SEQ ID NO: 71882 - RNA, 17 nt, Human
ucagggaaugagguugu

SEQ ID NO: 71883 - RNA, 22 nt, Human
ucagggaaugaugcacacaguu

SEQ ID NO: 71884 - RNA, 22 nt, Human
ucagggaccaccacucacccag

SEQ ID NO: 71885 - RNA, 22 nt, Human
ucagggacugcagagggaagcu

SEQ ID NO: 71886 - RNA, 22 nt, Human
ucagggagagugacccauccac

SEQ ID NO: 71887 - RNA, 22 nt, Human
ucagggaguaguuugugcuaug

SEQ ID NO: 71888 - RNA, 22 nt, Human
ucagggcaaaagggaaaccauu

SEQ ID NO: 71889 - RNA, 22 nt, Human
ucagggcaaagggcagaguuug

SEQ ID NO: 71890 - RNA, 22 nt, Human
ucagggcaaugucccucagaag

SEQ ID NO: 71891 - RNA, 22 nt, Human
ucagggcacauucugcaguggc

SEQ ID NO: 71892 - RNA, 22 nt, Human
ucagggcaccaaaaaagaugcc

SEQ ID NO: 71893 - RNA, 22 nt, Human
ucagggcacugucaccugauau

SEQ ID NO: 71894 - RNA, 22 nt, Human
ucagggcagaauccaaagaauu

SEQ ID NO: 71895 - RNA, 22 nt, Human
ucagggcaggacaguguaggcc

SEQ ID NO: 71896 - RNA, 22 nt, Human
ucagggcaggcgagcagcugcu

SEQ ID NO: 71897 - RNA, 19 nt, Human
ucagggcaguccggucccc

SEQ ID NO: 71898 - RNA, 22 nt, Human
ucagggcauacucuucaagguc

SEQ ID NO: 71899 - RNA, 22 nt, Human
ucagggcccucacuugcauagg

SEQ ID NO: 71900 - RNA, 22 nt, Human
ucagggccggggcuguggcgag

SEQ ID NO: 71901 - RNA, 22 nt, Human
ucagggcucaccagccucugcc

SEQ ID NO: 71902 - RNA, 22 nt, Human
ucagggcuggcuuuugcagagc

SEQ ID NO: 71903 - RNA, 22 nt, Human
ucaggggagguugaaucgucuc

SEQ ID NO: 71904 - RNA, 21 nt, Human
ucaggggcuguguuuuccauc

SEQ ID NO: 71905 - RNA, 22 nt, Human
ucaggguaaaccuucacuguga

SEQ ID NO: 71906 - RNA, 22 nt, Human
ucagggucagauuccagagccu

SEQ ID NO: 71907 - RNA, 21 nt, Human
ucaggguucaaaggaacugau

SEQ ID NO: 71908 - RNA, 22 nt, Human
ucaggguugugguggaauucag

SEQ ID NO: 71909 - RNA, 22 nt, Human
ucaggguuucggcucaacagaa

SEQ ID NO: 71910 - RNA, 22 nt, Human
ucagguccaagauggccaucca

SEQ ID NO: 71911 - RNA, 22 nt, Human
ucagguccagcuccugugccuc

SEQ ID NO: 71912 - RNA, 22 nt, Human
ucagguccucugggucccagcc

SEQ ID NO: 71913 - RNA, 22 nt, Human
ucagguccuuacugugcucccu

SEQ ID NO: 71914 - RNA, 22 nt, Human
ucaggucuauacuaugagaggc

SEQ ID NO: 71915 - RNA, 22 nt, Human
ucaggucugggcacaugguaca

SEQ ID NO: 71916 - RNA, 22 nt, Human
ucaggucuguacuauugucuug

SEQ ID NO: 71917 - RNA, 22 nt, Human
ucaggucuugagccaucaggau

SEQ ID NO: 71918 - RNA, 20 nt, Human
ucaggugacacacguggcac

SEQ ID NO: 71919 - RNA, 22 nt, Human
ucaggugaccugagccacuaug

SEQ ID NO: 71920 - RNA, 22 nt, Human
ucagguggaauuaauuaagaga

SEQ ID NO: 71921 - RNA, 22 nt, Human
ucagguggcuuggagggggacg

SEQ ID NO: 71922 - RNA, 22 nt, Human
ucaggugggaccugcuaggaca

SEQ ID NO: 71923 - RNA, 22 nt, Human
ucaggugggcaguggguugagc

SEQ ID NO: 71924 - RNA, 22 nt, Human
ucaggugguccuaagugccauc

SEQ ID NO: 71925 - RNA, 22 nt, Human
ucagguguauugaugucuguga

SEQ ID NO: 71926 - RNA, 22 nt, Human
ucaggugucugccucuuugagu

SEQ ID NO: 71927 - RNA, 22 nt, Human
ucagguguucuccacucaguuu

SEQ ID NO: 71928 - RNA, 22 nt, Human
ucacauuuuccuugguaucugu

SEQ ID NO: 71929 - RNA, 22 nt, Human
ucacauuuucuuaggaaacuua

SEQ ID NO: 71930 - RNA, 22 nt, Human
ucacauuuuguucaaggcuagu

SEQ ID NO: 71931 - RNA, 22 nt, Human
ucaccacucacucaggcaaguc

SEQ ID NO: 71932 - RNA, 22 nt, Human
ucaccaggauuccuaucaguag

SEQ ID NO: 71933 - RNA, 22 nt, Human
ucaccaggcaacuauguacucc

SEQ ID NO: 71934 - RNA, 22 nt, Human
ucaccagggcuccagccagccu

SEQ ID NO: 71935 - RNA, 22 nt, Human
ucaccauacauaaauuacauug

SEQ ID NO: 71936 - RNA, 22 nt, Human
ucacccagacagcuugcacuga

SEQ ID NO: 71937 - RNA, 22 nt, Human
ucacccagcagcugcuucugcu

SEQ ID NO: 71938 - RNA, 22 nt, Human
ucacccccuguauuaguagcua

SEQ ID NO: 71939 - RNA, 22 nt, Human
ucaccccuacauuucccuugcu

SEQ ID NO: 71940 - RNA, 22 nt, Human
ucaccccuaccaaggagcacug

SEQ ID NO: 71941 - RNA, 22 nt, Human
ucaccggugacccucggcucgc

SEQ ID NO: 71942 - RNA, 22 nt, Human
ucaccucucuggccgucuaccu

SEQ ID NO: 71943 - RNA, 22 nt, Human
ucaccucuuuuuuaacaggcuu

SEQ ID NO: 71944 - RNA, 22 nt, Human
ucaccugggagggcugugguag

SEQ ID NO: 71945 - RNA, 22 nt, Human
ucaccuuaacaaucugaccauc

SEQ ID NO: 71946 - RNA, 22 nt, Human
ucaccuugaaugcagcagcgug

SEQ ID NO: 71947 - RNA, 22 nt, Human
ucaccuugugaucucccugccu

SEQ ID NO: 71948 - RNA, 21 nt, Human
ucacguggucacaugagcuuu

SEQ ID NO: 71949 - RNA, 22 nt, Human
ucacuacugacagagaugugua

SEQ ID NO: 71950 - RNA, 22 nt, Human
ucacuagugguuucuggugguu

SEQ ID NO: 71951 - RNA, 22 nt, Human
ucacuaugcccagaauacaguu

SEQ ID NO: 71952 - RNA, 22 nt, Human
ucacuauguucggagaacucug

SEQ ID NO: 71953 - RNA, 22 nt, Human
ucacucaauaucccaguggggc

SEQ ID NO: 71954 - RNA, 22 nt, Human
ucacucagagauagccucauuu

SEQ ID NO: 71955 - RNA, 22 nt, Human
ucacucagccugccugguuccu

SEQ ID NO: 71956 - RNA, 22 nt, Human
ucacuccaaaccccaggcuugu

SEQ ID NO: 71957 - RNA, 22 nt, Human
ucacuccauagcuuaacucuuu

SEQ ID NO: 71958 - RNA, 19 nt, Human
ucacucucccugucugucc

SEQ ID NO: 71959 - RNA, 22 nt, Human
ucacucugauagauaagcuaac

SEQ ID NO: 71960 - RNA, 20 nt, Human
ucacucugaugcuagggugg

SEQ ID NO: 71961 - RNA, 21 nt, Human
ucacucugauuaggugucucu

SEQ ID NO: 71962 - RNA, 22 nt, Human
ucacucugguccauccgagagc

SEQ ID NO: 71963 - RNA, 22 nt, Human
ucacucuguguuucccugggac

SEQ ID NO: 71964 - RNA, 22 nt, Human
ucacugcaaggaggcuucucaa

SEQ ID NO: 71965 - RNA, 22 nt, Human
ucacugcagguuuuucaggagg

SEQ ID NO: 71966 - RNA, 22 nt, Human
ucacugcucagucuguacuaca

SEQ ID NO: 71967 - RNA, 22 nt, Human
ucacugcugcugccaugaugga

SEQ ID NO: 71968 - RNA, 22 nt, Human
ucacugcuuaacucaagaucuc

SEQ ID NO: 71969 - RNA, 22 nt, Human
ucacugcuucuuggagaauguc

SEQ ID NO: 71970 - RNA, 22 nt, Human
ucacugcuuugagccacugagc

SEQ ID NO: 71971 - RNA, 22 nt, Human
ucacuggauccuagcugagccu

SEQ ID NO: 71972 - RNA, 22 nt, Human
ucacuggauuaguuugaacugu

SEQ ID NO: 71973 - RNA, 22 nt, Human
ucacuggcaacuugugcucccu

SEQ ID NO: 71974 - RNA, 18 nt, Human
ucacugggagaagauauu

SEQ ID NO: 71975 - RNA, 22 nt, Human
ucacuggggccuuuggucagga

SEQ ID NO: 71976 - RNA, 22 nt, Human
ucacuguaaaguaauacuguca

SEQ ID NO: 71977 - RNA, 22 nt, Human
ucacuguagugagcagaauaua

SEQ ID NO: 71978 - RNA, 22 nt, Human
ucacugugcacauaugauaggu

SEQ ID NO: 71979 - RNA, 22 nt, Human
ucacugugguauauauguauca

SEQ ID NO: 71980 - RNA, 18 nt, Human
ucacugugugucuugggu

SEQ ID NO: 71981 - RNA, 22 nt, Human
ucacuguuaauaaauagcaaag

SEQ ID NO: 71982 - RNA, 22 nt, Human
ucacuguuagagcaaacguaug

SEQ ID NO: 71983 - RNA, 22 nt, Human
ucacuguugaccuggaaguggg

SEQ ID NO: 71984 - RNA, 22 nt, Human
ucacuguuuccuguacuggaca

SEQ ID NO: 71985 - RNA, 22 nt, Human
ucacuuaaaaauucuaguuaug

SEQ ID NO: 71986 - RNA, 22 nt, Human
ucacuuauaaaaugcaagaucu

SEQ ID NO: 71987 - RNA, 21 nt, Human
ucacuuauaauguauuugcug

SEQ ID NO: 71988 - RNA, 22 nt, Human
ucacuucacacccacuaucaug

SEQ ID NO: 71989 - RNA, 22 nt, Human
ucacuugaaccugggaggcaga

SEQ ID NO: 71990 - RNA, 19 nt, Human
ucacuugaaguucagaaau

SEQ ID NO: 71991 - RNA, 22 nt, Human
ucacuugaauucauucugcgaa

SEQ ID NO: 71992 - RNA, 22 nt, Human
ucacuugacccuucucuagccu

SEQ ID NO: 71993 - RNA, 22 nt, Human
ucacuugccuagcccaguucag

SEQ ID NO: 71994 - RNA, 22 nt, Human
ucacuuuacagcuaagguuguu

SEQ ID NO: 71995 - RNA, 22 nt, Human
ucacuuuacuuuguuaaucugg

SEQ ID NO: 71996 - RNA, 22 nt, Human
ucacuuugcccuguaccuuggg

SEQ ID NO: 71997 - RNA, 22 nt, Human
ucacuuuggaagauagcacauc

SEQ ID NO: 71998 - RNA, 22 nt, Human
ucacuuuggauuauguaauuuc

SEQ ID NO: 71999 - RNA, 22 nt, Human
ucacuuuuggguuuccaguaga

SEQ ID NO: 72000 - RNA, 22 nt, Human
ucagaaaagaccacauuauucu

SEQ ID NO: 72001 - RNA, 22 nt, Human
ucagaaacagaaacuaagaacc

SEQ ID NO: 72002 - RNA, 22 nt, Human
ucagaaaggccacauggugcag

SEQ ID NO: 72003 - RNA, 22 nt, Human
ucagaaaucuugucaaggcauc

SEQ ID NO: 72004 - RNA, 23 nt, Human
ucagaacaaugccuuaggggcau

SEQ ID NO: 72005 - RNA, 21 nt, Human
ucagaacaauuccaugccucc

SEQ ID NO: 72006 - RNA, 22 nt, Human
ucagaacaauugggaaccauua

SEQ ID NO: 72007 - RNA, 22 nt, Human
ucagaacagcaggguguggcug

SEQ ID NO: 72008 - RNA, 22 nt, Human
ucagaacagcucucagauaucc

SEQ ID NO: 72009 - RNA, 22 nt, Human
ucagaacaguucuuaauauugc

SEQ ID NO: 72010 - RNA, 22 nt, Human
ucagaacauccugguuuaaaau

SEQ ID NO: 72011 - RNA, 22 nt, Human
ucagaacauguuugaguaagac

SEQ ID NO: 72012 - RNA, 22 nt, Human
ucagaacauucucauugacugc

SEQ ID NO: 72013 - RNA, 22 nt, Human
ucagaacuacauggacauguua

SEQ ID NO: 72014 - RNA, 21 nt, Human
ucagaagagcugccucuuggu

SEQ ID NO: 72015 - RNA, 22 nt, Human
ucagacccaggugccaagcugu

SEQ ID NO: 72016 - RNA, 20 nt, Human
ucagacuugauucuaugcua

SEQ ID NO: 72017 - RNA, 22 nt, Human
ucagagaaauaauugcugaguu

SEQ ID NO: 72018 - RNA, 22 nt, Human
ucagagaacuccacaccuuagg

SEQ ID NO: 72019 - RNA, 23 nt, Human
ucagagaacucgggcagaugacc

SEQ ID NO: 72020 - RNA, 22 nt, Human
ucagagaacugcagcccuuccu

SEQ ID NO: 72021 - RNA, 20 nt, Human
ucagagaaggagcuuuccug

SEQ ID NO: 72022 - RNA, 22 nt, Human
ucagagaagguaagugaccugc

SEQ ID NO: 72023 - RNA, 23 nt, Human
ucagagaaguuguaggcugggga

SEQ ID NO: 72024 - RNA, 22 nt, Human
ucagagaaucucuccuuaguuu

SEQ ID NO: 72025 - RNA, 22 nt, Human
ucagagaauucucagaugacuc

SEQ ID NO: 72026 - RNA, 22 nt, Human
ucagagaauuguuuaauggaau

SEQ ID NO: 72027 - RNA, 22 nt, Human
ucagagacuggucugcagaugc

SEQ ID NO: 72028 - RNA, 22 nt, Human
ucagagacuguaggagcagccu

SEQ ID NO: 72029 - RNA, 18 nt, Human
ucagagagaauaguaauu

SEQ ID NO: 72030 - RNA, 20 nt, Human
ucagagagagggugccacuu

SEQ ID NO: 72031 - RNA, 22 nt, Human
ucagagagcuggugggcagagg

SEQ ID NO: 72032 - RNA, 22 nt, Human
ucagagagguuaaauaucuugu

SEQ ID NO: 72033 - RNA, 22 nt, Human
ucagagaguccuggucauuugc

SEQ ID NO: 72034 - RNA, 22 nt, Human
ucagagaguuacacaaauuguu

SEQ ID NO: 72035 - RNA, 22 nt, Human
ucagagauucacgucaguccca

SEQ ID NO: 72036 - RNA, 23 nt, Human
ucagagcaagaugauguaugagc

SEQ ID NO: 72037 - RNA, 22 nt, Human
ucagcuggauguggaagugcua

SEQ ID NO: 72038 - RNA, 19 nt, Human
ucagcuggcaggccuccuc

SEQ ID NO: 72039 - RNA, 22 nt, Human
ucagcuggcaguucagaggcug

SEQ ID NO: 72040 - RNA, 22 nt, Human
ucagcuggcaucggcucaccca

SEQ ID NO: 72041 - RNA, 22 nt, Human
ucagcuggugaguggauagaca

SEQ ID NO: 72042 - RNA, 22 nt, Human
ucagcugugauccaucuaucua

SEQ ID NO: 72043 - RNA, 22 nt, Human
ucagcuucgccugagguauggg

SEQ ID NO: 72044 - RNA, 22 nt, Human
ucagcuuggacagcuugguuga

SEQ ID NO: 72045 - RNA, 22 nt, Human
ucagcuugggaaauugagcaag

SEQ ID NO: 72046 - RNA, 22 nt, Human
ucagcuuguuuaugauaagcag

SEQ ID NO: 72047 - RNA, 22 nt, Human
ucagcuuuccugcagcuaaggg

SEQ ID NO: 72048 - RNA, 22 nt, Human
ucagcuuugcaaguuagaaaau

SEQ ID NO: 72049 - RNA, 22 nt, Human
ucagcuuugggggucucaggag

SEQ ID NO: 72050 - RNA, 22 nt, Human
ucagcuuuuaaaaacaagaagu

SEQ ID NO: 72051 - RNA, 18 nt, Human
ucagcuuuugaaaaccaa

SEQ ID NO: 72052 - RNA, 22 nt, Human
ucagcuuuuuggauugcccaag

SEQ ID NO: 72053 - RNA, 22 nt, Human
ucaggaaaggcagagugucugu

SEQ ID NO: 72054 - RNA, 22 nt, Human
ucaggaaauggaauucuugugu

SEQ ID NO: 72055 - RNA, 22 nt, Human
ucaggaaauggacaucuuugcu

SEQ ID NO: 72056 - RNA, 22 nt, Human
ucaggaacagaauuuucuaaaa

SEQ ID NO: 72057 - RNA, 22 nt, Human
ucaggaacauuuaaccacaggg

SEQ ID NO: 72058 - RNA, 22 nt, Human
ucaggaagauuaguuuccuacc

SEQ ID NO: 72059 - RNA, 22 nt, Human
ucaggaagccgguuaaauagau

SEQ ID NO: 72060 - RNA, 22 nt, Human
ucaggaagcugaauuacaaaaa

SEQ ID NO: 72061 - RNA, 22 nt, Human
ucaggaagcugcucuggguggu

SEQ ID NO: 72062 - RNA, 22 nt, Human
ucaggaaggagcuggccugcca

SEQ ID NO: 72063 - RNA, 22 nt, Human
ucaggaaggcaaauugcaugau

SEQ ID NO: 72064 - RNA, 22 nt, Human
ucaggaaggcuucacacgagug

SEQ ID NO: 72065 - RNA, 22 nt, Human
ucaggaagggugguccacaggg

SEQ ID NO: 72066 - RNA, 22 nt, Human
ucaggaauccagacagggcaca

SEQ ID NO: 72067 - RNA, 22 nt, Human
ucaggacaacauguugcuaauc

SEQ ID NO: 72068 - RNA, 22 nt, Human
ucaggacagaaggcugccaggg

SEQ ID NO: 72069 - RNA, 22 nt, Human
ucaggacagccagggugcagac

SEQ ID NO: 72070 - RNA, 22 nt, Human
ucaggagaacuuccuucuaccc

SEQ ID NO: 72071 - RNA, 22 nt, Human
ucaggagagaaagaauacaauu

SEQ ID NO: 72072 - RNA, 22 nt, Human
ucaggagcagcuguaggaaggg

SEQ ID NO: 72073 - RNA, 19 nt, Human
ucaggagcagcuucugaac

SEQ ID NO: 72074 - RNA, 22 nt, Human
ucaggagcucuucccuggugug

SEQ ID NO: 72075 - RNA, 22 nt, Human
ucaggagcugugaauacaaagg

SEQ ID NO: 72076 - RNA, 22 nt, Human
ucaggaggccaccaggaccugu

SEQ ID NO: 72077 - RNA, 22 nt, Human
ucaggaggcgucucgcuggggc

SEQ ID NO: 72078 - RNA, 22 nt, Human
ucaggaggcgugcugggguaca

SEQ ID NO: 72079 - RNA, 22 nt, Human
ucaggagggucucuauuuuccu

SEQ ID NO: 72080 - RNA, 22 nt, Human
ucaggagggugacaggcccugg

SEQ ID NO: 72081 - RNA, 22 nt, Human
ucaggagguguaacgaauacag

SEQ ID NO: 72082 - RNA, 22 nt, Human
ucaggagguuuggauucaguua

SEQ ID NO: 72083 - RNA, 22 nt, Human
ucaggaguccugccugcagccu

SEQ ID NO: 72084 - RNA, 22 nt, Human
ucaggagucugugcaguuccac

SEQ ID NO: 72085 - RNA, 18 nt, Human
ucaggaguuuguggaugg

SEQ ID NO: 72086 - RNA, 22 nt, Human
ucaggauggcacccaagcucuu

SEQ ID NO: 72087 - RNA, 22 nt, Human
ucaggauggcuucugcaucaaa

SEQ ID NO: 72088 - RNA, 22 nt, Human
ucaggaugguguggaggaaaua

SEQ ID NO: 72089 - RNA, 22 nt, Human
ucaggauguccaaaauccagcc

SEQ ID NO: 72090 - RNA, 22 nt, Human
ucaggcaaggcccuuagagugu

SEQ ID NO: 72091 - RNA, 22 nt, Human
ucaggcaccccuugaguagggg

SEQ ID NO: 72092 - RNA, 22 nt, Human
ucaggcagaauuaucaaaagau

SEQ ID NO: 72093 - RNA, 22 nt, Human
ucaggcagagggagaagccaag

SEQ ID NO: 72094 - RNA, 22 nt, Human
ucaggcagcauuaaacuucagc

SEQ ID NO: 72095 - RNA, 22 nt, Human
ucaggcagcuccaggaauggua

SEQ ID NO: 72096 - RNA, 22 nt, Human
ucaggcaggaagggaggacuug

SEQ ID NO: 72097 - RNA, 22 nt, Human
ucaggcaggacaauuauuuagg

SEQ ID NO: 72098 - RNA, 21 nt, Human
ucaggcaggcgcagagggaag

SEQ ID NO: 72099 - RNA, 22 nt, Human
ucaggcaguagaauugcuugaa

SEQ ID NO: 72100 - RNA, 22 nt, Human
ucaggcagugguaaaugaguua

SEQ ID NO: 72101 - RNA, 22 nt, Human
ucaggcaugcauucugcagguu

SEQ ID NO: 72102 - RNA, 22 nt, Human
ucaggccaagguagacaugacu

SEQ ID NO: 72103 - RNA, 22 nt, Human
ucaggccacuucacaggugauu

SEQ ID NO: 72104 - RNA, 22 nt, Human
ucaggccaggagaucagauuga

SEQ ID NO: 72105 - RNA, 22 nt, Human
ucaggccccuugucagcucugu

SEQ ID NO: 72106 - RNA, 22 nt, Human
ucaggcccuucucccaggacuc

SEQ ID NO: 72107 - RNA, 22 nt, Human
ucaggccugcaaggagaguccc

SEQ ID NO: 72108 - RNA, 22 nt, Human
ucaggccugcaggcuuccugga

SEQ ID NO: 72109 - RNA, 22 nt, Human
ucaggcucaggaauguguuuau

SEQ ID NO: 72110 - RNA, 20 nt, Human
ucaggcuccgcauuaacuua

SEQ ID NO: 72111 - RNA, 22 nt, Human
ucaggcucuacacuugacacac

SEQ ID NO: 72112 - RNA, 18 nt, Human
ucaggcucucuggcuaga

SEQ ID NO: 72113 - RNA, 21 nt, Human
ucaggcugaugucgauguuag

SEQ ID NO: 72114 - RNA, 22 nt, Human
ucaggcugcaguggcaaaagac

SEQ ID NO: 72115 - RNA, 22 nt, Human
ucaggcugcuggccagcaggcu

SEQ ID NO: 72116 - RNA, 22 nt, Human
ucaggcuggggugcuaaggugu

SEQ ID NO: 72117 - RNA, 17 nt, Human
ucaggcugggugcagug

SEQ ID NO: 72118 - RNA, 22 nt, Human
ucaggcugguccccacagugga

SEQ ID NO: 72119 - RNA, 22 nt, Human
ucaggcuguaaauggugugggu

SEQ ID NO: 72120 - RNA, 22 nt, Human
ucaggcuguagggccccuggag

SEQ ID NO: 72121 - RNA, 22 nt, Human
ucaggcugugggcacuggccau

SEQ ID NO: 72122 - RNA, 22 nt, Human
ucaggcugugucuuuaaacaau

SEQ ID NO: 72123 - RNA, 22 nt, Human
ucaggcuguuccuguccaaaau

SEQ ID NO: 72124 - RNA, 22 nt, Human
ucaggcuuauuacguuauuguc

SEQ ID NO: 72125 - RNA, 22 nt, Human
ucaggcuugggaggcccagggc

SEQ ID NO: 72126 - RNA, 22 nt, Human
ucaggcuuugcucuguugauuu

SEQ ID NO: 72127 - RNA, 22 nt, Human
ucaggcuuugggucaggcucug

SEQ ID NO: 72128 - RNA, 22 nt, Human
ucaggcuuuucuucccucagug

SEQ ID NO: 72129 - RNA, 22 nt, Human
ucagggaaaagucacacugggu

SEQ ID NO: 72130 - RNA, 22 nt, Human
ucagggaaaggggagagucauu

SEQ ID NO: 72131 - RNA, 22 nt, Human
ucagggaacaucguuaaacuag

SEQ ID NO: 72132 - RNA, 22 nt, Human
ucagggaaugggcccagucccu

SEQ ID NO: 72133 - RNA, 22 nt, Human
ucagcaaaggcaauucauuauu

SEQ ID NO: 72134 - RNA, 22 nt, Human
ucagcaaccaggggcacagucc

SEQ ID NO: 72135 - RNA, 22 nt, Human
ucagcaaggcagaagggaggua

SEQ ID NO: 72136 - RNA, 22 nt, Human
ucagcaaguggaccauccuggg

SEQ ID NO: 72137 - RNA, 22 nt, Human
ucagcacugaaucuggauuugc

SEQ ID NO: 72138 - RNA, 22 nt, Human
ucagcacugauagaagucaaua

SEQ ID NO: 72139 - RNA, 22 nt, Human
ucagcacuggcgcugggcaggu

SEQ ID NO: 72140 - RNA, 22 nt, Human
ucagcacuguguccagucuccc

SEQ ID NO: 72141 - RNA, 22 nt, Human
ucagcacuuggauuucagagau

SEQ ID NO: 72142 - RNA, 22 nt, Human
ucagcacuuuuuaaagcagcau

SEQ ID NO: 72143 - RNA, 21 nt, Human
ucagcagaaagcaaggucagu

SEQ ID NO: 72144 - RNA, 21 nt, Human
ucagcagaaggaccacuaggg

SEQ ID NO: 72145 - RNA, 22 nt, Human
ucagcagaaguauagaggccau

SEQ ID NO: 72146 - RNA, 22 nt, Human
uggucaggauucucagcccuuc

SEQ ID NO: 72147 - RNA, 22 nt, Human
uggucagguaccucuggcuguc

SEQ ID NO: 72148 - RNA, 22 nt, Human
uggucauugcuauuguuucuca

SEQ ID NO: 72149 - RNA, 17 nt, Human
uggucauuuuaauuuua

SEQ ID NO: 72150 - RNA, 19 nt, Human
ugguccagcuucuucuccu

SEQ ID NO: 72151 - RNA, 22 nt, Human
ugguccaggcacccuucuagag

SEQ ID NO: 72152 - RNA, 17 nt, Human
ugguccagguggagcca

SEQ ID NO: 72153 - RNA, 22 nt, Human
ugguccaguaaggguggagaga

SEQ ID NO: 72154 - RNA, 22 nt, Human
ugguccagucguuccuuuccuu

SEQ ID NO: 72155 - RNA, 22 nt, Human
ugguccagugacagauaggcac

SEQ ID NO: 72156 - RNA, 18 nt, Human
ugguccaguucagauaua

SEQ ID NO: 72157 - RNA, 22 nt, Human
ugguccaguucugugauauugc

SEQ ID NO: 72158 - RNA, 22 nt, Human
ugguccaugcccacggaaugug

SEQ ID NO: 72159 - RNA, 22 nt, Human
uggucccuagugugggagcuug

SEQ ID NO: 72160 - RNA, 23 nt, Human
uggucccugagagcuggggaggg

SEQ ID NO: 72161 - RNA, 22 nt, Human
ugguccucagguucucugugcg

SEQ ID NO: 72162 - RNA, 22 nt, Human
ugguccugcaguaauagacauc

SEQ ID NO: 72163 - RNA, 22 nt, Human
ugguccuggccuugaccccagg

SEQ ID NO: 72164 - RNA, 22 nt, Human
ugguccugggcacaguauaugc

SEQ ID NO: 72165 - RNA, 22 nt, Human
ugguccuggggaucugcaguga

SEQ ID NO: 72166 - RNA, 22 nt, Human
ugguccuggggugcaggcugac

SEQ ID NO: 72167 - RNA, 22 nt, Human
ugguccuguagcacuugauuag

SEQ ID NO: 72168 - RNA, 22 nt, Human
uggucucuacggaggaaagcug

SEQ ID NO: 72169 - RNA, 22 nt, Human
uggucucuccaugcccuccacc

SEQ ID NO: 72170 - RNA, 22 nt, Human
uggucucugacucugaagaccc

SEQ ID NO: 72171 - RNA, 22 nt, Human
uggucucuguaggcuaccccau

SEQ ID NO: 72172 - RNA, 22 nt, Human
uggucucuucuuccaagauggc

SEQ ID NO: 72173 - RNA, 22 nt, Human
uggucugaaggacuucugaggg

SEQ ID NO: 72174 - RNA, 21 nt, Human
uccagggaacuucucaggaau

SEQ ID NO: 72175 - RNA, 22 nt, Human
uccagggaccucccugagagcu

SEQ ID NO: 72176 - RNA, 22 nt, Human
uccagggagagccgcugcucca

SEQ ID NO: 72177 - RNA, 22 nt, Human
uccagggagauacuggcugcca

SEQ ID NO: 72178 - RNA, 22 nt, Human
uccagggagauggcagaggcug

SEQ ID NO: 72179 - RNA, 22 nt, Human
uccagggaguuggcuggauagu

SEQ ID NO: 72180 - RNA, 23 nt, Human
uccagggauuaaugaagucaguc

SEQ ID NO: 72181 - RNA, 22 nt, Human
uccagggcagccgcgggugcgc

SEQ ID NO: 72182 - RNA, 19 nt, Human
uccagggcaggaacaugua

SEQ ID NO: 72183 - RNA, 22 nt, Human
uccagggcagugacuacagcgg

SEQ ID NO: 72184 - RNA, 22 nt, Human
uccagggcauccacgcgugggg

SEQ ID NO: 72185 - RNA, 21 nt, Human
uccagggcgggcgcacggaga

SEQ ID NO: 72186 - RNA, 22 nt, Human
uccagggcuacaaggcaccaga

SEQ ID NO: 72187 - RNA, 22 nt, Human
uccagggcuccccaacauccag

SEQ ID NO: 72188 - RNA, 22 nt, Human
uccagggcuguuacuuuacaua

SEQ ID NO: 72189 - RNA, 19 nt, Human
uccagggcuuuauggcuuu

SEQ ID NO: 72190 - RNA, 22 nt, Human
uccaggggagacuagacccaca

SEQ ID NO: 72191 - RNA, 22 nt, Human
uccaggggagugcuacgcacag

SEQ ID NO: 72192 - RNA, 22 nt, Human
uccagggguaccggccaggcag

SEQ ID NO: 72193 - RNA, 22 nt, Human
uccagggucagaagucacauac

SEQ ID NO: 72194 - RNA, 21 nt, Human
uccagggucagaaguucagug

SEQ ID NO: 72195 - RNA, 20 nt, Human
uccagguaacaucucucugg

SEQ ID NO: 72196 - RNA, 22 nt, Human
uccagguagauuuauuccagcc

SEQ ID NO: 72197 - RNA, 22 nt, Human
uccaggucaucuuggagagcug

SEQ ID NO: 72198 - RNA, 22 nt, Human
uccaggucccagacugggcagc

SEQ ID NO: 72199 - RNA, 22 nt, Human
uccagguccuacuggcccauag

SEQ ID NO: 72200 - RNA, 22 nt, Human
uccaggugagugcaggugcaga

SEQ ID NO: 72201 - RNA, 22 nt, Human
uccaggugccggggacugaggc

SEQ ID NO: 72202 - RNA, 23 nt, Human
uccaguagggagucugcuuacuu

SEQ ID NO: 72203 - RNA, 20 nt, Human
uccaguauguuauuuggugu

SEQ ID NO: 72204 - RNA, 22 nt, Human
uccagucaggcugaauucaagg

SEQ ID NO: 72205 - RNA, 22 nt, Human
uccagucaucucccuucacauu

SEQ ID NO: 72206 - RNA, 22 nt, Human
uccaguccagggaauggcugau

SEQ ID NO: 72207 - RNA, 18 nt, Human
uccagucccaaggccagc

SEQ ID NO: 72208 - RNA, 18 nt, Human
uccagucccagcucugcc

SEQ ID NO: 72209 - RNA, 22 nt, Human
uccagucugguaugaauccuag

SEQ ID NO: 72210 - RNA, 22 nt, Human
uccagugcuggaccagagcacc

SEQ ID NO: 72211 - RNA, 22 nt, Human
uccagugcuguuuccaauguaa

SEQ ID NO: 72212 - RNA, 22 nt, Human
uccaguggaacagauguugccu

SEQ ID NO: 72213 - RNA, 22 nt, Human
uccaguggagugugggggugaa

SEQ ID NO: 72214 - RNA, 22 nt, Human
uccaguggcacuggagacuaga

SEQ ID NO: 72215 - RNA, 19 nt, Human
uccaguguagcuggucauu

SEQ ID NO: 72216 - RNA, 22 nt, Human
uccaguguguguccagcugcug

SEQ ID NO: 72217 - RNA, 16 nt, Human
uccaguguuccuggau

SEQ ID NO: 72218 - RNA, 22 nt, Human
uccaguguugucagaucaucug

SEQ ID NO: 72219 - RNA, 23 nt, Human
uccaguuaaugguucccagucug

SEQ ID NO: 72220 - RNA, 22 nt, Human
uccaguucuaggucacucucug

SEQ ID NO: 72221 - RNA, 22 nt, Human
uccaguuugcacuguauaauag

SEQ ID NO: 72222 - RNA, 22 nt, Human
uccauaaaccagaaaaucaaga

SEQ ID NO: 72223 - RNA, 19 nt, Human
uccauaaugaagauagagg

SEQ ID NO: 72224 - RNA, 17 nt, Human
uccauacaauucucucu

SEQ ID NO: 72225 - RNA, 22 nt, Human
uccauacauacagauaugcauu

SEQ ID NO: 72226 - RNA, 22 nt, Human
uccauacccagcuuucucacac

SEQ ID NO: 72227 - RNA, 23 nt, Human
uccauacucuaaacauguuauuu

SEQ ID NO: 72228 - RNA, 22 nt, Human
uccauauaaugggauuccuuau

SEQ ID NO: 72229 - RNA, 22 nt, Human
uccauauaccugcagccugguu

SEQ ID NO: 72230 - RNA, 22 nt, Human
uccauauuaacuaaaacuagaa

SEQ ID NO: 72231 - RNA, 22 nt, Human
uccaucagcaugcaggcuguuc

SEQ ID NO: 72232 - RNA, 22 nt, Human
uccauccauaccacuuggagac

SEQ ID NO: 72233 - RNA, 22 nt, Human
uccaucuacggcuauaccaccc

SEQ ID NO: 72234 - RNA, 22 nt, Human
uccaucuggaugguauguguaa

SEQ ID NO: 72235 - RNA, 22 nt, Human
uccaucugguaaaauucauuga

SEQ ID NO: 72236 - RNA, 20 nt, Human
uccaugaguuagagacuaua

SEQ ID NO: 72237 - RNA, 22 nt, Human
uccaugaguuugaggaaaagag

SEQ ID NO: 72238 - RNA, 22 nt, Human
uccaugcagcagccucccagcc

SEQ ID NO: 72239 - RNA, 22 nt, Human
uccaugcucuugucuagccucc

SEQ ID NO: 72240 - RNA, 22 nt, Human
uccaugggaagauuuugagugg

SEQ ID NO: 72241 - RNA, 22 nt, Human
uccauggggcccaggaugagag

SEQ ID NO: 72242 - RNA, 22 nt, Human
uccauggguagcccugguugag

SEQ ID NO: 72243 - RNA, 22 nt, Human
uccaugugcuuccucaggggaa

SEQ ID NO: 72244 - RNA, 22 nt, Human
uccauguggcaauaggagacag

SEQ ID NO: 72245 - RNA, 22 nt, Human
uccauguuagguaaaggcacug

SEQ ID NO: 72246 - RNA, 22 nt, Human
uccauguuucagcaucuacauc

SEQ ID NO: 72247 - RNA, 22 nt, Human
uccauucuaugcuuacauuuau

SEQ ID NO: 72248 - RNA, 22 nt, Human
uccauugucuuugguccuagcc

SEQ ID NO: 72249 - RNA, 22 nt, Human
uccauugugauuauauacaaaa

SEQ ID NO: 72250 - RNA, 22 nt, Human
uccauuguguuacagagcauuc

SEQ ID NO: 72251 - RNA, 22 nt, Human
uccauuuggccucuguauugua

SEQ ID NO: 72252 - RNA, 22 nt, Human
uccauuuuagagaugaagaaac

SEQ ID NO: 72253 - RNA, 22 nt, Human
uccauuuucaucucauguauaa

SEQ ID NO: 72254 - RNA, 22 nt, Human
ucccaaaguauuagcauuucaa

SEQ ID NO: 72255 - RNA, 22 nt, Human
ucccaaagucaagcugugucuu

SEQ ID NO: 72256 - RNA, 22 nt, Human
ucucuuucucagaugguggaga

SEQ ID NO: 72257 - RNA, 22 nt, Human
ucucuuucuuuguaugucuauu

SEQ ID NO: 72258 - RNA, 22 nt, Human
ucucuuugucugcucuuaguug

SEQ ID NO: 72259 - RNA, 22 nt, Human
ucucuuuguggccaggagagga

SEQ ID NO: 72260 - RNA, 22 nt, Human
ucugaaaacuccaugagcucgu

SEQ ID NO: 72261 - RNA, 22 nt, Human
ucugaaaauguugacuuuguuu

SEQ ID NO: 72262 - RNA, 22 nt, Human
ucugaaagcauaauuuguccca

SEQ ID NO: 72263 - RNA, 23 nt, Human
ucugaaagggaugcugggcagga

SEQ ID NO: 72264 - RNA, 22 nt, Human
ucugaaaguaucuggaucuuuu

SEQ ID NO: 72265 - RNA, 22 nt, Human
ucugaaauaaaugcacuguuag

SEQ ID NO: 72266 - RNA, 22 nt, Human
ucugaaauaacugaugccagau

SEQ ID NO: 72267 - RNA, 22 nt, Human
ucugaaauacugcagguucucu

SEQ ID NO: 72268 - RNA, 22 nt, Human
ucugaaauaggaaagcaaaugg

SEQ ID NO: 72269 - RNA, 22 nt, Human
ucugaaauaggcuucuuuuggu

SEQ ID NO: 72270 - RNA, 22 nt, Human
ucugaaauauugguaauacuuu

SEQ ID NO: 72271 - RNA, 22 nt, Human
ucugaaaucuguaagcacuagc

SEQ ID NO: 72272 - RNA, 22 nt, Human
ucugaaaugcaaauuugacuga

SEQ ID NO: 72273 - RNA, 22 nt, Human
ucugaaaugcaggcaauuugcu

SEQ ID NO: 72274 - RNA, 22 nt, Human
ucugaaauggggcugaagcacu

SEQ ID NO: 72275 - RNA, 22 nt, Human
ucugaaauucacaguugaguca

SEQ ID NO: 72276 - RNA, 22 nt, Human
ucugaaauuguuaguaaaaaug

SEQ ID NO: 72277 - RNA, 22 nt, Human
ucugaaauuuuaguuauagaaa

SEQ ID NO: 72278 - RNA, 22 nt, Human
ucugaacagcauggaaucauuu

SEQ ID NO: 72279 - RNA, 22 nt, Human
ucugaacauuuuuugcagccua

SEQ ID NO: 72280 - RNA, 22 nt, Human
ucugaacuccagcccugcucuc

SEQ ID NO: 72281 - RNA, 20 nt, Human
ucugaagaaagacagggacu

SEQ ID NO: 72282 - RNA, 22 nt, Human
ucugaagaacugucuagagaac

SEQ ID NO: 72283 - RNA, 22 nt, Human
ucugaagauaugagcuuuauga

SEQ ID NO: 72284 - RNA, 22 nt, Human
ucugaagauggaggaacuuaga

SEQ ID NO: 72285 - RNA, 17 nt, Human
ucugaagccagucugcu

SEQ ID NO: 72286 - RNA, 18 nt, Human
ucugaaggaaugauucca

SEQ ID NO: 72287 - RNA, 22 nt, Human
ucugaaggcauccucacugcaa

SEQ ID NO: 72288 - RNA, 22 nt, Human
ucugaagugaucaucauuucuc

SEQ ID NO: 72289 - RNA, 22 nt, Human
ucugaaguucuuaaauuaguuu

SEQ ID NO: 72290 - RNA, 22 nt, Human
ucugaauaguucuauuuuaaag

SEQ ID NO: 72291 - RNA, 22 nt, Human
ucugaaugcacuuaguuaccaa

SEQ ID NO: 72292 - RNA, 22 nt, Human
ucccagaguauuagcaauugcu

SEQ ID NO: 72293 - RNA, 22 nt, Human
ucccagagugagccaggggcag

SEQ ID NO: 72294 - RNA, 22 nt, Human
ucccagaguucaaugggaaggu

SEQ ID NO: 72295 - RNA, 22 nt, Human
ucccagauuccugcucuuauau

SEQ ID NO: 72296 - RNA, 22 nt, Human
ucccagcacagggcagauguga

SEQ ID NO: 72297 - RNA, 22 nt, Human
ucccagcauaacaaacugcccg

SEQ ID NO: 72298 - RNA, 22 nt, Human
ucccagccacagguguagcccu

SEQ ID NO: 72299 - RNA, 22 nt, Human
ucccagccacaguuuccaccug

SEQ ID NO: 72300 - RNA, 22 nt, Human
ucccagccaggcucuaccacuu

SEQ ID NO: 72301 - RNA, 22 nt, Human
ucccagccuggacccugccagu

SEQ ID NO: 72302 - RNA, 22 nt, Human
ucccagcuguguggaggagaug

SEQ ID NO: 72303 - RNA, 22 nt, Human
ucccagcuuagauuugcucauu

SEQ ID NO: 72304 - RNA, 22 nt, Human
ucccaggaaggauucggcauuu

SEQ ID NO: 72305 - RNA, 23 nt, Human
ucccaggaaucugcauuuuuaac

SEQ ID NO: 72306 - RNA, 22 nt, Human
ucccaggaauugaagccagugu

SEQ ID NO: 72307 - RNA, 22 nt, Human
ucccaggacccaggcauucaca

SEQ ID NO: 72308 - RNA, 22 nt, Human
ucccaggauuuuaggcucucag

SEQ ID NO: 72309 - RNA, 20 nt, Human
ucccaggcuccacccuagac

SEQ ID NO: 72310 - RNA, 22 nt, Human
ucccaggcucuucaaggaagac

SEQ ID NO: 72311 - RNA, 20 nt, Human
ucccaggcugggcuccagcu

SEQ ID NO: 72312 - RNA, 22 nt, Human
ucccaggcugggggccugaagu

SEQ ID NO: 72313 - RNA, 22 nt, Human
ucccagggacccagccugauac

SEQ ID NO: 72314 - RNA, 22 nt, Human
ucccagggauccuccgggucgc

SEQ ID NO: 72315 - RNA, 22 nt, Human
ucccagggauuaggacauggau

SEQ ID NO: 72316 - RNA, 22 nt, Human
ucccagggccgcaaacgaguuu

SEQ ID NO: 72317 - RNA, 22 nt, Human
ucccagggcucuagagugcugg

SEQ ID NO: 72318 - RNA, 22 nt, Human
ucccaggguauccuguaguaaa

SEQ ID NO: 72319 - RNA, 22 nt, Human
ucccagggucaguggugaggcc

SEQ ID NO: 72320 - RNA, 22 nt, Human
ucccagucuguguccuuuacag

SEQ ID NO: 72321 - RNA, 22 nt, Human
ucccagugagguccuggcuguc

SEQ ID NO: 72322 - RNA, 19 nt, Human
ucccaguggggagaggugu

SEQ ID NO: 72323 - RNA, 22 nt, Human
ucccaguuuuucuccacuaagg

SEQ ID NO: 72324 - RNA, 22 nt, Human
ucccauauauguuuauauugga

SEQ ID NO: 72325 - RNA, 22 nt, Human
ucccaucuccaacauuuuucuu

SEQ ID NO: 72326 - RNA, 22 nt, Human
ucccauggauagugaccuuguu

SEQ ID NO: 72327 - RNA, 20 nt, Human
ucccauguccauaucagccc

SEQ ID NO: 72328 - RNA, 22 nt, Human
ucccauguugugccuggcugca

SEQ ID NO: 72329 - RNA, 22 nt, Human
ucccauuguggaaggcagaaga

SEQ ID NO: 72330 - RNA, 21 nt, Human
ucccauuguuccccuccagug

SEQ ID NO: 72331 - RNA, 22 nt, Human
ucccauuuuggaugcggauugg

SEQ ID NO: 72332 - RNA, 22 nt, Human
uccccaaagcuuuguggucagg

SEQ ID NO: 72333 - RNA, 19 nt, Human
uccccaagaguucuagcuc

SEQ ID NO: 72334 - RNA, 22 nt, Human
uccccacaucucugcaucaggc

SEQ ID NO: 72335 - RNA, 22 nt, Human
uccccacucaccacuggccaaa

SEQ ID NO: 72336 - RNA, 22 nt, Human
uccccacucugggccaccacaa

SEQ ID NO: 72337 - RNA, 22 nt, Human
uccccagaggugaggcagcuuu

SEQ ID NO: 72338 - RNA, 22 nt, Human
uccccagauggccagcuacaug

SEQ ID NO: 72339 - RNA, 22 nt, Human
uccccagggcugcagagggugu

SEQ ID NO: 72340 - RNA, 22 nt, Human
uccccagggucccugcuuccau

SEQ ID NO: 72341 - RNA, 22 nt, Human
uccccagguccugucggcuccu

SEQ ID NO: 72342 - RNA, 22 nt, Human
uccccagucccggcggugggug

SEQ ID NO: 72343 - RNA, 22 nt, Human
uccccccagccuuucacaugag

SEQ ID NO: 72344 - RNA, 22 nt, Human
uccccuccaacuccaacuaugg

SEQ ID NO: 72345 - RNA, 22 nt, Human
uccccugagaccccucagcacu

SEQ ID NO: 72346 - RNA, 22 nt, Human
ucccgauaggcagggcucuggc

SEQ ID NO: 72347 - RNA, 20 nt, Human
ucccuaggcaggagggcacu

SEQ ID NO: 72348 - RNA, 22 nt, Human
ucccucagacagauguguuccu

SEQ ID NO: 72349 - RNA, 21 nt, Human
ucccucagacagggugccuau

SEQ ID NO: 72350 - RNA, 22 nt, Human
ucccucagauuggcaauuagau

SEQ ID NO: 72351 - RNA, 22 nt, Human
ucccucagcuugucuccaugca

SEQ ID NO: 72352 - RNA, 20 nt, Human
ucccucaguccuggcuuugu

SEQ ID NO: 72353 - RNA, 22 nt, Human
ucccuccacaccugcugguacc

SEQ ID NO: 72354 - RNA, 22 nt, Human
ucccuccauaacagaggugagc

SEQ ID NO: 72355 - RNA, 22 nt, Human
ucccuccugcaugaggcucggc

SEQ ID NO: 72356 - RNA, 22 nt, Human
ucccuccuggugagcaggggcu

SEQ ID NO: 72357 - RNA, 22 nt, Human
ucccuccuuaauaagaggucug

SEQ ID NO: 72358 - RNA, 22 nt, Human
ucccucugggcuccagcacgga

SEQ ID NO: 72359 - RNA, 22 nt, Human
ucccucuguucuguuccaagug

SEQ ID NO: 72360 - RNA, 23 nt, Human
ucccugagaugcugcucuguccc

SEQ ID NO: 72361 - RNA, 22 nt, Human
ucccugagggcagcucaagucc

SEQ ID NO: 72362 - RNA, 22 nt, Human
ucccugagugggcugguaguau

SEQ ID NO: 72363 - RNA, 22 nt, Human
ucccugcacagccgagccaugc

SEQ ID NO: 72364 - RNA, 22 nt, Human
ucccugcacccuugcugggccc

SEQ ID NO: 72365 - RNA, 22 nt, Human
uguaucaaucauguaauuuggu

SEQ ID NO: 72366 - RNA, 22 nt, Human
uguaucauauggggaagcuuca

SEQ ID NO: 72367 - RNA, 22 nt, Human
uguaucugacaguggagcggag

SEQ ID NO: 72368 - RNA, 22 nt, Human
uguaucuuucuguacuuuuaug

SEQ ID NO: 72369 - RNA, 22 nt, Human
uguaugaaaaggaauagauuga

SEQ ID NO: 72370 - RNA, 22 nt, Human
uguaugaaccuuuaauauagug

SEQ ID NO: 72371 - RNA, 16 nt, Human
uguaugaacgucucca

SEQ ID NO: 72372 - RNA, 22 nt, Human
uguaugaagacuucuucugugu

SEQ ID NO: 72373 - RNA, 22 nt, Human
uguaugaaguuacugagccucu

SEQ ID NO: 72374 - RNA, 22 nt, Human
uguaugcaauaauaacuaugug

SEQ ID NO: 72375 - RNA, 21 nt, Human
uguaugcacgcacaugcacac

SEQ ID NO: 72376 - RNA, 22 nt, Human
uguaugcagggcuuguaugcag

SEQ ID NO: 72377 - RNA, 22 nt, Human
uguaugcauaaaauuauuuaca

SEQ ID NO: 72378 - RNA, 22 nt, Human
uguauguaaaggucuucauguu

SEQ ID NO: 72379 - RNA, 22 nt, Human
uguauguauacacugaucauca

SEQ ID NO: 72380 - RNA, 22 nt, Human
uguaugugcaauguuuauaugu

SEQ ID NO: 72381 - RNA, 17 nt, Human
uguauguggauacacua

SEQ ID NO: 72382 - RNA, 22 nt, Human
uguauguguggauagauguaua

SEQ ID NO: 72383 - RNA, 22 nt, Human
uguauuaacauuaauaaaaugg

SEQ ID NO: 72384 - RNA, 20 nt, Human
uguauuacuuggucuuacaa

SEQ ID NO: 72385 - RNA, 22 nt, Human
uguauucaacuucuuaaaaauu

SEQ ID NO: 72386 - RNA, 22 nt, Human
uguauuccaaaaugcugaggau

SEQ ID NO: 72387 - RNA, 22 nt, Human
uguauugaauuguguuauaucu

SEQ ID NO: 72388 - RNA, 22 nt, Human
uguauuguaagugguuauaugc

SEQ ID NO: 72389 - RNA, 20 nt, Human
uguauuuaaugaaggcuuuu

SEQ ID NO: 72390 - RNA, 17 nt, Human
uguauuuaucaugucag

SEQ ID NO: 72391 - RNA, 22 nt, Human
uguauuuauucuucugguguuu

SEQ ID NO: 72392 - RNA, 22 nt, Human
uguauuucgcuagguacucccu

SEQ ID NO: 72393 - RNA, 22 nt, Human
uguauuuucugaagauaaucaa

SEQ ID NO: 72394 - RNA, 22 nt, Human
uguauuuucugaggagcauuag

SEQ ID NO: 72395 - RNA, 22 nt, Human
uguauuuucuucuggaagcuua

SEQ ID NO: 72396 - RNA, 22 nt, Human
uguauuuuuagaccuuuagacc

SEQ ID NO: 72397 - RNA, 22 nt, Human
ugucaaacugugacuucuaaug

SEQ ID NO: 72398 - RNA, 22 nt, Human
ugucaaagacagaaggaaaugg

SEQ ID NO: 72399 - RNA, 22 nt, Human
ugucaacaaaacgguucaaaug

SEQ ID NO: 72400 - RNA, 23 nt, Human
ugucaacaaaacuuucaggagaa

SEQ ID NO: 72401 - RNA, 22 nt, Human
ugucaagagugcacacaucugc

SEQ ID NO: 72402 - RNA, 22 nt, Human
ugucaagucucugaaugaaaug

SEQ ID NO: 72403 - RNA, 22 nt, Human
ugucaauaacuggagucauuau

SEQ ID NO: 72404 - RNA, 22 nt, Human
ugucacaaacauacauuauaga

SEQ ID NO: 72405 - RNA, 22 nt, Human
ugucacaaguaacuggcaaugc

SEQ ID NO: 72406 - RNA, 22 nt, Human
ucugaauuaaucaugccucuuu

SEQ ID NO: 72407 - RNA, 20 nt, Human
ucugaauugagugaaugucu

SEQ ID NO: 72408 - RNA, 22 nt, Human
ucugacagggccaaacaugaca

SEQ ID NO: 72409 - RNA, 22 nt, Human
ucugacagguguucuuccaggc

SEQ ID NO: 72410 - RNA, 22 nt, Human
ucugacauuagauuaauuggaa

SEQ ID NO: 72411 - RNA, 22 nt, Human
ucugacauuuugagaaugacau

SEQ ID NO: 72412 - RNA, 22 nt, Human
ucugaccacagacaaccugcua

SEQ ID NO: 72413 - RNA, 22 nt, Human
ucugacccugagucuauuuucu

SEQ ID NO: 72414 - RNA, 22 nt, Human
ucugacuuccuccacaucuguu

SEQ ID NO: 72415 - RNA, 22 nt, Human
ucugacuuccuuuucugaucca

SEQ ID NO: 72416 - RNA, 21 nt, Human
ucugacuugaucuauucuccc

SEQ ID NO: 72417 - RNA, 22 nt, Human
ucugacuuggugcuaccagcca

SEQ ID NO: 72418 - RNA, 22 nt, Human
ucugacuuuggacaguggcgaa

SEQ ID NO: 72419 - RNA, 22 nt, Human
ucugacuuuucucacuguugug

SEQ ID NO: 72420 - RNA, 22 nt, Human
ucugagaaaucaguggugaaua

SEQ ID NO: 72421 - RNA, 22 nt, Human
ucugagaacaucauuuccuaca

SEQ ID NO: 72422 - RNA, 22 nt, Human
ucugagaacuccggguuagauc

SEQ ID NO: 72423 - RNA, 17 nt, Human
ucugagaacuugaagca

SEQ ID NO: 72424 - RNA, 22 nt, Human
ucugagaaguccuguauuucua

SEQ ID NO: 72425 - RNA, 22 nt, Human
ucugagaaugaguguuuucuua

SEQ ID NO: 72426 - RNA, 17 nt, Human
ucugagaaugcuggagg

SEQ ID NO: 72427 - RNA, 22 nt, Human
ucugagaaugguggauguggug

SEQ ID NO: 72428 - RNA, 22 nt, Human
ucugagacuccauaaguugaaa

SEQ ID NO: 72429 - RNA, 22 nt, Human
ucugagagagggucagaugcua

SEQ ID NO: 72430 - RNA, 21 nt, Human
ucugagagcaacugcccuuua

SEQ ID NO: 72431 - RNA, 22 nt, Human
ucugagagccucuagccuaagu

SEQ ID NO: 72432 - RNA, 22 nt, Human
ucugagaggcaucugcacuucu

SEQ ID NO: 72433 - RNA, 22 nt, Human
ucugagcacaauuacuuacauc

SEQ ID NO: 72434 - RNA, 22 nt, Human
ucugagcagggcaguguccaug

SEQ ID NO: 72435 - RNA, 22 nt, Human
ucugagcauaugcagcaccugg

SEQ ID NO: 72436 - RNA, 22 nt, Human
ucugagccaauuucugugucca

SEQ ID NO: 72437 - RNA, 22 nt, Human
ucugagccacagauguccuguu

SEQ ID NO: 72438 - RNA, 22 nt, Human
ucugagccaccugccagugcug

SEQ ID NO: 72439 - RNA, 22 nt, Human
ucugagccagacaagacagcca

SEQ ID NO: 72440 - RNA, 22 nt, Human
ucugagcccagugagucucgca

SEQ ID NO: 72441 - RNA, 22 nt, Human
ucugagcuauguaagacuugga

SEQ ID NO: 72442 - RNA, 22 nt, Human
ucugagcucuaucugugggaau

SEQ ID NO: 72443 - RNA, 22 nt, Human
ucugagcuucccucugaggcag

SEQ ID NO: 72444 - RNA, 22 nt, Human
ucugagcuuucuugugcucaag

SEQ ID NO: 72445 - RNA, 22 nt, Human
ucugagcuuuuauuaucaaccu

SEQ ID NO: 72446 - RNA, 22 nt, Human
ucugaggaaaagaggagguagc

SEQ ID NO: 72447 - RNA, 22 nt, Human
ucugaggaaagagagugggaug

SEQ ID NO: 72448 - RNA, 22 nt, Human
ucugaggaccaucggggagcug

SEQ ID NO: 72449 - RNA, 22 nt, Human
ucugaggccccugggcaggaug

SEQ ID NO: 72450 - RNA, 22 nt, Human
ucugaggccuugggacagaagu

SEQ ID NO: 72451 - RNA, 22 nt, Human
ucugaggcugaauggacuccgu

SEQ ID NO: 72452 - RNA, 22 nt, Human
ucugaggcugcaucuaugugac

SEQ ID NO: 72453 - RNA, 19 nt, Human
ucugagggagcacgaaggc

SEQ ID NO: 72454 - RNA, 23 nt, Human
ucugagggagugggcaguggcac

SEQ ID NO: 72455 - RNA, 22 nt, Human
ucugagggauuugucccuuauc

SEQ ID NO: 72456 - RNA, 22 nt, Human
ucugagggcuugaggggaagua

SEQ ID NO: 72457 - RNA, 22 nt, Human
ucugaggguaagguuaagguag

SEQ ID NO: 72458 - RNA, 18 nt, Human
ucugagggugcgggagcu

SEQ ID NO: 72459 - RNA, 20 nt, Human
ucugagguaugauagggucu

SEQ ID NO: 72460 - RNA, 22 nt, Human
ucugaggucauaaagcaacuuu

SEQ ID NO: 72461 - RNA, 22 nt, Human
ucugaggucauuccaaggacau

SEQ ID NO: 72462 - RNA, 23 nt, Human
ucugagguccaccaguuugcaga

SEQ ID NO: 72463 - RNA, 22 nt, Human
ucugagguggggcuggagcauu

SEQ ID NO: 72464 - RNA, 22 nt, Human
ucugagguguagcugggcuuca

SEQ ID NO: 72465 - RNA, 22 nt, Human
ucugaggugucacaaggccagg

SEQ ID NO: 72466 - RNA, 22 nt, Human
ucugagguucccucaacuaccu

SEQ ID NO: 72467 - RNA, 22 nt, Human
ucugagguugaacuuugcaaag

SEQ ID NO: 72468 - RNA, 22 nt, Human
ucugagguuuucauguuuucug

SEQ ID NO: 72469 - RNA, 22 nt, Human
ucugagugauguugagucagaa

SEQ ID NO: 72470 - RNA, 22 nt, Human
ucugagugggaacucucaugac

SEQ ID NO: 72471 - RNA, 23 nt, Human
ucugaguuauguccuuacauuug

SEQ ID NO: 72472 - RNA, 22 nt, Human
ucugaguugaggaaaugcauuu

SEQ ID NO: 72473 - RNA, 20 nt, Human
ucugauaacugguugugauu

SEQ ID NO: 72474 - RNA, 22 nt, Human
ccaggcuuccuaaugugugcag

SEQ ID NO: 72475 - RNA, 22 nt, Human
ccaggcuuuaagagguggaaac

SEQ ID NO: 72476 - RNA, 22 nt, Human
ccaggcuuuguaccaggcuuuc

SEQ ID NO: 72477 - RNA, 22 nt, Human
ccagggaaaaucaacuucuacu

SEQ ID NO: 72478 - RNA, 22 nt, Human
ccagggaaacagcccaguguga

SEQ ID NO: 72479 - RNA, 22 nt, Human
ccagggaaacuuuggaguggag

SEQ ID NO: 72480 - RNA, 22 nt, Human
ccagggaaauuaaugaguuaau

SEQ ID NO: 72481 - RNA, 22 nt, Human
ccagggaagaccacuuccugga

SEQ ID NO: 72482 - RNA, 22 nt, Human
ccagggaagauuagaagccacu

SEQ ID NO: 72483 - RNA, 22 nt, Human
ccagggaaggcugcuggcugug

SEQ ID NO: 72484 - RNA, 22 nt, Human
ccagggaaucaggcagaaguca

SEQ ID NO: 72485 - RNA, 22 nt, Human
ccagggaaucucugaguguguu

SEQ ID NO: 72486 - RNA, 22 nt, Human
ccagggagcggggcugggucuc

SEQ ID NO: 72487 - RNA, 22 nt, Human
ccagggaggagcauuucauggu

SEQ ID NO: 72488 - RNA, 17 nt, Human
ccagggaggggccgcgc

SEQ ID NO: 72489 - RNA, 22 nt, Human
ccagggaggguccuguggcuuc

SEQ ID NO: 72490 - RNA, 18 nt, Human
ccagggaugcaugguccc

SEQ ID NO: 72491 - RNA, 22 nt, Human
ccagggauguggcagcaccaua

SEQ ID NO: 72492 - RNA, 22 nt, Human
ccagggcaauuauuuggagggu

SEQ ID NO: 72493 - RNA, 22 nt, Human
ccagggcagaaaaagagggaau

SEQ ID NO: 72494 - RNA, 22 nt, Human
ccagggcagccaacccagaugc

SEQ ID NO: 72495 - RNA, 22 nt, Human
ccagggcaggagaaagacucac

SEQ ID NO: 72496 - RNA, 22 nt, Human
ccagggcauccucacaucgcag

SEQ ID NO: 72497 - RNA, 22 nt, Human
ccagggcauguccaagacuuag

SEQ ID NO: 72498 - RNA, 22 nt, Human
ccagggcccacggccagaauag

SEQ ID NO: 72499 - RNA, 23 nt, Human
ccagggcuacgggcaccguccug

SEQ ID NO: 72500 - RNA, 22 nt, Human
ccagggcucgggugcuuaguca

SEQ ID NO: 72501 - RNA, 22 nt, Human
ccagggcucuaugaggguggag

SEQ ID NO: 72502 - RNA, 22 nt, Human
ccagggcugcugugggacucca

SEQ ID NO: 72503 - RNA, 22 nt, Human
ccagggcugguggcugcagagg

SEQ ID NO: 72504 - RNA, 22 nt, Human
ccagggcuucagagguuuuggc

SEQ ID NO: 72505 - RNA, 22 nt, Human
ccagggcuucccacgugcccug

SEQ ID NO: 72506 - RNA, 22 nt, Human
ccagggcuugguggcuuguauc

SEQ ID NO: 72507 - RNA, 22 nt, Human
ccagggcuuugccaaaguccag

SEQ ID NO: 72508 - RNA, 22 nt, Human
ccaggggggcguagaugcuggg

SEQ ID NO: 72509 - RNA, 22 nt, Human
ccagggucacaaauaacugcag

SEQ ID NO: 72510 - RNA, 22 nt, Human
ccagggucucugcugccugaga

SEQ ID NO: 72511 - RNA, 22 nt, Human
ccagggugagugucauggguua

SEQ ID NO: 72512 - RNA, 22 nt, Human
ccaggguuauaaaugcaucugu

SEQ ID NO: 72513 - RNA, 22 nt, Human
ccaggguugcagggagccagca

SEQ ID NO: 72514 - RNA, 22 nt, Human
ccaggguuuagcaagccuacaa

SEQ ID NO: 72515 - RNA, 22 nt, Human
ccaggguuucuucucuguauag

SEQ ID NO: 72516 - RNA, 22 nt, Human
ccagguacuugguaugcauuca

SEQ ID NO: 72517 - RNA, 22 nt, Human
ccagguagccaaggggucuggg

SEQ ID NO: 72518 - RNA, 22 nt, Human
ccagguccuguuuucaccacag

SEQ ID NO: 72519 - RNA, 22 nt, Human
ccaggucucgggucugcucgug

SEQ ID NO: 72520 - RNA, 22 nt, Human
ccaggucugucuucuuagcuca

SEQ ID NO: 72521 - RNA, 22 nt, Human
ccaggucuuggcccccggaccu

SEQ ID NO: 72522 - RNA, 22 nt, Human
ccagguggacaaggcuuucaca

SEQ ID NO: 72523 - RNA, 22 nt, Human
ccagguggacggcgaguacagg

SEQ ID NO: 72524 - RNA, 22 nt, Human
ccagguggaggugugagguccu

SEQ ID NO: 72525 - RNA, 17 nt, Human
ccaggugggaggugggg

SEQ ID NO: 72526 - RNA, 22 nt, Human
ccaggugucaugcgugugaccc

SEQ ID NO: 72527 - RNA, 22 nt, Human
ccaggugucugucucuuuuuca

SEQ ID NO: 72528 - RNA, 22 nt, Human
ccaggugugagcauucugucuu

SEQ ID NO: 72529 - RNA, 22 nt, Human
ccaggugugauuucaucugagg

SEQ ID NO: 72530 - RNA, 22 nt, Human
ccaggugugauuuggcaguguc

SEQ ID NO: 72531 - RNA, 22 nt, Human
ccagguguggccacauggcugg

SEQ ID NO: 72532 - RNA, 22 nt, Human
cacccaggcuggauugcagugg

SEQ ID NO: 72533 - RNA, 22 nt, Human
cacccagugaaggagcaagagg

SEQ ID NO: 72534 - RNA, 22 nt, Human
caccccagucuaaaaccagccu

SEQ ID NO: 72535 - RNA, 22 nt, Human
cacccccagcagggaaaggagg

SEQ ID NO: 72536 - RNA, 22 nt, Human
caccccuguggagcaugguggc

SEQ ID NO: 72537 - RNA, 22 nt, Human
cacccucaagcaguggcacgug

SEQ ID NO: 72538 - RNA, 22 nt, Human
cacccugaggccacccagaccu

SEQ ID NO: 72539 - RNA, 22 nt, Human
cacccugcccacuagcaaucug

SEQ ID NO: 72540 - RNA, 22 nt, Human
cacccugcucugcugugcggcc

SEQ ID NO: 72541 - RNA, 22 nt, Human
cacccuggaaagaaggucuggg

SEQ ID NO: 72542 - RNA, 22 nt, Human
cacccuggaauagccccgggag

SEQ ID NO: 72543 - RNA, 22 nt, Human
cacccugggcugggccuguuaa

SEQ ID NO: 72544 - RNA, 22 nt, Human
caccgagugacaguagccauca

SEQ ID NO: 72545 - RNA, 22 nt, Human
caccuacuuugugcagauuuua

SEQ ID NO: 72546 - RNA, 22 nt, Human
caccuagcauuccucuuccuca

SEQ ID NO: 72547 - RNA, 22 nt, Human
caccucaggcagcaaagucuca

SEQ ID NO: 72548 - RNA, 22 nt, Human
caccucucauuucuacagauuc

SEQ ID NO: 72549 - RNA, 22 nt, Human
caccucugccucaagcuuccca

SEQ ID NO: 72550 - RNA, 22 nt, Human
caccucugcuguccacaggaug

SEQ ID NO: 72551 - RNA, 22 nt, Human
caccucuuugauuugaggcaag

SEQ ID NO: 72552 - RNA, 22 nt, Human
caccugagugucaguauucuca

SEQ ID NO: 72553 - RNA, 22 nt, Human
caccugcccagcaccugggauc

SEQ ID NO: 72554 - RNA, 22 nt, Human
caccugccugcaggggcuccac

SEQ ID NO: 72555 - RNA, 22 nt, Human
caccugccugcuagagccugac

SEQ ID NO: 72556 - RNA, 22 nt, Human
caccuguuagcucuaauuuucu

SEQ ID NO: 72557 - RNA, 21 nt, Human
caccuuauagauaaaauuaga

SEQ ID NO: 72558 - RNA, 22 nt, Human
caccuugcauucuuuuaauuua

SEQ ID NO: 72559 - RNA, 22 nt, Human
caccuugugauccucuugccuu

SEQ ID NO: 72560 - RNA, 22 nt, Human
caccuuuaaugagcaccagccg

SEQ ID NO: 72561 - RNA, 19 nt, Human
cacgaguucucuuagcaaa

SEQ ID NO: 72562 - RNA, 22 nt, Human
cacgcauguggaucagaugaag

SEQ ID NO: 72563 - RNA, 22 nt, Human
cacgccuggacggcggagggug

SEQ ID NO: 72564 - RNA, 22 nt, Human
cacgcuuggcuuauacagagaa

SEQ ID NO: 72565 - RNA, 22 nt, Human
cacgggcagugagcacagccug

SEQ ID NO: 72566 - RNA, 22 nt, Human
cacgguuagccacaggcuggaa

SEQ ID NO: 72567 - RNA, 22 nt, Human
cacgugcaggucuuaggagaca

SEQ ID NO: 72568 - RNA, 19 nt, Human
cacuaagaagcaggggagc

SEQ ID NO: 72569 - RNA, 22 nt, Human
cacuaaguaagcuccucuacaa

SEQ ID NO: 72570 - RNA, 22 nt, Human
cacuaagucaacagccucucuu

SEQ ID NO: 72571 - RNA, 22 nt, Human
cacuaaguugguguuaauuagu

SEQ ID NO: 72572 - RNA, 22 nt, Human
cacuaauuccaucuccuuuucc

SEQ ID NO: 72573 - RNA, 22 nt, Human
cacuacagaaucaaauacgggc

SEQ ID NO: 72574 - RNA, 19 nt, Human
cacuagucuagaugggaug

SEQ ID NO: 72575 - RNA, 22 nt, Human
cacuauaucuguucuuguuuau

SEQ ID NO: 72576 - RNA, 22 nt, Human
cacuauuucagugauucugcag

SEQ ID NO: 72577 - RNA, 22 nt, Human
cacuauuuucucuucagauggc

SEQ ID NO: 72578 - RNA, 21 nt, Human
cacucaauaaaugucauaugc

SEQ ID NO: 72579 - RNA, 22 nt, Human
cacucaauacaaugguuggcac

SEQ ID NO: 72580 - RNA, 21 nt, Human
cacuccacuuagaacaggguu

SEQ ID NO: 72581 - RNA, 22 nt, Human
cacucccucuaguugcauucug

SEQ ID NO: 72582 - RNA, 22 nt, Human
cacucugacacaugaacuugau

SEQ ID NO: 72583 - RNA, 22 nt, Human
cacauuuaucuguucuuucuag

SEQ ID NO: 72584 - RNA, 19 nt, Human
cacauuuugagucugagau

SEQ ID NO: 72585 - RNA, 21 nt, Human
caccaacaccugggauagguc

SEQ ID NO: 72586 - RNA, 17 nt, Human
caccaauuaagacccuc

SEQ ID NO: 72587 - RNA, 22 nt, Human
caccacagcauccacuagaagg

SEQ ID NO: 72588 - RNA, 22 nt, Human
caccacuggaggucuuggcuuu

SEQ ID NO: 72589 - RNA, 22 nt, Human
caccagaacaagacaggagaau

SEQ ID NO: 72590 - RNA, 22 nt, Human
caccagacagguguaugcauau

SEQ ID NO: 72591 - RNA, 22 nt, Human
caccagagugaguggacugucg

SEQ ID NO: 72592 - RNA, 22 nt, Human
caccagcaccagcucugugccu

SEQ ID NO: 72593 - RNA, 22 nt, Human
caccagcagaagacugagggug

SEQ ID NO: 72594 - RNA, 22 nt, Human
caccagcuccaccagggcaggu

SEQ ID NO: 72595 - RNA, 22 nt, Human
caccaggaaguauucaaagggu

SEQ ID NO: 72596 - RNA, 22 nt, Human
caccaggcacagcucuccugcu

SEQ ID NO: 72597 - RNA, 22 nt, Human
caccaggcugaaccagagggga

SEQ ID NO: 72598 - RNA, 22 nt, Human
caccaggcuggagugcagaggu

SEQ ID NO: 72599 - RNA, 22 nt, Human
caccagggacaaugcuaggggu

SEQ ID NO: 72600 - RNA, 22 nt, Human
caccagggcucugagcucugaa

SEQ ID NO: 72601 - RNA, 22 nt, Human
caccaggugcuggaggacauca

SEQ ID NO: 72602 - RNA, 22 nt, Human
caccagguggaaaugucacagc

SEQ ID NO: 72603 - RNA, 22 nt, Human
caccaugacugguugagagagg

SEQ ID NO: 72604 - RNA, 22 nt, Human
cacccagccuucacacaggagu

SEQ ID NO: 72605 - RNA, 22 nt, Human
cacccaggagguugggaagggc

SEQ ID NO: 72606 - RNA, 22 nt, Human
cacccaggcaaggauucugcaa

SEQ ID NO: 72607 - RNA, 22 nt, Human
cacccaggcauggguugagaug

SEQ ID NO: 72608 - RNA, 22 nt, Human
cacccaggcuagagugcagugg

SEQ ID NO: 72609 - RNA, 22 nt, Human
cacccaggcuggagugcagggg

SEQ ID NO: 72610 - RNA, 22 nt, Human
cacccauuaaccaaagagugaa

SEQ ID NO: 72611 - RNA, 22 nt, Human
caccccagcuucucaggauaga

SEQ ID NO: 72612 - RNA, 22 nt, Human
caccccugggcugggcacacag

SEQ ID NO: 72613 - RNA, 22 nt, Human
cacccuagcugucauuucaguu

SEQ ID NO: 72614 - RNA, 22 nt, Human
cacccucccgucagccccuggg

SEQ ID NO: 72615 - RNA, 22 nt, Human
cacccugcuacaaagccuccug

SEQ ID NO: 72616 - RNA, 22 nt, Human
cacccuggccucgcucucugca

SEQ ID NO: 72617 - RNA, 22 nt, Human
cacccuguacaaauggacaucu

SEQ ID NO: 72618 - RNA, 22 nt, Human
cacccugucaguugcaggauag

SEQ ID NO: 72619 - RNA, 22 nt, Human
caccgcggagugauggagaaac

SEQ ID NO: 72620 - RNA, 19 nt, Human
caccuacuuuuggauuugc

SEQ ID NO: 72621 - RNA, 22 nt, Human
caccuagcaugaaauucagcag

SEQ ID NO: 72622 - RNA, 22 nt, Human
caccuagccuucuugugccucu

SEQ ID NO: 72623 - RNA, 22 nt, Human
caccucauggauaagauaaacu

SEQ ID NO: 72624 - RNA, 22 nt, Human
caccucucagcuaggaguaagu

SEQ ID NO: 72625 - RNA, 20 nt, Human
caccucugaaaguuuccagc

SEQ ID NO: 72626 - RNA, 22 nt, Human
caccugagacuccucaccauga

SEQ ID NO: 72627 - RNA, 22 nt, Human
caccugagcacuggggccgccc

SEQ ID NO: 72628 - RNA, 22 nt, Human
caccugccaaauggggaugcug

SEQ ID NO: 72629 - RNA, 22 nt, Human
caccugcccuuucuugcuccac

SEQ ID NO: 72630 - RNA, 22 nt, Human
caccugccucauuugucccugc

SEQ ID NO: 72631 - RNA, 22 nt, Human
caccuggauauguuucagcuug

SEQ ID NO: 72632 - RNA, 22 nt, Human
caccuggaugccacaaagccac

SEQ ID NO: 72633 - RNA, 20 nt, Human
caccuggcugacugucucca

SEQ ID NO: 72634 - RNA, 22 nt, Human
caccugggcuaaacuaugcagg

SEQ ID NO: 72635 - RNA, 22 nt, Human
caccugggcuuucucugggacu

SEQ ID NO: 72636 - RNA, 22 nt, Human
caccugggucauugcugguguu

SEQ ID NO: 72637 - RNA, 22 nt, Human
caccuguccacgcagucugccu

SEQ ID NO: 72638 - RNA, 22 nt, Human
caccuucagaaugcuccaggca

SEQ ID NO: 72639 - RNA, 22 nt, Human
caccuuugcaaaccaaaucuga

SEQ ID NO: 72640 - RNA, 22 nt, Human
cacgaauggaagggucuuggcu

SEQ ID NO: 72641 - RNA, 22 nt, Human
cacgagggcacacgugggaggg

SEQ ID NO: 72642 - RNA, 22 nt, Human
cacggccagggcugugggugcg

SEQ ID NO: 72643 - RNA, 22 nt, Human
cacgggagacgugaucuuggac

SEQ ID NO: 72644 - RNA, 22 nt, Human
cacguuaacagcuaacagauga

SEQ ID NO: 72645 - RNA, 20 nt, Human
cacguuuuuccacuagcaaa

SEQ ID NO: 72646 - RNA, 20 nt, Human
cacuaacugcucaugacucc

SEQ ID NO: 72647 - RNA, 19 nt, Human
cacuaagaugagauauagc

SEQ ID NO: 72648 - RNA, 22 nt, Human
cacuaagauuuaaaguauuagu

SEQ ID NO: 72649 - RNA, 22 nt, Human
cacaugggugugccuggaggaa

SEQ ID NO: 72650 - RNA, 22 nt, Human
cacaugguggugcuugauaagc

SEQ ID NO: 72651 - RNA, 22 nt, Human
cacauguaguaagcaggcaaug

SEQ ID NO: 72652 - RNA, 22 nt, Human
cacauguccugggaaaauaacu

SEQ ID NO: 72653 - RNA, 22 nt, Human
cacaugugggaaauggugcuua

SEQ ID NO: 72654 - RNA, 22 nt, Human
cacauguuuuuggccaucaugg

SEQ ID NO: 72655 - RNA, 22 nt, Human
cacauuaaaauccuaacuucca

SEQ ID NO: 72656 - RNA, 22 nt, Human
cacauuaagaauaaugagacua

SEQ ID NO: 72657 - RNA, 22 nt, Human
cacauuaugcuacuaccaaaug

SEQ ID NO: 72658 - RNA, 22 nt, Human
cacauuauucuaaagagguacu

SEQ ID NO: 72659 - RNA, 22 nt, Human
cacauucaggauuuuccauguc

SEQ ID NO: 72660 - RNA, 22 nt, Human
cacauucagggaacauuggagg

SEQ ID NO: 72661 - RNA, 22 nt, Human
cacauucuuucacaguucugaa

SEQ ID NO: 72662 - RNA, 23 nt, Human
cacauugaacacucucuuuccug

SEQ ID NO: 72663 - RNA, 21 nt, Human
cacauugaauacagagaugga

SEQ ID NO: 72664 - RNA, 22 nt, Human
cacauugcagcuucuuuuggcu

SEQ ID NO: 72665 - RNA, 22 nt, Human
cacauugggaugaagucuaaaa

SEQ ID NO: 72666 - RNA, 22 nt, Human
cacauuuaauccuuuauaagua

SEQ ID NO: 72667 - RNA, 22 nt, Human
cacauuucauuggcuuacguaa

SEQ ID NO: 72668 - RNA, 22 nt, Human
cacauuucuggaauugacuugg

SEQ ID NO: 72669 - RNA, 22 nt, Human
cacauuugaaggaauuagcauu

SEQ ID NO: 72670 - RNA, 22 nt, Human
caccacuucauaggcuuuaagg

SEQ ID NO: 72671 - RNA, 19 nt, Human
caccacuucuuuuugcauc

SEQ ID NO: 72672 - RNA, 22 nt, Human
caccagaguuguccaaaugauu

SEQ ID NO: 72673 - RNA, 22 nt, Human
caccagcagcggugugagggug

SEQ ID NO: 72674 - RNA, 22 nt, Human
caccagcuacuccagggccgug

SEQ ID NO: 72675 - RNA, 22 nt, Human
caccagcuacucggguuuccug

SEQ ID NO: 72676 - RNA, 22 nt, Human
caccagcucuccaccagguuuc

SEQ ID NO: 72677 - RNA, 22 nt, Human
caccagcuugcagucuuaaccc

SEQ ID NO: 72678 - RNA, 22 nt, Human
caccaggaagugguggccuggg

SEQ ID NO: 72679 - RNA, 20 nt, Human
caccaggcgcucugagaaca

SEQ ID NO: 72680 - RNA, 22 nt, Human
caccaggcugagccucucaucu

SEQ ID NO: 72681 - RNA, 22 nt, Human
caccagggcagcagccuagucu

SEQ ID NO: 72682 - RNA, 20 nt, Human
caccagucaugagucaauac

SEQ ID NO: 72683 - RNA, 22 nt, Human
caccauaaccaacaugucaguu

SEQ ID NO: 72684 - RNA, 22 nt, Human
caccaucagcagcaggugucaa

SEQ ID NO: 72685 - RNA, 22 nt, Human
caccaucuuuuggaggggaauu

SEQ ID NO: 72686 - RNA, 22 nt, Human
caccauguauucaguuuggcac

SEQ ID NO: 72687 - RNA, 22 nt, Human
caccauuuucuaaaaauaugac

SEQ ID NO: 72688 - RNA, 22 nt, Human
cacccacccacugcucauuggc

SEQ ID NO: 72689 - RNA, 22 nt, Human
cacccacugagcucauguccca

SEQ ID NO: 72690 - RNA, 22 nt, Human
cacccagagccugagagggaua

SEQ ID NO: 72691 - RNA, 22 nt, Human
cacccagagggcuugcugaaca

SEQ ID NO: 72692 - RNA, 22 nt, Human
ccucagagacugcaucuucccu

SEQ ID NO: 72693 - RNA, 22 nt, Human
ccucagaggcagaugguaagaa

SEQ ID NO: 72694 - RNA, 22 nt, Human
ccucagagguucugugugggaa

SEQ ID NO: 72695 - RNA, 22 nt, Human
ccucagagguuuucauucugua

SEQ ID NO: 72696 - RNA, 22 nt, Human
ccucagagucuaguaaauaaua

SEQ ID NO: 72697 - RNA, 22 nt, Human
ccucagaguuggaaucacauuu

SEQ ID NO: 72698 - RNA, 23 nt, Human
ccucagcauggcaggagcccagc

SEQ ID NO: 72699 - RNA, 22 nt, Human
ccucagccccugaauggagaga

SEQ ID NO: 72700 - RNA, 22 nt, Human
ccucagccuuggccccaggcag

SEQ ID NO: 72701 - RNA, 22 nt, Human
ccucaggauacaggagccacag

SEQ ID NO: 72702 - RNA, 22 nt, Human
ccucaggccagggggcggccag

SEQ ID NO: 72703 - RNA, 20 nt, Human
ccucaggccaguuuuaaagu

SEQ ID NO: 72704 - RNA, 22 nt, Human
ccucaggccugccagagcccca

SEQ ID NO: 72705 - RNA, 22 nt, Human
ccucaggcucugggugccuacc

SEQ ID NO: 72706 - RNA, 22 nt, Human
ccucagggacgggaucacuugg

SEQ ID NO: 72707 - RNA, 22 nt, Human
ccucagggacuccaugcugcag

SEQ ID NO: 72708 - RNA, 22 nt, Human
ccucagggucauccuaguaaua

SEQ ID NO: 72709 - RNA, 22 nt, Human
ccucagggucucucacagcacc

SEQ ID NO: 72710 - RNA, 22 nt, Human
ccucagggucugaggagaccgu

SEQ ID NO: 72711 - RNA, 22 nt, Human
ccucagucuccgugcucaccuu

SEQ ID NO: 72712 - RNA, 22 nt, Human
ccucagucugucugaucugcca

SEQ ID NO: 72713 - RNA, 22 nt, Human
ccucagugaguguuuccuucuu

SEQ ID NO: 72714 - RNA, 22 nt, Human
ccucaguguuaggauaagagaa

SEQ ID NO: 72715 - RNA, 21 nt, Human
ccucaucaaacuuucacuugc

SEQ ID NO: 72716 - RNA, 22 nt, Human
ccucaugaguucuucugcccau

SEQ ID NO: 72717 - RNA, 22 nt, Human
ccucaugauuuuuagcccauug

SEQ ID NO: 72718 - RNA, 22 nt, Human
ccucauggaccucagacugucc

SEQ ID NO: 72719 - RNA, 22 nt, Human
ccuccaagcuucaucucaacca

SEQ ID NO: 72720 - RNA, 22 nt, Human
ccuccacaggagcugcagugcu

SEQ ID NO: 72721 - RNA, 22 nt, Human
ccuccagcugccucagucucuu

SEQ ID NO: 72722 - RNA, 22 nt, Human
ccuccaggaggaaauggaacac

SEQ ID NO: 72723 - RNA, 22 nt, Human
ccuccagggcagacggggagca

SEQ ID NO: 72724 - RNA, 21 nt, Human
ccuccaggugauuccgugcuc

SEQ ID NO: 72725 - RNA, 22 nt, Human
ccuccaguacuccaguccagcg

SEQ ID NO: 72726 - RNA, 22 nt, Human
ccuccaucuccagcuucugccu

SEQ ID NO: 72727 - RNA, 23 nt, Human
ccuccaugguaagaagcuuagag

SEQ ID NO: 72728 - RNA, 22 nt, Human
ccuccauguaaagguccccuca

SEQ ID NO: 72729 - RNA, 22 nt, Human
ccucccaccguaucucaguggc

SEQ ID NO: 72730 - RNA, 22 nt, Human
ccucccacuucuugcugagguc

SEQ ID NO: 72731 - RNA, 22 nt, Human
ccucccagugccuccagagcag

SEQ ID NO: 72732 - RNA, 22 nt, Human
ccucccaucccugcaagagagc

SEQ ID NO: 72733 - RNA, 22 nt, Human
ccuccccacagcccaggagacu

SEQ ID NO: 72734 - RNA, 23 nt, Human
ccuccccaccagacucuaacaua

SEQ ID NO: 72735 - RNA, 22 nt, Human
ccucccguauauguccugggcu

SEQ ID NO: 72736 - RNA, 22 nt, Human
ccucccucccugcagaagccac

SEQ ID NO: 72737 - RNA, 22 nt, Human
ccucccucuuucagucccacag

SEQ ID NO: 72738 - RNA, 22 nt, Human
ccucccugccggcuggacuagu

SEQ ID NO: 72739 - RNA, 22 nt, Human
ccucccugcuccucaacuggca

SEQ ID NO: 72740 - RNA, 22 nt, Human
ccucccugggugacgggcuccu

SEQ ID NO: 72741 - RNA, 22 nt, Human
ccucccugggugcugggauugc

SEQ ID NO: 72742 - RNA, 22 nt, Human
ccucccuuggccauagccagcc

SEQ ID NO: 72743 - RNA, 22 nt, Human
ccucccuuuguugcaagggaaa

SEQ ID NO: 72744 - RNA, 22 nt, Human
ccuccuagaggaaccccagggc

SEQ ID NO: 72745 - RNA, 22 nt, Human
ccuccucugugcagcugugggu

SEQ ID NO: 72746 - RNA, 22 nt, Human
ccuccugcaccuccaggaacuc

SEQ ID NO: 72747 - RNA, 22 nt, Human
ccuccugcacuugcuuuccuuc

SEQ ID NO: 72748 - RNA, 22 nt, Human
ccuccuggaaaaauucccuggc

SEQ ID NO: 72749 - RNA, 22 nt, Human
ccuccuggaggcucuaagggag

SEQ ID NO: 72750 - RNA, 22 nt, Human
ccuccuggcccugggccuggaa

SEQ ID NO: 72751 - RNA, 22 nt, Human
ccuccuggcuuuucccauugaa

SEQ ID NO: 72752 - RNA, 22 nt, Human
ccuccugggcuccugucugcac

SEQ ID NO: 72753 - RNA, 22 nt, Human
ccuccugucuccuuccuauauu

SEQ ID NO: 72754 - RNA, 22 nt, Human
ccucgcggcacucgggccggau

SEQ ID NO: 72755 - RNA, 18 nt, Human
ccucuaccuaccccuaga

SEQ ID NO: 72756 - RNA, 22 nt, Human
ccucuacuuaccacucagccag

SEQ ID NO: 72757 - RNA, 22 nt, Human
ccucucagcgauuccucuugga

SEQ ID NO: 72758 - RNA, 22 nt, Human
ccucucauagucuguauccuuu

SEQ ID NO: 72759 - RNA, 22 nt, Human
ccucucaucauuaucgcuuugu

SEQ ID NO: 72760 - RNA, 22 nt, Human
ccucuccaguuuuaacgugacc

SEQ ID NO: 72761 - RNA, 22 nt, Human
ccucucccagggagagccugag

SEQ ID NO: 72762 - RNA, 19 nt, Human
ccucucccaugcuuaccuc

SEQ ID NO: 72763 - RNA, 22 nt, Human
ccucucccgggugccgcugggc

SEQ ID NO: 72764 - RNA, 22 nt, Human
ccucucuccaauuuucaccuca

SEQ ID NO: 72765 - RNA, 22 nt, Human
ccucucucuccugcacacacac

SEQ ID NO: 72766 - RNA, 22 nt, Human
ccucucucuuguagucccugcc

SEQ ID NO: 72767 - RNA, 22 nt, Human
ccucucuguguggccucuccau

SEQ ID NO: 72768 - RNA, 22 nt, Human
ccucucuuggccgcagucuucu

SEQ ID NO: 72769 - RNA, 23 nt, Human
ccucucuuuuuaggugguguuug

SEQ ID NO: 72770 - RNA, 23 nt, Human
ccucugacaaugaugucaccugc

SEQ ID NO: 72771 - RNA, 22 nt, Human
ccucugacuucucuuuauuggc

SEQ ID NO: 72772 - RNA, 22 nt, Human
ccucugagaccagcucugcacc

SEQ ID NO: 72773 - RNA, 22 nt, Human
ccucugagccagcgucuucucu

SEQ ID NO: 72774 - RNA, 22 nt, Human
ccucugaggugagcccagcugg

SEQ ID NO: 72775 - RNA, 22 nt, Human
ccucugaguguuuuccccgggu

SEQ ID NO: 72776 - RNA, 22 nt, Human
ccucugaguuggccugucuugu

SEQ ID NO: 72777 - RNA, 22 nt, Human
ccucugcaugugcaguaccgag

SEQ ID NO: 72778 - RNA, 19 nt, Human
ccucugccagcccgccucu

SEQ ID NO: 72779 - RNA, 22 nt, Human
ccucugcccuuuuccuguauca

SEQ ID NO: 72780 - RNA, 22 nt, Human
ccucugccuuuagugaaaguug

SEQ ID NO: 72781 - RNA, 18 nt, Human
ccucugccuuuguagagc

SEQ ID NO: 72782 - RNA, 19 nt, Human
ccucugcgcuguccugcuc

SEQ ID NO: 72783 - RNA, 22 nt, Human
ccucuggcaagugauuuaucau

SEQ ID NO: 72784 - RNA, 22 nt, Human
cagaugcuaaacaaaggacuuu

SEQ ID NO: 72785 - RNA, 18 nt, Human
cagaugcuaggccuccag

SEQ ID NO: 72786 - RNA, 22 nt, Human
cagaugcuauguauuauguaug

SEQ ID NO: 72787 - RNA, 20 nt, Human
cagaugcuggaucuuggucc

SEQ ID NO: 72788 - RNA, 22 nt, Human
cagaugcuuggaggacacuugg

SEQ ID NO: 72789 - RNA, 22 nt, Human
cagauggcaacagcucugugac

SEQ ID NO: 72790 - RNA, 22 nt, Human
cagauggccagaggcagcugca

SEQ ID NO: 72791 - RNA, 22 nt, Human
cagauggcugccaagaugggcu

SEQ ID NO: 72792 - RNA, 22 nt, Human
cagauguaguagcuuuauugca

SEQ ID NO: 72793 - RNA, 22 nt, Human
cagaugucauuucccaugcagc

SEQ ID NO: 72794 - RNA, 23 nt, Human
cagaugugcaacucuaggcaaug

SEQ ID NO: 72795 - RNA, 22 nt, Human
cagauguuguuccugccuguag

SEQ ID NO: 72796 - RNA, 22 nt, Human
cagauuacuuuguagcagucag

SEQ ID NO: 72797 - RNA, 22 nt, Human
cagauucaaccuaagacaaucu

SEQ ID NO: 72798 - RNA, 20 nt, Human
cagauucuccacuaacauau

SEQ ID NO: 72799 - RNA, 22 nt, Human
cagauucuucauucauucuaca

SEQ ID NO: 72800 - RNA, 22 nt, Human
cagauucuucuguauuuuugcu

SEQ ID NO: 72801 - RNA, 22 nt, Human
cagcagaaaaugugggugauuu

SEQ ID NO: 72802 - RNA, 22 nt, Human
cagcagaaacccagcaaagcca

SEQ ID NO: 72803 - RNA, 21 nt, Human
cagcagaagcaucuauggaag

SEQ ID NO: 72804 - RNA, 18 nt, Human
cagcagagacauucaaaa

SEQ ID NO: 72805 - RNA, 22 nt, Human
cagcagagaccaagugauuuga

SEQ ID NO: 72806 - RNA, 22 nt, Human
cagcagagacgguaagcagaac

SEQ ID NO: 72807 - RNA, 23 nt, Human
cagcagagagcagaccuuugugu

SEQ ID NO: 72808 - RNA, 22 nt, Human
cagcagagcuuauuaacuaaaa

SEQ ID NO: 72809 - RNA, 22 nt, Human
cagcagaggcacgucugugaau

SEQ ID NO: 72810 - RNA, 21 nt, Human
cagcagaguaaugcauucgua

SEQ ID NO: 72811 - RNA, 22 nt, Human
cagcagaguaauucucaccucu

SEQ ID NO: 72812 - RNA, 22 nt, Human
cagcagcaaaucuagaagagga

SEQ ID NO: 72813 - RNA, 22 nt, Human
cagcagcaaggugaggguggag

SEQ ID NO: 72814 - RNA, 22 nt, Human
cagcagcacucugcgggucccc

SEQ ID NO: 72815 - RNA, 22 nt, Human
cagcagcagagauacugguuuc

SEQ ID NO: 72816 - RNA, 22 nt, Human
cagcagcagcuuaguggucccc

SEQ ID NO: 72817 - RNA, 22 nt, Human
cagcagccuaggguuccaucau

SEQ ID NO: 72818 - RNA, 22 nt, Human
cagcagccucuugugccugugg

SEQ ID NO: 72819 - RNA, 22 nt, Human
cagcagccuggccccuccucgg

SEQ ID NO: 72820 - RNA, 22 nt, Human
cagcagcucacugaauaaugac

SEQ ID NO: 72821 - RNA, 22 nt, Human
cagcagcucaggcugcuuccca

SEQ ID NO: 72822 - RNA, 22 nt, Human
cagcagcucccauccgcugagc

SEQ ID NO: 72823 - RNA, 22 nt, Human
cagcagcugaggcgcuggcgug

SEQ ID NO: 72824 - RNA, 22 nt, Human
cagcagcugauggggaagugau

SEQ ID NO: 72825 - RNA, 22 nt, Human
cagcagcuggugagacacagcc

SEQ ID NO: 72826 - RNA, 22 nt, Human
cagcagcuguuuacggaacacc

SEQ ID NO: 72827 - RNA, 22 nt, Human
cagcagcuucuguugaucagaa

SEQ ID NO: 72828 - RNA, 20 nt, Human
cagcaggaaaagugccucag

SEQ ID NO: 72829 - RNA, 22 nt, Human
cagcaggaaacuuaaagguaau

SEQ ID NO: 72830 - RNA, 22 nt, Human
cagcaggaagguuuccccugca

SEQ ID NO: 72831 - RNA, 22 nt, Human
cagcaggaggcauggcuucccu

SEQ ID NO: 72832 - RNA, 22 nt, Human
cagcaggaggugagaugugacc

SEQ ID NO: 72833 - RNA, 22 nt, Human
cagcaggauagguuucuuugga

SEQ ID NO: 72834 - RNA, 22 nt, Human
cagcaggauuggauacaucuca

SEQ ID NO: 72835 - RNA, 22 nt, Human
cagcaggcccagaguuucaugg

SEQ ID NO: 72836 - RNA, 22 nt, Human
cagcagggaagcugugcuguuu

SEQ ID NO: 72837 - RNA, 22 nt, Human
cagcaggucaugaaagaaaacc

SEQ ID NO: 72838 - RNA, 22 nt, Human
cagcaggucucagcagcuccuu

SEQ ID NO: 72839 - RNA, 22 nt, Human
cagcaggucuuguugcugcuga

SEQ ID NO: 72840 - RNA, 22 nt, Human
cagcaggugggcuuugcggaug

SEQ ID NO: 72841 - RNA, 22 nt, Human
cagcaggugucuagcaaggguc

SEQ ID NO: 72842 - RNA, 22 nt, Human
cagcaguaacucccgugcagca

SEQ ID NO: 72843 - RNA, 22 nt, Human
cagcagugacaagacuaagaag

SEQ ID NO: 72844 - RNA, 20 nt, Human
cagcaguggaugagaguuuu

SEQ ID NO: 72845 - RNA, 22 nt, Human
cagcaguggccaucuguguggu

SEQ ID NO: 72846 - RNA, 22 nt, Human
cagcaguuaugaguagaauagu

SEQ ID NO: 72847 - RNA, 22 nt, Human
cagcaguucaauccagugcacg

SEQ ID NO: 72848 - RNA, 20 nt, Human
cagcauagcggcucacaucc

SEQ ID NO: 72849 - RNA, 22 nt, Human
cagcauaggauguggagccagg

SEQ ID NO: 72850 - RNA, 22 nt, Human
cagcauaucugaguugaaagag

SEQ ID NO: 72851 - RNA, 22 nt, Human
cagcauauuacuuuaaaaaauc

SEQ ID NO: 72852 - RNA, 20 nt, Human
cagcaucaaaggaagguuug

SEQ ID NO: 72853 - RNA, 22 nt, Human
cagcaucauacuaccuaaauga

SEQ ID NO: 72854 - RNA, 22 nt, Human
cagcaucccucaggggccucug

SEQ ID NO: 72855 - RNA, 22 nt, Human
cagcaucuaaucuucaugccgg

SEQ ID NO: 72856 - RNA, 22 nt, Human
cagcaucucauucauucauguu

SEQ ID NO: 72857 - RNA, 22 nt, Human
cagcaucuccauggcuuuggag

SEQ ID NO: 72858 - RNA, 22 nt, Human
cagcaucucccaggcauuugcc

SEQ ID NO: 72859 - RNA, 22 nt, Human
cagcaucucguggcuggauaga

SEQ ID NO: 72860 - RNA, 22 nt, Human
cagcaucucugcacccuccccc

SEQ ID NO: 72861 - RNA, 22 nt, Human
cagcaucuggggaacauucaag

SEQ ID NO: 72862 - RNA, 22 nt, Human
cagcaucuuauuuucuauggaa

SEQ ID NO: 72863 - RNA, 18 nt, Human
cagcaucuucauuaggcc

SEQ ID NO: 72864 - RNA, 22 nt, Human
cagcaucuucuagauccaggcu

SEQ ID NO: 72865 - RNA, 22 nt, Human
cagcaucuuuauaaaaaguaaa

SEQ ID NO: 72866 - RNA, 22 nt, Human
cagcaugaugcucacacaaaac

SEQ ID NO: 72867 - RNA, 22 nt, Human
cagcaugcaaguccagaugugg

SEQ ID NO: 72868 - RNA, 22 nt, Human
cagcaugcuugggggagggagc

SEQ ID NO: 72869 - RNA, 22 nt, Human
cagcauggccauuucucgcugc

SEQ ID NO: 72870 - RNA, 22 nt, Human
cagcauggcuugaguguuuccu

SEQ ID NO: 72871 - RNA, 22 nt, Human
cagcauggguuccgggggccug

SEQ ID NO: 72872 - RNA, 22 nt, Human
cagcauggugccagugagucca

SEQ ID NO: 72873 - RNA, 22 nt, Human
cagcauguaucuuucaggugug

SEQ ID NO: 72874 - RNA, 22 nt, Human
cagcauucuacuuugugaacug

SEQ ID NO: 72875 - RNA, 22 nt, Human
cagcauuuaucuuguagcagga

SEQ ID NO: 72876 - RNA, 22 nt, Human
cagcauuuucuuaauguaggug

SEQ ID NO: 72877 - RNA, 22 nt, Human
cagccaagaaccacagacccag

SEQ ID NO: 72878 - RNA, 22 nt, Human
cagccacagcugggugccugac

SEQ ID NO: 72879 - RNA, 22 nt, Human
cagccaccauacagcagaagcu

SEQ ID NO: 72880 - RNA, 22 nt, Human
cagccacguagcccuuggccgu

SEQ ID NO: 72881 - RNA, 22 nt, Human
cagccacugaacuccuggcuau

SEQ ID NO: 72882 - RNA, 22 nt, Human
cagccacugacaggaauggucc

SEQ ID NO: 72883 - RNA, 22 nt, Human
cagccacuuccccucuaugggu

SEQ ID NO: 72884 - RNA, 22 nt, Human
cagccacuucgagcuuccugau

SEQ ID NO: 72885 - RNA, 22 nt, Human
cagccagaaaguauguuaggga

SEQ ID NO: 72886 - RNA, 22 nt, Human
cagccagaggcugcgaggggcc

SEQ ID NO: 72887 - RNA, 22 nt, Human
cagccagaucaaacucagaugu

SEQ ID NO: 72888 - RNA, 22 nt, Human
cagccagcuggugcggcagagc

SEQ ID NO: 72889 - RNA, 22 nt, Human
cagccagggagggcaaaugaga

SEQ ID NO: 72890 - RNA, 22 nt, Human
cagccaggggcuggcguguuga

SEQ ID NO: 72891 - RNA, 22 nt, Human
cagccagggucaggcagcuucu

SEQ ID NO: 72892 - RNA, 22 nt, Human
cagccaucccagccugugguuc

SEQ ID NO: 72893 - RNA, 23 nt, Human
cagcccaaagagagagcuacuuu

SEQ ID NO: 72894 - RNA, 22 nt, Human
cagcccacugccucugugguag

SEQ ID NO: 72895 - RNA, 22 nt, Human
cagcccagcagggucuggcccu

SEQ ID NO: 72896 - RNA, 22 nt, Human
cagcccagugcacgcccguuuc

SEQ ID NO: 72897 - RNA, 21 nt, Human
cagaggcaggcucugugugug

SEQ ID NO: 72898 - RNA, 22 nt, Human
cagaggcagugggguugcuccu

SEQ ID NO: 72899 - RNA, 22 nt, Human
cagaggcauauaauugcugggg

SEQ ID NO: 72900 - RNA, 22 nt, Human
cagaggccaggcugccugacug

SEQ ID NO: 72901 - RNA, 22 nt, Human
cagaggccauauuucuucacuc

SEQ ID NO: 72902 - RNA, 22 nt, Human
cagaggccccauuggcugugcg

SEQ ID NO: 72903 - RNA, 22 nt, Human
cagaggccuauccaguguccau

SEQ ID NO: 72904 - RNA, 22 nt, Human
cagaggcuagacugugcuuccu

SEQ ID NO: 72905 - RNA, 22 nt, Human
cagaggcucaccagccuuucac

SEQ ID NO: 72906 - RNA, 22 nt, Human
cagaggcucagauggcccuggc

SEQ ID NO: 72907 - RNA, 22 nt, Human
cagaggcucuuccucacugccc

SEQ ID NO: 72908 - RNA, 22 nt, Human
cagaggcugacccugcuguugu

SEQ ID NO: 72909 - RNA, 22 nt, Human
cagaggcugauggcuguagcca

SEQ ID NO: 72910 - RNA, 16 nt, Human
cagcccugaggaagaa

SEQ ID NO: 72911 - RNA, 22 nt, Human
cagcccugcacgcugccuccgc

SEQ ID NO: 72912 - RNA, 17 nt, Human
cagcccugccguuccca

SEQ ID NO: 72913 - RNA, 22 nt, Human
cagcccugcugacacugucuga

SEQ ID NO: 72914 - RNA, 22 nt, Human
cagcccugcuggcaaugaugag

SEQ ID NO: 72915 - RNA, 22 nt, Human
cagcccuggaacagcugacuca

SEQ ID NO: 72916 - RNA, 23 nt, Human
cagcccuggagaugugggaggca

SEQ ID NO: 72917 - RNA, 22 nt, Human
cagcccuggccccagguggucu

SEQ ID NO: 72918 - RNA, 22 nt, Human
cagcccuggcgcccccagaucu

SEQ ID NO: 72919 - RNA, 22 nt, Human
cagcccuggcuagggcgagggc

SEQ ID NO: 72920 - RNA, 22 nt, Human
cagcccuggugagguuggcuau

SEQ ID NO: 72921 - RNA, 22 nt, Human
cagcccugucuaugacugauga

SEQ ID NO: 72922 - RNA, 22 nt, Human
cagcccugugcuaagcacccuc

SEQ ID NO: 72923 - RNA, 22 nt, Human
cagcccuuaaauagauauacag

SEQ ID NO: 72924 - RNA, 22 nt, Human
cagcccuuaagagucaucccuc

SEQ ID NO: 72925 - RNA, 22 nt, Human
cagcccuucagggggcugcagg

SEQ ID NO: 72926 - RNA, 22 nt, Human
cagcccuuccaggcagaauucu

SEQ ID NO: 72927 - RNA, 22 nt, Human
cagcccuugaugauaauuuauc

SEQ ID NO: 72928 - RNA, 20 nt, Human
cagcccuugauuuacaaucc

SEQ ID NO: 72929 - RNA, 22 nt, Human
cagcccuuggcccagggcacag

SEQ ID NO: 72930 - RNA, 22 nt, Human
cagcccuugggccauccuagaa

SEQ ID NO: 72931 - RNA, 22 nt, Human
cagccgucagaugugccgcagc

SEQ ID NO: 72932 - RNA, 22 nt, Human
cagccucuguggcugccacacc

SEQ ID NO: 72933 - RNA, 22 nt, Human
cagccugacaccagcuuugggc

SEQ ID NO: 72934 - RNA, 22 nt, Human
cagccugcucucagauguugag

SEQ ID NO: 72935 - RNA, 21 nt, Human
cagccugcugcuccagggcca

SEQ ID NO: 72936 - RNA, 22 nt, Human
cagccuggccugggacugcuga

SEQ ID NO: 72937 - RNA, 22 nt, Human
cagccuucgacaguuggaguag

SEQ ID NO: 72938 - RNA, 22 nt, Human
cagccuuuuccauguauuguug

SEQ ID NO: 72939 - RNA, 22 nt, Human
cagcgcaggcgugugaaggcgc

SEQ ID NO: 72940 - RNA, 22 nt, Human
cagcgccuccuggaccuccucu

SEQ ID NO: 72941 - RNA, 22 nt, Human
cagcgcugggguaggagcaccu

SEQ ID NO: 72942 - RNA, 22 nt, Human
cagcggccggugaggaagggga

SEQ ID NO: 72943 - RNA, 22 nt, Human
cagcggggccugugcuggggag

SEQ ID NO: 72944 - RNA, 22 nt, Human
cagcgguggcaaggugacugug

SEQ ID NO: 72945 - RNA, 22 nt, Human
cagcuacuccucccaugacuuc

SEQ ID NO: 72946 - RNA, 22 nt, Human
cagcuagggaguggcagagcuu

SEQ ID NO: 72947 - RNA, 22 nt, Human
cagcuaguaaauggcaagacua

SEQ ID NO: 72948 - RNA, 22 nt, Human
cagcuauagauggacugaagag

SEQ ID NO: 72949 - RNA, 22 nt, Human
cagcuauuguucuguauaauga

SEQ ID NO: 72950 - RNA, 22 nt, Human
cagcuauuuguaggaaaacugu

SEQ ID NO: 72951 - RNA, 22 nt, Human
cagcucagacgcaggucgagca

SEQ ID NO: 72952 - RNA, 22 nt, Human
cagcucaggaaggaaggccggc

SEQ ID NO: 72953 - RNA, 22 nt, Human
cagcucagugaugccuucacag

SEQ ID NO: 72954 - RNA, 22 nt, Human
cagcucaugaccuuuguuaucu

SEQ ID NO: 72955 - RNA, 22 nt, Human
cagcuccaaagccccacugucc

SEQ ID NO: 72956 - RNA, 22 nt, Human
cagcuccagccgacuguaagaa

SEQ ID NO: 72957 - RNA, 23 nt, Human
cagcuccagugcacucagguagc

SEQ ID NO: 72958 - RNA, 22 nt, Human
cagcuccaucuugcuuauacca

SEQ ID NO: 72959 - RNA, 22 nt, Human
cagcucccagaacugaccaugu

SEQ ID NO: 72960 - RNA, 22 nt, Human
cagcuccuagaucggcgaagug

SEQ ID NO: 72961 - RNA, 22 nt, Human
cagcuccucacgagucuugaaa

SEQ ID NO: 72962 - RNA, 22 nt, Human
cagcuccugaggacugcuggga

SEQ ID NO: 72963 - RNA, 22 nt, Human
cagcuccugcagcuggcuccca

SEQ ID NO: 72964 - RNA, 22 nt, Human
cagcucugaugaaauguaccag

SEQ ID NO: 72965 - RNA, 22 nt, Human
cagcucugccacuuccuagcua

SEQ ID NO: 72966 - RNA, 22 nt, Human
cagcucugcugguggugccagg

SEQ ID NO: 72967 - RNA, 22 nt, Human
cagcucuggcgucagggagcga

SEQ ID NO: 72968 - RNA, 22 nt, Human
cagcucugggagucccaccccu

SEQ ID NO: 72969 - RNA, 22 nt, Human
cagcucuggggcagagugacua

SEQ ID NO: 72970 - RNA, 22 nt, Human
cagcucugggugacaggagggc

SEQ ID NO: 72971 - RNA, 22 nt, Human
cagcucugugcaggccugggga

SEQ ID NO: 72972 - RNA, 22 nt, Human
cagcucuguugcccuggaaacg

SEQ ID NO: 72973 - RNA, 22 nt, Human
cagcucuuaacacagcuuguau

SEQ ID NO: 72974 - RNA, 22 nt, Human
cagcucuucccucuucuuguag

SEQ ID NO: 72975 - RNA, 18 nt, Human
cagcucuucuccaguaac

SEQ ID NO: 72976 - RNA, 22 nt, Human
cagcucuuuuucacacaacaug

SEQ ID NO: 72977 - RNA, 22 nt, Human
cagcucuuuuuugcagcagcug

SEQ ID NO: 72978 - RNA, 22 nt, Human
cagcugaaagaaggaaguguca

SEQ ID NO: 72979 - RNA, 22 nt, Human
cagcugacccagugaggaggca

SEQ ID NO: 72980 - RNA, 22 nt, Human
cagcugaccuggcuaagggagc

SEQ ID NO: 72981 - RNA, 22 nt, Human
cagcugagaaggucugaucagg

SEQ ID NO: 72982 - RNA, 22 nt, Human
cagcugagcugccagacuacug

SEQ ID NO: 72983 - RNA, 22 nt, Human
cagcugaguaugcauucaagca

SEQ ID NO: 72984 - RNA, 22 nt, Human
cagcugaguuacucugaggucu

SEQ ID NO: 72985 - RNA, 19 nt, Human
cagcugcaccgugaccauc

SEQ ID NO: 72986 - RNA, 22 nt, Human
cagcugcagaucauguuuacag

SEQ ID NO: 72987 - RNA, 18 nt, Human
cagcugcaggcucaggac

SEQ ID NO: 72988 - RNA, 22 nt, Human
cagcugcaguucaaugcuugcu

SEQ ID NO: 72989 - RNA, 22 nt, Human
cagcugcaugucuguggugguc

SEQ ID NO: 72990 - RNA, 22 nt, Human
cagcugccacaccucuuucucu

SEQ ID NO: 72991 - RNA, 22 nt, Human
cagcugccagcuucucuccauc

SEQ ID NO: 72992 - RNA, 22 nt, Human
cagcugccccgcuggcugacca

SEQ ID NO: 72993 - RNA, 22 nt, Human
cagcugcccugccuugcccuua

SEQ ID NO: 72994 - RNA, 22 nt, Human
cagcugccuguauuguccucau

SEQ ID NO: 72995 - RNA, 22 nt, Human
cagcugccuucugcgggaaguc

SEQ ID NO: 72996 - RNA, 22 nt, Human
cagcugcugcccuuggcugcag

SEQ ID NO: 72997 - RNA, 19 nt, Human
cagcuggaaucaucugagg

SEQ ID NO: 72998 - RNA, 22 nt, Human
cagcuggacuuuugauagaagu

SEQ ID NO: 72999 - RNA, 22 nt, Human
cagcuggaugggagaccauguu

SEQ ID NO: 73000 - RNA, 22 nt, Human
cagcuggcauaccugggcccgg

SEQ ID NO: 73001 - RNA, 22 nt, Human
cagcuggccccacaguagaggc

SEQ ID NO: 73002 - RNA, 22 nt, Human
cagcuggcccuuugguagccuu

SEQ ID NO: 73003 - RNA, 22 nt, Human
cagcuggcugcggugaggggac

SEQ ID NO: 73004 - RNA, 22 nt, Human
cagcuggcuuguuuguucuuga

SEQ ID NO: 73005 - RNA, 22 nt, Human
cagcuggggagagacauggcag

SEQ ID NO: 73006 - RNA, 22 nt, Human
cagcugggugaucuugggcagg

SEQ ID NO: 73007 - RNA, 22 nt, Human
cagcugguggcugaugaccguc

SEQ ID NO: 73008 - RNA, 23 nt, Human
cagcugguugugggaguggcugc

SEQ ID NO: 73009 - RNA, 22 nt, Human
cagcugucuaaguugagcagga

SEQ ID NO: 73010 - RNA, 22 nt, Human
cagcugucuuugcacaguuuag

SEQ ID NO: 73011 - RNA, 22 nt, Human
cagcugucuuuucuaaauauua

SEQ ID NO: 73012 - RNA, 22 nt, Human
cagcugugaauugucuuaucua

SEQ ID NO: 73013 - RNA, 22 nt, Human
cagcugugauaugccugccuga

SEQ ID NO: 73014 - RNA, 22 nt, Human
cagcagaaguccgacuccaguc

SEQ ID NO: 73015 - RNA, 22 nt, Human
cagcagagaaauuaaacuucug

SEQ ID NO: 73016 - RNA, 22 nt, Human
cagcagagcuuauguuggguca

SEQ ID NO: 73017 - RNA, 22 nt, Human
cagcagaggugguucacauugu

SEQ ID NO: 73018 - RNA, 22 nt, Human
cagcagagguuuugcuccauga

SEQ ID NO: 73019 - RNA, 22 nt, Human
ccuggguuggagagcaauggug

SEQ ID NO: 73020 - RNA, 22 nt, Human
cagcuguggagggaggaaaugc

SEQ ID NO: 73021 - RNA, 22 nt, Human
cagcuguggggagcuugggcca

SEQ ID NO: 73022 - RNA, 22 nt, Human
cagcuguuaccaaucuuagggc

SEQ ID NO: 73023 - RNA, 22 nt, Human
cagcuguucagcaacucgcaga

SEQ ID NO: 73024 - RNA, 22 nt, Human
cagcuguucggggcuggcaugu

SEQ ID NO: 73025 - RNA, 22 nt, Human
cagcuguugugauccauuuacg

SEQ ID NO: 73026 - RNA, 22 nt, Human
cagcuguuguguaucaggcaga

SEQ ID NO: 73027 - RNA, 22 nt, Human
cagcuguuugggcauggccaga

SEQ ID NO: 73028 - RNA, 22 nt, Human
cagcuucaccagggccaugguu

SEQ ID NO: 73029 - RNA, 22 nt, Human
cagcuucagaagaagccgugag

SEQ ID NO: 73030 - RNA, 22 nt, Human
cagcuucagcgugacaccagug

SEQ ID NO: 73031 - RNA, 22 nt, Human
cagcuucauguccagguacugu

SEQ ID NO: 73032 - RNA, 22 nt, Human
cagcuucauugccugaugucuu

SEQ ID NO: 73033 - RNA, 22 nt, Human
cagcuuccacagacuuggcucg

SEQ ID NO: 73034 - RNA, 22 nt, Human
cagcuucuaaagugugaagcca

SEQ ID NO: 73035 - RNA, 22 nt, Human
cagcuucucagaaagcugaggu

SEQ ID NO: 73036 - RNA, 22 nt, Human
cagcuucuccauucuucuggcu

SEQ ID NO: 73037 - RNA, 22 nt, Human
cagcuucuccggccuggugcgg

SEQ ID NO: 73038 - RNA, 22 nt, Human
cagcuucucgggagcgcaugug

SEQ ID NO: 73039 - RNA, 22 nt, Human
cagcuucugucugauuagcaag

SEQ ID NO: 73040 - RNA, 22 nt, Human
cagcuucuguuucuagccccug

SEQ ID NO: 73041 - RNA, 22 nt, Human
cagcuucuuacgagcugguacu

SEQ ID NO: 73042 - RNA, 22 nt, Human
cagcuucuucaguccuggagcu

SEQ ID NO: 73043 - RNA, 22 nt, Human
cagcuuggaggaggaucuaaga

SEQ ID NO: 73044 - RNA, 22 nt, Human
cagcuuggauuuuggcacgugu

SEQ ID NO: 73045 - RNA, 22 nt, Human
cagcuugggaguuugguuuuau

SEQ ID NO: 73046 - RNA, 22 nt, Human
cagcuugggggcgcuggccuca

SEQ ID NO: 73047 - RNA, 22 nt, Human
cagcuuguuuuauuuggggacc

SEQ ID NO: 73048 - RNA, 22 nt, Human
cagcuuuaguaacccacugcuc

SEQ ID NO: 73049 - RNA, 22 nt, Human
cagcuuucuuccuucugucugu

SEQ ID NO: 73050 - RNA, 22 nt, Human
cagcuuucuuuccauaagguuu

SEQ ID NO: 73051 - RNA, 22 nt, Human
cagcuuugaaacauggcucuag

SEQ ID NO: 73052 - RNA, 22 nt, Human
cagcuuugcaggcuggucagug

SEQ ID NO: 73053 - RNA, 22 nt, Human
cagcuuugcccuuugcccaauc

SEQ ID NO: 73054 - RNA, 22 nt, Human
cagcuuuggcccagucgggagg

SEQ ID NO: 73055 - RNA, 22 nt, Human
cagcuuuguccugcaaaccuga

SEQ ID NO: 73056 - RNA, 22 nt, Human
cagcuuugugacuucggacaag

SEQ ID NO: 73057 - RNA, 22 nt, Human
cagcuuuuaggacugugagaaa

SEQ ID NO: 73058 - RNA, 22 nt, Human
cagcuuuuggcaggaugaccag

SEQ ID NO: 73059 - RNA, 22 nt, Human
caggaaaaggagacuuuagcac

SEQ ID NO: 73060 - RNA, 22 nt, Human
caggaaacaaagccuugcucau

SEQ ID NO: 73061 - RNA, 16 nt, Human
caggaaacuuaaagac

SEQ ID NO: 73062 - RNA, 22 nt, Human
caggaaagccgagugccauagg

SEQ ID NO: 73063 - RNA, 22 nt, Human
caggaaagucuguaaaggaacc

SEQ ID NO: 73064 - RNA, 22 nt, Human
caggaaauaaaugguaaugcau

SEQ ID NO: 73065 - RNA, 22 nt, Human
caggaaauaucuccuggcagag

SEQ ID NO: 73066 - RNA, 23 nt, Human
caggaaaucaauucuuccagcau

SEQ ID NO: 73067 - RNA, 22 nt, Human
caggaaaugaaagcuagcuaau

SEQ ID NO: 73068 - RNA, 15 nt, Human
caggaaaugaaucug

SEQ ID NO: 73069 - RNA, 22 nt, Human
caggaaaugaggcugaagggug

SEQ ID NO: 73070 - RNA, 22 nt, Human
caggaaaugcguaguugaacuu

SEQ ID NO: 73071 - RNA, 22 nt, Human
caggaaaugcuaucauagcuga

SEQ ID NO: 73072 - RNA, 23 nt, Human
caggaaaugcuuggaggggcugg

SEQ ID NO: 73073 - RNA, 22 nt, Human
caggaaauggcugaauaaauuc

SEQ ID NO: 73074 - RNA, 22 nt, Human
caggaaauuuaagaguguacaa

SEQ ID NO: 73075 - RNA, 22 nt, Human
caggaacaauaucuguccuggu

SEQ ID NO: 73076 - RNA, 22 nt, Human
caggaacaccugcagcuagugg

SEQ ID NO: 73077 - RNA, 22 nt, Human
caggaacagaguggcauugucu

SEQ ID NO: 73078 - RNA, 22 nt, Human
caggaacagcugaccugacaau

SEQ ID NO: 73079 - RNA, 22 nt, Human
caggaacaggcugaugggcagg

SEQ ID NO: 73080 - RNA, 22 nt, Human
caggaacaggggagugaaccug

SEQ ID NO: 73081 - RNA, 19 nt, Human
caggaacauggagggaggg

SEQ ID NO: 73082 - RNA, 21 nt, Human
caggaacauucuuuacauuua

SEQ ID NO: 73083 - RNA, 22 nt, Human
caggaacauuuaaccacagggu

SEQ ID NO: 73084 - RNA, 20 nt, Human
caggaaccaaagaggacucc

SEQ ID NO: 73085 - RNA, 22 nt, Human
caggaaccagaaccuucccccg

SEQ ID NO: 73086 - RNA, 22 nt, Human
caggaaccauuuucucuuuaua

SEQ ID NO: 73087 - RNA, 22 nt, Human
caggaacccccacucucagcuc

SEQ ID NO: 73088 - RNA, 22 nt, Human
caggaaccuacaucuguuuggg

SEQ ID NO: 73089 - RNA, 22 nt, Human
caggaacgccugguguuggccu

SEQ ID NO: 73090 - RNA, 22 nt, Human
caggaagagaacauggaggcug

SEQ ID NO: 73091 - RNA, 22 nt, Human
caggaagaggacaggcuucccc

SEQ ID NO: 73092 - RNA, 22 nt, Human
caggaagauuagaccaagagcu

SEQ ID NO: 73093 - RNA, 22 nt, Human
caggaagcaccagcccggcccc

SEQ ID NO: 73094 - RNA, 22 nt, Human
caggaagcugagcugcacugca

SEQ ID NO: 73095 - RNA, 22 nt, Human
caggaagcugccggugagcgag

SEQ ID NO: 73096 - RNA, 22 nt, Human
caggaagcuggguuuccauaca

SEQ ID NO: 73097 - RNA, 22 nt, Human
caggaaggcgcggcugugccug

SEQ ID NO: 73098 - RNA, 22 nt, Human
caggaaggggcucacucuggcc

SEQ ID NO: 73099 - RNA, 22 nt, Human
caggaagugccuggugagagga

SEQ ID NO: 73100 - RNA, 22 nt, Human
caggaaguggggucauggagua

SEQ ID NO: 73101 - RNA, 22 nt, Human
caggaagugugaggguggugua

SEQ ID NO: 73102 - RNA, 22 nt, Human
caggaagugugccugagcaccu

SEQ ID NO: 73103 - RNA, 22 nt, Human
caggaauaguggagcaacaaga

SEQ ID NO: 73104 - RNA, 22 nt, Human
caggaaugacugcagauggggc

SEQ ID NO: 73105 - RNA, 22 nt, Human
caggaaugggugacagucagcu

SEQ ID NO: 73106 - RNA, 22 nt, Human
caggacaauuuccacuugguaa

SEQ ID NO: 73107 - RNA, 19 nt, Human
caggacagacuucaaagcc

SEQ ID NO: 73108 - RNA, 22 nt, Human
caggacagcucaacaccuccuc

SEQ ID NO: 73109 - RNA, 22 nt, Human
caggacagcugggccaccacca

SEQ ID NO: 73110 - RNA, 22 nt, Human
caggacagguguucuagaucag

SEQ ID NO: 73111 - RNA, 22 nt, Human
caggacaucuucuguguuuuua

SEQ ID NO: 73112 - RNA, 22 nt, Human
caggaccuaacucaccugucuc

SEQ ID NO: 73113 - RNA, 22 nt, Human
caggaccuggaaugcuugugaa

SEQ ID NO: 73114 - RNA, 22 nt, Human
caggagaaauguggcugcuacc

SEQ ID NO: 73115 - RNA, 22 nt, Human
caggagacaaguuagcagcuga

SEQ ID NO: 73116 - RNA, 22 nt, Human
caggagacaauggcuguggggc

SEQ ID NO: 73117 - RNA, 22 nt, Human
caggagaccugguaagccaagu

SEQ ID NO: 73118 - RNA, 22 nt, Human
caggagagcccggguccgggcu

SEQ ID NO: 73119 - RNA, 22 nt, Human
caggagaggcuguacguuucuc

SEQ ID NO: 73120 - RNA, 22 nt, Human
caggagcaaauccaaaagaauu

SEQ ID NO: 73121 - RNA, 18 nt, Human
caggagcaggaguugaac

SEQ ID NO: 73122 - RNA, 22 nt, Human
caggagcaguuagaagcccacu

SEQ ID NO: 73123 - RNA, 22 nt, Human
caggagcaugcugaugccagaa

SEQ ID NO: 73124 - RNA, 22 nt, Human
caggagccacauuccaccuuga

SEQ ID NO: 73125 - RNA, 22 nt, Human
caggagccccaggcugacaaua

SEQ ID NO: 73126 - RNA, 22 nt, Human
caggagcucaagaccacccugg

SEQ ID NO: 73127 - RNA, 22 nt, Human
caggagcucacagucuuugggu

SEQ ID NO: 73128 - RNA, 22 nt, Human
caggcuugugucucagcugcag

SEQ ID NO: 73129 - RNA, 22 nt, Human
caggcuuuugcauagcacuggg

SEQ ID NO: 73130 - RNA, 22 nt, Human
cagggaaaguucuuguccacuc

SEQ ID NO: 73131 - RNA, 22 nt, Human
cagggaagaauaguuagcaaag

SEQ ID NO: 73132 - RNA, 22 nt, Human
cagggaaggcugcaaauguuaa

SEQ ID NO: 73133 - RNA, 22 nt, Human
cagggacagggaucauuugcuu

SEQ ID NO: 73134 - RNA, 22 nt, Human
cagggacaugacuggucucugu

SEQ ID NO: 73135 - RNA, 22 nt, Human
cagggacccgcacagguagcau

SEQ ID NO: 73136 - RNA, 22 nt, Human
cagggacuacagccagcccucc

SEQ ID NO: 73137 - RNA, 22 nt, Human
cagggagaagucuggucagucc

SEQ ID NO: 73138 - RNA, 22 nt, Human
cagggagaggcaucauagggaa

SEQ ID NO: 73139 - RNA, 22 nt, Human
cagggagcacugcgagcggcag

SEQ ID NO: 73140 - RNA, 22 nt, Human
cagggagcagcaugggcaaagg

SEQ ID NO: 73141 - RNA, 22 nt, Human
cagggagcagccccuagaagua

SEQ ID NO: 73142 - RNA, 22 nt, Human
cagggagcggagucccaugccu

SEQ ID NO: 73143 - RNA, 22 nt, Human
cagggagcuauuaggguuagug

SEQ ID NO: 73144 - RNA, 22 nt, Human
cagggagcucugggccggacuc

SEQ ID NO: 73145 - RNA, 22 nt, Human
cagggagcugacaaccaaggag

SEQ ID NO: 73146 - RNA, 22 nt, Human
cagggagcuuucccaggacccu

SEQ ID NO: 73147 - RNA, 22 nt, Human
cagggagucaacaaacagauca

SEQ ID NO: 73148 - RNA, 22 nt, Human
cagggaugagaaagcucucuaa

SEQ ID NO: 73149 - RNA, 22 nt, Human
cagggaugggauggagucaguu

SEQ ID NO: 73150 - RNA, 19 nt, Human
cagggauggguagggacuc

SEQ ID NO: 73151 - RNA, 22 nt, Human
cagggaugguugagaauuggua

SEQ ID NO: 73152 - RNA, 22 nt, Human
cagggcaaagucuucuagaacc

SEQ ID NO: 73153 - RNA, 22 nt, Human
caggcuucagcauccacuuagu

SEQ ID NO: 73154 - RNA, 22 nt, Human
caggcuucagggaacgcagucu

SEQ ID NO: 73155 - RNA, 22 nt, Human
caggcuucaugaauuaugcacc

SEQ ID NO: 73156 - RNA, 22 nt, Human
caggcuucuuuucuuuccagac

SEQ ID NO: 73157 - RNA, 22 nt, Human
caggcuugaugugucuauacuu

SEQ ID NO: 73158 - RNA, 22 nt, Human
caggcuuggcagggaggcuggu

SEQ ID NO: 73159 - RNA, 22 nt, Human
caggcuugggagcagagccacu

SEQ ID NO: 73160 - RNA, 22 nt, Human
caggcuuggguucucugaguua

SEQ ID NO: 73161 - RNA, 22 nt, Human
caggcuuuuucugcuguccucu

SEQ ID NO: 73162 - RNA, 22 nt, Human
cagggaaacuaggaaauaagcu

SEQ ID NO: 73163 - RNA, 22 nt, Human
cagggaagagccgaugcugcag

SEQ ID NO: 73164 - RNA, 22 nt, Human
cagggacaaacaagguugggga

SEQ ID NO: 73165 - RNA, 22 nt, Human
cagggacaaagugagaaaggaa

SEQ ID NO: 73166 - RNA, 20 nt, Human
cagggacagcaguggguuuu

SEQ ID NO: 73167 - RNA, 22 nt, Human
cagggacagccuugggguggcg

SEQ ID NO: 73168 - RNA, 22 nt, Human
cagggacucgcuggacauaccg

SEQ ID NO: 73169 - RNA, 22 nt, Human
cagggagccuccaaagcuuuca

SEQ ID NO: 73170 - RNA, 22 nt, Human
cagggagcuuugucuucucauu

SEQ ID NO: 73171 - RNA, 22 nt, Human
cagggagggacaauugucaccu

SEQ ID NO: 73172 - RNA, 22 nt, Human
cagggaguuuuuguuccucuag

SEQ ID NO: 73173 - RNA, 22 nt, Human
cagggaugcuguuaaacauccu

SEQ ID NO: 73174 - RNA, 22 nt, Human
cagggauggcugucaggaugua

SEQ ID NO: 73175 - RNA, 22 nt, Human
cagggaugguaaauauguaaag

SEQ ID NO: 73176 - RNA, 22 nt, Human
cagggcaaagagagcacaugcu

SEQ ID NO: 73177 - RNA, 20 nt, Human
cagggcacacugcagccucg

SEQ ID NO: 73178 - RNA, 22 nt, Human
cagggcaggaugcugugauuau

SEQ ID NO: 73179 - RNA, 22 nt, Human
cagggcagggagcuuagaauga

SEQ ID NO: 73180 - RNA, 22 nt, Human
cagggcagggauguugcggcag

SEQ ID NO: 73181 - RNA, 22 nt, Human
cagggccagccauccugcuggg

SEQ ID NO: 73182 - RNA, 22 nt, Human
cagggccagcgcccaggcccag

SEQ ID NO: 73183 - RNA, 23 nt, Human
cagggcccugcucaauuucucca

SEQ ID NO: 73184 - RNA, 22 nt, Human
cagggccucauccucagagauu

SEQ ID NO: 73185 - RNA, 22 nt, Human
cagggccucauggccggggugc

SEQ ID NO: 73186 - RNA, 22 nt, Human
cagggccucucaucccacgggc

SEQ ID NO: 73187 - RNA, 22 nt, Human
cagggccugcuuccuucuuguu

SEQ ID NO: 73188 - RNA, 22 nt, Human
cagggccuggagcugggccugc

SEQ ID NO: 73189 - RNA, 22 nt, Human
cagggccuuguucaggagugaa

SEQ ID NO: 73190 - RNA, 22 nt, Human
cagggccuuuuagcaucuucuc

SEQ ID NO: 73191 - RNA, 22 nt, Human
cagggcggggucugccggcccu

SEQ ID NO: 73192 - RNA, 22 nt, Human
cagggcucagggacugcagaaa

SEQ ID NO: 73193 - RNA, 22 nt, Human
cagggcucaucugugugaccag

SEQ ID NO: 73194 - RNA, 22 nt, Human
cagggcuccccagagagccucu

SEQ ID NO: 73195 - RNA, 22 nt, Human
cagggcucgcucgcucgcucgc

SEQ ID NO: 73196 - RNA, 22 nt, Human
cagggcucgcucuugcccuucg

SEQ ID NO: 73197 - RNA, 22 nt, Human
cagggcucgcugccagcuucag

SEQ ID NO: 73198 - RNA, 22 nt, Human
cagggcugaaaucaagguguag

SEQ ID NO: 73199 - RNA, 22 nt, Human
cagggcugaagaaauucaaaag

SEQ ID NO: 73200 - RNA, 22 nt, Human
cagggcugaggacacaaguaaa

SEQ ID NO: 73201 - RNA, 22 nt, Human
cagggcugcuggccgugcccuc

SEQ ID NO: 73202 - RNA, 22 nt, Human
cagggcuguaaauuagugcuga

SEQ ID NO: 73203 - RNA, 22 nt, Human
cagggcugugcccaucuucccc

SEQ ID NO: 73204 - RNA, 18 nt, Human
cagggcuguggggucacu

SEQ ID NO: 73205 - RNA, 22 nt, Human
cagggcuuucccuuguagaaau

SEQ ID NO: 73206 - RNA, 22 nt, Human
cagggcuuugaacaggcaucaa

SEQ ID NO: 73207 - RNA, 22 nt, Human
caggggaagaugccaagggaga

SEQ ID NO: 73208 - RNA, 22 nt, Human
caggggaaggagccuugaaacu

SEQ ID NO: 73209 - RNA, 22 nt, Human
caggggacauuaaagcuccaua

SEQ ID NO: 73210 - RNA, 22 nt, Human
caggggaguuuuaugcaacaga

SEQ ID NO: 73211 - RNA, 22 nt, Human
caggggcaggugugagaucauc

SEQ ID NO: 73212 - RNA, 22 nt, Human
caggggcagucugugugcgugg

SEQ ID NO: 73213 - RNA, 22 nt, Human
caggggccaggcugucugcugu

SEQ ID NO: 73214 - RNA, 22 nt, Human
caggggccuguccuggcuucug

SEQ ID NO: 73215 - RNA, 22 nt, Human
caggggcggguaaaaggccucc

SEQ ID NO: 73216 - RNA, 22 nt, Human
caggggcucugagauugucuaa

SEQ ID NO: 73217 - RNA, 22 nt, Human
caggggcucugggugaugugag

SEQ ID NO: 73218 - RNA, 22 nt, Human
cagggggcuguggcuguccagu

SEQ ID NO: 73219 - RNA, 22 nt, Human
cagggguauucaagguaguuua

SEQ ID NO: 73220 - RNA, 22 nt, Human
caggguaguaauuuaauacaag

SEQ ID NO: 73221 - RNA, 22 nt, Human
cagggucccaggagcugcuuuc

SEQ ID NO: 73222 - RNA, 22 nt, Human
caggguccccgggucuccugug

SEQ ID NO: 73223 - RNA, 22 nt, Human
cagggucugaugguccucacuu

SEQ ID NO: 73224 - RNA, 22 nt, Human
cagggucuuggcgccaucaccc

SEQ ID NO: 73225 - RNA, 22 nt, Human
cagggugcagagcuaggguagu

SEQ ID NO: 73226 - RNA, 22 nt, Human
cagggugccaaagaacaaauau

SEQ ID NO: 73227 - RNA, 22 nt, Human
cagggugccucugcucccacca

SEQ ID NO: 73228 - RNA, 22 nt, Human
cagggugcgccacucagaugua

SEQ ID NO: 73229 - RNA, 22 nt, Human
cagggugcugcaccaucccuca

SEQ ID NO: 73230 - RNA, 22 nt, Human
cagggugcuuccguggagcugu

SEQ ID NO: 73231 - RNA, 22 nt, Human
caggguggaaaagcuaguugga

SEQ ID NO: 73232 - RNA, 22 nt, Human
caggguggaacaggcaauacuu

SEQ ID NO: 73233 - RNA, 22 nt, Human
caggguggcacucagcgcaucu

SEQ ID NO: 73234 - RNA, 22 nt, Human
caggguguggucugcauucgga

SEQ ID NO: 73235 - RNA, 22 nt, Human
caggguuauacagcugaacaaa

SEQ ID NO: 73236 - RNA, 22 nt, Human
caggguugggcuccaaggaugg

SEQ ID NO: 73237 - RNA, 22 nt, Human
caguaauagagugccagggaug

SEQ ID NO: 73238 - RNA, 22 nt, Human
caguaauagguaacauugcccu

SEQ ID NO: 73239 - RNA, 22 nt, Human
caguaauaucuguugaagcuau

SEQ ID NO: 73240 - RNA, 22 nt, Human
caguaauauuuuacucuaggcc

SEQ ID NO: 73241 - RNA, 22 nt, Human
caguacaauguugaaaaggagu

SEQ ID NO: 73242 - RNA, 22 nt, Human
caguacaauuuuacaaaggacg

SEQ ID NO: 73243 - RNA, 22 nt, Human
caguacacaagcuuucauguau

SEQ ID NO: 73244 - RNA, 22 nt, Human
caguacagaaucuauuccugca

SEQ ID NO: 73245 - RNA, 22 nt, Human
caguacauuucauaugauucua

SEQ ID NO: 73246 - RNA, 23 nt, Human
caguacuuaguguagcguuaauu

SEQ ID NO: 73247 - RNA, 22 nt, Human
caguacuuggucaaggaagcag

SEQ ID NO: 73248 - RNA, 22 nt, Human
caguacuuuucaaccaguauga

SEQ ID NO: 73249 - RNA, 20 nt, Human
caguagcaauaauuagaagc

SEQ ID NO: 73250 - RNA, 22 nt, Human
caguagcacuagauaugugugg

SEQ ID NO: 73251 - RNA, 22 nt, Human
caguagcaugcuuaucuuuuga

SEQ ID NO: 73252 - RNA, 22 nt, Human
caguagccacuagacacaugua

SEQ ID NO: 73253 - RNA, 22 nt, Human
caguagcuucaguugaggccug

SEQ ID NO: 73254 - RNA, 22 nt, Human
caguagcuugcuuaggcuuuua

SEQ ID NO: 73255 - RNA, 22 nt, Human
caguaggagguucugagguucu

SEQ ID NO: 73256 - RNA, 22 nt, Human
caguagggaaugugggaggcug

SEQ ID NO: 73257 - RNA, 17 nt, Human
caguaguggcacuggag

SEQ ID NO: 73258 - RNA, 22 nt, Human
caguaguggucuaucacuggag

SEQ ID NO: 73259 - RNA, 22 nt, Human
caguauaaugcccccugugggg

SEQ ID NO: 73260 - RNA, 23 nt, Human
caguauaauguauggauggggca

SEQ ID NO: 73261 - RNA, 22 nt, Human
caguauaugcucuuucaucaaa

SEQ ID NO: 73262 - RNA, 19 nt, Human
caguaucauugcacauagu

SEQ ID NO: 73263 - RNA, 22 nt, Human
caguaucuccacauguaaagug

SEQ ID NO: 73264 - RNA, 22 nt, Human
caguaucuugcuuauagacaca

SEQ ID NO: 73265 - RNA, 22 nt, Human
caguauguacucuuaucaugua

SEQ ID NO: 73266 - RNA, 22 nt, Human
cucauaaacauuauucauuauu

SEQ ID NO: 73267 - RNA, 22 nt, Human
cucauaaagugagaauaugacc

SEQ ID NO: 73268 - RNA, 22 nt, Human
cucauaaggagcucacaaccua

SEQ ID NO: 73269 - RNA, 22 nt, Human
cucauagacaagccucuuuuaa

SEQ ID NO: 73270 - RNA, 22 nt, Human
cucauauugcugguggucuaag

SEQ ID NO: 73271 - RNA, 22 nt, Human
cucaucagaaauaccugacaaa

SEQ ID NO: 73272 - RNA, 22 nt, Human
cucaucugcucuuauuaucuua

SEQ ID NO: 73273 - RNA, 22 nt, Human
cucaucuguauauagugaauga

SEQ ID NO: 73274 - RNA, 22 nt, Human
cucauggagggagugcucuucc

SEQ ID NO: 73275 - RNA, 22 nt, Human
cucauggcagagucaccugucc

SEQ ID NO: 73276 - RNA, 22 nt, Human
cucaugucaggggugucaaugu

SEQ ID NO: 73277 - RNA, 22 nt, Human
cucaugucggcaggacucgccc

SEQ ID NO: 73278 - RNA, 18 nt, Human
cucauguguggucccagc

SEQ ID NO: 73279 - RNA, 22 nt, Human
cucauuuacacuaugggaacua

SEQ ID NO: 73280 - RNA, 22 nt, Human
cucauuuaccuuugcaaucaag

SEQ ID NO: 73281 - RNA, 22 nt, Human
cucauuuacuacucaugugacc

SEQ ID NO: 73282 - RNA, 21 nt, Human
cucauuuauuuuuguguccaa

SEQ ID NO: 73283 - RNA, 22 nt, Human
cuccaaaggauaaaagcagagu

SEQ ID NO: 73284 - RNA, 22 nt, Human
cuccaaauacaauauuguuguu

SEQ ID NO: 73285 - RNA, 19 nt, Human
cuccaaauacuuuucccuu

SEQ ID NO: 73286 - RNA, 22 nt, Human
cuccaaauucagucacagucug

SEQ ID NO: 73287 - RNA, 20 nt, Human
cuccaaauuccugaggauaa

SEQ ID NO: 73288 - RNA, 22 nt, Human
cuccaaggauucuggacccuug

SEQ ID NO: 73289 - RNA, 22 nt, Human
cuccaaggguugugggugguca

SEQ ID NO: 73290 - RNA, 22 nt, Human
cuccaaggugguuauuugagau

SEQ ID NO: 73291 - RNA, 22 nt, Human
cuccaaguccgagggcucucaa

SEQ ID NO: 73292 - RNA, 22 nt, Human
cuccaagucggcugcagcugga

SEQ ID NO: 73293 - RNA, 22 nt, Human
cuccacagccccuccaguggca

SEQ ID NO: 73294 - RNA, 22 nt, Human
cuccagaacugggagagaauaa

SEQ ID NO: 73295 - RNA, 22 nt, Human
cuccagaggcccuaucccacua

SEQ ID NO: 73296 - RNA, 22 nt, Human
cuccagaggcgacuugcaucac

SEQ ID NO: 73297 - RNA, 22 nt, Human
cuccagagguucucaucuggga

SEQ ID NO: 73298 - RNA, 22 nt, Human
cuccagagucacacugccuggg

SEQ ID NO: 73299 - RNA, 22 nt, Human
cuccagauaggagggggucccc

SEQ ID NO: 73300 - RNA, 22 nt, Human
cuccagcagaaagggcgagugg

SEQ ID NO: 73301 - RNA, 20 nt, Human
cuccagccccugcccugguc

SEQ ID NO: 73302 - RNA, 22 nt, Human
cuccagccucagaugacgguac

SEQ ID NO: 73303 - RNA, 22 nt, Human
cuccagcugaguaagaacacua

SEQ ID NO: 73304 - RNA, 22 nt, Human
cuccagcugccaccagauguuu

SEQ ID NO: 73305 - RNA, 22 nt, Human
cuccagcugcuggucugagacu

SEQ ID NO: 73306 - RNA, 22 nt, Human
cuccagcuucccucagcugugg

SEQ ID NO: 73307 - RNA, 22 nt, Human
cuccagcuuuuucccaguuggc

SEQ ID NO: 73308 - RNA, 22 nt, Human
cuccaggaaagccugaggcccg

SEQ ID NO: 73309 - RNA, 22 nt, Human
cuccaggacacuaacccaggcu

SEQ ID NO: 73310 - RNA, 22 nt, Human
cuccaggacucaggccccuggg

SEQ ID NO: 73311 - RNA, 22 nt, Human
cuccaggaguggccuggacacc

SEQ ID NO: 73312 - RNA, 19 nt, Human
cuccaggauggcugggcga

SEQ ID NO: 73313 - RNA, 22 nt, Human
cuccaggccagggaaguggaca

SEQ ID NO: 73314 - RNA, 22 nt, Human
cuccaggccauggcugcggagg

SEQ ID NO: 73315 - RNA, 20 nt, Human
cuccagggaacagacuggag

SEQ ID NO: 73316 - RNA, 18 nt, Human
cuccagguaauucugaua

SEQ ID NO: 73317 - RNA, 22 nt, Human
cuccagucauagccucuugagu

SEQ ID NO: 73318 - RNA, 22 nt, Human
cuccagucuagguccuacuuau

SEQ ID NO: 73319 - RNA, 22 nt, Human
cuccagucucuuucggagacac

SEQ ID NO: 73320 - RNA, 22 nt, Human
cuccagugcccuccuugggggc

SEQ ID NO: 73321 - RNA, 22 nt, Human
cuccagugcgcaggacagcccc

SEQ ID NO: 73322 - RNA, 22 nt, Human
cuccaguggcacaaaugggugc

SEQ ID NO: 73323 - RNA, 22 nt, Human
cuccauuguucgcgcagcugca

SEQ ID NO: 73324 - RNA, 22 nt, Human
cucccagaaaauucucagacaa

SEQ ID NO: 73325 - RNA, 22 nt, Human
cucccagagaccaagcugagaa

SEQ ID NO: 73326 - RNA, 22 nt, Human
cucccagaggugucauucgagc

SEQ ID NO: 73327 - RNA, 22 nt, Human
cucccaggcacagggaggagcc

SEQ ID NO: 73328 - RNA, 22 nt, Human
cucccagggucuaggcugcugg

SEQ ID NO: 73329 - RNA, 22 nt, Human
cucccagguuacaucugagccu

SEQ ID NO: 73330 - RNA, 22 nt, Human
cucccauagcauuuuaaauagu

SEQ ID NO: 73331 - RNA, 22 nt, Human
cuccccaacucagccgaggcuu

SEQ ID NO: 73332 - RNA, 22 nt, Human
cuccccauccaggcagcaggug

SEQ ID NO: 73333 - RNA, 22 nt, Human
cuccccauuaugcagucauuau

SEQ ID NO: 73334 - RNA, 22 nt, Human
cucccccuuagcucuugucuuu

SEQ ID NO: 73335 - RNA, 20 nt, Human
cuccccucuacagagggcug

SEQ ID NO: 73336 - RNA, 18 nt, Human
cuccccuguuuucccugc

SEQ ID NO: 73337 - RNA, 22 nt, Human
cuccccuuuggaagaagggucu

SEQ ID NO: 73338 - RNA, 22 nt, Human
cucccguggauguucuucaguc

SEQ ID NO: 73339 - RNA, 22 nt, Human
cucccucucaccggagcccugg

SEQ ID NO: 73340 - RNA, 22 nt, Human
cucccucuguccgaggccggcu

SEQ ID NO: 73341 - RNA, 22 nt, Human
cucccucugucuuguccagaaa

SEQ ID NO: 73342 - RNA, 23 nt, Human
cucccugaacaugacacaccaga

SEQ ID NO: 73343 - RNA, 23 nt, Human
cucccuggaguuucuggaagaug

SEQ ID NO: 73344 - RNA, 23 nt, Human
cucccuggcccuugggagaccug

SEQ ID NO: 73345 - RNA, 22 nt, Human
cucccugggcagauguggcucu

SEQ ID NO: 73346 - RNA, 22 nt, Human
cucucuggaccucaacuauuuu

SEQ ID NO: 73347 - RNA, 22 nt, Human
cucucuggauauuuguaugcug

SEQ ID NO: 73348 - RNA, 19 nt, Human
cucucuggcggugucugcg

SEQ ID NO: 73349 - RNA, 22 nt, Human
cucucuggcuuggcacggagau

SEQ ID NO: 73350 - RNA, 22 nt, Human
cucucugggaauauuuuauucu

SEQ ID NO: 73351 - RNA, 22 nt, Human
cucucugggcccaguuggcacc

SEQ ID NO: 73352 - RNA, 22 nt, Human
cucucuggguccucuuuuauag

SEQ ID NO: 73353 - RNA, 18 nt, Human
cucucugggugaggacaa

SEQ ID NO: 73354 - RNA, 22 nt, Human
cucucuucccgugaguguugca

SEQ ID NO: 73355 - RNA, 22 nt, Human
cucucuuucauuggucgccuug

SEQ ID NO: 73356 - RNA, 18 nt, Human
cucugaaagacacaccag

SEQ ID NO: 73357 - RNA, 22 nt, Human
cucugaaagaguuuaguauuau

SEQ ID NO: 73358 - RNA, 22 nt, Human
cucugaacucuugggcagcaug

SEQ ID NO: 73359 - RNA, 22 nt, Human
cucugaauggacacuccagugu

SEQ ID NO: 73360 - RNA, 22 nt, Human
cucugacaccaucucaugacag

SEQ ID NO: 73361 - RNA, 22 nt, Human
cucugacauucugugacucuga

SEQ ID NO: 73362 - RNA, 22 nt, Human
cucugaccucuagccagcucug

SEQ ID NO: 73363 - RNA, 22 nt, Human
cucugagaagaguucaaguaaa

SEQ ID NO: 73364 - RNA, 22 nt, Human
cucugagagagcuggugagcac

SEQ ID NO: 73365 - RNA, 22 nt, Human
cucugagauaguuucuaucaau

SEQ ID NO: 73366 - RNA, 22 nt, Human
cucugagcuccuggaagcgugc

SEQ ID NO: 73367 - RNA, 22 nt, Human
cucugagcucgugcaguacuuc

SEQ ID NO: 73368 - RNA, 22 nt, Human
cucugagcugaaacaugagcau

SEQ ID NO: 73369 - RNA, 20 nt, Human
cucugaggcugagaagggag

SEQ ID NO: 73370 - RNA, 22 nt, Human
cucugagggucuaaggagucac

SEQ ID NO: 73371 - RNA, 22 nt, Human
cucugaggucagggcccggcaa

SEQ ID NO: 73372 - RNA, 22 nt, Human
cucugaggucuaggaccauggc

SEQ ID NO: 73373 - RNA, 22 nt, Human
cucugaguugaggcaggagagu

SEQ ID NO: 73374 - RNA, 22 nt, Human
cucugcaacuucuagcaguguc

SEQ ID NO: 73375 - RNA, 22 nt, Human
cucugcaaggcccuccaguagc

SEQ ID NO: 73376 - RNA, 22 nt, Human
cucugcaccuuguaggaggcaa

SEQ ID NO: 73377 - RNA, 22 nt, Human
cucugcagaggcccaaggcuga

SEQ ID NO: 73378 - RNA, 21 nt, Human
cucugcagcccugcuuccagg

SEQ ID NO: 73379 - RNA, 23 nt, Human
cucugcaggagagugggcagggc

SEQ ID NO: 73380 - RNA, 21 nt, Human
cucugcagugcccaccuugcc

SEQ ID NO: 73381 - RNA, 22 nt, Human
cucugccaccaugcuuccugac

SEQ ID NO: 73382 - RNA, 22 nt, Human
cucugccaggcagaacggcuuu

SEQ ID NO: 73383 - RNA, 22 nt, Human
cagugauauuuauccuacucac

SEQ ID NO: 73384 - RNA, 22 nt, Human
cagugauguuucugcaucagag

SEQ ID NO: 73385 - RNA, 22 nt, Human
cagugauuacugugcuuuuggu

SEQ ID NO: 73386 - RNA, 22 nt, Human
cagugauucaggugccuguugg

SEQ ID NO: 73387 - RNA, 22 nt, Human
cagugcaauuacaagcuaauuc

SEQ ID NO: 73388 - RNA, 22 nt, Human
cagugcagacguggagggggca

SEQ ID NO: 73389 - RNA, 22 nt, Human
cagugcagccaaggacaggcac

SEQ ID NO: 73390 - RNA, 22 nt, Human
cagugcagcugccccgcuggua

SEQ ID NO: 73391 - RNA, 22 nt, Human
cagugcaggcugggggcccugc

SEQ ID NO: 73392 - RNA, 22 nt, Human
cagugcagguggcagaggacag

SEQ ID NO: 73393 - RNA, 22 nt, Human
cagugcauagauccugaggccu

SEQ ID NO: 73394 - RNA, 22 nt, Human
cagugccaagccacagaucacu

SEQ ID NO: 73395 - RNA, 22 nt, Human
cagugccaaggauggccuggga

SEQ ID NO: 73396 - RNA, 22 nt, Human
cagugccacuuaaugaggcugc

SEQ ID NO: 73397 - RNA, 22 nt, Human
cagugccagagguacuagugga

SEQ ID NO: 73398 - RNA, 22 nt, Human
cagugccaugaugcagagcaau

SEQ ID NO: 73399 - RNA, 19 nt, Human
cagugcccacccuagcaca

SEQ ID NO: 73400 - RNA, 21 nt, Human
cagugccccagcuacaaaagg

SEQ ID NO: 73401 - RNA, 20 nt, Human
cagugcccguggaaaagaug

SEQ ID NO: 73402 - RNA, 20 nt, Human
cagugccuaucauuaauucc

SEQ ID NO: 73403 - RNA, 22 nt, Human
cagugccugggacccggcugug

SEQ ID NO: 73404 - RNA, 22 nt, Human
cagugcuaccccggaaguuggu

SEQ ID NO: 73405 - RNA, 22 nt, Human
cagugcuagggcagagcacucc

SEQ ID NO: 73406 - RNA, 22 nt, Human
cagugcuaggucgugugcuggg

SEQ ID NO: 73407 - RNA, 22 nt, Human
cagugcuauaauccagugucgu

SEQ ID NO: 73408 - RNA, 22 nt, Human
cagugcucauagcuguuccucc

SEQ ID NO: 73409 - RNA, 22 nt, Human
cagugcugcaggcgccugcggu

SEQ ID NO: 73410 - RNA, 22 nt, Human
cagugcugccaaagggaccuug

SEQ ID NO: 73411 - RNA, 21 nt, Human
cagugcugccuaauagggagu

SEQ ID NO: 73412 - RNA, 22 nt, Human
cagugcuguguuugcugccugg

SEQ ID NO: 73413 - RNA, 22 nt, Human
cagugcuguugggcccagagag

SEQ ID NO: 73414 - RNA, 22 nt, Human
caguggaaacuaugcugcugga

SEQ ID NO: 73415 - RNA, 22 nt, Human
caguggaaauauuggcagcauc

SEQ ID NO: 73416 - RNA, 22 nt, Human
caguggaaaucagagugagagu

SEQ ID NO: 73417 - RNA, 22 nt, Human
caguggaauauauaggggauuu

SEQ ID NO: 73418 - RNA, 23 nt, Human
caguggagacucaugcuuccuua

SEQ ID NO: 73419 - RNA, 22 nt, Human
caguggagaggcaugcuuggca

SEQ ID NO: 73420 - RNA, 22 nt, Human
caguggcacgaucucagcucac

SEQ ID NO: 73421 - RNA, 21 nt, Human
caguggcacgauuucggcuca

SEQ ID NO: 73422 - RNA, 22 nt, Human
caguggcagaucaccaacugga

SEQ ID NO: 73423 - RNA, 17 nt, Human
caguggcagaucuucuc

SEQ ID NO: 73424 - RNA, 22 nt, Human
caguggcaggggaagcaggugu

SEQ ID NO: 73425 - RNA, 18 nt, Human
caguggcauaguugagua

SEQ ID NO: 73426 - RNA, 22 nt, Human
caguggccgcggggcugugggu

SEQ ID NO: 73427 - RNA, 22 nt, Human
caguggccugagccaggcuucc

SEQ ID NO: 73428 - RNA, 19 nt, Human
caguggccuggaggucucu

SEQ ID NO: 73429 - RNA, 22 nt, Human
caguggccuuuccugcugcuca

SEQ ID NO: 73430 - RNA, 22 nt, Human
caguggcgugaucucugcucac

SEQ ID NO: 73431 - RNA, 22 nt, Human
cagugggacaugggcacugggc

SEQ ID NO: 73432 - RNA, 22 nt, Human
cagugggauaugggggcagcau

SEQ ID NO: 73433 - RNA, 22 nt, Human
cagugggauugggauuggaacc

SEQ ID NO: 73434 - RNA, 23 nt, Human
cagugggcuucuaacugcuccug

SEQ ID NO: 73435 - RNA, 22 nt, Human
caguggggaggccaggauagaa

SEQ ID NO: 73436 - RNA, 22 nt, Human
caguggguaggaaaggcucuuc

SEQ ID NO: 73437 - RNA, 22 nt, Human
caguggugaagagcaggggcuc

SEQ ID NO: 73438 - RNA, 22 nt, Human
cagugguucucaaucaggaaug

SEQ ID NO: 73439 - RNA, 21 nt, Human
cagugguugcugaauuagugg

SEQ ID NO: 73440 - RNA, 22 nt, Human
cagugguugcuugcauggcucc

SEQ ID NO: 73441 - RNA, 22 nt, Human
caguguauaaacuuuaacauag

SEQ ID NO: 73442 - RNA, 22 nt, Human
cagugucaccaggcgagucucc

SEQ ID NO: 73443 - RNA, 22 nt, Human
cagugucuccagaugcuccaau

SEQ ID NO: 73444 - RNA, 22 nt, Human
cagugucugccuuucuguuugg

SEQ ID NO: 73445 - RNA, 22 nt, Human
cagugucugggacagaaaguca

SEQ ID NO: 73446 - RNA, 22 nt, Human
caguguguccucagaauauaua

SEQ ID NO: 73447 - RNA, 22 nt, Human
caguguuacugggccugggugu

SEQ ID NO: 73448 - RNA, 22 nt, Human
caguguugcuaaguucugaacu

SEQ ID NO: 73449 - RNA, 22 nt, Human
caguguuucugaguuccagcuc

SEQ ID NO: 73450 - RNA, 22 nt, Human
caguuaaacgaugaugggguca

SEQ ID NO: 73451 - RNA, 22 nt, Human
caguuaaacgggccaugugagu

SEQ ID NO: 73452 - RNA, 22 nt, Human
caguuaaagcugcaugugucag

SEQ ID NO: 73453 - RNA, 22 nt, Human
caguuaaaggcccaauaucugg

SEQ ID NO: 73454 - RNA, 18 nt, Human
caguuacaccuucauuca

SEQ ID NO: 73455 - RNA, 22 nt, Human
ucuuuuccuccucuuguuggcc

SEQ ID NO: 73456 - RNA, 22 nt, Human
ucuuuuccuucccuacagaucu

SEQ ID NO: 73457 - RNA, 21 nt, Human
ucuuuucucugcaggauuccu

SEQ ID NO: 73458 - RNA, 22 nt, Human
ucuuuucugccagcugagcccu

SEQ ID NO: 73459 - RNA, 22 nt, Human
ucuuuucuugcauuauugcacu

SEQ ID NO: 73460 - RNA, 22 nt, Human
ucuuuugagggccagaggaaga

SEQ ID NO: 73461 - RNA, 22 nt, Human
ucuuuuguacucaguauugaca

SEQ ID NO: 73462 - RNA, 18 nt, Human
ucuuuuguccccugcugc

SEQ ID NO: 73463 - RNA, 23 nt, Human
ucuuuuuaagagaucuagugacg

SEQ ID NO: 73464 - RNA, 22 nt, Human
ucuuuuucugcacacguguccc

SEQ ID NO: 73465 - RNA, 22 nt, Human
ucuuuuucuuauucccacacug

SEQ ID NO: 73466 - RNA, 22 nt, Human
ucuuuuuuuccugugcagagcu

SEQ ID NO: 73467 - RNA, 22 nt, Human
ugaaaaaacaaguuggcccauu

SEQ ID NO: 73468 - RNA, 22 nt, Human
ugaaaaaccucaguccgcuuua

SEQ ID NO: 73469 - RNA, 22 nt, Human
ugaaaacuugacaagugaggua

SEQ ID NO: 73470 - RNA, 22 nt, Human
ugaaaauuaagcagaugaauga

SEQ ID NO: 73471 - RNA, 22 nt, Human
ugaaacaagggaccguccuuuc

SEQ ID NO: 73472 - RNA, 22 nt, Human
ugaaacaaguuuaagggaucua

SEQ ID NO: 73473 - RNA, 22 nt, Human
ugaaacaauuagaauguaauga

SEQ ID NO: 73474 - RNA, 22 nt, Human
ugaaacacaagccugguuagug

SEQ ID NO: 73475 - RNA, 22 nt, Human
ugaaacacuuucaauuacauau

SEQ ID NO: 73476 - RNA, 22 nt, Human
ugaaacaggaaguaaacagaca

SEQ ID NO: 73477 - RNA, 22 nt, Human
ugaaacauuaggaaaucauuau

SEQ ID NO: 73478 - RNA, 22 nt, Human
ugaaacauuauagaauauuuau

SEQ ID NO: 73479 - RNA, 21 nt, Human
ugaaacauuugaucaaagcac

SEQ ID NO: 73480 - RNA, 22 nt, Human
ugaaacauuugaugaucuuugg

SEQ ID NO: 73481 - RNA, 22 nt, Human
ugaaacggaauguucuuuaucg

SEQ ID NO: 73482 - RNA, 22 nt, Human
ugaaacuuauaagaauaugaau

SEQ ID NO: 73483 - RNA, 22 nt, Human
ugaaacuucuaauaugaauagu

SEQ ID NO: 73484 - RNA, 22 nt, Human
ugaaacuuuugagguucuucca

SEQ ID NO: 73485 - RNA, 22 nt, Human
ugaaagaacuagcaucuucaag

SEQ ID NO: 73486 - RNA, 22 nt, Human
ugaaagaagccucccuuuggag

SEQ ID NO: 73487 - RNA, 21 nt, Human
ugaaagaaggugcagucugaa

SEQ ID NO: 73488 - RNA, 22 nt, Human
ugaaagaagugucacauugcca

SEQ ID NO: 73489 - RNA, 17 nt, Human
ugaaagaaucagggaga

SEQ ID NO: 73490 - RNA, 22 nt, Human
ugaaagacaagguuuuuucaga

SEQ ID NO: 73491 - RNA, 22 nt, Human
ugaaagauaaguuauuauguac

SEQ ID NO: 73492 - RNA, 22 nt, Human
ugaaagaugaaagcaggcuggu

SEQ ID NO: 73493 - RNA, 23 nt, Human
ugaaagcaaugggucuauaguau

SEQ ID NO: 73494 - RNA, 22 nt, Human
ugaaagcagauagcucuguugu

SEQ ID NO: 73495 - RNA, 22 nt, Human
ugaaagcaugcuugccaagcuu

SEQ ID NO: 73496 - RNA, 22 nt, Human
ugaaagcuuguuggaaauguag

SEQ ID NO: 73497 - RNA, 22 nt, Human
ugaaagcuuugggacaguguga

SEQ ID NO: 73498 - RNA, 22 nt, Human
ugaaaggaaaguacagugaugc

SEQ ID NO: 73499 - RNA, 22 nt, Human
ugaaagggaaccugcuggacug

SEQ ID NO: 73500 - RNA, 22 nt, Human
ugaaaggugacauuucuuggau

SEQ ID NO: 73501 - RNA, 22 nt, Human
ugaaagguuaaaaguaguauug

SEQ ID NO: 73502 - RNA, 22 nt, Human
ugaaaguuauuacugaugaugu

SEQ ID NO: 73503 - RNA, 22 nt, Human
ugaaauagaaaaacaggcuucu

SEQ ID NO: 73504 - RNA, 22 nt, Human
ugaaauagacacagugcuauac

SEQ ID NO: 73505 - RNA, 22 nt, Human
ugaaauagacuugcacuauaug

SEQ ID NO: 73506 - RNA, 22 nt, Human
ugaaauaucauuuucaucuccc

SEQ ID NO: 73507 - RNA, 23 nt, Human
ugaaauauucuuuugcaugagcu

SEQ ID NO: 73508 - RNA, 22 nt, Human
ugaaaucaacuaggagacacca

SEQ ID NO: 73509 - RNA, 22 nt, Human
ugaaaucagugguauaaucggg

SEQ ID NO: 73510 - RNA, 22 nt, Human
ugaaaucauguaguuauugcaa

SEQ ID NO: 73511 - RNA, 22 nt, Human
ugaaaucuacccuauucagggu

SEQ ID NO: 73512 - RNA, 22 nt, Human
ugaaaucuccucuuuauauauc

SEQ ID NO: 73513 - RNA, 22 nt, Human
ugaaaucugucccacuuuagcu

SEQ ID NO: 73514 - RNA, 22 nt, Human
ugaaaucuuagccauucugccu

SEQ ID NO: 73515 - RNA, 22 nt, Human
ugaaaucuucacuaagucucuu

SEQ ID NO: 73516 - RNA, 22 nt, Human
ugaaaugagauagauaaucagg

SEQ ID NO: 73517 - RNA, 22 nt, Human
ugaaaugauaucugauaacaaa

SEQ ID NO: 73518 - RNA, 22 nt, Human
ugaaaugcuuaggaccagaagg

SEQ ID NO: 73519 - RNA, 22 nt, Human
ugaaauguagauuaggcauucu

SEQ ID NO: 73520 - RNA, 22 nt, Human
ugaaauguauauugccagugua

SEQ ID NO: 73521 - RNA, 22 nt, Human
ugaaaugucaguguuuuauaag

SEQ ID NO: 73522 - RNA, 22 nt, Human
ugaaaugucauccuuuagccau

SEQ ID NO: 73523 - RNA, 22 nt, Human
ugaaauguguucuaguguuuug

SEQ ID NO: 73524 - RNA, 22 nt, Human
ugaaauguucuggaguuucugu

SEQ ID NO: 73525 - RNA, 22 nt, Human
ugaaauguugguaauuuuauau

SEQ ID NO: 73526 - RNA, 22 nt, Human
ugaaauguuuaucucuccugcu

SEQ ID NO: 73527 - RNA, 22 nt, Human
ugaaauuagugaaguuacaguu

SEQ ID NO: 73528 - RNA, 22 nt, Human
ugaaauucaaaacacauuuguc

SEQ ID NO: 73529 - RNA, 22 nt, Human
ugaaauuccaggagaguuaaaa

SEQ ID NO: 73530 - RNA, 18 nt, Human
ugaaauugcauccaugag

SEQ ID NO: 73531 - RNA, 22 nt, Human
ugaacaaacugcauucuucacu

SEQ ID NO: 73532 - RNA, 22 nt, Human
ugaacacaaauauuuugggguu

SEQ ID NO: 73533 - RNA, 22 nt, Human
ugaacacaucugcgugugucuc

SEQ ID NO: 73534 - RNA, 22 nt, Human
ugaacacauuuucuucaguaga

SEQ ID NO: 73535 - RNA, 20 nt, Human
ugaacacugggguguuucag

SEQ ID NO: 73536 - RNA, 22 nt, Human
ugaacaggugccuucagggagu

SEQ ID NO: 73537 - RNA, 22 nt, Human
ugaacagucaaaaagugaccau

SEQ ID NO: 73538 - RNA, 22 nt, Human
ugaacagugaucuacauguggc

SEQ ID NO: 73539 - RNA, 22 nt, Human
ugaacagugugagggugugacc

SEQ ID NO: 73540 - RNA, 22 nt, Human
ucgcaccuguccucugauuaug

SEQ ID NO: 73541 - RNA, 19 nt, Human
ucgcagaccugaguucuaa

SEQ ID NO: 73542 - RNA, 22 nt, Human
ucgcagaggcacgagugcagaa

SEQ ID NO: 73543 - RNA, 22 nt, Human
ucgcauuugggcaggagaugcu

SEQ ID NO: 73544 - RNA, 22 nt, Human
ucgccagggaugcuguaaggaa

SEQ ID NO: 73545 - RNA, 22 nt, Human
ucgccaucgucggacacaguga

SEQ ID NO: 73546 - RNA, 22 nt, Human
ucgcccaggauggagugcagua

SEQ ID NO: 73547 - RNA, 22 nt, Human
ucgcuugaacccaggaagugga

SEQ ID NO: 73548 - RNA, 22 nt, Human
ucgcuuuaauggucuucacagc

SEQ ID NO: 73549 - RNA, 22 nt, Human
ucggagagcucacagcuguggc

SEQ ID NO: 73550 - RNA, 22 nt, Human
ucggagcuguagaugaaacccu

SEQ ID NO: 73551 - RNA, 22 nt, Human
ucggggauggugucugagggag

SEQ ID NO: 73552 - RNA, 22 nt, Human
ucgucugugaaauugggauaag

SEQ ID NO: 73553 - RNA, 22 nt, Human
ucgugaagucacaauaaagucu

SEQ ID NO: 73554 - RNA, 21 nt, Human
ucgugcagcagcugaggcuug

SEQ ID NO: 73555 - RNA, 22 nt, Human
ucguuaaucagcaccagaauuc

SEQ ID NO: 73556 - RNA, 22 nt, Human
ucuaaacaguuucacucuuaau

SEQ ID NO: 73557 - RNA, 22 nt, Human
ucuaaacauugugauagaccuu

SEQ ID NO: 73558 - RNA, 22 nt, Human
ucuaaacuacgucaaaacuagu

SEQ ID NO: 73559 - RNA, 22 nt, Human
ucuaaacucucuuugaauuaug

SEQ ID NO: 73560 - RNA, 22 nt, Human
ucuaaacugcuagcugacugag

SEQ ID NO: 73561 - RNA, 22 nt, Human
ucuaaacuuguaaacaagcaua

SEQ ID NO: 73562 - RNA, 22 nt, Human
ucuaaagaagaggguucugcgg

SEQ ID NO: 73563 - RNA, 22 nt, Human
ucuaaagagaaccuuuucucau

SEQ ID NO: 73564 - RNA, 22 nt, Human
ugaagacucagaagcuaagaua

SEQ ID NO: 73565 - RNA, 22 nt, Human
ugaagagauuaaguugguuuug

SEQ ID NO: 73566 - RNA, 22 nt, Human
ugaagaggccaaacuaucauug

SEQ ID NO: 73567 - RNA, 22 nt, Human
ugaagauugugcuuggccugua

SEQ ID NO: 73568 - RNA, 22 nt, Human
ugaagcaaacgcuucuguuccu

SEQ ID NO: 73569 - RNA, 22 nt, Human
ugaagcaaauuuuucucagagu

SEQ ID NO: 73570 - RNA, 22 nt, Human
ugaagcaaugaucuuuuggugg

SEQ ID NO: 73571 - RNA, 22 nt, Human
ugaagcagaggggucuugagcu

SEQ ID NO: 73572 - RNA, 22 nt, Human
ugaagcagcaaaugaugggaga

SEQ ID NO: 73573 - RNA, 22 nt, Human
ugaagcaggaaccagcagcauu

SEQ ID NO: 73574 - RNA, 22 nt, Human
ugaagcaggcauugacugauga

SEQ ID NO: 73575 - RNA, 23 nt, Human
ugaagcauggauaacucacaccu

SEQ ID NO: 73576 - RNA, 22 nt, Human
ugaagccacagagcaucugccu

SEQ ID NO: 73577 - RNA, 22 nt, Human
ugaagccagcuuuggaagacac

SEQ ID NO: 73578 - RNA, 23 nt, Human
ugaagcccagugauuuuguuuca

SEQ ID NO: 73579 - RNA, 22 nt, Human
ugaagccugaaagcuggacagg

SEQ ID NO: 73580 - RNA, 22 nt, Human
ugaagccuuguguggccucucu

SEQ ID NO: 73581 - RNA, 22 nt, Human
ugaagcuacagaccuucgcggu

SEQ ID NO: 73582 - RNA, 22 nt, Human
ugaagcuagguucaugaggucg

SEQ ID NO: 73583 - RNA, 22 nt, Human
ugaagcuugagugucaguuccu

SEQ ID NO: 73584 - RNA, 22 nt, Human
ugaagcuuuaggauggguucau

SEQ ID NO: 73585 - RNA, 17 nt, Human
ugaaggaaggaugaugu

SEQ ID NO: 73586 - RNA, 22 nt, Human
ugaaggagaaauggaaaguggg

SEQ ID NO: 73587 - RNA, 22 nt, Human
ugaaggagggaagaaggcucug

SEQ ID NO: 73588 - RNA, 19 nt, Human
ugaaggagggggauggcca

SEQ ID NO: 73589 - RNA, 20 nt, Human
ugaaggcagguaagaaagau

SEQ ID NO: 73590 - RNA, 22 nt, Human
ugaaggccagcagagugaaggc

SEQ ID NO: 73591 - RNA, 20 nt, Human
ugaaggccauuuguuccaga

SEQ ID NO: 73592 - RNA, 22 nt, Human
ugaaggccuccccgagcauuag

SEQ ID NO: 73593 - RNA, 22 nt, Human
ugaaggcugggcucagccagcu

SEQ ID NO: 73594 - RNA, 22 nt, Human
ugaaggcugucaccugcaccuu

SEQ ID NO: 73595 - RNA, 22 nt, Human
ugaaggcuuggauuggucauuu

SEQ ID NO: 73596 - RNA, 22 nt, Human
ugaaggcuugguggcagccucu

SEQ ID NO: 73597 - RNA, 22 nt, Human
ugaaggcuuuuagcucugaaaa

SEQ ID NO: 73598 - RNA, 21 nt, Human
ugaagggcagccucaggcucc

SEQ ID NO: 73599 - RNA, 21 nt, Human
ugaaggggccaucacaaaggc

SEQ ID NO: 73600 - RNA, 22 nt, Human
ugaagggggagauauaugugug

SEQ ID NO: 73601 - RNA, 22 nt, Human
ugaagguaaaggaaggaggcuu

SEQ ID NO: 73602 - RNA, 23 nt, Human
ugaagguauuaccugagaugcuc

SEQ ID NO: 73603 - RNA, 22 nt, Human
ugaaggugauuaugaauguaua

SEQ ID NO: 73604 - RNA, 22 nt, Human
ugaagguguaugcuguggguca

SEQ ID NO: 73605 - RNA, 22 nt, Human
ugaaggugucuuugugaacauc

SEQ ID NO: 73606 - RNA, 22 nt, Human
ugaagguguuuauaccucagau

SEQ ID NO: 73607 - RNA, 22 nt, Human
ugaaguacccguuuuuauugca

SEQ ID NO: 73608 - RNA, 22 nt, Human
ugaaguaggcagcaugcugaga

SEQ ID NO: 73609 - RNA, 22 nt, Human
ugaagucccugacauuuagaaa

SEQ ID NO: 73610 - RNA, 22 nt, Human
ugaaguccuagaacuccuggua

SEQ ID NO: 73611 - RNA, 22 nt, Human
ugaagugucauuuacauuucua

SEQ ID NO: 73612 - RNA, 17 nt, Human
ugaaguuaggcugcaga

SEQ ID NO: 73613 - RNA, 23 nt, Human
ugaaguucauucucacugaugua

SEQ ID NO: 73614 - RNA, 22 nt, Human
ugaaguuguuaagguugccauu

SEQ ID NO: 73615 - RNA, 22 nt, Human
ugaaguuuccucugaggccagu

SEQ ID NO: 73616 - RNA, 22 nt, Human
ugaaguuugguggaaauuuccu

SEQ ID NO: 73617 - RNA, 22 nt, Human
ugaaguuuuacuaggugaauuu

SEQ ID NO: 73618 - RNA, 21 nt, Human
ugaauaaagcugcugucgaua

SEQ ID NO: 73619 - RNA, 22 nt, Human
ugaauaagugaugucauauaua

SEQ ID NO: 73620 - RNA, 22 nt, Human
ugaauacacuaaaaaucacuuu

SEQ ID NO: 73621 - RNA, 22 nt, Human
ugaauacaggaaaauauacuga

SEQ ID NO: 73622 - RNA, 20 nt, Human
ugaauagagagcacauaugc

SEQ ID NO: 73623 - RNA, 18 nt, Human
ugaauagggguuugcaga

SEQ ID NO: 73624 - RNA, 22 nt, Human
ugaauaguccuuggaauaacug

SEQ ID NO: 73625 - RNA, 22 nt, Human
ugaauaugugacuuugauuuca

SEQ ID NO: 73626 - RNA, 22 nt, Human
ugaaucaauaguugcaaguauu

SEQ ID NO: 73627 - RNA, 22 nt, Human
ugaaucaauugucuuaagacau

SEQ ID NO: 73628 - RNA, 22 nt, Human
ugaauccagagcuauuucgucc

SEQ ID NO: 73629 - RNA, 22 nt, Human
ugaaucuuuuuggaaauaaaga

SEQ ID NO: 73630 - RNA, 22 nt, Human
ugaaugaaugaauuaauagagu

SEQ ID NO: 73631 - RNA, 22 nt, Human
ugaaugaggauccuugaccuua

SEQ ID NO: 73632 - RNA, 22 nt, Human
ugaaugagucaaucauuuagcu

SEQ ID NO: 73633 - RNA, 22 nt, Human
ugaaugauacagaauuauguag

SEQ ID NO: 73634 - RNA, 22 nt, Human
ugaaugauauauugggaauaau

SEQ ID NO: 73635 - RNA, 22 nt, Human
ugaaugaugcauuuguuuccca

SEQ ID NO: 73636 - RNA, 23 nt, Human
ugaaugauggugcuccucaucuu

SEQ ID NO: 73637 - RNA, 22 nt, Human
ugaaugauuaaaacccggacua

SEQ ID NO: 73638 - RNA, 22 nt, Human
ugaaugcaagaaggaacaugaa

SEQ ID NO: 73639 - RNA, 22 nt, Human
ugaaugcaagucacacauuucu

SEQ ID NO: 73640 - RNA, 22 nt, Human
ugaaugcuuggagucauaaaau

SEQ ID NO: 73641 - RNA, 22 nt, Human
ugaaugcuuuggagccuucuaa

SEQ ID NO: 73642 - RNA, 22 nt, Human
ugaauggauauaacaacagugu

SEQ ID NO: 73643 - RNA, 23 nt, Human
ugaauguuuauucucggugcaga

SEQ ID NO: 73644 - RNA, 22 nt, Human
ugaauuaaaggaauucgaauuc

SEQ ID NO: 73645 - RNA, 22 nt, Human
ugaauucaggggcuauuauauu

SEQ ID NO: 73646 - RNA, 22 nt, Human
ugaauucugcuguagcaagucc

SEQ ID NO: 73647 - RNA, 22 nt, Human
ugaauucugggucagcagcuug

SEQ ID NO: 73648 - RNA, 20 nt, Human
ugaauucuggguuuaucugc

SEQ ID NO: 73649 - RNA, 22 nt, Human
ugaauugccucuuauaugacca

SEQ ID NO: 73650 - RNA, 22 nt, Human
ugaauugcugccaucauauuuc

SEQ ID NO: 73651 - RNA, 22 nt, Human
ugaauugugaccccucuguauu

SEQ ID NO: 73652 - RNA, 22 nt, Human
ugaauuuaccuugccuauauuu

SEQ ID NO: 73653 - RNA, 21 nt, Human
ugaauuucccucuaucauucu

SEQ ID NO: 73654 - RNA, 21 nt, Human
ugaauuucgguauggcuauaa

SEQ ID NO: 73655 - RNA, 23 nt, Human
ugaauuuggaacucagagaauua

SEQ ID NO: 73656 - RNA, 22 nt, Human
ugacaaagcaugauggugacag

SEQ ID NO: 73657 - RNA, 22 nt, Human
ucugagugucuuaauaggcucu

SEQ ID NO: 73658 - RNA, 22 nt, Human
ucugaguucauaccaggcuacc

SEQ ID NO: 73659 - RNA, 22 nt, Human
ucugaguuuucugagaagcuua

SEQ ID NO: 73660 - RNA, 22 nt, Human
ucugauaggugguagaaggagg

SEQ ID NO: 73661 - RNA, 22 nt, Human
ucugaucugucagucaugaagg

SEQ ID NO: 73662 - RNA, 22 nt, Human
ucugaugcaauguaagucuugg

SEQ ID NO: 73663 - RNA, 22 nt, Human
ucugauguaggcuuuucuggga

SEQ ID NO: 73664 - RNA, 22 nt, Human
ucugaugucugaaaugcucuug

SEQ ID NO: 73665 - RNA, 22 nt, Human
ucugauguugaugcuucugccu

SEQ ID NO: 73666 - RNA, 22 nt, Human
ucugauuagagcauucuugagu

SEQ ID NO: 73667 - RNA, 22 nt, Human
ucugauuagcaguuuagggaaa

SEQ ID NO: 73668 - RNA, 22 nt, Human
ucugauuagcuccauuugcuaa

SEQ ID NO: 73669 - RNA, 22 nt, Human
ucugcaaacccccaucuaucau

SEQ ID NO: 73670 - RNA, 23 nt, Human
ucugcaagauaaugaagaugaua

SEQ ID NO: 73671 - RNA, 22 nt, Human
ucugcaagaucauuaaagcaga

SEQ ID NO: 73672 - RNA, 22 nt, Human
ucugcaagauggucuuagaggu

SEQ ID NO: 73673 - RNA, 22 nt, Human
uuccaacuuugucauauauuau

SEQ ID NO: 73674 - RNA, 22 nt, Human
uuccaagaguaaauucaaauug

SEQ ID NO: 73675 - RNA, 22 nt, Human
uuccaagggaauguuuaugagu

SEQ ID NO: 73676 - RNA, 23 nt, Human
uuccaagugcuuuacuuaauccu

SEQ ID NO: 73677 - RNA, 22 nt, Human
uuccaauaaaauguuauuugca

SEQ ID NO: 73678 - RNA, 22 nt, Human
uuccaauggaaucaugucuuga

SEQ ID NO: 73679 - RNA, 22 nt, Human
uuccacagcccaagcugguggc

SEQ ID NO: 73680 - RNA, 22 nt, Human
uuccacauagaucacagguguu

SEQ ID NO: 73681 - RNA, 22 nt, Human
uuccacauuccuuacauucaua

SEQ ID NO: 73682 - RNA, 22 nt, Human
uuccacggggcuccccgcucuu

SEQ ID NO: 73683 - RNA, 22 nt, Human
uuccacucaugcaaagguccca

SEQ ID NO: 73684 - RNA, 22 nt, Human
uuccacucuaugauagaagggu

SEQ ID NO: 73685 - RNA, 22 nt, Human
uuccacugaaggaucuagggaa

SEQ ID NO: 73686 - RNA, 22 nt, Human
uuccacugauuuugguugaccu

SEQ ID NO: 73687 - RNA, 22 nt, Human
uuccacuuugggucugugcagg

SEQ ID NO: 73688 - RNA, 22 nt, Human
uuccacuuuucucucucaugcc

SEQ ID NO: 73689 - RNA, 22 nt, Human
uuccagaacaauguggacguau

SEQ ID NO: 73690 - RNA, 22 nt, Human
uuccagaagccuccauauuacu

SEQ ID NO: 73691 - RNA, 22 nt, Human
uuccagaauugggagccuugag

SEQ ID NO: 73692 - RNA, 22 nt, Human
uuccagaggcuucagggaagaa

SEQ ID NO: 73693 - RNA, 22 nt, Human
uuccagaggggagguggcagcc

SEQ ID NO: 73694 - RNA, 22 nt, Human
uuccagauuucuacacaagacc

SEQ ID NO: 73695 - RNA, 22 nt, Human
ucuugcccucaacaagagcaug

SEQ ID NO: 73696 - RNA, 22 nt, Human
ucuugccgcgcaggcgcaguuc

SEQ ID NO: 73697 - RNA, 18 nt, Human
ucuugccugcacccucuc

SEQ ID NO: 73698 - RNA, 22 nt, Human
ucuugcuguacggcuacuugca

SEQ ID NO: 73699 - RNA, 22 nt, Human
ucuugcugugccccagcagggc

SEQ ID NO: 73700 - RNA, 22 nt, Human
ucuuggaagccucaagauacuc

SEQ ID NO: 73701 - RNA, 22 nt, Human
ucuuggaaguagaacacagucu

SEQ ID NO: 73702 - RNA, 20 nt, Human
ucuuggagaggguggacuua

SEQ ID NO: 73703 - RNA, 22 nt, Human
ucuuggauuuuaauggaucaaa

SEQ ID NO: 73704 - RNA, 22 nt, Human
ucuuggcaauuugaucucaguu

SEQ ID NO: 73705 - RNA, 22 nt, Human
ucuuggcaggcagugggguaag

SEQ ID NO: 73706 - RNA, 22 nt, Human
ucuuggcaguucuugugcuuuu

SEQ ID NO: 73707 - RNA, 22 nt, Human
ucuuggcuacuuuccugucugc

SEQ ID NO: 73708 - RNA, 22 nt, Human
ucuuggcuccucacagcaucag

SEQ ID NO: 73709 - RNA, 22 nt, Human
ucuuggcucugccacuaauuag

SEQ ID NO: 73710 - RNA, 22 nt, Human
ucuuggcugucuuugaaguuag

SEQ ID NO: 73711 - RNA, 22 nt, Human
ucuugggaaauaaacagauuga

SEQ ID NO: 73712 - RNA, 22 nt, Human
ucuugggaggagcaccugccug

SEQ ID NO: 73713 - RNA, 22 nt, Human
ucuugggaucaccuccuggcuu

SEQ ID NO: 73714 - RNA, 22 nt, Human
ucuugggauugcccugcaguuc

SEQ ID NO: 73715 - RNA, 22 nt, Human
ucuugggggacuuuggcaugga

SEQ ID NO: 73716 - RNA, 21 nt, Human
ucuuguauuggaucugugugu

SEQ ID NO: 73717 - RNA, 22 nt, Human
ucuuguguggaacugcuuuucu

SEQ ID NO: 73718 - RNA, 21 nt, Human
ucuugugugggaaacaauuug

SEQ ID NO: 73719 - RNA, 22 nt, Human
ucuuuaagccaagauauauuua

SEQ ID NO: 73720 - RNA, 22 nt, Human
ucuuuaagggauguucugcuuu

SEQ ID NO: 73721 - RNA, 22 nt, Human
ucuuuaauguacuuucuuucac

SEQ ID NO: 73722 - RNA, 22 nt, Human
ucuuuacaucacaauuguaugg

SEQ ID NO: 73723 - RNA, 22 nt, Human
ucuuuagaaacuuuucuucaug

SEQ ID NO: 73724 - RNA, 22 nt, Human
ucuuuagaguuaacaauaauga

SEQ ID NO: 73725 - RNA, 22 nt, Human
ucuuuagccaguaucauaauga

SEQ ID NO: 73726 - RNA, 22 nt, Human
ucuuuagugacaguugugcaag

SEQ ID NO: 73727 - RNA, 22 nt, Human
ucuuuauguaagacugggcuug

SEQ ID NO: 73728 - RNA, 22 nt, Human
ucuuuauuuaagucuguuguaa

SEQ ID NO: 73729 - RNA, 22 nt, Human
ucuuuauuucugaaucccccau

SEQ ID NO: 73730 - RNA, 22 nt, Human
ucuuucaaaugcuugaauugga

SEQ ID NO: 73731 - RNA, 22 nt, Human
ucuuucaauccauucauauguc

SEQ ID NO: 73732 - RNA, 22 nt, Human
ucuuucagcucuucaggaccca

SEQ ID NO: 73733 - RNA, 21 nt, Human
ucuuuccaauauucaugucuc

SEQ ID NO: 73734 - RNA, 22 nt, Human
ucuuucccaguagcucucccag

SEQ ID NO: 73735 - RNA, 22 nt, Human
ucuuucccuuagaacauuaaca

SEQ ID NO: 73736 - RNA, 23 nt, Human
ucuuuccuaaugaaacagugaaa

SEQ ID NO: 73737 - RNA, 22 nt, Human
ucuuuccuaggugauaugcaau

SEQ ID NO: 73738 - RNA, 22 nt, Human
ucuuuccuguaacugcuguuca

SEQ ID NO: 73739 - RNA, 22 nt, Human
ucuuucucucuaaucaagcaca

SEQ ID NO: 73740 - RNA, 21 nt, Human
ucuuucugaaaucucagucug

SEQ ID NO: 73741 - RNA, 22 nt, Human
ucuuucugcagcacaggggcag

SEQ ID NO: 73742 - RNA, 22 nt, Human
ucuuucuggucucgccuuauuc

SEQ ID NO: 73743 - RNA, 22 nt, Human
ucuuucuuaaauagguggauug

SEQ ID NO: 73744 - RNA, 22 nt, Human
ucuuucuuuaucaccugauaug

SEQ ID NO: 73745 - RNA, 22 nt, Human
ucuuugaaacacccuaaccuuu

SEQ ID NO: 73746 - RNA, 22 nt, Human
ucuuugaaagcuguucuagagu

SEQ ID NO: 73747 - RNA, 22 nt, Human
ucuuugaacuuggcugaucucu

SEQ ID NO: 73748 - RNA, 22 nt, Human
ucuuugcaaaauacaacaaugg

SEQ ID NO: 73749 - RNA, 22 nt, Human
ucuuugcacacaucccuucccg

SEQ ID NO: 73750 - RNA, 22 nt, Human
ucuuugcagucugggcuuguuu

SEQ ID NO: 73751 - RNA, 22 nt, Human
ucuuugcaguucugauuaaaua

SEQ ID NO: 73752 - RNA, 21 nt, Human
ucuuugcaucaguuguuuucu

SEQ ID NO: 73753 - RNA, 22 nt, Human
ucuuugcaugcauuuucccuua

SEQ ID NO: 73754 - RNA, 22 nt, Human
ucuuugcauggacauguguuuu

SEQ ID NO: 73755 - RNA, 22 nt, Human
ucuuuggaaaugcuuugagaau

SEQ ID NO: 73756 - RNA, 22 nt, Human
ucuuuggauggaaaauguauuc

SEQ ID NO: 73757 - RNA, 22 nt, Human
ucuuuggcacuucuguuuuaag

SEQ ID NO: 73758 - RNA, 22 nt, Human
ucuuuggccuuaggagcccuug

SEQ ID NO: 73759 - RNA, 22 nt, Human
ucuuugggagaaggggucccag

SEQ ID NO: 73760 - RNA, 22 nt, Human
ucuuuggggcaucugggagauu

SEQ ID NO: 73761 - RNA, 23 nt, Human
ucuuugguaaauaaaguggggau

SEQ ID NO: 73762 - RNA, 22 nt, Human
ucuuuggucaucaugggaagca

SEQ ID NO: 73763 - RNA, 22 nt, Human
ucuuuggugauaucucuuuggu

SEQ ID NO: 73764 - RNA, 22 nt, Human
ucuuugguuucugucucuguaa

SEQ ID NO: 73765 - RNA, 22 nt, Human
ucuuuguaaaugccuagcauaa

SEQ ID NO: 73766 - RNA, 22 nt, Human
ucuuuguggcgggcuuaaauac

SEQ ID NO: 73767 - RNA, 20 nt, Human
ucuuugugucagauggacag

SEQ ID NO: 73768 - RNA, 22 nt, Human
ucuuuguguucaggagccacgu

SEQ ID NO: 73769 - RNA, 22 nt, Human
ucuuuguuauugugaauagggu

SEQ ID NO: 73770 - RNA, 22 nt, Human
ucuuuguuugccuuuaucaaga

SEQ ID NO: 73771 - RNA, 22 nt, Human
ucuuuuaaccuaacuagcuugg

SEQ ID NO: 73772 - RNA, 22 nt, Human
ucuuuuauccuacauuuagcuc

SEQ ID NO: 73773 - RNA, 22 nt, Human
ucuuuuauuaggcugaaauggg

SEQ ID NO: 73774 - RNA, 23 nt, Human
ucuuuucaaugguucuuuaugug

SEQ ID NO: 73775 - RNA, 22 nt, Human
ucuuuucauugagaacacacug

SEQ ID NO: 73776 - RNA, 21 nt, Human
ucuuuuccuuucugugugcaa

SEQ ID NO: 73777 - RNA, 22 nt, Human
ucuuuucuagcaaauccaggag

SEQ ID NO: 73778 - RNA, 22 nt, Human
ucuuuucuccagaccugggauc

SEQ ID NO: 73779 - RNA, 22 nt, Human
ucuuuucugccacagccugagc

SEQ ID NO: 73780 - RNA, 22 nt, Human
ucuuuucuggacucugcaugga

SEQ ID NO: 73781 - RNA, 22 nt, Human
ucuuuucuguaacucagugucu

SEQ ID NO: 73782 - RNA, 22 nt, Human
ugcagcugaaaggacugaauga

SEQ ID NO: 73783 - RNA, 21 nt, Human
ugcagcugacacccuuuggga

SEQ ID NO: 73784 - RNA, 21 nt, Human
ugcagcugacacugguaugcc

SEQ ID NO: 73785 - RNA, 22 nt, Human
ugcagcugaccagcaaguccug

SEQ ID NO: 73786 - RNA, 22 nt, Human
ugcagcugacccacuccagucc

SEQ ID NO: 73787 - RNA, 22 nt, Human
ugcagcugaugauacccccaug

SEQ ID NO: 73788 - RNA, 22 nt, Human
ugcagcugcucauucucucagu

SEQ ID NO: 73789 - RNA, 22 nt, Human
ugcagcugcuggcccaggugcu

SEQ ID NO: 73790 - RNA, 22 nt, Human
ugcagcuggaacuuagaggaga

SEQ ID NO: 73791 - RNA, 21 nt, Human
ugcagcuggguucugguuugc

SEQ ID NO: 73792 - RNA, 20 nt, Human
ugcagcugguuucacaggga

SEQ ID NO: 73793 - RNA, 19 nt, Human
ugcagcugucucuauauua

SEQ ID NO: 73794 - RNA, 22 nt, Human
ugcagcugugaaagggaaccaa

SEQ ID NO: 73795 - RNA, 22 nt, Human
ugcagcuucuccaaauauuaca

SEQ ID NO: 73796 - RNA, 22 nt, Human
ugcagcuucuccaucuccuugu

SEQ ID NO: 73797 - RNA, 22 nt, Human
ugcagcuucucugcaacaggag

SEQ ID NO: 73798 - RNA, 22 nt, Human
ugcaggaaacagaggcucaaau

SEQ ID NO: 73799 - RNA, 21 nt, Human
ugcaggaaagugcugcgaccc

SEQ ID NO: 73800 - RNA, 22 nt, Human
ugcaggaaucagaggggaagcg

SEQ ID NO: 73801 - RNA, 22 nt, Human
ugcaggaauuuuuugcagaaag

SEQ ID NO: 73802 - RNA, 22 nt, Human
ugcaggagacauaauagggacu

SEQ ID NO: 73803 - RNA, 22 nt, Human
ugcaggagcaccagcucacccu

SEQ ID NO: 73804 - RNA, 22 nt, Human
ugcaggagcuuggcucuguccc

SEQ ID NO: 73805 - RNA, 19 nt, Human
ugcaggaggacugagcaga

SEQ ID NO: 73806 - RNA, 22 nt, Human
ugcaggaggauuuuguggagcu

SEQ ID NO: 73807 - RNA, 22 nt, Human
ugcaggaggccccauggaaccg

SEQ ID NO: 73808 - RNA, 22 nt, Human
ugcaggcaccauucugccucuc

SEQ ID NO: 73809 - RNA, 22 nt, Human
ugcaggcagcugaaaggugccu

SEQ ID NO: 73810 - RNA, 21 nt, Human
ugcaggcaggcagagaugcug

SEQ ID NO: 73811 - RNA, 22 nt, Human
ugcaggcauuggugagagaagc

SEQ ID NO: 73812 - RNA, 22 nt, Human
ugcaggcuauaucuuauuugac

SEQ ID NO: 73813 - RNA, 22 nt, Human
ugcaggcuccaggugcacauau

SEQ ID NO: 73814 - RNA, 22 nt, Human
ugaagugggggaacgagaguuc

SEQ ID NO: 73815 - RNA, 22 nt, Human
ugaaguuauauauguugaaaau

SEQ ID NO: 73816 - RNA, 21 nt, Human
ugaaguucgcgggcaagauua

SEQ ID NO: 73817 - RNA, 22 nt, Human
ugaaguuuauaacauagccucc

SEQ ID NO: 73818 - RNA, 22 nt, Human
ugaaguuugaacuguguugcug

SEQ ID NO: 73819 - RNA, 22 nt, Human
ugaaguuuuacauccucuccaa

SEQ ID NO: 73820 - RNA, 22 nt, Human
ugaaguuuucugguugauuaag

SEQ ID NO: 73821 - RNA, 22 nt, Human
ugaaguuuuuccagacaagucc

SEQ ID NO: 73822 - RNA, 22 nt, Human
ugaauaaaucaaagacugcccu

SEQ ID NO: 73823 - RNA, 22 nt, Human
ugaauaaucauguccauagugu

SEQ ID NO: 73824 - RNA, 22 nt, Human
ugaauaauuccuuuuugucaag

SEQ ID NO: 73825 - RNA, 22 nt, Human
ugaauagacaucuggccauaga

SEQ ID NO: 73826 - RNA, 22 nt, Human
ugaauagacuggggcugugaag

SEQ ID NO: 73827 - RNA, 22 nt, Human
ugaauagagcuuggcacuagaa

SEQ ID NO: 73828 - RNA, 22 nt, Human
ugaauaguguucuauaauaugg

SEQ ID NO: 73829 - RNA, 22 nt, Human
ugaauaugcuuugcaauccuaa

SEQ ID NO: 73830 - RNA, 22 nt, Human
ugaauauggcaacucuuguaac

SEQ ID NO: 73831 - RNA, 22 nt, Human
ugaauauguauuucuuauuuac

SEQ ID NO: 73832 - RNA, 22 nt, Human
ugaaucaaagcugaaguuuuca

SEQ ID NO: 73833 - RNA, 22 nt, Human
ugaaucaaugaauugcacuuca

SEQ ID NO: 73834 - RNA, 22 nt, Human
ugaaucucgaggcuauagaagu

SEQ ID NO: 73835 - RNA, 22 nt, Human
ugaaugaguggauucugaguag

SEQ ID NO: 73836 - RNA, 22 nt, Human
ugaaugauaugugaaaaggaac

SEQ ID NO: 73837 - RNA, 22 nt, Human
ugaaugaugaggggagaauaau

SEQ ID NO: 73838 - RNA, 22 nt, Human
ugaaugaugcaguauaaugaua

SEQ ID NO: 73839 - RNA, 22 nt, Human
ugaaugcucacaugccuagguc

SEQ ID NO: 73840 - RNA, 22 nt, Human
ugaauggucacugagcaucugu

SEQ ID NO: 73841 - RNA, 22 nt, Human
ugaauggugauuggugcuucuc

SEQ ID NO: 73842 - RNA, 22 nt, Human
ugaauguugauaugaguacaga

SEQ ID NO: 73843 - RNA, 19 nt, Human
ugaauuagaauuauccucu

SEQ ID NO: 73844 - RNA, 18 nt, Human
ugaauuaguuugugguuu

SEQ ID NO: 73845 - RNA, 17 nt, Human
ugaauucaaucugcacu

SEQ ID NO: 73846 - RNA, 22 nt, Human
ugaauucuuaaugaaaucuacu

SEQ ID NO: 73847 - RNA, 22 nt, Human
ugaauuuaaaauaaauguaguu

SEQ ID NO: 73848 - RNA, 22 nt, Human
ugacaaaacugcaauuacuuuu

SEQ ID NO: 73849 - RNA, 22 nt, Human
ugacaaaccaguagcaauaaag

SEQ ID NO: 73850 - RNA, 22 nt, Human
ugacaaacucuuugagaacaag

SEQ ID NO: 73851 - RNA, 22 nt, Human
ugacaaagacaaagauaugucc

SEQ ID NO: 73852 - RNA, 20 nt, Human
ugacaaagaguaagaggagg

SEQ ID NO: 73853 - RNA, 22 nt, Human
ugacaacagccaucacuuuuag

SEQ ID NO: 73854 - RNA, 22 nt, Human
ugacaacucuaguuaaugaauu

SEQ ID NO: 73855 - RNA, 22 nt, Human
ugacaagauagauugaguuuua

SEQ ID NO: 73856 - RNA, 22 nt, Human
ugacaagucacuguucuucaau

SEQ ID NO: 73857 - RNA, 17 nt, Human
ugacaaugacaagcacu

SEQ ID NO: 73858 - RNA, 22 nt, Human
ugacaaugacauggacagugau

SEQ ID NO: 73859 - RNA, 22 nt, Human
ugacaauucauuauaucuacag

SEQ ID NO: 73860 - RNA, 22 nt, Human
ugacaauugcagacacagaagu

SEQ ID NO: 73861 - RNA, 22 nt, Human
ugacaauugugggcaguuugug

SEQ ID NO: 73862 - RNA, 22 nt, Human
ugacaauuuauagaaugugacu

SEQ ID NO: 73863 - RNA, 20 nt, Human
ugacacaaauugcuuucuca

SEQ ID NO: 73864 - RNA, 22 nt, Human
ugacacaagagcccuguuugcu

SEQ ID NO: 73865 - RNA, 22 nt, Human
ugacacacuaggaaaagcauuu

SEQ ID NO: 73866 - RNA, 22 nt, Human
ugacacaguaucaaacaugauu

SEQ ID NO: 73867 - RNA, 22 nt, Human
ugacacaguugucgacucuaca

SEQ ID NO: 73868 - RNA, 23 nt, Human
ugacacauuuccuuuccacugca

SEQ ID NO: 73869 - RNA, 22 nt, Human
ugacaccaaggaaguaucauuu

SEQ ID NO: 73870 - RNA, 21 nt, Human
ugacacccagagccuccuccc

SEQ ID NO: 73871 - RNA, 22 nt, Human
ugacacugaccuaaagaccugg

SEQ ID NO: 73872 - RNA, 22 nt, Human
ugacacugcauauauugaaguu

SEQ ID NO: 73873 - RNA, 22 nt, Human
ugacacuucaaagaccaggguc

SEQ ID NO: 73874 - RNA, 22 nt, Human
ugacagaaagaguauuaaagau

SEQ ID NO: 73875 - RNA, 18 nt, Human
ugacagaaccuggagccu

SEQ ID NO: 73876 - RNA, 22 nt, Human
ugacagaaugugacucucagau

SEQ ID NO: 73877 - RNA, 23 nt, Human
ugacagaccuucccagacaguca

SEQ ID NO: 73878 - RNA, 22 nt, Human
ugacagacuacugccucuauug

SEQ ID NO: 73879 - RNA, 22 nt, Human
ugacagacuuuacuucuccuau

SEQ ID NO: 73880 - RNA, 22 nt, Human
ugacagaguccagaaguagugu

SEQ ID NO: 73881 - RNA, 22 nt, Human
ugacagauuuugauggcuaaua

SEQ ID NO: 73882 - RNA, 22 nt, Human
ugacagauuuuuucugagcuaa

SEQ ID NO: 73883 - RNA, 22 nt, Human
ugacagcugaggcccagaguac

SEQ ID NO: 73884 - RNA, 22 nt, Human
ugacaggaggcuugaggccagg

SEQ ID NO: 73885 - RNA, 22 nt, Human
ugacaggaggguuguggcaggg

SEQ ID NO: 73886 - RNA, 22 nt, Human
ugacaggcagugcugggcaugu

SEQ ID NO: 73887 - RNA, 22 nt, Human
ugacaggcuaggaggcugaagg

SEQ ID NO: 73888 - RNA, 19 nt, Human
ugacaggcuguugccuuga

SEQ ID NO: 73889 - RNA, 22 nt, Human
ugacaggggcugguggauaaau

SEQ ID NO: 73890 - RNA, 22 nt, Human
ugacaggugaaauguccuuauu

SEQ ID NO: 73891 - RNA, 22 nt, Human
ugcugccaugcagagcaacaga

SEQ ID NO: 73892 - RNA, 22 nt, Human
ugcugccuccaacuccugggcu

SEQ ID NO: 73893 - RNA, 22 nt, Human
ugcugccuggagccuuuuguuu

SEQ ID NO: 73894 - RNA, 22 nt, Human
ugcugccugguuucuucuugcu

SEQ ID NO: 73895 - RNA, 22 nt, Human
ugcugccugugccaggaggguc

SEQ ID NO: 73896 - RNA, 21 nt, Human
ugcugccuguggguguuuacc

SEQ ID NO: 73897 - RNA, 22 nt, Human
ugcugccuguuguggggccacg

SEQ ID NO: 73898 - RNA, 22 nt, Human
ugcugccuugaccuccugggcu

SEQ ID NO: 73899 - RNA, 22 nt, Human
ugcugccuuucaauguugucau

SEQ ID NO: 73900 - RNA, 22 nt, Human
ugcugcuagcuguauugcaaga

SEQ ID NO: 73901 - RNA, 22 nt, Human
ugcugcuccccagcacacagca

SEQ ID NO: 73902 - RNA, 22 nt, Human
ugcugcugaaaaggugugcuua

SEQ ID NO: 73903 - RNA, 22 nt, Human
ugcugcugaugcauagucugcu

SEQ ID NO: 73904 - RNA, 22 nt, Human
ugcugcuggaucuuacucaucu

SEQ ID NO: 73905 - RNA, 22 nt, Human
ugcugcuguagcuaggcuuucu

SEQ ID NO: 73906 - RNA, 20 nt, Human
ugcugcuuugccacuaguug

SEQ ID NO: 73907 - RNA, 22 nt, Human
ugcuggaaaaagauuguguuuu

SEQ ID NO: 73908 - RNA, 22 nt, Human
ugcuggaacuuagcaugcucuc

SEQ ID NO: 73909 - RNA, 22 nt, Human
ugcuggaagaauuccaugcugg

SEQ ID NO: 73910 - RNA, 22 nt, Human
ugcuggaagagauuggagccuc

SEQ ID NO: 73911 - RNA, 22 nt, Human
ugcuggaaggguaguauuaacu

SEQ ID NO: 73912 - RNA, 22 nt, Human
ugcuggaauaauuucauguuaa

SEQ ID NO: 73913 - RNA, 22 nt, Human
ugcuggaauugaccuagaagga

SEQ ID NO: 73914 - RNA, 22 nt, Human
ugcuggagaacugcucuguguu

SEQ ID NO: 73915 - RNA, 23 nt, Human
ugcuggagaagcaaaguucugag

SEQ ID NO: 73916 - RNA, 23 nt, Human
ugcuggagacaagugugagaagg

SEQ ID NO: 73917 - RNA, 22 nt, Human
ugcuggagaccugcuugcacca

SEQ ID NO: 73918 - RNA, 22 nt, Human
ugcuggagagccuuggccaagg

SEQ ID NO: 73919 - RNA, 22 nt, Human
ugcuggagagcuaguucugcag

SEQ ID NO: 73920 - RNA, 19 nt, Human
ugcuggaggguagugaguc

SEQ ID NO: 73921 - RNA, 23 nt, Human
ugcuggaguuuacucaggccagc

SEQ ID NO: 73922 - RNA, 22 nt, Human
ugcuggaugcuugauuuugagg

SEQ ID NO: 73923 - RNA, 22 nt, Human
ugcuggcacguggaccaggaga

SEQ ID NO: 73924 - RNA, 22 nt, Human
ugcuggcaguggcagugauggu

SEQ ID NO: 73925 - RNA, 22 nt, Human
ugcuggcaugcaugcuguagga

SEQ ID NO: 73926 - RNA, 22 nt, Human
ugcuggccugguuagaaagggg

SEQ ID NO: 73927 - RNA, 22 nt, Human
ugcuggccuguccacgggcugu

SEQ ID NO: 73928 - RNA, 22 nt, Human
ugcuggcuacauuauugcuguc

SEQ ID NO: 73929 - RNA, 22 nt, Human
ugcuggcuauuuaaagaagaaa

SEQ ID NO: 73930 - RNA, 22 nt, Human
ugcuggcuggagugccucugga

SEQ ID NO: 73931 - RNA, 22 nt, Human
ugcuggcugggcugcuggagac

SEQ ID NO: 73932 - RNA, 22 nt, Human
ugcuggcuuauuuaguaaaugu

SEQ ID NO: 73933 - RNA, 23 nt, Human
ugcuggcuuccagcugcucccuc

SEQ ID NO: 73934 - RNA, 22 nt, Human
ugcuggcuuuagugauuggggu

SEQ ID NO: 73935 - RNA, 22 nt, Human
ugcuggcuuuuugguccuugcu

SEQ ID NO: 73936 - RNA, 22 nt, Human
ugcuggcuuuuugugucaaaga

SEQ ID NO: 73937 - RNA, 22 nt, Human
ugcugggauuacagucaugagc

SEQ ID NO: 73938 - RNA, 22 nt, Human
ugcugggcacugucucugggga

SEQ ID NO: 73939 - RNA, 23 nt, Human
ugcugggcagagcuggugcugag

SEQ ID NO: 73940 - RNA, 22 nt, Human
ugcugggcaucguaggagguac

SEQ ID NO: 73941 - RNA, 18 nt, Human
ugcugggcauuaggcuua

SEQ ID NO: 73942 - RNA, 22 nt, Human
ugcugggcucaaccuccagagc

SEQ ID NO: 73943 - RNA, 21 nt, Human
ugcugggcugcaggggaugca

SEQ ID NO: 73944 - RNA, 22 nt, Human
ugcugggcuugaaagcugcuaa

SEQ ID NO: 73945 - RNA, 16 nt, Human
ugcuggggcgccgucc

SEQ ID NO: 73946 - RNA, 22 nt, Human
ugcugggggcuuucuggauacc

SEQ ID NO: 73947 - RNA, 18 nt, Human
ugcugggguagaauccac

SEQ ID NO: 73948 - RNA, 22 nt, Human
ugcuggggucucuccggugccc

SEQ ID NO: 73949 - RNA, 18 nt, Human
ugcuggguaacuguaugg

SEQ ID NO: 73950 - RNA, 19 nt, Human
ugcugggucauauggaaac

SEQ ID NO: 73951 - RNA, 22 nt, Human
ugcugggugguugcuccucccg

SEQ ID NO: 73952 - RNA, 22 nt, Human
ugcugguccccugcagccugug

SEQ ID NO: 73953 - RNA, 22 nt, Human
ugcugguccuggagcuggguuc

SEQ ID NO: 73954 - RNA, 23 nt, Human
ugcugguucaaaaaggaaggagg

SEQ ID NO: 73955 - RNA, 22 nt, Human
ugcuguaauacuuaagguuaag

SEQ ID NO: 73956 - RNA, 22 nt, Human
ugcuguauauauuuugaaguga

SEQ ID NO: 73957 - RNA, 22 nt, Human
ugcugucaagaaaacaagcaau

SEQ ID NO: 73958 - RNA, 22 nt, Human
ugcugucaagguuacaugcuuu

SEQ ID NO: 73959 - RNA, 22 nt, Human
ugcugucagacagcagugguaa

SEQ ID NO: 73960 - RNA, 22 nt, Human
ugcugucaguuggcaggaugag

SEQ ID NO: 73961 - RNA, 20 nt, Human
ugcugucguguuuucugcuu

SEQ ID NO: 73962 - RNA, 17 nt, Human
ugcugucugcuucccua

SEQ ID NO: 73963 - RNA, 22 nt, Human
ugcugucuuccaggauggugaa

SEQ ID NO: 73964 - RNA, 22 nt, Human
ugcugucuucucugaggucccu

SEQ ID NO: 73965 - RNA, 22 nt, Human
ugcugugacgccucaggaaucc

SEQ ID NO: 73966 - RNA, 22 nt, Human
uuggacugagaguuccaccauu

SEQ ID NO: 73967 - RNA, 22 nt, Human
uuggacugguuuacauuucaag

SEQ ID NO: 73968 - RNA, 22 nt, Human
uuggagaauguuuuccugcagu

SEQ ID NO: 73969 - RNA, 22 nt, Human
uuggagagcaguaaaccacacu

SEQ ID NO: 73970 - RNA, 22 nt, Human
uuggagagugauauucagaugc

SEQ ID NO: 73971 - RNA, 22 nt, Human
uuggagauguaaaauucagaga

SEQ ID NO: 73972 - RNA, 22 nt, Human
uuggagcccugaggaucuggau

SEQ ID NO: 73973 - RNA, 22 nt, Human
uuggaggacuaguuaagagacc

SEQ ID NO: 73974 - RNA, 22 nt, Human
uuggaggauggaguuagcaucu

SEQ ID NO: 73975 - RNA, 18 nt, Human
uuggaggauguccaugaa

SEQ ID NO: 73976 - RNA, 22 nt, Human
uuggagucagaugacuguagga

SEQ ID NO: 73977 - RNA, 20 nt, Human
uuggagucuaaagacugggg

SEQ ID NO: 73978 - RNA, 22 nt, Human
uuggauacagaugaaaggaagg

SEQ ID NO: 73979 - RNA, 22 nt, Human
uuggaucauggaaugucugcuu

SEQ ID NO: 73980 - RNA, 22 nt, Human
uuggaugaagucuagcuuuagu

SEQ ID NO: 73981 - RNA, 22 nt, Human
uuggauuacaugaaaugcagaa

SEQ ID NO: 73982 - RNA, 22 nt, Human
uuggcacaaauuucugaaauaa

SEQ ID NO: 73983 - RNA, 22 nt, Human
uuggcaccucccuaggaagaag

SEQ ID NO: 73984 - RNA, 22 nt, Human
uuggcacuuuuaggcaguaccg

SEQ ID NO: 73985 - RNA, 22 nt, Human
uuggcagaauuaaccacugaag

SEQ ID NO: 73986 - RNA, 22 nt, Human
uuggcagagggaccagccuaca

SEQ ID NO: 73987 - RNA, 22 nt, Human
uuggcagaggucucguuguggc

SEQ ID NO: 73988 - RNA, 22 nt, Human
uuggcagcacggggaacgucug

SEQ ID NO: 73989 - RNA, 20 nt, Human
uuggcagcagcucagccacc

SEQ ID NO: 73990 - RNA, 22 nt, Human
uuggcagcauacaguuggauug

SEQ ID NO: 73991 - RNA, 22 nt, Human
uuggcagcauccaagucucggg

SEQ ID NO: 73992 - RNA, 22 nt, Human
uuggcagcauuccagccaagca

SEQ ID NO: 73993 - RNA, 22 nt, Human
uuggcagccaggacccgccugg

SEQ ID NO: 73994 - RNA, 22 nt, Human
uuggcagcccagcuuacuagca

SEQ ID NO: 73995 - RNA, 22 nt, Human
uuggcagcggggacccuggcug

SEQ ID NO: 73996 - RNA, 22 nt, Human
uuggcagcugcacagacuccau

SEQ ID NO: 73997 - RNA, 22 nt, Human
uuggcaggaggcuucaguuccu

SEQ ID NO: 73998 - RNA, 22 nt, Human
uuggcaggaugauagcuuugug

SEQ ID NO: 73999 - RNA, 22 nt, Human
uuggcaguagucucggcuaccc

SEQ ID NO: 74000 - RNA, 22 nt, Human
ugcuucagugugucauuauuua

SEQ ID NO: 74001 - RNA, 22 nt, Human
ugcuucauuaaaacaauauuuu

SEQ ID NO: 74002 - RNA, 22 nt, Human
ugcuuccaguuccucaccacau

SEQ ID NO: 74003 - RNA, 21 nt, Human
ugcuucccugggccacacuga

SEQ ID NO: 74004 - RNA, 20 nt, Human
ugcuuccuggccacugcggg

SEQ ID NO: 74005 - RNA, 22 nt, Human
ugcuuccuugagcucuccaauc

SEQ ID NO: 74006 - RNA, 22 nt, Human
ugcuucuccauugaugcuaagu

SEQ ID NO: 74007 - RNA, 22 nt, Human
ugcuucucucuaggaagacgcu

SEQ ID NO: 74008 - RNA, 22 nt, Human
ugcuucugaaaugcaggucuuc

SEQ ID NO: 74009 - RNA, 22 nt, Human
ugcuucugaugugagcagcccc

SEQ ID NO: 74010 - RNA, 19 nt, Human
ugcuucuggaaccaugauc

SEQ ID NO: 74011 - RNA, 19 nt, Human
ugcuucuggaaugcaaggc

SEQ ID NO: 74012 - RNA, 22 nt, Human
ugcuucuggggacaggcugccu

SEQ ID NO: 74013 - RNA, 22 nt, Human
ugcuucuguauugaaauuguua

SEQ ID NO: 74014 - RNA, 22 nt, Human
ugcuucugucucuuaugccuug

SEQ ID NO: 74015 - RNA, 22 nt, Human
ugcuucuguuuguuucugucau

SEQ ID NO: 74016 - RNA, 22 nt, Human
ugcuucuuacucauaugcugau

SEQ ID NO: 74017 - RNA, 22 nt, Human
ugcuugaacccaggaaguggag

SEQ ID NO: 74018 - RNA, 22 nt, Human
ugcuugaagauauacuacuucc

SEQ ID NO: 74019 - RNA, 22 nt, Human
ugcuugacuuaguuucucauuu

SEQ ID NO: 74020 - RNA, 22 nt, Human
ugcuugaugagugugccaagca

SEQ ID NO: 74021 - RNA, 22 nt, Human
ugcuugaugauugcugucuccc

SEQ ID NO: 74022 - RNA, 22 nt, Human
ugcuugauuaagccuuguuugc

SEQ ID NO: 74023 - RNA, 22 nt, Human
ugcuugauuuggcaguguauuc

SEQ ID NO: 74024 - RNA, 22 nt, Human
ugcuuggccuacuuguccuuug

SEQ ID NO: 74025 - RNA, 17 nt, Human
ugcuuggcuucuuuagg

SEQ ID NO: 74026 - RNA, 22 nt, Human
ugcuugggaauguggagucaga

SEQ ID NO: 74027 - RNA, 20 nt, Human
ugcuuguaauaccugcuuca

SEQ ID NO: 74028 - RNA, 22 nt, Human
ugcuugucagugugcuagaaac

SEQ ID NO: 74029 - RNA, 21 nt, Human
ugcuugucaugaaugggccag

SEQ ID NO: 74030 - RNA, 22 nt, Human
ugcuuguucauggccuaguggc

SEQ ID NO: 74031 - RNA, 22 nt, Human
ugcuuuaaaauggacuguuuug

SEQ ID NO: 74032 - RNA, 22 nt, Human
ugcuuuaaauaugaauuagcau

SEQ ID NO: 74033 - RNA, 22 nt, Human
ugcuuuaacgcugagggucuca

SEQ ID NO: 74034 - RNA, 22 nt, Human
ugcuuuauaggggauugcaggc

SEQ ID NO: 74035 - RNA, 22 nt, Human
ugcuuuaucugacuuggcgcug

SEQ ID NO: 74036 - RNA, 20 nt, Human
ugcuuuaugcuauacuuugu

SEQ ID NO: 74037 - RNA, 22 nt, Human
ugcuuuauggagcccaucucau

SEQ ID NO: 74038 - RNA, 21 nt, Human
ugcuuuaugggaaaaauguca

SEQ ID NO: 74039 - RNA, 22 nt, Human
ugcuuuauguggcugauacuca

SEQ ID NO: 74040 - RNA, 22 nt, Human
ugcuuuauuaagagagaaauuu

SEQ ID NO: 74041 - RNA, 22 nt, Human
ugcuuuauuggaaccucauccu

SEQ ID NO: 74042 - RNA, 22 nt, Human
ugcuuucacaccaugccuauaa

SEQ ID NO: 74043 - RNA, 22 nt, Human
ugcuuucagauaucuguuucaa

SEQ ID NO: 74044 - RNA, 22 nt, Human
ugcuuucaugaagucuauagag

SEQ ID NO: 74045 - RNA, 22 nt, Human
ugcuuucuguuuuucauauaau

SEQ ID NO: 74046 - RNA, 23 nt, Human
ugcuuugccagagcaaaagucua

SEQ ID NO: 74047 - RNA, 19 nt, Human
ugcuuugccuugauuagcu

SEQ ID NO: 74048 - RNA, 19 nt, Human
ugcuuugcucuuggacuca

SEQ ID NO: 74049 - RNA, 22 nt, Human
ugcuuugcuggcacuccuggcu

SEQ ID NO: 74050 - RNA, 22 nt, Human
ugcuuugggucucucuaguuuc

SEQ ID NO: 74051 - RNA, 22 nt, Human
ugcuuuguguacacaagaauca

SEQ ID NO: 74052 - RNA, 22 nt, Human
ugcuuuuaagaacaaugcugcu

SEQ ID NO: 74053 - RNA, 22 nt, Human
ugcuuuuaggagauuaaaauua

SEQ ID NO: 74054 - RNA, 20 nt, Human
ugcuuuuauaccuauaauga

SEQ ID NO: 74055 - RNA, 22 nt, Human
ugcuuuugcacaggugaguucc

SEQ ID NO: 74056 - RNA, 22 nt, Human
uggaaaaaacccagacucuaga

SEQ ID NO: 74057 - RNA, 22 nt, Human
uggaaaacaaagcucucauuau

SEQ ID NO: 74058 - RNA, 21 nt, Human
uggaaaacauuuaaauagcaa

SEQ ID NO: 74059 - RNA, 22 nt, Human
uggaaaauauuuaggugaauga

SEQ ID NO: 74060 - RNA, 22 nt, Human
uggaaaaucaggggacauugau

SEQ ID NO: 74061 - RNA, 22 nt, Human
uggaaaauuaguagugaaaggc

SEQ ID NO: 74062 - RNA, 22 nt, Human
uggaaacacccacgcaugcaua

SEQ ID NO: 74063 - RNA, 22 nt, Human
uggaaacacugcauguucaccc

SEQ ID NO: 74064 - RNA, 21 nt, Human
uggaaacagcgccaucugccg

SEQ ID NO: 74065 - RNA, 22 nt, Human
uggaaacaucucugccuuuauu

SEQ ID NO: 74066 - RNA, 22 nt, Human
uggaaaccuacugauacaggag

SEQ ID NO: 74067 - RNA, 22 nt, Human
uggaaacuaggauggaagaaau

SEQ ID NO: 74068 - RNA, 22 nt, Human
uggaaacuauagucacaauaga

SEQ ID NO: 74069 - RNA, 22 nt, Human
uggaaacuauccucacaacuag

SEQ ID NO: 74070 - RNA, 19 nt, Human
uggaaacuccugauauuag

SEQ ID NO: 74071 - RNA, 22 nt, Human
uggaaacugugguauuucuuua

SEQ ID NO: 74072 - RNA, 22 nt, Human
uggaaacuuaucugacacgaac

SEQ ID NO: 74073 - RNA, 22 nt, Human
uggaaagaaaaacaggccauga

SEQ ID NO: 74074 - RNA, 22 nt, Human
uggaaagaaaguaaaggcguau

SEQ ID NO: 74075 - RNA, 22 nt, Human
uggaaagacauucagccgcugg

SEQ ID NO: 74076 - RNA, 22 nt, Human
uggaaagagauguuguuucuga

SEQ ID NO: 74077 - RNA, 22 nt, Human
uggaaagagguagaggaucugg

SEQ ID NO: 74078 - RNA, 22 nt, Human
uggaaaggaggcuuguggaaua

SEQ ID NO: 74079 - RNA, 22 nt, Human
uggaaagggacuuaugaguucc

SEQ ID NO: 74080 - RNA, 22 nt, Human
uggaaauacaagaaguauguca

SEQ ID NO: 74081 - RNA, 22 nt, Human
uggaaauauuggguaauaguug

SEQ ID NO: 74082 - RNA, 22 nt, Human
uggaaauuaaaauuccucuuaa

SEQ ID NO: 74083 - RNA, 22 nt, Human
uggaacaaaauauuuauguuug

SEQ ID NO: 74084 - RNA, 22 nt, Human
ugagggaggcccuuugagcaga

SEQ ID NO: 74085 - RNA, 20 nt, Human
ugagggaguauugauuuccc

SEQ ID NO: 74086 - RNA, 22 nt, Human
ugagggagucaugauuaaggaa

SEQ ID NO: 74087 - RNA, 22 nt, Human
ugagggaguguggauacaguag

SEQ ID NO: 74088 - RNA, 22 nt, Human
ugagggaguuggguguauagga

SEQ ID NO: 74089 - RNA, 20 nt, Human
ugagggcuaaccagacucug

SEQ ID NO: 74090 - RNA, 22 nt, Human
ugagggcuccccgcugcugugu

SEQ ID NO: 74091 - RNA, 22 nt, Human
ugaggggaaggcaugauaaaua

SEQ ID NO: 74092 - RNA, 22 nt, Human
ugagggucauuuggaaguggaa

SEQ ID NO: 74093 - RNA, 19 nt, Human
ugagggugagcuuuggaga

SEQ ID NO: 74094 - RNA, 22 nt, Human
ugaggguggcacaggcacaaag

SEQ ID NO: 74095 - RNA, 22 nt, Human
ugagguaaauucuggcccaaac

SEQ ID NO: 74096 - RNA, 22 nt, Human
ugagguagaagccuggguugag

SEQ ID NO: 74097 - RNA, 22 nt, Human
ugagguagaaguugggcugcuu

SEQ ID NO: 74098 - RNA, 22 nt, Human
ugagguagagauugugacugua

SEQ ID NO: 74099 - RNA, 18 nt, Human
ugagguagcuuuccuccu

SEQ ID NO: 74100 - RNA, 22 nt, Human
ugagguaggagggugaucagca

SEQ ID NO: 74101 - RNA, 22 nt, Human
ugagguaggagugggaaaguag

SEQ ID NO: 74102 - RNA, 22 nt, Human
ugagguagggacuuaaaacugu

SEQ ID NO: 74103 - RNA, 22 nt, Human
ugagguagugauuguagaagug

SEQ ID NO: 74104 - RNA, 22 nt, Human
ugagguaguguuuaguccaguc

SEQ ID NO: 74105 - RNA, 21 nt, Human
ugagguaguguuugucaaguu

SEQ ID NO: 74106 - RNA, 22 nt, Human
ugagguaguucuaauauuaaag

SEQ ID NO: 74107 - RNA, 22 nt, Human
ugagguaguuuuucaaguauuu

SEQ ID NO: 74108 - RNA, 22 nt, Human
ugagguaugauuuacaugcagu

SEQ ID NO: 74109 - RNA, 23 nt, Human
uggaaugagcugggaagcugagc

SEQ ID NO: 74110 - RNA, 22 nt, Human
uggaaugaguggcuaagauuca

SEQ ID NO: 74111 - RNA, 22 nt, Human
uggaaugaugacuaggaauugu

SEQ ID NO: 74112 - RNA, 22 nt, Human
uggaaugcagugggagcuuacc

SEQ ID NO: 74113 - RNA, 22 nt, Human
uggaauggggacuuugggacau

SEQ ID NO: 74114 - RNA, 22 nt, Human
uggaauguaaaggguaugggau

SEQ ID NO: 74115 - RNA, 20 nt, Human
uggaauguagucggugagag

SEQ ID NO: 74116 - RNA, 22 nt, Human
uggaauguaguguccauggaau

SEQ ID NO: 74117 - RNA, 22 nt, Human
uggaaugucaagaagcaguaag

SEQ ID NO: 74118 - RNA, 22 nt, Human
uggaaugucauaccauaaaaga

SEQ ID NO: 74119 - RNA, 22 nt, Human
uggaaugucuugauauagaggu

SEQ ID NO: 74120 - RNA, 22 nt, Human
uggaaugugaacauacaaggua

SEQ ID NO: 74121 - RNA, 22 nt, Human
uggaaugugagaauaccguuuu

SEQ ID NO: 74122 - RNA, 22 nt, Human
uggaaugugcuagggcuguggc

SEQ ID NO: 74123 - RNA, 22 nt, Human
uggaauguguucuauuuuacag

SEQ ID NO: 74124 - RNA, 22 nt, Human
ugccugcaagaguuggggcuac

SEQ ID NO: 74125 - RNA, 22 nt, Human
ugccugccacgcuugcuaccac

SEQ ID NO: 74126 - RNA, 22 nt, Human
ugccugccaggcaaccugggag

SEQ ID NO: 74127 - RNA, 20 nt, Human
ugccugccccugcuuuuucc

SEQ ID NO: 74128 - RNA, 22 nt, Human
ugccugccuaggaagcugugaa

SEQ ID NO: 74129 - RNA, 22 nt, Human
ugccugccucuggagcccaucc

SEQ ID NO: 74130 - RNA, 22 nt, Human
ugccugccucuggcagcccugc

SEQ ID NO: 74131 - RNA, 22 nt, Human
ugccugccuugcugcuggacag

SEQ ID NO: 74132 - RNA, 22 nt, Human
ugccugcugauuggaguugaau

SEQ ID NO: 74133 - RNA, 22 nt, Human
ugccugcuuucugggcugccau

SEQ ID NO: 74134 - RNA, 22 nt, Human
ugccuggaaggcccaugggaag

SEQ ID NO: 74135 - RNA, 22 nt, Human
ugccuggauggcucugagcagg

SEQ ID NO: 74136 - RNA, 22 nt, Human
ugccuggcaacuguggugggcu

SEQ ID NO: 74137 - RNA, 22 nt, Human
ugccuggcaucuagcccuggga

SEQ ID NO: 74138 - RNA, 22 nt, Human
ugccuggcccugacagcccugg

SEQ ID NO: 74139 - RNA, 22 nt, Human
ugccuggcuaauuuuuguaucc

SEQ ID NO: 74140 - RNA, 22 nt, Human
ugccugggccucugaggaaggc

SEQ ID NO: 74141 - RNA, 22 nt, Human
ugccugggcucgguagccaucg

SEQ ID NO: 74142 - RNA, 22 nt, Human
ugccuggguucccaccccaaag

SEQ ID NO: 74143 - RNA, 22 nt, Human
ugccugucucugacugccauua

SEQ ID NO: 74144 - RNA, 22 nt, Human
ugccugugaucagcugaguuca

SEQ ID NO: 74145 - RNA, 22 nt, Human
ugccugugcccuuugcugggag

SEQ ID NO: 74146 - RNA, 22 nt, Human
ugccuguggaaaggcuggugcu

SEQ ID NO: 74147 - RNA, 22 nt, Human
ugccugugucacagugauguuu

SEQ ID NO: 74148 - RNA, 22 nt, Human
ugccugugugaccacgggcaag

SEQ ID NO: 74149 - RNA, 22 nt, Human
ugccuguuauuguuggcuuagu

SEQ ID NO: 74150 - RNA, 20 nt, Human
ugccuuagagauaaaggcuu

SEQ ID NO: 74151 - RNA, 22 nt, Human
ugccuuagagcacucaagagug

SEQ ID NO: 74152 - RNA, 22 nt, Human
ugccuuaggguaccuggugcuu

SEQ ID NO: 74153 - RNA, 22 nt, Human
ugccuucaagacccauccucca

SEQ ID NO: 74154 - RNA, 22 nt, Human
ugccuucauccauguuauagug

SEQ ID NO: 74155 - RNA, 22 nt, Human
ugccuucuugaauaugguucuu

SEQ ID NO: 74156 - RNA, 22 nt, Human
ugccuugcuuuggcggaggcug

SEQ ID NO: 74157 - RNA, 22 nt, Human
ugccuuggauugcagggaaccu

SEQ ID NO: 74158 - RNA, 21 nt, Human
ugccuuggcaaaugaccauga

SEQ ID NO: 74159 - RNA, 22 nt, Human
ugccuugggauauauggacacu

SEQ ID NO: 74160 - RNA, 22 nt, Human
ugccuuuuagugcucaauaaag

SEQ ID NO: 74161 - RNA, 20 nt, Human
ugccuuuuauaccuuuaaac

SEQ ID NO: 74162 - RNA, 22 nt, Human
ugccuuuuauggcuagccucag

SEQ ID NO: 74163 - RNA, 22 nt, Human
ugccuuuuguaugcaggccaug

SEQ ID NO: 74164 - RNA, 22 nt, Human
ugcgccugcgcaaagguuucug

SEQ ID NO: 74165 - RNA, 22 nt, Human
ugcggaggucggugcugcgggc

SEQ ID NO: 74166 - RNA, 22 nt, Human
ugcgucuggaguggaguuugaa

SEQ ID NO: 74167 - RNA, 22 nt, Human
ugcguggcuggucccugugacc

SEQ ID NO: 74168 - RNA, 23 nt, Human
ugcgugugugcugaggggcgucc

SEQ ID NO: 74169 - RNA, 22 nt, Human
ugcguguguguauauacacagg

SEQ ID NO: 74170 - RNA, 23 nt, Human
ugcuaaaggcagaauauucaccu

SEQ ID NO: 74171 - RNA, 22 nt, Human
ugcuaaauucauuauugauuua

SEQ ID NO: 74172 - RNA, 22 nt, Human
ugcuaacaaagucuaaaucaua

SEQ ID NO: 74173 - RNA, 22 nt, Human
ugcuaaggacugggaggcaggg

SEQ ID NO: 74174 - RNA, 22 nt, Human
ugcuacaauucacaucuggaua

SEQ ID NO: 74175 - RNA, 22 nt, Human
ugcuacauaccacgaugcagua

SEQ ID NO: 74176 - RNA, 22 nt, Human
ugcuacuacuugucaacgguca

SEQ ID NO: 74177 - RNA, 22 nt, Human
ugcuagaaaucugaaacuagca

SEQ ID NO: 74178 - RNA, 22 nt, Human
ugcuagauggagcagaauagcu

SEQ ID NO: 74179 - RNA, 22 nt, Human
ugcuaggaauacacagagcaau

SEQ ID NO: 74180 - RNA, 22 nt, Human
ugcuagggaagaacgagggaau

SEQ ID NO: 74181 - RNA, 22 nt, Human
ugcuagggauacaguggugaau

SEQ ID NO: 74182 - RNA, 22 nt, Human
ugcuaggggcacuaaaagcuga

SEQ ID NO: 74183 - RNA, 20 nt, Human
ugcuauauugaagugcaguu

SEQ ID NO: 74184 - RNA, 22 nt, Human
ugcuaugcuuucccccaauguu

SEQ ID NO: 74185 - RNA, 22 nt, Human
ugcuauuaccugcuggacaguc

SEQ ID NO: 74186 - RNA, 22 nt, Human
ugcuauuauugucaccacugua

SEQ ID NO: 74187 - RNA, 22 nt, Human
ugcuauugugaacagugccaca

SEQ ID NO: 74188 - RNA, 22 nt, Human
ugcuauuucucugcuguaaaau

SEQ ID NO: 74189 - RNA, 22 nt, Human
ugcuauuuuagacauacuuugu

SEQ ID NO: 74190 - RNA, 22 nt, Human
ugcuauuuuuaucuugaucaaa

SEQ ID NO: 74191 - RNA, 22 nt, Human
ugcucaaugucuuaugagacug

SEQ ID NO: 74192 - RNA, 18 nt, Human
ugcucacacugaccucug

SEQ ID NO: 74193 - RNA, 21 nt, Human
ugcucacagaugugcucagug

SEQ ID NO: 74194 - RNA, 22 nt, Human
ugcucagacaagcugaacagua

SEQ ID NO: 74195 - RNA, 22 nt, Human
ugcucagacuuaagaagaucag

SEQ ID NO: 74196 - RNA, 22 nt, Human
ugcucagcacagaccaggccag

SEQ ID NO: 74197 - RNA, 22 nt, Human
ugcucagcugcucuguauucuu

SEQ ID NO: 74198 - RNA, 22 nt, Human
ugcucagcuucagaggaucccc

SEQ ID NO: 74199 - RNA, 22 nt, Human
ugcucaggaaauaaugucugug

SEQ ID NO: 74200 - RNA, 19 nt, Human
ugcucaggccaaggagccc

SEQ ID NO: 74201 - RNA, 22 nt, Human
ugcucaggccagccggacagag

SEQ ID NO: 74202 - RNA, 22 nt, Human
ugcucagggagcauagugaauu

SEQ ID NO: 74203 - RNA, 22 nt, Human
ugcucaggugccuuggcugcug

SEQ ID NO: 74204 - RNA, 22 nt, Human
ugcucagugagucugugacagg

SEQ ID NO: 74205 - RNA, 19 nt, Human
ugcucaguggcuaaaagca

SEQ ID NO: 74206 - RNA, 22 nt, Human
ugcucaguuaagcagaggaaau

SEQ ID NO: 74207 - RNA, 22 nt, Human
ugcucaguucaaggaaggugga

SEQ ID NO: 74208 - RNA, 22 nt, Human
ugcuccacugugcguggccaua

SEQ ID NO: 74209 - RNA, 22 nt, Human
ugcuccacuugggcacccccca

SEQ ID NO: 74210 - RNA, 16 nt, Human
ugcuccagaggaccca

SEQ ID NO: 74211 - RNA, 22 nt, Human
ugcuccagcaacaggcuuagcu

SEQ ID NO: 74212 - RNA, 22 nt, Human
ugcuccagccccuggugcacag

SEQ ID NO: 74213 - RNA, 22 nt, Human
ugcuccagcgcugccaccaguu

SEQ ID NO: 74214 - RNA, 22 nt, Human
ugcuccagggccuccagugggg

SEQ ID NO: 74215 - RNA, 22 nt, Human
ugcuccagggcugccagacccu

SEQ ID NO: 74216 - RNA, 20 nt, Human
ugcuccaucuaaagugauua

SEQ ID NO: 74217 - RNA, 22 nt, Human
ugcuccaucuagagcucugcag

SEQ ID NO: 74218 - RNA, 22 nt, Human
uggcuucuuuguagaaauugaa

SEQ ID NO: 74219 - RNA, 22 nt, Human
uggcuugcuacugaggugucag

SEQ ID NO: 74220 - RNA, 22 nt, Human
uggcuugcuucuucugcugucg

SEQ ID NO: 74221 - RNA, 19 nt, Human
uggcuuggcugcagaugcu

SEQ ID NO: 74222 - RNA, 22 nt, Human
uggcuugguccuggcccuuccc

SEQ ID NO: 74223 - RNA, 22 nt, Human
uggcuugucauguaucugaggc

SEQ ID NO: 74224 - RNA, 20 nt, Human
uggcuuguuucuaugggcag

SEQ ID NO: 74225 - RNA, 22 nt, Human
uggcuuuaagaagacugacagc

SEQ ID NO: 74226 - RNA, 22 nt, Human
uggcuuuaggccaaagccuaac

SEQ ID NO: 74227 - RNA, 22 nt, Human
uggcuuuauaccuuugccuugg

SEQ ID NO: 74228 - RNA, 22 nt, Human
uggcuuuauguacucaagucac

SEQ ID NO: 74229 - RNA, 22 nt, Human
uggcuuucgcuauagagcacgg

SEQ ID NO: 74230 - RNA, 22 nt, Human
ugggaaaguguagccugcaggc

SEQ ID NO: 74231 - RNA, 22 nt, Human
ugggaaaguguugaggugucuu

SEQ ID NO: 74232 - RNA, 22 nt, Human
ugggaaauauaauuuagcugug

SEQ ID NO: 74233 - RNA, 22 nt, Human
ugggaacaccugcugcccagug

SEQ ID NO: 74234 - RNA, 22 nt, Human
ugggaaccauguagcugagaug

SEQ ID NO: 74235 - RNA, 22 nt, Human
ugggaacucucugggaggcauc

SEQ ID NO: 74236 - RNA, 22 nt, Human
ugggaacuggggcauuguuucu

SEQ ID NO: 74237 - RNA, 22 nt, Human
ugggaacuguacugccuugaac

SEQ ID NO: 74238 - RNA, 23 nt, Human
ugggaagauauguauguucaagg

SEQ ID NO: 74239 - RNA, 22 nt, Human
uggaauguugcucugccuugcg

SEQ ID NO: 74240 - RNA, 22 nt, Human
uggaauuuaguuaauuccauuu

SEQ ID NO: 74241 - RNA, 22 nt, Human
uggacaaauagcaugacacuug

SEQ ID NO: 74242 - RNA, 22 nt, Human
uggacaaaugauuucuaccuuu

SEQ ID NO: 74243 - RNA, 22 nt, Human
uggacaacauagugagaccuca

SEQ ID NO: 74244 - RNA, 20 nt, Human
uggacacagcccuguugagu

SEQ ID NO: 74245 - RNA, 22 nt, Human
uggacacaguggugaagguaca

SEQ ID NO: 74246 - RNA, 18 nt, Human
uggacacauggccugggu

SEQ ID NO: 74247 - RNA, 22 nt, Human
uggacagcgaaagugccuggga

SEQ ID NO: 74248 - RNA, 22 nt, Human
uggacagcuugcagagccaccc

SEQ ID NO: 74249 - RNA, 23 nt, Human
uggacaggacccccuucggaccc

SEQ ID NO: 74250 - RNA, 22 nt, Human
uggacaggggcugcuguuguca

SEQ ID NO: 74251 - RNA, 22 nt, Human
uggacagguugaguaggaggag

SEQ ID NO: 74252 - RNA, 22 nt, Human
uggacaguauugugaagcaggc

SEQ ID NO: 74253 - RNA, 22 nt, Human
uggacaguuacugagcuugagu

SEQ ID NO: 74254 - RNA, 22 nt, Human
uggacaugaccucgagcgagau

SEQ ID NO: 74255 - RNA, 22 nt, Human
uggacauguccggccagacaau

SEQ ID NO: 74256 - RNA, 22 nt, Human
uggaccagcagccccagugccu

SEQ ID NO: 74257 - RNA, 22 nt, Human
uggacccccucaaggcagagcu

SEQ ID NO: 74258 - RNA, 22 nt, Human
uggacccuacccggcccucggc

SEQ ID NO: 74259 - RNA, 23 nt, Human
uggaccugaaccagugccucugu

SEQ ID NO: 74260 - RNA, 22 nt, Human
uggaccugaagaauaggaagua

SEQ ID NO: 74261 - RNA, 22 nt, Human
uggaccugcuggaugggcaggu

SEQ ID NO: 74262 - RNA, 22 nt, Human
uggacuaaagaggaaagaugua

SEQ ID NO: 74263 - RNA, 22 nt, Human
uggacucagaaguguucuuuua

SEQ ID NO: 74264 - RNA, 22 nt, Human
uggacuccagugucuguguucu

SEQ ID NO: 74265 - RNA, 22 nt, Human
uggacucuaugaugcgccagca

SEQ ID NO: 74266 - RNA, 22 nt, Human
uggacuuuuuaacugauaggag

SEQ ID NO: 74267 - RNA, 22 nt, Human
uggagaaggggcagggucucca

SEQ ID NO: 74268 - RNA, 22 nt, Human
uggagaaucuggaaacuguuga

SEQ ID NO: 74269 - RNA, 23 nt, Human
uggagaauuuagagucucuagga

SEQ ID NO: 74270 - RNA, 20 nt, Human
uggagacaauugcccuuuuu

SEQ ID NO: 74271 - RNA, 22 nt, Human
uggagacauuucucauuaaaaa

SEQ ID NO: 74272 - RNA, 22 nt, Human
uggagacucugcaucugugaca

SEQ ID NO: 74273 - RNA, 22 nt, Human
uggagacugacugccuguauuu

SEQ ID NO: 74274 - RNA, 22 nt, Human
uggagagaagaggcagugugcu

SEQ ID NO: 74275 - RNA, 22 nt, Human
uggagagaugucuguucaaggu

SEQ ID NO: 74276 - RNA, 22 nt, Human
uggagagcaaugaggggcaggc

SEQ ID NO: 74277 - RNA, 22 nt, Human
uggagagcacugucucauuuug

SEQ ID NO: 74278 - RNA, 22 nt, Human
uggagagcccgagacauccugu

SEQ ID NO: 74279 - RNA, 21 nt, Human
uggagagcccuugccugaguc

SEQ ID NO: 74280 - RNA, 20 nt, Human
uggagagccucuggacugug

SEQ ID NO: 74281 - RNA, 22 nt, Human
uggagagccuucccggcaucgc

SEQ ID NO: 74282 - RNA, 22 nt, Human
uggagagcgcgacgggaggaag

SEQ ID NO: 74283 - RNA, 22 nt, Human
uggagagcuccuauuugcuguc

SEQ ID NO: 74284 - RNA, 22 nt, Human
uggagagcugguucaaagcaga

SEQ ID NO: 74285 - RNA, 22 nt, Human
uggagaggagcaccauggccau

SEQ ID NO: 74286 - RNA, 22 nt, Human
uggagagguugaauaacuuguc

SEQ ID NO: 74287 - RNA, 22 nt, Human
uggagagguuuaaacaaaaguu

SEQ ID NO: 74288 - RNA, 22 nt, Human
uggagagucucugagccagggc

SEQ ID NO: 74289 - RNA, 22 nt, Human
uggagaguguagacuucagagu

SEQ ID NO: 74290 - RNA, 22 nt, Human
uggagaguucuguagauaucua

SEQ ID NO: 74291 - RNA, 22 nt, Human
uggagaugcacgagcaggugga

SEQ ID NO: 74292 - RNA, 22 nt, Human
uggagaugccuggagauuaggg

SEQ ID NO: 74293 - RNA, 22 nt, Human
uggagcagaaauuugaagccau

SEQ ID NO: 74294 - RNA, 22 nt, Human
uggagcagagaugguggccuuc

SEQ ID NO: 74295 - RNA, 22 nt, Human
uggagcagcauucauccagcag

SEQ ID NO: 74296 - RNA, 22 nt, Human
uggagcagccuuuucuaagcaa

SEQ ID NO: 74297 - RNA, 22 nt, Human
uggagcagcugaacagaguuga

SEQ ID NO: 74298 - RNA, 22 nt, Human
uggagcaggugcucaggguaau

SEQ ID NO: 74299 - RNA, 22 nt, Human
uggagcaggugggaugucguga

SEQ ID NO: 74300 - RNA, 22 nt, Human
uggagcauauucuggagcuugg

SEQ ID NO: 74301 - RNA, 22 nt, Human
uggagccaaugaacauuugcug

SEQ ID NO: 74302 - RNA, 22 nt, Human
uggagccagcgagccgaggcgg

SEQ ID NO: 74303 - RNA, 22 nt, Human
uggagccaggagccugggaguc

SEQ ID NO: 74304 - RNA, 22 nt, Human
uggagccaggguagaagcagag

SEQ ID NO: 74305 - RNA, 22 nt, Human
uggagccaguguugcccaacac

SEQ ID NO: 74306 - RNA, 22 nt, Human
uggagccuccucacacuguggc

SEQ ID NO: 74307 - RNA, 23 nt, Human
uggagccugggauacaauagaug

SEQ ID NO: 74308 - RNA, 22 nt, Human
uggagccuguucugagaagccg

SEQ ID NO: 74309 - RNA, 22 nt, Human
uggagccuuuuacccacaggag

SEQ ID NO: 74310 - RNA, 22 nt, Human
uggagcugagaaguggagcucu

SEQ ID NO: 74311 - RNA, 22 nt, Human
uggagcugagaguuaauaagga

SEQ ID NO: 74312 - RNA, 18 nt, Human
uggagcugagugcugugc

SEQ ID NO: 74313 - RNA, 21 nt, Human
uggagcugccacuugagcugc

SEQ ID NO: 74314 - RNA, 21 nt, Human
uggagcugccacuuguccucc

SEQ ID NO: 74315 - RNA, 22 nt, Human
uggagcugccuggcaccuacag

SEQ ID NO: 74316 - RNA, 17 nt, Human
uggagcugcguguguuc

SEQ ID NO: 74317 - RNA, 22 nt, Human
uggagcuggaauuugagcugga

SEQ ID NO: 74318 - RNA, 23 nt, Human
uggagcugggcucagacccuggg

SEQ ID NO: 74319 - RNA, 22 nt, Human
uggagcugguaaacagugacau

SEQ ID NO: 74320 - RNA, 19 nt, Human
uggaggaaguauauuucau

SEQ ID NO: 74321 - RNA, 22 nt, Human
uggaggaaguggacaguugugu

SEQ ID NO: 74322 - RNA, 21 nt, Human
uggaggaauaaagcacagaag

SEQ ID NO: 74323 - RNA, 18 nt, Human
uggaggaaucacaauggc

SEQ ID NO: 74324 - RNA, 22 nt, Human
uggaggacaggacuggacagcc

SEQ ID NO: 74325 - RNA, 22 nt, Human
uggaggaggaacuucuuaucuc

SEQ ID NO: 74326 - RNA, 22 nt, Human
uggaggagggcuggugucugua

SEQ ID NO: 74327 - RNA, 22 nt, Human
caucagagugguggccuggugu

SEQ ID NO: 74328 - RNA, 22 nt, Human
caucagaguuaacaucaugacu

SEQ ID NO: 74329 - RNA, 22 nt, Human
caucagccuggaaggcagccug

SEQ ID NO: 74330 - RNA, 22 nt, Human
caucagcuaaacuuagugaaau

SEQ ID NO: 74331 - RNA, 22 nt, Human
caucagcuuuggcgcugagcau

SEQ ID NO: 74332 - RNA, 22 nt, Human
caucaggaauaaaugaggcugu

SEQ ID NO: 74333 - RNA, 22 nt, Human
caucaggagaccagguccugcu

SEQ ID NO: 74334 - RNA, 22 nt, Human
caucaggaggagaugaagaaaa

SEQ ID NO: 74335 - RNA, 22 nt, Human
caucagucagucucuucaguau

SEQ ID NO: 74336 - RNA, 22 nt, Human
caucagucugaaagccagggag

SEQ ID NO: 74337 - RNA, 22 nt, Human
caucagugaaagugaauguucu

SEQ ID NO: 74338 - RNA, 22 nt, Human
caucagugagccccuugaugag

SEQ ID NO: 74339 - RNA, 22 nt, Human
caucaguguugauccaccagca

SEQ ID NO: 74340 - RNA, 22 nt, Human
caucaguuuggagaggcgguuu

SEQ ID NO: 74341 - RNA, 22 nt, Human
caucauaaaauugagauaacug

SEQ ID NO: 74342 - RNA, 22 nt, Human
caucaucaaaacaaauggaguc

SEQ ID NO: 74343 - RNA, 22 nt, Human
caucaucaacuggcagguaagu

SEQ ID NO: 74344 - RNA, 22 nt, Human
caucaucucuggcccuugaagu

SEQ ID NO: 74345 - RNA, 22 nt, Human
caucaucuggcuuuuagaaaaa

SEQ ID NO: 74346 - RNA, 22 nt, Human
caucaucuugaaugacugugau

SEQ ID NO: 74347 - RNA, 23 nt, Human
caucaugcaaucuugggauuucu

SEQ ID NO: 74348 - RNA, 21 nt, Human
caucaugcuuguguuggagaa

SEQ ID NO: 74349 - RNA, 22 nt, Human
caucauuuguuugcaugcagga

SEQ ID NO: 74350 - RNA, 22 nt, Human
caucauuuuguauccaagggga

SEQ ID NO: 74351 - RNA, 22 nt, Human
caucauuuuuguaagcugguag

SEQ ID NO: 74352 - RNA, 23 nt, Human
cauccaggagcugagucugacug

SEQ ID NO: 74353 - RNA, 22 nt, Human
cauccauagauugagagauggu

SEQ ID NO: 74354 - RNA, 22 nt, Human
cauccauagcuugaucuguucc

SEQ ID NO: 74355 - RNA, 22 nt, Human
caucccugacuucuaggugaca

SEQ ID NO: 74356 - RNA, 22 nt, Human
cauccgcaugcaagugcugucc

SEQ ID NO: 74357 - RNA, 22 nt, Human
cauccguuaauaaaaagacagu

SEQ ID NO: 74358 - RNA, 22 nt, Human
cauccugacaagaaagccagaa

SEQ ID NO: 74359 - RNA, 22 nt, Human
cauccugacuguaacuaagaga

SEQ ID NO: 74360 - RNA, 22 nt, Human
cauccugcggggagcagagggc

SEQ ID NO: 74361 - RNA, 18 nt, Human
cauccuuauagcugagaa

SEQ ID NO: 74362 - RNA, 22 nt, Human
caucguauggccgaauguacau

SEQ ID NO: 74363 - RNA, 22 nt, Human
caucuacacugauuaggugaac

SEQ ID NO: 74364 - RNA, 22 nt, Human
caucuaccagaauugcuauaaa

SEQ ID NO: 74365 - RNA, 22 nt, Human
caucuauuuucugugagguauc

SEQ ID NO: 74366 - RNA, 22 nt, Human
caucucacugagggguuuacaa

SEQ ID NO: 74367 - RNA, 22 nt, Human
caucucacuucccugcagcauc

SEQ ID NO: 74368 - RNA, 22 nt, Human
caucucauagugcagugcugua

SEQ ID NO: 74369 - RNA, 22 nt, Human
caucucauuuauuccaacucag

SEQ ID NO: 74370 - RNA, 22 nt, Human
caucuccaggaguucuacucau

SEQ ID NO: 74371 - RNA, 22 nt, Human
caucuccuggcagcuguuagga

SEQ ID NO: 74372 - RNA, 22 nt, Human
caucucuccacggcagcucucg

SEQ ID NO: 74373 - RNA, 22 nt, Human
caucucugagaccucagcuggg

SEQ ID NO: 74374 - RNA, 22 nt, Human
caucucugguucagucucugug

SEQ ID NO: 74375 - RNA, 22 nt, Human
caguacaguaaagcaagcugaa

SEQ ID NO: 74376 - RNA, 22 nt, Human
caguacuaagacuccaccuagc

SEQ ID NO: 74377 - RNA, 22 nt, Human
caguacucccagaacaaacccu

SEQ ID NO: 74378 - RNA, 22 nt, Human
caguacucuuauuugaaauaug

SEQ ID NO: 74379 - RNA, 22 nt, Human
caguacuuaguucucaugguuu

SEQ ID NO: 74380 - RNA, 22 nt, Human
caguacuuauuucuauuuaggg

SEQ ID NO: 74381 - RNA, 22 nt, Human
caguacuuugcaucauuccacu

SEQ ID NO: 74382 - RNA, 22 nt, Human
caguagcaggauuugggauuau

SEQ ID NO: 74383 - RNA, 21 nt, Human
caguagugcgucgcagaggac

SEQ ID NO: 74384 - RNA, 22 nt, Human
caguaguggaagggagagaaaa

SEQ ID NO: 74385 - RNA, 22 nt, Human
caguauauucugcagagccuua

SEQ ID NO: 74386 - RNA, 22 nt, Human
caguaucugucaguaaucaggu

SEQ ID NO: 74387 - RNA, 22 nt, Human
caguaugacuacaaacagcuuu

SEQ ID NO: 74388 - RNA, 22 nt, Human
caguauguuugggagacaugac

SEQ ID NO: 74389 - RNA, 20 nt, Human
caguauugauccauugucug

SEQ ID NO: 74390 - RNA, 22 nt, Human
caguauuuaggauuaggagaga

SEQ ID NO: 74391 - RNA, 22 nt, Human
caguauuuauggcuugaguauu

SEQ ID NO: 74392 - RNA, 22 nt, Human
caguauuuguucccuaucaaug

SEQ ID NO: 74393 - RNA, 21 nt, Human
caguauuuuaagcagugaguu

SEQ ID NO: 74394 - RNA, 22 nt, Human
cagucacacaaguggacuuggg

SEQ ID NO: 74395 - RNA, 17 nt, Human
cagucacaggucuuuuc

SEQ ID NO: 74396 - RNA, 22 nt, Human
cagucacagugacaggaugugg

SEQ ID NO: 74397 - RNA, 22 nt, Human
cagucacuccagccugccucag

SEQ ID NO: 74398 - RNA, 22 nt, Human
cagucacugguucuauaggccc

SEQ ID NO: 74399 - RNA, 22 nt, Human
cagucagaaggaagaugcuuaa

SEQ ID NO: 74400 - RNA, 22 nt, Human
cagucaggaaugccuccuuccu

SEQ ID NO: 74401 - RNA, 22 nt, Human
cagucauuccuaaccaagaaca

SEQ ID NO: 74402 - RNA, 22 nt, Human
cagucauuuuauuugaaaauua

SEQ ID NO: 74403 - RNA, 22 nt, Human
caguccaaccugccccuugggc

SEQ ID NO: 74404 - RNA, 20 nt, Human
caguccacuggaguuccuac

SEQ ID NO: 74405 - RNA, 22 nt, Human
caguccagaguaccccaagaag

SEQ ID NO: 74406 - RNA, 22 nt, Human
caguccagcucaucaguggcac

SEQ ID NO: 74407 - RNA, 22 nt, Human
caguccaguccaauccucaaug

SEQ ID NO: 74408 - RNA, 18 nt, Human
cagucccaaaccuuagga

SEQ ID NO: 74409 - RNA, 19 nt, Human
cagucccaaauucuuguca

SEQ ID NO: 74410 - RNA, 15 nt, Human
cagucccagggaccc

SEQ ID NO: 74411 - RNA, 22 nt, Human
cagucccaguuugagacucugg

SEQ ID NO: 74412 - RNA, 22 nt, Human
cagucccugggggagucaccag

SEQ ID NO: 74413 - RNA, 22 nt, Human
caguccucugcaacaccccuuc

SEQ ID NO: 74414 - RNA, 22 nt, Human
caguccugaauacuggacggug

SEQ ID NO: 74415 - RNA, 22 nt, Human
caguccugaggaagagcugcug

SEQ ID NO: 74416 - RNA, 20 nt, Human
caguccugcaggcgggagaa

SEQ ID NO: 74417 - RNA, 22 nt, Human
caguccugugucccuugguggg

SEQ ID NO: 74418 - RNA, 22 nt, Human
caguccuguuccuggaguaguu

SEQ ID NO: 74419 - RNA, 18 nt, Human
caguccuguuucuacagg

SEQ ID NO: 74420 - RNA, 22 nt, Human
caguccuugcucugggaugaug

SEQ ID NO: 74421 - RNA, 22 nt, Human
cagucuaagacucacgccaaga

SEQ ID NO: 74422 - RNA, 22 nt, Human
cagucuaccuuucagacauuga

SEQ ID NO: 74423 - RNA, 22 nt, Human
cagucuccaaaucaaucugaau

SEQ ID NO: 74424 - RNA, 22 nt, Human
cagucucucagcuuucagcugu

SEQ ID NO: 74425 - RNA, 22 nt, Human
cagucucugucaucucauggga

SEQ ID NO: 74426 - RNA, 23 nt, Human
cagucugcagcccacuugggcag

SEQ ID NO: 74427 - RNA, 22 nt, Human
cagucuggcucagcacaaaggg

SEQ ID NO: 74428 - RNA, 22 nt, Human
cagucuugcuuuacugagaugg

SEQ ID NO: 74429 - RNA, 22 nt, Human
cagucuuuuguauauuagcaga

SEQ ID NO: 74430 - RNA, 22 nt, Human
cagugaaaucacaacuuuaguu

SEQ ID NO: 74431 - RNA, 22 nt, Human
cagugaaguucuacugaauggu

SEQ ID NO: 74432 - RNA, 22 nt, Human
cagugacagguuccaugccgca

SEQ ID NO: 74433 - RNA, 22 nt, Human
cagugagaccuucuaagguggu

SEQ ID NO: 74434 - RNA, 22 nt, Human
cagugagauaccacagagcaaa

SEQ ID NO: 74435 - RNA, 20 nt, Human
cagugaggaggugcuggggg

SEQ ID NO: 74436 - RNA, 22 nt, Human
caugcagggagugcuccuauua

SEQ ID NO: 74437 - RNA, 22 nt, Human
caugcaggugaccagguguggg

SEQ ID NO: 74438 - RNA, 22 nt, Human
caugcauagaaugaagaggcug

SEQ ID NO: 74439 - RNA, 22 nt, Human
caugcaucgaugaaugcguggg

SEQ ID NO: 74440 - RNA, 20 nt, Human
caugcaugacacuggaaagg

SEQ ID NO: 74441 - RNA, 22 nt, Human
caugcaugccgggcugacagag

SEQ ID NO: 74442 - RNA, 22 nt, Human
caugcauguuuacuacagugac

SEQ ID NO: 74443 - RNA, 22 nt, Human
caugcauuguaauuuuuagucu

SEQ ID NO: 74444 - RNA, 22 nt, Human
caugcauuuggaguuuucaagu

SEQ ID NO: 74445 - RNA, 22 nt, Human
caugccaagcauguucagaagu

SEQ ID NO: 74446 - RNA, 22 nt, Human
caugccagguuugaguaucuug

SEQ ID NO: 74447 - RNA, 22 nt, Human
caugccauuucuucucuuuaug

SEQ ID NO: 74448 - RNA, 22 nt, Human
caugcccauugagaagggccuc

SEQ ID NO: 74449 - RNA, 22 nt, Human
caugcccuccuugccuucacug

SEQ ID NO: 74450 - RNA, 22 nt, Human
caugccucugcagcuguuuauu

SEQ ID NO: 74451 - RNA, 22 nt, Human
caugccugccuggugggcgugg

SEQ ID NO: 74452 - RNA, 22 nt, Human
caugcggcucuuuccaaaccgg

SEQ ID NO: 74453 - RNA, 22 nt, Human
caugcuaauucccaggccccaa

SEQ ID NO: 74454 - RNA, 22 nt, Human
caugcuauauaggaagagcacu

SEQ ID NO: 74455 - RNA, 22 nt, Human
caugcuauuuuccaauaaugua

SEQ ID NO: 74456 - RNA, 22 nt, Human
caugcucacaaaagauggcaaa

SEQ ID NO: 74457 - RNA, 22 nt, Human
caugcugagcacauucuguauu

SEQ ID NO: 74458 - RNA, 20 nt, Human
caugcugccuccauugaugc

SEQ ID NO: 74459 - RNA, 22 nt, Human
caugcuguacucugugucagaa

SEQ ID NO: 74460 - RNA, 22 nt, Human
caugcuguccugaaaagauauu

SEQ ID NO: 74461 - RNA, 22 nt, Human
caugcuguccugccagggaugg

SEQ ID NO: 74462 - RNA, 22 nt, Human
caugcugugugguuagaacugu

SEQ ID NO: 74463 - RNA, 22 nt, Human
caugcuguguguuuuagcucca

SEQ ID NO: 74464 - RNA, 22 nt, Human
caugcuuacuugucucagcaga

SEQ ID NO: 74465 - RNA, 22 nt, Human
caugcuuauauggaaaggaaga

SEQ ID NO: 74466 - RNA, 22 nt, Human
caugcuuaugauuugcuaagcc

SEQ ID NO: 74467 - RNA, 22 nt, Human
caugcuuuaccaaagcagugau

SEQ ID NO: 74468 - RNA, 22 nt, Human
caugcuuugggucagaaaugcc

SEQ ID NO: 74469 - RNA, 22 nt, Human
cauggaacuucaagaagaaagc

SEQ ID NO: 74470 - RNA, 22 nt, Human
cauggaaugguugaaugacgaa

SEQ ID NO: 74471 - RNA, 22 nt, Human
cauggacagugggacagugugu

SEQ ID NO: 74472 - RNA, 22 nt, Human
cauggacucugguuuggggagc

SEQ ID NO: 74473 - RNA, 22 nt, Human
cauggagauaaacugaaauauu

SEQ ID NO: 74474 - RNA, 22 nt, Human
cauggauauauuguacaguagc

SEQ ID NO: 74475 - RNA, 23 nt, Human
cauggcagcaagagcucauggcc

SEQ ID NO: 74476 - RNA, 22 nt, Human
cauggcaggaggcugcuggcag

SEQ ID NO: 74477 - RNA, 22 nt, Human
cauggcaggugugggguuuuau

SEQ ID NO: 74478 - RNA, 22 nt, Human
cauggcagugauucagccuuug

SEQ ID NO: 74479 - RNA, 22 nt, Human
cauggccaaagaauuauauuuu

SEQ ID NO: 74480 - RNA, 22 nt, Human
cauggccagcccugagguucag

SEQ ID NO: 74481 - RNA, 22 nt, Human
cauggccaggcacgcgcauagc

SEQ ID NO: 74482 - RNA, 22 nt, Human
cauggccaggcccagggcccag

SEQ ID NO: 74483 - RNA, 22 nt, Human
cauggcggucaggauguaggug

SEQ ID NO: 74484 - RNA, 22 nt, Human
cauggcucacaggaugggcuag

SEQ ID NO: 74485 - RNA, 22 nt, Human
cauggcugaggcagaggacuga

SEQ ID NO: 74486 - RNA, 19 nt, Human
cauggcugccccauauagc

SEQ ID NO: 74487 - RNA, 22 nt, Human
cauggcugccuguggacacugc

SEQ ID NO: 74488 - RNA, 22 nt, Human
cauggcugcgagaagagugggu

SEQ ID NO: 74489 - RNA, 22 nt, Human
cauggcuggccagugggagugg

SEQ ID NO: 74490 - RNA, 22 nt, Human
cauggcuuaccccaggagcagc

SEQ ID NO: 74491 - RNA, 22 nt, Human
cauggcuuacuuucagggagua

SEQ ID NO: 74492 - RNA, 22 nt, Human
cauggcuucaugaggguuuugc

SEQ ID NO: 74493 - RNA, 22 nt, Human
caguggcuguuucuggaaggca

SEQ ID NO: 74494 - RNA, 22 nt, Human
caguggcuuacaaugaacuaga

SEQ ID NO: 74495 - RNA, 22 nt, Human
caguggcuucuuccuagagcca

SEQ ID NO: 74496 - RNA, 21 nt, Human
cagugggcugcugcgcuccag

SEQ ID NO: 74497 - RNA, 22 nt, Human
caguggguccuaaguacaguuc

SEQ ID NO: 74498 - RNA, 22 nt, Human
cagugggugaugaguccugggg

SEQ ID NO: 74499 - RNA, 22 nt, Human
cagugggugccaucgugcccuu

SEQ ID NO: 74500 - RNA, 22 nt, Human
caguggguggccucuugaguca

SEQ ID NO: 74501 - RNA, 21 nt, Human
caguggucugucuccauuuuu

SEQ ID NO: 74502 - RNA, 22 nt, Human
caguggucugugcuucuguaca

SEQ ID NO: 74503 - RNA, 18 nt, Human
caguggugcugggaugug

SEQ ID NO: 74504 - RNA, 22 nt, Human
cagugguuauacuuacuguuuc

SEQ ID NO: 74505 - RNA, 22 nt, Human
cagugguuuugagauucagggu

SEQ ID NO: 74506 - RNA, 22 nt, Human
caguguaagcucuagacuagaa

SEQ ID NO: 74507 - RNA, 22 nt, Human
cagugucuacaguggcuggagg

SEQ ID NO: 74508 - RNA, 22 nt, Human
cagugucucaaaacaaguugcu

SEQ ID NO: 74509 - RNA, 22 nt, Human
cagugucucaguuucacuugaa

SEQ ID NO: 74510 - RNA, 22 nt, Human
cagugugccugaaucaaguguu

SEQ ID NO: 74511 - RNA, 22 nt, Human
caguguggcuuagggaauaggc

SEQ ID NO: 74512 - RNA, 22 nt, Human
caguguggguuugggaggagua

SEQ ID NO: 74513 - RNA, 21 nt, Human
caguguggugaccagggucuc

SEQ ID NO: 74514 - RNA, 22 nt, Human
caguguggugagauuccaggug

SEQ ID NO: 74515 - RNA, 22 nt, Human
caguguggugugcacagcuuag

SEQ ID NO: 74516 - RNA, 22 nt, Human
cagugugugacucuggggguac

SEQ ID NO: 74517 - RNA, 22 nt, Human
caguguguggauugcccuugca

SEQ ID NO: 74518 - RNA, 22 nt, Human
caguguucccugaacauauguu

SEQ ID NO: 74519 - RNA, 21 nt, Human
caguguugauauuuaauacau

SEQ ID NO: 74520 - RNA, 22 nt, Human
caguguuuaaucauugugaauu

SEQ ID NO: 74521 - RNA, 22 nt, Human
caguguuucugugcccaguggg

SEQ ID NO: 74522 - RNA, 22 nt, Human
caguguuuugagaagggcacgu

SEQ ID NO: 74523 - RNA, 22 nt, Human
caguguuuuguuacuugggcac

SEQ ID NO: 74524 - RNA, 22 nt, Human
caguuaaaagaagucuaucuua

SEQ ID NO: 74525 - RNA, 22 nt, Human
caguuaaaaugugcuauaagaa

SEQ ID NO: 74526 - RNA, 22 nt, Human
caguuaacugagcucugugaga

SEQ ID NO: 74527 - RNA, 22 nt, Human
caguuaacuucauaugaucauu

SEQ ID NO: 74528 - RNA, 22 nt, Human
caguuaaucuugccauuauauc

SEQ ID NO: 74529 - RNA, 20 nt, Human
caguuaaugacuaggcauca

SEQ ID NO: 74530 - RNA, 21 nt, Human
caguuacacaaguguuaccag

SEQ ID NO: 74531 - RNA, 22 nt, Human
caguuacauaaaugauaaaaug

SEQ ID NO: 74532 - RNA, 22 nt, Human
caguuacauuaauaaugcacau

SEQ ID NO: 74533 - RNA, 22 nt, Human
caguuagcugacaaguaggcua

SEQ ID NO: 74534 - RNA, 22 nt, Human
caguuaucaaauacuaugaagg

SEQ ID NO: 74535 - RNA, 22 nt, Human
caguuauuuugaggauuaaaug

SEQ ID NO: 74536 - RNA, 22 nt, Human
caguucaaaguuaagcagcagu

SEQ ID NO: 74537 - RNA, 22 nt, Human
caguucaggccggcugacucag

SEQ ID NO: 74538 - RNA, 19 nt, Human
caguuccagcuucuugacc

SEQ ID NO: 74539 - RNA, 22 nt, Human
caguucuaucauuuuagagaug

SEQ ID NO: 74540 - RNA, 22 nt, Human
caguucucugugccucgcuggg

SEQ ID NO: 74541 - RNA, 22 nt, Human
caguucuuauuuggccaguguc

SEQ ID NO: 74542 - RNA, 20 nt, Human
caguugaaauaauuuguuug

SEQ ID NO: 74543 - RNA, 22 nt, Human
caguugagucugcuagcuagga

SEQ ID NO: 74544 - RNA, 22 nt, Human
caguugccuuauuuccuugcug

SEQ ID NO: 74545 - RNA, 22 nt, Human
ccacagcuccucagccucuuuc

SEQ ID NO: 74546 - RNA, 22 nt, Human
ccacagcugacaauggauagac

SEQ ID NO: 74547 - RNA, 22 nt, Human
ccacagcugaccgcaggugagc

SEQ ID NO: 74548 - RNA, 17 nt, Human
ccacagcugggugccuu

SEQ ID NO: 74549 - RNA, 22 nt, Human
ccacaggacggaggucuggccg

SEQ ID NO: 74550 - RNA, 23 nt, Human
ccacaggcacagaggcuugcauc

SEQ ID NO: 74551 - RNA, 22 nt, Human
ccacaggcggaguggcgggcag

SEQ ID NO: 74552 - RNA, 22 nt, Human
ccacaggcugcugcaggucccg

SEQ ID NO: 74553 - RNA, 22 nt, Human
ccacagggcacagacaggaagc

SEQ ID NO: 74554 - RNA, 22 nt, Human
ccacagggcucuaggcgcuucc

SEQ ID NO: 74555 - RNA, 21 nt, Human
ccacaggggcuccccugucag

SEQ ID NO: 74556 - RNA, 22 nt, Human
ccacagggucagccacucugca

SEQ ID NO: 74557 - RNA, 16 nt, Human
ccacaguaagaaauac

SEQ ID NO: 74558 - RNA, 22 nt, Human
ccacagugagugucauacuugg

SEQ ID NO: 74559 - RNA, 22 nt, Human
ccacagugccuggaauucugca

SEQ ID NO: 74560 - RNA, 22 nt, Human
ccacagugggcacagcaggacu

SEQ ID NO: 74561 - RNA, 22 nt, Human
ccacaguuauucauuugugaca

SEQ ID NO: 74562 - RNA, 23 nt, Human
ccacaguucaucguucacucacc

SEQ ID NO: 74563 - RNA, 22 nt, Human
ccacaucauggauacaguuaug

SEQ ID NO: 74564 - RNA, 22 nt, Human
ccacaucuaagccuucaugaua

SEQ ID NO: 74565 - RNA, 22 nt, Human
ccacaucucccuauugcucuuu

SEQ ID NO: 74566 - RNA, 22 nt, Human
ccacaucucgguccccucuuug

SEQ ID NO: 74567 - RNA, 22 nt, Human
ccacaucugcagucccuucugu

SEQ ID NO: 74568 - RNA, 22 nt, Human
ccacaucugcauuuaauguaua

SEQ ID NO: 74569 - RNA, 22 nt, Human
ccacaucugguggccagugcua

SEQ ID NO: 74570 - RNA, 22 nt, Human
ccacaucuuuuuuccugaacag

SEQ ID NO: 74571 - RNA, 22 nt, Human
ccacaugcucuuguuacagugu

SEQ ID NO: 74572 - RNA, 22 nt, Human
ccacauggagcaggaggugggg

SEQ ID NO: 74573 - RNA, 19 nt, Human
ccacauggcuggaugacag

SEQ ID NO: 74574 - RNA, 22 nt, Human
ccacauuuacuggaugcucagg

SEQ ID NO: 74575 - RNA, 22 nt, Human
ccacauuucuucacuuguccca

SEQ ID NO: 74576 - RNA, 22 nt, Human
ccacauuuggagaagauacuuu

SEQ ID NO: 74577 - RNA, 22 nt, Human
ccacauuuugcuuugccuaggu

SEQ ID NO: 74578 - RNA, 22 nt, Human
ccaccaagucccacuauaauuu

SEQ ID NO: 74579 - RNA, 22 nt, Human
ccaccacuucuggcuucuggug

SEQ ID NO: 74580 - RNA, 22 nt, Human
ccaccagcagugugcaaggauu

SEQ ID NO: 74581 - RNA, 22 nt, Human
ccaccaggacagcccugagggg

SEQ ID NO: 74582 - RNA, 19 nt, Human
ccaccagugugaucuaaga

SEQ ID NO: 74583 - RNA, 22 nt, Human
ccaccauucaaggucuucacag

SEQ ID NO: 74584 - RNA, 22 nt, Human
ccacccagaccagggaucuggg

SEQ ID NO: 74585 - RNA, 22 nt, Human
ccacccagccagaugcaggaag

SEQ ID NO: 74586 - RNA, 22 nt, Human
ccaccccaaaugaagaccucuc

SEQ ID NO: 74587 - RNA, 20 nt, Human
ccacccuccaggaacacaua

SEQ ID NO: 74588 - RNA, 22 nt, Human
ccacccugaggaaugguccggc

SEQ ID NO: 74589 - RNA, 22 nt, Human
ccacccuuggguucggaggccg

SEQ ID NO: 74590 - RNA, 22 nt, Human
ccaccuccaccuauugccagcc

SEQ ID NO: 74591 - RNA, 22 nt, Human
ccaccuccucggccaugugacg

SEQ ID NO: 74592 - RNA, 20 nt, Human
ccaccuggccaaggcugugc

SEQ ID NO: 74593 - RNA, 22 nt, Human
ccacgcucccugaucccugcuu

SEQ ID NO: 74594 - RNA, 23 nt, Human
ccacgucugcacuguagcuguug

SEQ ID NO: 74595 - RNA, 22 nt, Human
ccacuacuuuguuuuuggugcu

SEQ ID NO: 74596 - RNA, 22 nt, Human
ccacucaggagcuuaucuaugc

SEQ ID NO: 74597 - RNA, 20 nt, Human
ccacuccaggugauucugau

SEQ ID NO: 74598 - RNA, 22 nt, Human
ccacugagaagggguugggguc

SEQ ID NO: 74599 - RNA, 22 nt, Human
ccacugaggccugggcccaggg

SEQ ID NO: 74600 - RNA, 22 nt, Human
ccacugaggggucaugguggga

SEQ ID NO: 74601 - RNA, 22 nt, Human
ccacugagugagcagagcaggg

SEQ ID NO: 74602 - RNA, 22 nt, Human
ccacugccaugggcuaggcaug

SEQ ID NO: 74603 - RNA, 22 nt, Human
ccacugcccaccccgacgucua

SEQ ID NO: 74604 - RNA, 22 nt, Human
ccacugccgauguuccaucuug

SEQ ID NO: 74605 - RNA, 22 nt, Human
ccacugccucuccagggccauc

SEQ ID NO: 74606 - RNA, 22 nt, Human
ccacugcuguuacuuacgcaaa

SEQ ID NO: 74607 - RNA, 22 nt, Human
ccacuggaagaugcugagguca

SEQ ID NO: 74608 - RNA, 23 nt, Human
ccacuggagaaaguggcaggugg

SEQ ID NO: 74609 - RNA, 22 nt, Human
ccacuggcaguuggcuagccuu

SEQ ID NO: 74610 - RNA, 22 nt, Human
ccacugggcguuucuguccaau

SEQ ID NO: 74611 - RNA, 22 nt, Human
ccacugggggcugcaggcacuc

SEQ ID NO: 74612 - RNA, 22 nt, Human
ccacugggggcugcucccaggu

SEQ ID NO: 74613 - RNA, 21 nt, Human
ccacuguagacucauucugag

SEQ ID NO: 74614 - RNA, 22 nt, Human
ccacuguaguuaugaugaaguu

SEQ ID NO: 74615 - RNA, 22 nt, Human
ccacugucagaggggcugugcc

SEQ ID NO: 74616 - RNA, 22 nt, Human
ccacugucugcaggccucagca

SEQ ID NO: 74617 - RNA, 22 nt, Human
ccacugucuuuuccaggcugaa

SEQ ID NO: 74618 - RNA, 22 nt, Human
ccacuguggaaagcaguucaga

SEQ ID NO: 74619 - RNA, 22 nt, Human
ccacuucaucagugcuccauuu

SEQ ID NO: 74620 - RNA, 22 nt, Human
ccacuugaaauaucuuuguucu

SEQ ID NO: 74621 - RNA, 22 nt, Human
ccacuugacauuuucauuaaga

SEQ ID NO: 74622 - RNA, 22 nt, Human
ccacuugugaaauaaucaaaua

SEQ ID NO: 74623 - RNA, 19 nt, Human
ccacuuugcuucucugggu

SEQ ID NO: 74624 - RNA, 22 nt, Human
ccagaaaacucuacaugcuugu

SEQ ID NO: 74625 - RNA, 19 nt, Human
ccacaaaauuauuuuaguu

SEQ ID NO: 74626 - RNA, 22 nt, Human
ccacaaagaaugggggaagcau

SEQ ID NO: 74627 - RNA, 22 nt, Human
ccacaaaguugcugaguuucug

SEQ ID NO: 74628 - RNA, 22 nt, Human
ccacaaauuagguuuugcuugu

SEQ ID NO: 74629 - RNA, 22 nt, Human
ccacaagacucugucagcauaa

SEQ ID NO: 74630 - RNA, 20 nt, Human
ccacaagggaauauuguuga

SEQ ID NO: 74631 - RNA, 22 nt, Human
ccacaagugaaguacaccugcc

SEQ ID NO: 74632 - RNA, 22 nt, Human
ccacacugaaccucagugucuu

SEQ ID NO: 74633 - RNA, 22 nt, Human
ccacacugucuaacaaggcaua

SEQ ID NO: 74634 - RNA, 22 nt, Human
ccacagaaugaugacacuucag

SEQ ID NO: 74635 - RNA, 22 nt, Human
ccacagagacagagcccagggu

SEQ ID NO: 74636 - RNA, 22 nt, Human
ccacagagagugucagccuuug

SEQ ID NO: 74637 - RNA, 19 nt, Human
ccacagagcaugcugaggc

SEQ ID NO: 74638 - RNA, 18 nt, Human
ccacagcagaguucuuac

SEQ ID NO: 74639 - RNA, 22 nt, Human
ccacagcaugcaggccugacac

SEQ ID NO: 74640 - RNA, 22 nt, Human
ccacagccauuccagggaggcu

SEQ ID NO: 74641 - RNA, 17 nt, Human
ccacagccuggcacuug

SEQ ID NO: 74642 - RNA, 21 nt, Human
ccacagcuggucucugagccc

SEQ ID NO: 74643 - RNA, 22 nt, Human
ccacagcuucgcagucugcugc

SEQ ID NO: 74644 - RNA, 22 nt, Human
ccacaggaggauguucagacaa

SEQ ID NO: 74645 - RNA, 22 nt, Human
ccacaggauccaagggaaggca

SEQ ID NO: 74646 - RNA, 16 nt, Human
ccacagggcaaggggc

SEQ ID NO: 74647 - RNA, 22 nt, Human
ccacaggggcccacgagccgcu

SEQ ID NO: 74648 - RNA, 22 nt, Human
ccacaggggucucuguagcuga

SEQ ID NO: 74649 - RNA, 22 nt, Human
ccacaguaaagaaacaacuucg

SEQ ID NO: 74650 - RNA, 22 nt, Human
ccacaguaacuguuuuguaccg

SEQ ID NO: 74651 - RNA, 22 nt, Human
ccacaguaggaacaaguugucg

SEQ ID NO: 74652 - RNA, 22 nt, Human
ccacagugaaaucuugauggag

SEQ ID NO: 74653 - RNA, 22 nt, Human
ccacagugacacgggcuggccc

SEQ ID NO: 74654 - RNA, 20 nt, Human
ccacaguggagacuggagac

SEQ ID NO: 74655 - RNA, 22 nt, Human
cauuaaacaaccuugaaucaau

SEQ ID NO: 74656 - RNA, 22 nt, Human
cauuaacaaauggaagcaugaa

SEQ ID NO: 74657 - RNA, 22 nt, Human
cauuaacacuuuggauuuagac

SEQ ID NO: 74658 - RNA, 22 nt, Human
cauuaagauuuuuuucuacugg

SEQ ID NO: 74659 - RNA, 22 nt, Human
cauuaauaaacauuucagaaga

SEQ ID NO: 74660 - RNA, 22 nt, Human
cauuaauauuguucuucuuuag

SEQ ID NO: 74661 - RNA, 22 nt, Human
cauuaauuguauuuuucaaagu

SEQ ID NO: 74662 - RNA, 19 nt, Human
cauuacaaauuuguaggga

SEQ ID NO: 74663 - RNA, 22 nt, Human
cauuacagaauauguaaugauc

SEQ ID NO: 74664 - RNA, 22 nt, Human
cauuacaucuuugaugcaguau

SEQ ID NO: 74665 - RNA, 22 nt, Human
cauuacgagcucuaaaauacua

SEQ ID NO: 74666 - RNA, 22 nt, Human
cauuagaaaagcagcugggacc

SEQ ID NO: 74667 - RNA, 22 nt, Human
cauuagaacuaagauguccagg

SEQ ID NO: 74668 - RNA, 22 nt, Human
cauuagaagaacaguuauauua

SEQ ID NO: 74669 - RNA, 22 nt, Human
cauuagaagguuuuaaaggaau

SEQ ID NO: 74670 - RNA, 22 nt, Human
cauuagacacagauguauaaau

SEQ ID NO: 74671 - RNA, 22 nt, Human
cauuagagcagauaauaugugu

SEQ ID NO: 74672 - RNA, 22 nt, Human
cauuagggucucucagcugaau

SEQ ID NO: 74673 - RNA, 22 nt, Human
cauuauauuuuacugcauggga

SEQ ID NO: 74674 - RNA, 22 nt, Human
cauuaucugagaguguccuaca

SEQ ID NO: 74675 - RNA, 22 nt, Human
cauuaugccaaaguagaaauau

SEQ ID NO: 74676 - RNA, 22 nt, Human
cauuauggaagugaagagcucu

SEQ ID NO: 74677 - RNA, 22 nt, Human
cauucaaaagcuccauguuugu

SEQ ID NO: 74678 - RNA, 22 nt, Human
cauucaaacauuaauuuauuca

SEQ ID NO: 74679 - RNA, 22 nt, Human
cauucaaagcaggaaaggccuu

SEQ ID NO: 74680 - RNA, 22 nt, Human
cauucacaauaguugaaaggug

SEQ ID NO: 74681 - RNA, 21 nt, Human
cauucacagucuggcucuuga

SEQ ID NO: 74682 - RNA, 22 nt, Human
cauucacaucuuguuccaucac

SEQ ID NO: 74683 - RNA, 22 nt, Human
cauucacauucuucuuacuguu

SEQ ID NO: 74684 - RNA, 22 nt, Human
cauucagucaugcugguuuuga

SEQ ID NO: 74685 - RNA, 22 nt, Human
cauucaguggaguauuauucag

SEQ ID NO: 74686 - RNA, 22 nt, Human
cauucauaagacuuugcucuug

SEQ ID NO: 74687 - RNA, 22 nt, Human
cauucauacaaguuuguuucau

SEQ ID NO: 74688 - RNA, 22 nt, Human
cauucauaggaggagaugauua

SEQ ID NO: 74689 - RNA, 22 nt, Human
cauucauauuugcaguauaccu

SEQ ID NO: 74690 - RNA, 22 nt, Human
cauucauucacauuuugucuau

SEQ ID NO: 74691 - RNA, 22 nt, Human
cauucauucagcaacuguuauu

SEQ ID NO: 74692 - RNA, 22 nt, Human
cauucauuuacuuucaacagcu

SEQ ID NO: 74693 - RNA, 22 nt, Human
cauucccugucucuucaauccu

SEQ ID NO: 74694 - RNA, 22 nt, Human
cauuccuauuaugucccuagug

SEQ ID NO: 74695 - RNA, 22 nt, Human
cauuccugagggcccccuacuu

SEQ ID NO: 74696 - RNA, 22 nt, Human
cauucuaucuuggacuggaucu

SEQ ID NO: 74697 - RNA, 22 nt, Human
cauucucaauaguagaugagua

SEQ ID NO: 74698 - RNA, 22 nt, Human
cauucucucuacuuguuuucaa

SEQ ID NO: 74699 - RNA, 22 nt, Human
cauucuucuggauaguuaguug

SEQ ID NO: 74700 - RNA, 22 nt, Human
cauugaaaaacguugacugagu

SEQ ID NO: 74701 - RNA, 22 nt, Human
cauugaaaauguugcaggcugu

SEQ ID NO: 74702 - RNA, 22 nt, Human
cauugaaagagauaaagccuuu

SEQ ID NO: 74703 - RNA, 22 nt, Human
cauugaauccuuccuucagaag

SEQ ID NO: 74704 - RNA, 22 nt, Human
cauugagaaucugggcuacagc

SEQ ID NO: 74705 - RNA, 22 nt, Human
cauugagaggcugccugccuga

SEQ ID NO: 74706 - RNA, 22 nt, Human
cauugagcgacccugcaugacu

SEQ ID NO: 74707 - RNA, 22 nt, Human
cauugauuauugaagggucuuu

SEQ ID NO: 74708 - RNA, 22 nt, Human
cauugcacagcccuguggugau

SEQ ID NO: 74709 - RNA, 22 nt, Human
cauugcacuccaucuugggcaa

SEQ ID NO: 74710 - RNA, 22 nt, Human
cauugcaguaaucuggugaaau

SEQ ID NO: 74711 - RNA, 22 nt, Human
cauugcucaggcccagcaggaa

SEQ ID NO: 74712 - RNA, 22 nt, Human
cauugcugccacuggauauuuc

SEQ ID NO: 74713 - RNA, 22 nt, Human
cauugcuguuaauugucucuag

SEQ ID NO: 74714 - RNA, 22 nt, Human
cauugcuuugugcauauuuaaa

SEQ ID NO: 74715 - RNA, 22 nt, Human
cauuggaaaaugcaugcuuuuu

SEQ ID NO: 74716 - RNA, 22 nt, Human
cauuggaagacauaucaugcua

SEQ ID NO: 74717 - RNA, 22 nt, Human
cauuggaaugaucguuuugcug

SEQ ID NO: 74718 - RNA, 22 nt, Human
cauuggaaugcauuugaagaga

SEQ ID NO: 74719 - RNA, 22 nt, Human
cauuggcaccucacaggauaga

SEQ ID NO: 74720 - RNA, 22 nt, Human
cauugucauucuaugcuauuca

SEQ ID NO: 74721 - RNA, 22 nt, Human
cauugugcagggauaaugcagc

SEQ ID NO: 74722 - RNA, 22 nt, Human
cauuguuucuggagggaucugu

SEQ ID NO: 74723 - RNA, 22 nt, Human
cauuguuuugagaacaaccuga

SEQ ID NO: 74724 - RNA, 22 nt, Human
cauuuacauuuaagguuaauau

SEQ ID NO: 74725 - RNA, 22 nt, Human
cauuuagaagucuuagaacuau

SEQ ID NO: 74726 - RNA, 22 nt, Human
cauuuagacauuugauuugggg

SEQ ID NO: 74727 - RNA, 22 nt, Human
cauuuaguacaacuuuuacagu

SEQ ID NO: 74728 - RNA, 22 nt, Human
cauuuagucaaggacacguggc

SEQ ID NO: 74729 - RNA, 22 nt, Human
cauuuaugaagcacuuuagagu

SEQ ID NO: 74730 - RNA, 22 nt, Human
cauuuaugauaguaauaugaaa

SEQ ID NO: 74731 - RNA, 22 nt, Human
cauuuauucauuugcuagggcu

SEQ ID NO: 74732 - RNA, 21 nt, Human
cauuucaaagagcuggaaauc

SEQ ID NO: 74733 - RNA, 22 nt, Human
cauuucaaggaccacccuggga

SEQ ID NO: 74734 - RNA, 22 nt, Human
cauuucaaugccuucaacauag

SEQ ID NO: 74735 - RNA, 22 nt, Human
cauuucagugucuugugaugaa

SEQ ID NO: 74736 - RNA, 21 nt, Human
cauuucaugauuauagaaaug

SEQ ID NO: 74737 - RNA, 22 nt, Human
cauuuccacuucugaaaacugg

SEQ ID NO: 74738 - RNA, 22 nt, Human
cauuuccagcuccugcaucaug

SEQ ID NO: 74739 - RNA, 22 nt, Human
cauuucuagacaaguccuggag

SEQ ID NO: 74740 - RNA, 22 nt, Human
cauuucucauaauauuagcacu

SEQ ID NO: 74741 - RNA, 22 nt, Human
cauuucuccgccgagaucacug

SEQ ID NO: 74742 - RNA, 22 nt, Human
ccagagggcccuggucucagcu

SEQ ID NO: 74743 - RNA, 22 nt, Human
ccagaggggcacaaaaguagaa

SEQ ID NO: 74744 - RNA, 22 nt, Human
ccagaggggugggccugguuua

SEQ ID NO: 74745 - RNA, 18 nt, Human
ccagagggugcgucagcu

SEQ ID NO: 74746 - RNA, 22 nt, Human
ccagagguccugcucacuggug

SEQ ID NO: 74747 - RNA, 22 nt, Human
ccagagguccugugaugcugca

SEQ ID NO: 74748 - RNA, 22 nt, Human
ccagaggugagggggauucuug

SEQ ID NO: 74749 - RNA, 22 nt, Human
ccagagguggugggugcuacag

SEQ ID NO: 74750 - RNA, 22 nt, Human
ccagaggugguggugucuagaa

SEQ ID NO: 74751 - RNA, 21 nt, Human
ccagagguucugggccucccu

SEQ ID NO: 74752 - RNA, 22 nt, Human
ccagagucaggagcucauguga

SEQ ID NO: 74753 - RNA, 19 nt, Human
ccagagucaugucuccccc

SEQ ID NO: 74754 - RNA, 22 nt, Human
ccagagucccuguucucggccu

SEQ ID NO: 74755 - RNA, 22 nt, Human
ccagagucccuugcagcucagu

SEQ ID NO: 74756 - RNA, 22 nt, Human
ccagagucugugugugucaucc

SEQ ID NO: 74757 - RNA, 19 nt, Human
ccagaguuggcagagcagg

SEQ ID NO: 74758 - RNA, 22 nt, Human
ccagauagaaaagaaggcagga

SEQ ID NO: 74759 - RNA, 22 nt, Human
ccagauagcaggucagaagugc

SEQ ID NO: 74760 - RNA, 22 nt, Human
ccagauaucacugccguguugu

SEQ ID NO: 74761 - RNA, 22 nt, Human
ccagaucuucuuuucagugucu

SEQ ID NO: 74762 - RNA, 22 nt, Human
ccagauggaaaugauguucuca

SEQ ID NO: 74763 - RNA, 22 nt, Human
ccagaugguauaguagggagag

SEQ ID NO: 74764 - RNA, 19 nt, Human
cuggcucuuggguggagga

SEQ ID NO: 74765 - RNA, 22 nt, Human
cuggcugacaccuugauagcag

SEQ ID NO: 74766 - RNA, 22 nt, Human
cuggcugaggcagagccugggg

SEQ ID NO: 74767 - RNA, 22 nt, Human
cuggcugaucucaaucauggcu

SEQ ID NO: 74768 - RNA, 22 nt, Human
cuggcugcaaaaucuauucacu

SEQ ID NO: 74769 - RNA, 22 nt, Human
cuggcugcauuggcaagucaau

SEQ ID NO: 74770 - RNA, 22 nt, Human
cuggcugcgucugcucugacag

SEQ ID NO: 74771 - RNA, 22 nt, Human
cuggcugcuggccugaggaugc

SEQ ID NO: 74772 - RNA, 22 nt, Human
cuggcuggccaugcagcgccag

SEQ ID NO: 74773 - RNA, 22 nt, Human
cuggcuggccggagcgaggcgg

SEQ ID NO: 74774 - RNA, 22 nt, Human
cuggcuggccggaggcaucccu

SEQ ID NO: 74775 - RNA, 22 nt, Human
cuggcuggcugugccccugccg

SEQ ID NO: 74776 - RNA, 22 nt, Human
cuggcugggaaguagaguaggu

SEQ ID NO: 74777 - RNA, 22 nt, Human
cuggcugggagcucgccugcgg

SEQ ID NO: 74778 - RNA, 22 nt, Human
cuggcugggcagacagaaugcu

SEQ ID NO: 74779 - RNA, 22 nt, Human
cuggcuggguuccaggauucca

SEQ ID NO: 74780 - RNA, 22 nt, Human
cuggcugguagaauugugaccu

SEQ ID NO: 74781 - RNA, 22 nt, Human
cuggcuggucugagcagucgca

SEQ ID NO: 74782 - RNA, 22 nt, Human
cuggcuguaagcguguuuccua

SEQ ID NO: 74783 - RNA, 22 nt, Human
cuggcuguauuaguuugauccu

SEQ ID NO: 74784 - RNA, 22 nt, Human
cuggcugugaaauggcaguguc

SEQ ID NO: 74785 - RNA, 22 nt, Human
cuggcugugcugacugagaggg

SEQ ID NO: 74786 - RNA, 22 nt, Human
cuggcuguguccacagaguaag

SEQ ID NO: 74787 - RNA, 22 nt, Human
cuggcuguuucaaauguauaga

SEQ ID NO: 74788 - RNA, 22 nt, Human
cuggcuucagcugccaucaaug

SEQ ID NO: 74789 - RNA, 22 nt, Human
cuggcuuccaugcuguaguggc

SEQ ID NO: 74790 - RNA, 22 nt, Human
cuggcuucccugucuuauggaa

SEQ ID NO: 74791 - RNA, 22 nt, Human
cuggcuuccugaguccauuacc

SEQ ID NO: 74792 - RNA, 22 nt, Human
cuggcuucugggccagggcaga

SEQ ID NO: 74793 - RNA, 22 nt, Human
cuggcuugaaguuaugcaccag

SEQ ID NO: 74794 - RNA, 22 nt, Human
cuggcuuuaccucacuggggcu

SEQ ID NO: 74795 - RNA, 22 nt, Human
cuggcuuucauucauucaggcc

SEQ ID NO: 74796 - RNA, 22 nt, Human
cuggcuuucugaacaucaguga

SEQ ID NO: 74797 - RNA, 22 nt, Human
cuggcuuuggaacaaaucauag

SEQ ID NO: 74798 - RNA, 22 nt, Human
cuggcuuuggucaugugaucau

SEQ ID NO: 74799 - RNA, 22 nt, Human
cuggcuuuuccuaaacugggaa

SEQ ID NO: 74800 - RNA, 22 nt, Human
cuggcuuuuuucccauuaugca

SEQ ID NO: 74801 - RNA, 22 nt, Human
cugggaaaacugugaccccugu

SEQ ID NO: 74802 - RNA, 22 nt, Human
cugggaaauggcuucgagcuca

SEQ ID NO: 74803 - RNA, 22 nt, Human
cugggaaauugacacugauaaa

SEQ ID NO: 74804 - RNA, 22 nt, Human
cugggaacuguacugccuugaa

SEQ ID NO: 74805 - RNA, 22 nt, Human
cugggaagaauccaagggcccu

SEQ ID NO: 74806 - RNA, 22 nt, Human
cugggaaggggaagguccucuc

SEQ ID NO: 74807 - RNA, 22 nt, Human
cugggaaguggugagggccuga

SEQ ID NO: 74808 - RNA, 22 nt, Human
cugggaccaucugugucuacuu

SEQ ID NO: 74809 - RNA, 19 nt, Human
cugggacuccugauaccuu

SEQ ID NO: 74810 - RNA, 22 nt, Human
cugggacuggguccucaggaca

SEQ ID NO: 74811 - RNA, 22 nt, Human
cugggagacgcagcuggggauc

SEQ ID NO: 74812 - RNA, 22 nt, Human
cugggagagacacuucugauua

SEQ ID NO: 74813 - RNA, 22 nt, Human
cugggagaggcugcuccgcucu

SEQ ID NO: 74814 - RNA, 22 nt, Human
cugggagauucaggugaaguuu

SEQ ID NO: 74815 - RNA, 22 nt, Human
cugggagauugaggccauggug

SEQ ID NO: 74816 - RNA, 22 nt, Human
cugggagcccugacuagccugg

SEQ ID NO: 74817 - RNA, 22 nt, Human
cugggagcggcugucacugguu

SEQ ID NO: 74818 - RNA, 22 nt, Human
cugggagcugucaggagcgugu

SEQ ID NO: 74819 - RNA, 22 nt, Human
cugggagcuuuuagaaaugcag

SEQ ID NO: 74820 - RNA, 22 nt, Human
cugggaggauucauugagguga

SEQ ID NO: 74821 - RNA, 22 nt, Human
cugggagucuaagcuagcaccg

SEQ ID NO: 74822 - RNA, 19 nt, Human
cugggaguucacugcugcc

SEQ ID NO: 74823 - RNA, 22 nt, Human
cugggaguugacgaggcuugua

SEQ ID NO: 74824 - RNA, 22 nt, Human
cugggaugcuccggccuggaug

SEQ ID NO: 74825 - RNA, 22 nt, Human
cugggauggcuccgcugcugcu

SEQ ID NO: 74826 - RNA, 22 nt, Human
cugggcacacagugacucugca

SEQ ID NO: 74827 - RNA, 22 nt, Human
cugggcacuugcucacagcucu

SEQ ID NO: 74828 - RNA, 22 nt, Human
cugggcagccucacacaauguu

SEQ ID NO: 74829 - RNA, 20 nt, Human
cugggcagguguuugaucuc

SEQ ID NO: 74830 - RNA, 22 nt, Human
cugggcagugguggcccuuccc

SEQ ID NO: 74831 - RNA, 22 nt, Human
cugggcauuuuucucuguuaca

SEQ ID NO: 74832 - RNA, 22 nt, Human
cugggccacaaaaaacuccugu

SEQ ID NO: 74833 - RNA, 22 nt, Human
cugggccagauccagccucaca

SEQ ID NO: 74834 - RNA, 22 nt, Human
cugggccaucagaggggcugga

SEQ ID NO: 74835 - RNA, 20 nt, Human
cugggccauccuuuuacaau

SEQ ID NO: 74836 - RNA, 22 nt, Human
cugggccaucuccuuugugugg

SEQ ID NO: 74837 - RNA, 22 nt, Human
cugggccauggaagucucugcc

SEQ ID NO: 74838 - RNA, 22 nt, Human
cugggcccaggcggcucucgga

SEQ ID NO: 74839 - RNA, 22 nt, Human
cugggccuagcaacagaggagu

SEQ ID NO: 74840 - RNA, 17 nt, Human
cugggccuccccugucc

SEQ ID NO: 74841 - RNA, 22 nt, Human
cugggccugggaggccaggucu

SEQ ID NO: 74842 - RNA, 22 nt, Human
cugggccugguguggcaccugc

SEQ ID NO: 74843 - RNA, 22 nt, Human
cugggccugucccugauugagg

SEQ ID NO: 74844 - RNA, 22 nt, Human
cugggcuacguguugacagcau

SEQ ID NO: 74845 - RNA, 22 nt, Human
cugggcucaccuguggcuggca

SEQ ID NO: 74846 - RNA, 22 nt, Human
cugggcucagcaggccaaggcc

SEQ ID NO: 74847 - RNA, 22 nt, Human
cugggcucagugucucacuccu

SEQ ID NO: 74848 - RNA, 22 nt, Human
cugggcuccacuacuugcuaac

SEQ ID NO: 74849 - RNA, 22 nt, Human
cugggcuccacucccacagugu

SEQ ID NO: 74850 - RNA, 22 nt, Human
cugggcucccucaugugucugc

SEQ ID NO: 74851 - RNA, 20 nt, Human
cugggcucgguggcccuggc

SEQ ID NO: 74852 - RNA, 22 nt, Human
cugggcucugcggugucgcucu

SEQ ID NO: 74853 - RNA, 22 nt, Human
cugggcucuguguuucaguuuc

SEQ ID NO: 74854 - RNA, 22 nt, Human
cugggcugcaggaguggggcaa

SEQ ID NO: 74855 - RNA, 22 nt, Human
ccagcuccugggucuuagucag

SEQ ID NO: 74856 - RNA, 22 nt, Human
ccagcucucaaggcucccuggg

SEQ ID NO: 74857 - RNA, 21 nt, Human
ccagcucugccuccaguuggu

SEQ ID NO: 74858 - RNA, 22 nt, Human
ccagcugcauccuauucacugc

SEQ ID NO: 74859 - RNA, 22 nt, Human
ccagcugcccaagaggcauccu

SEQ ID NO: 74860 - RNA, 21 nt, Human
ccagcugccugcacuuuggac

SEQ ID NO: 74861 - RNA, 18 nt, Human
ccagcugcgcugaaccga

SEQ ID NO: 74862 - RNA, 22 nt, Human
ccagcugcggucucccaaaguu

SEQ ID NO: 74863 - RNA, 22 nt, Human
ccagcugcuaucaugccauuuc

SEQ ID NO: 74864 - RNA, 21 nt, Human
ccagcugcuccuugagguucc

SEQ ID NO: 74865 - RNA, 22 nt, Human
ccagcuggaaacaaauagagug

SEQ ID NO: 74866 - RNA, 22 nt, Human
ccagcuggaagagugcagaacu

SEQ ID NO: 74867 - RNA, 22 nt, Human
ccagcuggagcucgcagauagg

SEQ ID NO: 74868 - RNA, 22 nt, Human
ccagcuggcacuguggcugccc

SEQ ID NO: 74869 - RNA, 22 nt, Human
ccagcuggcccagcugugcucc

SEQ ID NO: 74870 - RNA, 22 nt, Human
ccagcuggucugugcucauguu

SEQ ID NO: 74871 - RNA, 22 nt, Human
ccagcugguguuccuuaggacc

SEQ ID NO: 74872 - RNA, 22 nt, Human
ccagcugucugguuccagagcc

SEQ ID NO: 74873 - RNA, 23 nt, Human
ccacucucccaccauaucuguau

SEQ ID NO: 74874 - RNA, 21 nt, Human
ccacucugaguguugaacaga

SEQ ID NO: 74875 - RNA, 22 nt, Human
ccacucugauuggucaccucug

SEQ ID NO: 74876 - RNA, 22 nt, Human
ccacucugauuuuggcuccacu

SEQ ID NO: 74877 - RNA, 22 nt, Human
ccacugaaaaauuugagaugga

SEQ ID NO: 74878 - RNA, 22 nt, Human
ccacugaaggucaacauagagc

SEQ ID NO: 74879 - RNA, 17 nt, Human
ccacugacucugacuuc

SEQ ID NO: 74880 - RNA, 22 nt, Human
ccacugagcaguagcugcgucg

SEQ ID NO: 74881 - RNA, 22 nt, Human
ccacugagguuuugugguuaug

SEQ ID NO: 74882 - RNA, 22 nt, Human
ccacugaguacccgauggcugc

SEQ ID NO: 74883 - RNA, 23 nt, Human
ccacugaugcauuuucucucugu

SEQ ID NO: 74884 - RNA, 22 nt, Human
ccacugccagcuuuguccuccc

SEQ ID NO: 74885 - RNA, 22 nt, Human
ccacugcucugccaggagcugg

SEQ ID NO: 74886 - RNA, 22 nt, Human
ccacuggagacuggucucugug

SEQ ID NO: 74887 - RNA, 22 nt, Human
ccacuggcauccagcugccauc

SEQ ID NO: 74888 - RNA, 22 nt, Human
ccacuggcugucagcaggacuc

SEQ ID NO: 74889 - RNA, 19 nt, Human
ccacuggggcuccacauua

SEQ ID NO: 74890 - RNA, 22 nt, Human
ccacuguauaagcaaaaugaaa

SEQ ID NO: 74891 - RNA, 22 nt, Human
ccacuuaagagaacagcuauag

SEQ ID NO: 74892 - RNA, 22 nt, Human
ccacuuccugcagguaaggagc

SEQ ID NO: 74893 - RNA, 22 nt, Human
ccacuugaaacuuaguggcaua

SEQ ID NO: 74894 - RNA, 22 nt, Human
ccacuuucugagggaacagcag

SEQ ID NO: 74895 - RNA, 22 nt, Human
ccacuuugaaccacugaggugg

SEQ ID NO: 74896 - RNA, 19 nt, Human
ccacuuugcagauagugag

SEQ ID NO: 74897 - RNA, 18 nt, Human
ccacuuugcagccuggcc

SEQ ID NO: 74898 - RNA, 22 nt, Human
ccacuuuguaauguguuauguu

SEQ ID NO: 74899 - RNA, 22 nt, Human
ccacuuuucuacccacugugac

SEQ ID NO: 74900 - RNA, 22 nt, Human
ccacuuuugggaacagugagua

SEQ ID NO: 74901 - RNA, 22 nt, Human
ccagaaaagcaucugguucuuu

SEQ ID NO: 74902 - RNA, 22 nt, Human
ccagaaaaugcagaacauagaa

SEQ ID NO: 74903 - RNA, 22 nt, Human
ccagaaagauaggaaaucaagu

SEQ ID NO: 74904 - RNA, 22 nt, Human
ccagaagaacuuaauucaaaac

SEQ ID NO: 74905 - RNA, 22 nt, Human
ccagaagacaagaauguucuua

SEQ ID NO: 74906 - RNA, 20 nt, Human
ccagaagagaugaucaucca

SEQ ID NO: 74907 - RNA, 22 nt, Human
ccagaagcuucuacacaggaga

SEQ ID NO: 74908 - RNA, 22 nt, Human
ccagaagggcuauugcagugac

SEQ ID NO: 74909 - RNA, 22 nt, Human
ccagaagucaaguaagaugaag

SEQ ID NO: 74910 - RNA, 22 nt, Human
ccagaagucaaugcagauguga

SEQ ID NO: 74911 - RNA, 22 nt, Human
ccagaauagaaugaaagaaggg

SEQ ID NO: 74912 - RNA, 22 nt, Human
ccagaauaggaguaauaaaacc

SEQ ID NO: 74913 - RNA, 22 nt, Human
ccagaauccaaaacguuuugag

SEQ ID NO: 74914 - RNA, 22 nt, Human
ccagacaggaacacacaucucc

SEQ ID NO: 74915 - RNA, 22 nt, Human
ccagaccagacugacuugagcc

SEQ ID NO: 74916 - RNA, 22 nt, Human
ccagacccugcucuggggcucu

SEQ ID NO: 74917 - RNA, 22 nt, Human
ccagacccuuucuuggcaugug

SEQ ID NO: 74918 - RNA, 21 nt, Human
ccagacucagaaguuuaacca

SEQ ID NO: 74919 - RNA, 22 nt, Human
ccagacugagggucccugagcu

SEQ ID NO: 74920 - RNA, 22 nt, Human
ccagacuggggcuccuugaggg

SEQ ID NO: 74921 - RNA, 22 nt, Human
ccagacuuuuaguagugaguua

SEQ ID NO: 74922 - RNA, 22 nt, Human
ccagagaaagguuugauucauu

SEQ ID NO: 74923 - RNA, 22 nt, Human
ccagagaaauaaggggaaaaug

SEQ ID NO: 74924 - RNA, 22 nt, Human
ccagagaaccaucugcuugagg

SEQ ID NO: 74925 - RNA, 22 nt, Human
ccagagaagaaaagcaccuuuu

SEQ ID NO: 74926 - RNA, 22 nt, Human
ccagagaauuuuagacaaaaau

SEQ ID NO: 74927 - RNA, 22 nt, Human
ccagagacgucggucagggcgc

SEQ ID NO: 74928 - RNA, 21 nt, Human
ccagagagagggaaguggguu

SEQ ID NO: 74929 - RNA, 22 nt, Human
ccagagagcuacaaggcauaaa

SEQ ID NO: 74930 - RNA, 22 nt, Human
ccagagaggcaaaacuccuucc

SEQ ID NO: 74931 - RNA, 22 nt, Human
ccagagauguucacauucuaau

SEQ ID NO: 74932 - RNA, 22 nt, Human
ccagagccagagaggugccugc

SEQ ID NO: 74933 - RNA, 22 nt, Human
ccagagcuaaacacacaggcug

SEQ ID NO: 74934 - RNA, 23 nt, Human
ccagagcucuuucaugcuuccau

SEQ ID NO: 74935 - RNA, 22 nt, Human
ccagagcugcagguaaaaugcu

SEQ ID NO: 74936 - RNA, 18 nt, Human
ccagagcuggcuccucgc

SEQ ID NO: 74937 - RNA, 22 nt, Human
ccagaggaggggggucuuucug

SEQ ID NO: 74938 - RNA, 22 nt, Human
ccagaggaugcuggucagccuc

SEQ ID NO: 74939 - RNA, 21 nt, Human
ccagaggccucucuuggccac

SEQ ID NO: 74940 - RNA, 16 nt, Human
ccagaggccuggccuc

SEQ ID NO: 74941 - RNA, 22 nt, Human
ccagaggcggagguuugcagug

SEQ ID NO: 74942 - RNA, 22 nt, Human
ccagaggcuggcaagggcuccu

SEQ ID NO: 74943 - RNA, 22 nt, Human
ccagagggacguuaccaguuca

SEQ ID NO: 74944 - RNA, 22 nt, Human
ccagaggggcugagcaggucac

SEQ ID NO: 74945 - RNA, 20 nt, Human
ccagaggguagggccgcccc

SEQ ID NO: 74946 - RNA, 22 nt, Human
ccagagguccccugccaggagg

SEQ ID NO: 74947 - RNA, 22 nt, Human
ccagaggugaacaggaggcugu

SEQ ID NO: 74948 - RNA, 22 nt, Human
ccagagguuacuuugccuugga

SEQ ID NO: 74949 - RNA, 19 nt, Human
ccagagguuugcugggccu

SEQ ID NO: 74950 - RNA, 22 nt, Human
ccagagugacgugaagugugaa

SEQ ID NO: 74951 - RNA, 22 nt, Human
ccagauagggaugagagugcua

SEQ ID NO: 74952 - RNA, 22 nt, Human
ccagaugagaccacacugcugg

SEQ ID NO: 74953 - RNA, 19 nt, Human
ccagaugagcagcugagau

SEQ ID NO: 74954 - RNA, 21 nt, Human
ccagaugcaaaugcagacauu

SEQ ID NO: 74955 - RNA, 17 nt, Human
ccagaugcccugucucc

SEQ ID NO: 74956 - RNA, 20 nt, Human
ccagauggucccugugaaaa

SEQ ID NO: 74957 - RNA, 22 nt, Human
ccagcaagugcagauggccaag

SEQ ID NO: 74958 - RNA, 22 nt, Human
ccagcacuccugucucaagucu

SEQ ID NO: 74959 - RNA, 22 nt, Human
ccagcacucuauugaauauucu

SEQ ID NO: 74960 - RNA, 19 nt, Human
ccagcagaagccacuccug

SEQ ID NO: 74961 - RNA, 22 nt, Human
ccagcagagcucaaacuuccug

SEQ ID NO: 74962 - RNA, 22 nt, Human
ccagcagagggucuuggccauu

SEQ ID NO: 74963 - RNA, 22 nt, Human
ccagcagcccacaggcgucccu

SEQ ID NO: 74964 - RNA, 22 nt, Human
ccagcagcuuuauuggcucucc

SEQ ID NO: 74965 - RNA, 22 nt, Human
ccagcaggaaagugacguuuga

SEQ ID NO: 74966 - RNA, 22 nt, Human
ccagcaggagacuagcaacaua

SEQ ID NO: 74967 - RNA, 19 nt, Human
ccagcagguucauuucagg

SEQ ID NO: 74968 - RNA, 22 nt, Human
ccagcaucccugggguuggcca

SEQ ID NO: 74969 - RNA, 22 nt, Human
ccagcaucuaacgcuccuggga

SEQ ID NO: 74970 - RNA, 18 nt, Human
ccagcaugccagaggcug

SEQ ID NO: 74971 - RNA, 22 nt, Human
ccagcauggcaccugagaugag

SEQ ID NO: 74972 - RNA, 22 nt, Human
ccagcauuugcuucuggugggg

SEQ ID NO: 74973 - RNA, 22 nt, Human
ccagccagcaagcucccaguuc

SEQ ID NO: 74974 - RNA, 22 nt, Human
ccagccaggcauugcaaacuga

SEQ ID NO: 74975 - RNA, 23 nt, Human
cuguaugauguuaaguggaaagc

SEQ ID NO: 74976 - RNA, 22 nt, Human
cuguaugguccacgugggugcc

SEQ ID NO: 74977 - RNA, 22 nt, Human
cuguauuaaaggcagugaucuu

SEQ ID NO: 74978 - RNA, 22 nt, Human
cuguauucaagcuucugcccaa

SEQ ID NO: 74979 - RNA, 22 nt, Human
cuguauuuguccucuauuuauu

SEQ ID NO: 74980 - RNA, 22 nt, Human
cugucaaagacuaagguucuua

SEQ ID NO: 74981 - RNA, 22 nt, Human
cugucaaauggaaacuuauccu

SEQ ID NO: 74982 - RNA, 22 nt, Human
cugucaaauucauaacacuuau

SEQ ID NO: 74983 - RNA, 22 nt, Human
ccgcccacacuaaauaugagcg

SEQ ID NO: 74984 - RNA, 22 nt, Human
ccgcggggcgugggcucuuacc

SEQ ID NO: 74985 - RNA, 22 nt, Human
ccggcaaaggccccuuccccag

SEQ ID NO: 74986 - RNA, 22 nt, Human
ccggcgucucuuccacuuccua

SEQ ID NO: 74987 - RNA, 22 nt, Human
ccgggagacuuugagcaccaug

SEQ ID NO: 74988 - RNA, 22 nt, Human
ccguauguucagauuugucaau

SEQ ID NO: 74989 - RNA, 22 nt, Human
ccguggcuucccaggcggaugu

SEQ ID NO: 74990 - RNA, 22 nt, Human
ccguguguaugguggaacugcu

SEQ ID NO: 74991 - RNA, 22 nt, Human
ccuaacuuucauuaggccccag

SEQ ID NO: 74992 - RNA, 18 nt, Human
ccuaagcuccagccccag

SEQ ID NO: 74993 - RNA, 21 nt, Human
ccuacagauggauauauauuc

SEQ ID NO: 74994 - RNA, 22 nt, Human
ccuacucugagcgccuccgcau

SEQ ID NO: 74995 - RNA, 22 nt, Human
ccuacuuagcauauuuucucuu

SEQ ID NO: 74996 - RNA, 22 nt, Human
ccuagacauuaagcuuggguuu

SEQ ID NO: 74997 - RNA, 22 nt, Human
cuugccugggacugaggcauuu

SEQ ID NO: 74998 - RNA, 22 nt, Human
cuugccuucuuuuccuauagaa

SEQ ID NO: 74999 - RNA, 22 nt, Human
cuugcuggaaacucucucugcc

SEQ ID NO: 75000 - RNA, 22 nt, Human
cuugcugggguaagucugugcu

SEQ ID NO: 75001 - RNA, 22 nt, Human
cuugcuggugguguuuucuaug

SEQ ID NO: 75002 - RNA, 22 nt, Human
cuugcuguugugggagacuggg

SEQ ID NO: 75003 - RNA, 22 nt, Human
cuugcuugccaugggcuugggc

SEQ ID NO: 75004 - RNA, 22 nt, Human
cuugcuuuugcugaugauuaag

SEQ ID NO: 75005 - RNA, 22 nt, Human
cuuggaaucaaguuuuuggaga

SEQ ID NO: 75006 - RNA, 22 nt, Human
cuuggaauggggcagaaaaugg

SEQ ID NO: 75007 - RNA, 22 nt, Human
cuuggacuuccaggaaguauuu

SEQ ID NO: 75008 - RNA, 22 nt, Human
cuuggagacauugaucuuuugc

SEQ ID NO: 75009 - RNA, 22 nt, Human
cuuggagagugguuaucccugu

SEQ ID NO: 75010 - RNA, 22 nt, Human
cuuggagauacagaggacauuu

SEQ ID NO: 75011 - RNA, 22 nt, Human
cuuggagcccagcaggccugga

SEQ ID NO: 75012 - RNA, 22 nt, Human
cuuggaggagguggugcuugau

SEQ ID NO: 75013 - RNA, 22 nt, Human
cuuggagguggaaguugcagug

SEQ ID NO: 75014 - RNA, 22 nt, Human
cuuggauuugggcccuuaaauu

SEQ ID NO: 75015 - RNA, 21 nt, Human
cuuggcacagggaagaugcac

SEQ ID NO: 75016 - RNA, 22 nt, Human
cuuggcacuugggcagugagca

SEQ ID NO: 75017 - RNA, 22 nt, Human
cuuggcagagggcugggcucag

SEQ ID NO: 75018 - RNA, 22 nt, Human
cuuggcaguuucggaaggauga

SEQ ID NO: 75019 - RNA, 22 nt, Human
cuuggcuccaaucccagcucug

SEQ ID NO: 75020 - RNA, 17 nt, Human
cuuggcugcugugcgau

SEQ ID NO: 75021 - RNA, 22 nt, Human
cuuggcugucauaagguccugg

SEQ ID NO: 75022 - RNA, 22 nt, Human
cuuggcugucuauaggaaagag

SEQ ID NO: 75023 - RNA, 19 nt, Human
cuuggcuuagcuucuuagc

SEQ ID NO: 75024 - RNA, 22 nt, Human
cuuggcuuuugcucccagauca

SEQ ID NO: 75025 - RNA, 22 nt, Human
cuugggaguagaggcaggagca

SEQ ID NO: 75026 - RNA, 22 nt, Human
cuugggcuauaaauauaaccau

SEQ ID NO: 75027 - RNA, 22 nt, Human
cuugggcucagcaccgugugga

SEQ ID NO: 75028 - RNA, 22 nt, Human
cuugggcucugugggccuuagu

SEQ ID NO: 75029 - RNA, 22 nt, Human
cuuggggaggacgcaguguccu

SEQ ID NO: 75030 - RNA, 22 nt, Human
cuuggggcuuuguguguaggau

SEQ ID NO: 75031 - RNA, 22 nt, Human
cuuggguauaaaacuuggcuau

SEQ ID NO: 75032 - RNA, 22 nt, Human
cuugggucuguccugcugugca

SEQ ID NO: 75033 - RNA, 22 nt, Human
cuuggucuauaggagagauugu

SEQ ID NO: 75034 - RNA, 22 nt, Human
cuuggucuugggagcagggaca

SEQ ID NO: 75035 - RNA, 22 nt, Human
cuuggugcaggggacagggcaa

SEQ ID NO: 75036 - RNA, 22 nt, Human
cuugguuauacuccaggaacca

SEQ ID NO: 75037 - RNA, 22 nt, Human
cuuguaaaagguacauuaugcu

SEQ ID NO: 75038 - RNA, 22 nt, Human
cuuguaaaauauccaguuaagg

SEQ ID NO: 75039 - RNA, 19 nt, Human
cuuguaaagggcuguuucu

SEQ ID NO: 75040 - RNA, 22 nt, Human
cuuguaauuauaauguacuguu

SEQ ID NO: 75041 - RNA, 22 nt, Human
cuuguacagaucuugcaaggac

SEQ ID NO: 75042 - RNA, 22 nt, Human
cuuguacauugauuucugcauu

SEQ ID NO: 75043 - RNA, 22 nt, Human
cuuguagcugacuaucuuguuc

SEQ ID NO: 75044 - RNA, 22 nt, Human
cuuguauuaagcuuagagaggc

SEQ ID NO: 75045 - RNA, 22 nt, Human
cuuguauuaggaagaaugcuuu

SEQ ID NO: 75046 - RNA, 22 nt, Human
cuuguauuccccuaucucuaaa

SEQ ID NO: 75047 - RNA, 22 nt, Human
cuugucugauaauggggccaac

SEQ ID NO: 75048 - RNA, 21 nt, Human
cuugucugcaguguuuauagc

SEQ ID NO: 75049 - RNA, 22 nt, Human
cuugugcauaagaagaccugag

SEQ ID NO: 75050 - RNA, 22 nt, Human
cuuguggcccauggcuuccugc

SEQ ID NO: 75051 - RNA, 22 nt, Human
cuuguguggucuggucuugcua

SEQ ID NO: 75052 - RNA, 22 nt, Human
cuuguuaaaaugccgauucuga

SEQ ID NO: 75053 - RNA, 20 nt, Human
cuuguuaaauaugcagguag

SEQ ID NO: 75054 - RNA, 23 nt, Human
cuuguuauaagaagacugucugg

SEQ ID NO: 75055 - RNA, 22 nt, Human
cuuguuaucugaaccaaaauua

SEQ ID NO: 75056 - RNA, 22 nt, Human
cuuguuauuggaaaugucaugc

SEQ ID NO: 75057 - RNA, 18 nt, Human
cuuguucuucucuuggcg

SEQ ID NO: 75058 - RNA, 20 nt, Human
cuuguugauucuaggaauga

SEQ ID NO: 75059 - RNA, 22 nt, Human
cuuguugcaaacauucacucca

SEQ ID NO: 75060 - RNA, 22 nt, Human
cuuguugcuaacauaugcuucu

SEQ ID NO: 75061 - RNA, 22 nt, Human
cuuguuugauuauugccugagg

SEQ ID NO: 75062 - RNA, 17 nt, Human
cuuguuuuccacuggga

SEQ ID NO: 75063 - RNA, 22 nt, Human
cuuguuuucuaaaacaucauuu

SEQ ID NO: 75064 - RNA, 22 nt, Human
cuuguuuuggaacagagugaau

SEQ ID NO: 75065 - RNA, 22 nt, Human
cuuuaagacuaaauuagaguuu

SEQ ID NO: 75066 - RNA, 22 nt, Human
cuuuaaugagucuuucugcugu

SEQ ID NO: 75067 - RNA, 22 nt, Human
cuuuaauuaggaaguauaauga

SEQ ID NO: 75068 - RNA, 22 nt, Human
cuuuacaaauagggagggagug

SEQ ID NO: 75069 - RNA, 22 nt, Human
cuuuacaaauuagcucucggga

SEQ ID NO: 75070 - RNA, 22 nt, Human
cuuuacagccccacuuccgggc

SEQ ID NO: 75071 - RNA, 22 nt, Human
cuuuacagccuccagaaggaac

SEQ ID NO: 75072 - RNA, 22 nt, Human
cuuuacuguucuucugugggaa

SEQ ID NO: 75073 - RNA, 22 nt, Human
cuuuagaauuucauguuugguc

SEQ ID NO: 75074 - RNA, 22 nt, Human
cuuuagaauuugauauaaucaa

SEQ ID NO: 75075 - RNA, 22 nt, Human
cuuuagauguugcuuuaacuau

SEQ ID NO: 75076 - RNA, 22 nt, Human
cuuuagauuucuauguaucacu

SEQ ID NO: 75077 - RNA, 21 nt, Human
cuuuagugaaaaggggcuaac

SEQ ID NO: 75078 - RNA, 22 nt, Human
cuuuaguuauuuagacuacagu

SEQ ID NO: 75079 - RNA, 22 nt, Human
cuuuaguucuaaugcauugaaa

SEQ ID NO: 75080 - RNA, 22 nt, Human
cuuuaguucuagaaagugaaac

SEQ ID NO: 75081 - RNA, 22 nt, Human
cuuuaguuguaucagucaaguu

SEQ ID NO: 75082 - RNA, 22 nt, Human
cuuuaguuguuauuucuucaca

SEQ ID NO: 75083 - RNA, 22 nt, Human
cuuuaguuugugauacgaagau

SEQ ID NO: 75084 - RNA, 22 nt, Human
cuuuauauccagauguuuggug

SEQ ID NO: 75085 - RNA, 22 nt, Human
cuuuaucauggagguaaauaug

SEQ ID NO: 75086 - RNA, 22 nt, Human
cuuuaugaaaaccagauugggg

SEQ ID NO: 75087 - RNA, 22 nt, Human
cuuuaugagccuugugaaggag

SEQ ID NO: 75088 - RNA, 22 nt, Human
cuuuauggagugacacaauggg

SEQ ID NO: 75089 - RNA, 22 nt, Human
cuuuauguccuugaagaguugu

SEQ ID NO: 75090 - RNA, 18 nt, Human
cuuuaugugcagagcuuu

SEQ ID NO: 75091 - RNA, 22 nt, Human
cuuuaugugcugggcauuaagg

SEQ ID NO: 75092 - RNA, 19 nt, Human
cccaggaggcggagguugc

SEQ ID NO: 75093 - RNA, 22 nt, Human
cccaggagguagagguugcagu

SEQ ID NO: 75094 - RNA, 22 nt, Human
cccaggagguggagcuugcagu

SEQ ID NO: 75095 - RNA, 22 nt, Human
cccaggagguggagguugcagc

SEQ ID NO: 75096 - RNA, 22 nt, Human
cccaggagguguagcugcgugg

SEQ ID NO: 75097 - RNA, 22 nt, Human
cccaggagguuggggcuacagu

SEQ ID NO: 75098 - RNA, 22 nt, Human
cccaggaguaagugacauuguu

SEQ ID NO: 75099 - RNA, 19 nt, Human
cccaggagucuggcugguu

SEQ ID NO: 75100 - RNA, 22 nt, Human
cccaggaguuagagguuguggu

SEQ ID NO: 75101 - RNA, 22 nt, Human
cccaggaguuugaguucagcau

SEQ ID NO: 75102 - RNA, 22 nt, Human
cccaggaucaccuggucaaggg

SEQ ID NO: 75103 - RNA, 22 nt, Human
cccaggcacaccccgaacggaa

SEQ ID NO: 75104 - RNA, 22 nt, Human
cccaggcagaauuaguguuuca

SEQ ID NO: 75105 - RNA, 22 nt, Human
cccaggcagucuggcucuaaag

SEQ ID NO: 75106 - RNA, 22 nt, Human
cccaggcagugcugaucccuca

SEQ ID NO: 75107 - RNA, 22 nt, Human
cccaggcagugugugcaugcgu

SEQ ID NO: 75108 - RNA, 22 nt, Human
cccaggcaucccauuaaggagc

SEQ ID NO: 75109 - RNA, 22 nt, Human
cccaggccagaacuugguugcu

SEQ ID NO: 75110 - RNA, 22 nt, Human
cccaggcucccaggugggacaa

SEQ ID NO: 75111 - RNA, 22 nt, Human
cccaggcuccuagaggcccaga

SEQ ID NO: 75112 - RNA, 22 nt, Human
cuuuccuuaauaagcagguaua

SEQ ID NO: 75113 - RNA, 23 nt, Human
cuuuccuuucuuugacacccagc

SEQ ID NO: 75114 - RNA, 22 nt, Human
cuuucgaucaagggucccuuca

SEQ ID NO: 75115 - RNA, 22 nt, Human
cuuucuaauucucccauagucu

SEQ ID NO: 75116 - RNA, 22 nt, Human
cuuucuagacuguccagaugau

SEQ ID NO: 75117 - RNA, 22 nt, Human
cuuucuaguugacagcaugcca

SEQ ID NO: 75118 - RNA, 20 nt, Human
cuuucucuaauuuauaagua

SEQ ID NO: 75119 - RNA, 22 nt, Human
cuuucucuguggugaggagggu

SEQ ID NO: 75120 - RNA, 22 nt, Human
cuuucucuguguuucacaugcu

SEQ ID NO: 75121 - RNA, 22 nt, Human
cuuucugaaguuuaaguucuaa

SEQ ID NO: 75122 - RNA, 22 nt, Human
cuuucugauuuuaagcucuaau

SEQ ID NO: 75123 - RNA, 22 nt, Human
cuuucuuucgaagacgugauua

SEQ ID NO: 75124 - RNA, 22 nt, Human
cuuucuuugcagugagccagag

SEQ ID NO: 75125 - RNA, 22 nt, Human
cuuugaaaggaagccacacagc

SEQ ID NO: 75126 - RNA, 22 nt, Human
cuuugaagaucacauguugcuc

SEQ ID NO: 75127 - RNA, 22 nt, Human
cuuugagcaauucugagaugca

SEQ ID NO: 75128 - RNA, 22 nt, Human
cuuugaucuacucacuaaacaa

SEQ ID NO: 75129 - RNA, 22 nt, Human
cuuugauuaucggugugaaugu

SEQ ID NO: 75130 - RNA, 22 nt, Human
cuuugauucagagagaauuagc

SEQ ID NO: 75131 - RNA, 22 nt, Human
cuuugcaaacugucacacuuuc

SEQ ID NO: 75132 - RNA, 21 nt, Human
cuuugcaagaugucuaugaaa

SEQ ID NO: 75133 - RNA, 22 nt, Human
cuuugcagaaauaaacuugaug

SEQ ID NO: 75134 - RNA, 22 nt, Human
cuuugcagaagaaaccuacaaa

SEQ ID NO: 75135 - RNA, 22 nt, Human
cuuugcauucucagcacagagc

SEQ ID NO: 75136 - RNA, 19 nt, Human
cuuugccaaaagaggccau

SEQ ID NO: 75137 - RNA, 20 nt, Human
cuuugccuauucucugccug

SEQ ID NO: 75138 - RNA, 22 nt, Human
cuuugccuccuagagcacguuc

SEQ ID NO: 75139 - RNA, 22 nt, Human
cuuugcuaguguuucaguagac

SEQ ID NO: 75140 - RNA, 22 nt, Human
cuuugcuugacacugugauugu

SEQ ID NO: 75141 - RNA, 22 nt, Human
cuuuggaaaaauaccuggcaua

SEQ ID NO: 75142 - RNA, 22 nt, Human
cuuuggaaaguaagcagcuaga

SEQ ID NO: 75143 - RNA, 22 nt, Human
cuuuggaacauacugcugagcu

SEQ ID NO: 75144 - RNA, 22 nt, Human
cuuuggaaggcagagcucugug

SEQ ID NO: 75145 - RNA, 22 nt, Human
cuuuggaaucauugcuuauuca

SEQ ID NO: 75146 - RNA, 20 nt, Human
cuuuggagaaagaugcaaua

SEQ ID NO: 75147 - RNA, 22 nt, Human
cuuuggaguucccuaauuuccc

SEQ ID NO: 75148 - RNA, 22 nt, Human
cuuuggcaugguccucacuaua

SEQ ID NO: 75149 - RNA, 22 nt, Human
cuuuggcugcauucgaguugcu

SEQ ID NO: 75150 - RNA, 22 nt, Human
cuuuggcuguccucuuggcugg

SEQ ID NO: 75151 - RNA, 22 nt, Human
cuuuggcuuuuagauauccauu

SEQ ID NO: 75152 - RNA, 22 nt, Human
cuuuggucuccgucaucaauca

SEQ ID NO: 75153 - RNA, 22 nt, Human
cuuugguggaggggugcaggca

SEQ ID NO: 75154 - RNA, 22 nt, Human
cuuugguucuguccuucccaga

SEQ ID NO: 75155 - RNA, 22 nt, Human
cuuuguagcugcuucugauuua

SEQ ID NO: 75156 - RNA, 22 nt, Human
cuuuguauucaguugggcugug

SEQ ID NO: 75157 - RNA, 22 nt, Human
cuuugugcguagugagugguca

SEQ ID NO: 75158 - RNA, 22 nt, Human
cuuuguggcuccugcaggccau

SEQ ID NO: 75159 - RNA, 22 nt, Human
cuuugugucuguuaauaauuau

SEQ ID NO: 75160 - RNA, 22 nt, Human
cuuuguuaggggcucagggugg

SEQ ID NO: 75161 - RNA, 22 nt, Human
cuuuguuaucuguaaaugguua

SEQ ID NO: 75162 - RNA, 22 nt, Human
cuuuguucugccaauggcccau

SEQ ID NO: 75163 - RNA, 22 nt, Human
cuuuguuguuaauuggcgcuua

SEQ ID NO: 75164 - RNA, 17 nt, Human
cuuuuaauuuacuuccc

SEQ ID NO: 75165 - RNA, 21 nt, Human
cuuuuacauucagucaugaug

SEQ ID NO: 75166 - RNA, 22 nt, Human
cuuuucacaggaggauaagccc

SEQ ID NO: 75167 - RNA, 22 nt, Human
cuuuucauuguuuguacaugca

SEQ ID NO: 75168 - RNA, 22 nt, Human
cuuuuccuauugauucuguuac

SEQ ID NO: 75169 - RNA, 22 nt, Human
cuuuucuagagccgcagcccua

SEQ ID NO: 75170 - RNA, 22 nt, Human
cuuuucucuguaccguauaucu

SEQ ID NO: 75171 - RNA, 22 nt, Human
cuuuucugagagggccaagauu

SEQ ID NO: 75172 - RNA, 22 nt, Human
cuuuucuggccaggaacuugcc

SEQ ID NO: 75173 - RNA, 22 nt, Human
cuuuucuuguauuggaugcccc

SEQ ID NO: 75174 - RNA, 22 nt, Human
cuuuugauggaguucaagaagc

SEQ ID NO: 75175 - RNA, 22 nt, Human
cuuuugcagccauuauugcugc

SEQ ID NO: 75176 - RNA, 22 nt, Human
cuuuuggccucaaaggaaagaa

SEQ ID NO: 75177 - RNA, 22 nt, Human
cuuuuguugcccuugucgcagg

SEQ ID NO: 75178 - RNA, 22 nt, Human
cuuuuuacaaagccugucuucu

SEQ ID NO: 75179 - RNA, 22 nt, Human
cuuuuuauaccgugccaguuga

SEQ ID NO: 75180 - RNA, 22 nt, Human
cuuuuuaucucuuaaugauguu

SEQ ID NO: 75181 - RNA, 22 nt, Human
cuuuuuccagcuucaggguggg

SEQ ID NO: 75182 - RNA, 20 nt, Human
cuuuuucuccagcucugagc

SEQ ID NO: 75183 - RNA, 16 nt, Human
cuuuuucuccccucuu

SEQ ID NO: 75184 - RNA, 22 nt, Human
cuuuuucuucuaggugugccug

SEQ ID NO: 75185 - RNA, 22 nt, Human
cuuuuuuaagguagcuccuccu

SEQ ID NO: 75186 - RNA, 22 nt, Human
gaaaacacuuugaucugaaagu

SEQ ID NO: 75187 - RNA, 22 nt, Human
gaaaacauccagagauagaccu

SEQ ID NO: 75188 - RNA, 22 nt, Human
gaaaagagaacaucugaggauc

SEQ ID NO: 75189 - RNA, 22 nt, Human
gaaaaggccacuccuaggagcu

SEQ ID NO: 75190 - RNA, 22 nt, Human
gaaaaggccuccccauaggaau

SEQ ID NO: 75191 - RNA, 22 nt, Human
gaaaaggcucucacucccuccg

SEQ ID NO: 75192 - RNA, 22 nt, Human
gaaaaggcugcccacuuauuga

SEQ ID NO: 75193 - RNA, 22 nt, Human
gaaaaguucaucauauauucag

SEQ ID NO: 75194 - RNA, 22 nt, Human
gaaaauacaaauagccuugaaa

SEQ ID NO: 75195 - RNA, 21 nt, Human
gaaaauacaaugagcuugacc

SEQ ID NO: 75196 - RNA, 18 nt, Human
gaaaauacucugggcuca

SEQ ID NO: 75197 - RNA, 22 nt, Human
gaaaaucugcuuauauuauuuu

SEQ ID NO: 75198 - RNA, 22 nt, Human
gaaaaugccucuggcauuaaac

SEQ ID NO: 75199 - RNA, 22 nt, Human
gaaaauguuagcuucauaguca

SEQ ID NO: 75200 - RNA, 22 nt, Human
gaaaauguuuguccggagcuga

SEQ ID NO: 75201 - RNA, 22 nt, Human
gaacauucuuggaggaaauaac

SEQ ID NO: 75202 - RNA, 22 nt, Human
gaacauugcuuuauuucuucua

SEQ ID NO: 75203 - RNA, 22 nt, Human
gaacauuuccagaaaggaacua

SEQ ID NO: 75204 - RNA, 22 nt, Human
gaacauuuggauuuguaaauuu

SEQ ID NO: 75205 - RNA, 22 nt, Human
gaacauuuggcaugagaauuug

SEQ ID NO: 75206 - RNA, 22 nt, Human
gaaccacaagauucaaaggggu

SEQ ID NO: 75207 - RNA, 22 nt, Human
gaacccaaaccuggaccucccu

SEQ ID NO: 75208 - RNA, 22 nt, Human
gaacccaaccucacuuggggua

SEQ ID NO: 75209 - RNA, 22 nt, Human
gaacccaggagguugcagugag

SEQ ID NO: 75210 - RNA, 22 nt, Human
gaacccaggcuuuugaggcugu

SEQ ID NO: 75211 - RNA, 22 nt, Human
gaaccccaacuuauaagacaga

SEQ ID NO: 75212 - RNA, 22 nt, Human
gaaccucuuuagugcauccuuc

SEQ ID NO: 75213 - RNA, 22 nt, Human
gaaccugauccaauauuuacuc

SEQ ID NO: 75214 - RNA, 22 nt, Human
gaaccuggcagcccuauaucug

SEQ ID NO: 75215 - RNA, 22 nt, Human
gaaccuguuuauguuaccugcg

SEQ ID NO: 75216 - RNA, 22 nt, Human
gaacuaaaugaaauuacuggug

SEQ ID NO: 75217 - RNA, 22 nt, Human
gaacuauucauucucauuagcg

SEQ ID NO: 75218 - RNA, 22 nt, Human
gaacucagagccugagcuagga

SEQ ID NO: 75219 - RNA, 22 nt, Human
gaacucuugcagugaaagcuua

SEQ ID NO: 75220 - RNA, 22 nt, Human
gaacugaguuuucugccuggac

SEQ ID NO: 75221 - RNA, 22 nt, Human
gaacuggguccuugagucuaga

SEQ ID NO: 75222 - RNA, 22 nt, Human
gaacugguuacagagggauguu

SEQ ID NO: 75223 - RNA, 22 nt, Human
gaacuguaguuaauacuacaca

SEQ ID NO: 75224 - RNA, 22 nt, Human
gaacuguggguaauauauuaga

SEQ ID NO: 75225 - RNA, 22 nt, Human
gaacuguguacauuguagauaa

SEQ ID NO: 75226 - RNA, 22 nt, Human
gaacuuaguagucuacuucuua

SEQ ID NO: 75227 - RNA, 22 nt, Human
gaacuucacgauagccaaagcu

SEQ ID NO: 75228 - RNA, 22 nt, Human
gaacuucagaaucagcauaucu

SEQ ID NO: 75229 - RNA, 22 nt, Human
gaacuucuucaacauaauggac

SEQ ID NO: 75230 - RNA, 22 nt, Human
gaacuugggagaagggagugug

SEQ ID NO: 75231 - RNA, 20 nt, Human
gaacuugggcaaguggcuua

SEQ ID NO: 75232 - RNA, 22 nt, Human
gaacuugguauuccuuuuaaca

SEQ ID NO: 75233 - RNA, 17 nt, Human
gaacuuguucacuguga

SEQ ID NO: 75234 - RNA, 22 nt, Human
gaacuuguuguaagaaaauaug

SEQ ID NO: 75235 - RNA, 22 nt, Human
gaacuuuaggauuuucacaggu

SEQ ID NO: 75236 - RNA, 22 nt, Human
gaacuuuguggggcugagagga

SEQ ID NO: 75237 - RNA, 22 nt, Human
gaagaacugaaaguugaugcac

SEQ ID NO: 75238 - RNA, 22 nt, Human
gaagaacugugacagaagcagu

SEQ ID NO: 75239 - RNA, 22 nt, Human
gaagaacuuauaggaaugucau

SEQ ID NO: 75240 - RNA, 22 nt, Human
gaagaagcauucugcuguuuug

SEQ ID NO: 75241 - RNA, 22 nt, Human
gaagaagccucuguggaucuga

SEQ ID NO: 75242 - RNA, 22 nt, Human
gaagaaggaagaucaugcuuga

SEQ ID NO: 75243 - RNA, 22 nt, Human
gaagaagggagugacaaaugca

SEQ ID NO: 75244 - RNA, 22 nt, Human
gaagaagggagugcguguaaua

SEQ ID NO: 75245 - RNA, 22 nt, Human
gaagaagguggcccagggguag

SEQ ID NO: 75246 - RNA, 22 nt, Human
gaagaaguguaagucuguuuca

SEQ ID NO: 75247 - RNA, 22 nt, Human
gaagaauugaggauguuuaccu

SEQ ID NO: 75248 - RNA, 22 nt, Human
gaagaauugcccauuucugucu

SEQ ID NO: 75249 - RNA, 22 nt, Human
gaagacaagcugaguguugucc

SEQ ID NO: 75250 - RNA, 22 nt, Human
gaagacaccuacugucauuucu

SEQ ID NO: 75251 - RNA, 22 nt, Human
gaagacacuaaggcccagggag

SEQ ID NO: 75252 - RNA, 22 nt, Human
gaagacagaaaccuguuuggcu

SEQ ID NO: 75253 - RNA, 22 nt, Human
gaagacauguuuuuaauaugua

SEQ ID NO: 75254 - RNA, 22 nt, Human
gaagacauuuguaacacuugca

SEQ ID NO: 75255 - RNA, 22 nt, Human
gaagacauuuuaugcauacucu

SEQ ID NO: 75256 - RNA, 22 nt, Human
gaagaccaauuugggccauggc

SEQ ID NO: 75257 - RNA, 22 nt, Human
gaagaccccagagcgagguaag

SEQ ID NO: 75258 - RNA, 22 nt, Human
gaagacgagauaaaaugguguc

SEQ ID NO: 75259 - RNA, 22 nt, Human
gaagacuuuaagccgagauuag

SEQ ID NO: 75260 - RNA, 22 nt, Human
gaagagaagcaucaauagguaa

SEQ ID NO: 75261 - RNA, 22 nt, Human
gaagagagccgcgggacaucag

SEQ ID NO: 75262 - RNA, 22 nt, Human
gaagagaugacaaaggagcaug

SEQ ID NO: 75263 - RNA, 22 nt, Human
gaagagcauaugaagagcauau

SEQ ID NO: 75264 - RNA, 22 nt, Human
gaagagcuaaaggcacaggcuu

SEQ ID NO: 75265 - RNA, 22 nt, Human
gaagagcugucagaaaagcuaa

SEQ ID NO: 75266 - RNA, 22 nt, Human
gaagagcuuagacagaaucaaa

SEQ ID NO: 75267 - RNA, 22 nt, Human
gaagaggacuguggcauccuag

SEQ ID NO: 75268 - RNA, 22 nt, Human
gaagauaacuuuaaaaaguggc

SEQ ID NO: 75269 - RNA, 22 nt, Human
gaagauaccucaauucuuugaa

SEQ ID NO: 75270 - RNA, 20 nt, Human
gaagauggguagaggcacag

SEQ ID NO: 75271 - RNA, 22 nt, Human
gaagaugugcaauacaaagaaa

SEQ ID NO: 75272 - RNA, 22 nt, Human
gaagaugugggaacugcugaaa

SEQ ID NO: 75273 - RNA, 22 nt, Human
gaagauuuaagcacaauagucu

SEQ ID NO: 75274 - RNA, 22 nt, Human
gaagauuuauaaggaccuuauu

SEQ ID NO: 75275 - RNA, 22 nt, Human
gaagauuucugaugaguuacuu

SEQ ID NO: 75276 - RNA, 22 nt, Human
gaagauuuuucuuaaugcuccg

SEQ ID NO: 75277 - RNA, 22 nt, Human
gaagcaauguguuuucaacauu

SEQ ID NO: 75278 - RNA, 22 nt, Human
gaagcaauuuagaaucagaagc

SEQ ID NO: 75279 - RNA, 22 nt, Human
gaagcacaaaguguaguuccga

SEQ ID NO: 75280 - RNA, 22 nt, Human
gaagcacacugauuuuauuucu

SEQ ID NO: 75281 - RNA, 22 nt, Human
gaagcacagaaugguuaacaug

SEQ ID NO: 75282 - RNA, 22 nt, Human
gaagcacauggcuauagcuauu

SEQ ID NO: 75283 - RNA, 22 nt, Human
gaagcagcaaguauaggacagg

SEQ ID NO: 75284 - RNA, 22 nt, Human
gaagcagcgaaguggaagggac

SEQ ID NO: 75285 - RNA, 22 nt, Human
gaagcagcuagcccacuaguca

SEQ ID NO: 75286 - RNA, 22 nt, Human
gaagcagcuaggaucuucauuu

SEQ ID NO: 75287 - RNA, 22 nt, Human
gaagcagcucagauugacugaa

SEQ ID NO: 75288 - RNA, 22 nt, Human
gaagcagcugccagagaugucu

SEQ ID NO: 75289 - RNA, 22 nt, Human
gaagcagugugaacccauguaa

SEQ ID NO: 75290 - RNA, 22 nt, Human
gaagcaguucgaaagcaguugg

SEQ ID NO: 75291 - RNA, 22 nt, Human
gaagcauauagguacugaacua

SEQ ID NO: 75292 - RNA, 22 nt, Human
gaagccaagccagcugauggag

SEQ ID NO: 75293 - RNA, 22 nt, Human
gaagccaagggcugcuuuuccu

SEQ ID NO: 75294 - RNA, 22 nt, Human
gaagccacuauagauauucuaa

SEQ ID NO: 75295 - RNA, 22 nt, Human
gaagccagcaguggagaaagga

SEQ ID NO: 75296 - RNA, 22 nt, Human
gaagccaggggccugacaggca

SEQ ID NO: 75297 - RNA, 22 nt, Human
gaagccaguguuugaagaauuu

SEQ ID NO: 75298 - RNA, 22 nt, Human
gaagcccagggcguggccgggc

SEQ ID NO: 75299 - RNA, 22 nt, Human
gaagcccauuuguacagcacau

SEQ ID NO: 75300 - RNA, 22 nt, Human
gaagccugggagggcugggcua

SEQ ID NO: 75301 - RNA, 22 nt, Human
gaagccuuugccuaaaacauua

SEQ ID NO: 75302 - RNA, 22 nt, Human
gaagcgcggcgucggcgugggu

SEQ ID NO: 75303 - RNA, 22 nt, Human
gaagcgugcagguccguauacu

SEQ ID NO: 75304 - RNA, 22 nt, Human
gaagcuaaaccacagcuaagaa

SEQ ID NO: 75305 - RNA, 22 nt, Human
gaagcucucaaacucuccccuu

SEQ ID NO: 75306 - RNA, 22 nt, Human
gaagcucuggacagugaagaag

SEQ ID NO: 75307 - RNA, 22 nt, Human
gaagcugacccaggagcgugug

SEQ ID NO: 75308 - RNA, 22 nt, Human
gaagcugcaauaauuguuuuga

SEQ ID NO: 75309 - RNA, 22 nt, Human
gaagcugugaacaagcuacgug

SEQ ID NO: 75310 - RNA, 22 nt, Human
uggcaguguuucuaaggggcuc

SEQ ID NO: 75311 - RNA, 22 nt, Human
uggcaguuauauugccuuaggg

SEQ ID NO: 75312 - RNA, 22 nt, Human
uggcaguugaguuacuggguga

SEQ ID NO: 75313 - RNA, 22 nt, Human
uggcaguugugagguucauauu

SEQ ID NO: 75314 - RNA, 22 nt, Human
uggcaguuuacagaguucugaa

SEQ ID NO: 75315 - RNA, 22 nt, Human
uggcauccuuuaucugcaggcu

SEQ ID NO: 75316 - RNA, 19 nt, Human
uggcaucugggcccuccag

SEQ ID NO: 75317 - RNA, 19 nt, Human
uggcaucuguaaaauggug

SEQ ID NO: 75318 - RNA, 22 nt, Human
uggcaucuguguugcgguuguc

SEQ ID NO: 75319 - RNA, 23 nt, Human
uggcaucuuggcaucuugcugcu

SEQ ID NO: 75320 - RNA, 17 nt, Human
uggcaucuuuugcucau

SEQ ID NO: 75321 - RNA, 22 nt, Human
uggcaugaagucagcagcuggg

SEQ ID NO: 75322 - RNA, 22 nt, Human
uggcaugcacagcccuguucgg

SEQ ID NO: 75323 - RNA, 18 nt, Human
uggcaugcuuugauacau

SEQ ID NO: 75324 - RNA, 22 nt, Human
uggcauggaccuuggaagaauu

SEQ ID NO: 75325 - RNA, 22 nt, Human
uggcauggcaacccugcaggga

SEQ ID NO: 75326 - RNA, 22 nt, Human
uggcauggcauuuagagaauua

SEQ ID NO: 75327 - RNA, 22 nt, Human
uggcauguacccaggaauggac

SEQ ID NO: 75328 - RNA, 22 nt, Human
uggcauguauacuugaguagga

SEQ ID NO: 75329 - RNA, 22 nt, Human
uggcauguggcaauguugggau

SEQ ID NO: 75330 - RNA, 22 nt, Human
uggcauguuaaaguaguauuaa

SEQ ID NO: 75331 - RNA, 22 nt, Human
uggcauugcuagugacccagca

SEQ ID NO: 75332 - RNA, 22 nt, Human
uggcauuuagaaaacaacaugu

SEQ ID NO: 75333 - RNA, 22 nt, Human
uggcauuuagagaaaugaagga

SEQ ID NO: 75334 - RNA, 22 nt, Human
uggcauuuccucagugcucaga

SEQ ID NO: 75335 - RNA, 22 nt, Human
uggcauuucuggccauuugugu

SEQ ID NO: 75336 - RNA, 22 nt, Human
uggcauuuggcuuacuuauguu

SEQ ID NO: 75337 - RNA, 22 nt, Human
uggcauuugggcuggcuuuucu

SEQ ID NO: 75338 - RNA, 23 nt, Human
uggcauuuuaguuagcuucagug

SEQ ID NO: 75339 - RNA, 21 nt, Human
uggccaaacuggagcauuuga

SEQ ID NO: 75340 - RNA, 22 nt, Human
uggccaagccacugcugggucu

SEQ ID NO: 75341 - RNA, 22 nt, Human
uggccacagccucugccaguuc

SEQ ID NO: 75342 - RNA, 23 nt, Human
uggccacagggugcuccauugua

SEQ ID NO: 75343 - RNA, 23 nt, Human
uggccacaguccaugcaugccca

SEQ ID NO: 75344 - RNA, 22 nt, Human
uggccacaguguccagcagcag

SEQ ID NO: 75345 - RNA, 22 nt, Human
uggccacaucugaaaugagugu

SEQ ID NO: 75346 - RNA, 22 nt, Human
uggccacccacccuaaucuuuc

SEQ ID NO: 75347 - RNA, 22 nt, Human
uggccacccagcugacgccuuc

SEQ ID NO: 75348 - RNA, 22 nt, Human
uggccaccccuuucucugcacu

SEQ ID NO: 75349 - RNA, 22 nt, Human
uggccacucagggaugcaggaa

SEQ ID NO: 75350 - RNA, 22 nt, Human
uggccacuccucccugcaggcu

SEQ ID NO: 75351 - RNA, 22 nt, Human
uggccagaacucagacaugugg

SEQ ID NO: 75352 - RNA, 22 nt, Human
uggccagaccugacugucaggg

SEQ ID NO: 75353 - RNA, 22 nt, Human
uggccagaguccagugagccuu

SEQ ID NO: 75354 - RNA, 22 nt, Human
uggccagccacaauauaaagua

SEQ ID NO: 75355 - RNA, 22 nt, Human
uggccagccauaaaagaaccca

SEQ ID NO: 75356 - RNA, 22 nt, Human
uggccagccuggugcuugcucc

SEQ ID NO: 75357 - RNA, 22 nt, Human
uggccagccuugucaucgcuuu

SEQ ID NO: 75358 - RNA, 22 nt, Human
uggccagcugagauuuagcaca

SEQ ID NO: 75359 - RNA, 22 nt, Human
uggccagcuuuuuguagugcuc

SEQ ID NO: 75360 - RNA, 22 nt, Human
uggccaggaggcugcuucugac

SEQ ID NO: 75361 - RNA, 22 nt, Human
uggccaggcagguagaacggcc

SEQ ID NO: 75362 - RNA, 22 nt, Human
uggccaggcauucagauaagac

SEQ ID NO: 75363 - RNA, 22 nt, Human
uggccaggccucuuggugccca

SEQ ID NO: 75364 - RNA, 23 nt, Human
uggccaggguacuacacccaccc

SEQ ID NO: 75365 - RNA, 22 nt, Human
uggccaguagauaggcaggcaa

SEQ ID NO: 75366 - RNA, 22 nt, Human
uggccagucuguggaagccagg

SEQ ID NO: 75367 - RNA, 22 nt, Human
uggccagugggguugagcagga

SEQ ID NO: 75368 - RNA, 22 nt, Human
uggccaguuugcucaggcaguc

SEQ ID NO: 75369 - RNA, 22 nt, Human
uggcccagacucugcucuuauc

SEQ ID NO: 75370 - RNA, 22 nt, Human
uggcccagaucucugaccuuga

SEQ ID NO: 75371 - RNA, 23 nt, Human
aaaaaaccauguaggcacucagu

SEQ ID NO: 75372 - RNA, 22 nt, Human
aaaaaaucagaucuuugguuaa

SEQ ID NO: 75373 - RNA, 22 nt, Human
aaaaaauuaucauaguuccuga

SEQ ID NO: 75374 - RNA, 22 nt, Human
aaaaagacuagucgagugcagu

SEQ ID NO: 75375 - RNA, 22 nt, Human
aaaaagauagcauugugcuccu

SEQ ID NO: 75376 - RNA, 22 nt, Human
aaaaaggcuaagcaucuugugc

SEQ ID NO: 75377 - RNA, 22 nt, Human
aaaaagggauuugugauccagg

SEQ ID NO: 75378 - RNA, 18 nt, Human
aaaaagugcucaggccua

SEQ ID NO: 75379 - RNA, 22 nt, Human
aaaaaguuucaacugccaacuc

SEQ ID NO: 75380 - RNA, 22 nt, Human
aaaaauacuucacuucugggug

SEQ ID NO: 75381 - RNA, 22 nt, Human
aaaaaugugaccacaggguguu

SEQ ID NO: 75382 - RNA, 20 nt, Human
aaaaauugauaucgcuuccu

SEQ ID NO: 75383 - RNA, 22 nt, Human
aaaacacaagaagcaggguaca

SEQ ID NO: 75384 - RNA, 22 nt, Human
aaaacagacagccaguguagag

SEQ ID NO: 75385 - RNA, 22 nt, Human
aaaaccacaaugacuuuugcac

SEQ ID NO: 75386 - RNA, 22 nt, Human
aaaaccacaauuacuuuugcac

SEQ ID NO: 75387 - RNA, 22 nt, Human
aaaaccacaguuacuuuugcac

SEQ ID NO: 75388 - RNA, 22 nt, Human
aaaaccacuuccuugcuauugg

SEQ ID NO: 75389 - RNA, 22 nt, Human
aaaaccagacacuguuucuggg

SEQ ID NO: 75390 - RNA, 22 nt, Human
aaaaccaggcuugcugugcucg

SEQ ID NO: 75391 - RNA, 22 nt, Human
aaaaccauguaucuauuuccuu

SEQ ID NO: 75392 - RNA, 22 nt, Human
aaaacuaaauacgcuuugccuc

SEQ ID NO: 75393 - RNA, 22 nt, Human
aaaacuguaggaauugggugcc

SEQ ID NO: 75394 - RNA, 22 nt, Human
aaaacuuagcuaggcaaguuuu

SEQ ID NO: 75395 - RNA, 22 nt, Human
aaaagacauaugugggcauucu

SEQ ID NO: 75396 - RNA, 22 nt, Human
aaaagacaucuauuucaggcag

SEQ ID NO: 75397 - RNA, 22 nt, Human
aaaagagaaaguggcaggcuuu

SEQ ID NO: 75398 - RNA, 22 nt, Human
aaaagagaauccuguacagaga

SEQ ID NO: 75399 - RNA, 22 nt, Human
aaaagagaguugccagucugua

SEQ ID NO: 75400 - RNA, 22 nt, Human
aaaagagcaaacauguaauagu

SEQ ID NO: 75401 - RNA, 22 nt, Human
aaaagagccacuuaugaccuca

SEQ ID NO: 75402 - RNA, 22 nt, Human
aaaagagguuaaccaggugugu

SEQ ID NO: 75403 - RNA, 22 nt, Human
aaaagauuguuagggagaaugu

SEQ ID NO: 75404 - RNA, 22 nt, Human
aaaagcagagacucuggagcua

SEQ ID NO: 75405 - RNA, 22 nt, Human
aaaagcaguuuauagucaguug

SEQ ID NO: 75406 - RNA, 22 nt, Human
aaaagcaucucaaaggagcuuc

SEQ ID NO: 75407 - RNA, 22 nt, Human
aaaagccuggauacuaucauua

SEQ ID NO: 75408 - RNA, 22 nt, Human
aaaagcuuugccagaugaguug

SEQ ID NO: 75409 - RNA, 22 nt, Human
aaaaggaucagauuuugagcag

SEQ ID NO: 75410 - RNA, 22 nt, Human
aaaaggcuaauuaaguuuugga

SEQ ID NO: 75411 - RNA, 22 nt, Human
aaaagggaaagcagaaugacuu

SEQ ID NO: 75412 - RNA, 22 nt, Human
aaaaguaaucgcaguuuuugcc

SEQ ID NO: 75413 - RNA, 22 nt, Human
aaaaguaauugcaguuuuguca

SEQ ID NO: 75414 - RNA, 22 nt, Human
aaaaguaauugcaguuuuugcc

SEQ ID NO: 75415 - RNA, 22 nt, Human
aaaaguaauugcgguuuuugcc

SEQ ID NO: 75416 - RNA, 22 nt, Human
aaaaguaauugugguuuuugcc

SEQ ID NO: 75417 - RNA, 22 nt, Human
aaaaguauaggguuuggaguca

SEQ ID NO: 75418 - RNA, 22 nt, Human
aaaaguauccacagcucaggag

SEQ ID NO: 75419 - RNA, 22 nt, Human
aaaaguauuuauggcuauguaa

SEQ ID NO: 75420 - RNA, 22 nt, Human
aaaagucagucucuccuagcuc

SEQ ID NO: 75421 - RNA, 22 nt, Human
aaaagucucucugaguaaaagu

SEQ ID NO: 75422 - RNA, 22 nt, Human
aaaagucuuggggaaggccagg

SEQ ID NO: 75423 - RNA, 22 nt, Human
aaaagucuugucaagguuccca

SEQ ID NO: 75424 - RNA, 22 nt, Human
aaaaguguccagauuaugaaga

SEQ ID NO: 75425 - RNA, 22 nt, Human
aaaaguguucaggaagaauaau

SEQ ID NO: 75426 - RNA, 22 nt, Human
aaaaguuaacuguguucaugca

SEQ ID NO: 75427 - RNA, 22 nt, Human
aaaaguuaccucuguaauauaa

SEQ ID NO: 75428 - RNA, 22 nt, Human
aaaaguugcaaaauugcucuuc

SEQ ID NO: 75429 - RNA, 18 nt, Human
aaaauaacaaaguuggcu

SEQ ID NO: 75430 - RNA, 22 nt, Human
aaaauacuguggaguguugaaa

SEQ ID NO: 75431 - RNA, 22 nt, Human
aaaauagauucuaggaugucuu

SEQ ID NO: 75432 - RNA, 22 nt, Human
aaaauagcauauugcuuucuuu

SEQ ID NO: 75433 - RNA, 22 nt, Human
aaaauagccucacauaauugcu

SEQ ID NO: 75434 - RNA, 22 nt, Human
aaaauaucagcaaagggugaca

SEQ ID NO: 75435 - RNA, 22 nt, Human
aaaauaugaaguugucaguaug

SEQ ID NO: 75436 - RNA, 22 nt, Human
aaaauauuuuagggccaggaga

SEQ ID NO: 75437 - RNA, 21 nt, Human
aaaaucaccuuaggucacugg

SEQ ID NO: 75438 - RNA, 22 nt, Human
aaaaucugcacaggucaguuuu

SEQ ID NO: 75439 - RNA, 22 nt, Human
aaaaucugguaauuugaaugug

SEQ ID NO: 75440 - RNA, 22 nt, Human
aaaaucuugacuguuuuuagaa

SEQ ID NO: 75441 - RNA, 22 nt, Human
aaaaugaagcaaaggcauucag

SEQ ID NO: 75442 - RNA, 22 nt, Human
aaaaugagccaugaaccaacca

SEQ ID NO: 75443 - RNA, 22 nt, Human
aaaauggauagugcgucuucuc

SEQ ID NO: 75444 - RNA, 22 nt, Human
aaaauggcuuaauaggcaauaa

SEQ ID NO: 75445 - RNA, 22 nt, Human
aaaauggguuucuucaaccuca

SEQ ID NO: 75446 - RNA, 22 nt, Human
aaaauggucucagcuggcacca

SEQ ID NO: 75447 - RNA, 22 nt, Human
aaaauguaaagcuugaguguag

SEQ ID NO: 75448 - RNA, 22 nt, Human
aaaaugugaucuacaaaugcaa

SEQ ID NO: 75449 - RNA, 22 nt, Human
aaaauguucaagcaugcugguu

SEQ ID NO: 75450 - RNA, 18 nt, Human
aaaauguucccccauuaa

SEQ ID NO: 75451 - RNA, 22 nt, Human
aaaauucauggcuugggaaaag

SEQ ID NO: 75452 - RNA, 22 nt, Human
aaaauucauuccucagacugcc

SEQ ID NO: 75453 - RNA, 22 nt, Human
aaaauucuaacaugcagccaag

SEQ ID NO: 75454 - RNA, 22 nt, Human
aaaauugaagugaucaggaacu

SEQ ID NO: 75455 - RNA, 20 nt, Human
aaaauugcucugcagucccc

SEQ ID NO: 75456 - RNA, 22 nt, Human
aaaauugucgaacaguaguaac

SEQ ID NO: 75457 - RNA, 22 nt, Human
aaaauuuuacugguguuuccuu

SEQ ID NO: 75458 - RNA, 22 nt, Human
aaaauuuugcccuauccuucau

SEQ ID NO: 75459 - RNA, 22 nt, Human
aaacaaacaauuaguugugugg

SEQ ID NO: 75460 - RNA, 22 nt, Human
aaacaaauagugcaugggaauu

SEQ ID NO: 75461 - RNA, 22 nt, Human
aaacaacaugguggguguguag

SEQ ID NO: 75462 - RNA, 23 nt, Human
aaacaagcccuaaugaagagucc

SEQ ID NO: 75463 - RNA, 22 nt, Human
aaaaaagauugaugguggaugc

SEQ ID NO: 75464 - RNA, 22 nt, Human
aaaaaauuccauucugugccuu

SEQ ID NO: 75465 - RNA, 22 nt, Human
aaaaacacaaguggcuuggucu

SEQ ID NO: 75466 - RNA, 22 nt, Human
aaaaacacugggcugggaguca

SEQ ID NO: 75467 - RNA, 22 nt, Human
aaaaaccucaauuacuuuugca

SEQ ID NO: 75468 - RNA, 22 nt, Human
aaaaaccuuucauugcaaaugu

SEQ ID NO: 75469 - RNA, 22 nt, Human
aaaaacugcaauuacuuuuguc

SEQ ID NO: 75470 - RNA, 19 nt, Human
aaaaagaggcuauaauauu

SEQ ID NO: 75471 - RNA, 21 nt, Human
aaaaagcuggggcaugcaugc

SEQ ID NO: 75472 - RNA, 22 nt, Human
aaaaaguauuggccaugguuga

SEQ ID NO: 75473 - RNA, 22 nt, Human
aaaaauaggucaaccguguaug

SEQ ID NO: 75474 - RNA, 22 nt, Human
aaaaaucacuuuuauaggcagc

SEQ ID NO: 75475 - RNA, 22 nt, Human
aaaaaugcugugguagcugugu

SEQ ID NO: 75476 - RNA, 22 nt, Human
aaaaaugcuuggacuuaauaaa

SEQ ID NO: 75477 - RNA, 22 nt, Human
aaaaauugcugagaacggaauu

SEQ ID NO: 75478 - RNA, 22 nt, Human
aaaaauuuaugguucuucucug

SEQ ID NO: 75479 - RNA, 22 nt, Human
aaaacacugcaaagcugauugg

SEQ ID NO: 75480 - RNA, 22 nt, Human
aaaacaguuauaaacagaguca

SEQ ID NO: 75481 - RNA, 22 nt, Human
aaaacaguuuuugcuaacugcu

SEQ ID NO: 75482 - RNA, 22 nt, Human
aaaacauaaacugacagcccau

SEQ ID NO: 75483 - RNA, 22 nt, Human
aaaaccacaaaaguggcuuggu

SEQ ID NO: 75484 - RNA, 22 nt, Human
aaaacuacauuugacauuuugu

SEQ ID NO: 75485 - RNA, 22 nt, Human
aaaacucugcaguuaguuucua

SEQ ID NO: 75486 - RNA, 22 nt, Human
aaaacuguaucuucuugggacu

SEQ ID NO: 75487 - RNA, 22 nt, Human
aaaagagagcugaggagcucca

SEQ ID NO: 75488 - RNA, 22 nt, Human
aaaagagugacugauaaguaua

SEQ ID NO: 75489 - RNA, 22 nt, Human
aaaagcaagaggcuggauuaaa

SEQ ID NO: 75490 - RNA, 22 nt, Human
aaaagcacuacaauuucgcuuc

SEQ ID NO: 75491 - RNA, 20 nt, Human
aaaagcagccagagauggua

SEQ ID NO: 75492 - RNA, 22 nt, Human
aaaagcaguaaauguaugaccu

SEQ ID NO: 75493 - RNA, 22 nt, Human
aaaagcaguuaucugggaggaa

SEQ ID NO: 75494 - RNA, 22 nt, Human
aaaagcauuacaugguacguau

SEQ ID NO: 75495 - RNA, 22 nt, Human
aaaagcuagucaaugauguauu

SEQ ID NO: 75496 - RNA, 22 nt, Human
aaaagcucuuucugcuguagau

SEQ ID NO: 75497 - RNA, 22 nt, Human
aaaagcuuuguuaauagguuug

SEQ ID NO: 75498 - RNA, 21 nt, Human
aaaaggaaggucuguuugggg

SEQ ID NO: 75499 - RNA, 19 nt, Human
aaaaggaauauucuuuggg

SEQ ID NO: 75500 - RNA, 22 nt, Human
aaaaggaggacaugguuacaga

SEQ ID NO: 75501 - RNA, 21 nt, Human
aaaaggaggcaggugaacagc

SEQ ID NO: 75502 - RNA, 22 nt, Human
aaaaggcagugcaagagagggu

SEQ ID NO: 75503 - RNA, 22 nt, Human
aaaaguaauugaugcaaucgua

SEQ ID NO: 75504 - RNA, 22 nt, Human
aaaaguauuggccaccauuucu

SEQ ID NO: 75505 - RNA, 22 nt, Human
aaaaguauuuugagcacuuuau

SEQ ID NO: 75506 - RNA, 22 nt, Human
aaaagucugcuuucuauuauca

SEQ ID NO: 75507 - RNA, 22 nt, Human
aaaauagaugaaaggaagucug

SEQ ID NO: 75508 - RNA, 22 nt, Human
aaaauagcagggaugugggaaa

SEQ ID NO: 75509 - RNA, 20 nt, Human
aaaauagccccaggcucauu

SEQ ID NO: 75510 - RNA, 22 nt, Human
aaaauaguuaacguucagagua

SEQ ID NO: 75511 - RNA, 22 nt, Human
aaaaucaguacacuuuauuuug

SEQ ID NO: 75512 - RNA, 22 nt, Human
aaaauccugcugacucgagaug

SEQ ID NO: 75513 - RNA, 22 nt, Human
aaaauccuuagccgagugaggu

SEQ ID NO: 75514 - RNA, 22 nt, Human
aaaaucucauuaucaggaaggg

SEQ ID NO: 75515 - RNA, 22 nt, Human
aaaaucugcuuccuuuuacaga

SEQ ID NO: 75516 - RNA, 23 nt, Human
aaaaucuucugccuaugaagaaa

SEQ ID NO: 75517 - RNA, 22 nt, Human
aaaaugaauaaguuaacccagg

SEQ ID NO: 75518 - RNA, 22 nt, Human
aaaaugacauuccagugauauu

SEQ ID NO: 75519 - RNA, 22 nt, Human
aaaaugagauacaguuugaaag

SEQ ID NO: 75520 - RNA, 22 nt, Human
aaaaugaggaacggaucauggc

SEQ ID NO: 75521 - RNA, 22 nt, Human
aaaaugauauccugacuuuuau

SEQ ID NO: 75522 - RNA, 22 nt, Human
aaaaugcaugagaaugugcucg

SEQ ID NO: 75523 - RNA, 22 nt, Human
aaaaugcugggaaaguuggaau

SEQ ID NO: 75524 - RNA, 21 nt, Human
aaaaugugagcgugaugcuua

SEQ ID NO: 75525 - RNA, 22 nt, Human
aaaauguguuuaugcauuucgu

SEQ ID NO: 75526 - RNA, 22 nt, Human
aaaauugaggcucauguuaaau

SEQ ID NO: 75527 - RNA, 22 nt, Human
aaaauugguuccuuucugaggc

SEQ ID NO: 75528 - RNA, 22 nt, Human
aaaauuguaggaacugaaucaa

SEQ ID NO: 75529 - RNA, 22 nt, Human
aaacaaacauagguuugaaagu

SEQ ID NO: 75530 - RNA, 22 nt, Human
aaacaaauuucaagcugugaca

SEQ ID NO: 75531 - RNA, 22 nt, Human
aaacaacuucugcacuaugggu

SEQ ID NO: 75532 - RNA, 22 nt, Human
aaacaagagucuugcuccaccu

SEQ ID NO: 75533 - RNA, 22 nt, Human
aaacaagguccuucugugacau

SEQ ID NO: 75534 - RNA, 22 nt, Human
aaacaaguuuguagacuagcca

SEQ ID NO: 75535 - RNA, 17 nt, Human
aaacaaugcagacaagc

SEQ ID NO: 75536 - RNA, 22 nt, Human
aaacaauguuccuauauuagag

SEQ ID NO: 75537 - RNA, 22 nt, Human
aaacaauuuccaccucuccuga

SEQ ID NO: 75538 - RNA, 22 nt, Human
aaacacacagaaaugaaugagg

SEQ ID NO: 75539 - RNA, 22 nt, Human
aaacacagguacugcagaagug

SEQ ID NO: 75540 - RNA, 22 nt, Human
aaacacaucauucaugucguca

SEQ ID NO: 75541 - RNA, 22 nt, Human
aaacacauuuuaggaaaaucua

SEQ ID NO: 75542 - RNA, 22 nt, Human
aaacacuagcaggaagcacuga

SEQ ID NO: 75543 - RNA, 22 nt, Human
aaacacuggcaauuucaugcac

SEQ ID NO: 75544 - RNA, 22 nt, Human
aaacacugguaugauguauagu

SEQ ID NO: 75545 - RNA, 22 nt, Human
aaacacuucuuaggucuuaagu

SEQ ID NO: 75546 - RNA, 22 nt, Human
aaacagaaggguagguaaacau

SEQ ID NO: 75547 - RNA, 22 nt, Human
aaacagagagauguauguggag

SEQ ID NO: 75548 - RNA, 22 nt, Human
aaacagaguuugguaaauagcc

SEQ ID NO: 75549 - RNA, 22 nt, Human
aaacagauaagggacaauuuca

SEQ ID NO: 75550 - RNA, 22 nt, Human
aaacagauaaugcuauaaaugg

SEQ ID NO: 75551 - RNA, 22 nt, Human
aaacagauugaaauucguagua

SEQ ID NO: 75552 - RNA, 22 nt, Human
aaacagcugucauuguuuuaaa

SEQ ID NO: 75553 - RNA, 22 nt, Human
aaacaggcuuauauuuugcucu

SEQ ID NO: 75554 - RNA, 22 nt, Human
aaacagguagcccuagccuucu

SEQ ID NO: 75555 - RNA, 22 nt, Human
aaacaggucugaaaauagcuac

SEQ ID NO: 75556 - RNA, 22 nt, Human
aaacaagcugcagacaagccau

SEQ ID NO: 75557 - RNA, 23 nt, Human
aaacaagucucucaauggcuugc

SEQ ID NO: 75558 - RNA, 22 nt, Human
aaacaaguuuagaauaaugaau

SEQ ID NO: 75559 - RNA, 22 nt, Human
aaacaaugaaauauuuuuaugg

SEQ ID NO: 75560 - RNA, 22 nt, Human
aaacaaugacaacacagcugcg

SEQ ID NO: 75561 - RNA, 22 nt, Human
aaacacaagaggcaggguacag

SEQ ID NO: 75562 - RNA, 22 nt, Human
aaacacagauuucuuuguccca

SEQ ID NO: 75563 - RNA, 20 nt, Human
aaacacagccucucuuuaca

SEQ ID NO: 75564 - RNA, 22 nt, Human
aaacacauuagcccuguggaaa

SEQ ID NO: 75565 - RNA, 22 nt, Human
aaacaccaagagcuagcuauua

SEQ ID NO: 75566 - RNA, 22 nt, Human
aaacacuaauaacaguggcugg

SEQ ID NO: 75567 - RNA, 22 nt, Human
aaacacucauguguuacucucc

SEQ ID NO: 75568 - RNA, 22 nt, Human
aaacacugaaaauuuuggucau

SEQ ID NO: 75569 - RNA, 22 nt, Human
aaacacugugucaaacuggggc

SEQ ID NO: 75570 - RNA, 22 nt, Human
aaacacuuuaagugaggaggau

SEQ ID NO: 75571 - RNA, 22 nt, Human
aaacagaaauuuccucaugcuc

SEQ ID NO: 75572 - RNA, 22 nt, Human
aaacagacugaagaguugaagc

SEQ ID NO: 75573 - RNA, 22 nt, Human
aaacagacugcacugccaguca

SEQ ID NO: 75574 - RNA, 22 nt, Human
aaacagagggccacugaggcuc

SEQ ID NO: 75575 - RNA, 22 nt, Human
aaacagcaauuacuuuugcacc

SEQ ID NO: 75576 - RNA, 22 nt, Human
aaacagcagcuguuuaauuugc

SEQ ID NO: 75577 - RNA, 22 nt, Human
aaacagcuacuucuguauaaug

SEQ ID NO: 75578 - RNA, 22 nt, Human
aaacagcucaagaaguuacucu

SEQ ID NO: 75579 - RNA, 22 nt, Human
aaacagcuuguuucaggaaagu

SEQ ID NO: 75580 - RNA, 22 nt, Human
aaacaggaguugaccaaguaca

SEQ ID NO: 75581 - RNA, 22 nt, Human
aaacaggcacauaguaacauuu

SEQ ID NO: 75582 - RNA, 22 nt, Human
aaacaggcgcuuacuaagaaaa

SEQ ID NO: 75583 - RNA, 22 nt, Human
aaacaggcuuccauuagagcaa

SEQ ID NO: 75584 - RNA, 22 nt, Human
aaacaguaaguucuaguauuau

SEQ ID NO: 75585 - RNA, 22 nt, Human
aaacagucgucuuaauaguauu

SEQ ID NO: 75586 - RNA, 22 nt, Human
aaacagugauguugaguguaaa

SEQ ID NO: 75587 - RNA, 22 nt, Human
aaacaguuucauuuucaugacc

SEQ ID NO: 75588 - RNA, 22 nt, Human
aaacaguuucuaaucauggaga

SEQ ID NO: 75589 - RNA, 22 nt, Human
aaacaguuuuccuagcugucug

SEQ ID NO: 75590 - RNA, 22 nt, Human
aaacaguuuugccaaaaggaca

SEQ ID NO: 75591 - RNA, 20 nt, Human
aaacauaguggauaccacag

SEQ ID NO: 75592 - RNA, 22 nt, Human
aaacaucuaucagcauuuuuua

SEQ ID NO: 75593 - RNA, 22 nt, Human
aaacaucucaaagagguauuug

SEQ ID NO: 75594 - RNA, 21 nt, Human
aaacaucucugcuuuuguguc

SEQ ID NO: 75595 - RNA, 22 nt, Human
aaacaugaauagauauuaaaca

SEQ ID NO: 75596 - RNA, 22 nt, Human
aaacaugagcaucucuucaagc

SEQ ID NO: 75597 - RNA, 22 nt, Human
aaacaugauauugaggcugggc

SEQ ID NO: 75598 - RNA, 22 nt, Human
aaacaugaucacuccggcuuuu

SEQ ID NO: 75599 - RNA, 23 nt, Human
aaacaugcagcacaugaaugcua

SEQ ID NO: 75600 - RNA, 22 nt, Human
aaacauugagugccuuugguau

SEQ ID NO: 75601 - RNA, 22 nt, Human
aaacauuuuucuucaucauccu

SEQ ID NO: 75602 - RNA, 22 nt, Human
aaaccaaacauuugcgguggug

SEQ ID NO: 75603 - RNA, 22 nt, Human
aaaccacacuuagcaguuucgu

SEQ ID NO: 75604 - RNA, 22 nt, Human
aaaccacuccugauucacuuca

SEQ ID NO: 75605 - RNA, 22 nt, Human
aaaccauggcucauuggagaug

SEQ ID NO: 75606 - RNA, 22 nt, Human
aaacccaggguuuugucuuccc

SEQ ID NO: 75607 - RNA, 22 nt, Human
aaacccugagacuuggggccag

SEQ ID NO: 75608 - RNA, 22 nt, Human
aaacccugcccuucccaagaug

SEQ ID NO: 75609 - RNA, 22 nt, Human
aaaccgcaauuacuuuugcguc

SEQ ID NO: 75610 - RNA, 22 nt, Human
aaaccggguccagaucuucagg

SEQ ID NO: 75611 - RNA, 22 nt, Human
aaaccuauauagucuuagaagc

SEQ ID NO: 75612 - RNA, 22 nt, Human
aaaccucuccacuacaugacag

SEQ ID NO: 75613 - RNA, 22 nt, Human
aaaccucugaauacuguuggca

SEQ ID NO: 75614 - RNA, 22 nt, Human
aaaccucuggguuccgugguuu

SEQ ID NO: 75615 - RNA, 22 nt, Human
aaaccugucugauuauggagac

SEQ ID NO: 75616 - RNA, 22 nt, Human
aaaccuuaaaccaagcucuuga

SEQ ID NO: 75617 - RNA, 22 nt, Human
aaacggaaugaguaagaguauc

SEQ ID NO: 75618 - RNA, 22 nt, Human
aaacgguugcucauaguuacau

SEQ ID NO: 75619 - RNA, 20 nt, Human
aaacuaaagguguuugguuu

SEQ ID NO: 75620 - RNA, 22 nt, Human
aaacuaagacuaaugaagaacu

SEQ ID NO: 75621 - RNA, 22 nt, Human
aaacuaagggagaugugggcug

SEQ ID NO: 75622 - RNA, 19 nt, Human
aaacuaaggggaaauguuu

SEQ ID NO: 75623 - RNA, 22 nt, Human
aaacuaaggugcuguggacuga

SEQ ID NO: 75624 - RNA, 23 nt, Human
aaacuacauuuauaguuuuucuc

SEQ ID NO: 75625 - RNA, 22 nt, Human
aaacuacuaugggaauguacuu

SEQ ID NO: 75626 - RNA, 22 nt, Human
aaacuagaugaaacgaguaaag

SEQ ID NO: 75627 - RNA, 22 nt, Human
aaacuagauuaccacugcuaga

SEQ ID NO: 75628 - RNA, 22 nt, Human
aaacuagccacacagaauacac

SEQ ID NO: 75629 - RNA, 22 nt, Human
aaacuaggaaguucaucuuauu

SEQ ID NO: 75630 - RNA, 22 nt, Human
aaacucaaagucagaucagaga

SEQ ID NO: 75631 - RNA, 22 nt, Human
aaacucaaauuaaacuagcuua

SEQ ID NO: 75632 - RNA, 22 nt, Human
aaacucaaggauuuagacgaag

SEQ ID NO: 75633 - RNA, 22 nt, Human
aaacucagacacaguaucuguu

SEQ ID NO: 75634 - RNA, 22 nt, Human
aaacucaugccauuaauccuuu

SEQ ID NO: 75635 - RNA, 22 nt, Human
aaacucuacauggucgcaaaaa

SEQ ID NO: 75636 - RNA, 20 nt, Human
aaacucuaccucaaucguca

SEQ ID NO: 75637 - RNA, 22 nt, Human
aaacucuagcuacuaggauaac

SEQ ID NO: 75638 - RNA, 22 nt, Human
aaacucuagggcuccacauucc

SEQ ID NO: 75639 - RNA, 22 nt, Human
aaacucuggauuggaguccagc

SEQ ID NO: 75640 - RNA, 22 nt, Human
aaacucuggggguggagcccag

SEQ ID NO: 75641 - RNA, 22 nt, Human
aaacucuguagcuaaacauaau

SEQ ID NO: 75642 - RNA, 22 nt, Human
aaacucuuuccacgauuacuuu

SEQ ID NO: 75643 - RNA, 17 nt, Human
aaacugaaaaauucacu

SEQ ID NO: 75644 - RNA, 22 nt, Human
aaacugagaccgaaagggguag

SEQ ID NO: 75645 - RNA, 22 nt, Human
aaacugaggcucccgagggugu

SEQ ID NO: 75646 - RNA, 21 nt, Human
aaacugaggcuucaagcagug

SEQ ID NO: 75647 - RNA, 22 nt, Human
aaacugaguaccucugcauuca

SEQ ID NO: 75648 - RNA, 22 nt, Human
aaacugcaauuacuuuugcacc

SEQ ID NO: 75649 - RNA, 22 nt, Human
aaacugcaauuacuuuugcagc

SEQ ID NO: 75650 - RNA, 22 nt, Human
aaacugcaauuauguuugcaga

SEQ ID NO: 75651 - RNA, 22 nt, Human
aaacugcacaagggugcauagc

SEQ ID NO: 75652 - RNA, 22 nt, Human
aaacugcagagccaugguucaa

SEQ ID NO: 75653 - RNA, 22 nt, Human
aaacugcagccuugaguucagg

SEQ ID NO: 75654 - RNA, 23 nt, Human
aaacugcaucucugagccucagc

SEQ ID NO: 75655 - RNA, 22 nt, Human
aaacugccacaagagggacauc

SEQ ID NO: 75656 - RNA, 22 nt, Human
aaacugccuccugggcaacuaa

SEQ ID NO: 75657 - RNA, 22 nt, Human
aaacugcugggcauauauuucu

SEQ ID NO: 75658 - RNA, 22 nt, Human
aaacugcugguugcuggccagc

SEQ ID NO: 75659 - RNA, 23 nt, Human
aaacugcuuccaauuccugccau

SEQ ID NO: 75660 - RNA, 22 nt, Human
aaacuggauuaccaggcuggug

SEQ ID NO: 75661 - RNA, 17 nt, Human
aaacuggggucaggagc

SEQ ID NO: 75662 - RNA, 22 nt, Human
aaacuguaaacacagcaguaca

SEQ ID NO: 75663 - RNA, 22 nt, Human
aaacuguaagugccucaagguc

SEQ ID NO: 75664 - RNA, 22 nt, Human
aaacuguagugcuucgaucuga

SEQ ID NO: 75665 - RNA, 18 nt, Human
aaacuguauuucuuucua

SEQ ID NO: 75666 - RNA, 22 nt, Human
aaacugucauuggaugcauuug

SEQ ID NO: 75667 - RNA, 21 nt, Human
uuuggugcuggaaaugccauu

SEQ ID NO: 75668 - RNA, 22 nt, Human
uuugguuuauuaaauuguaggc

SEQ ID NO: 75669 - RNA, 22 nt, Human
uuuguaaaaggaggaagcaugg

SEQ ID NO: 75670 - RNA, 22 nt, Human
uuuguaacauuauggacugcuu

SEQ ID NO: 75671 - RNA, 22 nt, Human
uuuguaacuuuagaauugaucc

SEQ ID NO: 75672 - RNA, 22 nt, Human
uuuguaagugguagaucuaaga

SEQ ID NO: 75673 - RNA, 22 nt, Human
uuuguacagugaaagcgagguu

SEQ ID NO: 75674 - RNA, 22 nt, Human
uuuguacauccuaauucugagu

SEQ ID NO: 75675 - RNA, 22 nt, Human
uuuguacaugaaugugcaccca

SEQ ID NO: 75676 - RNA, 23 nt, Human
uuuguacauugaggaggcagaau

SEQ ID NO: 75677 - RNA, 22 nt, Human
uuuguacauuucacuccauugu

SEQ ID NO: 75678 - RNA, 22 nt, Human
uuuguacugaagauuguaaacu

SEQ ID NO: 75679 - RNA, 22 nt, Human
uuuguacugccacagcugacgu

SEQ ID NO: 75680 - RNA, 22 nt, Human
uuuguacuucauugguucuacu

SEQ ID NO: 75681 - RNA, 22 nt, Human
uuuguagagaauaaaacaaauu

SEQ ID NO: 75682 - RNA, 22 nt, Human
uuuguagauucauugaacuuuu

SEQ ID NO: 75683 - RNA, 22 nt, Human
uuuguagcagcaugauuuauaa

SEQ ID NO: 75684 - RNA, 22 nt, Human
uuuguaguuguggaugcugaag

SEQ ID NO: 75685 - RNA, 22 nt, Human
uuuguauuuuucccagcuagcu

SEQ ID NO: 75686 - RNA, 22 nt, Human
uuugucaaguuugcaaauacgu

SEQ ID NO: 75687 - RNA, 22 nt, Human
uuugucaauaacuaccaacagg

SEQ ID NO: 75688 - RNA, 22 nt, Human
uuugucauaucacacaauuuug

SEQ ID NO: 75689 - RNA, 22 nt, Human
uuugucaucccuuuugaaacug

SEQ ID NO: 75690 - RNA, 22 nt, Human
uuugucauguccuuaacugucu

SEQ ID NO: 75691 - RNA, 21 nt, Human
uuuguccaccuguguucacca

SEQ ID NO: 75692 - RNA, 22 nt, Human
uuuguccagaugcacagauaau

SEQ ID NO: 75693 - RNA, 22 nt, Human
uuuguccucuccauguacaaua

SEQ ID NO: 75694 - RNA, 22 nt, Human
uuugucuuaaaucuuguuacug

SEQ ID NO: 75695 - RNA, 22 nt, Human
uuugucuuggccaagguucuga

SEQ ID NO: 75696 - RNA, 22 nt, Human
uuugucuuguguccuuaggacc

SEQ ID NO: 75697 - RNA, 22 nt, Human
uuugugaaaugaagucacaacu

SEQ ID NO: 75698 - RNA, 22 nt, Human
uuugugaacaaacaugaagaug

SEQ ID NO: 75699 - RNA, 22 nt, Human
uuugugaauagguuggcuucca

SEQ ID NO: 75700 - RNA, 23 nt, Human
uuugugcagaagacaaaguggcc

SEQ ID NO: 75701 - RNA, 22 nt, Human
uuugugcagauguauauuugug

SEQ ID NO: 75702 - RNA, 22 nt, Human
uuugugcagcuaagaaaauggc

SEQ ID NO: 75703 - RNA, 22 nt, Human
uuugugcagguauaggcggaga

SEQ ID NO: 75704 - RNA, 22 nt, Human
uuugugcuaaugcuagauuacu

SEQ ID NO: 75705 - RNA, 22 nt, Human
uuugugcugacauuugggucau

SEQ ID NO: 75706 - RNA, 22 nt, Human
uuuguguauguaugcuuguaca

SEQ ID NO: 75707 - RNA, 22 nt, Human
uuugugucgucacugucuucuc

SEQ ID NO: 75708 - RNA, 22 nt, Human
uuugugugcgucuggccugggg

SEQ ID NO: 75709 - RNA, 22 nt, Human
uuuguguguauauguauauaga

SEQ ID NO: 75710 - RNA, 21 nt, Human
uuugugugucacgugcacagg

SEQ ID NO: 75711 - RNA, 22 nt, Human
uuuguguuuaugaaguuauucu

SEQ ID NO: 75712 - RNA, 22 nt, Human
aaaagguaguugccaaauaagg

SEQ ID NO: 75713 - RNA, 22 nt, Human
aaaagguuuugaguacaaauau

SEQ ID NO: 75714 - RNA, 22 nt, Human
aaaaguaauugcgguuuuugcu

SEQ ID NO: 75715 - RNA, 22 nt, Human
aaaaguaauugugguuuuugcu

SEQ ID NO: 75716 - RNA, 22 nt, Human
aaaaguauggugguccuuuuua

SEQ ID NO: 75717 - RNA, 22 nt, Human
aaaaguauuuuggaucucagau

SEQ ID NO: 75718 - RNA, 22 nt, Human
aaaagucuacaagcuucaacaa

SEQ ID NO: 75719 - RNA, 19 nt, Human
aaaagucuauucaauuaca

SEQ ID NO: 75720 - RNA, 22 nt, Human
aaaagugaggcagcccaaggga

SEQ ID NO: 75721 - RNA, 22 nt, Human
aaaaguuauugaugcaggacaa

SEQ ID NO: 75722 - RNA, 22 nt, Human
aaaaguucauuagugagcuucu

SEQ ID NO: 75723 - RNA, 22 nt, Human
aaaaguucccugguuagaaaag

SEQ ID NO: 75724 - RNA, 21 nt, Human
aaaaguuugacaggaaaggga

SEQ ID NO: 75725 - RNA, 22 nt, Human
aaaaguuugugcaaacacucag

SEQ ID NO: 75726 - RNA, 22 nt, Human
aaaauaaguugguccuguccuu

SEQ ID NO: 75727 - RNA, 22 nt, Human
aaaauacuacugucuucuuccc

SEQ ID NO: 75728 - RNA, 22 nt, Human
aaaauagauaaugccaggguca

SEQ ID NO: 75729 - RNA, 22 nt, Human
aaaauagcaugaaaggccuuug

SEQ ID NO: 75730 - RNA, 22 nt, Human
aaaauaugacugugcuccuuaa

SEQ ID NO: 75731 - RNA, 20 nt, Human
aaaauauguauaacucuucu

SEQ ID NO: 75732 - RNA, 22 nt, Human
aaaaucuaaguagcgaguaagg

SEQ ID NO: 75733 - RNA, 20 nt, Human
aaaaucucccagaaacuuau

SEQ ID NO: 75734 - RNA, 22 nt, Human
aaaaucuggcaacacuaaguuu

SEQ ID NO: 75735 - RNA, 22 nt, Human
aaaaugaacagaacaaugggga

SEQ ID NO: 75736 - RNA, 22 nt, Human
aaaaugagcauauugauccuuu

SEQ ID NO: 75737 - RNA, 22 nt, Human
aaaaugcuauuucauggaggag

SEQ ID NO: 75738 - RNA, 20 nt, Human
aaaauggccuuguauuaaaa

SEQ ID NO: 75739 - RNA, 21 nt, Human
aaaauguagacuuuucccuga

SEQ ID NO: 75740 - RNA, 22 nt, Human
aaaaugugcaguuuuuaagcug

SEQ ID NO: 75741 - RNA, 21 nt, Human
aaaauguuuccuuguugguua

SEQ ID NO: 75742 - RNA, 22 nt, Human
aaaauuaagugucugggaagcc

SEQ ID NO: 75743 - RNA, 22 nt, Human
aaaauuacuauuguuccugggc

SEQ ID NO: 75744 - RNA, 22 nt, Human
aaaauuauagaucuagugccug

SEQ ID NO: 75745 - RNA, 22 nt, Human
aaaauuauucauggcuuuugga

SEQ ID NO: 75746 - RNA, 22 nt, Human
aaaauucucuugaucuugacag

SEQ ID NO: 75747 - RNA, 17 nt, Human
aaaauucuguaaagagg

SEQ ID NO: 75748 - RNA, 22 nt, Human
aaaauucugucauuaaauugug

SEQ ID NO: 75749 - RNA, 22 nt, Human
aaaauugagaguuauagauggu

SEQ ID NO: 75750 - RNA, 22 nt, Human
aaaauuggacguagcuacucca

SEQ ID NO: 75751 - RNA, 22 nt, Human
aaaauugugaagguuucugaaa

SEQ ID NO: 75752 - RNA, 22 nt, Human
aaaauuuccaccaucuuugugu

SEQ ID NO: 75753 - RNA, 22 nt, Human
aaaauuuucagcuugacuugau

SEQ ID NO: 75754 - RNA, 20 nt, Human
aaacugucugucaguaucua

SEQ ID NO: 75755 - RNA, 22 nt, Human
aaacuguuauagcagaaaggac

SEQ ID NO: 75756 - RNA, 22 nt, Human
aaacuguugugguuuaucauua

SEQ ID NO: 75757 - RNA, 22 nt, Human
aaacuucaaggauuugcaaauc

SEQ ID NO: 75758 - RNA, 22 nt, Human
aaacuucaguaggagccaaccu

SEQ ID NO: 75759 - RNA, 22 nt, Human
aaacuucauggauaauauaaag

SEQ ID NO: 75760 - RNA, 22 nt, Human
aaacuucauuuucaacugcaaa

SEQ ID NO: 75761 - RNA, 22 nt, Human
aaacuucuggcuacaagcaaua

SEQ ID NO: 75762 - RNA, 22 nt, Human
aaacuugagucacuucucuucc

SEQ ID NO: 75763 - RNA, 22 nt, Human
aaacuuggccgcauccaccggg

SEQ ID NO: 75764 - RNA, 22 nt, Human
aaacuugugagcuaaauaaaug

SEQ ID NO: 75765 - RNA, 22 nt, Human
aaacuuuaaauuuguaccucug

SEQ ID NO: 75766 - RNA, 22 nt, Human
aaacuuuggauugugauugugc

SEQ ID NO: 75767 - RNA, 22 nt, Human
aaagaacaaaugauauaugguu

SEQ ID NO: 75768 - RNA, 22 nt, Human
aaagaacaauguggaaucuccu

SEQ ID NO: 75769 - RNA, 22 nt, Human
aaagaacucagagaggauuuua

SEQ ID NO: 75770 - RNA, 22 nt, Human
aaagaacuuaagaaauuaggcu

SEQ ID NO: 75771 - RNA, 19 nt, Human
aaagaacuuugggcuaggc

SEQ ID NO: 75772 - RNA, 22 nt, Human
aaagaagcuguggcucugggag

SEQ ID NO: 75773 - RNA, 18 nt, Human
aaagaaggauuggagagc

SEQ ID NO: 75774 - RNA, 22 nt, Human
aaagaaucacauccuucagcaa

SEQ ID NO: 75775 - RNA, 21 nt, Human
aaagaaucauggguaauuuca

SEQ ID NO: 75776 - RNA, 22 nt, Human
aaagacacaugucucuuagauu

SEQ ID NO: 75777 - RNA, 22 nt, Human
aaagacagagcuguaggggaaa

SEQ ID NO: 75778 - RNA, 22 nt, Human
aaagacauggcaagagaugggg

SEQ ID NO: 75779 - RNA, 22 nt, Human
aaagacauuagcuuagauguca

SEQ ID NO: 75780 - RNA, 22 nt, Human
aaagacauugaagaaggacuua

SEQ ID NO: 75781 - RNA, 22 nt, Human
aaagacuaaccaguugucaaaa

SEQ ID NO: 75782 - RNA, 23 nt, Human
aaagacugcugagaauuuuagga

SEQ ID NO: 75783 - RNA, 22 nt, Human
aaagacuggaaggugaggcugu

SEQ ID NO: 75784 - RNA, 21 nt, Human
aaagagacaaauggcauauac

SEQ ID NO: 75785 - RNA, 23 nt, Human
aaagagacugauacggaaguucc

SEQ ID NO: 75786 - RNA, 22 nt, Human
aaagagaugugccaaauagccu

SEQ ID NO: 75787 - RNA, 22 nt, Human
aaagagcaagcugagauuugaa

SEQ ID NO: 75788 - RNA, 21 nt, Human
aaagagcccgcugagagguuc

SEQ ID NO: 75789 - RNA, 22 nt, Human
aaagagcuaacauugccgagau

SEQ ID NO: 75790 - RNA, 22 nt, Human
aaagagcucacaguccacugga

SEQ ID NO: 75791 - RNA, 22 nt, Human
aaagaggaaccaagagcacgug

SEQ ID NO: 75792 - RNA, 22 nt, Human
aaagaggauggaguagucagcu

SEQ ID NO: 75793 - RNA, 22 nt, Human
aaagagucaaaggcaugucucu

SEQ ID NO: 75794 - RNA, 22 nt, Human
aaagagucuggcguuuuaaugg

SEQ ID NO: 75795 - RNA, 22 nt, Human
aaagaguucacggaggccaaag

SEQ ID NO: 75796 - RNA, 22 nt, Human
aaagaguuccaagucauuuuau

SEQ ID NO: 75797 - RNA, 22 nt, Human
aaagaguucuaugaucuuucca

SEQ ID NO: 75798 - RNA, 22 nt, Human
aaagaguuguuguauaacagga

SEQ ID NO: 75799 - RNA, 22 nt, Human
aaagauaauguuuccuuauucu

SEQ ID NO: 75800 - RNA, 22 nt, Human
aaagauacuuaauaguugucug

SEQ ID NO: 75801 - RNA, 20 nt, Human
aaagauacuuuuuguaaugg

SEQ ID NO: 75802 - RNA, 22 nt, Human
aaagaucagaggauagcugagu

SEQ ID NO: 75803 - RNA, 22 nt, Human
aaagaucaugcuguuuugugau

SEQ ID NO: 75804 - RNA, 22 nt, Human
aaagaucuaugggcauuuagcu

SEQ ID NO: 75805 - RNA, 22 nt, Human
aaagaugaguccggcagacaua

SEQ ID NO: 75806 - RNA, 22 nt, Human
aaagaugcauaaaugccaaugg

SEQ ID NO: 75807 - RNA, 23 nt, Human
aaagaugugaguauucauauggc

SEQ ID NO: 75808 - RNA, 22 nt, Human
aaagauguuaugaaauaacuau

SEQ ID NO: 75809 - RNA, 22 nt, Human
aaagauuaggcggcaacugggc

SEQ ID NO: 75810 - RNA, 22 nt, Human
aaagauuuaugaaguucaauua

SEQ ID NO: 75811 - RNA, 22 nt, Human
aaagcaaacagaaccccaagcu

SEQ ID NO: 75812 - RNA, 22 nt, Human
aaagcaaucagauucagauguc

SEQ ID NO: 75813 - RNA, 22 nt, Human
aaagcaaugcccguucauuauc

SEQ ID NO: 75814 - RNA, 22 nt, Human
aaagcaauggaugagaaucugu

SEQ ID NO: 75815 - RNA, 22 nt, Human
aaagcaauggcacaugauggua

SEQ ID NO: 75816 - RNA, 22 nt, Human
aaagcacagagcucccacagga

SEQ ID NO: 75817 - RNA, 22 nt, Human
aaagcacauuacaagcucaguc

SEQ ID NO: 75818 - RNA, 22 nt, Human
aaagcacuauagccaaauagcc

SEQ ID NO: 75819 - RNA, 22 nt, Human
aaagcacucguuaguauuucug

SEQ ID NO: 75820 - RNA, 22 nt, Human
aaagcagaacugagagagcugg

SEQ ID NO: 75821 - RNA, 22 nt, Human
aaacucuauaggcagaagcaau

SEQ ID NO: 75822 - RNA, 22 nt, Human
aaacucuauuucuguuggcuua

SEQ ID NO: 75823 - RNA, 22 nt, Human
aaacucucauuuuagugcacug

SEQ ID NO: 75824 - RNA, 22 nt, Human
aaacucuggagauguuuaugca

SEQ ID NO: 75825 - RNA, 22 nt, Human
aaacucuguugagauaauauuu

SEQ ID NO: 75826 - RNA, 22 nt, Human
aaacucuucauauacauaugcu

SEQ ID NO: 75827 - RNA, 22 nt, Human
aaacucuuuugcauauuagagg

SEQ ID NO: 75828 - RNA, 21 nt, Human
aaacugaagagacaggaacuu

SEQ ID NO: 75829 - RNA, 22 nt, Human
aaacugaaguagauucugaaau

SEQ ID NO: 75830 - RNA, 22 nt, Human
aaacugaauucaaguauccagu

SEQ ID NO: 75831 - RNA, 22 nt, Human
aaacugaauucccaagggcaug

SEQ ID NO: 75832 - RNA, 22 nt, Human
aaacugacaaucucaguccuau

SEQ ID NO: 75833 - RNA, 21 nt, Human
aaacugaccuugccugagaca

SEQ ID NO: 75834 - RNA, 22 nt, Human
aaacugaggaacaaggaaggau

SEQ ID NO: 75835 - RNA, 22 nt, Human
aaacugaugcucagagaggggc

SEQ ID NO: 75836 - RNA, 22 nt, Human
aaacugcuuuccacaguggcua

SEQ ID NO: 75837 - RNA, 22 nt, Human
aaacugggauucuucacaaggu

SEQ ID NO: 75838 - RNA, 22 nt, Human
aaacuggguuguggucaguggu

SEQ ID NO: 75839 - RNA, 22 nt, Human
aaacuggugucacugagggcug

SEQ ID NO: 75840 - RNA, 22 nt, Human
aaacuguauguugagaugacag

SEQ ID NO: 75841 - RNA, 22 nt, Human
aaacugugagcuaguaaauagg

SEQ ID NO: 75842 - RNA, 22 nt, Human
aaacugugcuucccaaaugccc

SEQ ID NO: 75843 - RNA, 22 nt, Human
aaacuucaacuggaaugggcua

SEQ ID NO: 75844 - RNA, 22 nt, Human
aaacuucaagauucaagccugg

SEQ ID NO: 75845 - RNA, 17 nt, Human
aaacuucacggucagcc

SEQ ID NO: 75846 - RNA, 22 nt, Human
aaacuugacaguagacagauua

SEQ ID NO: 75847 - RNA, 22 nt, Human
aaacuugacagugagacaguuu

SEQ ID NO: 75848 - RNA, 22 nt, Human
aaacuugagcagucagaugaag

SEQ ID NO: 75849 - RNA, 23 nt, Human
aaacuugcuauggcugaaaucau

SEQ ID NO: 75850 - RNA, 22 nt, Human
aaacuuguucucauguugcaga

SEQ ID NO: 75851 - RNA, 22 nt, Human
aaacuuuaagacaguccucaag

SEQ ID NO: 75852 - RNA, 22 nt, Human
aaacuuuaggaaggaauuuaca

SEQ ID NO: 75853 - RNA, 22 nt, Human
aaacuuugguauguagcaaaac

SEQ ID NO: 75854 - RNA, 22 nt, Human
aaacuuuguucguccagacuca

SEQ ID NO: 75855 - RNA, 22 nt, Human
aaacuuuguucgucugaugugg

SEQ ID NO: 75856 - RNA, 22 nt, Human
aaacuuuuauaaagcugcagau

SEQ ID NO: 75857 - RNA, 22 nt, Human
aaacuuuucuuggggaccugcc

SEQ ID NO: 75858 - RNA, 22 nt, Human
aaacuuuugguccucauggguu

SEQ ID NO: 75859 - RNA, 22 nt, Human
aaagaaaccuaucagccacaug

SEQ ID NO: 75860 - RNA, 22 nt, Human
aaagaaauaccuuucucagcuu

SEQ ID NO: 75861 - RNA, 22 nt, Human
aaagaaauagauggcauuuaaa

SEQ ID NO: 75862 - RNA, 22 nt, Human
aaagaacagauguguggugcau

SEQ ID NO: 75863 - RNA, 22 nt, Human
aaagaacuuauccuagaauuug

SEQ ID NO: 75864 - RNA, 22 nt, Human
aaagaagacagacauuucuuuc

SEQ ID NO: 75865 - RNA, 22 nt, Human
aaagaagagcaaauuuguugua

SEQ ID NO: 75866 - RNA, 22 nt, Human
aaagaaggaugggagaaauccu

SEQ ID NO: 75867 - RNA, 22 nt, Human
aaagaagguagggcuggugacu

SEQ ID NO: 75868 - RNA, 22 nt, Human
aaagaaguguugaauuugcaag

SEQ ID NO: 75869 - RNA, 22 nt, Human
aaagaauuuguacacccuacua

SEQ ID NO: 75870 - RNA, 22 nt, Human
aaagacacacagugcuucaguu

SEQ ID NO: 75871 - RNA, 22 nt, Human
aaacaaagcaucuugcuaugca

SEQ ID NO: 75872 - RNA, 22 nt, Human
aaacaaagccagggaaguuaug

SEQ ID NO: 75873 - RNA, 22 nt, Human
aaacaacaauccaaugggagcu

SEQ ID NO: 75874 - RNA, 22 nt, Human
aaacaacucggcaacugcuuuu

SEQ ID NO: 75875 - RNA, 22 nt, Human
aaacaagguacacaguaauggu

SEQ ID NO: 75876 - RNA, 22 nt, Human
aaacaagucacuuuaucuugaa

SEQ ID NO: 75877 - RNA, 22 nt, Human
aaacaauccaggaaccuguuua

SEQ ID NO: 75878 - RNA, 22 nt, Human
aaacaaugaaauucauucuuca

SEQ ID NO: 75879 - RNA, 22 nt, Human
aaacaauguagauuaccauuua

SEQ ID NO: 75880 - RNA, 22 nt, Human
aaacacaagauggccucuucug

SEQ ID NO: 75881 - RNA, 22 nt, Human
aaacacaccuuuggaacuguga

SEQ ID NO: 75882 - RNA, 19 nt, Human
aaacacagauuucuuacca

SEQ ID NO: 75883 - RNA, 22 nt, Human
aaacacagggauauauauucca

SEQ ID NO: 75884 - RNA, 22 nt, Human
aaacaccagcacuguuuacaaa

SEQ ID NO: 75885 - RNA, 22 nt, Human
aaacaccagucccaguauacac

SEQ ID NO: 75886 - RNA, 22 nt, Human
aaacacguauaaugugacagag

SEQ ID NO: 75887 - RNA, 22 nt, Human
aaacacugauggauauuuuucc

SEQ ID NO: 75888 - RNA, 20 nt, Human
aaacacuggcuggggcacag

SEQ ID NO: 75889 - RNA, 22 nt, Human
aaacacuguacaaucugcaggg

SEQ ID NO: 75890 - RNA, 22 nt, Human
aaacacugucucugguauugaa

SEQ ID NO: 75891 - RNA, 22 nt, Human
aaacacuuccuguaacaugaca

SEQ ID NO: 75892 - RNA, 21 nt, Human
aaacagagcugaguaauagau

SEQ ID NO: 75893 - RNA, 22 nt, Human
aaacagcugcacugcugauguc

SEQ ID NO: 75894 - RNA, 22 nt, Human
aaacagcuggucucaaauguuc

SEQ ID NO: 75895 - RNA, 22 nt, Human
aaacagcuuguaagguguaauu

SEQ ID NO: 75896 - RNA, 22 nt, Human
aaacaggcaucacucagcaaag

SEQ ID NO: 75897 - RNA, 22 nt, Human
aaacaguagaaguguauuuuau

SEQ ID NO: 75898 - RNA, 22 nt, Human
aaacaguauuaucaauauauuu

SEQ ID NO: 75899 - RNA, 22 nt, Human
aaacagucaaaggccuaagcua

SEQ ID NO: 75900 - RNA, 22 nt, Human
aaacaguccucuuuauuuaguc

SEQ ID NO: 75901 - RNA, 22 nt, Human
aaacagucugaugccaucugcc

SEQ ID NO: 75902 - RNA, 22 nt, Human
aaacagucuugugggcuuggag

SEQ ID NO: 75903 - RNA, 22 nt, Human
aaacagugacugguacauaaua

SEQ ID NO: 75904 - RNA, 17 nt, Human
aaacagugaguguuaug

SEQ ID NO: 75905 - RNA, 22 nt, Human
aaacagugcaggaaguuaagca

SEQ ID NO: 75906 - RNA, 18 nt, Human
aaacagugccuaaguguc

SEQ ID NO: 75907 - RNA, 22 nt, Human
aaacaguguguuucagagaggc

SEQ ID NO: 75908 - RNA, 22 nt, Human
aaacaguuacgagcgcagaccu

SEQ ID NO: 75909 - RNA, 22 nt, Human
aaacaguucucauuuguuuaga

SEQ ID NO: 75910 - RNA, 22 nt, Human
aaacaguucuccaggaagccag

SEQ ID NO: 75911 - RNA, 22 nt, Human
aaacaguuuucucauuuagugu

SEQ ID NO: 75912 - RNA, 22 nt, Human
aaacauagcacacacagcucuu

SEQ ID NO: 75913 - RNA, 22 nt, Human
aaacaucaauugcaucucccaa

SEQ ID NO: 75914 - RNA, 22 nt, Human
aaacaucauaggcaugcaugau

SEQ ID NO: 75915 - RNA, 22 nt, Human
aaacaucugacuugcuuuuuca

SEQ ID NO: 75916 - RNA, 22 nt, Human
aaacaucuucucuugauucuuu

SEQ ID NO: 75917 - RNA, 22 nt, Human
aaacaugaugccuguacuaaga

SEQ ID NO: 75918 - RNA, 22 nt, Human
aaacaugcuggauuuagaauau

SEQ ID NO: 75919 - RNA, 22 nt, Human
aaacauggccauucagacugug

SEQ ID NO: 75920 - RNA, 22 nt, Human
aaacauguaaguucagaucacc

SEQ ID NO: 75921 - RNA, 22 nt, Human
aaacauguagugcaugaggauc

SEQ ID NO: 75922 - RNA, 22 nt, Human
aaacauguuuagaaagcagcug

SEQ ID NO: 75923 - RNA, 22 nt, Human
aaacauucacucucaauuuuag

SEQ ID NO: 75924 - RNA, 22 nt, Human
aaacauuccauauauaccuugu

SEQ ID NO: 75925 - RNA, 22 nt, Human
aaacauucccuaauguguccgu

SEQ ID NO: 75926 - RNA, 22 nt, Human
aaacauugcuaaauaaugcugc

SEQ ID NO: 75927 - RNA, 23 nt, Human
aaacauuucucuuuuccugccuc

SEQ ID NO: 75928 - RNA, 22 nt, Human
aaacauuuuucuaggucuuggu

SEQ ID NO: 75929 - RNA, 22 nt, Human
aaacccaucugucugucugcag

SEQ ID NO: 75930 - RNA, 22 nt, Human
aagaaucaucugaacuuugagg

SEQ ID NO: 75931 - RNA, 23 nt, Human
aagaaucucagaauuagaaauac

SEQ ID NO: 75932 - RNA, 22 nt, Human
aagaaucuccaucugauucacu

SEQ ID NO: 75933 - RNA, 22 nt, Human
aagaaucuccauuccuguuuua

SEQ ID NO: 75934 - RNA, 22 nt, Human
aagaaucucugaucaggcuuua

SEQ ID NO: 75935 - RNA, 22 nt, Human
aagaaucugacauaauuuccug

SEQ ID NO: 75936 - RNA, 22 nt, Human
aagaaugauuacaaagcaacga

SEQ ID NO: 75937 - RNA, 22 nt, Human
aagaaugucucuggugaggcgc

SEQ ID NO: 75938 - RNA, 22 nt, Human
aagaaugugcuaaugaaaacuu

SEQ ID NO: 75939 - RNA, 22 nt, Human
aagaauguggguggauaugaug

SEQ ID NO: 75940 - RNA, 22 nt, Human
aagaauguuaguuucugauaca

SEQ ID NO: 75941 - RNA, 22 nt, Human
aagaauguucauuaaacuguug

SEQ ID NO: 75942 - RNA, 22 nt, Human
aagaauuuaaacuaaccauaug

SEQ ID NO: 75943 - RNA, 22 nt, Human
aagacaaagggguccuuggaug

SEQ ID NO: 75944 - RNA, 17 nt, Human
aagacaagacaaaugca

SEQ ID NO: 75945 - RNA, 22 nt, Human
aagacaaugcauuacuaagaag

SEQ ID NO: 75946 - RNA, 22 nt, Human
aagacaauuugauacuaguugc

SEQ ID NO: 75947 - RNA, 22 nt, Human
aagacacaaagcuucccuuuuc

SEQ ID NO: 75948 - RNA, 22 nt, Human
aagacacagcgaaauguuccug

SEQ ID NO: 75949 - RNA, 22 nt, Human
aagacaccauuugacaguggca

SEQ ID NO: 75950 - RNA, 22 nt, Human
aagacacuggguuaggcacgug

SEQ ID NO: 75951 - RNA, 21 nt, Human
aagacagaaaagccuauuuuc

SEQ ID NO: 75952 - RNA, 22 nt, Human
aagacagagacucugcaacagg

SEQ ID NO: 75953 - RNA, 22 nt, Human
aagacagagggaagcaaugaug

SEQ ID NO: 75954 - RNA, 22 nt, Human
aagacagugaucucugagagau

SEQ ID NO: 75955 - RNA, 22 nt, Human
aagacagugugucaggcaggug

SEQ ID NO: 75956 - RNA, 22 nt, Human
aagacauuacuggaaucugacu

SEQ ID NO: 75957 - RNA, 22 nt, Human
aagacauugcugcuuuuaauug

SEQ ID NO: 75958 - RNA, 22 nt, Human
aagacauuggcauugacuguaa

SEQ ID NO: 75959 - RNA, 22 nt, Human
aagacauugucauuuuauaauu

SEQ ID NO: 75960 - RNA, 22 nt, Human
aagacauuuuagagauagggaa

SEQ ID NO: 75961 - RNA, 22 nt, Human
aagaccagaggauauaaccaga

SEQ ID NO: 75962 - RNA, 22 nt, Human
aagacccuauacucagugaccc

SEQ ID NO: 75963 - RNA, 22 nt, Human
aagaccucugaaguaccuggug

SEQ ID NO: 75964 - RNA, 22 nt, Human
aagaccugccagccucauccug

SEQ ID NO: 75965 - RNA, 22 nt, Human
aagacgggagucaggugagcuc

SEQ ID NO: 75966 - RNA, 22 nt, Human
aagacucuaucuuuagagauca

SEQ ID NO: 75967 - RNA, 22 nt, Human
aagacugaguggcuuaagaaaa

SEQ ID NO: 75968 - RNA, 22 nt, Human
aagacuguacauuuuccagucu

SEQ ID NO: 75969 - RNA, 22 nt, Human
aagacuuauagucaguaauucu

SEQ ID NO: 75970 - RNA, 22 nt, Human
aagacuugaccagguugaaggc

SEQ ID NO: 75971 - RNA, 22 nt, Human
aagacuuucaaguaugcaugca

SEQ ID NO: 75972 - RNA, 20 nt, Human
aagagaagaagucuuugaaa

SEQ ID NO: 75973 - RNA, 22 nt, Human
aagagaaggauucugagccugg

SEQ ID NO: 75974 - RNA, 22 nt, Human
aagagaaggcccugacccaccc

SEQ ID NO: 75975 - RNA, 22 nt, Human
aagagaauaucgauagcacucu

SEQ ID NO: 75976 - RNA, 22 nt, Human
aagagaaugacaaggagaaccu

SEQ ID NO: 75977 - RNA, 22 nt, Human
aagagaauucugguuuuccuau

SEQ ID NO: 75978 - RNA, 22 nt, Human
aagagacaaugucuuuuggaua

SEQ ID NO: 75979 - RNA, 22 nt, Human
aagagacagagccauguuucua

SEQ ID NO: 75980 - RNA, 22 nt, Human
aagagacuaagaaagggcaaua

SEQ ID NO: 75981 - RNA, 22 nt, Human
aagagagaacucccuucgccag

SEQ ID NO: 75982 - RNA, 22 nt, Human
aagagagaagucucucugguuc

SEQ ID NO: 75983 - RNA, 22 nt, Human
aagagagagugcgcucacagaa

SEQ ID NO: 75984 - RNA, 22 nt, Human
aagagaggacauggugaaccug

SEQ ID NO: 75985 - RNA, 17 nt, Human
aagagaggcugagcugg

SEQ ID NO: 75986 - RNA, 22 nt, Human
aagagagggauuugguuuauug

SEQ ID NO: 75987 - RNA, 22 nt, Human
aagagaugaagguccugacugu

SEQ ID NO: 75988 - RNA, 22 nt, Human
aagagauuccucacucagaaug

SEQ ID NO: 75989 - RNA, 23 nt, Human
aagagcagggaauauuuauuugc

SEQ ID NO: 75990 - RNA, 20 nt, Human
aagagcauaguacaggaaga

SEQ ID NO: 75991 - RNA, 22 nt, Human
aagagcauauauguauguuugu

SEQ ID NO: 75992 - RNA, 22 nt, Human
aagagcaucaaugacucgcagu

SEQ ID NO: 75993 - RNA, 22 nt, Human
aagagcccugguugaaaauaac

SEQ ID NO: 75994 - RNA, 21 nt, Human
aagagcucuuuuguuaugguc

SEQ ID NO: 75995 - RNA, 20 nt, Human
aagagcugacucacaguggu

SEQ ID NO: 75996 - RNA, 22 nt, Human
aagagcugcacauauuuauauc

SEQ ID NO: 75997 - RNA, 22 nt, Human
aagagcugcaucuaagccauga

SEQ ID NO: 75998 - RNA, 21 nt, Human
aagagcuggaucaaggauaag

SEQ ID NO: 75999 - RNA, 22 nt, Human
aagagcuggaugaagaaaucaa

SEQ ID NO: 76000 - RNA, 22 nt, Human
aagagcuucccuguuguagagg

SEQ ID NO: 76001 - RNA, 22 nt, Human
aagagcuuggacuuucaaguca

SEQ ID NO: 76002 - RNA, 18 nt, Human
aagaggaggaaacccagg

SEQ ID NO: 76003 - RNA, 22 nt, Human
aagaggaggacgguucccagaa

SEQ ID NO: 76004 - RNA, 18 nt, Human
aagaggaggagcagguug

SEQ ID NO: 76005 - RNA, 22 nt, Human
aagaggaggaugcuuuacagcu

SEQ ID NO: 76006 - RNA, 22 nt, Human
aagaggaggauugaugugggag

SEQ ID NO: 76007 - RNA, 22 nt, Human
aagaggaguagaugugguuggu

SEQ ID NO: 76008 - RNA, 22 nt, Human
aagaggcagaaauaucgcugaa

SEQ ID NO: 76009 - RNA, 22 nt, Human
aagaggcuucagauccuucaga

SEQ ID NO: 76010 - RNA, 22 nt, Human
aagagggagggcaaaggcacug

SEQ ID NO: 76011 - RNA, 22 nt, Human
aagagggaggugcgggugcaga

SEQ ID NO: 76012 - RNA, 22 nt, Human
aagagggcagcacagguggguc

SEQ ID NO: 76013 - RNA, 22 nt, Human
aagaggggugugugucaaccca

SEQ ID NO: 76014 - RNA, 22 nt, Human
aagagguaaugacugcuugagu

SEQ ID NO: 76015 - RNA, 20 nt, Human
aagaggugauaacaggugag

SEQ ID NO: 76016 - RNA, 22 nt, Human
aagagguggguuggacagauac

SEQ ID NO: 76017 - RNA, 22 nt, Human
aagagguuuaacugacucacag

SEQ ID NO: 76018 - RNA, 22 nt, Human
aagaguaugcaugcauguuugu

SEQ ID NO: 76019 - RNA, 22 nt, Human
aagagucacuccauaaauccca

SEQ ID NO: 76020 - RNA, 22 nt, Human
aagagugaguauuuccugauua

SEQ ID NO: 76021 - RNA, 20 nt, Human
aacacagauaccaaagguug

SEQ ID NO: 76022 - RNA, 22 nt, Human
aacacagcaucccuuaggucgu

SEQ ID NO: 76023 - RNA, 22 nt, Human
aacacaggaaauugguaaaugg

SEQ ID NO: 76024 - RNA, 22 nt, Human
aacacaggcauacuggcuccag

SEQ ID NO: 76025 - RNA, 20 nt, Human
aacacaggguuaccaucaga

SEQ ID NO: 76026 - RNA, 22 nt, Human
aacacauaggcagagcaugaca

SEQ ID NO: 76027 - RNA, 22 nt, Human
aacacauauuuuugcugagcau

SEQ ID NO: 76028 - RNA, 22 nt, Human
aacacaugaaaguuggugagua

SEQ ID NO: 76029 - RNA, 22 nt, Human
aacacaugccuuaagaauaagu

SEQ ID NO: 76030 - RNA, 19 nt, Human
aacaccagagucaggaguc

SEQ ID NO: 76031 - RNA, 22 nt, Human
aacacuaacauauagucagugg

SEQ ID NO: 76032 - RNA, 22 nt, Human
aacacuaaugggagaacaaccc

SEQ ID NO: 76033 - RNA, 22 nt, Human
aacacuagucuagaccagacca

SEQ ID NO: 76034 - RNA, 22 nt, Human
aacacuaucugccuuacaggga

SEQ ID NO: 76035 - RNA, 22 nt, Human
aacacugaagaccagguaauuu

SEQ ID NO: 76036 - RNA, 22 nt, Human
aacacugaagccguuaaaccuu

SEQ ID NO: 76037 - RNA, 22 nt, Human
aacacugacgacgugaacuaaa

SEQ ID NO: 76038 - RNA, 22 nt, Human
aacacugagcuauuacggugga

SEQ ID NO: 76039 - RNA, 22 nt, Human
aacaggcacuaagcaugugggg

SEQ ID NO: 76040 - RNA, 22 nt, Human
aacaggcagcagacugaaucug

SEQ ID NO: 76041 - RNA, 22 nt, Human
aacaggcccugccauuuaucca

SEQ ID NO: 76042 - RNA, 22 nt, Human
aacaggcuauuucuuuacaaac

SEQ ID NO: 76043 - RNA, 22 nt, Human
aacaggcuccaugaacaacgug

SEQ ID NO: 76044 - RNA, 22 nt, Human
aacaggcuccuugugaauggau

SEQ ID NO: 76045 - RNA, 22 nt, Human
aacaggcuggccuugaagcagu

SEQ ID NO: 76046 - RNA, 22 nt, Human
aacaggcuuccaggagggacga

SEQ ID NO: 76047 - RNA, 22 nt, Human
aacaggcuuuuggaaaguuaca

SEQ ID NO: 76048 - RNA, 22 nt, Human
aacagggacaaggauagagaaa

SEQ ID NO: 76049 - RNA, 20 nt, Human
aacagggcagaagcggagac

SEQ ID NO: 76050 - RNA, 22 nt, Human
aacaguaauggcauugccauga

SEQ ID NO: 76051 - RNA, 22 nt, Human
aacaguaaugugguguuggguu

SEQ ID NO: 76052 - RNA, 22 nt, Human
aacaguacaacuccacaagacu

SEQ ID NO: 76053 - RNA, 22 nt, Human
aacaguacuggacaaggaguca

SEQ ID NO: 76054 - RNA, 22 nt, Human
aacaguacuugauaauuugcac

SEQ ID NO: 76055 - RNA, 20 nt, Human
aacagucaaauguugauugc

SEQ ID NO: 76056 - RNA, 22 nt, Human
aacagucuaaauuauacccuuu

SEQ ID NO: 76057 - RNA, 22 nt, Human
aacagucuacugaauaucugcg

SEQ ID NO: 76058 - RNA, 20 nt, Human
aacagugaaugaggccagag

SEQ ID NO: 76059 - RNA, 22 nt, Human
aacagugagaagguggacagga

SEQ ID NO: 76060 - RNA, 22 nt, Human
aacagugcugauuauuuuaccu

SEQ ID NO: 76061 - RNA, 22 nt, Human
aacaguggucuggggaguggag

SEQ ID NO: 76062 - RNA, 22 nt, Human
aacagugucaggauuacagaua

SEQ ID NO: 76063 - RNA, 22 nt, Human
aacaguguguuuuguuauuaag

SEQ ID NO: 76064 - RNA, 22 nt, Human
aacaguugauguagcuuuggag

SEQ ID NO: 76065 - RNA, 22 nt, Human
aacaguuuaucaaguuuuuaca

SEQ ID NO: 76066 - RNA, 22 nt, Human
aacaguuugccugaaauguauu

SEQ ID NO: 76067 - RNA, 22 nt, Human
aacaguuuguggauagcuugua

SEQ ID NO: 76068 - RNA, 22 nt, Human
aacauaauguggccaaagucac

SEQ ID NO: 76069 - RNA, 22 nt, Human
aacauacuuauacuaaauaaug

SEQ ID NO: 76070 - RNA, 22 nt, Human
aacauacuuguacuaugcauau

SEQ ID NO: 76071 - RNA, 22 nt, Human
aacauagaagaugguuaauugu

SEQ ID NO: 76072 - RNA, 22 nt, Human
aacauagaauuguuauauuuuc

SEQ ID NO: 76073 - RNA, 22 nt, Human
aacauauuuggcugauauuccc

SEQ ID NO: 76074 - RNA, 22 nt, Human
aacaucagaaguagaagacuca

SEQ ID NO: 76075 - RNA, 22 nt, Human
aacaucagcacacaauagcaag

SEQ ID NO: 76076 - RNA, 22 nt, Human
aacaucaucaugaacaacuaau

SEQ ID NO: 76077 - RNA, 22 nt, Human
aacaucucagaagugacccuga

SEQ ID NO: 76078 - RNA, 22 nt, Human
aacaucucauggacuacauucu

SEQ ID NO: 76079 - RNA, 22 nt, Human
aacaucuuaagauagaagggga

SEQ ID NO: 76080 - RNA, 22 nt, Human
aacaucuugaagauugggaaag

SEQ ID NO: 76081 - RNA, 22 nt, Human
aacaucuuguacugcacauuuu

SEQ ID NO: 76082 - RNA, 19 nt, Human
aacaucuuuccaguagagg

SEQ ID NO: 76083 - RNA, 22 nt, Human
aacaucuuugauaaacuuagug

SEQ ID NO: 76084 - RNA, 22 nt, Human
aacaugaaaagcccagagaggu

SEQ ID NO: 76085 - RNA, 22 nt, Human
aacaugaaaguugcuaagugca

SEQ ID NO: 76086 - RNA, 22 nt, Human
aacaugaagguaggaugguuuu

SEQ ID NO: 76087 - RNA, 22 nt, Human
aacaugagcauucuugugcuug

SEQ ID NO: 76088 - RNA, 21 nt, Human
aacaugauauguguauggauu

SEQ ID NO: 76089 - RNA, 22 nt, Human
aacaugaugacaaagguauauu

SEQ ID NO: 76090 - RNA, 22 nt, Human
aacaugauggggaagaacaaga

SEQ ID NO: 76091 - RNA, 22 nt, Human
aacaugauuuaguauaaugcag

SEQ ID NO: 76092 - RNA, 22 nt, Human
aacaugcauuugugggauggaa

SEQ ID NO: 76093 - RNA, 22 nt, Human
aacaugcuaugugucugaauca

SEQ ID NO: 76094 - RNA, 22 nt, Human
aacaugugucuggcuagauugu

SEQ ID NO: 76095 - RNA, 22 nt, Human
aacauucaaaacccaguucagu

SEQ ID NO: 76096 - RNA, 22 nt, Human
aacauucagcuggguggagcag

SEQ ID NO: 76097 - RNA, 22 nt, Human
aacauucucauugggauaugug

SEQ ID NO: 76098 - RNA, 22 nt, Human
aacauucuuuggaggauuauuc

SEQ ID NO: 76099 - RNA, 22 nt, Human
aacauugaaauauuugcaauag

SEQ ID NO: 76100 - RNA, 22 nt, Human
aacauugaauuuaaaauacagu

SEQ ID NO: 76101 - RNA, 22 nt, Human
aacauugagcucuggaguggaa

SEQ ID NO: 76102 - RNA, 22 nt, Human
aacauugagcugguggagagga

SEQ ID NO: 76103 - RNA, 22 nt, Human
aacauugccaugguuaauuuua

SEQ ID NO: 76104 - RNA, 22 nt, Human
aacauugcugaaagcugggaca

SEQ ID NO: 76105 - RNA, 20 nt, Human
aacauuguuuguaaaagcag

SEQ ID NO: 76106 - RNA, 22 nt, Human
aacauuguuuucccuauaucca

SEQ ID NO: 76107 - RNA, 22 nt, Human
aacauuguuuugcacaacucuu

SEQ ID NO: 76108 - RNA, 21 nt, Human
aacauuucaggauccaaauug

SEQ ID NO: 76109 - RNA, 22 nt, Human
aacauuuccggccuuuuguucu

SEQ ID NO: 76110 - RNA, 21 nt, Human
aacauuucugggagaacucac

SEQ ID NO: 76111 - RNA, 22 nt, Human
aacauuugcagaggaaagcuau

SEQ ID NO: 76112 - RNA, 23 nt, Human
aacauuuguaaggugauuuuguu

SEQ ID NO: 76113 - RNA, 22 nt, Human
aacauuuguuucguuaugugaa

SEQ ID NO: 76114 - RNA, 22 nt, Human
aacauuuguuuggcuucaauua

SEQ ID NO: 76115 - RNA, 22 nt, Human
aaccaaggacagcuagugaugc

SEQ ID NO: 76116 - RNA, 22 nt, Human
aaccacaacacuaaaugcuggu

SEQ ID NO: 76117 - RNA, 22 nt, Human
aaccacagacccagacuagaga

SEQ ID NO: 76118 - RNA, 22 nt, Human
aaccacagagcccccucagaug

SEQ ID NO: 76119 - RNA, 22 nt, Human
aaccacaugaaaagaguaauau

SEQ ID NO: 76120 - RNA, 22 nt, Human
aaccaccaccaucuaguuccaa

SEQ ID NO: 76121 - RNA, 22 nt, Human
aaccagaaggaaucugagcuga

SEQ ID NO: 76122 - RNA, 22 nt, Human
aaccagagaaauggagugauaa

SEQ ID NO: 76123 - RNA, 22 nt, Human
aaccagagagucuucuucauug

SEQ ID NO: 76124 - RNA, 22 nt, Human
aaccagaucgacuguuaacagc

SEQ ID NO: 76125 - RNA, 22 nt, Human
aaccagcuaaacuuugcucgaa

SEQ ID NO: 76126 - RNA, 22 nt, Human
aaccagcugagaaugcuucugc

SEQ ID NO: 76127 - RNA, 22 nt, Human
aaccaggaaaaguuaugaauag

SEQ ID NO: 76128 - RNA, 22 nt, Human
aaccaggaauugcagggcugca

SEQ ID NO: 76129 - RNA, 22 nt, Human
aaccaggacaauuugaauagaa

SEQ ID NO: 76130 - RNA, 22 nt, Human
aaccaggacaauuuugaaagua

SEQ ID NO: 76131 - RNA, 20 nt, Human
aaccaguacccaaguaggaa

SEQ ID NO: 76132 - RNA, 22 nt, Human
aaccaguauguuuaggagguga

SEQ ID NO: 76133 - RNA, 22 nt, Human
aaccaguuguauguccuccagc

SEQ ID NO: 76134 - RNA, 22 nt, Human
aaccaguuuaagcaaauaacug

SEQ ID NO: 76135 - RNA, 22 nt, Human
aaccauuagucaaucagcaaga

SEQ ID NO: 76136 - RNA, 22 nt, Human
aaccauucacaguguagccaaa

SEQ ID NO: 76137 - RNA, 22 nt, Human
aaccauucacugaacaguucaa

SEQ ID NO: 76138 - RNA, 22 nt, Human
aagaguuaaaugaaugaguggg

SEQ ID NO: 76139 - RNA, 22 nt, Human
aagaguuagcucaauaacuuga

SEQ ID NO: 76140 - RNA, 22 nt, Human
aagaguuuaauuuugucuagac

SEQ ID NO: 76141 - RNA, 22 nt, Human
aagaguuuaccagugcugcuuc

SEQ ID NO: 76142 - RNA, 23 nt, Human
aagaguuuagagucuugcagagu

SEQ ID NO: 76143 - RNA, 22 nt, Human
aagaguuuccaugcucugugcu

SEQ ID NO: 76144 - RNA, 22 nt, Human
aagaguuucugggucaaggauu

SEQ ID NO: 76145 - RNA, 22 nt, Human
aagaguuuucucugauggcauu

SEQ ID NO: 76146 - RNA, 22 nt, Human
aagauaaguaacgagccucagu

SEQ ID NO: 76147 - RNA, 22 nt, Human
aagauacacguuguauugaaua

SEQ ID NO: 76148 - RNA, 22 nt, Human
aagggcccggcugugggcagag

SEQ ID NO: 76149 - RNA, 22 nt, Human
aagggcugaaagaccuugggca

SEQ ID NO: 76150 - RNA, 22 nt, Human
aagggcugaucucacuuucuuu

SEQ ID NO: 76151 - RNA, 22 nt, Human
aagggcugcuguagaagcagag

SEQ ID NO: 76152 - RNA, 22 nt, Human
aagggcuggagaggaaagguug

SEQ ID NO: 76153 - RNA, 22 nt, Human
aagggcuggcccugggaagagu

SEQ ID NO: 76154 - RNA, 22 nt, Human
aagggcuguaguuuguugauca

SEQ ID NO: 76155 - RNA, 22 nt, Human
aaggggaaguagcaccagaggu

SEQ ID NO: 76156 - RNA, 22 nt, Human
aaggggaguuagugauaaaacc

SEQ ID NO: 76157 - RNA, 22 nt, Human
aaggggauuuaagguaagaaga

SEQ ID NO: 76158 - RNA, 21 nt, Human
aaggggcaaacccaggacacc

SEQ ID NO: 76159 - RNA, 22 nt, Human
aaggggcaugcuuuugccagga

SEQ ID NO: 76160 - RNA, 22 nt, Human
aagggggccacaccugguguga

SEQ ID NO: 76161 - RNA, 22 nt, Human
aagggggcccagcacuaaguug

SEQ ID NO: 76162 - RNA, 19 nt, Human
aagggucacaagcagcaga

SEQ ID NO: 76163 - RNA, 22 nt, Human
aagggugggcaccgccagguca

SEQ ID NO: 76164 - RNA, 22 nt, Human
aagggugggcccuggcagccau

SEQ ID NO: 76165 - RNA, 22 nt, Human
aaggguuggggaagagcaaauu

SEQ ID NO: 76166 - RNA, 22 nt, Human
aagguaaugaaacagcagcuaa

SEQ ID NO: 76167 - RNA, 22 nt, Human
aagguacaaaguauuauuuaaa

SEQ ID NO: 76168 - RNA, 22 nt, Human
aagguacaaaguuauacagcgu

SEQ ID NO: 76169 - RNA, 22 nt, Human
aagguacagaaauuaacaagga

SEQ ID NO: 76170 - RNA, 22 nt, Human
aagguacaggcauugcugcagc

SEQ ID NO: 76171 - RNA, 22 nt, Human
aagguacagggaaggagcaaga

SEQ ID NO: 76172 - RNA, 22 nt, Human
aagguacaguuuuaagaauaag

SEQ ID NO: 76173 - RNA, 22 nt, Human
aagguauagaguuuggaaaaau

SEQ ID NO: 76174 - RNA, 22 nt, Human
aagguauaucugauccaugagg

SEQ ID NO: 76175 - RNA, 22 nt, Human
aagguauuauuugcaaucauuu

SEQ ID NO: 76176 - RNA, 22 nt, Human
aagguauuggggaauauuugac

SEQ ID NO: 76177 - RNA, 18 nt, Human
aagucucugaaagcuuuu

SEQ ID NO: 76178 - RNA, 22 nt, Human
aagucugagugucagugcaagu

SEQ ID NO: 76179 - RNA, 22 nt, Human
aagucuggaaccucaugcuggc

SEQ ID NO: 76180 - RNA, 18 nt, Human
aagucuggcagcuuuccc

SEQ ID NO: 76181 - RNA, 21 nt, Human
aagucugguugauuccuuugc

SEQ ID NO: 76182 - RNA, 22 nt, Human
aagucuuagcaacuaucgcuuu

SEQ ID NO: 76183 - RNA, 22 nt, Human
aagucuuaggaaauagcaaaga

SEQ ID NO: 76184 - RNA, 22 nt, Human
aagucuucagacuggagagauu

SEQ ID NO: 76185 - RNA, 22 nt, Human
aagucuuuugcugucauaggug

SEQ ID NO: 76186 - RNA, 22 nt, Human
aagucuuuuguucaggcuggca

SEQ ID NO: 76187 - RNA, 22 nt, Human
aagugaaauugccauucuuaua

SEQ ID NO: 76188 - RNA, 22 nt, Human
aagugaauaaaauuguguucuu

SEQ ID NO: 76189 - RNA, 22 nt, Human
aagugaaugaugugaaguguaa

SEQ ID NO: 76190 - RNA, 22 nt, Human
aagugaauuucauuccaauucu

SEQ ID NO: 76191 - RNA, 22 nt, Human
aagugacaaaaggguauccaaa

SEQ ID NO: 76192 - RNA, 22 nt, Human
aagugacacauuugugaugaau

SEQ ID NO: 76193 - RNA, 22 nt, Human
aagugacaccucuucccuuucc

SEQ ID NO: 76194 - RNA, 22 nt, Human
aagugacauaccuuacauaugu

SEQ ID NO: 76195 - RNA, 22 nt, Human
aagugaccucaugguuucuccu

SEQ ID NO: 76196 - RNA, 22 nt, Human
aagugacuauuugaguacauca

SEQ ID NO: 76197 - RNA, 22 nt, Human
aagugagauuauauguacggga

SEQ ID NO: 76198 - RNA, 22 nt, Human
aagugauuauuuaaugcgguuu

SEQ ID NO: 76199 - RNA, 22 nt, Human
aagugauucauugaugaugagg

SEQ ID NO: 76200 - RNA, 22 nt, Human
aagugauuuagucuuauaaagg

SEQ ID NO: 76201 - RNA, 22 nt, Human
aagugauuuucuucuuaguuau

SEQ ID NO: 76202 - RNA, 22 nt, Human
aagugcaaauuuaagaaggcau

SEQ ID NO: 76203 - RNA, 22 nt, Human
aagugcauaaguaugauuauuu

SEQ ID NO: 76204 - RNA, 22 nt, Human
aagugccugaccuagccuggag

SEQ ID NO: 76205 - RNA, 22 nt, Human
aagugcugggauuacaggcguc

SEQ ID NO: 76206 - RNA, 22 nt, Human
aagugcuuagaaguugcauuag

SEQ ID NO: 76207 - RNA, 22 nt, Human
aagugcuuaggucaaaggacau

SEQ ID NO: 76208 - RNA, 22 nt, Human
aagugcuuccauguuugagugu

SEQ ID NO: 76209 - RNA, 22 nt, Human
aagugcuuggcuaaugguuaug

SEQ ID NO: 76210 - RNA, 22 nt, Human
aagugcuuuauaaacaaugaag

SEQ ID NO: 76211 - RNA, 22 nt, Human
aagugcuuucauauagucuuaa

SEQ ID NO: 76212 - RNA, 22 nt, Human
aaguggagagcccuggaggucu

SEQ ID NO: 76213 - RNA, 22 nt, Human
aagugguagagagagcauaagc

SEQ ID NO: 76214 - RNA, 22 nt, Human
aagugguuuuaagagguuccuu

SEQ ID NO: 76215 - RNA, 23 nt, Human
aagugguuuugaacccggacccu

SEQ ID NO: 76216 - RNA, 22 nt, Human
aaguguaagcaaagcucaagcu

SEQ ID NO: 76217 - RNA, 22 nt, Human
aaguguacaugaacacaugaca

SEQ ID NO: 76218 - RNA, 22 nt, Human
aaguguauuaagcaacguuauu

SEQ ID NO: 76219 - RNA, 22 nt, Human
aagugucugacacaaaauaugu

SEQ ID NO: 76220 - RNA, 22 nt, Human
aagugucugauggagcgaaaug

SEQ ID NO: 76221 - RNA, 22 nt, Human
aagugucugcaaaaugacagag

SEQ ID NO: 76222 - RNA, 22 nt, Human
aagugucuuaacuccuuuuggg

SEQ ID NO: 76223 - RNA, 22 nt, Human
aagugugaauuuuagagucagg

SEQ ID NO: 76224 - RNA, 22 nt, Human
aagugugauuuguagaaugccu

SEQ ID NO: 76225 - RNA, 22 nt, Human
aagugugggaaguagguggcga

SEQ ID NO: 76226 - RNA, 22 nt, Human
aagugugggacuagggcuccag

SEQ ID NO: 76227 - RNA, 22 nt, Human
aaguguuacagaaacaaaugaa

SEQ ID NO: 76228 - RNA, 22 nt, Human
aaguguuaggguaaaguuggua

SEQ ID NO: 76229 - RNA, 22 nt, Human
aaguguucuacacuuugaccuu

SEQ ID NO: 76230 - RNA, 22 nt, Human
aaguguuuauuuauaacgaucu

SEQ ID NO: 76231 - RNA, 20 nt, Human
aaguguuuugacuucugacc

SEQ ID NO: 76232 - RNA, 22 nt, Human
aaguguuuuguaaacagaaaag

SEQ ID NO: 76233 - RNA, 22 nt, Human
aaguuaaggcacaugcuuugga

SEQ ID NO: 76234 - RNA, 22 nt, Human
aaguuaauuaaccucuccauca

SEQ ID NO: 76235 - RNA, 22 nt, Human
aaguuacacauuuucauuguaa

SEQ ID NO: 76236 - RNA, 22 nt, Human
aaguuacagauugggagcagag

SEQ ID NO: 76237 - RNA, 22 nt, Human
aaguuacaggagaaagagauca

SEQ ID NO: 76238 - RNA, 22 nt, Human
aaguuacaguuaggggugauga

SEQ ID NO: 76239 - RNA, 22 nt, Human
aaguuacauauucuugggcuau

SEQ ID NO: 76240 - RNA, 22 nt, Human
aaguuacauuuuggucuaauug

SEQ ID NO: 76241 - RNA, 22 nt, Human
aaguuacuuuauguagaagaaa

SEQ ID NO: 76242 - RNA, 22 nt, Human
aaguuagagauuccaucaugcu

SEQ ID NO: 76243 - RNA, 22 nt, Human
aaguuaggaugaaugccuuagc

SEQ ID NO: 76244 - RNA, 22 nt, Human
aaguuaugaaauuuggacagcu

SEQ ID NO: 76245 - RNA, 22 nt, Human
aaguucaaauuggggccuguga

SEQ ID NO: 76246 - RNA, 22 nt, Human
aaguucaagucuccugaguaua

SEQ ID NO: 76247 - RNA, 22 nt, Human
aaguucaucuuaccuagauuuu

SEQ ID NO: 76248 - RNA, 22 nt, Human
aaguucccgaggaccacaguug

SEQ ID NO: 76249 - RNA, 22 nt, Human
aaguuccugagcucauauagca

SEQ ID NO: 76250 - RNA, 22 nt, Human
aaguucgaaauuuagggagaug

SEQ ID NO: 76251 - RNA, 22 nt, Human
aaguucuaacaucuacguggaa

SEQ ID NO: 76252 - RNA, 22 nt, Human
aaguucuagguagugcucuuuc

SEQ ID NO: 76253 - RNA, 22 nt, Human
aaguucugccaggcuguggcag

SEQ ID NO: 76254 - RNA, 22 nt, Human
aaguucuuggaggaugaagagu

SEQ ID NO: 76255 - RNA, 22 nt, Human
aaguucuuucuggaaggucugc

SEQ ID NO: 76256 - RNA, 22 nt, Human
aaguugauugcuucaaauuucu

SEQ ID NO: 76257 - RNA, 22 nt, Human
aauauccuuuccagaguacagu

SEQ ID NO: 76258 - RNA, 22 nt, Human
aauaucucaccaugacaaagca

SEQ ID NO: 76259 - RNA, 23 nt, Human
aauaucugcagcuccuggggagg

SEQ ID NO: 76260 - RNA, 22 nt, Human
aauaucuguuguucuaagccac

SEQ ID NO: 76261 - RNA, 22 nt, Human
aauaugaauuauuguuacaagu

SEQ ID NO: 76262 - RNA, 22 nt, Human
aauaugacauagaauugagaug

SEQ ID NO: 76263 - RNA, 22 nt, Human
aauaugauccuuaaccuucaug

SEQ ID NO: 76264 - RNA, 22 nt, Human
aauaugcaaauagguguaauga

SEQ ID NO: 76265 - RNA, 22 nt, Human
aauaugcacucugauuuagcag

SEQ ID NO: 76266 - RNA, 22 nt, Human
aauaugcagcaugaugaaguaa

SEQ ID NO: 76267 - RNA, 22 nt, Human
aauaugcagcuuaucuucuagg

SEQ ID NO: 76268 - RNA, 22 nt, Human
aauaugugagguauguucagug

SEQ ID NO: 76269 - RNA, 22 nt, Human
aauauguuccacuuaaagcugg

SEQ ID NO: 76270 - RNA, 22 nt, Human
aauauuaucaaaagcuuuuuca

SEQ ID NO: 76271 - RNA, 22 nt, Human
aauauucuaauaaaugcccauc

SEQ ID NO: 76272 - RNA, 22 nt, Human
aauauuuauauuucucuucccu

SEQ ID NO: 76273 - RNA, 22 nt, Human
aauauuucugcagaaugguuuu

SEQ ID NO: 76274 - RNA, 22 nt, Human
aauauuugaacagucacugagu

SEQ ID NO: 76275 - RNA, 21 nt, Human
aaucaaaugucauauccccag

SEQ ID NO: 76276 - RNA, 23 nt, Human
aaucaaguuuugaugaggaagcc

SEQ ID NO: 76277 - RNA, 22 nt, Human
aaucaauguuagucaugaauuu

SEQ ID NO: 76278 - RNA, 22 nt, Human
aaucacacaaaggcaacuuuug

SEQ ID NO: 76279 - RNA, 22 nt, Human
aaucacagaguccagcagauga

SEQ ID NO: 76280 - RNA, 22 nt, Human
aaucacaggcauagauugcucc

SEQ ID NO: 76281 - RNA, 22 nt, Human
aaucacaguggguacuagauug

SEQ ID NO: 76282 - RNA, 22 nt, Human
aaucacauagccaucucuuuga

SEQ ID NO: 76283 - RNA, 22 nt, Human
aaucacaucucauucaacagcc

SEQ ID NO: 76284 - RNA, 22 nt, Human
aaucacaugcagggccuccacc

SEQ ID NO: 76285 - RNA, 22 nt, Human
aaucacaugugcucaauuuuaa

SEQ ID NO: 76286 - RNA, 22 nt, Human
aaucacauuagugaaacacuga

SEQ ID NO: 76287 - RNA, 22 nt, Human
aaucacauuugcccccauauuc

SEQ ID NO: 76288 - RNA, 22 nt, Human
aaucagaaagaggucauguugc

SEQ ID NO: 76289 - RNA, 22 nt, Human
aaucagaaauucuacaucacaa

SEQ ID NO: 76290 - RNA, 22 nt, Human
aaucagaauuuauugaaucuuu

SEQ ID NO: 76291 - RNA, 22 nt, Human
aaucagacaguucuggauucaa

SEQ ID NO: 76292 - RNA, 22 nt, Human
aaucagagaaguuuccuaugcc

SEQ ID NO: 76293 - RNA, 22 nt, Human
aaucagagcccucugagcuuca

SEQ ID NO: 76294 - RNA, 22 nt, Human
aaucagaggaagucaacggauc

SEQ ID NO: 76295 - RNA, 22 nt, Human
aaucagcagaagagaggucuua

SEQ ID NO: 76296 - RNA, 22 nt, Human
aauaacuugaagaucucuucca

SEQ ID NO: 76297 - RNA, 22 nt, Human
aauaagaacuccauuuacucgu

SEQ ID NO: 76298 - RNA, 22 nt, Human
aauaagacucugcuagaaauuc

SEQ ID NO: 76299 - RNA, 22 nt, Human
aauaagagcacuggcuuuggag

SEQ ID NO: 76300 - RNA, 22 nt, Human
aauaagauaagauuucugcucu

SEQ ID NO: 76301 - RNA, 22 nt, Human
aauaagauccugaagauauguu

SEQ ID NO: 76302 - RNA, 22 nt, Human
aauaagauugacacaaguaccu

SEQ ID NO: 76303 - RNA, 22 nt, Human
aauaagcuggagcuauauugag

SEQ ID NO: 76304 - RNA, 23 nt, Human
aauaaggccaaacuaucuggucu

SEQ ID NO: 76305 - RNA, 22 nt, Human
aauaagugaugaugagucacuc

SEQ ID NO: 76306 - RNA, 22 nt, Human
aauaaucucccuuuuuguaugu

SEQ ID NO: 76307 - RNA, 22 nt, Human
aauaaugaacauuuaaaaccug

SEQ ID NO: 76308 - RNA, 22 nt, Human
aauaauguacauacauauuucg

SEQ ID NO: 76309 - RNA, 23 nt, Human
aauaaugucuugugcucucacuu

SEQ ID NO: 76310 - RNA, 22 nt, Human
aauaaugucuuuggcuugacca

SEQ ID NO: 76311 - RNA, 22 nt, Human
aauaauguuaugucauucuucu

SEQ ID NO: 76312 - RNA, 19 nt, Human
aauaauguucaugagauug

SEQ ID NO: 76313 - RNA, 22 nt, Human
aauaauuuccagccaacuggaa

SEQ ID NO: 76314 - RNA, 22 nt, Human
aauacaagauuuauaguuguuu

SEQ ID NO: 76315 - RNA, 22 nt, Human
aauacacuauuuugugcucagu

SEQ ID NO: 76316 - RNA, 22 nt, Human
aauacagauggcaugugaagau

SEQ ID NO: 76317 - RNA, 21 nt, Human
aauacagugaagaauuucuuu

SEQ ID NO: 76318 - RNA, 22 nt, Human
aauacauauggaauuccauguu

SEQ ID NO: 76319 - RNA, 20 nt, Human
aauacaugagcacacuuuca

SEQ ID NO: 76320 - RNA, 22 nt, Human
aauaccaccucauucuggaggc

SEQ ID NO: 76321 - RNA, 22 nt, Human
aauaccuuuucagugcacaaaa

SEQ ID NO: 76322 - RNA, 22 nt, Human
aauacuauguugugacacauga

SEQ ID NO: 76323 - RNA, 22 nt, Human
aauacugugggaugcaguagga

SEQ ID NO: 76324 - RNA, 22 nt, Human
aauagaacaauaauuguaaacu

SEQ ID NO: 76325 - RNA, 22 nt, Human
aauagaauuuaaaugcaguggc

SEQ ID NO: 76326 - RNA, 22 nt, Human
aauagacaagcacccugguaaa

SEQ ID NO: 76327 - RNA, 22 nt, Human
aauagacaauucuagccaacau

SEQ ID NO: 76328 - RNA, 22 nt, Human
aauagacuccagggucuauuuu

SEQ ID NO: 76329 - RNA, 22 nt, Human
aauagauacuacuuagauguag

SEQ ID NO: 76330 - RNA, 20 nt, Human
aauagcacagcucaaacauu

SEQ ID NO: 76331 - RNA, 22 nt, Human
aauagcaccugagguaguuugu

SEQ ID NO: 76332 - RNA, 22 nt, Human
aauagcauagaguuaaaaugca

SEQ ID NO: 76333 - RNA, 22 nt, Human
aauagcaucuucccugguaacc

SEQ ID NO: 76334 - RNA, 22 nt, Human
aauagcauguucaugauaaaau

SEQ ID NO: 76335 - RNA, 22 nt, Human
aauagcauuuuuaagggaauca

SEQ ID NO: 76336 - RNA, 22 nt, Human
aauagcugggaccugaauuagc

SEQ ID NO: 76337 - RNA, 22 nt, Human
aauagcuuaguccugauucugu

SEQ ID NO: 76338 - RNA, 22 nt, Human
aauagcuuuuacuccuccgagg

SEQ ID NO: 76339 - RNA, 22 nt, Human
aauaggaaaauauuuaacaaga

SEQ ID NO: 76340 - RNA, 22 nt, Human
aauaggcugagccauuucaagu

SEQ ID NO: 76341 - RNA, 22 nt, Human
aauaguaaaagauacagcuaau

SEQ ID NO: 76342 - RNA, 22 nt, Human
aauaguauuuauuuggaaaaag

SEQ ID NO: 76343 - RNA, 22 nt, Human
aauaguccucuccuuggaauuu

SEQ ID NO: 76344 - RNA, 22 nt, Human
aauagugcuuacauuaucauga

SEQ ID NO: 76345 - RNA, 22 nt, Human
aauaguguuugaagcaugauag

SEQ ID NO: 76346 - RNA, 22 nt, Human
aauaguuugaauuuaucagaug

SEQ ID NO: 76347 - RNA, 22 nt, Human
aauauaauuuuauuccuagagu

SEQ ID NO: 76348 - RNA, 22 nt, Human
aauauagaaucacuuuccuuca

SEQ ID NO: 76349 - RNA, 22 nt, Human
aauauagcucacuauaccaugg

SEQ ID NO: 76350 - RNA, 22 nt, Human
aauauaugacuccacugcauga

SEQ ID NO: 76351 - RNA, 22 nt, Human
aauauaugagggagcuauuuga

SEQ ID NO: 76352 - RNA, 22 nt, Human
aauauaugugguauugaccagc

SEQ ID NO: 76353 - RNA, 23 nt, Human
aauauauguguuuuucugcuuca

SEQ ID NO: 76354 - RNA, 22 nt, Human
aauaucagcacuuuugugguau

SEQ ID NO: 76355 - RNA, 22 nt, Human
aauaucaguauauuguaucagu

SEQ ID NO: 76356 - RNA, 22 nt, Human
aauauccacuucaauacaggca

SEQ ID NO: 76357 - RNA, 22 nt, Human
aauaucugucucuaaugcauau

SEQ ID NO: 76358 - RNA, 22 nt, Human
aauaugcauguauacaugugua

SEQ ID NO: 76359 - RNA, 22 nt, Human
aauaugcauuauacagacugau

SEQ ID NO: 76360 - RNA, 22 nt, Human
aauauggcuuguuacuauguuu

SEQ ID NO: 76361 - RNA, 22 nt, Human
aauaugucucuggcuagacauu

SEQ ID NO: 76362 - RNA, 22 nt, Human
aauauguuuauaagauaucuuc

SEQ ID NO: 76363 - RNA, 22 nt, Human
aauauucaaguuauucuuucuu

SEQ ID NO: 76364 - RNA, 22 nt, Human
aauauuucuccuucguuauagc

SEQ ID NO: 76365 - RNA, 22 nt, Human
aauauuucuggugcuucucacu

SEQ ID NO: 76366 - RNA, 22 nt, Human
aaugguuucugaaguuaggcag

SEQ ID NO: 76367 - RNA, 22 nt, Human
aaugguuuucuagaacaugaaa

SEQ ID NO: 76368 - RNA, 22 nt, Human
aaugguuuugcagguuugugga

SEQ ID NO: 76369 - RNA, 22 nt, Human
aaugguuuuuagugagaucgau

SEQ ID NO: 76370 - RNA, 22 nt, Human
aauguaaacagcaagagaaggg

SEQ ID NO: 76371 - RNA, 22 nt, Human
aauguaacagcaacaacaaugg

SEQ ID NO: 76372 - RNA, 22 nt, Human
aauguacacugaaagccuauca

SEQ ID NO: 76373 - RNA, 22 nt, Human
aauguacagcugucuuuccucc

SEQ ID NO: 76374 - RNA, 22 nt, Human
aauguacaggcuggcuaugggg

SEQ ID NO: 76375 - RNA, 22 nt, Human
aauguacaucucaguguaguac

SEQ ID NO: 76376 - RNA, 22 nt, Human
aauguagaugagauauuuuuug

SEQ ID NO: 76377 - RNA, 22 nt, Human
aauguauaaccauaggaaauuu

SEQ ID NO: 76378 - RNA, 20 nt, Human
aauguauauuuuaugccagg

SEQ ID NO: 76379 - RNA, 22 nt, Human
aauguaugugauuauuccucua

SEQ ID NO: 76380 - RNA, 22 nt, Human
aauguauuccucaugcaagagu

SEQ ID NO: 76381 - RNA, 22 nt, Human
aauguauucugggaaaauguua

SEQ ID NO: 76382 - RNA, 22 nt, Human
aaugucaagggaagcaggaaau

SEQ ID NO: 76383 - RNA, 22 nt, Human
aaugucaaucucagagaacaca

SEQ ID NO: 76384 - RNA, 22 nt, Human
aaugucaugggaauuuauucau

SEQ ID NO: 76385 - RNA, 22 nt, Human
aaugucauuuaaaauaauucug

SEQ ID NO: 76386 - RNA, 17 nt, Human
aauguccuuggaccaca

SEQ ID NO: 76387 - RNA, 22 nt, Human
aaugucuauuaaacugucauaa

SEQ ID NO: 76388 - RNA, 22 nt, Human
aaugucugaaaaucagacugca

SEQ ID NO: 76389 - RNA, 22 nt, Human
aaugucugaggcucaucugagg

SEQ ID NO: 76390 - RNA, 22 nt, Human
aaugucugagucucuguauccc

SEQ ID NO: 76391 - RNA, 22 nt, Human
aaugucuucaguucuguauugu

SEQ ID NO: 76392 - RNA, 22 nt, Human
aaugucuuuauuucagguuuac

SEQ ID NO: 76393 - RNA, 22 nt, Human
aaugucuuuuaaauguugaggu

SEQ ID NO: 76394 - RNA, 22 nt, Human
aaugucuuuucccuuacuuucc

SEQ ID NO: 76395 - RNA, 22 nt, Human
aaugugaaucuuccuuuuugau

SEQ ID NO: 76396 - RNA, 22 nt, Human
aaugugacugaauauuuacucu

SEQ ID NO: 76397 - RNA, 22 nt, Human
aaugugagccaaugcccguggg

SEQ ID NO: 76398 - RNA, 22 nt, Human
aaugugauuuucccaguagaau

SEQ ID NO: 76399 - RNA, 22 nt, Human
aaugugcugguaacugcuuugc

SEQ ID NO: 76400 - RNA, 22 nt, Human
aaugugcuucuggcugugguca

SEQ ID NO: 76401 - RNA, 19 nt, Human
aaugugcuugggagacugc

SEQ ID NO: 76402 - RNA, 22 nt, Human
aauguggacucuuguauuuuuc

SEQ ID NO: 76403 - RNA, 22 nt, Human
aauguggccacuuuuuucuggg

SEQ ID NO: 76404 - RNA, 22 nt, Human
aaugugguuaacccauuuaaga

SEQ ID NO: 76405 - RNA, 22 nt, Human
aauguguacuuuuucaugcuca

SEQ ID NO: 76406 - RNA, 22 nt, Human
aauguguagcauuuaaugcagu

SEQ ID NO: 76407 - RNA, 22 nt, Human
aauguguagucauugaucaaga

SEQ ID NO: 76408 - RNA, 22 nt, Human
aauguguauaugaacauacagg

SEQ ID NO: 76409 - RNA, 22 nt, Human
aaugugucuaugugguucacag

SEQ ID NO: 76410 - RNA, 22 nt, Human
aauguguguauuucuaggcgag

SEQ ID NO: 76411 - RNA, 22 nt, Human
aauguguuauuucagaauccag

SEQ ID NO: 76412 - RNA, 22 nt, Human
aauguguuuauuuagugauuua

SEQ ID NO: 76413 - RNA, 22 nt, Human
aauguguuuuaugagagaauau

SEQ ID NO: 76414 - RNA, 22 nt, Human
aauguuaauuuacugucuucau

SEQ ID NO: 76415 - RNA, 22 nt, Human
aauguuacaggacaaagaugga

SEQ ID NO: 76416 - RNA, 22 nt, Human
aauguuauuacacuugugaaau

SEQ ID NO: 76417 - RNA, 22 nt, Human
aauguucaaaagcaucagugaa

SEQ ID NO: 76418 - RNA, 22 nt, Human
aauguucaaacagaucacuuag

SEQ ID NO: 76419 - RNA, 22 nt, Human
aauguucaacagauggauauuu

SEQ ID NO: 76420 - RNA, 22 nt, Human
aauguucagcgagggaugcuag

SEQ ID NO: 76421 - RNA, 22 nt, Human
aauguucauugauuaaaugaau

SEQ ID NO: 76422 - RNA, 22 nt, Human
aauguuccaccaacauuuggga

SEQ ID NO: 76423 - RNA, 22 nt, Human
aauguucucaacaaaaggaagc

SEQ ID NO: 76424 - RNA, 22 nt, Human
aauguucugggagagaagcugu

SEQ ID NO: 76425 - RNA, 22 nt, Human
aauguugaggauaucagaaaau

SEQ ID NO: 76426 - RNA, 22 nt, Human
aauguugccccaggacaaagga

SEQ ID NO: 76427 - RNA, 22 nt, Human
aauguuguguuucaguucaaga

SEQ ID NO: 76428 - RNA, 22 nt, Human
aauguuguuuuucugcaugucu

SEQ ID NO: 76429 - RNA, 22 nt, Human
aauguuuaauguuagugguaau

SEQ ID NO: 76430 - RNA, 22 nt, Human
aauguuucuggauauugugggu

SEQ ID NO: 76431 - RNA, 22 nt, Human
aauguuuggacuggaagguccc

SEQ ID NO: 76432 - RNA, 22 nt, Human
aauguuugugcauaaauauguu

SEQ ID NO: 76433 - RNA, 22 nt, Human
aauguuuuagauuacugcuggg

SEQ ID NO: 76434 - RNA, 22 nt, Human
aauguuuuauagcucaagcaau

SEQ ID NO: 76435 - RNA, 22 nt, Human
aauguuuucccagugcagacga

SEQ ID NO: 76436 - RNA, 22 nt, Human
aauguuuuguaugccucugagc

SEQ ID NO: 76437 - RNA, 22 nt, Human
aauuaacagagggcuuauuacu

SEQ ID NO: 76438 - RNA, 22 nt, Human
aauuaagaaaauguuuuaugau

SEQ ID NO: 76439 - RNA, 22 nt, Human
aauuaagagagaguugaagcaa

SEQ ID NO: 76440 - RNA, 23 nt, Human
aauuaccaugcaacuugugaaac

SEQ ID NO: 76441 - RNA, 22 nt, Human
aauuacuguaauuuucuacagc

SEQ ID NO: 76442 - RNA, 22 nt, Human
aauuacuuaagagaaacuuuga

SEQ ID NO: 76443 - RNA, 20 nt, Human
aauuagauguuuaaucaaua

SEQ ID NO: 76444 - RNA, 22 nt, Human
aauuagcuaauuaauuguagcc

SEQ ID NO: 76445 - RNA, 22 nt, Human
aauuagcuuauguguacuuuuc

SEQ ID NO: 76446 - RNA, 22 nt, Human
aauuagcuuuccgccaucacac

SEQ ID NO: 76447 - RNA, 22 nt, Human
aauuagggaaaacauuugcuuu

SEQ ID NO: 76448 - RNA, 22 nt, Human
acacauuaaccuuugaaauucu

SEQ ID NO: 76449 - RNA, 22 nt, Human
acacauuaggcagugcuuaaau

SEQ ID NO: 76450 - RNA, 22 nt, Human
acacauucaugagugcaugcac

SEQ ID NO: 76451 - RNA, 22 nt, Human
acacauuuaaaaaggaacauau

SEQ ID NO: 76452 - RNA, 22 nt, Human
acacauuuacauguuuacguau

SEQ ID NO: 76453 - RNA, 22 nt, Human
acacauuuauggaucgcagaaa

SEQ ID NO: 76454 - RNA, 19 nt, Human
acacauuugcacaauccac

SEQ ID NO: 76455 - RNA, 22 nt, Human
acacauuugcauaauaccucau

SEQ ID NO: 76456 - RNA, 22 nt, Human
acacauuugcuaaaaugagcuc

SEQ ID NO: 76457 - RNA, 22 nt, Human
acacauuugggcuccuacauaa

SEQ ID NO: 76458 - RNA, 22 nt, Human
acacauuuucuaacagggauca

SEQ ID NO: 76459 - RNA, 22 nt, Human
acacauuuuguuaaacccugug

SEQ ID NO: 76460 - RNA, 22 nt, Human
acaccagggccuagccagggcg

SEQ ID NO: 76461 - RNA, 22 nt, Human
acaccaugguucccaaacugug

SEQ ID NO: 76462 - RNA, 21 nt, Human
acacccacuuaugcccgcuug

SEQ ID NO: 76463 - RNA, 22 nt, Human
acaccccaccaguaacugaggg

SEQ ID NO: 76464 - RNA, 22 nt, Human
acacggaaaaggagacagaggg

SEQ ID NO: 76465 - RNA, 22 nt, Human
acacggcacuuuaggaaggggc

SEQ ID NO: 76466 - RNA, 22 nt, Human
acacuaauuaagcugcuuuacu

SEQ ID NO: 76467 - RNA, 22 nt, Human
acacuacaacagcagaggugag

SEQ ID NO: 76468 - RNA, 22 nt, Human
acacuaguauuucuauaaguga

SEQ ID NO: 76469 - RNA, 22 nt, Human
acacuccagggagggagggaau

SEQ ID NO: 76470 - RNA, 22 nt, Human
acacucucagcuuuucaacuua

SEQ ID NO: 76471 - RNA, 22 nt, Human
acacucuuucugugggucacau

SEQ ID NO: 76472 - RNA, 22 nt, Human
acacugaaggcuacaagguuga

SEQ ID NO: 76473 - RNA, 22 nt, Human
acacugaaugcuguuuagaaau

SEQ ID NO: 76474 - RNA, 17 nt, Human
acacugacaugccacac

SEQ ID NO: 76475 - RNA, 22 nt, Human
cucucuguucauugagucaaaa

SEQ ID NO: 76476 - RNA, 22 nt, Human
cucugaaaaugugguggggaaa

SEQ ID NO: 76477 - RNA, 22 nt, Human
cucugaaacuccugcaccuucu

SEQ ID NO: 76478 - RNA, 22 nt, Human
cucugaagaugguaccagcuuu

SEQ ID NO: 76479 - RNA, 22 nt, Human
cucugaagccccaaauaguccg

SEQ ID NO: 76480 - RNA, 22 nt, Human
cucugaagggagggccaagccc

SEQ ID NO: 76481 - RNA, 21 nt, Human
cucugaauccugcuucucagu

SEQ ID NO: 76482 - RNA, 18 nt, Human
cucugaccgccacuugcu

SEQ ID NO: 76483 - RNA, 22 nt, Human
cucugagaaagcugugagcuaa

SEQ ID NO: 76484 - RNA, 22 nt, Human
cucugagaagccuugaugggga

SEQ ID NO: 76485 - RNA, 22 nt, Human
cucugagaauaugagcucuuug

SEQ ID NO: 76486 - RNA, 22 nt, Human
cucugagagugcucagagggua

SEQ ID NO: 76487 - RNA, 22 nt, Human
cucugagaugcuugaagaggau

SEQ ID NO: 76488 - RNA, 22 nt, Human
cucugagcccgcugcagcccca

SEQ ID NO: 76489 - RNA, 22 nt, Human
cucugagcuuugcagccccugg

SEQ ID NO: 76490 - RNA, 19 nt, Human
cucugaggauuagcugugg

SEQ ID NO: 76491 - RNA, 22 nt, Human
cucugaggcuccaugcaggcuu

SEQ ID NO: 76492 - RNA, 22 nt, Human
cucugagguccuucccagcucu

SEQ ID NO: 76493 - RNA, 22 nt, Human
cucugagguuuccucacaagcu

SEQ ID NO: 76494 - RNA, 22 nt, Human
cucugaguuucauuucccuccu

SEQ ID NO: 76495 - RNA, 22 nt, Human
cucugcacccccggcuccucgu

SEQ ID NO: 76496 - RNA, 22 nt, Human
cucugcagaauuugagcugcuc

SEQ ID NO: 76497 - RNA, 22 nt, Human
cucugcagagccuccagcccag

SEQ ID NO: 76498 - RNA, 20 nt, Human
cucugcagcaaggccugggu

SEQ ID NO: 76499 - RNA, 22 nt, Human
cuccccacacacuaggccugau

SEQ ID NO: 76500 - RNA, 23 nt, Human
cuccccaguguccucaugcaucu

SEQ ID NO: 76501 - RNA, 22 nt, Human
cuccccgagagagguuguccgc

SEQ ID NO: 76502 - RNA, 22 nt, Human
cuccccuagcccguugggaggu

SEQ ID NO: 76503 - RNA, 22 nt, Human
cuccccuccuuaggucuucuag

SEQ ID NO: 76504 - RNA, 22 nt, Human
cuccccugagcauagacucugu

SEQ ID NO: 76505 - RNA, 22 nt, Human
cuccccuucuugccagauccuu

SEQ ID NO: 76506 - RNA, 22 nt, Human
cucccucacaaagcauucucuu

SEQ ID NO: 76507 - RNA, 22 nt, Human
cucccucauauacccagcgaga

SEQ ID NO: 76508 - RNA, 22 nt, Human
cucccucccuacgugagcucac

SEQ ID NO: 76509 - RNA, 22 nt, Human
cucccucucuaaggcaaagaga

SEQ ID NO: 76510 - RNA, 22 nt, Human
cucccugacaggccaugggcuu

SEQ ID NO: 76511 - RNA, 22 nt, Human
cucccugcccugugaguuggcc

SEQ ID NO: 76512 - RNA, 22 nt, Human
cucccugcuuguuucccuucag

SEQ ID NO: 76513 - RNA, 22 nt, Human
cucccuggcacagcgagagguu

SEQ ID NO: 76514 - RNA, 22 nt, Human
cuccgcagcgggccaauccgga

SEQ ID NO: 76515 - RNA, 22 nt, Human
cuccgugcuauuuuaguaucgc

SEQ ID NO: 76516 - RNA, 22 nt, Human
cuccguggcuguggacgcagcc

SEQ ID NO: 76517 - RNA, 22 nt, Human
cuccguuuugugggacacggau

SEQ ID NO: 76518 - RNA, 22 nt, Human
cuccguuuuugaccggcacuga

SEQ ID NO: 76519 - RNA, 22 nt, Human
cuccuacaguguuugaguccag

SEQ ID NO: 76520 - RNA, 22 nt, Human
cuccuagaugucuucagagaaa

SEQ ID NO: 76521 - RNA, 22 nt, Human
cuccuaggacgccgcugcuccu

SEQ ID NO: 76522 - RNA, 22 nt, Human
cuccuagguaacagggugguuu

SEQ ID NO: 76523 - RNA, 22 nt, Human
cuccucagacuuuccuuguccg

SEQ ID NO: 76524 - RNA, 22 nt, Human
cuccucagcugggaggaguccc

SEQ ID NO: 76525 - RNA, 22 nt, Human
cuccucaggaaguagcaugugu

SEQ ID NO: 76526 - RNA, 18 nt, Human
cuccuccacagccccugc

SEQ ID NO: 76527 - RNA, 18 nt, Human
cuccucccuaagggcuca

SEQ ID NO: 76528 - RNA, 22 nt, Human
cuccucuccaucagcgccaccc

SEQ ID NO: 76529 - RNA, 22 nt, Human
cuccucucuggaguuaugcaga

SEQ ID NO: 76530 - RNA, 22 nt, Human
cuccucuguauugauugggacu

SEQ ID NO: 76531 - RNA, 22 nt, Human
cuccucuucugaguaccaggga

SEQ ID NO: 76532 - RNA, 22 nt, Human
cuccugacacaguccacacuug

SEQ ID NO: 76533 - RNA, 22 nt, Human
cuccugagcucugaggaagcuu

SEQ ID NO: 76534 - RNA, 22 nt, Human
cuccugcaugcucacauaugcc

SEQ ID NO: 76535 - RNA, 22 nt, Human
cuccugcugaauggccaggagc

SEQ ID NO: 76536 - RNA, 22 nt, Human
cuccuggaagcccgcccugcug

SEQ ID NO: 76537 - RNA, 22 nt, Human
cuccuggaggauagugacuggg

SEQ ID NO: 76538 - RNA, 22 nt, Human
cuccuggaggcuccaagggaga

SEQ ID NO: 76539 - RNA, 23 nt, Human
cuccuggaggguccggcccugcc

SEQ ID NO: 76540 - RNA, 22 nt, Human
cuccuggcacugucuugaccca

SEQ ID NO: 76541 - RNA, 17 nt, Human
cuccuggccaccccucu

SEQ ID NO: 76542 - RNA, 22 nt, Human
cuccuggcccugagcucccagg

SEQ ID NO: 76543 - RNA, 22 nt, Human
cuccuggcuaugacuacauuuc

SEQ ID NO: 76544 - RNA, 22 nt, Human
cuccuggcucucuguuuagugu

SEQ ID NO: 76545 - RNA, 22 nt, Human
cuccuggcuucugaaaucgugg

SEQ ID NO: 76546 - RNA, 22 nt, Human
cuccuggcuuucccagaccagg

SEQ ID NO: 76547 - RNA, 22 nt, Human
cuccugggagcagggauggaug

SEQ ID NO: 76548 - RNA, 22 nt, Human
cuccugggcucaagugauccuc

SEQ ID NO: 76549 - RNA, 18 nt, Human
cuccugggcugcagaugc

SEQ ID NO: 76550 - RNA, 22 nt, Human
cuccugggcugggaacucagcc

SEQ ID NO: 76551 - RNA, 22 nt, Human
cuccugggcuucgaaggcuccc

SEQ ID NO: 76552 - RNA, 22 nt, Human
cuccuguauguugggcuucaca

SEQ ID NO: 76553 - RNA, 22 nt, Human
cuccugucagaagcauccugag

SEQ ID NO: 76554 - RNA, 22 nt, Human
cuccugugcaccuccagcggca

SEQ ID NO: 76555 - RNA, 22 nt, Human
cuccugugcaugcaucucccua

SEQ ID NO: 76556 - RNA, 22 nt, Human
cuccugugggucaccaauaggc

SEQ ID NO: 76557 - RNA, 22 nt, Human
cuccuguugcacuaguuccuga

SEQ ID NO: 76558 - RNA, 22 nt, Human
cuccuuaaagggagcagcagcu

SEQ ID NO: 76559 - RNA, 22 nt, Human
cuccuucccuaccaucaauguu

SEQ ID NO: 76560 - RNA, 22 nt, Human
cuccuuccugccccagugauaa

SEQ ID NO: 76561 - RNA, 18 nt, Human
cuccuuggagaagaggcc

SEQ ID NO: 76562 - RNA, 22 nt, Human
cuccuuggguucuuucgguucc

SEQ ID NO: 76563 - RNA, 23 nt, Human
cuccuugguaugccaugcccagc

SEQ ID NO: 76564 - RNA, 18 nt, Human
cuccuuucccuacaccuc

SEQ ID NO: 76565 - RNA, 22 nt, Human
cucgggcuugaggcuguuuacc

SEQ ID NO: 76566 - RNA, 22 nt, Human
cucggguaccaugcuaggcacu

SEQ ID NO: 76567 - RNA, 22 nt, Human
cucuaaaggcuuguuauugcau

SEQ ID NO: 76568 - RNA, 22 nt, Human
cucuaaauccaaauaagugucc

SEQ ID NO: 76569 - RNA, 22 nt, Human
cucuaaauguggucugcagaua

SEQ ID NO: 76570 - RNA, 22 nt, Human
cucuaacaccacagugugguuu

SEQ ID NO: 76571 - RNA, 22 nt, Human
cucuaauccuuugucccugggu

SEQ ID NO: 76572 - RNA, 22 nt, Human
cucuacagcugcugccccuggu

SEQ ID NO: 76573 - RNA, 22 nt, Human
cucuagacaacuugcugugggu

SEQ ID NO: 76574 - RNA, 22 nt, Human
cucuagcaggugccuuguaaca

SEQ ID NO: 76575 - RNA, 22 nt, Human
cucuaggcugcccaggagcuga

SEQ ID NO: 76576 - RNA, 22 nt, Human
cucuagggaagaaugagagccc

SEQ ID NO: 76577 - RNA, 22 nt, Human
cucuauauucugaaacaguuag

SEQ ID NO: 76578 - RNA, 22 nt, Human
cucuauuuuucuuggcuagugu

SEQ ID NO: 76579 - RNA, 22 nt, Human
cucucagaagcuuccaguaugg

SEQ ID NO: 76580 - RNA, 22 nt, Human
cucucagacacccauuuggaaa

SEQ ID NO: 76581 - RNA, 22 nt, Human
cucucagacugaagggccugug

SEQ ID NO: 76582 - RNA, 22 nt, Human
cucucaguuuccucaacuguaa

SEQ ID NO: 76583 - RNA, 22 nt, Human
cucuccaaguuaucaagaugaa

SEQ ID NO: 76584 - RNA, 22 nt, Human
gccagcauuccuuggcuccugg

SEQ ID NO: 76585 - RNA, 22 nt, Human
gccagccagagaggcaugguua

SEQ ID NO: 76586 - RNA, 22 nt, Human
gccagccagggaagggagagac

SEQ ID NO: 76587 - RNA, 22 nt, Human
gccagccauaggccagcacugg

SEQ ID NO: 76588 - RNA, 22 nt, Human
gccagcccauuaaccccugucc

SEQ ID NO: 76589 - RNA, 22 nt, Human
gccagccccuccauccuguuca

SEQ ID NO: 76590 - RNA, 18 nt, Human
gccagcccuccaaccucc

SEQ ID NO: 76591 - RNA, 22 nt, Human
gccagccugugggggcucugug

SEQ ID NO: 76592 - RNA, 22 nt, Human
gccagcuagaggcugcagugca

SEQ ID NO: 76593 - RNA, 22 nt, Human
gccagcucagugccaggccccu

SEQ ID NO: 76594 - RNA, 22 nt, Human
gccagcucaguuucaaaguagg

SEQ ID NO: 76595 - RNA, 22 nt, Human
gccagcuccgcaggauggcgcg

SEQ ID NO: 76596 - RNA, 22 nt, Human
gccagcucuugaugggugggua

SEQ ID NO: 76597 - RNA, 22 nt, Human
gccagcugacaccuugauuuug

SEQ ID NO: 76598 - RNA, 22 nt, Human
gccagcugaggccgugcaggcu

SEQ ID NO: 76599 - RNA, 22 nt, Human
gccagcugcaaaguauguugaa

SEQ ID NO: 76600 - RNA, 18 nt, Human
gccagcugcacggcccuc

SEQ ID NO: 76601 - RNA, 22 nt, Human
gccagcugcccucugcuggucc

SEQ ID NO: 76602 - RNA, 20 nt, Human
gccagcugcccuuccacccu

SEQ ID NO: 76603 - RNA, 22 nt, Human
gccagcugcuucuccagaauuu

SEQ ID NO: 76604 - RNA, 22 nt, Human
gccagcuggagacuggcagggg

SEQ ID NO: 76605 - RNA, 20 nt, Human
gccagcuggucccaauuaug

SEQ ID NO: 76606 - RNA, 22 nt, Human
gccagcugucuaagagaguaaa

SEQ ID NO: 76607 - RNA, 22 nt, Human
gccagcugugcuuuuccuaaaa

SEQ ID NO: 76608 - RNA, 23 nt, Human
gccagcuuuggucugucuccuag

SEQ ID NO: 76609 - RNA, 19 nt, Human
gccaggaaagaaucaggcg

SEQ ID NO: 76610 - RNA, 22 nt, Human
gccaggaaagggaauucccuga

SEQ ID NO: 76611 - RNA, 22 nt, Human
gccaggaagagagagcccucca

SEQ ID NO: 76612 - RNA, 22 nt, Human
gccaggaagucagccaagccca

SEQ ID NO: 76613 - RNA, 22 nt, Human
gccaggaauuucaagagccacu

SEQ ID NO: 76614 - RNA, 22 nt, Human
gccaggacccuggagggcaucu

SEQ ID NO: 76615 - RNA, 22 nt, Human
gccaggaccucagaugcagggc

SEQ ID NO: 76616 - RNA, 22 nt, Human
gccaggaccucccagagcuuuc

SEQ ID NO: 76617 - RNA, 22 nt, Human
gccaggacggugaaugggcuac

SEQ ID NO: 76618 - RNA, 22 nt, Human
cucugaaauuggcccucagcag

SEQ ID NO: 76619 - RNA, 22 nt, Human
cucugacagguggcauuaucuc

SEQ ID NO: 76620 - RNA, 22 nt, Human
cucugacuuuaaauacaggaug

SEQ ID NO: 76621 - RNA, 22 nt, Human
cucugagaauauaagacuauuu

SEQ ID NO: 76622 - RNA, 23 nt, Human
cucugagacccagguggacacgg

SEQ ID NO: 76623 - RNA, 22 nt, Human
cucugagacucaagugaguggg

SEQ ID NO: 76624 - RNA, 22 nt, Human
cucugagacuuuucaccuccca

SEQ ID NO: 76625 - RNA, 22 nt, Human
cucugagagcggucuguggcuu

SEQ ID NO: 76626 - RNA, 22 nt, Human
cucugagaggugagaagcagca

SEQ ID NO: 76627 - RNA, 22 nt, Human
cucugagcagaggccguggcua

SEQ ID NO: 76628 - RNA, 22 nt, Human
cucugaggagaaagagcuuggu

SEQ ID NO: 76629 - RNA, 22 nt, Human
cucugagggcugucaggaaagg

SEQ ID NO: 76630 - RNA, 22 nt, Human
cucugagguuccuuugcccucg

SEQ ID NO: 76631 - RNA, 22 nt, Human
cucugaguagauagggaaccug

SEQ ID NO: 76632 - RNA, 22 nt, Human
cucugauuuauauuauaaagug

SEQ ID NO: 76633 - RNA, 22 nt, Human
cucugcacuguccggcuuucuu

SEQ ID NO: 76634 - RNA, 22 nt, Human
cucugcagauucaucccuucac

SEQ ID NO: 76635 - RNA, 17 nt, Human
cucugcagugcauggcu

SEQ ID NO: 76636 - RNA, 22 nt, Human
cucugcaguguaacagcgcuug

SEQ ID NO: 76637 - RNA, 22 nt, Human
cucugccaagaugacagguaag

SEQ ID NO: 76638 - RNA, 22 nt, Human
cucugccaucaguuuuucuuug

SEQ ID NO: 76639 - RNA, 22 nt, Human
cucugccaucucacuggguccu

SEQ ID NO: 76640 - RNA, 20 nt, Human
cucugcccccagacugacag

SEQ ID NO: 76641 - RNA, 22 nt, Human
cucugcccccagcuggugcuug

SEQ ID NO: 76642 - RNA, 22 nt, Human
cucugcccucacuuggggccug

SEQ ID NO: 76643 - RNA, 22 nt, Human
cucugcgccacccucgccugcu

SEQ ID NO: 76644 - RNA, 22 nt, Human
cucugcuagaaggucaaucucu

SEQ ID NO: 76645 - RNA, 21 nt, Human
cucugcugaguccuaggauuc

SEQ ID NO: 76646 - RNA, 22 nt, Human
cucugcugaucucagcugggcu

SEQ ID NO: 76647 - RNA, 22 nt, Human
cucugcugcuugccagucauug

SEQ ID NO: 76648 - RNA, 22 nt, Human
cucugcugcuuugccaguggaa

SEQ ID NO: 76649 - RNA, 21 nt, Human
cucugcugucuaccagcuguu

SEQ ID NO: 76650 - RNA, 22 nt, Human
cucugcuucugagauggaagcu

SEQ ID NO: 76651 - RNA, 22 nt, Human
cucugcuugugucaggcaugcu

SEQ ID NO: 76652 - RNA, 22 nt, Human
cucugcuuuuuaaaaggagucc

SEQ ID NO: 76653 - RNA, 22 nt, Human
cucuggaaaaccacuagcagga

SEQ ID NO: 76654 - RNA, 22 nt, Human
cucuggaaaauugugugggggu

SEQ ID NO: 76655 - RNA, 20 nt, Human
cucuggaagaguuuaaaugg

SEQ ID NO: 76656 - RNA, 22 nt, Human
cucuggaagaugaccuggguaa

SEQ ID NO: 76657 - RNA, 22 nt, Human
cucuggaauggguguuucuaac

SEQ ID NO: 76658 - RNA, 22 nt, Human
cucuggaauugaccugggaggg

SEQ ID NO: 76659 - RNA, 17 nt, Human
cucuggaauuggugaag

SEQ ID NO: 76660 - RNA, 22 nt, Human
cucuggacacuggcaugggguc

SEQ ID NO: 76661 - RNA, 22 nt, Human
cucuggacagcaggugcugugg

SEQ ID NO: 76662 - RNA, 22 nt, Human
cucuggacccagacaaaccugg

SEQ ID NO: 76663 - RNA, 22 nt, Human
cucuggacuuguacauacucag

SEQ ID NO: 76664 - RNA, 22 nt, Human
cucuggagcaccgggcuaucca

SEQ ID NO: 76665 - RNA, 22 nt, Human
cucuggaggcagcaccagccag

SEQ ID NO: 76666 - RNA, 22 nt, Human
cucuggagggaggcugagcugg

SEQ ID NO: 76667 - RNA, 22 nt, Human
cucuggaggucagguguggugg

SEQ ID NO: 76668 - RNA, 22 nt, Human
cucuggagugcagccugguggc

SEQ ID NO: 76669 - RNA, 22 nt, Human
cucuggaguucccuugaucuga

SEQ ID NO: 76670 - RNA, 22 nt, Human
cucuggaucugcccugacgcca

SEQ ID NO: 76671 - RNA, 20 nt, Human
cucuggcaaaggaugccuau

SEQ ID NO: 76672 - RNA, 22 nt, Human
cucuggccagagccugcgggaa

SEQ ID NO: 76673 - RNA, 22 nt, Human
cucuggccccaguggccccuug

SEQ ID NO: 76674 - RNA, 22 nt, Human
cucuggccgcagcucagcucug

SEQ ID NO: 76675 - RNA, 22 nt, Human
cucuggccugcuuccucaggua

SEQ ID NO: 76676 - RNA, 22 nt, Human
cucuggcuauggcacggcgcuc

SEQ ID NO: 76677 - RNA, 20 nt, Human
cucuggcuccgcgugaccgc

SEQ ID NO: 76678 - RNA, 22 nt, Human
cucuggcugccucucaggccug

SEQ ID NO: 76679 - RNA, 22 nt, Human
cucuggcuuguuaaugcauauu

SEQ ID NO: 76680 - RNA, 22 nt, Human
cucugggaagggcugagcacug

SEQ ID NO: 76681 - RNA, 22 nt, Human
cucugggauagagccucggucu

SEQ ID NO: 76682 - RNA, 19 nt, Human
cucugggcaagucacuuaa

SEQ ID NO: 76683 - RNA, 22 nt, Human
cucugggcaaguuucuucauga

SEQ ID NO: 76684 - RNA, 22 nt, Human
cucugggcacuguauggguucu

SEQ ID NO: 76685 - RNA, 22 nt, Human
cucugggcccacuuaaaucugg

SEQ ID NO: 76686 - RNA, 22 nt, Human
cucugggcuccuucagcccuuu

SEQ ID NO: 76687 - RNA, 22 nt, Human
cucugggcugaauggcugaacc

SEQ ID NO: 76688 - RNA, 20 nt, Human
cucugggcugcacccucgcc

SEQ ID NO: 76689 - RNA, 22 nt, Human
cucugggcuuaccugcuuccug

SEQ ID NO: 76690 - RNA, 22 nt, Human
cucugggcuuccuuuguggguu

SEQ ID NO: 76691 - RNA, 22 nt, Human
cucuggggaagcagccagcugg

SEQ ID NO: 76692 - RNA, 22 nt, Human
cucugggguuagaucugaugcu

SEQ ID NO: 76693 - RNA, 22 nt, Human
gccuuccugcagcucugagcgu

SEQ ID NO: 76694 - RNA, 22 nt, Human
gccuuccuuacaccugcucagc

SEQ ID NO: 76695 - RNA, 22 nt, Human
gccuucugauaucucuuggcau

SEQ ID NO: 76696 - RNA, 22 nt, Human
gccuucugaucgcuggacugac

SEQ ID NO: 76697 - RNA, 19 nt, Human
gccuugaagcaacucuugu

SEQ ID NO: 76698 - RNA, 21 nt, Human
gccuugccacaugugccacag

SEQ ID NO: 76699 - RNA, 22 nt, Human
gccuuggcccacagugcuccug

SEQ ID NO: 76700 - RNA, 22 nt, Human
gccuugggaaagugggaggaga

SEQ ID NO: 76701 - RNA, 22 nt, Human
gccuugggauucuuggaugcuc

SEQ ID NO: 76702 - RNA, 22 nt, Human
gccuuuaucaguuucauggcuu

SEQ ID NO: 76703 - RNA, 22 nt, Human
gccuuuaucuuccugauucaga

SEQ ID NO: 76704 - RNA, 22 nt, Human
gccuuuauuuucaacggagugu

SEQ ID NO: 76705 - RNA, 22 nt, Human
gccuuucacagagauuuaaaaa

SEQ ID NO: 76706 - RNA, 22 nt, Human
gccuuugaauuguuguggugag

SEQ ID NO: 76707 - RNA, 22 nt, Human
gccuuuggacugagguagucag

SEQ ID NO: 76708 - RNA, 22 nt, Human
gccuuuggagaauccagucaug

SEQ ID NO: 76709 - RNA, 22 nt, Human
gccuuuggauauauucagggau

SEQ ID NO: 76710 - RNA, 22 nt, Human
gccuuuggaugguuuuucuauu

SEQ ID NO: 76711 - RNA, 22 nt, Human
gccuuuggcucugucugaccug

SEQ ID NO: 76712 - RNA, 19 nt, Human
gccuuugggcguuguuggg

SEQ ID NO: 76713 - RNA, 22 nt, Human
gccuuuugaaauagaaaucuga

SEQ ID NO: 76714 - RNA, 22 nt, Human
gccuuuugaucuauaacugugu

SEQ ID NO: 76715 - RNA, 22 nt, Human
gcgacgcucgggcuccgaugcc

SEQ ID NO: 76716 - RNA, 22 nt, Human
gcgagaaacuaagugcccuuug

SEQ ID NO: 76717 - RNA, 22 nt, Human
gcgagccucuggaguccucugg

SEQ ID NO: 76718 - RNA, 19 nt, Human
gcgaggaagucacuguggc

SEQ ID NO: 76719 - RNA, 22 nt, Human
gcgagggcacgcgguugaaggc

SEQ ID NO: 76720 - RNA, 22 nt, Human
gcgagucgccgcugcagcccua

SEQ ID NO: 76721 - RNA, 22 nt, Human
gcgagugccgagagggcagggc

SEQ ID NO: 76722 - RNA, 22 nt, Human
gcgcaagccacacagccugggg

SEQ ID NO: 76723 - RNA, 22 nt, Human
gcgcagaguagcagagugcuga

SEQ ID NO: 76724 - RNA, 22 nt, Human
gcgcaggugaugcgucugccuu

SEQ ID NO: 76725 - RNA, 22 nt, Human
gcgcaggugcugcuggagcagc

SEQ ID NO: 76726 - RNA, 22 nt, Human
gcgccugccaccaugccaggcu

SEQ ID NO: 76727 - RNA, 22 nt, Human
gcgcucagaaaagauuuucuuc

SEQ ID NO: 76728 - RNA, 22 nt, Human
gcggcccggguccccagcagca

SEQ ID NO: 76729 - RNA, 22 nt, Human
gcggcgccugggacccgccagc

SEQ ID NO: 76730 - RNA, 22 nt, Human
gcggcggagacagcaggaagcc

SEQ ID NO: 76731 - RNA, 22 nt, Human
gcggcuccgaagccaggccgcg

SEQ ID NO: 76732 - RNA, 22 nt, Human
gcgggccaccuuggagagcgcu

SEQ ID NO: 76733 - RNA, 22 nt, Human
gcgggcggggguucccaggucu

SEQ ID NO: 76734 - RNA, 22 nt, Human
gcggggcccccggccgagcucu

SEQ ID NO: 76735 - RNA, 22 nt, Human
gcgggggcggcgcagaccucag

SEQ ID NO: 76736 - RNA, 22 nt, Human
gcggggggaggaacaucuugca

SEQ ID NO: 76737 - RNA, 22 nt, Human
gcggggggcagcagucgcucag

SEQ ID NO: 76738 - RNA, 22 nt, Human
gcggggggcaggcaguacguug

SEQ ID NO: 76739 - RNA, 22 nt, Human
gcggguggaucaugaggucagg

SEQ ID NO: 76740 - RNA, 22 nt, Human
gcggguugaagggcgcaucgaa

SEQ ID NO: 76741 - RNA, 22 nt, Human
gcgguauuugugugggugucga

SEQ ID NO: 76742 - RNA, 22 nt, Human
gcggucggcagaggggcucugc

SEQ ID NO: 76743 - RNA, 22 nt, Human
gcgucugaguugcgggggcuca

SEQ ID NO: 76744 - RNA, 22 nt, Human
gcguggggcagcccagggcuuc

SEQ ID NO: 76745 - RNA, 22 nt, Human
gcguguuugcccagugaguggc

SEQ ID NO: 76746 - RNA, 22 nt, Human
gcguuuaaagauagcuaauaag

SEQ ID NO: 76747 - RNA, 23 nt, Human
gcuaaauugaagucucaggggaa

SEQ ID NO: 76748 - RNA, 22 nt, Human
gcuaagaaaaauucauguauau

SEQ ID NO: 76749 - RNA, 22 nt, Human
gcuaaggagggucuugcaaauu

SEQ ID NO: 76750 - RNA, 22 nt, Human
gcuaaggcacaaauagcuuugc

SEQ ID NO: 76751 - RNA, 22 nt, Human
gcuaaggccuuaacucauggag

SEQ ID NO: 76752 - RNA, 22 nt, Human
gcuaaggcucagguucuaagga

SEQ ID NO: 76753 - RNA, 22 nt, Human
gcuaaugaaaaauagauuauag

SEQ ID NO: 76754 - RNA, 22 nt, Human
cugcugccuuccaaaggccagg

SEQ ID NO: 76755 - RNA, 22 nt, Human
cugcugcucagugucaucaugu

SEQ ID NO: 76756 - RNA, 22 nt, Human
cugcugcugagagcucagccug

SEQ ID NO: 76757 - RNA, 22 nt, Human
cugcuggccuagcccauccucu

SEQ ID NO: 76758 - RNA, 17 nt, Human
cugcuggcuggggcuug

SEQ ID NO: 76759 - RNA, 22 nt, Human
cugcugggauagaaguaucuca

SEQ ID NO: 76760 - RNA, 22 nt, Human
cugcuggggaggcgccucgacg

SEQ ID NO: 76761 - RNA, 22 nt, Human
cugcuguaauaggagcguuuug

SEQ ID NO: 76762 - RNA, 22 nt, Human
cugcuguagagaaggguuguca

SEQ ID NO: 76763 - RNA, 22 nt, Human
cugcuguagccacugggcucag

SEQ ID NO: 76764 - RNA, 22 nt, Human
cugcugucccagccuccucaca

SEQ ID NO: 76765 - RNA, 22 nt, Human
cugcugucucacuggugugguu

SEQ ID NO: 76766 - RNA, 23 nt, Human
cugcugugaaacaugguuuuggu

SEQ ID NO: 76767 - RNA, 22 nt, Human
cugcugugggcaggguagcugg

SEQ ID NO: 76768 - RNA, 20 nt, Human
cugcugugguccuuuauuuu

SEQ ID NO: 76769 - RNA, 22 nt, Human
cugcuguggugucaagcaucuc

SEQ ID NO: 76770 - RNA, 22 nt, Human
cugcugugucagaguccagggg

SEQ ID NO: 76771 - RNA, 22 nt, Human
cugcuguguggauucaauggcu

SEQ ID NO: 76772 - RNA, 22 nt, Human
cugcuguucugaagcaacaagc

SEQ ID NO: 76773 - RNA, 22 nt, Human
cugcuguuucucaaaauuaagu

SEQ ID NO: 76774 - RNA, 18 nt, Human
cugcuuacaaaaauaccc

SEQ ID NO: 76775 - RNA, 19 nt, Human
cugcuucaggcgccuugcc

SEQ ID NO: 76776 - RNA, 22 nt, Human
cugcuucauagcccuggucucu

SEQ ID NO: 76777 - RNA, 22 nt, Human
cugcuucauauuucauagugau

SEQ ID NO: 76778 - RNA, 22 nt, Human
cugcuuccaagaaagagauagg

SEQ ID NO: 76779 - RNA, 22 nt, Human
cugcuuccaugcaauggcaguc

SEQ ID NO: 76780 - RNA, 22 nt, Human
cugcuuccucccuguaaaggca

SEQ ID NO: 76781 - RNA, 21 nt, Human
cugcuuccucucuucauggca

SEQ ID NO: 76782 - RNA, 22 nt, Human
cugcuucuaagaaccugcagcu

SEQ ID NO: 76783 - RNA, 22 nt, Human
cugcuucuagcaccaagucccu

SEQ ID NO: 76784 - RNA, 22 nt, Human
cugcuuggaggccugggugcua

SEQ ID NO: 76785 - RNA, 22 nt, Human
cugcuuggaguccuccagcacc

SEQ ID NO: 76786 - RNA, 20 nt, Human
cugcuugggacacugccaga

SEQ ID NO: 76787 - RNA, 22 nt, Human
cugcuugggguuaggguguccu

SEQ ID NO: 76788 - RNA, 22 nt, Human
cugcuuuaaaacugauacauga

SEQ ID NO: 76789 - RNA, 22 nt, Human
cugcuuuaagaaugaguguaag

SEQ ID NO: 76790 - RNA, 22 nt, Human
cugcuuuaauuuagacaaggca

SEQ ID NO: 76791 - RNA, 22 nt, Human
cugcuuuacucauaggguuuca

SEQ ID NO: 76792 - RNA, 22 nt, Human
cugcuuuagguggaauguucua

SEQ ID NO: 76793 - RNA, 22 nt, Human
cugcuuuagugugguguuagag

SEQ ID NO: 76794 - RNA, 22 nt, Human
cugcuuugacuguuaagaacca

SEQ ID NO: 76795 - RNA, 22 nt, Human
cugcuuugcauagcugccagag

SEQ ID NO: 76796 - RNA, 17 nt, Human
cugcuuugugcaacgcu

SEQ ID NO: 76797 - RNA, 22 nt, Human
cugcuuuuuguaggucccagag

SEQ ID NO: 76798 - RNA, 22 nt, Human
cuggaaagucaggucagaaacu

SEQ ID NO: 76799 - RNA, 22 nt, Human
cuggaaagugcugagacaauug

SEQ ID NO: 76800 - RNA, 22 nt, Human
cuggaaagugucuccauccugg

SEQ ID NO: 76801 - RNA, 19 nt, Human
cuggaaaguuggcagugag

SEQ ID NO: 76802 - RNA, 22 nt, Human
gcucagagaaucagcagacacc

SEQ ID NO: 76803 - RNA, 22 nt, Human
gcucagagagauuaaauaauuu

SEQ ID NO: 76804 - RNA, 22 nt, Human
gcucagagaguuucacaaguuu

SEQ ID NO: 76805 - RNA, 22 nt, Human
gcucagagauaaaacugaucag

SEQ ID NO: 76806 - RNA, 22 nt, Human
gcucagagauguucaguagcuu

SEQ ID NO: 76807 - RNA, 22 nt, Human
gcucagagcccgaggcuugcau

SEQ ID NO: 76808 - RNA, 22 nt, Human
gcucagaggaggccuuuaccua

SEQ ID NO: 76809 - RNA, 22 nt, Human
gcucagaggccaagugcccgcc

SEQ ID NO: 76810 - RNA, 22 nt, Human
gcucagagggaacaaggggcug

SEQ ID NO: 76811 - RNA, 22 nt, Human
gcucagaggguuuuggccaagu

SEQ ID NO: 76812 - RNA, 21 nt, Human
gcucagaguauugcacuguuu

SEQ ID NO: 76813 - RNA, 22 nt, Human
gcucagaguuaaauauagugcu

SEQ ID NO: 76814 - RNA, 22 nt, Human
gcucagaguuaauuggaugggu

SEQ ID NO: 76815 - RNA, 22 nt, Human
gcucagcuacuuacagguggcu

SEQ ID NO: 76816 - RNA, 22 nt, Human
gcucagcucuauggacacaaag

SEQ ID NO: 76817 - RNA, 21 nt, Human
gcucagcugcuugguuccugu

SEQ ID NO: 76818 - RNA, 22 nt, Human
gcucaggaaacagcagggcuug

SEQ ID NO: 76819 - RNA, 22 nt, Human
gcucaggaaggcucaaccagga

SEQ ID NO: 76820 - RNA, 22 nt, Human
gcucaggaccgaggggugggaa

SEQ ID NO: 76821 - RNA, 22 nt, Human
gcucaggagcucuugguggcgc

SEQ ID NO: 76822 - RNA, 22 nt, Human
gcucaggcauguaugugguugc

SEQ ID NO: 76823 - RNA, 22 nt, Human
gcucaggcccagcggcuggugu

SEQ ID NO: 76824 - RNA, 22 nt, Human
gcucaggccuggcccaugggac

SEQ ID NO: 76825 - RNA, 21 nt, Human
gcucaggcucuugacagagca

SEQ ID NO: 76826 - RNA, 22 nt, Human
gcucaggcuucuucuauaaaga

SEQ ID NO: 76827 - RNA, 22 nt, Human
gcucagggaaagagcuccuguc

SEQ ID NO: 76828 - RNA, 22 nt, Human
gcucagggaacuuuuugcaggc

SEQ ID NO: 76829 - RNA, 22 nt, Human
gcucagggaaugagaagauguu

SEQ ID NO: 76830 - RNA, 22 nt, Human
gcucagggagagagggcagccg

SEQ ID NO: 76831 - RNA, 22 nt, Human
gcucagggagcgauuuaccaug

SEQ ID NO: 76832 - RNA, 22 nt, Human
gcucagggccuggcugcggacu

SEQ ID NO: 76833 - RNA, 22 nt, Human
gcucagggucccuuggugcugg

SEQ ID NO: 76834 - RNA, 22 nt, Human
gcucagguguuaccuccucuag

SEQ ID NO: 76835 - RNA, 22 nt, Human
gcucagucuuugugggguacgg

SEQ ID NO: 76836 - RNA, 22 nt, Human
gcucagugaagggugccaagua

SEQ ID NO: 76837 - RNA, 22 nt, Human
gcucagugcagccuuucuguau

SEQ ID NO: 76838 - RNA, 22 nt, Human
gcucaguguuucugguagaaaa

SEQ ID NO: 76839 - RNA, 22 nt, Human
gcucaguuauccgugugugacu

SEQ ID NO: 76840 - RNA, 22 nt, Human
gcucauucagccagggcccggu

SEQ ID NO: 76841 - RNA, 22 nt, Human
gcuccaagguauccaccagggu

SEQ ID NO: 76842 - RNA, 17 nt, Human
gcuccagaauucuaguc

SEQ ID NO: 76843 - RNA, 22 nt, Human
gcuccagaugaaugcacuuguu

SEQ ID NO: 76844 - RNA, 22 nt, Human
gcuccagcaccuagagcagguc

SEQ ID NO: 76845 - RNA, 22 nt, Human
gcuccagcucuguucuggggaa

SEQ ID NO: 76846 - RNA, 22 nt, Human
gcuccaggaagggaaaucucca

SEQ ID NO: 76847 - RNA, 22 nt, Human
gcuccaggagagggaagcagau

SEQ ID NO: 76848 - RNA, 22 nt, Human
gcuccaggaggaugaccuuccu

SEQ ID NO: 76849 - RNA, 22 nt, Human
gcuccaggaggcucccgcgucu

SEQ ID NO: 76850 - RNA, 22 nt, Human
gcuccaggcugcucugucccau

SEQ ID NO: 76851 - RNA, 22 nt, Human
gcuccagggaacagaauguacu

SEQ ID NO: 76852 - RNA, 20 nt, Human
gcuccaggucagagaggacg

SEQ ID NO: 76853 - RNA, 22 nt, Human
gcuccagguggcuuauuuguau

SEQ ID NO: 76854 - RNA, 22 nt, Human
gcuccaguggacugggggaggc

SEQ ID NO: 76855 - RNA, 22 nt, Human
gcucccaggaagagaagggcca

SEQ ID NO: 76856 - RNA, 22 nt, Human
gcucccagggaccgcagggcag

SEQ ID NO: 76857 - RNA, 22 nt, Human
gcucccucccaccagccugcag

SEQ ID NO: 76858 - RNA, 22 nt, Human
gcucccugaaaagaacaaaguc

SEQ ID NO: 76859 - RNA, 17 nt, Human
gcucccugaggacagcu

SEQ ID NO: 76860 - RNA, 21 nt, Human
gcucccuggcugugugaccug

SEQ ID NO: 76861 - RNA, 23 nt, Human
gcucccugucccugcacuuaggc

SEQ ID NO: 76862 - RNA, 23 nt, Human
gcucccugugcuccaggagaugc

SEQ ID NO: 76863 - RNA, 22 nt, Human
gcucccuuaguccuugccggga

SEQ ID NO: 76864 - RNA, 22 nt, Human
gcuccuccaauauggacuccuc

SEQ ID NO: 76865 - RNA, 22 nt, Human
gcuccucccugugcagacccag

SEQ ID NO: 76866 - RNA, 22 nt, Human
gcuccucuuauuucaucagggc

SEQ ID NO: 76867 - RNA, 22 nt, Human
gcuccugcccucuugcaauucc

SEQ ID NO: 76868 - RNA, 18 nt, Human
gcuccuggaccaggucac

SEQ ID NO: 76869 - RNA, 22 nt, Human
gcuccuggauguucaagucggc

SEQ ID NO: 76870 - RNA, 22 nt, Human
gcuccuggcuucacugacauca

SEQ ID NO: 76871 - RNA, 22 nt, Human
cuggcaccuccagcucauggcc

SEQ ID NO: 76872 - RNA, 22 nt, Human
cuggcacuuggcacccaugaaa

SEQ ID NO: 76873 - RNA, 22 nt, Human
cuggcagaggauggggacccag

SEQ ID NO: 76874 - RNA, 22 nt, Human
cuggcagagucugcugucugca

SEQ ID NO: 76875 - RNA, 22 nt, Human
cuggcagcauuaacagagagca

SEQ ID NO: 76876 - RNA, 22 nt, Human
cuggcagccaagugggauacuc

SEQ ID NO: 76877 - RNA, 22 nt, Human
cuggcagcccaaccuagagucu

SEQ ID NO: 76878 - RNA, 22 nt, Human
cuggcagcgcagcaugaagucg

SEQ ID NO: 76879 - RNA, 22 nt, Human
cuggcagcgugagcagcaucca

SEQ ID NO: 76880 - RNA, 22 nt, Human
cuggcagcuuagcacucugguu

SEQ ID NO: 76881 - RNA, 22 nt, Human
cuggcagcuuccuuugcaucug

SEQ ID NO: 76882 - RNA, 22 nt, Human
cuggcaggaaggcauuuagaca

SEQ ID NO: 76883 - RNA, 22 nt, Human
cuggcaggcaaauuggugggag

SEQ ID NO: 76884 - RNA, 22 nt, Human
cuggcaggcagacuucugcaag

SEQ ID NO: 76885 - RNA, 22 nt, Human
cuggcagguggauggggacucc

SEQ ID NO: 76886 - RNA, 22 nt, Human
cuggcagguuuggugucuggug

SEQ ID NO: 76887 - RNA, 22 nt, Human
cuggcagucacggccaugugcu

SEQ ID NO: 76888 - RNA, 22 nt, Human
cuggcagucugccucuucacug

SEQ ID NO: 76889 - RNA, 22 nt, Human
cuggcaguguccagcucgugau

SEQ ID NO: 76890 - RNA, 22 nt, Human
cuggcaguuggcauuggcaucu

SEQ ID NO: 76891 - RNA, 22 nt, Human
cuggcaguuugccaggagcucg

SEQ ID NO: 76892 - RNA, 22 nt, Human
cuggcaucuagugcguugaggu

SEQ ID NO: 76893 - RNA, 22 nt, Human
cuggcaugguguauuuguucaa

SEQ ID NO: 76894 - RNA, 22 nt, Human
cuggccaacaucuggggcacau

SEQ ID NO: 76895 - RNA, 22 nt, Human
cuggccaauauagggaaaucuu

SEQ ID NO: 76896 - RNA, 22 nt, Human
cuggccacugauuccuccccug

SEQ ID NO: 76897 - RNA, 22 nt, Human
cuggccagccucccagguaccc

SEQ ID NO: 76898 - RNA, 22 nt, Human
cuggccagccugucgaugcccu

SEQ ID NO: 76899 - RNA, 22 nt, Human
cuggccagcugacagcagggcu

SEQ ID NO: 76900 - RNA, 22 nt, Human
cuggccagggugcgaucguggu

SEQ ID NO: 76901 - RNA, 22 nt, Human
cuggccagugacugcucacccg

SEQ ID NO: 76902 - RNA, 22 nt, Human
cuggccaguguggcucugaucu

SEQ ID NO: 76903 - RNA, 22 nt, Human
cuggccaguugccuuccugggu

SEQ ID NO: 76904 - RNA, 22 nt, Human
cuggccauguugccucugagac

SEQ ID NO: 76905 - RNA, 22 nt, Human
cuggcccagagagcagagcuua

SEQ ID NO: 76906 - RNA, 22 nt, Human
cuggcccaggaagacguguccc

SEQ ID NO: 76907 - RNA, 20 nt, Human
cuggcccaggaugauggcgc

SEQ ID NO: 76908 - RNA, 22 nt, Human
cuggcccaggcuccuggggcac

SEQ ID NO: 76909 - RNA, 22 nt, Human
cuggcccaguucugcguuuugc

SEQ ID NO: 76910 - RNA, 22 nt, Human
cuggccccagaguuucacuugg

SEQ ID NO: 76911 - RNA, 19 nt, Human
cuggucugcugcuuccagg

SEQ ID NO: 76912 - RNA, 22 nt, Human
cuggucuggcuacccagcgaau

SEQ ID NO: 76913 - RNA, 19 nt, Human
cuggucugucaugcucccc

SEQ ID NO: 76914 - RNA, 22 nt, Human
cuggucuguccgcaggucaccu

SEQ ID NO: 76915 - RNA, 22 nt, Human
cuggugaccggaccucaguuuu

SEQ ID NO: 76916 - RNA, 22 nt, Human
cuggugaccuugccccagguca

SEQ ID NO: 76917 - RNA, 19 nt, Human
cuggugaggguuauugaua

SEQ ID NO: 76918 - RNA, 22 nt, Human
cuggugaucuugggcaagucac

SEQ ID NO: 76919 - RNA, 22 nt, Human
cuggugcaaaaguaauuguggu

SEQ ID NO: 76920 - RNA, 22 nt, Human
cuggugcacaugaaagagaagg

SEQ ID NO: 76921 - RNA, 22 nt, Human
cuggugcauguggccuugcucu

SEQ ID NO: 76922 - RNA, 22 nt, Human
cuggugcuggcaacagaguagg

SEQ ID NO: 76923 - RNA, 22 nt, Human
cuggugcuguagccugauugag

SEQ ID NO: 76924 - RNA, 22 nt, Human
cugguggagaugccuggccccu

SEQ ID NO: 76925 - RNA, 22 nt, Human
cuggugggaagauggaaaacau

SEQ ID NO: 76926 - RNA, 22 nt, Human
cuggugggagauaauugaauca

SEQ ID NO: 76927 - RNA, 22 nt, Human
cuggugggagcagcaggcagcu

SEQ ID NO: 76928 - RNA, 22 nt, Human
cuggugggaggcaagguggaag

SEQ ID NO: 76929 - RNA, 22 nt, Human
cuggugguucaggagaauggcu

SEQ ID NO: 76930 - RNA, 22 nt, Human
cuggugucauuuuagccucagg

SEQ ID NO: 76931 - RNA, 22 nt, Human
cugguguccagcauguguggaa

SEQ ID NO: 76932 - RNA, 22 nt, Human
cugguguccgcaacgggcagcg

SEQ ID NO: 76933 - RNA, 22 nt, Human
cuggugugauugagcccaggug

SEQ ID NO: 76934 - RNA, 22 nt, Human
cugguguggcggcgcccuguag

SEQ ID NO: 76935 - RNA, 22 nt, Human
cugguuaauccauaaacagaga

SEQ ID NO: 76936 - RNA, 22 nt, Human
cugguuauuauucuuggaaugc

SEQ ID NO: 76937 - RNA, 22 nt, Human
cugguucauauaggcaaguuua

SEQ ID NO: 76938 - RNA, 22 nt, Human
cugguuggaagugcagacucuc

SEQ ID NO: 76939 - RNA, 22 nt, Human
cugguuuagcuguaagguuccc

SEQ ID NO: 76940 - RNA, 22 nt, Human
cugguuuaguaggggacugaag

SEQ ID NO: 76941 - RNA, 22 nt, Human
cugguuuauguaucaucuagaa

SEQ ID NO: 76942 - RNA, 22 nt, Human
cugguuugucuugggaggaugu

SEQ ID NO: 76943 - RNA, 22 nt, Human
cugguuuugcccagucuugcac

SEQ ID NO: 76944 - RNA, 22 nt, Human
cuguaaaaugaaccuagucauc

SEQ ID NO: 76945 - RNA, 22 nt, Human
cuguaaauaugaagaauauaug

SEQ ID NO: 76946 - RNA, 22 nt, Human
cuguaacuuagcaugguuacua

SEQ ID NO: 76947 - RNA, 22 nt, Human
cuguaagggccugacuacccug

SEQ ID NO: 76948 - RNA, 22 nt, Human
cuguacaaaagaaaguuccuau

SEQ ID NO: 76949 - RNA, 22 nt, Human
cuguacagaccuauuagcccag

SEQ ID NO: 76950 - RNA, 19 nt, Human
cuguacagguugcuucugg

SEQ ID NO: 76951 - RNA, 22 nt, Human
cuguacauaaaggaauaggugu

SEQ ID NO: 76952 - RNA, 22 nt, Human
cuguacauauacauuuuuuucc

SEQ ID NO: 76953 - RNA, 22 nt, Human
cuguacaucuuaaauggaaaaa

SEQ ID NO: 76954 - RNA, 22 nt, Human
cuguacuaauugcuuuacaugu

SEQ ID NO: 76955 - RNA, 22 nt, Human
cuguagcagacagacccuaggu

SEQ ID NO: 76956 - RNA, 22 nt, Human
cuguagccagaagcagaaggcc

SEQ ID NO: 76957 - RNA, 22 nt, Human
cuguaguugaugauuucugaua

SEQ ID NO: 76958 - RNA, 22 nt, Human
cuguauaugugcauacacacac

SEQ ID NO: 76959 - RNA, 22 nt, Human
cuguaucugucagcuggucucg

SEQ ID NO: 76960 - RNA, 22 nt, Human
cuguaucuguguuggaugaguu

SEQ ID NO: 76961 - RNA, 22 nt, Human
cuguaugaaauugucauuuuua

SEQ ID NO: 76962 - RNA, 22 nt, Human
cuguaugauauccaaauugaua

SEQ ID NO: 76963 - RNA, 22 nt, Human
cuguauuuaguuaaaaugcuaa

SEQ ID NO: 76964 - RNA, 22 nt, Human
cuguauuugaaagaaaagauuu

SEQ ID NO: 76965 - RNA, 22 nt, Human
cuguauuuuuuaagaauaucuc

SEQ ID NO: 76966 - RNA, 22 nt, Human
cuguauuuuuuaagugaucugg

SEQ ID NO: 76967 - RNA, 22 nt, Human
cugucaacauuggugucuguca

SEQ ID NO: 76968 - RNA, 22 nt, Human
cugucacagcccgcgucuccuc

SEQ ID NO: 76969 - RNA, 22 nt, Human
cugucacucuggcaacccagua

SEQ ID NO: 76970 - RNA, 22 nt, Human
cugucagaggcucucuguugcc

SEQ ID NO: 76971 - RNA, 22 nt, Human
cugucaggggcggguggagcgg

SEQ ID NO: 76972 - RNA, 22 nt, Human
cugucagggggccuggccauca

SEQ ID NO: 76973 - RNA, 22 nt, Human
cugucaguucuuccagauagag

SEQ ID NO: 76974 - RNA, 22 nt, Human
cugucauggucagauugucauc

SEQ ID NO: 76975 - RNA, 22 nt, Human
cugucauucuuacauaauguga

SEQ ID NO: 76976 - RNA, 22 nt, Human
cugucauuggcagggagugugu

SEQ ID NO: 76977 - RNA, 21 nt, Human
cuguccacaucacagagccuc

SEQ ID NO: 76978 - RNA, 22 nt, Human
cuguccagaauaggcaaaucca

SEQ ID NO: 76979 - RNA, 22 nt, Human
cuguccagcugaccagagcagc

SEQ ID NO: 76980 - RNA, 21 nt, Human
cuguccaguaauuccuggcac

SEQ ID NO: 76981 - RNA, 22 nt, Human
cuguccagucagaacgucauua

SEQ ID NO: 76982 - RNA, 22 nt, Human
cuguccaugacuugcacuauaa

SEQ ID NO: 76983 - RNA, 22 nt, Human
cuguccaugcauguugucugcu

SEQ ID NO: 76984 - RNA, 22 nt, Human
cuguccauguuaagccccuugc

SEQ ID NO: 76985 - RNA, 22 nt, Human
cugucccagccccguacucuaa

SEQ ID NO: 76986 - RNA, 22 nt, Human
cuguccccauuguuugaggguu

SEQ ID NO: 76987 - RNA, 22 nt, Human
cugucccucaucaccucugggu

SEQ ID NO: 76988 - RNA, 19 nt, Human
cugucccucccagguauga

SEQ ID NO: 76989 - RNA, 16 nt, Human
gcuccugggcccucga

SEQ ID NO: 76990 - RNA, 19 nt, Human
gcuccugggccucacucau

SEQ ID NO: 76991 - RNA, 22 nt, Human
gcuccuggucuggagcuucaag

SEQ ID NO: 76992 - RNA, 20 nt, Human
gcuccuguccugguggaggg

SEQ ID NO: 76993 - RNA, 22 nt, Human
gcuccugugaggacacagccgc

SEQ ID NO: 76994 - RNA, 17 nt, Human
gcuccuucuaacuucca

SEQ ID NO: 76995 - RNA, 22 nt, Human
gcucgaccgccagaaacuuccu

SEQ ID NO: 76996 - RNA, 18 nt, Human
gcucuaauuuuagaaagg

SEQ ID NO: 76997 - RNA, 22 nt, Human
gcucuagaaagaaggauguggg

SEQ ID NO: 76998 - RNA, 22 nt, Human
gcucuaugcaugggagcaggag

SEQ ID NO: 76999 - RNA, 22 nt, Human
gcucucacuuuagguuggaccg

SEQ ID NO: 77000 - RNA, 22 nt, Human
gcucucagguacaaagcugugu

SEQ ID NO: 77001 - RNA, 22 nt, Human
gcucucaugcccucugggcuug

SEQ ID NO: 77002 - RNA, 22 nt, Human
gcucuccaaacccuguggcuuu

SEQ ID NO: 77003 - RNA, 22 nt, Human
gcucuccugugcagaugcugcu

SEQ ID NO: 77004 - RNA, 22 nt, Human
gcucucuggcuaguccaucggg

SEQ ID NO: 77005 - RNA, 22 nt, Human
gcucucuggguggugggcaaca

SEQ ID NO: 77006 - RNA, 22 nt, Human
gcucucugucguuaugcuucau

SEQ ID NO: 77007 - RNA, 20 nt, Human
gcucugaccauaucaagaca

SEQ ID NO: 77008 - RNA, 22 nt, Human
gcucugacuggugggccacagu

SEQ ID NO: 77009 - RNA, 19 nt, Human
gcucugagaggggcauggg

SEQ ID NO: 77010 - RNA, 22 nt, Human
gcucugagagugcaugauagca

SEQ ID NO: 77011 - RNA, 22 nt, Human
gcucugagagugggugauucug

SEQ ID NO: 77012 - RNA, 22 nt, Human
gcucugagcagggagaaacagg

SEQ ID NO: 77013 - RNA, 22 nt, Human
gcucugagcccccagaagcaga

SEQ ID NO: 77014 - RNA, 22 nt, Human
gcucugagccgggggccugucc

SEQ ID NO: 77015 - RNA, 22 nt, Human
gcucugagcucagcgucagagu

SEQ ID NO: 77016 - RNA, 22 nt, Human
gcucugaguaaaugaaagcauu

SEQ ID NO: 77017 - RNA, 22 nt, Human
gcucugagugauuaaggagcuu

SEQ ID NO: 77018 - RNA, 18 nt, Human
gcucugcagcugaggcuu

SEQ ID NO: 77019 - RNA, 21 nt, Human
gcucugccacuuaccagauuu

SEQ ID NO: 77020 - RNA, 19 nt, Human
gcucugccagugguaacau

SEQ ID NO: 77021 - RNA, 22 nt, Human
cugggugcuuacuuugugcuag

SEQ ID NO: 77022 - RNA, 20 nt, Human
cuggguggcaagcaaggggg

SEQ ID NO: 77023 - RNA, 22 nt, Human
cuggguggcagagccugcagug

SEQ ID NO: 77024 - RNA, 22 nt, Human
cugggugguuuugaugugaauu

SEQ ID NO: 77025 - RNA, 22 nt, Human
cugggugucaggagacaugaug

SEQ ID NO: 77026 - RNA, 22 nt, Human
cugggugugggucaagcaacca

SEQ ID NO: 77027 - RNA, 22 nt, Human
cuggguguucaggagcugggcu

SEQ ID NO: 77028 - RNA, 22 nt, Human
cuggguucuuggcacagcagga

SEQ ID NO: 77029 - RNA, 22 nt, Human
cugguacaaaaugcugauauca

SEQ ID NO: 77030 - RNA, 22 nt, Human
cugguauaguauaaauuaaugu

SEQ ID NO: 77031 - RNA, 22 nt, Human
cugguauugaguuguugcuucc

SEQ ID NO: 77032 - RNA, 22 nt, Human
cuggucaauaaucauguaguac

SEQ ID NO: 77033 - RNA, 22 nt, Human
cuggucagggcucuuugggagc

SEQ ID NO: 77034 - RNA, 22 nt, Human
cuggucaugccagguuugcugc

SEQ ID NO: 77035 - RNA, 22 nt, Human
cugguccagaauuuaugauucu

SEQ ID NO: 77036 - RNA, 22 nt, Human
cugguccauucucucccugaag

SEQ ID NO: 77037 - RNA, 22 nt, Human
cugguccccagacugggcuuag

SEQ ID NO: 77038 - RNA, 22 nt, Human
cuggucccugcagugugcuggg

SEQ ID NO: 77039 - RNA, 22 nt, Human
cugguccuugacgcgugggagg

SEQ ID NO: 77040 - RNA, 22 nt, Human
cugguccuugcuacccagcaag

SEQ ID NO: 77041 - RNA, 18 nt, Human
cuggucucccuucgcuuu

SEQ ID NO: 77042 - RNA, 22 nt, Human
cuggucugaaaaggaggcaugc

SEQ ID NO: 77043 - RNA, 22 nt, Human
cuggugcaaggcuuuggaaucc

SEQ ID NO: 77044 - RNA, 22 nt, Human
cuggugcacguggcugcagucg

SEQ ID NO: 77045 - RNA, 22 nt, Human
cuggugcaggaaggagcuggca

SEQ ID NO: 77046 - RNA, 22 nt, Human
cuggugccuccucucccagguc

SEQ ID NO: 77047 - RNA, 22 nt, Human
cuggugcugggcagggcucagg

SEQ ID NO: 77048 - RNA, 19 nt, Human
cuggugcuugagugaguca

SEQ ID NO: 77049 - RNA, 22 nt, Human
cugguggaauggcagagggaac

SEQ ID NO: 77050 - RNA, 22 nt, Human
cugguggagagugggcucugga

SEQ ID NO: 77051 - RNA, 22 nt, Human
cugguggagggacaggcuuagc

SEQ ID NO: 77052 - RNA, 22 nt, Human
cugguggcaucuugagacgguu

SEQ ID NO: 77053 - RNA, 22 nt, Human
cugguguuuauuacaggugcuc

SEQ ID NO: 77054 - RNA, 23 nt, Human
cugguucauagucaagagauuga

SEQ ID NO: 77055 - RNA, 22 nt, Human
cugguucauccccuuccaggaa

SEQ ID NO: 77056 - RNA, 22 nt, Human
cugguucaugguggaaugacau

SEQ ID NO: 77057 - RNA, 22 nt, Human
cugguucauuagguauuagugg

SEQ ID NO: 77058 - RNA, 22 nt, Human
cugguuccagaauugccugugg

SEQ ID NO: 77059 - RNA, 22 nt, Human
cugguucugauguucuuggcuu

SEQ ID NO: 77060 - RNA, 22 nt, Human
cugguugggagguuggcuuuca

SEQ ID NO: 77061 - RNA, 22 nt, Human
cugguuuaaccauguauccugg

SEQ ID NO: 77062 - RNA, 22 nt, Human
cugguuuauucgucacaccgga

SEQ ID NO: 77063 - RNA, 22 nt, Human
cugguuugcccacaccagccac

SEQ ID NO: 77064 - RNA, 22 nt, Human
cugguuuuaauguuauguuuau

SEQ ID NO: 77065 - RNA, 22 nt, Human
cugguuuugaauaugucugcuu

SEQ ID NO: 77066 - RNA, 22 nt, Human
cugguuuuuagugcuuaggagu

SEQ ID NO: 77067 - RNA, 20 nt, Human
cuguaaaccaggcuucuugg

SEQ ID NO: 77068 - RNA, 20 nt, Human
cuguaaacugcgucuguaau

SEQ ID NO: 77069 - RNA, 22 nt, Human
cuguaaccuccucuuuccauuc

SEQ ID NO: 77070 - RNA, 22 nt, Human
cuguacagaguucugaguguac

SEQ ID NO: 77071 - RNA, 22 nt, Human
cuguaccucagcuuugcuccca

SEQ ID NO: 77072 - RNA, 22 nt, Human
cuguagagaaagcauggaagcu

SEQ ID NO: 77073 - RNA, 22 nt, Human
cuguagaggaacaagagcucuu

SEQ ID NO: 77074 - RNA, 22 nt, Human
cuguagcaaguuauucaauaaa

SEQ ID NO: 77075 - RNA, 22 nt, Human
cuguagccaguuuggccucacc

SEQ ID NO: 77076 - RNA, 22 nt, Human
cuguagcugacaggaucacuua

SEQ ID NO: 77077 - RNA, 22 nt, Human
cuguaggagugggaauuuauug

SEQ ID NO: 77078 - RNA, 22 nt, Human
cuguaguugggcauuauaauag

SEQ ID NO: 77079 - RNA, 22 nt, Human
cuguauaaacauauuuucaagu

SEQ ID NO: 77080 - RNA, 22 nt, Human
cuguauaaccccaugcgacugu

SEQ ID NO: 77081 - RNA, 22 nt, Human
cuguauaagauaccacacugaa

SEQ ID NO: 77082 - RNA, 22 nt, Human
cuguauauggcuuacuuuauau

SEQ ID NO: 77083 - RNA, 22 nt, Human
cuguaugaacccauauacuuau

SEQ ID NO: 77084 - RNA, 22 nt, Human
cuguaugaguugggaauagaau

SEQ ID NO: 77085 - RNA, 22 nt, Human
cuguauguagaauagcugacaa

SEQ ID NO: 77086 - RNA, 22 nt, Human
cuguauguuccguuuugucacu

SEQ ID NO: 77087 - RNA, 22 nt, Human
cuguauguuucuaugaauguga

SEQ ID NO: 77088 - RNA, 22 nt, Human
cuguauguuuucuccuuugguu

SEQ ID NO: 77089 - RNA, 21 nt, Human
cuguauuaacuuuugcaccuu

SEQ ID NO: 77090 - RNA, 22 nt, Human
cuguauuauuuucuuagcucug

SEQ ID NO: 77091 - RNA, 23 nt, Human
cuguauuugacuugagcggaaau

SEQ ID NO: 77092 - RNA, 22 nt, Human
cugucacacuaaaacaagaagu

SEQ ID NO: 77093 - RNA, 22 nt, Human
cugucacccacccagccuguca

SEQ ID NO: 77094 - RNA, 18 nt, Human
cugucaccgccaccacac

SEQ ID NO: 77095 - RNA, 21 nt, Human
cugucaccugcucagagaggg

SEQ ID NO: 77096 - RNA, 22 nt, Human
cugucacugaugcuccugccac

SEQ ID NO: 77097 - RNA, 22 nt, Human
cugucacugaugggcucaccag

SEQ ID NO: 77098 - RNA, 18 nt, Human
cugucagcagcuucacga

SEQ ID NO: 77099 - RNA, 22 nt, Human
cugucagcuucuccuggccaga

SEQ ID NO: 77100 - RNA, 22 nt, Human
cugucauugagccugucagggc

SEQ ID NO: 77101 - RNA, 22 nt, Human
cugucauuguacauguuauaca

SEQ ID NO: 77102 - RNA, 22 nt, Human
cugucauuucuauuauagagga

SEQ ID NO: 77103 - RNA, 21 nt, Human
cuguccaaauuucauaacuuu

SEQ ID NO: 77104 - RNA, 22 nt, Human
cuguccagucuuuagcaagcug

SEQ ID NO: 77105 - RNA, 22 nt, Human
cuguccauggcaaugaugcaga

SEQ ID NO: 77106 - RNA, 22 nt, Human
cuguccaugguccuuauuacca

SEQ ID NO: 77107 - RNA, 22 nt, Human
cuguguggccucaagccagccu

SEQ ID NO: 77108 - RNA, 22 nt, Human
cugugugugaacacagcccagc

SEQ ID NO: 77109 - RNA, 22 nt, Human
cuguguguuuauaucauuuccu

SEQ ID NO: 77110 - RNA, 22 nt, Human
cuguguuggcuuuucucuugua

SEQ ID NO: 77111 - RNA, 22 nt, Human
cuguguuuugauuaaaaagcaa

SEQ ID NO: 77112 - RNA, 22 nt, Human
cuguuaaaauguggucuuaaaa

SEQ ID NO: 77113 - RNA, 22 nt, Human
cuguuaaagauaguuaagcuuc

SEQ ID NO: 77114 - RNA, 22 nt, Human
cuguuaaauagacugcagugca

SEQ ID NO: 77115 - RNA, 22 nt, Human
cuguuaaaugagaaagcagacu

SEQ ID NO: 77116 - RNA, 22 nt, Human
cuguuaaucugcuugcaugaug

SEQ ID NO: 77117 - RNA, 17 nt, Human
cuguuaauucauuuccc

SEQ ID NO: 77118 - RNA, 22 nt, Human
cuguuacuccuuuggcagauua

SEQ ID NO: 77119 - RNA, 22 nt, Human
cuguuacugaaaugcaccgugc

SEQ ID NO: 77120 - RNA, 22 nt, Human
cuguuacuguuggcccagggug

SEQ ID NO: 77121 - RNA, 22 nt, Human
cuguuacuucaaucuucucccg

SEQ ID NO: 77122 - RNA, 22 nt, Human
cuguuagucuuuugcaggagag

SEQ ID NO: 77123 - RNA, 22 nt, Human
cuguuagugaucaaagggagag

SEQ ID NO: 77124 - RNA, 23 nt, Human
cuguuauuccaggcugaugggug

SEQ ID NO: 77125 - RNA, 22 nt, Human
cuguuauuccccuugcuguggu

SEQ ID NO: 77126 - RNA, 19 nt, Human
cuguuauugucagagcucc

SEQ ID NO: 77127 - RNA, 22 nt, Human
cuguuauuuagaacauggaauc

SEQ ID NO: 77128 - RNA, 22 nt, Human
cuguuauuucugaaugccaucc

SEQ ID NO: 77129 - RNA, 22 nt, Human
cuguuauuuggaggaugcuugg

SEQ ID NO: 77130 - RNA, 19 nt, Human
cuuauacagauuuucucau

SEQ ID NO: 77131 - RNA, 22 nt, Human
cuuauacugaaaaauuauuugu

SEQ ID NO: 77132 - RNA, 22 nt, Human
cuuauauuugucaacuuuacaa

SEQ ID NO: 77133 - RNA, 22 nt, Human
cuuauauuuuaggaacagacaa

SEQ ID NO: 77134 - RNA, 22 nt, Human
cuuaucaaacuggagcaggcuu

SEQ ID NO: 77135 - RNA, 22 nt, Human
cuuaucauaucauacauggcua

SEQ ID NO: 77136 - RNA, 22 nt, Human
cuuaucuuacuuccccuucaug

SEQ ID NO: 77137 - RNA, 22 nt, Human
cuuauggcuguagucuggaagu

SEQ ID NO: 77138 - RNA, 22 nt, Human
cuuauguauaauguuccacaua

SEQ ID NO: 77139 - RNA, 22 nt, Human
cuuauuagaguuguguucuguu

SEQ ID NO: 77140 - RNA, 22 nt, Human
cuuauuagugucugucugaguu

SEQ ID NO: 77141 - RNA, 22 nt, Human
cuuauuauggcauguaaguggg

SEQ ID NO: 77142 - RNA, 22 nt, Human
cuuauucagaaggagaaaugga

SEQ ID NO: 77143 - RNA, 22 nt, Human
cuuauucagaccuuggauucuu

SEQ ID NO: 77144 - RNA, 22 nt, Human
cuuauucagauacagacucuug

SEQ ID NO: 77145 - RNA, 22 nt, Human
cuuauucauauauucucgguag

SEQ ID NO: 77146 - RNA, 22 nt, Human
cuuauucuugucuuauugugcu

SEQ ID NO: 77147 - RNA, 22 nt, Human
cuuauugugagguauugagauu

SEQ ID NO: 77148 - RNA, 22 nt, Human
cuuauugugauuccugccucuu

SEQ ID NO: 77149 - RNA, 22 nt, Human
cuuauuguguguauuuucuagu

SEQ ID NO: 77150 - RNA, 22 nt, Human
cuuauuguuccuggacccugag

SEQ ID NO: 77151 - RNA, 22 nt, Human
cuuauuuccugacauggaaaga

SEQ ID NO: 77152 - RNA, 22 nt, Human
cuuauuucuccauccagaguca

SEQ ID NO: 77153 - RNA, 22 nt, Human
cuuauuugcccauguuucuuua

SEQ ID NO: 77154 - RNA, 22 nt, Human
cuuauuuuaagucaguuugggu

SEQ ID NO: 77155 - RNA, 22 nt, Human
cuucaaaagccagaagccugcg

SEQ ID NO: 77156 - RNA, 22 nt, Human
cuucaaagauuauugaaaacaa

SEQ ID NO: 77157 - RNA, 22 nt, Human
cuucaaagauuugauaaagcca

SEQ ID NO: 77158 - RNA, 22 nt, Human
cuucaaauacaaguagauuaug

SEQ ID NO: 77159 - RNA, 22 nt, Human
cuucaaauucgaggaguagaug

SEQ ID NO: 77160 - RNA, 22 nt, Human
cuucaacaguuuuagaacacug

SEQ ID NO: 77161 - RNA, 22 nt, Human
cuucaagaagacagcagagcau

SEQ ID NO: 77162 - RNA, 22 nt, Human
cuucaagauauuucuagaauca

SEQ ID NO: 77163 - RNA, 22 nt, Human
cuucaaggcuuauuccaguugu

SEQ ID NO: 77164 - RNA, 22 nt, Human
cuucaagguggcuaaauggggc

SEQ ID NO: 77165 - RNA, 22 nt, Human
cuucacaaaauauuucauuaua

SEQ ID NO: 77166 - RNA, 22 nt, Human
cuucacaaauggccuagaguuc

SEQ ID NO: 77167 - RNA, 16 nt, Human
cuucacagaggagagu

SEQ ID NO: 77168 - RNA, 22 nt, Human
cuucacauggguacugcugauc

SEQ ID NO: 77169 - RNA, 22 nt, Human
cuucacuggaaucuguaauagu

SEQ ID NO: 77170 - RNA, 22 nt, Human
cuucacuucacagaugccaaga

SEQ ID NO: 77171 - RNA, 22 nt, Human
cuucacuuuaagccaaucauga

SEQ ID NO: 77172 - RNA, 22 nt, Human
cuucagaaauaacaacaauuac

SEQ ID NO: 77173 - RNA, 22 nt, Human
cuucagaagaaaagcagugugu

SEQ ID NO: 77174 - RNA, 22 nt, Human
cuucagcaacuuuggaauguuu

SEQ ID NO: 77175 - RNA, 22 nt, Human
cuucagcugacgucaaaacacc

SEQ ID NO: 77176 - RNA, 22 nt, Human
cuucaggaguaguuaccuagca

SEQ ID NO: 77177 - RNA, 22 nt, Human
cuucaggauuaauuuggggccu

SEQ ID NO: 77178 - RNA, 19 nt, Human
cuucagggaggggccaggc

SEQ ID NO: 77179 - RNA, 22 nt, Human
cuucaguauccuccacauguua

SEQ ID NO: 77180 - RNA, 22 nt, Human
cuucagugauugcagaaagccu

SEQ ID NO: 77181 - RNA, 22 nt, Human
cuucagugcauguuuauaauca

SEQ ID NO: 77182 - RNA, 19 nt, Human
cuucaguguucaccuggcc

SEQ ID NO: 77183 - RNA, 22 nt, Human
cuucaguuagccaauucagguc

SEQ ID NO: 77184 - RNA, 22 nt, Human
cuucaguuaguuucaugugagc

SEQ ID NO: 77185 - RNA, 22 nt, Human
cuucaguuuaucccaucaucca

SEQ ID NO: 77186 - RNA, 22 nt, Human
cuucauaaucugaaauuuguaa

SEQ ID NO: 77187 - RNA, 22 nt, Human
cuucauaggguuguaaggauua

SEQ ID NO: 77188 - RNA, 22 nt, Human
cuucauaucucuguagaguuuu

SEQ ID NO: 77189 - RNA, 23 nt, Human
cuucaucaaaaguuaacacuagu

SEQ ID NO: 77190 - RNA, 22 nt, Human
cuucaucaacucuaacaaaugu

SEQ ID NO: 77191 - RNA, 21 nt, Human
cuucaucccggagauucuggu

SEQ ID NO: 77192 - RNA, 22 nt, Human
cuucaugaguguacaaccugug

SEQ ID NO: 77193 - RNA, 22 nt, Human
cuucaugaugaccaacugccau

SEQ ID NO: 77194 - RNA, 22 nt, Human
cuucauuaaccaaaaugcaaua

SEQ ID NO: 77195 - RNA, 22 nt, Human
cuucauuuccauccaacuggga

SEQ ID NO: 77196 - RNA, 22 nt, Human
cuucauuuggcaggcuggccuc

SEQ ID NO: 77197 - RNA, 22 nt, Human
cuuccagagauccaugaauacc

SEQ ID NO: 77198 - RNA, 22 nt, Human
cuuccagaggaacucugcagug

SEQ ID NO: 77199 - RNA, 22 nt, Human
cuuccagcugauuacaggcuau

SEQ ID NO: 77200 - RNA, 22 nt, Human
cuuccaggguccaggaagagcc

SEQ ID NO: 77201 - RNA, 22 nt, Human
cuucccaagcuuuaguuauuuu

SEQ ID NO: 77202 - RNA, 22 nt, Human
cuucccacuaaagcccuuguug

SEQ ID NO: 77203 - RNA, 22 nt, Human
cuuccccaaccccgacugugug

SEQ ID NO: 77204 - RNA, 22 nt, Human
cuucccuuuagcauauaguagu

SEQ ID NO: 77205 - RNA, 22 nt, Human
cuucccuuucuggugacuucuc

SEQ ID NO: 77206 - RNA, 22 nt, Human
cuuccuagcuucagagucuguu

SEQ ID NO: 77207 - RNA, 22 nt, Human
cuuccuagugucuacuuuggag

SEQ ID NO: 77208 - RNA, 22 nt, Human
cuuccucacggugcaacaggaa

SEQ ID NO: 77209 - RNA, 18 nt, Human
cuuccucaucgcucuccc

SEQ ID NO: 77210 - RNA, 22 nt, Human
cuuccucccggcccaugcucug

SEQ ID NO: 77211 - RNA, 22 nt, Human
cuuccuccgaagaaguugcugg

SEQ ID NO: 77212 - RNA, 22 nt, Human
cuuccucuauguucagguagaa

SEQ ID NO: 77213 - RNA, 22 nt, Human
cuuccucucuugcccauaagag

SEQ ID NO: 77214 - RNA, 22 nt, Human
cuuccucuguggccagagugua

SEQ ID NO: 77215 - RNA, 18 nt, Human
cuuccucuucuggagaaa

SEQ ID NO: 77216 - RNA, 22 nt, Human
cuuccugaacaaugccaucaau

SEQ ID NO: 77217 - RNA, 22 nt, Human
cuuccugaaggauggcagccuc

SEQ ID NO: 77218 - RNA, 22 nt, Human
cuuccugaaucuuccauguaua

SEQ ID NO: 77219 - RNA, 22 nt, Human
cuuccugaggugcugagcacag

SEQ ID NO: 77220 - RNA, 22 nt, Human
cuuccugcccacuuccugcugg

SEQ ID NO: 77221 - RNA, 19 nt, Human
cuuccuggaggagagccuc

SEQ ID NO: 77222 - RNA, 22 nt, Human
cuuccugggacaccuaacucua

SEQ ID NO: 77223 - RNA, 22 nt, Human
cuuccuuggcuucuggggugug

SEQ ID NO: 77224 - RNA, 22 nt, Human
cuuccuuuccccaaucauaucg

SEQ ID NO: 77225 - RNA, 22 nt, Human
cuuccuuugguuggagcgccgu

SEQ ID NO: 77226 - RNA, 22 nt, Human
cuucuaagcugagaaugccuuu

SEQ ID NO: 77227 - RNA, 22 nt, Human
cuucuaauauaaagucuuugca

SEQ ID NO: 77228 - RNA, 22 nt, Human
cuucuagagcuggagcaaaugu

SEQ ID NO: 77229 - RNA, 22 nt, Human
cuucuagauuuuuguaauuguu

SEQ ID NO: 77230 - RNA, 22 nt, Human
cuucuaggcuucucagggggca

SEQ ID NO: 77231 - RNA, 22 nt, Human
cuucuauaaacugugaucuuuc

SEQ ID NO: 77232 - RNA, 22 nt, Human
cuucuauucacuggucacaguu

SEQ ID NO: 77233 - RNA, 23 nt, Human
cuucucagaagucugugccagga

SEQ ID NO: 77234 - RNA, 23 nt, Human
cuucucaguaguacacacacuau

SEQ ID NO: 77235 - RNA, 22 nt, Human
cuucucauucaagcaaaacaga

SEQ ID NO: 77236 - RNA, 22 nt, Human
cuucucccgaagccgguucugc

SEQ ID NO: 77237 - RNA, 22 nt, Human
cuucucccuggcuucugcacac

SEQ ID NO: 77238 - RNA, 22 nt, Human
cuucucccugggggcucuuuau

SEQ ID NO: 77239 - RNA, 22 nt, Human
ggaauguuuuagcuugacuuuu

SEQ ID NO: 77240 - RNA, 22 nt, Human
ggaauucuuaaaauggugugua

SEQ ID NO: 77241 - RNA, 20 nt, Human
ggaauugcuuuccugucuuu

SEQ ID NO: 77242 - RNA, 22 nt, Human
ggaauugguuucaagggaaagu

SEQ ID NO: 77243 - RNA, 22 nt, Human
ggacaaaaaucagccaucucua

SEQ ID NO: 77244 - RNA, 22 nt, Human
ggacaaaauccaaacuucuuag

SEQ ID NO: 77245 - RNA, 22 nt, Human
cuucuccuuauaugucccguuc

SEQ ID NO: 77246 - RNA, 22 nt, Human
cuucucggccguguggaugcgc

SEQ ID NO: 77247 - RNA, 22 nt, Human
cuucucucggugcaucccucac

SEQ ID NO: 77248 - RNA, 22 nt, Human
cuucucugacagucuguuucac

SEQ ID NO: 77249 - RNA, 23 nt, Human
cuucucugagcuaggaaugcucu

SEQ ID NO: 77250 - RNA, 17 nt, Human
cuucucuggcagaagau

SEQ ID NO: 77251 - RNA, 22 nt, Human
cuucucuguguagagauucaga

SEQ ID NO: 77252 - RNA, 22 nt, Human
cuucucuuggguguggugucuu

SEQ ID NO: 77253 - RNA, 22 nt, Human
cuucugaccccuggucuacagc

SEQ ID NO: 77254 - RNA, 22 nt, Human
cuucugaggacucuaaagagga

SEQ ID NO: 77255 - RNA, 22 nt, Human
cuucugaggcagcuauucaguu

SEQ ID NO: 77256 - RNA, 22 nt, Human
cuucugagggccuuugcuucca

SEQ ID NO: 77257 - RNA, 22 nt, Human
cuucugauuagcaaguuuguau

SEQ ID NO: 77258 - RNA, 22 nt, Human
cuucugcaauaaguuuuggucc

SEQ ID NO: 77259 - RNA, 22 nt, Human
cuucugcaggagucaacucugg

SEQ ID NO: 77260 - RNA, 22 nt, Human
cuucugcaggcccugucugacc

SEQ ID NO: 77261 - RNA, 22 nt, Human
cuucuggauuuauucauuccuu

SEQ ID NO: 77262 - RNA, 22 nt, Human
cuucugggauuaauuuuuccug

SEQ ID NO: 77263 - RNA, 22 nt, Human
cuucugggauuuuugaagacuc

SEQ ID NO: 77264 - RNA, 22 nt, Human
cuucuggggauggagcccagaa

SEQ ID NO: 77265 - RNA, 22 nt, Human
cuucuggguauuccagauaccu

SEQ ID NO: 77266 - RNA, 22 nt, Human
cuucuguagccaguaacauaua

SEQ ID NO: 77267 - RNA, 22 nt, Human
cuucugugaccaccagcagccc

SEQ ID NO: 77268 - RNA, 22 nt, Human
cuucugugcgccucuauucccu

SEQ ID NO: 77269 - RNA, 22 nt, Human
cuucugugcuucacaguugcca

SEQ ID NO: 77270 - RNA, 22 nt, Human
cuucugugguaaacuuuguugu

SEQ ID NO: 77271 - RNA, 22 nt, Human
cuucuuaaaguugucacagcug

SEQ ID NO: 77272 - RNA, 22 nt, Human
cuucuuaaauauuuggcugacu

SEQ ID NO: 77273 - RNA, 22 nt, Human
cuucuuaaauuggauugcuauu

SEQ ID NO: 77274 - RNA, 22 nt, Human
cuucuuaaugacagauuaaaau

SEQ ID NO: 77275 - RNA, 22 nt, Human
cuucuuaucugaaaguaauauu

SEQ ID NO: 77276 - RNA, 22 nt, Human
cuucuucaaccugaaaguuuca

SEQ ID NO: 77277 - RNA, 22 nt, Human
cuucuuccaguuauaagagcuu

SEQ ID NO: 77278 - RNA, 22 nt, Human
cuucuugucaauuugccauugu

SEQ ID NO: 77279 - RNA, 22 nt, Human
cuucuuuaauguauacaaaaga

SEQ ID NO: 77280 - RNA, 22 nt, Human
cuucuuucuuuugaucacaggu

SEQ ID NO: 77281 - RNA, 22 nt, Human
cuugaaagauuuggccucugug

SEQ ID NO: 77282 - RNA, 22 nt, Human
cuugaaagcacuccuuugacug

SEQ ID NO: 77283 - RNA, 21 nt, Human
cuugaaagguagagucuacag

SEQ ID NO: 77284 - RNA, 19 nt, Human
cuugaaaugagacugaagg

SEQ ID NO: 77285 - RNA, 22 nt, Human
cuugaagaaauggagacaggau

SEQ ID NO: 77286 - RNA, 22 nt, Human
cuugaaucuggcuuugccacuu

SEQ ID NO: 77287 - RNA, 22 nt, Human
cuugaaucuucugaguauuugc

SEQ ID NO: 77288 - RNA, 22 nt, Human
cuugaaugggccauaagacggu

SEQ ID NO: 77289 - RNA, 22 nt, Human
cuugaauugggggaagaucacu

SEQ ID NO: 77290 - RNA, 22 nt, Human
cuugacaacuggcagauauaua

SEQ ID NO: 77291 - RNA, 22 nt, Human
cuugacucuugcuucccaugga

SEQ ID NO: 77292 - RNA, 22 nt, Human
cuugacuucuucuagaaauaag

SEQ ID NO: 77293 - RNA, 22 nt, Human
cuugacuuugccuuuuaaaugu

SEQ ID NO: 77294 - RNA, 22 nt, Human
cuugagaagcauuaagagguag

SEQ ID NO: 77295 - RNA, 22 nt, Human
cuugagaaucuugaugucuacc

SEQ ID NO: 77296 - RNA, 20 nt, Human
cuugaguucagagcugucau

SEQ ID NO: 77297 - RNA, 22 nt, Human
cuugauauuuuaaacauacagu

SEQ ID NO: 77298 - RNA, 22 nt, Human
cuugaugauuugcagagggagu

SEQ ID NO: 77299 - RNA, 22 nt, Human
cuugaugguggcagaagaguga

SEQ ID NO: 77300 - RNA, 22 nt, Human
cuugauucucagaaugcuugcu

SEQ ID NO: 77301 - RNA, 22 nt, Human
cuugauuucagccuugugauau

SEQ ID NO: 77302 - RNA, 22 nt, Human
cuugcaaacacucaaagccauc

SEQ ID NO: 77303 - RNA, 22 nt, Human
cuugcacacauguacaugugua

SEQ ID NO: 77304 - RNA, 22 nt, Human
cuugcacaggaucugaaguggg

SEQ ID NO: 77305 - RNA, 22 nt, Human
cuugcaggauuuugcugcugua

SEQ ID NO: 77306 - RNA, 22 nt, Human
cuugcaggcagggccuccugga

SEQ ID NO: 77307 - RNA, 23 nt, Human
cuugcagggcuggaggcuuagaa

SEQ ID NO: 77308 - RNA, 22 nt, Human
cuugcaugcauuugaagaucau

SEQ ID NO: 77309 - RNA, 22 nt, Human
cuugccaaauuaacauacagaa

SEQ ID NO: 77310 - RNA, 22 nt, Human
cuugccaaugguacaaacgauu

SEQ ID NO: 77311 - RNA, 20 nt, Human
cuugccaguucccuggcaga

SEQ ID NO: 77312 - RNA, 22 nt, Human
cuugccuagguguauauuaaau

SEQ ID NO: 77313 - RNA, 22 nt, Human
cuugccucugcuaaugguuucu

SEQ ID NO: 77314 - RNA, 22 nt, Human
cuugccugaggaacagagggua

SEQ ID NO: 77315 - RNA, 19 nt, Human
cuugccuguuccuacagcu

SEQ ID NO: 77316 - RNA, 22 nt, Human
cuugccuucagugucccuuugc

SEQ ID NO: 77317 - RNA, 22 nt, Human
cuugccuuugucuucaaaggcu

SEQ ID NO: 77318 - RNA, 22 nt, Human
cuugcucuagauguucagagcu

SEQ ID NO: 77319 - RNA, 18 nt, Human
cuugcugagggccucauu

SEQ ID NO: 77320 - RNA, 19 nt, Human
cuugcugggugguuucugc

SEQ ID NO: 77321 - RNA, 22 nt, Human
cuugcugucuugcauuuagagc

SEQ ID NO: 77322 - RNA, 22 nt, Human
cuugcugugugguguucucaga

SEQ ID NO: 77323 - RNA, 22 nt, Human
cuugcuguuauccauauuaucu

SEQ ID NO: 77324 - RNA, 22 nt, Human
cuugcuuuaucugguuucucau

SEQ ID NO: 77325 - RNA, 22 nt, Human
cuugcuuuguccagaaauucag

SEQ ID NO: 77326 - RNA, 22 nt, Human
cuuggacccacucccagaauug

SEQ ID NO: 77327 - RNA, 22 nt, Human
cuuggacuuuagucucucucca

SEQ ID NO: 77328 - RNA, 22 nt, Human
cuuggagaaaggaaagggcuug

SEQ ID NO: 77329 - RNA, 19 nt, Human
cuuggagaaggcuaugacc

SEQ ID NO: 77330 - RNA, 22 nt, Human
cuuggagacaggacaggcagaa

SEQ ID NO: 77331 - RNA, 22 nt, Human
cuuggaggaaggggcucuucug

SEQ ID NO: 77332 - RNA, 22 nt, Human
cuuggaguagagauuuagugaa

SEQ ID NO: 77333 - RNA, 22 nt, Human
cuuggagucaauaagaucuaga

SEQ ID NO: 77334 - RNA, 22 nt, Human
cuuggauaucacucagaaagau

SEQ ID NO: 77335 - RNA, 22 nt, Human
cuuggauuccgugaacuuaacc

SEQ ID NO: 77336 - RNA, 19 nt, Human
cuuggcaucugugaaguga

SEQ ID NO: 77337 - RNA, 22 nt, Human
cuuggcaugcagcaggcacuca

SEQ ID NO: 77338 - RNA, 22 nt, Human
cuuggcauguucaucugcuugg

SEQ ID NO: 77339 - RNA, 22 nt, Human
cuuggccugacauguggcaggg

SEQ ID NO: 77340 - RNA, 22 nt, Human
cuuggccugcaggcagcagcgc

SEQ ID NO: 77341 - RNA, 22 nt, Human
cuuggccugcccagccagaagg

SEQ ID NO: 77342 - RNA, 22 nt, Human
cuuggcucuguguugaugggac

SEQ ID NO: 77343 - RNA, 18 nt, Human
cuuggcugaugggggugu

SEQ ID NO: 77344 - RNA, 22 nt, Human
cuuggcugcuuuugugcacauu

SEQ ID NO: 77345 - RNA, 22 nt, Human
cuuggcuggaacuccugagaaa

SEQ ID NO: 77346 - RNA, 22 nt, Human
cuugggaaaccaaugggcuccu

SEQ ID NO: 77347 - RNA, 22 nt, Human
cuugggaggagaacaaagcucc

SEQ ID NO: 77348 - RNA, 21 nt, Human
accuucaguguucucagcugc

SEQ ID NO: 77349 - RNA, 19 nt, Human
accuucugggaaacauucc

SEQ ID NO: 77350 - RNA, 22 nt, Human
accuuggaaaguuuaauugagg

SEQ ID NO: 77351 - RNA, 22 nt, Human
accuugucugugcaccugggcu

SEQ ID NO: 77352 - RNA, 22 nt, Human
accuugugagguuacauaaugu

SEQ ID NO: 77353 - RNA, 22 nt, Human
accuuguuaaaaugaggauucu

SEQ ID NO: 77354 - RNA, 22 nt, Human
accuuguuguagguacaaaaga

SEQ ID NO: 77355 - RNA, 22 nt, Human
accuuucaaaguggcuaucacu

SEQ ID NO: 77356 - RNA, 20 nt, Human
accuuucaaaugauucagca

SEQ ID NO: 77357 - RNA, 22 nt, Human
accuuucguccugguuccuccg

SEQ ID NO: 77358 - RNA, 19 nt, Human
accuuugagaagaaauguc

SEQ ID NO: 77359 - RNA, 22 nt, Human
accuuuggaaauaaacacucug

SEQ ID NO: 77360 - RNA, 22 nt, Human
accuuuuuccaaagcuucuuac

SEQ ID NO: 77361 - RNA, 22 nt, Human
acgaaucauucacggacaacac

SEQ ID NO: 77362 - RNA, 22 nt, Human
acgacagcacaacagcauccuc

SEQ ID NO: 77363 - RNA, 22 nt, Human
acgagguuggagaguuguuugg

SEQ ID NO: 77364 - RNA, 22 nt, Human
acgaguauguuuguauuuucuu

SEQ ID NO: 77365 - RNA, 22 nt, Human
acgaugagauggggcuggaagg

SEQ ID NO: 77366 - RNA, 22 nt, Human
acgaugcucaacuauaugaauu

SEQ ID NO: 77367 - RNA, 22 nt, Human
acgcgcaaccaggcaugcacau

SEQ ID NO: 77368 - RNA, 22 nt, Human
acggccgaugacuccagcaugg

SEQ ID NO: 77369 - RNA, 22 nt, Human
acaguguagaauccuguacuua

SEQ ID NO: 77370 - RNA, 22 nt, Human
acagugucuccugguacccagu

SEQ ID NO: 77371 - RNA, 22 nt, Human
acaguguguucugggaccucca

SEQ ID NO: 77372 - RNA, 20 nt, Human
acaguguuagguuuuuccuu

SEQ ID NO: 77373 - RNA, 22 nt, Human
acaguguugaggugcuuguuuc

SEQ ID NO: 77374 - RNA, 22 nt, Human
acaguguuguggcucuuaauag

SEQ ID NO: 77375 - RNA, 22 nt, Human
acaguguuuaaaaaucagaucu

SEQ ID NO: 77376 - RNA, 22 nt, Human
acaguguuuggcaaugcaugca

SEQ ID NO: 77377 - RNA, 22 nt, Human
acaguguuuuagaaaagcuuga

SEQ ID NO: 77378 - RNA, 22 nt, Human
acaguuaacuggagagcgaguu

SEQ ID NO: 77379 - RNA, 22 nt, Human
acaguuaauccuaaaggcggua

SEQ ID NO: 77380 - RNA, 22 nt, Human
acaguuacaucacuuacugaca

SEQ ID NO: 77381 - RNA, 22 nt, Human
acaguuacauuccagcaacauc

SEQ ID NO: 77382 - RNA, 22 nt, Human
acaguuaggcacggguacagca

SEQ ID NO: 77383 - RNA, 22 nt, Human
acaguuauucuuuaugcaacca

SEQ ID NO: 77384 - RNA, 22 nt, Human
acaguuccugacuuuaacucca

SEQ ID NO: 77385 - RNA, 23 nt, Human
acaguucucugauggguuuaaca

SEQ ID NO: 77386 - RNA, 22 nt, Human
acaguucugagcuauaauugcu

SEQ ID NO: 77387 - RNA, 22 nt, Human
acaguucugcaagauauuuuuu

SEQ ID NO: 77388 - RNA, 22 nt, Human
acaguuuagaaugccacauagu

SEQ ID NO: 77389 - RNA, 22 nt, Human
acaguuuagagcaugaugacca

SEQ ID NO: 77390 - RNA, 22 nt, Human
acaguuuauugcacagguaacc

SEQ ID NO: 77391 - RNA, 22 nt, Human
acaguuugguugcuacaguaaa

SEQ ID NO: 77392 - RNA, 17 nt, Human
acaguuugucauucuaa

SEQ ID NO: 77393 - RNA, 22 nt, Human
acaguuuuuucaacauuggaau

SEQ ID NO: 77394 - RNA, 22 nt, Human
acauaaaguacugagagacucu

SEQ ID NO: 77395 - RNA, 21 nt, Human
acauaacugucaaguaacguu

SEQ ID NO: 77396 - RNA, 22 nt, Human
acauaaguuauggauaaaaugu

SEQ ID NO: 77397 - RNA, 22 nt, Human
acauaauaggugccugaauauu

SEQ ID NO: 77398 - RNA, 22 nt, Human
acauacacaugaauauauuuuu

SEQ ID NO: 77399 - RNA, 22 nt, Human
acauacacgggaaaccucuuuu

SEQ ID NO: 77400 - RNA, 22 nt, Human
acauacagaccugcagggcagc

SEQ ID NO: 77401 - RNA, 23 nt, Human
acauacauaagcaccacauuuug

SEQ ID NO: 77402 - RNA, 22 nt, Human
acauacaugggauuaaaaaauu

SEQ ID NO: 77403 - RNA, 18 nt, Human
acauacauucugucugca

SEQ ID NO: 77404 - RNA, 22 nt, Human
acauaccauacauggugagaug

SEQ ID NO: 77405 - RNA, 22 nt, Human
acauacuuaacauuaaagucau

SEQ ID NO: 77406 - RNA, 22 nt, Human
acauacuuaugcuaaaaauaua

SEQ ID NO: 77407 - RNA, 22 nt, Human
acauacuuauguguauaugugu

SEQ ID NO: 77408 - RNA, 22 nt, Human
acauagaaccuggcacauagua

SEQ ID NO: 77409 - RNA, 22 nt, Human
acauagaaggaagaguaguagg

SEQ ID NO: 77410 - RNA, 22 nt, Human
acauagaagugaugcuuaucca

SEQ ID NO: 77411 - RNA, 22 nt, Human
acauagaguaucauacuggaug

SEQ ID NO: 77412 - RNA, 22 nt, Human
acauagauuuaagagcaauuag

SEQ ID NO: 77413 - RNA, 19 nt, Human
acauagcuggcuacacugu

SEQ ID NO: 77414 - RNA, 22 nt, Human
acauagcuuaaaugagaagaua

SEQ ID NO: 77415 - RNA, 21 nt, Human
acauaggcgaauguucgggag

SEQ ID NO: 77416 - RNA, 22 nt, Human
acauauauuuucacacaugguu

SEQ ID NO: 77417 - RNA, 22 nt, Human
acauaucuuucccucuccugaa

SEQ ID NO: 77418 - RNA, 22 nt, Human
acauaugaguacuauacagugc

SEQ ID NO: 77419 - RNA, 22 nt, Human
acauaugauauugaggaucuca

SEQ ID NO: 77420 - RNA, 22 nt, Human
acauaugucuauuucauguaaa

SEQ ID NO: 77421 - RNA, 20 nt, Human
acauaugugugcauaucuuu

SEQ ID NO: 77422 - RNA, 22 nt, Human
acauauguuguaaacauuccaa

SEQ ID NO: 77423 - RNA, 22 nt, Human
acauauuuccaugcagcauguc

SEQ ID NO: 77424 - RNA, 22 nt, Human
acaucacacgccuuccaggagg

SEQ ID NO: 77425 - RNA, 22 nt, Human
acaucacaguaguuaagccaga

SEQ ID NO: 77426 - RNA, 22 nt, Human
acaucagacaauuaauuauuaa

SEQ ID NO: 77427 - RNA, 23 nt, Human
acaucagaguuaguucaaucagg

SEQ ID NO: 77428 - RNA, 22 nt, Human
acaucaguaacuguaaaacagg

SEQ ID NO: 77429 - RNA, 22 nt, Human
acauccacauuuauucagucau

SEQ ID NO: 77430 - RNA, 22 nt, Human
acauccaccacaugccaggcuc

SEQ ID NO: 77431 - RNA, 22 nt, Human
acauccagaggcguggaaggcu

SEQ ID NO: 77432 - RNA, 22 nt, Human
acauccaucuuaugagauaggu

SEQ ID NO: 77433 - RNA, 22 nt, Human
acaucccacagaaacauacaua

SEQ ID NO: 77434 - RNA, 22 nt, Human
acaucccuugcucggggccccu

SEQ ID NO: 77435 - RNA, 22 nt, Human
acauccgcagguuauaaagccc

SEQ ID NO: 77436 - RNA, 20 nt, Human
acauccuggugacuagaacu

SEQ ID NO: 77437 - RNA, 22 nt, Human
acaucuagaagaucugggagau

SEQ ID NO: 77438 - RNA, 22 nt, Human
acaucucaaauuccaggcucca

SEQ ID NO: 77439 - RNA, 22 nt, Human
acaucucacuucuuugaaggcu

SEQ ID NO: 77440 - RNA, 22 nt, Human
acaucugaaagggauugcagaa

SEQ ID NO: 77441 - RNA, 22 nt, Human
acaucugagcaacagaacacua

SEQ ID NO: 77442 - RNA, 22 nt, Human
acaucugggccuaaggcuauau

SEQ ID NO: 77443 - RNA, 22 nt, Human
acaucuguucuucucuuguccc

SEQ ID NO: 77444 - RNA, 22 nt, Human
acaucuucccacacuugcaaaa

SEQ ID NO: 77445 - RNA, 22 nt, Human
acaugaaguggucagaucaaac

SEQ ID NO: 77446 - RNA, 22 nt, Human
acaugaaugcagccauaacacu

SEQ ID NO: 77447 - RNA, 22 nt, Human
acaugacaagguuuauaaggcu

SEQ ID NO: 77448 - RNA, 22 nt, Human
acaugacagggaaugaggugaa

SEQ ID NO: 77449 - RNA, 22 nt, Human
acaugacuauaauuacuuaaau

SEQ ID NO: 77450 - RNA, 17 nt, Human
acaugacugcacaaagu

SEQ ID NO: 77451 - RNA, 22 nt, Human
acaugagagaaaaguauucuga

SEQ ID NO: 77452 - RNA, 22 nt, Human
acaugagaggcuguggaguaca

SEQ ID NO: 77453 - RNA, 22 nt, Human
acaugaggaaacaaggguauau

SEQ ID NO: 77454 - RNA, 22 nt, Human
acaugaguacagauggauguaa

SEQ ID NO: 77455 - RNA, 22 nt, Human
acaugaucuuauguagaagauc

SEQ ID NO: 77456 - RNA, 22 nt, Human
acaugauuggacuccuuccccu

SEQ ID NO: 77457 - RNA, 22 nt, Human
acaugacagugacuuuauaaga

SEQ ID NO: 77458 - RNA, 22 nt, Human
acaugacuuuucucuuccagag

SEQ ID NO: 77459 - RNA, 21 nt, Human
acaugagacacacauauaugu

SEQ ID NO: 77460 - RNA, 22 nt, Human
acaugagauuagcucacccacu

SEQ ID NO: 77461 - RNA, 22 nt, Human
acaugaggaacucaggagucac

SEQ ID NO: 77462 - RNA, 22 nt, Human
acaugaggugcuauaggucuac

SEQ ID NO: 77463 - RNA, 22 nt, Human
acaugauauaugggaaaugcuu

SEQ ID NO: 77464 - RNA, 22 nt, Human
acaugauuugcaugauuuguaa

SEQ ID NO: 77465 - RNA, 22 nt, Human
acaugauuuuaguaucauaaua

SEQ ID NO: 77466 - RNA, 22 nt, Human
acaugauuuuucuuugacucua

SEQ ID NO: 77467 - RNA, 22 nt, Human
acaugcacaccuauauacaugu

SEQ ID NO: 77468 - RNA, 22 nt, Human
acaugcacggcaccaucuucug

SEQ ID NO: 77469 - RNA, 20 nt, Human
acaugcacguguguauauau

SEQ ID NO: 77470 - RNA, 22 nt, Human
acaugcacucucacugugcucu

SEQ ID NO: 77471 - RNA, 22 nt, Human
acaugcacugcucaggguuccg

SEQ ID NO: 77472 - RNA, 22 nt, Human
acaugcagagggagggccaggc

SEQ ID NO: 77473 - RNA, 22 nt, Human
acaugcagugaggaucuuagaa

SEQ ID NO: 77474 - RNA, 22 nt, Human
acaugcauaagccuagccauca

SEQ ID NO: 77475 - RNA, 22 nt, Human
acaugcauaggagaagucuuua

SEQ ID NO: 77476 - RNA, 22 nt, Human
acaugcaugaaauccauaaaca

SEQ ID NO: 77477 - RNA, 22 nt, Human
acaugcauggacauguauauau

SEQ ID NO: 77478 - RNA, 22 nt, Human
acaugcauggcugcuuaaauua

SEQ ID NO: 77479 - RNA, 22 nt, Human
acaugcaugguguuggguugga

SEQ ID NO: 77480 - RNA, 22 nt, Human
acaugccaauuugguuaguuca

SEQ ID NO: 77481 - RNA, 22 nt, Human
acaugccagaacuuguaccaau

SEQ ID NO: 77482 - RNA, 22 nt, Human
acaugccaugguuguuugcugc

SEQ ID NO: 77483 - RNA, 22 nt, Human
acaugccuccauugagcugugg

SEQ ID NO: 77484 - RNA, 22 nt, Human
acaugcuaaaucugagaugcuu

SEQ ID NO: 77485 - RNA, 22 nt, Human
acaugcuagguacagaucuaaa

SEQ ID NO: 77486 - RNA, 22 nt, Human
acaugcuguccugucuuuguca

SEQ ID NO: 77487 - RNA, 22 nt, Human
acaugcuuuaucggauugacac

SEQ ID NO: 77488 - RNA, 22 nt, Human
acucgugucaagauccuaaguc

SEQ ID NO: 77489 - RNA, 22 nt, Human
acucuaaaagugaagugugguc

SEQ ID NO: 77490 - RNA, 20 nt, Human
acucuaacucuuuacaacag

SEQ ID NO: 77491 - RNA, 22 nt, Human
acucuaaugcuaauaguauuuu

SEQ ID NO: 77492 - RNA, 20 nt, Human
acucuaccagggcagcagca

SEQ ID NO: 77493 - RNA, 22 nt, Human
acucuacuguaguaugggcacu

SEQ ID NO: 77494 - RNA, 22 nt, Human
acucucaaauauuaaucuuugg

SEQ ID NO: 77495 - RNA, 22 nt, Human
acucucagggacagggucuggg

SEQ ID NO: 77496 - RNA, 22 nt, Human
acucucagggcuccagggaaag

SEQ ID NO: 77497 - RNA, 23 nt, Human
acucucagguucuuuccagcagg

SEQ ID NO: 77498 - RNA, 22 nt, Human
acucucccacguucgacucuaa

SEQ ID NO: 77499 - RNA, 22 nt, Human
acucugaagaagacuuccagac

SEQ ID NO: 77500 - RNA, 22 nt, Human
acucugaauuaauugcucucaa

SEQ ID NO: 77501 - RNA, 23 nt, Human
acucugacuuaguuauagcuauu

SEQ ID NO: 77502 - RNA, 22 nt, Human
acucugagccaccagaucccca

SEQ ID NO: 77503 - RNA, 22 nt, Human
acucugaggaauguacaggacc

SEQ ID NO: 77504 - RNA, 19 nt, Human
acucugaggcugagacaag

SEQ ID NO: 77505 - RNA, 22 nt, Human
acucugagggguauguuccuau

SEQ ID NO: 77506 - RNA, 22 nt, Human
acucugaguuccuacuugcucc

SEQ ID NO: 77507 - RNA, 22 nt, Human
acucugccuuucagcagaugaa

SEQ ID NO: 77508 - RNA, 22 nt, Human
acucugcuaaauguguaggcuc

SEQ ID NO: 77509 - RNA, 22 nt, Human
acucugcuauugcagugcaaaa

SEQ ID NO: 77510 - RNA, 22 nt, Human
acucugcucuguauuucacugu

SEQ ID NO: 77511 - RNA, 22 nt, Human
acucugcucuuauaguguuaua

SEQ ID NO: 77512 - RNA, 22 nt, Human
acucugcuggcugcagggcagc

SEQ ID NO: 77513 - RNA, 22 nt, Human
acucugcugucugauggcagga

SEQ ID NO: 77514 - RNA, 22 nt, Human
acucugcuuauugcugcaggca

SEQ ID NO: 77515 - RNA, 22 nt, Human
acucuggcaagcuuccacuucc

SEQ ID NO: 77516 - RNA, 22 nt, Human
acucuggccaggugcgguaugu

SEQ ID NO: 77517 - RNA, 22 nt, Human
acucuggccccaggaucugugu

SEQ ID NO: 77518 - RNA, 22 nt, Human
acucuggcuauucacuauaaua

SEQ ID NO: 77519 - RNA, 22 nt, Human
acucuggcuugaggaccagguc

SEQ ID NO: 77520 - RNA, 22 nt, Human
acucugggauuguuucugguau

SEQ ID NO: 77521 - RNA, 22 nt, Human
acucugggcccacccucagagu

SEQ ID NO: 77522 - RNA, 22 nt, Human
acucuggggugaugucucugag

SEQ ID NO: 77523 - RNA, 22 nt, Human
acucuguaaagcauaacguuug

SEQ ID NO: 77524 - RNA, 22 nt, Human
acucuguacuuucuuguugugu

SEQ ID NO: 77525 - RNA, 22 nt, Human
acucuguagaguauaccaaugu

SEQ ID NO: 77526 - RNA, 22 nt, Human
acucuguagccuguaagagagc

SEQ ID NO: 77527 - RNA, 22 nt, Human
acucuguguuuugguggcagca

SEQ ID NO: 77528 - RNA, 19 nt, Human
acucuguuguacuugaggg

SEQ ID NO: 77529 - RNA, 22 nt, Human
acucuuacucccucaggcacug

SEQ ID NO: 77530 - RNA, 22 nt, Human
acucuuauucccucagaaauau

SEQ ID NO: 77531 - RNA, 22 nt, Human
acucuuauuuugaaguaauaau

SEQ ID NO: 77532 - RNA, 22 nt, Human
acucuucacacuugucuccagg

SEQ ID NO: 77533 - RNA, 22 nt, Human
acucuucaucccuuuaucagga

SEQ ID NO: 77534 - RNA, 22 nt, Human
acucuucaugcuaugcucaacu

SEQ ID NO: 77535 - RNA, 22 nt, Human
acucuucuugcugcucauuaau

SEQ ID NO: 77536 - RNA, 22 nt, Human
acucuuggccacucuugguguc

SEQ ID NO: 77537 - RNA, 22 nt, Human
acucuuuaacagacuuugaucu

SEQ ID NO: 77538 - RNA, 22 nt, Human
acucuuuagagguacaucucuu

SEQ ID NO: 77539 - RNA, 22 nt, Human
acugaaaguccagcaugguaca

SEQ ID NO: 77540 - RNA, 22 nt, Human
acugaaauauuuagaagugaag

SEQ ID NO: 77541 - RNA, 22 nt, Human
acugaaauuuauauuuugggca

SEQ ID NO: 77542 - RNA, 22 nt, Human
acugaacauaugcaagaccauu

SEQ ID NO: 77543 - RNA, 21 nt, Human
acugaacuuguguucuagagg

SEQ ID NO: 77544 - RNA, 22 nt, Human
acugaagcacauuugccaugaa

SEQ ID NO: 77545 - RNA, 17 nt, Human
acugaagcauuuaugau

SEQ ID NO: 77546 - RNA, 22 nt, Human
acugaagcuuggguggaacuua

SEQ ID NO: 77547 - RNA, 22 nt, Human
acugaaggcuuaacucuuucau

SEQ ID NO: 77548 - RNA, 22 nt, Human
acugaaggcuuucccaagguca

SEQ ID NO: 77549 - RNA, 22 nt, Human
acugaaguagucauugucauua

SEQ ID NO: 77550 - RNA, 22 nt, Human
acugaaguucauacaacagacu

SEQ ID NO: 77551 - RNA, 22 nt, Human
acugaauauauuccauugcaug

SEQ ID NO: 77552 - RNA, 22 nt, Human
acugaaugaggggugaucuggg

SEQ ID NO: 77553 - RNA, 22 nt, Human
acugaauuacagucugcauuuu

SEQ ID NO: 77554 - RNA, 22 nt, Human
acugaauuagggaacacugaac

SEQ ID NO: 77555 - RNA, 22 nt, Human
acugaauuccucuuucuuaucc

SEQ ID NO: 77556 - RNA, 22 nt, Human
acugaauuuuaauuagaucugc

SEQ ID NO: 77557 - RNA, 22 nt, Human
acugacauuuuucccuaagcau

SEQ ID NO: 77558 - RNA, 22 nt, Human
acugacuuuggaauauuucuag

SEQ ID NO: 77559 - RNA, 22 nt, Human
acugagaaauuuccagacuugc

SEQ ID NO: 77560 - RNA, 22 nt, Human
acugagagaacgggcugcuccc

SEQ ID NO: 77561 - RNA, 22 nt, Human
acugagaguugugcauucaugc

SEQ ID NO: 77562 - RNA, 22 nt, Human
acugagcaaugcagugggagcg

SEQ ID NO: 77563 - RNA, 22 nt, Human
acugagcacucacuuuuguuau

SEQ ID NO: 77564 - RNA, 22 nt, Human
acugagcauaaauaugugucca

SEQ ID NO: 77565 - RNA, 23 nt, Human
acugagccagggccugggucagc

SEQ ID NO: 77566 - RNA, 21 nt, Human
acuagcaaaagccuauuaucc

SEQ ID NO: 77567 - RNA, 22 nt, Human
acuagcagaaacugaucauggc

SEQ ID NO: 77568 - RNA, 22 nt, Human
acuaggaggcauauaaaacauu

SEQ ID NO: 77569 - RNA, 22 nt, Human
acuaggggcucaggcccaggga

SEQ ID NO: 77570 - RNA, 22 nt, Human
acuagucauuuaggugauauua

SEQ ID NO: 77571 - RNA, 22 nt, Human
acuagugaagaagauuugacug

SEQ ID NO: 77572 - RNA, 18 nt, Human
acuagugagcaagcuagg

SEQ ID NO: 77573 - RNA, 22 nt, Human
acuaguuuuccauaauauagga

SEQ ID NO: 77574 - RNA, 22 nt, Human
acuauaacccauggaauauaag

SEQ ID NO: 77575 - RNA, 22 nt, Human
acuauacauaaaacauuugggu

SEQ ID NO: 77576 - RNA, 22 nt, Human
acuaucucuuuugucugcagcu

SEQ ID NO: 77577 - RNA, 18 nt, Human
acuaugcugaauaaaugg

SEQ ID NO: 77578 - RNA, 18 nt, Human
acuauugagguauucuug

SEQ ID NO: 77579 - RNA, 22 nt, Human
acuauugcuuagagcaaugggg

SEQ ID NO: 77580 - RNA, 22 nt, Human
acuauuuguaaagagcaaacgg

SEQ ID NO: 77581 - RNA, 20 nt, Human
acucaaaucaccugccucaa

SEQ ID NO: 77582 - RNA, 23 nt, Human
acucaaauuucgcuuggaguuca

SEQ ID NO: 77583 - RNA, 22 nt, Human
acucaacagggaacaagaucag

SEQ ID NO: 77584 - RNA, 22 nt, Human
acucaagauagggaaaguacaa

SEQ ID NO: 77585 - RNA, 18 nt, Human
acucaaggguggagagaa

SEQ ID NO: 77586 - RNA, 22 nt, Human
acucaagucauaggcuucuuuc

SEQ ID NO: 77587 - RNA, 22 nt, Human
acucacuagagguagaucccug

SEQ ID NO: 77588 - RNA, 22 nt, Human
acucacucuuaaucagacuccc

SEQ ID NO: 77589 - RNA, 22 nt, Human
acucacucuuucaauugaaaga

SEQ ID NO: 77590 - RNA, 22 nt, Human
acucacugggucccggaagccc

SEQ ID NO: 77591 - RNA, 22 nt, Human
acucagacgaaaacaugaacau

SEQ ID NO: 77592 - RNA, 22 nt, Human
acucagagaacauucccagucu

SEQ ID NO: 77593 - RNA, 22 nt, Human
acucagaggcuggaaaucaaag

SEQ ID NO: 77594 - RNA, 22 nt, Human
acucagagucugagauaaaucu

SEQ ID NO: 77595 - RNA, 22 nt, Human
acucagagucuguuugguaccu

SEQ ID NO: 77596 - RNA, 22 nt, Human
acucagagugcaucuccuauuu

SEQ ID NO: 77597 - RNA, 20 nt, Human
acucagaugcucacaacagg

SEQ ID NO: 77598 - RNA, 22 nt, Human
acucagcauauggggccgcuug

SEQ ID NO: 77599 - RNA, 22 nt, Human
acucagcuuccuacagcuagaa

SEQ ID NO: 77600 - RNA, 22 nt, Human
acucaggaaaaauguagugaua

SEQ ID NO: 77601 - RNA, 22 nt, Human
acucaggaauggggcugggacu

SEQ ID NO: 77602 - RNA, 19 nt, Human
acucaggcaaugagaaaca

SEQ ID NO: 77603 - RNA, 21 nt, Human
acucaggcaccaggggauggc

SEQ ID NO: 77604 - RNA, 22 nt, Human
acucaggcuucaggcacagcug

SEQ ID NO: 77605 - RNA, 22 nt, Human
acucaguacaucuggaguuggc

SEQ ID NO: 77606 - RNA, 23 nt, Human
acucagugaagcaaacagauagu

SEQ ID NO: 77607 - RNA, 23 nt, Human
acucagugagggccuugggcugc

SEQ ID NO: 77608 - RNA, 22 nt, Human
acucaucuauuagauaucuguu

SEQ ID NO: 77609 - RNA, 22 nt, Human
acucaucugaaaaaugaggaga

SEQ ID NO: 77610 - RNA, 22 nt, Human
acucaucuuugaauuuucagua

SEQ ID NO: 77611 - RNA, 22 nt, Human
acucauguaagcggaauguagu

SEQ ID NO: 77612 - RNA, 20 nt, Human
acucauuuccagcaucugau

SEQ ID NO: 77613 - RNA, 22 nt, Human
acucauuugcaugaugugcuau

SEQ ID NO: 77614 - RNA, 21 nt, Human
acucauuugucugcaucuaau

SEQ ID NO: 77615 - RNA, 22 nt, Human
acucauuuuuacugcaauugag

SEQ ID NO: 77616 - RNA, 21 nt, Human
acuccaaacaaguuaagcugu

SEQ ID NO: 77617 - RNA, 22 nt, Human
acuccagaggcagcugugcuga

SEQ ID NO: 77618 - RNA, 22 nt, Human
acuccagaugauaagggacagu

SEQ ID NO: 77619 - RNA, 22 nt, Human
acuccagggaggugagugugcg

SEQ ID NO: 77620 - RNA, 19 nt, Human
acuccagggaugacagaag

SEQ ID NO: 77621 - RNA, 22 nt, Human
acuccagggguugcuauuuaca

SEQ ID NO: 77622 - RNA, 18 nt, Human
acuccccacaggcucugu

SEQ ID NO: 77623 - RNA, 22 nt, Human
acuccccagacugccaugcugg

SEQ ID NO: 77624 - RNA, 22 nt, Human
acucccuccaaaucugcacagu

SEQ ID NO: 77625 - RNA, 22 nt, Human
acucccugcaagauuuuccaug

SEQ ID NO: 77626 - RNA, 22 nt, Human
acucccuugugaacucauucuu

SEQ ID NO: 77627 - RNA, 22 nt, Human
acuccgacucugagucuacauu

SEQ ID NO: 77628 - RNA, 22 nt, Human
acuccuggggcugccaucacag

SEQ ID NO: 77629 - RNA, 22 nt, Human
acuccuggguucuaaauuugaa

SEQ ID NO: 77630 - RNA, 22 nt, Human
acuccugguuuguguccuggcu

SEQ ID NO: 77631 - RNA, 22 nt, Human
acucuaaaccccacucugcugg

SEQ ID NO: 77632 - RNA, 22 nt, Human
acucuacagaaugaauaccugu

SEQ ID NO: 77633 - RNA, 19 nt, Human
acucuacaguguguacaac

SEQ ID NO: 77634 - RNA, 22 nt, Human
acucucccagcuauauguggug

SEQ ID NO: 77635 - RNA, 22 nt, Human
acucucccuuggagccucaggc

SEQ ID NO: 77636 - RNA, 22 nt, Human
acucucucacacacgccuauau

SEQ ID NO: 77637 - RNA, 22 nt, Human
acucucucacagcuuggcugau

SEQ ID NO: 77638 - RNA, 21 nt, Human
agagaauugccuuagauguuc

SEQ ID NO: 77639 - RNA, 22 nt, Human
agagaauuggagcagugacagg

SEQ ID NO: 77640 - RNA, 22 nt, Human
agagaauuugagacuugcccaa

SEQ ID NO: 77641 - RNA, 22 nt, Human
agagacaagggaccucuggaga

SEQ ID NO: 77642 - RNA, 22 nt, Human
agagacaggaauggcauuaaga

SEQ ID NO: 77643 - RNA, 22 nt, Human
agagacauagcacaguuuuucg

SEQ ID NO: 77644 - RNA, 22 nt, Human
agagacccagacugaucauugc

SEQ ID NO: 77645 - RNA, 22 nt, Human
agagaccugaagagcuuccuca

SEQ ID NO: 77646 - RNA, 22 nt, Human
agagaccuuccugacuccagag

SEQ ID NO: 77647 - RNA, 22 nt, Human
agagaccuuucuccugccuuuc

SEQ ID NO: 77648 - RNA, 22 nt, Human
agagacuaagaaguuuuaacuu

SEQ ID NO: 77649 - RNA, 19 nt, Human
agagacugccaccagcugu

SEQ ID NO: 77650 - RNA, 22 nt, Human
agagacuggcuucuaaaauggc

SEQ ID NO: 77651 - RNA, 22 nt, Human
agagacugugccagccccaugc

SEQ ID NO: 77652 - RNA, 22 nt, Human
agagacuucugccuuagcaaga

SEQ ID NO: 77653 - RNA, 22 nt, Human
agagacuuugucuauuuuguuc

SEQ ID NO: 77654 - RNA, 22 nt, Human
agagagaauuggauaaauuggu

SEQ ID NO: 77655 - RNA, 20 nt, Human
agagagaccuaggccuaguc

SEQ ID NO: 77656 - RNA, 22 nt, Human
agagagacgggggcugcugcuu

SEQ ID NO: 77657 - RNA, 22 nt, Human
agagagaggcagcagugcucac

SEQ ID NO: 77658 - RNA, 22 nt, Human
agagagagggaaacugcuaaac

SEQ ID NO: 77659 - RNA, 20 nt, Human
agagagcacaggcaggaaag

SEQ ID NO: 77660 - RNA, 22 nt, Human
agagagcaggacuucacugagc

SEQ ID NO: 77661 - RNA, 22 nt, Human
agagagcagucuggaagaaaca

SEQ ID NO: 77662 - RNA, 23 nt, Human
agagagcucacuauauagcauug

SEQ ID NO: 77663 - RNA, 19 nt, Human
agagaggcugugugaggga

SEQ ID NO: 77664 - RNA, 22 nt, Human
agagaguuguaccacacucaua

SEQ ID NO: 77665 - RNA, 22 nt, Human
agagaguuuaagugacuugccg

SEQ ID NO: 77666 - RNA, 17 nt, Human
agagauaaggcggagaa

SEQ ID NO: 77667 - RNA, 22 nt, Human
agagauaauuagguuaaaugag

SEQ ID NO: 77668 - RNA, 22 nt, Human
agagauauauauuuguuuacca

SEQ ID NO: 77669 - RNA, 22 nt, Human
agagauaugaguaguugugaca

SEQ ID NO: 77670 - RNA, 22 nt, Human
agagauauggaugucagaaacu

SEQ ID NO: 77671 - RNA, 19 nt, Human
agagauccagcuucuagcu

SEQ ID NO: 77672 - RNA, 21 nt, Human
agagaucugaagaaccauuag

SEQ ID NO: 77673 - RNA, 22 nt, Human
agagaugaaaaggguacugagg

SEQ ID NO: 77674 - RNA, 22 nt, Human
agagaugaaucuugagacucug

SEQ ID NO: 77675 - RNA, 22 nt, Human
agagaugacaugagggacuuaa

SEQ ID NO: 77676 - RNA, 21 nt, Human
acugugauaaugcuuuuucug

SEQ ID NO: 77677 - RNA, 22 nt, Human
acugugcacccuggacaguguc

SEQ ID NO: 77678 - RNA, 22 nt, Human
acugugcagguagaugccuggg

SEQ ID NO: 77679 - RNA, 22 nt, Human
acugugcaugguauccuugaug

SEQ ID NO: 77680 - RNA, 22 nt, Human
acugugcuuucucuggaggcau

SEQ ID NO: 77681 - RNA, 22 nt, Human
acuguggcaaaagaacauugga

SEQ ID NO: 77682 - RNA, 22 nt, Human
acuguggccaaagccucuggga

SEQ ID NO: 77683 - RNA, 22 nt, Human
acuguggccuuguggguucagg

SEQ ID NO: 77684 - RNA, 21 nt, Human
acugugggguucaacuggcag

SEQ ID NO: 77685 - RNA, 20 nt, Human
acuguguaaacaugauucau

SEQ ID NO: 77686 - RNA, 22 nt, Human
acuguguaugauauguacuggg

SEQ ID NO: 77687 - RNA, 22 nt, Human
acuguguccuauuuccuugaca

SEQ ID NO: 77688 - RNA, 22 nt, Human
acuguguccucauguggcagaa

SEQ ID NO: 77689 - RNA, 22 nt, Human
acuguguggaaauuugugaggg

SEQ ID NO: 77690 - RNA, 22 nt, Human
acuguguguuugucuagcacag

SEQ ID NO: 77691 - RNA, 22 nt, Human
acuguuauaguucacuuuuccc

SEQ ID NO: 77692 - RNA, 18 nt, Human
acuguuaucugauaaggc

SEQ ID NO: 77693 - RNA, 22 nt, Human
acuguuaugauuuacacagucc

SEQ ID NO: 77694 - RNA, 21 nt, Human
acuguuauucccauuuucacc

SEQ ID NO: 77695 - RNA, 22 nt, Human
acuguucaagcaaaugacauug

SEQ ID NO: 77696 - RNA, 22 nt, Human
acuguucaaguuuuaugcugga

SEQ ID NO: 77697 - RNA, 22 nt, Human
acuguucauuuggauuucucug

SEQ ID NO: 77698 - RNA, 22 nt, Human
acuguucuccagcauggcugua

SEQ ID NO: 77699 - RNA, 22 nt, Human
acuguucugcauguaccugagg

SEQ ID NO: 77700 - RNA, 22 nt, Human
acuguuggucagggauauugug

SEQ ID NO: 77701 - RNA, 22 nt, Human
acuguuuaggaggcuuauaugc

SEQ ID NO: 77702 - RNA, 22 nt, Human
acuguuucucaaauuauguggu

SEQ ID NO: 77703 - RNA, 22 nt, Human
acuuaaaaagaaucuuuucacg

SEQ ID NO: 77704 - RNA, 22 nt, Human
acuuaaauagaacuccucaaua

SEQ ID NO: 77705 - RNA, 22 nt, Human
acuuagaaagggauucuagauu

SEQ ID NO: 77706 - RNA, 22 nt, Human
acuuagaacaggcagaauucca

SEQ ID NO: 77707 - RNA, 22 nt, Human
acuuagaauauguucaagauuu

SEQ ID NO: 77708 - RNA, 22 nt, Human
acuuagaauuaaauauuuuugg

SEQ ID NO: 77709 - RNA, 22 nt, Human
acuuagcaauuugauuaaaaga

SEQ ID NO: 77710 - RNA, 22 nt, Human
acuuagcacgaacauuuacuuu

SEQ ID NO: 77711 - RNA, 22 nt, Human
acuuagcauuauguaauuacua

SEQ ID NO: 77712 - RNA, 22 nt, Human
acuuagcugugugauuuccauu

SEQ ID NO: 77713 - RNA, 22 nt, Human
acuuaguggcuaugugaccuua

SEQ ID NO: 77714 - RNA, 20 nt, Human
acuuaguuuuucucacagga

SEQ ID NO: 77715 - RNA, 22 nt, Human
acuuauaagagugcuaugggga

SEQ ID NO: 77716 - RNA, 22 nt, Human
acuuaucaguugucucuaaugu

SEQ ID NO: 77717 - RNA, 22 nt, Human
acuuauuagacaucuucauugu

SEQ ID NO: 77718 - RNA, 22 nt, Human
acuuauuuauucauucagcuca

SEQ ID NO: 77719 - RNA, 22 nt, Human
acuucaaaaauaagugagaggu

SEQ ID NO: 77720 - RNA, 22 nt, Human
acuucaaaaugaguuuccuggu

SEQ ID NO: 77721 - RNA, 22 nt, Human
acuucaaacaauuaacagagaa

SEQ ID NO: 77722 - RNA, 22 nt, Human
acuucacaaagagaucaucuaa

SEQ ID NO: 77723 - RNA, 22 nt, Human
acuucacacagcaaauuuaucu

SEQ ID NO: 77724 - RNA, 22 nt, Human
acuucacauuugcaagucuugg

SEQ ID NO: 77725 - RNA, 22 nt, Human
acuucagaaaauguugaauguu

SEQ ID NO: 77726 - RNA, 22 nt, Human
acuucagccaagaaaacucagu

SEQ ID NO: 77727 - RNA, 22 nt, Human
acuucagcccagaggaagggau

SEQ ID NO: 77728 - RNA, 22 nt, Human
acuucaguuucccucaacaaga

SEQ ID NO: 77729 - RNA, 22 nt, Human
acuucaugaacauguggccugu

SEQ ID NO: 77730 - RNA, 22 nt, Human
acuucaugaacuaagggaucgg

SEQ ID NO: 77731 - RNA, 22 nt, Human
acuucaugcuuuagagagauga

SEQ ID NO: 77732 - RNA, 22 nt, Human
acuucauguugcucuuggcuau

SEQ ID NO: 77733 - RNA, 22 nt, Human
acuuccagaccugugcuugcuc

SEQ ID NO: 77734 - RNA, 22 nt, Human
acuuccagccccugucagcaaa

SEQ ID NO: 77735 - RNA, 22 nt, Human
acuuccaggaacugccgcuaac

SEQ ID NO: 77736 - RNA, 22 nt, Human
acuucccacacccuguuuucuc

SEQ ID NO: 77737 - RNA, 21 nt, Human
acuucccaggaccuacucaga

SEQ ID NO: 77738 - RNA, 22 nt, Human
acuuccuagauacgagauugaa

SEQ ID NO: 77739 - RNA, 22 nt, Human
acuuccugacuucuggguugga

SEQ ID NO: 77740 - RNA, 22 nt, Human
acuuccugcagcuucucagccc

SEQ ID NO: 77741 - RNA, 19 nt, Human
acuuccugcccgcuccuuu

SEQ ID NO: 77742 - RNA, 22 nt, Human
acuuccugcuaugagcuucugu

SEQ ID NO: 77743 - RNA, 22 nt, Human
acuuccuggauucccaagggcu

SEQ ID NO: 77744 - RNA, 22 nt, Human
acuuccuggcguagcugacauu

SEQ ID NO: 77745 - RNA, 22 nt, Human
acuuccuguuaugugugccucu

SEQ ID NO: 77746 - RNA, 22 nt, Human
acuuccuuguacugacuccauu

SEQ ID NO: 77747 - RNA, 22 nt, Human
acuucucucauucagacauagc

SEQ ID NO: 77748 - RNA, 22 nt, Human
acuucucuccacccaagucccu

SEQ ID NO: 77749 - RNA, 22 nt, Human
acuucugagaaauuuaaggaca

SEQ ID NO: 77750 - RNA, 22 nt, Human
acuucuggugucauacugcauu

SEQ ID NO: 77751 - RNA, 22 nt, Human
acuucuugggacccuggcaccg

SEQ ID NO: 77752 - RNA, 19 nt, Human
acuucuuuucaacacagga

SEQ ID NO: 77753 - RNA, 22 nt, Human
agaaguuuggaugccaucauag

SEQ ID NO: 77754 - RNA, 22 nt, Human
agaaguuugggggcgaaggcag

SEQ ID NO: 77755 - RNA, 20 nt, Human
agaaguuuggggguguggag

SEQ ID NO: 77756 - RNA, 22 nt, Human
agaaguuugguccuuuucaagg

SEQ ID NO: 77757 - RNA, 22 nt, Human
agaaguuuguuauguaaacaaa

SEQ ID NO: 77758 - RNA, 22 nt, Human
agaaguuuugggaaauacugau

SEQ ID NO: 77759 - RNA, 22 nt, Human
agaauaagccugacgaaaccua

SEQ ID NO: 77760 - RNA, 22 nt, Human
agaauacaauuguucaguaaua

SEQ ID NO: 77761 - RNA, 22 nt, Human
agaauacuaggcuucagaaagg

SEQ ID NO: 77762 - RNA, 22 nt, Human
agaauauaaagauaauucuguu

SEQ ID NO: 77763 - RNA, 22 nt, Human
agaaucauuagagagaaaacuu

SEQ ID NO: 77764 - RNA, 22 nt, Human
agaauccucuucaguaaauucu

SEQ ID NO: 77765 - RNA, 22 nt, Human
agaauccuggccaggucagagc

SEQ ID NO: 77766 - RNA, 19 nt, Human
agaaucuaaauuauuucug

SEQ ID NO: 77767 - RNA, 22 nt, Human
agaaucucuacucaaguacuug

SEQ ID NO: 77768 - RNA, 22 nt, Human
agaaucugcauuucuaauaagc

SEQ ID NO: 77769 - RNA, 22 nt, Human
agaaucugcuuuuuaacaagau

SEQ ID NO: 77770 - RNA, 22 nt, Human
agaaucugguagaaccaaggau

SEQ ID NO: 77771 - RNA, 22 nt, Human
agaaucuuuccucauugcuguc

SEQ ID NO: 77772 - RNA, 22 nt, Human
agaaugaagaugacuucggaga

SEQ ID NO: 77773 - RNA, 22 nt, Human
agaaugcagcuugccaguaucu

SEQ ID NO: 77774 - RNA, 22 nt, Human
agaaugcucuucaaaaucuagc

SEQ ID NO: 77775 - RNA, 22 nt, Human
agaaugcuuuggauauauugga

SEQ ID NO: 77776 - RNA, 22 nt, Human
agaaugggggcuacaggccaca

SEQ ID NO: 77777 - RNA, 22 nt, Human
agaauguaagaaugcaaagauu

SEQ ID NO: 77778 - RNA, 22 nt, Human
agaauguguuauuagagaagga

SEQ ID NO: 77779 - RNA, 22 nt, Human
agaauuacauaaauacaugaau

SEQ ID NO: 77780 - RNA, 18 nt, Human
agaauuaccaaagugcuu

SEQ ID NO: 77781 - RNA, 22 nt, Human
agaauuagccggauucuuguuu

SEQ ID NO: 77782 - RNA, 22 nt, Human
agaauuagguaaguucaucuga

SEQ ID NO: 77783 - RNA, 18 nt, Human
agaauuauucuuguccuc

SEQ ID NO: 77784 - RNA, 23 nt, Human
agaauuccaguuucuuaugucac

SEQ ID NO: 77785 - RNA, 22 nt, Human
agacaaguguggugagagcagu

SEQ ID NO: 77786 - RNA, 22 nt, Human
agacaaguguuucuggguaacu

SEQ ID NO: 77787 - RNA, 20 nt, Human
agacaaugagugacagaguu

SEQ ID NO: 77788 - RNA, 19 nt, Human
agacaaugggguuggcagu

SEQ ID NO: 77789 - RNA, 22 nt, Human
agacaauuuuugguuuugcaag

SEQ ID NO: 77790 - RNA, 19 nt, Human
agacacacuuacguggaau

SEQ ID NO: 77791 - RNA, 22 nt, Human
agacacagaacacaaaagcaua

SEQ ID NO: 77792 - RNA, 22 nt, Human
agccuguguuuuuucuauugca

SEQ ID NO: 77793 - RNA, 22 nt, Human
agccuuagagacuuaaaacagg

SEQ ID NO: 77794 - RNA, 22 nt, Human
agccuuagggauugagguugcu

SEQ ID NO: 77795 - RNA, 22 nt, Human
agccuucaguaaauccacugug

SEQ ID NO: 77796 - RNA, 22 nt, Human
agccuuccacccagauccccuu

SEQ ID NO: 77797 - RNA, 22 nt, Human
agccuucucugauucuccuagu

SEQ ID NO: 77798 - RNA, 22 nt, Human
agccuugaaugcgcugcauugg

SEQ ID NO: 77799 - RNA, 22 nt, Human
agccuugacacuggggaaacug

SEQ ID NO: 77800 - RNA, 22 nt, Human
agccuugaucuugguaacagga

SEQ ID NO: 77801 - RNA, 22 nt, Human
agccuugccugggaaacugggu

SEQ ID NO: 77802 - RNA, 22 nt, Human
agccuugcuuuuucaguagcac

SEQ ID NO: 77803 - RNA, 23 nt, Human
agccuuggagguugaggcugcag

SEQ ID NO: 77804 - RNA, 22 nt, Human
agccuuguuggucugaguuugg

SEQ ID NO: 77805 - RNA, 22 nt, Human
agcgagcacauugagugaagaa

SEQ ID NO: 77806 - RNA, 22 nt, Human
agcgagguuuugcagauacagc

SEQ ID NO: 77807 - RNA, 22 nt, Human
agcgagugggucagcguugcag

SEQ ID NO: 77808 - RNA, 22 nt, Human
agcgauucacacacugggcugu

SEQ ID NO: 77809 - RNA, 22 nt, Human
agcgcgcucgaugguuuccgcg

SEQ ID NO: 77810 - RNA, 22 nt, Human
agcgcgcucuaggacaccgcgg

SEQ ID NO: 77811 - RNA, 22 nt, Human
agcggagcuaguuuuuguccuc

SEQ ID NO: 77812 - RNA, 22 nt, Human
agcggcugcucuuuucagaucc

SEQ ID NO: 77813 - RNA, 22 nt, Human
agcgggcagaaguggggucugc

SEQ ID NO: 77814 - RNA, 22 nt, Human
agcgguggugucggcagcggcu

SEQ ID NO: 77815 - RNA, 19 nt, Human
agcgguucucaaagucagg

SEQ ID NO: 77816 - RNA, 21 nt, Human
agcgucaauaucgucaacagg

SEQ ID NO: 77817 - RNA, 22 nt, Human
agcguggguccaaggcucuggu

SEQ ID NO: 77818 - RNA, 22 nt, Human
agcguguggagaacuaagcaga

SEQ ID NO: 77819 - RNA, 22 nt, Human
agcgugugugcgggucuucuuu

SEQ ID NO: 77820 - RNA, 20 nt, Human
agcuaacccuacuuucuuug

SEQ ID NO: 77821 - RNA, 22 nt, Human
agcuaagacuuagugacuuagu

SEQ ID NO: 77822 - RNA, 23 nt, Human
agcuaaggaagcugaggcacagu

SEQ ID NO: 77823 - RNA, 22 nt, Human
agcuaaggacaguugauuuaga

SEQ ID NO: 77824 - RNA, 22 nt, Human
agcuaagguguccuggaggccc

SEQ ID NO: 77825 - RNA, 22 nt, Human
agcuaaugaaauauuuucugau

SEQ ID NO: 77826 - RNA, 22 nt, Human
agcuaaugggagacccuuucac

SEQ ID NO: 77827 - RNA, 22 nt, Human
agcuaauguauguugaaagcac

SEQ ID NO: 77828 - RNA, 22 nt, Human
agcuaauuagaaauagauuauu

SEQ ID NO: 77829 - RNA, 22 nt, Human
agcuacaacuuuuccaugagca

SEQ ID NO: 77830 - RNA, 22 nt, Human
agcuaccuggcuuaucacuguc

SEQ ID NO: 77831 - RNA, 22 nt, Human
agcuacucagaguuccacucua

SEQ ID NO: 77832 - RNA, 22 nt, Human
agcuacucugcagugcccaugg

SEQ ID NO: 77833 - RNA, 22 nt, Human
agcuacuucccuguaggaaaca

SEQ ID NO: 77834 - RNA, 22 nt, Human
agcuagagcugagaagcacuug

SEQ ID NO: 77835 - RNA, 22 nt, Human
agcuagcaaauagcauguagga

SEQ ID NO: 77836 - RNA, 22 nt, Human
agcuagcuuagccugugaggua

SEQ ID NO: 77837 - RNA, 22 nt, Human
agcuaggaaauugaggcugaga

SEQ ID NO: 77838 - RNA, 22 nt, Human
agcuaggacagguagagauggg

SEQ ID NO: 77839 - RNA, 22 nt, Human
agcuagggcaaauaugagauac

SEQ ID NO: 77840 - RNA, 19 nt, Human
agcuagugcucagcuguca

SEQ ID NO: 77841 - RNA, 22 nt, Human
agcuaguucacugaagccuaug

SEQ ID NO: 77842 - RNA, 22 nt, Human
agcuaugaagccacuuuuaaca

SEQ ID NO: 77843 - RNA, 22 nt, Human
agcuauguauaaauaggccacu

SEQ ID NO: 77844 - RNA, 22 nt, Human
agcuauguuccucgaugcucag

SEQ ID NO: 77845 - RNA, 22 nt, Human
agcucaagcuacacacagaguc

SEQ ID NO: 77846 - RNA, 23 nt, Human
agcucaaggcaguccacauuucc

SEQ ID NO: 77847 - RNA, 22 nt, Human
agcucagaaccuccucauccca

SEQ ID NO: 77848 - RNA, 22 nt, Human
agcucagagcucgggaggaugg

SEQ ID NO: 77849 - RNA, 21 nt, Human
agcucagccgggcacaguggc

SEQ ID NO: 77850 - RNA, 22 nt, Human
agcucaggcucugcagggacua

SEQ ID NO: 77851 - RNA, 22 nt, Human
agcucagggcgaucugucucgg

SEQ ID NO: 77852 - RNA, 22 nt, Human
agcucaguggcucaguggguau

SEQ ID NO: 77853 - RNA, 22 nt, Human
agcucaguggcuggggcgcugc

SEQ ID NO: 77854 - RNA, 22 nt, Human
agcuccagagccacauccauca

SEQ ID NO: 77855 - RNA, 22 nt, Human
agcuccagaggcagugaugaag

SEQ ID NO: 77856 - RNA, 22 nt, Human
agcuccagccucuucuggaggu

SEQ ID NO: 77857 - RNA, 22 nt, Human
agcuccaggaucugaaaguucg

SEQ ID NO: 77858 - RNA, 20 nt, Human
agcuccagugcugacgcuuc

SEQ ID NO: 77859 - RNA, 22 nt, Human
agcucccagaguccucugccca

SEQ ID NO: 77860 - RNA, 22 nt, Human
agcucccagcuccuuugagaga

SEQ ID NO: 77861 - RNA, 22 nt, Human
agcucccugcacgacccugccc

SEQ ID NO: 77862 - RNA, 21 nt, Human
agcucccuguuuccucacucu

SEQ ID NO: 77863 - RNA, 20 nt, Human
agcuccucaucacuggaggu

SEQ ID NO: 77864 - RNA, 22 nt, Human
agcuccuccugagugucuggga

SEQ ID NO: 77865 - RNA, 22 nt, Human
agcuccucuagaucugccacuu

SEQ ID NO: 77866 - RNA, 20 nt, Human
agcuccugaggguuacuuuc

SEQ ID NO: 77867 - RNA, 19 nt, Human
agcuccugauugugccucg

SEQ ID NO: 77868 - RNA, 22 nt, Human
agcuccugcacccagccuugag

SEQ ID NO: 77869 - RNA, 22 nt, Human
agcuccugcccaggaaggcucu

SEQ ID NO: 77870 - RNA, 22 nt, Human
agcuccuggaggugcgcacucg

SEQ ID NO: 77871 - RNA, 22 nt, Human
agcuccuggcuuuccucucacc

SEQ ID NO: 77872 - RNA, 19 nt, Human
agcuccugggcucugggcc

SEQ ID NO: 77873 - RNA, 22 nt, Human
agcuccuggggguuccaagcag

SEQ ID NO: 77874 - RNA, 22 nt, Human
agcuccuggugccucagccgaa

SEQ ID NO: 77875 - RNA, 22 nt, Human
agcuccugugugcccaccugcu

SEQ ID NO: 77876 - RNA, 19 nt, Human
agcuccuguucagcagcuc

SEQ ID NO: 77877 - RNA, 22 nt, Human
agcuccuugaagggcucuggga

SEQ ID NO: 77878 - RNA, 22 nt, Human
agcuccuugaauuaaugcugcu

SEQ ID NO: 77879 - RNA, 22 nt, Human
agcucuaaauggaauuuugccu

SEQ ID NO: 77880 - RNA, 22 nt, Human
agcucuaucaccugucaguugc

SEQ ID NO: 77881 - RNA, 22 nt, Human
agcucuccacacauaggacuag

SEQ ID NO: 77882 - RNA, 18 nt, Human
agcucucccccacaugcc

SEQ ID NO: 77883 - RNA, 22 nt, Human
agcucucugauaaauugauaaa

SEQ ID NO: 77884 - RNA, 22 nt, Human
agcucucuuccagauccacuug

SEQ ID NO: 77885 - RNA, 22 nt, Human
agcucugcaggcacagcugagg

SEQ ID NO: 77886 - RNA, 23 nt, Human
agcucugcucgggcaugcccugc

SEQ ID NO: 77887 - RNA, 22 nt, Human
agcucuggaccugacaucuggu

SEQ ID NO: 77888 - RNA, 18 nt, Human
agcucuggcauacuugaa

SEQ ID NO: 77889 - RNA, 22 nt, Human
agcucugggauucucaggccac

SEQ ID NO: 77890 - RNA, 22 nt, Human
agcucugggcugacaugcuccc

SEQ ID NO: 77891 - RNA, 22 nt, Human
agcucugggguagggcccaaca

SEQ ID NO: 77892 - RNA, 22 nt, Human
agcucugguuuagaaggggaaa

SEQ ID NO: 77893 - RNA, 22 nt, Human
agcucuguguucacagcacuaa

SEQ ID NO: 77894 - RNA, 22 nt, Human
agcuggguguguaucagauaaa

SEQ ID NO: 77895 - RNA, 22 nt, Human
agcuggguucagaggcacaugg

SEQ ID NO: 77896 - RNA, 22 nt, Human
agcugguauuucugaaggaaag

SEQ ID NO: 77897 - RNA, 20 nt, Human
agcugguccccaagccucuc

SEQ ID NO: 77898 - RNA, 22 nt, Human
agcuggucugcugcauggagug

SEQ ID NO: 77899 - RNA, 22 nt, Human
agcuggucuuaaauguguccag

SEQ ID NO: 77900 - RNA, 18 nt, Human
agcuggugaaauccagua

SEQ ID NO: 77901 - RNA, 22 nt, Human
agcuggugcugaagcucuugag

SEQ ID NO: 77902 - RNA, 22 nt, Human
agcugguucauucauucauggu

SEQ ID NO: 77903 - RNA, 22 nt, Human
agcugguugacguuauccagga

SEQ ID NO: 77904 - RNA, 22 nt, Human
agcuguaauauaagcaaugaaa

SEQ ID NO: 77905 - RNA, 22 nt, Human
agcugugaccuucaagagcuac

SEQ ID NO: 77906 - RNA, 22 nt, Human
agcugugccuauucguggcaag

SEQ ID NO: 77907 - RNA, 22 nt, Human
agcugugcugccaaguugcuga

SEQ ID NO: 77908 - RNA, 19 nt, Human
agcuguggaugugggauuu

SEQ ID NO: 77909 - RNA, 22 nt, Human
agcuguggcagcagccguggca

SEQ ID NO: 77910 - RNA, 22 nt, Human
agacacagcaauaacuacuguu

SEQ ID NO: 77911 - RNA, 22 nt, Human
agacacaggauucugcauuucu

SEQ ID NO: 77912 - RNA, 22 nt, Human
agacacaguauaagcacaacaa

SEQ ID NO: 77913 - RNA, 22 nt, Human
agacacagucugucuggaggag

SEQ ID NO: 77914 - RNA, 22 nt, Human
agacacaucuuagguugucagg

SEQ ID NO: 77915 - RNA, 22 nt, Human
agacacauuuuacauuaacugu

SEQ ID NO: 77916 - RNA, 22 nt, Human
agacacauuuucagcucugcca

SEQ ID NO: 77917 - RNA, 22 nt, Human
agacaccagaaucuguugagca

SEQ ID NO: 77918 - RNA, 22 nt, Human
agacacugcggaggucgggugg

SEQ ID NO: 77919 - RNA, 22 nt, Human
agacacuguguacagaaaaaga

SEQ ID NO: 77920 - RNA, 15 nt, Human
agacagacaguggga

SEQ ID NO: 77921 - RNA, 22 nt, Human
agacagacaugcuaguuuucuu

SEQ ID NO: 77922 - RNA, 22 nt, Human
agacagacuguguuugaauccu

SEQ ID NO: 77923 - RNA, 22 nt, Human
agacagacuugaaaauguucuu

SEQ ID NO: 77924 - RNA, 22 nt, Human
agacagagauacuauguuguca

SEQ ID NO: 77925 - RNA, 22 nt, Human
agacagcaggggagucugguuu

SEQ ID NO: 77926 - RNA, 21 nt, Human
agacagcagucuccaaacccc

SEQ ID NO: 77927 - RNA, 22 nt, Human
agacagcugccuccaccacagc

SEQ ID NO: 77928 - RNA, 22 nt, Human
agacagcugguagcacuuccug

SEQ ID NO: 77929 - RNA, 23 nt, Human
agacagcuuagaguuugccucuc

SEQ ID NO: 77930 - RNA, 22 nt, Human
agacaggcagaggcugcagagg

SEQ ID NO: 77931 - RNA, 22 nt, Human
agacaggcaugaggcuggauug

SEQ ID NO: 77932 - RNA, 22 nt, Human
agacaggccacucuggucuggu

SEQ ID NO: 77933 - RNA, 22 nt, Human
agacaggcugcugucugcuagg

SEQ ID NO: 77934 - RNA, 21 nt, Human
agacaggucagggagagguga

SEQ ID NO: 77935 - RNA, 22 nt, Human
agacagguguuuuacaacuucg

SEQ ID NO: 77936 - RNA, 22 nt, Human
agacagugauaccuugggaugu

SEQ ID NO: 77937 - RNA, 22 nt, Human
agacaguggcucagccccaguc

SEQ ID NO: 77938 - RNA, 22 nt, Human
agacauaagugcuaugacauug

SEQ ID NO: 77939 - RNA, 22 nt, Human
agacauaggauuccacauagca

SEQ ID NO: 77940 - RNA, 22 nt, Human
agacaucaaugaucagagguag

SEQ ID NO: 77941 - RNA, 22 nt, Human
agacaucucuaugcaggaucuc

SEQ ID NO: 77942 - RNA, 22 nt, Human
agacaugccaagaaacccagug

SEQ ID NO: 77943 - RNA, 22 nt, Human
agacauggauuucuuacauaaa

SEQ ID NO: 77944 - RNA, 22 nt, Human
agacaugguuuauuuuaauggu

SEQ ID NO: 77945 - RNA, 22 nt, Human
agacaugucaccaauucuuacu

SEQ ID NO: 77946 - RNA, 22 nt, Human
agacauuuuagacauaaaagau

SEQ ID NO: 77947 - RNA, 22 nt, Human
agacauuuuggaaaguauuacu

SEQ ID NO: 77948 - RNA, 22 nt, Human
agaccacagucaggcuccuggu

SEQ ID NO: 77949 - RNA, 18 nt, Human
agaccagacaagaauggu

SEQ ID NO: 77950 - RNA, 22 nt, Human
agaccagcugccucccagggcc

SEQ ID NO: 77951 - RNA, 22 nt, Human
agaccagggucccacagagucu

SEQ ID NO: 77952 - RNA, 21 nt, Human
agaccagugggauaaauaggu

SEQ ID NO: 77953 - RNA, 22 nt, Human
agaccauagggaccucagguug

SEQ ID NO: 77954 - RNA, 23 nt, Human
agacccagagacuggcucugcuc

SEQ ID NO: 77955 - RNA, 18 nt, Human
agacccucuaagggcagu

SEQ ID NO: 77956 - RNA, 22 nt, Human
agacccugaaguuuucuaugau

SEQ ID NO: 77957 - RNA, 22 nt, Human
agacccugguaaacacuccagg

SEQ ID NO: 77958 - RNA, 22 nt, Human
agaccgagaaguucuccaggcc

SEQ ID NO: 77959 - RNA, 22 nt, Human
agaccuggaaguucaagagaaa

SEQ ID NO: 77960 - RNA, 22 nt, Human
agaccuggugauagcuguccua

SEQ ID NO: 77961 - RNA, 22 nt, Human
agaccuuguaacuagaggccca

SEQ ID NO: 77962 - RNA, 22 nt, Human
agacuaaaagaaggaagcuacc

SEQ ID NO: 77963 - RNA, 22 nt, Human
agacuaaagacucauucugcug

SEQ ID NO: 77964 - RNA, 16 nt, Human
agacucagugcacuuu

SEQ ID NO: 77965 - RNA, 22 nt, Human
agacuccaaaugaaagaggggg

SEQ ID NO: 77966 - RNA, 22 nt, Human
agacucuaacucaugccauugc

SEQ ID NO: 77967 - RNA, 22 nt, Human
agacucugaagucauugcauga

SEQ ID NO: 77968 - RNA, 19 nt, Human
agacucugccacucuucuc

SEQ ID NO: 77969 - RNA, 22 nt, Human
agacucuggaggggcugguccu

SEQ ID NO: 77970 - RNA, 22 nt, Human
agacucuggagucagcuaggau

SEQ ID NO: 77971 - RNA, 22 nt, Human
agacucuggcaugcuaacuagu

SEQ ID NO: 77972 - RNA, 22 nt, Human
agacucugguccucuugaauuu

SEQ ID NO: 77973 - RNA, 17 nt, Human
agacucugucccaugua

SEQ ID NO: 77974 - RNA, 19 nt, Human
agacucugugugagacuuu

SEQ ID NO: 77975 - RNA, 22 nt, Human
agacugagacuggggaaagaca

SEQ ID NO: 77976 - RNA, 21 nt, Human
agacugccauuguucuuuugg

SEQ ID NO: 77977 - RNA, 22 nt, Human
agacuggaagccugccaagcaa

SEQ ID NO: 77978 - RNA, 22 nt, Human
agacuggcuugcuuuacaagga

SEQ ID NO: 77979 - RNA, 22 nt, Human
agacugggguucuggcaaggag

SEQ ID NO: 77980 - RNA, 22 nt, Human
agacuguagggauagaggucuu

SEQ ID NO: 77981 - RNA, 22 nt, Human
agacuguaugauuugaguuuau

SEQ ID NO: 77982 - RNA, 22 nt, Human
agacuguauucaaaaugugguu

SEQ ID NO: 77983 - RNA, 22 nt, Human
agacugugagggagauacaggg

SEQ ID NO: 77984 - RNA, 22 nt, Human
agacuuagugaguucuaaguuu

SEQ ID NO: 77985 - RNA, 22 nt, Human
agacuucaccuacagcagucuc

SEQ ID NO: 77986 - RNA, 22 nt, Human
agacuucucuaacuugaggacc

SEQ ID NO: 77987 - RNA, 22 nt, Human
agacuucuuugugagcauuuuc

SEQ ID NO: 77988 - RNA, 22 nt, Human
agacuuuagauacgucuucuuc

SEQ ID NO: 77989 - RNA, 22 nt, Human
agacuuuauaaaucuuaauuuc

SEQ ID NO: 77990 - RNA, 22 nt, Human
agacuuuauaguuuuuggcuau

SEQ ID NO: 77991 - RNA, 22 nt, Human
agagaaaagccaucccagccaa

SEQ ID NO: 77992 - RNA, 22 nt, Human
agagaaauuucccugccuucug

SEQ ID NO: 77993 - RNA, 22 nt, Human
agagaacagccuccuagagaaa

SEQ ID NO: 77994 - RNA, 22 nt, Human
agagaagauucuuauaugucuu

SEQ ID NO: 77995 - RNA, 22 nt, Human
agagaagcagggagucaucugu

SEQ ID NO: 77996 - RNA, 21 nt, Human
agagaagggauuccaggcccu

SEQ ID NO: 77997 - RNA, 22 nt, Human
agagaagggccuguauguaauc

SEQ ID NO: 77998 - RNA, 22 nt, Human
agagaagggggaaagaucucac

SEQ ID NO: 77999 - RNA, 22 nt, Human
agagaauccccagacagaguua

SEQ ID NO: 78000 - RNA, 22 nt, Human
agagaauuacagaagaauguca

SEQ ID NO: 78001 - RNA, 22 nt, Human
agagaauuuuaaaagccuugaa

SEQ ID NO: 78002 - RNA, 22 nt, Human
agagacaaacacugcaacuucu

SEQ ID NO: 78003 - RNA, 22 nt, Human
agccuugcagaauaauuugaag

SEQ ID NO: 78004 - RNA, 22 nt, Human
agccuugcaugauuucauucau

SEQ ID NO: 78005 - RNA, 22 nt, Human
agccuuguagaccauuuuaagg

SEQ ID NO: 78006 - RNA, 22 nt, Human
agccuuguugcuaccagaugcc

SEQ ID NO: 78007 - RNA, 22 nt, Human
agcgagggaggucugaggacag

SEQ ID NO: 78008 - RNA, 22 nt, Human
agcgagguuuguucuauucagu

SEQ ID NO: 78009 - RNA, 22 nt, Human
agcgauucuaauuggagauuaa

SEQ ID NO: 78010 - RNA, 22 nt, Human
agcgcaggaacacgucugccuu

SEQ ID NO: 78011 - RNA, 22 nt, Human
agcgccugcggugugagccugc

SEQ ID NO: 78012 - RNA, 22 nt, Human
agcgcgcugucagacuggcucg

SEQ ID NO: 78013 - RNA, 22 nt, Human
agcgcuugccgcacuccaagca

SEQ ID NO: 78014 - RNA, 20 nt, Human
agcggcagcuuccugcuucg

SEQ ID NO: 78015 - RNA, 22 nt, Human
agcgggugcugugucagcccuc

SEQ ID NO: 78016 - RNA, 22 nt, Human
agcgugaauuaguugguacaca

SEQ ID NO: 78017 - RNA, 22 nt, Human
agcuaacacauuccagcuauuu

SEQ ID NO: 78018 - RNA, 23 nt, Human
agcuaacagaucgacaaaguaua

SEQ ID NO: 78019 - RNA, 22 nt, Human
agcuaacauggaggaaaaaguu

SEQ ID NO: 78020 - RNA, 19 nt, Human
agcuaacucacuaacuaug

SEQ ID NO: 78021 - RNA, 22 nt, Human
agcuaagaacuugagcucugga

SEQ ID NO: 78022 - RNA, 22 nt, Human
agcuaaggaacucuguaacacc

SEQ ID NO: 78023 - RNA, 22 nt, Human
agcuaaggacuggaggguuucu

SEQ ID NO: 78024 - RNA, 22 nt, Human
agcuaaggccgcguugggguaa

SEQ ID NO: 78025 - RNA, 22 nt, Human
agcuacagucggaaggacagac

SEQ ID NO: 78026 - RNA, 22 nt, Human
agcuacaugaaauugcugauau

SEQ ID NO: 78027 - RNA, 22 nt, Human
agcuacuacuaccaaacuaaag

SEQ ID NO: 78028 - RNA, 22 nt, Human
agcuagaaguacagccauauga

SEQ ID NO: 78029 - RNA, 22 nt, Human
agcuagaauguuccuuuucauu

SEQ ID NO: 78030 - RNA, 22 nt, Human
agcuagagaaugacagagucug

SEQ ID NO: 78031 - RNA, 22 nt, Human
agcuagaggugaaacaugccaa

SEQ ID NO: 78032 - RNA, 22 nt, Human
agcuagcaggaagcaguuuagu

SEQ ID NO: 78033 - RNA, 22 nt, Human
agcuagccuaggcagagugcau

SEQ ID NO: 78034 - RNA, 20 nt, Human
agcuaggagaaagcauggag

SEQ ID NO: 78035 - RNA, 22 nt, Human
agcuaggccauuuguucaguga

SEQ ID NO: 78036 - RNA, 22 nt, Human
agcuagggacagauaccagcca

SEQ ID NO: 78037 - RNA, 22 nt, Human
agcuagggcuuucguagacagu

SEQ ID NO: 78038 - RNA, 22 nt, Human
agcuaggggaccaagguggccc

SEQ ID NO: 78039 - RNA, 22 nt, Human
agcuaguucagagagauaugua

SEQ ID NO: 78040 - RNA, 22 nt, Human
agcuauguaacagugccaugga

SEQ ID NO: 78041 - RNA, 22 nt, Human
agcuauuucucuuauuauaucc

SEQ ID NO: 78042 - RNA, 22 nt, Human
agcucaagaguaguucgagggg

SEQ ID NO: 78043 - RNA, 21 nt, Human
agcucacaguucuguccuguc

SEQ ID NO: 78044 - RNA, 22 nt, Human
agcucagaagccuaugcauagu

SEQ ID NO: 78045 - RNA, 22 nt, Human
agcucagaagggaggaaaugag

SEQ ID NO: 78046 - RNA, 22 nt, Human
agcucagagaauagggcuugag

SEQ ID NO: 78047 - RNA, 22 nt, Human
agcucagcccuccugugcagcu

SEQ ID NO: 78048 - RNA, 22 nt, Human
agcucagcgggcuucugguaag

SEQ ID NO: 78049 - RNA, 22 nt, Human
agcucaggucucaggagguguc

SEQ ID NO: 78050 - RNA, 22 nt, Human
agcucauggugcuaucucaggg

SEQ ID NO: 78051 - RNA, 22 nt, Human
agcuccagaaagguacacacag

SEQ ID NO: 78052 - RNA, 22 nt, Human
agcuccagagucugaacuauuc

SEQ ID NO: 78053 - RNA, 22 nt, Human
agcuccagccgcugauggguuu

SEQ ID NO: 78054 - RNA, 23 nt, Human
agcuccagcugacgugggcagcc

SEQ ID NO: 78055 - RNA, 19 nt, Human
agcuccaggccuggaugcu

SEQ ID NO: 78056 - RNA, 21 nt, Human
agcuccaggcuccugggguuc

SEQ ID NO: 78057 - RNA, 22 nt, Human
agcuccagguagugccuuaucg

SEQ ID NO: 78058 - RNA, 22 nt, Human
agcuccaggugcaagucauggu

SEQ ID NO: 78059 - RNA, 18 nt, Human
agcuccaucugucagcau

SEQ ID NO: 78060 - RNA, 22 nt, Human
agcucccagaaggcccugcgcc

SEQ ID NO: 78061 - RNA, 19 nt, Human
agcauuuggaauucuacac

SEQ ID NO: 78062 - RNA, 20 nt, Human
agcauuuuaugguaggaaac

SEQ ID NO: 78063 - RNA, 22 nt, Human
agccaaaggcaccagagacacu

SEQ ID NO: 78064 - RNA, 22 nt, Human
agccaaauacaaacuggggugg

SEQ ID NO: 78065 - RNA, 22 nt, Human
agccaaaucuaaagugaauauu

SEQ ID NO: 78066 - RNA, 22 nt, Human
agccaacaacucugagcccagu

SEQ ID NO: 78067 - RNA, 22 nt, Human
agccaacacauguaaaugcacc

SEQ ID NO: 78068 - RNA, 22 nt, Human
agccaacuaauuaaacaacuuu

SEQ ID NO: 78069 - RNA, 22 nt, Human
agccaacuccagccccugcagc

SEQ ID NO: 78070 - RNA, 22 nt, Human
agccaacuuggaaagucagauu

SEQ ID NO: 78071 - RNA, 22 nt, Human
agccaagagaugaggcugcagg

SEQ ID NO: 78072 - RNA, 22 nt, Human
agccaagaggagccuaaagcga

SEQ ID NO: 78073 - RNA, 22 nt, Human
agccaagcugaucuccugcuga

SEQ ID NO: 78074 - RNA, 22 nt, Human
agccaaggcagcuagagcucug

SEQ ID NO: 78075 - RNA, 22 nt, Human
agccaagggucagcugcacaga

SEQ ID NO: 78076 - RNA, 22 nt, Human
agccaagguaucaugagaggca

SEQ ID NO: 78077 - RNA, 22 nt, Human
agccaaucuacaacaaaggaua

SEQ ID NO: 78078 - RNA, 22 nt, Human
agccaaugcguaaaaagaucua

SEQ ID NO: 78079 - RNA, 22 nt, Human
agccacaccuguccugccagcu

SEQ ID NO: 78080 - RNA, 22 nt, Human
agccacagagagggagcugcaa

SEQ ID NO: 78081 - RNA, 22 nt, Human
agccacagcacauuguaagaaa

SEQ ID NO: 78082 - RNA, 22 nt, Human
agccacagguguuggccagugu

SEQ ID NO: 78083 - RNA, 22 nt, Human
agccacagugggcuaccagcuc

SEQ ID NO: 78084 - RNA, 22 nt, Human
agccacgucccugucaggguca

SEQ ID NO: 78085 - RNA, 22 nt, Human
agccacuccuucagcgucugcu

SEQ ID NO: 78086 - RNA, 22 nt, Human
agccagaaaaacaccaagagga

SEQ ID NO: 78087 - RNA, 22 nt, Human
agccagaaaggggcauuaucug

SEQ ID NO: 78088 - RNA, 22 nt, Human
agccagagacugugucuguaau

SEQ ID NO: 78089 - RNA, 22 nt, Human
agccagagacuuuaccugugca

SEQ ID NO: 78090 - RNA, 22 nt, Human
agccagagagccccagguucua

SEQ ID NO: 78091 - RNA, 22 nt, Human
agccagaggaacuugaugacug

SEQ ID NO: 78092 - RNA, 22 nt, Human
agccagaggaagccuggcccuc

SEQ ID NO: 78093 - RNA, 22 nt, Human
agccagaggccagccugccuca

SEQ ID NO: 78094 - RNA, 22 nt, Human
agccagaggucaugagcacagg

SEQ ID NO: 78095 - RNA, 22 nt, Human
agccagauacuuggaaagaccc

SEQ ID NO: 78096 - RNA, 22 nt, Human
agccagauccaggagacagcuc

SEQ ID NO: 78097 - RNA, 22 nt, Human
agccagcacggcgccauggagu

SEQ ID NO: 78098 - RNA, 22 nt, Human
agccagcaggugggaaacugga

SEQ ID NO: 78099 - RNA, 22 nt, Human
agccagcauauauauaguugaa

SEQ ID NO: 78100 - RNA, 22 nt, Human
agccagccaguucacuaggaaa

SEQ ID NO: 78101 - RNA, 22 nt, Human
agccagcugcucgggggaaaca

SEQ ID NO: 78102 - RNA, 22 nt, Human
agccagcuggugggucagcugg

SEQ ID NO: 78103 - RNA, 22 nt, Human
agccagcuguucuggggcagca

SEQ ID NO: 78104 - RNA, 22 nt, Human
agccaggaauuggacaacacau

SEQ ID NO: 78105 - RNA, 22 nt, Human
agccaggacagggcagcucgcu

SEQ ID NO: 78106 - RNA, 22 nt, Human
agccaggccagacucacacccu

SEQ ID NO: 78107 - RNA, 22 nt, Human
agccagggagguggagguugca

SEQ ID NO: 78108 - RNA, 22 nt, Human
agccagggaugcagcacaguga

SEQ ID NO: 78109 - RNA, 22 nt, Human
agccagggggacgcuuucuggc

SEQ ID NO: 78110 - RNA, 22 nt, Human
agccaggguuagaagauaguca

SEQ ID NO: 78111 - RNA, 22 nt, Human
agccaggucagcucacccugcu

SEQ ID NO: 78112 - RNA, 22 nt, Human
agcugagcucaggcugauguaa

SEQ ID NO: 78113 - RNA, 22 nt, Human
agcugaggguucgguguccaca

SEQ ID NO: 78114 - RNA, 19 nt, Human
agcugcaaaagguggaacu

SEQ ID NO: 78115 - RNA, 22 nt, Human
agcugcaaaccaggccggcgcg

SEQ ID NO: 78116 - RNA, 22 nt, Human
agcugcaaagaucugucaguca

SEQ ID NO: 78117 - RNA, 21 nt, Human
agcugcaagagcaacaucuuu

SEQ ID NO: 78118 - RNA, 22 nt, Human
agcugcaagauaaaagugaugu

SEQ ID NO: 78119 - RNA, 22 nt, Human
agcugcaagucuguguggggag

SEQ ID NO: 78120 - RNA, 22 nt, Human
agcugcacugugaaguucauag

SEQ ID NO: 78121 - RNA, 22 nt, Human
agcugcagaaaggacaacuaau

SEQ ID NO: 78122 - RNA, 21 nt, Human
agcugcagcccaaaggccugu

SEQ ID NO: 78123 - RNA, 22 nt, Human
agcugcagcguucauuuuucca

SEQ ID NO: 78124 - RNA, 22 nt, Human
agcugcagcuacaguguugguu

SEQ ID NO: 78125 - RNA, 22 nt, Human
agcugcaggaaguagaagcgga

SEQ ID NO: 78126 - RNA, 22 nt, Human
agcugcaggauuauggaaugga

SEQ ID NO: 78127 - RNA, 22 nt, Human
agcugcaggcgccggggccgau

SEQ ID NO: 78128 - RNA, 22 nt, Human
agcugcagguucagcauuccac

SEQ ID NO: 78129 - RNA, 22 nt, Human
agcugcagucaagcugggccac

SEQ ID NO: 78130 - RNA, 22 nt, Human
agcugcagugaauucgcuaacu

SEQ ID NO: 78131 - RNA, 22 nt, Human
agcugcaguuagccccagauga

SEQ ID NO: 78132 - RNA, 22 nt, Human
agcugccaaguuggaguagcaa

SEQ ID NO: 78133 - RNA, 22 nt, Human
agcugccagcaaguuucaaaca

SEQ ID NO: 78134 - RNA, 22 nt, Human
agcugccagggacugggcaugg

SEQ ID NO: 78135 - RNA, 21 nt, Human
agcugcccagaguagggaagg

SEQ ID NO: 78136 - RNA, 22 nt, Human
agcugcccagauaggaggaggc

SEQ ID NO: 78137 - RNA, 18 nt, Human
agcugcccugggcuggag

SEQ ID NO: 78138 - RNA, 22 nt, Human
agcugcccuguggggaggguug

SEQ ID NO: 78139 - RNA, 22 nt, Human
agcugccuaguagauugauugg

SEQ ID NO: 78140 - RNA, 22 nt, Human
agcugccucagucacucauggc

SEQ ID NO: 78141 - RNA, 21 nt, Human
agcugccuccacuucugaggc

SEQ ID NO: 78142 - RNA, 22 nt, Human
agcugccuccuggugccccauc

SEQ ID NO: 78143 - RNA, 22 nt, Human
agcugccucugaacuuuaauuc

SEQ ID NO: 78144 - RNA, 22 nt, Human
agcugccugccaugccgcuggu

SEQ ID NO: 78145 - RNA, 21 nt, Human
agcugccugcucuggaccugg

SEQ ID NO: 78146 - RNA, 22 nt, Human
agcugccugcugcacucggugc

SEQ ID NO: 78147 - RNA, 22 nt, Human
agcugccugcuuaugagcucca

SEQ ID NO: 78148 - RNA, 15 nt, Human
agcugccugggugcu

SEQ ID NO: 78149 - RNA, 19 nt, Human
agcugccugugcgcgcccg

SEQ ID NO: 78150 - RNA, 22 nt, Human
agcugccugugcugggagccca

SEQ ID NO: 78151 - RNA, 22 nt, Human
agcugccuguguagaaccaucu

SEQ ID NO: 78152 - RNA, 22 nt, Human
agcugcuccaauuuuuaccauu

SEQ ID NO: 78153 - RNA, 21 nt, Human
agcugcuccagggagcucagg

SEQ ID NO: 78154 - RNA, 22 nt, Human
agcugcucccuauccuuuccuu

SEQ ID NO: 78155 - RNA, 22 nt, Human
agcugcucgaagccgguggccc

SEQ ID NO: 78156 - RNA, 22 nt, Human
agcugcucugagcccugauucu

SEQ ID NO: 78157 - RNA, 22 nt, Human
agcugcucugauaaaccuacuu

SEQ ID NO: 78158 - RNA, 22 nt, Human
agcugcucuuugaaggacacuu

SEQ ID NO: 78159 - RNA, 22 nt, Human
agcugcugaaugacacugcaag

SEQ ID NO: 78160 - RNA, 22 nt, Human
agcugcugcggaaagaugccac

SEQ ID NO: 78161 - RNA, 19 nt, Human
agcugcuggcccagggacc

SEQ ID NO: 78162 - RNA, 22 nt, Human
agcugcugggaccccagaucca

SEQ ID NO: 78163 - RNA, 22 nt, Human
agcugcugggauacaguaguga

SEQ ID NO: 78164 - RNA, 22 nt, Human
agcugcuggggagggcagacac

SEQ ID NO: 78165 - RNA, 22 nt, Human
agcugcugguuuaagggauggg

SEQ ID NO: 78166 - RNA, 21 nt, Human
agcugcuguggccagaaucca

SEQ ID NO: 78167 - RNA, 22 nt, Human
agcugcuguuuggugagucuug

SEQ ID NO: 78168 - RNA, 22 nt, Human
agcugcuuagaguccucaggau

SEQ ID NO: 78169 - RNA, 22 nt, Human
agcugcuuagagucucuucuua

SEQ ID NO: 78170 - RNA, 22 nt, Human
agcugcuuauaagauuugggag

SEQ ID NO: 78171 - RNA, 22 nt, Human
agcugcuucaaaaugggcuccu

SEQ ID NO: 78172 - RNA, 18 nt, Human
agcugcuuuuggcuuaaa

SEQ ID NO: 78173 - RNA, 22 nt, Human
agcuggaaaauccaagaccuug

SEQ ID NO: 78174 - RNA, 22 nt, Human
agcuggaaagaagguggcagcc

SEQ ID NO: 78175 - RNA, 22 nt, Human
agcuggaacgucacaggagcag

SEQ ID NO: 78176 - RNA, 22 nt, Human
agcuggagccagugugaggcuu

SEQ ID NO: 78177 - RNA, 22 nt, Human
agcaucuucaacaggcauuuua

SEQ ID NO: 78178 - RNA, 22 nt, Human
agcaugaaaggcgugccaacuu

SEQ ID NO: 78179 - RNA, 22 nt, Human
agcaugaagacuucagagcuag

SEQ ID NO: 78180 - RNA, 22 nt, Human
agcaugcaguaaagcccauguc

SEQ ID NO: 78181 - RNA, 22 nt, Human
agcaugcaguaaguacccugug

SEQ ID NO: 78182 - RNA, 22 nt, Human
agcaugcaugaagauucagcaa

SEQ ID NO: 78183 - RNA, 19 nt, Human
agcauggaagcuggugcca

SEQ ID NO: 78184 - RNA, 23 nt, Human
agcauggaauaggaaagaggcag

SEQ ID NO: 78185 - RNA, 22 nt, Human
agcauggcuuuggaggauagca

SEQ ID NO: 78186 - RNA, 22 nt, Human
agcaugucuaacucuucagggu

SEQ ID NO: 78187 - RNA, 21 nt, Human
agcaugucucagucaacaagg

SEQ ID NO: 78188 - RNA, 22 nt, Human
agcauguggcuaucuuuggggg

SEQ ID NO: 78189 - RNA, 22 nt, Human
agcauguucaucuucuguuggu

SEQ ID NO: 78190 - RNA, 22 nt, Human
agcauuaagagagacugaacug

SEQ ID NO: 78191 - RNA, 22 nt, Human
agcauuacuauucucaaaaaca

SEQ ID NO: 78192 - RNA, 22 nt, Human
agcauuagguguguuucagagg

SEQ ID NO: 78193 - RNA, 22 nt, Human
agcauucaaguaauucacuugg

SEQ ID NO: 78194 - RNA, 20 nt, Human
agcauucauucagcaagccu

SEQ ID NO: 78195 - RNA, 22 nt, Human
agcauucauugcuagaauguaa

SEQ ID NO: 78196 - RNA, 23 nt, Human
agcauucucuccaacauuuaaca

SEQ ID NO: 78197 - RNA, 22 nt, Human
agcauugccugccuauugcuaa

SEQ ID NO: 78198 - RNA, 22 nt, Human
agcauuuaguuaguaaauguuu

SEQ ID NO: 78199 - RNA, 22 nt, Human
agcauuuaugacuaauguaaaa

SEQ ID NO: 78200 - RNA, 22 nt, Human
agccaaaacaugugaguuuuga

SEQ ID NO: 78201 - RNA, 20 nt, Human
agccaaaggagaacagugcu

SEQ ID NO: 78202 - RNA, 22 nt, Human
agccaaagugguauauagggaa

SEQ ID NO: 78203 - RNA, 22 nt, Human
agccaacagccagcaucaacca

SEQ ID NO: 78204 - RNA, 22 nt, Human
agccaagacauuuagaaaagcu

SEQ ID NO: 78205 - RNA, 22 nt, Human
agccaagcaccacuggcacucg

SEQ ID NO: 78206 - RNA, 22 nt, Human
agccaagcacucaacuccugga

SEQ ID NO: 78207 - RNA, 21 nt, Human
agccaagccuugggagccagg

SEQ ID NO: 78208 - RNA, 18 nt, Human
agccaaggaggaggagga

SEQ ID NO: 78209 - RNA, 22 nt, Human
agccaauaaauuuacaacuaga

SEQ ID NO: 78210 - RNA, 20 nt, Human
agccaauacagcaaaauuug

SEQ ID NO: 78211 - RNA, 22 nt, Human
agccacaaaggcuugccucgga

SEQ ID NO: 78212 - RNA, 19 nt, Human
agccacagaacuugcagga

SEQ ID NO: 78213 - RNA, 22 nt, Human
agccacagagcaggagaccuuu

SEQ ID NO: 78214 - RNA, 22 nt, Human
agccacagagguugaugugguu

SEQ ID NO: 78215 - RNA, 22 nt, Human
agccacagcauguguguaugua

SEQ ID NO: 78216 - RNA, 22 nt, Human
agccacagcccacaggacucuu

SEQ ID NO: 78217 - RNA, 22 nt, Human
agccacagcgaaccucucuucc

SEQ ID NO: 78218 - RNA, 22 nt, Human
agccacagcuccuugguggaga

SEQ ID NO: 78219 - RNA, 22 nt, Human
agccacagggggugagggacaa

SEQ ID NO: 78220 - RNA, 22 nt, Human
agccacagucuguagccagcuu

SEQ ID NO: 78221 - RNA, 22 nt, Human
agccacagugcaagagagaaaa

SEQ ID NO: 78222 - RNA, 22 nt, Human
aggggcucaguuacuuuggcag

SEQ ID NO: 78223 - RNA, 22 nt, Human
aggggcuccucucugagaguag

SEQ ID NO: 78224 - RNA, 22 nt, Human
aggggcucuaaagaucauggaa

SEQ ID NO: 78225 - RNA, 22 nt, Human
aggggcuucccuuccuggguag

SEQ ID NO: 78226 - RNA, 22 nt, Human
aggggcuuguggaguugcuggu

SEQ ID NO: 78227 - RNA, 22 nt, Human
agggggagacauguguguguuu

SEQ ID NO: 78228 - RNA, 22 nt, Human
agggggagcuuggcuacuccug

SEQ ID NO: 78229 - RNA, 22 nt, Human
agggggcucagcaggcucugga

SEQ ID NO: 78230 - RNA, 22 nt, Human
agggggcucagcauggauggag

SEQ ID NO: 78231 - RNA, 22 nt, Human
agggggucguccggaagaccug

SEQ ID NO: 78232 - RNA, 22 nt, Human
agggggugaucaaggugcggcg

SEQ ID NO: 78233 - RNA, 22 nt, Human
agggggugggaagucuagaauc

SEQ ID NO: 78234 - RNA, 16 nt, Human
agggguacaguucauc

SEQ ID NO: 78235 - RNA, 20 nt, Human
aggggucuagcagcagugcu

SEQ ID NO: 78236 - RNA, 22 nt, Human
aggggucuauccugagaugguc

SEQ ID NO: 78237 - RNA, 22 nt, Human
aggggucuugggaguccuggcu

SEQ ID NO: 78238 - RNA, 22 nt, Human
aggggugauuugggacaggaca

SEQ ID NO: 78239 - RNA, 22 nt, Human
agggguuggacauaagacagaa

SEQ ID NO: 78240 - RNA, 22 nt, Human
agggguuggauuuggccuagag

SEQ ID NO: 78241 - RNA, 22 nt, Human
aggguaggaacugaguggaagg

SEQ ID NO: 78242 - RNA, 22 nt, Human
aggguauaaagagcaagcagaa

SEQ ID NO: 78243 - RNA, 22 nt, Human
agggucaaaugggcaggaagag

SEQ ID NO: 78244 - RNA, 22 nt, Human
agggucaacauucuaaaaucug

SEQ ID NO: 78245 - RNA, 22 nt, Human
agggucaagaggcagaguucuu

SEQ ID NO: 78246 - RNA, 22 nt, Human
agggucaagucacugguucacg

SEQ ID NO: 78247 - RNA, 22 nt, Human
agggucacaaugugugaauugg

SEQ ID NO: 78248 - RNA, 17 nt, Human
agggucaggugaaguuc

SEQ ID NO: 78249 - RNA, 22 nt, Human
aggguccaacugaggcugaacu

SEQ ID NO: 78250 - RNA, 19 nt, Human
aggguccaggcccugugga

SEQ ID NO: 78251 - RNA, 22 nt, Human
aggguccaucaaggacugcaca

SEQ ID NO: 78252 - RNA, 22 nt, Human
aggguccauucuuugccuuuuc

SEQ ID NO: 78253 - RNA, 22 nt, Human
agggucucuacgcacuagaggg

SEQ ID NO: 78254 - RNA, 22 nt, Human
agggucugcauuccaacuuggg

SEQ ID NO: 78255 - RNA, 22 nt, Human
agggucugugcaagaacacgcc

SEQ ID NO: 78256 - RNA, 22 nt, Human
agggucuugaggaucugaacug

SEQ ID NO: 78257 - RNA, 22 nt, Human
agggucuuuccugggagccagc

SEQ ID NO: 78258 - RNA, 22 nt, Human
agggugaaucucacaacucuua

SEQ ID NO: 78259 - RNA, 20 nt, Human
agggugagacaugagccucc

SEQ ID NO: 78260 - RNA, 22 nt, Human
agggugcagaacaaauuaagac

SEQ ID NO: 78261 - RNA, 22 nt, Human
agggugcaggggaagcugcccu

SEQ ID NO: 78262 - RNA, 22 nt, Human
agggugcauguuugcaagagug

SEQ ID NO: 78263 - RNA, 22 nt, Human
aggguggaagauggcacuaucu

SEQ ID NO: 78264 - RNA, 20 nt, Human
aggguggcaaguuagugaca

SEQ ID NO: 78265 - RNA, 22 nt, Human
aggguggcaccacauaucauag

SEQ ID NO: 78266 - RNA, 22 nt, Human
aggguggccaugagggagagau

SEQ ID NO: 78267 - RNA, 22 nt, Human
aggguggcuggaggaaucagaa

SEQ ID NO: 78268 - RNA, 20 nt, Human
aggguggggacguucugacu

SEQ ID NO: 78269 - RNA, 22 nt, Human
agggugucagccacggaauggg

SEQ ID NO: 78270 - RNA, 22 nt, Human
aggguguguucuccuaugagaa

SEQ ID NO: 78271 - RNA, 19 nt, Human
aggguuacccgcugccacc

SEQ ID NO: 78272 - RNA, 20 nt, Human
aggguucccuuguucagcag

SEQ ID NO: 78273 - RNA, 22 nt, Human
agguaaaugaauguuuagucuu

SEQ ID NO: 78274 - RNA, 22 nt, Human
agguaaaugucagagccuuuaa

SEQ ID NO: 78275 - RNA, 22 nt, Human
agguaacauugccuccaucuga

SEQ ID NO: 78276 - RNA, 22 nt, Human
agguaagguuuggaggcagugg

SEQ ID NO: 78277 - RNA, 22 nt, Human
agguaauaggguucagaauuau

SEQ ID NO: 78278 - RNA, 22 nt, Human
agguaauuacuagaguuauuua

SEQ ID NO: 78279 - RNA, 22 nt, Human
agguaauuguauguuccaagca

SEQ ID NO: 78280 - RNA, 22 nt, Human
agguaauuucuccaaacaugcu

SEQ ID NO: 78281 - RNA, 23 nt, Human
agguacacauuauagaaauagac

SEQ ID NO: 78282 - RNA, 22 nt, Human
agguacauggggugugugcacg

SEQ ID NO: 78283 - RNA, 22 nt, Human
agguacuaccagggauuuucag

SEQ ID NO: 78284 - RNA, 22 nt, Human
agguacugaaaaaauguuugca

SEQ ID NO: 78285 - RNA, 22 nt, Human
agguagcauauuccagacuugu

SEQ ID NO: 78286 - RNA, 20 nt, Human
agguaggaucggugucauaa

SEQ ID NO: 78287 - RNA, 19 nt, Human
agguaggcaguggcaugga

SEQ ID NO: 78288 - RNA, 22 nt, Human
agguaggcccugagugcuguug

SEQ ID NO: 78289 - RNA, 22 nt, Human
agguaggccugacgcuggggug

SEQ ID NO: 78290 - RNA, 22 nt, Human
agguaguuuugacuucauggcu

SEQ ID NO: 78291 - RNA, 22 nt, Human
agguauaagaagauuauuuaua

SEQ ID NO: 78292 - RNA, 22 nt, Human
agguauauauucugguccuuau

SEQ ID NO: 78293 - RNA, 22 nt, Human
agcuggaugaauuuggaacacu

SEQ ID NO: 78294 - RNA, 22 nt, Human
agcuggauuccagugcagucac

SEQ ID NO: 78295 - RNA, 21 nt, Human
agcuggcagugccuggaccuc

SEQ ID NO: 78296 - RNA, 22 nt, Human
agcuggcauacuuugcuaggaa

SEQ ID NO: 78297 - RNA, 22 nt, Human
agcuggcauuacaggagcaugc

SEQ ID NO: 78298 - RNA, 22 nt, Human
agcuggccauugugaguggccu

SEQ ID NO: 78299 - RNA, 20 nt, Human
agcuggcccccgguggccug

SEQ ID NO: 78300 - RNA, 18 nt, Human
agcuggcccuggcugccg

SEQ ID NO: 78301 - RNA, 21 nt, Human
agcuggccugguuugagcucc

SEQ ID NO: 78302 - RNA, 22 nt, Human
agcuggcuuuugugaagguuuu

SEQ ID NO: 78303 - RNA, 23 nt, Human
agcugggaauuuucugaagcuuu

SEQ ID NO: 78304 - RNA, 22 nt, Human
agcugggacagacaacuauguu

SEQ ID NO: 78305 - RNA, 22 nt, Human
agcugggaggcuccucugugac

SEQ ID NO: 78306 - RNA, 22 nt, Human
agcugggcaaaaugugagguug

SEQ ID NO: 78307 - RNA, 22 nt, Human
agcugggcgcaguggcugguga

SEQ ID NO: 78308 - RNA, 22 nt, Human
agcugggcugaugacucauguu

SEQ ID NO: 78309 - RNA, 22 nt, Human
agcugggcugggcugagcugag

SEQ ID NO: 78310 - RNA, 19 nt, Human
agcugggcugucacaguga

SEQ ID NO: 78311 - RNA, 22 nt, Human
agcugggcuuggccaggucgcu

SEQ ID NO: 78312 - RNA, 18 nt, Human
agcuggggccucuggucc

SEQ ID NO: 78313 - RNA, 22 nt, Human
agcuggggguagugagaaauaa

SEQ ID NO: 78314 - RNA, 22 nt, Human
agcuggggguuggauaagggua

SEQ ID NO: 78315 - RNA, 22 nt, Human
agcuggguacacguugucacaa

SEQ ID NO: 78316 - RNA, 22 nt, Human
agcugggugcccgaagccacgu

SEQ ID NO: 78317 - RNA, 23 nt, Human
agcuggguggccugcgugaagcu

SEQ ID NO: 78318 - RNA, 22 nt, Human
agcuggguggugcugagccuug

SEQ ID NO: 78319 - RNA, 22 nt, Human
agcuggguguucuugggccuaa

SEQ ID NO: 78320 - RNA, 17 nt, Human
agcuggguucucaggaa

SEQ ID NO: 78321 - RNA, 22 nt, Human
agcugguaaaggggaaagcaga

SEQ ID NO: 78322 - RNA, 22 nt, Human
agcugguaaguggcagagauuc

SEQ ID NO: 78323 - RNA, 22 nt, Human
agcugguccuaauugagccauu

SEQ ID NO: 78324 - RNA, 22 nt, Human
agcuggugaaccugaggcacag

SEQ ID NO: 78325 - RNA, 22 nt, Human
agcuggugauguggucccucac

SEQ ID NO: 78326 - RNA, 22 nt, Human
agcugguggaagggagcccaaa

SEQ ID NO: 78327 - RNA, 22 nt, Human
agcugguggagaagcagaccuc

SEQ ID NO: 78328 - RNA, 22 nt, Human
agcugguggggaagcugcaggu

SEQ ID NO: 78329 - RNA, 22 nt, Human
agcuggugucaccuccagucca

SEQ ID NO: 78330 - RNA, 22 nt, Human
agcuggugugccacuguugggg

SEQ ID NO: 78331 - RNA, 22 nt, Human
agcuggugugccaguuccaguu

SEQ ID NO: 78332 - RNA, 22 nt, Human
uguuaguuguucauguuaagag

SEQ ID NO: 78333 - RNA, 22 nt, Human
uguuauacagacacgaugguau

SEQ ID NO: 78334 - RNA, 22 nt, Human
uguuaucugguugucugauuac

SEQ ID NO: 78335 - RNA, 21 nt, Human
uguuaugugcuucaagaagug

SEQ ID NO: 78336 - RNA, 20 nt, Human
uguuauuagcaagcuucuuu

SEQ ID NO: 78337 - RNA, 22 nt, Human
uguuauuaucuguuagguguuc

SEQ ID NO: 78338 - RNA, 22 nt, Human
uguuauuauguuuccagagccu

SEQ ID NO: 78339 - RNA, 22 nt, Human
uguuauuuaucugagcauuuau

SEQ ID NO: 78340 - RNA, 22 nt, Human
uguuauuucuuugccauaucuu

SEQ ID NO: 78341 - RNA, 22 nt, Human
uguuauuugggaaaguuguaca

SEQ ID NO: 78342 - RNA, 22 nt, Human
uguucaaaucuuuugcuuauuu

SEQ ID NO: 78343 - RNA, 22 nt, Human
uguucacaaggugaugcuuuga

SEQ ID NO: 78344 - RNA, 22 nt, Human
uguucaguuaacacagacacca

SEQ ID NO: 78345 - RNA, 22 nt, Human
uguucauagcuaucauuguguc

SEQ ID NO: 78346 - RNA, 22 nt, Human
uguucauucaacaugucaucua

SEQ ID NO: 78347 - RNA, 22 nt, Human
uguucauucuguauaugcugua

SEQ ID NO: 78348 - RNA, 18 nt, Human
uguuccaaggaaggaauc

SEQ ID NO: 78349 - RNA, 22 nt, Human
uguuccaauaaggaguugaaau

SEQ ID NO: 78350 - RNA, 22 nt, Human
uguuccagaggcagagauagga

SEQ ID NO: 78351 - RNA, 23 nt, Human
uguuccagauacgccuuuuccuc

SEQ ID NO: 78352 - RNA, 20 nt, Human
uguuccaggaggccagggcu

SEQ ID NO: 78353 - RNA, 22 nt, Human
uguucccauggauaucugcaua

SEQ ID NO: 78354 - RNA, 22 nt, Human
uguucccauuuucugcauaauc

SEQ ID NO: 78355 - RNA, 22 nt, Human
uguuccuaaauaugaauggaga

SEQ ID NO: 78356 - RNA, 22 nt, Human
uguuccucugaacuucuuccaa

SEQ ID NO: 78357 - RNA, 18 nt, Human
uguuccugccuuucucug

SEQ ID NO: 78358 - RNA, 22 nt, Human
uguuccugguuccugcaugaug

SEQ ID NO: 78359 - RNA, 21 nt, Human
uguuccuguucucuaggaucc

SEQ ID NO: 78360 - RNA, 22 nt, Human
uguuccuugaauauaucagacg

SEQ ID NO: 78361 - RNA, 22 nt, Human
uguucuaaauuugcauggucca

SEQ ID NO: 78362 - RNA, 22 nt, Human
uguucuaagcugccaaaaugcu

SEQ ID NO: 78363 - RNA, 17 nt, Human
uguucucuucagaaauc

SEQ ID NO: 78364 - RNA, 22 nt, Human
uguucuggggacagcgucccau

SEQ ID NO: 78365 - RNA, 22 nt, Human
uguucuguaccuguccuggggc

SEQ ID NO: 78366 - RNA, 20 nt, Human
uguucugucgucuuucuuca

SEQ ID NO: 78367 - RNA, 22 nt, Human
uguucuuagguauuugacaguc

SEQ ID NO: 78368 - RNA, 22 nt, Human
uguucuuaugaauucaagacac

SEQ ID NO: 78369 - RNA, 22 nt, Human
uguucuugagccuuuagaccua

SEQ ID NO: 78370 - RNA, 19 nt, Human
uguugaagauuauuugugg

SEQ ID NO: 78371 - RNA, 22 nt, Human
uguugacaauaaagucuaccau

SEQ ID NO: 78372 - RNA, 22 nt, Human
uguugacucaacacugugggca

SEQ ID NO: 78373 - RNA, 22 nt, Human
uguugagacacagacacaagcc

SEQ ID NO: 78374 - RNA, 22 nt, Human
uguugaguauauaccuacaagu

SEQ ID NO: 78375 - RNA, 22 nt, Human
uguugauuugugggcugcaaaa

SEQ ID NO: 78376 - RNA, 22 nt, Human
uguugcaguaaaaauggagagg

SEQ ID NO: 78377 - RNA, 22 nt, Human
uguugccuaacugcccucugaa

SEQ ID NO: 78378 - RNA, 22 nt, Human
uguugccugacuuuaaaaugug

SEQ ID NO: 78379 - RNA, 20 nt, Human
uguugcucucuccugaguuu

SEQ ID NO: 78380 - RNA, 22 nt, Human
uguuggaauuaggauacagagg

SEQ ID NO: 78381 - RNA, 22 nt, Human
uguuggcauuagaggguuauug

SEQ ID NO: 78382 - RNA, 22 nt, Human
uguugguuuaaaaugcugauuu

SEQ ID NO: 78383 - RNA, 22 nt, Human
uguuguaaaauuugagauguca

SEQ ID NO: 78384 - RNA, 22 nt, Human
uguuguaaucauuuuaugaaaa

SEQ ID NO: 78385 - RNA, 22 nt, Human
uguugugacccagaccaagaag

SEQ ID NO: 78386 - RNA, 22 nt, Human
uguuuaagccuguggugucauc

SEQ ID NO: 78387 - RNA, 22 nt, Human
uguuuaagcugaugagguaucg

SEQ ID NO: 78388 - RNA, 22 nt, Human
uguuuaaguagucucagggccu

SEQ ID NO: 78389 - RNA, 21 nt, Human
uguuuaauacauauuugugga

SEQ ID NO: 78390 - RNA, 22 nt, Human
uguuuaaucuucaggacagucu

SEQ ID NO: 78391 - RNA, 22 nt, Human
uguuuaauucaccaucauguuc

SEQ ID NO: 78392 - RNA, 22 nt, Human
uguuuaauugggccaacagcgg

SEQ ID NO: 78393 - RNA, 22 nt, Human
uguuuacaagccacuuguuaag

SEQ ID NO: 78394 - RNA, 22 nt, Human
uguuuacaaggagaauuugagg

SEQ ID NO: 78395 - RNA, 22 nt, Human
uguuuacagggugauuuuaccu

SEQ ID NO: 78396 - RNA, 19 nt, Human
uguuuacauguuucuucag

SEQ ID NO: 78397 - RNA, 22 nt, Human
uguuuacuagccaacauggaga

SEQ ID NO: 78398 - RNA, 22 nt, Human
uguuuacuccugauauauuuuu

SEQ ID NO: 78399 - RNA, 20 nt, Human
uggcccagcacgacgaggac

SEQ ID NO: 78400 - RNA, 22 nt, Human
uggcccagcaguucugccccag

SEQ ID NO: 78401 - RNA, 22 nt, Human
uggcccagcugcagauggugga

SEQ ID NO: 78402 - RNA, 22 nt, Human
uggcccagugcuuaugcucuga

SEQ ID NO: 78403 - RNA, 22 nt, Human
uggccccauuuuacagaugaaa

SEQ ID NO: 78404 - RNA, 22 nt, Human
uggccccugaggagcgucagcc

SEQ ID NO: 78405 - RNA, 18 nt, Human
uggccccuuaucaguccu

SEQ ID NO: 78406 - RNA, 22 nt, Human
uggcccucguccgacagguggg

SEQ ID NO: 78407 - RNA, 23 nt, Human
uggcccugaaucuguccuggagg

SEQ ID NO: 78408 - RNA, 22 nt, Human
uggcccugacacgugguacugg

SEQ ID NO: 78409 - RNA, 22 nt, Human
uggcccugacuuggaggccuga

SEQ ID NO: 78410 - RNA, 22 nt, Human
uggcccugagggcucggagcca

SEQ ID NO: 78411 - RNA, 22 nt, Human
uggcccugcuaugauccugcaa

SEQ ID NO: 78412 - RNA, 22 nt, Human
uggcccugcugggucagagcug

SEQ ID NO: 78413 - RNA, 22 nt, Human
uggcccugcuuaugucucucuu

SEQ ID NO: 78414 - RNA, 22 nt, Human
uggcccugggcaucuuucguga

SEQ ID NO: 78415 - RNA, 22 nt, Human
uggcccugguggcacagccugc

SEQ ID NO: 78416 - RNA, 23 nt, Human
uggcccugugcaugcugcuuccc

SEQ ID NO: 78417 - RNA, 22 nt, Human
uggcccuuuugugaaguggcca

SEQ ID NO: 78418 - RNA, 22 nt, Human
uggccgggccgggcgccuccac

SEQ ID NO: 78419 - RNA, 22 nt, Human
uggccuauuucaucaguucaau

SEQ ID NO: 78420 - RNA, 22 nt, Human
uggccucugcaauggauucacc

SEQ ID NO: 78421 - RNA, 22 nt, Human
uggccucuuacgacauagccuu

SEQ ID NO: 78422 - RNA, 22 nt, Human
uggccucuuucuucccuuugac

SEQ ID NO: 78423 - RNA, 22 nt, Human
uggccugauacuuccagaguuc

SEQ ID NO: 78424 - RNA, 22 nt, Human
uggccugauuuugcuaagagaa

SEQ ID NO: 78425 - RNA, 23 nt, Human
uggccugcagaguuucugcuggg

SEQ ID NO: 78426 - RNA, 22 nt, Human
uggccugccugggagcagcagg

SEQ ID NO: 78427 - RNA, 22 nt, Human
uggccugcucacagucagaugg

SEQ ID NO: 78428 - RNA, 22 nt, Human
uggccuggaaaaaugcagaugg

SEQ ID NO: 78429 - RNA, 22 nt, Human
uggccuguugcuccuagggguc

SEQ ID NO: 78430 - RNA, 22 nt, Human
uggccuugauuaugccaguaga

SEQ ID NO: 78431 - RNA, 22 nt, Human
uggccuuggacagagcgcuccu

SEQ ID NO: 78432 - RNA, 22 nt, Human
uggccuuguguuuuagagaaag

SEQ ID NO: 78433 - RNA, 22 nt, Human
uggccuuuguugauagcuaugc

SEQ ID NO: 78434 - RNA, 22 nt, Human
uggccuuuucuuucacaggcaa

SEQ ID NO: 78435 - RNA, 22 nt, Human
uggcgaggccaggccagggccu

SEQ ID NO: 78436 - RNA, 22 nt, Human
uggcgagguuucagagagcggc

SEQ ID NO: 78437 - RNA, 22 nt, Human
uggcgcaguuucucugcugccu

SEQ ID NO: 78438 - RNA, 17 nt, Human
uggcgcucccagggugc

SEQ ID NO: 78439 - RNA, 22 nt, Human
uggcggcucaggaggggcaguu

SEQ ID NO: 78440 - RNA, 22 nt, Human
uggcuaaacuugggucagaugu

SEQ ID NO: 78441 - RNA, 22 nt, Human
uguaauuauguuguuagaguau

SEQ ID NO: 78442 - RNA, 22 nt, Human
uguaauugcuuguuuaccugcu

SEQ ID NO: 78443 - RNA, 22 nt, Human
uguaauuuccugauguuagaac

SEQ ID NO: 78444 - RNA, 22 nt, Human
uguaauuuuacgugacacaguu

SEQ ID NO: 78445 - RNA, 22 nt, Human
uguacaaagaguauagcuuuga

SEQ ID NO: 78446 - RNA, 22 nt, Human
uguacaaagguacuuugauguu

SEQ ID NO: 78447 - RNA, 22 nt, Human
uguacaaaguuaaaccuauaua

SEQ ID NO: 78448 - RNA, 22 nt, Human
uguacaaugccgagacuaacuc

SEQ ID NO: 78449 - RNA, 22 nt, Human
uguacacaaccuacagucugcu

SEQ ID NO: 78450 - RNA, 22 nt, Human
uguacacauaucauuuguggga

SEQ ID NO: 78451 - RNA, 22 nt, Human
uguacaccugucuuuacacaua

SEQ ID NO: 78452 - RNA, 22 nt, Human
uguacacugcaggaugcauugc

SEQ ID NO: 78453 - RNA, 23 nt, Human
uguacacuuggucaagguacuua

SEQ ID NO: 78454 - RNA, 22 nt, Human
uguacagaaauuccuacuacau

SEQ ID NO: 78455 - RNA, 22 nt, Human
uguacagaacuugcugucccuu

SEQ ID NO: 78456 - RNA, 22 nt, Human
uguacagacuuugcagugugca

SEQ ID NO: 78457 - RNA, 22 nt, Human
uguacagagacuaccauuaaua

SEQ ID NO: 78458 - RNA, 22 nt, Human
uguacaggagaacaaugagaaa

SEQ ID NO: 78459 - RNA, 22 nt, Human
uguacaguuaaucuuaagccau

SEQ ID NO: 78460 - RNA, 22 nt, Human
uguacauauucaagcacuucua

SEQ ID NO: 78461 - RNA, 22 nt, Human
uguaccaaaaaugugucagacu

SEQ ID NO: 78462 - RNA, 22 nt, Human
uguaccaggugauggagucaua

SEQ ID NO: 78463 - RNA, 22 nt, Human
uguaccauauauguuacugacu

SEQ ID NO: 78464 - RNA, 22 nt, Human
uguaccuuuuucugugcaugcu

SEQ ID NO: 78465 - RNA, 22 nt, Human
uguacuaaggcuguguagaugu

SEQ ID NO: 78466 - RNA, 22 nt, Human
uguacucagcucagaucucagg

SEQ ID NO: 78467 - RNA, 22 nt, Human
uguacuugcuuauuagaaaucu

SEQ ID NO: 78468 - RNA, 18 nt, Human
uguagaaaagauaggaau

SEQ ID NO: 78469 - RNA, 22 nt, Human
uguagaaacuacacaugcaaca

SEQ ID NO: 78470 - RNA, 22 nt, Human
uguagaaagaauauguuucaua

SEQ ID NO: 78471 - RNA, 22 nt, Human
uguagaagcuagccuggagcca

SEQ ID NO: 78472 - RNA, 22 nt, Human
uguagaaggcuauagacuagga

SEQ ID NO: 78473 - RNA, 22 nt, Human
uguagaaguucuucaggagaau

SEQ ID NO: 78474 - RNA, 22 nt, Human
uguagacuuucuuuguguuagu

SEQ ID NO: 78475 - RNA, 22 nt, Human
uguagauaaguaaaagcccagu

SEQ ID NO: 78476 - RNA, 22 nt, Human
uguagauacacacauauagugg

SEQ ID NO: 78477 - RNA, 22 nt, Human
uguagauauagaaaaagacuga

SEQ ID NO: 78478 - RNA, 22 nt, Human
uguagauauuaauuauuccuuu

SEQ ID NO: 78479 - RNA, 22 nt, Human
uguagcacagagcuuugacacu

SEQ ID NO: 78480 - RNA, 22 nt, Human
uguagcacguuaguguuagagc

SEQ ID NO: 78481 - RNA, 22 nt, Human
uguagcaguuuuucauuaucca

SEQ ID NO: 78482 - RNA, 22 nt, Human
uguagcauuuuauguaauaagu

SEQ ID NO: 78483 - RNA, 23 nt, Human
uguagcuuuauacaagaucuguu

SEQ ID NO: 78484 - RNA, 22 nt, Human
uguaggaacucacagauauucu

SEQ ID NO: 78485 - RNA, 22 nt, Human
uguaggaagauauaaaauaucu

SEQ ID NO: 78486 - RNA, 22 nt, Human
uguaggaauguuuuuaaguugg

SEQ ID NO: 78487 - RNA, 16 nt, Human
uguaggauaaccauac

SEQ ID NO: 78488 - RNA, 22 nt, Human
uguaggcaucacuuucucuugg

SEQ ID NO: 78489 - RNA, 22 nt, Human
uguaggccuauguccagcaauu

SEQ ID NO: 78490 - RNA, 20 nt, Human
uguagguguacaguaaggag

SEQ ID NO: 78491 - RNA, 22 nt, Human
uguaguaaacacuauucugauc

SEQ ID NO: 78492 - RNA, 22 nt, Human
uguaguguagcagggugggaca

SEQ ID NO: 78493 - RNA, 22 nt, Human
uguagugugacauaggugucca

SEQ ID NO: 78494 - RNA, 22 nt, Human
uguaguguggccuaucuuugcc

SEQ ID NO: 78495 - RNA, 21 nt, Human
uguauaacaacuaugcaaugu

SEQ ID NO: 78496 - RNA, 22 nt, Human
uguauaagccuagugaaauuuc

SEQ ID NO: 78497 - RNA, 23 nt, Human
uguauacacccugugcaucuggg

SEQ ID NO: 78498 - RNA, 22 nt, Human
uguauacaggauuacucauagc

SEQ ID NO: 78499 - RNA, 22 nt, Human
uguauacauuuggugcauauuu

SEQ ID NO: 78500 - RNA, 22 nt, Human
uguauagacuagcuuucacgau

SEQ ID NO: 78501 - RNA, 22 nt, Human
uguauauacacacucccauguu

SEQ ID NO: 78502 - RNA, 22 nt, Human
uguauaugugcacaugugcuuc

SEQ ID NO: 78503 - RNA, 22 nt, Human
uguauauucacugagcaagggg

SEQ ID NO: 78504 - RNA, 20 nt, Human
uguauauuuucugguguaaa

SEQ ID NO: 78505 - RNA, 22 nt, Human
uguaucaagaucagcagcuguu

SEQ ID NO: 78506 - RNA, 22 nt, Human
uguaucagaucaaauacuggcu

SEQ ID NO: 78507 - RNA, 22 nt, Human
uguauccccugcagguugcuau

SEQ ID NO: 78508 - RNA, 23 nt, Human
uguaucuguacuauuccugccuc

SEQ ID NO: 78509 - RNA, 22 nt, Human
uguaucuguuuagcacccagcc

SEQ ID NO: 78510 - RNA, 22 nt, Human
uguaugaagguuuaccugcugu

SEQ ID NO: 78511 - RNA, 22 nt, Human
uguaugaauauguuggggaggu

SEQ ID NO: 78512 - RNA, 22 nt, Human
uguaugccuuuuucuguuguaa

SEQ ID NO: 78513 - RNA, 22 nt, Human
uguaugcuuguguauaauauaa

SEQ ID NO: 78514 - RNA, 22 nt, Human
uguauggcuuggaaauaguuua

SEQ ID NO: 78515 - RNA, 22 nt, Human
uguauguauacacauagauacg

SEQ ID NO: 78516 - RNA, 22 nt, Human
uguauguugggucaaaguacau

SEQ ID NO: 78517 - RNA, 22 nt, Human
uguauuagguugaugcgaaagu

SEQ ID NO: 78518 - RNA, 22 nt, Human
uguauuaucaaguaaauacaug

SEQ ID NO: 78519 - RNA, 22 nt, Human
uguauucucucaauauuucaua

SEQ ID NO: 78520 - RNA, 22 nt, Human
uguauuuaauuguaucaucaca

SEQ ID NO: 78521 - RNA, 22 nt, Human
uguauuuauucaggauguaacu

SEQ ID NO: 78522 - RNA, 22 nt, Human
uguauuuccugguuuagaucaa

SEQ ID NO: 78523 - RNA, 18 nt, Human
uguauuucuaacagcuaa

SEQ ID NO: 78524 - RNA, 22 nt, Human
uguauuugaugagaggaggguc

SEQ ID NO: 78525 - RNA, 22 nt, Human
uguauuugggucacaagauggg

SEQ ID NO: 78526 - RNA, 17 nt, Human
uguauuuguaccacagc

SEQ ID NO: 78527 - RNA, 22 nt, Human
uguauuuucagaguggcauuuc

SEQ ID NO: 78528 - RNA, 22 nt, Human
uguauuuugaguccaaucuccu

SEQ ID NO: 78529 - RNA, 22 nt, Human
uguauuuugugaggaucacucu

SEQ ID NO: 78530 - RNA, 22 nt, Human
ugucaaaaagcugggacaagca

SEQ ID NO: 78531 - RNA, 22 nt, Human
ugucaaaaugacuuuacuacag

SEQ ID NO: 78532 - RNA, 22 nt, Human
ugucaaacaccaacauuucucc

SEQ ID NO: 78533 - RNA, 22 nt, Human
ugucaaagaugucuuugaaaau

SEQ ID NO: 78534 - RNA, 22 nt, Human
ugucaaaggguaagcuggauaa

SEQ ID NO: 78535 - RNA, 22 nt, Human
ugucaaauuauguaaugggaag

SEQ ID NO: 78536 - RNA, 22 nt, Human
ugucaacugugaugucaacacu

SEQ ID NO: 78537 - RNA, 22 nt, Human
ugucaaguuguuaaguucuggg

SEQ ID NO: 78538 - RNA, 20 nt, Human
ugucaauagcacugaggcug

SEQ ID NO: 78539 - RNA, 22 nt, Human
ugucaauauguaauaacugaau

SEQ ID NO: 78540 - RNA, 22 nt, Human
ugucaaugcuggucuugaauga

SEQ ID NO: 78541 - RNA, 22 nt, Human
ugucacaccucguuuagcauuc

SEQ ID NO: 78542 - RNA, 22 nt, Human
ugucacagggauaccauggggc

SEQ ID NO: 78543 - RNA, 22 nt, Human
ugucacaguuuguacuuuauag

SEQ ID NO: 78544 - RNA, 22 nt, Human
ugucacaucagggguguugaca

SEQ ID NO: 78545 - RNA, 22 nt, Human
ugugaggagaggcccagcuccc

SEQ ID NO: 78546 - RNA, 22 nt, Human
ugugaggauguaaccagaaguc

SEQ ID NO: 78547 - RNA, 22 nt, Human
ugugaggcgaggccagugagcu

SEQ ID NO: 78548 - RNA, 22 nt, Human
ugugaggcuaccugccaggguc

SEQ ID NO: 78549 - RNA, 22 nt, Human
ugugaggcuugaaguaauucca

SEQ ID NO: 78550 - RNA, 22 nt, Human
uguccaggcuaaagugcagugg

SEQ ID NO: 78551 - RNA, 22 nt, Human
uguccaggcucccuuggugcug

SEQ ID NO: 78552 - RNA, 22 nt, Human
uguccagggggcuuaccuggag

SEQ ID NO: 78553 - RNA, 22 nt, Human
uguccaggucagcagcagggac

SEQ ID NO: 78554 - RNA, 22 nt, Human
uguccauggggaaggggaagug

SEQ ID NO: 78555 - RNA, 22 nt, Human
uguccauugcuuauuucuacuu

SEQ ID NO: 78556 - RNA, 22 nt, Human
ugucccacugacuucacaucca

SEQ ID NO: 78557 - RNA, 22 nt, Human
ugucccagacauaaguggacau

SEQ ID NO: 78558 - RNA, 23 nt, Human
ugucccagagggagggauaggcu

SEQ ID NO: 78559 - RNA, 22 nt, Human
ugucccagaucacaggagggga

SEQ ID NO: 78560 - RNA, 22 nt, Human
ugucccagcagcuggguucucu

SEQ ID NO: 78561 - RNA, 17 nt, Human
ugucccaggcucaacgc

SEQ ID NO: 78562 - RNA, 22 nt, Human
ugucccaguuuaucugggacug

SEQ ID NO: 78563 - RNA, 22 nt, Human
ugucccauggauaccaggcuau

SEQ ID NO: 78564 - RNA, 22 nt, Human
uguccccagagccuguuccugc

SEQ ID NO: 78565 - RNA, 22 nt, Human
uguccccugcccagggauggga

SEQ ID NO: 78566 - RNA, 22 nt, Human
uguccccuuuaccuccgcagcc

SEQ ID NO: 78567 - RNA, 22 nt, Human
ugucccuaaagaaacagacauu

SEQ ID NO: 78568 - RNA, 22 nt, Human
ugucccuggacuccaggagcca

SEQ ID NO: 78569 - RNA, 19 nt, Human
ugucccuggucaccagacu

SEQ ID NO: 78570 - RNA, 20 nt, Human
uguccuaauagacaagcaga

SEQ ID NO: 78571 - RNA, 22 nt, Human
uguccuagagacaucagauguu

SEQ ID NO: 78572 - RNA, 23 nt, Human
uguccuaugcagcuaaaauuccu

SEQ ID NO: 78573 - RNA, 22 nt, Human
uguccucacacguagggaguaa

SEQ ID NO: 78574 - RNA, 19 nt, Human
uguccucacagagcauaac

SEQ ID NO: 78575 - RNA, 22 nt, Human
uguccucacaugguggggagag

SEQ ID NO: 78576 - RNA, 22 nt, Human
uguccucaucuuuuccagaaau

SEQ ID NO: 78577 - RNA, 22 nt, Human
uguccuccagcagcaugguaug

SEQ ID NO: 78578 - RNA, 22 nt, Human
uguccucuccaacagccucugu

SEQ ID NO: 78579 - RNA, 22 nt, Human
uguccucuuccagugcuccuuc

SEQ ID NO: 78580 - RNA, 22 nt, Human
uguccuggaaaaauggagaguu

SEQ ID NO: 78581 - RNA, 22 nt, Human
uguccuggaucaugccucugaa

SEQ ID NO: 78582 - RNA, 22 nt, Human
uguccuggccaaggccuugcuu

SEQ ID NO: 78583 - RNA, 22 nt, Human
uguccuggccuccagaaagucg

SEQ ID NO: 78584 - RNA, 22 nt, Human
uguccugggucccugcuagaag

SEQ ID NO: 78585 - RNA, 22 nt, Human
uguccuggguggaugcuucauu

SEQ ID NO: 78586 - RNA, 22 nt, Human
uguccuggugcuucuugggauu

SEQ ID NO: 78587 - RNA, 22 nt, Human
uguccuguaggaggcagaacaa

SEQ ID NO: 78588 - RNA, 22 nt, Human
uguccuguagguuuauuugugu

SEQ ID NO: 78589 - RNA, 22 nt, Human
uguccugucucuuuccuaauug

SEQ ID NO: 78590 - RNA, 22 nt, Human
uguccuguucauggcucuggac

SEQ ID NO: 78591 - RNA, 22 nt, Human
uguccuuauaagaaaaggaaau

SEQ ID NO: 78592 - RNA, 22 nt, Human
uguccuugaugaauaugaaauu

SEQ ID NO: 78593 - RNA, 22 nt, Human
uucauagaucucaauuuugagg

SEQ ID NO: 78594 - RNA, 22 nt, Human
uucauagcagucccuuucuggg

SEQ ID NO: 78595 - RNA, 22 nt, Human
uucauaguguuuccuuccagug

SEQ ID NO: 78596 - RNA, 22 nt, Human
uucauauaccuugcguuucaca

SEQ ID NO: 78597 - RNA, 22 nt, Human
uucauaugugaacucagugaug

SEQ ID NO: 78598 - RNA, 22 nt, Human
uucauauucaaauacucugcuu

SEQ ID NO: 78599 - RNA, 20 nt, Human
uucaucagcaaagcacagca

SEQ ID NO: 78600 - RNA, 21 nt, Human
uucaucauugguaaaaagugg

SEQ ID NO: 78601 - RNA, 22 nt, Human
uucaucugcugguuuuuggcau

SEQ ID NO: 78602 - RNA, 22 nt, Human
uucaucugcuucuugauuuugc

SEQ ID NO: 78603 - RNA, 22 nt, Human
uucaucuggaaguucccaaggc

SEQ ID NO: 78604 - RNA, 21 nt, Human
uucaucuggccguauuccagg

SEQ ID NO: 78605 - RNA, 22 nt, Human
uucaucuugauggcuuccuaau

SEQ ID NO: 78606 - RNA, 22 nt, Human
uucaugaaaaggucuauuucuu

SEQ ID NO: 78607 - RNA, 22 nt, Human
uucaugaaaguguaucuugugg

SEQ ID NO: 78608 - RNA, 22 nt, Human
uucaugaaauucucguguaccu

SEQ ID NO: 78609 - RNA, 22 nt, Human
uucaugaauguuccaugugagu

SEQ ID NO: 78610 - RNA, 23 nt, Human
uucaugaguuggacaagacuggg

SEQ ID NO: 78611 - RNA, 22 nt, Human
uucaugauaguauuuuuuguga

SEQ ID NO: 78612 - RNA, 22 nt, Human
uucaugcugugucuacaacuua

SEQ ID NO: 78613 - RNA, 22 nt, Human
uucauggaguugagaaggcuaa

SEQ ID NO: 78614 - RNA, 20 nt, Human
uucaugggagcaaagaggcc

SEQ ID NO: 78615 - RNA, 22 nt, Human
uucauguaauuccauaagguaa

SEQ ID NO: 78616 - RNA, 22 nt, Human
uucaugugaauauauuugucuu

SEQ ID NO: 78617 - RNA, 22 nt, Human
uucaugugauaaaugugugacu

SEQ ID NO: 78618 - RNA, 22 nt, Human
uucaugugccagagcugaaaau

SEQ ID NO: 78619 - RNA, 18 nt, Human
uucauguuggcuuaggga

SEQ ID NO: 78620 - RNA, 22 nt, Human
uucauguuugccuauuugacuu

SEQ ID NO: 78621 - RNA, 22 nt, Human
uucauuacugaauucucacuac

SEQ ID NO: 78622 - RNA, 22 nt, Human
uucauuagaaaaguaaaaaugc

SEQ ID NO: 78623 - RNA, 23 nt, Human
uucauucaaaaggaaaagucaug

SEQ ID NO: 78624 - RNA, 22 nt, Human
uucauucaagggguuccugauu

SEQ ID NO: 78625 - RNA, 22 nt, Human
uucauucacccaggaaacaucu

SEQ ID NO: 78626 - RNA, 20 nt, Human
uucauucacguagcuguuga

SEQ ID NO: 78627 - RNA, 22 nt, Human
uucauucagguguauuuauggg

SEQ ID NO: 78628 - RNA, 22 nt, Human
uucauucagugcauuugggaga

SEQ ID NO: 78629 - RNA, 22 nt, Human
uucauucaucucuaaaaugccu

SEQ ID NO: 78630 - RNA, 21 nt, Human
uucauucauggcauaauauag

SEQ ID NO: 78631 - RNA, 20 nt, Human
uucauucauuccacaacuuc

SEQ ID NO: 78632 - RNA, 22 nt, Human
uucauuccugagcccauauuua

SEQ ID NO: 78633 - RNA, 22 nt, Human
uucauucucuuagcauaguccu

SEQ ID NO: 78634 - RNA, 22 nt, Human
uucauucugcaguucucagcuc

SEQ ID NO: 78635 - RNA, 22 nt, Human
uucauucuucagagcugcgcuu

SEQ ID NO: 78636 - RNA, 19 nt, Human
uucauucuuucuacuuacc

SEQ ID NO: 78637 - RNA, 22 nt, Human
uucauugaaggagggacuugcu

SEQ ID NO: 78638 - RNA, 23 nt, Human
uucauugagcuguucuugaggau

SEQ ID NO: 78639 - RNA, 22 nt, Human
uucauugauaguuuuauguaug

SEQ ID NO: 78640 - RNA, 22 nt, Human
uucauugaugugguuuaaugua

SEQ ID NO: 78641 - RNA, 22 nt, Human
uucauugauuuccuuggaauaa

SEQ ID NO: 78642 - RNA, 22 nt, Human
uucauugcauuccagccugggu

SEQ ID NO: 78643 - RNA, 22 nt, Human
uucauuguagcuugacuaauua

SEQ ID NO: 78644 - RNA, 22 nt, Human
uucauugugauucuuggcuagc

SEQ ID NO: 78645 - RNA, 20 nt, Human
uucauuugggaaaaucugcg

SEQ ID NO: 78646 - RNA, 22 nt, Human
uucauuuguaacucuguuaggg

SEQ ID NO: 78647 - RNA, 23 nt, Human
uucauuugucuacuucacuuguu

SEQ ID NO: 78648 - RNA, 22 nt, Human
uucauuuguugacagagacaug

SEQ ID NO: 78649 - RNA, 22 nt, Human
uucauuuuuaccgcgugucaaa

SEQ ID NO: 78650 - RNA, 22 nt, Human
uuccaaaacaguauggcaugug

SEQ ID NO: 78651 - RNA, 19 nt, Human
uuccaaaaucaggauuuga

SEQ ID NO: 78652 - RNA, 22 nt, Human
uuccaaagaaauugaccaagac

SEQ ID NO: 78653 - RNA, 22 nt, Human
uuccaaagugcuggaauuacau

SEQ ID NO: 78654 - RNA, 22 nt, Human
uuccaaaugaguuccaucgaau

SEQ ID NO: 78655 - RNA, 22 nt, Human
uuccaaauggagaagaugaguu

SEQ ID NO: 78656 - RNA, 20 nt, Human
uuccaacucacaucucuaca

SEQ ID NO: 78657 - RNA, 22 nt, Human
uuccaacucugaaaugugaaau

SEQ ID NO: 78658 - RNA, 22 nt, Human
uuccaagagucagcugauccca

SEQ ID NO: 78659 - RNA, 22 nt, Human
uucagcaaugggauggugcagg

SEQ ID NO: 78660 - RNA, 22 nt, Human
uucagcacaguucaagauggua

SEQ ID NO: 78661 - RNA, 22 nt, Human
uucagcaccacuuccagagaag

SEQ ID NO: 78662 - RNA, 22 nt, Human
uucagcacuguuauggauuugc

SEQ ID NO: 78663 - RNA, 22 nt, Human
uucagcacuuuguuuugcucau

SEQ ID NO: 78664 - RNA, 22 nt, Human
uucagcaguuucugagaagcaa

SEQ ID NO: 78665 - RNA, 22 nt, Human
uucagcaucuacauauuuagaa

SEQ ID NO: 78666 - RNA, 22 nt, Human
uucagcauuucuguuguuggcu

SEQ ID NO: 78667 - RNA, 22 nt, Human
uucagccagucaucagucuugu

SEQ ID NO: 78668 - RNA, 22 nt, Human
uucagccuguucaugcuguugc

SEQ ID NO: 78669 - RNA, 22 nt, Human
uucagcuaaggaguuucacugu

SEQ ID NO: 78670 - RNA, 22 nt, Human
uucagcuccuuauuucugagca

SEQ ID NO: 78671 - RNA, 22 nt, Human
uucagcuccuuucuuccaccag

SEQ ID NO: 78672 - RNA, 22 nt, Human
uucagcucugcuagcucugugc

SEQ ID NO: 78673 - RNA, 21 nt, Human
uucagcuuaugugucacuugc

SEQ ID NO: 78674 - RNA, 22 nt, Human
uucagcuugcuuagucuccuuc

SEQ ID NO: 78675 - RNA, 22 nt, Human
uucaggaaauuugugucacagg

SEQ ID NO: 78676 - RNA, 22 nt, Human
uucaggaagccuuucuuggucu

SEQ ID NO: 78677 - RNA, 22 nt, Human
uucaggaauaauuaucauauga

SEQ ID NO: 78678 - RNA, 22 nt, Human
uucaggaaucaaccaagucauu

SEQ ID NO: 78679 - RNA, 21 nt, Human
uucaggacaggaaaaacaggg

SEQ ID NO: 78680 - RNA, 22 nt, Human
uucaggagcuagggaugugaaa

SEQ ID NO: 78681 - RNA, 22 nt, Human
uucaggaucacuaaacccucca

SEQ ID NO: 78682 - RNA, 22 nt, Human
uucaggauccccuugaugggcu

SEQ ID NO: 78683 - RNA, 22 nt, Human
uucaggaugaaagugugcaaca

SEQ ID NO: 78684 - RNA, 22 nt, Human
uucaggauuauacucucuuccc

SEQ ID NO: 78685 - RNA, 20 nt, Human
uucaggauucuagaccacac

SEQ ID NO: 78686 - RNA, 19 nt, Human
uucaggauugacccuacug

SEQ ID NO: 78687 - RNA, 22 nt, Human
uucaggccuaauuucuagcccc

SEQ ID NO: 78688 - RNA, 22 nt, Human
uucaggccucuaaagggaaagc

SEQ ID NO: 78689 - RNA, 22 nt, Human
uucagggcagacagaagagaug

SEQ ID NO: 78690 - RNA, 22 nt, Human
uucagggcagcuagaaccagga

SEQ ID NO: 78691 - RNA, 22 nt, Human
uucagggcccugagagggcagu

SEQ ID NO: 78692 - RNA, 22 nt, Human
uucagggcuuagggaaauagug

SEQ ID NO: 78693 - RNA, 18 nt, Human
uucaggucagaaagaugg

SEQ ID NO: 78694 - RNA, 22 nt, Human
uucaggugucaaggauaggcug

SEQ ID NO: 78695 - RNA, 22 nt, Human
uucaguaagcacuucuagagcu

SEQ ID NO: 78696 - RNA, 22 nt, Human
uucaguaaggauaauaaacaga

SEQ ID NO: 78697 - RNA, 22 nt, Human
uucaguaugauuccuccaguag

SEQ ID NO: 78698 - RNA, 22 nt, Human
uucagucccuugcuuaaauuua

SEQ ID NO: 78699 - RNA, 22 nt, Human
uucagucuccucauuuuacaaa

SEQ ID NO: 78700 - RNA, 22 nt, Human
uucagugcacaguacugagacu

SEQ ID NO: 78701 - RNA, 22 nt, Human
uucagugccgugcugggucgcu

SEQ ID NO: 78702 - RNA, 22 nt, Human
uucaguguacagugaagggauu

SEQ ID NO: 78703 - RNA, 22 nt, Human
uucaguguaucuugucagggag

SEQ ID NO: 78704 - RNA, 22 nt, Human
uucagugucaauuuuuaaauau

SEQ ID NO: 78705 - RNA, 22 nt, Human
uucagugucacaagagcaagcc

SEQ ID NO: 78706 - RNA, 22 nt, Human
uucaguguggaaugugaacugc

SEQ ID NO: 78707 - RNA, 22 nt, Human
uucagugugugauaccugcugu

SEQ ID NO: 78708 - RNA, 22 nt, Human
uucaguguuacucaaggggcag

SEQ ID NO: 78709 - RNA, 22 nt, Human
uucaguguuuguagagauaacu

SEQ ID NO: 78710 - RNA, 22 nt, Human
uucaguuggccauaccccuaga

SEQ ID NO: 78711 - RNA, 22 nt, Human
uucaguuuauaccuguugauua

SEQ ID NO: 78712 - RNA, 22 nt, Human
uucaguuucaaauccugugaag

SEQ ID NO: 78713 - RNA, 22 nt, Human
uucaguuuuauuguacugcuau

SEQ ID NO: 78714 - RNA, 22 nt, Human
uucaguuuucccuccugcaggu

SEQ ID NO: 78715 - RNA, 21 nt, Human
uucauaaaccauucucaugca

SEQ ID NO: 78716 - RNA, 23 nt, Human
uucauaacucaaggugauauaau

SEQ ID NO: 78717 - RNA, 19 nt, Human
uucauaacuuuuauauccu

SEQ ID NO: 78718 - RNA, 22 nt, Human
uucauaaggguggccauauaaa

SEQ ID NO: 78719 - RNA, 22 nt, Human
uucauaaugagguccuagaggc

SEQ ID NO: 78720 - RNA, 22 nt, Human
uucauacauuuuuacuaacagc

SEQ ID NO: 78721 - RNA, 22 nt, Human
uucauaggaaauaguguucuuu

SEQ ID NO: 78722 - RNA, 22 nt, Human
uucauagugacaugcauucugg

SEQ ID NO: 78723 - RNA, 22 nt, Human
uucauaugcagauuaacaaaua

SEQ ID NO: 78724 - RNA, 22 nt, Human
uucauauuaugauuugaaaugc

SEQ ID NO: 78725 - RNA, 22 nt, Human
uucauauugcuuccguggagug

SEQ ID NO: 78726 - RNA, 22 nt, Human
uucauauuuucugcuugcucac

SEQ ID NO: 78727 - RNA, 21 nt, Human
uucaucagccagaaaucaagc

SEQ ID NO: 78728 - RNA, 22 nt, Human
uucaucaggcaucaugcucaag

SEQ ID NO: 78729 - RNA, 22 nt, Human
uucaucaucuacaaccaggacc

SEQ ID NO: 78730 - RNA, 22 nt, Human
uucaugaaacuuaacuguuggg

SEQ ID NO: 78731 - RNA, 22 nt, Human
uucaugaauggaaucaaugcuc

SEQ ID NO: 78732 - RNA, 23 nt, Human
uucaugagauuaucugcaugugu

SEQ ID NO: 78733 - RNA, 23 nt, Human
uucaugaugauuaaucagcuaca

SEQ ID NO: 78734 - RNA, 22 nt, Human
uucaugccagcccuguguggua

SEQ ID NO: 78735 - RNA, 22 nt, Human
uucaugcuaguaugugcuguuc

SEQ ID NO: 78736 - RNA, 22 nt, Human
uucaugcuuuuaccgcuguuaa

SEQ ID NO: 78737 - RNA, 22 nt, Human
uucauggaucaugccuuuugug

SEQ ID NO: 78738 - RNA, 22 nt, Human
uucauggauguugguagaaaac

SEQ ID NO: 78739 - RNA, 22 nt, Human
uucauggcaggagucagaagcu

SEQ ID NO: 78740 - RNA, 22 nt, Human
uucauggcgcuguucucucccu

SEQ ID NO: 78741 - RNA, 22 nt, Human
uucauguagcuuagcagagagg

SEQ ID NO: 78742 - RNA, 22 nt, Human
uucauguccagaggaaguugag

SEQ ID NO: 78743 - RNA, 22 nt, Human
uucauguucauauguguauauc

SEQ ID NO: 78744 - RNA, 23 nt, Human
uucauguucccuccuucugguga

SEQ ID NO: 78745 - RNA, 22 nt, Human
uucauguuucaauuguuaaugu

SEQ ID NO: 78746 - RNA, 23 nt, Human
uuaugcuuuggcacucuuguuag

SEQ ID NO: 78747 - RNA, 22 nt, Human
uuaugcuuuuagaauuuagcau

SEQ ID NO: 78748 - RNA, 22 nt, Human
uuauggaaaacuccagagagua

SEQ ID NO: 78749 - RNA, 22 nt, Human
uuauggaagugcaaauugugug

SEQ ID NO: 78750 - RNA, 22 nt, Human
uuauggagacuuucagaagcgg

SEQ ID NO: 78751 - RNA, 22 nt, Human
uuauggagcagacagcugguca

SEQ ID NO: 78752 - RNA, 22 nt, Human
uuauggagugcuuaccugccag

SEQ ID NO: 78753 - RNA, 22 nt, Human
uuauggcauauuccucauugua

SEQ ID NO: 78754 - RNA, 22 nt, Human
uuauggcauucauuggggcuuu

SEQ ID NO: 78755 - RNA, 22 nt, Human
uuauguaaguggagucauauag

SEQ ID NO: 78756 - RNA, 22 nt, Human
uuauguacaauguuaauguaaa

SEQ ID NO: 78757 - RNA, 22 nt, Human
uuauguaccucuuucugcuuca

SEQ ID NO: 78758 - RNA, 22 nt, Human
uuauguaccugaauuaguaaag

SEQ ID NO: 78759 - RNA, 22 nt, Human
uuauguacucugcaauguuuga

SEQ ID NO: 78760 - RNA, 22 nt, Human
uuauguaggauaaugaauugcc

SEQ ID NO: 78761 - RNA, 21 nt, Human
uuaugucucuuuggugacugg

SEQ ID NO: 78762 - RNA, 22 nt, Human
uuaugucugugaauuggcaagc

SEQ ID NO: 78763 - RNA, 22 nt, Human
uuaugucuuaaguaugcuaauu

SEQ ID NO: 78764 - RNA, 22 nt, Human
uuaugugcuucaacugagccua

SEQ ID NO: 78765 - RNA, 22 nt, Human
uuauguguauaauuacaggaag

SEQ ID NO: 78766 - RNA, 22 nt, Human
uuauguguguguauacauacaa

SEQ ID NO: 78767 - RNA, 22 nt, Human
uuauguuaugaauggaugaucu

SEQ ID NO: 78768 - RNA, 21 nt, Human
uugcuguuuucccaaugcagu

SEQ ID NO: 78769 - RNA, 23 nt, Human
uugcuuagagaccuccucaucag

SEQ ID NO: 78770 - RNA, 22 nt, Human
uugcuucacugaguuaugccug

SEQ ID NO: 78771 - RNA, 22 nt, Human
uugcuucagaaguucugcuugu

SEQ ID NO: 78772 - RNA, 19 nt, Human
uugcuucaggcugugugcu

SEQ ID NO: 78773 - RNA, 22 nt, Human
uugcuucaucagaguaaacaag

SEQ ID NO: 78774 - RNA, 19 nt, Human
uugcuucaugucuuuugcu

SEQ ID NO: 78775 - RNA, 22 nt, Human
uugcuucauuuuaaauaaagac

SEQ ID NO: 78776 - RNA, 23 nt, Human
uugcuuccacuguaaguggagaa

SEQ ID NO: 78777 - RNA, 22 nt, Human
uugcuuccucugugcaauccuc

SEQ ID NO: 78778 - RNA, 22 nt, Human
uugcuuccuugagcuggucuga

SEQ ID NO: 78779 - RNA, 22 nt, Human
uugcuucuaaguauaaauauga

SEQ ID NO: 78780 - RNA, 23 nt, Human
uugcuucugugcaauucaguacu

SEQ ID NO: 78781 - RNA, 22 nt, Human
uugcuuggcccauugcuucagu

SEQ ID NO: 78782 - RNA, 22 nt, Human
uugcuuuaaaauggcuaagucu

SEQ ID NO: 78783 - RNA, 22 nt, Human
uugcuuuacuuugccauucguu

SEQ ID NO: 78784 - RNA, 22 nt, Human
uugcuuuagggcaaauauuuca

SEQ ID NO: 78785 - RNA, 22 nt, Human
uucugaaagucuuuuuaaguua

SEQ ID NO: 78786 - RNA, 22 nt, Human
uucugaaaugagauauaaggua

SEQ ID NO: 78787 - RNA, 22 nt, Human
uucugaauucaugagauuuggg

SEQ ID NO: 78788 - RNA, 22 nt, Human
uucugacacauuacuacaugga

SEQ ID NO: 78789 - RNA, 22 nt, Human
uucugacagcaaaacucagccu

SEQ ID NO: 78790 - RNA, 22 nt, Human
uucugacaguaaucaguuugcu

SEQ ID NO: 78791 - RNA, 22 nt, Human
uucugagaagggugggucuggc

SEQ ID NO: 78792 - RNA, 21 nt, Human
uucugagacucauuugaacuc

SEQ ID NO: 78793 - RNA, 22 nt, Human
uucugagauacaaaauuuacuu

SEQ ID NO: 78794 - RNA, 22 nt, Human
uucugagaugugaaucugucaa

SEQ ID NO: 78795 - RNA, 22 nt, Human
uucugagcuacauaguacuggg

SEQ ID NO: 78796 - RNA, 22 nt, Human
uucugaggcauagaggaugaga

SEQ ID NO: 78797 - RNA, 22 nt, Human
uucugagggagguucucuggga

SEQ ID NO: 78798 - RNA, 22 nt, Human
uucugauaauaccacaucgcag

SEQ ID NO: 78799 - RNA, 22 nt, Human
uucugaugauggcggcuggagc

SEQ ID NO: 78800 - RNA, 22 nt, Human
uucugcacaaauuuuagguuau

SEQ ID NO: 78801 - RNA, 22 nt, Human
uucugcacauuuuagcaaagua

SEQ ID NO: 78802 - RNA, 22 nt, Human
uucugcaggagcccuaguguau

SEQ ID NO: 78803 - RNA, 22 nt, Human
uucugcauacacugaauguagu

SEQ ID NO: 78804 - RNA, 22 nt, Human
uucugcauguguuucaaauacu

SEQ ID NO: 78805 - RNA, 23 nt, Human
uucugcauguuucagagcuggga

SEQ ID NO: 78806 - RNA, 22 nt, Human
uucugccagugaaaauaaugau

SEQ ID NO: 78807 - RNA, 22 nt, Human
uucugccauugccaugagggcu

SEQ ID NO: 78808 - RNA, 22 nt, Human
uucugccugccccagagaggcc

SEQ ID NO: 78809 - RNA, 22 nt, Human
uucugccuuacgauauuuucaa

SEQ ID NO: 78810 - RNA, 21 nt, Human
uucugccuuccccuagcuggg

SEQ ID NO: 78811 - RNA, 21 nt, Human
uucugccuucgaggucucagg

SEQ ID NO: 78812 - RNA, 22 nt, Human
uucugcuaccuuucuguaccuu

SEQ ID NO: 78813 - RNA, 22 nt, Human
uucugcucuaauguacaccagc

SEQ ID NO: 78814 - RNA, 22 nt, Human
uucugcucuuggcuuugcuggu

SEQ ID NO: 78815 - RNA, 22 nt, Human
uucugcugagugggcaggugca

SEQ ID NO: 78816 - RNA, 22 nt, Human
uucugcugcgacccaggaguua

SEQ ID NO: 78817 - RNA, 22 nt, Human
uucugcugguaacuauguuuca

SEQ ID NO: 78818 - RNA, 22 nt, Human
uucugcuguugugacguuaguu

SEQ ID NO: 78819 - RNA, 22 nt, Human
uucugcuuuucucugucugagu

SEQ ID NO: 78820 - RNA, 20 nt, Human
uucugcuuuugcuuagggac

SEQ ID NO: 78821 - RNA, 22 nt, Human
uucuggaaagaaggcuaagguc

SEQ ID NO: 78822 - RNA, 22 nt, Human
uucuggaaccaacaugccaguu

SEQ ID NO: 78823 - RNA, 22 nt, Human
uucuggaagaguaaaauaagcc

SEQ ID NO: 78824 - RNA, 22 nt, Human
uucuggaagccaugggaacagg

SEQ ID NO: 78825 - RNA, 22 nt, Human
uucuggaagccccagagucaga

SEQ ID NO: 78826 - RNA, 22 nt, Human
uucuggaaguuuucuccugugg

SEQ ID NO: 78827 - RNA, 22 nt, Human
uucuggaaugccuguucuaauu

SEQ ID NO: 78828 - RNA, 22 nt, Human
uucuggacacgugacucucauu

SEQ ID NO: 78829 - RNA, 22 nt, Human
uucuggagaggaacagaaaggu

SEQ ID NO: 78830 - RNA, 22 nt, Human
uucuggaggccagcugccaccu

SEQ ID NO: 78831 - RNA, 22 nt, Human
uucuggaguauuccuggcagcc

SEQ ID NO: 78832 - RNA, 22 nt, Human
uucuggauauaacauucagucc

SEQ ID NO: 78833 - RNA, 22 nt, Human
uucuggauauggauuuugguga

SEQ ID NO: 78834 - RNA, 22 nt, Human
uucuggaugcuguuaagaugua

SEQ ID NO: 78835 - RNA, 22 nt, Human
uucuggauguuguagucugaga

SEQ ID NO: 78836 - RNA, 22 nt, Human
uucuggcucgauucucugaccg

SEQ ID NO: 78837 - RNA, 22 nt, Human
uucuggcugaaaguuuauuuga

SEQ ID NO: 78838 - RNA, 22 nt, Human
uucuggcuuauccuaacucuaa

SEQ ID NO: 78839 - RNA, 21 nt, Human
uucugggaaaugagcuggggc

SEQ ID NO: 78840 - RNA, 22 nt, Human
uucugggaggccuuugugucug

SEQ ID NO: 78841 - RNA, 22 nt, Human
uucugggcagagcuggagcugc

SEQ ID NO: 78842 - RNA, 19 nt, Human
uucugggcauucauauuua

SEQ ID NO: 78843 - RNA, 22 nt, Human
uucugggccaaucucuuaaucu

SEQ ID NO: 78844 - RNA, 22 nt, Human
uucugggcucacagagcagcag

SEQ ID NO: 78845 - RNA, 22 nt, Human
uucugggcuguccagaggguga

SEQ ID NO: 78846 - RNA, 22 nt, Human
uucugggggccaggacaguggu

SEQ ID NO: 78847 - RNA, 22 nt, Human
uucugggguuaugggugauucu

SEQ ID NO: 78848 - RNA, 22 nt, Human
uucuggguaguaugguuaguuu

SEQ ID NO: 78849 - RNA, 22 nt, Human
uucugggucacccuucugcuca

SEQ ID NO: 78850 - RNA, 22 nt, Human
uucugggugacucacgcucccc

SEQ ID NO: 78851 - RNA, 22 nt, Human
uucugggugccaccuaagacau

SEQ ID NO: 78852 - RNA, 18 nt, Human
uucuggguguuauguuua

SEQ ID NO: 78853 - RNA, 22 nt, Human
uucugguucucaggaaugcuaa

SEQ ID NO: 78854 - RNA, 22 nt, Human
uucugguuuaagaaagugcugg

SEQ ID NO: 78855 - RNA, 22 nt, Human
uucuguacccaacauuuuuacu

SEQ ID NO: 78856 - RNA, 21 nt, Human
uucuguagcuguuagcuuuuc

SEQ ID NO: 78857 - RNA, 22 nt, Human
uucuguaggcauggaacaggga

SEQ ID NO: 78858 - RNA, 22 nt, Human
uucuguauauuguaaagacuca

SEQ ID NO: 78859 - RNA, 22 nt, Human
uucuguaucucuguguuucuug

SEQ ID NO: 78860 - RNA, 22 nt, Human
uucuguauguacauauguguau

SEQ ID NO: 78861 - RNA, 22 nt, Human
uucuguauguaugccagagcau

SEQ ID NO: 78862 - RNA, 22 nt, Human
uucugucaaauuugccauaugg

SEQ ID NO: 78863 - RNA, 22 nt, Human
uucugucagaagcuagcuccug

SEQ ID NO: 78864 - RNA, 22 nt, Human
uucugucagcgucagaaauucu

SEQ ID NO: 78865 - RNA, 22 nt, Human
uucugucagcugcuuugucuca

SEQ ID NO: 78866 - RNA, 22 nt, Human
uucugucaugcucauguaauug

SEQ ID NO: 78867 - RNA, 22 nt, Human
uucugucuucccacugaggagc

SEQ ID NO: 78868 - RNA, 22 nt, Human
uucugugaaacuaaagagagga

SEQ ID NO: 78869 - RNA, 17 nt, Human
uucugugcuuccuggcu

SEQ ID NO: 78870 - RNA, 22 nt, Human
uucuguggaauaugaacuagca

SEQ ID NO: 78871 - RNA, 22 nt, Human
uucuguggagguuuggaacauu

SEQ ID NO: 78872 - RNA, 22 nt, Human
uucuguggcaguuugggaggug

SEQ ID NO: 78873 - RNA, 19 nt, Human
uucuguguuaauuccuuua

SEQ ID NO: 78874 - RNA, 22 nt, Human
uucuguguugugacauucuaga

SEQ ID NO: 78875 - RNA, 22 nt, Human
uucuguuacaagugaaaaaaug

SEQ ID NO: 78876 - RNA, 22 nt, Human
uucuguuacauggggcacagug

SEQ ID NO: 78877 - RNA, 22 nt, Human
uuguauucuguuacagcaacau

SEQ ID NO: 78878 - RNA, 22 nt, Human
uuguauuuuguuaugcuacugc

SEQ ID NO: 78879 - RNA, 22 nt, Human
uugucaaauccuugucaucugc

SEQ ID NO: 78880 - RNA, 22 nt, Human
uugucaagaaaaauggaugaag

SEQ ID NO: 78881 - RNA, 20 nt, Human
uugucacagcuuuccaucag

SEQ ID NO: 78882 - RNA, 22 nt, Human
uugucaccauauuucauuuuga

SEQ ID NO: 78883 - RNA, 22 nt, Human
uugucaccccuagaggaauucu

SEQ ID NO: 78884 - RNA, 22 nt, Human
uugucacuagugaagaaucagg

SEQ ID NO: 78885 - RNA, 22 nt, Human
uugucaggaacuaugauuaugc

SEQ ID NO: 78886 - RNA, 22 nt, Human
uugucaucauguuuuccaaagg

SEQ ID NO: 78887 - RNA, 22 nt, Human
uuguccagcagcucagucuacg

SEQ ID NO: 78888 - RNA, 22 nt, Human
uuguccagcgaccaggcucugu

SEQ ID NO: 78889 - RNA, 22 nt, Human
uugucccauugcgaaugugagu

SEQ ID NO: 78890 - RNA, 22 nt, Human
uuguccugagauaaggaacaga

SEQ ID NO: 78891 - RNA, 22 nt, Human
uuguccugauuuauaaaaugaa

SEQ ID NO: 78892 - RNA, 16 nt, Human
uuguccugucucacug

SEQ ID NO: 78893 - RNA, 22 nt, Human
uuguccugugucuguuuggauu

SEQ ID NO: 78894 - RNA, 22 nt, Human
uuguccuguuacuuguuuggau

SEQ ID NO: 78895 - RNA, 22 nt, Human
uuguccuguuuagggauaagga

SEQ ID NO: 78896 - RNA, 23 nt, Human
uuguccuucugaaauauaucugg

SEQ ID NO: 78897 - RNA, 22 nt, Human
uuguccuugugauaguuugcug

SEQ ID NO: 78898 - RNA, 22 nt, Human
uugucucuaagugugaucuuca

SEQ ID NO: 78899 - RNA, 22 nt, Human
uugucucugggacaugguauua

SEQ ID NO: 78900 - RNA, 22 nt, Human
uugucugaaagaucauuacauu

SEQ ID NO: 78901 - RNA, 22 nt, Human
uugucugaagucacacagaugc

SEQ ID NO: 78902 - RNA, 22 nt, Human
uugucugauguucccucaugau

SEQ ID NO: 78903 - RNA, 22 nt, Human
uugucuggucaaaucacuugua

SEQ ID NO: 78904 - RNA, 22 nt, Human
uuucucucuuaaggaguuuaaa

SEQ ID NO: 78905 - RNA, 22 nt, Human
uuucucugaguuguuacaaaac

SEQ ID NO: 78906 - RNA, 22 nt, Human
uuucucugccaguuauuuuccu

SEQ ID NO: 78907 - RNA, 22 nt, Human
uuucucugugggcuuuaugcau

SEQ ID NO: 78908 - RNA, 22 nt, Human
uuucucuucacugugugccuca

SEQ ID NO: 78909 - RNA, 22 nt, Human
uuucucuuucaaucugcaguac

SEQ ID NO: 78910 - RNA, 22 nt, Human
uuucugaaaugcuggcuuugga

SEQ ID NO: 78911 - RNA, 22 nt, Human
uuucugaacaaagccauuauca

SEQ ID NO: 78912 - RNA, 22 nt, Human
uuucugaacuugguacuggagc

SEQ ID NO: 78913 - RNA, 21 nt, Human
uuucugaaggcaacaucuauc

SEQ ID NO: 78914 - RNA, 22 nt, Human
uuucugaagguuaaggaauuag

SEQ ID NO: 78915 - RNA, 22 nt, Human
uuucugauaauuuugugaaauc

SEQ ID NO: 78916 - RNA, 23 nt, Human
uuucugaugagggaugugguaug

SEQ ID NO: 78917 - RNA, 22 nt, Human
uuucugauuugacuugaaguau

SEQ ID NO: 78918 - RNA, 22 nt, Human
uuucugcaaguguagauaccca

SEQ ID NO: 78919 - RNA, 22 nt, Human
uuucugcagcagacucagugug

SEQ ID NO: 78920 - RNA, 19 nt, Human
uuucugcagcucagagaag

SEQ ID NO: 78921 - RNA, 22 nt, Human
uuucugcauuguccucuugguu

SEQ ID NO: 78922 - RNA, 22 nt, Human
uuucuggaacaguaauugaaga

SEQ ID NO: 78923 - RNA, 22 nt, Human
uuucuggacccuucugugagug

SEQ ID NO: 78924 - RNA, 22 nt, Human
uuucuggaggcccaagggcaga

SEQ ID NO: 78925 - RNA, 21 nt, Human
uuucuggguggcugcauagug

SEQ ID NO: 78926 - RNA, 22 nt, Human
uuucuggguuuaugucacagcu

SEQ ID NO: 78927 - RNA, 22 nt, Human
uuucuguaauuggccaagucac

SEQ ID NO: 78928 - RNA, 22 nt, Human
uuucugucauaguuaucuuugu

SEQ ID NO: 78929 - RNA, 19 nt, Human
uuucugucuguguuuugcc

SEQ ID NO: 78930 - RNA, 22 nt, Human
uuucuguggauuuuccauucaa

SEQ ID NO: 78931 - RNA, 19 nt, Human
uuucuguuagaaggauaca

SEQ ID NO: 78932 - RNA, 22 nt, Human
uuucuguuguauggcuucugca

SEQ ID NO: 78933 - RNA, 21 nt, Human
uuucuuaggcucuaaaaugac

SEQ ID NO: 78934 - RNA, 22 nt, Human
uuucuuaugggguaguccuuua

SEQ ID NO: 78935 - RNA, 22 nt, Human
uuucuucacaggguauugggug

SEQ ID NO: 78936 - RNA, 22 nt, Human
uuucuucagagagagcuuuccc

SEQ ID NO: 78937 - RNA, 22 nt, Human
uuucuucagccacuccaaacug

SEQ ID NO: 78938 - RNA, 22 nt, Human
uuucuucauucaccuucacccc

SEQ ID NO: 78939 - RNA, 22 nt, Human
uuucuucauugacaaggaaaaa

SEQ ID NO: 78940 - RNA, 22 nt, Human
uuucuucauugaugucaggugg

SEQ ID NO: 78941 - RNA, 22 nt, Human
uuucuuccccaagugaauuuua

SEQ ID NO: 78942 - RNA, 22 nt, Human
uuucuuccuuaccuuacuagag

SEQ ID NO: 78943 - RNA, 22 nt, Human
uuucuucucgacaccuuauccc

SEQ ID NO: 78944 - RNA, 22 nt, Human
uuucuuguacacuggaauuuau

SEQ ID NO: 78945 - RNA, 20 nt, Human
uuucuuguacuuggagaagg

SEQ ID NO: 78946 - RNA, 22 nt, Human
uuucuugucuuuaguaucuggc

SEQ ID NO: 78947 - RNA, 22 nt, Human
uuucuuguuucauggugucuca

SEQ ID NO: 78948 - RNA, 22 nt, Human
uuucuuucucguaaacuuaguu

SEQ ID NO: 78949 - RNA, 22 nt, Human
uuucuuugagucucaguuugcu

SEQ ID NO: 78950 - RNA, 22 nt, Human
uuucuuuugcugagaggggcac

SEQ ID NO: 78951 - RNA, 22 nt, Human
uuugaaagaaaccagugaguga

SEQ ID NO: 78952 - RNA, 22 nt, Human
uuugaaagagcugauacaugaa

SEQ ID NO: 78953 - RNA, 21 nt, Human
uuugaaagcccuauguuuuca

SEQ ID NO: 78954 - RNA, 22 nt, Human
uuugaaagccuggcuuuucucu

SEQ ID NO: 78955 - RNA, 22 nt, Human
uuugaaaggaaguuaauacuuu

SEQ ID NO: 78956 - RNA, 22 nt, Human
uuugaaaguccuaggagagucc

SEQ ID NO: 78957 - RNA, 22 nt, Human
uuugaaauaugugaugagagag

SEQ ID NO: 78958 - RNA, 22 nt, Human
uuugaacagggaauguuccaca

SEQ ID NO: 78959 - RNA, 22 nt, Human
uuugaacaucacuguaggguga

SEQ ID NO: 78960 - RNA, 22 nt, Human
uuugaacuucuccauucugaug

SEQ ID NO: 78961 - RNA, 22 nt, Human
uuugaagaagcugaccuauuuu

SEQ ID NO: 78962 - RNA, 22 nt, Human
uuugaagcaccaaaggagaaaa

SEQ ID NO: 78963 - RNA, 18 nt, Human
uuugaaggauggccugga

SEQ ID NO: 78964 - RNA, 22 nt, Human
uuugaagggcacgacaauaguu

SEQ ID NO: 78965 - RNA, 22 nt, Human
uuugaaguguaugaaaauacag

SEQ ID NO: 78966 - RNA, 22 nt, Human
uuugaauaaacgguuaauguuc

SEQ ID NO: 78967 - RNA, 19 nt, Human
uuugaauccagcugguaac

SEQ ID NO: 78968 - RNA, 22 nt, Human
uuugaaugcaggacauacagaa

SEQ ID NO: 78969 - RNA, 22 nt, Human
uuugaauggacugagaaucuug

SEQ ID NO: 78970 - RNA, 22 nt, Human
uuugaauguuuuagguacuuaa

SEQ ID NO: 78971 - RNA, 22 nt, Human
uuugacaagagcaaauguucuu

SEQ ID NO: 78972 - RNA, 22 nt, Human
uuugacaauaauugcauuuaua

SEQ ID NO: 78973 - RNA, 22 nt, Human
uuugacagagcucuuagucucu

SEQ ID NO: 78974 - RNA, 22 nt, Human
uuugacagaguugugaggauuu

SEQ ID NO: 78975 - RNA, 22 nt, Human
uuugacagcagauaaaauaaaa

SEQ ID NO: 78976 - RNA, 22 nt, Human
uuugacaguaauaaagcacaag

SEQ ID NO: 78977 - RNA, 22 nt, Human
uuugacaugugcuuauaacuuu

SEQ ID NO: 78978 - RNA, 22 nt, Human
uuugacccuguuauucucccug

SEQ ID NO: 78979 - RNA, 22 nt, Human
uuugacucaguggacguacuag

SEQ ID NO: 78980 - RNA, 22 nt, Human
uuugacucauugauuuucucug

SEQ ID NO: 78981 - RNA, 22 nt, Human
uuugacucugggugcuuuuucg

SEQ ID NO: 78982 - RNA, 22 nt, Human
uuugacucuuaaguggcucaau

SEQ ID NO: 78983 - RNA, 22 nt, Human
uuugacuucugggcauuuuggu

SEQ ID NO: 78984 - RNA, 22 nt, Human
uuugagaaaaagugaugaugau

SEQ ID NO: 78985 - RNA, 22 nt, Human
uuugagaaaugggcucugugcu

SEQ ID NO: 78986 - RNA, 19 nt, Human
ccccuuagggguuaagccu

SEQ ID NO: 78987 - RNA, 22 nt, Human
ccccuuccaggaagcagaaucg

SEQ ID NO: 78988 - RNA, 22 nt, Human
ccccuucuguguccugucagcc

SEQ ID NO: 78989 - RNA, 19 nt, Human
ccccuuguguaacuagccu

SEQ ID NO: 78990 - RNA, 21 nt, Human
cccgcacagcgguaggccgcc

SEQ ID NO: 78991 - RNA, 22 nt, Human
cccgcaggggcagcccucaucc

SEQ ID NO: 78992 - RNA, 21 nt, Human
cccgcaucuuccucuccagca

SEQ ID NO: 78993 - RNA, 22 nt, Human
cccgcuccuuaccuguccaacc

SEQ ID NO: 78994 - RNA, 17 nt, Human
cccguucucuucgcugg

SEQ ID NO: 78995 - RNA, 22 nt, Human
cccguuugccucuuuauuuacu

SEQ ID NO: 78996 - RNA, 21 nt, Human
cccuaacucuaaaggauccau

SEQ ID NO: 78997 - RNA, 22 nt, Human
cccuaagaagcaaagugauacc

SEQ ID NO: 78998 - RNA, 22 nt, Human
cccuaaggcagcccagucugug

SEQ ID NO: 78999 - RNA, 22 nt, Human
cccuagaaaugaaagcauacgu

SEQ ID NO: 79000 - RNA, 22 nt, Human
cccuagaacacgcagacacuga

SEQ ID NO: 79001 - RNA, 19 nt, Human
cccuagaguaagacugcau

SEQ ID NO: 79002 - RNA, 22 nt, Human
cccuaggggcaaugauggugcu

SEQ ID NO: 79003 - RNA, 22 nt, Human
cccucaccaggcuccaggcaug

SEQ ID NO: 79004 - RNA, 22 nt, Human
cccucacucugccuccuggggu

SEQ ID NO: 79005 - RNA, 22 nt, Human
cccucagagccugaagcaagca

SEQ ID NO: 79006 - RNA, 19 nt, Human
cccucauucacuuauucuc

SEQ ID NO: 79007 - RNA, 22 nt, Human
cccuccaccaagcagggcgcca

SEQ ID NO: 79008 - RNA, 22 nt, Human
cccuccagagccuggacauucu

SEQ ID NO: 79009 - RNA, 20 nt, Human
cccuccagcaaccaggacuu

SEQ ID NO: 79010 - RNA, 22 nt, Human
cccuccagccauggacccaggu

SEQ ID NO: 79011 - RNA, 22 nt, Human
cccuccccacaaagcuucacac

SEQ ID NO: 79012 - RNA, 22 nt, Human
cccuccccagggucauauugaa

SEQ ID NO: 79013 - RNA, 22 nt, Human
cccucccuuugucuuuaugaac

SEQ ID NO: 79014 - RNA, 22 nt, Human
cccucgagguuuucugagguac

SEQ ID NO: 79015 - RNA, 22 nt, Human
cccucucucaggcugacagccu

SEQ ID NO: 79016 - RNA, 22 nt, Human
cccucucuuagaagaaacacag

SEQ ID NO: 79017 - RNA, 22 nt, Human
cccucugacugggccaguucug

SEQ ID NO: 79018 - RNA, 22 nt, Human
cccucugccugcgcccuggugu

SEQ ID NO: 79019 - RNA, 19 nt, Human
cccucuugcacaaagcaaa

SEQ ID NO: 79020 - RNA, 22 nt, Human
gaaggcuuagaaacaagggagc

SEQ ID NO: 79021 - RNA, 22 nt, Human
gaaggcuuauuuucuuuguaaa

SEQ ID NO: 79022 - RNA, 22 nt, Human
gaaggcuucaaaagguguaauu

SEQ ID NO: 79023 - RNA, 21 nt, Human
gaaggcuucugccuggaggag

SEQ ID NO: 79024 - RNA, 22 nt, Human
gaaggcuugcaagugguucaua

SEQ ID NO: 79025 - RNA, 22 nt, Human
gaaggcuugcagcucuguggca

SEQ ID NO: 79026 - RNA, 22 nt, Human
gaaggcuuuagagagauauaaa

SEQ ID NO: 79027 - RNA, 22 nt, Human
gaaggcuuuuuggguaauugua

SEQ ID NO: 79028 - RNA, 22 nt, Human
gaagggaaauucagaucuucag

SEQ ID NO: 79029 - RNA, 22 nt, Human
gaagggcucaucagguggccgc

SEQ ID NO: 79030 - RNA, 18 nt, Human
gaagggcuuugaaguaga

SEQ ID NO: 79031 - RNA, 22 nt, Human
gaagggugcauggagggaaguc

SEQ ID NO: 79032 - RNA, 22 nt, Human
gaagggugugauuugccugaga

SEQ ID NO: 79033 - RNA, 22 nt, Human
gaaggugucuggcccagagucu

SEQ ID NO: 79034 - RNA, 22 nt, Human
gaagguuuacugaagauuuaaa

SEQ ID NO: 79035 - RNA, 17 nt, Human
gaagguuucucuuaggu

SEQ ID NO: 79036 - RNA, 22 nt, Human
gaaguacaaaggacauggaaac

SEQ ID NO: 79037 - RNA, 22 nt, Human
gaaguauagcagauguuauuua

SEQ ID NO: 79038 - RNA, 22 nt, Human
gaaguauaggagacaaacaaga

SEQ ID NO: 79039 - RNA, 22 nt, Human
gaaguauuucugaguugcccag

SEQ ID NO: 79040 - RNA, 22 nt, Human
gaagucagucaucuccugucuc

SEQ ID NO: 79041 - RNA, 22 nt, Human
gaagucaugcucccaucuugcu

SEQ ID NO: 79042 - RNA, 22 nt, Human
gaaguccagaauacugcucuga

SEQ ID NO: 79043 - RNA, 22 nt, Human
gaaguccgggaggaucauguuc

SEQ ID NO: 79044 - RNA, 20 nt, Human
gaaguccuuucacucuuccc

SEQ ID NO: 79045 - RNA, 22 nt, Human
gaagucuucaucugaugcucug

SEQ ID NO: 79046 - RNA, 22 nt, Human
gaagugggcuuuguggucagcu

SEQ ID NO: 79047 - RNA, 22 nt, Human
gaagugucuccguuuuuaaagg

SEQ ID NO: 79048 - RNA, 22 nt, Human
gaaguguuuuaguucuucaggu

SEQ ID NO: 79049 - RNA, 22 nt, Human
gaaguuaguguaaugcagggug

SEQ ID NO: 79050 - RNA, 22 nt, Human
gaaguuaucaggauuaaaguug

SEQ ID NO: 79051 - RNA, 22 nt, Human
gaaguuaugaaauuuggacagc

SEQ ID NO: 79052 - RNA, 22 nt, Human
gaaguuauuuccugguguugga

SEQ ID NO: 79053 - RNA, 22 nt, Human
gaaguucacauagcuggcaggu

SEQ ID NO: 79054 - RNA, 21 nt, Human
gaaguucaugaucuuucugcu

SEQ ID NO: 79055 - RNA, 22 nt, Human
gaaguucucuugggggccugag

SEQ ID NO: 79056 - RNA, 22 nt, Human
gaaguucugguguaugugauaa

SEQ ID NO: 79057 - RNA, 22 nt, Human
gaaguucuuuauagcaguguga

SEQ ID NO: 79058 - RNA, 22 nt, Human
gaaguuuagaagugacagguuu

SEQ ID NO: 79059 - RNA, 22 nt, Human
gaaguuuagaguuuggaguccu

SEQ ID NO: 79060 - RNA, 22 nt, Human
gaaguuuauuuuacacauccau

SEQ ID NO: 79061 - RNA, 22 nt, Human
gaauaaacuccucagcuuccuu

SEQ ID NO: 79062 - RNA, 22 nt, Human
gaauaacagcaaguuugcaggc

SEQ ID NO: 79063 - RNA, 17 nt, Human
gaauaaguggauggcac

SEQ ID NO: 79064 - RNA, 22 nt, Human
gaauaauauugacuuugcaggc

SEQ ID NO: 79065 - RNA, 22 nt, Human
gaauaaucauaucgucucacau

SEQ ID NO: 79066 - RNA, 22 nt, Human
gaauaaucaugaaauucaguga

SEQ ID NO: 79067 - RNA, 22 nt, Human
gaauaauugugaugcuugaagu

SEQ ID NO: 79068 - RNA, 22 nt, Human
gaauacaaacuuaaggcuuuac

SEQ ID NO: 79069 - RNA, 22 nt, Human
gaauacaaagcagaacucauac

SEQ ID NO: 79070 - RNA, 22 nt, Human
gaauacaagccugccaccugga

SEQ ID NO: 79071 - RNA, 22 nt, Human
gaauacacgaaggcaagagucc

SEQ ID NO: 79072 - RNA, 22 nt, Human
gaauacacgaauagagcauggu

SEQ ID NO: 79073 - RNA, 22 nt, Human
gaauacauccagagcagggcug

SEQ ID NO: 79074 - RNA, 22 nt, Human
gaauacauuugccgugguucuc

SEQ ID NO: 79075 - RNA, 22 nt, Human
gaauagaugaaagugucucuua

SEQ ID NO: 79076 - RNA, 22 nt, Human
gaauagcuuagauuccuuagug

SEQ ID NO: 79077 - RNA, 22 nt, Human
gaauagcuugacaauuauuuuu

SEQ ID NO: 79078 - RNA, 21 nt, Human
gaauaguucuguggcagcagu

SEQ ID NO: 79079 - RNA, 22 nt, Human
gaauauauuauucagcuuuuca

SEQ ID NO: 79080 - RNA, 22 nt, Human
gaauaucugucugguugaggaa

SEQ ID NO: 79081 - RNA, 22 nt, Human
gaauaucuuguacaucuaagua

SEQ ID NO: 79082 - RNA, 22 nt, Human
gaauaugaacuauuccuagccc

SEQ ID NO: 79083 - RNA, 22 nt, Human
gaauauuuucaguacagauggu

SEQ ID NO: 79084 - RNA, 22 nt, Human
gaaucaaaucaaguucuuuuga

SEQ ID NO: 79085 - RNA, 22 nt, Human
gaaucauuggaaccacauccaa

SEQ ID NO: 79086 - RNA, 22 nt, Human
gaauccgggaggcaaaaguugc

SEQ ID NO: 79087 - RNA, 22 nt, Human
gaaucucaaauuaagaauuuua

SEQ ID NO: 79088 - RNA, 22 nt, Human
gaaucucaaggcuugugaggau

SEQ ID NO: 79089 - RNA, 22 nt, Human
gaaucucaggaagaucucugca

SEQ ID NO: 79090 - RNA, 22 nt, Human
gaaucuuaaaucggaaucuuaa

SEQ ID NO: 79091 - RNA, 22 nt, Human
gaaucuuauccccaguccuuaa

SEQ ID NO: 79092 - RNA, 22 nt, Human
gaaucuuauuuuuaaaucuucc

SEQ ID NO: 79093 - RNA, 22 nt, Human
gaaucuuuuuucuugccaggca

SEQ ID NO: 79094 - RNA, 22 nt, Human
gaaugaaaaccuuggcucaaau

SEQ ID NO: 79095 - RNA, 22 nt, Human
ccugcagagggacuggcaggaa

SEQ ID NO: 79096 - RNA, 22 nt, Human
ccugcagaugugggacagcugu

SEQ ID NO: 79097 - RNA, 22 nt, Human
ccugcagcagcugaaaucacag

SEQ ID NO: 79098 - RNA, 22 nt, Human
ccugcagccguccuguuugucu

SEQ ID NO: 79099 - RNA, 22 nt, Human
ccugcagcuguaggagaaggcg

SEQ ID NO: 79100 - RNA, 19 nt, Human
ccugcagggaugagagguu

SEQ ID NO: 79101 - RNA, 22 nt, Human
ccugccacuguaggugacaguu

SEQ ID NO: 79102 - RNA, 22 nt, Human
ccugccagaaaagagggaguuc

SEQ ID NO: 79103 - RNA, 22 nt, Human
ccugccagacgcaccagggggc

SEQ ID NO: 79104 - RNA, 22 nt, Human
ccugccaggacauugcuugaag

SEQ ID NO: 79105 - RNA, 22 nt, Human
ccugccaggcgagucuaggcca

SEQ ID NO: 79106 - RNA, 22 nt, Human
ccugccagugaagcugacgggc

SEQ ID NO: 79107 - RNA, 22 nt, Human
ccugccagugccucccacuggu

SEQ ID NO: 79108 - RNA, 22 nt, Human
ccugccaugccagcaugcccgu

SEQ ID NO: 79109 - RNA, 22 nt, Human
ccugcccacugcccggucagcc

SEQ ID NO: 79110 - RNA, 22 nt, Human
ccugcccagcuucaccucaggc

SEQ ID NO: 79111 - RNA, 22 nt, Human
ccugcccaggcccuaaguuagg

SEQ ID NO: 79112 - RNA, 22 nt, Human
ccugcccaucccguccuuggcc

SEQ ID NO: 79113 - RNA, 22 nt, Human
ccugcccuguguuuggggacua

SEQ ID NO: 79114 - RNA, 22 nt, Human
ccugccucaucaacuugucgug

SEQ ID NO: 79115 - RNA, 22 nt, Human
ccugccugaaggucagccaccc

SEQ ID NO: 79116 - RNA, 22 nt, Human
ccugccugcguccucugagggc

SEQ ID NO: 79117 - RNA, 22 nt, Human
ccugccuggcccaccuugccac

SEQ ID NO: 79118 - RNA, 22 nt, Human
ccugccuggggacaaaggaggg

SEQ ID NO: 79119 - RNA, 22 nt, Human
ccugccuggguucaaaucccag

SEQ ID NO: 79120 - RNA, 22 nt, Human
ccugccugucaucgccugcgcc

SEQ ID NO: 79121 - RNA, 22 nt, Human
ccugccuuccagccuugggcuc

SEQ ID NO: 79122 - RNA, 22 nt, Human
ccugcgggcugguaagaggcuu

SEQ ID NO: 79123 - RNA, 22 nt, Human
ccugcgucgugugggcagugac

SEQ ID NO: 79124 - RNA, 22 nt, Human
ccugcucaacgaauauggcgau

SEQ ID NO: 79125 - RNA, 22 nt, Human
ccugcucagccccagcucaccc

SEQ ID NO: 79126 - RNA, 23 nt, Human
ccugcucaggcgugugcccugcu

SEQ ID NO: 79127 - RNA, 22 nt, Human
ccugcucccgggacgcguucac

SEQ ID NO: 79128 - RNA, 22 nt, Human
ccugcuccugcuauucuucugg

SEQ ID NO: 79129 - RNA, 22 nt, Human
ccugcucggggugcagugggcu

SEQ ID NO: 79130 - RNA, 22 nt, Human
ccugcucuccauacacuuucua

SEQ ID NO: 79131 - RNA, 22 nt, Human
ccugcugagacccugagguggg

SEQ ID NO: 79132 - RNA, 19 nt, Human
ccugcugcaccacuuguua

SEQ ID NO: 79133 - RNA, 22 nt, Human
ccugcugcuaugaaggugacag

SEQ ID NO: 79134 - RNA, 22 nt, Human
ccugcuggcgcuugucugggag

SEQ ID NO: 79135 - RNA, 22 nt, Human
gaauucuuugaucuuaaucuug

SEQ ID NO: 79136 - RNA, 22 nt, Human
gaauucuuuucuuucugaaagu

SEQ ID NO: 79137 - RNA, 22 nt, Human
gaauugauugauauguacugua

SEQ ID NO: 79138 - RNA, 22 nt, Human
gaauugcuagcgcaccaauucu

SEQ ID NO: 79139 - RNA, 22 nt, Human
gaauugcuaggcugcauguguc

SEQ ID NO: 79140 - RNA, 22 nt, Human
gaauugcugaaucauauguuua

SEQ ID NO: 79141 - RNA, 22 nt, Human
gaauugcuugcugagauuaaag

SEQ ID NO: 79142 - RNA, 22 nt, Human
gaauuggggguuuugcaaggca

SEQ ID NO: 79143 - RNA, 22 nt, Human
gaauuguaaguaccagcaugcu

SEQ ID NO: 79144 - RNA, 22 nt, Human
gaauuguacugcaaucagggga

SEQ ID NO: 79145 - RNA, 21 nt, Human
gaauugugccccuugguguug

SEQ ID NO: 79146 - RNA, 22 nt, Human
gaauuuacagggugagcuucag

SEQ ID NO: 79147 - RNA, 19 nt, Human
gaauuuaucucuucagucc

SEQ ID NO: 79148 - RNA, 22 nt, Human
gaauuucaaaagccagaacggg

SEQ ID NO: 79149 - RNA, 22 nt, Human
gaauuucauugcucugcugugu

SEQ ID NO: 79150 - RNA, 22 nt, Human
gaauuuccucuaaaccccugag

SEQ ID NO: 79151 - RNA, 22 nt, Human
gaauuuuaauaaagguuuauca

SEQ ID NO: 79152 - RNA, 22 nt, Human
gaauuuucagguagcaauuuca

SEQ ID NO: 79153 - RNA, 22 nt, Human
gacaaaacacauuaguuuaaaa

SEQ ID NO: 79154 - RNA, 21 nt, Human
gacaaacauuucauagcuuua

SEQ ID NO: 79155 - RNA, 22 nt, Human
gacaaacugaaguauauuuaga

SEQ ID NO: 79156 - RNA, 22 nt, Human
gacaaagcuuuggcauccuuac

SEQ ID NO: 79157 - RNA, 22 nt, Human
gacaaaggaucagagguuggga

SEQ ID NO: 79158 - RNA, 21 nt, Human
gacaaagugaagcaggcagga

SEQ ID NO: 79159 - RNA, 22 nt, Human
gacaaauaggucaacaggaggg

SEQ ID NO: 79160 - RNA, 22 nt, Human
gacaacacauguaugccacucu

SEQ ID NO: 79161 - RNA, 22 nt, Human
gacaacugagcagaggaaauga

SEQ ID NO: 79162 - RNA, 17 nt, Human
gacaagacagaauucau

SEQ ID NO: 79163 - RNA, 22 nt, Human
gacaagcucgccugccccggaa

SEQ ID NO: 79164 - RNA, 22 nt, Human
gacaagcucuuguuucaugguu

SEQ ID NO: 79165 - RNA, 22 nt, Human
gacaaggagccaccagucacgu

SEQ ID NO: 79166 - RNA, 22 nt, Human
gacaaggcagaaagcuuaaagg

SEQ ID NO: 79167 - RNA, 22 nt, Human
gacaaguuacaccugugcuuga

SEQ ID NO: 79168 - RNA, 22 nt, Human
gacaauaaagugauacauggga

SEQ ID NO: 79169 - RNA, 22 nt, Human
gacaaugcauugugauugugac

SEQ ID NO: 79170 - RNA, 22 nt, Human
gacaauuagaucauuccuuuga

SEQ ID NO: 79171 - RNA, 22 nt, Human
gacaauuucucaauauagaaac

SEQ ID NO: 79172 - RNA, 22 nt, Human
gacacaaaguuugucagaaauu

SEQ ID NO: 79173 - RNA, 22 nt, Human
gacacagaaugggugcucagua

SEQ ID NO: 79174 - RNA, 22 nt, Human
gacacagagauaggccuguguu

SEQ ID NO: 79175 - RNA, 22 nt, Human
gacacagaguauuuuaaguacu

SEQ ID NO: 79176 - RNA, 22 nt, Human
gacacagauaucucugagauua

SEQ ID NO: 79177 - RNA, 22 nt, Human
gacacagcuaauggcuuaggac

SEQ ID NO: 79178 - RNA, 22 nt, Human
gacacaggaaaagcuccagccc

SEQ ID NO: 79179 - RNA, 22 nt, Human
gacacaggggggcgcuagaaga

SEQ ID NO: 79180 - RNA, 22 nt, Human
gacacaguucccuaugagguaa

SEQ ID NO: 79181 - RNA, 16 nt, Human
gacacaugggggaaaa

SEQ ID NO: 79182 - RNA, 22 nt, Human
gacaccagagacugaugaggcc

SEQ ID NO: 79183 - RNA, 22 nt, Human
gacaccagcaaggcugugagga

SEQ ID NO: 79184 - RNA, 22 nt, Human
gacaccaggaauaguucugucu

SEQ ID NO: 79185 - RNA, 23 nt, Human
gacaccaggcguggcccucgaca

SEQ ID NO: 79186 - RNA, 23 nt, Human
gacaccuuugccagaucaagaug

SEQ ID NO: 79187 - RNA, 22 nt, Human
gacacuaaaguauaggguaucu

SEQ ID NO: 79188 - RNA, 22 nt, Human
gacacuccagcuuuuggcucaa

SEQ ID NO: 79189 - RNA, 22 nt, Human
gacacugaccccaagcuguccu

SEQ ID NO: 79190 - RNA, 22 nt, Human
gacacugucccacagaauucga

SEQ ID NO: 79191 - RNA, 22 nt, Human
gacacuuucucagguaaagcau

SEQ ID NO: 79192 - RNA, 22 nt, Human
gacagaaggcaucuagggcacg

SEQ ID NO: 79193 - RNA, 22 nt, Human
gacagaauuuuccaucaugugg

SEQ ID NO: 79194 - RNA, 22 nt, Human
gacagacacaauugauccauga

SEQ ID NO: 79195 - RNA, 22 nt, Human
gacagacacagggccaugauug

SEQ ID NO: 79196 - RNA, 22 nt, Human
gacagacacuauugguaugccu

SEQ ID NO: 79197 - RNA, 22 nt, Human
gacagacagagaaugggcuuga

SEQ ID NO: 79198 - RNA, 22 nt, Human
gacagacaggaggccaccugcu

SEQ ID NO: 79199 - RNA, 22 nt, Human
gacagacaugggacuucauacu

SEQ ID NO: 79200 - RNA, 22 nt, Human
gacagacauuuccugauccaau

SEQ ID NO: 79201 - RNA, 22 nt, Human
gacagaggagaagaugcugugg

SEQ ID NO: 79202 - RNA, 22 nt, Human
gacagaggguuccaaaauugau

SEQ ID NO: 79203 - RNA, 23 nt, Human
gacagagugagaccuugucuuac

SEQ ID NO: 79204 - RNA, 22 nt, Human
ccuguggcuuccacgaccuaau

SEQ ID NO: 79205 - RNA, 22 nt, Human
ccugugggagggagcggcugga

SEQ ID NO: 79206 - RNA, 22 nt, Human
ccugugggcgcagcuggaguca

SEQ ID NO: 79207 - RNA, 22 nt, Human
ccuguggguacaacagggucac

SEQ ID NO: 79208 - RNA, 22 nt, Human
ccugugucaucagcuguggcua

SEQ ID NO: 79209 - RNA, 22 nt, Human
ccuguguccuaauccaucaggc

SEQ ID NO: 79210 - RNA, 22 nt, Human
ccuguguccuuggcagauaucc

SEQ ID NO: 79211 - RNA, 22 nt, Human
ccugugucugaccaugcacaug

SEQ ID NO: 79212 - RNA, 23 nt, Human
ccugugucuguugcugaauaaug

SEQ ID NO: 79213 - RNA, 22 nt, Human
ccugugugaagguuaggcaggu

SEQ ID NO: 79214 - RNA, 23 nt, Human
ccugugugcccuuaauucacagc

SEQ ID NO: 79215 - RNA, 22 nt, Human
ccugugugccuggccgcgggag

SEQ ID NO: 79216 - RNA, 18 nt, Human
ccuguguguguugcaggc

SEQ ID NO: 79217 - RNA, 22 nt, Human
ccuguguuaguuaugggucucu

SEQ ID NO: 79218 - RNA, 22 nt, Human
ccuguguucuaauccaucucag

SEQ ID NO: 79219 - RNA, 19 nt, Human
ccuguguugggagugugag

SEQ ID NO: 79220 - RNA, 22 nt, Human
ccuguucaagguauuaauuauc

SEQ ID NO: 79221 - RNA, 22 nt, Human
ccuguucaaguugcagggcugg

SEQ ID NO: 79222 - RNA, 22 nt, Human
ccuguucauuuguauuugucuu

SEQ ID NO: 79223 - RNA, 20 nt, Human
ccuguuccauucccucaacc

SEQ ID NO: 79224 - RNA, 22 nt, Human
ccuguugucauggaauaaguua

SEQ ID NO: 79225 - RNA, 22 nt, Human
ccuguuguggaaaaagccugau

SEQ ID NO: 79226 - RNA, 22 nt, Human
ccuguuuaccacugaggggcag

SEQ ID NO: 79227 - RNA, 22 nt, Human
ccuuagaaaaucauggaauauu

SEQ ID NO: 79228 - RNA, 22 nt, Human
ccuuagaagaaaguuacuuuuu

SEQ ID NO: 79229 - RNA, 22 nt, Human
ccuuagaaggcugaauaauucu

SEQ ID NO: 79230 - RNA, 22 nt, Human
ccuuagcauggcugugcugugu

SEQ ID NO: 79231 - RNA, 22 nt, Human
ccuuagcauuagaagcuguggg

SEQ ID NO: 79232 - RNA, 22 nt, Human
ccuucaaguuccuggucccugg

SEQ ID NO: 79233 - RNA, 22 nt, Human
ccuucaaucuuaagucagccca

SEQ ID NO: 79234 - RNA, 22 nt, Human
ccuucacaccaucuuuaccagg

SEQ ID NO: 79235 - RNA, 22 nt, Human
ccuucacacuuucacuuggaua

SEQ ID NO: 79236 - RNA, 23 nt, Human
ccuucagaagaaguaacaggggc

SEQ ID NO: 79237 - RNA, 22 nt, Human
ccuucagccuagaacuugagag

SEQ ID NO: 79238 - RNA, 22 nt, Human
ccuucagccucaagauccuuca

SEQ ID NO: 79239 - RNA, 22 nt, Human
ccuucagccuucauccuuccuu

SEQ ID NO: 79240 - RNA, 22 nt, Human
ccuucagccuuuguuuaucaga

SEQ ID NO: 79241 - RNA, 18 nt, Human
ccuucagcucugccagua

SEQ ID NO: 79242 - RNA, 18 nt, Human
ccuucagcucugguuuuc

SEQ ID NO: 79243 - RNA, 22 nt, Human
ccuuccagccccaucucaucgu

SEQ ID NO: 79244 - RNA, 22 nt, Human
ccuuccaguucuugguuguaau

SEQ ID NO: 79245 - RNA, 22 nt, Human
ccuuccuggagcccaugcagau

SEQ ID NO: 79246 - RNA, 22 nt, Human
ccuuccuucaagcacacaucua

SEQ ID NO: 79247 - RNA, 22 nt, Human
ccuuccuugagaagcaauuccu

SEQ ID NO: 79248 - RNA, 22 nt, Human
ccuucuagccugcgccagggca

SEQ ID NO: 79249 - RNA, 20 nt, Human
ccuucuccagcuuguucuug

SEQ ID NO: 79250 - RNA, 22 nt, Human
ccuucuccccucugcagggugu

SEQ ID NO: 79251 - RNA, 22 nt, Human
ccuucucuaccaugugaggaaa

SEQ ID NO: 79252 - RNA, 22 nt, Human
ccuucugagcuucaauuucagu

SEQ ID NO: 79253 - RNA, 22 nt, Human
ccuucugcucccuggccagggc

SEQ ID NO: 79254 - RNA, 22 nt, Human
ccuucugucucccucauauuga

SEQ ID NO: 79255 - RNA, 22 nt, Human
ccuucugugugcccacguuuau

SEQ ID NO: 79256 - RNA, 22 nt, Human
ccuucuugagguagcacauucu

SEQ ID NO: 79257 - RNA, 22 nt, Human
ccuugaaaugagaaaaaguugg

SEQ ID NO: 79258 - RNA, 22 nt, Human
ccuugagaggaaguuuguagaa

SEQ ID NO: 79259 - RNA, 22 nt, Human
ccuugcauuuaaaggcguaggg

SEQ ID NO: 79260 - RNA, 22 nt, Human
ccuugcccugagcaggggucag

SEQ ID NO: 79261 - RNA, 22 nt, Human
ccuugccucauugugcuucucc

SEQ ID NO: 79262 - RNA, 22 nt, Human
ccuugccuugguccuucgcagg

SEQ ID NO: 79263 - RNA, 22 nt, Human
ccuugcucucccaagcccgcag

SEQ ID NO: 79264 - RNA, 22 nt, Human
ccuugcuguuagccuacauuau

SEQ ID NO: 79265 - RNA, 22 nt, Human
ccuuggagaccugggucugugc

SEQ ID NO: 79266 - RNA, 22 nt, Human
ccuuggcaagacaguggagggu

SEQ ID NO: 79267 - RNA, 16 nt, Human
ccuuggcaucagcugu

SEQ ID NO: 79268 - RNA, 22 nt, Human
ccuuggcauccucugaagaaau

SEQ ID NO: 79269 - RNA, 22 nt, Human
ccuuggcugugcugcccuuugc

SEQ ID NO: 79270 - RNA, 22 nt, Human
gagccagccuucuucugagguc

SEQ ID NO: 79271 - RNA, 22 nt, Human
gagccagcuauguagcaagagg

SEQ ID NO: 79272 - RNA, 22 nt, Human
gagccaggaggcagagacugca

SEQ ID NO: 79273 - RNA, 22 nt, Human
gagccaggguuugaaacuagac

SEQ ID NO: 79274 - RNA, 22 nt, Human
gagcccagcuaaauuuauauaa

SEQ ID NO: 79275 - RNA, 22 nt, Human
gagcccagcuugcacauggagc

SEQ ID NO: 79276 - RNA, 22 nt, Human
gagcccaggcagagguugcagu

SEQ ID NO: 79277 - RNA, 22 nt, Human
gagcccagggcaggcaaggcag

SEQ ID NO: 79278 - RNA, 22 nt, Human
gagcccucaccgccugaccagg

SEQ ID NO: 79279 - RNA, 22 nt, Human
gagcccucauugaaucugcauu

SEQ ID NO: 79280 - RNA, 22 nt, Human
gagcccucucuguaggcaagua

SEQ ID NO: 79281 - RNA, 22 nt, Human
gagcccucuucccuagugaucg

SEQ ID NO: 79282 - RNA, 22 nt, Human
gagcccugacacugagggaguu

SEQ ID NO: 79283 - RNA, 18 nt, Human
gagcccugagucugcaca

SEQ ID NO: 79284 - RNA, 22 nt, Human
gagcccugcugggccuugucuc

SEQ ID NO: 79285 - RNA, 22 nt, Human
gagcccuggcagucugggaugg

SEQ ID NO: 79286 - RNA, 22 nt, Human
gagccugaauuugaccugcuua

SEQ ID NO: 79287 - RNA, 22 nt, Human
gagccugagugcugccuccccu

SEQ ID NO: 79288 - RNA, 22 nt, Human
gagccugcgagggaguaaggca

SEQ ID NO: 79289 - RNA, 22 nt, Human
gagccuggauagccuuguucca

SEQ ID NO: 79290 - RNA, 20 nt, Human
gagccugggaagucuaaggu

SEQ ID NO: 79291 - RNA, 22 nt, Human
gagccuggggacccuccugagu

SEQ ID NO: 79292 - RNA, 22 nt, Human
gagccuggguccuucccuggga

SEQ ID NO: 79293 - RNA, 22 nt, Human
gagccuguguuuccuguagcca

SEQ ID NO: 79294 - RNA, 21 nt, Human
gagccuucccucugcccuuuc

SEQ ID NO: 79295 - RNA, 22 nt, Human
gagcuaagaccugagggcaagu

SEQ ID NO: 79296 - RNA, 22 nt, Human
gagcuaagcccuggagaggucg

SEQ ID NO: 79297 - RNA, 22 nt, Human
gagcuaagcuauguuaugcagc

SEQ ID NO: 79298 - RNA, 22 nt, Human
gagcuagacagcaagggccugc

SEQ ID NO: 79299 - RNA, 22 nt, Human
gagcuagaguuuguaggguaga

SEQ ID NO: 79300 - RNA, 22 nt, Human
gagcuaggauaucaugagggua

SEQ ID NO: 79301 - RNA, 22 nt, Human
gagcuagggaggaggcuugcuc

SEQ ID NO: 79302 - RNA, 22 nt, Human
gagcuagguuuuccagucgcau

SEQ ID NO: 79303 - RNA, 22 nt, Human
gagcucagacucgggccugggg

SEQ ID NO: 79304 - RNA, 22 nt, Human
gagcucagcacuaaaaucaugu

SEQ ID NO: 79305 - RNA, 18 nt, Human
gagcucagcguguuucua

SEQ ID NO: 79306 - RNA, 23 nt, Human
gagcucagguagggcucgcccgc

SEQ ID NO: 79307 - RNA, 22 nt, Human
gagcucagguggucaaaacaau

SEQ ID NO: 79308 - RNA, 22 nt, Human
gagcucaguguagucauggcuu

SEQ ID NO: 79309 - RNA, 22 nt, Human
gagcuccacuuagcaaggccac

SEQ ID NO: 79310 - RNA, 22 nt, Human
gagcuccagggaacagcagcua

SEQ ID NO: 79311 - RNA, 22 nt, Human
gagcucccaggccccagcaagg

SEQ ID NO: 79312 - RNA, 22 nt, Human
gagcuccugcugcauccugccu

SEQ ID NO: 79313 - RNA, 22 nt, Human
ccuggguccaauucuggcuugu

SEQ ID NO: 79314 - RNA, 22 nt, Human
ccugggucccagccaggcuuug

SEQ ID NO: 79315 - RNA, 22 nt, Human
ccugggugaaauaguccucaag

SEQ ID NO: 79316 - RNA, 22 nt, Human
ccugggugaaaucucuccugca

SEQ ID NO: 79317 - RNA, 22 nt, Human
ccuggguggcugccugccuuuc

SEQ ID NO: 79318 - RNA, 22 nt, Human
ccugggugguuccggcaaggag

SEQ ID NO: 79319 - RNA, 22 nt, Human
ccuggucaccccucucucugca

SEQ ID NO: 79320 - RNA, 22 nt, Human
ccuggugcagguguguugccag

SEQ ID NO: 79321 - RNA, 22 nt, Human
ccuggugccgguagacgcgcag

SEQ ID NO: 79322 - RNA, 22 nt, Human
ccuggugcuuaccagagcuuuu

SEQ ID NO: 79323 - RNA, 22 nt, Human
ccugguggacagcagccagcag

SEQ ID NO: 79324 - RNA, 22 nt, Human
ccugguguugugaaguagccgu

SEQ ID NO: 79325 - RNA, 22 nt, Human
ccugguugagggagguguggac

SEQ ID NO: 79326 - RNA, 22 nt, Human
ccugguugugaguugaguugag

SEQ ID NO: 79327 - RNA, 22 nt, Human
ccuguaaguaguuugccugagc

SEQ ID NO: 79328 - RNA, 22 nt, Human
ccuguacaagcucuuggugaca

SEQ ID NO: 79329 - RNA, 22 nt, Human
ccuguacacggucuaugccucc

SEQ ID NO: 79330 - RNA, 22 nt, Human
ccuguacuuguauuaaaggucc

SEQ ID NO: 79331 - RNA, 22 nt, Human
ccuguaggcgagggauggacag

SEQ ID NO: 79332 - RNA, 22 nt, Human
ccuguauuugcuuccuucugca

SEQ ID NO: 79333 - RNA, 22 nt, Human
ccugucacauauuugcuguuca

SEQ ID NO: 79334 - RNA, 22 nt, Human
ccugucacucugagccgcuccg

SEQ ID NO: 79335 - RNA, 22 nt, Human
ccugucagccccacuucugccu

SEQ ID NO: 79336 - RNA, 22 nt, Human
ccugucccaagcagggcuggcc

SEQ ID NO: 79337 - RNA, 22 nt, Human
ccuguccuccggagcgggcugu

SEQ ID NO: 79338 - RNA, 22 nt, Human
ccugucuacauaacugugugaa

SEQ ID NO: 79339 - RNA, 22 nt, Human
ccugucuaccagucacuuagcg

SEQ ID NO: 79340 - RNA, 22 nt, Human
ccugucuaucaagacaucuuca

SEQ ID NO: 79341 - RNA, 20 nt, Human
ccugucucacguuccgcccc

SEQ ID NO: 79342 - RNA, 20 nt, Human
ccugucuccucuuaccuggc

SEQ ID NO: 79343 - RNA, 22 nt, Human
ccugucucugcagggcccugcc

SEQ ID NO: 79344 - RNA, 22 nt, Human
ccugucucuguuaccacauuug

SEQ ID NO: 79345 - RNA, 20 nt, Human
ccugucugcaauggagguca

SEQ ID NO: 79346 - RNA, 22 nt, Human
ccugugaaugcauuaaugagug

SEQ ID NO: 79347 - RNA, 22 nt, Human
ccugugacauuagaauuucauu

SEQ ID NO: 79348 - RNA, 22 nt, Human
ccugugacucugucugaugguc

SEQ ID NO: 79349 - RNA, 22 nt, Human
ccugugacuuggcaaaccucca

SEQ ID NO: 79350 - RNA, 22 nt, Human
ccugugauauuguucauaauau

SEQ ID NO: 79351 - RNA, 22 nt, Human
ccugugcaggcuccauaauaga

SEQ ID NO: 79352 - RNA, 22 nt, Human
ccugugcauugaguuugcaccc

SEQ ID NO: 79353 - RNA, 22 nt, Human
ccugugccaaaaggcugcuuau

SEQ ID NO: 79354 - RNA, 22 nt, Human
ccugugccagccccuucugcug

SEQ ID NO: 79355 - RNA, 22 nt, Human
ccugugcccuacaccuuuccag

SEQ ID NO: 79356 - RNA, 22 nt, Human
ccugugcccucagccuggcucu

SEQ ID NO: 79357 - RNA, 22 nt, Human
ccugugcccugccaggcuggug

SEQ ID NO: 79358 - RNA, 22 nt, Human
ccugugcccuggaaggagagag

SEQ ID NO: 79359 - RNA, 22 nt, Human
ccugugccugccugugaguucu

SEQ ID NO: 79360 - RNA, 22 nt, Human
ccugugccuuccuuaggcaccu

SEQ ID NO: 79361 - RNA, 19 nt, Human
ccugugcuaggagcugacc

SEQ ID NO: 79362 - RNA, 21 nt, Human
ccugugcuccacacagggucc

SEQ ID NO: 79363 - RNA, 22 nt, Human
ccugugcucccauagcuucugu

SEQ ID NO: 79364 - RNA, 20 nt, Human
ccugugcuuaucacuugcug

SEQ ID NO: 79365 - RNA, 22 nt, Human
ccugugcuucacucaacaagcc

SEQ ID NO: 79366 - RNA, 22 nt, Human
ccuguggaauagaaucuucccu

SEQ ID NO: 79367 - RNA, 20 nt, Human
ccuguggagcugccuccucc

SEQ ID NO: 79368 - RNA, 22 nt, Human
ccuguggaggcugcucagcugg

SEQ ID NO: 79369 - RNA, 22 nt, Human
ccuguggccgcgucgggcggcg

SEQ ID NO: 79370 - RNA, 22 nt, Human
ccuguggccugaauuugguaaa

SEQ ID NO: 79371 - RNA, 20 nt, Human
ccuguggcucuuguaauuca

SEQ ID NO: 79372 - RNA, 22 nt, Human
ccuguggcugccccgcuguugg

SEQ ID NO: 79373 - RNA, 22 nt, Human
ccuguggcuggucaggccagca

SEQ ID NO: 79374 - RNA, 22 nt, Human
ccugugggagcccaggcagaua

SEQ ID NO: 79375 - RNA, 22 nt, Human
ccugugggaggggccuggcgcg

SEQ ID NO: 79376 - RNA, 22 nt, Human
ccugugggccaaggaccugcca

SEQ ID NO: 79377 - RNA, 22 nt, Human
ccugugggucacaugggugacu

SEQ ID NO: 79378 - RNA, 22 nt, Human
ccugugguuuacaugacaguua

SEQ ID NO: 79379 - RNA, 22 nt, Human
ccugugguuuacucuguggcua

SEQ ID NO: 79380 - RNA, 19 nt, Human
ccugugucccacguagaug

SEQ ID NO: 79381 - RNA, 22 nt, Human
ccugugugauuggaagcugaga

SEQ ID NO: 79382 - RNA, 22 nt, Human
ccuguguggaaaccgcaugacg

SEQ ID NO: 79383 - RNA, 20 nt, Human
ccuguguggccagcugaggc

SEQ ID NO: 79384 - RNA, 20 nt, Human
ccugugugguuugcacuaca

SEQ ID NO: 79385 - RNA, 22 nt, Human
ccuguguuucaccaaaagaguc

SEQ ID NO: 79386 - RNA, 22 nt, Human
ccuguucacccuccaugcacag

SEQ ID NO: 79387 - RNA, 20 nt, Human
ccuguucacugcgcaguuuc

SEQ ID NO: 79388 - RNA, 22 nt, Human
ccuguucacuuugacuucucca

SEQ ID NO: 79389 - RNA, 22 nt, Human
ccuguucaugaaacugcuuucc

SEQ ID NO: 79390 - RNA, 22 nt, Human
gaggaaugggugucucgugauu

SEQ ID NO: 79391 - RNA, 21 nt, Human
gaggaaugguuugcaaagcac

SEQ ID NO: 79392 - RNA, 22 nt, Human
gaggacaaagcccaggugcugg

SEQ ID NO: 79393 - RNA, 22 nt, Human
gaggacaagcugugaguggggu

SEQ ID NO: 79394 - RNA, 22 nt, Human
gaggacaaggccuugcaauucu

SEQ ID NO: 79395 - RNA, 23 nt, Human
gaggacacagcccagacagccgu

SEQ ID NO: 79396 - RNA, 22 nt, Human
gaggacaggagacucacuguuu

SEQ ID NO: 79397 - RNA, 22 nt, Human
gaggacauaguggacuaggguu

SEQ ID NO: 79398 - RNA, 22 nt, Human
gaggaccacagaugagccugca

SEQ ID NO: 79399 - RNA, 22 nt, Human
gaggacgugccaggcgaucucc

SEQ ID NO: 79400 - RNA, 22 nt, Human
gaggacucugggcguguauggg

SEQ ID NO: 79401 - RNA, 21 nt, Human
gaggacugcacacucugauug

SEQ ID NO: 79402 - RNA, 22 nt, Human
gaggagaaagcagugauuugug

SEQ ID NO: 79403 - RNA, 22 nt, Human
gaggagaaauuuggggaccuga

SEQ ID NO: 79404 - RNA, 22 nt, Human
gaggagagagggacugucugca

SEQ ID NO: 79405 - RNA, 22 nt, Human
gaggagaggccaucguuguuau

SEQ ID NO: 79406 - RNA, 22 nt, Human
gaggagaggggcucccaagagc

SEQ ID NO: 79407 - RNA, 22 nt, Human
gaggagcaugggaaggcucugg

SEQ ID NO: 79408 - RNA, 22 nt, Human
gaggagccaagguauguguguu

SEQ ID NO: 79409 - RNA, 22 nt, Human
gaggagccauagauagugcugc

SEQ ID NO: 79410 - RNA, 22 nt, Human
gaggagcccagcaccaucacuu

SEQ ID NO: 79411 - RNA, 22 nt, Human
gaggagcccuguuccccaggcc

SEQ ID NO: 79412 - RNA, 18 nt, Human
gaggagccgucccuacua

SEQ ID NO: 79413 - RNA, 17 nt, Human
gaggagcuccaguaggu

SEQ ID NO: 79414 - RNA, 22 nt, Human
gaggagcugaggcugaggccuc

SEQ ID NO: 79415 - RNA, 22 nt, Human
gaggagcugggucagggagaca

SEQ ID NO: 79416 - RNA, 22 nt, Human
gaggaggcacuaguuagugaca

SEQ ID NO: 79417 - RNA, 22 nt, Human
gaggaggcuguuucucugcauu

SEQ ID NO: 79418 - RNA, 22 nt, Human
gaggaggggacaguacuugugc

SEQ ID NO: 79419 - RNA, 23 nt, Human
gaggagggucgugcuguguuccu

SEQ ID NO: 79420 - RNA, 22 nt, Human
gaggagguugacggcacuguga

SEQ ID NO: 79421 - RNA, 22 nt, Human
gaggaucauuugagccuaggag

SEQ ID NO: 79422 - RNA, 22 nt, Human
ccuuccccagugauucucucag

SEQ ID NO: 79423 - RNA, 19 nt, Human
ccuuccccuucagccucug

SEQ ID NO: 79424 - RNA, 22 nt, Human
ccuucccuaaagcgucgcuuag

SEQ ID NO: 79425 - RNA, 22 nt, Human
ccuuccuugucuacaaaagcuc

SEQ ID NO: 79426 - RNA, 22 nt, Human
ccuuccuuucagggcuaugccu

SEQ ID NO: 79427 - RNA, 22 nt, Human
ccuucgagauuuaaacacugau

SEQ ID NO: 79428 - RNA, 22 nt, Human
ccuucuagcaaaucaacauaaa

SEQ ID NO: 79429 - RNA, 21 nt, Human
ccuucuccauuacaguaagcu

SEQ ID NO: 79430 - RNA, 22 nt, Human
ccuucucuacuccugaugcaug

SEQ ID NO: 79431 - RNA, 21 nt, Human
ccuucucuugcuucagcuuca

SEQ ID NO: 79432 - RNA, 22 nt, Human
ccuucugcuggucaucccagug

SEQ ID NO: 79433 - RNA, 22 nt, Human
ccuucuggaagcucuaagggag

SEQ ID NO: 79434 - RNA, 22 nt, Human
ccuucuggaugugcuaaggaag

SEQ ID NO: 79435 - RNA, 23 nt, Human
ccuucuguuaaccaucugggggg

SEQ ID NO: 79436 - RNA, 22 nt, Human
ccuugaaaccacaucuuagaaa

SEQ ID NO: 79437 - RNA, 22 nt, Human
ccuugaaacccugacacucugu

SEQ ID NO: 79438 - RNA, 22 nt, Human
ccuugaaauguucucacugggg

SEQ ID NO: 79439 - RNA, 22 nt, Human
ccuugaaucucugcucuagaac

SEQ ID NO: 79440 - RNA, 22 nt, Human
ccuugagccagggagcuggcag

SEQ ID NO: 79441 - RNA, 22 nt, Human
ccuugaggaguccauaguauca

SEQ ID NO: 79442 - RNA, 22 nt, Human
ccuugauggugagagcugcaga

SEQ ID NO: 79443 - RNA, 22 nt, Human
ccuugcagacaucaguaguggc

SEQ ID NO: 79444 - RNA, 22 nt, Human
ccuugcguuuuacagcuucuag

SEQ ID NO: 79445 - RNA, 22 nt, Human
ccuugcucggggagcugcagga

SEQ ID NO: 79446 - RNA, 22 nt, Human
ccuugcugcgugcuagcacaga

SEQ ID NO: 79447 - RNA, 22 nt, Human
ccuuggaguucuguuuggcuua

SEQ ID NO: 79448 - RNA, 22 nt, Human
ccuuggcaguggagugaggugg

SEQ ID NO: 79449 - RNA, 22 nt, Human
ccuuggcuugugggcugcagcc

SEQ ID NO: 79450 - RNA, 22 nt, Human
ccuugggacagccagcuucaga

SEQ ID NO: 79451 - RNA, 22 nt, Human
ccuugggagaaauugcagaguc

SEQ ID NO: 79452 - RNA, 22 nt, Human
ccuugggucuaggccagggagu

SEQ ID NO: 79453 - RNA, 22 nt, Human
ccuuggguguuuaauagauaua

SEQ ID NO: 79454 - RNA, 22 nt, Human
ccuugguccaacccugcacagc

SEQ ID NO: 79455 - RNA, 22 nt, Human
ccuugucuugcacagaugcagc

SEQ ID NO: 79456 - RNA, 21 nt, Human
ccuuuacaauuuugcauuccu

SEQ ID NO: 79457 - RNA, 22 nt, Human
ccuuuacacauggaaugggucu

SEQ ID NO: 79458 - RNA, 22 nt, Human
ccuuuacacguaaggcuguuga

SEQ ID NO: 79459 - RNA, 22 nt, Human
ccuuuaugagauccugggguga

SEQ ID NO: 79460 - RNA, 22 nt, Human
ccuuuaugauagaugcuuucag

SEQ ID NO: 79461 - RNA, 21 nt, Human
ccuuuaugcaaggacuggcau

SEQ ID NO: 79462 - RNA, 22 nt, Human
ccuuuaugucacucuggagagc

SEQ ID NO: 79463 - RNA, 22 nt, Human
ccuuuauguuucugcagccccc

SEQ ID NO: 79464 - RNA, 19 nt, Human
ccuuucagaacagaagcca

SEQ ID NO: 79465 - RNA, 22 nt, Human
ccuuucagaugggcauggaccg

SEQ ID NO: 79466 - RNA, 22 nt, Human
ccuuucucuaucgacccaucgc

SEQ ID NO: 79467 - RNA, 22 nt, Human
ccuuucucuuggauaccgauug

SEQ ID NO: 79468 - RNA, 17 nt, Human
ccuuucuucccagaggg

SEQ ID NO: 79469 - RNA, 22 nt, Human
ccuuucuugcuaagaguuuaug

SEQ ID NO: 79470 - RNA, 19 nt, Human
ccuuugaaucaggacacuu

SEQ ID NO: 79471 - RNA, 22 nt, Human
ccuuugcaacagaaagaccuga

SEQ ID NO: 79472 - RNA, 22 nt, Human
ccuuugcaauccuguaggccuu

SEQ ID NO: 79473 - RNA, 22 nt, Human
ccuuugcaaugaauuguuauug

SEQ ID NO: 79474 - RNA, 22 nt, Human
ccuuuggagcaacugagagcua

SEQ ID NO: 79475 - RNA, 19 nt, Human
ccuuuggauuuguuuaguc

SEQ ID NO: 79476 - RNA, 22 nt, Human
ccuuuggcccugagagaugauu

SEQ ID NO: 79477 - RNA, 22 nt, Human
ccuuuggccgcuuuauggagga

SEQ ID NO: 79478 - RNA, 22 nt, Human
ccuuuggcugcauagggaaggg

SEQ ID NO: 79479 - RNA, 22 nt, Human
ccuuugguaacauuccaaccuu

SEQ ID NO: 79480 - RNA, 22 nt, Human
ccuuugguaauucuguguagag

SEQ ID NO: 79481 - RNA, 22 nt, Human
ccuuuggucuugaugaacuguu

SEQ ID NO: 79482 - RNA, 22 nt, Human
ccuuuguucauugccuucaguc

SEQ ID NO: 79483 - RNA, 22 nt, Human
ccuuuguucuguguaucuuugu

SEQ ID NO: 79484 - RNA, 22 nt, Human
ccuuuuaagggagacuagagau

SEQ ID NO: 79485 - RNA, 22 nt, Human
ccuuuuaugaacuugagcaggu

SEQ ID NO: 79486 - RNA, 22 nt, Human
ccuuuucaacuaagauucugca

SEQ ID NO: 79487 - RNA, 22 nt, Human
ccuuuucuacaagcaaaugugc

SEQ ID NO: 79488 - RNA, 22 nt, Human
ccuuuucuagaaagggaggcaa

SEQ ID NO: 79489 - RNA, 22 nt, Human
ccuuuucuauccuucuagguuc

SEQ ID NO: 79490 - RNA, 22 nt, Human
ccuuuucuggccaccaagcgcu

SEQ ID NO: 79491 - RNA, 22 nt, Human
ccuuuucuguguggguaauuua

SEQ ID NO: 79492 - RNA, 22 nt, Human
ccuuuugagacuuccacugugu

SEQ ID NO: 79493 - RNA, 22 nt, Human
ccuuuuucaauauagaauugca

SEQ ID NO: 79494 - RNA, 22 nt, Human
ccuuuuucccuggagggacagc

SEQ ID NO: 79495 - RNA, 19 nt, Human
ccuuuuuuaacuucagcaa

SEQ ID NO: 79496 - RNA, 22 nt, Human
cgaaaucaaacuugggcuucug

SEQ ID NO: 79497 - RNA, 22 nt, Human
cgaagacagaccaucugaguag

SEQ ID NO: 79498 - RNA, 22 nt, Human
cgagaguggacagggcgcagcu

SEQ ID NO: 79499 - RNA, 22 nt, Human
cgaggaagaaguuugagucaag

SEQ ID NO: 79500 - RNA, 22 nt, Human
cgaggaggaaacgcggagaacu

SEQ ID NO: 79501 - RNA, 22 nt, Human
cgaggcagaggcugaaacggcu

SEQ ID NO: 79502 - RNA, 22 nt, Human
cgaggcaggcaggcggaggaua

SEQ ID NO: 79503 - RNA, 22 nt, Human
cgaggcggcggaagugcccgua

SEQ ID NO: 79504 - RNA, 22 nt, Human
cgagugucccuaccauuuccua

SEQ ID NO: 79505 - RNA, 22 nt, Human
cgauggagagguccugauaguu

SEQ ID NO: 79506 - RNA, 22 nt, Human
cgaugggggcaguguuacauug

SEQ ID NO: 79507 - RNA, 22 nt, Human
cgaugguucuggcugcuuguau

SEQ ID NO: 79508 - RNA, 18 nt, Human
cgauguguaugugauuug

SEQ ID NO: 79509 - RNA, 22 nt, Human
cuacuguugggagcccuggaag

SEQ ID NO: 79510 - RNA, 22 nt, Human
cuacuucuugaucugucgaccu

SEQ ID NO: 79511 - RNA, 20 nt, Human
cuacuuuaggcacugagaau

SEQ ID NO: 79512 - RNA, 22 nt, Human
cuagaaaaauacuuuauuguga

SEQ ID NO: 79513 - RNA, 22 nt, Human
cuagaaacauuacauguguuaa

SEQ ID NO: 79514 - RNA, 22 nt, Human
cuagaaacuccaucucacuaca

SEQ ID NO: 79515 - RNA, 22 nt, Human
cuagaaagauacuuaaaucaag

SEQ ID NO: 79516 - RNA, 22 nt, Human
cuagaacagucaaagugagcuc

SEQ ID NO: 79517 - RNA, 22 nt, Human
cuagaacuacaucuuuuaauag

SEQ ID NO: 79518 - RNA, 20 nt, Human
cuagaagugccucaucuaga

SEQ ID NO: 79519 - RNA, 22 nt, Human
cuagaaguuuggguccauuaag

SEQ ID NO: 79520 - RNA, 22 nt, Human
cuagaaucccaaauggacuggg

SEQ ID NO: 79521 - RNA, 22 nt, Human
cuagaaucuccaaguuuacuca

SEQ ID NO: 79522 - RNA, 23 nt, Human
cuagaauuuugcuaaaagacuag

SEQ ID NO: 79523 - RNA, 22 nt, Human
cuagagaagagguuaagcauga

SEQ ID NO: 79524 - RNA, 22 nt, Human
cuagagaauggcaaagauuaga

SEQ ID NO: 79525 - RNA, 17 nt, Human
cuagagagaaagagcua

SEQ ID NO: 79526 - RNA, 22 nt, Human
cuagagaggcagauguccugug

SEQ ID NO: 79527 - RNA, 22 nt, Human
cuagagaggugguguugggugg

SEQ ID NO: 79528 - RNA, 22 nt, Human
cuagagcuguucugugcacuca

SEQ ID NO: 79529 - RNA, 22 nt, Human
cuagagggauguuaggauagca

SEQ ID NO: 79530 - RNA, 22 nt, Human
cuagaguccuccuggaaaaggu

SEQ ID NO: 79531 - RNA, 22 nt, Human
cgccaguggcagcuggaacagg

SEQ ID NO: 79532 - RNA, 22 nt, Human
cgcccacgaaguagguggcauu

SEQ ID NO: 79533 - RNA, 22 nt, Human
cgccccagucuguaggugcccc

SEQ ID NO: 79534 - RNA, 22 nt, Human
cgccccucagcgacccaccagc

SEQ ID NO: 79535 - RNA, 22 nt, Human
cgccuggcugcagccggcgagg

SEQ ID NO: 79536 - RNA, 22 nt, Human
cgccugggaguccacaccugcu

SEQ ID NO: 79537 - RNA, 22 nt, Human
cgcgcugcagacagcggaggcc

SEQ ID NO: 79538 - RNA, 22 nt, Human
cgcggcgcgcccccgggugugu

SEQ ID NO: 79539 - RNA, 22 nt, Human
cgcuaggauuaggauuaauccu

SEQ ID NO: 79540 - RNA, 21 nt, Human
cgcuccaccccacccacuggc

SEQ ID NO: 79541 - RNA, 22 nt, Human
cgcugcagaugggagcugguug

SEQ ID NO: 79542 - RNA, 22 nt, Human
cgcugccaggucaccaggggua

SEQ ID NO: 79543 - RNA, 22 nt, Human
cgcugccucucuggggcccugg

SEQ ID NO: 79544 - RNA, 22 nt, Human
cgcugccuucaucccacgccua

SEQ ID NO: 79545 - RNA, 22 nt, Human
cgcugcgaggcgcccuuguugc

SEQ ID NO: 79546 - RNA, 22 nt, Human
cgcugggcauggugccuuauuu

SEQ ID NO: 79547 - RNA, 22 nt, Human
cgcugggcgcgcuccgaacccg

SEQ ID NO: 79548 - RNA, 22 nt, Human
cgcuggucaccauggcguccug

SEQ ID NO: 79549 - RNA, 22 nt, Human
cgcuuaauuuucuauagaaaag

SEQ ID NO: 79550 - RNA, 22 nt, Human
cgcuuuaacgugagaagaaggg

SEQ ID NO: 79551 - RNA, 22 nt, Human
cgcuuuggagucccugcuuuac

SEQ ID NO: 79552 - RNA, 22 nt, Human
cgcuuuggauuucgcuuuccaa

SEQ ID NO: 79553 - RNA, 22 nt, Human
cggaaacuacgugacacccguu

SEQ ID NO: 79554 - RNA, 22 nt, Human
cggaaacuugagaaccagccag

SEQ ID NO: 79555 - RNA, 22 nt, Human
cggaagcguucucagcaggggc

SEQ ID NO: 79556 - RNA, 22 nt, Human
cggagcugccugccaagccugc

SEQ ID NO: 79557 - RNA, 22 nt, Human
cggagcugcgccgggacacggg

SEQ ID NO: 79558 - RNA, 22 nt, Human
cggcacagccgggcaaggcugg

SEQ ID NO: 79559 - RNA, 22 nt, Human
cggcagagacggcgcuuugaac

SEQ ID NO: 79560 - RNA, 22 nt, Human
cggcagcuccgcgccguaggac

SEQ ID NO: 79561 - RNA, 22 nt, Human
cggcagcucgagggccacccgu

SEQ ID NO: 79562 - RNA, 22 nt, Human
cggccaaauugcagagagaagc

SEQ ID NO: 79563 - RNA, 22 nt, Human
cggccaagccggggccccgaag

SEQ ID NO: 79564 - RNA, 22 nt, Human
cggccgcguccagggccgccag

SEQ ID NO: 79565 - RNA, 22 nt, Human
cggcucaggccacaggacggca

SEQ ID NO: 79566 - RNA, 22 nt, Human
cggcugagcagugcugauggaa

SEQ ID NO: 79567 - RNA, 22 nt, Human
cggcugaggaucuccaggccug

SEQ ID NO: 79568 - RNA, 22 nt, Human
cggcugcugccugagucgcugu

SEQ ID NO: 79569 - RNA, 22 nt, Human
cggcuggguucggcugcaggcc

SEQ ID NO: 79570 - RNA, 22 nt, Human
cggcuucagcucaggccccucg

SEQ ID NO: 79571 - RNA, 22 nt, Human
cggcuucagucucaucaucgcc

SEQ ID NO: 79572 - RNA, 22 nt, Human
cggcuuccaacaagcuuugcug

SEQ ID NO: 79573 - RNA, 22 nt, Human
cggcuuccagcaggugcugcgc

SEQ ID NO: 79574 - RNA, 22 nt, Human
cggcuucuauuaggucggugca

SEQ ID NO: 79575 - RNA, 20 nt, Human
cgggacacucaagcucuggg

SEQ ID NO: 79576 - RNA, 22 nt, Human
cgggagccucugggucacacug

SEQ ID NO: 79577 - RNA, 22 nt, Human
cgggcacacacuugacagguuc

SEQ ID NO: 79578 - RNA, 22 nt, Human
cgggcaguguggcuccagaguc

SEQ ID NO: 79579 - RNA, 17 nt, Human
cgggcccgcggccgcuc

SEQ ID NO: 79580 - RNA, 22 nt, Human
cgggcgcacuccgggcagcugu

SEQ ID NO: 79581 - RNA, 22 nt, Human
cgggcucaggaggaaacaggag

SEQ ID NO: 79582 - RNA, 22 nt, Human
cgggcugcucuggaccgacagc

SEQ ID NO: 79583 - RNA, 22 nt, Human
cgggcuggcugcagcugcugga

SEQ ID NO: 79584 - RNA, 22 nt, Human
cggggaagcgguucuggcggua

SEQ ID NO: 79585 - RNA, 22 nt, Human
cggggacacacuggcagcuccu

SEQ ID NO: 79586 - RNA, 22 nt, Human
cggggaggcuucggauuaaagc

SEQ ID NO: 79587 - RNA, 22 nt, Human
cggggcaggagucccuguagag

SEQ ID NO: 79588 - RNA, 23 nt, Human
cggggccagggucaggaccgguc

SEQ ID NO: 79589 - RNA, 22 nt, Human
cggggccuagucuaccucggca

SEQ ID NO: 79590 - RNA, 22 nt, Human
cggggcugcucguccuccugug

SEQ ID NO: 79591 - RNA, 22 nt, Human
cggggcuggcacaggugaccac

SEQ ID NO: 79592 - RNA, 22 nt, Human
cggggucccugcccacccauac

SEQ ID NO: 79593 - RNA, 22 nt, Human
cgggguccgggcaguaggcugc

SEQ ID NO: 79594 - RNA, 22 nt, Human
cggggugggaauagaccugucu

SEQ ID NO: 79595 - RNA, 22 nt, Human
cgggucaccuaucaauuuugug

SEQ ID NO: 79596 - RNA, 22 nt, Human
cggucaggugcagcguuggcac

SEQ ID NO: 79597 - RNA, 22 nt, Human
cgguccagagcuaguucauugc

SEQ ID NO: 79598 - RNA, 22 nt, Human
cgguccagggaacgcccccgcc

SEQ ID NO: 79599 - RNA, 19 nt, Human
cgguccauccgauuuuaca

SEQ ID NO: 79600 - RNA, 22 nt, Human
cgguuaguuauuuuucagauau

SEQ ID NO: 79601 - RNA, 22 nt, Human
cguagcucacgcccccucuccc

SEQ ID NO: 79602 - RNA, 22 nt, Human
cgucacuggcgugaagugagga

SEQ ID NO: 79603 - RNA, 22 nt, Human
cgucaucacggcaagcaucucc

SEQ ID NO: 79604 - RNA, 22 nt, Human
cguccaggaagaucggccgaug

SEQ ID NO: 79605 - RNA, 19 nt, Human
cguccaggugcuggaagau

SEQ ID NO: 79606 - RNA, 22 nt, Human
cguccgcaaugcaagccuuuua

SEQ ID NO: 79607 - RNA, 22 nt, Human
cgucugcccgacuguucuucac

SEQ ID NO: 79608 - RNA, 22 nt, Human
cgugaaaugaguugaauuauug

SEQ ID NO: 79609 - RNA, 19 nt, Human
cgugaacaugacugcaugg

SEQ ID NO: 79610 - RNA, 22 nt, Human
cgugacacauucuggacauggu

SEQ ID NO: 79611 - RNA, 22 nt, Human
cguggccacccaguggugcgug

SEQ ID NO: 79612 - RNA, 22 nt, Human
cguggccagcacaaggcaguga

SEQ ID NO: 79613 - RNA, 22 nt, Human
cguggccaguuucaagcuacca

SEQ ID NO: 79614 - RNA, 22 nt, Human
cguggccuuugagugagcuccc

SEQ ID NO: 79615 - RNA, 22 nt, Human
cgugggccccagccacucccuc

SEQ ID NO: 79616 - RNA, 22 nt, Human
cguguacagucuaucuuuuuuc

SEQ ID NO: 79617 - RNA, 22 nt, Human
cguguaugauaaauguuaauaa

SEQ ID NO: 79618 - RNA, 22 nt, Human
cguguaugugccugcauucaca

SEQ ID NO: 79619 - RNA, 22 nt, Human
cgugucaucugagccuugggcg

SEQ ID NO: 79620 - RNA, 22 nt, Human
cguguccuuuuagcuucagguc

SEQ ID NO: 79621 - RNA, 22 nt, Human
cgugucuguguaugcaggccgu

SEQ ID NO: 79622 - RNA, 22 nt, Human
cguguggucccggcaaggcaag

SEQ ID NO: 79623 - RNA, 22 nt, Human
cguuggagacacuugaggacuu

SEQ ID NO: 79624 - RNA, 22 nt, Human
cguugugagcuugguagacacu

SEQ ID NO: 79625 - RNA, 22 nt, Human
cguuuccaacugugaugagguc

SEQ ID NO: 79626 - RNA, 22 nt, Human
cguuuuucaguggucuuagguc

SEQ ID NO: 79627 - RNA, 22 nt, Human
gaucagaguggcuagagccuug

SEQ ID NO: 79628 - RNA, 22 nt, Human
gaucaggagauggccucagacc

SEQ ID NO: 79629 - RNA, 19 nt, Human
gaucaggagccgacaacug

SEQ ID NO: 79630 - RNA, 22 nt, Human
gaucaugcuggcugcccuguug

SEQ ID NO: 79631 - RNA, 22 nt, Human
gaucauuuacuuguucuggacu

SEQ ID NO: 79632 - RNA, 22 nt, Human
gaucauuucaguccaguaaaua

SEQ ID NO: 79633 - RNA, 22 nt, Human
gaucauuugcaggaaacauuaa

SEQ ID NO: 79634 - RNA, 22 nt, Human
gauccacagcccgcuugggccc

SEQ ID NO: 79635 - RNA, 22 nt, Human
gauccacagcugcgguaggaga

SEQ ID NO: 79636 - RNA, 22 nt, Human
gaucccauguaggagaauguua

SEQ ID NO: 79637 - RNA, 22 nt, Human
gauccccagggcaggccucccg

SEQ ID NO: 79638 - RNA, 22 nt, Human
gauccguugcaaccaauuagca

SEQ ID NO: 79639 - RNA, 22 nt, Human
gauccguuuauacugaguuuga

SEQ ID NO: 79640 - RNA, 22 nt, Human
cucuggagucaggcagcccugg

SEQ ID NO: 79641 - RNA, 19 nt, Human
cucuggagucauugcuccc

SEQ ID NO: 79642 - RNA, 22 nt, Human
cucuggaguucuucaagcuacu

SEQ ID NO: 79643 - RNA, 22 nt, Human
cucuggcaauggauuuuugagg

SEQ ID NO: 79644 - RNA, 22 nt, Human
cucuggcacacuccuuccaggu

SEQ ID NO: 79645 - RNA, 22 nt, Human
cucuggccuggggccugcuccc

SEQ ID NO: 79646 - RNA, 22 nt, Human
cucuggcggccaugcucguggu

SEQ ID NO: 79647 - RNA, 22 nt, Human
cucuggcuaucuguuucuaugu

SEQ ID NO: 79648 - RNA, 22 nt, Human
cucuggcuggcaccugaucuga

SEQ ID NO: 79649 - RNA, 22 nt, Human
cucuggcuuugcucaugcaucc

SEQ ID NO: 79650 - RNA, 22 nt, Human
cucugggaaagauugugcaggc

SEQ ID NO: 79651 - RNA, 22 nt, Human
gcacuuucagcaggcagacaga

SEQ ID NO: 79652 - RNA, 22 nt, Human
gcacuuuguggauuguauuucc

SEQ ID NO: 79653 - RNA, 22 nt, Human
gcagaaccugaauugaacauug

SEQ ID NO: 79654 - RNA, 22 nt, Human
gcagaagcccggucagcgcacg

SEQ ID NO: 79655 - RNA, 22 nt, Human
gcagaagcugggcagcgaggug

SEQ ID NO: 79656 - RNA, 22 nt, Human
gcagaaggauccgcaggugcaa

SEQ ID NO: 79657 - RNA, 22 nt, Human
gcagaagguuguuugggaaagg

SEQ ID NO: 79658 - RNA, 22 nt, Human
gcagaaguaccucguucuaguu

SEQ ID NO: 79659 - RNA, 22 nt, Human
gcagaaguaggcucuguguagg

SEQ ID NO: 79660 - RNA, 22 nt, Human
gcagaagucagaccaucugaau

SEQ ID NO: 79661 - RNA, 22 nt, Human
gcagaauacauuuuguuuuccu

SEQ ID NO: 79662 - RNA, 22 nt, Human
gcagaauagugacuuuccuuaa

SEQ ID NO: 79663 - RNA, 22 nt, Human
gcagaauauuauggaaaaagua

SEQ ID NO: 79664 - RNA, 22 nt, Human
gcagaauuccuucuuccuuggg

SEQ ID NO: 79665 - RNA, 22 nt, Human
gcagaauugauggagaacuuaa

SEQ ID NO: 79666 - RNA, 22 nt, Human
gcagaauuuggggguaaccuuu

SEQ ID NO: 79667 - RNA, 22 nt, Human
gcagaauuuucuguuuucuaga

SEQ ID NO: 79668 - RNA, 22 nt, Human
gcagacagccagacugcacugg

SEQ ID NO: 79669 - RNA, 22 nt, Human
gcagacaugggaucuauucaca

SEQ ID NO: 79670 - RNA, 22 nt, Human
gcagacauguguucuaacagga

SEQ ID NO: 79671 - RNA, 22 nt, Human
gcagacccugaacugggcaugg

SEQ ID NO: 79672 - RNA, 22 nt, Human
gcagacugcgagcgugcuggug

SEQ ID NO: 79673 - RNA, 22 nt, Human
gcagacuguacacuggacuuug

SEQ ID NO: 79674 - RNA, 21 nt, Human
gcagagaaugaacuuuggcuu

SEQ ID NO: 79675 - RNA, 22 nt, Human
gcagagacuaguagugcagacu

SEQ ID NO: 79676 - RNA, 22 nt, Human
gcagagacuccacugucuugug

SEQ ID NO: 79677 - RNA, 22 nt, Human
gcagagaugagcuaucaggaca

SEQ ID NO: 79678 - RNA, 22 nt, Human
gcagagauggcugccucugagu

SEQ ID NO: 79679 - RNA, 22 nt, Human
gcagagcagcaaauggaaagga

SEQ ID NO: 79680 - RNA, 22 nt, Human
gcagagcagggauuuugccaua

SEQ ID NO: 79681 - RNA, 22 nt, Human
gcagagcauuggagggacccug

SEQ ID NO: 79682 - RNA, 22 nt, Human
gcagagccaggagagacccuug

SEQ ID NO: 79683 - RNA, 16 nt, Human
gcagagcucagggacu

SEQ ID NO: 79684 - RNA, 22 nt, Human
gcagagcuccccaagacaccaa

SEQ ID NO: 79685 - RNA, 22 nt, Human
gcagagcuguuaauggagcuga

SEQ ID NO: 79686 - RNA, 16 nt, Human
gcagaggaaaggggag

SEQ ID NO: 79687 - RNA, 22 nt, Human
gcagaggagugauuaugccgug

SEQ ID NO: 79688 - RNA, 21 nt, Human
gcagaggcacggcaccaaggg

SEQ ID NO: 79689 - RNA, 22 nt, Human
gcagaggccuagguggaaggcc

SEQ ID NO: 79690 - RNA, 22 nt, Human
gcagaggggguacuucggcccu

SEQ ID NO: 79691 - RNA, 22 nt, Human
gcagagguccuagccaggaguc

SEQ ID NO: 79692 - RNA, 22 nt, Human
gcagaggucuagcaccaagaau

SEQ ID NO: 79693 - RNA, 22 nt, Human
gcagaggugagaagggccuccc

SEQ ID NO: 79694 - RNA, 22 nt, Human
gcagaggugcucaguggcagaa

SEQ ID NO: 79695 - RNA, 22 nt, Human
gcagagguggcaucugggcucu

SEQ ID NO: 79696 - RNA, 22 nt, Human
gcagagucaggauuccauccca

SEQ ID NO: 79697 - RNA, 22 nt, Human
gcagagucagguccaaggacug

SEQ ID NO: 79698 - RNA, 22 nt, Human
gcagagucauuauuuaugcaau

SEQ ID NO: 79699 - RNA, 22 nt, Human
gcagagucccagcagguggugg

SEQ ID NO: 79700 - RNA, 22 nt, Human
gcagagugggagcccagggcug

SEQ ID NO: 79701 - RNA, 22 nt, Human
gcagagugguuucagaguugag

SEQ ID NO: 79702 - RNA, 22 nt, Human
gcagaguugaugcaaguacuga

SEQ ID NO: 79703 - RNA, 22 nt, Human
gcagaucaauugauuguucacu

SEQ ID NO: 79704 - RNA, 18 nt, Human
gcagaugaguaguguacc

SEQ ID NO: 79705 - RNA, 22 nt, Human
gcagaugagugagauagacuuc

SEQ ID NO: 79706 - RNA, 22 nt, Human
gcagaugccugaaggagcuggg

SEQ ID NO: 79707 - RNA, 22 nt, Human
gcagaugcugagauuuauuucu

SEQ ID NO: 79708 - RNA, 22 nt, Human
gcagaugcugcuccucucuaga

SEQ ID NO: 79709 - RNA, 22 nt, Human
gcagauggaaagugcuugaggg

SEQ ID NO: 79710 - RNA, 22 nt, Human
gcagauggagauaaauggaacu

SEQ ID NO: 79711 - RNA, 22 nt, Human
gcagauggcagcccaggcuggg

SEQ ID NO: 79712 - RNA, 21 nt, Human
gcagaugggaagagacgaggc

SEQ ID NO: 79713 - RNA, 22 nt, Human
gcagauggugccaugucuugug

SEQ ID NO: 79714 - RNA, 22 nt, Human
gcagauguucugugucucacaa

SEQ ID NO: 79715 - RNA, 22 nt, Human
gcagauuucuaauaagcaaugu

SEQ ID NO: 79716 - RNA, 22 nt, Human
gcagcaaagcucuucaugugau

SEQ ID NO: 79717 - RNA, 22 nt, Human
gcagcaagaauaauuuggguag

SEQ ID NO: 79718 - RNA, 22 nt, Human
gcagcaagagguuucuguugac

SEQ ID NO: 79719 - RNA, 22 nt, Human
gcagcaaggaugaagcacuugg

SEQ ID NO: 79720 - RNA, 22 nt, Human
gcagcacugucuugucuuagga

SEQ ID NO: 79721 - RNA, 22 nt, Human
gcagcagaaggccaaggggagc

SEQ ID NO: 79722 - RNA, 22 nt, Human
gcagcagaguuugggagauggu

SEQ ID NO: 79723 - RNA, 22 nt, Human
gcagcagccacuauucuggcau

SEQ ID NO: 79724 - RNA, 22 nt, Human
gcagcagcucagccgggcacug

SEQ ID NO: 79725 - RNA, 22 nt, Human
gcagcaggcuuuucauaccuug

SEQ ID NO: 79726 - RNA, 22 nt, Human
gcagcaggugugcuuuuaauga

SEQ ID NO: 79727 - RNA, 22 nt, Human
gcagcaguggcaguuaauauuu

SEQ ID NO: 79728 - RNA, 22 nt, Human
gcagcagugucucccaucuugc

SEQ ID NO: 79729 - RNA, 22 nt, Human
gcagcagugugggcugaaccua

SEQ ID NO: 79730 - RNA, 21 nt, Human
gcagcaguguucuagaauacu

SEQ ID NO: 79731 - RNA, 22 nt, Human
gcagcaucagguucacugcgug

SEQ ID NO: 79732 - RNA, 22 nt, Human
gcagcauggagaaguagcuaga

SEQ ID NO: 79733 - RNA, 22 nt, Human
gcagcauuaccaagacauggca

SEQ ID NO: 79734 - RNA, 22 nt, Human
gcagcauuuguggaaugggccc

SEQ ID NO: 79735 - RNA, 23 nt, Human
gcagccaagagaccagggcaggc

SEQ ID NO: 79736 - RNA, 22 nt, Human
gcagccacacuguuacagaaug

SEQ ID NO: 79737 - RNA, 22 nt, Human
gcagccacagaggagggaugca

SEQ ID NO: 79738 - RNA, 19 nt, Human
gcagccaccgcggcggccg

SEQ ID NO: 79739 - RNA, 21 nt, Human
gcagccagacgggauucaguu

SEQ ID NO: 79740 - RNA, 21 nt, Human
gcagccagccgagaccaugcc

SEQ ID NO: 79741 - RNA, 19 nt, Human
gcagccaggugcucuaccu

SEQ ID NO: 79742 - RNA, 22 nt, Human
gcagcccaagagacucuguuga

SEQ ID NO: 79743 - RNA, 22 nt, Human
gcagcccagagcgcaggacccc

SEQ ID NO: 79744 - RNA, 22 nt, Human
gcagcccagcagggcccggagc

SEQ ID NO: 79745 - RNA, 22 nt, Human
gcagcccaggacccuggacaga

SEQ ID NO: 79746 - RNA, 22 nt, Human
gcagcccaggucucucucacuc

SEQ ID NO: 79747 - RNA, 22 nt, Human
gcagccccaggagacgcccagg

SEQ ID NO: 79748 - RNA, 22 nt, Human
gcagcccucccugggugugucu

SEQ ID NO: 79749 - RNA, 17 nt, Human
cugaagauaauggcaac

SEQ ID NO: 79750 - RNA, 22 nt, Human
cugaagauuauaaacagacaua

SEQ ID NO: 79751 - RNA, 22 nt, Human
cugaagcaaaggaucgagcuaa

SEQ ID NO: 79752 - RNA, 22 nt, Human
cugaagcaaaugaaacagcucu

SEQ ID NO: 79753 - RNA, 22 nt, Human
cugaagcacagcauauaaauaa

SEQ ID NO: 79754 - RNA, 22 nt, Human
cugaagcaggaacagcgagauu

SEQ ID NO: 79755 - RNA, 22 nt, Human
cugaagcagggagugaugaagu

SEQ ID NO: 79756 - RNA, 23 nt, Human
cugaagcaguucccucucugccc

SEQ ID NO: 79757 - RNA, 22 nt, Human
cugaagcuugauaaacuauaaa

SEQ ID NO: 79758 - RNA, 22 nt, Human
cugaagcuuuacuucaaauaca

SEQ ID NO: 79759 - RNA, 22 nt, Human
cugaaggaagcagaagcgaggu

SEQ ID NO: 79760 - RNA, 22 nt, Human
cugaaggaagcagguggccugu

SEQ ID NO: 79761 - RNA, 22 nt, Human
cugaaggagaaggccacuguuc

SEQ ID NO: 79762 - RNA, 22 nt, Human
cugaaggauguguggugggagu

SEQ ID NO: 79763 - RNA, 22 nt, Human
cugaaggcuuguuguuuucuua

SEQ ID NO: 79764 - RNA, 22 nt, Human
cugaagggaugugauuucuaca

SEQ ID NO: 79765 - RNA, 22 nt, Human
cugaagucagauggcacaaggu

SEQ ID NO: 79766 - RNA, 22 nt, Human
cugaaguuaaaguaguuuuuau

SEQ ID NO: 79767 - RNA, 22 nt, Human
cugaaguuauucagugggcuga

SEQ ID NO: 79768 - RNA, 22 nt, Human
gcagcuccuuuaggcugcaaag

SEQ ID NO: 79769 - RNA, 22 nt, Human
gcagcucucuggccugcccugg

SEQ ID NO: 79770 - RNA, 22 nt, Human
gcagcucugauugguucagccu

SEQ ID NO: 79771 - RNA, 22 nt, Human
gcagcugaauguccauugcugc

SEQ ID NO: 79772 - RNA, 22 nt, Human
gcagcugcagguggucccaugc

SEQ ID NO: 79773 - RNA, 22 nt, Human
gcagcugccaguccccuuccag

SEQ ID NO: 79774 - RNA, 22 nt, Human
gcagcugcgaagaagucuaucu

SEQ ID NO: 79775 - RNA, 22 nt, Human
gcagcugcugggaucauuuagg

SEQ ID NO: 79776 - RNA, 22 nt, Human
gcagcuggacccacacggcuua

SEQ ID NO: 79777 - RNA, 22 nt, Human
gcagcuggcucagagagguggg

SEQ ID NO: 79778 - RNA, 22 nt, Human
gcagcuggucuggccuagagua

SEQ ID NO: 79779 - RNA, 22 nt, Human
gcagcuguacuggcagcauugu

SEQ ID NO: 79780 - RNA, 22 nt, Human
gcagcuguaucacuuuuaaaca

SEQ ID NO: 79781 - RNA, 22 nt, Human
gcagcugucgcuaggagcugug

SEQ ID NO: 79782 - RNA, 22 nt, Human
gcagcugucggaaagcuaagug

SEQ ID NO: 79783 - RNA, 22 nt, Human
gcagcuuggggacaugaaaaga

SEQ ID NO: 79784 - RNA, 22 nt, Human
gcagcuuggugaaaggugaugg

SEQ ID NO: 79785 - RNA, 22 nt, Human
gcagcuuucuuuuugcaugucu

SEQ ID NO: 79786 - RNA, 21 nt, Human
gcaggaacaggucaugaucug

SEQ ID NO: 79787 - RNA, 22 nt, Human
gcaggaacaguuuaucucuggc

SEQ ID NO: 79788 - RNA, 22 nt, Human
gcaggaaccugguaagcuucac

SEQ ID NO: 79789 - RNA, 22 nt, Human
gcaggacacagaugcaaggcca

SEQ ID NO: 79790 - RNA, 22 nt, Human
gcaggacagacccaagcagucu

SEQ ID NO: 79791 - RNA, 22 nt, Human
gcaggacagcaggaugcuuaga

SEQ ID NO: 79792 - RNA, 22 nt, Human
gcaggacaggcguugguccagu

SEQ ID NO: 79793 - RNA, 19 nt, Human
gcaggacucccagcuccuc

SEQ ID NO: 79794 - RNA, 22 nt, Human
gcaggagaaaugaagauugggu

SEQ ID NO: 79795 - RNA, 22 nt, Human
gcaggagacuggcugugguagu

SEQ ID NO: 79796 - RNA, 22 nt, Human
gcaggagagccagcaggcuucc

SEQ ID NO: 79797 - RNA, 22 nt, Human
gcaggagcaaacugcagugugg

SEQ ID NO: 79798 - RNA, 22 nt, Human
gcaggagcucguuuccaggcug

SEQ ID NO: 79799 - RNA, 22 nt, Human
gcaggaggaucacuugagccca

SEQ ID NO: 79800 - RNA, 22 nt, Human
gcaggagguugagccaggacug

SEQ ID NO: 79801 - RNA, 22 nt, Human
gcaggaguaugcagcuaugguu

SEQ ID NO: 79802 - RNA, 22 nt, Human
gcaggagucccagaagguuuug

SEQ ID NO: 79803 - RNA, 22 nt, Human
gcaggagugugucuaauacuca

SEQ ID NO: 79804 - RNA, 22 nt, Human
gcaggauggugcccuuucugcc

SEQ ID NO: 79805 - RNA, 22 nt, Human
gcaggauugggcugaaggagug

SEQ ID NO: 79806 - RNA, 22 nt, Human
gcaggcaccgcggcggcagguu

SEQ ID NO: 79807 - RNA, 21 nt, Human
gcaggcacucuagaggagcug

SEQ ID NO: 79808 - RNA, 22 nt, Human
gcaggcagagaaggaacauuua

SEQ ID NO: 79809 - RNA, 22 nt, Human
gcaggcagagagggguuuccag

SEQ ID NO: 79810 - RNA, 22 nt, Human
gcaggcagagguggaggagaca

SEQ ID NO: 79811 - RNA, 22 nt, Human
gcaggcagagucaauuugaucc

SEQ ID NO: 79812 - RNA, 19 nt, Human
gcaggcagcugggguaucc

SEQ ID NO: 79813 - RNA, 19 nt, Human
gcaggcaguggcauucgga

SEQ ID NO: 79814 - RNA, 22 nt, Human
gcaggcccagagucgcuggccu

SEQ ID NO: 79815 - RNA, 22 nt, Human
gcaggccuccccugcuggagcu

SEQ ID NO: 79816 - RNA, 22 nt, Human
gcaggccucuguugagggccuu

SEQ ID NO: 79817 - RNA, 19 nt, Human
gcaggccucuugggaauua

SEQ ID NO: 79818 - RNA, 22 nt, Human
gcaggccugcccagcaggaugg

SEQ ID NO: 79819 - RNA, 20 nt, Human
gcaggcuccgggcuugggag

SEQ ID NO: 79820 - RNA, 22 nt, Human
gcaggcucuucuuucugcccag

SEQ ID NO: 79821 - RNA, 22 nt, Human
gcaggcugaugacuggaguugg

SEQ ID NO: 79822 - RNA, 22 nt, Human
gcaggcugcugagauccuuagg

SEQ ID NO: 79823 - RNA, 22 nt, Human
gcaggcugggguagccccacuu

SEQ ID NO: 79824 - RNA, 22 nt, Human
gcaggcuugggacgagcuggag

SEQ ID NO: 79825 - RNA, 19 nt, Human
gcaggcuugggucucccca

SEQ ID NO: 79826 - RNA, 22 nt, Human
gcaggcuuguugaaguaaaaua

SEQ ID NO: 79827 - RNA, 22 nt, Human
gcaggcuuugacuuggggcaac

SEQ ID NO: 79828 - RNA, 22 nt, Human
gcagggaagacccggagcagcg

SEQ ID NO: 79829 - RNA, 22 nt, Human
gcagggacaaggcagguguucu

SEQ ID NO: 79830 - RNA, 22 nt, Human
gcagggacagggcagggccuuu

SEQ ID NO: 79831 - RNA, 22 nt, Human
gcagggacgcagcacucuccgu

SEQ ID NO: 79832 - RNA, 22 nt, Human
gcagggagguuugcugaccugg

SEQ ID NO: 79833 - RNA, 22 nt, Human
gcagggaugcugaggcucagug

SEQ ID NO: 79834 - RNA, 22 nt, Human
gcagggauugucaaugcugcuc

SEQ ID NO: 79835 - RNA, 22 nt, Human
gcagggcaaacccagguguuca

SEQ ID NO: 79836 - RNA, 22 nt, Human
gcagggcagaaggugcugagga

SEQ ID NO: 79837 - RNA, 22 nt, Human
gcagggcagaccuccagccuau

SEQ ID NO: 79838 - RNA, 22 nt, Human
gcagggcagccacaggcccccu

SEQ ID NO: 79839 - RNA, 22 nt, Human
gcagggcagcugaagcuaggug

SEQ ID NO: 79840 - RNA, 22 nt, Human
gcagggcaggauuugaacccag

SEQ ID NO: 79841 - RNA, 20 nt, Human
gcagggcaucuuggccccca

SEQ ID NO: 79842 - RNA, 22 nt, Human
gcagggcgcguuugagcgggcu

SEQ ID NO: 79843 - RNA, 22 nt, Human
gcagggcuagauauuugcaagu

SEQ ID NO: 79844 - RNA, 22 nt, Human
gcagggcucagccgcucccacc

SEQ ID NO: 79845 - RNA, 22 nt, Human
gcagggcugaaggucccaggcc

SEQ ID NO: 79846 - RNA, 22 nt, Human
gcagggcugauguuauugacga

SEQ ID NO: 79847 - RNA, 22 nt, Human
gcagggcugcugaaacuuguuu

SEQ ID NO: 79848 - RNA, 22 nt, Human
gcagggcugggacuuacuggua

SEQ ID NO: 79849 - RNA, 22 nt, Human
gcagggcuguaauuugagccug

SEQ ID NO: 79850 - RNA, 22 nt, Human
gcagggcuguuuagugaauagg

SEQ ID NO: 79851 - RNA, 22 nt, Human
gcaggggaguggaugauggauu

SEQ ID NO: 79852 - RNA, 22 nt, Human
gcaggggaguggcaggcccgga

SEQ ID NO: 79853 - RNA, 21 nt, Human
gcaggggauagaaauggucug

SEQ ID NO: 79854 - RNA, 22 nt, Human
gcaggggcugcugggaacucgg

SEQ ID NO: 79855 - RNA, 22 nt, Human
gcagggguagagauugcuggug

SEQ ID NO: 79856 - RNA, 22 nt, Human
gcagggguuuucugacuugagu

SEQ ID NO: 79857 - RNA, 22 nt, Human
gcaggguaggugacagguaguc

SEQ ID NO: 79858 - RNA, 22 nt, Human
ggagauggucuguucucauauu

SEQ ID NO: 79859 - RNA, 22 nt, Human
ggagcaaaugccaagugggagg

SEQ ID NO: 79860 - RNA, 22 nt, Human
ggagcacaccgggagcuugccu

SEQ ID NO: 79861 - RNA, 22 nt, Human
ggagcaccaaaguaacuagcac

SEQ ID NO: 79862 - RNA, 22 nt, Human
ggagcagacauaaccuuacaga

SEQ ID NO: 79863 - RNA, 22 nt, Human
ggagcagagcugggcuuggcug

SEQ ID NO: 79864 - RNA, 22 nt, Human
ggagcaggcucugugguuucca

SEQ ID NO: 79865 - RNA, 22 nt, Human
ggagccagagcacuggggagcc

SEQ ID NO: 79866 - RNA, 22 nt, Human
ggagccaggggaccuucacaga

SEQ ID NO: 79867 - RNA, 18 nt, Human
ggagccagucugucucug

SEQ ID NO: 79868 - RNA, 22 nt, Human
ggagccaguuuagaccucaguu

SEQ ID NO: 79869 - RNA, 18 nt, Human
ggagcccagaggacagga

SEQ ID NO: 79870 - RNA, 22 nt, Human
ggagcccagguuguuugugcag

SEQ ID NO: 79871 - RNA, 22 nt, Human
ggagcccuucuauuccauggag

SEQ ID NO: 79872 - RNA, 22 nt, Human
cuuggggcugucacucuggcau

SEQ ID NO: 79873 - RNA, 22 nt, Human
cuugggucacaacucugaggug

SEQ ID NO: 79874 - RNA, 22 nt, Human
cuugggugcucagggaaagcuu

SEQ ID NO: 79875 - RNA, 22 nt, Human
cuugggugugaccuuggcauug

SEQ ID NO: 79876 - RNA, 22 nt, Human
cuuggucaugcaagauaucgau

SEQ ID NO: 79877 - RNA, 22 nt, Human
cuuggucauuucuuguccuguu

SEQ ID NO: 79878 - RNA, 22 nt, Human
cuuggucauuuggggcugcuau

SEQ ID NO: 79879 - RNA, 22 nt, Human
cuuggucucuuuaccggagugu

SEQ ID NO: 79880 - RNA, 22 nt, Human
cuuggugccacagcagcuugcg

SEQ ID NO: 79881 - RNA, 19 nt, Human
cuugguuaugguaugaugc

SEQ ID NO: 79882 - RNA, 22 nt, Human
cuuguaauggcagagaccuguc

SEQ ID NO: 79883 - RNA, 22 nt, Human
cuuguacacucaguacuucuag

SEQ ID NO: 79884 - RNA, 22 nt, Human
cuuguacaggauauuauaggcu

SEQ ID NO: 79885 - RNA, 22 nt, Human
cuuguacaucacuggcagaugg

SEQ ID NO: 79886 - RNA, 22 nt, Human
cuuguagaauugaaauggucuc

SEQ ID NO: 79887 - RNA, 22 nt, Human
cuuguagcugcuucuucugaag

SEQ ID NO: 79888 - RNA, 22 nt, Human
cuuguauagggaaagauaaauc

SEQ ID NO: 79889 - RNA, 23 nt, Human
cuuguauucacucauuugggaac

SEQ ID NO: 79890 - RNA, 22 nt, Human
cuuguauucuuguaccuuucaa

SEQ ID NO: 79891 - RNA, 22 nt, Human
cuuguauugcaaacuggccagg

SEQ ID NO: 79892 - RNA, 22 nt, Human
cuugucacucuggcuccagagc

SEQ ID NO: 79893 - RNA, 22 nt, Human
cuugucuaguuccuggugaugu

SEQ ID NO: 79894 - RNA, 22 nt, Human
cuugucugcuauaaaaauccag

SEQ ID NO: 79895 - RNA, 22 nt, Human
cuugucugggcagcuugggagu

SEQ ID NO: 79896 - RNA, 22 nt, Human
cuugucugugucggauaaaacu

SEQ ID NO: 79897 - RNA, 22 nt, Human
cuugugauugagaaagucuaaa

SEQ ID NO: 79898 - RNA, 22 nt, Human
cuugugcaaauccucgagcaca

SEQ ID NO: 79899 - RNA, 22 nt, Human
cuugugcaauugacauugaauc

SEQ ID NO: 79900 - RNA, 22 nt, Human
cuugugcagccuccucuugcag

SEQ ID NO: 79901 - RNA, 19 nt, Human
cuugugcaguucacgcuca

SEQ ID NO: 79902 - RNA, 22 nt, Human
cuuguggagauauccaugucug

SEQ ID NO: 79903 - RNA, 22 nt, Human
cuuguggcagguggauggugcc

SEQ ID NO: 79904 - RNA, 22 nt, Human
cuuguggccaauguuuguuaua

SEQ ID NO: 79905 - RNA, 22 nt, Human
cuuguuaaauuauauaagcaga

SEQ ID NO: 79906 - RNA, 22 nt, Human
cuuguuaucuccguguccuugu

SEQ ID NO: 79907 - RNA, 22 nt, Human
cuuguucaguugccucuccugc

SEQ ID NO: 79908 - RNA, 22 nt, Human
cuuguucaucugcauaccaagu

SEQ ID NO: 79909 - RNA, 22 nt, Human
cuuguuuaaauaagauagcagu

SEQ ID NO: 79910 - RNA, 22 nt, Human
cuuguuuauuaugcacuguaga

SEQ ID NO: 79911 - RNA, 22 nt, Human
cuuguuuuaaacuguuguggcu

SEQ ID NO: 79912 - RNA, 22 nt, Human
cuuguuuucuucugcagucuau

SEQ ID NO: 79913 - RNA, 22 nt, Human
cuuguuuuuaagagauguuuac

SEQ ID NO: 79914 - RNA, 22 nt, Human
cuuuacaaacuauaaagugcgg

SEQ ID NO: 79915 - RNA, 22 nt, Human
cuuuacaaccuaaguugaagcu

SEQ ID NO: 79916 - RNA, 22 nt, Human
cuuuacaauucaagggaacucu

SEQ ID NO: 79917 - RNA, 22 nt, Human
cuuuacacaugagaccugcaau

SEQ ID NO: 79918 - RNA, 22 nt, Human
cuuuacacuuggacccacacuu

SEQ ID NO: 79919 - RNA, 22 nt, Human
cuuuacagauaggaacuacuca

SEQ ID NO: 79920 - RNA, 22 nt, Human
cuuuacagauggauaauuguuu

SEQ ID NO: 79921 - RNA, 22 nt, Human
cuuuacagugaacuugcuuguc

SEQ ID NO: 79922 - RNA, 22 nt, Human
cuuuacauaaggauaaaccugg

SEQ ID NO: 79923 - RNA, 22 nt, Human
cuuuacugccaugcauuuauaa

SEQ ID NO: 79924 - RNA, 22 nt, Human
cuuuacuugcuuuguuacaaaa

SEQ ID NO: 79925 - RNA, 22 nt, Human
cuuuagacauacagaauuucca

SEQ ID NO: 79926 - RNA, 22 nt, Human
cuuuagauggcuuaggaggccc

SEQ ID NO: 79927 - RNA, 22 nt, Human
cuuuagguuuugccugagaucu

SEQ ID NO: 79928 - RNA, 22 nt, Human
cuuuaguugucuccucaagggu

SEQ ID NO: 79929 - RNA, 22 nt, Human
cuuuaguuugcuguccccuggg

SEQ ID NO: 79930 - RNA, 22 nt, Human
cuuuaguuuguaagagcaagag

SEQ ID NO: 79931 - RNA, 22 nt, Human
cuuuaugguaaguauagaugac

SEQ ID NO: 79932 - RNA, 22 nt, Human
cuuuauguacuguguauuugaa

SEQ ID NO: 79933 - RNA, 22 nt, Human
cuuuauuagauguagacuuucu

SEQ ID NO: 79934 - RNA, 22 nt, Human
cuuucaaagaccuuggcauggg

SEQ ID NO: 79935 - RNA, 22 nt, Human
cuuucacagcugugcuuaugau

SEQ ID NO: 79936 - RNA, 22 nt, Human
cuuucagaagaggaccuuucca

SEQ ID NO: 79937 - RNA, 22 nt, Human
cuuucagggcaacacuucuuuu

SEQ ID NO: 79938 - RNA, 18 nt, Human
cuuucaguaauuucagcc

SEQ ID NO: 79939 - RNA, 22 nt, Human
cuuucagucaguuaacucagaa

SEQ ID NO: 79940 - RNA, 22 nt, Human
cuuucaguuaguaccuaguggc

SEQ ID NO: 79941 - RNA, 22 nt, Human
cuuucauaagggguuuuauaau

SEQ ID NO: 79942 - RNA, 22 nt, Human
cuuucauaguuaaaauaguuug

SEQ ID NO: 79943 - RNA, 22 nt, Human
cuuucaugcacuucuuuagauc

SEQ ID NO: 79944 - RNA, 22 nt, Human
cuuucauucuuagauauuagug

SEQ ID NO: 79945 - RNA, 22 nt, Human
cuuuccagaccuccuuguagcu

SEQ ID NO: 79946 - RNA, 22 nt, Human
cuuuccagauuuguccaguuau

SEQ ID NO: 79947 - RNA, 22 nt, Human
cuuuccagcauuuccuugugaa

SEQ ID NO: 79948 - RNA, 22 nt, Human
cuuucccuuuugccuugcgugg

SEQ ID NO: 79949 - RNA, 22 nt, Human
cuuuccuagaaauauauacuua

SEQ ID NO: 79950 - RNA, 22 nt, Human
cuuuccuaguuggucccagcac

SEQ ID NO: 79951 - RNA, 22 nt, Human
cuuuccugaaaucucuucugca

SEQ ID NO: 79952 - RNA, 22 nt, Human
cuuuccugaggaguauggcugu

SEQ ID NO: 79953 - RNA, 22 nt, Human
cuuuccugccuuauucauucau

SEQ ID NO: 79954 - RNA, 22 nt, Human
cuuuccuggcuggcaguugugg

SEQ ID NO: 79955 - RNA, 22 nt, Human
cuuucucaaugccggaaggcac

SEQ ID NO: 79956 - RNA, 22 nt, Human
cuuucucuucagcacccagccc

SEQ ID NO: 79957 - RNA, 22 nt, Human
cuuucugaaagacauuuuaacu

SEQ ID NO: 79958 - RNA, 22 nt, Human
cuuucuuaauuuuuaaggacac

SEQ ID NO: 79959 - RNA, 22 nt, Human
cuuucuuauaccugucagggcc

SEQ ID NO: 79960 - RNA, 22 nt, Human
cuuucuuuguccaccaacaaug

SEQ ID NO: 79961 - RNA, 22 nt, Human
cuuugaaaacuuaaauaacagc

SEQ ID NO: 79962 - RNA, 22 nt, Human
cuuugaaagcucccaggacuua

SEQ ID NO: 79963 - RNA, 22 nt, Human
cuuugaaauucuucagcugaag

SEQ ID NO: 79964 - RNA, 22 nt, Human
cuuugaauuccaguacaauaac

SEQ ID NO: 79965 - RNA, 19 nt, Human
cuuugcaaagcccugugua

SEQ ID NO: 79966 - RNA, 22 nt, Human
cuuugcagcaauuucuguuaaa

SEQ ID NO: 79967 - RNA, 22 nt, Human
cuugccuucuguuccuauagaa

SEQ ID NO: 79968 - RNA, 22 nt, Human
cuugcuacuaugccuggcuaau

SEQ ID NO: 79969 - RNA, 22 nt, Human
cuugcucauuaaguagcucaca

SEQ ID NO: 79970 - RNA, 22 nt, Human
cuugcugagauaaaugcugucu

SEQ ID NO: 79971 - RNA, 22 nt, Human
cuugcugcucuggagucaugcc

SEQ ID NO: 79972 - RNA, 22 nt, Human
cuugcugcugcaucugagcaug

SEQ ID NO: 79973 - RNA, 22 nt, Human
cuugcuggugucgugccuucac

SEQ ID NO: 79974 - RNA, 22 nt, Human
cuugcugugugccaucagggcu

SEQ ID NO: 79975 - RNA, 22 nt, Human
cuugcuguuuucuacccucaag

SEQ ID NO: 79976 - RNA, 22 nt, Human
cuugcuucauuagugucuuagu

SEQ ID NO: 79977 - RNA, 22 nt, Human
cuugcuuggagaagagaucagu

SEQ ID NO: 79978 - RNA, 22 nt, Human
cuugcuuuccaaaugacucacu

SEQ ID NO: 79979 - RNA, 22 nt, Human
cuuggaacaaauuaaacaauac

SEQ ID NO: 79980 - RNA, 22 nt, Human
cuuggaaggacgggcuguaucu

SEQ ID NO: 79981 - RNA, 22 nt, Human
cuuggacuggacccgaggaaug

SEQ ID NO: 79982 - RNA, 22 nt, Human
cuuggagaaugacaguggauua

SEQ ID NO: 79983 - RNA, 22 nt, Human
cuuggagaccagugacauugcu

SEQ ID NO: 79984 - RNA, 22 nt, Human
cuuggagauucauugccugaaa

SEQ ID NO: 79985 - RNA, 22 nt, Human
cuuggagcaacacaugacaucu

SEQ ID NO: 79986 - RNA, 22 nt, Human
cuuggaggaaaggcagggagac

SEQ ID NO: 79987 - RNA, 22 nt, Human
cuuggaggaugugcggcugccc

SEQ ID NO: 79988 - RNA, 22 nt, Human
cuuggagugaaugggggcaggu

SEQ ID NO: 79989 - RNA, 22 nt, Human
cuuggauucauugugggaggga

SEQ ID NO: 79990 - RNA, 22 nt, Human
cuuggcaccaccaaguggccau

SEQ ID NO: 79991 - RNA, 22 nt, Human
gaagcuaaugagauaaaugcca

SEQ ID NO: 79992 - RNA, 22 nt, Human
gaagcuccguacuaugacuuuu

SEQ ID NO: 79993 - RNA, 22 nt, Human
gaagcugaugaggaccagauug

SEQ ID NO: 79994 - RNA, 22 nt, Human
gaagcuuaauuaugaccagcug

SEQ ID NO: 79995 - RNA, 22 nt, Human
gaaggaaaaauacucuguaagg

SEQ ID NO: 79996 - RNA, 22 nt, Human
gaaggaaaggucucaugccuuu

SEQ ID NO: 79997 - RNA, 20 nt, Human
gaaggaagggggcaagguga

SEQ ID NO: 79998 - RNA, 22 nt, Human
gaaggaagugcucauacuaguu

SEQ ID NO: 79999 - RNA, 22 nt, Human
gaaggagagaaaggcaauucug

SEQ ID NO: 80000 - RNA, 19 nt, Human
gaaggagagcugaguuagg

SEQ ID NO: 80001 - RNA, 22 nt, Human
gaaggaggcguuagcccuagga

SEQ ID NO: 80002 - RNA, 22 nt, Human
gaaggagggagcggcgcggauu

SEQ ID NO: 80003 - RNA, 22 nt, Human
gaaggaggucugcauucuacag

SEQ ID NO: 80004 - RNA, 22 nt, Human
gaaggaggugucaguuggacug

SEQ ID NO: 80005 - RNA, 22 nt, Human
gaaggcaacaccaggaugcacu

SEQ ID NO: 80006 - RNA, 22 nt, Human
gaaggcaagaucucaguggagg

SEQ ID NO: 80007 - RNA, 22 nt, Human
gaaggcaagcuuuggauaugag

SEQ ID NO: 80008 - RNA, 22 nt, Human
gaaggcacagauggcaguccac

SEQ ID NO: 80009 - RNA, 22 nt, Human
gaaggcaggcuucugauuaggu

SEQ ID NO: 80010 - RNA, 22 nt, Human
gaaggcaucacagaggcuguga

SEQ ID NO: 80011 - RNA, 22 nt, Human
gaaggcauucuauucuacauau

SEQ ID NO: 80012 - RNA, 22 nt, Human
gaaggccacaaaaaaugucaua

SEQ ID NO: 80013 - RNA, 22 nt, Human
gaaggccauuagagccugugcc

SEQ ID NO: 80014 - RNA, 22 nt, Human
gaaggcccgcccugagcaaggg

SEQ ID NO: 80015 - RNA, 22 nt, Human
gaaggcccuguuuucccuauuu

SEQ ID NO: 80016 - RNA, 22 nt, Human
gaaggccuaggaaggaagccuu

SEQ ID NO: 80017 - RNA, 22 nt, Human
gaaggccuagggaugcucugcg

SEQ ID NO: 80018 - RNA, 22 nt, Human
gaaggcuguggcuggucucagu

SEQ ID NO: 80019 - RNA, 22 nt, Human
gaaggcuucccaccugauauuu

SEQ ID NO: 80020 - RNA, 20 nt, Human
gaaggcuuggacagugacag

SEQ ID NO: 80021 - RNA, 22 nt, Human
gaaggcuugguuuuuucaacac

SEQ ID NO: 80022 - RNA, 19 nt, Human
gaaggcuuuugguauguuu

SEQ ID NO: 80023 - RNA, 22 nt, Human
gaagggcuuucugggagaagag

SEQ ID NO: 80024 - RNA, 22 nt, Human
gaaggggaaaguugagcaaaua

SEQ ID NO: 80025 - RNA, 22 nt, Human
gaagggugugugugagggacac

SEQ ID NO: 80026 - RNA, 22 nt, Human
gaagguccagcguggccaaguc

SEQ ID NO: 80027 - RNA, 22 nt, Human
gaaggugcaguggcuggaggcu

SEQ ID NO: 80028 - RNA, 22 nt, Human
gaagguggcgagcggauugcug

SEQ ID NO: 80029 - RNA, 22 nt, Human
gaaggugucagcaagucaaagc

SEQ ID NO: 80030 - RNA, 22 nt, Human
gaagguguccaucaccaacugu

SEQ ID NO: 80031 - RNA, 22 nt, Human
gaagguucuguguacacuacuu

SEQ ID NO: 80032 - RNA, 22 nt, Human
gaagguuugaaauagguauaga

SEQ ID NO: 80033 - RNA, 22 nt, Human
gaagguuuugauuccacugaau

SEQ ID NO: 80034 - RNA, 22 nt, Human
gaaguagaaaacucaguuucaa

SEQ ID NO: 80035 - RNA, 22 nt, Human
gaaguauaugucuuuaaucuau

SEQ ID NO: 80036 - RNA, 22 nt, Human
gaaguauuauagcauauuagcc

SEQ ID NO: 80037 - RNA, 22 nt, Human
gaagucagaaaagaauuaggga

SEQ ID NO: 80038 - RNA, 22 nt, Human
gaagucauccacuaugggggag

SEQ ID NO: 80039 - RNA, 22 nt, Human
gaagucugacucuuuguaagcu

SEQ ID NO: 80040 - RNA, 22 nt, Human
gaagucuguggguucaaaggca

SEQ ID NO: 80041 - RNA, 22 nt, Human
gaagucuugaagagcacuguaa

SEQ ID NO: 80042 - RNA, 22 nt, Human
gaagucuuuuagcaaaacgaac

SEQ ID NO: 80043 - RNA, 18 nt, Human
gaagugaagugacucaau

SEQ ID NO: 80044 - RNA, 22 nt, Human
gaagugacagaagggaugggca

SEQ ID NO: 80045 - RNA, 22 nt, Human
gaagugaugacgcuguguuuuu

SEQ ID NO: 80046 - RNA, 22 nt, Human
gaagugcaaaaccacaugguaa

SEQ ID NO: 80047 - RNA, 22 nt, Human
gaaguggggaagcaacaggaga

SEQ ID NO: 80048 - RNA, 22 nt, Human
gaaguggguggugauaucacug

SEQ ID NO: 80049 - RNA, 22 nt, Human
gaaguguuguaucuuuuuaaua

SEQ ID NO: 80050 - RNA, 22 nt, Human
gaaguguuuaagucuucuuugu

SEQ ID NO: 80051 - RNA, 22 nt, Human
gaaguuaccgaaccucuccaug

SEQ ID NO: 80052 - RNA, 22 nt, Human
gaaguuacucucguuaaauaug

SEQ ID NO: 80053 - RNA, 22 nt, Human
gaaguuaggcuuuccuaugcuu

SEQ ID NO: 80054 - RNA, 22 nt, Human
gaaguuaguguggaugcaggga

SEQ ID NO: 80055 - RNA, 22 nt, Human
gaaguuauaaacuuuuccuccc

SEQ ID NO: 80056 - RNA, 22 nt, Human
gaaguuauuuuaccuguuaaag

SEQ ID NO: 80057 - RNA, 22 nt, Human
gaaguuccagugauauaaaacu

SEQ ID NO: 80058 - RNA, 22 nt, Human
gaaguucugaaauaaaauccug

SEQ ID NO: 80059 - RNA, 22 nt, Human
gaaguucugaccauauggccaa

SEQ ID NO: 80060 - RNA, 22 nt, Human
gaaguucuuagucucauuugca

SEQ ID NO: 80061 - RNA, 22 nt, Human
gaaguucuuaugaaaacuugag

SEQ ID NO: 80062 - RNA, 23 nt, Human
gaaguucuuucuucucaugcugu

SEQ ID NO: 80063 - RNA, 22 nt, Human
gaaguuuaccucugccuugcuu

SEQ ID NO: 80064 - RNA, 22 nt, Human
gaaguuuauggugcuuguaagg

SEQ ID NO: 80065 - RNA, 22 nt, Human
gaaguuuuuguagagacagggu

SEQ ID NO: 80066 - RNA, 22 nt, Human
gaauaagugaaguuggcagcuu

SEQ ID NO: 80067 - RNA, 23 nt, Human
gaauacagagauaaauagaacac

SEQ ID NO: 80068 - RNA, 22 nt, Human
gaauacaugauuaaaguuugau

SEQ ID NO: 80069 - RNA, 22 nt, Human
gaauacauggcagggagucauc

SEQ ID NO: 80070 - RNA, 22 nt, Human
gaauacauguguguauagaggu

SEQ ID NO: 80071 - RNA, 22 nt, Human
gaauacauguuguuucccugga

SEQ ID NO: 80072 - RNA, 22 nt, Human
gaauagauauccuugagggucu

SEQ ID NO: 80073 - RNA, 22 nt, Human
gaauaguucuauggcugcaggg

SEQ ID NO: 80074 - RNA, 23 nt, Human
gaauaguuuuagaaauuggagaa

SEQ ID NO: 80075 - RNA, 22 nt, Human
gaauauaggaccucugggaaca

SEQ ID NO: 80076 - RNA, 22 nt, Human
ggcagugcaaggcagccuggau

SEQ ID NO: 80077 - RNA, 22 nt, Human
ggcaguggcauguggguagugg

SEQ ID NO: 80078 - RNA, 22 nt, Human
ggcaguggcuguagucucuugg

SEQ ID NO: 80079 - RNA, 22 nt, Human
ggcaguggguggaucucaggga

SEQ ID NO: 80080 - RNA, 22 nt, Human
ggcaguggugggaggcucgcuc

SEQ ID NO: 80081 - RNA, 22 nt, Human
ggcaguguccagcuuccuggag

SEQ ID NO: 80082 - RNA, 22 nt, Human
ggcaguguggcauaacauguag

SEQ ID NO: 80083 - RNA, 22 nt, Human
ggcaguguggccugaguaaguc

SEQ ID NO: 80084 - RNA, 22 nt, Human
ggcaguguuauuuuucagaaau

SEQ ID NO: 80085 - RNA, 22 nt, Human
ggcaguguuccagaccuucacc

SEQ ID NO: 80086 - RNA, 22 nt, Human
ggcaguucucagccaaggcaau

SEQ ID NO: 80087 - RNA, 22 nt, Human
ggcaguuucaucaggagaaaag

SEQ ID NO: 80088 - RNA, 22 nt, Human
ggcaguuuuaacagagguagua

SEQ ID NO: 80089 - RNA, 22 nt, Human
ggcauagauuucuuuagguuua

SEQ ID NO: 80090 - RNA, 22 nt, Human
ggcauagcggcucagcguccag

SEQ ID NO: 80091 - RNA, 22 nt, Human
ggcauauguagcguguguucug

SEQ ID NO: 80092 - RNA, 22 nt, Human
ggcaucaggaucugucuugcuu

SEQ ID NO: 80093 - RNA, 22 nt, Human
ggcauccaguucugaucaacaa

SEQ ID NO: 80094 - RNA, 20 nt, Human
ggcauccuuuuggucacagc

SEQ ID NO: 80095 - RNA, 21 nt, Human
ggcaucucuuaguaucaccau

SEQ ID NO: 80096 - RNA, 18 nt, Human
ggcaucugcacagcagcc

SEQ ID NO: 80097 - RNA, 22 nt, Human
ggcaucuggaucugcuucuccc

SEQ ID NO: 80098 - RNA, 22 nt, Human
ggcaugagagguccuggggauu

SEQ ID NO: 80099 - RNA, 22 nt, Human
ggcaugagcacgaagugguacc

SEQ ID NO: 80100 - RNA, 22 nt, Human
ggcaugaguaacgugagugagg

SEQ ID NO: 80101 - RNA, 23 nt, Human
ggcaugcaauggacagagcugga

SEQ ID NO: 80102 - RNA, 22 nt, Human
ggcaugcucuuuguccacagua

SEQ ID NO: 80103 - RNA, 22 nt, Human
ggcaugcuucugagaugucucc

SEQ ID NO: 80104 - RNA, 22 nt, Human
ggcaugcuugccaugggccagu

SEQ ID NO: 80105 - RNA, 21 nt, Human
ggcauggcaccucugggcagg

SEQ ID NO: 80106 - RNA, 22 nt, Human
ggcauggcucggagucagaaca

SEQ ID NO: 80107 - RNA, 22 nt, Human
ggcauggcuggguucuggugag

SEQ ID NO: 80108 - RNA, 22 nt, Human
ggcaugggagugagcaaccuua

SEQ ID NO: 80109 - RNA, 19 nt, Human
ggcauggucggaagagcuc

SEQ ID NO: 80110 - RNA, 22 nt, Human
ggcauguaugugcauuuuugua

SEQ ID NO: 80111 - RNA, 22 nt, Human
ggcaugugccugaggucacaca

SEQ ID NO: 80112 - RNA, 22 nt, Human
ggcauguuguuuauguuucugg

SEQ ID NO: 80113 - RNA, 22 nt, Human
ggcauguuucaucacaucaaga

SEQ ID NO: 80114 - RNA, 22 nt, Human
ggcauuuagagggcuuuucuga

SEQ ID NO: 80115 - RNA, 22 nt, Human
ggcauuuaguuuucauauucug

SEQ ID NO: 80116 - RNA, 20 nt, Human
ggcauuuaugaaccaagccu

SEQ ID NO: 80117 - RNA, 22 nt, Human
ggcauuugacucagugacuggg

SEQ ID NO: 80118 - RNA, 22 nt, Human
ggccaaaccgcaauuauuuuug

SEQ ID NO: 80119 - RNA, 21 nt, Human
ggccaacauggucucaucucu

SEQ ID NO: 80120 - RNA, 22 nt, Human
ggccacaacuugcuccuagccc

SEQ ID NO: 80121 - RNA, 21 nt, Human
ggccacaagcggaggagccgc

SEQ ID NO: 80122 - RNA, 22 nt, Human
ggccacaagugguccugagucc

SEQ ID NO: 80123 - RNA, 22 nt, Human
ggccacacagaugacugcuuuc

SEQ ID NO: 80124 - RNA, 22 nt, Human
ggccacagcagaugcuucagau

SEQ ID NO: 80125 - RNA, 22 nt, Human
gacugaggcuccccuaggcuca

SEQ ID NO: 80126 - RNA, 22 nt, Human
gacugagggacagggcagugga

SEQ ID NO: 80127 - RNA, 22 nt, Human
gacugagggauagaggugcuuc

SEQ ID NO: 80128 - RNA, 17 nt, Human
gacugagguaaggugag

SEQ ID NO: 80129 - RNA, 22 nt, Human
gacugaggugaccuaggacuac

SEQ ID NO: 80130 - RNA, 22 nt, Human
gacugcagugaaggcacauggg

SEQ ID NO: 80131 - RNA, 22 nt, Human
gacugcauaggaccaaauagua

SEQ ID NO: 80132 - RNA, 22 nt, Human
gacugccucaguuucccugcag

SEQ ID NO: 80133 - RNA, 22 nt, Human
gacugcuuauauguuaaagaua

SEQ ID NO: 80134 - RNA, 22 nt, Human
gacugcuuugaccaauagcaca

SEQ ID NO: 80135 - RNA, 22 nt, Human
gacuggaaucccaggcucugug

SEQ ID NO: 80136 - RNA, 21 nt, Human
gacuggagagaggaagucugg

SEQ ID NO: 80137 - RNA, 22 nt, Human
gacuggagauaaaaccaugagu

SEQ ID NO: 80138 - RNA, 22 nt, Human
gacuggagucaaugagcagcac

SEQ ID NO: 80139 - RNA, 22 nt, Human
gacuggcuuauuucacuuagca

SEQ ID NO: 80140 - RNA, 22 nt, Human
gacugguaaggaaauucacuaa

SEQ ID NO: 80141 - RNA, 22 nt, Human
gacugucuccugucaugaggga

SEQ ID NO: 80142 - RNA, 22 nt, Human
gacuguggcguagaugcuggga

SEQ ID NO: 80143 - RNA, 22 nt, Human
gacuguggcuaaugguguuagg

SEQ ID NO: 80144 - RNA, 22 nt, Human
gacugugggaagacuguagguu

SEQ ID NO: 80145 - RNA, 22 nt, Human
gacuguguccaugugcuggauu

SEQ ID NO: 80146 - RNA, 22 nt, Human
gacuuaaguggugugauaagug

SEQ ID NO: 80147 - RNA, 20 nt, Human
gacuucaauuucuaucuuuu

SEQ ID NO: 80148 - RNA, 22 nt, Human
gacuucaugugcaagcgcuuug

SEQ ID NO: 80149 - RNA, 20 nt, Human
gacuucccauaucuucuuca

SEQ ID NO: 80150 - RNA, 19 nt, Human
gacuucugauguccagaug

SEQ ID NO: 80151 - RNA, 22 nt, Human
gacuuuaaagguucugcugcuu

SEQ ID NO: 80152 - RNA, 22 nt, Human
gacuuuaaguccuaucugugcg

SEQ ID NO: 80153 - RNA, 22 nt, Human
gacuuuauaaaugagaggcgga

SEQ ID NO: 80154 - RNA, 22 nt, Human
gacuuuauuacuaacccuguga

SEQ ID NO: 80155 - RNA, 22 nt, Human
gacuuuccagguccugggcuau

SEQ ID NO: 80156 - RNA, 22 nt, Human
gacuuucugaaggucucgcagu

SEQ ID NO: 80157 - RNA, 22 nt, Human
gacuuucugauguaaacauuua

SEQ ID NO: 80158 - RNA, 21 nt, Human
gacuuucuuaccagauuuuug

SEQ ID NO: 80159 - RNA, 22 nt, Human
gacuuucuuguagugucugaug

SEQ ID NO: 80160 - RNA, 19 nt, Human
gacuuuggaaaugcuguuu

SEQ ID NO: 80161 - RNA, 17 nt, Human
gacuuuggaguuucaua

SEQ ID NO: 80162 - RNA, 22 nt, Human
gacuuugguucagggcucagag

SEQ ID NO: 80163 - RNA, 22 nt, Human
gacuuuguagguaauugugucu

SEQ ID NO: 80164 - RNA, 22 nt, Human
gacuuugugccaaacgccagaa

SEQ ID NO: 80165 - RNA, 18 nt, Human
gagaaaccugugaaugcu

SEQ ID NO: 80166 - RNA, 22 nt, Human
gagaaacugaauauuuaacggg

SEQ ID NO: 80167 - RNA, 22 nt, Human
gagaaacuuggaguuauucugg

SEQ ID NO: 80168 - RNA, 22 nt, Human
gagaaagaaagggaaguuuguu

SEQ ID NO: 80169 - RNA, 22 nt, Human
gagaaagacguaggcugggagg

SEQ ID NO: 80170 - RNA, 22 nt, Human
gagaaagauuguccuucagggg

SEQ ID NO: 80171 - RNA, 23 nt, Human
gagaaagccggcuaugauccugg

SEQ ID NO: 80172 - RNA, 22 nt, Human
gagaacacgaggaggcccagcg

SEQ ID NO: 80173 - RNA, 22 nt, Human
gagaacacuuauggauuauucu

SEQ ID NO: 80174 - RNA, 22 nt, Human
gagaacagaagcauuccuaauu

SEQ ID NO: 80175 - RNA, 22 nt, Human
gagaacagauuuuucugcuguc

SEQ ID NO: 80176 - RNA, 22 nt, Human
gagaacaguguuguauuuuuuc

SEQ ID NO: 80177 - RNA, 22 nt, Human
gagaaccuacuguauacuauau

SEQ ID NO: 80178 - RNA, 21 nt, Human
gagaacugaaccagagcagcu

SEQ ID NO: 80179 - RNA, 22 nt, Human
gagaagcaaucaguggccaccc

SEQ ID NO: 80180 - RNA, 22 nt, Human
gagaaggacuacacaucuggcc

SEQ ID NO: 80181 - RNA, 22 nt, Human
gagaaggacuacggaaaacaga

SEQ ID NO: 80182 - RNA, 22 nt, Human
gagaaggcuuccaaauucugug

SEQ ID NO: 80183 - RNA, 22 nt, Human
gagaagggauauggcuucuuga

SEQ ID NO: 80184 - RNA, 22 nt, Human
gagaagggggcucgaguguccu

SEQ ID NO: 80185 - RNA, 22 nt, Human
gagcagcuggacaggccucccu

SEQ ID NO: 80186 - RNA, 22 nt, Human
gagcagcuguccccaaagcuuc

SEQ ID NO: 80187 - RNA, 22 nt, Human
gagcagcuugcgcugucuucac

SEQ ID NO: 80188 - RNA, 22 nt, Human
gagcaggaacagaucccuugga

SEQ ID NO: 80189 - RNA, 19 nt, Human
gagcaggccacacaugugu

SEQ ID NO: 80190 - RNA, 22 nt, Human
gagcaggccagcaauggaaggg

SEQ ID NO: 80191 - RNA, 22 nt, Human
gagcaggcuugcagagaagggg

SEQ ID NO: 80192 - RNA, 17 nt, Human
gagcagggaugcgguuc

SEQ ID NO: 80193 - RNA, 22 nt, Human
gagcagggcuuguccuccucau

SEQ ID NO: 80194 - RNA, 22 nt, Human
gagcaggucuuucauggugcau

SEQ ID NO: 80195 - RNA, 22 nt, Human
gagcaguaggagaacccugagc

SEQ ID NO: 80196 - RNA, 22 nt, Human
gagcagugaagacagaaguaca

SEQ ID NO: 80197 - RNA, 20 nt, Human
gagcagugagccagggaaag

SEQ ID NO: 80198 - RNA, 22 nt, Human
gagcagugccaaagaauuugcg

SEQ ID NO: 80199 - RNA, 22 nt, Human
gagcaguggucacagggaggga

SEQ ID NO: 80200 - RNA, 22 nt, Human
gagcaguguuuguggaccugga

SEQ ID NO: 80201 - RNA, 22 nt, Human
gagcaucuccuaccuacuccuu

SEQ ID NO: 80202 - RNA, 22 nt, Human
gagcaucuggcuagaggaguga

SEQ ID NO: 80203 - RNA, 22 nt, Human
gagcaugagggaaggcagcaga

SEQ ID NO: 80204 - RNA, 22 nt, Human
gagcauggauagaaggugggau

SEQ ID NO: 80205 - RNA, 22 nt, Human
gagccaaaugugcagacauugu

SEQ ID NO: 80206 - RNA, 22 nt, Human
gagccaagcucuucuccaugag

SEQ ID NO: 80207 - RNA, 22 nt, Human
gagccacagacuguauuuggga

SEQ ID NO: 80208 - RNA, 22 nt, Human
gagccacagcaaccucaaagga

SEQ ID NO: 80209 - RNA, 22 nt, Human
gagccagagcuacaagugucug

SEQ ID NO: 80210 - RNA, 22 nt, Human
gagccagauuuuaugcaagaca

SEQ ID NO: 80211 - RNA, 22 nt, Human
gagccagcuacauggucugcaa

SEQ ID NO: 80212 - RNA, 22 nt, Human
gagccagcugagcugcacuguc

SEQ ID NO: 80213 - RNA, 22 nt, Human
gagccaggcaccuucuguguug

SEQ ID NO: 80214 - RNA, 22 nt, Human
gagccaggcccguacuugcugu

SEQ ID NO: 80215 - RNA, 22 nt, Human
gagccagggagggucugguaua

SEQ ID NO: 80216 - RNA, 22 nt, Human
gagccagggcugugagcugagc

SEQ ID NO: 80217 - RNA, 22 nt, Human
gagccaggggucagcuccgagg

SEQ ID NO: 80218 - RNA, 22 nt, Human
gagccaggucgggccgcggcga

SEQ ID NO: 80219 - RNA, 22 nt, Human
gagccagguuugaaucucaguc

SEQ ID NO: 80220 - RNA, 22 nt, Human
gagccauacaaccuauaaagug

SEQ ID NO: 80221 - RNA, 22 nt, Human
gagcccagcccagagccauaug

SEQ ID NO: 80222 - RNA, 22 nt, Human
gagcccaggaaguggaggcuga

SEQ ID NO: 80223 - RNA, 22 nt, Human
gagcccaguaggcaaagcugca

SEQ ID NO: 80224 - RNA, 22 nt, Human
gagcccagucugcuccugcgcc

SEQ ID NO: 80225 - RNA, 22 nt, Human
gagccccaggacagcucuaguu

SEQ ID NO: 80226 - RNA, 22 nt, Human
gagcccucgggcgagcccgcgc

SEQ ID NO: 80227 - RNA, 22 nt, Human
gagcccugauuugcagcauuug

SEQ ID NO: 80228 - RNA, 22 nt, Human
gagcccugcccacuugucugag

SEQ ID NO: 80229 - RNA, 22 nt, Human
gagcccugcggagccccgaggc

SEQ ID NO: 80230 - RNA, 22 nt, Human
gagcccugcgugucugggggca

SEQ ID NO: 80231 - RNA, 22 nt, Human
gagcccugugauucuguugugu

SEQ ID NO: 80232 - RNA, 22 nt, Human
gagccgaggcgcacagcucggg

SEQ ID NO: 80233 - RNA, 22 nt, Human
gagccugagcaaugugauguuu

SEQ ID NO: 80234 - RNA, 22 nt, Human
gagccugcagcuuucacagcau

SEQ ID NO: 80235 - RNA, 22 nt, Human
gagccuggacaucucaggccca

SEQ ID NO: 80236 - RNA, 22 nt, Human
gagccuggauugucaccgacuu

SEQ ID NO: 80237 - RNA, 22 nt, Human
gagccugggacugggggucaug

SEQ ID NO: 80238 - RNA, 22 nt, Human
gagccuucaucgcagccuuguu

SEQ ID NO: 80239 - RNA, 20 nt, Human
gagccuuccccucaccacug

SEQ ID NO: 80240 - RNA, 22 nt, Human
gagccuuugaagcccucagaga

SEQ ID NO: 80241 - RNA, 22 nt, Human
gagcggaggcuuggaggccagc

SEQ ID NO: 80242 - RNA, 22 nt, Human
gagcuaaguuucuggaggcaga

SEQ ID NO: 80243 - RNA, 22 nt, Human
gacccugguguccagguccugc

SEQ ID NO: 80244 - RNA, 22 nt, Human
gacccuuucugagugagcaguu

SEQ ID NO: 80245 - RNA, 22 nt, Human
gacccuuuucagacucagguac

SEQ ID NO: 80246 - RNA, 22 nt, Human
gaccucagauuuucccaggcca

SEQ ID NO: 80247 - RNA, 22 nt, Human
gaccucagcuguggggaugcug

SEQ ID NO: 80248 - RNA, 22 nt, Human
gaccucaguauuguucaggaug

SEQ ID NO: 80249 - RNA, 22 nt, Human
gaccucagugaauggucaugua

SEQ ID NO: 80250 - RNA, 16 nt, Human
gaccucagugcuggcu

SEQ ID NO: 80251 - RNA, 22 nt, Human
gaccucugaaggcagagcaggg

SEQ ID NO: 80252 - RNA, 22 nt, Human
gaccuggaaugaagggucccuc

SEQ ID NO: 80253 - RNA, 22 nt, Human
gaccuggcauauucauuggcac

SEQ ID NO: 80254 - RNA, 22 nt, Human
gaccugggguaagcuuggcaac

SEQ ID NO: 80255 - RNA, 20 nt, Human
gaccugugucugggaugcgg

SEQ ID NO: 80256 - RNA, 22 nt, Human
gaccuuagaacgugacacaaga

SEQ ID NO: 80257 - RNA, 22 nt, Human
gaccuuccaugccuucuuccaa

SEQ ID NO: 80258 - RNA, 22 nt, Human
gacggcagaaacucaugagguc

SEQ ID NO: 80259 - RNA, 19 nt, Human
gacuacagggggaagaagu

SEQ ID NO: 80260 - RNA, 22 nt, Human
gacuacucaaacuuucucuaua

SEQ ID NO: 80261 - RNA, 22 nt, Human
gacuauugcacacuucucucac

SEQ ID NO: 80262 - RNA, 22 nt, Human
gacuauuucccucaucaucuuc

SEQ ID NO: 80263 - RNA, 22 nt, Human
gacucagagaucccuggagguc

SEQ ID NO: 80264 - RNA, 22 nt, Human
gacuccagcauauacuuuuagu

SEQ ID NO: 80265 - RNA, 22 nt, Human
gacucccaagcuuggaggaagg

SEQ ID NO: 80266 - RNA, 22 nt, Human
gacuccucagucacccucagcu

SEQ ID NO: 80267 - RNA, 22 nt, Human
gacuccuggcuuucccucuuag

SEQ ID NO: 80268 - RNA, 22 nt, Human
gacucucaagcacaaguccacc

SEQ ID NO: 80269 - RNA, 22 nt, Human
gacucugggaguuuaugugauu

SEQ ID NO: 80270 - RNA, 22 nt, Human
gacucugggcugagccagggcc

SEQ ID NO: 80271 - RNA, 21 nt, Human
gacucuggggucagcucaacc

SEQ ID NO: 80272 - RNA, 22 nt, Human
gacucuuucccugugacagagu

SEQ ID NO: 80273 - RNA, 22 nt, Human
gacugaaagcuuggaauguucc

SEQ ID NO: 80274 - RNA, 22 nt, Human
gacugaaauuauaccaaguggu

SEQ ID NO: 80275 - RNA, 22 nt, Human
gacugaaccucaaauuuggcuc

SEQ ID NO: 80276 - RNA, 22 nt, Human
gacugagaaacaguacauuacc

SEQ ID NO: 80277 - RNA, 22 nt, Human
gacugagcuucugcaacacugg

SEQ ID NO: 80278 - RNA, 22 nt, Human
gacugagguauuaagauggcuu

SEQ ID NO: 80279 - RNA, 22 nt, Human
gacugaggugcccagaggugac

SEQ ID NO: 80280 - RNA, 22 nt, Human
gacugcaaccuuagacuagaaa

SEQ ID NO: 80281 - RNA, 22 nt, Human
gacugcaagucugggaaaggag

SEQ ID NO: 80282 - RNA, 22 nt, Human
gacuggacucugaagaugggug

SEQ ID NO: 80283 - RNA, 22 nt, Human
gacuggccuggagaugcagcug

SEQ ID NO: 80284 - RNA, 22 nt, Human
gacuggcucuaucaggauaaau

SEQ ID NO: 80285 - RNA, 22 nt, Human
gacuggcucuaucuccuuggcg

SEQ ID NO: 80286 - RNA, 22 nt, Human
gacugggaggguucagcugggu

SEQ ID NO: 80287 - RNA, 22 nt, Human
gacugggguaaggugaggaggu

SEQ ID NO: 80288 - RNA, 22 nt, Human
gacuguccagaauuccuaggug

SEQ ID NO: 80289 - RNA, 22 nt, Human
gacugucucugugaaugguagg

SEQ ID NO: 80290 - RNA, 22 nt, Human
gacugucuuuugaauaaaaaug

SEQ ID NO: 80291 - RNA, 22 nt, Human
gacugugacuucugaagcaaua

SEQ ID NO: 80292 - RNA, 22 nt, Human
gacuguggacucucaugauaga

SEQ ID NO: 80293 - RNA, 22 nt, Human
gacuguggcugcguguaaggaa

SEQ ID NO: 80294 - RNA, 22 nt, Human
gagagggagccagccaggaacc

SEQ ID NO: 80295 - RNA, 22 nt, Human
gagagggccgggggccagcucc

SEQ ID NO: 80296 - RNA, 22 nt, Human
gagagggcucuguguggguacu

SEQ ID NO: 80297 - RNA, 22 nt, Human
gagaggggcccaagccacauag

SEQ ID NO: 80298 - RNA, 22 nt, Human
gagaggggcgcgcagcucgcga

SEQ ID NO: 80299 - RNA, 22 nt, Human
gagaggucaucucccaucagca

SEQ ID NO: 80300 - RNA, 22 nt, Human
gagagucuagugcaccuaguuu

SEQ ID NO: 80301 - RNA, 22 nt, Human
gagagucugguagagcagcaag

SEQ ID NO: 80302 - RNA, 22 nt, Human
gagagugauucccucccauaga

SEQ ID NO: 80303 - RNA, 22 nt, Human
gagaguggaaagcaagcugagu

SEQ ID NO: 80304 - RNA, 22 nt, Human
gagagugucuggaggaagcuaa

SEQ ID NO: 80305 - RNA, 22 nt, Human
gagaguuaguugagcagucuga

SEQ ID NO: 80306 - RNA, 22 nt, Human
gagaguucuaccucugaaggcg

SEQ ID NO: 80307 - RNA, 22 nt, Human
gagauaaagcuaccauguugau

SEQ ID NO: 80308 - RNA, 22 nt, Human
gagauaacucuaggucuucgag

SEQ ID NO: 80309 - RNA, 22 nt, Human
gagauauaaccuaaaggucacu

SEQ ID NO: 80310 - RNA, 22 nt, Human
gagauauuuauucauacuguca

SEQ ID NO: 80311 - RNA, 22 nt, Human
gagaucaucuuuuuuagauucc

SEQ ID NO: 80312 - RNA, 17 nt, Human
gagaugcuaaucugauc

SEQ ID NO: 80313 - RNA, 22 nt, Human
gagaugcuauggcuauuccccu

SEQ ID NO: 80314 - RNA, 22 nt, Human
gagaugcuuuugguccaagagu

SEQ ID NO: 80315 - RNA, 21 nt, Human
gagaugcuuuuuauucaaccc

SEQ ID NO: 80316 - RNA, 22 nt, Human
gagauggaaaacugcugguagu

SEQ ID NO: 80317 - RNA, 20 nt, Human
gagauggacagaugaagggg

SEQ ID NO: 80318 - RNA, 22 nt, Human
gagauggagaaggaagcuguuu

SEQ ID NO: 80319 - RNA, 22 nt, Human
gagauggcucucagaucuuuga

SEQ ID NO: 80320 - RNA, 17 nt, Human
gagauggguggaucacc

SEQ ID NO: 80321 - RNA, 22 nt, Human
gagaugguagccucagaagagu

SEQ ID NO: 80322 - RNA, 22 nt, Human
gagaugguguuccacugccagu

SEQ ID NO: 80323 - RNA, 23 nt, Human
gagauguggguuuguucaguguc

SEQ ID NO: 80324 - RNA, 22 nt, Human
gagaugugucagguccuggggg

SEQ ID NO: 80325 - RNA, 22 nt, Human
gagauguuuugcugagaauggg

SEQ ID NO: 80326 - RNA, 22 nt, Human
gagauucuaagucguugguuag

SEQ ID NO: 80327 - RNA, 22 nt, Human
gagauucuaauauaaggauggg

SEQ ID NO: 80328 - RNA, 22 nt, Human
gagauucucgagggcuuccagc

SEQ ID NO: 80329 - RNA, 22 nt, Human
gagauucugguuagguguauuu

SEQ ID NO: 80330 - RNA, 22 nt, Human
gagauucugugaaacggacauu

SEQ ID NO: 80331 - RNA, 21 nt, Human
gagauuuagaaggaucaauuu

SEQ ID NO: 80332 - RNA, 22 nt, Human
gagcaaacaucagugaugucug

SEQ ID NO: 80333 - RNA, 22 nt, Human
gagcaacaaauuagggggauuu

SEQ ID NO: 80334 - RNA, 22 nt, Human
gagcaacacauugaaugaggau

SEQ ID NO: 80335 - RNA, 22 nt, Human
gagcaacaggugauggggcugu

SEQ ID NO: 80336 - RNA, 19 nt, Human
gagcaacauauguaaacuc

SEQ ID NO: 80337 - RNA, 22 nt, Human
gagcaagacucacugcaucuug

SEQ ID NO: 80338 - RNA, 22 nt, Human
gagcaagauuaaaaggcugggu

SEQ ID NO: 80339 - RNA, 22 nt, Human
gagcacagauccuggagccaca

SEQ ID NO: 80340 - RNA, 22 nt, Human
gagcacagcuggagguagcauu

SEQ ID NO: 80341 - RNA, 22 nt, Human
gagcacaguccuuuuguuaaaa

SEQ ID NO: 80342 - RNA, 22 nt, Human
gagcacaguguguugugauuuc

SEQ ID NO: 80343 - RNA, 22 nt, Human
gagcacguugaagcgcacuguc

SEQ ID NO: 80344 - RNA, 22 nt, Human
gagcacugagcuggaauuggag

SEQ ID NO: 80345 - RNA, 22 nt, Human
gagcacugaggaaagcugguua

SEQ ID NO: 80346 - RNA, 18 nt, Human
gagcacugguguugaggu

SEQ ID NO: 80347 - RNA, 22 nt, Human
gagcacuguacucauuugcacu

SEQ ID NO: 80348 - RNA, 22 nt, Human
gagcagaacaggccggguggga

SEQ ID NO: 80349 - RNA, 23 nt, Human
gagcagagcgggcggggguccug

SEQ ID NO: 80350 - RNA, 16 nt, Human
gagcagagcgguucca

SEQ ID NO: 80351 - RNA, 18 nt, Human
gagcagaggaggguuuuu

SEQ ID NO: 80352 - RNA, 18 nt, Human
gagcagaggcucaacugg

SEQ ID NO: 80353 - RNA, 22 nt, Human
gagcagcagauugucuccaugg

SEQ ID NO: 80354 - RNA, 22 nt, Human
gagcagcccuagggcauaagca

SEQ ID NO: 80355 - RNA, 22 nt, Human
gagcagccugaggagcgugggc

SEQ ID NO: 80356 - RNA, 22 nt, Human
gagcagcuaaaauucucaugca

SEQ ID NO: 80357 - RNA, 22 nt, Human
gagcagcuagauaaagcccuuc

SEQ ID NO: 80358 - RNA, 22 nt, Human
gagcagcuccagccgcaugacu

SEQ ID NO: 80359 - RNA, 22 nt, Human
gagcagcugagcuggaaugaga

SEQ ID NO: 80360 - RNA, 19 nt, Human
gagcagcugcacccauuga

SEQ ID NO: 80361 - RNA, 22 nt, Human
gagcagcugugggguugaccau

SEQ ID NO: 80362 - RNA, 20 nt, Human
gagcagcuguuugcauugca

SEQ ID NO: 80363 - RNA, 22 nt, Human
gagcuagggguagucaggagac

SEQ ID NO: 80364 - RNA, 22 nt, Human
gagcuagguugagacucacuua

SEQ ID NO: 80365 - RNA, 22 nt, Human
gagcucagagccuauaguuggu

SEQ ID NO: 80366 - RNA, 22 nt, Human
gagcucagauucuggugucaga

SEQ ID NO: 80367 - RNA, 22 nt, Human
gagcucagcccaaagagcagug

SEQ ID NO: 80368 - RNA, 22 nt, Human
gagcucagccugaggccuggcu

SEQ ID NO: 80369 - RNA, 22 nt, Human
gagcucaggagcaucagaagaa

SEQ ID NO: 80370 - RNA, 22 nt, Human
gagcucagggcauugagcaaga

SEQ ID NO: 80371 - RNA, 22 nt, Human
gagcucauacccucuucucuuu

SEQ ID NO: 80372 - RNA, 22 nt, Human
gagcucauuguggauggauggg

SEQ ID NO: 80373 - RNA, 22 nt, Human
gagcucccuggagguucagaua

SEQ ID NO: 80374 - RNA, 22 nt, Human
gagcuccuggauugcuccuagg

SEQ ID NO: 80375 - RNA, 22 nt, Human
gagcucugacugcugggugaca

SEQ ID NO: 80376 - RNA, 22 nt, Human
gagcucugauguuuaguggaga

SEQ ID NO: 80377 - RNA, 22 nt, Human
gagcucuggguggcaggugucu

SEQ ID NO: 80378 - RNA, 22 nt, Human
gagcucuguccacacuuggaga

SEQ ID NO: 80379 - RNA, 17 nt, Human
gagcucuguggcacaag

SEQ ID NO: 80380 - RNA, 22 nt, Human
gagcucuguguggcuugggugg

SEQ ID NO: 80381 - RNA, 22 nt, Human
gagcucuuagauagggcaggaa

SEQ ID NO: 80382 - RNA, 22 nt, Human
gagcucuuauaguucuagcagu

SEQ ID NO: 80383 - RNA, 22 nt, Human
gagcugagaagcagcgcuugau

SEQ ID NO: 80384 - RNA, 19 nt, Human
gagcugagaguagcacugg

SEQ ID NO: 80385 - RNA, 22 nt, Human
gagcugaggauacaucagugaa

SEQ ID NO: 80386 - RNA, 22 nt, Human
gagcugaguagaggcugcuccc

SEQ ID NO: 80387 - RNA, 22 nt, Human
gagcugagucugcagucgccau

SEQ ID NO: 80388 - RNA, 22 nt, Human
gagcugaguuaccuccagauca

SEQ ID NO: 80389 - RNA, 22 nt, Human
gagcugcacaucugaggcuaau

SEQ ID NO: 80390 - RNA, 22 nt, Human
gagcugccagacaugggaauga

SEQ ID NO: 80391 - RNA, 22 nt, Human
gagcugccaguguaugaauucu

SEQ ID NO: 80392 - RNA, 22 nt, Human
gagcugcuggccuccugcggga

SEQ ID NO: 80393 - RNA, 22 nt, Human
gagcugcugguugcuggugccu

SEQ ID NO: 80394 - RNA, 22 nt, Human
gagcugcugugaggggagcuuc

SEQ ID NO: 80395 - RNA, 22 nt, Human
gagcugcuuccagaguugagug

SEQ ID NO: 80396 - RNA, 22 nt, Human
gagcuggacuuucagauacauc

SEQ ID NO: 80397 - RNA, 22 nt, Human
gagcuggccgcagagagggcag

SEQ ID NO: 80398 - RNA, 22 nt, Human
gagcuggccucaggcacaggag

SEQ ID NO: 80399 - RNA, 22 nt, Human
gagcugggacuuggaauccaca

SEQ ID NO: 80400 - RNA, 22 nt, Human
gagcugggaggacugggaacuu

SEQ ID NO: 80401 - RNA, 23 nt, Human
gagcugggauacaggcuuacugc

SEQ ID NO: 80402 - RNA, 22 nt, Human
gagcugggauucaucuaugucu

SEQ ID NO: 80403 - RNA, 22 nt, Human
gaugcagggcuggcaggagcuu

SEQ ID NO: 80404 - RNA, 22 nt, Human
gaugcauguauggagugagggu

SEQ ID NO: 80405 - RNA, 22 nt, Human
gaugccuccaaaugagggcaga

SEQ ID NO: 80406 - RNA, 22 nt, Human
gaugccucuuuuggcugaauua

SEQ ID NO: 80407 - RNA, 22 nt, Human
gaugcuaaaauaauuauuuuga

SEQ ID NO: 80408 - RNA, 22 nt, Human
gaugcucaucuguccuuugaug

SEQ ID NO: 80409 - RNA, 19 nt, Human
gaugcucauucagguggaa

SEQ ID NO: 80410 - RNA, 22 nt, Human
gaugcugaagugaagugaucuu

SEQ ID NO: 80411 - RNA, 22 nt, Human
gaugcugaccagcuguuuccuu

SEQ ID NO: 80412 - RNA, 22 nt, Human
gaugcugacugaccaaaaggau

SEQ ID NO: 80413 - RNA, 22 nt, Human
gaugcugagcuguauggcuggu

SEQ ID NO: 80414 - RNA, 22 nt, Human
gaugcugauuuuacuguuuucu

SEQ ID NO: 80415 - RNA, 22 nt, Human
gaugcugcucgggugccuggga

SEQ ID NO: 80416 - RNA, 22 nt, Human
gaugcuggccuggccaucuggg

SEQ ID NO: 80417 - RNA, 22 nt, Human
gaugcuucaagcuuccuuauaa

SEQ ID NO: 80418 - RNA, 22 nt, Human
gauggaagaaaaaugcaugucu

SEQ ID NO: 80419 - RNA, 22 nt, Human
gauggaggagauggcagggugc

SEQ ID NO: 80420 - RNA, 22 nt, Human
gauggagugccaggguggaacu

SEQ ID NO: 80421 - RNA, 22 nt, Human
gauggcagucaaccaggugagg

SEQ ID NO: 80422 - RNA, 22 nt, Human
gauggccuggguccccuuccgg

SEQ ID NO: 80423 - RNA, 22 nt, Human
gauggccuguauuugggccaga

SEQ ID NO: 80424 - RNA, 22 nt, Human
gauggcgguggccaccuccuug

SEQ ID NO: 80425 - RNA, 22 nt, Human
gauggcuugcuuagugacagca

SEQ ID NO: 80426 - RNA, 20 nt, Human
gaugggaaucggagcuggua

SEQ ID NO: 80427 - RNA, 22 nt, Human
gaugggcacggcagucugagag

SEQ ID NO: 80428 - RNA, 22 nt, Human
gauggggcuggcuuugaggguu

SEQ ID NO: 80429 - RNA, 22 nt, Human
gauggguggucucagacuugcc

SEQ ID NO: 80430 - RNA, 22 nt, Human
gauguaaaaacuccuuucgaaa

SEQ ID NO: 80431 - RNA, 22 nt, Human
gauguaaaauucuugguuguca

SEQ ID NO: 80432 - RNA, 22 nt, Human
gauguaauagauauagauugcu

SEQ ID NO: 80433 - RNA, 22 nt, Human
gauguacaaguaaaauaugugu

SEQ ID NO: 80434 - RNA, 22 nt, Human
gauguauacaggguugacucau

SEQ ID NO: 80435 - RNA, 22 nt, Human
gauguauacuuuucuuucucug

SEQ ID NO: 80436 - RNA, 22 nt, Human
gaugucugggucuuccuggcuu

SEQ ID NO: 80437 - RNA, 22 nt, Human
gaugucuuagguaacauucuau

SEQ ID NO: 80438 - RNA, 22 nt, Human
gaugucuucucaacuguagacc

SEQ ID NO: 80439 - RNA, 22 nt, Human
gaugucuuggcuugcucucugu

SEQ ID NO: 80440 - RNA, 22 nt, Human
gaugucuuggucaacuugggcu

SEQ ID NO: 80441 - RNA, 22 nt, Human
gaugugacuaacuugguaccag

SEQ ID NO: 80442 - RNA, 22 nt, Human
gauguggcugcucuaaagccca

SEQ ID NO: 80443 - RNA, 22 nt, Human
gaugugggguugagggaccagc

SEQ ID NO: 80444 - RNA, 22 nt, Human
gauguguauuuggaagacaaaa

SEQ ID NO: 80445 - RNA, 22 nt, Human
gauguguccccagaggauugaa

SEQ ID NO: 80446 - RNA, 22 nt, Human
gaugugugcuuuucgcaguguc

SEQ ID NO: 80447 - RNA, 22 nt, Human
gauguuaaagguugguaaguca

SEQ ID NO: 80448 - RNA, 22 nt, Human
gauguucuagaagugugguguu

SEQ ID NO: 80449 - RNA, 22 nt, Human
gauguucugggguguuuguggc

SEQ ID NO: 80450 - RNA, 21 nt, Human
gauguuggaggcuggggucug

SEQ ID NO: 80451 - RNA, 22 nt, Human
gauguuucccguuaagagaaaa

SEQ ID NO: 80452 - RNA, 22 nt, Human
gauguuucugggaaggaaaagu

SEQ ID NO: 80453 - RNA, 22 nt, Human
gauguuuuaggucccuguagcu

SEQ ID NO: 80454 - RNA, 22 nt, Human
gauuaaaaauaacccaugcuga

SEQ ID NO: 80455 - RNA, 22 nt, Human
gauuaagagaaguuucuuaucg

SEQ ID NO: 80456 - RNA, 22 nt, Human
gauuaagauuacauauuuaagu

SEQ ID NO: 80457 - RNA, 22 nt, Human
gauuaauagacacaaccaagcu

SEQ ID NO: 80458 - RNA, 22 nt, Human
gauuaauaguacagguucuuag

SEQ ID NO: 80459 - RNA, 22 nt, Human
gauuagcucuagaucugggcua

SEQ ID NO: 80460 - RNA, 22 nt, Human
gauuaguauccuuauuaagaga

SEQ ID NO: 80461 - RNA, 22 nt, Human
gauuaguugauuaagagucaga

SEQ ID NO: 80462 - RNA, 22 nt, Human
gauuaugguagaaacaagaagu

SEQ ID NO: 80463 - RNA, 22 nt, Human
gauucaagaccuagcucagcca

SEQ ID NO: 80464 - RNA, 23 nt, Human
gauucacagggugguuuaugggg

SEQ ID NO: 80465 - RNA, 22 nt, Human
gauucauaccguuucuucucca

SEQ ID NO: 80466 - RNA, 22 nt, Human
gauuccacagcuucgaggucuu

SEQ ID NO: 80467 - RNA, 22 nt, Human
gauuccugcuauucacagggcu

SEQ ID NO: 80468 - RNA, 22 nt, Human
gauuccuuggcucugucucagg

SEQ ID NO: 80469 - RNA, 22 nt, Human
gauucugaaauuaacagacugg

SEQ ID NO: 80470 - RNA, 18 nt, Human
gauucugauucuggaggc

SEQ ID NO: 80471 - RNA, 22 nt, Human
gauucugcgaugaggacgagcu

SEQ ID NO: 80472 - RNA, 22 nt, Human
gauucuggaguuaaggaugccu

SEQ ID NO: 80473 - RNA, 22 nt, Human
gauucuuacuucuaagcaagcu

SEQ ID NO: 80474 - RNA, 22 nt, Human
gauucuuuagcccagaaaguua

SEQ ID NO: 80475 - RNA, 22 nt, Human
gauugaaaggucuuuaaauugg

SEQ ID NO: 80476 - RNA, 22 nt, Human
gauugcccagaauauucucauu

SEQ ID NO: 80477 - RNA, 22 nt, Human
gauugcgucugugucaccuuca

SEQ ID NO: 80478 - RNA, 22 nt, Human
gauugcugccagcguguccgug

SEQ ID NO: 80479 - RNA, 22 nt, Human
gauugcuguaguuaaaaugaug

SEQ ID NO: 80480 - RNA, 22 nt, Human
gauugcuucuggaaagcaguuu

SEQ ID NO: 80481 - RNA, 22 nt, Human
gauugcuugauacccagucaau

SEQ ID NO: 80482 - RNA, 22 nt, Human
gauuguggaagucagugguucu

SEQ ID NO: 80483 - RNA, 22 nt, Human
gauuuagagaauguuuuguaag

SEQ ID NO: 80484 - RNA, 22 nt, Human
gauuuauaguaugugcuuucag

SEQ ID NO: 80485 - RNA, 22 nt, Human
gauuucaagcccccagagauuc

SEQ ID NO: 80486 - RNA, 22 nt, Human
gauuucaaggaguuuucacagu

SEQ ID NO: 80487 - RNA, 22 nt, Human
gauuucaaggauguuagaggug

SEQ ID NO: 80488 - RNA, 22 nt, Human
gauuucagggugcagaugauga

SEQ ID NO: 80489 - RNA, 22 nt, Human
gauuucaguggcugucucaaau

SEQ ID NO: 80490 - RNA, 22 nt, Human
gauuuccaggacgggagguggg

SEQ ID NO: 80491 - RNA, 22 nt, Human
gauuuccauuuucaacuccugc

SEQ ID NO: 80492 - RNA, 22 nt, Human
gauuuccuaauguggaucucug

SEQ ID NO: 80493 - RNA, 17 nt, Human
gauuuccugaaguucuu

SEQ ID NO: 80494 - RNA, 22 nt, Human
gauuucuaguaagucaugaagg

SEQ ID NO: 80495 - RNA, 22 nt, Human
gauuucuaguucauuaucuauu

SEQ ID NO: 80496 - RNA, 22 nt, Human
gauuucuguggcuuguacauau

SEQ ID NO: 80497 - RNA, 22 nt, Human
gauuucuguugagaaacauggg

SEQ ID NO: 80498 - RNA, 22 nt, Human
gauuucuuuagguguaauagug

SEQ ID NO: 80499 - RNA, 22 nt, Human
gaggccugaggcugccuggagc

SEQ ID NO: 80500 - RNA, 22 nt, Human
gaggccugcagcguggucccug

SEQ ID NO: 80501 - RNA, 22 nt, Human
gaggccuggcugggaggaggug

SEQ ID NO: 80502 - RNA, 22 nt, Human
gaggccuggugugucucccgcu

SEQ ID NO: 80503 - RNA, 22 nt, Human
gaggccugguuugcaugagaau

SEQ ID NO: 80504 - RNA, 22 nt, Human
gaggccugucgcuaggccucug

SEQ ID NO: 80505 - RNA, 22 nt, Human
gaggccuuagagcuuuucuaga

SEQ ID NO: 80506 - RNA, 22 nt, Human
gaggccuuccucucaagcacau

SEQ ID NO: 80507 - RNA, 22 nt, Human
gaggcggcggccgagccuggcu

SEQ ID NO: 80508 - RNA, 22 nt, Human
gaggcuaaggugccagacgaau

SEQ ID NO: 80509 - RNA, 22 nt, Human
gaggcuaagguucugccagaag

SEQ ID NO: 80510 - RNA, 22 nt, Human
gaggcucaccuagggagcacug

SEQ ID NO: 80511 - RNA, 22 nt, Human
gaggcucacuaggcauccuggg

SEQ ID NO: 80512 - RNA, 22 nt, Human
gauacagaaaggcugcauugag

SEQ ID NO: 80513 - RNA, 22 nt, Human
gauacauuuuaucuccuaacag

SEQ ID NO: 80514 - RNA, 22 nt, Human
gauaccaaaaucaucuuauagg

SEQ ID NO: 80515 - RNA, 22 nt, Human
gauacccagcaaaaugcaggag

SEQ ID NO: 80516 - RNA, 22 nt, Human
gauacuuucucauuuacccaag

SEQ ID NO: 80517 - RNA, 22 nt, Human
gauagaaagagugguucuuuuu

SEQ ID NO: 80518 - RNA, 22 nt, Human
gauagaguguugccucucaauu

SEQ ID NO: 80519 - RNA, 19 nt, Human
gauagcugaugaccaucau

SEQ ID NO: 80520 - RNA, 19 nt, Human
gauaggcagccaugagccc

SEQ ID NO: 80521 - RNA, 22 nt, Human
gauagucaccucccuuaacuuu

SEQ ID NO: 80522 - RNA, 22 nt, Human
gauauaaauuaaucaagugcaa

SEQ ID NO: 80523 - RNA, 22 nt, Human
gauauacugucuguauuacaua

SEQ ID NO: 80524 - RNA, 22 nt, Human
gauauagguucauaguguuaca

SEQ ID NO: 80525 - RNA, 22 nt, Human
gauauaguaggacacaucauga

SEQ ID NO: 80526 - RNA, 22 nt, Human
gauauauuuggaccagagcauu

SEQ ID NO: 80527 - RNA, 22 nt, Human
gauauauuuuccauggucugca

SEQ ID NO: 80528 - RNA, 22 nt, Human
gauauguaugaggaguauguau

SEQ ID NO: 80529 - RNA, 22 nt, Human
gauauugcauauuggaugaguu

SEQ ID NO: 80530 - RNA, 22 nt, Human
gauauugccagauguccccgga

SEQ ID NO: 80531 - RNA, 22 nt, Human
gauauuuucauucggaugcuca

SEQ ID NO: 80532 - RNA, 22 nt, Human
gaucaaaagcuggguucuaaaa

SEQ ID NO: 80533 - RNA, 22 nt, Human
gaucaaauauauuaugccacag

SEQ ID NO: 80534 - RNA, 22 nt, Human
gaucaacaaauguccuuuguga

SEQ ID NO: 80535 - RNA, 22 nt, Human
gaucaacauguauuuaagaguu

SEQ ID NO: 80536 - RNA, 22 nt, Human
gaucaauacuauuaagaucaua

SEQ ID NO: 80537 - RNA, 22 nt, Human
gaucacauaauuuggaaacagc

SEQ ID NO: 80538 - RNA, 22 nt, Human
gaucacaucuuuaugaguauuu

SEQ ID NO: 80539 - RNA, 22 nt, Human
gaucacaugaauggaauagaag

SEQ ID NO: 80540 - RNA, 22 nt, Human
gaucacaugaguuaucuaacuu

SEQ ID NO: 80541 - RNA, 22 nt, Human
gaucagaauuuacuuauaauug

SEQ ID NO: 80542 - RNA, 19 nt, Human
gaucagagugucagcuugu

SEQ ID NO: 80543 - RNA, 18 nt, Human
gaucaggaucaaucaccc

SEQ ID NO: 80544 - RNA, 22 nt, Human
gaucagugaacuauacugccuc

SEQ ID NO: 80545 - RNA, 22 nt, Human
gaucauagcgucuucuugcagc

SEQ ID NO: 80546 - RNA, 22 nt, Human
gaucaucugggcuccuuguagu

SEQ ID NO: 80547 - RNA, 22 nt, Human
gaucauugaacaggcacuggag

SEQ ID NO: 80548 - RNA, 22 nt, Human
gaucauugcugccuuuuucuau

SEQ ID NO: 80549 - RNA, 22 nt, Human
gaucauuggccuuucugcagug

SEQ ID NO: 80550 - RNA, 22 nt, Human
gaucauuugacuuuauaaggcu

SEQ ID NO: 80551 - RNA, 22 nt, Human
gaucauuuugaugcccuuuuag

SEQ ID NO: 80552 - RNA, 22 nt, Human
gauccuggcacagguugguccc

SEQ ID NO: 80553 - RNA, 22 nt, Human
gauccugugcauggggugaugg

SEQ ID NO: 80554 - RNA, 22 nt, Human
gauccuguuagaucccauuaga

SEQ ID NO: 80555 - RNA, 22 nt, Human
gauccuguuauaauuuggaugu

SEQ ID NO: 80556 - RNA, 22 nt, Human
gauccuugcaacucugugaggu

SEQ ID NO: 80557 - RNA, 22 nt, Human
gaucgaguuguuuguucugggg

SEQ ID NO: 80558 - RNA, 18 nt, Human
gaucgggggcgccccaag

SEQ ID NO: 80559 - RNA, 22 nt, Human
gaucucuggguccuguuggccu

SEQ ID NO: 80560 - RNA, 22 nt, Human
gaucugaauagacuugcuaagg

SEQ ID NO: 80561 - RNA, 22 nt, Human
gaucugggagccucauggagac

SEQ ID NO: 80562 - RNA, 22 nt, Human
gaucugguuucaucauggacuu

SEQ ID NO: 80563 - RNA, 22 nt, Human
gaucuucuagcagaaguaauuu

SEQ ID NO: 80564 - RNA, 22 nt, Human
gaucuugagcaaguuguguaac

SEQ ID NO: 80565 - RNA, 22 nt, Human
gaucuuuaaggcuuacccugga

SEQ ID NO: 80566 - RNA, 22 nt, Human
gaugaaauagcaaaggcauuug

SEQ ID NO: 80567 - RNA, 20 nt, Human
gaugaaaucacugggcagcc

SEQ ID NO: 80568 - RNA, 17 nt, Human
gaugaaaugaugcacac

SEQ ID NO: 80569 - RNA, 22 nt, Human
gaugaaaugugaaaguucuggg

SEQ ID NO: 80570 - RNA, 22 nt, Human
gaugaaauuguuuugauacuuu

SEQ ID NO: 80571 - RNA, 22 nt, Human
gaugaaauuugggcagguuaaa

SEQ ID NO: 80572 - RNA, 21 nt, Human
gaugaagcaaucuuucuguug

SEQ ID NO: 80573 - RNA, 22 nt, Human
gaugaagccugacuucucggug

SEQ ID NO: 80574 - RNA, 22 nt, Human
gaugacaagcauaugacacguc

SEQ ID NO: 80575 - RNA, 22 nt, Human
gaugacagcagcuguggcucac

SEQ ID NO: 80576 - RNA, 22 nt, Human
gaugagcauuguuucauguguu

SEQ ID NO: 80577 - RNA, 22 nt, Human
gaugagguaagaauguaacacc

SEQ ID NO: 80578 - RNA, 22 nt, Human
gaugaggucuacauuguuaaaa

SEQ ID NO: 80579 - RNA, 22 nt, Human
gaugagguguguggccacuaga

SEQ ID NO: 80580 - RNA, 22 nt, Human
gaugaguaauagcuaaugguuc

SEQ ID NO: 80581 - RNA, 22 nt, Human
gaugagucacugcaggugcugg

SEQ ID NO: 80582 - RNA, 16 nt, Human
gaugagucuuaguggu

SEQ ID NO: 80583 - RNA, 22 nt, Human
gaugaguucuuucuauucuauu

SEQ ID NO: 80584 - RNA, 22 nt, Human
gaugauaacagcauuucaacug

SEQ ID NO: 80585 - RNA, 22 nt, Human
gaugauauuuugacuggagaau

SEQ ID NO: 80586 - RNA, 22 nt, Human
gaugaucugcaagaacuacaug

SEQ ID NO: 80587 - RNA, 22 nt, Human
gaugaugagauaaggauaacuu

SEQ ID NO: 80588 - RNA, 22 nt, Human
gaugauggacaaagcauuggug

SEQ ID NO: 80589 - RNA, 22 nt, Human
gaugauuacacuuuuaaaacag

SEQ ID NO: 80590 - RNA, 22 nt, Human
gaugauuccuuuguucauugug

SEQ ID NO: 80591 - RNA, 22 nt, Human
gaugauuuuguuggugauucaa

SEQ ID NO: 80592 - RNA, 22 nt, Human
gaugauuuuugccagugugaug

SEQ ID NO: 80593 - RNA, 22 nt, Human
gaugcaaagauaaaacagacgc

SEQ ID NO: 80594 - RNA, 22 nt, Human
gaugcacagugacccugccagu

SEQ ID NO: 80595 - RNA, 22 nt, Human
gaugcacuuucuuuucaacagu

SEQ ID NO: 80596 - RNA, 22 nt, Human
gaugcagaaaguagacaccauc

SEQ ID NO: 80597 - RNA, 22 nt, Human
gaugcaggauagcuucacccag

SEQ ID NO: 80598 - RNA, 22 nt, Human
gaugcauagugaagcugacaga

SEQ ID NO: 80599 - RNA, 22 nt, Human
gaugcauuacaaaagugauuau

SEQ ID NO: 80600 - RNA, 22 nt, Human
gaugcauugcaucgaguagcuu

SEQ ID NO: 80601 - RNA, 22 nt, Human
gaugccugcauuucaggagagu

SEQ ID NO: 80602 - RNA, 22 nt, Human
gaugccuggcacccagcaagga

SEQ ID NO: 80603 - RNA, 22 nt, Human
gaugcugauuauuucuugcuag

SEQ ID NO: 80604 - RNA, 22 nt, Human
gaugcugugcuaugucuacaga

SEQ ID NO: 80605 - RNA, 22 nt, Human
gaugcuuuggccccaucaugag

SEQ ID NO: 80606 - RNA, 22 nt, Human
gaugcuuuucuuuucagcaaga

SEQ ID NO: 80607 - RNA, 20 nt, Human
gauggauuucaacaccuuuc

SEQ ID NO: 80608 - RNA, 22 nt, Human
gauggcacacagacauccccgc

SEQ ID NO: 80609 - RNA, 22 nt, Human
gauggcagcauauugacagcau

SEQ ID NO: 80610 - RNA, 22 nt, Human
gauggcccgcuagcuggccucu

SEQ ID NO: 80611 - RNA, 22 nt, Human
gauggccucagugcccaaagga

SEQ ID NO: 80612 - RNA, 22 nt, Human
gauggccuuguuuucucccuuc

SEQ ID NO: 80613 - RNA, 22 nt, Human
gauggcuucacuuacauggcug

SEQ ID NO: 80614 - RNA, 22 nt, Human
gauggcuucagucuccuugggu

SEQ ID NO: 80615 - RNA, 22 nt, Human
gauggcuucugaaucagggccu

SEQ ID NO: 80616 - RNA, 22 nt, Human
gauggcuuguuuucuggcugaa

SEQ ID NO: 80617 - RNA, 22 nt, Human
gauggcuuugugcaccaugauu

SEQ ID NO: 80618 - RNA, 18 nt, Human
gaugggagcaagagaaga

SEQ ID NO: 80619 - RNA, 22 nt, Human
gaugggcaucaaacaugacgug

SEQ ID NO: 80620 - RNA, 22 nt, Human
gaugggcuggggagaaagcaug

SEQ ID NO: 80621 - RNA, 22 nt, Human
ggggcucucaggucuccccaaa

SEQ ID NO: 80622 - RNA, 20 nt, Human
ggggcugcaugcagagaaga

SEQ ID NO: 80623 - RNA, 22 nt, Human
ggggcugguggugguuucucca

SEQ ID NO: 80624 - RNA, 22 nt, Human
ggggcuguuuuuggaauggcug

SEQ ID NO: 80625 - RNA, 21 nt, Human
gggggaagaggaguugcuagu

SEQ ID NO: 80626 - RNA, 22 nt, Human
gggggaaguaauuauaaaccaa

SEQ ID NO: 80627 - RNA, 22 nt, Human
gaggccuggagccgccuaggcg

SEQ ID NO: 80628 - RNA, 22 nt, Human
gaggccugguagccgagcccca

SEQ ID NO: 80629 - RNA, 22 nt, Human
gaggccuggucuaugagauguu

SEQ ID NO: 80630 - RNA, 22 nt, Human
gaggcgagaagcuggagauggu

SEQ ID NO: 80631 - RNA, 19 nt, Human
gaggcgaggcgugcaggag

SEQ ID NO: 80632 - RNA, 22 nt, Human
gaggcuaugaggagugagguuu

SEQ ID NO: 80633 - RNA, 22 nt, Human
gaggcucaguuaugucaucagg

SEQ ID NO: 80634 - RNA, 22 nt, Human
gaggcuccagcgacaccuaggc

SEQ ID NO: 80635 - RNA, 22 nt, Human
gaggcucccucaacucugggug

SEQ ID NO: 80636 - RNA, 22 nt, Human
gaggcuccgguaguagccuuga

SEQ ID NO: 80637 - RNA, 22 nt, Human
gaggcuccucauucaguaugcu

SEQ ID NO: 80638 - RNA, 22 nt, Human
gaggcugacggcaccaucuucu

SEQ ID NO: 80639 - RNA, 22 nt, Human
gaggcugaguagcuuugugcuc

SEQ ID NO: 80640 - RNA, 22 nt, Human
gaggcugaugcugccucacaga

SEQ ID NO: 80641 - RNA, 22 nt, Human
gaggcugauucggggaacagca

SEQ ID NO: 80642 - RNA, 22 nt, Human
gaggcugcacuggcuaaaggcu

SEQ ID NO: 80643 - RNA, 22 nt, Human
gaggcugcccacaccugcgccg

SEQ ID NO: 80644 - RNA, 22 nt, Human
gaggcugcuuuccuccuauccu

SEQ ID NO: 80645 - RNA, 22 nt, Human
gaggcuggaggucaaagaugaa

SEQ ID NO: 80646 - RNA, 22 nt, Human
gaggcuggcagaaaagcacagg

SEQ ID NO: 80647 - RNA, 22 nt, Human
gaggcuggugguuaguuccauu

SEQ ID NO: 80648 - RNA, 22 nt, Human
gaggcuuucacaagguuaguuc

SEQ ID NO: 80649 - RNA, 22 nt, Human
gaggcuuuucuucagguaucaa

SEQ ID NO: 80650 - RNA, 22 nt, Human
gaggcuuuuggcuaauaacugu

SEQ ID NO: 80651 - RNA, 22 nt, Human
gagggaaggagaguuguagcug

SEQ ID NO: 80652 - RNA, 22 nt, Human
gagggaauggugugcaagaggu

SEQ ID NO: 80653 - RNA, 22 nt, Human
gagggagcuggagcagacgccg

SEQ ID NO: 80654 - RNA, 22 nt, Human
gagggaggugauacugaacgua

SEQ ID NO: 80655 - RNA, 22 nt, Human
gagggagugagacacaaaagaa

SEQ ID NO: 80656 - RNA, 22 nt, Human
gagggcaagaguuggaaacggu

SEQ ID NO: 80657 - RNA, 22 nt, Human
gagggcaccuucaguaauagcu

SEQ ID NO: 80658 - RNA, 22 nt, Human
gagggcacgaaacaaccacuuc

SEQ ID NO: 80659 - RNA, 16 nt, Human
gagggcagaggcggaa

SEQ ID NO: 80660 - RNA, 22 nt, Human
gagggcaguagccucguacccu

SEQ ID NO: 80661 - RNA, 22 nt, Human
gagggccaaagagcaagagccu

SEQ ID NO: 80662 - RNA, 22 nt, Human
gagggccaaugugucccugagc

SEQ ID NO: 80663 - RNA, 22 nt, Human
gagggccacuugaauguuuuca

SEQ ID NO: 80664 - RNA, 22 nt, Human
gagggccagcagccucagcaug

SEQ ID NO: 80665 - RNA, 22 nt, Human
gagggcuccauuccccgugccc

SEQ ID NO: 80666 - RNA, 22 nt, Human
gagggcuuccauggggagcccc

SEQ ID NO: 80667 - RNA, 22 nt, Human
gaggggaaaacaggaauuaaca

SEQ ID NO: 80668 - RNA, 22 nt, Human
gaggggaaagugugaggcugcg

SEQ ID NO: 80669 - RNA, 22 nt, Human
gaggggagaggcuuauggauca

SEQ ID NO: 80670 - RNA, 22 nt, Human
gaggggaugcagagaggcuuau

SEQ ID NO: 80671 - RNA, 22 nt, Human
gaggggcacagcagcuguugca

SEQ ID NO: 80672 - RNA, 22 nt, Human
gaggggcacaguaaaggguccc

SEQ ID NO: 80673 - RNA, 22 nt, Human
gaggggcucuuuaauaguaaca

SEQ ID NO: 80674 - RNA, 22 nt, Human
gaggggcuggcacgauggcugc

SEQ ID NO: 80675 - RNA, 22 nt, Human
gaggggcuggcuguggucccau

SEQ ID NO: 80676 - RNA, 22 nt, Human
gaggggcuggguagggcaaccc

SEQ ID NO: 80677 - RNA, 22 nt, Human
gagggggagaugugcacacacu

SEQ ID NO: 80678 - RNA, 22 nt, Human
gagggggcgugcaaggcuccgc

SEQ ID NO: 80679 - RNA, 22 nt, Human
gagggggucuaugagguagagc

SEQ ID NO: 80680 - RNA, 22 nt, Human
gagggguccaggaggcacuuac

SEQ ID NO: 80681 - RNA, 22 nt, Human
gagggguguggagccaucaguu

SEQ ID NO: 80682 - RNA, 22 nt, Human
gagggucagaagggccugguuc

SEQ ID NO: 80683 - RNA, 22 nt, Human
gagggucccgagcccugucaga

SEQ ID NO: 80684 - RNA, 22 nt, Human
gagggucuuaccuaagcagggu

SEQ ID NO: 80685 - RNA, 22 nt, Human
gagggugcagcugggccccacg

SEQ ID NO: 80686 - RNA, 22 nt, Human
gagggugcucugagcccuuuug

SEQ ID NO: 80687 - RNA, 22 nt, Human
gaggguggaucagccugauugg

SEQ ID NO: 80688 - RNA, 20 nt, Human
gagggugggacuuccuaggc

SEQ ID NO: 80689 - RNA, 22 nt, Human
gagggugggcuccuaucugggu

SEQ ID NO: 80690 - RNA, 22 nt, Human
gagggugggcuuuguuccucca

SEQ ID NO: 80691 - RNA, 22 nt, Human
gaggguggguacaccagcccuc

SEQ ID NO: 80692 - RNA, 22 nt, Human
gaggguggguuucuugcacguc

SEQ ID NO: 80693 - RNA, 22 nt, Human
gagggugucucacgugaaagua

SEQ ID NO: 80694 - RNA, 23 nt, Human
gagguacagcaccagugaauagg

SEQ ID NO: 80695 - RNA, 18 nt, Human
gagguagauaagauuuuc

SEQ ID NO: 80696 - RNA, 22 nt, Human
gagguagcgaguggacagugca

SEQ ID NO: 80697 - RNA, 22 nt, Human
gagguagcucuuacucucuccg

SEQ ID NO: 80698 - RNA, 17 nt, Human
gagguaggaagugaguc

SEQ ID NO: 80699 - RNA, 22 nt, Human
gagguaggagguagguauugug

SEQ ID NO: 80700 - RNA, 22 nt, Human
gagguaggcagggugacuuggc

SEQ ID NO: 80701 - RNA, 22 nt, Human
gagguagggaagacaaauaugc

SEQ ID NO: 80702 - RNA, 22 nt, Human
gagguagggcagaggcugaaug

SEQ ID NO: 80703 - RNA, 20 nt, Human
gagguagggcuuaaggcaag

SEQ ID NO: 80704 - RNA, 22 nt, Human
gagguaguaagcagaguggggu

SEQ ID NO: 80705 - RNA, 22 nt, Human
gagguaucuuagagaguguaga

SEQ ID NO: 80706 - RNA, 23 nt, Human
gaggucaaggcugcagugauugc

SEQ ID NO: 80707 - RNA, 22 nt, Human
gaggucaauaauaugugcuuua

SEQ ID NO: 80708 - RNA, 22 nt, Human
gaggucaggggagaggcugaug

SEQ ID NO: 80709 - RNA, 22 nt, Human
gagguccagagcagguucagug

SEQ ID NO: 80710 - RNA, 22 nt, Human
gagguccaggguggggccugag

SEQ ID NO: 80711 - RNA, 22 nt, Human
gaggucccccauggcugugacu

SEQ ID NO: 80712 - RNA, 22 nt, Human
gagguccucuguguccgcgggc

SEQ ID NO: 80713 - RNA, 22 nt, Human
gaggugaguggaucacgagguc

SEQ ID NO: 80714 - RNA, 22 nt, Human
gaggugcuuccuuugggcucug

SEQ ID NO: 80715 - RNA, 22 nt, Human
gagguggccaagcgaggaaggg

SEQ ID NO: 80716 - RNA, 22 nt, Human
gagguggccagagucaagagcc

SEQ ID NO: 80717 - RNA, 22 nt, Human
gagguggcccuugcucagccuu

SEQ ID NO: 80718 - RNA, 22 nt, Human
gagguggcugggaguagggaau

SEQ ID NO: 80719 - RNA, 22 nt, Human
gagguggcugucagcuucacuu

SEQ ID NO: 80720 - RNA, 22 nt, Human
gaggugggagggcagucccuaa

SEQ ID NO: 80721 - RNA, 22 nt, Human
gaggugggguuuuguucuugaa

SEQ ID NO: 80722 - RNA, 22 nt, Human
gaggugucacuauuuugcuuau

SEQ ID NO: 80723 - RNA, 22 nt, Human
gagguguccuagaaguauucag

SEQ ID NO: 80724 - RNA, 22 nt, Human
gaggugucguagauuauucuca

SEQ ID NO: 80725 - RNA, 22 nt, Human
gaggugucuagaucuaccagua

SEQ ID NO: 80726 - RNA, 22 nt, Human
gaggugucugaguggggaccug

SEQ ID NO: 80727 - RNA, 22 nt, Human
gaggugucuggccuuuguagga

SEQ ID NO: 80728 - RNA, 23 nt, Human
gaggugugaauucugggugcugc

SEQ ID NO: 80729 - RNA, 22 nt, Human
gaggugugcugcggcccggugc

SEQ ID NO: 80730 - RNA, 22 nt, Human
gguacaaggagugaagguuugg

SEQ ID NO: 80731 - RNA, 22 nt, Human
gguacaaugucuuacagaccca

SEQ ID NO: 80732 - RNA, 22 nt, Human
gguacagggcuuccuggacaag

SEQ ID NO: 80733 - RNA, 22 nt, Human
gguagacugagcuccuugagga

SEQ ID NO: 80734 - RNA, 22 nt, Human
gguaggaagauagagcaaaguu

SEQ ID NO: 80735 - RNA, 22 nt, Human
gguagggaaggucucccacauu

SEQ ID NO: 80736 - RNA, 21 nt, Human
gguagggaagguucgcuggug

SEQ ID NO: 80737 - RNA, 22 nt, Human
gguauggagucugaguuucuag

SEQ ID NO: 80738 - RNA, 22 nt, Human
gguauuuacugagagccacucu

SEQ ID NO: 80739 - RNA, 22 nt, Human
ggucaaagugaggagucagguu

SEQ ID NO: 80740 - RNA, 22 nt, Human
ggucaacacugugaccaacagg

SEQ ID NO: 80741 - RNA, 22 nt, Human
ggucaacagaauuuguacucag

SEQ ID NO: 80742 - RNA, 18 nt, Human
ggucaagaaaguaaggca

SEQ ID NO: 80743 - RNA, 22 nt, Human
gaguaacauaccaaaauucaca

SEQ ID NO: 80744 - RNA, 21 nt, Human
gaguaacauuuccucuccaca

SEQ ID NO: 80745 - RNA, 22 nt, Human
gaguaagagcuggcuuuggugu

SEQ ID NO: 80746 - RNA, 22 nt, Human
gaguaaggcugcugauggagug

SEQ ID NO: 80747 - RNA, 22 nt, Human
gaguaauuccaauauaaaucac

SEQ ID NO: 80748 - RNA, 22 nt, Human
gaguaauuuauccagugaagua

SEQ ID NO: 80749 - RNA, 22 nt, Human
gaguaauuuucuuaaaacauca

SEQ ID NO: 80750 - RNA, 19 nt, Human
gaguacaggugcagaaaug

SEQ ID NO: 80751 - RNA, 22 nt, Human
gaguacuuaacuccaaauagga

SEQ ID NO: 80752 - RNA, 22 nt, Human
gaguagcauucuagaguaugcu

SEQ ID NO: 80753 - RNA, 22 nt, Human
gaguauaaugauuuucauucac

SEQ ID NO: 80754 - RNA, 22 nt, Human
gaguauauaauuaauuggucug

SEQ ID NO: 80755 - RNA, 22 nt, Human
gaguauaugacuuucuuuugca

SEQ ID NO: 80756 - RNA, 19 nt, Human
gaguauuuuccaacuuggu

SEQ ID NO: 80757 - RNA, 22 nt, Human
gagucaacaagucagaucucac

SEQ ID NO: 80758 - RNA, 20 nt, Human
gagucacagaagaagcugaa

SEQ ID NO: 80759 - RNA, 22 nt, Human
gagucaccacacggugcugacu

SEQ ID NO: 80760 - RNA, 22 nt, Human
gagucagaaacucacucuauag

SEQ ID NO: 80761 - RNA, 22 nt, Human
gagucagacagggucacccaga

SEQ ID NO: 80762 - RNA, 22 nt, Human
gagucagaccgacugggcucau

SEQ ID NO: 80763 - RNA, 22 nt, Human
gagucaggaguccugugugaga

SEQ ID NO: 80764 - RNA, 22 nt, Human
gagucagguuucugccuauaga

SEQ ID NO: 80765 - RNA, 22 nt, Human
gaguccagagauuaagcaccuc

SEQ ID NO: 80766 - RNA, 22 nt, Human
gaguccaggcaucccucccaua

SEQ ID NO: 80767 - RNA, 22 nt, Human
gaguccagugauguuccugguc

SEQ ID NO: 80768 - RNA, 22 nt, Human
gaguccuggaacccugaaugcu

SEQ ID NO: 80769 - RNA, 22 nt, Human
gaguccuggagaaacgcaggug

SEQ ID NO: 80770 - RNA, 22 nt, Human
gaguccuuccagcaggcauuua

SEQ ID NO: 80771 - RNA, 22 nt, Human
gaguccuugucauaauucagug

SEQ ID NO: 80772 - RNA, 22 nt, Human
gagucuaaguagaaugugaaaa

SEQ ID NO: 80773 - RNA, 22 nt, Human
gagucucuagucugguccuggc

SEQ ID NO: 80774 - RNA, 22 nt, Human
gagucucugggagggaaagaag

SEQ ID NO: 80775 - RNA, 22 nt, Human
gagucugagaacugggcucagu

SEQ ID NO: 80776 - RNA, 22 nt, Human
gagucugagagccuaaugaccu

SEQ ID NO: 80777 - RNA, 22 nt, Human
gagucuggacuauucuggucuu

SEQ ID NO: 80778 - RNA, 17 nt, Human
gagucuguguucaucag

SEQ ID NO: 80779 - RNA, 22 nt, Human
gagucuucuacgcucacacaaa

SEQ ID NO: 80780 - RNA, 22 nt, Human
gagugacggcucaucucuggaa

SEQ ID NO: 80781 - RNA, 22 nt, Human
gagugagggcagcaggggcugc

SEQ ID NO: 80782 - RNA, 22 nt, Human
gagugauuuaagcuauuuuuaa

SEQ ID NO: 80783 - RNA, 22 nt, Human
gagugcaaguucuuccuucuuc

SEQ ID NO: 80784 - RNA, 23 nt, Human
gagugcagaauagacaugcagug

SEQ ID NO: 80785 - RNA, 17 nt, Human
gagugcagacacaagca

SEQ ID NO: 80786 - RNA, 22 nt, Human
gagugcaggccugagcaccauc

SEQ ID NO: 80787 - RNA, 22 nt, Human
gagugcaguaucuucugugucc

SEQ ID NO: 80788 - RNA, 22 nt, Human
gagugcaguaugagaggcugcu

SEQ ID NO: 80789 - RNA, 22 nt, Human
gagugcaguuggggugagggga

SEQ ID NO: 80790 - RNA, 18 nt, Human
gagugcgguggugcacac

SEQ ID NO: 80791 - RNA, 22 nt, Human
gagugcuccgucuuggacaggg

SEQ ID NO: 80792 - RNA, 22 nt, Human
gagugcucgggccucugccugc

SEQ ID NO: 80793 - RNA, 22 nt, Human
gagugcuggggugcagagaggu

SEQ ID NO: 80794 - RNA, 22 nt, Human
gagugcuguaggacugagcccu

SEQ ID NO: 80795 - RNA, 22 nt, Human
gaguggagaucgugccacugca

SEQ ID NO: 80796 - RNA, 22 nt, Human
gaguggcaggcacugugacgga

SEQ ID NO: 80797 - RNA, 22 nt, Human
gaguggcuaaaguaugucaugg

SEQ ID NO: 80798 - RNA, 22 nt, Human
gaguggcuacaggcagcuuaca

SEQ ID NO: 80799 - RNA, 22 nt, Human
gaguggcuggguguuugaaucc

SEQ ID NO: 80800 - RNA, 22 nt, Human
gagugggcaaaagaaaguaggc

SEQ ID NO: 80801 - RNA, 22 nt, Human
gagugggcaccgugggcacacu

SEQ ID NO: 80802 - RNA, 22 nt, Human
gaguggggcgaagucggcgagu

SEQ ID NO: 80803 - RNA, 22 nt, Human
gagugggggguccgucucagug

SEQ ID NO: 80804 - RNA, 22 nt, Human
gaguggguccacagaggugaca

SEQ ID NO: 80805 - RNA, 22 nt, Human
gagugggugaaugugcucauaa

SEQ ID NO: 80806 - RNA, 22 nt, Human
gaguguaguucauuccguccua

SEQ ID NO: 80807 - RNA, 22 nt, Human
gagugucacuugaugcagggca

SEQ ID NO: 80808 - RNA, 22 nt, Human
gagugugggucucagcuuuaag

SEQ ID NO: 80809 - RNA, 22 nt, Human
gagugugugacuucacuuuagc

SEQ ID NO: 80810 - RNA, 23 nt, Human
gaguguucauagcaggcucuugc

SEQ ID NO: 80811 - RNA, 22 nt, Human
gaguuaaaaaugccuccaugga

SEQ ID NO: 80812 - RNA, 22 nt, Human
gaguuaaaggcaguugaggaaa

SEQ ID NO: 80813 - RNA, 22 nt, Human
gaguuaaauagcuuaggauuca

SEQ ID NO: 80814 - RNA, 22 nt, Human
gaguuaaaugacuugguuaagg

SEQ ID NO: 80815 - RNA, 22 nt, Human
gaguuacagagaggauuauggu

SEQ ID NO: 80816 - RNA, 22 nt, Human
gaguuacauggacauucucucc

SEQ ID NO: 80817 - RNA, 22 nt, Human
gaguuacauuuggugacacuuc

SEQ ID NO: 80818 - RNA, 22 nt, Human
gaguuacuggguggaaggcacu

SEQ ID NO: 80819 - RNA, 22 nt, Human
gaguuagaagacagaauguaaa

SEQ ID NO: 80820 - RNA, 22 nt, Human
gaguuauauccugagucauauu

SEQ ID NO: 80821 - RNA, 22 nt, Human
gaguuauugaguauagaaugua

SEQ ID NO: 80822 - RNA, 22 nt, Human
gaguuauuggguggaaagguag

SEQ ID NO: 80823 - RNA, 22 nt, Human
gaguuauuugguuugcaugcag

SEQ ID NO: 80824 - RNA, 22 nt, Human
gaguuauuuguagggauuauau

SEQ ID NO: 80825 - RNA, 22 nt, Human
gaguucaguaguuauagucuag

SEQ ID NO: 80826 - RNA, 22 nt, Human
gaguucauauucagagaucgcu

SEQ ID NO: 80827 - RNA, 20 nt, Human
gaguuccccauuucuccugg

SEQ ID NO: 80828 - RNA, 22 nt, Human
gaguucuauuaugguuagaagu

SEQ ID NO: 80829 - RNA, 22 nt, Human
gaguucucaagcaaucaaagag

SEQ ID NO: 80830 - RNA, 22 nt, Human
gaguucucaguaaaguucuuug

SEQ ID NO: 80831 - RNA, 22 nt, Human
gaguucugugagccauccuagc

SEQ ID NO: 80832 - RNA, 22 nt, Human
gaguucugugauuauuugggac

SEQ ID NO: 80833 - RNA, 22 nt, Human
gaguugaaagcaaaaguugaua

SEQ ID NO: 80834 - RNA, 22 nt, Human
gaguugaucauuauuugguuuc

SEQ ID NO: 80835 - RNA, 22 nt, Human
gaguuuaacacuuggagaaaag

SEQ ID NO: 80836 - RNA, 19 nt, Human
gaguuuaucuccuagcccu

SEQ ID NO: 80837 - RNA, 22 nt, Human
gauaaaauauguggccuuuagu

SEQ ID NO: 80838 - RNA, 22 nt, Human
gauaaacacugaugauaugggg

SEQ ID NO: 80839 - RNA, 22 nt, Human
gauaaacaugggagaaaggaau

SEQ ID NO: 80840 - RNA, 22 nt, Human
gauaaagcagguaggagaagau

SEQ ID NO: 80841 - RNA, 22 nt, Human
gauaaaguagauuuguucuaga

SEQ ID NO: 80842 - RNA, 22 nt, Human
gauaaauggcugaagaaauagu

SEQ ID NO: 80843 - RNA, 22 nt, Human
gauaacauacuugcauguguau

SEQ ID NO: 80844 - RNA, 22 nt, Human
gauaacuacacuuaagacaacc

SEQ ID NO: 80845 - RNA, 21 nt, Human
gauaaggcaggaggauaagua

SEQ ID NO: 80846 - RNA, 22 nt, Human
gauaaguuauguaacuugcuca

SEQ ID NO: 80847 - RNA, 22 nt, Human
gauaauaucugguuuauucacc

SEQ ID NO: 80848 - RNA, 22 nt, Human
gauaauuucuccaucucaaggu

SEQ ID NO: 80849 - RNA, 22 nt, Human
gauacaagacuaauaggaaaca

SEQ ID NO: 80850 - RNA, 22 nt, Human
gauacacauuuuagcuuugucu

SEQ ID NO: 80851 - RNA, 23 nt, Human
gauacacucccugcugggcacug

SEQ ID NO: 80852 - RNA, 22 nt, Human
gauacagacaccacucuuuucc

SEQ ID NO: 80853 - RNA, 22 nt, Human
gauacagcucuggccagaugug

SEQ ID NO: 80854 - RNA, 22 nt, Human
gcagagaggaaugaagccaucc

SEQ ID NO: 80855 - RNA, 22 nt, Human
gcagagauccuugcuggaugac

SEQ ID NO: 80856 - RNA, 22 nt, Human
gcagagaugggccagugacgca

SEQ ID NO: 80857 - RNA, 22 nt, Human
gcagagauuaugccauggaaag

SEQ ID NO: 80858 - RNA, 22 nt, Human
gcagagauuggugcacugauga

SEQ ID NO: 80859 - RNA, 22 nt, Human
gcagagcagagccugcauuggc

SEQ ID NO: 80860 - RNA, 22 nt, Human
gcagagcagugcuugcccagcg

SEQ ID NO: 80861 - RNA, 18 nt, Human
gcagagcaucaaggguua

SEQ ID NO: 80862 - RNA, 22 nt, Human
gcagagcauguccucaggacag

SEQ ID NO: 80863 - RNA, 20 nt, Human
gcagagccucacugcaaggg

SEQ ID NO: 80864 - RNA, 22 nt, Human
gcagagccugggggucugcgga

SEQ ID NO: 80865 - RNA, 22 nt, Human
gcagagcugcagcgaggccugg

SEQ ID NO: 80866 - RNA, 21 nt, Human
gcagagcuggaaccaggaccc

SEQ ID NO: 80867 - RNA, 22 nt, Human
gcagagcugggauaugaaccca

SEQ ID NO: 80868 - RNA, 22 nt, Human
gcagagcugggucuguauccaa

SEQ ID NO: 80869 - RNA, 22 nt, Human
gcagagcugucuaagucacuuc

SEQ ID NO: 80870 - RNA, 22 nt, Human
gcagaggacacaggagggcaag

SEQ ID NO: 80871 - RNA, 22 nt, Human
gcagaggacagggauuuagauu

SEQ ID NO: 80872 - RNA, 22 nt, Human
gcagaggacucaaucaagguau

SEQ ID NO: 80873 - RNA, 22 nt, Human
gcagaggagaugaagauacuuu

SEQ ID NO: 80874 - RNA, 22 nt, Human
gcagaggagcaagcuggacacc

SEQ ID NO: 80875 - RNA, 22 nt, Human
gcagaggcaaucagguaugugg

SEQ ID NO: 80876 - RNA, 22 nt, Human
gcagaggcagggcccuccucca

SEQ ID NO: 80877 - RNA, 22 nt, Human
gcagaggcuguagggaagguug

SEQ ID NO: 80878 - RNA, 22 nt, Human
gcagaggggaagcugaggaauu

SEQ ID NO: 80879 - RNA, 22 nt, Human
gcagaggugaccagcagcaggg

SEQ ID NO: 80880 - RNA, 22 nt, Human
gcagaggugaguuucucagcug

SEQ ID NO: 80881 - RNA, 22 nt, Human
gcagagguguagcccccuccau

SEQ ID NO: 80882 - RNA, 22 nt, Human
gcagaggugucaccuuccagga

SEQ ID NO: 80883 - RNA, 22 nt, Human
gcagaggugugggaggggccac

SEQ ID NO: 80884 - RNA, 19 nt, Human
gcagagucaagagcugcug

SEQ ID NO: 80885 - RNA, 22 nt, Human
gcagagugagauaugaacccag

SEQ ID NO: 80886 - RNA, 22 nt, Human
gcagagugagccgaggcugcuc

SEQ ID NO: 80887 - RNA, 22 nt, Human
gcagaugaaguuuacaggaaac

SEQ ID NO: 80888 - RNA, 22 nt, Human
gcagaugcaacugcaggugagu

SEQ ID NO: 80889 - RNA, 22 nt, Human
gcagaugccacuaggugaagug

SEQ ID NO: 80890 - RNA, 22 nt, Human
gcagaugcuguggugauagaag

SEQ ID NO: 80891 - RNA, 22 nt, Human
gcagaugcuuggcacugacagu

SEQ ID NO: 80892 - RNA, 23 nt, Human
gcagauggccccagagugcugcc

SEQ ID NO: 80893 - RNA, 22 nt, Human
gcagauggcucagacacugggg

SEQ ID NO: 80894 - RNA, 22 nt, Human
gcagauggcugagccugcagau

SEQ ID NO: 80895 - RNA, 15 nt, Human
gcagaugggggugau

SEQ ID NO: 80896 - RNA, 22 nt, Human
gcagauguuguugcugggaguu

SEQ ID NO: 80897 - RNA, 22 nt, Human
gcagauuucauuuaaaccuuuc

SEQ ID NO: 80898 - RNA, 22 nt, Human
gcagcaaaaaaguaauauuuau

SEQ ID NO: 80899 - RNA, 22 nt, Human
gcagcaaucuucacagugucau

SEQ ID NO: 80900 - RNA, 22 nt, Human
gcagcacaaaguccccagggac

SEQ ID NO: 80901 - RNA, 22 nt, Human
gcagcacauauaaacaaagaga

SEQ ID NO: 80902 - RNA, 22 nt, Human
gcagcaccaaccagggccuguu

SEQ ID NO: 80903 - RNA, 22 nt, Human
gcagcagaaguagaaguacagg

SEQ ID NO: 80904 - RNA, 22 nt, Human
gcagcagaugcuuucauggaca

SEQ ID NO: 80905 - RNA, 22 nt, Human
gcagcagcaagaagguuggacu

SEQ ID NO: 80906 - RNA, 22 nt, Human
gcagcagcagggagucugacuu

SEQ ID NO: 80907 - RNA, 22 nt, Human
gcagcagcucucaaaguggucu

SEQ ID NO: 80908 - RNA, 22 nt, Human
gcagcagcucugaaugggcccc

SEQ ID NO: 80909 - RNA, 22 nt, Human
gcagcaggaauaggauaagcaa

SEQ ID NO: 80910 - RNA, 22 nt, Human
gcagcaggaauuuaaauuuaua

SEQ ID NO: 80911 - RNA, 22 nt, Human
gcagcaggagaguuuguccugc

SEQ ID NO: 80912 - RNA, 22 nt, Human
gcagcagggagcagggguguca

SEQ ID NO: 80913 - RNA, 20 nt, Human
gcagcagugcaaguccucuu

SEQ ID NO: 80914 - RNA, 22 nt, Human
gcagcauauuguacuggccugc

SEQ ID NO: 80915 - RNA, 22 nt, Human
gcagcaucaauccaugcuucuc

SEQ ID NO: 80916 - RNA, 22 nt, Human
gcagcauccuuggccuccaccc

SEQ ID NO: 80917 - RNA, 22 nt, Human
gcagcaucuguacauagacgcu

SEQ ID NO: 80918 - RNA, 21 nt, Human
gcagcaugagaaagccccaaa

SEQ ID NO: 80919 - RNA, 22 nt, Human
gcagcaugagcuauacaaagua

SEQ ID NO: 80920 - RNA, 22 nt, Human
gcagcaugugccuuaaaucauu

SEQ ID NO: 80921 - RNA, 22 nt, Human
gcagcauguugaaagggccaca

SEQ ID NO: 80922 - RNA, 22 nt, Human
gcagcauugugagguccugccc

SEQ ID NO: 80923 - RNA, 22 nt, Human
gcagccacccucaaggcugaau

SEQ ID NO: 80924 - RNA, 21 nt, Human
gcagccacugccuucaacaau

SEQ ID NO: 80925 - RNA, 22 nt, Human
gcagccacuuugcaaccaagag

SEQ ID NO: 80926 - RNA, 22 nt, Human
gcagccagaagacucagaacaa

SEQ ID NO: 80927 - RNA, 22 nt, Human
gcagccaggaaagcuggacccu

SEQ ID NO: 80928 - RNA, 22 nt, Human
gcagccaggaagccuuucccuc

SEQ ID NO: 80929 - RNA, 22 nt, Human
gcagccaggcuacagcgggcuu

SEQ ID NO: 80930 - RNA, 22 nt, Human
gcagccauugagcgaaaaaauc

SEQ ID NO: 80931 - RNA, 22 nt, Human
gcagcccaauggacugagacag

SEQ ID NO: 80932 - RNA, 22 nt, Human
gcagcccacaccacucugcuca

SEQ ID NO: 80933 - RNA, 18 nt, Human
gcagccccucuuccuucc

SEQ ID NO: 80934 - RNA, 22 nt, Human
gcagcccuagcgacaaauugau

SEQ ID NO: 80935 - RNA, 22 nt, Human
gcagcccugcaggcagcuccag

SEQ ID NO: 80936 - RNA, 20 nt, Human
gcagccguggagacuaggag

SEQ ID NO: 80937 - RNA, 22 nt, Human
gcagccucaaacuccccagcuc

SEQ ID NO: 80938 - RNA, 22 nt, Human
gcagccuccgcacugcgagucc

SEQ ID NO: 80939 - RNA, 22 nt, Human
gcagccugaggcccuuucuggc

SEQ ID NO: 80940 - RNA, 22 nt, Human
gcagccuuccguggaccuggac

SEQ ID NO: 80941 - RNA, 22 nt, Human
gcagcgcuacucacagcucuga

SEQ ID NO: 80942 - RNA, 22 nt, Human
gcagcguggggacaggagcuca

SEQ ID NO: 80943 - RNA, 20 nt, Human
gcagcuacucugucucgcuc

SEQ ID NO: 80944 - RNA, 22 nt, Human
gcagcucaagagaggugcuaug

SEQ ID NO: 80945 - RNA, 22 nt, Human
gcagcucccagcuugaaagguc

SEQ ID NO: 80946 - RNA, 22 nt, Human
gcagcucccuggcugcaaauga

SEQ ID NO: 80947 - RNA, 22 nt, Human
gcagcucuuuucuuaaagagau

SEQ ID NO: 80948 - RNA, 22 nt, Human
gcaugcacgggcacauaugcua

SEQ ID NO: 80949 - RNA, 19 nt, Human
gcaugcagaguaagaaggu

SEQ ID NO: 80950 - RNA, 22 nt, Human
gcaugcagagucccucugcauu

SEQ ID NO: 80951 - RNA, 22 nt, Human
gcaugcaggaaguuuuuuggga

SEQ ID NO: 80952 - RNA, 22 nt, Human
gcaugcaggagagaaagacggc

SEQ ID NO: 80953 - RNA, 22 nt, Human
gcaugcaggauagguugagcuc

SEQ ID NO: 80954 - RNA, 22 nt, Human
gcaugcaucuagauaugcagac

SEQ ID NO: 80955 - RNA, 22 nt, Human
gcaugcaugguuugugacugug

SEQ ID NO: 80956 - RNA, 22 nt, Human
gcaugcauuuguacuugauuuu

SEQ ID NO: 80957 - RNA, 22 nt, Human
gcaugcugcaccagagccucuc

SEQ ID NO: 80958 - RNA, 19 nt, Human
gcaugcuugguggcuucug

SEQ ID NO: 80959 - RNA, 22 nt, Human
gcauggaauucccuuaugggcc

SEQ ID NO: 80960 - RNA, 22 nt, Human
gcauggaucuaagaggucaagg

SEQ ID NO: 80961 - RNA, 20 nt, Human
gcauggcauguagugaagug

SEQ ID NO: 80962 - RNA, 22 nt, Human
gcauggccauggcacuauggac

SEQ ID NO: 80963 - RNA, 22 nt, Human
gcauggccuccagccaacagca

SEQ ID NO: 80964 - RNA, 22 nt, Human
gcauggccuucagggacagcug

SEQ ID NO: 80965 - RNA, 22 nt, Human
gcaugggcaccagucucuaggu

SEQ ID NO: 80966 - RNA, 22 nt, Human
gcaugggcuuucucagaguucu

SEQ ID NO: 80967 - RNA, 22 nt, Human
gcaugguggccuuaggguagcc

SEQ ID NO: 80968 - RNA, 22 nt, Human
gcauguggccuucaggcuggaa

SEQ ID NO: 80969 - RNA, 22 nt, Human
gcauguggugcugaggcugucg

SEQ ID NO: 80970 - RNA, 15 nt, Human
gcauguguaauaggc

SEQ ID NO: 80971 - RNA, 21 nt, Human
gcauguguggugugcuccaca

SEQ ID NO: 80972 - RNA, 22 nt, Human
gcauguguucuugaaaggccac

SEQ ID NO: 80973 - RNA, 22 nt, Human
gcauuaaaugcuagggaccuaa

SEQ ID NO: 80974 - RNA, 22 nt, Human
gcauuacagcaguucaacuugg

SEQ ID NO: 80975 - RNA, 22 nt, Human
gcauuacuucuuucauagguca

SEQ ID NO: 80976 - RNA, 22 nt, Human
gcauuagaagggaccucugggg

SEQ ID NO: 80977 - RNA, 22 nt, Human
gcauuauuaacuggaggaaaag

SEQ ID NO: 80978 - RNA, 22 nt, Human
gcauucauacaucaauaagcuu

SEQ ID NO: 80979 - RNA, 22 nt, Human
gcauucaucuucaugaaagcac

SEQ ID NO: 80980 - RNA, 22 nt, Human
gcauucauguccuuccugaacg

SEQ ID NO: 80981 - RNA, 22 nt, Human
gcauucauucaggcucccaggg

SEQ ID NO: 80982 - RNA, 22 nt, Human
gcauucauucauucauuaggua

SEQ ID NO: 80983 - RNA, 21 nt, Human
gcauuccuaggagguaagcau

SEQ ID NO: 80984 - RNA, 22 nt, Human
gcauuccuugaguucccugugc

SEQ ID NO: 80985 - RNA, 22 nt, Human
gcauucugugcuacagccauuc

SEQ ID NO: 80986 - RNA, 22 nt, Human
gcauucuuagggccuggggugu

SEQ ID NO: 80987 - RNA, 18 nt, Human
gcacucugacugcagagc

SEQ ID NO: 80988 - RNA, 22 nt, Human
gcacugaaaauguuggauucca

SEQ ID NO: 80989 - RNA, 22 nt, Human
gcacugaacuuuaaucauuucu

SEQ ID NO: 80990 - RNA, 18 nt, Human
gcacugaggaaaaccucu

SEQ ID NO: 80991 - RNA, 22 nt, Human
gcacugcaucuacuggcaagua

SEQ ID NO: 80992 - RNA, 22 nt, Human
gcacuggagauacagagaugaa

SEQ ID NO: 80993 - RNA, 16 nt, Human
gcacugggaugucuuc

SEQ ID NO: 80994 - RNA, 23 nt, Human
gcacugggcucucagcaaggugu

SEQ ID NO: 80995 - RNA, 22 nt, Human
gcacugugaucaaggcuaagca

SEQ ID NO: 80996 - RNA, 22 nt, Human
gcacugugcuagaagccagggg

SEQ ID NO: 80997 - RNA, 22 nt, Human
gcacuuaacuggaaaagaauuu

SEQ ID NO: 80998 - RNA, 22 nt, Human
gcacuuaugcucaccuuguucu

SEQ ID NO: 80999 - RNA, 22 nt, Human
gcacuuccaucugucaccaggu

SEQ ID NO: 81000 - RNA, 22 nt, Human
gcacuucuggccuggccugugu

SEQ ID NO: 81001 - RNA, 22 nt, Human
gcacuugaaaagaucaggugca

SEQ ID NO: 81002 - RNA, 22 nt, Human
gcacuugaagaauugaacugga

SEQ ID NO: 81003 - RNA, 22 nt, Human
gcacuugagccaaugcuaguag

SEQ ID NO: 81004 - RNA, 22 nt, Human
gcacuugauaaauguuaacuga

SEQ ID NO: 81005 - RNA, 22 nt, Human
gcacuugaucauuguuacagau

SEQ ID NO: 81006 - RNA, 22 nt, Human
gcacuuggaggugcccacacag

SEQ ID NO: 81007 - RNA, 22 nt, Human
gcacuugguaggacuucaguga

SEQ ID NO: 81008 - RNA, 22 nt, Human
gcacuugugacaguuccuggca

SEQ ID NO: 81009 - RNA, 22 nt, Human
gcacuuguggauuugauauaca

SEQ ID NO: 81010 - RNA, 22 nt, Human
gcagaaaccacagugucuuuua

SEQ ID NO: 81011 - RNA, 22 nt, Human
gcagaaacuuggagaagccagg

SEQ ID NO: 81012 - RNA, 22 nt, Human
gcagaaagcuccuugcgaucug

SEQ ID NO: 81013 - RNA, 21 nt, Human
gcagaaaggaaucuuaggucc

SEQ ID NO: 81014 - RNA, 22 nt, Human
gcagaacaacguaggaguggag

SEQ ID NO: 81015 - RNA, 22 nt, Human
gcagaagaccaugguggaaaga

SEQ ID NO: 81016 - RNA, 22 nt, Human
gcagaagcacaggugacgggcc

SEQ ID NO: 81017 - RNA, 22 nt, Human
gcagaagcagcagaugggcgca

SEQ ID NO: 81018 - RNA, 22 nt, Human
gcagaaggucaaagcaagaugu

SEQ ID NO: 81019 - RNA, 22 nt, Human
gcagaaguggugcugugccacu

SEQ ID NO: 81020 - RNA, 22 nt, Human
gcagaauacauuugggauuacu

SEQ ID NO: 81021 - RNA, 22 nt, Human
gcagaauacugagagcugauug

SEQ ID NO: 81022 - RNA, 22 nt, Human
gcagaauagggcauaacuuugc

SEQ ID NO: 81023 - RNA, 22 nt, Human
gcagaauauauuacugagccuc

SEQ ID NO: 81024 - RNA, 22 nt, Human
gcagacaauuuauuagcagauu

SEQ ID NO: 81025 - RNA, 22 nt, Human
gcagacaccuuguaggugugua

SEQ ID NO: 81026 - RNA, 18 nt, Human
gcagacacucguggaggg

SEQ ID NO: 81027 - RNA, 22 nt, Human
gcagacacuucccacugcagcg

SEQ ID NO: 81028 - RNA, 17 nt, Human
gcagacacuucuauuga

SEQ ID NO: 81029 - RNA, 22 nt, Human
gcagacaggauuggguuaauag

SEQ ID NO: 81030 - RNA, 22 nt, Human
gcagacagggcuacagagguac

SEQ ID NO: 81031 - RNA, 22 nt, Human
gcagacaucaccucagugcuau

SEQ ID NO: 81032 - RNA, 22 nt, Human
gcagacgucaccgagucgaugg

SEQ ID NO: 81033 - RNA, 22 nt, Human
gcagacugcgugaggcgccgcc

SEQ ID NO: 81034 - RNA, 22 nt, Human
gcagacuggucuucagccuugg

SEQ ID NO: 81035 - RNA, 22 nt, Human
gcagacuguaccuggaagaggg

SEQ ID NO: 81036 - RNA, 22 nt, Human
gcagagaacccagcagauuggc

SEQ ID NO: 81037 - RNA, 22 nt, Human
gcagagaaggauugaaaccaga

SEQ ID NO: 81038 - RNA, 23 nt, Human
gcagagacagccccagcgcgaug

SEQ ID NO: 81039 - RNA, 22 nt, Human
gcagagaggauauuauugucca

SEQ ID NO: 81040 - RNA, 22 nt, Human
gcagagaguugggcugcgccag

SEQ ID NO: 81041 - RNA, 22 nt, Human
gcagagauaaguagacaggaug

SEQ ID NO: 81042 - RNA, 22 nt, Human
gcagagcacccugcagugguau

SEQ ID NO: 81043 - RNA, 18 nt, Human
gcagagcagaagcucaag

SEQ ID NO: 81044 - RNA, 22 nt, Human
gcagagcagaggugcagguugg

SEQ ID NO: 81045 - RNA, 22 nt, Human
gcagagcaguacucucuugacu

SEQ ID NO: 81046 - RNA, 22 nt, Human
gcagagcauuucgguugcuucc

SEQ ID NO: 81047 - RNA, 22 nt, Human
gcagagccaggagcccaggauc

SEQ ID NO: 81048 - RNA, 22 nt, Human
gcagagccccauugcuggcggg

SEQ ID NO: 81049 - RNA, 22 nt, Human
gcagagccgugaauggauuuca

SEQ ID NO: 81050 - RNA, 21 nt, Human
gcagagccugagguucuugag

SEQ ID NO: 81051 - RNA, 22 nt, Human
gcagagccugugucugagcaaa

SEQ ID NO: 81052 - RNA, 22 nt, Human
gcagagccuugcgucaugugcc

SEQ ID NO: 81053 - RNA, 22 nt, Human
gcagagcucaugccugcaccuc

SEQ ID NO: 81054 - RNA, 22 nt, Human
gcagagcucuguucuuaucucc

SEQ ID NO: 81055 - RNA, 22 nt, Human
gcagagcugagcggcugcccgg

SEQ ID NO: 81056 - RNA, 23 nt, Human
gcagagcugcccuauugccuugg

SEQ ID NO: 81057 - RNA, 22 nt, Human
gcagguggaucaccacgucagg

SEQ ID NO: 81058 - RNA, 14 nt, Human
gcagguggaucacu

SEQ ID NO: 81059 - RNA, 22 nt, Human
gcaggugguggcgcgcgcccug

SEQ ID NO: 81060 - RNA, 22 nt, Human
gcaggugguggggcuaugaucu

SEQ ID NO: 81061 - RNA, 22 nt, Human
gcagguggugggggagccguuc

SEQ ID NO: 81062 - RNA, 22 nt, Human
gcaggugucugacugccuucuu

SEQ ID NO: 81063 - RNA, 22 nt, Human
gcaguaagauguaagugcuaua

SEQ ID NO: 81064 - RNA, 22 nt, Human
gcaguaggagggacaacuaccu

SEQ ID NO: 81065 - RNA, 22 nt, Human
gcaguaggaguuuccagggugg

SEQ ID NO: 81066 - RNA, 22 nt, Human
gcaguaggggcuggagggcugu

SEQ ID NO: 81067 - RNA, 22 nt, Human
gcaguaguccauaaguacucug

SEQ ID NO: 81068 - RNA, 22 nt, Human
gcaguaguucugauuggaacuu

SEQ ID NO: 81069 - RNA, 22 nt, Human
gcaguauauacucuuugagggg

SEQ ID NO: 81070 - RNA, 22 nt, Human
gcaguauauccauuacuucaua

SEQ ID NO: 81071 - RNA, 22 nt, Human
gcagucacagggagauggugac

SEQ ID NO: 81072 - RNA, 22 nt, Human
gcagucagguuaaggccuuccc

SEQ ID NO: 81073 - RNA, 22 nt, Human
gcagucaguaaggcagccagaa

SEQ ID NO: 81074 - RNA, 22 nt, Human
gcagucauggaaaaauguauac

SEQ ID NO: 81075 - RNA, 22 nt, Human
gcagucauggguagaacucaag

SEQ ID NO: 81076 - RNA, 22 nt, Human
gcaguccuagggugcucugcag

SEQ ID NO: 81077 - RNA, 22 nt, Human
gcaguccuggaggaagguguga

SEQ ID NO: 81078 - RNA, 22 nt, Human
gcagucuugccacaggguuuca

SEQ ID NO: 81079 - RNA, 22 nt, Human
gcagucuuuucugugacuggcu

SEQ ID NO: 81080 - RNA, 17 nt, Human
gcagugaaaagagauca

SEQ ID NO: 81081 - RNA, 18 nt, Human
gcagugaagaaagagcuu

SEQ ID NO: 81082 - RNA, 22 nt, Human
gcagugaagauuugggcucugg

SEQ ID NO: 81083 - RNA, 22 nt, Human
gcagugaagcaguccuuguuga

SEQ ID NO: 81084 - RNA, 22 nt, Human
gcagugaagccagaucugaaau

SEQ ID NO: 81085 - RNA, 22 nt, Human
gcagugacagacaacuguuuga

SEQ ID NO: 81086 - RNA, 22 nt, Human
gcagugcauuacucacauguuu

SEQ ID NO: 81087 - RNA, 18 nt, Human
gcagugccagccucuccu

SEQ ID NO: 81088 - RNA, 22 nt, Human
gcagugcuagccucacaggguc

SEQ ID NO: 81089 - RNA, 17 nt, Human
gcaguggagggguaguu

SEQ ID NO: 81090 - RNA, 22 nt, Human
gcaguggccacauggaggagga

SEQ ID NO: 81091 - RNA, 22 nt, Human
gcagugggaagguuggcacaug

SEQ ID NO: 81092 - RNA, 22 nt, Human
gcagugguggagcuuacauauc

SEQ ID NO: 81093 - RNA, 22 nt, Human
gcagugugaugcuuccagccac

SEQ ID NO: 81094 - RNA, 22 nt, Human
gcaguguggccccaguaucacg

SEQ ID NO: 81095 - RNA, 20 nt, Human
gcaguguguaugaauagcug

SEQ ID NO: 81096 - RNA, 22 nt, Human
gcaguguguguccccacacugg

SEQ ID NO: 81097 - RNA, 22 nt, Human
gcaguguuaggaauaaaaauga

SEQ ID NO: 81098 - RNA, 22 nt, Human
gcaguguucuaaauugggugug

SEQ ID NO: 81099 - RNA, 22 nt, Human
gcaguguuucccagagauggaa

SEQ ID NO: 81100 - RNA, 22 nt, Human
gcaguguuuuucaaugcuucca

SEQ ID NO: 81101 - RNA, 22 nt, Human
gcaguuaaaaauaaaccuucau

SEQ ID NO: 81102 - RNA, 17 nt, Human
gcaguuaaauuaagaug

SEQ ID NO: 81103 - RNA, 22 nt, Human
gcaguuacuagcaauuugugaa

SEQ ID NO: 81104 - RNA, 22 nt, Human
gcauucuucacaguauuccucc

SEQ ID NO: 81105 - RNA, 22 nt, Human
gcauucuuguuuuuccuacccu

SEQ ID NO: 81106 - RNA, 22 nt, Human
gcauucuuugaaugcuucuaau

SEQ ID NO: 81107 - RNA, 22 nt, Human
gcauugaaggcauuuuaucuac

SEQ ID NO: 81108 - RNA, 20 nt, Human
gcauugaguauagacagaug

SEQ ID NO: 81109 - RNA, 22 nt, Human
gcauugaucuguaugcauuaag

SEQ ID NO: 81110 - RNA, 22 nt, Human
gcauugaucuuuauucugcuuu

SEQ ID NO: 81111 - RNA, 23 nt, Human
gcauuguagaauguuuagcagca

SEQ ID NO: 81112 - RNA, 22 nt, Human
gcauuguccugcuucugagugu

SEQ ID NO: 81113 - RNA, 22 nt, Human
gcauuuauuucuuuacugcauc

SEQ ID NO: 81114 - RNA, 22 nt, Human
gcauuucaugcuccuuggaacc

SEQ ID NO: 81115 - RNA, 22 nt, Human
gcauuucugugcauacacauga

SEQ ID NO: 81116 - RNA, 22 nt, Human
gcauuuguuugggcuaaucuua

SEQ ID NO: 81117 - RNA, 18 nt, Human
gcauuuuaaucugaggca

SEQ ID NO: 81118 - RNA, 22 nt, Human
gcauuuuaaugagguuuaugag

SEQ ID NO: 81119 - RNA, 22 nt, Human
gcauuuuugaucccacuaggau

SEQ ID NO: 81120 - RNA, 22 nt, Human
gccaaaggaccugugggugaca

SEQ ID NO: 81121 - RNA, 22 nt, Human
gccaaaggauucuauggagaua

SEQ ID NO: 81122 - RNA, 17 nt, Human
gccaaaggguuccaauc

SEQ ID NO: 81123 - RNA, 22 nt, Human
gccaaaguaccuagcccucugc

SEQ ID NO: 81124 - RNA, 22 nt, Human
gccaaauaaguggaaucacaca

SEQ ID NO: 81125 - RNA, 22 nt, Human
gccaaauuugugagcccccaag

SEQ ID NO: 81126 - RNA, 22 nt, Human
gccaaccauuggcuucuuguca

SEQ ID NO: 81127 - RNA, 21 nt, Human
gccaagaacaagacagacaug

SEQ ID NO: 81128 - RNA, 22 nt, Human
gccaagaguuuccagcugcaag

SEQ ID NO: 81129 - RNA, 22 nt, Human
gccaagcuggaugaagagguug

SEQ ID NO: 81130 - RNA, 22 nt, Human
gccaaggaaggcuuccuggaag

SEQ ID NO: 81131 - RNA, 22 nt, Human
gccaauggcucaugagcaggac

SEQ ID NO: 81132 - RNA, 22 nt, Human
gccaauuuauagccaaaaauca

SEQ ID NO: 81133 - RNA, 23 nt, Human
gccaauuuuugacugucaguagg

SEQ ID NO: 81134 - RNA, 22 nt, Human
gccacacuuauucucaugcaca

SEQ ID NO: 81135 - RNA, 22 nt, Human
gccacagcagggcccucucagg

SEQ ID NO: 81136 - RNA, 22 nt, Human
gccacagggcagaugcgcagag

SEQ ID NO: 81137 - RNA, 22 nt, Human
gccacaggucggcuagaggguc

SEQ ID NO: 81138 - RNA, 22 nt, Human
gccacagucacugcugcagggg

SEQ ID NO: 81139 - RNA, 22 nt, Human
gccacauccuucagaaagcuuu

SEQ ID NO: 81140 - RNA, 22 nt, Human
gccaccagccccaugcgcugug

SEQ ID NO: 81141 - RNA, 22 nt, Human
gccaccagggggugcaaggucc

SEQ ID NO: 81142 - RNA, 22 nt, Human
gccaccagguuagauccagccu

SEQ ID NO: 81143 - RNA, 22 nt, Human
gccaccccaaccucccuaaguu

SEQ ID NO: 81144 - RNA, 22 nt, Human
gccaccccauagguguuaggug

SEQ ID NO: 81145 - RNA, 18 nt, Human
gccacccuccucgucucc

SEQ ID NO: 81146 - RNA, 22 nt, Human
gccacccuuaucccaugcuucu

SEQ ID NO: 81147 - RNA, 22 nt, Human
gccacccuugcgucacugacau

SEQ ID NO: 81148 - RNA, 22 nt, Human
gccaccucccaggacgaggcug

SEQ ID NO: 81149 - RNA, 22 nt, Human
gccaccucucucuugacucgag

SEQ ID NO: 81150 - RNA, 22 nt, Human
gccaccucuuugucucugccgc

SEQ ID NO: 81151 - RNA, 22 nt, Human
gccaccugguggcaucuucugg

SEQ ID NO: 81152 - RNA, 22 nt, Human
gccaccuguaagccauuaggcc

SEQ ID NO: 81153 - RNA, 22 nt, Human
gccaccugugugggccuuugug

SEQ ID NO: 81154 - RNA, 22 nt, Human
gccaccuguuucagaugugguu

SEQ ID NO: 81155 - RNA, 22 nt, Human
gccacugauuccaagucaauuu

SEQ ID NO: 81156 - RNA, 22 nt, Human
gccacuguacuccagccugcga

SEQ ID NO: 81157 - RNA, 22 nt, Human
gccacugucaucuugugaagca

SEQ ID NO: 81158 - RNA, 22 nt, Human
gccagaaacauacacaucacuu

SEQ ID NO: 81159 - RNA, 22 nt, Human
gccagaaagaggaggaccuggg

SEQ ID NO: 81160 - RNA, 22 nt, Human
gccagaagacuggagucagcug

SEQ ID NO: 81161 - RNA, 22 nt, Human
gccagaagggguggauccaggc

SEQ ID NO: 81162 - RNA, 22 nt, Human
gccagagacacuuggagguaga

SEQ ID NO: 81163 - RNA, 22 nt, Human
gccagagagacugauacaugcu

SEQ ID NO: 81164 - RNA, 22 nt, Human
gccagagagagucccugggccu

SEQ ID NO: 81165 - RNA, 22 nt, Human
gccagagaggcaaauccuagca

SEQ ID NO: 81166 - RNA, 22 nt, Human
gccagagaggccuuagaaucca

SEQ ID NO: 81167 - RNA, 22 nt, Human
gcauuagacccaagguauuuug

SEQ ID NO: 81168 - RNA, 22 nt, Human
gcauuagauuugccuuugaagc

SEQ ID NO: 81169 - RNA, 22 nt, Human
gcauucagccuaaagagaaaag

SEQ ID NO: 81170 - RNA, 22 nt, Human
gcauucaggaaccggaagggua

SEQ ID NO: 81171 - RNA, 22 nt, Human
gcauucaucaaaaauguuccuc

SEQ ID NO: 81172 - RNA, 22 nt, Human
gcauucaucuuccuccaugcag

SEQ ID NO: 81173 - RNA, 22 nt, Human
gcauucaugccugugugagcuc

SEQ ID NO: 81174 - RNA, 22 nt, Human
gcauucccaaaagacacuuacc

SEQ ID NO: 81175 - RNA, 22 nt, Human
gcauuccugagaaugcagagug

SEQ ID NO: 81176 - RNA, 22 nt, Human
gcauuccuguaccucucugcua

SEQ ID NO: 81177 - RNA, 22 nt, Human
gcauuccuuguuagcauuugau

SEQ ID NO: 81178 - RNA, 21 nt, Human
gcauucuucaugugauucaga

SEQ ID NO: 81179 - RNA, 22 nt, Human
gcauucuuccugggcugggggc

SEQ ID NO: 81180 - RNA, 22 nt, Human
gcauucuuuagacugagagaua

SEQ ID NO: 81181 - RNA, 23 nt, Human
gcauugaacaaaagaggggagua

SEQ ID NO: 81182 - RNA, 22 nt, Human
gcauugaaccaucuagauuucu

SEQ ID NO: 81183 - RNA, 22 nt, Human
gcauugaaggacuuccauuaua

SEQ ID NO: 81184 - RNA, 22 nt, Human
gcauugaguccacucugucuuu

SEQ ID NO: 81185 - RNA, 22 nt, Human
gcauugauuuaaacaucucucu

SEQ ID NO: 81186 - RNA, 22 nt, Human
gcauugguuuacacagggugaa

SEQ ID NO: 81187 - RNA, 22 nt, Human
gcauuuaaauuugaacuucaga

SEQ ID NO: 81188 - RNA, 22 nt, Human
gcauuuauuaucugccaggcac

SEQ ID NO: 81189 - RNA, 22 nt, Human
gcauuucaaaauuccaggcaag

SEQ ID NO: 81190 - RNA, 22 nt, Human
gcauuuccugugcuuggcauau

SEQ ID NO: 81191 - RNA, 22 nt, Human
gcauuuguacaaaaugcaguag

SEQ ID NO: 81192 - RNA, 22 nt, Human
gcauuuuagaauauuggagcaa

SEQ ID NO: 81193 - RNA, 22 nt, Human
gcauuuuauaaagaguuauuug

SEQ ID NO: 81194 - RNA, 22 nt, Human
gcauuuugaggcugggggagca

SEQ ID NO: 81195 - RNA, 22 nt, Human
gcauuuuucuaaucauuggcau

SEQ ID NO: 81196 - RNA, 22 nt, Human
gccaaagcuggagguggaggug

SEQ ID NO: 81197 - RNA, 22 nt, Human
gccaaauacaguagucauugcc

SEQ ID NO: 81198 - RNA, 22 nt, Human
gccaaauauaauucuccaccuu

SEQ ID NO: 81199 - RNA, 22 nt, Human
gccaagccuguagacacaagcu

SEQ ID NO: 81200 - RNA, 22 nt, Human
gccaagcucaccuucugaugga

SEQ ID NO: 81201 - RNA, 22 nt, Human
gccaagcucuuuaaaggccaaa

SEQ ID NO: 81202 - RNA, 22 nt, Human
gccaagcuguuuuucagagacg

SEQ ID NO: 81203 - RNA, 21 nt, Human
gccaaggaggcuagagaacau

SEQ ID NO: 81204 - RNA, 22 nt, Human
gccaaggccucugcaggaugag

SEQ ID NO: 81205 - RNA, 22 nt, Human
gccaagggggcagugcaugggu

SEQ ID NO: 81206 - RNA, 22 nt, Human
gccaaggguaguggaggccccu

SEQ ID NO: 81207 - RNA, 22 nt, Human
gccaaucaggaggcuguacauc

SEQ ID NO: 81208 - RNA, 22 nt, Human
gccaaucuuugacuauaugugu

SEQ ID NO: 81209 - RNA, 22 nt, Human
gccacagacagagagucuagug

SEQ ID NO: 81210 - RNA, 22 nt, Human
gccacagcccgagcaccaugag

SEQ ID NO: 81211 - RNA, 22 nt, Human
gccacagcggggccgcuagagc

SEQ ID NO: 81212 - RNA, 22 nt, Human
gccacagcuccagucaggugac

SEQ ID NO: 81213 - RNA, 22 nt, Human
gccacagcuuagaucacagccu

SEQ ID NO: 81214 - RNA, 19 nt, Human
gccacaggaugaaguuugg

SEQ ID NO: 81215 - RNA, 22 nt, Human
gccacagggaggcguuuucagg

SEQ ID NO: 81216 - RNA, 22 nt, Human
gccacauccagguggaucaaau

SEQ ID NO: 81217 - RNA, 22 nt, Human
gucccaggcuccauggcagcca

SEQ ID NO: 81218 - RNA, 22 nt, Human
gucccagggaugcagacaugag

SEQ ID NO: 81219 - RNA, 22 nt, Human
gucccagggcaaggcuguuucu

SEQ ID NO: 81220 - RNA, 22 nt, Human
guccccucauuuuagagaaaga

SEQ ID NO: 81221 - RNA, 22 nt, Human
guccccuggcccccagcgucgg

SEQ ID NO: 81222 - RNA, 22 nt, Human
guccccugguggcuggagcugc

SEQ ID NO: 81223 - RNA, 22 nt, Human
guccccuuaaacaugcucucuu

SEQ ID NO: 81224 - RNA, 22 nt, Human
gucccuaguggaaagacaugau

SEQ ID NO: 81225 - RNA, 23 nt, Human
gucccucaccccuaggcaaugcc

SEQ ID NO: 81226 - RNA, 22 nt, Human
gucccucacuggaccauaugaa

SEQ ID NO: 81227 - RNA, 22 nt, Human
gucccucaguagugcacagugg

SEQ ID NO: 81228 - RNA, 22 nt, Human
gucccucugcucuagagagcca

SEQ ID NO: 81229 - RNA, 22 nt, Human
gucccucugggccaucaggucc

SEQ ID NO: 81230 - RNA, 22 nt, Human
gucccugauaagagccaucgau

SEQ ID NO: 81231 - RNA, 22 nt, Human
gucccuggaaaagagcugguga

SEQ ID NO: 81232 - RNA, 22 nt, Human
gucccuggaucugggacagcug

SEQ ID NO: 81233 - RNA, 22 nt, Human
gucccuggucuaccguggcuuc

SEQ ID NO: 81234 - RNA, 22 nt, Human
gucccugguuugcccaggacca

SEQ ID NO: 81235 - RNA, 19 nt, Human
gucccuucacuccugcugg

SEQ ID NO: 81236 - RNA, 22 nt, Human
gucccuuccucauuccacuuua

SEQ ID NO: 81237 - RNA, 22 nt, Human
guccuaaauauagugauucaug

SEQ ID NO: 81238 - RNA, 22 nt, Human
guccuaaucucuucuuauaagg

SEQ ID NO: 81239 - RNA, 17 nt, Human
guccuacccauggucua

SEQ ID NO: 81240 - RNA, 23 nt, Human
guccuagugcuuggugcccaggc

SEQ ID NO: 81241 - RNA, 22 nt, Human
guccuauuagcauauugaauac

SEQ ID NO: 81242 - RNA, 23 nt, Human
guccuauuuuuugaaauacugag

SEQ ID NO: 81243 - RNA, 22 nt, Human
guccucagaugcugcugaaaug

SEQ ID NO: 81244 - RNA, 21 nt, Human
guccucagcugaugggagcug

SEQ ID NO: 81245 - RNA, 22 nt, Human
guccucaggaaagcagauaaca

SEQ ID NO: 81246 - RNA, 22 nt, Human
guccucaggaaggcuuucugac

SEQ ID NO: 81247 - RNA, 22 nt, Human
guccucuccaggaggcucugau

SEQ ID NO: 81248 - RNA, 22 nt, Human
guccucugagggggcugcacgc

SEQ ID NO: 81249 - RNA, 22 nt, Human
guccucugcccaggucaagguu

SEQ ID NO: 81250 - RNA, 22 nt, Human
guccucugcuucaugcccugau

SEQ ID NO: 81251 - RNA, 22 nt, Human
guccucuggaagaugaguucuu

SEQ ID NO: 81252 - RNA, 22 nt, Human
guccucuggccuuucccaggac

SEQ ID NO: 81253 - RNA, 22 nt, Human
guccucugggcagcugccccac

SEQ ID NO: 81254 - RNA, 22 nt, Human
guccugaaugccuuuaggcaga

SEQ ID NO: 81255 - RNA, 22 nt, Human
guccugagucaagugugggcag

SEQ ID NO: 81256 - RNA, 22 nt, Human
guccugcuuguuaggccuaguc

SEQ ID NO: 81257 - RNA, 22 nt, Human
guccuggcuagucguccgcgac

SEQ ID NO: 81258 - RNA, 20 nt, Human
guccugggagccacagcaca

SEQ ID NO: 81259 - RNA, 22 nt, Human
guccugggaggggcugguccug

SEQ ID NO: 81260 - RNA, 22 nt, Human
guccuggggaauacagaagccg

SEQ ID NO: 81261 - RNA, 22 nt, Human
guccuggggauacagaagugaa

SEQ ID NO: 81262 - RNA, 22 nt, Human
guccugggggcagcugugucca

SEQ ID NO: 81263 - RNA, 22 nt, Human
guccuggguccccgcaggucag

SEQ ID NO: 81264 - RNA, 22 nt, Human
guccuggugccaccugcgggau

SEQ ID NO: 81265 - RNA, 22 nt, Human
guccugguggagucucugggga

SEQ ID NO: 81266 - RNA, 17 nt, Human
guccuggugugugagga

SEQ ID NO: 81267 - RNA, 22 nt, Human
guccugguuuucacagaccuuu

SEQ ID NO: 81268 - RNA, 22 nt, Human
guccugugccgaggugggaagc

SEQ ID NO: 81269 - RNA, 22 nt, Human
guccuguguaaguacuugcuca

SEQ ID NO: 81270 - RNA, 22 nt, Human
guccugugugacuucccaaaug

SEQ ID NO: 81271 - RNA, 22 nt, Human
guccuguuggugaauggcucuu

SEQ ID NO: 81272 - RNA, 22 nt, Human
guccuucauggaguuacagccu

SEQ ID NO: 81273 - RNA, 22 nt, Human
guccuucauuuccugaucucua

SEQ ID NO: 81274 - RNA, 22 nt, Human
guccuucuuuucaucccugguu

SEQ ID NO: 81275 - RNA, 22 nt, Human
guccuuggcauucugagucuug

SEQ ID NO: 81276 - RNA, 22 nt, Human
gugaagcacaugggcguugggu

SEQ ID NO: 81277 - RNA, 22 nt, Human
gugaagcacgcugccgcacugg

SEQ ID NO: 81278 - RNA, 22 nt, Human
gugaagcagggaaggaaaggau

SEQ ID NO: 81279 - RNA, 22 nt, Human
gugaagcauaacugaaggauuu

SEQ ID NO: 81280 - RNA, 22 nt, Human
gugaaggaguuaucagugguua

SEQ ID NO: 81281 - RNA, 20 nt, Human
gugaaggcuaagcacagagg

SEQ ID NO: 81282 - RNA, 22 nt, Human
gugaaggcuaauuaaacaaguu

SEQ ID NO: 81283 - RNA, 22 nt, Human
gugaaggcuacaagagaucaag

SEQ ID NO: 81284 - RNA, 23 nt, Human
gugaagguuucugcauuuauugg

SEQ ID NO: 81285 - RNA, 22 nt, Human
gugaagucaagaaugcaauuug

SEQ ID NO: 81286 - RNA, 19 nt, Human
gugaagugccagaagucag

SEQ ID NO: 81287 - RNA, 22 nt, Human
gugaaguugauuguuaucguca

SEQ ID NO: 81288 - RNA, 22 nt, Human
gugaauaaagggaguuuucaaa

SEQ ID NO: 81289 - RNA, 22 nt, Human
gugaauaaccuacuccaggccu

SEQ ID NO: 81290 - RNA, 22 nt, Human
gugaauaauuuuuuaguauaag

SEQ ID NO: 81291 - RNA, 22 nt, Human
gugaauauucuuugugcaguau

SEQ ID NO: 81292 - RNA, 22 nt, Human
gugaaugacuguuuucagcauu

SEQ ID NO: 81293 - RNA, 22 nt, Human
gugaaugcaaacuguuucugau

SEQ ID NO: 81294 - RNA, 22 nt, Human
gugaaugccgcagucuguugcu

SEQ ID NO: 81295 - RNA, 22 nt, Human
gugaauuacauguauuuuuaag

SEQ ID NO: 81296 - RNA, 22 nt, Human
gugacaaaaacacugauuauuu

SEQ ID NO: 81297 - RNA, 22 nt, Human
gugacagagcugggauuugaag

SEQ ID NO: 81298 - RNA, 22 nt, Human
gugacagcuccuugguuagaug

SEQ ID NO: 81299 - RNA, 22 nt, Human
gugacaggccacugcggcucug

SEQ ID NO: 81300 - RNA, 22 nt, Human
gugacagggagugauauagcag

SEQ ID NO: 81301 - RNA, 22 nt, Human
gugacagucaaagacaugacuu

SEQ ID NO: 81302 - RNA, 22 nt, Human
gugacaguggucacuuguaguu

SEQ ID NO: 81303 - RNA, 22 nt, Human
gugacauuucgugacgugagaa

SEQ ID NO: 81304 - RNA, 22 nt, Human
gugaccagccagugcugucugu

SEQ ID NO: 81305 - RNA, 22 nt, Human
gugaccaucaucucagcuaguu

SEQ ID NO: 81306 - RNA, 22 nt, Human
gugacccaugcagugguuuugg

SEQ ID NO: 81307 - RNA, 18 nt, Human
gugacguuuuggaugauu

SEQ ID NO: 81308 - RNA, 22 nt, Human
gugacucuuaaagcaaaucuug

SEQ ID NO: 81309 - RNA, 22 nt, Human
gugacucuuaccuacccagccu

SEQ ID NO: 81310 - RNA, 22 nt, Human
gugacuguuuuuaggaggagua

SEQ ID NO: 81311 - RNA, 22 nt, Human
gugagacaagauuuguaggcag

SEQ ID NO: 81312 - RNA, 22 nt, Human
gugagagcucagcugcccuggg

SEQ ID NO: 81313 - RNA, 22 nt, Human
gugagagcugcuagacuguuau

SEQ ID NO: 81314 - RNA, 22 nt, Human
gugagagggcugggcucaugau

SEQ ID NO: 81315 - RNA, 22 nt, Human
gugagcaauucaaaggcaggaa

SEQ ID NO: 81316 - RNA, 22 nt, Human
gugagcagaacagguggcuucu

SEQ ID NO: 81317 - RNA, 23 nt, Human
gugagcagcaccaugaggcuaga

SEQ ID NO: 81318 - RNA, 23 nt, Human
gugagcagcccacuaggaaugcc

SEQ ID NO: 81319 - RNA, 22 nt, Human
gugagcagcucaggguggucuc

SEQ ID NO: 81320 - RNA, 22 nt, Human
gugagcaggauuucauggugua

SEQ ID NO: 81321 - RNA, 22 nt, Human
gugagcaguuuguuccagaauc

SEQ ID NO: 81322 - RNA, 22 nt, Human
gugagcauauauguaaucguuu

SEQ ID NO: 81323 - RNA, 22 nt, Human
gugagccaauaccaugcuguuc

SEQ ID NO: 81324 - RNA, 17 nt, Human
gugagcugagucaggac

SEQ ID NO: 81325 - RNA, 22 nt, Human
gugagcuggaauaguggagaaa

SEQ ID NO: 81326 - RNA, 22 nt, Human
gugagcuucugccucucagucc

SEQ ID NO: 81327 - RNA, 22 nt, Human
gugaggacuaguggguuugugc

SEQ ID NO: 81328 - RNA, 22 nt, Human
gugaggacugguaaggacugca

SEQ ID NO: 81329 - RNA, 22 nt, Human
gugaggagggcuggucccaggc

SEQ ID NO: 81330 - RNA, 22 nt, Human
gugaggaugcagaugagggccu

SEQ ID NO: 81331 - RNA, 22 nt, Human
gugaggcagggaaagaggauaa

SEQ ID NO: 81332 - RNA, 19 nt, Human
gccacaucuguaccccuuu

SEQ ID NO: 81333 - RNA, 19 nt, Human
gccacaucuuuuccagagu

SEQ ID NO: 81334 - RNA, 22 nt, Human
gccacauuagcccucaccaucu

SEQ ID NO: 81335 - RNA, 22 nt, Human
gccaccagcagaaaaggggcca

SEQ ID NO: 81336 - RNA, 22 nt, Human
gccaccaguagcuaacaacagu

SEQ ID NO: 81337 - RNA, 22 nt, Human
gccaccagugggggccugggca

SEQ ID NO: 81338 - RNA, 22 nt, Human
gccacccccaaguagguggucu

SEQ ID NO: 81339 - RNA, 21 nt, Human
gccaccccuggcacaggugcu

SEQ ID NO: 81340 - RNA, 22 nt, Human
gccacccugagcugggccaggg

SEQ ID NO: 81341 - RNA, 22 nt, Human
gccacccuggacgcacuguucg

SEQ ID NO: 81342 - RNA, 22 nt, Human
gccaccugccaacuugcuggaa

SEQ ID NO: 81343 - RNA, 22 nt, Human
gccaccugcgggccguggugga

SEQ ID NO: 81344 - RNA, 22 nt, Human
gccaccuggacagcugugcccu

SEQ ID NO: 81345 - RNA, 22 nt, Human
gccaccuuccaaaauaaucaca

SEQ ID NO: 81346 - RNA, 22 nt, Human
gccacugauuauucagcagaca

SEQ ID NO: 81347 - RNA, 22 nt, Human
gccacuggacccagaaagggaa

SEQ ID NO: 81348 - RNA, 22 nt, Human
gccacuggcaucuaguugguag

SEQ ID NO: 81349 - RNA, 22 nt, Human
gccacuggcgcugugcagagug

SEQ ID NO: 81350 - RNA, 22 nt, Human
gccacugugguccucccaugau

SEQ ID NO: 81351 - RNA, 22 nt, Human
gccagagccuguggauuuaacc

SEQ ID NO: 81352 - RNA, 22 nt, Human
gccagagcuucccccgagugug

SEQ ID NO: 81353 - RNA, 22 nt, Human
gccagagcuugguuuuuauuua

SEQ ID NO: 81354 - RNA, 20 nt, Human
gccagaggccggcaggggcu

SEQ ID NO: 81355 - RNA, 22 nt, Human
gccagaggcucagguugccaug

SEQ ID NO: 81356 - RNA, 18 nt, Human
gccagagggaagcaggug

SEQ ID NO: 81357 - RNA, 22 nt, Human
gccagagggauuccuggugugu

SEQ ID NO: 81358 - RNA, 22 nt, Human
gccagaggggcucgaaggcgcg

SEQ ID NO: 81359 - RNA, 22 nt, Human
gccagcagggaagccuugggcu

SEQ ID NO: 81360 - RNA, 22 nt, Human
gccagcagguugucaaggagcu

SEQ ID NO: 81361 - RNA, 22 nt, Human
gccagcaguggccaccaccagg

SEQ ID NO: 81362 - RNA, 22 nt, Human
gccagccacguuagacuggccc

SEQ ID NO: 81363 - RNA, 18 nt, Human
gccagccaggcguugcuc

SEQ ID NO: 81364 - RNA, 22 nt, Human
gccagcccugggagacuuaugg

SEQ ID NO: 81365 - RNA, 22 nt, Human
gccagccugugcuuggccaggc

SEQ ID NO: 81366 - RNA, 21 nt, Human
gccagccuguuuaccuguggu

SEQ ID NO: 81367 - RNA, 22 nt, Human
gccagcucagaugcaggaagga

SEQ ID NO: 81368 - RNA, 22 nt, Human
gccagcucccaagugagccccu

SEQ ID NO: 81369 - RNA, 22 nt, Human
gccagcucucauuguauaggcu

SEQ ID NO: 81370 - RNA, 22 nt, Human
gccagcugagaaaucauugaua

SEQ ID NO: 81371 - RNA, 22 nt, Human
gccagcugagcaaauuccagcu

SEQ ID NO: 81372 - RNA, 22 nt, Human
gccagcugcaucuccugggcug

SEQ ID NO: 81373 - RNA, 22 nt, Human
gccagcugcucgcguaggguag

SEQ ID NO: 81374 - RNA, 22 nt, Human
gccagcuggagugagagugggc

SEQ ID NO: 81375 - RNA, 21 nt, Human
gccagcugggucuugcaggag

SEQ ID NO: 81376 - RNA, 22 nt, Human
gccagcuguaagcagugauucu

SEQ ID NO: 81377 - RNA, 22 nt, Human
gccagcuguuucagagcccagu

SEQ ID NO: 81378 - RNA, 22 nt, Human
gccagcuuccauggccacguca

SEQ ID NO: 81379 - RNA, 22 nt, Human
gccagcuuggcaugugaggagu

SEQ ID NO: 81380 - RNA, 22 nt, Human
gccagcuuggccaguggccagu

SEQ ID NO: 81381 - RNA, 22 nt, Human
gccaggaacacaaugccaagcu

SEQ ID NO: 81382 - RNA, 18 nt, Human
gccaggaagcauggggac

SEQ ID NO: 81383 - RNA, 22 nt, Human
gccaggaaggcugaagccagaa

SEQ ID NO: 81384 - RNA, 22 nt, Human
gccaggaaguugggccagucua

SEQ ID NO: 81385 - RNA, 22 nt, Human
guggaaaugcccccaaauagug

SEQ ID NO: 81386 - RNA, 22 nt, Human
guggaagcaacccuggcaggag

SEQ ID NO: 81387 - RNA, 22 nt, Human
guggaaggugaaggagcagcga

SEQ ID NO: 81388 - RNA, 20 nt, Human
guggaaugcacucugugcug

SEQ ID NO: 81389 - RNA, 22 nt, Human
guggaauguccuugaucauaag

SEQ ID NO: 81390 - RNA, 22 nt, Human
guggacagagcuagaaaaugug

SEQ ID NO: 81391 - RNA, 22 nt, Human
guggacugcgcuugagggggcc

SEQ ID NO: 81392 - RNA, 22 nt, Human
guggagaccuccuaggaugugu

SEQ ID NO: 81393 - RNA, 22 nt, Human
guggagagagauaagccugguc

SEQ ID NO: 81394 - RNA, 22 nt, Human
guggagaggaacccagcucugu

SEQ ID NO: 81395 - RNA, 22 nt, Human
guggagaggagcagcuaccuca

SEQ ID NO: 81396 - RNA, 20 nt, Human
guggagaggcuggcgggacu

SEQ ID NO: 81397 - RNA, 21 nt, Human
guggagagugauuuugaugca

SEQ ID NO: 81398 - RNA, 22 nt, Human
guggagccaggaucuccgcaca

SEQ ID NO: 81399 - RNA, 22 nt, Human
guggagcccugccuugcucaug

SEQ ID NO: 81400 - RNA, 22 nt, Human
guggagcuggacccaggccucu

SEQ ID NO: 81401 - RNA, 22 nt, Human
guggagcuggcccaagaagcug

SEQ ID NO: 81402 - RNA, 22 nt, Human
guggaggaaaagaaguugggug

SEQ ID NO: 81403 - RNA, 22 nt, Human
guggagggugagcucauguuug

SEQ ID NO: 81404 - RNA, 18 nt, Human
guggaggguucucagaau

SEQ ID NO: 81405 - RNA, 22 nt, Human
guggaggucccgggcaggagca

SEQ ID NO: 81406 - RNA, 17 nt, Human
guggaggugcucuggua

SEQ ID NO: 81407 - RNA, 22 nt, Human
guggaguggccuggcccugaga

SEQ ID NO: 81408 - RNA, 22 nt, Human
guggaucuacuguaugggauag

SEQ ID NO: 81409 - RNA, 20 nt, Human
guggaugaucaguguagugg

SEQ ID NO: 81410 - RNA, 22 nt, Human
guggaugaugagugacuacaga

SEQ ID NO: 81411 - RNA, 22 nt, Human
guggauggauugaggcaguggg

SEQ ID NO: 81412 - RNA, 22 nt, Human
guggauggcuaguugagaaggg

SEQ ID NO: 81413 - RNA, 22 nt, Human
guggcaaguguuccaagaggcg

SEQ ID NO: 81414 - RNA, 22 nt, Human
guggcacuaaauacagcauuuc

SEQ ID NO: 81415 - RNA, 22 nt, Human
guggcagaacuaugugauugcu

SEQ ID NO: 81416 - RNA, 22 nt, Human
guggcagagagcaagugucuga

SEQ ID NO: 81417 - RNA, 22 nt, Human
guggcagagcaggagacaggac

SEQ ID NO: 81418 - RNA, 22 nt, Human
guggcagagccaggcuuugaac

SEQ ID NO: 81419 - RNA, 22 nt, Human
guggcagagccgugcagguagg

SEQ ID NO: 81420 - RNA, 22 nt, Human
guggcagaggcucugggaccag

SEQ ID NO: 81421 - RNA, 22 nt, Human
guggcagagggugagcuggacu

SEQ ID NO: 81422 - RNA, 22 nt, Human
guggcagaguugcugacuagaa

SEQ ID NO: 81423 - RNA, 19 nt, Human
guggcagcagauuuggugu

SEQ ID NO: 81424 - RNA, 22 nt, Human
guggcagccgcaggcccugugu

SEQ ID NO: 81425 - RNA, 18 nt, Human
guggcagccuuuggcuuu

SEQ ID NO: 81426 - RNA, 22 nt, Human
guggcagcggugugcaaggagg

SEQ ID NO: 81427 - RNA, 22 nt, Human
guggcaggagagacacagccau

SEQ ID NO: 81428 - RNA, 22 nt, Human
guggcaggagugggccuugaag

SEQ ID NO: 81429 - RNA, 22 nt, Human
guggcaggggcgggcuguuccg

SEQ ID NO: 81430 - RNA, 22 nt, Human
guggcagugaaggucauagcau

SEQ ID NO: 81431 - RNA, 22 nt, Human
guggcagugggaugcuaucagg

SEQ ID NO: 81432 - RNA, 20 nt, Human
guggcagugguggcagcagu

SEQ ID NO: 81433 - RNA, 22 nt, Human
guggcagugugaggauccugcu

SEQ ID NO: 81434 - RNA, 22 nt, Human
guggcaguguggagggaggagu

SEQ ID NO: 81435 - RNA, 22 nt, Human
guggcauuuggaaagagcacua

SEQ ID NO: 81436 - RNA, 22 nt, Human
guggccaaacaccaguuuagga

SEQ ID NO: 81437 - RNA, 22 nt, Human
guggccaacucaauguuuuuca

SEQ ID NO: 81438 - RNA, 22 nt, Human
guggccaaggcagagaaagagc

SEQ ID NO: 81439 - RNA, 22 nt, Human
guggccaauaggagcagcuauc

SEQ ID NO: 81440 - RNA, 22 nt, Human
guggccagccagggugcugaug

SEQ ID NO: 81441 - RNA, 19 nt, Human
guggccagggcaggggcug

SEQ ID NO: 81442 - RNA, 22 nt, Human
guggccagggcccacaggauga

SEQ ID NO: 81443 - RNA, 22 nt, Human
guggccagucccgaugcuuguu

SEQ ID NO: 81444 - RNA, 21 nt, Human
guggccagugacuacuuauug

SEQ ID NO: 81445 - RNA, 22 nt, Human
guggccagugggaaugggcuca

SEQ ID NO: 81446 - RNA, 22 nt, Human
guggccauaggaggucagauga

SEQ ID NO: 81447 - RNA, 22 nt, Human
guggcccacuuacgucaugugu

SEQ ID NO: 81448 - RNA, 22 nt, Human
guggcccaggcacccugaugac

SEQ ID NO: 81449 - RNA, 22 nt, Human
guggcccuaacaccguuucuca

SEQ ID NO: 81450 - RNA, 22 nt, Human
guggcccucagcaguugccaag

SEQ ID NO: 81451 - RNA, 21 nt, Human
guggcccugccgcagugucca

SEQ ID NO: 81452 - RNA, 22 nt, Human
guggcccuggaguugugacacu

SEQ ID NO: 81453 - RNA, 20 nt, Human
guggcccuuaaagagggaag

SEQ ID NO: 81454 - RNA, 22 nt, Human
gcccucagaugggaaaggaggg

SEQ ID NO: 81455 - RNA, 22 nt, Human
gcccucagcauccucagggcca

SEQ ID NO: 81456 - RNA, 22 nt, Human
gcccucagcuccuggacacaug

SEQ ID NO: 81457 - RNA, 22 nt, Human
gcccucagcuugauguuguucu

SEQ ID NO: 81458 - RNA, 22 nt, Human
gcccuccaugagacacagugua

SEQ ID NO: 81459 - RNA, 22 nt, Human
gcccuccccucuggguggugag

SEQ ID NO: 81460 - RNA, 22 nt, Human
gcccucccuacagccuauuucu

SEQ ID NO: 81461 - RNA, 23 nt, Human
gcccucccucccagguggguguu

SEQ ID NO: 81462 - RNA, 22 nt, Human
gcccuccuuugcuucuccuagu

SEQ ID NO: 81463 - RNA, 22 nt, Human
gcccucugccacaggacgccag

SEQ ID NO: 81464 - RNA, 22 nt, Human
gcccucugcucagcuccucagc

SEQ ID NO: 81465 - RNA, 22 nt, Human
gcccucuggcacagagaugcag

SEQ ID NO: 81466 - RNA, 22 nt, Human
gcccucuggcagccuuggcugg

SEQ ID NO: 81467 - RNA, 22 nt, Human
gcccucuggugggugagccccg

SEQ ID NO: 81468 - RNA, 22 nt, Human
gcccugaacgaggggucuggag

SEQ ID NO: 81469 - RNA, 22 nt, Human
gcccugaauuccucaggcugug

SEQ ID NO: 81470 - RNA, 22 nt, Human
gcccugaccuucacugacucuc

SEQ ID NO: 81471 - RNA, 22 nt, Human
gcccugagacugagcauggguu

SEQ ID NO: 81472 - RNA, 22 nt, Human
gcccugagcacacaguagcaaa

SEQ ID NO: 81473 - RNA, 22 nt, Human
gcccugagcuagugugggcagg

SEQ ID NO: 81474 - RNA, 22 nt, Human
gcccugcccuguugaaacuaga

SEQ ID NO: 81475 - RNA, 23 nt, Human
gcccugcccuuagcacacucaca

SEQ ID NO: 81476 - RNA, 17 nt, Human
gcccugccugcugcccu

SEQ ID NO: 81477 - RNA, 23 nt, Human
gcccugcuacucacaagcugugu

SEQ ID NO: 81478 - RNA, 22 nt, Human
gcccugcucuggucucugcccg

SEQ ID NO: 81479 - RNA, 22 nt, Human
gcccuggaaucucuccauggga

SEQ ID NO: 81480 - RNA, 20 nt, Human
gcccuggacguggccucggc

SEQ ID NO: 81481 - RNA, 22 nt, Human
gcccuggaugcucauggcauca

SEQ ID NO: 81482 - RNA, 22 nt, Human
gcccuggauguacaggcauguu

SEQ ID NO: 81483 - RNA, 22 nt, Human
gcccuggcaccucguugcccag

SEQ ID NO: 81484 - RNA, 22 nt, Human
gcccuggggaaggugucuccaa

SEQ ID NO: 81485 - RNA, 22 nt, Human
gcccuguauccaagucccaucu

SEQ ID NO: 81486 - RNA, 22 nt, Human
gcccugucccuuggcuucuagg

SEQ ID NO: 81487 - RNA, 22 nt, Human
gcccuguccuccugacugagug

SEQ ID NO: 81488 - RNA, 22 nt, Human
gcccugugagauuagaacagca

SEQ ID NO: 81489 - RNA, 22 nt, Human
gcccugugguuccaggaagcaa

SEQ ID NO: 81490 - RNA, 22 nt, Human
gcccuguguauccccugugcuu

SEQ ID NO: 81491 - RNA, 22 nt, Human
gcccugugugaucacaugaaca

SEQ ID NO: 81492 - RNA, 22 nt, Human
gcccuguguguuugcacugauu

SEQ ID NO: 81493 - RNA, 22 nt, Human
gcccuguugucggacgucaagg

SEQ ID NO: 81494 - RNA, 22 nt, Human
guuauguaugagggaaugauua

SEQ ID NO: 81495 - RNA, 22 nt, Human
guuauguauugggaaauccaag

SEQ ID NO: 81496 - RNA, 22 nt, Human
guuauuagaagugaaggauugu

SEQ ID NO: 81497 - RNA, 22 nt, Human
guuauuaguaagacucgcacau

SEQ ID NO: 81498 - RNA, 22 nt, Human
guuauuaucuugaggaaucugu

SEQ ID NO: 81499 - RNA, 22 nt, Human
guuauuauuucucuccuugcua

SEQ ID NO: 81500 - RNA, 22 nt, Human
guuauucuagugcucagccauu

SEQ ID NO: 81501 - RNA, 22 nt, Human
guuauucugcacaccuuuaaaa

SEQ ID NO: 81502 - RNA, 22 nt, Human
guuauucugccaaacuuccaca

SEQ ID NO: 81503 - RNA, 22 nt, Human
guuauugagguggagucucacu

SEQ ID NO: 81504 - RNA, 23 nt, Human
guuauugcuggugcuggccagcc

SEQ ID NO: 81505 - RNA, 22 nt, Human
guuauuguuuauccugcacccc

SEQ ID NO: 81506 - RNA, 22 nt, Human
guuauuuucauuggcucagacu

SEQ ID NO: 81507 - RNA, 22 nt, Human
guucaaauggcugcaguuacca

SEQ ID NO: 81508 - RNA, 22 nt, Human
guucaaauuuuggcuguacugc

SEQ ID NO: 81509 - RNA, 22 nt, Human
guucaaggaagggaggaaagcc

SEQ ID NO: 81510 - RNA, 22 nt, Human
guucaaguucauaucucuuaac

SEQ ID NO: 81511 - RNA, 22 nt, Human
guucacaaaguacuguaugcau

SEQ ID NO: 81512 - RNA, 22 nt, Human
guucacaagcuggguuucugca

SEQ ID NO: 81513 - RNA, 22 nt, Human
guucacaauggcuuuaccuaag

SEQ ID NO: 81514 - RNA, 22 nt, Human
guucacagaaggccagauggua

SEQ ID NO: 81515 - RNA, 22 nt, Human
guucacagcugggacaagacug

SEQ ID NO: 81516 - RNA, 22 nt, Human
guucacagcuucuuaggucaua

SEQ ID NO: 81517 - RNA, 22 nt, Human
guucacagucuacauaguaaag

SEQ ID NO: 81518 - RNA, 22 nt, Human
guucacaguguuuucuuugcau

SEQ ID NO: 81519 - RNA, 22 nt, Human
guucacaucccagaaagagcau

SEQ ID NO: 81520 - RNA, 22 nt, Human
guucacauccugcuuuuucccu

SEQ ID NO: 81521 - RNA, 22 nt, Human
guucacauccuggcugugccac

SEQ ID NO: 81522 - RNA, 22 nt, Human
guucacauccuugugaggauuu

SEQ ID NO: 81523 - RNA, 22 nt, Human
guucacauguguuaucuucuuu

SEQ ID NO: 81524 - RNA, 22 nt, Human
guucacuggcugugugacucug

SEQ ID NO: 81525 - RNA, 22 nt, Human
guucacuguacuggugaugguu

SEQ ID NO: 81526 - RNA, 22 nt, Human
guucagagugggaaugaucacu

SEQ ID NO: 81527 - RNA, 22 nt, Human
guucagauggagaaggaaaacu

SEQ ID NO: 81528 - RNA, 22 nt, Human
guucagauuugacugguuucuc

SEQ ID NO: 81529 - RNA, 22 nt, Human
guucagcaagaauguuucuauu

SEQ ID NO: 81530 - RNA, 22 nt, Human
guucagcucaagcaauaauuuu

SEQ ID NO: 81531 - RNA, 22 nt, Human
guucagcuuacaaaauacaccu

SEQ ID NO: 81532 - RNA, 22 nt, Human
guucaguggggccuugggggac

SEQ ID NO: 81533 - RNA, 22 nt, Human
guucaguuuugaaauguuaauu

SEQ ID NO: 81534 - RNA, 22 nt, Human
guucauauuacuuugagugcag

SEQ ID NO: 81535 - RNA, 22 nt, Human
guucaucucacagauaggcagu

SEQ ID NO: 81536 - RNA, 22 nt, Human
guucaugugacuacuaugaccu

SEQ ID NO: 81537 - RNA, 22 nt, Human
guucauguuugagaacaaggag

SEQ ID NO: 81538 - RNA, 22 nt, Human
guucauucagcuggguaggagg

SEQ ID NO: 81539 - RNA, 22 nt, Human
guucauuuaugauguaacaugu

SEQ ID NO: 81540 - RNA, 22 nt, Human
guucauuuuacuguaaauagca

SEQ ID NO: 81541 - RNA, 23 nt, Human
guucauuuuauugucugauugcu

SEQ ID NO: 81542 - RNA, 22 nt, Human
guuccacaaaaggucuaguuua

SEQ ID NO: 81543 - RNA, 22 nt, Human
guuccacaaaauguacccaguu

SEQ ID NO: 81544 - RNA, 22 nt, Human
guuccacaaagauugucucucu

SEQ ID NO: 81545 - RNA, 22 nt, Human
guuccacauaacacaucuacaa

SEQ ID NO: 81546 - RNA, 22 nt, Human
guuccaggacccuggccucuga

SEQ ID NO: 81547 - RNA, 22 nt, Human
guucccaccccugagcuccgau

SEQ ID NO: 81548 - RNA, 22 nt, Human
guucccacgccuccucuccagc

SEQ ID NO: 81549 - RNA, 22 nt, Human
guucccacuuggugcacuauga

SEQ ID NO: 81550 - RNA, 18 nt, Human
guucccagauggugcuga

SEQ ID NO: 81551 - RNA, 22 nt, Human
guucccaggcccugggcucucc

SEQ ID NO: 81552 - RNA, 21 nt, Human
guucccuuauuggggcaggca

SEQ ID NO: 81553 - RNA, 22 nt, Human
guuccuaaauuugaaggacuuu

SEQ ID NO: 81554 - RNA, 22 nt, Human
guuccucagcccuuacuuagcc

SEQ ID NO: 81555 - RNA, 22 nt, Human
guuccugagaaauaaagagaga

SEQ ID NO: 81556 - RNA, 22 nt, Human
guuccugaugcuuugaaauuca

SEQ ID NO: 81557 - RNA, 22 nt, Human
guuccugggccugcauucacca

SEQ ID NO: 81558 - RNA, 22 nt, Human
guuccugguggucauggcagcu

SEQ ID NO: 81559 - RNA, 16 nt, Human
guuccuucccacaccu

SEQ ID NO: 81560 - RNA, 22 nt, Human
guuccuuuccuauuuggauaag

SEQ ID NO: 81561 - RNA, 22 nt, Human
guuccuuuguuuagcagagaca

SEQ ID NO: 81562 - RNA, 22 nt, Human
guucgcaucuugaucauggacu

SEQ ID NO: 81563 - RNA, 22 nt, Human
guucguauuuaugucgcagaag

SEQ ID NO: 81564 - RNA, 22 nt, Human
guucuacaugacacucaacauu

SEQ ID NO: 81565 - RNA, 22 nt, Human
guucuacuuucugugucuuuga

SEQ ID NO: 81566 - RNA, 22 nt, Human
guucuagccuggggcuccuugg

SEQ ID NO: 81567 - RNA, 22 nt, Human
guucuagguauaguaagaaauu

SEQ ID NO: 81568 - RNA, 22 nt, Human
guucuagguuagaaggacagau

SEQ ID NO: 81569 - RNA, 22 nt, Human
guucucagcgugggaggcagag

SEQ ID NO: 81570 - RNA, 22 nt, Human
guucucagggauaacuuccccc

SEQ ID NO: 81571 - RNA, 22 nt, Human
guucuccacugcagagucucuc

SEQ ID NO: 81572 - RNA, 22 nt, Human
guucucuaucauuagugaauuu

SEQ ID NO: 81573 - RNA, 22 nt, Human
guucucuggaaacuaugauuca

SEQ ID NO: 81574 - RNA, 22 nt, Human
guucugaguccuccuuugaagg

SEQ ID NO: 81575 - RNA, 22 nt, Human
guucugaguggcccaagcccug

SEQ ID NO: 81576 - RNA, 21 nt, Human
guucugaguuagaguuggcca

SEQ ID NO: 81577 - RNA, 22 nt, Human
guucugcuccuguggcaaucua

SEQ ID NO: 81578 - RNA, 22 nt, Human
guucuggguagauguaucuuuu

SEQ ID NO: 81579 - RNA, 22 nt, Human
guucuguagucauagagcaauu

SEQ ID NO: 81580 - RNA, 22 nt, Human
guucugucacacacugguacuu

SEQ ID NO: 81581 - RNA, 22 nt, Human
guucuguccucacugcaggccu

SEQ ID NO: 81582 - RNA, 21 nt, Human
guucuguugacugugggcauc

SEQ ID NO: 81583 - RNA, 22 nt, Human
guucuucaaagugacaacuaaa

SEQ ID NO: 81584 - RNA, 22 nt, Human
gcccagaguggccacuuggcuc

SEQ ID NO: 81585 - RNA, 21 nt, Human
gcccagaguuaagcccaccca

SEQ ID NO: 81586 - RNA, 22 nt, Human
gcccagaguucaaggcugcagu

SEQ ID NO: 81587 - RNA, 22 nt, Human
gcccagcacagcuggaagaguc

SEQ ID NO: 81588 - RNA, 22 nt, Human
gcccagcagaucucagugucuc

SEQ ID NO: 81589 - RNA, 22 nt, Human
gcccagcagcuccacuuggcuu

SEQ ID NO: 81590 - RNA, 22 nt, Human
gcccagcaggggauggcagcuc

SEQ ID NO: 81591 - RNA, 22 nt, Human
gcccagcccugaggucacagcu

SEQ ID NO: 81592 - RNA, 22 nt, Human
gcccagcuuuuugaggcaggca

SEQ ID NO: 81593 - RNA, 17 nt, Human
gcccaggaaggacggcc

SEQ ID NO: 81594 - RNA, 22 nt, Human
gcccaggagaggccagggcuga

SEQ ID NO: 81595 - RNA, 22 nt, Human
gcccaggagguggaggugcagu

SEQ ID NO: 81596 - RNA, 22 nt, Human
gcccaggaguugaagggcugac

SEQ ID NO: 81597 - RNA, 22 nt, Human
gcccaggaguuggaggcugcag

SEQ ID NO: 81598 - RNA, 20 nt, Human
gcccaggaucucugaggcau

SEQ ID NO: 81599 - RNA, 23 nt, Human
gcccagggacugggaaucagugg

SEQ ID NO: 81600 - RNA, 22 nt, Human
gcccagggcagggcaagaguga

SEQ ID NO: 81601 - RNA, 22 nt, Human
gcccagggcugcaaguggacgc

SEQ ID NO: 81602 - RNA, 22 nt, Human
gcccaggggcagcgcauagugg

SEQ ID NO: 81603 - RNA, 22 nt, Human
gccuggcuccuaagagcacaac

SEQ ID NO: 81604 - RNA, 22 nt, Human
gccuggcucugagggagcuccu

SEQ ID NO: 81605 - RNA, 22 nt, Human
gccuggcugaggccucugcuaa

SEQ ID NO: 81606 - RNA, 22 nt, Human
gccuggcugcugguucugagga

SEQ ID NO: 81607 - RNA, 19 nt, Human
gccuggcugggaugagccc

SEQ ID NO: 81608 - RNA, 22 nt, Human
gccuggcugggcugaaugcuua

SEQ ID NO: 81609 - RNA, 22 nt, Human
gccugggaaaugguggggucag

SEQ ID NO: 81610 - RNA, 21 nt, Human
gccugggaagagaaagguaag

SEQ ID NO: 81611 - RNA, 23 nt, Human
gccugggacucaggaggagcuca

SEQ ID NO: 81612 - RNA, 22 nt, Human
gccugggacuggauguguuugu

SEQ ID NO: 81613 - RNA, 22 nt, Human
gccugggagggcagcagugugg

SEQ ID NO: 81614 - RNA, 22 nt, Human
gccugggagugcacagugaggu

SEQ ID NO: 81615 - RNA, 22 nt, Human
gccugggauagaggcaaugcau

SEQ ID NO: 81616 - RNA, 22 nt, Human
gccuggggccagcuugggcuga

SEQ ID NO: 81617 - RNA, 22 nt, Human
gccuggggucucugacucacag

SEQ ID NO: 81618 - RNA, 22 nt, Human
gccugggugucgaucacuagug

SEQ ID NO: 81619 - RNA, 22 nt, Human
gccugguggacacugggcauca

SEQ ID NO: 81620 - RNA, 22 nt, Human
gccugguggugugcucaagugg

SEQ ID NO: 81621 - RNA, 22 nt, Human
gccuggugugcgccgcgcagcu

SEQ ID NO: 81622 - RNA, 22 nt, Human
gccugucaauuuuguguacaau

SEQ ID NO: 81623 - RNA, 22 nt, Human
gccuguccacuaaacagccaag

SEQ ID NO: 81624 - RNA, 22 nt, Human
gccuguccuggaugcucugcaa

SEQ ID NO: 81625 - RNA, 22 nt, Human
gccuguccuugugaggucccag

SEQ ID NO: 81626 - RNA, 22 nt, Human
gccugucugcagggcugucauu

SEQ ID NO: 81627 - RNA, 22 nt, Human
gccugucugcgucacgcuuauu

SEQ ID NO: 81628 - RNA, 22 nt, Human
gccugugcauagcagcggacuc

SEQ ID NO: 81629 - RNA, 22 nt, Human
gccugugcuuucuucccuccug

SEQ ID NO: 81630 - RNA, 22 nt, Human
gccuguggccacugcgucugca

SEQ ID NO: 81631 - RNA, 22 nt, Human
gccuguggccgacugagagccu

SEQ ID NO: 81632 - RNA, 21 nt, Human
gccuguguaaauugaguuucc

SEQ ID NO: 81633 - RNA, 22 nt, Human
gccugugugugaggacuggcug

SEQ ID NO: 81634 - RNA, 22 nt, Human
gccuguguguuuagcucugggg

SEQ ID NO: 81635 - RNA, 22 nt, Human
gccuguguuuuuaacucuagga

SEQ ID NO: 81636 - RNA, 20 nt, Human
gccuguucacaggcuucuug

SEQ ID NO: 81637 - RNA, 22 nt, Human
gccuguuggguaacagaguuca

SEQ ID NO: 81638 - RNA, 22 nt, Human
gccuguuuacuuugccgcagga

SEQ ID NO: 81639 - RNA, 22 nt, Human
gccuguuucccugacgcuuaca

SEQ ID NO: 81640 - RNA, 22 nt, Human
gccuguuucuccuccuuggccc

SEQ ID NO: 81641 - RNA, 22 nt, Human
gccuguuugagaauagucaggg

SEQ ID NO: 81642 - RNA, 22 nt, Human
gccuuaauugcagagcaauaua

SEQ ID NO: 81643 - RNA, 22 nt, Human
gccuuagaaaaauaagauuuua

SEQ ID NO: 81644 - RNA, 22 nt, Human
gccuucagcggccgcucgcugc

SEQ ID NO: 81645 - RNA, 23 nt, Human
gccuucagcucgggaaggcuccc

SEQ ID NO: 81646 - RNA, 22 nt, Human
gccuuccaccuaggccucugcu

SEQ ID NO: 81647 - RNA, 22 nt, Human
gccuucccucucauccugcugg

SEQ ID NO: 81648 - RNA, 22 nt, Human
gccuucccuggcuaggcaagca

SEQ ID NO: 81649 - RNA, 22 nt, Human
gccuucucugugagcuccuagg

SEQ ID NO: 81650 - RNA, 22 nt, Human
gccuucugauugcuggacugac

SEQ ID NO: 81651 - RNA, 22 nt, Human
gccuugccaaggggcagcagag

SEQ ID NO: 81652 - RNA, 22 nt, Human
gccuugccgcucagcagugggg

SEQ ID NO: 81653 - RNA, 22 nt, Human
gccuugcuaauuucuccucaac

SEQ ID NO: 81654 - RNA, 22 nt, Human
gccuugcugauuaccuuccuuu

SEQ ID NO: 81655 - RNA, 22 nt, Human
gccuuggagaucacugcucaug

SEQ ID NO: 81656 - RNA, 19 nt, Human
gccuuggcauucucugcuu

SEQ ID NO: 81657 - RNA, 22 nt, Human
gccuuggccaacaccuugcaaa

SEQ ID NO: 81658 - RNA, 22 nt, Human
gccuuggccuuccuaggccuga

SEQ ID NO: 81659 - RNA, 22 nt, Human
gccuuggcugccaagcugcuga

SEQ ID NO: 81660 - RNA, 22 nt, Human
gccuugggcacaggcagggccc

SEQ ID NO: 81661 - RNA, 22 nt, Human
gccuugggggugaaagaggcua

SEQ ID NO: 81662 - RNA, 22 nt, Human
gccuugguuggccagcaggucc

SEQ ID NO: 81663 - RNA, 22 nt, Human
gccuuguuucauuacacguggu

SEQ ID NO: 81664 - RNA, 22 nt, Human
gccuuuauaucccugauaucua

SEQ ID NO: 81665 - RNA, 22 nt, Human
gccuuucagugccuucuguuca

SEQ ID NO: 81666 - RNA, 22 nt, Human
gccuuucaguuccaucaaagga

SEQ ID NO: 81667 - RNA, 22 nt, Human
gccuuuccugcucuggcauuca

SEQ ID NO: 81668 - RNA, 22 nt, Human
gccuuugccugcgacguggcug

SEQ ID NO: 81669 - RNA, 22 nt, Human
gccuuugcugugacaaugcugg

SEQ ID NO: 81670 - RNA, 19 nt, Human
gccuuuguuccuuuugucu

SEQ ID NO: 81671 - RNA, 22 nt, Human
gcgaaaaauguguaaauauguu

SEQ ID NO: 81672 - RNA, 22 nt, Human
gcgacgcaggcacgacguguug

SEQ ID NO: 81673 - RNA, 19 nt, Human
gcgagaacagagcuuacug

SEQ ID NO: 81674 - RNA, 22 nt, Human
gcgaguccacuggggggcgcag

SEQ ID NO: 81675 - RNA, 22 nt, Human
gcgcagcucagugagggaacuu

SEQ ID NO: 81676 - RNA, 17 nt, Human
gcgcagcuccuggcgcg

SEQ ID NO: 81677 - RNA, 22 nt, Human
gcgcgccucugcccgguguucc

SEQ ID NO: 81678 - RNA, 22 nt, Human
gcggaaggcugccuggcuugag

SEQ ID NO: 81679 - RNA, 22 nt, Human
gcggaggaaacugaggcaagag

SEQ ID NO: 81680 - RNA, 22 nt, Human
gcggagggagauaggccuugcu

SEQ ID NO: 81681 - RNA, 22 nt, Human
gcggagggcgagcccgcggagc

SEQ ID NO: 81682 - RNA, 22 nt, Human
gcggcgccuaagccccgaccuc

SEQ ID NO: 81683 - RNA, 22 nt, Human
gcggggacagaaggcgguucuc

SEQ ID NO: 81684 - RNA, 22 nt, Human
gcggggcacagugauggagcac

SEQ ID NO: 81685 - RNA, 22 nt, Human
gcgguccaggagcgcagguccu

SEQ ID NO: 81686 - RNA, 22 nt, Human
gcgguggggaaaggaggugcug

SEQ ID NO: 81687 - RNA, 22 nt, Human
gcggugggggaaaggagcgguu

SEQ ID NO: 81688 - RNA, 22 nt, Human
gcguaaggccucuggucucgga

SEQ ID NO: 81689 - RNA, 22 nt, Human
gcgucaauuccaucauucuucu

SEQ ID NO: 81690 - RNA, 22 nt, Human
gcgucuuuuagauuuuacaucu

SEQ ID NO: 81691 - RNA, 22 nt, Human
gcguggcuuagagugggguacc

SEQ ID NO: 81692 - RNA, 17 nt, Human
gcguguccccgcgucuc

SEQ ID NO: 81693 - RNA, 22 nt, Human
gcguuaauaacauuaauaaugc

SEQ ID NO: 81694 - RNA, 22 nt, Human
gcguuggggaccccgaagcugg

SEQ ID NO: 81695 - RNA, 22 nt, Human
gcguuuaagugaugaucgucuu

SEQ ID NO: 81696 - RNA, 22 nt, Human
gcuaaaucuccuacaaugcaca

SEQ ID NO: 81697 - RNA, 22 nt, Human
gcuaagggacccuuucuaaugu

SEQ ID NO: 81698 - RNA, 22 nt, Human
gcuaauacuuuggaaagaaugu

SEQ ID NO: 81699 - RNA, 22 nt, Human
gcuacaaacugucauggugcuu

SEQ ID NO: 81700 - RNA, 22 nt, Human
gcuacaagucuugucauucauu

SEQ ID NO: 81701 - RNA, 22 nt, Human
gcuacagagcucugugaagaga

SEQ ID NO: 81702 - RNA, 22 nt, Human
gcuacagguauauagaugaaac

SEQ ID NO: 81703 - RNA, 22 nt, Human
guuucugagcacuuuuauugca

SEQ ID NO: 81704 - RNA, 20 nt, Human
guuucugauucaguaggucu

SEQ ID NO: 81705 - RNA, 22 nt, Human
guuucuggagugacuauaacug

SEQ ID NO: 81706 - RNA, 22 nt, Human
guuucuuaauagcaggggccaa

SEQ ID NO: 81707 - RNA, 22 nt, Human
guuucuuagguaaauucuuuga

SEQ ID NO: 81708 - RNA, 22 nt, Human
guuucuuucuauugacugaaca

SEQ ID NO: 81709 - RNA, 22 nt, Human
guuucuuuuaaaauauguagac

SEQ ID NO: 81710 - RNA, 22 nt, Human
guuucuuuugugaucaccaacc

SEQ ID NO: 81711 - RNA, 22 nt, Human
guuugaaacaugcaccuggagg

SEQ ID NO: 81712 - RNA, 22 nt, Human
gcuggggccucugugagguuaa

SEQ ID NO: 81713 - RNA, 22 nt, Human
gcuggggccugaacagucagcu

SEQ ID NO: 81714 - RNA, 19 nt, Human
gcuggggccugaccagaca

SEQ ID NO: 81715 - RNA, 22 nt, Human
gcuggggucugugaggagggcu

SEQ ID NO: 81716 - RNA, 22 nt, Human
gcuggguccaugguccucgggu

SEQ ID NO: 81717 - RNA, 22 nt, Human
gcugggucucuggguguaacaa

SEQ ID NO: 81718 - RNA, 22 nt, Human
gcugggucuggcugugagccgg

SEQ ID NO: 81719 - RNA, 22 nt, Human
gcugguaaacuucuggugccau

SEQ ID NO: 81720 - RNA, 22 nt, Human
gcuggucacucugggagcugcu

SEQ ID NO: 81721 - RNA, 22 nt, Human
gcuggucagggagggcacccau

SEQ ID NO: 81722 - RNA, 22 nt, Human
gcugguccacauccugguacgu

SEQ ID NO: 81723 - RNA, 22 nt, Human
uaaguuuuaagcaaucugauaa

SEQ ID NO: 81724 - RNA, 22 nt, Human
uaauaaacugcuacgcuuaguu

SEQ ID NO: 81725 - RNA, 22 nt, Human
uaauaauagcaguagcugccac

SEQ ID NO: 81726 - RNA, 22 nt, Human
uaauacaaggcaggaagcagua

SEQ ID NO: 81727 - RNA, 22 nt, Human
uaauacagacaacuugccaaau

SEQ ID NO: 81728 - RNA, 22 nt, Human
uaauacagggcacuuugaguga

SEQ ID NO: 81729 - RNA, 22 nt, Human
uaauacauuaccuaaccucucu

SEQ ID NO: 81730 - RNA, 22 nt, Human
uaauacuuaccuugcagagucu

SEQ ID NO: 81731 - RNA, 22 nt, Human
uaauaguuaugguugguucuca

SEQ ID NO: 81732 - RNA, 22 nt, Human
uaauaguugugacuuuguaaag

SEQ ID NO: 81733 - RNA, 22 nt, Human
uaauauauuucugcuaagcuca

SEQ ID NO: 81734 - RNA, 22 nt, Human
uaauaucuggcauucaaacaug

SEQ ID NO: 81735 - RNA, 22 nt, Human
uaaucacagaaaugcccauuca

SEQ ID NO: 81736 - RNA, 22 nt, Human
uaaucacugggcguuugguacu

SEQ ID NO: 81737 - RNA, 22 nt, Human
uaaucacugucaaccuuuguuc

SEQ ID NO: 81738 - RNA, 22 nt, Human
uaauccuuuagguuaaaagagg

SEQ ID NO: 81739 - RNA, 22 nt, Human
uaaucucuagcccaugcaaaga

SEQ ID NO: 81740 - RNA, 22 nt, Human
uaaucuguguaccuucaucgga

SEQ ID NO: 81741 - RNA, 22 nt, Human
uaaucuguuguuaauauugacu

SEQ ID NO: 81742 - RNA, 22 nt, Human
uaaucuguuucccaaggugaua

SEQ ID NO: 81743 - RNA, 22 nt, Human
uaaucuuagacauguauuuuuc

SEQ ID NO: 81744 - RNA, 19 nt, Human
uaaucuuauugggcagauu

SEQ ID NO: 81745 - RNA, 22 nt, Human
uaaugaacucuuuacuuuggga

SEQ ID NO: 81746 - RNA, 22 nt, Human
uaaugacauuguauccacagag

SEQ ID NO: 81747 - RNA, 22 nt, Human
uaaugacuaagcaaucaugaau

SEQ ID NO: 81748 - RNA, 22 nt, Human
uaaugacuguaccaaggcuuca

SEQ ID NO: 81749 - RNA, 23 nt, Human
uaaugagaagcuuuguuuccuga

SEQ ID NO: 81750 - RNA, 18 nt, Human
uaaugauaagccuugaag

SEQ ID NO: 81751 - RNA, 22 nt, Human
uaaugaugugugcaaacugaau

SEQ ID NO: 81752 - RNA, 22 nt, Human
uaaugcacagaauugacauggg

SEQ ID NO: 81753 - RNA, 22 nt, Human
uaaugcaguacugauauaaaca

SEQ ID NO: 81754 - RNA, 22 nt, Human
uaaugccuuucuguacuauaug

SEQ ID NO: 81755 - RNA, 22 nt, Human
uaaugcuaacaucauaucacug

SEQ ID NO: 81756 - RNA, 20 nt, Human
uaaugcuuaacacauccccu

SEQ ID NO: 81757 - RNA, 22 nt, Human
uaaugcuuaacagcuggcuuuu

SEQ ID NO: 81758 - RNA, 22 nt, Human
uaaugcuuaauuuucacaagcc

SEQ ID NO: 81759 - RNA, 22 nt, Human
uaaugcuuauguuaugcaauuu

SEQ ID NO: 81760 - RNA, 22 nt, Human
uaaugcuuccuauauagcacuc

SEQ ID NO: 81761 - RNA, 22 nt, Human
uaaugcuuugucagccuaaggg

SEQ ID NO: 81762 - RNA, 22 nt, Human
uaaugcuuuuccuucaaauaag

SEQ ID NO: 81763 - RNA, 22 nt, Human
uaauguaaacacagagacagaa

SEQ ID NO: 81764 - RNA, 22 nt, Human
uaauguaaagaagauguaggaa

SEQ ID NO: 81765 - RNA, 20 nt, Human
uaaugucaaagucacaaggu

SEQ ID NO: 81766 - RNA, 22 nt, Human
uaaugucaaggugauagauuug

SEQ ID NO: 81767 - RNA, 22 nt, Human
uaaugucagcauaguuuauuuu

SEQ ID NO: 81768 - RNA, 22 nt, Human
uaaugucuagaucagaccucga

SEQ ID NO: 81769 - RNA, 22 nt, Human
uaaugucuguguuucagugcag

SEQ ID NO: 81770 - RNA, 22 nt, Human
uaauguguccugaaagcuucug

SEQ ID NO: 81771 - RNA, 22 nt, Human
uaauguuauaaauucuugguuu

SEQ ID NO: 81772 - RNA, 22 nt, Human
uaauguuuagaagcagacagcu

SEQ ID NO: 81773 - RNA, 22 nt, Human
uaauguuuccagucuaugaugg

SEQ ID NO: 81774 - RNA, 22 nt, Human
uaauguuuuucucaacauugcu

SEQ ID NO: 81775 - RNA, 22 nt, Human
uaauuauagcauuggaguggcc

SEQ ID NO: 81776 - RNA, 22 nt, Human
uaauuauagccgcuauuuugcu

SEQ ID NO: 81777 - RNA, 23 nt, Human
uaauucacauauacauugcuuca

SEQ ID NO: 81778 - RNA, 22 nt, Human
uaauucaugggcccagugauau

SEQ ID NO: 81779 - RNA, 22 nt, Human
uaauucuuguucagagguagua

SEQ ID NO: 81780 - RNA, 22 nt, Human
uaauugaacuaacaugcaaaca

SEQ ID NO: 81781 - RNA, 22 nt, Human
uaauugcuaauccugccuucua

SEQ ID NO: 81782 - RNA, 22 nt, Human
uaauugcuccaaggagaacuaa

SEQ ID NO: 81783 - RNA, 22 nt, Human
uaauugcuguauagauugucau

SEQ ID NO: 81784 - RNA, 23 nt, Human
uaauugcuugaguuaguaauaca

SEQ ID NO: 81785 - RNA, 22 nt, Human
uaauugucagguuuuaguauca

SEQ ID NO: 81786 - RNA, 22 nt, Human
uaauugucaucguaguaaacau

SEQ ID NO: 81787 - RNA, 22 nt, Human
uaauugucccugcaguuaggau

SEQ ID NO: 81788 - RNA, 22 nt, Human
uaauuuaauuucaugccagccu

SEQ ID NO: 81789 - RNA, 22 nt, Human
uaauuuacuugcaaauaacaau

SEQ ID NO: 81790 - RNA, 22 nt, Human
uaauuucaaauuucuuagcgug

SEQ ID NO: 81791 - RNA, 22 nt, Human
uaauuucaccguugcuagaaau

SEQ ID NO: 81792 - RNA, 22 nt, Human
uaauuucacugauaugaaguca

SEQ ID NO: 81793 - RNA, 22 nt, Human
uaauuucagugggcucugggcu

SEQ ID NO: 81794 - RNA, 23 nt, Human
uaauuuuagccuuacaggacccu

SEQ ID NO: 81795 - RNA, 22 nt, Human
uaauuuuguauugccauuguag

SEQ ID NO: 81796 - RNA, 22 nt, Human
uaauuuugucccccugcacaua

SEQ ID NO: 81797 - RNA, 22 nt, Human
uaauuuuuccacguacacuggg

SEQ ID NO: 81798 - RNA, 22 nt, Human
uacaaaaaauugauacugacga

SEQ ID NO: 81799 - RNA, 20 nt, Human
uacaaaccuccacacuggug

SEQ ID NO: 81800 - RNA, 22 nt, Human
uacaaacucuuuauauuucaua

SEQ ID NO: 81801 - RNA, 22 nt, Human
uacaaacuguccagcccagagg

SEQ ID NO: 81802 - RNA, 22 nt, Human
uacaaagaggcagcuccauuuu

SEQ ID NO: 81803 - RNA, 22 nt, Human
uacaaagcaaaucaucuaagag

SEQ ID NO: 81804 - RNA, 22 nt, Human
uacaaagcuguauagccugguc

SEQ ID NO: 81805 - RNA, 22 nt, Human
uacaaaggaaacuucuuuuccc

SEQ ID NO: 81806 - RNA, 22 nt, Human
uacaaaggagaauaggguagca

SEQ ID NO: 81807 - RNA, 22 nt, Human
uacaaagggggaagagauucug

SEQ ID NO: 81808 - RNA, 22 nt, Human
uacaaagguaucuuuccuagau

SEQ ID NO: 81809 - RNA, 22 nt, Human
uacaaaguuugagaaugcuuuc

SEQ ID NO: 81810 - RNA, 22 nt, Human
uacaacagaccuagaugaauga

SEQ ID NO: 81811 - RNA, 22 nt, Human
uacaacaugugguccuuuauga

SEQ ID NO: 81812 - RNA, 22 nt, Human
uacaacauuguguugcuucaua

SEQ ID NO: 81813 - RNA, 22 nt, Human
uacaaccagauccucuaaguca

SEQ ID NO: 81814 - RNA, 22 nt, Human
uacaacugugugaaggaaucug

SEQ ID NO: 81815 - RNA, 22 nt, Human
uacaagaaacuacaugaaugca

SEQ ID NO: 81816 - RNA, 22 nt, Human
uacaagaaauuucugcauauau

SEQ ID NO: 81817 - RNA, 22 nt, Human
uacaagaaggaaaacuagcaau

SEQ ID NO: 81818 - RNA, 20 nt, Human
uacaagaauccccaguuguc

SEQ ID NO: 81819 - RNA, 22 nt, Human
uacaagaauuucuuucugguug

SEQ ID NO: 81820 - RNA, 22 nt, Human
uacaagagugagauuaucaugu

SEQ ID NO: 81821 - RNA, 21 nt, Human
uagaagcacauagguucaaag

SEQ ID NO: 81822 - RNA, 22 nt, Human
uagaagcacugacagaguuuga

SEQ ID NO: 81823 - RNA, 19 nt, Human
uagaagcagggaagcugag

SEQ ID NO: 81824 - RNA, 22 nt, Human
uagaaggaggacuggcaguguu

SEQ ID NO: 81825 - RNA, 22 nt, Human
uagaaggcuuugagagauacuu

SEQ ID NO: 81826 - RNA, 17 nt, Human
uagaaguuagaacacuu

SEQ ID NO: 81827 - RNA, 21 nt, Human
uagaauacagguauuuuggau

SEQ ID NO: 81828 - RNA, 22 nt, Human
uagaauaguguuuucauuaugg

SEQ ID NO: 81829 - RNA, 22 nt, Human
uagaauaugauuaauuuucuua

SEQ ID NO: 81830 - RNA, 17 nt, Human
uagaauauggugggcug

SEQ ID NO: 81831 - RNA, 22 nt, Human
uagaaucauaccucuaggaaca

SEQ ID NO: 81832 - RNA, 22 nt, Human
uagaaucugaauauucuuauuu

SEQ ID NO: 81833 - RNA, 22 nt, Human
uagaaucugaauguagagcuga

SEQ ID NO: 81834 - RNA, 22 nt, Human
uagaaucuggaaggggcuauuc

SEQ ID NO: 81835 - RNA, 22 nt, Human
uagaaucuggaucugggcgcau

SEQ ID NO: 81836 - RNA, 20 nt, Human
uagaaucuggugauguaucg

SEQ ID NO: 81837 - RNA, 22 nt, Human
uagaauguaaauuccaagggca

SEQ ID NO: 81838 - RNA, 22 nt, Human
uagaauuaugccuugcugucca

SEQ ID NO: 81839 - RNA, 22 nt, Human
uagaauugggccuaacuuccau

SEQ ID NO: 81840 - RNA, 22 nt, Human
uagacaaacugauacuuggcga

SEQ ID NO: 81841 - RNA, 22 nt, Human
uagacaacuggagauagucuga

SEQ ID NO: 81842 - RNA, 22 nt, Human
uagacaaugccaucuugugguu

SEQ ID NO: 81843 - RNA, 22 nt, Human
uagacacaaaucucagugacac

SEQ ID NO: 81844 - RNA, 22 nt, Human
uagacacauccguggaagcuuc

SEQ ID NO: 81845 - RNA, 22 nt, Human
uagacacuguaugagcugggug

SEQ ID NO: 81846 - RNA, 22 nt, Human
uagacagauuuaaaggaaugga

SEQ ID NO: 81847 - RNA, 22 nt, Human
uagacauuauuucuacccacaa

SEQ ID NO: 81848 - RNA, 22 nt, Human
uagacauuucugguuauugaca

SEQ ID NO: 81849 - RNA, 22 nt, Human
uagacauuuggcaugguuuuca

SEQ ID NO: 81850 - RNA, 22 nt, Human
uagacauuuucucaacaucucu

SEQ ID NO: 81851 - RNA, 22 nt, Human
uagacuuuacuaaggcucauuu

SEQ ID NO: 81852 - RNA, 22 nt, Human
uagacuuuccagccugcugcuu

SEQ ID NO: 81853 - RNA, 22 nt, Human
uagacuuugauauuguacaccc

SEQ ID NO: 81854 - RNA, 22 nt, Human
uagagaaaaccacuggugagcu

SEQ ID NO: 81855 - RNA, 22 nt, Human
gcugucugucuucacaucucgc

SEQ ID NO: 81856 - RNA, 22 nt, Human
gcugucuuccuugcuccaaggg

SEQ ID NO: 81857 - RNA, 22 nt, Human
gcugucuugaugauuggaugcu

SEQ ID NO: 81858 - RNA, 22 nt, Human
gcugucuugcucacucuugcag

SEQ ID NO: 81859 - RNA, 22 nt, Human
gcugucuuguauguuguaggac

SEQ ID NO: 81860 - RNA, 22 nt, Human
gcugucuuuuccuggcaguaaa

SEQ ID NO: 81861 - RNA, 22 nt, Human
gcugugaaagcugccacacugu

SEQ ID NO: 81862 - RNA, 22 nt, Human
gcugugagcugccugugucaca

SEQ ID NO: 81863 - RNA, 22 nt, Human
gcugugaguggaggaggcugag

SEQ ID NO: 81864 - RNA, 22 nt, Human
gcugugauaaaugcagauguca

SEQ ID NO: 81865 - RNA, 22 nt, Human
gcugugauccuugagagaaggu

SEQ ID NO: 81866 - RNA, 21 nt, Human
gcugugcacauaguagaagug

SEQ ID NO: 81867 - RNA, 22 nt, Human
gcugugcagaggugagaaucca

SEQ ID NO: 81868 - RNA, 22 nt, Human
gcugugcaggggauuugguuau

SEQ ID NO: 81869 - RNA, 22 nt, Human
gcugugcauggagggccguuca

SEQ ID NO: 81870 - RNA, 22 nt, Human
gcugugcccagcuccagcucug

SEQ ID NO: 81871 - RNA, 22 nt, Human
gcugugcccauauucugcugac

SEQ ID NO: 81872 - RNA, 19 nt, Human
gcugugccccugccgcuug

SEQ ID NO: 81873 - RNA, 20 nt, Human
gcugugccuccagcuggugg

SEQ ID NO: 81874 - RNA, 22 nt, Human
gcugugcuauaucucugagugu

SEQ ID NO: 81875 - RNA, 22 nt, Human
gcugugcugauucauucccugc

SEQ ID NO: 81876 - RNA, 22 nt, Human
gcuguggaugcuauggaucauc

SEQ ID NO: 81877 - RNA, 20 nt, Human
gcuguggcaaagcuuugugu

SEQ ID NO: 81878 - RNA, 20 nt, Human
gcuguggcaagugcucacug

SEQ ID NO: 81879 - RNA, 22 nt, Human
gcuguggccuggcgcagagcug

SEQ ID NO: 81880 - RNA, 22 nt, Human
gcuguggcuccaauggugagcc

SEQ ID NO: 81881 - RNA, 22 nt, Human
gcugugggugcuggcuccaccc

SEQ ID NO: 81882 - RNA, 22 nt, Human
gcuguggucccucuguccucau

SEQ ID NO: 81883 - RNA, 22 nt, Human
gcuguguaaacuuguacagugc

SEQ ID NO: 81884 - RNA, 22 nt, Human
gcuguguaccuacuaacugcuu

SEQ ID NO: 81885 - RNA, 22 nt, Human
gcuguguaucagaugccacggg

SEQ ID NO: 81886 - RNA, 22 nt, Human
gcugugugaccugggcaagucu

SEQ ID NO: 81887 - RNA, 22 nt, Human
gcugugugacugagagccuggc

SEQ ID NO: 81888 - RNA, 22 nt, Human
gcugugugcugggcauggcacu

SEQ ID NO: 81889 - RNA, 22 nt, Human
gcuguguggcugugccgucacg

SEQ ID NO: 81890 - RNA, 22 nt, Human
gcuguguugggaaucauguggg

SEQ ID NO: 81891 - RNA, 22 nt, Human
gcuguguuggugaagcuguagc

SEQ ID NO: 81892 - RNA, 22 nt, Human
gcuguguuugacaguagcagac

SEQ ID NO: 81893 - RNA, 20 nt, Human
gcuguuaguugggggcuccc

SEQ ID NO: 81894 - RNA, 22 nt, Human
gcuguuauaauauucuguuugu

SEQ ID NO: 81895 - RNA, 22 nt, Human
gcuguuauuuuacaagacuuau

SEQ ID NO: 81896 - RNA, 22 nt, Human
gcuguucacggaggaggauggg

SEQ ID NO: 81897 - RNA, 22 nt, Human
gcuguucauuagaaauagaaug

SEQ ID NO: 81898 - RNA, 22 nt, Human
gcuguucccauguggggcucag

SEQ ID NO: 81899 - RNA, 20 nt, Human
gcuguucugaagcagaaggc

SEQ ID NO: 81900 - RNA, 19 nt, Human
gcuguucugaccaucaccc

SEQ ID NO: 81901 - RNA, 22 nt, Human
gcuguucugcaccagacuucag

SEQ ID NO: 81902 - RNA, 22 nt, Human
gcuguucugcgucccaggcugg

SEQ ID NO: 81903 - RNA, 22 nt, Human
gcuguugcaaucaaggccaugg

SEQ ID NO: 81904 - RNA, 22 nt, Human
gcuguuuccagacaaugucuuu

SEQ ID NO: 81905 - RNA, 22 nt, Human
gcuguuuccaguuacguggaua

SEQ ID NO: 81906 - RNA, 22 nt, Human
gcuguuuccuacaugguguuau

SEQ ID NO: 81907 - RNA, 22 nt, Human
gcuguuucuaagcugguuccua

SEQ ID NO: 81908 - RNA, 22 nt, Human
gcuguuucuccaggucaggaag

SEQ ID NO: 81909 - RNA, 22 nt, Human
gcuguuucucucccaccccuuc

SEQ ID NO: 81910 - RNA, 22 nt, Human
gcuguuucuuuccuggcacuug

SEQ ID NO: 81911 - RNA, 22 nt, Human
gcuuaaaguuguaaauuagaga

SEQ ID NO: 81912 - RNA, 22 nt, Human
gcuuacaaucauuucaguuuag

SEQ ID NO: 81913 - RNA, 22 nt, Human
gcuuagaaguacacaugccuuu

SEQ ID NO: 81914 - RNA, 22 nt, Human
gcuuagcaaugugacaagaugc

SEQ ID NO: 81915 - RNA, 22 nt, Human
gcuuagcagugugugcuuuuga

SEQ ID NO: 81916 - RNA, 22 nt, Human
gcuuaggaguuucaggcucuca

SEQ ID NO: 81917 - RNA, 22 nt, Human
gcuuaggaugaaugcuguagaa

SEQ ID NO: 81918 - RNA, 22 nt, Human
gcuuagucaauuauaaauaggc

SEQ ID NO: 81919 - RNA, 22 nt, Human
gcuuaguccccaagagagacca

SEQ ID NO: 81920 - RNA, 22 nt, Human
gcuucaaagaacaaagggaggc

SEQ ID NO: 81921 - RNA, 22 nt, Human
gcuucaaagauucacaguuuca

SEQ ID NO: 81922 - RNA, 22 nt, Human
gcuucaagcuguucagaacuau

SEQ ID NO: 81923 - RNA, 22 nt, Human
gcuucagaaauaucaucauuau

SEQ ID NO: 81924 - RNA, 20 nt, Human
gcuucagaaccugggugcug

SEQ ID NO: 81925 - RNA, 22 nt, Human
gcuucagacuggagcagaggaa

SEQ ID NO: 81926 - RNA, 22 nt, Human
gcuucagacugugcuucuguug

SEQ ID NO: 81927 - RNA, 21 nt, Human
gcuuccaagauggcaccuuga

SEQ ID NO: 81928 - RNA, 22 nt, Human
gcuuccaccuacuaaaugccac

SEQ ID NO: 81929 - RNA, 23 nt, Human
gcuuccagaagacucauugacau

SEQ ID NO: 81930 - RNA, 18 nt, Human
ggagagugacagagucgu

SEQ ID NO: 81931 - RNA, 18 nt, Human
ggagagugagaucaaaca

SEQ ID NO: 81932 - RNA, 17 nt, Human
ggagagugggaauggcc

SEQ ID NO: 81933 - RNA, 23 nt, Human
ggagaucagagacuagggcaguu

SEQ ID NO: 81934 - RNA, 17 nt, Human
ggagaucuggcagaggg

SEQ ID NO: 81935 - RNA, 22 nt, Human
ggagaucuuuaggaguuggacu

SEQ ID NO: 81936 - RNA, 22 nt, Human
ggagaugacacaauuuauuuau

SEQ ID NO: 81937 - RNA, 22 nt, Human
ggagaugccagaauugcaaauu

SEQ ID NO: 81938 - RNA, 22 nt, Human
ggagaugccuuguuucaggaac

SEQ ID NO: 81939 - RNA, 22 nt, Human
ggagauguagugucacuggacu

SEQ ID NO: 81940 - RNA, 21 nt, Human
ggagauguugugcaggagggu

SEQ ID NO: 81941 - RNA, 22 nt, Human
ggagauuuauagcacacuucag

SEQ ID NO: 81942 - RNA, 22 nt, Human
ggagcacuauaauagagauuuu

SEQ ID NO: 81943 - RNA, 22 nt, Human
ggagcagagcucuucaucugca

SEQ ID NO: 81944 - RNA, 17 nt, Human
ggagcagauccaccauu

SEQ ID NO: 81945 - RNA, 22 nt, Human
ggagcagccuguguagacgggg

SEQ ID NO: 81946 - RNA, 22 nt, Human
ggagcaggcagggccgugucug

SEQ ID NO: 81947 - RNA, 22 nt, Human
ggagcauguggggugagcaggg

SEQ ID NO: 81948 - RNA, 22 nt, Human
ggagccagaggcugcugcugug

SEQ ID NO: 81949 - RNA, 22 nt, Human
ggagccagagucugcaguguaa

SEQ ID NO: 81950 - RNA, 22 nt, Human
ggagccagaguuuaauguggag

SEQ ID NO: 81951 - RNA, 22 nt, Human
ggagccagcucccuccuuguga

SEQ ID NO: 81952 - RNA, 19 nt, Human
ggagccagcuguggaaggc

SEQ ID NO: 81953 - RNA, 17 nt, Human
ggagccaggagcccacc

SEQ ID NO: 81954 - RNA, 22 nt, Human
ggagccaggcauaucggggcac

SEQ ID NO: 81955 - RNA, 22 nt, Human
ggagccagggaagcugcuuccu

SEQ ID NO: 81956 - RNA, 22 nt, Human
ggagccaguauuuaguggucuu

SEQ ID NO: 81957 - RNA, 22 nt, Human
ggagccagugcccucuggugga

SEQ ID NO: 81958 - RNA, 22 nt, Human
ggagccauguuuucagcaugau

SEQ ID NO: 81959 - RNA, 22 nt, Human
ggagcccaagucugcacucggc

SEQ ID NO: 81960 - RNA, 22 nt, Human
ggagcccagucgggguguaggu

SEQ ID NO: 81961 - RNA, 22 nt, Human
ggagcccuagcugugcaucaga

SEQ ID NO: 81962 - RNA, 22 nt, Human
ggagcccuccaucccuugcggc

SEQ ID NO: 81963 - RNA, 22 nt, Human
ggagcccugaagcaagaaagua

SEQ ID NO: 81964 - RNA, 23 nt, Human
ggagcccugagcuguccccaugc

SEQ ID NO: 81965 - RNA, 22 nt, Human
ggagcccugcugacaugggugu

SEQ ID NO: 81966 - RNA, 22 nt, Human
ggagcccuugcugaccuuccaa

SEQ ID NO: 81967 - RNA, 22 nt, Human
ggagccuauuauuagcauggca

SEQ ID NO: 81968 - RNA, 23 nt, Human
ggagccuccggugugugagaggc

SEQ ID NO: 81969 - RNA, 22 nt, Human
ggagccugacagugcccagcau

SEQ ID NO: 81970 - RNA, 22 nt, Human
ggagccugguauaguguugcau

SEQ ID NO: 81971 - RNA, 22 nt, Human
ggagccugguuacuagagccug

SEQ ID NO: 81972 - RNA, 22 nt, Human
ggagccuguggcugcuugaagc

SEQ ID NO: 81973 - RNA, 20 nt, Human
gcuugcuuugucugaugggc

SEQ ID NO: 81974 - RNA, 22 nt, Human
gcuuggcuccuggcucacaggu

SEQ ID NO: 81975 - RNA, 22 nt, Human
gcuuggcucuaagacaccuauu

SEQ ID NO: 81976 - RNA, 22 nt, Human
gcuuggcuugggcucagaggcc

SEQ ID NO: 81977 - RNA, 22 nt, Human
gcuugggauaugcugauguaaa

SEQ ID NO: 81978 - RNA, 22 nt, Human
gcuugguuacugauggaaagga

SEQ ID NO: 81979 - RNA, 21 nt, Human
gcuugguuuugguuacuugcc

SEQ ID NO: 81980 - RNA, 22 nt, Human
gcuugucauaguuguuacaaau

SEQ ID NO: 81981 - RNA, 23 nt, Human
gcuugucuagugaauucauaucu

SEQ ID NO: 81982 - RNA, 22 nt, Human
gcuugucucucagccccaguca

SEQ ID NO: 81983 - RNA, 22 nt, Human
gcuuguuucuauuuaucaagua

SEQ ID NO: 81984 - RNA, 22 nt, Human
gcuuguuugugauuucuccaga

SEQ ID NO: 81985 - RNA, 20 nt, Human
gcuuuaagacacagcuaaaa

SEQ ID NO: 81986 - RNA, 22 nt, Human
gcuuuaaugcaauuucaccuca

SEQ ID NO: 81987 - RNA, 22 nt, Human
gcuuuacaaguggugcagauua

SEQ ID NO: 81988 - RNA, 22 nt, Human
gcuuuacauaaacauuuauuau

SEQ ID NO: 81989 - RNA, 22 nt, Human
gcuuuacaugagaugaggacaa

SEQ ID NO: 81990 - RNA, 22 nt, Human
gcuuuacaugauuucucacccu

SEQ ID NO: 81991 - RNA, 22 nt, Human
gcuuuacauguuucccuuuaag

SEQ ID NO: 81992 - RNA, 22 nt, Human
gcuuuagagcccagcuuggugg

SEQ ID NO: 81993 - RNA, 22 nt, Human
gcuuuagauagauuuagucuuu

SEQ ID NO: 81994 - RNA, 22 nt, Human
gcuuuagaucugacuuucugug

SEQ ID NO: 81995 - RNA, 22 nt, Human
gcuuuaggaaugaauaaaaauc

SEQ ID NO: 81996 - RNA, 19 nt, Human
gcuuuaguuuacucaucua

SEQ ID NO: 81997 - RNA, 22 nt, Human
gcuuuauggauuguaaacugca

SEQ ID NO: 81998 - RNA, 22 nt, Human
gcuuuauguaaguccaaaggca

SEQ ID NO: 81999 - RNA, 22 nt, Human
gcuuuauuuugugagggauuac

SEQ ID NO: 82000 - RNA, 22 nt, Human
gcuuucaaauccuaauuccaac

SEQ ID NO: 82001 - RNA, 22 nt, Human
gcuuucaauuaugucagccugu

SEQ ID NO: 82002 - RNA, 18 nt, Human
gcuuucaauuucuuuccu

SEQ ID NO: 82003 - RNA, 21 nt, Human
gcuuucagaagucucauaguu

SEQ ID NO: 82004 - RNA, 22 nt, Human
gcuuuccuggcccugucccugc

SEQ ID NO: 82005 - RNA, 22 nt, Human
gcuuucucuucacugauguuca

SEQ ID NO: 82006 - RNA, 22 nt, Human
gcuuucugaugagcuuaagaaa

SEQ ID NO: 82007 - RNA, 22 nt, Human
gcuuucuguagguaguuacugu

SEQ ID NO: 82008 - RNA, 22 nt, Human
gcuuucuuaguguguuaauugg

SEQ ID NO: 82009 - RNA, 22 nt, Human
gcuuucuugguucugcaggggc

SEQ ID NO: 82010 - RNA, 22 nt, Human
gcuuucuuuucaagaauguauu

SEQ ID NO: 82011 - RNA, 22 nt, Human
gcuuugaugaaucugugcuugg

SEQ ID NO: 82012 - RNA, 21 nt, Human
gcuuugaugcugccuugcucc

SEQ ID NO: 82013 - RNA, 22 nt, Human
gcuuugcacaaccuuuaagaca

SEQ ID NO: 82014 - RNA, 22 nt, Human
gcuuugcacucugauccuuccc

SEQ ID NO: 82015 - RNA, 18 nt, Human
gcuuugcagaaauacaga

SEQ ID NO: 82016 - RNA, 22 nt, Human
gcuuugcauucuugugugauca

SEQ ID NO: 82017 - RNA, 22 nt, Human
gcuuugcuaugacucaccagca

SEQ ID NO: 82018 - RNA, 22 nt, Human
gcuuugcuuccuguucuagccu

SEQ ID NO: 82019 - RNA, 22 nt, Human
gcuuuggaacuuaaauccuugg

SEQ ID NO: 82020 - RNA, 22 nt, Human
gcuuuggaaggggcugguggag

SEQ ID NO: 82021 - RNA, 22 nt, Human
gcuuuggaguuaggacucggcc

SEQ ID NO: 82022 - RNA, 22 nt, Human
gcuuugugaauuauuacucaca

SEQ ID NO: 82023 - RNA, 22 nt, Human
gcuuuuaauuaguugcuuccau

SEQ ID NO: 82024 - RNA, 22 nt, Human
gcuuuuccugacuuuccauuag

SEQ ID NO: 82025 - RNA, 22 nt, Human
gcuuuucuagcuagaacauccg

SEQ ID NO: 82026 - RNA, 22 nt, Human
gcuuuugccuacaucuuggucu

SEQ ID NO: 82027 - RNA, 22 nt, Human
gcuuuuguggugauggagaggc

SEQ ID NO: 82028 - RNA, 20 nt, Human
gcuuuuucuaauagcagucc

SEQ ID NO: 82029 - RNA, 19 nt, Human
gcuuuuuguugucaaaggu

SEQ ID NO: 82030 - RNA, 22 nt, Human
gcuuuuuugcuauugaaguggu

SEQ ID NO: 82031 - RNA, 22 nt, Human
ggaaaaacagucuuuauuauuu

SEQ ID NO: 82032 - RNA, 22 nt, Human
ggaaaacagcgauugguaucau

SEQ ID NO: 82033 - RNA, 22 nt, Human
ggaaaagaauugcagugaagua

SEQ ID NO: 82034 - RNA, 22 nt, Human
ggaaaagacagguuaacuguga

SEQ ID NO: 82035 - RNA, 22 nt, Human
ggaaaaggccacagggacacau

SEQ ID NO: 82036 - RNA, 22 nt, Human
ggaaaaggccauuguuucucug

SEQ ID NO: 82037 - RNA, 22 nt, Human
ggaaacagcaaauuauggcaau

SEQ ID NO: 82038 - RNA, 22 nt, Human
ggaaacauauucugaugugcau

SEQ ID NO: 82039 - RNA, 20 nt, Human
ggaaacauuuuuauuuccau

SEQ ID NO: 82040 - RNA, 18 nt, Human
gcugugugcaccugauaa

SEQ ID NO: 82041 - RNA, 22 nt, Human
gcugugugccaggggaaggcug

SEQ ID NO: 82042 - RNA, 22 nt, Human
gcugugugcucuggucuuucuu

SEQ ID NO: 82043 - RNA, 22 nt, Human
gcuguguucauuuugcauaugu

SEQ ID NO: 82044 - RNA, 19 nt, Human
gcuguuaaggacccucgga

SEQ ID NO: 82045 - RNA, 22 nt, Human
gcuguuagucaaaucaguugag

SEQ ID NO: 82046 - RNA, 22 nt, Human
gcuguucacagacucugcucug

SEQ ID NO: 82047 - RNA, 22 nt, Human
gcuguucauagaaauggucuca

SEQ ID NO: 82048 - RNA, 22 nt, Human
gcuguuccugcuuagaggucgg

SEQ ID NO: 82049 - RNA, 21 nt, Human
gcuguucggcggcccucgcgc

SEQ ID NO: 82050 - RNA, 22 nt, Human
gcuguucuccgaugaccccgug

SEQ ID NO: 82051 - RNA, 22 nt, Human
gcuguucucuguaacaugcauu

SEQ ID NO: 82052 - RNA, 21 nt, Human
gcuguucuuucagcuggucuu

SEQ ID NO: 82053 - RNA, 22 nt, Human
gcuguucuuugcaucucuggug

SEQ ID NO: 82054 - RNA, 21 nt, Human
gcuguugcccgccgccucuuc

SEQ ID NO: 82055 - RNA, 23 nt, Human
gcuguuuccccaugugcugaagg

SEQ ID NO: 82056 - RNA, 22 nt, Human
gcuguuuccccuucacaguggc

SEQ ID NO: 82057 - RNA, 22 nt, Human
gcuguuucccgugcgcugcguc

SEQ ID NO: 82058 - RNA, 22 nt, Human
gcuguuucuugaggcuacuccu

SEQ ID NO: 82059 - RNA, 22 nt, Human
gcuguuucuuugaugauggaau

SEQ ID NO: 82060 - RNA, 22 nt, Human
gcuuaagauguuuguggcaauu

SEQ ID NO: 82061 - RNA, 22 nt, Human
gcuuaaugagcagagaaucuac

SEQ ID NO: 82062 - RNA, 22 nt, Human
gcuuaauucuggcucaguuucc

SEQ ID NO: 82063 - RNA, 22 nt, Human
gcuuacaagccagcuguaccac

SEQ ID NO: 82064 - RNA, 22 nt, Human
gcuuacacuaaacaaguuuccu

SEQ ID NO: 82065 - RNA, 20 nt, Human
gcuuagcaggcauaguagcu

SEQ ID NO: 82066 - RNA, 22 nt, Human
gcuuagcagucacacauuguuc

SEQ ID NO: 82067 - RNA, 22 nt, Human
gcuuagcaucuuacaaugcuga

SEQ ID NO: 82068 - RNA, 22 nt, Human
gcuuaguggugugcaaaggggu

SEQ ID NO: 82069 - RNA, 22 nt, Human
gcuuaguguaggaccuggaaua

SEQ ID NO: 82070 - RNA, 22 nt, Human
gcuuauacucuggagaauaaga

SEQ ID NO: 82071 - RNA, 21 nt, Human
gcuuauagaaacaucaccaga

SEQ ID NO: 82072 - RNA, 22 nt, Human
gcuuauuuucaccuucucucag

SEQ ID NO: 82073 - RNA, 22 nt, Human
gcuucaaacugagcuucaagug

SEQ ID NO: 82074 - RNA, 22 nt, Human
gcuucaaggccaagacaccuua

SEQ ID NO: 82075 - RNA, 22 nt, Human
gcuucagaaguugggcucugac

SEQ ID NO: 82076 - RNA, 22 nt, Human
gcuucagagauuucacuaguuu

SEQ ID NO: 82077 - RNA, 20 nt, Human
gcuucaguuuccucacuggu

SEQ ID NO: 82078 - RNA, 22 nt, Human
gcuucaugaaaaucacugguca

SEQ ID NO: 82079 - RNA, 22 nt, Human
gcuucaugcuugcuccaaagcu

SEQ ID NO: 82080 - RNA, 18 nt, Human
gcuucauggaaggguugu

SEQ ID NO: 82081 - RNA, 22 nt, Human
gcuucauuacugacagucugug

SEQ ID NO: 82082 - RNA, 20 nt, Human
gcuuccaccugaagcgcacc

SEQ ID NO: 82083 - RNA, 22 nt, Human
gcuuccagagacugagcucuuc

SEQ ID NO: 82084 - RNA, 22 nt, Human
gcuuccagcaaacacuggcugc

SEQ ID NO: 82085 - RNA, 22 nt, Human
gcuuccaggcuuccuaccuuug

SEQ ID NO: 82086 - RNA, 22 nt, Human
gcuuccauguaugcucuugaca

SEQ ID NO: 82087 - RNA, 22 nt, Human
gcuuccauguugcugcugguca

SEQ ID NO: 82088 - RNA, 22 nt, Human
ggaagaugcccaacccagcuuu

SEQ ID NO: 82089 - RNA, 22 nt, Human
ggaagcacugaggcagagaggg

SEQ ID NO: 82090 - RNA, 22 nt, Human
ggaagcaggaggcugggguaaa

SEQ ID NO: 82091 - RNA, 22 nt, Human
ggaagccaagguggccucuauu

SEQ ID NO: 82092 - RNA, 22 nt, Human
ggaagccagagugcugggcagg

SEQ ID NO: 82093 - RNA, 22 nt, Human
ggaagcccagcugucuccuguc

SEQ ID NO: 82094 - RNA, 22 nt, Human
ggaagccccagcauggccuugg

SEQ ID NO: 82095 - RNA, 22 nt, Human
ggaagcggcccugagcgcaggg

SEQ ID NO: 82096 - RNA, 22 nt, Human
ggaagcucuguggcuuggaguc

SEQ ID NO: 82097 - RNA, 22 nt, Human
ggaagcugaacuuagcaaggaa

SEQ ID NO: 82098 - RNA, 22 nt, Human
ggaagcugcagucccccccaag

SEQ ID NO: 82099 - RNA, 22 nt, Human
ggaagcugcauaacuagcgugg

SEQ ID NO: 82100 - RNA, 22 nt, Human
ggaagcuguuccuguguggcca

SEQ ID NO: 82101 - RNA, 22 nt, Human
ggaagcuuaaugccuaauuucc

SEQ ID NO: 82102 - RNA, 22 nt, Human
ggaagcuuucucuguuuccuua

SEQ ID NO: 82103 - RNA, 22 nt, Human
ggaaggaaagcagcuuggcccu

SEQ ID NO: 82104 - RNA, 22 nt, Human
ggaaggaacaaacccugugugg

SEQ ID NO: 82105 - RNA, 22 nt, Human
ggaaggaagugaccaggauauc

SEQ ID NO: 82106 - RNA, 22 nt, Human
ggaaggagcauuugccaguuua

SEQ ID NO: 82107 - RNA, 22 nt, Human
ggaaggagggcggcaaugauga

SEQ ID NO: 82108 - RNA, 22 nt, Human
ggaaggaggggcaaagcaguuc

SEQ ID NO: 82109 - RNA, 22 nt, Human
ggaaggcuaauaaugcaagaaa

SEQ ID NO: 82110 - RNA, 22 nt, Human
ggaaggcuacaggaauccagcg

SEQ ID NO: 82111 - RNA, 22 nt, Human
ggaaggcuccacccaaggcgag

SEQ ID NO: 82112 - RNA, 22 nt, Human
ggaaggcucgaggaugcuucug

SEQ ID NO: 82113 - RNA, 20 nt, Human
ggaaggcuugaaguuuacau

SEQ ID NO: 82114 - RNA, 22 nt, Human
ggaaggcuuuaagcaccaaagc

SEQ ID NO: 82115 - RNA, 22 nt, Human
ggaagggaaaauucauucggcu

SEQ ID NO: 82116 - RNA, 22 nt, Human
ggaagggaauccaucugguuag

SEQ ID NO: 82117 - RNA, 22 nt, Human
ggaagggcaaaagagaugaacu

SEQ ID NO: 82118 - RNA, 22 nt, Human
ggaagggcaauaaaaucucagg

SEQ ID NO: 82119 - RNA, 22 nt, Human
ggaagggccucgggcgugggac

SEQ ID NO: 82120 - RNA, 21 nt, Human
ggaagggcucugaggacggcu

SEQ ID NO: 82121 - RNA, 20 nt, Human
ggaaggggcaaaguguguga

SEQ ID NO: 82122 - RNA, 22 nt, Human
ggaaggggucaccuccugauga

SEQ ID NO: 82123 - RNA, 22 nt, Human
ggaaggggugggugagccucag

SEQ ID NO: 82124 - RNA, 22 nt, Human
ggaaggguucaggugggccugc

SEQ ID NO: 82125 - RNA, 19 nt, Human
ggaaggugacaguggugaa

SEQ ID NO: 82126 - RNA, 22 nt, Human
ggaaggugcucccuggacagag

SEQ ID NO: 82127 - RNA, 18 nt, Human
ggaaggugcuggagugca

SEQ ID NO: 82128 - RNA, 22 nt, Human
ggaagugaggaaauauuuuguu

SEQ ID NO: 82129 - RNA, 22 nt, Human
ggaagugguagagccaugagug

SEQ ID NO: 82130 - RNA, 22 nt, Human
ggaaguguaguccgaaguugcg

SEQ ID NO: 82131 - RNA, 22 nt, Human
ggaaguguuugugcagauggcc

SEQ ID NO: 82132 - RNA, 22 nt, Human
ggaaguuguaugaucggggaau

SEQ ID NO: 82133 - RNA, 22 nt, Human
ggaaguuugggagcugguaauc

SEQ ID NO: 82134 - RNA, 22 nt, Human
ggaauacuaaaggaagcaauug

SEQ ID NO: 82135 - RNA, 22 nt, Human
ggaaucagaauuacugaaugga

SEQ ID NO: 82136 - RNA, 22 nt, Human
ggaaucagagcagaggcuguua

SEQ ID NO: 82137 - RNA, 22 nt, Human
ggaaucagaugaggggcagagc

SEQ ID NO: 82138 - RNA, 20 nt, Human
ggaaucaggguaauguacug

SEQ ID NO: 82139 - RNA, 22 nt, Human
ggaaucuagaaagggagcaagg

SEQ ID NO: 82140 - RNA, 22 nt, Human
ggaaugaagaaauagauggugu

SEQ ID NO: 82141 - RNA, 22 nt, Human
ggaaugggagcuauuaguggaa

SEQ ID NO: 82142 - RNA, 22 nt, Human
ggaauguucuggucugguucau

SEQ ID NO: 82143 - RNA, 22 nt, Human
ggaauguuugcucccuucaggg

SEQ ID NO: 82144 - RNA, 22 nt, Human
ggaauucugcauguucaguugg

SEQ ID NO: 82145 - RNA, 22 nt, Human
ggaauucuguagcucuuccucu

SEQ ID NO: 82146 - RNA, 21 nt, Human
ggaauugcaggcugucuuuug

SEQ ID NO: 82147 - RNA, 22 nt, Human
ggaauugcuaacauucugaagg

SEQ ID NO: 82148 - RNA, 22 nt, Human
ggaauugucuaguacucacggc

SEQ ID NO: 82149 - RNA, 22 nt, Human
gcuuucuguggugauguaaagg

SEQ ID NO: 82150 - RNA, 22 nt, Human
gcuuucuucauacucaagcauc

SEQ ID NO: 82151 - RNA, 22 nt, Human
gcuuugaagacuuuuccagggu

SEQ ID NO: 82152 - RNA, 22 nt, Human
gcuuugcauugugaugggaugc

SEQ ID NO: 82153 - RNA, 22 nt, Human
gcuuugccuguagcauuggccu

SEQ ID NO: 82154 - RNA, 22 nt, Human
gcuuugccuugaacucucaugu

SEQ ID NO: 82155 - RNA, 22 nt, Human
gcuuugcuggcuugaaaugcug

SEQ ID NO: 82156 - RNA, 22 nt, Human
gcuuuggaaacuggcccugcgc

SEQ ID NO: 82157 - RNA, 22 nt, Human
gcuuuggaaauauagacucaag

SEQ ID NO: 82158 - RNA, 19 nt, Human
gcuuuggagggagguucua

SEQ ID NO: 82159 - RNA, 22 nt, Human
gcuuuguguagaaggaggaugg

SEQ ID NO: 82160 - RNA, 22 nt, Human
gcuuugugugaaguccauggcg

SEQ ID NO: 82161 - RNA, 23 nt, Human
gcuuuuaaaccugugacugccgc

SEQ ID NO: 82162 - RNA, 22 nt, Human
gcuuuuacaagagccagagagg

SEQ ID NO: 82163 - RNA, 22 nt, Human
gcuuuuaugcacauaaggguca

SEQ ID NO: 82164 - RNA, 22 nt, Human
gcuuuuauuucuucacaaaagu

SEQ ID NO: 82165 - RNA, 22 nt, Human
gcuuuucauagauaaaauucua

SEQ ID NO: 82166 - RNA, 22 nt, Human
gcuuuucuccuuagugucccug

SEQ ID NO: 82167 - RNA, 22 nt, Human
gcuuuuggaccucugauguuuc

SEQ ID NO: 82168 - RNA, 22 nt, Human
gcuuuugucauggugacucagu

SEQ ID NO: 82169 - RNA, 23 nt, Human
ggaaaaacacugugucuuggcag

SEQ ID NO: 82170 - RNA, 22 nt, Human
ggaaaacaagagaaugauguuu

SEQ ID NO: 82171 - RNA, 22 nt, Human
ggaaaacugaggcucucagcag

SEQ ID NO: 82172 - RNA, 22 nt, Human
ggaaaagacagaauucuagaau

SEQ ID NO: 82173 - RNA, 20 nt, Human
ggaaaaguacuccuccuuaa

SEQ ID NO: 82174 - RNA, 22 nt, Human
ggaaaaguguuaagguguugau

SEQ ID NO: 82175 - RNA, 22 nt, Human
ggaaaauacugauucaugccau

SEQ ID NO: 82176 - RNA, 22 nt, Human
ggaaaaugggaaccugaagcca

SEQ ID NO: 82177 - RNA, 21 nt, Human
ggaaaauucagagugcaauuu

SEQ ID NO: 82178 - RNA, 22 nt, Human
ggaaacaaaccacucauggugg

SEQ ID NO: 82179 - RNA, 22 nt, Human
ggaaacauuccaagaguugaaa

SEQ ID NO: 82180 - RNA, 22 nt, Human
ggaaacugcuuacacuagaggg

SEQ ID NO: 82181 - RNA, 22 nt, Human
ggaaacuuggaugccagcacuc

SEQ ID NO: 82182 - RNA, 22 nt, Human
ggaaacuuguuauuguauuuuc

SEQ ID NO: 82183 - RNA, 22 nt, Human
ggaaagaaagugugaacaacuu

SEQ ID NO: 82184 - RNA, 21 nt, Human
ggaaagaaggcaaggcucagg

SEQ ID NO: 82185 - RNA, 22 nt, Human
ggaaagaauagagacuuuauca

SEQ ID NO: 82186 - RNA, 22 nt, Human
ggaaagaccugagauaggaaua

SEQ ID NO: 82187 - RNA, 22 nt, Human
ggaaagccaggugcucuggugu

SEQ ID NO: 82188 - RNA, 22 nt, Human
ggaaagcuuuguacuugaaaac

SEQ ID NO: 82189 - RNA, 22 nt, Human
ggaaagcuuuguuuuccucacc

SEQ ID NO: 82190 - RNA, 22 nt, Human
ggaaaggagauauuggagagug

SEQ ID NO: 82191 - RNA, 17 nt, Human
ggaaagguagaguaauc

SEQ ID NO: 82192 - RNA, 22 nt, Human
ggaaaguggugguggaaagagg

SEQ ID NO: 82193 - RNA, 22 nt, Human
ggaaaucaaggggacaaauugu

SEQ ID NO: 82194 - RNA, 22 nt, Human
ggaaaucagcagaugcugguga

SEQ ID NO: 82195 - RNA, 22 nt, Human
ggaaaucucuacuuugucauuu

SEQ ID NO: 82196 - RNA, 22 nt, Human
ggaaaucucuuuugugguguuu

SEQ ID NO: 82197 - RNA, 17 nt, Human
ggaacaaauacuaugca

SEQ ID NO: 82198 - RNA, 22 nt, Human
ggaacacucagaaaugcucguc

SEQ ID NO: 82199 - RNA, 22 nt, Human
ggaacagacugacuucuugaau

SEQ ID NO: 82200 - RNA, 18 nt, Human
ggaacagcucagggcagc

SEQ ID NO: 82201 - RNA, 22 nt, Human
ggaacaggaaaggagggaugcu

SEQ ID NO: 82202 - RNA, 22 nt, Human
ggaacaguacucggaggccaga

SEQ ID NO: 82203 - RNA, 22 nt, Human
ggaacauacuguguagacuuug

SEQ ID NO: 82204 - RNA, 22 nt, Human
uagguucagcuuccacugccua

SEQ ID NO: 82205 - RNA, 22 nt, Human
uagguucagugucuuguucugc

SEQ ID NO: 82206 - RNA, 22 nt, Human
uagguucaugaaauuuucagga

SEQ ID NO: 82207 - RNA, 22 nt, Human
uagguuccauuuaaacaaagaa

SEQ ID NO: 82208 - RNA, 19 nt, Human
uagguuggacaguaucccc

SEQ ID NO: 82209 - RNA, 22 nt, Human
uaguaaagugucuuaacacaua

SEQ ID NO: 82210 - RNA, 17 nt, Human
uaguaaaugaguagagc

SEQ ID NO: 82211 - RNA, 22 nt, Human
uaguaaauuaaaauauugacuu

SEQ ID NO: 82212 - RNA, 22 nt, Human
uaguaacagcagcuucccugug

SEQ ID NO: 82213 - RNA, 22 nt, Human
uaguacaacucacuugauuuua

SEQ ID NO: 82214 - RNA, 22 nt, Human
uaguacagaauuaauaauugug

SEQ ID NO: 82215 - RNA, 22 nt, Human
uaguacuuaucucugucauugu

SEQ ID NO: 82216 - RNA, 22 nt, Human
uaguagcaacaagaaacaaaua

SEQ ID NO: 82217 - RNA, 22 nt, Human
uaguagcaggaaucugaaggua

SEQ ID NO: 82218 - RNA, 22 nt, Human
uaguaguaauuguuaucuuauu

SEQ ID NO: 82219 - RNA, 22 nt, Human
uaguauagauugaagcagauca

SEQ ID NO: 82220 - RNA, 22 nt, Human
uagucaaaaggaaggauaugcu

SEQ ID NO: 82221 - RNA, 22 nt, Human
uagucaagauuggaauaaugua

SEQ ID NO: 82222 - RNA, 22 nt, Human
uagucacaaccuucaaguuguc

SEQ ID NO: 82223 - RNA, 22 nt, Human
uagucacaguacaggauaaaga

SEQ ID NO: 82224 - RNA, 22 nt, Human
uagucaccuguugugugaugcc

SEQ ID NO: 82225 - RNA, 22 nt, Human
uagucagauauaugacuuacgu

SEQ ID NO: 82226 - RNA, 22 nt, Human
uagucagcaugaaauaagcagc

SEQ ID NO: 82227 - RNA, 23 nt, Human
uagucaguauguaagucuaauug

SEQ ID NO: 82228 - RNA, 22 nt, Human
uagucagucuuacauauuugaa

SEQ ID NO: 82229 - RNA, 22 nt, Human
uagucagugcacagacacuugu

SEQ ID NO: 82230 - RNA, 22 nt, Human
uaguccaggacaaucuucauau

SEQ ID NO: 82231 - RNA, 22 nt, Human
uaguccagguuuccaucuccac

SEQ ID NO: 82232 - RNA, 22 nt, Human
uagucccggaacuccuucaggu

SEQ ID NO: 82233 - RNA, 22 nt, Human
uaguccuugguaaaauucuaug

SEQ ID NO: 82234 - RNA, 22 nt, Human
uaguccuuuaucaaacauuuau

SEQ ID NO: 82235 - RNA, 22 nt, Human
uagucuggacuucuuaguguca

SEQ ID NO: 82236 - RNA, 22 nt, Human
uagugaaaguauuaaacagcug

SEQ ID NO: 82237 - RNA, 22 nt, Human
uagugaaaugauaacagagcag

SEQ ID NO: 82238 - RNA, 22 nt, Human
uagugaaauuuaugcacagcua

SEQ ID NO: 82239 - RNA, 19 nt, Human
uagugaguagugaauuaga

SEQ ID NO: 82240 - RNA, 22 nt, Human
uagugauuauaaaacaguuuuu

SEQ ID NO: 82241 - RNA, 22 nt, Human
uagugauuccaaugugaagugg

SEQ ID NO: 82242 - RNA, 22 nt, Human
uagugauucugauguaagacaa

SEQ ID NO: 82243 - RNA, 22 nt, Human
uagugcaaggauugcugcagag

SEQ ID NO: 82244 - RNA, 22 nt, Human
uagugccaccacugucuuuggc

SEQ ID NO: 82245 - RNA, 22 nt, Human
uagugccauucaagagguaguu

SEQ ID NO: 82246 - RNA, 22 nt, Human
uagugcuuaauaaauuucagaa

SEQ ID NO: 82247 - RNA, 22 nt, Human
uagugcuucuacccuaggcagg

SEQ ID NO: 82248 - RNA, 22 nt, Human
uagugcuuggcccuaccagaua

SEQ ID NO: 82249 - RNA, 22 nt, Human
uaguggagaguuguuuugugca

SEQ ID NO: 82250 - RNA, 22 nt, Human
uaguggagguggucugugaacu

SEQ ID NO: 82251 - RNA, 22 nt, Human
uaguggauguucagagauuuga

SEQ ID NO: 82252 - RNA, 17 nt, Human
uaguggcaggaaaugaa

SEQ ID NO: 82253 - RNA, 22 nt, Human
uaguggcugcagggcuguuuga

SEQ ID NO: 82254 - RNA, 22 nt, Human
uaguggcugcuucauuggugag

SEQ ID NO: 82255 - RNA, 22 nt, Human
uagugggugauuugaugaggaa

SEQ ID NO: 82256 - RNA, 22 nt, Human
uaguggguuuauacaauuuaaa

SEQ ID NO: 82257 - RNA, 21 nt, Human
uaguguagcugcagcagcaga

SEQ ID NO: 82258 - RNA, 22 nt, Human
ggagggagagugacccuaccaa

SEQ ID NO: 82259 - RNA, 22 nt, Human
ggagggagggcuagaccaaaga

SEQ ID NO: 82260 - RNA, 22 nt, Human
ggagggagguuagauucaagcu

SEQ ID NO: 82261 - RNA, 22 nt, Human
ggagggagucagcugauuagaa

SEQ ID NO: 82262 - RNA, 21 nt, Human
ggagggcagcccagacuggcu

SEQ ID NO: 82263 - RNA, 22 nt, Human
ggagggcccugggugcagcucu

SEQ ID NO: 82264 - RNA, 23 nt, Human
ggagggcuucaucagacccccag

SEQ ID NO: 82265 - RNA, 18 nt, Human
ggagggcuuuggggacug

SEQ ID NO: 82266 - RNA, 22 nt, Human
ggaggggaacuaaucccgugac

SEQ ID NO: 82267 - RNA, 22 nt, Human
ggaggggagauguuugggcuca

SEQ ID NO: 82268 - RNA, 22 nt, Human
ggaggggaggauuaaugacaaa

SEQ ID NO: 82269 - RNA, 22 nt, Human
ggaggggagucucccaaagccg

SEQ ID NO: 82270 - RNA, 22 nt, Human
ggagggggaaacuuuggcugcc

SEQ ID NO: 82271 - RNA, 22 nt, Human
ggaggggucucuagcgaggaga

SEQ ID NO: 82272 - RNA, 22 nt, Human
ggaggggugagaauggcugccu

SEQ ID NO: 82273 - RNA, 22 nt, Human
ggagggugcauuuuacccugug

SEQ ID NO: 82274 - RNA, 22 nt, Human
ggagggugggucauucuuacau

SEQ ID NO: 82275 - RNA, 22 nt, Human
ggagguagccucaaaagcagcu

SEQ ID NO: 82276 - RNA, 22 nt, Human
ggagguauuugucaaucuguuu

SEQ ID NO: 82277 - RNA, 22 nt, Human
ggaggucaaauggagggcuggg

SEQ ID NO: 82278 - RNA, 21 nt, Human
ggaggucccuucugguuucag

SEQ ID NO: 82279 - RNA, 22 nt, Human
ggaggugaggccguagggugug

SEQ ID NO: 82280 - RNA, 22 nt, Human
ggagguggcagagggacauucu

SEQ ID NO: 82281 - RNA, 22 nt, Human
ggaggugggagacauaggcggc

SEQ ID NO: 82282 - RNA, 22 nt, Human
ggaggugggagccuccaguggu

SEQ ID NO: 82283 - RNA, 22 nt, Human
ggaggugguggcagugacaauu

SEQ ID NO: 82284 - RNA, 22 nt, Human
ggaggugguuugauuucuauau

SEQ ID NO: 82285 - RNA, 22 nt, Human
ggaguaaggcucagaggaaaug

SEQ ID NO: 82286 - RNA, 22 nt, Human
ggagucaaggaaggcucuguga

SEQ ID NO: 82287 - RNA, 22 nt, Human
ggagucacacagagaagauaag

SEQ ID NO: 82288 - RNA, 22 nt, Human
ggagucaccugggaggacuggg

SEQ ID NO: 82289 - RNA, 22 nt, Human
ggagucagaacccaggcuucua

SEQ ID NO: 82290 - RNA, 22 nt, Human
ggagucaucucagcugagaggc

SEQ ID NO: 82291 - RNA, 22 nt, Human
ggaguccuggacuccaucucac

SEQ ID NO: 82292 - RNA, 22 nt, Human
ggagucugacccuuagagauga

SEQ ID NO: 82293 - RNA, 22 nt, Human
ggagucugagcuuguguccugg

SEQ ID NO: 82294 - RNA, 22 nt, Human
ggagucugauacugaguuccuc

SEQ ID NO: 82295 - RNA, 22 nt, Human
ggagucugauuuuuuaugggug

SEQ ID NO: 82296 - RNA, 22 nt, Human
ggagucugcggcagacacugua

SEQ ID NO: 82297 - RNA, 21 nt, Human
ggagucuguggaugcuguuuc

SEQ ID NO: 82298 - RNA, 22 nt, Human
ggagucuuaaaaaucaaaugga

SEQ ID NO: 82299 - RNA, 22 nt, Human
ggagugacucucggggccacua

SEQ ID NO: 82300 - RNA, 22 nt, Human
ggagugcuuugaagccuucauu

SEQ ID NO: 82301 - RNA, 22 nt, Human
ggaguggcagagaggguauacu

SEQ ID NO: 82302 - RNA, 22 nt, Human
ggaguggcuauuugugcugguu

SEQ ID NO: 82303 - RNA, 22 nt, Human
ggagugggcagcacugcccugu

SEQ ID NO: 82304 - RNA, 22 nt, Human
ggagugguggucaggccauggc

SEQ ID NO: 82305 - RNA, 22 nt, Human
ggagugucagaaacaguguccu

SEQ ID NO: 82306 - RNA, 23 nt, Human
ggagugugaagaccugauauagc

SEQ ID NO: 82307 - RNA, 22 nt, Human
ggaguuccagaaucugcuuuuu

SEQ ID NO: 82308 - RNA, 22 nt, Human
ggaguuggugagcaccaggcuu

SEQ ID NO: 82309 - RNA, 22 nt, Human
ggaguugguggcccggaaucuc

SEQ ID NO: 82310 - RNA, 22 nt, Human
ggauaagaaaauuguaauaacu

SEQ ID NO: 82311 - RNA, 18 nt, Human
ggauaggaccuuaggcag

SEQ ID NO: 82312 - RNA, 22 nt, Human
ggauauaugcauguuaucauuu

SEQ ID NO: 82313 - RNA, 22 nt, Human
ggaucaagaaagucagaugaag

SEQ ID NO: 82314 - RNA, 22 nt, Human
ggaucauuaagaauagcuacua

SEQ ID NO: 82315 - RNA, 22 nt, Human
ggauccugauauguguuucuca

SEQ ID NO: 82316 - RNA, 22 nt, Human
ggauccuuaacuaucacaguga

SEQ ID NO: 82317 - RNA, 22 nt, Human
ggauccuucuuugaccucacag

SEQ ID NO: 82318 - RNA, 22 nt, Human
ggaucgcggucccggcccgcgc

SEQ ID NO: 82319 - RNA, 22 nt, Human
ggaucugagagcaagcaggacc

SEQ ID NO: 82320 - RNA, 22 nt, Human
ggacugaaugccagucuaugga

SEQ ID NO: 82321 - RNA, 22 nt, Human
ggacugaggacaugugaggcau

SEQ ID NO: 82322 - RNA, 22 nt, Human
ggacugggagaauggaggcaag

SEQ ID NO: 82323 - RNA, 22 nt, Human
ggacugggcaugggugcucugc

SEQ ID NO: 82324 - RNA, 22 nt, Human
ggacugggccagggguuggacu

SEQ ID NO: 82325 - RNA, 17 nt, Human
ggacugggcggggcagg

SEQ ID NO: 82326 - RNA, 22 nt, Human
ggacugguggcuccuugggcag

SEQ ID NO: 82327 - RNA, 22 nt, Human
ggacugucuccuugcugguagg

SEQ ID NO: 82328 - RNA, 19 nt, Human
ggacuguugccaggccucu

SEQ ID NO: 82329 - RNA, 22 nt, Human
ggacuuggggaaggcacaguua

SEQ ID NO: 82330 - RNA, 19 nt, Human
ggacuugguuuccaggcuc

SEQ ID NO: 82331 - RNA, 22 nt, Human
ggacuuuaggaagggccaagug

SEQ ID NO: 82332 - RNA, 22 nt, Human
ggagaaaggauaggaaugugcu

SEQ ID NO: 82333 - RNA, 22 nt, Human
ggagaaagucagcuccaagcag

SEQ ID NO: 82334 - RNA, 22 nt, Human
ggagaagauuggaauuaagcac

SEQ ID NO: 82335 - RNA, 22 nt, Human
ggagaagcagcuucuugaugaa

SEQ ID NO: 82336 - RNA, 19 nt, Human
ggagaagcccaggaauccu

SEQ ID NO: 82337 - RNA, 22 nt, Human
ggagaaggcgaagucauucuuu

SEQ ID NO: 82338 - RNA, 22 nt, Human
ggagaagggacagacucagcuu

SEQ ID NO: 82339 - RNA, 22 nt, Human
ggagaagggccaauuccaugua

SEQ ID NO: 82340 - RNA, 23 nt, Human
ggagacaagguaccacguuaaca

SEQ ID NO: 82341 - RNA, 22 nt, Human
ggagacaugcagacugagauac

SEQ ID NO: 82342 - RNA, 22 nt, Human
ggagacucucauugucaagcuu

SEQ ID NO: 82343 - RNA, 22 nt, Human
ggagacugaucugagugauaac

SEQ ID NO: 82344 - RNA, 22 nt, Human
ggagacuugaguuuuugucuua

SEQ ID NO: 82345 - RNA, 22 nt, Human
ggagagaacuggcuccuucuag

SEQ ID NO: 82346 - RNA, 22 nt, Human
ggagagaauuccauggacaugu

SEQ ID NO: 82347 - RNA, 22 nt, Human
ggagagagaccuccaugcccag

SEQ ID NO: 82348 - RNA, 22 nt, Human
ggagagagagcucauuagcugc

SEQ ID NO: 82349 - RNA, 20 nt, Human
ggagagcagggaagacagua

SEQ ID NO: 82350 - RNA, 20 nt, Human
ggagagccacauagucuccc

SEQ ID NO: 82351 - RNA, 22 nt, Human
ggagagccuccacggcuucugu

SEQ ID NO: 82352 - RNA, 22 nt, Human
ggagagcuagugccugccagua

SEQ ID NO: 82353 - RNA, 23 nt, Human
ggagagcuccucgugacucacug

SEQ ID NO: 82354 - RNA, 22 nt, Human
ggagagcugguagcuggcucca

SEQ ID NO: 82355 - RNA, 22 nt, Human
ggagaggaaaugccagcacuuc

SEQ ID NO: 82356 - RNA, 22 nt, Human
ggagaggggaacuuguugcuug

SEQ ID NO: 82357 - RNA, 22 nt, Human
ggagagggggcucccugcuugg

SEQ ID NO: 82358 - RNA, 22 nt, Human
ggagaggguagggguccugccc

SEQ ID NO: 82359 - RNA, 22 nt, Human
ggagaggugaauggcugcucua

SEQ ID NO: 82360 - RNA, 22 nt, Human
ggagaggugagagguacaaguu

SEQ ID NO: 82361 - RNA, 22 nt, Human
ggagaggugcaggucaguggca

SEQ ID NO: 82362 - RNA, 22 nt, Human
ggagagguguauucaguggguc

SEQ ID NO: 82363 - RNA, 22 nt, Human
ggagaguggauuccagcuguau

SEQ ID NO: 82364 - RNA, 16 nt, Human
ggagagugucugcaaa

SEQ ID NO: 82365 - RNA, 22 nt, Human
ggagauccaggcaaggccgcag

SEQ ID NO: 82366 - RNA, 19 nt, Human
ggagaucccgcugcagaug

SEQ ID NO: 82367 - RNA, 23 nt, Human
ggcacugaagcuacaauggugag

SEQ ID NO: 82368 - RNA, 22 nt, Human
ggcacugaaguggguguugggu

SEQ ID NO: 82369 - RNA, 22 nt, Human
ggcacugagaacaggcugacuu

SEQ ID NO: 82370 - RNA, 20 nt, Human
ggcacugcaccaguuaguag

SEQ ID NO: 82371 - RNA, 22 nt, Human
ggcacuggaaggaucaugugag

SEQ ID NO: 82372 - RNA, 22 nt, Human
ggcacuggaagucccauugucu

SEQ ID NO: 82373 - RNA, 22 nt, Human
ggcacugggcaccggcugaggg

SEQ ID NO: 82374 - RNA, 22 nt, Human
ggcacuggguuguaggaauuaa

SEQ ID NO: 82375 - RNA, 18 nt, Human
ggcacuggugaugcagag

SEQ ID NO: 82376 - RNA, 22 nt, Human
ggcacuuuccagucuauagagc

SEQ ID NO: 82377 - RNA, 22 nt, Human
ggcacuuugauuuugagaugca

SEQ ID NO: 82378 - RNA, 22 nt, Human
ggcacuuuucuccccggucaug

SEQ ID NO: 82379 - RNA, 22 nt, Human
ggcagaagauaggacagggaau

SEQ ID NO: 82380 - RNA, 19 nt, Human
ggcagacacaguugacaug

SEQ ID NO: 82381 - RNA, 22 nt, Human
ggcagacaccuuuaugucuaau

SEQ ID NO: 82382 - RNA, 22 nt, Human
ggcagacacucaaaagcuggga

SEQ ID NO: 82383 - RNA, 20 nt, Human
ggcagaccugcugagagccc

SEQ ID NO: 82384 - RNA, 21 nt, Human
ggcagagaagcuggaaguugg

SEQ ID NO: 82385 - RNA, 22 nt, Human
ggcagagacaccgaaugacucu

SEQ ID NO: 82386 - RNA, 22 nt, Human
ggcagagacuggguuggcagag

SEQ ID NO: 82387 - RNA, 19 nt, Human
ggcagagcuccugcuuucu

SEQ ID NO: 82388 - RNA, 22 nt, Human
ggcagagcucuggacugagaac

SEQ ID NO: 82389 - RNA, 22 nt, Human
ggcagagcuuguuccuucuguu

SEQ ID NO: 82390 - RNA, 22 nt, Human
ggcagaggaagcuggaaguggg

SEQ ID NO: 82391 - RNA, 22 nt, Human
ggcagaggagcuggaaacaugg

SEQ ID NO: 82392 - RNA, 22 nt, Human
ggcagaguugguggagucaguu

SEQ ID NO: 82393 - RNA, 22 nt, Human
ggcagaugacagaccaguaugu

SEQ ID NO: 82394 - RNA, 22 nt, Human
ggcagauggaaugagcugucua

SEQ ID NO: 82395 - RNA, 18 nt, Human
ggcagcaagaagggaggg

SEQ ID NO: 82396 - RNA, 22 nt, Human
ggcagcaaggccucgggugagc

SEQ ID NO: 82397 - RNA, 22 nt, Human
ggcagcaagguggcggaaauga

SEQ ID NO: 82398 - RNA, 22 nt, Human
ggcagcagaccccuaagucuac

SEQ ID NO: 82399 - RNA, 22 nt, Human
ggcagcagcaagguuggagcug

SEQ ID NO: 82400 - RNA, 16 nt, Human
ggcagcagcuccgugc

SEQ ID NO: 82401 - RNA, 22 nt, Human
ggcagcagggcugucucccuac

SEQ ID NO: 82402 - RNA, 22 nt, Human
ggcagcaguggcugcuauuguc

SEQ ID NO: 82403 - RNA, 22 nt, Human
ggcagcaugagccuggugaauu

SEQ ID NO: 82404 - RNA, 22 nt, Human
ggcagcaugugugguccgcugg

SEQ ID NO: 82405 - RNA, 20 nt, Human
ggcagccaaucagcgugccg

SEQ ID NO: 82406 - RNA, 22 nt, Human
ggcagccagcaaugagaaguuu

SEQ ID NO: 82407 - RNA, 22 nt, Human
ggcagccagcacgcaguugaug

SEQ ID NO: 82408 - RNA, 22 nt, Human
ggcagccccagaaacaguucag

SEQ ID NO: 82409 - RNA, 22 nt, Human
ggcagcccuguggagaggccca

SEQ ID NO: 82410 - RNA, 17 nt, Human
ggcagccucaggcguuu

SEQ ID NO: 82411 - RNA, 23 nt, Human
ggcagccucugacucugcuuugc

SEQ ID NO: 82412 - RNA, 22 nt, Human
ggcagccuggagacuuugugaa

SEQ ID NO: 82413 - RNA, 22 nt, Human
ggcagccuucucucauagguga

SEQ ID NO: 82414 - RNA, 22 nt, Human
ggcagccuugacuagugacuua

SEQ ID NO: 82415 - RNA, 22 nt, Human
ggcagcgagucgccaagucucg

SEQ ID NO: 82416 - RNA, 22 nt, Human
ggcagcuaguuuaagaaagagg

SEQ ID NO: 82417 - RNA, 22 nt, Human
ggcagcucaccucugguccagg

SEQ ID NO: 82418 - RNA, 22 nt, Human
ggcagcucacugauuagcaauu

SEQ ID NO: 82419 - RNA, 22 nt, Human
ggcagcuccaaaaggaaacacu

SEQ ID NO: 82420 - RNA, 22 nt, Human
ggcagcuccucucagcaaaaga

SEQ ID NO: 82421 - RNA, 22 nt, Human
ggcagcucgucaggcugcggcg

SEQ ID NO: 82422 - RNA, 22 nt, Human
ggcagcucugugucugggaagc

SEQ ID NO: 82423 - RNA, 22 nt, Human
ggcagcugagaucaugcuguug

SEQ ID NO: 82424 - RNA, 22 nt, Human
ggcagcugcaaaucugcucugu

SEQ ID NO: 82425 - RNA, 22 nt, Human
ggcagcuggccuccucgcccac

SEQ ID NO: 82426 - RNA, 22 nt, Human
ggcagcugucucugaguuagca

SEQ ID NO: 82427 - RNA, 21 nt, Human
ggcagcugugguuaauugaac

SEQ ID NO: 82428 - RNA, 22 nt, Human
ggcagcuucucccaggcuguuu

SEQ ID NO: 82429 - RNA, 20 nt, Human
ggcagcuugggcagcaguua

SEQ ID NO: 82430 - RNA, 22 nt, Human
ggcagcuuugagucuuagagua

SEQ ID NO: 82431 - RNA, 22 nt, Human
ggcaggaagcauuaaaacgauu

SEQ ID NO: 82432 - RNA, 22 nt, Human
ggcaggaauaaauuauggacuu

SEQ ID NO: 82433 - RNA, 22 nt, Human
ggcaggacagucccaguucaaa

SEQ ID NO: 82434 - RNA, 22 nt, Human
ggcaggacauugacuacaguga

SEQ ID NO: 82435 - RNA, 22 nt, Human
ggcaggacugaucagugggaug

SEQ ID NO: 82436 - RNA, 18 nt, Human
ggcaggauuucaacuuuc

SEQ ID NO: 82437 - RNA, 22 nt, Human
ggcaggcaaggcagccugguga

SEQ ID NO: 82438 - RNA, 22 nt, Human
ggcaggcacaguaauacauguu

SEQ ID NO: 82439 - RNA, 22 nt, Human
ggcaggcaggagcucugucucc

SEQ ID NO: 82440 - RNA, 20 nt, Human
ggcaggcaggagguuuccag

SEQ ID NO: 82441 - RNA, 22 nt, Human
ggcaggcaggucuucauggccc

SEQ ID NO: 82442 - RNA, 22 nt, Human
ggcaggcucagcagccaaggag

SEQ ID NO: 82443 - RNA, 22 nt, Human
ggcaggcuccaagcauccuaug

SEQ ID NO: 82444 - RNA, 22 nt, Human
ggcaggcuguucaccugcuuuu

SEQ ID NO: 82445 - RNA, 22 nt, Human
ggcagggguccugguguugacu

SEQ ID NO: 82446 - RNA, 22 nt, Human
ggcagggguggccuuccuuugg

SEQ ID NO: 82447 - RNA, 22 nt, Human
ggcagggguucauuuugucuua

SEQ ID NO: 82448 - RNA, 22 nt, Human
ggcaggguccacaccugggaaa

SEQ ID NO: 82449 - RNA, 22 nt, Human
ggcagggugccuggcuccuguu

SEQ ID NO: 82450 - RNA, 22 nt, Human
ggcaggguggcagaggcucaga

SEQ ID NO: 82451 - RNA, 19 nt, Human
ggcagguagagggccaguc

SEQ ID NO: 82452 - RNA, 22 nt, Human
ggcaggucagguccaugaccaa

SEQ ID NO: 82453 - RNA, 23 nt, Human
ggccaggugcaccuuagagagcc

SEQ ID NO: 82454 - RNA, 22 nt, Human
ggccaggugcgguggcucacac

SEQ ID NO: 82455 - RNA, 22 nt, Human
ggccagguggcuguccuggcgu

SEQ ID NO: 82456 - RNA, 22 nt, Human
ggccagguuggguggaaguggc

SEQ ID NO: 82457 - RNA, 22 nt, Human
ggccagugugggaguaguucuu

SEQ ID NO: 82458 - RNA, 22 nt, Human
ggccaguuuccaugcacuauuu

SEQ ID NO: 82459 - RNA, 22 nt, Human
ggccaugcaggucugguagguc

SEQ ID NO: 82460 - RNA, 22 nt, Human
ggccauggcgggagccggcguc

SEQ ID NO: 82461 - RNA, 23 nt, Human
ggccauuucauuugguucaaacu

SEQ ID NO: 82462 - RNA, 22 nt, Human
ggcccaaaccaaguaccucaaa

SEQ ID NO: 82463 - RNA, 22 nt, Human
ggcccaaggugccaaggccucc

SEQ ID NO: 82464 - RNA, 22 nt, Human
ggcccagaagccagaagccucc

SEQ ID NO: 82465 - RNA, 22 nt, Human
ggcccagagacgugcaauguac

SEQ ID NO: 82466 - RNA, 22 nt, Human
ggcccagagcucugggggagcu

SEQ ID NO: 82467 - RNA, 22 nt, Human
ggcccagagggguugagcaucu

SEQ ID NO: 82468 - RNA, 22 nt, Human
ggcccagauuagaagcugaaug

SEQ ID NO: 82469 - RNA, 22 nt, Human
ggcccaggaugcaagaacugaa

SEQ ID NO: 82470 - RNA, 22 nt, Human
ggcccagugcuguucacccagu

SEQ ID NO: 82471 - RNA, 22 nt, Human
ggcccaugcauccugugcagcc

SEQ ID NO: 82472 - RNA, 22 nt, Human
ggccccagcagacccuccucug

SEQ ID NO: 82473 - RNA, 19 nt, Human
ggccccagccaggguauca

SEQ ID NO: 82474 - RNA, 22 nt, Human
ggccccaggucugaacacgcug

SEQ ID NO: 82475 - RNA, 19 nt, Human
ggccccucucacaggaguu

SEQ ID NO: 82476 - RNA, 22 nt, Human
ggcagugaaaaaguauguuucc

SEQ ID NO: 82477 - RNA, 22 nt, Human
ggcagugaacagaaaugcagaa

SEQ ID NO: 82478 - RNA, 22 nt, Human
ggcagugacuguucagacgucc

SEQ ID NO: 82479 - RNA, 22 nt, Human
ggcagugaugucaaacagugaa

SEQ ID NO: 82480 - RNA, 22 nt, Human
ggcagugcccggugccuccucu

SEQ ID NO: 82481 - RNA, 22 nt, Human
ggcaguguucugguugucagga

SEQ ID NO: 82482 - RNA, 20 nt, Human
ggcaguuaaggcacagucau

SEQ ID NO: 82483 - RNA, 22 nt, Human
ggcaguugcgugcaucaguggu

SEQ ID NO: 82484 - RNA, 22 nt, Human
ggcaguuucucaggcaggggua

SEQ ID NO: 82485 - RNA, 22 nt, Human
ggcaguuuggcaggauggaggg

SEQ ID NO: 82486 - RNA, 22 nt, Human
ggcauacaagagaaauauaaga

SEQ ID NO: 82487 - RNA, 22 nt, Human
ggcaucagagguguguucugcu

SEQ ID NO: 82488 - RNA, 22 nt, Human
ggcaucaggguaggaagguauc

SEQ ID NO: 82489 - RNA, 22 nt, Human
ggcaucaguauggccauagggu

SEQ ID NO: 82490 - RNA, 19 nt, Human
ggcauccagaacuaccagu

SEQ ID NO: 82491 - RNA, 22 nt, Human
ggcauccugggacuggcuucuu

SEQ ID NO: 82492 - RNA, 20 nt, Human
ggcauccuucugacccagag

SEQ ID NO: 82493 - RNA, 22 nt, Human
ggcaucucggaacacgccuccg

SEQ ID NO: 82494 - RNA, 22 nt, Human
ggcaucugagcuguguaugguu

SEQ ID NO: 82495 - RNA, 22 nt, Human
ggcaucuguccaucucuccagc

SEQ ID NO: 82496 - RNA, 20 nt, Human
ggcaugagaugugagggagg

SEQ ID NO: 82497 - RNA, 21 nt, Human
ggcaugagggcagugagcaga

SEQ ID NO: 82498 - RNA, 22 nt, Human
ggcaugaguggcagugggcagu

SEQ ID NO: 82499 - RNA, 22 nt, Human
ggcaugcauacguagugauuuu

SEQ ID NO: 82500 - RNA, 22 nt, Human
ggcaugcucuggggguccuccg

SEQ ID NO: 82501 - RNA, 22 nt, Human
ggcaugcugcguacagaugaac

SEQ ID NO: 82502 - RNA, 20 nt, Human
ggcauggcaaauguucuugc

SEQ ID NO: 82503 - RNA, 22 nt, Human
ggcauggucuuugcuugcagga

SEQ ID NO: 82504 - RNA, 22 nt, Human
ggcaugucugauggcccaaguc

SEQ ID NO: 82505 - RNA, 22 nt, Human
ggcauuaacucuguuucaauuu

SEQ ID NO: 82506 - RNA, 20 nt, Human
ggcauuagauuuuaaauguc

SEQ ID NO: 82507 - RNA, 22 nt, Human
ggcauuuacauaaucuuauuua

SEQ ID NO: 82508 - RNA, 22 nt, Human
ggcauuuaucuaauauaguuua

SEQ ID NO: 82509 - RNA, 22 nt, Human
ggccaaaucuguaaggcaagau

SEQ ID NO: 82510 - RNA, 22 nt, Human
ggccaaaugaaaucugagcaau

SEQ ID NO: 82511 - RNA, 22 nt, Human
ggccaaauuuauuugcagcugg

SEQ ID NO: 82512 - RNA, 22 nt, Human
ggccaagaaugauaggcucagu

SEQ ID NO: 82513 - RNA, 22 nt, Human
ggccaagauggaaggagagaug

SEQ ID NO: 82514 - RNA, 22 nt, Human
ggccaagcucucauuccagcac

SEQ ID NO: 82515 - RNA, 22 nt, Human
ggccaaggcucuugagggcuga

SEQ ID NO: 82516 - RNA, 22 nt, Human
ggccaagguggagaaggcacug

SEQ ID NO: 82517 - RNA, 22 nt, Human
ggccaagguguucugauaugcc

SEQ ID NO: 82518 - RNA, 22 nt, Human
ggccaauuccaggagccggcgg

SEQ ID NO: 82519 - RNA, 22 nt, Human
ggccacacucugguagagguga

SEQ ID NO: 82520 - RNA, 22 nt, Human
ggccacagcaaugcugugaugu

SEQ ID NO: 82521 - RNA, 20 nt, Human
ggccacagggugcuggugga

SEQ ID NO: 82522 - RNA, 21 nt, Human
ggccacaguuagggcucagga

SEQ ID NO: 82523 - RNA, 22 nt, Human
ggccacauguggcugcucguau

SEQ ID NO: 82524 - RNA, 22 nt, Human
ggccaccaguccucuggcaggg

SEQ ID NO: 82525 - RNA, 22 nt, Human
ggccaccucugcccuacugagu

SEQ ID NO: 82526 - RNA, 22 nt, Human
ggccaccugggaucucauccug

SEQ ID NO: 82527 - RNA, 22 nt, Human
ggccaccuuaaguuaaggauau

SEQ ID NO: 82528 - RNA, 22 nt, Human
ggccaccuuccuguggucucug

SEQ ID NO: 82529 - RNA, 22 nt, Human
ggccacgugaccucuggcuccu

SEQ ID NO: 82530 - RNA, 22 nt, Human
ggccacuccgcugcuacuggaa

SEQ ID NO: 82531 - RNA, 22 nt, Human
ggccacugccuccgccauggcu

SEQ ID NO: 82532 - RNA, 22 nt, Human
ggccacuguuuccugggcaguu

SEQ ID NO: 82533 - RNA, 23 nt, Human
ggccacuuugugucaguaugugc

SEQ ID NO: 82534 - RNA, 22 nt, Human
ggccagaaguuggaaaagagcc

SEQ ID NO: 82535 - RNA, 22 nt, Human
ggccagagaauaugccuuacgu

SEQ ID NO: 82536 - RNA, 22 nt, Human
ggccagagagcagccaggauuc

SEQ ID NO: 82537 - RNA, 22 nt, Human
ggccagagagccgcuguuagga

SEQ ID NO: 82538 - RNA, 22 nt, Human
ggccagagcucaaacagucgca

SEQ ID NO: 82539 - RNA, 22 nt, Human
ggccagaggccacagcuguguc

SEQ ID NO: 82540 - RNA, 22 nt, Human
ggccagaggccauccuccugcu

SEQ ID NO: 82541 - RNA, 22 nt, Human
ggccagagguguccucaguucu

SEQ ID NO: 82542 - RNA, 22 nt, Human
ggccagagucuauaugcagaca

SEQ ID NO: 82543 - RNA, 22 nt, Human
ggccagcagucacagggucaga

SEQ ID NO: 82544 - RNA, 22 nt, Human
ggccagcauggcaagaccaacu

SEQ ID NO: 82545 - RNA, 19 nt, Human
ggccagccaccucgccugg

SEQ ID NO: 82546 - RNA, 22 nt, Human
ggccagcccagugguccucucu

SEQ ID NO: 82547 - RNA, 22 nt, Human
ggccagcggcacagccuggccc

SEQ ID NO: 82548 - RNA, 22 nt, Human
ggccagcuacccaucugcguca

SEQ ID NO: 82549 - RNA, 22 nt, Human
ggccagcucagucuccaucagg

SEQ ID NO: 82550 - RNA, 22 nt, Human
ggccagcucugcacagcagcug

SEQ ID NO: 82551 - RNA, 21 nt, Human
ggccagcugcauaugucacug

SEQ ID NO: 82552 - RNA, 22 nt, Human
ggccagcugccaccagcccuau

SEQ ID NO: 82553 - RNA, 22 nt, Human
ggccagcugccugaccuucugu

SEQ ID NO: 82554 - RNA, 22 nt, Human
ggccagcugggccaccaggugc

SEQ ID NO: 82555 - RNA, 22 nt, Human
ggccagcuuauuagcucagagg

SEQ ID NO: 82556 - RNA, 22 nt, Human
ggccagcuucucugcugccugu

SEQ ID NO: 82557 - RNA, 22 nt, Human
ggccagcuuugagcugcaggaa

SEQ ID NO: 82558 - RNA, 22 nt, Human
ggccaggaacuuuugggauggg

SEQ ID NO: 82559 - RNA, 22 nt, Human
ggccaggagcaagccaggcucu

SEQ ID NO: 82560 - RNA, 22 nt, Human
ggccaggcacugugugagauau

SEQ ID NO: 82561 - RNA, 19 nt, Human
ggccaggcugacugugguc

SEQ ID NO: 82562 - RNA, 22 nt, Human
ggccaggcugcccugggagcag

SEQ ID NO: 82563 - RNA, 22 nt, Human
ggccaggcugcugggaccccgc

SEQ ID NO: 82564 - RNA, 22 nt, Human
ggccaggcuggucucagacuuc

SEQ ID NO: 82565 - RNA, 22 nt, Human
ggccagggccuggggacugucc

SEQ ID NO: 82566 - RNA, 22 nt, Human
ggccagguccaguggaaggccc

SEQ ID NO: 82567 - RNA, 22 nt, Human
ggccaguccccuaauccagggc

SEQ ID NO: 82568 - RNA, 21 nt, Human
ggccaguggaauuuuauguca

SEQ ID NO: 82569 - RNA, 22 nt, Human
ggccaguggcucugugcuuggg

SEQ ID NO: 82570 - RNA, 21 nt, Human
ggccauccugggaagggcugc

SEQ ID NO: 82571 - RNA, 22 nt, Human
ucacagugggacuuuuaucgcu

SEQ ID NO: 82572 - RNA, 23 nt, Human
ucacaguuacuuuugcaucaacc

SEQ ID NO: 82573 - RNA, 22 nt, Human
ucacaguucaucugauaaacua

SEQ ID NO: 82574 - RNA, 22 nt, Human
ucacaguugauugaaacacagc

SEQ ID NO: 82575 - RNA, 22 nt, Human
ucacaguuuccauaggucagca

SEQ ID NO: 82576 - RNA, 22 nt, Human
ucacaguuuuagaaaauagaua

SEQ ID NO: 82577 - RNA, 22 nt, Human
ucacauacacuaggauauuuuu

SEQ ID NO: 82578 - RNA, 23 nt, Human
ucacauaucaagaaagugguaga

SEQ ID NO: 82579 - RNA, 22 nt, Human
ucacaucauggagaauuauggg

SEQ ID NO: 82580 - RNA, 20 nt, Human
ucacauccucucccaacaug

SEQ ID NO: 82581 - RNA, 22 nt, Human
ucacaucugcaaaaucccuuuu

SEQ ID NO: 82582 - RNA, 22 nt, Human
ucacaucugugugauugucauu

SEQ ID NO: 82583 - RNA, 22 nt, Human
ucacaucuguugauacagcauc

SEQ ID NO: 82584 - RNA, 22 nt, Human
ucacaucuuaguuugggacucu

SEQ ID NO: 82585 - RNA, 22 nt, Human
ggcuccagcuaaugguuucuau

SEQ ID NO: 82586 - RNA, 22 nt, Human
ggcuccaggaaccuccucuccu

SEQ ID NO: 82587 - RNA, 22 nt, Human
ggcuccaggagaugcugggcag

SEQ ID NO: 82588 - RNA, 22 nt, Human
ggcuccaggagggccuuggcca

SEQ ID NO: 82589 - RNA, 22 nt, Human
ggcuccaggcuccuauuucacu

SEQ ID NO: 82590 - RNA, 22 nt, Human
ggcuccagggucucuccuugug

SEQ ID NO: 82591 - RNA, 18 nt, Human
ggcuccagucuucagugg

SEQ ID NO: 82592 - RNA, 22 nt, Human
ggcuccauccaaggccuucuag

SEQ ID NO: 82593 - RNA, 22 nt, Human
ggcucccuagggagagugggag

SEQ ID NO: 82594 - RNA, 22 nt, Human
ggcucccucaccaccaucacau

SEQ ID NO: 82595 - RNA, 17 nt, Human
ggcucccugacuaugga

SEQ ID NO: 82596 - RNA, 22 nt, Human
ggcucccugccuguccucaguc

SEQ ID NO: 82597 - RNA, 22 nt, Human
ggcucccuggaaaucccgaggc

SEQ ID NO: 82598 - RNA, 22 nt, Human
ggcucccuggcccuggggacac

SEQ ID NO: 82599 - RNA, 22 nt, Human
ggcuccugaugcucagauuuca

SEQ ID NO: 82600 - RNA, 22 nt, Human
ggcuccugcaccugucccucug

SEQ ID NO: 82601 - RNA, 22 nt, Human
ggcuccugcuguccuuugaagc

SEQ ID NO: 82602 - RNA, 22 nt, Human
ggcuccuggaaagcccucgcuc

SEQ ID NO: 82603 - RNA, 22 nt, Human
ggcuccugggagaaguuuuauu

SEQ ID NO: 82604 - RNA, 22 nt, Human
ggcuccuguagaucucuaaagc

SEQ ID NO: 82605 - RNA, 22 nt, Human
ggcuccuguccuccuggagcuc

SEQ ID NO: 82606 - RNA, 18 nt, Human
ggcuccugugaucacauu

SEQ ID NO: 82607 - RNA, 22 nt, Human
ggcuccuucaagccugucacug

SEQ ID NO: 82608 - RNA, 22 nt, Human
ggcucuagagcugugcacacau

SEQ ID NO: 82609 - RNA, 19 nt, Human
ggcucucccuugagagagc

SEQ ID NO: 82610 - RNA, 22 nt, Human
ggcucucuccuuggcuuucaga

SEQ ID NO: 82611 - RNA, 22 nt, Human
ggcucugaacauggggaggagu

SEQ ID NO: 82612 - RNA, 23 nt, Human
ggcucugaggauggagcuggugg

SEQ ID NO: 82613 - RNA, 22 nt, Human
ggcucugccauuuccuagcugc

SEQ ID NO: 82614 - RNA, 22 nt, Human
ggcucugcccgcggcugcccac

SEQ ID NO: 82615 - RNA, 22 nt, Human
ggcucugccgugugcucacaug

SEQ ID NO: 82616 - RNA, 22 nt, Human
ggcucugcuucagaaggcucau

SEQ ID NO: 82617 - RNA, 20 nt, Human
ggcucuggaaucuggugggc

SEQ ID NO: 82618 - RNA, 22 nt, Human
ggcucuggcgagcuuuaguaca

SEQ ID NO: 82619 - RNA, 22 nt, Human
ggcucuggcggcucuuucaaua

SEQ ID NO: 82620 - RNA, 22 nt, Human
ggcucugggcauagaaggaagc

SEQ ID NO: 82621 - RNA, 22 nt, Human
ggcucuggggaagcucucuuca

SEQ ID NO: 82622 - RNA, 22 nt, Human
ggcucuggguucugcaaugcgu

SEQ ID NO: 82623 - RNA, 22 nt, Human
ggcucuggucagugaggggccu

SEQ ID NO: 82624 - RNA, 22 nt, Human
ggcucuggugaggguaggagau

SEQ ID NO: 82625 - RNA, 22 nt, Human
ggcucuguaaagugacaccugc

SEQ ID NO: 82626 - RNA, 22 nt, Human
ggcucuucuguuucacaggcca

SEQ ID NO: 82627 - RNA, 22 nt, Human
ggcucuugcccgcccaggcugg

SEQ ID NO: 82628 - RNA, 22 nt, Human
ggcugaaacagauuucaagaca

SEQ ID NO: 82629 - RNA, 22 nt, Human
ggcugaaaccguuauccacuga

SEQ ID NO: 82630 - RNA, 22 nt, Human
ggcugaaagcgcgacuugcccc

SEQ ID NO: 82631 - RNA, 22 nt, Human
ggcugaaggaugaaagcugcag

SEQ ID NO: 82632 - RNA, 22 nt, Human
ggcugaaguguaguggcucacu

SEQ ID NO: 82633 - RNA, 22 nt, Human
ggcugagaagacaguggggugg

SEQ ID NO: 82634 - RNA, 23 nt, Human
ggcugagaagucccaugauaggu

SEQ ID NO: 82635 - RNA, 22 nt, Human
ggcugagacuagagugaggcau

SEQ ID NO: 82636 - RNA, 22 nt, Human
ggcugagaggacgucgggcuca

SEQ ID NO: 82637 - RNA, 22 nt, Human
ggcugagcaauuuugaugacau

SEQ ID NO: 82638 - RNA, 22 nt, Human
ggcugagccaugggcacugcag

SEQ ID NO: 82639 - RNA, 22 nt, Human
ggcugagcccccucugcguagg

SEQ ID NO: 82640 - RNA, 22 nt, Human
ggcugagcucaggggcagcagg

SEQ ID NO: 82641 - RNA, 22 nt, Human
ggcugaggcucaugccaucuug

SEQ ID NO: 82642 - RNA, 22 nt, Human
ggcugaggggcccagaggaaca

SEQ ID NO: 82643 - RNA, 22 nt, Human
ggcugagggucccagacccuaa

SEQ ID NO: 82644 - RNA, 22 nt, Human
ggcugaguggagguagcccugu

SEQ ID NO: 82645 - RNA, 22 nt, Human
ggcugaugggcaugagcuguca

SEQ ID NO: 82646 - RNA, 22 nt, Human
ggcugcaaaggaaaagugguga

SEQ ID NO: 82647 - RNA, 22 nt, Human
ggcugcagaggcccccaguggg

SEQ ID NO: 82648 - RNA, 22 nt, Human
ggcugcagaggucacuuuauag

SEQ ID NO: 82649 - RNA, 22 nt, Human
ggcugcagcagagggacucacg

SEQ ID NO: 82650 - RNA, 22 nt, Human
ggcugcagcccucgccuagcca

SEQ ID NO: 82651 - RNA, 22 nt, Human
ggcugcagcggauuggggauug

SEQ ID NO: 82652 - RNA, 22 nt, Human
ggcugcaguuugucuuuugcuu

SEQ ID NO: 82653 - RNA, 22 nt, Human
ggcugcaugccucaguguaaga

SEQ ID NO: 82654 - RNA, 22 nt, Human
ggcugcauguucagaugacacu

SEQ ID NO: 82655 - RNA, 22 nt, Human
ggcugccauaacugauaccaua

SEQ ID NO: 82656 - RNA, 22 nt, Human
ggcugccccaugggcugggcug

SEQ ID NO: 82657 - RNA, 22 nt, Human
ggcugcccucgucuacugccca

SEQ ID NO: 82658 - RNA, 22 nt, Human
ggcugcccucugcugacugcaa

SEQ ID NO: 82659 - RNA, 22 nt, Human
ggcugccuacuuucccagaguu

SEQ ID NO: 82660 - RNA, 22 nt, Human
ggcugccucagauuugcugacu

SEQ ID NO: 82661 - RNA, 22 nt, Human
ggcugccucugaugugcagacg

SEQ ID NO: 82662 - RNA, 22 nt, Human
ggcugccucuuucuuagugucu

SEQ ID NO: 82663 - RNA, 21 nt, Human
ggcugccugggaagaagaaga

SEQ ID NO: 82664 - RNA, 22 nt, Human
ggcugccuucagacuccagcuu

SEQ ID NO: 82665 - RNA, 22 nt, Human
ggcugccuucccugagccccgg

SEQ ID NO: 82666 - RNA, 19 nt, Human
ggcugccuucugcucaucu

SEQ ID NO: 82667 - RNA, 21 nt, Human
ggcugcucaccuaggucccaa

SEQ ID NO: 82668 - RNA, 22 nt, Human
ggcugcucggagccuccuguga

SEQ ID NO: 82669 - RNA, 22 nt, Human
ggcugcucggcagcuccugagc

SEQ ID NO: 82670 - RNA, 22 nt, Human
ggcugcucuccaucccaggccu

SEQ ID NO: 82671 - RNA, 22 nt, Human
ggcugcucugagaguggguuuu

SEQ ID NO: 82672 - RNA, 22 nt, Human
ggcugcugcccaccccugcaug

SEQ ID NO: 82673 - RNA, 22 nt, Human
ggcugcuggaguugggucucuc

SEQ ID NO: 82674 - RNA, 22 nt, Human
ggcugcuggauuguguaucugu

SEQ ID NO: 82675 - RNA, 22 nt, Human
ggcugcuggcagauguaguuua

SEQ ID NO: 82676 - RNA, 22 nt, Human
ggcugcuggcauugagguaggu

SEQ ID NO: 82677 - RNA, 22 nt, Human
ggcugcuggccagccuaggagu

SEQ ID NO: 82678 - RNA, 22 nt, Human
ggcugcugggucaugaugcaga

SEQ ID NO: 82679 - RNA, 20 nt, Human
ggcugcugguuuggcucugu

SEQ ID NO: 82680 - RNA, 22 nt, Human
ggcugcuucacuuuuuugagcc

SEQ ID NO: 82681 - RNA, 22 nt, Human
ggcuggaaaagacaaagcuauu

SEQ ID NO: 82682 - RNA, 22 nt, Human
ggcuggaaccagagugaggcag

SEQ ID NO: 82683 - RNA, 22 nt, Human
ggcuggaacuucuucuggcauu

SEQ ID NO: 82684 - RNA, 19 nt, Human
ggcauccacgaaugcagag

SEQ ID NO: 82685 - RNA, 22 nt, Human
ggcaucccuucuuccaguguca

SEQ ID NO: 82686 - RNA, 22 nt, Human
ggcauccuccauauaggugaau

SEQ ID NO: 82687 - RNA, 22 nt, Human
ggcaucucgcauucuuguuucu

SEQ ID NO: 82688 - RNA, 22 nt, Human
ggcaugcaaaugugggugaccu

SEQ ID NO: 82689 - RNA, 22 nt, Human
ggcaugcaugcaagguggugua

SEQ ID NO: 82690 - RNA, 22 nt, Human
ggcauggccuguaagacggaga

SEQ ID NO: 82691 - RNA, 22 nt, Human
ggcaugggccgaggugccuccu

SEQ ID NO: 82692 - RNA, 18 nt, Human
ggcaugugagugcugagg

SEQ ID NO: 82693 - RNA, 22 nt, Human
ggcauucuaggccaaaaucagg

SEQ ID NO: 82694 - RNA, 22 nt, Human
gucaugccuggcuucuuagaca

SEQ ID NO: 82695 - RNA, 22 nt, Human
gucauuauaccauuauaauugu

SEQ ID NO: 82696 - RNA, 22 nt, Human
gucauuauucugggauucuaua

SEQ ID NO: 82697 - RNA, 22 nt, Human
gucauucaaacuguaucacuug

SEQ ID NO: 82698 - RNA, 22 nt, Human
gucauucuccaagaacccgcug

SEQ ID NO: 82699 - RNA, 22 nt, Human
gucauugacuagaauuccaaag

SEQ ID NO: 82700 - RNA, 22 nt, Human
gucauugcaguggcaaaucaca

SEQ ID NO: 82701 - RNA, 22 nt, Human
gucauuguguggacauggagaa

SEQ ID NO: 82702 - RNA, 22 nt, Human
gucauuuaaaagggaacacaug

SEQ ID NO: 82703 - RNA, 22 nt, Human
gucauuuucuagaauuauuuga

SEQ ID NO: 82704 - RNA, 22 nt, Human
gucauuuugcugcauauuuaga

SEQ ID NO: 82705 - RNA, 22 nt, Human
gucauuuuuuucguaauagugg

SEQ ID NO: 82706 - RNA, 22 nt, Human
guccaaguacauguguguacau

SEQ ID NO: 82707 - RNA, 22 nt, Human
guccaagucuuccuucccaaac

SEQ ID NO: 82708 - RNA, 18 nt, Human
guccacagcccucacagc

SEQ ID NO: 82709 - RNA, 22 nt, Human
guccacauaggaacccagcuuc

SEQ ID NO: 82710 - RNA, 19 nt, Human
guccacuccacucggucuc

SEQ ID NO: 82711 - RNA, 22 nt, Human
guccacucucugccgugccugu

SEQ ID NO: 82712 - RNA, 22 nt, Human
guccacugcugugugcuucacc

SEQ ID NO: 82713 - RNA, 22 nt, Human
guccagaaagggcagugauuug

SEQ ID NO: 82714 - RNA, 22 nt, Human
guccagaaggaggucaaguugg

SEQ ID NO: 82715 - RNA, 22 nt, Human
guccagagagaucuucugauag

SEQ ID NO: 82716 - RNA, 22 nt, Human
guccagagccggaagagugaca

SEQ ID NO: 82717 - RNA, 22 nt, Human
guccagcaggaugcaagugcca

SEQ ID NO: 82718 - RNA, 22 nt, Human
guccagcccucugccuccaggu

SEQ ID NO: 82719 - RNA, 22 nt, Human
guccaggaaucaaaagauggaa

SEQ ID NO: 82720 - RNA, 19 nt, Human
guccaggcauuggguuggu

SEQ ID NO: 82721 - RNA, 22 nt, Human
guccaggcuaagucccuucugc

SEQ ID NO: 82722 - RNA, 22 nt, Human
guccaggcugaccccuagagga

SEQ ID NO: 82723 - RNA, 22 nt, Human
guccaguguguuuaucuuggau

SEQ ID NO: 82724 - RNA, 22 nt, Human
guccauaugucaggugugaauu

SEQ ID NO: 82725 - RNA, 22 nt, Human
guccaucuagaauuuauuucua

SEQ ID NO: 82726 - RNA, 22 nt, Human
guccaucuguaggagggacaca

SEQ ID NO: 82727 - RNA, 22 nt, Human
guccaugcagucaccuccagcu

SEQ ID NO: 82728 - RNA, 19 nt, Human
guccaugcuuagaggggcc

SEQ ID NO: 82729 - RNA, 18 nt, Human
guccauggccuccaccca

SEQ ID NO: 82730 - RNA, 22 nt, Human
gucccagaugucuggaacuccc

SEQ ID NO: 82731 - RNA, 22 nt, Human
gucccaggaacauucuggcuag

SEQ ID NO: 82732 - RNA, 22 nt, Human
gucccaggcuuauguggagcuu

SEQ ID NO: 82733 - RNA, 22 nt, Human
gucccagggaagaaggcagcac

SEQ ID NO: 82734 - RNA, 22 nt, Human
guccccucaaaauucauauguu

SEQ ID NO: 82735 - RNA, 22 nt, Human
gucccucaagguccagucaugg

SEQ ID NO: 82736 - RNA, 22 nt, Human
gucccucacccagaugcuccca

SEQ ID NO: 82737 - RNA, 22 nt, Human
gucccugcccuccugggacuca

SEQ ID NO: 82738 - RNA, 22 nt, Human
gucccugggucuaaggcaguaa

SEQ ID NO: 82739 - RNA, 22 nt, Human
guccguaguggcugaugcuuug

SEQ ID NO: 82740 - RNA, 22 nt, Human
guccuagagggugagcuaggcu

SEQ ID NO: 82741 - RNA, 22 nt, Human
guccucagaagccugcuuagcu

SEQ ID NO: 82742 - RNA, 22 nt, Human
guccucagggaauguggcgggu

SEQ ID NO: 82743 - RNA, 22 nt, Human
guccuccauggucuugaaguaa

SEQ ID NO: 82744 - RNA, 19 nt, Human
guccucucaacaacccggg

SEQ ID NO: 82745 - RNA, 22 nt, Human
guccucugaaagaugaaccaug

SEQ ID NO: 82746 - RNA, 22 nt, Human
guccucuggagguuuuuaggug

SEQ ID NO: 82747 - RNA, 22 nt, Human
guccucuguuuccaucugacuu

SEQ ID NO: 82748 - RNA, 22 nt, Human
guccucuuagccacuuaauuau

SEQ ID NO: 82749 - RNA, 22 nt, Human
guccugacggcugauuggccug

SEQ ID NO: 82750 - RNA, 22 nt, Human
guccugagaccauggccuuagu

SEQ ID NO: 82751 - RNA, 22 nt, Human
guccugagagaggcuccuugcc

SEQ ID NO: 82752 - RNA, 22 nt, Human
guccugagcccucagcacagca

SEQ ID NO: 82753 - RNA, 18 nt, Human
guccugagcucugcugua

SEQ ID NO: 82754 - RNA, 22 nt, Human
guccugcuggcuucaggagauu

SEQ ID NO: 82755 - RNA, 22 nt, Human
guccuggcccacuggcaggcug

SEQ ID NO: 82756 - RNA, 22 nt, Human
guccuggcugucuuauguugaa

SEQ ID NO: 82757 - RNA, 22 nt, Human
guccuggcuguguuugguuucu

SEQ ID NO: 82758 - RNA, 22 nt, Human
guccugggaacuggacagcuaa

SEQ ID NO: 82759 - RNA, 22 nt, Human
guccugggccugcugaggcuga

SEQ ID NO: 82760 - RNA, 22 nt, Human
guccuggggauuauagaguguu

SEQ ID NO: 82761 - RNA, 22 nt, Human
guccugguagggcucugugucu

SEQ ID NO: 82762 - RNA, 22 nt, Human
guccuggugagguagugggagg

SEQ ID NO: 82763 - RNA, 22 nt, Human
guccugucccccaaggcugugg

SEQ ID NO: 82764 - RNA, 22 nt, Human
guccugugaugaguaccaggug

SEQ ID NO: 82765 - RNA, 22 nt, Human
guccugugcaccgugggauguu

SEQ ID NO: 82766 - RNA, 22 nt, Human
guccuguggaaagcuagccgcu

SEQ ID NO: 82767 - RNA, 22 nt, Human
guccuguguacuccugauacuu

SEQ ID NO: 82768 - RNA, 22 nt, Human
guccugugugagugcaccaccu

SEQ ID NO: 82769 - RNA, 22 nt, Human
guccuguugugagcugccuucc

SEQ ID NO: 82770 - RNA, 22 nt, Human
guccuuaaccacuuguguuuau

SEQ ID NO: 82771 - RNA, 22 nt, Human
guccuucaaaggcacgcaguua

SEQ ID NO: 82772 - RNA, 22 nt, Human
guccuucaagguccuuggugug

SEQ ID NO: 82773 - RNA, 22 nt, Human
guccuucaucuggagccugguc

SEQ ID NO: 82774 - RNA, 22 nt, Human
guccuugaguaagucauggugg

SEQ ID NO: 82775 - RNA, 22 nt, Human
guccuugcuugagacaggcagu

SEQ ID NO: 82776 - RNA, 22 nt, Human
guccuuggaaagucuaaucucu

SEQ ID NO: 82777 - RNA, 22 nt, Human
guccuuggagguguggaaucug

SEQ ID NO: 82778 - RNA, 22 nt, Human
guccuuggcacccaugugauuc

SEQ ID NO: 82779 - RNA, 22 nt, Human
guccuugggauagaaagaugaa

SEQ ID NO: 82780 - RNA, 22 nt, Human
guccuuggggucauccauuauc

SEQ ID NO: 82781 - RNA, 22 nt, Human
guccuuugaaggcaaaaggaga

SEQ ID NO: 82782 - RNA, 22 nt, Human
gucuaauuccugcucuuacuca

SEQ ID NO: 82783 - RNA, 22 nt, Human
gucuacaaagcauauaaaagag

SEQ ID NO: 82784 - RNA, 20 nt, Human
gucuacacgggcaguguaga

SEQ ID NO: 82785 - RNA, 22 nt, Human
gucuacuuuugucaucauugca

SEQ ID NO: 82786 - RNA, 22 nt, Human
gucuagaauaucuagaaagauc

SEQ ID NO: 82787 - RNA, 22 nt, Human
guggcuggcccuggacccuaag

SEQ ID NO: 82788 - RNA, 22 nt, Human
guggcuucuucugccagaagga

SEQ ID NO: 82789 - RNA, 22 nt, Human
guggcuucuucuugggagcugc

SEQ ID NO: 82790 - RNA, 22 nt, Human
guggcuuucauuucaggaugug

SEQ ID NO: 82791 - RNA, 22 nt, Human
gugggacagcggggugggacag

SEQ ID NO: 82792 - RNA, 22 nt, Human
gugggacagucagaagugagca

SEQ ID NO: 82793 - RNA, 22 nt, Human
gugggagaagauuuggucaucu

SEQ ID NO: 82794 - RNA, 22 nt, Human
gugggagcccucagggaggugc

SEQ ID NO: 82795 - RNA, 22 nt, Human
gugggaugcaguggugaguggc

SEQ ID NO: 82796 - RNA, 22 nt, Human
gugggaugcuuaggaucuugcc

SEQ ID NO: 82797 - RNA, 22 nt, Human
gugggcaaggucccugccagcu

SEQ ID NO: 82798 - RNA, 22 nt, Human
gugggcagaauugaaucuuuaa

SEQ ID NO: 82799 - RNA, 22 nt, Human
gugggcagacagugcuuugcag

SEQ ID NO: 82800 - RNA, 22 nt, Human
gugggcagacaugauagaagga

SEQ ID NO: 82801 - RNA, 22 nt, Human
gugggcagauuauagaugaugc

SEQ ID NO: 82802 - RNA, 22 nt, Human
gugggcagccuguccggagacc

SEQ ID NO: 82803 - RNA, 22 nt, Human
gugggcaggccccaaagcaggg

SEQ ID NO: 82804 - RNA, 22 nt, Human
gugggcaggguugcuuucuccg

SEQ ID NO: 82805 - RNA, 22 nt, Human
gugggcaucuccuuggaagcca

SEQ ID NO: 82806 - RNA, 22 nt, Human
gugggccacaucccagggcucu

SEQ ID NO: 82807 - RNA, 22 nt, Human
gugggccagcuuuucuccuggg

SEQ ID NO: 82808 - RNA, 22 nt, Human
gugggcugaggggacaccaagg

SEQ ID NO: 82809 - RNA, 22 nt, Human
gugggcugcuuccuccuuccac

SEQ ID NO: 82810 - RNA, 22 nt, Human
gugggcuuuggccucuuucucc

SEQ ID NO: 82811 - RNA, 22 nt, Human
guggggaggccuaagcaaguug

SEQ ID NO: 82812 - RNA, 22 nt, Human
guggggcaguggccugggagca

SEQ ID NO: 82813 - RNA, 22 nt, Human
guggggcuuccuggggcaaguu

SEQ ID NO: 82814 - RNA, 22 nt, Human
gugggggagaugcuuagguccg

SEQ ID NO: 82815 - RNA, 22 nt, Human
gugggggcagugggcuucgagc

SEQ ID NO: 82816 - RNA, 22 nt, Human
gugggggcuggaaaucuugcca

SEQ ID NO: 82817 - RNA, 22 nt, Human
gugggggcuggcucguccugug

SEQ ID NO: 82818 - RNA, 22 nt, Human
guggggggacguuggucacuuu

SEQ ID NO: 82819 - RNA, 22 nt, Human
guggggguuucauuaagacaau

SEQ ID NO: 82820 - RNA, 22 nt, Human
guggggugcagcaguacugugu

SEQ ID NO: 82821 - RNA, 22 nt, Human
gugggguguccagcagcgagcu

SEQ ID NO: 82822 - RNA, 22 nt, Human
gugggugcggggagccgaggcg

SEQ ID NO: 82823 - RNA, 22 nt, Human
guggguggggagcucucuggag

SEQ ID NO: 82824 - RNA, 22 nt, Human
gugguaaaaugugaaauggauu

SEQ ID NO: 82825 - RNA, 22 nt, Human
gugguaaagcugauugaauuga

SEQ ID NO: 82826 - RNA, 22 nt, Human
gugguaauagagcuccaaacua

SEQ ID NO: 82827 - RNA, 22 nt, Human
gugguaucugucucccccacug

SEQ ID NO: 82828 - RNA, 22 nt, Human
guggucagagaugacagugggu

SEQ ID NO: 82829 - RNA, 22 nt, Human
guggucagggagcagagccaug

SEQ ID NO: 82830 - RNA, 22 nt, Human
guggucaggggcugaggugccc

SEQ ID NO: 82831 - RNA, 22 nt, Human
guggucaucauuaguauuauua

SEQ ID NO: 82832 - RNA, 22 nt, Human
guggucaucuggguuuguggca

SEQ ID NO: 82833 - RNA, 22 nt, Human
gugguccaaggaguuuccagca

SEQ ID NO: 82834 - RNA, 22 nt, Human
gugguccucuucuucuguuugg

SEQ ID NO: 82835 - RNA, 22 nt, Human
gugguccuuuagaggauguaau

SEQ ID NO: 82836 - RNA, 22 nt, Human
guggucuuuaaauuugugccug

SEQ ID NO: 82837 - RNA, 22 nt, Human
guggugaagcauugagaaguca

SEQ ID NO: 82838 - RNA, 22 nt, Human
guggugaguucaggcuggggug

SEQ ID NO: 82839 - RNA, 22 nt, Human
gugguggucaccaaauugaggg

SEQ ID NO: 82840 - RNA, 22 nt, Human
gugguguggcuggcagaguuua

SEQ ID NO: 82841 - RNA, 21 nt, Human
gugguucuagagaaacagaau

SEQ ID NO: 82842 - RNA, 22 nt, Human
gugguuugugcauagcuccuau

SEQ ID NO: 82843 - RNA, 22 nt, Human
gugguuuucuccaacccagaac

SEQ ID NO: 82844 - RNA, 22 nt, Human
guguaaaaacauacuauuucua

SEQ ID NO: 82845 - RNA, 22 nt, Human
guguaaacaaugaaaacagagc

SEQ ID NO: 82846 - RNA, 22 nt, Human
guguaaagaugccaggaaucuu

SEQ ID NO: 82847 - RNA, 22 nt, Human
guguaaaucagcuuguguaaua

SEQ ID NO: 82848 - RNA, 22 nt, Human
guguaaauuuguacuuguaaau

SEQ ID NO: 82849 - RNA, 22 nt, Human
guguaaggccccagguucuuua

SEQ ID NO: 82850 - RNA, 22 nt, Human
guguaaguaucuuuguaucuuu

SEQ ID NO: 82851 - RNA, 22 nt, Human
guguaauguugucagcaucauc

SEQ ID NO: 82852 - RNA, 19 nt, Human
guguacacuuggccauggu

SEQ ID NO: 82853 - RNA, 22 nt, Human
guguacauauugagucugcuga

SEQ ID NO: 82854 - RNA, 22 nt, Human
guguagauaguuuagauuucaa

SEQ ID NO: 82855 - RNA, 22 nt, Human
guguauaacccaaauaugcugc

SEQ ID NO: 82856 - RNA, 22 nt, Human
guguaucaacauguuuuuugug

SEQ ID NO: 82857 - RNA, 22 nt, Human
guguaucucauguucuucucug

SEQ ID NO: 82858 - RNA, 22 nt, Human
guguaugaggggagaauguuuu

SEQ ID NO: 82859 - RNA, 22 nt, Human
guguaugcagaaacaugcaaag

SEQ ID NO: 82860 - RNA, 22 nt, Human
guguaugcuuagccagagauuu

SEQ ID NO: 82861 - RNA, 22 nt, Human
guguauguucuacuuaauauua

SEQ ID NO: 82862 - RNA, 22 nt, Human
guguauugcacauccuguagcc

SEQ ID NO: 82863 - RNA, 22 nt, Human
gugucagaaacaggaaggggaa

SEQ ID NO: 82864 - RNA, 22 nt, Human
gugucagcuaauuugggagcuc

SEQ ID NO: 82865 - RNA, 19 nt, Human
gugucaggaugugcagggg

SEQ ID NO: 82866 - RNA, 22 nt, Human
gugucaugggagucagaaguga

SEQ ID NO: 82867 - RNA, 21 nt, Human
gugucaugguugacuuuggca

SEQ ID NO: 82868 - RNA, 22 nt, Human
guguccagagaaacucacagcu

SEQ ID NO: 82869 - RNA, 22 nt, Human
guguccagagccgggcugaaug

SEQ ID NO: 82870 - RNA, 22 nt, Human
guguccagccugcacagggugc

SEQ ID NO: 82871 - RNA, 22 nt, Human
guguccaggggguaucccagcu

SEQ ID NO: 82872 - RNA, 19 nt, Human
guguccauggagcauggag

SEQ ID NO: 82873 - RNA, 22 nt, Human
guguccauucacugcaacacuu

SEQ ID NO: 82874 - RNA, 22 nt, Human
gugucccaaucuacuuuucccu

SEQ ID NO: 82875 - RNA, 22 nt, Human
gugucccagcagcacauuggcu

SEQ ID NO: 82876 - RNA, 22 nt, Human
gugucccagccccacaggccug

SEQ ID NO: 82877 - RNA, 22 nt, Human
guguccugcaggccaggaaugg

SEQ ID NO: 82878 - RNA, 22 nt, Human
guguccugcauuggcucugccc

SEQ ID NO: 82879 - RNA, 22 nt, Human
guguccugccacccugggcuuu

SEQ ID NO: 82880 - RNA, 22 nt, Human
guguccugggcauuaggcuuag

SEQ ID NO: 82881 - RNA, 22 nt, Human
guguccuuauuucugucucuca

SEQ ID NO: 82882 - RNA, 22 nt, Human
guguccuucauuggaaucucuc

SEQ ID NO: 82883 - RNA, 22 nt, Human
guguccuugcaguuugaagaaa

SEQ ID NO: 82884 - RNA, 22 nt, Human
guguccuuuccgggccuggagg

SEQ ID NO: 82885 - RNA, 22 nt, Human
guguccuuuuaugugacugguu

SEQ ID NO: 82886 - RNA, 22 nt, Human
gugucugcacauaggaucucaa

SEQ ID NO: 82887 - RNA, 22 nt, Human
gugucugcuuggucaucuuuca

SEQ ID NO: 82888 - RNA, 22 nt, Human
gugucugcuuucagcuaguagg

SEQ ID NO: 82889 - RNA, 22 nt, Human
gugucuggaacgggugguacuc

SEQ ID NO: 82890 - RNA, 22 nt, Human
gugugaaagcuuguccucugua

SEQ ID NO: 82891 - RNA, 22 nt, Human
gugugaaaguuccuaagacuau

SEQ ID NO: 82892 - RNA, 20 nt, Human
gugugaagcccucaggagga

SEQ ID NO: 82893 - RNA, 22 nt, Human
gugugagcagaaaccaugagua

SEQ ID NO: 82894 - RNA, 22 nt, Human
gugugagcucagccuugggaga

SEQ ID NO: 82895 - RNA, 22 nt, Human
gugugauaacagggcaugacgg

SEQ ID NO: 82896 - RNA, 22 nt, Human
gugugcaagggcauguacauug

SEQ ID NO: 82897 - RNA, 22 nt, Human
gugugcagggcugccugugccg

SEQ ID NO: 82898 - RNA, 22 nt, Human
gucccuggaauggacucugcgc

SEQ ID NO: 82899 - RNA, 22 nt, Human
gucccuggggaaucagcuggag

SEQ ID NO: 82900 - RNA, 22 nt, Human
gucccuggguagcucaguggcu

SEQ ID NO: 82901 - RNA, 22 nt, Human
guccuagagauccgggagggga

SEQ ID NO: 82902 - RNA, 22 nt, Human
guccuagugccuggaagcuggg

SEQ ID NO: 82903 - RNA, 22 nt, Human
guccuauauucuuuuaaaauuu

SEQ ID NO: 82904 - RNA, 22 nt, Human
guccucagcaccagaacuaggg

SEQ ID NO: 82905 - RNA, 22 nt, Human
guccucaguaagagggccucug

SEQ ID NO: 82906 - RNA, 22 nt, Human
guccucagucaguuuggugggg

SEQ ID NO: 82907 - RNA, 22 nt, Human
guccucugacucagccuuggga

SEQ ID NO: 82908 - RNA, 23 nt, Human
guccucuggagagaaaggcagua

SEQ ID NO: 82909 - RNA, 22 nt, Human
guccucugggcuuugagcaguc

SEQ ID NO: 82910 - RNA, 22 nt, Human
guccucuguguaggcugcagac

SEQ ID NO: 82911 - RNA, 22 nt, Human
guccucuugcucauuggggcag

SEQ ID NO: 82912 - RNA, 22 nt, Human
ucucaaauguaaagcaugauuu

SEQ ID NO: 82913 - RNA, 22 nt, Human
ucucaaauuugcuggaccagua

SEQ ID NO: 82914 - RNA, 22 nt, Human
ucucaacagugaaauguguuug

SEQ ID NO: 82915 - RNA, 22 nt, Human
ucucaacuaauggugcaagaug

SEQ ID NO: 82916 - RNA, 22 nt, Human
ucucaagagggaggcaaucaug

SEQ ID NO: 82917 - RNA, 22 nt, Human
ucucaaggaaaagugauggcau

SEQ ID NO: 82918 - RNA, 22 nt, Human
ucucaaguuuucucauaaucuc

SEQ ID NO: 82919 - RNA, 19 nt, Human
ucucacaagcaacauuguu

SEQ ID NO: 82920 - RNA, 22 nt, Human
ucucacacaacauguuacuuug

SEQ ID NO: 82921 - RNA, 22 nt, Human
ucucacagaggcuugggcucau

SEQ ID NO: 82922 - RNA, 22 nt, Human
ucucacaucugcccugugcugg

SEQ ID NO: 82923 - RNA, 22 nt, Human
ucucacauuuuaaaaggacaua

SEQ ID NO: 82924 - RNA, 22 nt, Human
ucucacucauuuccuaggucuu

SEQ ID NO: 82925 - RNA, 22 nt, Human
ucucacugcaaauauuauguau

SEQ ID NO: 82926 - RNA, 21 nt, Human
ucucacugucugcuuuguuua

SEQ ID NO: 82927 - RNA, 22 nt, Human
ucucacuuuccagacuuuucaa

SEQ ID NO: 82928 - RNA, 22 nt, Human
ucucacuuuguugcccagacuu

SEQ ID NO: 82929 - RNA, 22 nt, Human
ucucagaaaagagcuucagaaa

SEQ ID NO: 82930 - RNA, 22 nt, Human
ucucagaacuuuauauguauca

SEQ ID NO: 82931 - RNA, 22 nt, Human
ucucagaauuguguccacuggg

SEQ ID NO: 82932 - RNA, 22 nt, Human
ucucagacauguaaucucuacc

SEQ ID NO: 82933 - RNA, 22 nt, Human
ucucagagaccugaacucccug

SEQ ID NO: 82934 - RNA, 22 nt, Human
ucucagagagaugaaacuucca

SEQ ID NO: 82935 - RNA, 22 nt, Human
ucucagagauucagggagaagu

SEQ ID NO: 82936 - RNA, 22 nt, Human
ucucagagcucacaccuccugg

SEQ ID NO: 82937 - RNA, 22 nt, Human
ucucagaggcccgacguucucc

SEQ ID NO: 82938 - RNA, 22 nt, Human
ucucagagggaaacaugaguga

SEQ ID NO: 82939 - RNA, 22 nt, Human
ucucagagugguggucccucug

SEQ ID NO: 82940 - RNA, 22 nt, Human
ucucagaugcccuugcaucacc

SEQ ID NO: 82941 - RNA, 22 nt, Human
ucucaggaagugauauugagac

SEQ ID NO: 82942 - RNA, 22 nt, Human
ucucaggaauagaguggcagca

SEQ ID NO: 82943 - RNA, 17 nt, Human
ucucaggcacguguggc

SEQ ID NO: 82944 - RNA, 22 nt, Human
ucucaggcccacuguguugaaa

SEQ ID NO: 82945 - RNA, 22 nt, Human
ucucaggcucuuggaaccuguu

SEQ ID NO: 82946 - RNA, 22 nt, Human
ucucaggcuuccuggugcugug

SEQ ID NO: 82947 - RNA, 22 nt, Human
ucucagggaccaugaugaugac

SEQ ID NO: 82948 - RNA, 22 nt, Human
ucucagggcagcaaggaagcau

SEQ ID NO: 82949 - RNA, 22 nt, Human
ucucaggguuuccugggggcug

SEQ ID NO: 82950 - RNA, 22 nt, Human
ucucaggucucaugccaggccu

SEQ ID NO: 82951 - RNA, 22 nt, Human
ucucagguuucaagacaggaaa

SEQ ID NO: 82952 - RNA, 22 nt, Human
ucucagucagccuugauguccc

SEQ ID NO: 82953 - RNA, 22 nt, Human
ucucagucaguuuggacugugu

SEQ ID NO: 82954 - RNA, 22 nt, Human
ucucaguccaaaugagagguug

SEQ ID NO: 82955 - RNA, 22 nt, Human
ucucagucccauugaagaggug

SEQ ID NO: 82956 - RNA, 22 nt, Human
ucucagugagcuuuucuauguu

SEQ ID NO: 82957 - RNA, 22 nt, Human
ucucagugauggcccauuugga

SEQ ID NO: 82958 - RNA, 22 nt, Human
ucucagugcagagaggcuaucu

SEQ ID NO: 82959 - RNA, 19 nt, Human
ucucagugccgcugaccgc

SEQ ID NO: 82960 - RNA, 22 nt, Human
ucucaguggguuaaaagagaag

SEQ ID NO: 82961 - RNA, 22 nt, Human
ucucaguguggugcuuaggaua

SEQ ID NO: 82962 - RNA, 22 nt, Human
ucucaguguuguucugcagaug

SEQ ID NO: 82963 - RNA, 22 nt, Human
ucucauaauuagguaagucaga

SEQ ID NO: 82964 - RNA, 22 nt, Human
ucucaucauuccuucaaagccc

SEQ ID NO: 82965 - RNA, 22 nt, Human
ucucaucuccauuauagcauca

SEQ ID NO: 82966 - RNA, 22 nt, Human
ucucaucuucauugucucccau

SEQ ID NO: 82967 - RNA, 22 nt, Human
ucucaugaaaggucucuccugg

SEQ ID NO: 82968 - RNA, 22 nt, Human
ucucauguauugcccuggugug

SEQ ID NO: 82969 - RNA, 22 nt, Human
ucucauguuuuaccuguccuca

SEQ ID NO: 82970 - RNA, 22 nt, Human
ucucauucauccaaggauuuau

SEQ ID NO: 82971 - RNA, 22 nt, Human
ucucauugcacaaugcagagug

SEQ ID NO: 82972 - RNA, 22 nt, Human
ucucauugguaugauguguaga

SEQ ID NO: 82973 - RNA, 22 nt, Human
ucuccaaaucaaucaauaugaa

SEQ ID NO: 82974 - RNA, 22 nt, Human
ucuccaagaaaagaucucagcu

SEQ ID NO: 82975 - RNA, 22 nt, Human
ucuccaaggcccuacucuauuu

SEQ ID NO: 82976 - RNA, 22 nt, Human
ucuccacaagcuuucuccuuuu

SEQ ID NO: 82977 - RNA, 22 nt, Human
ucuccacagucccaccucgcuu

SEQ ID NO: 82978 - RNA, 22 nt, Human
ucuccagaguaaccuuggagca

SEQ ID NO: 82979 - RNA, 22 nt, Human
ucuccaggaaagacacuggacu

SEQ ID NO: 82980 - RNA, 22 nt, Human
ucuccaggagaaauaugaagga

SEQ ID NO: 82981 - RNA, 22 nt, Human
ucuccaggcccacugauuuaua

SEQ ID NO: 82982 - RNA, 22 nt, Human
ucuccaggcuuaaucucagcuu

SEQ ID NO: 82983 - RNA, 22 nt, Human
ucuccagggagguagcccagug

SEQ ID NO: 82984 - RNA, 22 nt, Human
ucuccagguggcuugggcuucu

SEQ ID NO: 82985 - RNA, 22 nt, Human
ucuccagguggggucaccuuuu

SEQ ID NO: 82986 - RNA, 23 nt, Human
ucuccagugucucuucauugagu

SEQ ID NO: 82987 - RNA, 22 nt, Human
ucuccauaggcaguucauaaca

SEQ ID NO: 82988 - RNA, 22 nt, Human
ucuccaucugucauucuugucc

SEQ ID NO: 82989 - RNA, 22 nt, Human
ucuccauuuuauagauaaugaa

SEQ ID NO: 82990 - RNA, 22 nt, Human
ucucccacagucucccauggcu

SEQ ID NO: 82991 - RNA, 22 nt, Human
ucucccacugcaagcccaggcu

SEQ ID NO: 82992 - RNA, 22 nt, Human
ucucccagaaguccucaguaca

SEQ ID NO: 82993 - RNA, 19 nt, Human
ucucccagcugagaagggc

SEQ ID NO: 82994 - RNA, 20 nt, Human
ucucccaggcucagggaaga

SEQ ID NO: 82995 - RNA, 22 nt, Human
ucucccaggcuggagugcagug

SEQ ID NO: 82996 - RNA, 22 nt, Human
ucucccaguggugcagaaagca

SEQ ID NO: 82997 - RNA, 19 nt, Human
ucucccaugccugugucua

SEQ ID NO: 82998 - RNA, 22 nt, Human
ucuccccagcugagcugcccuu

SEQ ID NO: 82999 - RNA, 22 nt, Human
ucuccccuacucuaaaucugca

SEQ ID NO: 83000 - RNA, 19 nt, Human
ucucccggcacuccugccc

SEQ ID NO: 83001 - RNA, 22 nt, Human
ucucccucauuccugcuuccau

SEQ ID NO: 83002 - RNA, 22 nt, Human
ucucccuggagcccugaagcau

SEQ ID NO: 83003 - RNA, 22 nt, Human
ucucccuuggucacagauuccu

SEQ ID NO: 83004 - RNA, 22 nt, Human
ucuccggguggcggcgaaggga

SEQ ID NO: 83005 - RNA, 22 nt, Human
ucuccuaauuaaaugcucuuau

SEQ ID NO: 83006 - RNA, 22 nt, Human
ucuccuccagaggcugugggga

SEQ ID NO: 83007 - RNA, 21 nt, Human
ucuccucccggggagaggccg

SEQ ID NO: 83008 - RNA, 23 nt, Human
ucuccuccuagauacagucaugg

SEQ ID NO: 83009 - RNA, 22 nt, Human
ucuccucucuuaccugguacaa

SEQ ID NO: 83010 - RNA, 22 nt, Human
ucuccugaagaccaugugcacu

SEQ ID NO: 83011 - RNA, 22 nt, Human
gugugcaggggcuugguggagc

SEQ ID NO: 83012 - RNA, 22 nt, Human
gugugcaguagagaaagagcag

SEQ ID NO: 83013 - RNA, 22 nt, Human
gugugcagugagcaaaagaucu

SEQ ID NO: 83014 - RNA, 22 nt, Human
gugugcaucucacccuuccccg

SEQ ID NO: 83015 - RNA, 22 nt, Human
gugugcaugaggauaggaauaa

SEQ ID NO: 83016 - RNA, 22 nt, Human
gugugcauggagggggcaguga

SEQ ID NO: 83017 - RNA, 22 nt, Human
gugugcaugugcuugcacagau

SEQ ID NO: 83018 - RNA, 22 nt, Human
gugugcauguggaagcauguau

SEQ ID NO: 83019 - RNA, 22 nt, Human
gugugccaagagauaguugcug

SEQ ID NO: 83020 - RNA, 22 nt, Human
gugugccaccagucaaggugaa

SEQ ID NO: 83021 - RNA, 22 nt, Human
gucucauaugauauaaaugcag

SEQ ID NO: 83022 - RNA, 22 nt, Human
gucucauugguucugccagagu

SEQ ID NO: 83023 - RNA, 22 nt, Human
gucuccacagcccagcugccac

SEQ ID NO: 83024 - RNA, 22 nt, Human
gucuccagagguuacauccugu

SEQ ID NO: 83025 - RNA, 22 nt, Human
gucuccagccauucucugauca

SEQ ID NO: 83026 - RNA, 22 nt, Human
gucuccagggcugcuggcgccu

SEQ ID NO: 83027 - RNA, 22 nt, Human
gucuccuaaaccauccugguac

SEQ ID NO: 83028 - RNA, 22 nt, Human
gucuccuccauggagaugguau

SEQ ID NO: 83029 - RNA, 22 nt, Human
gucuccuggcugcagcuaagac

SEQ ID NO: 83030 - RNA, 22 nt, Human
gucucuaucauagcugaacccu

SEQ ID NO: 83031 - RNA, 22 nt, Human
gucucucugcuaggccuccagu

SEQ ID NO: 83032 - RNA, 22 nt, Human
gucucugaagucaguuuuucua

SEQ ID NO: 83033 - RNA, 19 nt, Human
gucucugcuccagggucuc

SEQ ID NO: 83034 - RNA, 22 nt, Human
gucucugugcccccauuuccgu

SEQ ID NO: 83035 - RNA, 22 nt, Human
gucucuguggcuggcuccuucc

SEQ ID NO: 83036 - RNA, 22 nt, Human
gucucuguuauuuccaggguca

SEQ ID NO: 83037 - RNA, 22 nt, Human
gucucuuuuauggugaguugau

SEQ ID NO: 83038 - RNA, 22 nt, Human
gucugaaaaugcccuacgauug

SEQ ID NO: 83039 - RNA, 22 nt, Human
gucugaagccagugguaguccg

SEQ ID NO: 83040 - RNA, 22 nt, Human
gucugaaugaugagugggacuc

SEQ ID NO: 83041 - RNA, 22 nt, Human
gucugagaaucuugcauaucau

SEQ ID NO: 83042 - RNA, 22 nt, Human
gucugagggguuucccaggaca

SEQ ID NO: 83043 - RNA, 22 nt, Human
gucugagggucaugggucucac

SEQ ID NO: 83044 - RNA, 22 nt, Human
gucugcagacaacuuagaagca

SEQ ID NO: 83045 - RNA, 20 nt, Human
gucugcaguaagagggaaua

SEQ ID NO: 83046 - RNA, 22 nt, Human
gucugcauacaggacaugcaca

SEQ ID NO: 83047 - RNA, 20 nt, Human
gucugcccaggccaccacgg

SEQ ID NO: 83048 - RNA, 22 nt, Human
gucugcccggccuuccuccacc

SEQ ID NO: 83049 - RNA, 22 nt, Human
gucugcccucacaugcacucuu

SEQ ID NO: 83050 - RNA, 22 nt, Human
gucugcccuggggcaucaguuu

SEQ ID NO: 83051 - RNA, 22 nt, Human
gucugccugcuaguggcugccu

SEQ ID NO: 83052 - RNA, 22 nt, Human
gucugccugggacgcugggagu

SEQ ID NO: 83053 - RNA, 18 nt, Human
gucugccuucucccuucc

SEQ ID NO: 83054 - RNA, 22 nt, Human
gucugcugacagagcauggacc

SEQ ID NO: 83055 - RNA, 22 nt, Human
gucugcugcagagcauggcuuu

SEQ ID NO: 83056 - RNA, 22 nt, Human
gucugcugcuucuguugaagca

SEQ ID NO: 83057 - RNA, 22 nt, Human
gucugcuggugccuggccugcg

SEQ ID NO: 83058 - RNA, 22 nt, Human
gucugcugugccuuggggaaaa

SEQ ID NO: 83059 - RNA, 22 nt, Human
gucugcuuucugggaacucuuu

SEQ ID NO: 83060 - RNA, 22 nt, Human
gucugcuuugucuuucaugaua

SEQ ID NO: 83061 - RNA, 22 nt, Human
gucuggaaagagcugagguuca

SEQ ID NO: 83062 - RNA, 22 nt, Human
gucuggaaaggggcuuuuaucu

SEQ ID NO: 83063 - RNA, 22 nt, Human
gucuggaagaaccugugccagu

SEQ ID NO: 83064 - RNA, 22 nt, Human
gucuggaagaacuagggauguu

SEQ ID NO: 83065 - RNA, 22 nt, Human
gucuggaaggaggagauggagc

SEQ ID NO: 83066 - RNA, 22 nt, Human
gucuggaagggagugcauuuuc

SEQ ID NO: 83067 - RNA, 22 nt, Human
gucuggagccacugcugcugcu

SEQ ID NO: 83068 - RNA, 22 nt, Human
gucuggaggaaaagguuaaaug

SEQ ID NO: 83069 - RNA, 22 nt, Human
gucuggaggcccgucagcccua

SEQ ID NO: 83070 - RNA, 21 nt, Human
gucuggaugcccuucucuugg

SEQ ID NO: 83071 - RNA, 22 nt, Human
gucuggcucccacucuuacaaa

SEQ ID NO: 83072 - RNA, 22 nt, Human
gucuggcucuggaaggcaaagg

SEQ ID NO: 83073 - RNA, 22 nt, Human
gucuggcuguccagcuuaucua

SEQ ID NO: 83074 - RNA, 22 nt, Human
gucuggcuuugcucagaugcug

SEQ ID NO: 83075 - RNA, 22 nt, Human
gucugggauugggguaaagaag

SEQ ID NO: 83076 - RNA, 22 nt, Human
gucuggggaagucagggcauca

SEQ ID NO: 83077 - RNA, 22 nt, Human
gucuggggcagcaaggcgcgcg

SEQ ID NO: 83078 - RNA, 22 nt, Human
gucuggggguccgggugccugc

SEQ ID NO: 83079 - RNA, 22 nt, Human
gucugggguccuuuuggcuuua

SEQ ID NO: 83080 - RNA, 22 nt, Human
gucugggucuccacagucagca

SEQ ID NO: 83081 - RNA, 22 nt, Human
gucuggguuaaguccugauaau

SEQ ID NO: 83082 - RNA, 22 nt, Human
gucuggguuucaugggcacugg

SEQ ID NO: 83083 - RNA, 22 nt, Human
gucuguacccacguccugcuag

SEQ ID NO: 83084 - RNA, 22 nt, Human
gucuguagaugagucuuaagaa

SEQ ID NO: 83085 - RNA, 22 nt, Human
gucugucaucugagauggagug

SEQ ID NO: 83086 - RNA, 22 nt, Human
gucuguccaucagcaaaggcuu

SEQ ID NO: 83087 - RNA, 22 nt, Human
gucugucccaauagccaacagg

SEQ ID NO: 83088 - RNA, 22 nt, Human
gucugugggccaaauacagccc

SEQ ID NO: 83089 - RNA, 22 nt, Human
gucuguuaccuccaagaccauu

SEQ ID NO: 83090 - RNA, 22 nt, Human
gucuguuagugauaacuguuuu

SEQ ID NO: 83091 - RNA, 22 nt, Human
gucuuaaaaucagaggauauag

SEQ ID NO: 83092 - RNA, 22 nt, Human
gucuuauuaaaaaucuaauccc

SEQ ID NO: 83093 - RNA, 22 nt, Human
gucuuauuaaaaugcaguuucu

SEQ ID NO: 83094 - RNA, 22 nt, Human
gucuuauuagguuaacccugcu

SEQ ID NO: 83095 - RNA, 22 nt, Human
gucuucaauagagccucaauuu

SEQ ID NO: 83096 - RNA, 22 nt, Human
gucuucauucucauagcccugg

SEQ ID NO: 83097 - RNA, 22 nt, Human
gucuucugaucugguuagccau

SEQ ID NO: 83098 - RNA, 22 nt, Human
gucuucugcaacugcaccugcc

SEQ ID NO: 83099 - RNA, 22 nt, Human
gucuucuguaagaugagguccc

SEQ ID NO: 83100 - RNA, 22 nt, Human
gucuucuuguguugccugucuu

SEQ ID NO: 83101 - RNA, 22 nt, Human
gucuucuuuucagucugcuugu

SEQ ID NO: 83102 - RNA, 22 nt, Human
gucuugcacuuaccuaagaacu

SEQ ID NO: 83103 - RNA, 22 nt, Human
gucuuguccauuccaugcugcu

SEQ ID NO: 83104 - RNA, 22 nt, Human
gucuuguuaagauuuuggaaua

SEQ ID NO: 83105 - RNA, 22 nt, Human
gucuuguuggaguucuugcagc

SEQ ID NO: 83106 - RNA, 22 nt, Human
gucuuuaguugaaacauguggu

SEQ ID NO: 83107 - RNA, 16 nt, Human
gucuuuauucacuuag

SEQ ID NO: 83108 - RNA, 22 nt, Human
gucuuucauggauauucaguuu

SEQ ID NO: 83109 - RNA, 22 nt, Human
gucuuucuaugaugaacuguug

SEQ ID NO: 83110 - RNA, 22 nt, Human
gucuuucuucagagcuuggacu

SEQ ID NO: 83111 - RNA, 22 nt, Human
gucuuugccacacuucuguaca

SEQ ID NO: 83112 - RNA, 22 nt, Human
gucuuugcugucuuugcucuca

SEQ ID NO: 83113 - RNA, 22 nt, Human
gucuuuggaggcacuguugagu

SEQ ID NO: 83114 - RNA, 22 nt, Human
gucuuugugguaguccucagcc

SEQ ID NO: 83115 - RNA, 21 nt, Human
gucuuuuaagugaagagaggc

SEQ ID NO: 83116 - RNA, 21 nt, Human
gucuuuuuaauugcgauuucc

SEQ ID NO: 83117 - RNA, 22 nt, Human
gucuuuuuauuauagaguggag

SEQ ID NO: 83118 - RNA, 22 nt, Human
gucuuuuucuacgauagcgccu

SEQ ID NO: 83119 - RNA, 22 nt, Human
gugaaaaaugauuuguuaacug

SEQ ID NO: 83120 - RNA, 22 nt, Human
gugaaaagagagccugugucag

SEQ ID NO: 83121 - RNA, 22 nt, Human
gugaaaagcaacauuguggacc

SEQ ID NO: 83122 - RNA, 22 nt, Human
gugaaaguaagaaaguaggacu

SEQ ID NO: 83123 - RNA, 22 nt, Human
gugaaauauuuaacguccaggu

SEQ ID NO: 83124 - RNA, 22 nt, Human
guuauuuauaagguguaacucc

SEQ ID NO: 83125 - RNA, 21 nt, Human
guuauuuuaagugagcuuugc

SEQ ID NO: 83126 - RNA, 19 nt, Human
guucaaacacugauucagc

SEQ ID NO: 83127 - RNA, 22 nt, Human
guucaaccaugauuaggaacug

SEQ ID NO: 83128 - RNA, 22 nt, Human
guucaaccccuugaugguacag

SEQ ID NO: 83129 - RNA, 18 nt, Human
guucaaggucaagagaga

SEQ ID NO: 83130 - RNA, 22 nt, Human
gugaaccucugaaaggcaguga

SEQ ID NO: 83131 - RNA, 22 nt, Human
gugaacucagucucucuugcua

SEQ ID NO: 83132 - RNA, 22 nt, Human
gugaacucugacucucaugccu

SEQ ID NO: 83133 - RNA, 22 nt, Human
gugaagaaggcaauacaaagaa

SEQ ID NO: 83134 - RNA, 21 nt, Human
gugaagacuuugccuuuaaga

SEQ ID NO: 83135 - RNA, 22 nt, Human
gugaagauaaggaugcugcagu

SEQ ID NO: 83136 - RNA, 22 nt, Human
gugaagcauaugcuucucugcc

SEQ ID NO: 83137 - RNA, 22 nt, Human
gugaagccacagagccacgccg

SEQ ID NO: 83138 - RNA, 22 nt, Human
gugaagccucggaaccaagcuc

SEQ ID NO: 83139 - RNA, 18 nt, Human
gugaagcuuuauugaaug

SEQ ID NO: 83140 - RNA, 22 nt, Human
gugaaggaccaauaugacucau

SEQ ID NO: 83141 - RNA, 22 nt, Human
gugaaggacuagcauggagggc

SEQ ID NO: 83142 - RNA, 22 nt, Human
gugaaggcaaugauaagaguga

SEQ ID NO: 83143 - RNA, 22 nt, Human
gugaaggccaguaggguccugg

SEQ ID NO: 83144 - RNA, 20 nt, Human
gugaagggagucaggugugc

SEQ ID NO: 83145 - RNA, 22 nt, Human
gugaaguucaagcuugccaucu

SEQ ID NO: 83146 - RNA, 22 nt, Human
gugaauaauauuguuuauaaaa

SEQ ID NO: 83147 - RNA, 22 nt, Human
gugaaugaaaggaugauucuuu

SEQ ID NO: 83148 - RNA, 22 nt, Human
gugaaugauagcuucucuuugg

SEQ ID NO: 83149 - RNA, 17 nt, Human
gugaauggcauagucgg

SEQ ID NO: 83150 - RNA, 22 nt, Human
gugaauggggcaggaaggaugg

SEQ ID NO: 83151 - RNA, 22 nt, Human
gugaaugguugugaacaucuuu

SEQ ID NO: 83152 - RNA, 22 nt, Human
gugaauuaaauauagccagguc

SEQ ID NO: 83153 - RNA, 22 nt, Human
gugaauuaggacaaaagggcuu

SEQ ID NO: 83154 - RNA, 22 nt, Human
gugaauuaggcuauggcagagg

SEQ ID NO: 83155 - RNA, 22 nt, Human
gugacaaaggucaagcuuuuga

SEQ ID NO: 83156 - RNA, 22 nt, Human
gugacagagugagaccuugucu

SEQ ID NO: 83157 - RNA, 22 nt, Human
gugacagugacagcuagauagu

SEQ ID NO: 83158 - RNA, 22 nt, Human
gugacauuuacgaaucuuaucc

SEQ ID NO: 83159 - RNA, 22 nt, Human
gugaccagagcgggagauuggg

SEQ ID NO: 83160 - RNA, 22 nt, Human
gugaccagcccauagagaggcg

SEQ ID NO: 83161 - RNA, 22 nt, Human
gugaccaguuggcagggguggg

SEQ ID NO: 83162 - RNA, 22 nt, Human
gugacccagguagguaagcaau

SEQ ID NO: 83163 - RNA, 22 nt, Human
gugacguuuaauagugacaugg

SEQ ID NO: 83164 - RNA, 22 nt, Human
gugacugugaacuguuucugau

SEQ ID NO: 83165 - RNA, 22 nt, Human
gugacugugagucgcugugaca

SEQ ID NO: 83166 - RNA, 22 nt, Human
gugacugugaucuuauuugcaa

SEQ ID NO: 83167 - RNA, 22 nt, Human
gugagaaaugacaaaugugucg

SEQ ID NO: 83168 - RNA, 22 nt, Human
gugagaagauaaguauugcaaa

SEQ ID NO: 83169 - RNA, 22 nt, Human
gugagaaugagauuggaaugua

SEQ ID NO: 83170 - RNA, 22 nt, Human
gugagacaauuccucaguagac

SEQ ID NO: 83171 - RNA, 19 nt, Human
gugagacccugcauagggc

SEQ ID NO: 83172 - RNA, 22 nt, Human
gugagagaauuugaguuaaauu

SEQ ID NO: 83173 - RNA, 22 nt, Human
gugagagaugcuuucuuaacgc

SEQ ID NO: 83174 - RNA, 22 nt, Human
gugagagauugauuguagcggc

SEQ ID NO: 83175 - RNA, 22 nt, Human
gugagagcugcuccagaucucu

SEQ ID NO: 83176 - RNA, 22 nt, Human
gugagaguaccaccucaacauc

SEQ ID NO: 83177 - RNA, 22 nt, Human
gugagcaaagguuaaacauuua

SEQ ID NO: 83178 - RNA, 22 nt, Human
gugagcagagaucgcgugauug

SEQ ID NO: 83179 - RNA, 22 nt, Human
gugagcagccucaccugagggu

SEQ ID NO: 83180 - RNA, 22 nt, Human
gugagcuguuggaguggcagag

SEQ ID NO: 83181 - RNA, 22 nt, Human
gugagcuguuuuggacccaucu

SEQ ID NO: 83182 - RNA, 22 nt, Human
gugaggagcucuuugacucacg

SEQ ID NO: 83183 - RNA, 22 nt, Human
gugaggagcugacacuggggug

SEQ ID NO: 83184 - RNA, 22 nt, Human
gugaggagucugaagcacauaa

SEQ ID NO: 83185 - RNA, 19 nt, Human
gugaggauacugcucagag

SEQ ID NO: 83186 - RNA, 22 nt, Human
gugaggcaagggcauacuaggc

SEQ ID NO: 83187 - RNA, 22 nt, Human
gugaggcaggcauucuccuuuc

SEQ ID NO: 83188 - RNA, 22 nt, Human
gugaggccgcacgccccggagu

SEQ ID NO: 83189 - RNA, 22 nt, Human
gugagggagguagauuucauca

SEQ ID NO: 83190 - RNA, 22 nt, Human
gugagggguggcugagcaguuu

SEQ ID NO: 83191 - RNA, 22 nt, Human
gugagguaaagcacagaaauag

SEQ ID NO: 83192 - RNA, 22 nt, Human
gugagguccauguuaauggguu

SEQ ID NO: 83193 - RNA, 22 nt, Human
gugagguccucccugcugggag

SEQ ID NO: 83194 - RNA, 22 nt, Human
gugaggugggcugggcucuaug

SEQ ID NO: 83195 - RNA, 22 nt, Human
gugagucaauguauugcagcaa

SEQ ID NO: 83196 - RNA, 22 nt, Human
gugagugccaggugaaguaugu

SEQ ID NO: 83197 - RNA, 22 nt, Human
gugauaauugcagagaaaggag

SEQ ID NO: 83198 - RNA, 22 nt, Human
gugauacagguguucuggauau

SEQ ID NO: 83199 - RNA, 22 nt, Human
gugauaucuuacaauucucuuu

SEQ ID NO: 83200 - RNA, 22 nt, Human
gugauauuucaagaguggggca

SEQ ID NO: 83201 - RNA, 22 nt, Human
gugauccgaugucagucgcaga

SEQ ID NO: 83202 - RNA, 22 nt, Human
gugaugucacacccuugauaga

SEQ ID NO: 83203 - RNA, 22 nt, Human
gugaugucagcaagaauaggaa

SEQ ID NO: 83204 - RNA, 22 nt, Human
gugaugucuuguacauaugauu

SEQ ID NO: 83205 - RNA, 22 nt, Human
gugauuaagcauuucagaauuu

SEQ ID NO: 83206 - RNA, 22 nt, Human
gugauucauucgauuaguauuu

SEQ ID NO: 83207 - RNA, 22 nt, Human
gugauuccuauuaguacaugca

SEQ ID NO: 83208 - RNA, 22 nt, Human
gugauucucaaauugugauauc

SEQ ID NO: 83209 - RNA, 21 nt, Human
gugauucucugaguuuugggg

SEQ ID NO: 83210 - RNA, 22 nt, Human
gugauucugcacgucauuccug

SEQ ID NO: 83211 - RNA, 22 nt, Human
gugauucuguucuggugcugcc

SEQ ID NO: 83212 - RNA, 22 nt, Human
gugauucuuccugcuggcauac

SEQ ID NO: 83213 - RNA, 22 nt, Human
gugauucuuugaucuaugaaag

SEQ ID NO: 83214 - RNA, 22 nt, Human
gugauuuagauguugaaaguga

SEQ ID NO: 83215 - RNA, 22 nt, Human
gugauuucagguuuuucauacu

SEQ ID NO: 83216 - RNA, 22 nt, Human
gugcaaaaggcauugugguuuu

SEQ ID NO: 83217 - RNA, 22 nt, Human
gugcaaaaguaacugugguuuu

SEQ ID NO: 83218 - RNA, 22 nt, Human
gugcaaaaguaauugagguuuu

SEQ ID NO: 83219 - RNA, 22 nt, Human
gugcaaaaguaauugcuguuuu

SEQ ID NO: 83220 - RNA, 22 nt, Human
gugcaaagcuuaacauucugca

SEQ ID NO: 83221 - RNA, 22 nt, Human
gugcaaagugcauggggaaggg

SEQ ID NO: 83222 - RNA, 22 nt, Human
gugcaaauguaauugccauuga

SEQ ID NO: 83223 - RNA, 22 nt, Human
gugcaaauguaauugugauuuu

SEQ ID NO: 83224 - RNA, 22 nt, Human
gugcaaauguaauugugguuuu

SEQ ID NO: 83225 - RNA, 22 nt, Human
gugcaagaaggggagacugggu

SEQ ID NO: 83226 - RNA, 22 nt, Human
gugcaaguccagaaagaacucu

SEQ ID NO: 83227 - RNA, 22 nt, Human
gugcaauaaauaaauagauugu

SEQ ID NO: 83228 - RNA, 22 nt, Human
gugcaauauugccauguucuug

SEQ ID NO: 83229 - RNA, 22 nt, Human
gugcaauccucauagaacucau

SEQ ID NO: 83230 - RNA, 22 nt, Human
gugcaaucuguugacuggacuu

SEQ ID NO: 83231 - RNA, 18 nt, Human
gugcaaugaauagcagag

SEQ ID NO: 83232 - RNA, 22 nt, Human
gugcaauuuugcaucuguaugc

SEQ ID NO: 83233 - RNA, 22 nt, Human
gugcacagauuuaauuuuauuc

SEQ ID NO: 83234 - RNA, 23 nt, Human
gugcacagucaagcccagcuuag

SEQ ID NO: 83235 - RNA, 21 nt, Human
gugcacaguccugcacacagg

SEQ ID NO: 83236 - RNA, 22 nt, Human
gugcaccccggggcccugcucc

SEQ ID NO: 83237 - RNA, 22 nt, Human
gucugcccucacgccagcuggg

SEQ ID NO: 83238 - RNA, 22 nt, Human
gucugccucagccgggggccgc

SEQ ID NO: 83239 - RNA, 22 nt, Human
ucuggcagagucagugcacaca

SEQ ID NO: 83240 - RNA, 22 nt, Human
ucuggcagagugauaggauaag

SEQ ID NO: 83241 - RNA, 22 nt, Human
ucuggcagcagcaucaguggcu

SEQ ID NO: 83242 - RNA, 22 nt, Human
ucuggcaggauaucgaagugaa

SEQ ID NO: 83243 - RNA, 22 nt, Human
ucuggcagggguucugcacuug

SEQ ID NO: 83244 - RNA, 19 nt, Human
ucuggcagguaauuaggga

SEQ ID NO: 83245 - RNA, 22 nt, Human
ucuggcagguucccauguuaug

SEQ ID NO: 83246 - RNA, 22 nt, Human
ucuggccaacaaaaacuaaguc

SEQ ID NO: 83247 - RNA, 22 nt, Human
ucuggccaacccucaaguugua

SEQ ID NO: 83248 - RNA, 22 nt, Human
ucuggccauggcaagccgagug

SEQ ID NO: 83249 - RNA, 22 nt, Human
ucuggcccagccccugagguca

SEQ ID NO: 83250 - RNA, 22 nt, Human
ucuggccccauacagagggucu

SEQ ID NO: 83251 - RNA, 22 nt, Human
ucuggccccgcaugcacuuuau

SEQ ID NO: 83252 - RNA, 22 nt, Human
ucuggccccuggcaguccugga

SEQ ID NO: 83253 - RNA, 22 nt, Human
ucuggccuacuggaguccauga

SEQ ID NO: 83254 - RNA, 22 nt, Human
ucuggccucuugggaugcuccc

SEQ ID NO: 83255 - RNA, 22 nt, Human
ucuggccuuaucuguccaagcc

SEQ ID NO: 83256 - RNA, 22 nt, Human
ucuggcucaaaauacguacucu

SEQ ID NO: 83257 - RNA, 22 nt, Human
uaaauucugaucaaguuccuuc

SEQ ID NO: 83258 - RNA, 22 nt, Human
uaaauugaaaaucuacagaaca

SEQ ID NO: 83259 - RNA, 21 nt, Human
uaacaaagacuucuggucagg

SEQ ID NO: 83260 - RNA, 22 nt, Human
uaacaaaguaccauagacugga

SEQ ID NO: 83261 - RNA, 19 nt, Human
uaacaaagucugaagucag

SEQ ID NO: 83262 - RNA, 22 nt, Human
uaacaacugaggaagaggcaga

SEQ ID NO: 83263 - RNA, 22 nt, Human
uaacaacuugcuuuuaucuuag

SEQ ID NO: 83264 - RNA, 22 nt, Human
uaacaagaaauacauugguucu

SEQ ID NO: 83265 - RNA, 22 nt, Human
uaacaagaugucacuccugucc

SEQ ID NO: 83266 - RNA, 22 nt, Human
uaacaaggcaauuugugauccu

SEQ ID NO: 83267 - RNA, 22 nt, Human
uaacaauacccauucuaauuac

SEQ ID NO: 83268 - RNA, 18 nt, Human
uaacaauccugagugucu

SEQ ID NO: 83269 - RNA, 22 nt, Human
uaacaaugcaaaaugaauuuag

SEQ ID NO: 83270 - RNA, 23 nt, Human
uaacaauggacuccucuuagcua

SEQ ID NO: 83271 - RNA, 22 nt, Human
uaacaaugggaaggacugauga

SEQ ID NO: 83272 - RNA, 22 nt, Human
uaacaaugguuuugcugauaau

SEQ ID NO: 83273 - RNA, 22 nt, Human
uaacaauuugcuucauuuguuu

SEQ ID NO: 83274 - RNA, 22 nt, Human
uaacacacugaaggugagaugg

SEQ ID NO: 83275 - RNA, 22 nt, Human
uaacacagaguaaguggucaau

SEQ ID NO: 83276 - RNA, 17 nt, Human
uaacacaggcucagaga

SEQ ID NO: 83277 - RNA, 22 nt, Human
uaacacagugucuaccauuauu

SEQ ID NO: 83278 - RNA, 22 nt, Human
uaacacaguucucuguugcaca

SEQ ID NO: 83279 - RNA, 22 nt, Human
uaacacauagauauuuuaacuu

SEQ ID NO: 83280 - RNA, 22 nt, Human
uaacacauauuugcaguaagca

SEQ ID NO: 83281 - RNA, 22 nt, Human
uaacacaugguuaguacacaau

SEQ ID NO: 83282 - RNA, 22 nt, Human
uaacacugcuucauuuuggaga

SEQ ID NO: 83283 - RNA, 22 nt, Human
uaacacugguauuucauuuagu

SEQ ID NO: 83284 - RNA, 22 nt, Human
uaacacuguccaaagaauucca

SEQ ID NO: 83285 - RNA, 22 nt, Human
uaacacuugggggcauccuuag

SEQ ID NO: 83286 - RNA, 22 nt, Human
uaacagaaacagauaaguguaa

SEQ ID NO: 83287 - RNA, 22 nt, Human
uaacagaaauagaaaugagagu

SEQ ID NO: 83288 - RNA, 22 nt, Human
uaacagaaauauuuccagguga

SEQ ID NO: 83289 - RNA, 22 nt, Human
uaacagaaauuuuaguuagggg

SEQ ID NO: 83290 - RNA, 22 nt, Human
uaacagaagaaaacauauugga

SEQ ID NO: 83291 - RNA, 22 nt, Human
uaacagaauuugcuaaacuccg

SEQ ID NO: 83292 - RNA, 22 nt, Human
uaacagagugaaaaucagcaca

SEQ ID NO: 83293 - RNA, 22 nt, Human
uaacagaguuguacaguuacgu

SEQ ID NO: 83294 - RNA, 22 nt, Human
uaacagcaaccacagugcuggu

SEQ ID NO: 83295 - RNA, 22 nt, Human
uaacagcacuggcaggcacugu

SEQ ID NO: 83296 - RNA, 22 nt, Human
uaacagcauuugaaugaguaac

SEQ ID NO: 83297 - RNA, 22 nt, Human
uaacagcccucccuccauccug

SEQ ID NO: 83298 - RNA, 22 nt, Human
uaacaggcaaggucacaccuug

SEQ ID NO: 83299 - RNA, 22 nt, Human
uaacaggcugaucauauauccu

SEQ ID NO: 83300 - RNA, 19 nt, Human
uaacaggggaaaaugauca

SEQ ID NO: 83301 - RNA, 22 nt, Human
uaacaggugguaguuugugcuc

SEQ ID NO: 83302 - RNA, 20 nt, Human
uaacaguaagugauguuaca

SEQ ID NO: 83303 - RNA, 22 nt, Human
uaacaguaccauuaacuuugau

SEQ ID NO: 83304 - RNA, 22 nt, Human
uaacaguugguguaauuucuug

SEQ ID NO: 83305 - RNA, 20 nt, Human
uaacaguuguagaggguuuu

SEQ ID NO: 83306 - RNA, 22 nt, Human
uaacaucuuauuggcaaagaua

SEQ ID NO: 83307 - RNA, 22 nt, Human
uaacaugcuaggaagagugauu

SEQ ID NO: 83308 - RNA, 22 nt, Human
uaacauuauacagagaggacag

SEQ ID NO: 83309 - RNA, 22 nt, Human
uaacauuccauggaucugcaga

SEQ ID NO: 83310 - RNA, 22 nt, Human
uaacauuccucaaaguuuucag

SEQ ID NO: 83311 - RNA, 22 nt, Human
uaacauucuuaacuuagaaaca

SEQ ID NO: 83312 - RNA, 22 nt, Human
uaacauugucaguucaacugcu

SEQ ID NO: 83313 - RNA, 22 nt, Human
uaaccaaagggccuaaggaaug

SEQ ID NO: 83314 - RNA, 22 nt, Human
uaaccaagcaaacuuucauugu

SEQ ID NO: 83315 - RNA, 22 nt, Human
uaacccaaaggcaaugucucga

SEQ ID NO: 83316 - RNA, 22 nt, Human
uaaccucuauuuuuauaaaagu

SEQ ID NO: 83317 - RNA, 22 nt, Human
uaaccucugagcuccagcuucu

SEQ ID NO: 83318 - RNA, 22 nt, Human
uaaccugaacacacaauaggga

SEQ ID NO: 83319 - RNA, 23 nt, Human
uaaccugagauugcaagggagcu

SEQ ID NO: 83320 - RNA, 22 nt, Human
uaaccugaggagaacagugcuu

SEQ ID NO: 83321 - RNA, 23 nt, Human
uaaccugaguuuuuuagaugcaa

SEQ ID NO: 83322 - RNA, 22 nt, Human
uaaccugggaucugacgggaug

SEQ ID NO: 83323 - RNA, 22 nt, Human
uaacuacaagggcggucucugu

SEQ ID NO: 83324 - RNA, 22 nt, Human
uaacucucacagugcaacauga

SEQ ID NO: 83325 - RNA, 22 nt, Human
uaacucuuccaacacuccuucc

SEQ ID NO: 83326 - RNA, 22 nt, Human
uaacucuuuacuauacauuuau

SEQ ID NO: 83327 - RNA, 19 nt, Human
uaacucuuuccuuuucccc

SEQ ID NO: 83328 - RNA, 22 nt, Human
uaacugaugugaacuuaccauu

SEQ ID NO: 83329 - RNA, 22 nt, Human
uaacugcagaggaaaugcaucu

SEQ ID NO: 83330 - RNA, 22 nt, Human
uaacugccuacugugcaaauau

SEQ ID NO: 83331 - RNA, 22 nt, Human
uaacugcucagugaguauuuuu

SEQ ID NO: 83332 - RNA, 22 nt, Human
uaacuggcuuaaauuuuaucaa

SEQ ID NO: 83333 - RNA, 22 nt, Human
uaacugguuuggcucagggucu

SEQ ID NO: 83334 - RNA, 22 nt, Human
uaacuguaauauaaauaugagu

SEQ ID NO: 83335 - RNA, 22 nt, Human
uaacuguaccuagauaacgaac

SEQ ID NO: 83336 - RNA, 22 nt, Human
uaacuguaguuauaaagcuauc

SEQ ID NO: 83337 - RNA, 22 nt, Human
uaacuguauuuuaggucucauu

SEQ ID NO: 83338 - RNA, 22 nt, Human
uaacuguauuuuucugagauuc

SEQ ID NO: 83339 - RNA, 22 nt, Human
uaacugucacuucugcacaucu

SEQ ID NO: 83340 - RNA, 22 nt, Human
uaacuucaagucuguggaucag

SEQ ID NO: 83341 - RNA, 22 nt, Human
uaacuucugaauagcaauagua

SEQ ID NO: 83342 - RNA, 22 nt, Human
uaacuugagcucucagugcuau

SEQ ID NO: 83343 - RNA, 22 nt, Human
uaacuugguuggugggcaggag

SEQ ID NO: 83344 - RNA, 22 nt, Human
uaacuuguguuacauuacucuu

SEQ ID NO: 83345 - RNA, 22 nt, Human
uaacuuuaggaauagguaaucu

SEQ ID NO: 83346 - RNA, 22 nt, Human
uaacuuucacaucacacugacu

SEQ ID NO: 83347 - RNA, 22 nt, Human
uaacuuucuucauaugugaacc

SEQ ID NO: 83348 - RNA, 22 nt, Human
ucugggucggaagccccaggga

SEQ ID NO: 83349 - RNA, 22 nt, Human
ucugggucucagagugaccaug

SEQ ID NO: 83350 - RNA, 22 nt, Human
ucugggucuuuacccauggaau

SEQ ID NO: 83351 - RNA, 22 nt, Human
ucugggugacccugggcaaggc

SEQ ID NO: 83352 - RNA, 22 nt, Human
ucugggugaugaaaugcacugu

SEQ ID NO: 83353 - RNA, 22 nt, Human
ucugggugcccuuugcucuguu

SEQ ID NO: 83354 - RNA, 22 nt, Human
ucugggugucacuccugccugc

SEQ ID NO: 83355 - RNA, 20 nt, Human
ucuggguugaaaucaagauc

SEQ ID NO: 83356 - RNA, 22 nt, Human
ucugguacuagaggagugcugg

SEQ ID NO: 83357 - RNA, 22 nt, Human
ucuggucaguaauaagaagugg

SEQ ID NO: 83358 - RNA, 22 nt, Human
ucuggucccugcucacuucuug

SEQ ID NO: 83359 - RNA, 22 nt, Human
ucuggucccuuuuccugcaguc

SEQ ID NO: 83360 - RNA, 22 nt, Human
ucugguccucucugugaugcua

SEQ ID NO: 83361 - RNA, 21 nt, Human
ucuggucugcuguggaccugg

SEQ ID NO: 83362 - RNA, 22 nt, Human
ucugguuagccaauaaugccaa

SEQ ID NO: 83363 - RNA, 22 nt, Human
ucuguaaaacaauauuguauuc

SEQ ID NO: 83364 - RNA, 22 nt, Human
ucuguaaaauuaguauaauugu

SEQ ID NO: 83365 - RNA, 22 nt, Human
ucuguaaacaccauguuagagu

SEQ ID NO: 83366 - RNA, 22 nt, Human
ucuguaaagauguuuauaccuu

SEQ ID NO: 83367 - RNA, 19 nt, Human
ucuguaacacucuagccuu

SEQ ID NO: 83368 - RNA, 22 nt, Human
ucuguaaguguugguuauucua

SEQ ID NO: 83369 - RNA, 23 nt, Human
ucuguacacaucagcaucuccca

SEQ ID NO: 83370 - RNA, 21 nt, Human
ucuguacaucauugagucccc

SEQ ID NO: 83371 - RNA, 22 nt, Human
ucuguacaugaguugagaauca

SEQ ID NO: 83372 - RNA, 22 nt, Human
ucuguacauuuggggaccccag

SEQ ID NO: 83373 - RNA, 22 nt, Human
ucuguacauuuguguugugaau

SEQ ID NO: 83374 - RNA, 22 nt, Human
gugggcuuuugacagugccugg

SEQ ID NO: 83375 - RNA, 22 nt, Human
guggggacgggauggcucacug

SEQ ID NO: 83376 - RNA, 22 nt, Human
guggggagggagaugcugaagu

SEQ ID NO: 83377 - RNA, 22 nt, Human
guggggcggcagaugcucccug

SEQ ID NO: 83378 - RNA, 22 nt, Human
gugggggacccaggugcugucc

SEQ ID NO: 83379 - RNA, 22 nt, Human
guggggguggaaaggcaaguug

SEQ ID NO: 83380 - RNA, 18 nt, Human
gugggguguugugaggau

SEQ ID NO: 83381 - RNA, 22 nt, Human
gugggucccuaaacacauccca

SEQ ID NO: 83382 - RNA, 22 nt, Human
guggguccgcuugguuccggug

SEQ ID NO: 83383 - RNA, 22 nt, Human
guggguggacggugcuuuuguu

SEQ ID NO: 83384 - RNA, 22 nt, Human
guggguggagacugggugcaag

SEQ ID NO: 83385 - RNA, 22 nt, Human
guggguggauuccagcaacgcu

SEQ ID NO: 83386 - RNA, 22 nt, Human
gugguaauuuaauccuacacug

SEQ ID NO: 83387 - RNA, 22 nt, Human
gugguacagcugaaaggcuugc

SEQ ID NO: 83388 - RNA, 22 nt, Human
gugguaggcacagagaacaaga

SEQ ID NO: 83389 - RNA, 22 nt, Human
guggucagguuaucagaucaua

SEQ ID NO: 83390 - RNA, 22 nt, Human
guggucaguuaggcaaucaugu

SEQ ID NO: 83391 - RNA, 22 nt, Human
guggucaucuaacuaaauuuuc

SEQ ID NO: 83392 - RNA, 22 nt, Human
guggucauguuaauuaugaucc

SEQ ID NO: 83393 - RNA, 22 nt, Human
guggucauuugucugagcucca

SEQ ID NO: 83394 - RNA, 22 nt, Human
gugguccaucaugcagagcucc

SEQ ID NO: 83395 - RNA, 22 nt, Human
gugguccuggcaaccaugguga

SEQ ID NO: 83396 - RNA, 22 nt, Human
gugguccuguccugacggcuuc

SEQ ID NO: 83397 - RNA, 22 nt, Human
gugguccuuacaggaggcuuac

SEQ ID NO: 83398 - RNA, 22 nt, Human
guggucuggggucaggccugag

SEQ ID NO: 83399 - RNA, 22 nt, Human
guggugaagccccaucucugcu

SEQ ID NO: 83400 - RNA, 22 nt, Human
guggugagauugcuggaucaaa

SEQ ID NO: 83401 - RNA, 22 nt, Human
gugguggaugucuguaaucuca

SEQ ID NO: 83402 - RNA, 22 nt, Human
gugguguaggucacaguuagga

SEQ ID NO: 83403 - RNA, 22 nt, Human
gugguuguuuaggucguggauc

SEQ ID NO: 83404 - RNA, 22 nt, Human
gugguuuuggaggccacuguuu

SEQ ID NO: 83405 - RNA, 22 nt, Human
guguaaacaacagugguuugaa

SEQ ID NO: 83406 - RNA, 21 nt, Human
guguaaacggacucaugcagu

SEQ ID NO: 83407 - RNA, 22 nt, Human
guguaaaugccccauucauuga

SEQ ID NO: 83408 - RNA, 22 nt, Human
guguaacuugcuggaaaaacua

SEQ ID NO: 83409 - RNA, 22 nt, Human
guguaaggugaaaucaacaaau

SEQ ID NO: 83410 - RNA, 22 nt, Human
guguaauugaaauugagaacca

SEQ ID NO: 83411 - RNA, 22 nt, Human
guguacagauaucucacguucu

SEQ ID NO: 83412 - RNA, 22 nt, Human
guguacaguaagugaaucuagg

SEQ ID NO: 83413 - RNA, 22 nt, Human
guguacaugagaaaucaacuuu

SEQ ID NO: 83414 - RNA, 22 nt, Human
guguacugcaaaugcugcugcc

SEQ ID NO: 83415 - RNA, 22 nt, Human
guguagagugacaaggugggaa

SEQ ID NO: 83416 - RNA, 22 nt, Human
guguagcauauagcaagagcau

SEQ ID NO: 83417 - RNA, 22 nt, Human
guguagcuuuggagugggaggc

SEQ ID NO: 83418 - RNA, 22 nt, Human
guguagguaagcaugcagcuga

SEQ ID NO: 83419 - RNA, 22 nt, Human
guguauaauccugcaaagggag

SEQ ID NO: 83420 - RNA, 22 nt, Human
guguaucaguaacuguggacag

SEQ ID NO: 83421 - RNA, 22 nt, Human
guguaucuggcaugucgagugu

SEQ ID NO: 83422 - RNA, 22 nt, Human
guguaugagccuccagcugggc

SEQ ID NO: 83423 - RNA, 22 nt, Human
gugucacaagagcccaggaaac

SEQ ID NO: 83424 - RNA, 22 nt, Human
gugucacaugguuuacugcagc

SEQ ID NO: 83425 - RNA, 22 nt, Human
gugucauacagaaugcauaagu

SEQ ID NO: 83426 - RNA, 22 nt, Human
gugucaugcacacucaguguug

SEQ ID NO: 83427 - RNA, 22 nt, Human
guguccagagaacugugggagc

SEQ ID NO: 83428 - RNA, 17 nt, Human
guguccaggccgauggc

SEQ ID NO: 83429 - RNA, 22 nt, Human
guguccagggccguguugucuu

SEQ ID NO: 83430 - RNA, 22 nt, Human
guguccagggcuggaagugagg

SEQ ID NO: 83431 - RNA, 22 nt, Human
gugucccaaagauuagaaauca

SEQ ID NO: 83432 - RNA, 22 nt, Human
gugucccaauguucaggacggc

SEQ ID NO: 83433 - RNA, 22 nt, Human
gugucccacucuggaggugaag

SEQ ID NO: 83434 - RNA, 22 nt, Human
guguccuggagcccccaguuca

SEQ ID NO: 83435 - RNA, 18 nt, Human
guguccuggcugcggcgc

SEQ ID NO: 83436 - RNA, 22 nt, Human
guguccugggggacuucagguu

SEQ ID NO: 83437 - RNA, 22 nt, Human
guguccugggucucugauucuu

SEQ ID NO: 83438 - RNA, 22 nt, Human
guguccuguuucccugucuaua

SEQ ID NO: 83439 - RNA, 22 nt, Human
gugucucuuccuuucaaguggg

SEQ ID NO: 83440 - RNA, 22 nt, Human
gugucugaguuuggaaagucca

SEQ ID NO: 83441 - RNA, 22 nt, Human
gugucugcaagauagccaaguc

SEQ ID NO: 83442 - RNA, 20 nt, Human
gugucugcauauagcaggug

SEQ ID NO: 83443 - RNA, 22 nt, Human
gugucugcauauucaaacuugu

SEQ ID NO: 83444 - RNA, 22 nt, Human
gugucuuagaaagacugaaugc

SEQ ID NO: 83445 - RNA, 22 nt, Human
gugucuuuauuccucuauguuu

SEQ ID NO: 83446 - RNA, 17 nt, Human
gugucuuugcuguugug

SEQ ID NO: 83447 - RNA, 22 nt, Human
gugugacuuuauuuggaaauag

SEQ ID NO: 83448 - RNA, 22 nt, Human
gugugagagacugaagaaagcc

SEQ ID NO: 83449 - RNA, 22 nt, Human
gugugagcagguuugaccuaag

SEQ ID NO: 83450 - RNA, 22 nt, Human
gugugagcaucaaagccuguca

SEQ ID NO: 83451 - RNA, 22 nt, Human
gugugagugaaaguaguuugau

SEQ ID NO: 83452 - RNA, 22 nt, Human
gugugcagcagagacaggacuc

SEQ ID NO: 83453 - RNA, 22 nt, Human
gugugcagggggccagcgcagc

SEQ ID NO: 83454 - RNA, 22 nt, Human
gugugcaggugucagugcagcu

SEQ ID NO: 83455 - RNA, 22 nt, Human
gugugccaccacugacaggauu

SEQ ID NO: 83456 - RNA, 22 nt, Human
gugugccagacaugaugcuaug

SEQ ID NO: 83457 - RNA, 22 nt, Human
guucagaguauuaauugauuua

SEQ ID NO: 83458 - RNA, 22 nt, Human
guucagcagcagugauuuugug

SEQ ID NO: 83459 - RNA, 22 nt, Human
guucagcuaggaauggagaugc

SEQ ID NO: 83460 - RNA, 22 nt, Human
guucaguauuaaugagaugauu

SEQ ID NO: 83461 - RNA, 22 nt, Human
guucagugauucucgguguuca

SEQ ID NO: 83462 - RNA, 22 nt, Human
guucaguguuuacaugauuguu

SEQ ID NO: 83463 - RNA, 22 nt, Human
guucaguguuugauuucugcug

SEQ ID NO: 83464 - RNA, 22 nt, Human
guucaguguuuuuauugacagg

SEQ ID NO: 83465 - RNA, 22 nt, Human
guucaguuauuucugaagauau

SEQ ID NO: 83466 - RNA, 22 nt, Human
guucaguuugacaaccuuuaua

SEQ ID NO: 83467 - RNA, 22 nt, Human
guucauaauuugaaggaauagg

SEQ ID NO: 83468 - RNA, 18 nt, Human
guucaucuuuuucuaaag

SEQ ID NO: 83469 - RNA, 21 nt, Human
guucaugucagcauuaaggga

SEQ ID NO: 83470 - RNA, 20 nt, Human
guucaugucucaaauagaaa

SEQ ID NO: 83471 - RNA, 22 nt, Human
guucauguggaaauuuaaaaca

SEQ ID NO: 83472 - RNA, 22 nt, Human
guucaugugguuuuuaaaggau

SEQ ID NO: 83473 - RNA, 22 nt, Human
guucauuguguguggucuucuu

SEQ ID NO: 83474 - RNA, 19 nt, Human
guuccaaaggccagaccuu

SEQ ID NO: 83475 - RNA, 22 nt, Human
guuccacaucacacuacuugau

SEQ ID NO: 83476 - RNA, 22 nt, Human
guuccacauuuguaaaaugagg

SEQ ID NO: 83477 - RNA, 22 nt, Human
guuccagacuugccaguggaag

SEQ ID NO: 83478 - RNA, 22 nt, Human
guuccaggcaguggcaacagcu

SEQ ID NO: 83479 - RNA, 22 nt, Human
guuccagggaagggaaggcaga

SEQ ID NO: 83480 - RNA, 22 nt, Human
guuccucacguggacagaugau

SEQ ID NO: 83481 - RNA, 22 nt, Human
guuccucauccagucaugacua

SEQ ID NO: 83482 - RNA, 22 nt, Human
guuccugaaagaugaguaauua

SEQ ID NO: 83483 - RNA, 22 nt, Human
guuccugugggguuaacccuga

SEQ ID NO: 83484 - RNA, 22 nt, Human
guuccuuagaguugauauggua

SEQ ID NO: 83485 - RNA, 22 nt, Human
guuccuuguaauuuguuaagga

SEQ ID NO: 83486 - RNA, 22 nt, Human
guucuaauaggagaaaagacag

SEQ ID NO: 83487 - RNA, 22 nt, Human
guucuauguugagauagcuaau

SEQ ID NO: 83488 - RNA, 22 nt, Human
guucuauuccccuuaucuguga

SEQ ID NO: 83489 - RNA, 22 nt, Human
guucuauucuccaguuacauau

SEQ ID NO: 83490 - RNA, 22 nt, Human
guucucaguggggagcaggguu

SEQ ID NO: 83491 - RNA, 22 nt, Human
guucucaguucaggaaggacau

SEQ ID NO: 83492 - RNA, 22 nt, Human
uaagaauauugggaauggaugg

SEQ ID NO: 83493 - RNA, 22 nt, Human
uaagaauuguguugaauagagu

SEQ ID NO: 83494 - RNA, 22 nt, Human
uaagacaaauacuauuucaaga

SEQ ID NO: 83495 - RNA, 22 nt, Human
uaagacaauucuucagucacaa

SEQ ID NO: 83496 - RNA, 22 nt, Human
uaagacacauucauaucugucu

SEQ ID NO: 83497 - RNA, 22 nt, Human
uaagacacauugagaaacacaa

SEQ ID NO: 83498 - RNA, 19 nt, Human
uaagacagauuccuagagu

SEQ ID NO: 83499 - RNA, 22 nt, Human
uaagacagggagggcucucagc

SEQ ID NO: 83500 - RNA, 21 nt, Human
uaagacaguaugaauacuuuc

SEQ ID NO: 83501 - RNA, 22 nt, Human
uaagacauccguugcuuauaau

SEQ ID NO: 83502 - RNA, 22 nt, Human
uaagacaugguugaucuagugu

SEQ ID NO: 83503 - RNA, 22 nt, Human
uaagacauguccaggcugugag

SEQ ID NO: 83504 - RNA, 22 nt, Human
uaagacauuugaaaugugaucc

SEQ ID NO: 83505 - RNA, 22 nt, Human
uaagacauuugacaaaccauuu

SEQ ID NO: 83506 - RNA, 22 nt, Human
uaagaccaaaguucuguaggga

SEQ ID NO: 83507 - RNA, 22 nt, Human
uaagagaacuggauagauagga

SEQ ID NO: 83508 - RNA, 22 nt, Human
uaagagaugcuuuucuaaauaa

SEQ ID NO: 83509 - RNA, 22 nt, Human
uaagagauucuaaagcuacugg

SEQ ID NO: 83510 - RNA, 22 nt, Human
uaagagcagaacagcaacauau

SEQ ID NO: 83511 - RNA, 22 nt, Human
uaagagcauaggcuugaaaaua

SEQ ID NO: 83512 - RNA, 22 nt, Human
uaagagcuaggauuuuaaauca

SEQ ID NO: 83513 - RNA, 21 nt, Human
uaagagcuauuauugcaaacc

SEQ ID NO: 83514 - RNA, 22 nt, Human
uaagagcugaggcauugggaca

SEQ ID NO: 83515 - RNA, 22 nt, Human
uaagagcuguucagguacccau

SEQ ID NO: 83516 - RNA, 22 nt, Human
uaagauaaggagagugcuagua

SEQ ID NO: 83517 - RNA, 22 nt, Human
uaagauaauccauuauaauguu

SEQ ID NO: 83518 - RNA, 22 nt, Human
uaagauaugguaggaaguuugg

SEQ ID NO: 83519 - RNA, 19 nt, Human
uaagauggcaagugucucu

SEQ ID NO: 83520 - RNA, 22 nt, Human
uaagaugucaaagggucacagu

SEQ ID NO: 83521 - RNA, 22 nt, Human
uaagauguggaaucacagcuuc

SEQ ID NO: 83522 - RNA, 22 nt, Human
uaagcaagggucucuguaucag

SEQ ID NO: 83523 - RNA, 22 nt, Human
uaagcaagugguagaaggacaa

SEQ ID NO: 83524 - RNA, 22 nt, Human
uaagcaaucuaaaagccuuacc

SEQ ID NO: 83525 - RNA, 22 nt, Human
uaagcagaaaaagugggaguua

SEQ ID NO: 83526 - RNA, 22 nt, Human
uaagcagaugcugucugcacaa

SEQ ID NO: 83527 - RNA, 20 nt, Human
uaagcauaguugucaggguc

SEQ ID NO: 83528 - RNA, 22 nt, Human
uaagcauggugguaaaagaggu

SEQ ID NO: 83529 - RNA, 22 nt, Human
uaagcauucaaugcuuagcacu

SEQ ID NO: 83530 - RNA, 22 nt, Human
uaagcccacauuuuucugaaga

SEQ ID NO: 83531 - RNA, 22 nt, Human
uaagccugcaugaaccaugaga

SEQ ID NO: 83532 - RNA, 22 nt, Human
uaagcuauuccugaagaagguu

SEQ ID NO: 83533 - RNA, 22 nt, Human
uaagcuucaaagaacauauugg

SEQ ID NO: 83534 - RNA, 22 nt, Human
uaaggaaaauggacaucaaaca

SEQ ID NO: 83535 - RNA, 22 nt, Human
uaaggaaacaacuuguauuuuu

SEQ ID NO: 83536 - RNA, 22 nt, Human
uaaggaaagugccaugauuucu

SEQ ID NO: 83537 - RNA, 22 nt, Human
uaaggaauagugcuaugaaaaa

SEQ ID NO: 83538 - RNA, 22 nt, Human
uaaggaauaucauaagaaguag

SEQ ID NO: 83539 - RNA, 22 nt, Human
uaaggacaauuugucgcuugca

SEQ ID NO: 83540 - RNA, 22 nt, Human
uaaggacauugguuuugaguaa

SEQ ID NO: 83541 - RNA, 22 nt, Human
uaaggaggcgagguggugagca

SEQ ID NO: 83542 - RNA, 22 nt, Human
uaaggcaaguuuuuaguggaca

SEQ ID NO: 83543 - RNA, 22 nt, Human
uaaggcagauguggaaucaauu

SEQ ID NO: 83544 - RNA, 19 nt, Human
uaaggcagcagugacaggc

SEQ ID NO: 83545 - RNA, 22 nt, Human
uaaggcagccgcucagagaggu

SEQ ID NO: 83546 - RNA, 22 nt, Human
uaaggcagugaaacuauucugu

SEQ ID NO: 83547 - RNA, 22 nt, Human
uaaggcauaaggaagauuugga

SEQ ID NO: 83548 - RNA, 22 nt, Human
uaaggcauaaggccagaggcua

SEQ ID NO: 83549 - RNA, 19 nt, Human
uaaggccaaaaguaagugu

SEQ ID NO: 83550 - RNA, 22 nt, Human
uaaggccaaggggccauagucu

SEQ ID NO: 83551 - RNA, 22 nt, Human
uaaggccauuauggugggcccg

SEQ ID NO: 83552 - RNA, 22 nt, Human
uaaggccuugaaaggauguccu

SEQ ID NO: 83553 - RNA, 22 nt, Human
uaaggcuacugucagcuucagg

SEQ ID NO: 83554 - RNA, 22 nt, Human
uaaggcuaucugaguuuaugug

SEQ ID NO: 83555 - RNA, 22 nt, Human
uaaggcuaucuuuugagugugu

SEQ ID NO: 83556 - RNA, 22 nt, Human
uaaggcucccuuugccacuugu

SEQ ID NO: 83557 - RNA, 22 nt, Human
uaaggcuucagcauucaaaaca

SEQ ID NO: 83558 - RNA, 22 nt, Human
uaaggcuuuccuugucaucuuu

SEQ ID NO: 83559 - RNA, 22 nt, Human
uaaggcuuucuaaauaugcaga

SEQ ID NO: 83560 - RNA, 22 nt, Human
uaagggaacagcuucaaacuca

SEQ ID NO: 83561 - RNA, 22 nt, Human
uaagggcugacuuggaacuguc

SEQ ID NO: 83562 - RNA, 22 nt, Human
uaaggugagcuguauaacaggg

SEQ ID NO: 83563 - RNA, 18 nt, Human
uaaguaaggucauauggg

SEQ ID NO: 83564 - RNA, 22 nt, Human
uaaguagacuguugaacuuggu

SEQ ID NO: 83565 - RNA, 22 nt, Human
uaaguaguagggccagaauuug

SEQ ID NO: 83566 - RNA, 22 nt, Human
uacaaagauaaaaucucaccau

SEQ ID NO: 83567 - RNA, 22 nt, Human
uacaaagcuuguacugugugac

SEQ ID NO: 83568 - RNA, 22 nt, Human
uacaaaggagauaaauuggagg

SEQ ID NO: 83569 - RNA, 19 nt, Human
uacaaaggaggauguaaaa

SEQ ID NO: 83570 - RNA, 22 nt, Human
uacaaaggaggugcauagaaca

SEQ ID NO: 83571 - RNA, 22 nt, Human
uacaaaguagaaauucaguaaa

SEQ ID NO: 83572 - RNA, 22 nt, Human
uacaaaguauauuucuagcugu

SEQ ID NO: 83573 - RNA, 22 nt, Human
uacaaagucacauugaaaugaa

SEQ ID NO: 83574 - RNA, 22 nt, Human
uacaaagucuuggguucuaggc

SEQ ID NO: 83575 - RNA, 22 nt, Human
uacaaagugacaagcucugcug

SEQ ID NO: 83576 - RNA, 22 nt, Human
uacaaagugagcaaccucuuuu

SEQ ID NO: 83577 - RNA, 22 nt, Human
uacaaagugggaaacgaagguu

SEQ ID NO: 83578 - RNA, 22 nt, Human
uacaaaucagaucaugaguuua

SEQ ID NO: 83579 - RNA, 22 nt, Human
uacaaaugaaccaacuuugaug

SEQ ID NO: 83580 - RNA, 22 nt, Human
uacaacaguucaugaaaugaaa

SEQ ID NO: 83581 - RNA, 22 nt, Human
uacaacauaacgggcauucagu

SEQ ID NO: 83582 - RNA, 22 nt, Human
uacaacauguaaagugguuuaa

SEQ ID NO: 83583 - RNA, 22 nt, Human
uacaacgugggacuuuguuucu

SEQ ID NO: 83584 - RNA, 22 nt, Human
uacaacuuccagcuuucagccc

SEQ ID NO: 83585 - RNA, 22 nt, Human
uacaagaaaguccaguggguuu

SEQ ID NO: 83586 - RNA, 22 nt, Human
uacaagagaacuaauguaaguc

SEQ ID NO: 83587 - RNA, 22 nt, Human
uacaagagcaguaagcuugucc

SEQ ID NO: 83588 - RNA, 22 nt, Human
uacaagagguauauagaaacag

SEQ ID NO: 83589 - RNA, 22 nt, Human
uacaagcucacaaauuuuuaag

SEQ ID NO: 83590 - RNA, 19 nt, Human
uacaagcuuuuuuggcagg

SEQ ID NO: 83591 - RNA, 22 nt, Human
uacaaggcaaauccaugauguc

SEQ ID NO: 83592 - RNA, 23 nt, Human
uacaagguagcauuaguuucuuc

SEQ ID NO: 83593 - RNA, 22 nt, Human
uacaaguaaauuguagauacca

SEQ ID NO: 83594 - RNA, 19 nt, Human
uacaaguaggcguuuucuc

SEQ ID NO: 83595 - RNA, 22 nt, Human
uacaaguauggaaugauucuca

SEQ ID NO: 83596 - RNA, 22 nt, Human
uacaagucauuggaugaggaau

SEQ ID NO: 83597 - RNA, 22 nt, Human
uacaaguguaagcuugugagac

SEQ ID NO: 83598 - RNA, 22 nt, Human
uacaauacuuaaccuauuuugc

SEQ ID NO: 83599 - RNA, 22 nt, Human
uacaaugacucucaguuuggcu

SEQ ID NO: 83600 - RNA, 22 nt, Human
uacaaugcauucguugucucgg

SEQ ID NO: 83601 - RNA, 22 nt, Human
uacaauguaauucugauuaugu

SEQ ID NO: 83602 - RNA, 22 nt, Human
uacaaugugugcuucuugucac

SEQ ID NO: 83603 - RNA, 22 nt, Human
uacaauguucauagcuuuggca

SEQ ID NO: 83604 - RNA, 22 nt, Human
uacacaacugacaaccauucug

SEQ ID NO: 83605 - RNA, 22 nt, Human
uacacaaucuguuuuuccauuu

SEQ ID NO: 83606 - RNA, 22 nt, Human
uacacaaugacuuaagauguca

SEQ ID NO: 83607 - RNA, 22 nt, Human
uacacaauucuggaugcauguc

SEQ ID NO: 83608 - RNA, 22 nt, Human
uacacacagaggccaugggauu

SEQ ID NO: 83609 - RNA, 22 nt, Human
ucuuauaauguugaaggguugg

SEQ ID NO: 83610 - RNA, 22 nt, Human
ucuuauaccccuaaacugcagc

SEQ ID NO: 83611 - RNA, 22 nt, Human
ucuuauaugcacauacauuggg

SEQ ID NO: 83612 - RNA, 22 nt, Human
ucuuaucuuauaccuaacagcc

SEQ ID NO: 83613 - RNA, 22 nt, Human
ucuuaugucaagaaugaauauu

SEQ ID NO: 83614 - RNA, 22 nt, Human
ucuuaugugcugugagauuuuu

SEQ ID NO: 83615 - RNA, 22 nt, Human
ucuuauugguaaugauggcauu

SEQ ID NO: 83616 - RNA, 22 nt, Human
ucuuauuuuuuaaugacagaga

SEQ ID NO: 83617 - RNA, 22 nt, Human
ucuucaaagcauaugcaggcau

SEQ ID NO: 83618 - RNA, 22 nt, Human
ucuucaaaugcuaguaauauca

SEQ ID NO: 83619 - RNA, 22 nt, Human
ucuucacaguccuggucagugg

SEQ ID NO: 83620 - RNA, 22 nt, Human
ucuucacauggagaagcaacuc

SEQ ID NO: 83621 - RNA, 22 nt, Human
ucuucacauucacguaacauag

SEQ ID NO: 83622 - RNA, 22 nt, Human
ucuucagaaaauuaucacuugu

SEQ ID NO: 83623 - RNA, 22 nt, Human
ucuucagagcauuucugaggua

SEQ ID NO: 83624 - RNA, 22 nt, Human
ucuucagauaaagggagaguau

SEQ ID NO: 83625 - RNA, 22 nt, Human
ucuucagauggccaguuguccc

SEQ ID NO: 83626 - RNA, 22 nt, Human
ucuucagggucugccccagggg

SEQ ID NO: 83627 - RNA, 21 nt, Human
ucuucaguacacuugcacgcc

SEQ ID NO: 83628 - RNA, 22 nt, Human
ucuucagugcaugcccucaggc

SEQ ID NO: 83629 - RNA, 22 nt, Human
ucuucauacucaucacauaggu

SEQ ID NO: 83630 - RNA, 22 nt, Human
ucuucauggucugguucuccag

SEQ ID NO: 83631 - RNA, 22 nt, Human
ucuucaugucaugguauauuga

SEQ ID NO: 83632 - RNA, 22 nt, Human
ucuucaugucucugcuugaguc

SEQ ID NO: 83633 - RNA, 22 nt, Human
ucuucauucucgccuuugucgu

SEQ ID NO: 83634 - RNA, 22 nt, Human
ucuucauuuugaagaggcagaa

SEQ ID NO: 83635 - RNA, 22 nt, Human
ucuuccaaaugcagcuaaagcu

SEQ ID NO: 83636 - RNA, 21 nt, Human
ucuuccaagggcugcugagac

SEQ ID NO: 83637 - RNA, 22 nt, Human
ucuuccagagccuccaucccua

SEQ ID NO: 83638 - RNA, 19 nt, Human
ucuuccagcaucugggggc

SEQ ID NO: 83639 - RNA, 20 nt, Human
ucuuccagguacagucugca

SEQ ID NO: 83640 - RNA, 22 nt, Human
ucuuccagugcuguguagagcu

SEQ ID NO: 83641 - RNA, 22 nt, Human
ucuucccagcugcugcgaugcc

SEQ ID NO: 83642 - RNA, 22 nt, Human
ucuucccauuaguaaugaagug

SEQ ID NO: 83643 - RNA, 22 nt, Human
ucuucccucuucugccaaauac

SEQ ID NO: 83644 - RNA, 19 nt, Human
ucuucccuggcugucaguc

SEQ ID NO: 83645 - RNA, 22 nt, Human
ucuuccuaguuacauaugcaca

SEQ ID NO: 83646 - RNA, 22 nt, Human
ucuuccuauggggcugcaggaa

SEQ ID NO: 83647 - RNA, 22 nt, Human
ucuuccucucuaauugaucaga

SEQ ID NO: 83648 - RNA, 22 nt, Human
ucuuccucuucugcugagaagu

SEQ ID NO: 83649 - RNA, 21 nt, Human
ucuuccugacauaugcaaggc

SEQ ID NO: 83650 - RNA, 21 nt, Human
ucuuccugcuccacacucccc

SEQ ID NO: 83651 - RNA, 22 nt, Human
ucuuccugcuuuggugaggcuu

SEQ ID NO: 83652 - RNA, 16 nt, Human
ucuuccuuuugauuuu

SEQ ID NO: 83653 - RNA, 17 nt, Human
ucuucgggcgcuaggua

SEQ ID NO: 83654 - RNA, 22 nt, Human
ucuucuccaguucauccuacca

SEQ ID NO: 83655 - RNA, 22 nt, Human
ucuucucuccugcuuggcagaa

SEQ ID NO: 83656 - RNA, 19 nt, Human
ucuucugacuucaagaaac

SEQ ID NO: 83657 - RNA, 22 nt, Human
ucuucugagacuucucuuuggu

SEQ ID NO: 83658 - RNA, 22 nt, Human
ucuucugaugccaguaaccaug

SEQ ID NO: 83659 - RNA, 22 nt, Human
ucuucuggaucgaucacauugu

SEQ ID NO: 83660 - RNA, 22 nt, Human
ucuucuggaugagagcggaggc

SEQ ID NO: 83661 - RNA, 22 nt, Human
ucuucuuaugugccauuaucuc

SEQ ID NO: 83662 - RNA, 23 nt, Human
ucuugaaaagccuacagcaguuc

SEQ ID NO: 83663 - RNA, 22 nt, Human
ucuugaaaguaucuuauuuugu

SEQ ID NO: 83664 - RNA, 22 nt, Human
ucuugaaggggggcaguguuga

SEQ ID NO: 83665 - RNA, 22 nt, Human
ucuugaauaaguuucaugagcu

SEQ ID NO: 83666 - RNA, 22 nt, Human
ucuugacauugcaaucuucaga

SEQ ID NO: 83667 - RNA, 22 nt, Human
ucuugacauuguuguuagcagg

SEQ ID NO: 83668 - RNA, 19 nt, Human
ucuugaggaaaguaaggca

SEQ ID NO: 83669 - RNA, 19 nt, Human
ucuugaugagguuucucca

SEQ ID NO: 83670 - RNA, 22 nt, Human
ucuugaugcuuuuucuaaaugu

SEQ ID NO: 83671 - RNA, 21 nt, Human
ucuugauuauuggccucacac

SEQ ID NO: 83672 - RNA, 22 nt, Human
ucuugauuuacucuaauagcuu

SEQ ID NO: 83673 - RNA, 22 nt, Human
ucuugauuuguaaaagaaggau

SEQ ID NO: 83674 - RNA, 22 nt, Human
ucuugauuuuguuaaaauuaga

SEQ ID NO: 83675 - RNA, 22 nt, Human
uaacacuuuggauuaaaauucu

SEQ ID NO: 83676 - RNA, 22 nt, Human
uaacagaaaggggacagaaaua

SEQ ID NO: 83677 - RNA, 22 nt, Human
uaacagaauagcagaaacagaa

SEQ ID NO: 83678 - RNA, 22 nt, Human
uaacagaauccuguuauugcca

SEQ ID NO: 83679 - RNA, 22 nt, Human
uaacagagauagaaauguaaag

SEQ ID NO: 83680 - RNA, 22 nt, Human
uaacagaguaacagguauguaa

SEQ ID NO: 83681 - RNA, 22 nt, Human
uaacagcaggguuacaggcauu

SEQ ID NO: 83682 - RNA, 22 nt, Human
uaacagcaguccucuucucaug

SEQ ID NO: 83683 - RNA, 22 nt, Human
uaacagcuggcguuauaggaau

SEQ ID NO: 83684 - RNA, 22 nt, Human
uaacaggguaggagggcaugaa

SEQ ID NO: 83685 - RNA, 22 nt, Human
uaacaguacauccuuuucucuu

SEQ ID NO: 83686 - RNA, 22 nt, Human
uaacaguagccuuauguggucu

SEQ ID NO: 83687 - RNA, 22 nt, Human
uaacaguauauuuaccaaaccu

SEQ ID NO: 83688 - RNA, 22 nt, Human
uaacagugugaggucucaggcg

SEQ ID NO: 83689 - RNA, 22 nt, Human
uaacaguguguccagucaguuu

SEQ ID NO: 83690 - RNA, 22 nt, Human
uaacaucaaacauguuuuaaag

SEQ ID NO: 83691 - RNA, 22 nt, Human
uaacauccuacacuguugucuu

SEQ ID NO: 83692 - RNA, 22 nt, Human
uaacaucugggcugcguccuga

SEQ ID NO: 83693 - RNA, 22 nt, Human
uaacaugauuugcuauuuagau

SEQ ID NO: 83694 - RNA, 22 nt, Human
uaacauguguauugguuuccua

SEQ ID NO: 83695 - RNA, 22 nt, Human
uaacauguucagacuaccugug

SEQ ID NO: 83696 - RNA, 22 nt, Human
uaacauuacagacaccuugugu

SEQ ID NO: 83697 - RNA, 22 nt, Human
uaacauuagguagacauaagcc

SEQ ID NO: 83698 - RNA, 22 nt, Human
uaacauucccuuugugccaagg

SEQ ID NO: 83699 - RNA, 22 nt, Human
uaacauuucggugacaguggga

SEQ ID NO: 83700 - RNA, 22 nt, Human
uaacauuugcugucuccuaugu

SEQ ID NO: 83701 - RNA, 22 nt, Human
uaaccagcaugaaaucugcagc

SEQ ID NO: 83702 - RNA, 22 nt, Human
uaaccaugcaugucucuaguuu

SEQ ID NO: 83703 - RNA, 22 nt, Human
uaaccugacugcucuuuagaau

SEQ ID NO: 83704 - RNA, 22 nt, Human
uaaccugcugugcuggucaguc

SEQ ID NO: 83705 - RNA, 22 nt, Human
uaaccuggaugugccaacguga

SEQ ID NO: 83706 - RNA, 22 nt, Human
uaaccuggggccugaagaccau

SEQ ID NO: 83707 - RNA, 22 nt, Human
uaaccuuucaggcauguagguu

SEQ ID NO: 83708 - RNA, 22 nt, Human
uaacguuugauaacuucuguuc

SEQ ID NO: 83709 - RNA, 22 nt, Human
uaacuaagugacucaagugauc

SEQ ID NO: 83710 - RNA, 22 nt, Human
uaacuacauuucacugcaauua

SEQ ID NO: 83711 - RNA, 22 nt, Human
uaacucacuccaaaaaggcauu

SEQ ID NO: 83712 - RNA, 22 nt, Human
uaacucugcuuguucucugagu

SEQ ID NO: 83713 - RNA, 23 nt, Human
uaacucugugaagggugacuggg

SEQ ID NO: 83714 - RNA, 22 nt, Human
uaacugaaaaucccucuucucc

SEQ ID NO: 83715 - RNA, 22 nt, Human
uaacugaacagccuaauucuuu

SEQ ID NO: 83716 - RNA, 22 nt, Human
uaacugaacaucucaaaucaag

SEQ ID NO: 83717 - RNA, 22 nt, Human
uaacugaagcuggaagcgcugg

SEQ ID NO: 83718 - RNA, 22 nt, Human
uaacugaauguauuacaacaga

SEQ ID NO: 83719 - RNA, 22 nt, Human
uaacugauguucccuuacugua

SEQ ID NO: 83720 - RNA, 22 nt, Human
uaacugguagauuuuaaaucgg

SEQ ID NO: 83721 - RNA, 22 nt, Human
uaacuggugaguugguugagug

SEQ ID NO: 83722 - RNA, 19 nt, Human
uaacugguuaaaaagcuug

SEQ ID NO: 83723 - RNA, 18 nt, Human
uaacugguuucuucccau

SEQ ID NO: 83724 - RNA, 22 nt, Human
uaacuguacaacugguuaguca

SEQ ID NO: 83725 - RNA, 22 nt, Human
uaacuguauauuaagguggccc

SEQ ID NO: 83726 - RNA, 22 nt, Human
uaacugugaaguaauuguggau

SEQ ID NO: 83727 - RNA, 22 nt, Human
uaacugugugaacgugaucauu

SEQ ID NO: 83728 - RNA, 22 nt, Human
uaacuguugugcgggucucugg

SEQ ID NO: 83729 - RNA, 22 nt, Human
uaacuucaaaauugccacaugu

SEQ ID NO: 83730 - RNA, 22 nt, Human
uaacuucacuggacucagcagc

SEQ ID NO: 83731 - RNA, 22 nt, Human
uaacuucuuugguuuaaagaga

SEQ ID NO: 83732 - RNA, 22 nt, Human
uaacuugaacauggagaguaag

SEQ ID NO: 83733 - RNA, 22 nt, Human
uaacuuuaugacaugucuugcu

SEQ ID NO: 83734 - RNA, 20 nt, Human
uaacuuucuaugcuuucagc

SEQ ID NO: 83735 - RNA, 22 nt, Human
uaacuuuuacuuaccaucugag

SEQ ID NO: 83736 - RNA, 22 nt, Human
uaacuuuucuaggugugauaau

SEQ ID NO: 83737 - RNA, 22 nt, Human
uaagaaacuauggagaagaacu

SEQ ID NO: 83738 - RNA, 22 nt, Human
uaagaaacuuaacugggaacua

SEQ ID NO: 83739 - RNA, 20 nt, Human
uaagaacaagacuaggaagc

SEQ ID NO: 83740 - RNA, 22 nt, Human
uaagaacagauaaaguuucccc

SEQ ID NO: 83741 - RNA, 22 nt, Human
uaagaacagugucugucucaca

SEQ ID NO: 83742 - RNA, 22 nt, Human
uaagaacaguguuucaucucua

SEQ ID NO: 83743 - RNA, 22 nt, Human
uagcacacgcauuagcaaauca

SEQ ID NO: 83744 - RNA, 22 nt, Human
uagcacagagcuuuuaaacuuc

SEQ ID NO: 83745 - RNA, 22 nt, Human
uagcacagggcauaugcggugg

SEQ ID NO: 83746 - RNA, 22 nt, Human
uagcacccauggaaucugcugg

SEQ ID NO: 83747 - RNA, 22 nt, Human
uagcaccugugcacaccaggca

SEQ ID NO: 83748 - RNA, 22 nt, Human
uagcacuaucuugggauuugga

SEQ ID NO: 83749 - RNA, 22 nt, Human
uagcacugagucuagcuuugga

SEQ ID NO: 83750 - RNA, 21 nt, Human
uagcacuucgcuguaauuggg

SEQ ID NO: 83751 - RNA, 21 nt, Human
uagcagaaacaguucaggcca

SEQ ID NO: 83752 - RNA, 22 nt, Human
uagcagaaccagcagucaauuu

SEQ ID NO: 83753 - RNA, 22 nt, Human
uagcagaaccagucagugagcc

SEQ ID NO: 83754 - RNA, 21 nt, Human
uagcagagaguuaacuucucc

SEQ ID NO: 83755 - RNA, 21 nt, Human
uagcagagaucauuuucuccu

SEQ ID NO: 83756 - RNA, 22 nt, Human
uagcagaggaaauccagaguaa

SEQ ID NO: 83757 - RNA, 22 nt, Human
uagcagaggcaaggaugugaau

SEQ ID NO: 83758 - RNA, 22 nt, Human
uagcagaggcuacugcuccuug

SEQ ID NO: 83759 - RNA, 22 nt, Human
uagcagagugauuggccaugag

SEQ ID NO: 83760 - RNA, 22 nt, Human
uagcagaguuugguaccugggg

SEQ ID NO: 83761 - RNA, 22 nt, Human
uagcagcacaaauggacuauga

SEQ ID NO: 83762 - RNA, 22 nt, Human
uagcagcaccuuucuaaucuga

SEQ ID NO: 83763 - RNA, 20 nt, Human
uagcagcagaaagaacuuag

SEQ ID NO: 83764 - RNA, 17 nt, Human
uagcagcaguaauugug

SEQ ID NO: 83765 - RNA, 22 nt, Human
uagcagcauuaauuccauuugc

SEQ ID NO: 83766 - RNA, 22 nt, Human
uagcagcuaugccauuuugaca

SEQ ID NO: 83767 - RNA, 22 nt, Human
uagcagcugcaucauuuuacag

SEQ ID NO: 83768 - RNA, 22 nt, Human
uagcagcuggggcuauucauca

SEQ ID NO: 83769 - RNA, 22 nt, Human
uagcagcugucaguuucacaua

SEQ ID NO: 83770 - RNA, 22 nt, Human
uagcagcuuccagagagggcag

SEQ ID NO: 83771 - RNA, 22 nt, Human
uagcaggaauaugagguuaaua

SEQ ID NO: 83772 - RNA, 21 nt, Human
uagcaggaggccccugcuugc

SEQ ID NO: 83773 - RNA, 22 nt, Human
uagcaggcaucucagagauaau

SEQ ID NO: 83774 - RNA, 22 nt, Human
uagcagggaagaugaucagaau

SEQ ID NO: 83775 - RNA, 22 nt, Human
uagcagggagggccagugucaa

SEQ ID NO: 83776 - RNA, 22 nt, Human
uagcagggauacaaggucgccu

SEQ ID NO: 83777 - RNA, 18 nt, Human
uagcagggcuuguccuuu

SEQ ID NO: 83778 - RNA, 22 nt, Human
uagcaggugcucauuuaacucc

SEQ ID NO: 83779 - RNA, 22 nt, Human
uagcaguacugggcauguguuu

SEQ ID NO: 83780 - RNA, 22 nt, Human
uagcaguauuccggaauacuuu

SEQ ID NO: 83781 - RNA, 22 nt, Human
uagcagugccaggauuuugcug

SEQ ID NO: 83782 - RNA, 22 nt, Human
uagcaguuaaucugagccaaga

SEQ ID NO: 83783 - RNA, 22 nt, Human
uagcauauggaggguaagaggg

SEQ ID NO: 83784 - RNA, 22 nt, Human
ugagacgaagucuugcucuguu

SEQ ID NO: 83785 - RNA, 22 nt, Human
ugagacuuaagaggucauguug

SEQ ID NO: 83786 - RNA, 22 nt, Human
ugagacuuccugaugaggcccg

SEQ ID NO: 83787 - RNA, 22 nt, Human
ugagagacacacugugcaugua

SEQ ID NO: 83788 - RNA, 22 nt, Human
ugagagaguaauugagugguaa

SEQ ID NO: 83789 - RNA, 22 nt, Human
ugagagauuuucaugagugcuu

SEQ ID NO: 83790 - RNA, 17 nt, Human
ugagagcagggcugggc

SEQ ID NO: 83791 - RNA, 23 nt, Human
ugagagccuggcagccuggguuc

SEQ ID NO: 83792 - RNA, 22 nt, Human
ugagagcugaagauauguuaac

SEQ ID NO: 83793 - RNA, 22 nt, Human
ugagagcuguccaccuguggga

SEQ ID NO: 83794 - RNA, 22 nt, Human
ugagagcuugaguaucacuggc

SEQ ID NO: 83795 - RNA, 18 nt, Human
ugagaggcagguagagga

SEQ ID NO: 83796 - RNA, 19 nt, Human
ugagaggcuuaaggcagcu

SEQ ID NO: 83797 - RNA, 22 nt, Human
ugagaggugaggcaugaggcau

SEQ ID NO: 83798 - RNA, 22 nt, Human
ugagaguagagucuucaucugu

SEQ ID NO: 83799 - RNA, 22 nt, Human
ugagauaacucugauuuauguu

SEQ ID NO: 83800 - RNA, 22 nt, Human
ugagauaauacuucuuagcugg

SEQ ID NO: 83801 - RNA, 22 nt, Human
ugagaucacuuacguggcugca

SEQ ID NO: 83802 - RNA, 22 nt, Human
ugagaucauauguacaaggucu

SEQ ID NO: 83803 - RNA, 22 nt, Human
ugagaucauugacuuguuccug

SEQ ID NO: 83804 - RNA, 22 nt, Human
ugagaucauuuauuuaccuuuc

SEQ ID NO: 83805 - RNA, 23 nt, Human
ugagaucgcccagcugguaggca

SEQ ID NO: 83806 - RNA, 23 nt, Human
ugagaucuuuguaguaucaauga

SEQ ID NO: 83807 - RNA, 22 nt, Human
ugagaugaaagcagaaagacuu

SEQ ID NO: 83808 - RNA, 19 nt, Human
ugagaugccuuccagcccu

SEQ ID NO: 83809 - RNA, 17 nt, Human
ugagauggaagaagacu

SEQ ID NO: 83810 - RNA, 22 nt, Human
ugagauggcugggccccaggag

SEQ ID NO: 83811 - RNA, 22 nt, Human
ugagauggguggguagccaagg

SEQ ID NO: 83812 - RNA, 22 nt, Human
ugagaugguugaccagagagca

SEQ ID NO: 83813 - RNA, 22 nt, Human
ugagauucuguucagaaaaaug

SEQ ID NO: 83814 - RNA, 22 nt, Human
ugagauuuggaaaauuugauau

SEQ ID NO: 83815 - RNA, 20 nt, Human
ugagauuuguauuauaaguc

SEQ ID NO: 83816 - RNA, 22 nt, Human
ugagcaaaaguugauggugcuu

SEQ ID NO: 83817 - RNA, 22 nt, Human
ugagcaauaugugaauuuucuu

SEQ ID NO: 83818 - RNA, 20 nt, Human
ugagcaccaagaaucaagaa

SEQ ID NO: 83819 - RNA, 22 nt, Human
ugagcaccaggcaccacagcuc

SEQ ID NO: 83820 - RNA, 22 nt, Human
ugagcaccucccugacaguggg

SEQ ID NO: 83821 - RNA, 22 nt, Human
ugagcagaaaagaaugcugagc

SEQ ID NO: 83822 - RNA, 22 nt, Human
ugagcagaggagugacguaggu

SEQ ID NO: 83823 - RNA, 22 nt, Human
ugagcagauuuguucuaggggu

SEQ ID NO: 83824 - RNA, 22 nt, Human
ugagcagcaacuguccauggca

SEQ ID NO: 83825 - RNA, 22 nt, Human
ugagcaggacucacugcagccu

SEQ ID NO: 83826 - RNA, 22 nt, Human
ugagcaggagauaaacagguag

SEQ ID NO: 83827 - RNA, 22 nt, Human
ugagcagggacuuugaguguag

SEQ ID NO: 83828 - RNA, 22 nt, Human
ugagcagggacuuuggagucug

SEQ ID NO: 83829 - RNA, 22 nt, Human
ugagcagggagcugggcugagc

SEQ ID NO: 83830 - RNA, 22 nt, Human
ugagcaggucaggaaguacauu

SEQ ID NO: 83831 - RNA, 22 nt, Human
ugagcaguggcaccaggucacc

SEQ ID NO: 83832 - RNA, 22 nt, Human
ugagcaguucgacuucuucccc

SEQ ID NO: 83833 - RNA, 22 nt, Human
ugagcaucuucgugaaagcuuc

SEQ ID NO: 83834 - RNA, 20 nt, Human
ugagccaaacgaugaagagc

SEQ ID NO: 83835 - RNA, 22 nt, Human
ugagccaaggccucaagaauuu

SEQ ID NO: 83836 - RNA, 22 nt, Human
ugagccaaguucacaccauugc

SEQ ID NO: 83837 - RNA, 22 nt, Human
ugagccaaugauuugaauagag

SEQ ID NO: 83838 - RNA, 21 nt, Human
ugagccaggcugacggcugug

SEQ ID NO: 83839 - RNA, 19 nt, Human
ugagccagggaggccaugc

SEQ ID NO: 83840 - RNA, 20 nt, Human
ugagccagucaagcuacauu

SEQ ID NO: 83841 - RNA, 22 nt, Human
ugagccagugugguaaagcuga

SEQ ID NO: 83842 - RNA, 22 nt, Human
ugagcccagaagcccacucggc

SEQ ID NO: 83843 - RNA, 22 nt, Human
ugagcccagagaucugagcuau

SEQ ID NO: 83844 - RNA, 22 nt, Human
ugagcccagagcccuuguaggg

SEQ ID NO: 83845 - RNA, 23 nt, Human
ugagcccaggaggucaaggcugc

SEQ ID NO: 83846 - RNA, 22 nt, Human
ugagccccaggaaauugaggag

SEQ ID NO: 83847 - RNA, 22 nt, Human
ugagcccuaauuuacaacaucu

SEQ ID NO: 83848 - RNA, 22 nt, Human
ugagcccucggcuggggcagag

SEQ ID NO: 83849 - RNA, 22 nt, Human
ugagcccugaggaucuguucgg

SEQ ID NO: 83850 - RNA, 22 nt, Human
ugagcccuugacaucgcccacu

SEQ ID NO: 83851 - RNA, 18 nt, Human
ugagccgguagauggggu

SEQ ID NO: 83852 - RNA, 22 nt, Human
ugagccugcaauaagcacagcc

SEQ ID NO: 83853 - RNA, 22 nt, Human
ugagccugccugcaggugugcu

SEQ ID NO: 83854 - RNA, 22 nt, Human
ugagccugcugucgcuggaccc

SEQ ID NO: 83855 - RNA, 22 nt, Human
ugagccuggagcccagauguuu

SEQ ID NO: 83856 - RNA, 22 nt, Human
ugagccuggagucguggagggg

SEQ ID NO: 83857 - RNA, 22 nt, Human
ugagccuggcggaagcagcgug

SEQ ID NO: 83858 - RNA, 22 nt, Human
ugagcuaggugugcagauauga

SEQ ID NO: 83859 - RNA, 22 nt, Human
uaaagucaagguacuguuucac

SEQ ID NO: 83860 - RNA, 22 nt, Human
uaaagucagauaucuggguuga

SEQ ID NO: 83861 - RNA, 22 nt, Human
uaaagucauaagaguggauccg

SEQ ID NO: 83862 - RNA, 22 nt, Human
uaaagugcagauugugauucag

SEQ ID NO: 83863 - RNA, 22 nt, Human
uaaagugcaggcuacucagaag

SEQ ID NO: 83864 - RNA, 22 nt, Human
uaaagugcaugcggggccagau

SEQ ID NO: 83865 - RNA, 23 nt, Human
uaaagugcugauggugagggagc

SEQ ID NO: 83866 - RNA, 22 nt, Human
uaaagugcugggauuauaggcc

SEQ ID NO: 83867 - RNA, 22 nt, Human
uaaagugcuuccuaacccagag

SEQ ID NO: 83868 - RNA, 22 nt, Human
uaaaguguguauauacauaugg

SEQ ID NO: 83869 - RNA, 22 nt, Human
uaaaguucuggugagagguaag

SEQ ID NO: 83870 - RNA, 22 nt, Human
uaaaguucuuagaacaaggccu

SEQ ID NO: 83871 - RNA, 22 nt, Human
uaaauaagucacugaccauuua

SEQ ID NO: 83872 - RNA, 22 nt, Human
uaaauaaguucuucauuguuug

SEQ ID NO: 83873 - RNA, 22 nt, Human
uaaauacuuaguuuugugucua

SEQ ID NO: 83874 - RNA, 22 nt, Human
uaaauacuuuuacuccacugau

SEQ ID NO: 83875 - RNA, 22 nt, Human
uaaauagaaucuaaacugcuca

SEQ ID NO: 83876 - RNA, 22 nt, Human
uaaauagagaaucagcuuggag

SEQ ID NO: 83877 - RNA, 22 nt, Human
uaaauagggaauagaagaggaa

SEQ ID NO: 83878 - RNA, 22 nt, Human
uaaauaucaccuggaauuguua

SEQ ID NO: 83879 - RNA, 22 nt, Human
uaaaucacuguucauuccacac

SEQ ID NO: 83880 - RNA, 22 nt, Human
uaaaucaguaaggcauauucuc

SEQ ID NO: 83881 - RNA, 22 nt, Human
uaaaucaguagauaugguauag

SEQ ID NO: 83882 - RNA, 22 nt, Human
uaaaucucacuggguauauugg

SEQ ID NO: 83883 - RNA, 19 nt, Human
uaaaucuguauucuucaaa

SEQ ID NO: 83884 - RNA, 22 nt, Human
uaaaucuuguggcaaugcuucu

SEQ ID NO: 83885 - RNA, 22 nt, Human
uaaaugacaacaccugcuuuug

SEQ ID NO: 83886 - RNA, 22 nt, Human
uaaaugacccaugcugaccuca

SEQ ID NO: 83887 - RNA, 22 nt, Human
uaaaugagauuuguucuuuugu

SEQ ID NO: 83888 - RNA, 22 nt, Human
uaaaugagggcugacaugauug

SEQ ID NO: 83889 - RNA, 22 nt, Human
uaaaugcuaucgcauaaaaccu

SEQ ID NO: 83890 - RNA, 22 nt, Human
uaaaugucaaugugauuuauaa

SEQ ID NO: 83891 - RNA, 22 nt, Human
uaaaugugcacuuuacuuuuca

SEQ ID NO: 83892 - RNA, 22 nt, Human
uaaauguggagacucaggaguc

SEQ ID NO: 83893 - RNA, 22 nt, Human
ugaguggguuaucaggaaaggu

SEQ ID NO: 83894 - RNA, 23 nt, Human
ugagugugaaaauccuggagaug

SEQ ID NO: 83895 - RNA, 17 nt, Human
ugaguuaaguuuagauc

SEQ ID NO: 83896 - RNA, 22 nt, Human
ugaguuauaaugaauauuugaa

SEQ ID NO: 83897 - RNA, 22 nt, Human
ugaguucaaauuuuggcucugc

SEQ ID NO: 83898 - RNA, 18 nt, Human
ugaguucauuagacuucc

SEQ ID NO: 83899 - RNA, 22 nt, Human
ugaguucucacccauucuucuu

SEQ ID NO: 83900 - RNA, 23 nt, Human
ugaguucucaucuuggcuucuau

SEQ ID NO: 83901 - RNA, 22 nt, Human
ugaguucugcccuacaccugaa

SEQ ID NO: 83902 - RNA, 22 nt, Human
ugaguugaaagacugacuucug

SEQ ID NO: 83903 - RNA, 22 nt, Human
ugaguuuuggaagacaacacaa

SEQ ID NO: 83904 - RNA, 22 nt, Human
ugauaaacagcugaugaagacc

SEQ ID NO: 83905 - RNA, 22 nt, Human
ugauaaacuuagaaagaauguu

SEQ ID NO: 83906 - RNA, 22 nt, Human
ugauaaauccauguaaauggua

SEQ ID NO: 83907 - RNA, 22 nt, Human
ugauaacuuuaauuugaucuga

SEQ ID NO: 83908 - RNA, 22 nt, Human
ugauaauauuuugaaucauaag

SEQ ID NO: 83909 - RNA, 22 nt, Human
ugauacuuuucuuuuagacuaa

SEQ ID NO: 83910 - RNA, 21 nt, Human
ugauaggguuugggcaauuau

SEQ ID NO: 83911 - RNA, 17 nt, Human
ugauaguucauuuuaag

SEQ ID NO: 83912 - RNA, 20 nt, Human
ugauauauuacucaggggaa

SEQ ID NO: 83913 - RNA, 22 nt, Human
ugauaugggaaaagggcucgga

SEQ ID NO: 83914 - RNA, 22 nt, Human
ugauauguaacuacuccuuaua

SEQ ID NO: 83915 - RNA, 20 nt, Human
ugauauuucuggaaguggag

SEQ ID NO: 83916 - RNA, 22 nt, Human
ugaucaaagccaaaguugagau

SEQ ID NO: 83917 - RNA, 22 nt, Human
ugaucaaauucaggagucugga

SEQ ID NO: 83918 - RNA, 20 nt, Human
ugaucaugugaaagucaugu

SEQ ID NO: 83919 - RNA, 22 nt, Human
ugauccuauuucaguguauguu

SEQ ID NO: 83920 - RNA, 18 nt, Human
ugaucuuucaugauucca

SEQ ID NO: 83921 - RNA, 22 nt, Human
ugaucuuugggccauuaauaaa

SEQ ID NO: 83922 - RNA, 22 nt, Human
ugaucuuuucaaagacaagcuu

SEQ ID NO: 83923 - RNA, 22 nt, Human
ugaugaaaauaugauucugagg

SEQ ID NO: 83924 - RNA, 22 nt, Human
ugaugaauuaguaacaaaugag

SEQ ID NO: 83925 - RNA, 22 nt, Human
ugaugaccgccaacguuuaggu

SEQ ID NO: 83926 - RNA, 22 nt, Human
ugaugaggaccuggucucugcu

SEQ ID NO: 83927 - RNA, 21 nt, Human
ugaugaggucauagcacccuc

SEQ ID NO: 83928 - RNA, 22 nt, Human
ugaugauguuuaucuugguauu

SEQ ID NO: 83929 - RNA, 22 nt, Human
ugaugcauugccgacuuacugg

SEQ ID NO: 83930 - RNA, 22 nt, Human
ugaugccuaugaauuguaaugu

SEQ ID NO: 83931 - RNA, 22 nt, Human
ugaugcugcugggaguggugcu

SEQ ID NO: 83932 - RNA, 22 nt, Human
ugauggaacagccuuugccaaa

SEQ ID NO: 83933 - RNA, 22 nt, Human
ugauggaagugacugucaguuc

SEQ ID NO: 83934 - RNA, 19 nt, Human
ugauggaauuugacauucc

SEQ ID NO: 83935 - RNA, 22 nt, Human
ugauggagcaugugugcuuccu

SEQ ID NO: 83936 - RNA, 22 nt, Human
ugauggcugugcugauguuagg

SEQ ID NO: 83937 - RNA, 22 nt, Human
ugaugggacugccagcugcuga

SEQ ID NO: 83938 - RNA, 22 nt, Human
ugauggugaugguugcacaaug

SEQ ID NO: 83939 - RNA, 22 nt, Human
ugaugguuuuauuaauaggacc

SEQ ID NO: 83940 - RNA, 22 nt, Human
ugauguaagagauacacuugau

SEQ ID NO: 83941 - RNA, 22 nt, Human
ugauguccucaugucaagcucc

SEQ ID NO: 83942 - RNA, 22 nt, Human
ugaugucuaguacauacaagag

SEQ ID NO: 83943 - RNA, 22 nt, Human
ugauuaaaauuuaacuuaguua

SEQ ID NO: 83944 - RNA, 22 nt, Human
ugauuacacaccacagugcucc

SEQ ID NO: 83945 - RNA, 22 nt, Human
ugauucaacuuucuugaaugca

SEQ ID NO: 83946 - RNA, 22 nt, Human
ugauucaagccaccacauacug

SEQ ID NO: 83947 - RNA, 23 nt, Human
ugauucagcaaguccacuucugg

SEQ ID NO: 83948 - RNA, 19 nt, Human
ugauucaucuaacugccuc

SEQ ID NO: 83949 - RNA, 22 nt, Human
ugauucucacagugggaccuca

SEQ ID NO: 83950 - RNA, 21 nt, Human
ugauucucugacugucggaca

SEQ ID NO: 83951 - RNA, 21 nt, Human
ugauucugcauuucuaacagg

SEQ ID NO: 83952 - RNA, 22 nt, Human
ugauucugcccuuucuucugac

SEQ ID NO: 83953 - RNA, 22 nt, Human
ugauucugcuuauggguggauu

SEQ ID NO: 83954 - RNA, 21 nt, Human
ugauucuguuuuaucaucagc

SEQ ID NO: 83955 - RNA, 22 nt, Human
ugauucuuugaccaaaaaauug

SEQ ID NO: 83956 - RNA, 23 nt, Human
ugauugaaaugaggaguauuugu

SEQ ID NO: 83957 - RNA, 22 nt, Human
ugauugaacugagcuucaagau

SEQ ID NO: 83958 - RNA, 22 nt, Human
ugauugaaguguucuguuccag

SEQ ID NO: 83959 - RNA, 22 nt, Human
ugauugaauauucccuugggcc

SEQ ID NO: 83960 - RNA, 22 nt, Human
ugauugacuuuagaauagcacu

SEQ ID NO: 83961 - RNA, 22 nt, Human
ugauugccuacuaugugccaug

SEQ ID NO: 83962 - RNA, 22 nt, Human
ugauuguaugauugaaauauuu

SEQ ID NO: 83963 - RNA, 22 nt, Human
ugauuguuuuaguucccugaug

SEQ ID NO: 83964 - RNA, 22 nt, Human
ugauuuacacaccuaugauuua

SEQ ID NO: 83965 - RNA, 22 nt, Human
ugauuuaccaguuacuaucuug

SEQ ID NO: 83966 - RNA, 22 nt, Human
ugauuuacuucccagcuggguu

SEQ ID NO: 83967 - RNA, 22 nt, Human
ugauuuaugcauuauacuguug

SEQ ID NO: 83968 - RNA, 21 nt, Human
ugauuuaugcccaagucccug

SEQ ID NO: 83969 - RNA, 22 nt, Human
ugauuucaguaaugaggaugaa

SEQ ID NO: 83970 - RNA, 22 nt, Human
ugauuuccacagucaggggugc

SEQ ID NO: 83971 - RNA, 22 nt, Human
ugauuuccacgugcacccaggu

SEQ ID NO: 83972 - RNA, 22 nt, Human
ugauuucccuguagccucugaa

SEQ ID NO: 83973 - RNA, 22 nt, Human
ugauuucuuccuugucauuaga

SEQ ID NO: 83974 - RNA, 22 nt, Human
ugauuucuucuaauuuccauca

SEQ ID NO: 83975 - RNA, 22 nt, Human
ugauuugaaaccuuuggcaaga

SEQ ID NO: 83976 - RNA, 22 nt, Human
ugauuugcgucucauuugaaau

SEQ ID NO: 83977 - RNA, 22 nt, Human
ugauuuguuacacaggugugug

SEQ ID NO: 83978 - RNA, 23 nt, Human
ugauuuuaaaaaguaaguuauca

SEQ ID NO: 83979 - RNA, 22 nt, Human
ugauuuuauugaaacuucacuu

SEQ ID NO: 83980 - RNA, 22 nt, Human
ugauuuugagguuucaggucuu

SEQ ID NO: 83981 - RNA, 22 nt, Human
ugauuuuuaaaauucuccuugc

SEQ ID NO: 83982 - RNA, 22 nt, Human
ugcaaaaauugcuggaaucuuu

SEQ ID NO: 83983 - RNA, 22 nt, Human
ugcaaaacuucucagagccuuu

SEQ ID NO: 83984 - RNA, 22 nt, Human
uaaguucugaugucuguugcca

SEQ ID NO: 83985 - RNA, 18 nt, Human
uaaguucuuaggcagcuu

SEQ ID NO: 83986 - RNA, 22 nt, Human
uaaguuuaaauguacaugaagc

SEQ ID NO: 83987 - RNA, 22 nt, Human
uaaguuuccagauuguaagucc

SEQ ID NO: 83988 - RNA, 22 nt, Human
uaaguuuggggaaaauguuaag

SEQ ID NO: 83989 - RNA, 22 nt, Human
uaauaaaugaaagugcuggcau

SEQ ID NO: 83990 - RNA, 22 nt, Human
uaauaagcguagaagguauauc

SEQ ID NO: 83991 - RNA, 22 nt, Human
uaauaauuaacagugauggguc

SEQ ID NO: 83992 - RNA, 22 nt, Human
uaauaauuaguuauugaucgug

SEQ ID NO: 83993 - RNA, 22 nt, Human
uaauaauuggcaauguugagca

SEQ ID NO: 83994 - RNA, 22 nt, Human
uaauacacacucucauuccuaa

SEQ ID NO: 83995 - RNA, 22 nt, Human
uaauacaguagcuuuuacacag

SEQ ID NO: 83996 - RNA, 22 nt, Human
uaauacaucauucaucuaagga

SEQ ID NO: 83997 - RNA, 22 nt, Human
uaauacauguauuccagagagu

SEQ ID NO: 83998 - RNA, 22 nt, Human
uaauaccacugugcucauuaua

SEQ ID NO: 83999 - RNA, 22 nt, Human
uaauaccuugaucucucuuguc

SEQ ID NO: 84000 - RNA, 22 nt, Human
uaauacugagccaccagguagg

SEQ ID NO: 84001 - RNA, 22 nt, Human
uaauacuuugaaugagagcuaa

SEQ ID NO: 84002 - RNA, 22 nt, Human
uagauauaucugucauacuggu

SEQ ID NO: 84003 - RNA, 22 nt, Human
uagauaugaugagucacuugag

SEQ ID NO: 84004 - RNA, 22 nt, Human
uagauauggccgucuguuuuaa

SEQ ID NO: 84005 - RNA, 22 nt, Human
uagauauguguuuauuaugcug

SEQ ID NO: 84006 - RNA, 22 nt, Human
uagaucaggcugcuuagauaga

SEQ ID NO: 84007 - RNA, 22 nt, Human
uagaucauuagcgggggugaga

SEQ ID NO: 84008 - RNA, 20 nt, Human
uagauccgcaguaaaacuuu

SEQ ID NO: 84009 - RNA, 22 nt, Human
uagaugaaauguguguuauuau

SEQ ID NO: 84010 - RNA, 22 nt, Human
uagaugaaauuuguguguaugc

SEQ ID NO: 84011 - RNA, 22 nt, Human
uagaugaaugacuuauauguca

SEQ ID NO: 84012 - RNA, 22 nt, Human
uagaugaauuagcaauuaucuu

SEQ ID NO: 84013 - RNA, 22 nt, Human
uagaugcuuauaaagagcauau

SEQ ID NO: 84014 - RNA, 22 nt, Human
uagauggaggcuagaugcaggg

SEQ ID NO: 84015 - RNA, 22 nt, Human
uagauggcaccuucuguguguc

SEQ ID NO: 84016 - RNA, 22 nt, Human
uagauggcguccauggccgcag

SEQ ID NO: 84017 - RNA, 22 nt, Human
uagauggcugguguucugagcu

SEQ ID NO: 84018 - RNA, 22 nt, Human
uagauguuaagcuucuagaagg

SEQ ID NO: 84019 - RNA, 22 nt, Human
uagauguuuuaacucuugguua

SEQ ID NO: 84020 - RNA, 22 nt, Human
uagauuaacaguuuuguugaag

SEQ ID NO: 84021 - RNA, 22 nt, Human
uagauucucagaauuuuagaaa

SEQ ID NO: 84022 - RNA, 22 nt, Human
uagauucuccacauguagcaau

SEQ ID NO: 84023 - RNA, 20 nt, Human
uagauucugucuguccaaac

SEQ ID NO: 84024 - RNA, 22 nt, Human
uagauucuguuuccucugguuu

SEQ ID NO: 84025 - RNA, 22 nt, Human
uagauugagcuugacaguguug

SEQ ID NO: 84026 - RNA, 22 nt, Human
uagauuuccucuuccucauucc

SEQ ID NO: 84027 - RNA, 22 nt, Human
uagauuugaaugauguaaagag

SEQ ID NO: 84028 - RNA, 22 nt, Human
uagauuuuaggagauuuuacug

SEQ ID NO: 84029 - RNA, 18 nt, Human
uagcaaagauguggauug

SEQ ID NO: 84030 - RNA, 22 nt, Human
uagcaaagcuccguaguuauuu

SEQ ID NO: 84031 - RNA, 22 nt, Human
uagcaaaggccuuggacacgcu

SEQ ID NO: 84032 - RNA, 22 nt, Human
uagcaaauaaaacaguauugaa

SEQ ID NO: 84033 - RNA, 22 nt, Human
uagcaaaugccugguuaauuag

SEQ ID NO: 84034 - RNA, 22 nt, Human
uagcaacagaaaauaggagugc

SEQ ID NO: 84035 - RNA, 22 nt, Human
uagcaaccagaacagcacucua

SEQ ID NO: 84036 - RNA, 22 nt, Human
uagcaaccuauggauagagaag

SEQ ID NO: 84037 - RNA, 22 nt, Human
uagcaacguguauaaacucaag

SEQ ID NO: 84038 - RNA, 22 nt, Human
uagcaagacaacuuuucucagu

SEQ ID NO: 84039 - RNA, 22 nt, Human
uagcaagaggugaagguuucau

SEQ ID NO: 84040 - RNA, 22 nt, Human
uagcaaggacguccaaagaacu

SEQ ID NO: 84041 - RNA, 22 nt, Human
uagcaaggcuuccaaugaacag

SEQ ID NO: 84042 - RNA, 22 nt, Human
uagcaauaugcuaccuuaaaug

SEQ ID NO: 84043 - RNA, 22 nt, Human
uagcaauccguugaucccuugc

SEQ ID NO: 84044 - RNA, 20 nt, Human
uagcaaugaguguuccauuu

SEQ ID NO: 84045 - RNA, 22 nt, Human
uagcaaugcucuaugaugaaaa

SEQ ID NO: 84046 - RNA, 22 nt, Human
uagcaauguguugacuugguca

SEQ ID NO: 84047 - RNA, 17 nt, Human
uagcacaaagcaggauu

SEQ ID NO: 84048 - RNA, 22 nt, Human
uagcacaaguaucugcuuuucc

SEQ ID NO: 84049 - RNA, 22 nt, Human
uagcacacugcauaugaagauu

SEQ ID NO: 84050 - RNA, 22 nt, Human
uagcacagacagaauggucaua

SEQ ID NO: 84051 - RNA, 22 nt, Human
uagcacaguauuucucaacugg

SEQ ID NO: 84052 - RNA, 22 nt, Human
uagcacaguguucacaacagug

SEQ ID NO: 84053 - RNA, 22 nt, Human
uagcacaguuccugacucuuug

SEQ ID NO: 84054 - RNA, 22 nt, Human
uagcacaugccgggagugaucu

SEQ ID NO: 84055 - RNA, 22 nt, Human
uagcaccaugauggaagagcug

SEQ ID NO: 84056 - RNA, 22 nt, Human
uagcaccugcaggaugugcaca

SEQ ID NO: 84057 - RNA, 22 nt, Human
uagcaccuggucaauucaguca

SEQ ID NO: 84058 - RNA, 22 nt, Human
uagcacugaaucacaugcugcu

SEQ ID NO: 84059 - RNA, 22 nt, Human
uagcacuuguguuaugccuugu

SEQ ID NO: 84060 - RNA, 22 nt, Human
uagcagaagaaauucagaguug

SEQ ID NO: 84061 - RNA, 22 nt, Human
uagcagagaggggacaguggca

SEQ ID NO: 84062 - RNA, 22 nt, Human
uagcagagagguuucagcuaau

SEQ ID NO: 84063 - RNA, 22 nt, Human
uagcagagcagggaucagagcc

SEQ ID NO: 84064 - RNA, 22 nt, Human
uagcagagcgggugcgaggcgg

SEQ ID NO: 84065 - RNA, 22 nt, Human
uagcagagcugcaauauagacc

SEQ ID NO: 84066 - RNA, 22 nt, Human
uagcagagcugggacuagauua

SEQ ID NO: 84067 - RNA, 22 nt, Human
uagcagaggcugucugacuuaa

SEQ ID NO: 84068 - RNA, 22 nt, Human
uagcagaggguagugccggggc

SEQ ID NO: 84069 - RNA, 22 nt, Human
uagcagaguagugccuccagau

SEQ ID NO: 84070 - RNA, 22 nt, Human
uagcagaguaucuugcaaauua

SEQ ID NO: 84071 - RNA, 22 nt, Human
uagcagcaauucaggugugaug

SEQ ID NO: 84072 - RNA, 22 nt, Human
uagcagcagugguguauuuaga

SEQ ID NO: 84073 - RNA, 22 nt, Human
uagcagcauuuuuguagaguau

SEQ ID NO: 84074 - RNA, 22 nt, Human
uagcagcucacuaacucugcgu

SEQ ID NO: 84075 - RNA, 22 nt, Human
uagcagcuuaaguaauuagaau

SEQ ID NO: 84076 - RNA, 21 nt, Human
uagcaggagcgaauuuugaug

SEQ ID NO: 84077 - RNA, 21 nt, Human
uagcaggauuugguuuauuuu

SEQ ID NO: 84078 - RNA, 22 nt, Human
uagcaggcauggagaugacugu

SEQ ID NO: 84079 - RNA, 22 nt, Human
uagcaggcuugugaauggagcc

SEQ ID NO: 84080 - RNA, 22 nt, Human
uagcagggguagauagagugug

SEQ ID NO: 84081 - RNA, 22 nt, Human
uagcaggguccaaugugaggca

SEQ ID NO: 84082 - RNA, 22 nt, Human
uagcagggucucaggagucagg

SEQ ID NO: 84083 - RNA, 22 nt, Human
uagcaguagcauuuaacauaua

SEQ ID NO: 84084 - RNA, 22 nt, Human
uagcaguauggagcgaggccca

SEQ ID NO: 84085 - RNA, 22 nt, Human
uagcagucaucggcagagaaaa

SEQ ID NO: 84086 - RNA, 22 nt, Human
uagcaguggaaucuuuugucca

SEQ ID NO: 84087 - RNA, 22 nt, Human
uagcaguguugccguuggcugc

SEQ ID NO: 84088 - RNA, 22 nt, Human
uagcauaacagguaagagugag

SEQ ID NO: 84089 - RNA, 22 nt, Human
uagcauaggaaaguacugggaa

SEQ ID NO: 84090 - RNA, 21 nt, Human
uagcaucucuacugucauaga

SEQ ID NO: 84091 - RNA, 22 nt, Human
uagcaugucagucgccacacgu

SEQ ID NO: 84092 - RNA, 22 nt, Human
uagcauucagaacugagagcaa

SEQ ID NO: 84093 - RNA, 22 nt, Human
uagcauuccaucacucagcacc

SEQ ID NO: 84094 - RNA, 22 nt, Human
uagcauuucacugaucuucacu

SEQ ID NO: 84095 - RNA, 22 nt, Human
uagcauuucuggccucuacuca

SEQ ID NO: 84096 - RNA, 22 nt, Human
uagcauuuggcaccaguuauuu

SEQ ID NO: 84097 - RNA, 21 nt, Human
uagcauuuuuguauugcugaa

SEQ ID NO: 84098 - RNA, 22 nt, Human
uagccaaaaaguagcaauuauu

SEQ ID NO: 84099 - RNA, 22 nt, Human
uagccaaagaagguauauuugu

SEQ ID NO: 84100 - RNA, 22 nt, Human
uagccaggcaauuaugggugau

SEQ ID NO: 84101 - RNA, 22 nt, Human
uagccaggccuuugaucccggc

SEQ ID NO: 84102 - RNA, 22 nt, Human
uagccaugagcagaucacuaua

SEQ ID NO: 84103 - RNA, 22 nt, Human
uagccauugacuuaaagcuuau

SEQ ID NO: 84104 - RNA, 22 nt, Human
uagcccagcuuggccuauuucu

SEQ ID NO: 84105 - RNA, 21 nt, Human
uagcccucucugucuguguac

SEQ ID NO: 84106 - RNA, 22 nt, Human
uagcccugcugugaugugaagu

SEQ ID NO: 84107 - RNA, 22 nt, Human
uagcccuggagcagggaaauac

SEQ ID NO: 84108 - RNA, 19 nt, Human
uagcccuggccaucaugag

SEQ ID NO: 84109 - RNA, 22 nt, Human
uagccgcuuaauuauuugguga

SEQ ID NO: 84110 - RNA, 22 nt, Human
uagccucucuccuccacaaccu

SEQ ID NO: 84111 - RNA, 22 nt, Human
uaggccagaggagcagcuuugg

SEQ ID NO: 84112 - RNA, 22 nt, Human
uaggccagauuguuauccaugg

SEQ ID NO: 84113 - RNA, 22 nt, Human
uaggccaggacagagcuuccag

SEQ ID NO: 84114 - RNA, 22 nt, Human
uaggccaguaaaauguuucagu

SEQ ID NO: 84115 - RNA, 18 nt, Human
uaggccaguauacuuuuc

SEQ ID NO: 84116 - RNA, 22 nt, Human
uaggccuaagagauacuacugu

SEQ ID NO: 84117 - RNA, 22 nt, Human
uaggccugguacuguguuaaua

SEQ ID NO: 84118 - RNA, 22 nt, Human
uaggcuccaagagcgaacucag

SEQ ID NO: 84119 - RNA, 22 nt, Human
uaggcuccaguguguggcgagu

SEQ ID NO: 84120 - RNA, 22 nt, Human
uaggcuccucucacauucuauu

SEQ ID NO: 84121 - RNA, 22 nt, Human
uaggcuccugaggacuccaugc

SEQ ID NO: 84122 - RNA, 22 nt, Human
uaggcugagguugaugccaggg

SEQ ID NO: 84123 - RNA, 22 nt, Human
uaggcuggaacuuaggcagagg

SEQ ID NO: 84124 - RNA, 22 nt, Human
uaggcuggggguaggaauugag

SEQ ID NO: 84125 - RNA, 22 nt, Human
ucaauaaguaggauaucaagau

SEQ ID NO: 84126 - RNA, 22 nt, Human
ucaauacacaugccgcuguucu

SEQ ID NO: 84127 - RNA, 17 nt, Human
ucaauacacugcuuuua

SEQ ID NO: 84128 - RNA, 21 nt, Human
ucaauacaggugcaugugucu

SEQ ID NO: 84129 - RNA, 22 nt, Human
ucaauacuuaagcuuaauucua

SEQ ID NO: 84130 - RNA, 22 nt, Human
ucaauauuuuuaugagcauaga

SEQ ID NO: 84131 - RNA, 22 nt, Human
ucaaugagccagaauguaguac

SEQ ID NO: 84132 - RNA, 22 nt, Human
ucaaugaugcugaagguagcgu

SEQ ID NO: 84133 - RNA, 22 nt, Human
ucaaugcaacuuccaccuccca

SEQ ID NO: 84134 - RNA, 22 nt, Human
ucaauguaauaaaauacucuau

SEQ ID NO: 84135 - RNA, 22 nt, Human
ucaaugucagcugguaggaaau

SEQ ID NO: 84136 - RNA, 22 nt, Human
ucaauguccgggccccauucca

SEQ ID NO: 84137 - RNA, 22 nt, Human
ucaaugucucuuucuaaaaugu

SEQ ID NO: 84138 - RNA, 22 nt, Human
ucaaugucugucuaucuauuua

SEQ ID NO: 84139 - RNA, 22 nt, Human
ucaauguucaaguaugacaaug

SEQ ID NO: 84140 - RNA, 22 nt, Human
ucaauguucuugguauauccuu

SEQ ID NO: 84141 - RNA, 22 nt, Human
ucaauguuuguucaugaaaaua

SEQ ID NO: 84142 - RNA, 22 nt, Human
ucaauuaugccauugcaauauu

SEQ ID NO: 84143 - RNA, 22 nt, Human
ucaauucaacacaugcacauug

SEQ ID NO: 84144 - RNA, 22 nt, Human
ucaauucagacugagaaaugau

SEQ ID NO: 84145 - RNA, 22 nt, Human
ucaauucuagagccuuacauug

SEQ ID NO: 84146 - RNA, 22 nt, Human
ucaauucuaguggagagaguuu

SEQ ID NO: 84147 - RNA, 22 nt, Human
ucaauucugccucuaaauauuu

SEQ ID NO: 84148 - RNA, 22 nt, Human
ucaauucugguccucaggaacu

SEQ ID NO: 84149 - RNA, 20 nt, Human
ucaauuucagguagcauagu

SEQ ID NO: 84150 - RNA, 22 nt, Human
ucaauuucauucuauuaguuaa

SEQ ID NO: 84151 - RNA, 22 nt, Human
ucaauuuuaugaaacaaaguga

SEQ ID NO: 84152 - RNA, 22 nt, Human
ucacaaaaggccauguggcuuc

SEQ ID NO: 84153 - RNA, 22 nt, Human
ucacaaagggagggauagcugg

SEQ ID NO: 84154 - RNA, 22 nt, Human
ucacaaagugaagugugucaug

SEQ ID NO: 84155 - RNA, 22 nt, Human
ucacaaauauuuuaacaguagg

SEQ ID NO: 84156 - RNA, 22 nt, Human
ucacaacaggaaggaccagcug

SEQ ID NO: 84157 - RNA, 22 nt, Human
ucacaacugggugucuucauca

SEQ ID NO: 84158 - RNA, 22 nt, Human
ucacaagauggcugcugcagcc

SEQ ID NO: 84159 - RNA, 22 nt, Human
ucacaaggauaagccacauaua

SEQ ID NO: 84160 - RNA, 19 nt, Human
ucacaaggccucuuagucu

SEQ ID NO: 84161 - RNA, 22 nt, Human
ucacaagggcccugcaguccac

SEQ ID NO: 84162 - RNA, 22 nt, Human
ucacaauacucacucaauggcu

SEQ ID NO: 84163 - RNA, 20 nt, Human
ucacaauaugagcucauaca

SEQ ID NO: 84164 - RNA, 22 nt, Human
ucacaauaugggugugggaacu

SEQ ID NO: 84165 - RNA, 22 nt, Human
ucacaaugcaaguguucagugg

SEQ ID NO: 84166 - RNA, 22 nt, Human
ucacacacauaaucuaagauua

SEQ ID NO: 84167 - RNA, 22 nt, Human
ucacacacauggauaguauuuu

SEQ ID NO: 84168 - RNA, 22 nt, Human
ucacacagcagccccggguguu

SEQ ID NO: 84169 - RNA, 22 nt, Human
ucacacagcuuggaguuauggu

SEQ ID NO: 84170 - RNA, 22 nt, Human
ucacacagguuugcaaugauuu

SEQ ID NO: 84171 - RNA, 22 nt, Human
ucacacauguaagggcuuugga

SEQ ID NO: 84172 - RNA, 22 nt, Human
ucacacauuugaaggccuguca

SEQ ID NO: 84173 - RNA, 16 nt, Human
ucacacauuuguuggu

SEQ ID NO: 84174 - RNA, 22 nt, Human
ucacaccuguaaucccaggccu

SEQ ID NO: 84175 - RNA, 22 nt, Human
ucacacuaggauguuguuucua

SEQ ID NO: 84176 - RNA, 22 nt, Human
ucacagaaacagaauggcacag

SEQ ID NO: 84177 - RNA, 22 nt, Human
ucacagaacaagccugguggag

SEQ ID NO: 84178 - RNA, 22 nt, Human
ucacagaagcccucgcaaacua

SEQ ID NO: 84179 - RNA, 22 nt, Human
ucacagaaggagggaagcuagu

SEQ ID NO: 84180 - RNA, 22 nt, Human
ucacagaagguggccauagcug

SEQ ID NO: 84181 - RNA, 22 nt, Human
ucacagaaguguagugaggaaa

SEQ ID NO: 84182 - RNA, 18 nt, Human
ucacagaauauugagugg

SEQ ID NO: 84183 - RNA, 20 nt, Human
ucacagaaugccugaagaag

SEQ ID NO: 84184 - RNA, 22 nt, Human
ucacagacaauuguuuuggugu

SEQ ID NO: 84185 - RNA, 22 nt, Human
ucacagacacauuaaacaugug

SEQ ID NO: 84186 - RNA, 19 nt, Human
ucacagacagagcaaucac

SEQ ID NO: 84187 - RNA, 22 nt, Human
ucacagacgcauccucagguag

SEQ ID NO: 84188 - RNA, 22 nt, Human
ucacagacuugucuccagggau

SEQ ID NO: 84189 - RNA, 22 nt, Human
ucacagagaaauguggcacaaa

SEQ ID NO: 84190 - RNA, 22 nt, Human
ucacagagagaauauuguguuu

SEQ ID NO: 84191 - RNA, 22 nt, Human
ucacagagcacacaagaauugc

SEQ ID NO: 84192 - RNA, 22 nt, Human
ucacagagcacguaucaugccu

SEQ ID NO: 84193 - RNA, 22 nt, Human
ucacagagcucacaguuuagca

SEQ ID NO: 84194 - RNA, 22 nt, Human
ucacagcacauggaccgagucc

SEQ ID NO: 84195 - RNA, 22 nt, Human
ucacagcacccugaggugcugg

SEQ ID NO: 84196 - RNA, 22 nt, Human
ucacagcagaauuuaggaggca

SEQ ID NO: 84197 - RNA, 22 nt, Human
ucacagcaggguaacaggaaga

SEQ ID NO: 84198 - RNA, 22 nt, Human
ucacagcauucgcaauggacag

SEQ ID NO: 84199 - RNA, 22 nt, Human
ucacagcucugucaauuuuaua

SEQ ID NO: 84200 - RNA, 22 nt, Human
ucacaggacagccuuccacccg

SEQ ID NO: 84201 - RNA, 22 nt, Human
ucacaggagcccaggggagcug

SEQ ID NO: 84202 - RNA, 20 nt, Human
ucacaggagggaaggcaggu

SEQ ID NO: 84203 - RNA, 22 nt, Human
ucacaggauaagguggcaucac

SEQ ID NO: 84204 - RNA, 22 nt, Human
ucacaggcaaagaagauuggug

SEQ ID NO: 84205 - RNA, 19 nt, Human
ucacaggcaucuccccaga

SEQ ID NO: 84206 - RNA, 22 nt, Human
ucacaggcucuagggauuaaga

SEQ ID NO: 84207 - RNA, 22 nt, Human
ucacaggcuugugaacauugca

SEQ ID NO: 84208 - RNA, 22 nt, Human
ucacaggguaucugggauggau

SEQ ID NO: 84209 - RNA, 22 nt, Human
ucacaggguuuggaagccuccu

SEQ ID NO: 84210 - RNA, 22 nt, Human
ucacaguaaaagcauggaagag

SEQ ID NO: 84211 - RNA, 22 nt, Human
ucacaguacugugacuauugac

SEQ ID NO: 84212 - RNA, 22 nt, Human
ucacaguauaaccucauauagg

SEQ ID NO: 84213 - RNA, 22 nt, Human
ucacaguaucagguggagugga

SEQ ID NO: 84214 - RNA, 22 nt, Human
ucacagucggugacuucuugcu

SEQ ID NO: 84215 - RNA, 22 nt, Human
ucacagugauaacuaaguccug

SEQ ID NO: 84216 - RNA, 22 nt, Human
ucacagugcaccagugugaagc

SEQ ID NO: 84217 - RNA, 22 nt, Human
ucacagugcaccccucacaggg

SEQ ID NO: 84218 - RNA, 22 nt, Human
ucacagugugaaggucagucac

SEQ ID NO: 84219 - RNA, 22 nt, Human
ucacaguguuggaaucagagcu

SEQ ID NO: 84220 - RNA, 22 nt, Human
uagcauuuauggucaugugucc

SEQ ID NO: 84221 - RNA, 22 nt, Human
uagcauuuggacauugucaccu

SEQ ID NO: 84222 - RNA, 22 nt, Human
uagcauuuuagcuguuuucucu

SEQ ID NO: 84223 - RNA, 22 nt, Human
uagccagugaauguuuccagug

SEQ ID NO: 84224 - RNA, 22 nt, Human
uagccagugagacccagaaaua

SEQ ID NO: 84225 - RNA, 22 nt, Human
uagccaguuucuuuaacagcaa

SEQ ID NO: 84226 - RNA, 22 nt, Human
uagccauguguggaacacagcc

SEQ ID NO: 84227 - RNA, 22 nt, Human
uagcccagcucaaaugaccggu

SEQ ID NO: 84228 - RNA, 22 nt, Human
uagcccauggacuggucagcug

SEQ ID NO: 84229 - RNA, 17 nt, Human
uagcccauggcugccag

SEQ ID NO: 84230 - RNA, 22 nt, Human
uagcccucagcuuggagcgugg

SEQ ID NO: 84231 - RNA, 22 nt, Human
uagcccucuccagcgaggucug

SEQ ID NO: 84232 - RNA, 22 nt, Human
uagcccucuuuaauccuucccu

SEQ ID NO: 84233 - RNA, 22 nt, Human
uagcccuugaugcugcggccag

SEQ ID NO: 84234 - RNA, 22 nt, Human
uagccggguguugugucaugca

SEQ ID NO: 84235 - RNA, 22 nt, Human
uagccucuggaauccuuucucu

SEQ ID NO: 84236 - RNA, 22 nt, Human
uagcgagguguuucuaggacug

SEQ ID NO: 84237 - RNA, 22 nt, Human
uagcgcaacugcagagaaguag

SEQ ID NO: 84238 - RNA, 22 nt, Human
uagcgcaaugagagagcggugc

SEQ ID NO: 84239 - RNA, 17 nt, Human
uagcuagaccgagucuc

SEQ ID NO: 84240 - RNA, 22 nt, Human
uagcuaggguaagacuuggacc

SEQ ID NO: 84241 - RNA, 22 nt, Human
uagcuaguagauggggaagcug

SEQ ID NO: 84242 - RNA, 22 nt, Human
uagcuauuguugguaguuaccc

SEQ ID NO: 84243 - RNA, 22 nt, Human
uaggcuguaagagagggcagag

SEQ ID NO: 84244 - RNA, 22 nt, Human
uaggcuucccgcucacaugccc

SEQ ID NO: 84245 - RNA, 22 nt, Human
uaggcuuuguguuuugggaaca

SEQ ID NO: 84246 - RNA, 22 nt, Human
uagggaaauauagauuuagggc

SEQ ID NO: 84247 - RNA, 22 nt, Human
uagggagaggaagcaggccgcu

SEQ ID NO: 84248 - RNA, 22 nt, Human
uagggagaugcaagggacggag

SEQ ID NO: 84249 - RNA, 22 nt, Human
uagggagcucuggcagaaggaa

SEQ ID NO: 84250 - RNA, 22 nt, Human
uagggaggcuacuucuuguagg

SEQ ID NO: 84251 - RNA, 22 nt, Human
uagggaugaagaugguauuucu

SEQ ID NO: 84252 - RNA, 22 nt, Human
uagggaugaugucuaaaaucau

SEQ ID NO: 84253 - RNA, 22 nt, Human
uagggauggcagcauguagcuu

SEQ ID NO: 84254 - RNA, 22 nt, Human
uagggauguaaacauaguaauu

SEQ ID NO: 84255 - RNA, 22 nt, Human
uagggauguccugagacuuggc

SEQ ID NO: 84256 - RNA, 22 nt, Human
uagggauguggugagaacugag

SEQ ID NO: 84257 - RNA, 22 nt, Human
uagggcagagcuuguacacgau

SEQ ID NO: 84258 - RNA, 22 nt, Human
uagggcagccacccaggcugcu

SEQ ID NO: 84259 - RNA, 23 nt, Human
uagggcagcugggagggacaugc

SEQ ID NO: 84260 - RNA, 21 nt, Human
uagggcaggcauuggaagaga

SEQ ID NO: 84261 - RNA, 22 nt, Human
uagggcaguuauaacauuagug

SEQ ID NO: 84262 - RNA, 22 nt, Human
uagggccaguuagggaagcuuu

SEQ ID NO: 84263 - RNA, 22 nt, Human
uagggcuccacucccagagauu

SEQ ID NO: 84264 - RNA, 22 nt, Human
uagggcucugcucaucaguugu

SEQ ID NO: 84265 - RNA, 22 nt, Human
uagggcucuggugggcucuguu

SEQ ID NO: 84266 - RNA, 22 nt, Human
uagggcugccauuugcuuuucu

SEQ ID NO: 84267 - RNA, 22 nt, Human
uagggcugugucuccaggacca

SEQ ID NO: 84268 - RNA, 23 nt, Human
uaggggaaaaaucuucugcaauu

SEQ ID NO: 84269 - RNA, 22 nt, Human
uaggggaacuggcacagggcag

SEQ ID NO: 84270 - RNA, 22 nt, Human
uaggggaauugcagugugucca

SEQ ID NO: 84271 - RNA, 22 nt, Human
uaggggagcucgggugcaaucg

SEQ ID NO: 84272 - RNA, 22 nt, Human
uaggggugggauccaggaauua

SEQ ID NO: 84273 - RNA, 22 nt, Human
uagggguuaccuuuagcaucuc

SEQ ID NO: 84274 - RNA, 22 nt, Human
uaggguaguaccaugcugccag

SEQ ID NO: 84275 - RNA, 22 nt, Human
uaggguccaagccuuauaauua

SEQ ID NO: 84276 - RNA, 22 nt, Human
uaggguccauauggaugaaugg

SEQ ID NO: 84277 - RNA, 22 nt, Human
uagggugccuuuuauugcugug

SEQ ID NO: 84278 - RNA, 22 nt, Human
uaggguggagacuggaagcagg

SEQ ID NO: 84279 - RNA, 22 nt, Human
uagguacuuaagaucucagcua

SEQ ID NO: 84280 - RNA, 22 nt, Human
uagguagggaccaccuugggga

SEQ ID NO: 84281 - RNA, 22 nt, Human
uaggucagaacaagcaguaucg

SEQ ID NO: 84282 - RNA, 22 nt, Human
uaggucuccuggccuagagauu

SEQ ID NO: 84283 - RNA, 22 nt, Human
uaggucucucuucuugauggga

SEQ ID NO: 84284 - RNA, 22 nt, Human
uaggucuguaaaugagagagac

SEQ ID NO: 84285 - RNA, 22 nt, Human
uaggugaguuuggggaagauag

SEQ ID NO: 84286 - RNA, 22 nt, Human
uaggugggugacuuccaugggg

SEQ ID NO: 84287 - RNA, 22 nt, Human
uaggugguagagccuggcuugc

SEQ ID NO: 84288 - RNA, 22 nt, Human
uagguggugggauaugagcauc

SEQ ID NO: 84289 - RNA, 22 nt, Human
uaggugguuaugucagccuaga

SEQ ID NO: 84290 - RNA, 22 nt, Human
uaggugucuuguguaugguaca

SEQ ID NO: 84291 - RNA, 22 nt, Human
uagguucagcuuucauccugaa

SEQ ID NO: 84292 - RNA, 22 nt, Human
uagguucaggagauauugcaca

SEQ ID NO: 84293 - RNA, 22 nt, Human
uagguuccaugagggaggcaaa

SEQ ID NO: 84294 - RNA, 22 nt, Human
uagguuuacugaauuaguggaa

SEQ ID NO: 84295 - RNA, 22 nt, Human
uagguuuuccuaaaauucuggu

SEQ ID NO: 84296 - RNA, 22 nt, Human
uaguaaaaagcaauggugagua

SEQ ID NO: 84297 - RNA, 22 nt, Human
uaguaaacagcucugccacaau

SEQ ID NO: 84298 - RNA, 22 nt, Human
uaguaaacaggcaagggaccac

SEQ ID NO: 84299 - RNA, 22 nt, Human
uaguaaacccaugaggcuuaaa

SEQ ID NO: 84300 - RNA, 22 nt, Human
uaguaacccacacaacaguaga

SEQ ID NO: 84301 - RNA, 22 nt, Human
uaguaagcacauggacaagugg

SEQ ID NO: 84302 - RNA, 22 nt, Human
uaguaaguagcuaauauuuacu

SEQ ID NO: 84303 - RNA, 22 nt, Human
uaguaauaaguugugcuuugau

SEQ ID NO: 84304 - RNA, 22 nt, Human
uaguaaucagagguaaacuuua

SEQ ID NO: 84305 - RNA, 22 nt, Human
uaguacagaaaaccucaggguc

SEQ ID NO: 84306 - RNA, 22 nt, Human
uaguacaguacugggcucuagu

SEQ ID NO: 84307 - RNA, 22 nt, Human
uaguacaguggcauucaaacuu

SEQ ID NO: 84308 - RNA, 22 nt, Human
uaguacaguuuacuuucagcgc

SEQ ID NO: 84309 - RNA, 22 nt, Human
uaguacaguuuuggcacaugga

SEQ ID NO: 84310 - RNA, 19 nt, Human
uaguaguagaaaacaauac

SEQ ID NO: 84311 - RNA, 22 nt, Human
uaguagugagucuuuauaaaua

SEQ ID NO: 84312 - RNA, 22 nt, Human
uaguauaugucuaugguuguag

SEQ ID NO: 84313 - RNA, 22 nt, Human
uaguauauuaauucucacgguu

SEQ ID NO: 84314 - RNA, 22 nt, Human
uaguaucuauuaguaacaagag

SEQ ID NO: 84315 - RNA, 22 nt, Human
uaguaucuuucuauauuuccca

SEQ ID NO: 84316 - RNA, 22 nt, Human
uaguaugggaagaacuuuguag

SEQ ID NO: 84317 - RNA, 22 nt, Human
uaguauuuccuguaagcuauag

SEQ ID NO: 84318 - RNA, 22 nt, Human
uaguauuugcagauuuguguca

SEQ ID NO: 84319 - RNA, 22 nt, Human
uagucaccagcuacaggacagc

SEQ ID NO: 84320 - RNA, 22 nt, Human
uagucaccucuuuaaauguccu

SEQ ID NO: 84321 - RNA, 22 nt, Human
uagucaccugugagcugcguag

SEQ ID NO: 84322 - RNA, 22 nt, Human
uagucagacccaagagagccau

SEQ ID NO: 84323 - RNA, 22 nt, Human
uagucagagucuucucuguugu

SEQ ID NO: 84324 - RNA, 22 nt, Human
uagucaggaguaggaguuuugg

SEQ ID NO: 84325 - RNA, 22 nt, Human
uagucaguagcaagguauuuug

SEQ ID NO: 84326 - RNA, 22 nt, Human
uagucagugaucaguggaguug

SEQ ID NO: 84327 - RNA, 22 nt, Human
uaguccagccuuggguguagcc

SEQ ID NO: 84328 - RNA, 22 nt, Human
uaguccaggaagguggggcaga

SEQ ID NO: 84329 - RNA, 22 nt, Human
uauagcaucuaggaugauugca

SEQ ID NO: 84330 - RNA, 22 nt, Human
uauaggaaaggaguggucacaa

SEQ ID NO: 84331 - RNA, 22 nt, Human
uauaggaaguguagugcuugga

SEQ ID NO: 84332 - RNA, 22 nt, Human
uauaggaauaaagugggguaua

SEQ ID NO: 84333 - RNA, 22 nt, Human
uauaggcagaucugagaauauu

SEQ ID NO: 84334 - RNA, 22 nt, Human
uauaggcucuuguuaaccuuuu

SEQ ID NO: 84335 - RNA, 22 nt, Human
uauaggcuuuugccugaagcua

SEQ ID NO: 84336 - RNA, 22 nt, Human
uauaggugaauaaaugaguuua

SEQ ID NO: 84337 - RNA, 22 nt, Human
uauaguacacuuagguacuuca

SEQ ID NO: 84338 - RNA, 21 nt, Human
uauagucacuugagcauuauc

SEQ ID NO: 84339 - RNA, 22 nt, Human
uauagugucucuagaucaaaga

SEQ ID NO: 84340 - RNA, 22 nt, Human
uauauaauuuguaaaagcaccu

SEQ ID NO: 84341 - RNA, 22 nt, Human
uauauccauaggcugugccuag

SEQ ID NO: 84342 - RNA, 22 nt, Human
uauaucuaaguguauguaagag

SEQ ID NO: 84343 - RNA, 22 nt, Human
uauaugcaaugaggugggagua

SEQ ID NO: 84344 - RNA, 20 nt, Human
uauaugcagccaacacuccc

SEQ ID NO: 84345 - RNA, 22 nt, Human
uauaugcagugugucauucaag

SEQ ID NO: 84346 - RNA, 22 nt, Human
uauaugcuugggaaaugguaga

SEQ ID NO: 84347 - RNA, 22 nt, Human
uauauguaagcuauguaagagu

SEQ ID NO: 84348 - RNA, 17 nt, Human
uauauguaugccucucc

SEQ ID NO: 84349 - RNA, 22 nt, Human
uauauguugauacuaauucugg

SEQ ID NO: 84350 - RNA, 22 nt, Human
uauauuaaagugcuuugcagug

SEQ ID NO: 84351 - RNA, 22 nt, Human
uauauuaacuugugauccugga

SEQ ID NO: 84352 - RNA, 22 nt, Human
uauauuauaagcccuuucagaa

SEQ ID NO: 84353 - RNA, 22 nt, Human
uauauuaucauaaaaccauuca

SEQ ID NO: 84354 - RNA, 22 nt, Human
uauauucacuuguguccaacca

SEQ ID NO: 84355 - RNA, 22 nt, Human
uauauucauuuuaaagccaucu

SEQ ID NO: 84356 - RNA, 22 nt, Human
uauauucuauuguaccucuccu

SEQ ID NO: 84357 - RNA, 22 nt, Human
uauauugaccaguacaauuggu

SEQ ID NO: 84358 - RNA, 22 nt, Human
uauauugucucugccuugucug

SEQ ID NO: 84359 - RNA, 22 nt, Human
uauauuguuggugggaauauaa

SEQ ID NO: 84360 - RNA, 22 nt, Human
uauauuuaauccuagagccauu

SEQ ID NO: 84361 - RNA, 22 nt, Human
uauauuugcuaaaugugugcaa

SEQ ID NO: 84362 - RNA, 22 nt, Human
ugccugucuuggaguccuggcc

SEQ ID NO: 84363 - RNA, 22 nt, Human
ugccugugaaaacccugggguu

SEQ ID NO: 84364 - RNA, 19 nt, Human
ugccuguggcgagcaucuu

SEQ ID NO: 84365 - RNA, 22 nt, Human
ugccugugggugaugauuugau

SEQ ID NO: 84366 - RNA, 22 nt, Human
ugccuguguggucugcgcauua

SEQ ID NO: 84367 - RNA, 22 nt, Human
ugccuuaaaaaauucuaaacau

SEQ ID NO: 84368 - RNA, 22 nt, Human
ugccuuaauuucccuguuuugu

SEQ ID NO: 84369 - RNA, 22 nt, Human
ugccuuagaggauagugaagcc

SEQ ID NO: 84370 - RNA, 23 nt, Human
ugccuuaguuagcacauuucuaa

SEQ ID NO: 84371 - RNA, 22 nt, Human
ugccuuccuggagcugaaggcu

SEQ ID NO: 84372 - RNA, 22 nt, Human
ugccuucucccuuggacccuga

SEQ ID NO: 84373 - RNA, 22 nt, Human
ugccuucucuucccugggagcu

SEQ ID NO: 84374 - RNA, 22 nt, Human
ugccuugaacauaguggacagu

SEQ ID NO: 84375 - RNA, 22 nt, Human
ugccuugcuggaugucaguuuu

SEQ ID NO: 84376 - RNA, 20 nt, Human
ugccuugggacagugccugu

SEQ ID NO: 84377 - RNA, 22 nt, Human
ugccuugggagccagcaugcca

SEQ ID NO: 84378 - RNA, 22 nt, Human
ugccuuggugcuucuucaugug

SEQ ID NO: 84379 - RNA, 22 nt, Human
ugccuuuaaaaaggaagucauu

SEQ ID NO: 84380 - RNA, 22 nt, Human
ugccuuuaaccagucuagacag

SEQ ID NO: 84381 - RNA, 22 nt, Human
ugccuuuuccagcuuccaggag

SEQ ID NO: 84382 - RNA, 22 nt, Human
ugccuuuuccaguuccuagaag

SEQ ID NO: 84383 - RNA, 22 nt, Human
ugcgauggcguagacaaauccc

SEQ ID NO: 84384 - RNA, 17 nt, Human
ugcgaugucuguguuug

SEQ ID NO: 84385 - RNA, 22 nt, Human
ugcgccucuaaucucgggcguc

SEQ ID NO: 84386 - RNA, 22 nt, Human
ugcggaaggcagcgcagggugg

SEQ ID NO: 84387 - RNA, 16 nt, Human
ugcggcaacuugcggc

SEQ ID NO: 84388 - RNA, 22 nt, Human
ugcggcaggagaagguguuaug

SEQ ID NO: 84389 - RNA, 22 nt, Human
ugcgggucaucagggagaacgu

SEQ ID NO: 84390 - RNA, 22 nt, Human
ugcguugcgcuccugcagcagg

SEQ ID NO: 84391 - RNA, 22 nt, Human
ugcuaaagcaaacugugcuacu

SEQ ID NO: 84392 - RNA, 22 nt, Human
ugcuaacuauuccuaaagauca

SEQ ID NO: 84393 - RNA, 22 nt, Human
ugcuaagucacucaagaccucu

SEQ ID NO: 84394 - RNA, 22 nt, Human
ugcuaaguucugcaaaagauaa

SEQ ID NO: 84395 - RNA, 22 nt, Human
ugcuaauaaacuccaggcugag

SEQ ID NO: 84396 - RNA, 22 nt, Human
ugcuacauaggauagcucaaau

SEQ ID NO: 84397 - RNA, 22 nt, Human
ugcuacaugcacugugaucuag

SEQ ID NO: 84398 - RNA, 22 nt, Human
ugcuaccuuuuuuauuaaauga

SEQ ID NO: 84399 - RNA, 19 nt, Human
ugcuagaaauucugugacu

SEQ ID NO: 84400 - RNA, 22 nt, Human
ugcuagaagauagcuagaagau

SEQ ID NO: 84401 - RNA, 22 nt, Human
ugcuagaauaccuaccuggagg

SEQ ID NO: 84402 - RNA, 22 nt, Human
ugcuagaauuagguuaaacaaa

SEQ ID NO: 84403 - RNA, 22 nt, Human
ugcuagcacugugcagucuacg

SEQ ID NO: 84404 - RNA, 22 nt, Human
ugcuagggauguagcagugaag

SEQ ID NO: 84405 - RNA, 22 nt, Human
ugcuaggggucagcaccauauc

SEQ ID NO: 84406 - RNA, 22 nt, Human
ugcuaggugcuccucccuaauu

SEQ ID NO: 84407 - RNA, 22 nt, Human
ugcuagugugugagauguucaa

SEQ ID NO: 84408 - RNA, 22 nt, Human
ugcuauauaauggaauuucuaa

SEQ ID NO: 84409 - RNA, 22 nt, Human
ugcuaucuaggcaagguggucc

SEQ ID NO: 84410 - RNA, 22 nt, Human
ugcuaucucuauauccauuuau

SEQ ID NO: 84411 - RNA, 22 nt, Human
ugcuaugugacugcuucagauu

SEQ ID NO: 84412 - RNA, 22 nt, Human
ugcuauuuaacuuuuaugugua

SEQ ID NO: 84413 - RNA, 21 nt, Human
ugcuauuuaauuuuucuguuc

SEQ ID NO: 84414 - RNA, 22 nt, Human
ugcuauuucuaucucauuuaaa

SEQ ID NO: 84415 - RNA, 22 nt, Human
ugcuauuuggcacuuuugaccu

SEQ ID NO: 84416 - RNA, 22 nt, Human
ugcucaacagauauguaacaug

SEQ ID NO: 84417 - RNA, 22 nt, Human
ugcucacugaacucuugcuguc

SEQ ID NO: 84418 - RNA, 22 nt, Human
ugcucagaaacgaggugcagcc

SEQ ID NO: 84419 - RNA, 22 nt, Human
ugcucagagcuccagcucuccu

SEQ ID NO: 84420 - RNA, 22 nt, Human
ugcucagcaaaaagcuugugag

SEQ ID NO: 84421 - RNA, 22 nt, Human
ugcucagcagucaaggucauag

SEQ ID NO: 84422 - RNA, 22 nt, Human
ugcucagcgccaaagcugaugg

SEQ ID NO: 84423 - RNA, 19 nt, Human
ugcucagcuccugugaguc

SEQ ID NO: 84424 - RNA, 22 nt, Human
ugcucaggacaguggaaccuaa

SEQ ID NO: 84425 - RNA, 22 nt, Human
ugcucaggagcuuagagcacag

SEQ ID NO: 84426 - RNA, 22 nt, Human
ugcucaguauagaaaaugauau

SEQ ID NO: 84427 - RNA, 22 nt, Human
ugcucaguuccaugaguggagu

SEQ ID NO: 84428 - RNA, 22 nt, Human
ugcucaucaacaugaugaucau

SEQ ID NO: 84429 - RNA, 22 nt, Human
ugcucaugcuggggacagaugu

SEQ ID NO: 84430 - RNA, 22 nt, Human
ugcucauuaggacugcaaauuc

SEQ ID NO: 84431 - RNA, 22 nt, Human
ugcucauuggcgaucugaggga

SEQ ID NO: 84432 - RNA, 22 nt, Human
ugcuccagccuaugcucuccgg

SEQ ID NO: 84433 - RNA, 23 nt, Human
ugcuccagccucuuugauagugu

SEQ ID NO: 84434 - RNA, 22 nt, Human
ugcuccaggccgccuggggcug

SEQ ID NO: 84435 - RNA, 19 nt, Human
ugcuccaggccuugccgca

SEQ ID NO: 84436 - RNA, 23 nt, Human
ugcuccagguacagaacuccagg

SEQ ID NO: 84437 - RNA, 22 nt, Human
ugcuccagugagcuggccaucc

SEQ ID NO: 84438 - RNA, 22 nt, Human
uauguacaucuugagcaaugaa

SEQ ID NO: 84439 - RNA, 21 nt, Human
uauguagacucguuagaaugc

SEQ ID NO: 84440 - RNA, 22 nt, Human
uauguagagauaaaauccaaau

SEQ ID NO: 84441 - RNA, 22 nt, Human
uauguagauuucucuguuuuuc

SEQ ID NO: 84442 - RNA, 22 nt, Human
uauguagcaauagcaucauacu

SEQ ID NO: 84443 - RNA, 22 nt, Human
uauguaguacuuagugcauaca

SEQ ID NO: 84444 - RNA, 22 nt, Human
uauguauauauguuggguagaa

SEQ ID NO: 84445 - RNA, 22 nt, Human
uauguauauguguguugacaac

SEQ ID NO: 84446 - RNA, 22 nt, Human
uauguaucuguucaucaguuaa

SEQ ID NO: 84447 - RNA, 23 nt, Human
uauguauguauguuuguauggaa

SEQ ID NO: 84448 - RNA, 22 nt, Human
uauguauuagagcuccaugagg

SEQ ID NO: 84449 - RNA, 22 nt, Human
uaugucacauuguaacagugug

SEQ ID NO: 84450 - RNA, 23 nt, Human
uaugucaugagcauauugaaugu

SEQ ID NO: 84451 - RNA, 22 nt, Human
uaugucugaaucuuauuuaaau

SEQ ID NO: 84452 - RNA, 22 nt, Human
uaugucuuacuacagcaauuaa

SEQ ID NO: 84453 - RNA, 22 nt, Human
uaugucuuuuucucacuauagu

SEQ ID NO: 84454 - RNA, 22 nt, Human
uaugugacaaaaguaaacugca

SEQ ID NO: 84455 - RNA, 22 nt, Human
uaugugcaaauuaauugcuaga

SEQ ID NO: 84456 - RNA, 22 nt, Human
uaugugcacauuagagagaugg

SEQ ID NO: 84457 - RNA, 22 nt, Human
uaugugcagcacuugccauuac

SEQ ID NO: 84458 - RNA, 22 nt, Human
uaugugcaggggcaggagcuca

SEQ ID NO: 84459 - RNA, 20 nt, Human
uaugugcaguuugguuuauc

SEQ ID NO: 84460 - RNA, 22 nt, Human
uaugugcaugcugacuugagga

SEQ ID NO: 84461 - RNA, 22 nt, Human
uaugugcauuaucuaguucauu

SEQ ID NO: 84462 - RNA, 22 nt, Human
uauguguaagcuguuuaucuuu

SEQ ID NO: 84463 - RNA, 22 nt, Human
uauguguacucguuaaauauuu

SEQ ID NO: 84464 - RNA, 22 nt, Human
uauguguauaccuauacaugug

SEQ ID NO: 84465 - RNA, 22 nt, Human
uauguguauguacauacauaca

SEQ ID NO: 84466 - RNA, 22 nt, Human
uaugugucaaaccauucaucug

SEQ ID NO: 84467 - RNA, 22 nt, Human
uauguguccuguuaccggcagc

SEQ ID NO: 84468 - RNA, 16 nt, Human
uaugugucucaucuac

SEQ ID NO: 84469 - RNA, 22 nt, Human
uaugugucugucgugcauaaau

SEQ ID NO: 84470 - RNA, 18 nt, Human
uaugugucuguuacaacu

SEQ ID NO: 84471 - RNA, 22 nt, Human
uaugugugcauguauacauuaa

SEQ ID NO: 84472 - RNA, 22 nt, Human
uaugugugcuuuuuccaugcau

SEQ ID NO: 84473 - RNA, 19 nt, Human
uauguguguguauuuacau

SEQ ID NO: 84474 - RNA, 17 nt, Human
uauguguguguuuauac

SEQ ID NO: 84475 - RNA, 17 nt, Human
uauguguguuugcagca

SEQ ID NO: 84476 - RNA, 22 nt, Human
uauguguuauuugguauacauu

SEQ ID NO: 84477 - RNA, 22 nt, Human
uauguuacucacauguucuugc

SEQ ID NO: 84478 - RNA, 22 nt, Human
uauguucaugcuuaugcagaau

SEQ ID NO: 84479 - RNA, 22 nt, Human
uauguucuaaccuugucuuucc

SEQ ID NO: 84480 - RNA, 22 nt, Human
uauguucuuggaaaugaagcuu

SEQ ID NO: 84481 - RNA, 22 nt, Human
uauguugcaccaaccuaauaau

SEQ ID NO: 84482 - RNA, 22 nt, Human
uauguuuaaauguauguguaug

SEQ ID NO: 84483 - RNA, 22 nt, Human
uauguuuacgcugguagaauua

SEQ ID NO: 84484 - RNA, 22 nt, Human
uauguuucaucaggcauggagu

SEQ ID NO: 84485 - RNA, 22 nt, Human
uauguuuguuaucacaacuagg

SEQ ID NO: 84486 - RNA, 22 nt, Human
uauuaaagagagaaucaucauc

SEQ ID NO: 84487 - RNA, 22 nt, Human
uauuaaauauaucuguuaguug

SEQ ID NO: 84488 - RNA, 22 nt, Human
uauuaauaugugugugcaugua

SEQ ID NO: 84489 - RNA, 22 nt, Human
uauuaauucuugccaauucucc

SEQ ID NO: 84490 - RNA, 22 nt, Human
uauuaauuuaaucuccauggua

SEQ ID NO: 84491 - RNA, 22 nt, Human
uauuacaaauuauaaugggaga

SEQ ID NO: 84492 - RNA, 22 nt, Human
uauuacaauuuacauugcacuu

SEQ ID NO: 84493 - RNA, 22 nt, Human
uauuacacagugaaagcaugga

SEQ ID NO: 84494 - RNA, 23 nt, Human
uauuagcaauucccacagagcag

SEQ ID NO: 84495 - RNA, 22 nt, Human
uauuagcagacaagcugcugga

SEQ ID NO: 84496 - RNA, 17 nt, Human
uauuagcuagcuuccag

SEQ ID NO: 84497 - RNA, 22 nt, Human
uauuagcuguguaacucugguu

SEQ ID NO: 84498 - RNA, 18 nt, Human
uauuccugauucaucuuu

SEQ ID NO: 84499 - RNA, 22 nt, Human
uauuccugggccccauuccaga

SEQ ID NO: 84500 - RNA, 22 nt, Human
uauuccuggguuccagcccaga

SEQ ID NO: 84501 - RNA, 22 nt, Human
uauuccuggucccuaccacaga

SEQ ID NO: 84502 - RNA, 22 nt, Human
uauucuagaaguccaccagucu

SEQ ID NO: 84503 - RNA, 22 nt, Human
uauucucagcaacacacaugga

SEQ ID NO: 84504 - RNA, 22 nt, Human
uauucugcuucccguggcacaa

SEQ ID NO: 84505 - RNA, 19 nt, Human
uauucuguuaaccuuuguc

SEQ ID NO: 84506 - RNA, 22 nt, Human
uauucuuguaccuuaaaugauu

SEQ ID NO: 84507 - RNA, 22 nt, Human
uauugaaaugaaugacagugau

SEQ ID NO: 84508 - RNA, 22 nt, Human
uauugaaauucuucauguccuc

SEQ ID NO: 84509 - RNA, 22 nt, Human
uauugaauuagacccuaaaaug

SEQ ID NO: 84510 - RNA, 22 nt, Human
uauugacaauaggcaacugagg

SEQ ID NO: 84511 - RNA, 22 nt, Human
uauugacaggugccugcagaca

SEQ ID NO: 84512 - RNA, 22 nt, Human
uauugacagugacuauugguag

SEQ ID NO: 84513 - RNA, 22 nt, Human
uauugacauuuuuauagcuuga

SEQ ID NO: 84514 - RNA, 22 nt, Human
uauugaguuacagaaaauacuu

SEQ ID NO: 84515 - RNA, 22 nt, Human
uauugaucuggauauuuagaca

SEQ ID NO: 84516 - RNA, 22 nt, Human
uauugauucugucccaaguuga

SEQ ID NO: 84517 - RNA, 22 nt, Human
uauugcaaguggcauaaaauuu

SEQ ID NO: 84518 - RNA, 22 nt, Human
uauugcaauuggcagagugcua

SEQ ID NO: 84519 - RNA, 22 nt, Human
uauugcaauuuggcuaaagaau

SEQ ID NO: 84520 - RNA, 23 nt, Human
uauugcacacauagaaacauaga

SEQ ID NO: 84521 - RNA, 22 nt, Human
uauugcagacaaaaugagcuac

SEQ ID NO: 84522 - RNA, 22 nt, Human
uauugcauaaaaucagguuaga

SEQ ID NO: 84523 - RNA, 21 nt, Human
uauugcauaccaugaaucuga

SEQ ID NO: 84524 - RNA, 22 nt, Human
uauugcauacuuaaauuuccgg

SEQ ID NO: 84525 - RNA, 22 nt, Human
uauugcauagaaggaaggaguu

SEQ ID NO: 84526 - RNA, 22 nt, Human
uauugcaucaguaauuuagugu

SEQ ID NO: 84527 - RNA, 22 nt, Human
uauugcaucauccugcaggggu

SEQ ID NO: 84528 - RNA, 22 nt, Human
uauugcauuaugguaggaaagg

SEQ ID NO: 84529 - RNA, 22 nt, Human
uauugccaaaugucugcuggaa

SEQ ID NO: 84530 - RNA, 22 nt, Human
uauugccugaguguuucauaau

SEQ ID NO: 84531 - RNA, 22 nt, Human
uauugcugcuauugucaguuca

SEQ ID NO: 84532 - RNA, 22 nt, Human
uauugcuugggguacaagguau

SEQ ID NO: 84533 - RNA, 22 nt, Human
uauugcuuucaguugcuuugag

SEQ ID NO: 84534 - RNA, 22 nt, Human
uauuggaauaguuaaggaagau

SEQ ID NO: 84535 - RNA, 22 nt, Human
uauuggaugauucacuuggcag

SEQ ID NO: 84536 - RNA, 22 nt, Human
uauuggauuucugaaagaugag

SEQ ID NO: 84537 - RNA, 22 nt, Human
uauuggcagcaugagcuccugg

SEQ ID NO: 84538 - RNA, 22 nt, Human
uauuggucuucuguucccuauu

SEQ ID NO: 84539 - RNA, 22 nt, Human
uauuggugaugacuugaggcca

SEQ ID NO: 84540 - RNA, 22 nt, Human
uauuggugggggcagagagaga

SEQ ID NO: 84541 - RNA, 22 nt, Human
uauuguacauuucaaaguagcu

SEQ ID NO: 84542 - RNA, 22 nt, Human
uauuguaucuuaccacauguau

SEQ ID NO: 84543 - RNA, 22 nt, Human
uauuguauuaaggauucaagua

SEQ ID NO: 84544 - RNA, 22 nt, Human
uauugucaagaaguuuauagug

SEQ ID NO: 84545 - RNA, 21 nt, Human
uauugucaaucugcuuucaga

SEQ ID NO: 84546 - RNA, 22 nt, Human
uauugucacgucuuaauucuag

SEQ ID NO: 84547 - RNA, 22 nt, Human
uauugucucugcguuguucuau

SEQ ID NO: 84548 - RNA, 22 nt, Human
uauugucuguccgggucaaagc

SEQ ID NO: 84549 - RNA, 22 nt, Human
uauugugaauuuggaagcaaug

SEQ ID NO: 84550 - RNA, 20 nt, Human
uauugugauagguguuaauc

SEQ ID NO: 84551 - RNA, 22 nt, Human
uauugugccagguaauguguuc

SEQ ID NO: 84552 - RNA, 22 nt, Human
uauuguucuucacuggucuuau

SEQ ID NO: 84553 - RNA, 22 nt, Human
uauuuaaaauagugcuccagca

SEQ ID NO: 84554 - RNA, 22 nt, Human
uauuuaauaaaacuauggcaug

SEQ ID NO: 84555 - RNA, 22 nt, Human
uauuuaauuugcucauugugau

SEQ ID NO: 84556 - RNA, 22 nt, Human
uauuuagaacagacaauagaaa

SEQ ID NO: 84557 - RNA, 22 nt, Human
uauuuagaaugcguguacgugu

SEQ ID NO: 84558 - RNA, 22 nt, Human
uauuuaguuaucuuucauaaaa

SEQ ID NO: 84559 - RNA, 21 nt, Human
uauuuaguuuuacaaaugugg

SEQ ID NO: 84560 - RNA, 22 nt, Human
uauuuauaaucugccaaagaga

SEQ ID NO: 84561 - RNA, 22 nt, Human
uauuuauaccaggugaucggag

SEQ ID NO: 84562 - RNA, 22 nt, Human
uauuuauauucugccuucugcu

SEQ ID NO: 84563 - RNA, 22 nt, Human
uauuuaucaagguaggagaaua

SEQ ID NO: 84564 - RNA, 21 nt, Human
uauuuaucucaggcuaucuuu

SEQ ID NO: 84565 - RNA, 22 nt, Human
uauuuaugucucugcagagaau

SEQ ID NO: 84566 - RNA, 22 nt, Human
uauuuauguggaccauaagccu

SEQ ID NO: 84567 - RNA, 22 nt, Human
uauuuauucuuuguacugccuu

SEQ ID NO: 84568 - RNA, 22 nt, Human
uauuucaacguaugaaaagcug

SEQ ID NO: 84569 - RNA, 22 nt, Human
uauuucacauaccacagagugu

SEQ ID NO: 84570 - RNA, 22 nt, Human
uauuucacaucuaugaagugag

SEQ ID NO: 84571 - RNA, 22 nt, Human
uauuucaccuaaaagugucaaa

SEQ ID NO: 84572 - RNA, 22 nt, Human
uauuucaggcuauauuucuugu

SEQ ID NO: 84573 - RNA, 22 nt, Human
uauuucagggagaauaaauuug

SEQ ID NO: 84574 - RNA, 22 nt, Human
uauuucagguauggugugaaau

SEQ ID NO: 84575 - RNA, 22 nt, Human
uauuucagucacuucuucucug

SEQ ID NO: 84576 - RNA, 22 nt, Human
uauuucaugugcaccauaauuc

SEQ ID NO: 84577 - RNA, 21 nt, Human
uauuuccaacccuuuauccuu

SEQ ID NO: 84578 - RNA, 22 nt, Human
uauuuccacaccuuuugaaucu

SEQ ID NO: 84579 - RNA, 18 nt, Human
uauuucccaauggaaaca

SEQ ID NO: 84580 - RNA, 22 nt, Human
uauuuccuugagacggagucuc

SEQ ID NO: 84581 - RNA, 22 nt, Human
uauuucuauuccccaggcaagu

SEQ ID NO: 84582 - RNA, 22 nt, Human
uauuucugagaaccaacuuacc

SEQ ID NO: 84583 - RNA, 22 nt, Human
uauuucuucgggauucaagcua

SEQ ID NO: 84584 - RNA, 22 nt, Human
uauuucuugaguggucaguuuc

SEQ ID NO: 84585 - RNA, 22 nt, Human
uauuugaagacagggucuuuaa

SEQ ID NO: 84586 - RNA, 22 nt, Human
uauuugaaggcauacauuuuga

SEQ ID NO: 84587 - RNA, 22 nt, Human
uauuugaugguucuaaaacagc

SEQ ID NO: 84588 - RNA, 22 nt, Human
uauuugcaacauaaaacucuga

SEQ ID NO: 84589 - RNA, 22 nt, Human
uauuugcuccuuaggcauauuu

SEQ ID NO: 84590 - RNA, 22 nt, Human
uauuugcuuggaaaccuaaucc

SEQ ID NO: 84591 - RNA, 22 nt, Human
uauuugcuuugcuuuauagaga

SEQ ID NO: 84592 - RNA, 22 nt, Human
uauuuggaaacaauucacaugc

SEQ ID NO: 84593 - RNA, 23 nt, Human
uauuuggaaagagggaagaagac

SEQ ID NO: 84594 - RNA, 22 nt, Human
uauuuggaaaggacauguaagu

SEQ ID NO: 84595 - RNA, 22 nt, Human
uauuuggaaauagggcuuugua

SEQ ID NO: 84596 - RNA, 22 nt, Human
uauuuggaauagcuugcuaaug

SEQ ID NO: 84597 - RNA, 22 nt, Human
uauuuggacaccaaguagaagu

SEQ ID NO: 84598 - RNA, 22 nt, Human
uauuuggagauaagauuuuuag

SEQ ID NO: 84599 - RNA, 22 nt, Human
uauuuggagauaagggcuuuaa

SEQ ID NO: 84600 - RNA, 22 nt, Human
uauuugguggcugauuaucuuu

SEQ ID NO: 84601 - RNA, 22 nt, Human
uauuuguauguguguacauaua

SEQ ID NO: 84602 - RNA, 22 nt, Human
uauuugucaagagagggggaua

SEQ ID NO: 84603 - RNA, 22 nt, Human
uauuugucaccuauggcugucc

SEQ ID NO: 84604 - RNA, 22 nt, Human
uauuugucagcuguugaguuca

SEQ ID NO: 84605 - RNA, 22 nt, Human
uauuuguccagguaaauuucag

SEQ ID NO: 84606 - RNA, 22 nt, Human
uauuuguugaauaccccugucu

SEQ ID NO: 84607 - RNA, 22 nt, Human
uauuuguuucuaguggcagcaa

SEQ ID NO: 84608 - RNA, 22 nt, Human
uauuuuaaagugaagggucuug

SEQ ID NO: 84609 - RNA, 22 nt, Human
ucaugcauauuuguaguaguuc

SEQ ID NO: 84610 - RNA, 22 nt, Human
ucaugccaaaauccaguggcuu

SEQ ID NO: 84611 - RNA, 22 nt, Human
ucaugccaauuucugcauggcu

SEQ ID NO: 84612 - RNA, 22 nt, Human
ucaugccauccacaucuguuuc

SEQ ID NO: 84613 - RNA, 22 nt, Human
ucaugcucugguuuagcuguuu

SEQ ID NO: 84614 - RNA, 22 nt, Human
ucaugcugaguccuggcuuugu

SEQ ID NO: 84615 - RNA, 22 nt, Human
ucaugcuuuguuaauguggcac

SEQ ID NO: 84616 - RNA, 22 nt, Human
ucauggaaacaaugcggaaaaa

SEQ ID NO: 84617 - RNA, 23 nt, Human
ucauggaacugggcaaucuugaa

SEQ ID NO: 84618 - RNA, 22 nt, Human
ucauggaagaaagguuuguuuc

SEQ ID NO: 84619 - RNA, 22 nt, Human
ucauggaaggaugcccugcaag

SEQ ID NO: 84620 - RNA, 22 nt, Human
ucauggaauagagcaguggcaa

SEQ ID NO: 84621 - RNA, 22 nt, Human
ucauggagacuuugagccuguu

SEQ ID NO: 84622 - RNA, 22 nt, Human
ucauggauuaaauuauuaaguu

SEQ ID NO: 84623 - RNA, 21 nt, Human
ucauggauuuucucugcuuuu

SEQ ID NO: 84624 - RNA, 22 nt, Human
ucauggcacaugcccuccaggg

SEQ ID NO: 84625 - RNA, 20 nt, Human
ucauggcagccacccacagg

SEQ ID NO: 84626 - RNA, 22 nt, Human
ucauggcagcccuuuacuagag

SEQ ID NO: 84627 - RNA, 22 nt, Human
ucauggcaguuuaauaaguggu

SEQ ID NO: 84628 - RNA, 21 nt, Human
ucauggccagcaaguggcaga

SEQ ID NO: 84629 - RNA, 22 nt, Human
ucauggcucuaaagacauagau

SEQ ID NO: 84630 - RNA, 22 nt, Human
ucauggcuggaagcucaguuag

SEQ ID NO: 84631 - RNA, 22 nt, Human
ucauggcuucaaggaagcaggc

SEQ ID NO: 84632 - RNA, 22 nt, Human
ucauggggugaauuaguaugcu

SEQ ID NO: 84633 - RNA, 22 nt, Human
ucauguaaauguggaugcuucc

SEQ ID NO: 84634 - RNA, 22 nt, Human
ucauguauugaaaagcauuuua

SEQ ID NO: 84635 - RNA, 22 nt, Human
ucaugucagcuguugaugugca

SEQ ID NO: 84636 - RNA, 22 nt, Human
ucaugucccguugcuggcugcc

SEQ ID NO: 84637 - RNA, 18 nt, Human
ucaugucucacaggugau

SEQ ID NO: 84638 - RNA, 22 nt, Human
ucaugucucuaugugccuauua

SEQ ID NO: 84639 - RNA, 22 nt, Human
ucaugugacaggcacuguucug

SEQ ID NO: 84640 - RNA, 22 nt, Human
ucauguuaucagacacagagua

SEQ ID NO: 84641 - RNA, 22 nt, Human
ucauguuuggaguuugcucacu

SEQ ID NO: 84642 - RNA, 22 nt, Human
ucauguuuuaaugccuuuuucu

SEQ ID NO: 84643 - RNA, 22 nt, Human
ucauuaauaagucuaacucucc

SEQ ID NO: 84644 - RNA, 22 nt, Human
ucauuaaucccgggguccaggg

SEQ ID NO: 84645 - RNA, 22 nt, Human
ucauuacaagauuuccaauuug

SEQ ID NO: 84646 - RNA, 22 nt, Human
ucauuacaguguuuauaugucu

SEQ ID NO: 84647 - RNA, 18 nt, Human
ucauuagggauugcaaag

SEQ ID NO: 84648 - RNA, 22 nt, Human
ucauuauccuaguaucuugaau

SEQ ID NO: 84649 - RNA, 22 nt, Human
ucauuauuugcuuuaguuaugu

SEQ ID NO: 84650 - RNA, 22 nt, Human
ucauuauuuuggacuggagugu

SEQ ID NO: 84651 - RNA, 18 nt, Human
ucauucaaagucuacuga

SEQ ID NO: 84652 - RNA, 23 nt, Human
ucauucaaggcugguaucuuuca

SEQ ID NO: 84653 - RNA, 21 nt, Human
ucauucacaggguauuguaua

SEQ ID NO: 84654 - RNA, 22 nt, Human
ucauucagguugggcaaguguc

SEQ ID NO: 84655 - RNA, 22 nt, Human
ucauucauacucuuuucuauua

SEQ ID NO: 84656 - RNA, 22 nt, Human
uccaggcccugggaugggagca

SEQ ID NO: 84657 - RNA, 22 nt, Human
uccaggccgcaggggcagcccc

SEQ ID NO: 84658 - RNA, 22 nt, Human
uccaggccuugacaggucaguu

SEQ ID NO: 84659 - RNA, 20 nt, Human
uccaggccuuguucucagau

SEQ ID NO: 84660 - RNA, 22 nt, Human
uccaggcuagagugcaguggcc

SEQ ID NO: 84661 - RNA, 22 nt, Human
uccaggcuagguuuacaggaca

SEQ ID NO: 84662 - RNA, 19 nt, Human
uccaggcugagagucagcu

SEQ ID NO: 84663 - RNA, 22 nt, Human
uccaggcugcaaggccacaggg

SEQ ID NO: 84664 - RNA, 22 nt, Human
uccaggcugccacagugcaacg

SEQ ID NO: 84665 - RNA, 22 nt, Human
uccaggcuggaaaugucaaacu

SEQ ID NO: 84666 - RNA, 21 nt, Human
uccaggcuggaaggggcguug

SEQ ID NO: 84667 - RNA, 22 nt, Human
uccaggcuggagugcaguggca

SEQ ID NO: 84668 - RNA, 23 nt, Human
uccaggcugggacuucaacuggc

SEQ ID NO: 84669 - RNA, 22 nt, Human
uccagggagcaagucaggccgg

SEQ ID NO: 84670 - RNA, 22 nt, Human
uccagggagucaaaugaacuac

SEQ ID NO: 84671 - RNA, 22 nt, Human
uccagggaugccagccauguug

SEQ ID NO: 84672 - RNA, 20 nt, Human
uccagggcaaacucaucacc

SEQ ID NO: 84673 - RNA, 22 nt, Human
uccagggcaugcucagacucag

SEQ ID NO: 84674 - RNA, 22 nt, Human
uccagggcauggggagagagug

SEQ ID NO: 84675 - RNA, 22 nt, Human
uccagggccaagucauggaacc

SEQ ID NO: 84676 - RNA, 20 nt, Human
uccagggcccuggcuccucu

SEQ ID NO: 84677 - RNA, 22 nt, Human
uccagggcgugugugaaggaaa

SEQ ID NO: 84678 - RNA, 20 nt, Human
uccagggcuagggagcucau

SEQ ID NO: 84679 - RNA, 22 nt, Human
uccagggcucauucccucugca

SEQ ID NO: 84680 - RNA, 22 nt, Human
uccagggcuggguuggcucagc

SEQ ID NO: 84681 - RNA, 22 nt, Human
uccagggcuugacagggugccu

SEQ ID NO: 84682 - RNA, 22 nt, Human
uccagggcuuggcugggacggu

SEQ ID NO: 84683 - RNA, 21 nt, Human
uccagggcuuugauucucuca

SEQ ID NO: 84684 - RNA, 22 nt, Human
uccaggggacacuguuucucca

SEQ ID NO: 84685 - RNA, 22 nt, Human
uccaggguugugggcuucagca

SEQ ID NO: 84686 - RNA, 22 nt, Human
uccagguagggaauaaauguca

SEQ ID NO: 84687 - RNA, 22 nt, Human
uccagguauuacuaaguguuaa

SEQ ID NO: 84688 - RNA, 22 nt, Human
uccaggucagacuucugugccc

SEQ ID NO: 84689 - RNA, 18 nt, Human
uccaggucccaggggaag

SEQ ID NO: 84690 - RNA, 22 nt, Human
uccaggucugugagcuaaaugg

SEQ ID NO: 84691 - RNA, 22 nt, Human
uccaggugacagagacaggaua

SEQ ID NO: 84692 - RNA, 19 nt, Human
uccagguggagagacaccc

SEQ ID NO: 84693 - RNA, 22 nt, Human
uccaggugggcugcacccaggc

SEQ ID NO: 84694 - RNA, 22 nt, Human
uccaguacugaagcuccuucaa

SEQ ID NO: 84695 - RNA, 22 nt, Human
uccagucacuucauuuuacaga

SEQ ID NO: 84696 - RNA, 22 nt, Human
uccaguccauggccucagucuu

SEQ ID NO: 84697 - RNA, 22 nt, Human
uccagucucuacucugagauaa

SEQ ID NO: 84698 - RNA, 22 nt, Human
uccagugaucuagggagcugga

SEQ ID NO: 84699 - RNA, 22 nt, Human
uccaguggugguuugaagggca

SEQ ID NO: 84700 - RNA, 22 nt, Human
uccaguguggaccccugcaguc

SEQ ID NO: 84701 - RNA, 22 nt, Human
uccaguguuuuucuucacaggu

SEQ ID NO: 84702 - RNA, 22 nt, Human
uccaguugccugucucugauua

SEQ ID NO: 84703 - RNA, 22 nt, Human
uccaguuugggugugagcugcg

SEQ ID NO: 84704 - RNA, 22 nt, Human
uccaguuugguucuguucucca

SEQ ID NO: 84705 - RNA, 18 nt, Human
uccaguuuucccagcauc

SEQ ID NO: 84706 - RNA, 22 nt, Human
uccaguuuugaauccugcuucu

SEQ ID NO: 84707 - RNA, 20 nt, Human
uccaguuuuggagacauucu

SEQ ID NO: 84708 - RNA, 19 nt, Human
uccauaagcuuguguucau

SEQ ID NO: 84709 - RNA, 22 nt, Human
uccauacaguccacacggugca

SEQ ID NO: 84710 - RNA, 22 nt, Human
uccauacauugaaauaccauuc

SEQ ID NO: 84711 - RNA, 22 nt, Human
uccauagaaugcaguguaaauu

SEQ ID NO: 84712 - RNA, 22 nt, Human
uccauaggaucugcuucauacu

SEQ ID NO: 84713 - RNA, 22 nt, Human
uccauauacaacuuaaucuuua

SEQ ID NO: 84714 - RNA, 22 nt, Human
uccaucagauucccuccugaga

SEQ ID NO: 84715 - RNA, 22 nt, Human
uccaucaggcucgugggcucuc

SEQ ID NO: 84716 - RNA, 22 nt, Human
uccauccacauuaacagauacg

SEQ ID NO: 84717 - RNA, 22 nt, Human
uccauccauguaggaagauggu

SEQ ID NO: 84718 - RNA, 18 nt, Human
uccauccucugcucuuca

SEQ ID NO: 84719 - RNA, 22 nt, Human
uccaucucaccugcacucugcg

SEQ ID NO: 84720 - RNA, 22 nt, Human
uccaucugcauuugguuucugu

SEQ ID NO: 84721 - RNA, 22 nt, Human
uccaucuggguggggagaagga

SEQ ID NO: 84722 - RNA, 22 nt, Human
uccaugacagcgugagaguuug

SEQ ID NO: 84723 - RNA, 22 nt, Human
uccaugacuaggaaaccaguuu

SEQ ID NO: 84724 - RNA, 17 nt, Human
uccaugagacaugaaga

SEQ ID NO: 84725 - RNA, 22 nt, Human
uccaugagagguaacuuuacaa

SEQ ID NO: 84726 - RNA, 22 nt, Human
uccaugaggcagggaggcuggc

SEQ ID NO: 84727 - RNA, 22 nt, Human
uccaugcaaacaguggcuagcu

SEQ ID NO: 84728 - RNA, 20 nt, Human
uccaugcaaauacagaguuu

SEQ ID NO: 84729 - RNA, 22 nt, Human
uccaugcagagaacugaaguac

SEQ ID NO: 84730 - RNA, 20 nt, Human
uccaugcaguuuccauacag

SEQ ID NO: 84731 - RNA, 22 nt, Human
uccaugccaggcagucgaugca

SEQ ID NO: 84732 - RNA, 22 nt, Human
uccauggagauggaugacugua

SEQ ID NO: 84733 - RNA, 22 nt, Human
uccaugguuucagucuggcugg

SEQ ID NO: 84734 - RNA, 22 nt, Human
uccaugugccaaggggcagagg

SEQ ID NO: 84735 - RNA, 22 nt, Human
uccauguggccagacacuggca

SEQ ID NO: 84736 - RNA, 22 nt, Human
uccauguugagaaugcuauaau

SEQ ID NO: 84737 - RNA, 20 nt, Human
uccauucagcauuguggaaa

SEQ ID NO: 84738 - RNA, 22 nt, Human
uccauucauucagguauuuagu

SEQ ID NO: 84739 - RNA, 22 nt, Human
uccauucauucauugaugaaca

SEQ ID NO: 84740 - RNA, 22 nt, Human
ucacccagacuugugaaugugu

SEQ ID NO: 84741 - RNA, 22 nt, Human
ucacccagauagugagcauagu

SEQ ID NO: 84742 - RNA, 22 nt, Human
ucacccagauuacauccuguca

SEQ ID NO: 84743 - RNA, 22 nt, Human
ucacccagcgggcgcacacucg

SEQ ID NO: 84744 - RNA, 22 nt, Human
ucacccaggcuggacugcagug

SEQ ID NO: 84745 - RNA, 22 nt, Human
ucacccaggcugguaugcagug

SEQ ID NO: 84746 - RNA, 22 nt, Human
ucacccagggacugugauggaa

SEQ ID NO: 84747 - RNA, 22 nt, Human
ucacccagguaauagcaguuug

SEQ ID NO: 84748 - RNA, 22 nt, Human
ucacccauccuggaugagauuc

SEQ ID NO: 84749 - RNA, 22 nt, Human
ucaccccuugugaaugcugcuc

SEQ ID NO: 84750 - RNA, 22 nt, Human
ucacccuuaguguacuaucaug

SEQ ID NO: 84751 - RNA, 22 nt, Human
ucacccuucccagcuguccgcc

SEQ ID NO: 84752 - RNA, 22 nt, Human
ucaccggcagacguggccugau

SEQ ID NO: 84753 - RNA, 22 nt, Human
ucaccuaauugaagucaggagu

SEQ ID NO: 84754 - RNA, 22 nt, Human
ucaccuguuggauguauacugu

SEQ ID NO: 84755 - RNA, 22 nt, Human
ucacuaagugccgaguuuaguu

SEQ ID NO: 84756 - RNA, 22 nt, Human
ucacuagcauuguugaaggacu

SEQ ID NO: 84757 - RNA, 23 nt, Human
ucacuagucaagugccuuugagu

SEQ ID NO: 84758 - RNA, 21 nt, Human
ucacuagugccuucugucauu

SEQ ID NO: 84759 - RNA, 22 nt, Human
ucacuauaauaugucaaaauac

SEQ ID NO: 84760 - RNA, 22 nt, Human
ucacucaaugguaucaggaggu

SEQ ID NO: 84761 - RNA, 22 nt, Human
ucacucagguucaugucuuugu

SEQ ID NO: 84762 - RNA, 22 nt, Human
ucacucaguuuuuggccucugc

SEQ ID NO: 84763 - RNA, 18 nt, Human
ucacucauagacaucuau

SEQ ID NO: 84764 - RNA, 22 nt, Human
ucacucucuaagcaugacagac

SEQ ID NO: 84765 - RNA, 22 nt, Human
ucacucugccuccauauuacua

SEQ ID NO: 84766 - RNA, 22 nt, Human
ucaggaguaaagacagaguucc

SEQ ID NO: 84767 - RNA, 22 nt, Human
ucaggaguacuggugucuacag

SEQ ID NO: 84768 - RNA, 22 nt, Human
ucaggagugauaccauuuguca

SEQ ID NO: 84769 - RNA, 21 nt, Human
ucaggaguggagagaauuggu

SEQ ID NO: 84770 - RNA, 22 nt, Human
ucaggaguugaaggggauccug

SEQ ID NO: 84771 - RNA, 22 nt, Human
ucaggaguuuggccuacagagg

SEQ ID NO: 84772 - RNA, 22 nt, Human
ucaggaucggccuuuuuuuaag

SEQ ID NO: 84773 - RNA, 22 nt, Human
ucaggaugaccacgagccucua

SEQ ID NO: 84774 - RNA, 22 nt, Human
ucaggaugagucaucaagcugc

SEQ ID NO: 84775 - RNA, 17 nt, Human
ucaggauguagcaguag

SEQ ID NO: 84776 - RNA, 22 nt, Human
ucaggauuauuucaguggcuuu

SEQ ID NO: 84777 - RNA, 22 nt, Human
ucaggcaaggcuggucucauac

SEQ ID NO: 84778 - RNA, 22 nt, Human
ucaggcagaggauggggagcgu

SEQ ID NO: 84779 - RNA, 22 nt, Human
ucaggcagaguuaauuugcucc

SEQ ID NO: 84780 - RNA, 22 nt, Human
ucaggcagaugcagggauggau

SEQ ID NO: 84781 - RNA, 22 nt, Human
ucaggcaggaagccccugcaca

SEQ ID NO: 84782 - RNA, 21 nt, Human
ucaggcaggucccacugaaca

SEQ ID NO: 84783 - RNA, 22 nt, Human
ucaggcagguggcuggcuaugg

SEQ ID NO: 84784 - RNA, 22 nt, Human
ucaggcauggcucuuccucagg

SEQ ID NO: 84785 - RNA, 22 nt, Human
ucaggccuagaacacagcagau

SEQ ID NO: 84786 - RNA, 22 nt, Human
ucaggccucagaaauugcacug

SEQ ID NO: 84787 - RNA, 22 nt, Human
ucaggccucagcagcccacagg

SEQ ID NO: 84788 - RNA, 22 nt, Human
ucaggccugcccugaaagcaca

SEQ ID NO: 84789 - RNA, 22 nt, Human
ucaggccugcuguaugauggau

SEQ ID NO: 84790 - RNA, 16 nt, Human
ucaggccuggacgagc

SEQ ID NO: 84791 - RNA, 22 nt, Human
ucaggccuuguccugaccuccu

SEQ ID NO: 84792 - RNA, 22 nt, Human
ucaggccuuucuucagagcuuc

SEQ ID NO: 84793 - RNA, 22 nt, Human
ucaggccuuugaacuuggagug

SEQ ID NO: 84794 - RNA, 22 nt, Human
ucaggcuacacucuuuucaugg

SEQ ID NO: 84795 - RNA, 22 nt, Human
ucaggcucagguuaggggccaa

SEQ ID NO: 84796 - RNA, 22 nt, Human
ucaggcugaaaggacuccaguu

SEQ ID NO: 84797 - RNA, 22 nt, Human
ucaggcugagaaaaucuggacc

SEQ ID NO: 84798 - RNA, 22 nt, Human
ucaggcugaggucaucugcauc

SEQ ID NO: 84799 - RNA, 22 nt, Human
ucaggcugcaucuguaagggug

SEQ ID NO: 84800 - RNA, 22 nt, Human
ucaggcugcuguacugugaaug

SEQ ID NO: 84801 - RNA, 18 nt, Human
ucaggcuggaaguuugcc

SEQ ID NO: 84802 - RNA, 21 nt, Human
ucaggcugucugcugguucca

SEQ ID NO: 84803 - RNA, 22 nt, Human
ucaggcuguggcuucaguucuu

SEQ ID NO: 84804 - RNA, 22 nt, Human
ucaggcuguuagccaccuccuc

SEQ ID NO: 84805 - RNA, 22 nt, Human
ucaggcuucacuccuguccaag

SEQ ID NO: 84806 - RNA, 22 nt, Human
ucaggcuuccaacaaugauguu

SEQ ID NO: 84807 - RNA, 22 nt, Human
ucaggcuuggugcuccagugcc

SEQ ID NO: 84808 - RNA, 22 nt, Human
ucaggcuuugaagucuagcugg

SEQ ID NO: 84809 - RNA, 22 nt, Human
ucaggcuuuuucucaaccucuu

SEQ ID NO: 84810 - RNA, 22 nt, Human
ucagggaaauucaagggagauu

SEQ ID NO: 84811 - RNA, 18 nt, Human
ucagggaagagaauauga

SEQ ID NO: 84812 - RNA, 22 nt, Human
ucagggaagagagaucuccuag

SEQ ID NO: 84813 - RNA, 18 nt, Human
ucagggaaucuuggccuu

SEQ ID NO: 84814 - RNA, 22 nt, Human
ucagggacaggaugggcauuuc

SEQ ID NO: 84815 - RNA, 22 nt, Human
ucagggacagggugcugcugcg

SEQ ID NO: 84816 - RNA, 22 nt, Human
ucagggaccccucugaguggag

SEQ ID NO: 84817 - RNA, 22 nt, Human
ucagggagagccugucugacgu

SEQ ID NO: 84818 - RNA, 22 nt, Human
ucagggagaggugagagccugu

SEQ ID NO: 84819 - RNA, 22 nt, Human
ucagggagauuuggggacucaa

SEQ ID NO: 84820 - RNA, 22 nt, Human
ucagggagggaccugaggcugg

SEQ ID NO: 84821 - RNA, 22 nt, Human
ucagggaguguuggcaggauca

SEQ ID NO: 84822 - RNA, 22 nt, Human
ucagggcacguuucugcaaugc

SEQ ID NO: 84823 - RNA, 22 nt, Human
ucagggcauccauugccuguug

SEQ ID NO: 84824 - RNA, 22 nt, Human
ucagggcauggcugcacuuggc

SEQ ID NO: 84825 - RNA, 20 nt, Human
ucagggcaugggacagcccc

SEQ ID NO: 84826 - RNA, 22 nt, Human
ucagggccacaacaccagaguc

SEQ ID NO: 84827 - RNA, 22 nt, Human
ucagggccacgcggaggugacg

SEQ ID NO: 84828 - RNA, 22 nt, Human
ucagggccaggacuaggaugag

SEQ ID NO: 84829 - RNA, 22 nt, Human
ucagggccaucuuuugccucaa

SEQ ID NO: 84830 - RNA, 19 nt, Human
ucagggccaugagcgccac

SEQ ID NO: 84831 - RNA, 22 nt, Human
ucagggcccuggacaacccucc

SEQ ID NO: 84832 - RNA, 22 nt, Human
ucagggcccuggcaggaaacag

SEQ ID NO: 84833 - RNA, 19 nt, Human
ucagggccgcagaggguac

SEQ ID NO: 84834 - RNA, 22 nt, Human
ucagggccugagcuuuuaauua

SEQ ID NO: 84835 - RNA, 23 nt, Human
ucagggcucacacguuuucuggc

SEQ ID NO: 84836 - RNA, 22 nt, Human
ucagggcucagcaucuggcauu

SEQ ID NO: 84837 - RNA, 22 nt, Human
ucagggcugacugcuacucucc

SEQ ID NO: 84838 - RNA, 22 nt, Human
ucagggcugcagaagaggcagg

SEQ ID NO: 84839 - RNA, 22 nt, Human
ucaggggcagcugugcuuugug

SEQ ID NO: 84840 - RNA, 22 nt, Human
ucaggggcccuucccucagcag

SEQ ID NO: 84841 - RNA, 22 nt, Human
ucaggggcuugaggugcauguc

SEQ ID NO: 84842 - RNA, 22 nt, Human
ucagguggccaaaugggagcgc

SEQ ID NO: 84843 - RNA, 22 nt, Human
ucagguggcuucggggaguggc

SEQ ID NO: 84844 - RNA, 22 nt, Human
ucagguguaucauggaguugaa

SEQ ID NO: 84845 - RNA, 22 nt, Human
ucaggugucuaucuaaccuggu

SEQ ID NO: 84846 - RNA, 22 nt, Human
ucaggugugaacuauuuggaaa

SEQ ID NO: 84847 - RNA, 23 nt, Human
ucaggugugcggacugcugaguc

SEQ ID NO: 84848 - RNA, 22 nt, Human
ucagguguggucaccacagggu

SEQ ID NO: 84849 - RNA, 22 nt, Human
ucaggugugugguggaaggcag

SEQ ID NO: 84850 - RNA, 22 nt, Human
ucagguguuucuggagaaguaa

SEQ ID NO: 84851 - RNA, 22 nt, Human
ucagguuuuucucaaaucaggu

SEQ ID NO: 84852 - RNA, 21 nt, Human
ucaguaaaaaaacuaccuaga

SEQ ID NO: 84853 - RNA, 22 nt, Human
ucaguaaaaccugcuuuuagug

SEQ ID NO: 84854 - RNA, 21 nt, Human
ucaguaaaccuaaagauugua

SEQ ID NO: 84855 - RNA, 22 nt, Human
ucaguaaaggcuagguuaugcu

SEQ ID NO: 84856 - RNA, 22 nt, Human
ucaguaaaucucuaauuggcau

SEQ ID NO: 84857 - RNA, 22 nt, Human
ucaguaacccugcuguucagag

SEQ ID NO: 84858 - RNA, 19 nt, Human
ucaguaacuuuuaagagga

SEQ ID NO: 84859 - RNA, 22 nt, Human
ucaguacagcuuagucuucuca

SEQ ID NO: 84860 - RNA, 23 nt, Human
ucaguacucugcuggguauagag

SEQ ID NO: 84861 - RNA, 22 nt, Human
ucaguacuucugcaucuuccag

SEQ ID NO: 84862 - RNA, 22 nt, Human
ucaguagcagaaagcaaugagu

SEQ ID NO: 84863 - RNA, 22 nt, Human
ucaguagcccuugaguucaugu

SEQ ID NO: 84864 - RNA, 22 nt, Human
ucaguauaauugcuggcacuga

SEQ ID NO: 84865 - RNA, 22 nt, Human
ucaguauuccuggaaauacaag

SEQ ID NO: 84866 - RNA, 22 nt, Human
ucagucaacauaaauccaaggu

SEQ ID NO: 84867 - RNA, 22 nt, Human
ucaguccaaugauuguaggaca

SEQ ID NO: 84868 - RNA, 22 nt, Human
ucaguccagcuccucauuuccc

SEQ ID NO: 84869 - RNA, 22 nt, Human
ucaguccauaggugggccugag

SEQ ID NO: 84870 - RNA, 22 nt, Human
ucagucccaagguccugaggug

SEQ ID NO: 84871 - RNA, 22 nt, Human
ucaguccuccacacaggcaccc

SEQ ID NO: 84872 - RNA, 18 nt, Human
ucaguccuccauagagcu

SEQ ID NO: 84873 - RNA, 22 nt, Human
ucaguccucucuggguuucuua

SEQ ID NO: 84874 - RNA, 22 nt, Human
ucaguccuuaucugguguucag

SEQ ID NO: 84875 - RNA, 20 nt, Human
uccugugugucucaucaacc

SEQ ID NO: 84876 - RNA, 22 nt, Human
uccuguguucaagucauucauu

SEQ ID NO: 84877 - RNA, 22 nt, Human
uccuguguugauagagaugguu

SEQ ID NO: 84878 - RNA, 19 nt, Human
uccuguuauggagcuuagg

SEQ ID NO: 84879 - RNA, 22 nt, Human
uccuguuuaggcuguggucugg

SEQ ID NO: 84880 - RNA, 22 nt, Human
uccuguuucuccugcaaaaucc

SEQ ID NO: 84881 - RNA, 22 nt, Human
ucaucugucuguucaacagccu

SEQ ID NO: 84882 - RNA, 22 nt, Human
ucaugaaaaauuuuccauguca

SEQ ID NO: 84883 - RNA, 22 nt, Human
ucaugaacauggaauaucuuuu

SEQ ID NO: 84884 - RNA, 22 nt, Human
ucaugaaguccaaacuaaagca

SEQ ID NO: 84885 - RNA, 22 nt, Human
ucaugacaacuauauuauucca

SEQ ID NO: 84886 - RNA, 22 nt, Human
ucaugacaaugguagccuguua

SEQ ID NO: 84887 - RNA, 22 nt, Human
ucaugacaggugaguuuuuagg

SEQ ID NO: 84888 - RNA, 22 nt, Human
ucaugacaugugaauugaauau

SEQ ID NO: 84889 - RNA, 22 nt, Human
ucaugacauucaggugcuacau

SEQ ID NO: 84890 - RNA, 18 nt, Human
ucaugagguagaggcugg

SEQ ID NO: 84891 - RNA, 23 nt, Human
ucaugaguggcugcggggcugag

SEQ ID NO: 84892 - RNA, 22 nt, Human
ucaugaguuuaagguuuaggcu

SEQ ID NO: 84893 - RNA, 22 nt, Human
ucaugauaauacaggccuucua

SEQ ID NO: 84894 - RNA, 22 nt, Human
ucaugauuuuucuuuacaguug

SEQ ID NO: 84895 - RNA, 22 nt, Human
ucaugcaacggcucgcugagcc

SEQ ID NO: 84896 - RNA, 22 nt, Human
ucaugcaaucucuuguucagga

SEQ ID NO: 84897 - RNA, 22 nt, Human
ucaugcaauguuaguuugaaag

SEQ ID NO: 84898 - RNA, 22 nt, Human
ucaugcaccucuccaugucccc

SEQ ID NO: 84899 - RNA, 22 nt, Human
ucaugcagagccagucaggaua

SEQ ID NO: 84900 - RNA, 22 nt, Human
ucaugcagauuuggagguauuu

SEQ ID NO: 84901 - RNA, 22 nt, Human
ucaugcaggacuuacgagagau

SEQ ID NO: 84902 - RNA, 22 nt, Human
ucaugcaguuacuguuaugcaa

SEQ ID NO: 84903 - RNA, 22 nt, Human
ucaugcaguuugaaguucaggg

SEQ ID NO: 84904 - RNA, 22 nt, Human
ucaugcaguuuugccaccuaag

SEQ ID NO: 84905 - RNA, 22 nt, Human
ucaugcaucugggcuggcuggu

SEQ ID NO: 84906 - RNA, 19 nt, Human
ucaugcauuucuaagugca

SEQ ID NO: 84907 - RNA, 22 nt, Human
ucaugccaaacugaacacaguu

SEQ ID NO: 84908 - RNA, 22 nt, Human
ucaugccacuuacaaaauaaug

SEQ ID NO: 84909 - RNA, 22 nt, Human
ucaugccaguuaaaggcuguga

SEQ ID NO: 84910 - RNA, 22 nt, Human
ucaugcccagagcaguaaauua

SEQ ID NO: 84911 - RNA, 22 nt, Human
ucaugcuaguuaagaacacaau

SEQ ID NO: 84912 - RNA, 22 nt, Human
ucaugcuauuucgaauguaaua

SEQ ID NO: 84913 - RNA, 22 nt, Human
ucaugcucaucauuagagugac

SEQ ID NO: 84914 - RNA, 22 nt, Human
ucaugcugaggaugcugugaag

SEQ ID NO: 84915 - RNA, 22 nt, Human
ucaugcuuaaaagacacuugag

SEQ ID NO: 84916 - RNA, 22 nt, Human
ucaugcuuauugcauauuugga

SEQ ID NO: 84917 - RNA, 22 nt, Human
ucaugcuuuggguuagaaaccu

SEQ ID NO: 84918 - RNA, 22 nt, Human
ucaugcuuugguugcuguccuu

SEQ ID NO: 84919 - RNA, 19 nt, Human
ucauggaagaaaugugaua

SEQ ID NO: 84920 - RNA, 20 nt, Human
ucauggaaucucacucuagu

SEQ ID NO: 84921 - RNA, 23 nt, Human
ucauggaaugaauucuucuguua

SEQ ID NO: 84922 - RNA, 19 nt, Human
ucauggaucagguaguuua

SEQ ID NO: 84923 - RNA, 22 nt, Human
ucauggaugggcccagcucugu

SEQ ID NO: 84924 - RNA, 22 nt, Human
ucauggcacuuagcacaguccu

SEQ ID NO: 84925 - RNA, 22 nt, Human
ucauggcuaaccaaggccugau

SEQ ID NO: 84926 - RNA, 22 nt, Human
ucauggcuugcagauggccacc

SEQ ID NO: 84927 - RNA, 18 nt, Human
ucauggcuuuagucccuc

SEQ ID NO: 84928 - RNA, 22 nt, Human
ucauggcuuuuucacuguucgc

SEQ ID NO: 84929 - RNA, 22 nt, Human
ucaugggguuuggcuggauguc

SEQ ID NO: 84930 - RNA, 22 nt, Human
ucaugguauauuucacucuuua

SEQ ID NO: 84931 - RNA, 22 nt, Human
ucauguguccuaguucauauaa

SEQ ID NO: 84932 - RNA, 22 nt, Human
ucaugugucugcugcagcuguu

SEQ ID NO: 84933 - RNA, 20 nt, Human
ucauguguguccuacagaga

SEQ ID NO: 84934 - RNA, 22 nt, Human
ucauguguuaaacuccaagaua

SEQ ID NO: 84935 - RNA, 22 nt, Human
ucauguguugcacugaggaccu

SEQ ID NO: 84936 - RNA, 22 nt, Human
ucauguuaucuuggcucuggga

SEQ ID NO: 84937 - RNA, 22 nt, Human
ucauguuauugacucauaauau

SEQ ID NO: 84938 - RNA, 22 nt, Human
ucauguuugagacuaauuuuuc

SEQ ID NO: 84939 - RNA, 22 nt, Human
ucauguuugcccuaagaaaaag

SEQ ID NO: 84940 - RNA, 22 nt, Human
ucauuaaaaugcagauucugac

SEQ ID NO: 84941 - RNA, 22 nt, Human
ucauuaagauuacgugccagaa

SEQ ID NO: 84942 - RNA, 22 nt, Human
ucauuacacaguucaguggaaa

SEQ ID NO: 84943 - RNA, 22 nt, Human
ucauuacagagauauaaucuac

SEQ ID NO: 84944 - RNA, 22 nt, Human
ucauuagaaaugcagauucuca

SEQ ID NO: 84945 - RNA, 22 nt, Human
ucauuauaaacauaugcuaaag

SEQ ID NO: 84946 - RNA, 22 nt, Human
ucauuaucuuggcucauuucug

SEQ ID NO: 84947 - RNA, 18 nt, Human
ucauuauuguuucuggag

SEQ ID NO: 84948 - RNA, 22 nt, Human
ucauucaauguaagcauauaua

SEQ ID NO: 84949 - RNA, 22 nt, Human
ucauucacuuugaaauaaacga

SEQ ID NO: 84950 - RNA, 22 nt, Human
ucauucaucugguguuaguccu

SEQ ID NO: 84951 - RNA, 22 nt, Human
ucauucauucuuucugaauaua

SEQ ID NO: 84952 - RNA, 22 nt, Human
ucauuccuccagcgggagucca

SEQ ID NO: 84953 - RNA, 21 nt, Human
ucauucgauuuccucuaucuc

SEQ ID NO: 84954 - RNA, 22 nt, Human
ucauucuccucuggaaaaggca

SEQ ID NO: 84955 - RNA, 22 nt, Human
ucauucucugggaugcaguuug

SEQ ID NO: 84956 - RNA, 22 nt, Human
ucauugaaugagaugcaauaga

SEQ ID NO: 84957 - RNA, 22 nt, Human
ucauugacaguuguuucaaaua

SEQ ID NO: 84958 - RNA, 22 nt, Human
ucauugaguaauacuguagugu

SEQ ID NO: 84959 - RNA, 22 nt, Human
ucauugauggcuucuuucuugc

SEQ ID NO: 84960 - RNA, 22 nt, Human
ucauugccauggcauuugcaga

SEQ ID NO: 84961 - RNA, 22 nt, Human
ucauuguauacuuuauuuauga

SEQ ID NO: 84962 - RNA, 22 nt, Human
ucauuguauucagaacugaaga

SEQ ID NO: 84963 - RNA, 20 nt, Human
ucauuguguugccaauuccc

SEQ ID NO: 84964 - RNA, 22 nt, Human
ucauuguugcguuaaugucuuc

SEQ ID NO: 84965 - RNA, 22 nt, Human
ucauuguuucugcuuuucauga

SEQ ID NO: 84966 - RNA, 22 nt, Human
ucauuuacacuucacaaaugga

SEQ ID NO: 84967 - RNA, 22 nt, Human
ucauuuacuggauccauaagca

SEQ ID NO: 84968 - RNA, 22 nt, Human
ucauuuaguucuuucaugucca

SEQ ID NO: 84969 - RNA, 22 nt, Human
ucauuuaucgcugccuuuuaaa

SEQ ID NO: 84970 - RNA, 22 nt, Human
ucauuuaugucuuugccaucca

SEQ ID NO: 84971 - RNA, 22 nt, Human
ucauuucaaguucugacagcua

SEQ ID NO: 84972 - RNA, 21 nt, Human
ucauuucagggccuuggcuuc

SEQ ID NO: 84973 - RNA, 17 nt, Human
ucauuucaguaaaucca

SEQ ID NO: 84974 - RNA, 22 nt, Human
ucauuucaguccucugugugag

SEQ ID NO: 84975 - RNA, 22 nt, Human
ucauuucucugagucugauaau

SEQ ID NO: 84976 - RNA, 22 nt, Human
ucauuucuuaacuagagugaac

SEQ ID NO: 84977 - RNA, 20 nt, Human
ucauuucuugggguuccaag

SEQ ID NO: 84978 - RNA, 22 nt, Human
ucauuuguacuugugugcuugu

SEQ ID NO: 84979 - RNA, 22 nt, Human
ucauuugugcaauguagaugaa

SEQ ID NO: 84980 - RNA, 22 nt, Human
ucauuugugcugucagcaugca

SEQ ID NO: 84981 - RNA, 19 nt, Human
ucauuuguuaguagaaguu

SEQ ID NO: 84982 - RNA, 17 nt, Human
ucauuuguugugacuag

SEQ ID NO: 84983 - RNA, 22 nt, Human
ucauuuguuuagguagcaccau

SEQ ID NO: 84984 - RNA, 22 nt, Human
ucauuuuuagcgcgcaaaaguu

SEQ ID NO: 84985 - RNA, 22 nt, Human
ucuaaacuucacuuuaagugcu

SEQ ID NO: 84986 - RNA, 22 nt, Human
ucuaaagaaacauugagaccug

SEQ ID NO: 84987 - RNA, 22 nt, Human
ucuaaagcuccuuccacuaaaa

SEQ ID NO: 84988 - RNA, 20 nt, Human
ucuaaaguacaguuugugug

SEQ ID NO: 84989 - RNA, 22 nt, Human
ucuaaaguaugcuaauauguga

SEQ ID NO: 84990 - RNA, 22 nt, Human
ucuaaagugagucauuucgacu

SEQ ID NO: 84991 - RNA, 22 nt, Human
ucuaaaucccaacaugauauca

SEQ ID NO: 84992 - RNA, 22 nt, Human
ucuaaauggaaagaaaauaccu

SEQ ID NO: 84993 - RNA, 22 nt, Human
ucuaaauucaguuuauuuugau

SEQ ID NO: 84994 - RNA, 22 nt, Human
ucuaaauucuuuccuggguuga

SEQ ID NO: 84995 - RNA, 22 nt, Human
ucuaacaccugucagaugugau

SEQ ID NO: 84996 - RNA, 22 nt, Human
ucuaacuauacaaagaaaacau

SEQ ID NO: 84997 - RNA, 22 nt, Human
ucuaacuugaacucaugacugu

SEQ ID NO: 84998 - RNA, 22 nt, Human
ucuaagacacuguacuuucagu

SEQ ID NO: 84999 - RNA, 22 nt, Human
ugggaguuaguuauacugugac

SEQ ID NO: 85000 - RNA, 22 nt, Human
ugggaguugagacauuuugccc

SEQ ID NO: 85001 - RNA, 22 nt, Human
ugggaguugggugggagacuuc

SEQ ID NO: 85002 - RNA, 22 nt, Human
ugggauaauaaauagaggcaga

SEQ ID NO: 85003 - RNA, 22 nt, Human
ugggauauaaucugaaaaguau

SEQ ID NO: 85004 - RNA, 22 nt, Human
ugggauaucugucagcagcuuc

SEQ ID NO: 85005 - RNA, 22 nt, Human
ugggauauuuugagcuuuccuc

SEQ ID NO: 85006 - RNA, 22 nt, Human
ugggaucuuuugagauacugug

SEQ ID NO: 85007 - RNA, 22 nt, Human
ugggaugaauacaaugggauca

SEQ ID NO: 85008 - RNA, 22 nt, Human
ugggaugaguuguuaggacuga

SEQ ID NO: 85009 - RNA, 19 nt, Human
ugggaugaugcagaaggua

SEQ ID NO: 85010 - RNA, 22 nt, Human
ugggauguggccaugguucucu

SEQ ID NO: 85011 - RNA, 22 nt, Human
ugggcaagucacuucugucuuu

SEQ ID NO: 85012 - RNA, 22 nt, Human
ugggcacaaacaucugccuguu

SEQ ID NO: 85013 - RNA, 22 nt, Human
ugggcacagagucccaucugcc

SEQ ID NO: 85014 - RNA, 22 nt, Human
ugggcacagggguaggaaugag

SEQ ID NO: 85015 - RNA, 22 nt, Human
ugggcacagugaguugccuuua

SEQ ID NO: 85016 - RNA, 22 nt, Human
ugggcacauaguuuuaugguca

SEQ ID NO: 85017 - RNA, 21 nt, Human
ugggcacugagggugcugcuc

SEQ ID NO: 85018 - RNA, 22 nt, Human
ugggcagaaggaagagccaccu

SEQ ID NO: 85019 - RNA, 22 nt, Human
ugggcagaggacagggaagauc

SEQ ID NO: 85020 - RNA, 22 nt, Human
ugggcagaggcagcagaaaccu

SEQ ID NO: 85021 - RNA, 22 nt, Human
ugggcagcaaagacugugugcu

SEQ ID NO: 85022 - RNA, 19 nt, Human
ugggcagcucccucugucc

SEQ ID NO: 85023 - RNA, 22 nt, Human
ugggcaggauaauaucucaugu

SEQ ID NO: 85024 - RNA, 22 nt, Human
ugggcaggaugcguugauucuu

SEQ ID NO: 85025 - RNA, 22 nt, Human
ugggcaucauggacagcagagg

SEQ ID NO: 85026 - RNA, 22 nt, Human
ugggccacaagccaugggacca

SEQ ID NO: 85027 - RNA, 22 nt, Human
ugggccacaguucaccaauccc

SEQ ID NO: 85028 - RNA, 22 nt, Human
ugggccaccugcucuguuucua

SEQ ID NO: 85029 - RNA, 22 nt, Human
ugggccacuaccuucucuggau

SEQ ID NO: 85030 - RNA, 22 nt, Human
ugggccagcucccugccccugg

SEQ ID NO: 85031 - RNA, 23 nt, Human
ugggccagggaguccgguuucuu

SEQ ID NO: 85032 - RNA, 22 nt, Human
ugggccaguucuuuacucgucc

SEQ ID NO: 85033 - RNA, 22 nt, Human
ugggccaguuggaauggauacu

SEQ ID NO: 85034 - RNA, 22 nt, Human
ugggccaguuggugacuacaaa

SEQ ID NO: 85035 - RNA, 22 nt, Human
ugggccauuuuuggaagacugg

SEQ ID NO: 85036 - RNA, 21 nt, Human
ugggcccaguucccgcugggc

SEQ ID NO: 85037 - RNA, 22 nt, Human
ugggcccugacuucaagcaucc

SEQ ID NO: 85038 - RNA, 22 nt, Human
ugggcccugcccuugucugucc

SEQ ID NO: 85039 - RNA, 23 nt, Human
ugggcccuggagucgccagucug

SEQ ID NO: 85040 - RNA, 22 nt, Human
ugggccgggcacuguacugggc

SEQ ID NO: 85041 - RNA, 22 nt, Human
ugggccucaucuucaaugaguc

SEQ ID NO: 85042 - RNA, 22 nt, Human
ugggccuccuccgacagccggg

SEQ ID NO: 85043 - RNA, 22 nt, Human
ugggccucggggaagcccgugu

SEQ ID NO: 85044 - RNA, 22 nt, Human
ugggccugaguuugggaacugg

SEQ ID NO: 85045 - RNA, 18 nt, Human
ugggccugcauccuaguc

SEQ ID NO: 85046 - RNA, 22 nt, Human
ugggccugccccaggcuucagc

SEQ ID NO: 85047 - RNA, 22 nt, Human
ugggccuggguuccuccugggc

SEQ ID NO: 85048 - RNA, 22 nt, Human
ugggccuguugccugaguccau

SEQ ID NO: 85049 - RNA, 22 nt, Human
ugggccuuacuuggggcugacu

SEQ ID NO: 85050 - RNA, 22 nt, Human
ugggcgaggagaaugcugugaa

SEQ ID NO: 85051 - RNA, 22 nt, Human
ugggcuagauauuuuugggcug

SEQ ID NO: 85052 - RNA, 22 nt, Human
ugggcuagauuuggugacccag

SEQ ID NO: 85053 - RNA, 18 nt, Human
ugggcucaaaggauccuc

SEQ ID NO: 85054 - RNA, 22 nt, Human
ugggcucaaucugcuucuguuu

SEQ ID NO: 85055 - RNA, 22 nt, Human
ugggcucagaagauaguuucca

SEQ ID NO: 85056 - RNA, 23 nt, Human
ugggcucagcuuccaguggggag

SEQ ID NO: 85057 - RNA, 22 nt, Human
ugggcucagggaagcuuggccu

SEQ ID NO: 85058 - RNA, 22 nt, Human
ugggcucagucugcuugguccu

SEQ ID NO: 85059 - RNA, 22 nt, Human
ugggcucauggcccagcacugg

SEQ ID NO: 85060 - RNA, 22 nt, Human
ugggcucuagacuuuagugugg

SEQ ID NO: 85061 - RNA, 22 nt, Human
ugggcucucaaagugcggcuug

SEQ ID NO: 85062 - RNA, 22 nt, Human
ugggcucucgucccugcagaag

SEQ ID NO: 85063 - RNA, 22 nt, Human
ugggcucugaagucagucugcu

SEQ ID NO: 85064 - RNA, 22 nt, Human
ugggcucuggagggccuaggau

SEQ ID NO: 85065 - RNA, 22 nt, Human
ugggcucuggguggccugagca

SEQ ID NO: 85066 - RNA, 22 nt, Human
ugggcucuuggaccccaacgcu

SEQ ID NO: 85067 - RNA, 22 nt, Human
ugggcugaaaugcuguggacua

SEQ ID NO: 85068 - RNA, 22 nt, Human
ugggcugaacuucaucugauga

SEQ ID NO: 85069 - RNA, 22 nt, Human
ugggcugagcacugaggaagga

SEQ ID NO: 85070 - RNA, 22 nt, Human
ugggcugagcagugaagcucau

SEQ ID NO: 85071 - RNA, 22 nt, Human
ugggcugaguggcagccagagu

SEQ ID NO: 85072 - RNA, 22 nt, Human
ugggcugcacuccauuuucugc

SEQ ID NO: 85073 - RNA, 22 nt, Human
ugggcugccagcucuccagaug

SEQ ID NO: 85074 - RNA, 22 nt, Human
ugggcugcuucucaaaugucuc

SEQ ID NO: 85075 - RNA, 22 nt, Human
ugggcuggagcuuguugcuucc

SEQ ID NO: 85076 - RNA, 22 nt, Human
ugggcuggcccaccacaccucg

SEQ ID NO: 85077 - RNA, 22 nt, Human
ugggcuggcugaggcauucacu

SEQ ID NO: 85078 - RNA, 22 nt, Human
ugggcuggugagggaucauuua

SEQ ID NO: 85079 - RNA, 22 nt, Human
ugggcuguccagcaccugggcu

SEQ ID NO: 85080 - RNA, 19 nt, Human
ugggcuuccccagggcaga

SEQ ID NO: 85081 - RNA, 22 nt, Human
uggggaaaaugcagaagauuac

SEQ ID NO: 85082 - RNA, 22 nt, Human
uggggaaagauaguuuucucua

SEQ ID NO: 85083 - RNA, 22 nt, Human
uggggaaaguucuugaaaguaa

SEQ ID NO: 85084 - RNA, 22 nt, Human
uggggaaauguccugccuuccc

SEQ ID NO: 85085 - RNA, 16 nt, Human
uggggaagcucgugag

SEQ ID NO: 85086 - RNA, 22 nt, Human
uggggacacagagccaaacuau

SEQ ID NO: 85087 - RNA, 22 nt, Human
uggggacugacagccaggccuc

SEQ ID NO: 85088 - RNA, 22 nt, Human
uggggagaguuacaaggaaucu

SEQ ID NO: 85089 - RNA, 22 nt, Human
uggggagcacgguagggaaaug

SEQ ID NO: 85090 - RNA, 22 nt, Human
uggggaggacgggcgccuuccu

SEQ ID NO: 85091 - RNA, 21 nt, Human
uggggaggggaccugauuaug

SEQ ID NO: 85092 - RNA, 22 nt, Human
uggggagugaugccucggauaa

SEQ ID NO: 85093 - RNA, 19 nt, Human
uggggaugcugaugaccaa

SEQ ID NO: 85094 - RNA, 22 nt, Human
uccaguuuccuguggcugccua

SEQ ID NO: 85095 - RNA, 19 nt, Human
uccaguuuggcaggaagac

SEQ ID NO: 85096 - RNA, 21 nt, Human
uccauaagagaccaucuccua

SEQ ID NO: 85097 - RNA, 22 nt, Human
uccauaagcagguucuuccuga

SEQ ID NO: 85098 - RNA, 22 nt, Human
uccauacacauuuauuuggccu

SEQ ID NO: 85099 - RNA, 22 nt, Human
uccauauauauuagucuuccuu

SEQ ID NO: 85100 - RNA, 22 nt, Human
uccaucaccacagaggacagag

SEQ ID NO: 85101 - RNA, 22 nt, Human
uccaucacuauuaucuacaaca

SEQ ID NO: 85102 - RNA, 22 nt, Human
uccaucauguucacagcuauau

SEQ ID NO: 85103 - RNA, 22 nt, Human
uccauccauggauggaaaugug

SEQ ID NO: 85104 - RNA, 22 nt, Human
uccaucuggugagugaggagcc

SEQ ID NO: 85105 - RNA, 22 nt, Human
uccaucugucuuucccauccac

SEQ ID NO: 85106 - RNA, 20 nt, Human
uccaucuugggcagaagcag

SEQ ID NO: 85107 - RNA, 22 nt, Human
uccaugagaacccuuggagaua

SEQ ID NO: 85108 - RNA, 22 nt, Human
uccaugagcuagggauucauca

SEQ ID NO: 85109 - RNA, 22 nt, Human
uccaugagggacacuggaugcu

SEQ ID NO: 85110 - RNA, 22 nt, Human
uccaugcagaguccaggccuca

SEQ ID NO: 85111 - RNA, 22 nt, Human
uccauuaaugauuauuucugug

SEQ ID NO: 85112 - RNA, 22 nt, Human
uccauucaauucuaaagcccuu

SEQ ID NO: 85113 - RNA, 18 nt, Human
uccauuguucuacuguga

SEQ ID NO: 85114 - RNA, 22 nt, Human
uccauuuacuauucucauaucg

SEQ ID NO: 85115 - RNA, 22 nt, Human
uccauuuggcacucuauuucca

SEQ ID NO: 85116 - RNA, 22 nt, Human
uccauuuuagaagaaaauccac

SEQ ID NO: 85117 - RNA, 22 nt, Human
ucucagggccccaaaggcuagu

SEQ ID NO: 85118 - RNA, 22 nt, Human
ucucagggcuuuucuuuugaau

SEQ ID NO: 85119 - RNA, 22 nt, Human
ucucaggggcagugauccuaag

SEQ ID NO: 85120 - RNA, 22 nt, Human
ucucagggugaggaaagaauuu

SEQ ID NO: 85121 - RNA, 22 nt, Human
ucucagguaagcuucuuugaug

SEQ ID NO: 85122 - RNA, 22 nt, Human
ucucagguggcccccaugagug

SEQ ID NO: 85123 - RNA, 22 nt, Human
ucucagucuuugcaaggaugcu

SEQ ID NO: 85124 - RNA, 22 nt, Human
ucucagugaagaguauaacaaa

SEQ ID NO: 85125 - RNA, 22 nt, Human
ucucagugcagcaaggaauuua

SEQ ID NO: 85126 - RNA, 22 nt, Human
ucucagugcagcuugacagaga

SEQ ID NO: 85127 - RNA, 22 nt, Human
ucucagugcuauccauauucca

SEQ ID NO: 85128 - RNA, 22 nt, Human
ucucaguguguuuucucucaga

SEQ ID NO: 85129 - RNA, 22 nt, Human
ucucaguguuuaaaaagauuuc

SEQ ID NO: 85130 - RNA, 23 nt, Human
ucucaguuccagaggcuacaagu

SEQ ID NO: 85131 - RNA, 22 nt, Human
ucucaguuuccucauauguaaa

SEQ ID NO: 85132 - RNA, 22 nt, Human
ucucaucugccauuugcaggag

SEQ ID NO: 85133 - RNA, 22 nt, Human
ucucauggagucaggagcagaa

SEQ ID NO: 85134 - RNA, 22 nt, Human
ucucaugguuugugauucaaau

SEQ ID NO: 85135 - RNA, 23 nt, Human
ucucaugucuuuccuacaagcau

SEQ ID NO: 85136 - RNA, 22 nt, Human
ucucaugugauucccgugcaug

SEQ ID NO: 85137 - RNA, 20 nt, Human
ucucauuauauccaagaggc

SEQ ID NO: 85138 - RNA, 22 nt, Human
ucucauugaaaugugacugagu

SEQ ID NO: 85139 - RNA, 22 nt, Human
ucucauuggaaaagaguuuaau

SEQ ID NO: 85140 - RNA, 22 nt, Human
ucucauuguccaauugaauuua

SEQ ID NO: 85141 - RNA, 22 nt, Human
ucuccaagcagggcugcaaggc

SEQ ID NO: 85142 - RNA, 22 nt, Human
ucuccacaccagaaggagcuga

SEQ ID NO: 85143 - RNA, 22 nt, Human
ucuccacucugagugccuuuca

SEQ ID NO: 85144 - RNA, 22 nt, Human
ucuccagaaauggggcugggga

SEQ ID NO: 85145 - RNA, 22 nt, Human
ucuccagaggucccuugucucu

SEQ ID NO: 85146 - RNA, 20 nt, Human
ucuccagaugcagaugacau

SEQ ID NO: 85147 - RNA, 22 nt, Human
ucuccaggaaccaucaugguaa

SEQ ID NO: 85148 - RNA, 22 nt, Human
ucuccaggagcaagucacccag

SEQ ID NO: 85149 - RNA, 22 nt, Human
ucuccaggcacuaccuggguaa

SEQ ID NO: 85150 - RNA, 19 nt, Human
ucuccaggcaggugagcga

SEQ ID NO: 85151 - RNA, 22 nt, Human
ucuccagggacugaggcuggag

SEQ ID NO: 85152 - RNA, 22 nt, Human
ucuccagggcagagaauagcaa

SEQ ID NO: 85153 - RNA, 22 nt, Human
ucuccagggcccccgagcguug

SEQ ID NO: 85154 - RNA, 22 nt, Human
ucuccagggugagcuaggccag

SEQ ID NO: 85155 - RNA, 22 nt, Human
ucuccagguagauaugucagga

SEQ ID NO: 85156 - RNA, 22 nt, Human
ucuccaggugagggugguuaga

SEQ ID NO: 85157 - RNA, 22 nt, Human
ucuccaguaucuuuccaaugaa

SEQ ID NO: 85158 - RNA, 22 nt, Human
ucuccagucccuucucuguuag

SEQ ID NO: 85159 - RNA, 22 nt, Human
ucucccaacauguggaggucag

SEQ ID NO: 85160 - RNA, 22 nt, Human
ucucccaaccucuggugggugc

SEQ ID NO: 85161 - RNA, 22 nt, Human
ucucccaagccuggcaggggca

SEQ ID NO: 85162 - RNA, 23 nt, Human
ucucccaagccuggcaggggcac

SEQ ID NO: 85163 - RNA, 22 nt, Human
ucucccaaggcacagaaagagu

SEQ ID NO: 85164 - RNA, 22 nt, Human
ucucccaagggcacauucaagg

SEQ ID NO: 85165 - RNA, 22 nt, Human
ucucccaagugaccaggaaaga

SEQ ID NO: 85166 - RNA, 22 nt, Human
ucucccaggcugcccuguggac

SEQ ID NO: 85167 - RNA, 22 nt, Human
ucucccaggucauacacagaga

SEQ ID NO: 85168 - RNA, 22 nt, Human
ucucccaguccucugugcuuac

SEQ ID NO: 85169 - RNA, 22 nt, Human
ucucccagugucuggcagucag

SEQ ID NO: 85170 - RNA, 22 nt, Human
ucucccccagucucuacagcag

SEQ ID NO: 85171 - RNA, 22 nt, Human
ucuccccucccuggaccagugc

SEQ ID NO: 85172 - RNA, 23 nt, Human
ucucccucaugccuaggccuggg

SEQ ID NO: 85173 - RNA, 22 nt, Human
ucucccucucagauuuauucac

SEQ ID NO: 85174 - RNA, 22 nt, Human
ucucccucuguaagaucagggg

SEQ ID NO: 85175 - RNA, 20 nt, Human
ucucccugcccaucucagau

SEQ ID NO: 85176 - RNA, 16 nt, Human
ucucccuguucuccaa

SEQ ID NO: 85177 - RNA, 22 nt, Human
ucucccuucucuggauuccguu

SEQ ID NO: 85178 - RNA, 22 nt, Human
ucuccgggugcaugugugugcc

SEQ ID NO: 85179 - RNA, 22 nt, Human
ucuccuacucacucaaggcuug

SEQ ID NO: 85180 - RNA, 22 nt, Human
ucuccuccuuuuuucaacauag

SEQ ID NO: 85181 - RNA, 22 nt, Human
ucuccucuccuuucauguuguu

SEQ ID NO: 85182 - RNA, 22 nt, Human
ucuccucugcgcggcagugccc

SEQ ID NO: 85183 - RNA, 22 nt, Human
ucuccugaugaugguacuggca

SEQ ID NO: 85184 - RNA, 22 nt, Human
ucuccuggagcaggaagguggg

SEQ ID NO: 85185 - RNA, 22 nt, Human
ucuccuggauagauacuaucca

SEQ ID NO: 85186 - RNA, 22 nt, Human
ucuccuggccgggcuguccccu

SEQ ID NO: 85187 - RNA, 22 nt, Human
ucuccuggcucuaaaaggcugu

SEQ ID NO: 85188 - RNA, 17 nt, Human
ucuccuggcucuaucag

SEQ ID NO: 85189 - RNA, 22 nt, Human
ucuccugguacccuuccuagca

SEQ ID NO: 85190 - RNA, 22 nt, Human
ucuccugguauguaugcaccug

SEQ ID NO: 85191 - RNA, 20 nt, Human
ucuccuggugacaguaccca

SEQ ID NO: 85192 - RNA, 22 nt, Human
ucuccugguuuguuaaauaauu

SEQ ID NO: 85193 - RNA, 22 nt, Human
ucuccuguaugggacuggcgag

SEQ ID NO: 85194 - RNA, 22 nt, Human
ucuccugugcacccucccugug

SEQ ID NO: 85195 - RNA, 22 nt, Human
ucuccuucgaggcccagcuccc

SEQ ID NO: 85196 - RNA, 22 nt, Human
ucuccuuuaagauuuccucagg

SEQ ID NO: 85197 - RNA, 22 nt, Human
ucuccuuucuggagccugcuca

SEQ ID NO: 85198 - RNA, 22 nt, Human
ucuccuuucuuuuaaaauguca

SEQ ID NO: 85199 - RNA, 22 nt, Human
ucucgacagccuggcacagugg

SEQ ID NO: 85200 - RNA, 22 nt, Human
ucucuaaagauauuuauggcaa

SEQ ID NO: 85201 - RNA, 22 nt, Human
ucucuaaagccuggaagaggag

SEQ ID NO: 85202 - RNA, 22 nt, Human
ucucuaaaguagaaaagacccc

SEQ ID NO: 85203 - RNA, 23 nt, Human
ugucauugugacuacagaaccag

SEQ ID NO: 85204 - RNA, 22 nt, Human
ugucauuuaguccucugugugu

SEQ ID NO: 85205 - RNA, 20 nt, Human
ugucauuuauuuaucaaaug

SEQ ID NO: 85206 - RNA, 22 nt, Human
ugucauuuccugaaugcugagu

SEQ ID NO: 85207 - RNA, 22 nt, Human
ugucauuuggugccaggaaaga

SEQ ID NO: 85208 - RNA, 22 nt, Human
uguccaaugcccuuuccacaug

SEQ ID NO: 85209 - RNA, 22 nt, Human
uguccacaucacucacuuguca

SEQ ID NO: 85210 - RNA, 22 nt, Human
uguccaccguucagcaccagag

SEQ ID NO: 85211 - RNA, 22 nt, Human
uguccacuuugucagugucaua

SEQ ID NO: 85212 - RNA, 22 nt, Human
uguccagagucacagagcucaa

SEQ ID NO: 85213 - RNA, 22 nt, Human
uguccagcugaaggcagccuca

SEQ ID NO: 85214 - RNA, 22 nt, Human
uguccaggcacugggacucuag

SEQ ID NO: 85215 - RNA, 22 nt, Human
uguccaggcggccuugccuguu

SEQ ID NO: 85216 - RNA, 20 nt, Human
uguccaggggaucguuggcc

SEQ ID NO: 85217 - RNA, 22 nt, Human
uguccagguggccucugcugcu

SEQ ID NO: 85218 - RNA, 19 nt, Human
uguccagugaugucaagga

SEQ ID NO: 85219 - RNA, 22 nt, Human
ugucccaggccucauguugcca

SEQ ID NO: 85220 - RNA, 22 nt, Human
ugucccauggacacaacuucuu

SEQ ID NO: 85221 - RNA, 22 nt, Human
uguccccaagguucagcccaca

SEQ ID NO: 85222 - RNA, 22 nt, Human
uguccccagguccucugccguc

SEQ ID NO: 85223 - RNA, 22 nt, Human
ugucccucauugacgcugugcc

SEQ ID NO: 85224 - RNA, 22 nt, Human
ugucccugauccacuggacccc

SEQ ID NO: 85225 - RNA, 22 nt, Human
ugucccugccugcccacucugu

SEQ ID NO: 85226 - RNA, 22 nt, Human
ugucccugcuguacuuagagca

SEQ ID NO: 85227 - RNA, 22 nt, Human
ugucccuggagcuucugucccc

SEQ ID NO: 85228 - RNA, 22 nt, Human
uguccucagauaugucuacucu

SEQ ID NO: 85229 - RNA, 22 nt, Human
uguccuccaggaccugcagggc

SEQ ID NO: 85230 - RNA, 22 nt, Human
uguccuggagacacaagguggu

SEQ ID NO: 85231 - RNA, 22 nt, Human
uguccuggagugcuugggggaa

SEQ ID NO: 85232 - RNA, 22 nt, Human
uguccuggaguuauaaugccug

SEQ ID NO: 85233 - RNA, 22 nt, Human
uguccugggaaugggaugcagu

SEQ ID NO: 85234 - RNA, 22 nt, Human
uguccuggggcgacuuggggcc

SEQ ID NO: 85235 - RNA, 22 nt, Human
uguccugggucaaauccugguc

SEQ ID NO: 85236 - RNA, 19 nt, Human
uguccuguccugcucugac

SEQ ID NO: 85237 - RNA, 22 nt, Human
uguccugugcacuguagcaugu

SEQ ID NO: 85238 - RNA, 22 nt, Human
uguccuguuauauguuggguag

SEQ ID NO: 85239 - RNA, 22 nt, Human
uguccuguucuugcuguguccu

SEQ ID NO: 85240 - RNA, 22 nt, Human
uguccuuaaggagcuuaauguc

SEQ ID NO: 85241 - RNA, 22 nt, Human
uguccuuagaagaagugaaaga

SEQ ID NO: 85242 - RNA, 22 nt, Human
uguccuuauauuguggaagggg

SEQ ID NO: 85243 - RNA, 22 nt, Human
uguccuuuguguaucuauagua

SEQ ID NO: 85244 - RNA, 22 nt, Human
uguccuuuucuuuagugcagcu

SEQ ID NO: 85245 - RNA, 22 nt, Human
uguccuuuuucuuaggaaauau
